(19) United States
(12) Patent Application Publication
(10) Pub. No.: US 2024/0033377 A1
(43) Pub. Date: Feb. 1, 2024

(54) AAV VECTORS FOR GENE EDITING

(71) Applicant: Scribe Therapeutics Inc., Alameda, CA (US)

(72) Inventors: Manuel MOHR, Berkeley, CA (US); Katherine BANEY, Berkeley, CA (US); Angus SIDORE, Oakland, CA (US); Cécile FORTUNY, Oakland, CA (US); Maroof ADIL, Davis, CA (US); Addison WRIGHT, El Cerrito, CA (US); Brett T. STAAHL, Tiburon, CA (US); Sean HIGGINS, Alameda, CA (US); Benjamin OAKES, El Cerrito, CA (US); Suraj MAKHIJA, San Francisco, CA (US); Sarah DENNY, San Francisco, CA (US)

(21) Appl. No.: 18/266,076

(22) PCT Filed: Dec. 9, 2021
(86) PCT No.: PCT/US2021/062714

§ 371 Date: Jun. 8, 2023

Related U.S. Application Data
(60) Provisional application No. 63/235,638, filed on Aug. 20, 2021.
(60) Provisional application No. 63/123,112, filed on Dec. 9, 2020.

(51) Int. Cl. A61K 48/00; C12N 9/22; C12N 15/86; C12N 15/11

(52) U.S. Cl. CPC A61K 48/005; C12N 9/22; C12N 15/86; C12N 15/11; C12N 2310/20; C12N 2750/14143; C12N 2750/14151

(57) ABSTRACT

Provided herein polynucleotides configured for incorporation into recombinant adeno-associated virus (AAV) vectors. The polynucleotides encode for CRISPR proteins, gRNA, and ancillary components of AAV vectors useful in the modification of target nucleic acids. The systems are also useful for introduction into cells, for example eukaryotic cells having mutations in the target nucleic acid of a gene. Also provided are methods of using such AAV vectors to modify cells having such mutations.

### CROSS-REFERENCE TO RELATED APPLICATIONS

[0001] This application claims priority to U.S. provisional patent application Nos. 63/123,112, filed on Dec. 9, 2020, and 63/235,638, filed on Aug. 20, 2021, the contents of which are incorporated by reference in their entirety herein.

### INCORPORATION BY REFERENCE OF SEQUENCE LISTING

[0002] The sequence listing paragraph application contains a Sequence Listing which has been submitted in ASCII format via EFS-WEB and is hereby incorporated by reference in its entirety. Said ASCII copy, created on Dec. 9, 2021 is named SCRB-028_02WO_SeqList_ST25.txt and is 13 MB in size.

### BACKGROUND

[0003] Gene editing holds great promise for treating or preventing many genetic diseases. However, safe and targeted delivery of CRISPR gene editing machinery into the desired cells is necessary to achieve therapeutic benefit. There remains a need in the art for compositions and methods for delivering CRISPR gene editing machinery to cells in vitro and/or in vivo.

### SUMMARY

[0004] The present disclosure relates to AAV vectors for the delivery of CRISPR nucleases to cells for the modification of target nucleic acids.

[0005] In some embodiments, the present disclosure provides polynucleotides useful for production of AAV transgenes (transgene plasmids for example), as well as for the production of recombinant adeno-associated virus (AAV) vectors. In some embodiments, the disclosure provides polynucleotides encoding a first adeno-associated virus (AAV) 5′ inverted terminal repeat (ITR) sequence, a second AAV 3′ ITR sequence, a CRISPR nuclease, a first guide RNA (gRNA), one or more promoters and, optionally, accessory elements; all encompassed in a single expression cassette capable of being incorporated into a single AAV particle. In other embodiments, the polynucleotides comprise sequences encoding a first 5′ AAV ITR sequence, a second 3′ AAV ITR sequence, a CRISPR nuclease, a first gRNA, a first promoter, a second promoter, and, optionally, one or more accessory elements. In still other embodiments, the polynucleotides comprise sequences encoding a first 5′ AAV ITR sequence, a second 3′ AAV ITR sequence, a CRISPR nuclease, a first gRNA, a second gRNA, a first promoter, a second promoter, a third promoter, and, optionally, one or more accessory elements.

[0006] In some embodiments, the sequence encoding the CRISPR protein and the gRNA sequence is less than about 3100, less than about 3090, less than about 3080, less than about 3070, less than about 3060, less than about 3050, or less than about 3040 nucleotides in combined length. In other embodiments, the polynucleotide encoding the CRISPR protein sequence and the gRNA sequence are less than about 3040 to about 3100 nucleotides in combined length.

[0007] In some embodiments, the polynucleotide sequences of the first promoter and the at least one accessory element are greater than at least about 1300, at least about 1350, at least about 1360, at least about 1370, at least about 1380, at least about 1390, at least about 1400, at least about 1500, at least about 1600 nucleotides, at least 1650, at least about 1700, at least about 1750, at least about 1800, at least about 1850, or at least about 1900 nucleotides in combined length. In other embodiments, the polynucleotide sequences of the first promoter, the second promoter, and two or more accessory elements are greater than at least about 1300 to at least about 1900 nucleotides in combined length. In some embodiments, the polynucleotide sequences of the first promoter, the second promoter, and the two or more accessory elements are greater than 1314 nucleotides in combined length. In other embodiments, the polynucleotide sequences of the first promoter, the second promoter, and the two or more accessory elements are greater than 1381 nucleotides in combined length. In one embodiment, the polynucleotide sequences of the first promoter, the second promoter, and the two or more accessory elements comprise at least 25%, 26%, 27%, 28%, 29%, 30%, 31%, 32%, 33%, 34%, or at least 35% or more of the total polynucleotide sequence length.

[0008] In some embodiments, the accessory element of the polynucleotide is selected from the group consisting of a poly(A) signal, a gene enhancer element, an intron, a posttranscriptional regulatory element, a nuclear localization signal (NLS), a deaminase, a DNA glycosylase inhibitor, a stimulator of CRISPR-mediated homology-directed repair, and an activator or repressor of transcription. In some embodiments, the accessory elements enhance the expression, binding, activity, or performance of the CRISPR protein as compared to the CRISPR protein in the absence of said accessory element. In particular embodiments, the enhanced performance is an increase in editing of a target nucleic acid upon expression of the CRISPR components in an in vitro assay of at least about 10%, at least about 20%, at least about 30%, at least about 40%, at least about 50%, at least about 60%, at least about 70%, at least about 80%, at least about 90%, at least about 100%, at least about 1500%, at least about 200%, or at least about 300%.

[0009] In some embodiments, the present disclosure provides a polynucleotide encoding a CRISPR protein that is a Class 2, Type V CRISPR protein. In some embodiments, the Class 2, Type V CRISPR protein is a CasX. In some embodiments, the CasX comprises a sequence selected from the group consisting of SEQ ID NOS: 1-3 and the sequences of SEQ ID NOS: 49-160, 40208-40369 and 40828-40912, or a sequence having at least 85%, at least 90%, at least 95%, at least 95%, at least 96%, at least 97%, at least 98%, or at least 99% identity thereto. In some embodiments, the present disclosure provides a polynucleotide encoding a Class 2, Type V CRISPR protein wherein the encoded CRISPR protein comprises the sequence of SEQ ID NO: 145 comprising at least one modification in one or more domains, wherein the one or more modifications are selected from the group consisting of the modifications set forth in Tables 30-33, wherein the one or more modifications results in an improved characteristic relative to the CRISPR protein of SEQ ID NO: 145.

[0010] In some embodiments, the polynucleotide encodes a first and a second gRNA wherein the encoded gRNA each comprise a sequence selected from the group of sequences of SEQ ID NOS: 2101-2285, 39981-40026, 40913-40958, and 41817 as set forth in Table 2, or a sequence having at least 85%, at least 90%, at least 95%, at least 95%, at least 96%, at least 97%, at least 98% identity thereto. In some embodiments, the encoded first and second gRNA comprise a scaffold sequence having one or more modifications relative to SEQ ID NO: 2238, wherein the one or more modifications result in an improved characteristic in the expressed first and second gRNA, wherein the one or more modifications comprise one or more nucleotide substitutions, insertions, and/or deletions as set forth in Table 28, wherein the one or more modifications result in an improved characteristic in the expressed first and second gRNA. In another embodiment, the encoded first and second gRNA comprise a scaffold sequence having one or more modifications relative to SEQ ID NO: 2239, wherein the one or more modifications result in an improved characteristic in the expressed first and second gRNA, wherein the one or more modifications comprise one or more nucleotide substitutions, insertions, and/or deletions as set forth in Table 28, wherein the one or more modifications result in an improved characteristic in the expressed first and second gRNA.

[0011] In some embodiments, the polynucleotide comprises 5′ and 3′ ITRs, wherein the ITRs are derived from serotype AAV1, AAV2, AAV3, AAV4, AAV5, AAV6, AAV7, AAV8, AAV9, AAV10, AAV11, AAV12, AAV 44.9, AAV-Rh74, or AAVRh10.

[0012] In some embodiments, the polynucleotide comprises one or more sequences selected from the group consisting of the sequences of Tables 8-10, 12, 13, and 17-22 and 24-27, or a sequence having at least 85%, at least 90%, at least 95%, at least 95%, at least 96%, at least 97%, at least 98%, or at least 99% identity thereto.

[0013] In other embodiments, the present disclosure provides a recombinant adeno-associated virus (rAAV) comprising an AAV capsid protein, and the polynucleotide of any one of the embodiments disclosed herein. In some embodiments, the AAV capsid protein is derived from serotype AAV1, AAV2, AAV3, AAV4, AAV5, AAV6, AAV7, AAV8, AAV9, AAV10, AAV11, AAV12, AAV 44.9, AAV-Rh74, or AAVRh10.

[0014] In some embodiments, the present disclosure provides a method of making a recombinant AAV vector, comprising providing a population of cells, and transfecting the population of cells with a vector comprising the polynucleotide of any of the embodiments disclosed herein. In some embodiments, the population of cells expresses the AAV rep and cap proteins.

[0015] In some embodiments, the present disclosure provides AAV vectors wherein one or more component sequences are selected from the group consisting of 5′ ITR, 3′ ITR, pol III promoter, pol II promoter, encoding sequence for CRISPR nuclease, encoding sequence for gRNA, accessory element, and poly(A) are substantially depleted of CpG dinucleotides, wherein the component sequences retain their functional characteristics (e.g., the ability to drive expression or the ability to retain editing potential for a target nucleic acid). In some embodiments, the AAV vectors that are substantially depleted of CpG dinucleotides exhibit reduced immunogenic properties (e.g., reduced ability to elicit inflammatory cytokines or antibodies to components of the AAV), e.g. when administered.

[0016] In some embodiments, the present disclosure provides a method for modifying a target nucleic acid in a population of mammalian cells, comprising contacting a plurality of the cells with an effective amount of the rAAV of any of the embodiments disclosed herein, wherein the target nucleic acid of a gene of the cells targeted by the expressed gRNA is modified by the expressed CRISPR protein.

[0017] In some embodiments, the present disclosure provides a method for treating a disease in a subject (e.g. a human) caused by one or more mutations in a gene of the subject, comprising administering a therapeutically effective dose of the rAAV of any of the embodiments disclosed herein.

[0018] In some embodiments, the present disclosure provides a method of reducing the immunogenicity of an rAAV, comprising deleting all or a portion of the CpG dinucleotides of the sequences of the AAV components selected from the group consisting of 5′ ITR, 3′ ITR, pol III promoter, pol II promoter, encoding sequence for CRISPR nuclease, encoding sequence for gRNA, accessory element, and poly(A).

### INCORPORATION BY REFERENCE

[0019] All publications, patents, and patent applications mentioned in this specification are herein incorporated by reference to the same extent as if each individual publication, patent, or patent application was specifically and individually indicated to be incorporated by reference.

[0020] The contents of WO/2020/247882, published Dec. 10, 2020 and PCT/US2021/061673, filed Dec. 2, 2021, are incorporated by reference in their entireties herein.

### BRIEF DESCRIPTION OF THE DRAWINGS

[0021] The novel features of the disclosure are set forth with particularity in the appended claims. A better understanding of the features and advantages of the present disclosure will be obtained by reference to the following detailed description that sets forth illustrative embodiments, in which the principles of the disclosure are utilized, and the accompanying drawings of which:

[0022] FIG. 1 shows a schematic of the AAV construct described in Example 1.

[0023] FIG. 2 shows results of an editing assay using AAV transgene plasmids nucleofected into mNPCs, as described in Example 1, demonstrating that the CasX and targeting guide in three different vectors (constructs 1, 2, and 3) edits on target (tdTomato) with high efficiency compared to non-targeting control (NT). Editing was assessed by FACS 5 days post-transfection. Data are presented as mean±SEM for n=3 replicates.

[0024] FIG. 3 shows results of an editing assay using AAV transgene plasmids nucleofected into mNPCs at four different dose levels, as described in Example 1. CasX delivered as an AAV transgene plasmid to mNPCs edits on target with high efficiency in a dose-dependent manner, compared to non-targeting control (NT). CasX variant 491 with scaffold variant 174 and spacer targeting tdTomato in three different vectors (constructs 1, 2, and 3) were nucleofected in mNPCs, and editing was assessed by FACS 5 days post-transfection. Data are presented as mean±SEM for n=3 replicates.

[0025] FIG. 4 shows results of an editing assay using AAV vector construct 3 transduced into mNPCs at 3-fold dilutions, assessed by FACS five days post-transduction, as described in Example 1. Data are presented as mean±SEM for n=3 replicates. MOI: multiplicity of infection.

[0026] FIG. 5 is a scanning transmission micrograph showing AAV particles with packaged CasX variant 438, gRNA scaffold 174 and spacer 12.7, as described in Example 2. AAV were negatively stained with 1% uranyl acetate. Empty particles are identified by a dark electron dense circle at the center of the capsid.

[0027] FIG. 6 shows results of an immunohistochemistry staining of mouse coronal brain sections, as described in Example 3. Mice received an ICV injection of 1×10¹¹ AAV packaged with CasX 491, gRNA scaffold 174 with spacer 12.7 (top panel), which were able to edit the tdTom locus in the Ai9 mice (edited cells appear white). The bottom panel shows that CasX 491 and scaffold 174 with a non-targeting spacer administered as an AAV ICV injection did not edit at the tdTom locus. Tissues were processed for immunohistochemical analysis 1 month post-injection.

[0028] FIG. 7 shows the results of an editing assay of the tdTom locus in mNPCs using AAV transgene plasmids of constructs having variations in the CasX promoters, as described in Example 4. Editing was assessed by FACS 5 days post-transfection. Data are presented as mean±SEM for n=3 replicates.

[0029] FIG. 8 shows the results of an editing assay of the tdTom locus in mNPCs using AAV transgene plasmids of constructs having variations in the CasX promoters, as described in Example 4. Editing was assessed by FACS 5 days post-transfection. Data are presented as mean±SEM for n=3 replicates.

[0030] FIG. 9 shows the results of an editing assay of the tdTom locus in mNPCs using AAV transgene plasmids of constructs having variations in the CasX promoters and transgene size (see table insert), as described in Example 4. Editing was assessed by FACS 5 days post-transfection. Data are presented as mean±SEM for n=3 replicates.

[0031] FIG. 10 shows the results of an editing assay of the tdTom locus in mNPCs using AAV vectors incorporating the same promoters as shown in FIG. 9, as described in Example 4. The graph on the left are results testing 3-fold dilutions of the constructs, while the graph on the right are results of editing using an MOI of 2×10⁵ vg/cell. Editing was assessed by FACS 5 days post-transfection. Data are presented as mean±SEM for n=3 replicates.

[0032] FIG. 11 shows the results of an editing assay of the tdTom locus in mNPCs using AAV vectors with protein promoter variants designed to reduce transgene size, compared to AAV with the top 4 protein promoter variants identified previously (AAV.3, AAV.4, AAV.5 and AAV.6), as described in Example 4. Editing was assessed by FACS 5 days post-transfection. Data are presented as mean±SEM for n=3 replicates. The dashed line shows editing levels of AAV.4, the AAV construct that in this experiment was used as a baseline for comparison across the variants.

[0033] FIG. 12 is a graph of percent editing versus transgene size for all constructs having varying promoters tested in this study. Constructs circled with dashes were identified as having above average editing while minimizing transgene size. The dashed line shows editing levels of AAV.4, the AAV construct that in this experiment was used as a baseline for comparison across variants.

[0034] FIG. 13 shows the results of an editing assay of mNPCs using AAV transgene plasmids having variations in gRNA promoter strength, as described in Example 5. Editing was assessed by FACS 5 days post-transfection. Data are presented as mean±SEM for n=3 replicates.

[0035] FIG. 14 shows the results of an editing assay of mNPCs using three different AAV vectors having variations in gRNA promoter strength, as described in Example 5. The graph on the left are results testing 3-fold dilutions of the constructs ranging from 1×10⁴ to 5×10⁵ vg/cell, while the graph on the right are results of editing using an MOI of 3×10⁵ vg/cell. Editing was assessed by FACS 5 days post-transfection. Data are presented as mean±SEM for n=3 replicates.

[0036] FIG. 15 is a bar graph that shows percent editing of the tdTom locus in mNPCs in an experiment to assess use of truncated U6 RNA promoters in constructs when delivered in AAV transgene plasmids designed to minimize the footprint of the Pol III promoter in the delivered transgene, as described in Example 5. Editing was assessed by FACS 5 days post-transfection. Data are presented as mean±SEM for n=3 replicates.

[0037] FIG. 16 is a bar graph that shows percent editing of the tdTom locus in mNPCs comparing base construct 53 to construct 85, when delivered as AAV vector designed to minimize the footprint of the Pol III promoter in the delivered transgene, as described in Example 5.

[0038] FIG. 17 is a bar graph that shows editing results of the tdTom locus in an experiment to assess the effects of constructs having engineered U6 RNA promoters when delivered to mNPCs in an AAV vector designed to minimize the footprint of the Pol III promoter in the AAV transgene, as described in Example 5. Editing was assessed by FACS 5 days post-transfection. Data are presented as mean±SEM for n=3 replicates.

[0039] FIG. 18 is a scatter plot depicting transgene size of all AAV variants tested having engineered U6 RNA promoters on the X-axis vs. percent of mNPCs edited on the Y-axis, as described in Example 5. The dashed line indicates construct 53, having the largest promoter tested, while the dotted line indicates construct 89, having the smallest promoter tested.

[0040] FIG. 19 shows the results of an editing assay of the tdTom locus in mNPCs in an experiment to assess the effects of constructs having engineered Pol III RNA promoters when delivered in an AAV vector designed to minimize the footprint of the Pol III promoter in the AAV transgene, as described in Example 5. Editing was assessed by FACS 5 days post-transfection. Data are presented as mean±SEM for n=3 replicates.

[0041] FIG. 20 is a bar graph showing AAV-mediated editing level in mNPCs at an MOI of 3.0E+5 vg/cell using the indicated constructs, as described in Example 5.

[0042] FIG. 21 is a scatter plot depicting the transgene size of all variants tested on the X-axis vs. the percent of mNPCs edited on the Y-axis, as described in Example 5.

[0043] FIG. 22 shows the results of an editing assay of the tdTom locus in mNPCs using AAV transgene plasmids having variations in poly(A) signals, as described in Example 6. Data are presented as mean±SEM for n=3 replicates.

[0044] FIG. 23 shows the results of an editing assay of the tdTom locus in mNPCs using two AAV vectors having the top poly(A) signals, as described in Example 6. Editing was assessed by FACS 5 days post-transfection. Data are presented as mean±SEM for n=3 replicates.

[0045] FIG. 24 are schematics of AAV plasmid constructs containing guide RNA transcriptional units (gRNA scaffold-spacer stack driven by a U6 promoter) in different orientations in regards to the protein promoter transcriptional unit, as described in Example 7. The tapered points depicts the orientation of the transcriptional unit for protein or guide RNA.

[0046] FIG. 25 shows the results of an editing assay of the tdTom locus in mNPCs using AAV transgene plasmids having differences in regulatory element orientation, as described in Example 7. Editing was assessed by FACS 5 days post-transfection. Data are presented as mean±SEM for n=3 replicates.

[0047] FIG. 26 shows the results of an editing assay of NPCs using AAV vectors containing guide RNA transcriptional units (gRNA scaffold-spacer stack driven by a U6 promoter) in different orientations in relation to the protein promoter transcriptional unit, as described in Example 7. The graph on the left shows results testing 3-fold dilutions of the constructs ranging from 1×10⁴ to 2×10⁶ vg/cell. The bar graph on the right shows AAV-mediated percent editing in mNPCs at an MOI of 3.0E+5 vg/cell. Editing was assessed by FACS 5 days post-transfection. Data are presented as mean±SEM for n=3 replicates.

[0048] FIG. 27 is a bar graph of results of an editing assay of the tdTom locus in mNPCs using AAV transgene plasmid constructs having different post-transcriptional regulatory elements compared to constructs not having post-transcriptional regulatory elements, as described in Example 8. Editing was assessed by FACS 5 days post-transfection. Data are presented as mean±SEM for n=3 replicates.

[0049] FIG. 28 is bar graph showing AAV-mediated editing levels (grey bars) of mNPCs at a viral MOI of 3.0E+5 compared to nucleofection editing using 150 ng of AAV-cis plasmids (dark bars) expressing the CasX protein 491 under the control of top promoters without (constructs 4, 5, 6) or in combination with different post-transcriptional regulatory element sequences (constructs 35-37 for base plasmid 4, constructs 38-39 for base plasmid 5, and constructs 42-43 for base plasmid 6), as described in Example 8. Editing was assessed by FACS 5 days post-transfection. Data are presented as mean±SEM for n=3 replicates.

[0050] FIG. 29 is a bar graph showing AAV-mediated editing levels of mNPCs at a viral MOI of 3.0E+5 for constructs under promoters without (constructs 58, 59, 53) or in combination of different post-transcriptional regulatory element sequences (respectively constructs 72-74 for base plasmid 58 containing Jet promoter, constructs 75-77 for base plasmid 59 containing Jet+USP promoter, and constructs 80-81 for base plasmid 53 containing UbC promoter), as described in Example 8. Editing was assessed by FACS 5 days post-transfection. Data (n=3) are presented as mean±SEM.

[0051] FIG. 30 is a scatterplot comparing the transgene size of each construct evaluated (from ITR to ITR, in bp) to AAV-mediated editing levels in mNPCs at a MOI of 3.0e+5 vg/cell, as described in Example 8. The circled data points represent the top identified constructs in terms of editing levels of select transgene size. The horizontal grey line shows the editing level of the benchmark vector AAV.53 for comparative purposes. The vertical grey line delimits vectors that are over or under a 4.9 kb transgene size.

[0052] FIG. 31 is a violin plot displaying AAV-mediated fold-improvement from the inclusion of the indicated PTRE element in the transgene plasmid, relative to its base (transgene with same promoter but no PTRE, indicated by gray dashed line), as described in Example 8.

[0053] FIG. 32 is a bar chart showing editing results of constructs with different neuronal enhancers delivered as AAV transgene plasmids to mNPCs, as described in Example 8. The gray lines show editing levels of reference plasmid 64, harboring CMV enhancer+core promoter. Editing was assessed by FACS 5 days post-transfection. Data are presented as mean±SEM for n=3 replicates.

[0054] FIG. 33 shows schematics of AAV constructs with alternative gRNA configurations for constructs having multiple gRNA, as described in Example 9. The top schematic is architecture 1, while the bottom is architecture 2. The tapered points depict the orientation of the transcriptional unit for protein or guide RNA.

[0055] FIG. 34 shows schematics of AAV constructs with alternative gRNA configurations for constructs having multiple gRNA, as described in Example 9. The tapered points depicts the orientation of the transcriptional unit for protein or guide RNA.

[0056] FIG. 35 shows schematics of guide RNA stack (Pol III promoter, scaffold, spacer) architectures tested with nucleofection and AAV transduction, as described in Example 9. Transgene harbors dual stacks in different orientations, with spacer 12.7, 12.2 and non-target spacer NT. The tapered points depict the orientation of the transcriptional unit for protein or guide RNA.

[0057] FIG. 36 shows the results of an editing assay for constructs having guide RNA stacks delivered via plasmid transfection to mNPCs, showing constructs with RNA stacks edit with enhanced potency compared to non-targeting control (NT), as described in Example 9. Editing was assessed by FACS 5 days post-transfection. Data are presented as mean±SEM for n=3 replicates.

[0058] FIG. 37 shows the results of an editing assay of mNPCs using AAV transgene plasmid constructs having multiple gRNA in different architectures and with different combinations of spacers (see FIG. 35) compared to construct 3 having a single gRNA and to a non-targeting construct, as described in Example 9. Editing was assessed by FACS 5 days post-transfection. Data are presented as mean±SEM for n=3 replicates.

[0059] FIG. 38 shows the results of an editing assay of mNPCs using AAV vector constructs 45-48 having multiple gRNA in different architectures and with different combinations of spacers (see FIG. 35) compared to construct 3, as described in Example 9. The left panel shows editing results using 3-fold MOI dilutions ranging from 1×10⁴ to 3×10⁵ vg/cell, while the right panel shows editing results at an MOI of 3×10⁵ vg/cell. Editing was assessed by FACS 5 days post-transfection. Data are presented as mean±SEM for n=3 replicates.

[0060] FIG. 39 is a bar graph of percent editing in mNPCs using AAV transgene plasmid constructs with varying 5′ NLS combinations (2, 7, and 9 in Table 15) with 3′ NLS 1, 8 and 9 in mNPCs, as described in Example 10.

[0061] FIG. 40 is a bar graph of percent editing in mNPCs using AAV vectors with varying 5′ NLS combinations with 3′ NLS 1, 8 and 9 in mNPCs, as described in Example 10.

[0062] FIG. 41 is a bar graph of percent editing in mNPCs using AAV vectors with varying NLS combinations when delivered in a vector designed to minimize the footprint of Pol III promoter in the transgene.

[0063] FIG. 42 is a schematic showing the organization of the components of an exemplary AAV transgene between the 5′ and 3′ ITRs, as described in Example 12.

[0064] FIG. 43A show results of editing assays in mNPCs nucleofected with 1000 of AAV-cis plasmids expressing CasX protein 491 expression of CMV and guide variants 174, 229-237 with spacer 11.30 targeting the mouse RHO exon 1 locus demonstrating improved activity at mouse RHO exon 1 in a dose-dependent manner, as described in Example 12. Triplicate wells were pooled together for gDNA extraction and therefore treated as n=1.

[0065] FIG. 43B is a bar graph showing fold-change in editing levels for each engineered scaffolds (229-237) relative to guide 174 with spacer 11.30 (set to a value of 1.0) across two plasmid nucleofection doses 1000 and 500 ng of AAV-cis plasmids, as described in Example 12. Triplicate wells were pooled together for gDNA extraction and therefore treated as n=1.

[0066] FIG. 44A show editing results of engineered guide 235 compared to 174 with spacer 11.1 targeting RHO at the exogenous RHO-GFP locus (with GFP as the reporter), under the expression of Pol III hU6 promote in ARPE-19 cells, demonstrating improved activity by the 235 variant at the human RHO locus, with increased on-target activity at WT exogenous RHO without off-target cleavage at the mutant RHO reporter gene, as described in Example 12. Data (n=3) are presented as mean±SD.

[0067] FIG. 44B is a bar graph displaying fold-change in editing levels of engineered guide 235 compared to 174 at the human RHO locus, with p590.4910.2350.11.1 normalized to benchmark p590.4910.1740.11.1 levels (set to value 1.0) in cells nucleofected with 1000 ng of each plasmid, as described in Example 12. Data (n=3) are presented as mean±SD.

[0068] FIG. 45A shows editing levels in mNPCs by AAV-mediated expression of CasX molecule and engineered guide variant 235 compared to guide scaffold 174 with spacer 11.30 at 3 different MOI levels, confirming increased editing levels at the endogenous mouse Rho exon 1 locus with no off-target locus, as described in Example 12.

[0069] FIG. 45B is a bar graph displaying fold-change in editing levels in mNPCs by AAV-mediated expression of CasX molecule and engineered guide variant 235 compared to guide scaffold 174 with spacer 11.30 in cells infected at a 5.0e+5 MOI, as described in Example 12. Data are presented as the mean of n=3.

[0070] FIG. 46A shows editing results at the human RHO locus in mNPCs nucleofected with 1000 and 500 ng of AAV-cis plasmids expressing CasX protein 491 and sgRNA-scaffold 174 with on-target spacers of varying length, demonstrating improved on-target editing at the mouse RHO locus, as described in Example 12. Spacers variants are: 11.30 (20 nt WT RHO), 11.38 (18 nt WT RHO), and 11.39 (19 nt WT RHO), respectively. A control spacer, no-target (NT), designed to not recognize any sequence across the mouse and human genomes, was also tested as a negative control to ensure no unspecific targeting resulting from the expression of the CasX protein alone. Triplicate wells were pooled together for gDNA extraction and therefore treated as n=1.

[0071] FIG. 46B is a bar graph showing editing levels at the human RHO locus in nucleofected mNPCs with 1000 ng of AAV-cis plasmids expressing CasX protein 491 and sgRNA-scaffold 174 with the indicated off-target spacers, as described in Example 12.

[0072] FIG. 46C is a bar graph displaying fold-change in editing levels at the human RHO locus in nucleofected mNPCs for each sgRNA-scaffold 174 with spacer variants 11.38 and 11.39 normalized to levels of parental sgRNA-scaffold-spacer 174.11.30, as described in Example 12. Data shows means+SD across 3 different biological replicates.

[0073] FIG. 47A is a Whisker box graph showing editing results of RHO in a mouse model comparing AAV-mediated delivery of sgRNA scaffold variants and optimized spacers compared to benchmark construct, as described in Example 13. Each dot represents one retina (n=8-16). One-way ANOVA statistical test was performed, ***=p<0.001.

[0074] FIG. 47B is a Whisker box graph showing the relative fold-change in editing of RHO in a mouse model comparing AAV-mediated delivery of sgRNA scaffold variants 174 and 235 and optimized spacers compared to benchmark construct, as described in Example 13. Values are relative to the benchmark vector AAV.RHO.174.11.30 (set to a value of 1). Each dot represents one retina (n=8-16).

[0075] FIG. 48A is a bar graph showing CTC-PAM editing levels (indel rates) at the mouse RHO locus in mNPCs nucleofected with 1000 and 500 ng of AAV-cis plasmids expressing the CasX protein variant 491, 515,527, 528, 535, 536 or 537, respectively, and sgRNA-scaffold 235.11.37 (on target), as described in Example 14. A control spacer, no-target (NT), designed to not recognize any sequence across the mouse and human genomes, was also tested as a negative control to ensure no unspecific targeting resulting from the expression of the CasX protein alone. Triplicate wells were pooled together for gDNA extraction and therefore treated as n=1.

[0076] FIG. 48B is a bar graph showing CTC-PAM editing levels (indel rates) at the mouse RHO locus in mNPCs nucleofected with AAV-cis plasmids expressing the CasX protein variant 491, 515, 527, 528, 535, 536 or 537, respectively, and sgRNA-scaffold 235.11.39 (off-target), as described in Example 14.

[0077] FIG. 48C shows a bar graph displaying fold-change in editing levels for each indicated CasX protein variant with guide 235 and spacer 11.39, with results normalized to levels of the parental CasX protein 491, as described in Example 14.

[0078] FIG. 49A shows a bar graph showing editing levels in ARPE-19 mNPC nucleofected with 1000 ng of AAV-cis plasmids expressing CasX protein variant 491, 515, 527, 528, 535, 536 or 537 and guide variant 235 with spacer 11.41 or 11.43, as described in Example 14. Data (n=3) are presented as mean±SD.

[0079] FIG. 49B shows a bar graph displaying fold-change in editing levels in ARPE-19 mNPC nucleofected with 1000 ng of AAV-cis plasmids expressing CasX protein variant 515, 527, 528, 535, 536 or 537 and guide variant 235 with spacer 11.41 or 11.43 relative to benchmark p59.491.235.11.41 levels (set to a value of 1.0), as described in Example 14. Data (n=3) are presented as mean±SD.

[0080] FIG. 50A shows a bar graph of AAV-mediated editing levels in mNPCs at the endogenous mouse Rho exon 1 locus, as described in Example 14. mNPCs were infected using a 3.0e+5 and 1.0e+5 vg/cell MOI with AAV vectors expressing the indicated CasX protein 491, 515, 527, 528, 535, or 537 and sgRNA-scaffold variant 235.11.39, as described in Example 14. Data (n=3) are presented as the mean.

[0081] FIG. 50B is a bar graph displaying fold-change in editing levels for the indicated CasX variant with guide scaffold 235 relative to guide 174 with spacer 11.39 in cells infected with the indicated MOI, as described in Example 14.

[0082] FIG. 51 is an illustration of reference mRHO exon 1 locus and target amino acid residue P23 (CCC) sequence (highlighted in bold), showing spacer 11.30 target sequence and expected CasX-mediated cleavage, as described in Example 15. The most common predicted edits quantified in CRISPResso edits (substitution/deletions) are displayed under the reference genome).

[0083] FIG. 52A shows results of in vivo AAV CasX-mediated editing of the mRHO P23 locus in retinae in C57BL6J mice (n=6-8; quantification in percent of total indels detected by NGS), as described in Example 15.

[0084] FIG. 52B shows the fraction (%) of AAV CasX-mediated frame-shift edits of the mRHO P23 locus in the retinae in C57BL6J (n=6-8) mice (n=6-8; quantification in percent of total indels detected by NGS), as described in Example 15.

[0085] FIGS. 53A-53F show representative fluorescence imaging of retinas from AAV-CasX treated mice or negative controls and stained, as described in Example 15. Cell nuclei were counterstained with DAPI (top row; FIGS. 53A-C) to visualized retinal layers and stained with HA-tag (bottom row, FIGS. 53D-F) antibody to detect CasX expression in photoreceptors (ONL) and other retinal layers (INL; GCL). Legends: ONL=Outer nuclear layer; INL=Inner nuclear layer, GCL=Ganglion cell layer.

[0086] FIG. 54A is a box plot showing median, minimal and highest editing values using AAV-mediated expression of CasX 491 detected by NGS 3 weeks post-injection in wild-type retinae injected with 5.0e+9 vg/eye of AAV.X.491.174.11.30 vectors, in which the 491 protein is driven by promoter variants designed to selectively express in rod photoreceptors (X=RP1-RP5) or a ubiquitous promoter (X=CMV), as described in Example 16. The grey line is placed at the editing levels achieved by AAV.RP1.491.174.11.30 to compare to other viral vectors tested.

[0087] FIG. 54B is a plot displaying levels of editing achieved by AAV vectors in wild-type retinae injected with 5.0e+9 vg/eye of AAV.X.491.174.11.30 vectors, compared to total transgene size (bp), as described in Example 16. The grey line delimitates transgenes below or above 4.9 kb size.

[0088] FIG. 55 shows in vivo editing results that AAV-mediated expression of CasX 491 and sgRNA spacer 174.4.76 in rod photoreceptors led to detectable levels of editing levels at integrated Nrl-GFP locus in a dose-dependent manner, as described in Example 16. The bar graph shows editing levels detected by NGS at the integrated GFP locus 4-weeks and 12-weeks post-injection in heterozygous Nrl-GFP mice injected with the indicated doses of AAV.RP1.491.174.4.76 vectors in one eye, and the vehicle control in the contralateral eye).

[0089] FIG. 56A shows a western blot of retinal lysates from positive (C1, uninjected homozygous Nrl-GFP retinae) and negative (N, uninjected C57BL/6J retinae) controls, vehicle groups (V, AAV formulation buffer injected retinae) and AAV-CasX 491, sgRNA 174 and spacer 4.76 treated retinae with the medium dose 1.9e+9 (M) or high dose 1.0e+10 vg (H arm. Blots display the respective bands for the HA protein (CasX protein, top), GFP protein (middle) and GAPDH (bottom panels) used as a loading control, as described in Example 16. Levels of percent editing in the retinae detected by NGS are displayed under the blot for each sample.

[0090] FIG. 56B is a scatter boxplot representing levels of GFP protein detected in the western blots of FIG. 56A (ratios of densitometric values of the GFP band for total amount of proteins, normalized to the vehicle group levels), as described in Example 16. One-way ANOVA statistical analysis was performed (*=p<0.5).

[0091] FIG. 56C is a plot correlating GFP protein fraction to levels of editing achieved in mouse retinae of the AAV-treated mice, for both the 1.0e+9 and 1.0e+10 dose groups, as described in Example 16.

[0092] FIG. 57A is a bar graph representing the ratio of GFP fluorescence levels (superior to inferior retina mean grey values) detected by fundus imaging at 4-weeks compared to 12-weeks post-injection in mice injected with two dose levels of AAV constructs, as described in Example 16.

[0093] FIG. 57B displays representative images of fluorescence fundus imaging of GFP in retina from mice injected with 1.0e+9 vg (#13) or 1.0e+10 vg (#34) with the AAV constructs at 4-weeks and (left panel) or 12-weeks (right panel), as described in Example 16.

[0094] FIGS. 58A-58L present histology images or retinae of mice stained with various immunochemistry reagents, as described in Example 16, confirming efficient knock-down of GFP in photoreceptor cells in an AAV-dose dependent manner. The images are representative confocal images of cross-sectioned retinae injected with vehicle (FIGS. 58A, 58B, 58C, 58D), AAV-CasX at a 1.0e+9 vg dose (FIGS. 58E, 58F, 58G, and 58H) and 1.0E+10 vg dose (FIGS. 58I, 58J, 58K, and 58L). Structural imaging shows GFP expression by rod photoreceptors in the outer segment (images in FIGS. 58A, 58E, 58I and images FIGS. 58C, 58G, and 58K for 20× and 40× magnifications, respectively). Cell nuclei were counterstained with Hoechst (FIGS. 58B, 58F, and 58J) and cells stained with anti-HA to correlate levels of HA (CasX transgene levels; FIGS. 58D, 58H, and 58L; 40× magnification) and GFP expressed in photoreceptors. White box outlines in B and F indicate retinal regions analyzed at 40× magnification in FIGS. 58C and 58G. Legend: RPE=retinal pigment epithelium, OS=outer segment, ONL=outer nuclear layer, INL=inner nuclear layer, GCL=ganglion.

[0095] FIG. 59A shows results of an immunohistochemistry staining of a mouse liver section showing that CasX 491 and scaffold 174 with spacer 12.7 administered as an AAV IV injection was able to edit the tdTom locus in vivo in Ai9 mice, as described in Example 3. The images are representative of n=3 animals.

[0096] FIG. 59B shows results of an immunohistochemistry staining of a mouse heart section showing that CasX 491 and scaffold 174 with spacer 12.7 administered as an AAV IV injection was able to edit the tdTom locus in vivo in Ai9 mice, as described in Example 3. The images are representative of n=3 animals.

[0097] FIG. 60 is a graph of the quantification of percent editing at the B2M locus 5 days post-transduction of AAVs into human NPCs in a series of three-fold dilution of MOI, as described in Example 17. Editing levels were determined by NGS as indel rate and by flow cytometry as population of cells that do not express the HLA protein due to successful editing at the B2M locus.

[0098] FIG. 61 shows the results of an editing assay measured as indel rate detected by NGS at the human AAVS1 locus in human induced neurons (iNs) using the three indicated AAVs, each containing CasX 491 and gRNA with a specific spacer targeting AAVS1, as described in Example 17.

[0099] FIG. 62 is a bar graph exhibiting percent editing at the B2M locus in human iNs 14 days post-transduction of AAVs expressing CasX 491 driven by various protein promoters at an MOI of 2E4 or 6.67E3, as described in Example 17.

[0100] FIG. 63 shows the results of an editing assay using AAV transgene plasmids nucleofected into hNPCs, as described in Example 18, demonstrating that CpG reduction or depletion within the U1a promoter (construct ID 178 and 179), U6 promoter (construct ID 180 and 181), or bGH poly(A) (construct ID 182) did not significantly reduce CasX-mediated editing at the B2M locus compared to the editing achieved with the original CpG⁺ AAV vector (construct ID 177). The controls used in this experiment were the non-targeting (NT) spacer and no treatment (NTx).

[0101] FIG. 64 is a bar graph showing editing results of the tdTomato locus in an experiment to assess the effects of AAV constructs having engineered Pol III promoter hybrid variants when delivered to mNPCs in an AAV vector, as described in Example 5. Editing was assessed by FACS five days post-nucleofection.

[0102] FIG. 65 is a schematic of the regions and domains of a guide RNA used to design a scaffold library, as described in Example 20.

[0103] FIG. 66 is a pie chart of the relative distribution and design of the scaffold library with both unbiased (double and single mutations) and targeted mutations (towards the triplex, scaffold stem bubble, pseudoknot, and extended stem and loop) indicated, as described in Example 20.

[0104] FIG. 67 is a schematic of the triplex mutagenesis designed to specifically incorporate alternate triplex-forming base pairs into the triplex, as described in Example 20. Solid lines indicate the Watson-Crick pair in the triplex; the third strand nucleotide is indicated as a dotted line representing the non-canonical interaction with the purine of the duplex. In the library, each of the 5 locations indicated was replaced with all possible triplex motifs (G:GC, T:AT, G:GC)=243 sequences. Sequence of ACUGGCGCUUUUAUCUGAUUACUUUGAGAGCCAUCANNNAUCAAAG (SEQ ID NO: 41829).

[0105] FIG. 68 is a bar chart with results of the enrichment values of reference guide scaffolds 174 and 175 in each screen, as described in Example 20.

[0106] FIG. 69 are scatterplots showing the log₂ enrichment value for each measured single nucleotide substitution, deletion, or insertion, as measured in each of two independent screens of the mutant libraries for guide scaffolds 174 and 175, as described in Example 20.

[0107] FIG. 70 are heat maps for single mutants in guide scaffolds 174 and 175 showing specific mutable regions in the scaffold across the sequences, as described in Example 20. Yellow shades reflect values with similar enrichment to the reference scaffolds; red shades indicate an increase in enrichment, and thus activity, relative to the reference scaffold; blue shades indicate a loss of activity relative to the wildtype scaffold; white indicates missing data (or a substitution that would result in wildtype sequence.

[0108] FIG. 71 is a scatterplot that compares the log₂ enrichment of single nucleotide mutations on reference guide scaffolds 174 and 175, as described in Example 20. Only those mutations to positions that were analogous between 174 and 175 are shown. Results suggest that, overall, guide scaffold 174 is more tolerant to changes than 175.

[0109] FIG. 72 is a bar chart showing the average (and 95% confidence interval) log 2 enrichment values for a set of scaffolds in which the pseudoknot pairs have been shuffled, such that each new pseudoknot has the same composition of base pairs, but in a different order within the stem, as described in Example 20. Each bar represents a set of scaffolds with the G:A (or A:G) pair location indicated (see diagram at right). 291 pseudoknot stems were tested; numbers above bars indicate the number of stems with the G:A (or A:G) pair at each position.

[0110] FIG. 73 is a schematic of the pseudoknot sequence of FIGS. 55 and 56, given 5′ to 3′, with the two strand sequences separated by an underscore.

[0111] FIG. 74 is a bar chart showing the average (and 95% confidence interval) log₂ enrichment values for scaffolds, divided by the predicted secondary structure stability of the pseudoknot stem region, as described in Example 20. Scaffolds with very stable stems (e.g., ΔG<−7 kcal/mol) had high enrichment values on average, whereas scaffolds with destabilized stems (ΔG≥−5 kcal/mol) had low enrichment values on average.

[0112] FIG. 75 is a heat map of all double mutants of positions 7 and 29 in scaffold 175, as described in Example 20. The pseudoknot sequence is given 5′ to 3′, on the right.

[0113] FIG. 76 is a graph of a survival assay to determine the selective stringency of the CcdB selection to different spacers when targeted by CasX protein 515 and Scaffold 174, as described in Example 21.

### DETAILED DESCRIPTION

[0114] While exemplary embodiments have been shown and described herein, it will be obvious to those skilled in the art that such embodiments are provided by way of example only. Numerous variations, changes, and substitutions will now occur to those skilled in the art without departing from the inventions claimed herein. It should be understood that various alternatives to the embodiments described herein may be employed in practicing the embodiments of the disclosure. It is intended that the claims define the scope of the invention and that methods and structures within the scope of these claims and their equivalents be covered thereby.

[0115] Unless otherwise defined, all technical and scientific terms used herein have the same meaning as commonly understood by one of ordinary skill in the art to which this invention belongs. Although methods and materials similar or equivalent to those described herein can be used in the practice or testing of the present embodiments, suitable methods and materials are described below. In case of conflict, the patent specification, including definitions, will control. In addition, the materials, methods, and examples are illustrative only and not intended to be limiting. Numerous variations, changes, and substitutions will now occur to those skilled in the art without departing from the invention.

### Definitions

[0116] The terms “polynucleotide” and “nucleic acid,” used interchangeably herein, refer to a polymeric form of nucleotides of any length, either ribonucleotides or deoxyribonucleotides. Thus, terms “polynucleotide” and “nucleic acid” encompass single-stranded DNA; double-stranded DNA; multi-stranded DNA; single-stranded RNA; double-stranded RNA; multi-stranded RNA; genomic DNA; cDNA; DNA-RNA hybrids; and a polymer comprising purine and pyrimidine bases or other natural, chemically or biochemically modified, non-natural, or derivatized nucleotide bases.

[0117] “Hybridizable” or “complementary” are used interchangeably to mean that a nucleic acid (e.g., RNA, DNA) comprises a sequence of nucleotides that enables it to non-covalently bind, i.e., form Watson-Crick base pairs and/or G/U base pairs, “anneal”, or “hybridize,” to another nucleic acid in a sequence-specific, antiparallel, manner (i.e., a nucleic acid specifically binds to a complementary nucleic acid) under the appropriate in vitro and/or in vivo conditions of temperature and solution ionic strength. It is understood that the sequence of a polynucleotide need not be 100% complementary to that of its target nucleic acid sequence to be specifically hybridizable; it can have at least about 70%, at least about 80%, or at least about 90%, or at least about 95% sequence identity and still hybridize to the target nucleic acid sequence. Moreover, a polynucleotide may hybridize over one or more segments such that intervening or adjacent segments are not involved in the hybridization event (e.g., a loop structure or hairpin structure, a ‘bulge’, ‘bubble’ and the like).

[0118] A “gene,” for the purposes of the present disclosure, includes a DNA region encoding a gene product (e.g., a protein, RNA), as well as all DNA regions which regulate the production of the gene product, whether or not such regulatory sequences are adjacent to coding and/or transcribed sequences. Accordingly, a gene may include accessory element sequences including, but not necessarily limited to, promoter sequences, terminators, translational regulatory sequences such as ribosome binding sites and internal ribosome entry sites, enhancers, silencers, insulators, boundary elements, replication origins, matrix attachment sites and locus control regions. Coding sequences encode a gene product upon transcription or transcription and translation; the coding sequences of the disclosure may comprise fragments and need not contain a full-length open reading frame. A gene can include both the strand that is transcribed as well as the complementary strand containing the anticodons.

[0119] The term “downstream” refers to a nucleotide sequence that is located 3′ to a reference nucleotide sequence. In certain embodiments, downstream nucleotide sequences relate to sequences that follow the starting point of transcription. For example, the translation initiation codon of a gene is located downstream of the start site of transcription.

[0120] The term “upstream” refers to a nucleotide sequence that is located 5′ to a reference nucleotide sequence. In certain embodiments, upstream nucleotide sequences relate to sequences that are located on the 5′ side of a coding region or starting point of transcription. For example, most promoters are located upstream of the start site of transcription.

[0121] The term “adjacent to” with respect to polynucleotide or amino acid sequences refers to sequences that are next to, or adjoining each other in a polynucleotide or polypeptide. The skilled artisan will appreciate that two sequences can be considered to be adjacent to each other and still encompass a limited amount of intervening sequence, e.g., 1, 2, 3, 4, 5, 6, 7, 8, 9 or 10 nucleotides or amino acids.

[0122] The term “accessory element” is used interchangeably herein with the term “accessory sequence,” and is intended to include, inter alia, polyadenylation signals (poly(A) signal), enhancer elements, introns, posttranscriptional regulatory elements (PTREs), nuclear localization signals (NLS), deaminases, DNA glycosylase inhibitors, additional promoters, factors that stimulate CRISPR-mediated homology-directed repair (e.g. in cis or in trans), activators or repressors of transcription, self-cleaving sequences, and fusion domains, for example a fusion domain fused to a CRISPR protein. It will be understood that the choice of the appropriate accessory element or elements will depend on the encoded component to be expressed (e.g., protein or RNA) or whether the nucleic acid comprises multiple components that require different polymerases or are not intended to be expressed as a fusion protein.

[0123] The term “promoter” refers to a DNA sequence that contains a transcription start site and additional sequences to facilitate polymerase binding and transcription. Exemplary eukaryotic promoters include elements such as a TATA box, and/or B recognition element (BRE) and assists or promotes the transcription and expression of an associated transcribable polynucleotide sequence and/or gene (or transgene). A promoter can be synthetically produced or can be derived from a known or naturally occurring promoter sequence or another promoter sequence. A promoter can be proximal or distal to the gene to be transcribed. A promoter can also include a chimeric promoter comprising a combination of two or more heterologous sequences to confer certain properties. A promoter of the present disclosure can include variants of promoter sequences that are similar in composition, but not identical to, other promoter sequence(s) known or provided herein. A promoter can be classified according to criteria relating to the pattern of expression of an associated coding or transcribable sequence or gene operably linked to the promoter, such as constitutive, developmental, tissue-specific, inducible, etc. A promoter can also be classified according to its strength. As used in the context of a promoter, “strength” refers to the rate of transcription of the gene controlled by the promoter. A “strong” promoter means the rate of transcription is high, while a “weak” promoter means the rate of transcription is relatively low.

[0124] A promoter of the disclosure can be a Polymerase II (Pol II) promoter. Polymerase II transcribes all protein coding and many non-coding genes. A representative Pol II promoter includes a core promoter, which is a sequence of about 100 base pairs surrounding the transcription start site, and serves as a binding platform for the Pol II polymerase and associated general transcription factors. The promoter may contain one or more core promoter elements such as the TATA box, BRE, Initiator (INR), motif ten element (MTE), downstream core promoter element (DPE), downstream core element (DCE), although core promoters lacking these elements are known in the art.

[0125] A promoter of the disclosure can be a Polymerase III (Pol III) promoter. Pol III transcribes DNA to synthesize small ribosomal RNAs such as the 5S rRNA, tRNAs, and other small RNAs. Representative Pol III promoters use internal control sequences (sequences within the transcribed section of the gene) to support transcription, although upstream elements such as the TATA box are also sometimes used. All Pol III promoters are envisaged as within the scope of the instant disclosure.

[0126] The term “enhancer” refers to regulatory DNA sequences that, when bound by specific proteins called transcription factors, regulate the expression of an associated gene. Enhancers may be located in the intron of the gene, or 5′ or 3′ of the coding sequence of the gene. Enhancers may be proximal to the gene (i.e., within a few tens or hundreds of base pairs (bp) of the promoter), or may be located distal to the gene (i.e., thousands of bp, hundreds of thousands of bp, or even millions of bp away from the promoter). A single gene may be regulated by more than one enhancer, all of which are envisaged as within the scope of the instant disclosure.

[0127] As used herein, a “post-transcriptional regulatory element (PRE),” such as a hepatitis PRE, refers to a DNA sequence that, when transcribed creates a tertiary structure capable of exhibiting post-transcriptional activity to enhance or promote expression of an associated gene operably linked thereto.

[0128] As used herein, a “post-transcriptional regulatory element (PTRE),” such as a hepatitis PTRE, refers to a DNA sequence that, when transcribed creates a tertiary structure capable of exhibiting post-transcriptional activity to enhance or promote expression of an associated gene operably linked thereto.

[0129] “Recombinant,” as used herein, means that a particular nucleic acid (DNA or RNA) is the product of various combinations of cloning, restriction, and/or ligation steps resulting in a construct having a structural coding or non-coding sequence distinguishable from endogenous nucleic acids found in natural systems. Generally, DNA sequences encoding the structural coding sequence can be assembled from cDNA fragments and short oligonucleotide linkers, or from a series of synthetic oligonucleotides, to provide a synthetic nucleic acid which is capable of being expressed from a recombinant transcriptional unit contained in a cell or in a cell-free transcription and translation system. Such sequences can be provided in the form of an open reading frame uninterrupted by internal non-translated sequences, or introns, which are typically present in eukaryotic genes. Genomic DNA comprising the relevant sequences can also be used in the formation of a recombinant gene or transcriptional unit. Sequences of non-translated DNA may be present 5′ or 3′ from the open reading frame, where such sequences do not interfere with manipulation or expression of the coding regions, and may indeed act to modulate production of a desired product by various mechanisms (see “enhancers” and “promoters”, above).

[0130] The term “recombinant polynucleotide” or “recombinant nucleic acid” refers to one which is not naturally occurring, e.g., is made by the artificial combination of two otherwise separated segments of sequence through human intervention. This artificial combination is often accomplished by either chemical synthesis means, or by the artificial manipulation of isolated segments of nucleic acids, e.g., by genetic engineering techniques. Such is usually done to replace a codon with a redundant codon encoding the same or a conservative amino acid, while typically introducing or removing a sequence recognition site. Alternatively, it is performed to join together nucleic acid segments of desired functions to generate a desired combination of functions. This artificial combination is often accomplished by either chemical synthesis means, or by the artificial manipulation of isolated segments of nucleic acids, e.g., by genetic engineering techniques.

[0131] Similarly, the term “recombinant polypeptide” or “recombinant protein” refers to a polypeptide or protein which is not naturally occurring, e.g., is made by the artificial combination of two otherwise separated segments of amino sequence through human intervention. Thus, e.g., a protein that comprises a heterologous amino acid sequence is recombinant.

[0132] As used herein, the term “contacting” means establishing a physical connection between two or more entities. For example, contacting a target nucleic acid with a guide nucleic acid means that the target nucleic acid and the guide nucleic acid are made to share a physical connection; e.g., can hybridize if the sequences share sequence similarity.

[0133] “Dissociation constant”, or “K_{d}”, are used interchangeably and mean the affinity between a ligand “L” and a protein “P”; i.e., how tightly a ligand binds to a particular protein. It can be calculated using the formula K_{d}=[L] [P]/[LP], where [P], [L] and [LP] represent molar concentrations of the protein, ligand and complex, respectively.

[0134] The disclosure provides systems and methods useful for editing a target nucleic acid sequence. As used herein “editing” is used interchangeably with “modifying” and includes but is not limited to cleaving, nicking, deleting, knocking in, knocking out, and the like.

[0135] By “cleavage” it is meant the breakage of the covalent backbone of a target nucleic acid molecule (e.g., RNA, DNA). Cleavage can be initiated by a variety of methods including, but not limited to, enzymatic or chemical hydrolysis of a phosphodiester bond. Both single-stranded cleavage and double-stranded cleavage are possible, and double-stranded cleavage can occur as a result of two distinct single-stranded cleavage events.

[0136] The term “knock-out” refers to the elimination of a gene or the expression of a gene. For example, a gene can be knocked out by either a deletion or an addition of a nucleotide sequence that leads to a disruption of the reading frame. As another example, a gene may be knocked out by replacing a part of the gene with an irrelevant sequence. The term “knock-down” as used herein refers to reduction in the expression of a gene or its gene product(s). As a result of a gene knock-down, the protein activity or function may be attenuated or the protein levels may be reduced or eliminated.

[0137] As used herein, “homology-directed repair” (HDR) refers to the form of DNA repair that takes place during repair of double-strand breaks in cells. This process requires nucleotide sequence homology, and uses a donor template to repair or knock-out a target DNA, and leads to the transfer of genetic information from the donor to the target. Homology-directed repair can result in an alteration of the sequence of the target sequence by insertion, deletion, or mutation if the donor template differs from the target DNA sequence and part or all of the sequence of the donor template is incorporated into the target DNA.

[0138] As used herein, “non-homologous end joining” (NHEJ) refers to the repair of double-strand breaks in DNA by direct ligation of the break ends to one another without the need for a homologous template (in contrast to homology-directed repair, which requires a homologous sequence to guide repair). NHEJ often results in the loss (deletion) of nucleotide sequence near the site of the double-strand break.

[0139] As used herein “micro-homology mediated end joining” (MMEJ) refers to a mutagenic DSB repair mechanism, which always associates with deletions flanking the break sites without the need for a homologous template (in contrast to homology-directed repair, which requires a homologous sequence to guide repair). MMEJ often results in the loss (deletion) of nucleotide sequence near the site of the double-strand break. A polynucleotide or polypeptide has a certain percent “sequence similarity” or “sequence identity” to another polynucleotide or polypeptide, meaning that, when aligned, that percentage of bases or amino acids are the same, and in the same relative position, when comparing the two sequences. Sequence similarity (sometimes referred to as percent similarity, percent identity, or homology) can be determined in a number of different manners. To determine sequence similarity, sequences can be aligned using the methods and computer programs that are known in the art, including BLAST, available over the world wide web at ncbi.nlm.nih.gov/BLAST. Percent complementarity between particular stretches of nucleic acid sequences within nucleic acids can be determined using any convenient method. Example methods include BLAST programs (basic local alignment search tools) and PowerBLAST programs (Altschul et al., J. Mol. Biol., 1990, 215, 403-410; Zhang and Madden, Genome Res., 1997, 7, 649-656) or by using the Gap program (Wisconsin Sequence Analysis Package, Version 8 for Unix, Genetics Computer Group, University Research Park, Madison Wis.), e.g., using default settings, which uses the algorithm of Smith and Waterman (Adv. Appl. Math., 1981, 2, 482-489).

[0140] The terms “polypeptide,” and “protein” are used interchangeably herein, and refer to a polymeric form of amino acids of any length, which can include coded and non-coded amino acids, chemically or biochemically modified or derivatized amino acids, and polypeptides having modified peptide backbones. The term includes fusion proteins, including, but not limited to, fusion proteins with a heterologous amino acid sequence.

[0141] A “vector” or “expression vector” is a replicon, such as plasmid, phage, virus, virus-like particle or cosmid, to which another DNA segment, i.e., an “insert”, may be attached so as to bring about the replication or expression of the attached segment in a cell.

[0142] The term “naturally-occurring” or “unmodified” or “wild type” as used herein as applied to a nucleic acid, a polypeptide, a cell, or an organism, refers to a nucleic acid, polypeptide, cell, or organism that is found in nature.

[0143] As used herein, a “mutation” refers to an insertion, deletion, substitution, duplication, or inversion of one or more amino acids or nucleotides as compared to a wild-type or reference amino acid sequence or to a wild-type or reference nucleotide sequence.

[0144] As used herein the term “isolated” is meant to describe a polynucleotide, a polypeptide, or a cell that is in an environment different from that in which the polynucleotide, the polypeptide, or the cell naturally occurs. An isolated genetically modified host cell may be present in a mixed population of genetically modified host cells.

[0145] A “host cell,” as used herein, denotes a eukaryotic cell, a prokaryotic cell, or a cell from a multicellular organism (e.g., in a cell line), which eukaryotic or prokaryotic cells are used as recipients for a nucleic acid (e.g., an expression vector), and include the progeny of the original cell which has been genetically modified by the nucleic acid. It is understood that the progeny of a single cell may not necessarily be completely identical in morphology or in genomic or total DNA complement as the original parent, due to natural, accidental, or deliberate mutation. A “recombinant host cell” (also referred to as a “genetically modified host cell”) is a host cell into which has been introduced a heterologous nucleic acid, e.g., an expression vector.

[0146] A “target cell marker” refers to a molecule expressed by a target cell including but not limited to cell-surface receptors, cytokine receptors, antigens, tumor-associated antigens, glycoproteins, oligonucleotides, enzymatic substrates, antigenic determinants, or binding sites that may be present in the on the surface of a target tissue or cell that may serve as ligands for an antibody fragment or glycoprotein tropism factor.

[0147] The term “conservative amino acid substitution” refers to the interchangeability in proteins of amino acid residues having similar side chains. For example, a group of amino acids having aliphatic side chains consists of glycine, alanine, valine, leucine, and isoleucine; a group of amino acids having aliphatic-hydroxyl side chains consists of serine and threonine; a group of amino acids having amide-containing side chains consists of asparagine and glutamine; a group of amino acids having aromatic side chains consists of phenylalanine, tyrosine, and tryptophan; a group of amino acids having basic side chains consists of lysine, arginine, and histidine; and a group of amino acids having sulfur-containing side chains consists of cysteine and methionine. Exemplary conservative amino acid substitution groups are: valine-leucine-isoleucine, phenylalanine-tyrosine, lysine-arginine, alanine-valine, and asparagine-glutamine.

[0148] The term “antibody,” as used herein, encompasses various antibody structures, including but not limited to monoclonal antibodies, polyclonal antibodies, multispecific antibodies (e.g., bispecific antibodies), nanobodies, single domain antibodies such as VHH antibodies, and antibody fragments so long as they exhibit the desired antigen-binding activity or immunological activity. Antibodies represent a large family of molecules that include several types of molecules, such as IgD, IgG, IgA, IgM and IgE.

[0149] An “antibody fragment” refers to a molecule other than an intact antibody that comprises a portion of an intact antibody and that binds the antigen to which the intact antibody binds. Examples of antibody fragments include but are not limited to Fv, Fab, Fab′, Fab′-SH, F(ab′)2, diabodies, single chain diabodies, linear antibodies, a single domain antibody, a single domain camelid antibody, single-chain variable fragment (scFv) antibody molecules, and multispecific antibodies formed from antibody fragments.

[0150] As used herein, “treatment” or “treating,” are used interchangeably herein and refer to an approach for obtaining beneficial or desired results, including but not limited to a therapeutic benefit and/or a prophylactic benefit. By therapeutic benefit is meant eradication or amelioration of the underlying disorder or disease being treated. A therapeutic benefit can also be achieved with the eradication or amelioration of one or more of the symptoms or an improvement in one or more clinical parameters associated with the underlying disease such that an improvement is observed in the subject, notwithstanding that the subject may still be afflicted with the underlying disorder.

[0151] The terms “therapeutically effective amount” and “therapeutically effective dose”, as used herein, refer to an amount of a drug or a biologic, alone or as a part of a composition, that is capable of having any detectable, beneficial effect on any symptom, aspect, measured parameter or characteristics of a disease state or condition when administered in one or repeated doses to a subject such as a human or an experimental animal. Such effect need not be absolute to be beneficial.

[0152] As used herein, “administering” means a method of giving a dosage of a compound (e.g., a composition of the disclosure) or a composition (e.g., a pharmaceutical composition) to a subject.

[0153] A “subject” is a mammal. Mammals include, but are not limited to, domesticated animals, non-human primates, humans, dogs, rabbits, mice, rats and other rodents.

[0154] All publications, patents, and patent applications mentioned in this specification are herein incorporated by reference to the same extent as if each individual publication, patent, or patent application was specifically and individually indicated to be incorporated by reference.

### I. General Methods

[0155] The practice of the present invention employs, unless otherwise indicated, conventional techniques of immunology, biochemistry, chemistry, molecular biology, microbiology, cell biology, genomics and recombinant DNA, which can be found in such standard textbooks as Molecular Cloning: A Laboratory Manual, 3rd Ed. (Sambrook et al., Harbor Laboratory Press 2001); Short Protocols in Molecular Biology, 4th Ed. (Ausubel et al. eds., John Wiley & Sons 1999); Protein Methods (Bollag et al., John Wiley & Sons 1996); Nonviral Vectors for Gene Therapy (Wagner et al. eds., Academic Press 1999); Viral Vectors (Kaplift & Loewy eds., Academic Press 1995); Immunology Methods Manual (I. Lefkovits ed., Academic Press 1997); and Cell and Tissue Culture: Laboratory Procedures in Biotechnology (Doyle & Griffiths, John Wiley & Sons 1998), the disclosures of which are incorporated herein by reference.

[0156] Where a range of values is provided, it is understood that endpoints are included and that each intervening value, to the tenth of the unit of the lower limit unless the context clearly dictates otherwise, between the upper and lower limit of that range and any other stated or intervening value in that stated range, is encompassed. The upper and lower limits of these smaller ranges may independently be included in the smaller ranges, and are also encompassed, subject to any specifically excluded limit in the stated range. Where the stated range includes one or both of the limits, ranges excluding either or both of those included limits are also included.

[0157] Unless defined otherwise, all technical and scientific terms used herein have the same meaning as commonly understood by one of ordinary skill in the art to which this invention belongs. All publications mentioned herein are incorporated herein by reference to disclose and describe the methods and/or materials in connection with which the publications are cited.

[0158] It must be noted that as used herein and in the appended claims, the singular forms “a,” “an,” and “the” include plural referents unless the context clearly dictates otherwise.

[0159] It will be appreciated that certain features of the disclosure, which are, for clarity, described in the context of separate embodiments, may also be provided in combination in a single embodiment. In other cases, various features of the disclosure, which are, for brevity, described in the context of a single embodiment, may also be provided separately or in any suitable sub-combination. It is intended that all combinations of the embodiments pertaining to the disclosure are specifically embraced by the present disclosure and are disclosed herein just as if each and every combination was individually and explicitly disclosed. In addition, all sub-combinations of the various embodiments and elements thereof are also specifically embraced by the present disclosure and are disclosed herein just as if each and every such sub-combination was individually and explicitly disclosed herein.

### II. AAV Vectors

[0160] In a first aspect, the present disclosure relates to AAV vectors optimized for the expression and delivery of CRISPR nucleases to target cells and/or tissues for genetic editing.

[0161] Wild-type AAV is a small, single-stranded DNA virus belonging to the parvovirus family. The wild-type AAV genome is made up of two genes that encode four replication proteins and three capsid proteins, respectively, and is flanked on either side by inverted terminal repeats (ITRs) having 130-145 nucleotides that fold into a hairpin shape important for replication. The virion is composed of three capsid proteins, Vp1, Vp2, and Vp3, produced in a 1:1:10 ratio from the same open reading frame but from differential splicing (Vp1) and alternative translational start sites (Vp2 and Vp3, respectively). The cap gene produces an additional, non-structural protein called the Assembly-Activating Protein (AAP). This protein is produced from ORF2 and is essential for the capsid-assembly process. The capsid forms a supramolecular assembly of approximately 60 individual capsid protein subunits into a non-enveloped, T-1 icosahedral lattice capable of protecting the AAV genome.

[0162] Being naturally replication-defective and capable of transducing nearly every cell type in the human body, AAV represents a suitable vector for therapeutic use in gene therapy or vaccine delivery. Typically, when producing a recombinant AAV vector, the sequence between the two ITRs is replaced with one or more sequences of interest (e.g., a transgene), and the Rep and Cap sequences are provided in trans, making the ITRs the only viral DNA that remains in the vector. The resulting recombinant AAV vector genome construct comprises two cis-acting 130 to 145-nucleotide ITRs flanking an expression cassette encoding the transgene sequences of interest, providing at least 4.7 kb or more for packaging of foreign DNA that can include a transgene, one or more promoters and accessory elements, such that the total size of the vector is below 5 to 5.2 kb, which is compatible with packaging within the AAV capsid (it being understood that as the size of the construct exceeds this threshold, the packaging efficiency of the vector decreases). The transgene may be used to correct or ameliorate gene deficiencies in the cells of a subject. In the context of CRISPR-mediated gene editing, however, the size limitation of the expression cassette is a challenge for most CRISPR systems, given the large size of the nucleases.

[0163] The present disclosure provides polynucleotides for production of AAV transgene plasmids as well as for the production of AAV viral vectors. In some embodiments, the polynucleotides comprise sequences encoding a first adeno-associated virus (AAV) 5′ inverted terminal repeat (ITR) sequence, a second AAV 3′ ITR sequence, a CRISPR nuclease, a first guide RNA (gRNA), one or more promoters and, optionally, accessory elements; all encompassed in a single expression cassette encoded by a single polynucleotide capable of being incorporated into a single AAV viral particle. In other embodiments, the polynucleotides comprise sequences encoding a first 5′ AAV ITR sequence, a second 3′ AAV ITR sequence, a CRISPR nuclease, a first gRNA, a first promoter, a second promoter, and, optionally, one or more accessory elements.

[0164] The promoter and accessory elements can be operably linked to a transgene, e.g. the CRISPR protein and/or gRNA, in a manner which permits its transcription, translation and/or expression in a cell transfected with the AAV vector of the embodiments. As used herein, “operably linked” sequences include both accessory element sequences that are contiguous with the gene of interest and accessory element sequences that are at a distance to control the gene of interest. In some embodiments, the CRISPR protein and the first gRNA are under the control of, and operably linked to, a first promoter. In other embodiments, the CRISPR protein is under the control of and operably linked to a first promoter and the first gRNA is under the control of and operably linked to a second promoter.

[0165] In some embodiments, the disclosure provides accessory elements for inclusion in the AAV vector that include, but are not limited to sequences that control transcription initiation, termination, promoters, enhancer elements, RNA processing signal sequences, enhancer elements, sequences that stabilize cytoplasmic mRNA, sequences that enhance translation efficiency (i.e., Kozak consensus sequence), an intron, a post-transcriptional regulatory element (PTRE), a nuclear localization signal (NLS), a deaminase, a DNA glycosylase inhibitor, a second guide RNA, a stimulator of CRISPR-mediated homology-directed repair, and an activator or repressor of transcription.

[0166] By “adeno-associated virus inverted terminal repeats” or “AAV ITRs” is meant the art recognized regions found at each end of the AAV genome which function together in cis as origins of DNA replication and as packaging signals for the virus. AAV ITRs, together with the AAV rep coding region, provide for the efficient excision and rescue from, and integration of a nucleotide sequence interposed between two flanking ITRs into a mammalian cell genome.

[0167] The nucleotide sequences of AAV ITR regions are known. See, for example Kotin, R. M. (1994) Human Gene Therapy 5:793-801; Berns, K. I. “Parvoviridae and their Replication” in Fundamental Virology, 2nd Edition, (B. N. Fields and D. M. Knipe, eds.). As used herein, an AAV ITR need not have the wild-type nucleotide sequence depicted, but may be altered, e.g., by the insertion, deletion or substitution of nucleotides. Additionally, the AAV ITR may be derived from any of several AAV serotypes, including without limitation, AAV1, AAV2, AAV3, AAV4, AAV5, AAV6, AAV7, AAV8, AAV9, AAV10, AAV11, AAV12, AAV 44.9, AAV-Rh74, and AAVRh10, and modified capsids of these serotypes. Furthermore, 5′ and 3′ ITRs which flank a selected nucleotide sequence in an AAV vector need not necessarily be identical or derived from the same AAV serotype or isolate, so long as they function as intended, i.e., to allow for excision and rescue of the sequence of interest from a host cell genome or vector, and to allow integration of the heterologous sequence into the recipient cell genome when AAV Rep gene products are present in the cell. Use of AAV serotypes for integration of heterologous sequences into a host cell is known in the art (see, e.g., WO2018195555A1 and US20180258424A1, incorporated by reference herein). In one particular embodiment, the ITRs are derived from serotype AAV1. In another particular embodiment, the ITRs are derived from serotype AAV2, including the 5′ ITR having sequence CCTGCAGGCAGCTGCGCGCTCGCTCGCTCACTGAGGCCGCCCGGGCGTCGGGCGAC CTTTGGTCGCCCGGCCTCAGTGAGCGAGCGAGCGCGCAGAGAGGGAGTGGCCAACT CCATCACTAGGGGTTCCT (SEQ ID NO: 40557) and the 3′ ITR having sequence AGGAACCCCTAGTGATGGAGTTGGCCACTCCCTCTCTGCGCGCTCGCTCGCTCACTG AGGCCGGGCGACCAAAGGTCGCCCGACGCCCGGGCTTTGCCCGGGCGGCCTCAGTG AGCGAGCGAGCGCGCAGCTGCCTGCAGG (SEQ ID NO: 40576).

[0168] By “AAV rep coding region” is meant the region of the AAV genome which encodes the replication proteins Rep 78, Rep 68, Rep 52 and Rep 40. These Rep expression products have been shown to possess many functions, including recognition, binding and nicking of the AAV origin of DNA replication, DNA helicase activity and modulation of transcription from AAV (or other heterologous) promoters. The Rep expression products are collectively required for replicating the AAV genome.

[0169] By “AAV cap coding region” is meant the region of the AAV genome which encodes the capsid proteins VP1, VP2, and VP3, or functional homologues thereof. These Cap expression products supply the packaging functions which are collectively required for packaging the viral genome.

[0170] In some embodiments, the AAV vector is of serotype 9 or of serotype 6, which have been demonstrated to effectively deliver polynucleotides to motor neurons and glia throughout the spinal cord in preclinical models of Amyotrophic lateral sclerosis (ALS) (Foust, K D. et al. Therapeutic AAV9-mediated suppression of mutant RHO slows disease progression and extends survival in models of inherited ALS. Mol Ther. 21(12):2148 (2013)). In some embodiments, the methods provide use of AAV9 or AAV6 for targeting of neurons via intraparenchymal brain injection. In some embodiments, the methods provide use of AAV9 for intravenous administering of the vector wherein the AAV9 has the ability to penetrate the blood-brain barrier and drive gene expression in the nervous system via both neuronal and glial tropism of the vector. In other embodiments, the AAV vector is of serotype 8, which have been demonstrated to effectively deliver polynucleotides to retinal cells.

[0171] In some embodiments, the one or more accessory elements are selected from the group consisting of a poly(A) signal, a gene enhancer element, an intron, a posttranscriptional regulatory element (PTRE), a nuclear localization signal (NLS), a deaminase, a DNA glycosylase inhibitor, a third promoter, a second guide RNA (targeting a different or overlapping segment of the target nucleic acid), a stimulator of CRISPR-mediated homology-directed repair, and an activator or repressor of transcription. In some cases, the PTRE is selected from the group consisting of cytomegalovirus immediate/early intronA, hepatitis B virus PRE (HPRE), Woodchuck Hepatitis virus PRE (WPRE), and 5′ untranslated region (UTR) of human heat shock protein 70 mRNA (Hsp70).

[0172] In the foregoing, the one or more accessory elements are operably linked to the CRISPR protein. It has been discovered that the inclusion of the accessory element(s) in the polynucleotide of the AAV construct can enhance the expression, binding, activity, or performance of the CRISPR protein as compared to the CRISPR protein in the absence of said accessory element in an AAV construct. In one embodiment, the inclusion of the one or more accessory elements results in an increase in editing of a target nucleic acid by the CRISPR protein in an in vitro assay of at least about 10%, at least about 20%, at least about 30%, at least about 40%, at least about 50%, at least about 60%, at least about 70%, at least about 80%, at least about 90%, at least about 100%, at least about 1500%, at least about 200%, or at least about 300% as compared to the CRISPR protein in the absence of said accessory element in an AAV construct.

[0173] In a feature of the AAV vectors of the present disclosure, it has been discovered that utilization of certain Class 2 CRISPR systems of smaller size permit the inclusion of additional sequence space in the polynucleotides used in the making of the AAV vectors that can be utilized for the remaining components of the transgene, as described herein. In some embodiments, the Class 2 CRISPR system comprises a Type V protein selected from the group consisting of Cas12a, Cas12b, Cas12c, Cas12d (CasY), Cas12j and CasX, and the associated guide RNA of the respective system. In a particular embodiment, the CRISPR protein is a CasX, wherein the CasX comprises a sequence selected from the group consisting of SEQ ID NOS: 1-3 and SEQ ID NOS: 49-160, 40208-40369 and 40828-40912 as listed in Table 3, or a sequence having at least about 85%, at least about 90%, at least about 91%, at least about 92%, at least about 93%, at least about 94%, at least about 95%, at least about 96%, at least about 97%, at least about 98%, or at least about 99% sequence identity thereto. In a particular embodiment, the CRISPR protein is a CasX, wherein the CasX comprises a sequence selected from the group consisting of the sequences of SEQ ID NOS: 1-3 and SEQ ID NOS: 49-160 and 40208-40369 and 40828-40912 as listed in Table 3. In some embodiments, the gRNA comprises a scaffold sequence selected from the group consisting of SEQ ID NOS: 2101-2285, 39981-40026, 40913-40958, and 41817 as set forth in Table 2, or a sequence having at least 85%, at least 90%, at least 95%, at least 95%, at least 96%, at least 97%, at least 98% identity thereto. In a particular embodiment, the gRNA comprises a sequence selected from the group of sequences of SEQ ID NOS: 2101-2285, 39981-40026, 40913-40958, and 41817 as set forth in Table 2. In the foregoing embodiments, the gRNA further comprises a targeting sequence complementary to a target nucleic acid to be modified, wherein the targeting sequence has at least 15 to 20 nucleotides. The CasX protein and gRNA component embodiments contemplated for incorporation into the AAV vectors of the disclosure are described more fully, below.

[0174] As described, supra, the smaller size of the Class 2, Type V proteins and gRNA contemplated for inclusion in the AAV constructs permit inclusion of additional or larger components that can be packaged into a single AAV particle. In some embodiments, the polynucleotide encoding the CRISPR protein sequence and the gRNA sequence are less than about 3100, about 3090, about 3080, about 3070, about 3060, about 3050, or less than about 3040 nucleotides in length. In other embodiments, the polynucleotide encoding the CRISPR protein sequence and the gRNA sequence are less than about 3040 to about 3100 nucleotides in combined length. Thus, in light of the total length of the expression cassette that can be packaged into an AAV particle, in some embodiments, the polynucleotide sequences of the first promoter and the at least one accessory element have greater than at least about 1300, at least about 1350, at least about 1360, at least about 1370, at least about 1380, at least about 1390, at least about 1400, at least about 1500, at least about 1600 nucleotides, at least 1650, at least about 1700, at least about 1750, at least about 1800, at least about 1850, or at least about 1900 nucleotides in combined length. In other embodiments, the polynucleotide sequences of the first promoter and the at least one accessory element have greater than at least about 1300 to at least about 1900 nucleotides in combined length. In one embodiment, the polynucleotide sequences of the first promoter and the at least one accessory element have greater than 1314 nucleotides in combined length. In another embodiment, the polynucleotide sequences of the first promoter and the at least one accessory element have greater than 1381 nucleotides in combined length. In other embodiments, the polynucleotide sequences of the first promoter, the second promoter and the at least one accessory element have greater than at least about 1300, at least about 1350, at least about 1360, at least about 1370, at least about 1380, at least about 1390, at least about 1400, at least about 1500, at least about 1600 nucleotides, at least 1650, at least about 1700, at least about 1750, at least about 1800, at least about 1850, or at least about 1900 nucleotides in combined length. In other embodiments, the polynucleotide sequences of the first promoter, the second promoter and the at least one accessory element have greater than at least about 1300 to at least about 1900 nucleotides in combined length. In one embodiment, the polynucleotide sequences of the first promoter, the second promoter, and the at least one accessory element have greater than 1314 nucleotides in combined length. In other embodiments, the polynucleotide sequences of the first promoter, the second promoter, and the at least one accessory element have greater than 1381 nucleotides in combined length. In still other embodiments, the polynucleotide sequences of the first promoter, the second promoter, and the two or more accessory elements have greater than at least about 1300, at least about 1350, at least about 1360, at least about 1370, at least about 1380, at least about 1390, at least about 1400, at least about 1500, at least about 1600 nucleotides, at least 1650, at least about 1700, at least about 1750, at least about 1800, at least about 1850, or at least about 1900 nucleotides in combined length. In other embodiments, the polynucleotide sequences of the first promoter, the second promoter, and the two or more accessory elements have greater than at least about 1300 to at least about 1900 nucleotides in combined length. In one embodiment, the polynucleotide sequences of the first promoter, the second promoter, and the two or more accessory elements have greater than 1314 nucleotides in combined length. In another embodiment, the polynucleotide sequences of the first promoter, the second promoter, and the two or more accessory elements have greater than 1381 nucleotides in combined length.

[0175] In some embodiments, the present disclosure provides a polynucleotide comprising a first adeno-associated virus (AAV) inverted terminal repeat (ITR) sequence, a second AAV ITR sequence, a first promoter sequence, a sequence encoding a CRISPR protein, a second promoter sequence, a sequence encoding at least a first guide RNA (gRNA), and one or more accessory element sequences, wherein at least 25%, 26%, 27%, 28%, 29%, 30%, 31%, 32%, 33%, 34%, or 35% or more of the nucleotides of the polynucleotide sequence comprise the first and second promoters and the one or more accessory element sequences in combined length. In other embodiments, the present disclosure provides a polynucleotide comprising a first adeno-associated virus (AAV) inverted terminal repeat (ITR) sequence, a second AAV ITR sequence, a first promoter sequence, a sequence encoding a CRISPR protein, a second promoter sequence, a sequence encoding a first guide RNA (gRNA), a third promoter sequence, a sequence encoding a second gRNA, and one or more accessory element sequences, wherein at least 25%, 26%, 27%, 28%, 29%, 30%, 31%, 32%, 33%, 34%, or 35% or more of the nucleotides of the polynucleotide sequence comprise the first, second, and third promoters and the one or more accessory element sequences in combined length. As detailed in the Examples, it has been discovered that the ability to devote more of the total polynucleotide of the expression cassette of an AAV transgene to the promoters, a second gRNA, and/or the accessory elements results in enhanced expression of and/or performance of the CRISPR protein and gRNA, when expressed in the target host cell; either in an in vitro assay or in vivo in a subject. In some embodiments, the use of alternative or longer promoters and/or accessory elements (e.g., poly(A) signal, a gene enhancer element, an intron, a posttranscriptional regulatory element (PTRE), a nuclear localization signal (NLS), a deaminase, a DNA glycosylase inhibitor, a stimulator of CRISPR-mediated homology-directed repair, and an activator or repressor of transcription) in the AAV polynucleotides and resulting AAV vectors results in an increase in editing of a target nucleic acid of at least about 10%, at least about 20%, at least about 30%, at least about 40%, at least about 50%, at least about 60%, at least about 70%, at least about 80%, at least about 90%, at least about 100%, at least about 1500%, at least about 200%, or at least about 300% when the AAV is assessed in an in vitro assay compared to a construct not having the alternative or longer promoters and/or accessory elements. In one embodiment, the first promoter sequence of the polynucleotide has at least about 200, at least about 300, at least about 400, at least about 500, at least about 600, at least about 700, or at least about 800 nucleotides. In another embodiment, the second promoter sequence of the polynucleotide has at least about 200, at least about 300, at least about 400, at least about 500, at least about 600, at least about 700, or at least about 800 nucleotides. Embodiments of the promoters are described more fully, below.

[0176] In some embodiments, the present disclosure provides a polynucleotide, wherein the polynucleotide comprises one or more sequences selected from the group of sequences set forth in Tables 8-10, 12, 13, 17-22 and 24-27, or a sequence having at least 85%, at least 90%, at least 95%, at least 95%, at least 96%, at least 97%, at least 98%, or at least 99% identity thereto. In another embodiment, the present disclosure provides a polynucleotide, wherein the polynucleotide comprises a sequence selected from the group of sequences set forth in Tables 8-10, 12, 13, and 17-23 and 24-27. In some embodiments, the polynucleotide sequence differs from those set forth in Tables 8-10, 12, 13, and 17-22 and 24-26 only in the selection of the targeting sequences of the gRNA or gRNAs encoded by the polynucleotide, wherein the targeting sequence is a sequence having 15 to 30 nucleotides capable of hybridizing with the sequence of a target nucleic acid. In a particular embodiment of the foregoing, the targeting sequence is selected from the group of sequences set forth in Table 27. In some embodiments, the present disclosure provides a polynucleotide of any of the embodiments described herein, wherein the polynucleotide has the configuration of a construct of FIG. 24, FIGS. 33-35, or FIG. 42.

[0177] In some embodiments, the present disclosure provides a polynucleotide for use in the making of an AAV vector, wherein the polynucleotide comprises one or more sequences selected from the group of sequences set forth in Tables 8-10, 12, 13, and 17-22 and 24-27, or a sequence having at least 85%, at least 90%, at least 95%, at least 95%, at least 96%, at least 97%, at least 98%, or at least 99% identity thereto. In another embodiment, the present disclosure provides a polynucleotide for use in the making of an AAV vector, wherein the polynucleotide comprises a sequence selected from the group of sequences set forth in Tables 8-10, 12, 13, 17-22 and 24-27. In some embodiments, the polynucleotide sequence differs from those set forth in Tables 8-10, 12, 13, 17-22 and 24-26 only in the selection of the targeting sequences of the gRNA or gRNAs encoded by the polynucleotide, wherein the targeting sequence is a sequence having 15 to 30 nucleotides and is capable of hybridizing with the sequence of a target nucleic acid to be modified. In a particular embodiment of the foregoing, the targeting sequence is selected from the group of sequences set forth in Table 27. In some embodiments, the present disclosure provides a polynucleotide of any of the embodiments described herein for use in the making of an AAV vector, wherein the polynucleotide has the configuration of a construct of FIG. 24, FIGS. 33-35, or FIG. 42.

### III. Guide Nucleic Acids of the AAV Systems

[0178] In some embodiments, the disclosure relates to specifically-designed guide ribonucleic acids (gRNA) utilized in the AAV systems that have utility in genome editing of a target nucleic acid in a cell. The present disclosure provides specifically-designed gRNAs with targeting sequences that are complementary to (and are therefore able to hybridize with) the target nucleic acid as a component of the gene editing AAV systems. It is envisioned that in some embodiments, multiple gRNAs (e.g., multiple gRNAs) are delivered in the AAV system for the modification of a target nucleic acid. For example, a pair of gRNAs with targeting sequences to different or overlapping regions of the target nucleic acid sequence can be used, when each is complexed with a CRISPR nuclease, in order to bind and cleave at two different or overlapping sites within the gene, which is then edited by non-homologous end joining (NHEJ), homology-directed repair (HDR), homology-independent targeted integration (HITI), micro-homology mediated end joining (MMEJ), single strand annealing (SSA) or base excision repair (BER).

[0179] In some embodiments, the disclosure provides gRNAs utilized in the systems that have utility in genome editing a gene in a eukaryotic cell. In a particular embodiment, the gRNA of the systems are capable of forming a complex with a CRISPR nuclease; a ribonucleoprotein (RNP) complex, described more fully, below.

[0180] a. Reference gRNA and gRNA Variants

[0181] In some embodiments, a gRNA of the present disclosure comprises a sequence of a naturally-occurring guide RNA (a “reference gRNA”). In some embodiments, a reference gRNA of the disclosure may be subjected to one or more mutagenesis methods, such as the mutagenesis methods described herein, which may include Deep Mutational Evolution (DME), deep mutational scanning (DMS), error prone PCR, cassette mutagenesis, random mutagenesis, staggered extension PCR, gene shuffling, or domain swapping (as described herein, as well as in WO2020247883A2, incorporated by reference herein), in order to generate one or more variants (referred to herein as “gRNA variant”) with enhanced or varied properties relative to the reference gRNA. gRNA variants also include variants comprising one or more exogenous sequences, for example fused to either the 5′ or 3′ end, or inserted internally. The activity of reference gRNAs or the variant from which it was derived may be used as a benchmark against which the activity of gRNA variants are compared, thereby measuring improvements in function or other characteristics of the gRNA variants. In other embodiments, a reference gRNA or a gRNA variant may be subjected to one or more deliberate, specifically-targeted mutations in order to produce a gRNA variant; for example a rationally designed variant.

[0182] In some embodiments, the guide is a ribonucleic acid molecule (“gRNA”), and in other embodiments, the guide is a chimera, and comprises both DNA and RNA.

[0183] The gRNAs of the disclosure comprise two segments; a targeting sequence and a protein-binding segment. The targeting segment of a gRNA includes a nucleotide sequence (referred to interchangeably as a guide sequence, a spacer, a targeting sequence, or a targeting region) that is complementary to, and therefore can hybridize with, a specific sequence (a target site) within the target nucleic acid (e.g., a target ssRNA, a target ssDNA, the complementary strand of a double stranded target DNA, etc.), described more fully below. The targeting sequence of a gRNA is capable of binding to a target nucleic acid sequence, including a coding sequence, a complement of a coding sequence, a non-coding sequence, and to accessory elements. The protein-binding segment (or “protein-binding sequence”) interacts with (e.g., binds to) a CasX protein as a complex, forming an RNP (described more fully, below). The protein-binding segment is alternatively referred to herein as a “scaffold”, which is comprised of several regions, described more fully, below.

[0184] In the case of a dual guide RNA (dgRNA), the targeter and the activator portions each have a duplex-forming segment, where the duplex forming segment of the targeter and the duplex-forming segment of the activator have complementarity with one another and hybridize to one another to form a double stranded duplex (dsRNA duplex for a gRNA). When the gRNA is a gRNA, the term “targeter” or “targeter RNA” is used herein to refer to a crRNA-like molecule (crRNA: “CRISPR RNA”) of a CasX dual guide RNA (and therefore of a CasX single guide RNA when the “activator” and the “targeter” are linked together, e.g., by intervening nucleotides). The crRNA has a 5′ region that anneals with the tracrRNA followed by the nucleotides of the targeting sequence. Thus, for example, a guide RNA (dgRNA or sgRNA) comprises a guide sequence and a duplex-forming segment of a crRNA, which can also be referred to as a crRNA repeat. A corresponding tracrRNA-like molecule (activator) also comprises a duplex-forming stretch of nucleotides that forms the other half of the dsRNA duplex of the protein-binding segment of the guide RNA. Thus, a targeter and an activator, as a corresponding pair, hybridize to form a dual guide RNA, referred to herein as a “dual-molecule gRNA”, a “dgRNA”, a “double-molecule guide RNA”, or a “two-molecule guide RNA”. Site-specific binding and/or cleavage of a target nucleic acid sequence (e.g., genomic DNA) by the CasX protein can occur at one or more locations (e.g., a sequence of a target nucleic acid) determined by base-pairing complementarity between the targeting sequence of the gRNA and the target nucleic acid sequence. Thus, for example, the gRNA of the disclosure have sequences complementarity to and therefore can hybridize with the target nucleic acid that is adjacent to a sequence complementary to a TC PAM motif or a PAM sequence, such as ATC, CTC, GTC, or TTC. Because the targeting sequence of a guide sequence hybridizes with a sequence of a target nucleic acid sequence, a targeter can be modified by a user to hybridize with a specific target nucleic acid sequence, so long as the location of the PAM sequence is considered. Thus, in some cases, the sequence of a targeter may be the complement to a non-naturally occurring sequence. In other cases, the sequence of a targeter may be a naturally-occurring sequence, derived from the complement to the gene sequence to be edited. In other embodiments, the activator and targeter of the gRNA are covalently linked to one another (rather than hybridizing to one another) and comprise a single molecule, referred to herein as a “single-molecule gRNA,” “single guide RNA”, a “single-molecule guide RNA,” a “one-molecule guide RNA”, or a “sgRNA”. In some embodiments, the sgRNA includes an “activator” or a “targeter” and thus can be an “activator-RNA” and a “targeter-RNA,” respectively. In some embodiments, the gRNA is a ribonucleic acid molecule (“gRNA”), and in other embodiments, the gRNA is a chimera, and comprises both DNA and RNA. As used herein, the term gRNA cover naturally-occurring molecules, as well as sequence variants (e.g. non-naturally occurring modified nucleotides).

[0185] Collectively, the assembled gRNAs of the disclosure comprise four distinct regions, or domains: the RNA triplex, the scaffold stem, the extended stem, and the targeting sequence that, in the embodiments of the disclosure, is specific for a target nucleic acid and is located on the 3′end of the gRNA. The RNA triplex, the scaffold stem, and the extended stem, together, are referred to as the “scaffold” of the gRNA (gRNA scaffold). The gRNA scaffolds of the disclosure can comprise RNA, or RNA and DNA.

[0186] b. RNA Triplex

[0187] In some embodiments of the guide NAs provided herein (including reference sgRNAs), there is a RNA triplex, and the RNA triplex comprises the sequence of a UUU-nX(˜4-15)-UUU (SEQ ID NO: 19) stem loop that ends with an AAAG (SEQ ID NO: 40786) after 2 intervening stem loops (the scaffold stem loop and the extended stem loop), forming a pseudoknot that may also extend past the triplex into a duplex pseudoknot. The UU-UUU-AAA (SEQ ID NO: 40787) sequence of the triplex forms as a nexus between the targeting sequence, scaffold stem, and extended stem. In exemplary CasX sgRNAs, the UUU-loop-UUU region is coded for first, then the scaffold stem loop, and then the extended stem loop, which is linked by the tetraloop, and then an AAAG (SEQ ID NO: 40786) closes off the triplex before becoming the targeting sequence.

[0188] c. Scaffold Stem Loop

[0189] In some embodiments of CasX sgRNAs of the disclosure, the triplex region is followed by the scaffold stem loop. The scaffold stem loop is a region of the gRNA that is bound by CasX protein (such as a CasX variant protein). In some embodiments, the scaffold stem loop is a fairly short and stable stem loop. In some cases, the scaffold stem loop does not tolerate many changes, and requires some form of an RNA bubble. In some embodiments, the scaffold stem is necessary for CasX sgRNA function. While it is perhaps analogous to the nexus stem of Cas9 as being a critical stem loop, the scaffold stem of a CasX sgRNA, in some embodiments, has a necessary bulge (RNA bubble) that is different from many other stem loops found in CRISPR/Cas systems. In some embodiments, the presence of this bulge is conserved across sgRNA that interact with different CasX proteins. An exemplary sequence of a scaffold stem loop sequence of a gRNA comprises the sequence CCAGCGACUAUGUCGUAUGG (SEQ ID NO: 14).

[0190] d. Extended Stem Loop

[0191] In some embodiments of the CasX sgRNAs of the disclosure, the scaffold stem loop is followed by the extended stem loop. In some embodiments, the extended stem comprises a synthetic tracr and crRNA fusion that is largely unbound by the CasX protein. In some embodiments, the extended stem loop can be highly malleable. In some embodiments, a single guide gRNA is made with a GAAA (SEQ ID NO: 40788) tetraloop linker or a GAGAAA (SEQ ID NO: 40789) linker between the tracr and crRNA in the extended stem loop. In some cases, the targeter and activator of a CasX sgRNA are linked to one another by intervening nucleotides and the linker can have a length of from 3 to 20 nucleotides. In some embodiments of the CasX sgRNAs of the disclosure, the extended stem is a large 32-bp loop that sits outside of the CasX protein in the ribonucleoprotein complex. An exemplary sequence of an extended stem loop sequence of a sgRNA comprises the sequence GCGCUUAUUUAUCGGAGAGAAAUCCGAUAAAUAAGAAGC (SEQ ID NO: 15).

[0192] e. Targeting Sequence

[0193] In some embodiments of the gRNAs of the disclosure, the extended stem loop is followed by a region that forms part of the triplex, and then the targeting sequence (or “spacer”) at the 3′ end of the gRNA. The targeting sequence targets the CasX ribonucleoprotein holo complex to a specific region of the target nucleic acid sequence of the gene to be modified. Thus, for example, gRNA targeting sequences of the disclosure have sequences complementarity to, and therefore can hybridize to, a portion of a gene in a target nucleic acid in a eukaryotic cell (e.g., a eukaryotic chromosome, chromosomal sequence, etc.) as a component of the RNP when the TC PAM motif or any one of the PAM sequences TTC, ATC, GTC, or CTC is located 1 nucleotide 5′ to the non-target strand sequence complementary to the target sequence. The targeting sequence of a gRNA can be modified so that the gRNA can target a desired sequence of any desired target nucleic acid sequence, so long as the PAM sequence location is taken into consideration. In some embodiments, the gRNA scaffold is 5′ of the targeting sequence, with the targeting sequence on the 3′ end of the gRNA. In some embodiments, the PAM motif sequence recognized by the nuclease of the RNP is TC. In other embodiments, the PAM sequence recognized by the nuclease of the RNP is NTC; i.e., ATC, CTC, GTC, or TTC.

[0194] In some embodiments, the disclosure provides a gRNA wherein the targeting sequence of the gRNA is complementary to a target nucleic acid sequence of a gene to be modified. In some embodiments, the targeting sequence of the gRNA is complementary to a target nucleic acid sequence of a gene comprising one or more mutations compared to a wild-type gene sequence for purposes of editing the sequence comprising the mutations with the CasX:gRNA systems of the disclosure. In such cases, the modification effected by the CasX:gRNA system can either correct or compensate for the mutation or can knock down or knock out expression of the mutant gene product. In other embodiments, the targeting sequence of the gRNA is complementary to a target nucleic acid sequence of a wild-type gene for purposes of editing the sequence to introduce a mutation with the CasX:gRNA systems of the disclosure in order to knock-down or knock-out the gene. In some embodiments, the targeting sequence of a gRNA is designed to be specific for an exon of the gene of the target nucleic acid. In other embodiments, the targeting sequence of a gRNA is designed to be specific for an intron of the gene of the target nucleic acid. In other embodiments, the targeting sequence of the gRNA is designed to be specific for an intron-exon junction of the gene of the target nucleic acid. In other embodiments, the targeting sequence of the gRNA is designed to be specific for a regulatory element of the gene of the target nucleic acid. In some embodiments, the targeting sequence of the gRNA is designed to be complementary to a sequence comprising one or more single nucleotide polymorphisms (SNPs) in a gene of the target nucleic acid. SNPs that are within the coding sequence or within non-coding sequences are both within the scope of the instant disclosure. In other embodiments, the targeting sequence of the gRNA is designed to be complementary to a sequence of an intergenic region of the gene of the target nucleic acid.

[0195] In some embodiments, the targeting sequence is specific for a regulatory element that regulates expression of the gene product. Such regulatory elements include, but are not limited to promoter regions, enhancer regions, intergenic regions, 5′ untranslated regions (5′ UTR), 3′ untranslated regions (3′ UTR), conserved elements, and regions comprising cis-regulatory elements. The promoter region is intended to encompass nucleotides within 5 kb of the initiation point of the encoding sequence or, in the case of gene enhancer elements or conserved elements, can be thousands of bp, hundreds of thousands of bp, or even millions of bp away from the encoding sequence of the gene of the target nucleic acid. In the foregoing, the targets are those in which the encoding gene of the target is intended to be knocked out or knocked down such that the gene product is not expressed or is expressed at a lower level in a cell.

[0196] In some embodiments, the targeting sequence of a gRNA incorporated into the AAV of any of the embodiments described herein has between 14 and 35 consecutive nucleotides. In some embodiments, the targeting sequence of a gRNA has between 10 and 30 consecutive nucleotides. In some embodiments, the targeting sequence has 10, 11, 12, 13, 14, 15, 16, 17, 18, 19, 20, 21, 22, 23, 24, 25, 26, 27, 28, 29, or 30 consecutive nucleotides. In some embodiments, the targeting sequence of the gRNA consists of 20 consecutive nucleotides. In some embodiments, the targeting sequence consists of 19 consecutive nucleotides. In some embodiments, the targeting sequence consists of 18 consecutive nucleotides. In some embodiments, the targeting sequence consists of 17 consecutive nucleotides. In some embodiments, the targeting sequence consists of 16 consecutive nucleotides. In some embodiments, the targeting sequence consists of 15 consecutive nucleotides. In some embodiments, the targeting sequence has 10, 11, 12, 13, 14, 15, 16, 17, 18, 19, 20, 21, 22, 23, 24, 25, 26, 27, 28, 29, or 30 consecutive nucleotides and the targeting sequence can comprise 0 to 5, 0 to 4, 0 to 3, or 0 to 2 mismatches relative to the target nucleic acid sequence and retain sufficient binding specificity such that the RNP comprising the gRNA comprising the targeting sequence can form a complementary bond with respect to the target nucleic acid to be modified. In some embodiments, the targeting sequence of a gRNA incorporated into the AAV of any of the embodiments described herein comprises a sequence selected from the group consisting of the sequences of SEQ ID NO: 41056-41776, as set forth in Table 27, or a sequence having at least about 80%, or at least 90%, or at least 95% thereto. In some embodiments, the targeting sequence of a gRNA incorporated into the AAV of any of the embodiments described herein consists of a sequence selected from the group consisting of the sequences of SEQ ID NO: 41056-41776, as set forth in Table 27.

[0197] In some embodiments, the CasX:gRNA system comprises a first gRNA and further comprises a second (and optionally a third, fourth, fifth, or more) gRNA, wherein the second gRNA or additional gRNA has a targeting sequence complementary to a different or overlapping portion of the target nucleic acid sequence compared to the targeting sequence of the first gRNA such that multiple points in the target nucleic acid are targeted, and for example, multiple breaks are introduced in the target nucleic acid by the CasX. It will be understood that in such cases, the second or additional gRNA is complexed with an additional copy of the CasX protein. By selection of the targeting sequences of the gRNA, defined regions of the target nucleic acid sequence bracketing a mutation can be modified or edited using the CasX:gRNA systems described herein, including facilitating the insertion of a donor template or the excision of the DNA between the cleavage sites in cases, for example, where mutant repeats occur or where removal of an exon comprising mutations nevertheless results in expression of a functional gene product.

[0198] f. gRNA Scaffolds

[0199] With the exception of the targeting sequence domain, the remaining components of the gRNA are referred to herein as the scaffold. In some embodiments, the gRNA scaffolds are derived from naturally occurring sequences, described below as reference gRNA. In other embodiments, the gRNA scaffolds are variants of reference gRNA wherein mutations, insertions, deletions or domain substitutions are introduced to confer desirable properties on the gRNA.

[0200] In some embodiments, a CasX reference gRNA comprises a sequence isolated or derived from Deltaproteobacter. In some embodiments, the sequence is a CasX tracrRNA sequence. Exemplary CasX reference tracrRNA sequences isolated or derived from Deltaproteobacter may include: ACAUCUGGCGCGUUUAUUCCAUUACUUUGGAGCCAGUCCCAGCGACUAUGUCGU AUGGACGAAGCGCUUAUUUAUCGGAGA (SEQ ID NO: 22) and ACAUCUGGCGCGUUUAUUCCAUUACUUUGGAGCCAGUCCCAGCGACUAUGUCGU AUGGACGAAGCGCUUAUUUAUCGG (SEQ ID NO: 23). Exemplary crRNA sequences isolated or derived from Deltaproteobacter may comprise a sequence of CCGAUAAGUAAAACGCAUCAAAG (SEQ ID NO: 24). In some embodiments, a CasX reference gRNA comprises a sequence identical to a sequence isolated or derived from Deltaproteobacter.

[0201] In some embodiments, a CasX reference guide RNA comprises a sequence isolated or derived from Planctomycetes. In some embodiments, the sequence is a CasX tracrRNA sequence. Exemplary CasX reference tracrRNA sequences isolated or derived from Planctomycetes may include: UACUGGCGCUUUUAUCUCAUUACUUUGAGAGCCAUCACCAGCGACUAUGUCGUA UGGGUAAAGCGCUUAUUUAUCGGAGA (SEQ ID NO: 25) and UACUGGCGCUUUUAUCUCAUUACUUUGAGAGCCAUCACCAGCGACUAUGUCGUA UGGGUAAAGCGCUUAUUUAUCGG (SEQ ID NO: 26). Exemplary crRNA sequences isolated or derived from Planctomycetes may comprise a sequence of UCUCCGAUAAAUAAGAAGCAUCAAAG (SEQ ID NO: 27). In some embodiments, a CasX reference gRNA comprises a sequence identical to a sequence isolated or derived from Planctomycetes.

[0202] In some embodiments, a CasX reference gRNA comprises a sequence isolated or derived from Candidatus Sungbacteria. In some embodiments, the sequence is a CasX tracrRNA sequence. Exemplary CasX reference tracrRNA sequences isolated or derived from Candidatus Sungbacteria may comprise sequences of: GUUUACACACUCCCUCUCAUAGGGU (SEQ ID NO: 28), GUUUACACACUCCCUCUCAUGAGGU (SEQ ID NO: 11), UUUUACAUACCCCCUCUCAUGGGAU (SEQ ID NO: 12) and GUUUACACACUCCCUCUCAUGGGGG (SEQ ID NO: 13). In some embodiments, a CasX reference guide RNA comprises a sequence identical to a sequence isolated or derived from Candidatus Sungbacteria.

[0203] Table 1 provides the sequences of reference gRNA tracr, cr and scaffold sequences. In some embodiments, the disclosure provides gRNA variant sequences wherein the gRNA has a scaffold comprising a sequence having at least one nucleotide modification relative to a reference gRNA sequence having a sequence of any one of SEQ ID NOS: 4-16 of Table 1. It will be understood that in those embodiments wherein a vector comprises a DNA encoding sequence for a gRNA, or where a gRNA is a chimera of RNA and DNA, that thymine (T) bases can be substituted for the uracil (U) bases of any of the gRNA sequence embodiments described herein.

TABLE 1
Reference gRNA tracr and scaffold sequences

| SEQ ID NO. | Nucleotide Sequence |
|---|---|
| 4 | ACAUCUGGCGCGUUUAUUCCAUUACUUUGGAGCCAGUCCCAGCGACUAUGUCGUAUGGACGAAG |
| | CGCUUAUUUAUCGGAGAGAAACCGAUAAGUAAAACGCAUCAAAG |
| 5 | UACUGGCGCUUUUAUCUCAUUACUUUGAGAGCCAUCACCAGCGACUAUGUCGUAUGGGUAAAGC |
| | GCUUAUUUAUCGGAGAGAAAUCCGAUAAAUAAGAAGCAUCAAAG |
| 6 | ACAUCUGGCGCGUUUAUUCCAUUACUUUGGAGCCAGUCCCAGCGACUAUGUCGUAUGGACGAAG |
| | CGCUUAUUUAUCGGAGA |
| 7 | ACAUCUGGCGCGUUUAUUCCAUUACUUUGGAGCCAGUCCCAGCGACUAUGUCGUAUGGACGAAG |
| | CGCUUAUUUAUCGG |
| 8 | UACUGGCGCUUUUAUCUCAUUACUUUGAGAGCCAUCACCAGCGACUAUGUCGUAUGGGUAAAGC |
| | GCUUAUUUAUCGGAGA |
| 9 | UACUGGCGCUUUUAUCUCAUUACUUUGAGAGCCAUCACCAGCGACUAUGUCGUAUGGGUAAAGC |
| | GCUUAUUUAUCGG |
| 10 | GUUUACACACUCCCUCUCAUAGGGU |
| 11 | GUUUACACACUCCCUCUCAUGAGGU |
| 12 | UUUUACAUACCCCCUCUCAUGGGAU |
| 13 | GUUUACACACUCCCUCUCAUGGGGG |
| 14 | CCAGCGACUAUGUCGUAUGG |
| 15 | GCGCUUAUUUAUCGGAGAGAAAUCCGAUAAAUAAGAAGC |
| 16 | GGCGCUUUUAUCUCAUUACUUUGAGAGCCAUCACCAGCGACUAUGUCGUAUGGGUAAAGCGCUU |
| | AUUUAUCGGA |

[0204] g. gRNA Variants

[0205] In another aspect, the disclosure relates to gRNA variants, which comprise one or more modifications relative to a reference gRNA scaffold or are derived from another gRNA variant. As used herein, “scaffold” refers to all parts to the gRNA necessary for gRNA function with the exception of the spacer sequence.

[0206] In some embodiments, a gRNA variant comprises one or more nucleotide substitutions, insertions, deletions, or swapped or replaced regions relative to a reference gRNA sequence of the disclosure. In some embodiments, a mutation can occur in any region of a reference gRNA scaffold to produce a gRNA variant. In some embodiments, the scaffold of the gRNA variant sequence has at least 20%, at least 30%, at least 40%, at least 50%, at least 60%, or at least 70%, at least 80%, at least 85%, at least about 90%, at least about 95%, at least about 96%, at least about 97%, at least about 98%, or at least about 99% identity to the sequence of SEQ ID NO: 4 or SEQ ID NO: 5. In other embodiments, a gRNA variant comprises one or more nucleotide substitutions, insertions, deletions, or swapped or replaced regions relative to a gRNA variant sequence of the disclosure. In some embodiments, the scaffold of the gRNA variant sequence has at least 50%, at least 60%, or at least 70%, at least 80%, at least 85%, at least about 90%, at least about 95%, at least about 96%, at least about 97%, at least about 98%, or at least about 99% identity to the sequence of SEQ ID NO: 2238 or SEQ ID NO: 2239.

[0207] In some embodiments, a gRNA variant comprises one or more nucleotide changes within one or more regions of the reference gRNA scaffold that improve a characteristic of the reference gRNA. Exemplary regions include the RNA triplex, the pseudoknot, the scaffold stem loop, and the extended stem loop. In some cases, the variant scaffold stem further comprises a bubble. In other cases, the variant scaffold further comprises a triplex loop region. In still other cases, the variant scaffold further comprises a 5′ unstructured region. In some embodiments, the gRNA variant scaffold comprises a scaffold stem loop having at least 60% sequence identity, at least 70% sequence identity, at least 80% sequence identity, at least 90% sequence identity, at least 95% sequence identity, or at least 99% sequence identity to SEQ ID NO: 14. In some embodiments, the gRNA variant scaffold comprises a scaffold stem loop having at least 60% sequence identity to SEQ ID NO: 14. In other embodiments, the gRNA variant comprises a scaffold stem loop having the sequence of CCAGCGACUAUGUCGUAGUGG (SEQ ID NO: 32). In other embodiments, the disclosure provides a gRNA scaffold comprising, relative to SEQ ID NO: 5, a C18G substitution, a G55 insertion, a U1 deletion, and a modified extended stem loop in which the original 6 nt loop and 13 most-loop-proximal base pairs (32 nucleotides total) are replaced by a Uvsx hairpin (4 nt loop and 5 loop-proximal base pairs; 14 nucleotides total) and the loop-distal base of the extended stem was converted to a fully base-paired stem contiguous with the new Uvsx hairpin by deletion of the A99 and substitution of G65U. In the foregoing embodiment, the gRNA scaffold 174 comprises the sequence ACUGGCGCUUUUAUCUGAUUACUUUGAGAGCCAUCACCAGCGACUAUGUCGUAG UGGGUAAAGCUCCCUCUUCGGAGGGAGCAUCAAAG (SEQ ID NO: 2238).

[0208] All gRNA variants that have one or more improved characteristics, or add one or more new functions when the variant gRNA is compared to a reference gRNA described herein, are envisaged as within the scope of the disclosure. A representative example of such a gRNA variant is guide 174 (SEQ ID NO: 2238), the design of which is described in the Examples, and guide 235 (SEQ ID NO: 39987). In some embodiments, the gRNA variant adds a new function to the RNP comprising the gRNA variant. In some embodiments, the gRNA variant has an improved characteristic selected from: increased stability; increased transcription of the gRNA; increased resistance to nuclease activity; increased folding rate of the gRNA; decreased side product formation during folding; increased productive folding; increased binding affinity to a CasX protein; increased binding affinity to a target nucleic acid when complexed with a CasX protein; increased gene editing when complexed with a CasX protein; increased specificity of editing of the target nucleic acid when complexed with a CasX protein; decreased off-target editing when complexed with a CasX protein; and increased ability to utilize a greater spectrum of one or more PAM sequences, including ATC, CTC, GTC, or TTC, in the editing of target nucleic acid when complexed with a CasX protein, and any combination thereof. In some cases, the one or more of the improved characteristics of the gRNA variant is at least about 1.1 to about 100,000-fold increased relative to the reference gRNA of SEQ ID NO: 4 or SEQ ID NO: 5, or to gRNA variant 174 or 175. In other cases, the one or more improved characteristics of the gRNA variant is at least about 1.1, at least about 10, at least about 100, at least about 1000, at least about 10,000, at least about 100,000-fold or more increased relative to the reference gRNA of SEQ ID NO: 4 or SEQ ID NO: 5, or to gRNA variant 174 or 175. In other cases, the one or more of the improved characteristics of the gRNA variant is about 1.1 to 100,00-fold, about 1.1 to 10,00-fold, about 1.1 to 1,000-fold, about 1.1 to 500-fold, about 1.1 to 100-fold, about 1.1 to 50-fold, about 1.1 to 20-fold, about 10 to 100,00-fold, about 10 to 10,00-fold, about 10 to 1,000-fold, about 10 to 500-fold, about 10 to 100-fold, about 10 to 50-fold, about 10 to 20-fold, about 2 to 70-fold, about 2 to 50-fold, about 2 to 30-fold, about 2 to 20-fold, about 2 to 10-fold, about 5 to 50-fold, about 5 to 30-fold, about 5 to 10-fold, about 100 to 100,00-fold, about 100 to 10,00-fold, about 100 to 1,000-fold, about 100 to 500-fold, about 500 to 100,00-fold, about 500 to 10,00-fold, about 500 to 1,000-fold, about 500 to 750-fold, about 1,000 to 100,00-fold, about 10,000 to 100,00-fold, about 20 to 500-fold, about 20 to 250-fold, about 20 to 200-fold, about 20 to 100-fold, about 20 to 50-fold, about 50 to 10,000-fold, about 50 to 1,000-fold, about 50 to 500-fold, about 50 to 200-fold, or about 50 to 100-fold, increased relative to the reference gRNA of SEQ ID NO: 4 or SEQ ID NO: 5, or to gRNA variant 174 or 175. In other cases, the one or more improved characteristics of the gRNA variant is about 1.1-fold, 1.2-fold, 1.3-fold, 1.4-fold, 1.5-fold, 1.6-fold, 1.7-fold, 1.8-fold, 1.9-fold, 2-fold, 3-fold, 4-fold, 5-fold, 6-fold, 7-fold, 8-fold, 9-fold, 10-fold, 11-fold, 12-fold, 13-fold, 14-fold, 15-fold, 16-fold, 17-fold, 18-fold, 19-fold, 20-fold, 25-fold, 30-fold, 40-fold, 45-fold, 50-fold, 55-fold, 60-fold, 70-fold, 80-fold, 90-fold, 100-fold, 110-fold, 120-fold, 130-fold, 140-fold, 150-fold, 160-fold, 170-fold, 180-fold, 190-fold, 200-fold, 210-fold, 220-fold, 230-fold, 240-fold, 250-fold, 260-fold, 270-fold, 280-fold, 290-fold, 300-fold, 310-fold, 320-fold, 330-fold, 340-fold, 350-fold, 360-fold, 370-fold, 380-fold, 390-fold, 400-fold, 425-fold, 450-fold, 475-fold, or 500-fold increased relative to the reference gRNA of SEQ ID NO: 4 or SEQ ID NO: 5, or to gRNA variant 174 or 175.

[0209] In some embodiments, a gRNA variant can be created by subjecting a reference gRNA or a gRNA variant to a one or more mutagenesis methods, such as the mutagenesis methods described herein, below, which may include Deep Mutational Evolution (DME), deep mutational scanning (DMS), error prone PCR, cassette mutagenesis, random mutagenesis, staggered extension PCR, gene shuffling, or domain swapping, in order to generate the gRNA variants of the disclosure. The activity of reference gRNA or gRNA variant may be used as a benchmark against which the activity of gRNA variants are compared, thereby measuring improvements in function of gRNA variants. In other embodiments, a reference gRNA or gRNA variant may be subjected to one or more deliberate, targeted mutations, substitutions, or domain swaps in order to produce a gRNA variant, for example a rationally designed variant. Exemplary gRNA variants produced by such methods are described in the Examples and representative sequences of gRNA scaffolds are presented in Table 2.

[0210] In some embodiments, the gRNA variant comprises one or more modifications compared to a reference guide nucleic acid scaffold sequence or a gRNA variant scaffold sequence, wherein the one or more modification is selected from: at least one nucleotide substitution in a region of the gRNA, at least one nucleotide deletion in a region of the gRNA; at least one nucleotide insertion in a region of the gRNA; a substitution of all or a portion of a region of the gRNA; a deletion of all or a portion of a region of the gRNA; or any combination of the foregoing. In some cases, the modification is a substitution of 1 to 15 consecutive or non-consecutive nucleotides in the gRNA in one or more regions. In other cases, the modification is a deletion of 1 to 10 consecutive or non-consecutive nucleotides in the gRNA in one or more regions. In other cases, the modification is an insertion of 1 to 10 consecutive or non-consecutive nucleotides in the gRNA in one or more regions. In other cases, the modification is a substitution of the scaffold stem loop or the extended stem loop with an RNA stem loop sequence from a heterologous RNA source with proximal 5′ and 3′ ends. In some cases, a gRNA variant of the disclosure comprises two or more modifications in one region relative to a gRNA. In other cases, a gRNA variant of the disclosure comprises modifications in two or more regions. In other cases, a gRNA variant comprises any combination of the foregoing modifications described in this paragraph. In some embodiments, exemplary modifications of gRNA of the disclosure include the modifications of Table 2.

[0211] In some embodiments, a 5′ G is added to a gRNA variant sequence, relative to a reference gRNA, for expression in vivo, as transcription from a U6 promoter is more efficient and more consistent with regard to the start site when the +1 nucleotide is a G. In other embodiments, two 5′ Gs are added to generate a gRNA variant sequence for in vitro transcription to increase production efficiency, as T7 polymerase strongly prefers a G in the +1 position and a purine in the +2 position. In some cases, the 5′ G bases are added to the reference scaffolds of Table 1. In other cases, the 5′ G bases are added to the variant scaffolds of Table 2.

[0212] Table 2 provides exemplary gRNA variant scaffold sequences. In some embodiments, the gRNA variant scaffold comprises any one of the sequences SEQ ID NOS: 2101-2285, 39981-40026, 40913-40958, or 41817 as listed in Table 2, or a sequence having at least about 50%, at least about 60%, at least about 70%, at least about 80%, at least about 90%, at least about 95%, at least about 95%, at least about 96%, at least about 97%, at least about 98%, at least about 99% sequence identity thereto. In some embodiments, the gRNA variant scaffold comprises any one of the sequences SEQ ID NOS: 2238-2285, 39981-40026, 40913-40958, or 41817, or a sequence having at least about 50%, at least about 60, at least about 70%, at least about 80%, at least about 90%, at least about 95%, at least about 95%, at least about 96%, at least about 97%, at least about 98%, at least about 99% sequence identity thereto. In some embodiments, the gRNA variant scaffold comprises any one of the sequences SEQ ID NOS: 2281-2285, 39981-40026, 40913-40958, or 41817, or a sequence having at least about 50%, at least about 60%, at least about 70%, at least about 80%, at least about 90%, at least about 95%, at least about 95%, at least about 96%, at least about 97%, at least about 98%, at least about 99% sequence identity thereto. It will be understood that in those embodiments wherein a vector comprises a DNA encoding sequence for a gRNA, or where a gRNA is a chimera of RNA and DNA, that thymine (T) bases can be substituted for the uracil (U) bases of any of the gRNA sequence embodiments described herein.

TABLE 2
Exemplary gRNA Scaffold Sequences

| SEQ ID | | |
|---|---|---|
| NO: | Name | NUCLEOTIDE SEQUENCE OR DESCRIPTION OF MODIFICATION |
| 2101 | ND | phage replication stable |
| 2102 | ND | Kissing loop_b1 |
| 2103 | ND | Kissing loop_a |
| 2104 | ND | 32: uvsX hairpin |
| 2105 | ND | PP7 |
| 2106 | ND | 64: trip mut, extended stem truncation |
| 2107 | ND | hyperstable tetraloop |
| 2108 | ND | C18G |
| 2109 | ND | U17G |
| 2110 | ND | CUUCGG loop |
| 2111 | ND | MS2 |
| 2112 | ND | −1, A2G, −78, G77U |
| 2113 | ND | QB |
| 2114 | ND | 45,44 hairpin |
| 2115 | ND | U1A |
| 2116 | ND | A14C, U17G |
| 2117 | ND | CUUCGG loop modified |
| 2118 | ND | Kissing loop_b2 |
| 2119 | ND | −76:78, −83:87 |
| 2120 | ND | −4 |
| 2121 | ND | extended stem truncation |
| 2122 | ND | C55 |
| 2123 | ND | trip mut |
| 2124 | ND | −76:78 |
| 2125 | ND | −1:5 |
| 2126 | ND | 83:87 |
| 2127 | ND | = +G28, A82U, −84, |
| 2128 | ND | = +51U |
| 2129 | ND | −1:4, +G5A, +G86, |
| 2130 | ND | = +A94 |
| 2131 | ND | = +G72 |
| 2132 | ND | shorten front, CUUCGG loop modified. extend extended |
| 2133 | ND | A14C |
| 2134 | ND | −1:3, +G3 |
| 2135 | ND | = +C45, +U46 |
| 2136 | ND | CUUCGG loop modified, fun start |
| 2137 | ND | −93:94 |
| 2138 | ND | = +U45 |
| 2139 | ND | −69, −94 |
| 2140 | ND | −94 |
| 2141 | ND | modified CUUCGG, minus U in 1st triplex |
| 2142 | ND | −1:4, +C4, A14C, U17G, +G72, −76:78, −83:87 |
| 2143 | ND | U1C, −73 |
| 2144 | ND | Scaffold uuCG, stem uuCG. Stem swap, t shorten |
| 2145 | ND | Scaffold uuCG, stem uuCG. Stem swap |
| 2146 | ND | = +G60 |
| 2147 | ND | no stem Scaffold uuCG |
| 2148 | ND | no stem Scaffold uuCG, fun start |
| 2149 | ND | Scaffold uuCG, stem uuCG, fun start |
| 2150 | ND | Pseudoknots |
| 2151 | ND | Scaffold uuCG, stem uuCG |
| 2152 | ND | Scaffold uuCG, stem uuCG, no start |
| 2153 | ND | Scaffold uuCG |
| 2154 | ND | = +GCUC36 |
| 2155 | ND | G quadriplex telomere basket+ ends |
| 2156 | ND | G quadriplex M3q |
| 2157 | ND | G quadriplex telomere basket no ends |
| 2158 | ND | 45, 44 hairpin (old version) |
| 2159 | ND | Sarcin-ricin loop |
| 2160 | ND | uvsX, C18G |
| 2161 | ND | truncated stem loop, C18G, trip mut (U10C) |
| 2162 | ND | short phage rep, C18G |
| 2163 | ND | phage rep loop, C18G |
| 2164 | ND | = +G18, stacked onto 64 |
| 2165 | ND | truncated stem loop, C18G, −1 A2G |
| 2166 | ND | phage rep loop, C18G, trip mut (U10C) |
| 2167 | ND | short phage rep, C18G, trip mut (U10C) |
| 2168 | ND | uvsX, trip mut (U10C) |
| 2169 | ND | truncated stem loop |
| 2170 | ND | = +A17, stacked onto 64 |
| 2171 | ND | 3′ HDV genomic ribozyme |
| 2172 | ND | phage rep loop, trip mut (U10C) |
| 2173 | ND | −79:80 |
| 2174 | ND | short phage rep, trip mut (U10C) |
| 2175 | ND | extra truncated stem loop |
| 2176 | ND | U17G, C18G |
| 2177 | ND | short phage rep |
| 2178 | ND | uvsX, C18G, −1 A2G |
| 2179 | ND | uvsX, C18G, trip mut (U10C), −1 A2G, HDV −99 G65U |
| 2180 | ND | 3′ HDV antigenomic ribozyme |
| 2181 | ND | uvsX, C18G, trip mut (U10C), −1 A2G, HDV AA(98:99)C |
| 2182 | ND | 3′ HDV ribozyme (Lior Nissim, Timothy Lu) |
| 2183 | ND | TAC(1:3)GA, stacked onto 64 |
| 2184 | ND | uvsX, −1 A2G |
| 2185 | ND | truncated stem loop, C18G, trip mut (U10C), −1 A2G, HDV −99 G65U |
| 2186 | ND | short phage rep, C18G, trip mut (U10C), −1 A2G, HDV −99 G65U |
| 2187 | ND | 3′ sTRSV WT viral Hammerhead ribozyme |
| 2188 | ND | short phage rep, C18G, −1 A2G |
| 2189 | ND | short phage rep, C18G, trip mut (U10C), −1 A2G, 3′ genomic HDV |
| 2190 | ND | phage rep loop, C18G, trip mut (U10C), −1 A2G, HDV −99 G65U |
| 2191 | ND | 3′ HDV ribozyme (Owen Ryan, Jamie Cate) |
| 2192 | ND | phage rep loop, C18G, −1 A2G |
| 2193 | ND | 0.14 |
| 2194 | ND | −78, G77U |
| 2195 | ND | ND |
| 2196 | ND | short phage rep, −1 A2G |
| 2197 | ND | truncated stem loop, C18G, trip mut (U10C), −1 A2G |
| 2198 | ND | −1, A2G |
| 2199 | ND | truncated stem loop, trip mut (U10C), −1 A2G |
| 2200 | ND | uvsX, C18G, trip mut (U10C), −1 A2G |
| 2201 | ND | phage rep loop, −1 A2G |
| 2202 | ND | phage rep loop, trip mut (U10C), −1 A2G |
| 2203 | ND | phage rep loop, C18G, trip mut (U10C), −1 A2G |
| 2204 | ND | truncated stem loop, C18G |
| 2205 | ND | uvsX, trip mut (U10C), −1 A2G |
| 2206 | ND | truncated stem loop, −1 A2G |
| 2207 | ND | short phage rep, trip mut (U10C), −1 A2G |
| 2208 | ND | 5′HDV ribozyme (Owen Ryan, Jamie Cate) |
| 2209 | ND | 5′HDV genomic ribozyme |
| 2210 | ND | truncated stem loop, C18G, trip mut (U10C), −1 A2G, HDV AA(98:99)C |
| 2211 | ND | 5′env25 pistol ribozyme (with an added CUUCGG loop) |
| 2212 | ND | 5′HDV antigenomic ribozyme |
| 2213 | ND | 3′ Hammerhead ribozyme (Lior Nissim, Timothy Lu) guide scaffold scar |
| 2214 | ND | = +A27, stacked onto 64 |
| 2215 | ND | 5′Hammerhead ribozyme (Lior Nissim, Timothy Lu) smaller scar |
| 2216 | ND | phage rep loop, C18G, trip mut (U10C), −1 A2G, HDV AA(98:99)C |
| 2217 | ND | −27, stacked onto 64 |
| 2218 | ND | 3′ Hatchet |
| 2219 | ND | 3′ Hammerhead ribozyme (Lior Nissim, Timothy Lu) |
| 2220 | ND | 5′ Hatchet |
| 2221 | ND | 5′ HDV ribozyme (Lior Nissim, Timothy Lu) |
| 2222 | ND | 5′ Hammerhead ribozyme (Lior Nissim, Timothy Lu) |
| 2223 | ND | 3′ HH15 Minimal Hammerhead ribozyme |
| 2224 | ND | 5′ RBMX recruiting motif |
| 2225 | ND | 3′ Hammerhead ribozyme (Lior Nissim, Timothy Lu) smaller scar |
| 2226 | ND | 3′ env25 pistol ribozyme (with an added CUUCGG loop) |
| 2227 | ND | 3′ Env-9 Twister |
| 2228 | ND | = +AUUAUCUCAUUACU25 |
| 2229 | ND | 5′ Env-9 Twister |
| 2230 | ND | 3′ Twisted Sister 1 |
| 2231 | ND | no stem |
| 2232 | ND | 5′ HH15 Minimal Hammerhead ribozyme |
| 2233 | ND | 5′ Hammerhead ribozyme (Lior Nissim, Timothy Lu) guide scaffold scar |
| 2234 | ND | 5′ Twisted Sister 1 |
| 2235 | ND | 5′ sTRSV WT viral Hammerhead ribozyme |
| 2236 | ND | 148: = +G55, stacked onto 64 |
| 2237 | ND | 158: 103+148(+G55) −99, G65U |
| 2238 | 174 | ACUGGCGCUUUUAUCUGAUUACUUUGAGAGCCAUCACCAGCGACUAUGUCGUAG |
| | | UGGGUAAAGCUCCCUCUUCGGAGGGAGCAUCAAAG |
| 2239 | 175 | ACUGGCGCCUUUAUCUCAUUACUUUGAGAGCCAUCACCAGCGACUAUGUCGUAU |
| | | GGGUAAAGCGCUUACGGACUUCGGUCCGUAAGAAGCAUCAAAG |
| 2240 | 176 | GCUGGCGCUUUUAUCUGAUUACUUUGAGAGCCAUCACCAGCGACUAUGUCGUAG |
| | | UGGGUAAAGCUCCCUCUUCGGAGGGAGCAUCAAAG |
| 2241 | 177 | ACUGGCGCUUUUAUCUGAUUACUUUGAGAGCCAUCACCAGCGACUAUGUCGUAU |
| | | GGGUAAAGCUCCCUCUUCGGAGGGAGCAUCAAAG |
| 2242 | 181 | ACUGGCGCCUUUAUCUGAUUACUUUGAGAGCCAUCACCAGCGACUAUGUCGUAU |
| | | GGGUAAAGCGCUUACGGACUUCGGUCCGUAAGAAGCAUCAAAG |
| 2243 | 182 | ACUGGCGCUUUUAUCUGAUUACUUUGAGAGCCAUCACCAGCGACUAUGUCGUAU |
| | | GGGUAAAGCGCUUACGGACUUCGGUCCGUAAGAAGCAUCAAAG |
| 2244 | 183 | ACUGGCGCUUUUAUCUGAUUACUUUGAGAGCCAUCACCAGCGACUAUGUCGUAG |
| | | UGGGUAAAGCGCUUACGGACUUCGGUCCGUAAGAAGCAUCAAAG |
| 2245 | 184 | ACUGGCGCUUUUAUCUGAUUACUUUGAGAGCCAUCACCAGCGACUAUGUCGUAU |
| | | UGGGUAAAGCUCCCUCUUCGGAGGGAGCAUCAAAG |
| 2246 | 185 | ACUGGCGCUUUUAUCUGAUUACUUUGAGAGCCAUCACCAGCGACUAUGUCGUAU |
| | | UGGGUAAAGCGCUUACGGACUUCGGUCCGUAAGAAGCAUCAAAG |
| 2247 | 186 | ACUGGCGCCUUUAUCAUCAUUACUUUGAGAGCCAUCACCAGCGACUAUGUCGUA |
| | | UGGGUAAAGCGCUUACGGACUUCGGUCCGUAAGAAGCAUCAAAG |
| 2248 | 187 | ACUGGCGCUUUUAUCUGAUUACUUUGAGAGCCAUCACCAGCGACUAUGUCGUAG |
| | | UGGGUAAAGCGCCCUCUUCGGAGGGAAGCAUCAAAG |
| 2249 | 188 | ACUGGCGCUUUUAUCUGAUUACUUUGAGAGCCAUCACCAGCGACUAUGUCGUAG |
| | | UGGGUAAAGCUCACAUGAGGAUCACCCAUGUGAGCAUCAAAG |
| 2250 | 189 | ACUGGCACUUUUACCUGAUUACUUUGAGAGCCAACACCAGCGACUAUGUCGUAG |
| | | UGGGUAAAGCUCCCUCUUCGGAGGGAGCAUCAAAG |
| 2251 | 190 | ACUGGCACUUUUAUCUGAUUACUUUGAGAGCCAUCACCAGCGACUAUGUCGUAG |
| | | UGGGUAAAGCUCCCUCUUCGGAGGGAGCAUCAAAG |
| 2252 | 191 | ACUGGCCCUUUUAUCUGAUUACUUUGAGAGCCAUCACCAGCGACUAUGUCGUAG |
| | | UGGGUAAAGCUCCCUCUUCGGAGGGAGCAUCAAAG |
| 2253 | 192 | ACUGGCGCUUUUACCUGAUUACUUUGAGAGCCAUCACCAGCGACUAUGUCGUAG |
| | | UGGGUAAAGCUCCCUCUUCGGAGGGAGCAUCAAAG |
| 2254 | 193 | ACUGGCGCUUUUAUCUGAUUACUUUGAGAGCCAACACCAGCGACUAUGUCGUAG |
| | | UGGGUAAAGCUCCCUCUUCGGAGGGAGCAUCAAAG |
| 2255 | 195 | ACUGGCACCUUUACCUGAUUACUUUGAGAGCCAACACCAGCGACUAUGUCGUAU |
| | | GGGUAAAGCGCUUACGGACUUCGGUCCGUAAGAAGCAUCAAAG |
| 2256 | 196 | ACUGGCACCUUUAUCUGAUUACUUUGAGAGCCAUCACCAGCGACUAUGUCGUAU |
| | | GGGUAAAGCGCUUACGGACUUCGGUCCGUAAGAAGCAUCAAAG |
| 2257 | 197 | ACUGGCCCCUUUAUCUGAUUACUUUGAGAGCCAUCACCAGCGACUAUGUCGUAU |
| | | GGGUAAAGCGCUUACGGACUUCGGUCCGUAAGAAGCAUCAAAG |
| 2258 | 198 | ACUGGCGCCUUUAUCUGAUUACUUUGAGAGCCAACACCAGCGACUAUGUCGUAU |
| | | GGGUAAAGCGCUUACGGACUUCGGUCCGUAAGAAGCAUCAAAG |
| 2259 | 199 | GCUGGCGCUUUUAUCUGAUUACUUUGAGAGCCAUCACCAGCGACUAUGUCGUAG |
| | | UGGGUAAAGCUCCCUCUUCGGAGGGAGCAUCAAAG |
| 2260 | 200 | GACUGGCGCUUUUAUCUGAUUACUUUGAGAGCCAUCACCAGCGACUAUGUCGUA |
| | | GUGGGUAAAGCUCCCUCUUCGGAGGGAGCAUCAAAG |
| 2261 | 201 | ACUGGCGCCUUUAUCUGAUUACUUUGGAGAGCCAUCACCAGCGACUAUGUCGUA |
| | | GUGGGUAAAGCUCCCUCUUCGGAGGGAGCAUCAAAG |
| 2262 | 202 | ACUGGCGCAUUUAUCUGAUUACUUUGUGAGCCAUCACCAGCGACUAUGUCGUAG |
| | | UGGGUAAAGCUCCCUCUUCGGAGGGAGCAUCAAAG |
| 2263 | 203 | ACUGGCGCCUUUAUCUGAUUACUUUGAGAGCCAUCACCAGCGACUAUGUCGUAG |
| | | UGGGUAAAGCUCCCUCUUCGGAGGGAGCAUCAAAG |
| 2264 | 204 | ACUGGCGCUUUUAUCUGAUUACUUUGGAGAGCCAUCACCAGCGACUAUGUCGUA |
| | | GUGGGUAAAGCUCCCUCUUCGGAGGGAGCAUCAAAG |
| 2265 | 205 | ACUGGCGCAUUUAUCUGAUUACUUUGAGAGCCAUCACCAGCGACUAUGUCGUAG |
| | | UGGGUAAAGCUCCCUCUUCGGAGGGAGCAUCAAAG |
| 2266 | 206 | ACUGGCGCUUUUAUCUGAUUACUUUGUGAGCCAUCACCAGCGACUAUGUCGUAG |
| | | UGGGUAAAGCUCCCUCUUCGGAGGGAGCAUCAAAG |
| 2267 | 207 | ACUGGCGCUUUUAUUCUGAUUACUUUGAGAGCCAUCACCAGCGACUAUGUCGUA |
| | | GUGGGUAAAGCUCCCUCUUCGGAGGGAGCAUCAAAG |
| 2268 | 208 | ACGGCGCUUUUAUCUGAUUACUUUGAGAGCCAUCACCAGCGACUAUGUCGUAGU |
| | | GGGUAAAGCUCCCUCUUCGGAGGGAGCAUCAAAG |
| 2269 | 209 | ACUGGCGCUUUUAUAUGAUUACUUUGAGAGCCAUCACCAGCGACUAUGUCGUAG |
| | | UGGGUAAAGCUCCCUCUUCGGAGGGAGCAUCAAAG |
| 2270 | 210 | ACUGGCGCUUUUAUCUUGAUUACUUUGAGAGCCAUCACCAGCGACUAUGUCGUA |
| | | GUGGGUAAAGCUCCCUCUUCGGAGGGAGCAUCAAAG |
| 2271 | 211 | ACUGGCGCUUUUAUCUGAUUACUUUGAGAGCCAGCACCAGCGACUAUGUCGUAG |
| | | UGGGUAAAGCUCCCUCUUCGGAGGGAGCAUCAAAG |
| 2272 | 212 | ACUGGCGCUGUUAUCUGAUUACUUCGAGAGCCAUCACCAGCGACUAUGUCGUAG |
| | | UGGGUAAAGCUCCCUCUUCGGAGGGAGCAUCGAAG |
| 2273 | 213 | ACUGGCGCUCUUAUCUGAUUACUUCGAGAGCCAUCACCAGCGACUAUGUCGUAG |
| | | UGGGUAAAGCUCCCUCUUCGGAGGGAGCAUCGAAG |
| 2274 | 214 | ACUGGCGCUUGUAUCUGAUUACUCUGAGAGCCAUCACCAGCGACUAUGUCGUAG |
| | | UGGGUAAAGCUCCCUCUUCGGAGGGAGCAUCAGAG |
| 2275 | 215 | ACUGGCGCUUCUAUCUGAUUACUCUGAGAGCCAUCACCAGCGACUAUGUCGUAG |
| | | UGGGUAAAGCUCCCUCUUCGGAGGGAGCAUCAGAG |
| 2276 | 216 | ACUGGCGCUUUGAUCUGAUUACCUUGAGAGCCAUCACCAGCGACUAUGUCGUAG |
| | | UGGGUAAAGCUCCCUCUUCGGAGGGAGCAUCAAGG |
| 2277 | 217 | ACUGGCGCUUUCAUCUGAUUACCUUGAGAGCCAUCACCAGCGACUAUGUCGUAG |
| | | UGGGUAAAGCUCCCUCUUCGGAGGGAGCAUCAAGG |
| 2278 | 218 | ACUGGCGCUGUUAUCUGAUUACUUUGAGAGCCAUCACCAGCGACUAUGUCGUAG |
| | | UGGGUAAAGCUCCCUCUUCGGAGGGAGCAUCAAAG |
| 2279 | 219 | ACUGGCGCUUUUAUCUGAUUACUUUGAGAGCCAUCACCAGCGACUAUGUCGUAG |
| | | UGGGUAAAGCUCCCUCUUCGGAGGGAGCAUCGAAG |
| 2280 | 220 | ACUGGCGCUUUUAUCUGAUUACUUCGAGAGCCAUCACCAGCGACUAUGUCGUAG |
| | | UGGGUAAAGCUCCCUCUUCGGAGGGAGCAUCAAAG |
| 2281 | 221 | ACUGGCACUUCUAUCUGAUUACUCUGAGAGCCAUCACCAGCGACUAUGUCGUAU |
| | | GGGUAAAGCCGCUUACGGACUUCGGUCCGUAAGAGGCAUCAGAG |
| 2282 | 222 | ACUGGCACUUCUAUCUGAUUACUCUGAGAGCCAUCACCAGCGACUAUGUCGUAG |
| | | UGGGUAAAGCUCCCUCUUCGGAGGGAGCAUCAGAG |
| 2283 | 223 | ACUGGCACCUUUAUCUGAUUACUUUGAGAGCCAUCACCAGCGACUAUGUCGUAU |
| | | GGGUAAAGCCGCUUACGGACUUCGGUCCGUAAGAGGCAUCAAAG |
| 2284 | 224 | ACUGGCACUUGUAUCUGAUUACUCUGAGAGCCAUCACCAGCGACUAUGUCGUAU |
| | | GGGUAAAGCCGCUUACGGACUUCGGUCCGUAAGAGGCAUCAGAG |
| 2285 | 225 | ACUGGCACUUGUAUCUGAUUACUCUGAGAGCCAUCACCAGCGACUAUGUCGUAG |
| | | UGGGUAAAGCUCCCUCUUCGGAGGGAGCAUCAGAG |
| 41817 | 226 | ACUGGCGCUUUUAUCUGAUUACUUUGAGAGCCAUCACCAGCGACUAUGUCGUAG |
| | | UGGGUAAAGCUGCACUAUGGGCGCAGCGUCAAUGACGCUGACGGUACAGGCCAG |
| | | ACAAUUAUUGUCUGGUAUAGUGCAGCAUCAAAG |
| 39981 | 229 | ACUGGCGCUUUUAUCUGAUUACUUUGAGAGCCAUCACCAGCGACUAUGUCGUAG |
| | | UGGGUAAAGCUCCCCGUACACCAUUAGGGUACGGGGAGCAUCAAAGCGAGACGU |
| | | AAUUACGUCUCGUUUUUUUU |
| 39982 | 230 | ACUGGCACUUCUAUCUGAUUACUCUGAGAGCCAUCACCAGCGACUAUGUCGUAU |
| | | GGGUAAAGCGCUUACGGACUUCGGUCCGUAAGAAGCAUCAGAG |
| 39983 | 231 | ACUGGCGCUUCUAUCUGAUUACUCUGAGAGCCAUCACCAGCGACUAUGUCGUAU |
| | | GGGUAAAGCCGCUUACGGACUUCGGUCCGUAAGAGGCAUCAGAG |
| 39984 | 232 | ACUGGCACUUCUAUCUGAUUACUCUGAGCGCCAUCACCAGCGACUAUGUCGUAU |
| | | GGGUAAAGCCGCUUACGGACUUCGGUCCGUAAGAGGCAUCAGAG |
| 39985 | 233 | ACUGGCGCUUCUAUCUGAUUACUCUGAGCGCCAUCACCAGCGACUAUGUCGUAU |
| | | GGGUAAAGCCGCUUACGGACUUCGGUCCGUAAGAGGCAUCAGAG |
| 39986 | 234 | ACUGGCGCUUCUAUCUGAUUACUCUGAGCGCCAUCACCAGCGACUAUGUCGUAU |
| | | GGGUAAAGCGCCUUACGGACUUCGGUCCGUAAGGAGCAUCAGAG |
| 39987 | 235 | ACUGGCGCUUCUAUCUGAUUACUCUGAGCGCCAUCACCAGCGACUAUGUCGUAG |
| | | UGGGUAAAGCCGCUUACGGACUUCGGUCCGUAAGAGGCAUCAGAG |
| 39988 | 236 | ACGGGACUUUCUAUCUGAUUACUCUGAAGUCCCUCACCAGCGACUAUGUCGUAU |
| | | GGGUAAAGCCGCUUACGGACUUCGGUCCGUAAGAGGCAUCAGAG |
| 39989 | 237 | ACCUGUAGUUCUAUCUGAUUACUCUGACUACAGUCACCAGCGACUAUGUCGUAU |
| | | GGGUAAAGCCGCUUACGGACUUCGGUCCGUAAGAGGCAUCAGAG |
| 39990 | 238 | ACUGGCGCUUUUAUCUGAUUACUUUGAGAGCCAUCACCAGCGACUAUGUCGUAG |
| | | UGGGUAAAGCUGCACGGUGGGCGCAGCUUCGGCUGACGGUACACCGUGCAGCAU |
| | | CAAAG |
| 39991 | 239 | ACUGGCGCUUUUAUCUGAUUACUUUGAGAGCCAUCACCAGCGACUAUGUCGUAG |
| | | UGGGUAAAGCUGCACGGUGGGCGCAGCUUCGGCUGACGGUACACCGGUGGGCGC |
| | | AGCUUCGGCUGACGGUACACCGUGCAGCAUCAAAG |
| 39992 | 240 | ACUGGCGCUUUUAUCUGAUUACUUUGAGAGCCAUCACCAGCGACUAUGUCGUAG |
| | | UGGGUAAAGCUGCACGGUGGGCGCAGCUUCGGCUGACGGUACACCGGUGGGCGC |
| | | AGCUUCGGCUGACGGUACACCGGUGGGCGCAGCUUCGGCUGACGGUACACCGUG |
| | | CAGCAUCAAAG |
| 39993 | 241 | ACUGGCGCUUUUAUCUGAUUACUUUGAGAGCCAUCACCAGCGACUAUGUCGUAG |
| | | UGGGUAAAGCUGCACGGUGGGCGCAGCUUCGGCUGACGGUACACCGGUGGGCGC |
| | | AGCUUCGGCUGACGGUACACCGGUGGGCGCAGCUUCGGCUGACGGUACACCGGU |
| | | GGGCGCAGCUUCGGCUGACGGUACACCGUGCAGCAUCAAAG |
| 39994 | 242 | ACUGGCGCUUUUAUCUGAUUACUUUGAGAGCCAUCACCAGCGACUAUGUCGUAG |
| | | UGGGUAAAGCUGCACGGUGGGCGCAGCUUCGGCUGACGGUACACCGGUGGGCGC |
| | | AGCUUCGGCUGACGGUACACCGGUGGGCGCAGCUUCGGCUGACGGUACACCGGU |
| | | GGGCGCAGCUUCGGCUGACGGUACACCGGUGGGCGCAGCUUCGGCUGACGGUAC |
| | | ACCGUGCAGCAUCAAAG |
| 39995 | 243 | ACUGGCGCUUUUAUCUGAUUACUUUGAGAGCCAUCACCAGCGACUAUGUCGUAG |
| | | UGGGUAAAGCUGCACCUAGCGGAGGCUAGGUGCAGCAUCAAAG |
| 39996 | 244 | ACUGGCGCUUUUAUCUGAUUACUUUGAGAGCCAUCACCAGCGACUAUGUCGUAG |
| | | UGGGUAAAGCUGCACCUCGGCUUGCUGAAGCGCGCACGGCAAGAGGCGAGGUGC |
| | | AGCAUCAAAG |
| 39997 | 245 | ACUGGCGCUUUUAUCUGAUUACUUUGAGAGCCAUCACCAGCGACUAUGUCGUAG |
| | | UGGGUAAAGCUGCACCUCUCUCGACGCAGGACUCGGCUUGCUGAAGCGCGCACG |
| | | GCAAGAGGCGAGGGGCGGCGACUGGUGAGUACGCCAAAAAUUUUGACUAGCGGA |
| | | GGCUAGAAGGAGAGAGGUGCAGCAUCAAAG |
| 39998 | 246 | ACUGGCGCUUUUAUCUGAUUACUUUGAGAGCCAUCACCAGCGACUAUGUCGUAG |
| | | UGGGUAAAGCUGCACGGUGCCCGUCUGUUGUGUCGAGAGACGCCAAAAAUUUUG |
| | | ACUAGCGGAGGCUAGAAGGAGAGAGAUGGGUGCCGUGCAGCAUCAAAG |
| 39999 | 247 | ACUGGCGCUUUUAUCUGAUUACUUUGAGAGCCAUCACCAGCGACUAUGUCGUAG |
| | | UGGGUAAAGCUGCACAUGGAGAGGAGAUGUGCAGCAUCAAAG |
| 40000 | 248 | ACUGGCGCUUUUAUCUGAUUACUUUGAGAGCCAUCACCAGCGACUAUGUCGUAG |
| | | UGGGUAAAGCUGCACAUGGAGAUGUGCAGCAUCAAAG |
| 40001 | 249 | ACUGGCGCUUUUAUCUGAUUACUUUGAGAGCCAUCACCAGCGACUAUGUCGUAG |
| | | UGGGUAAAGCUUGGGCGCAGCGUCAAUGACGCUGACGGUACAAGCAUCAAAG |
| 40002 | 250 | ACUGGCGCUUUUAUCUGAUUACUUUGAGAGCCAUCACCAGCGACUAUGUCGUAG |
| | | UGGGUAAAGCUGCACUAUGGGCGCAGCGUCAAUGACGCUGACGGUACAGGCCAC |
| | | AUGAGGAUCACCCAUGUGGUAUAGUGCAGCAUCAAAG |
| 40003 | 251 | ACUGGCGCUUUUAUCUGAUUACUUUGAGAGCCAUCACCAGCGACUAUGUCGUAG |
| | | UGGGUAAAGCUGCACUAUGGGCGCAGCUCAUGAGGAUCACCCAUGAGCUGACGG |
| | | UACAGGCCACAUGAGGAUCACCCAUGUGGUAUAGUGCAGCAUCAAAG |
| 40004 | 252 | ACUGGCGCUUUUAUCUGAUUACUUUGAGAGCCAUCACCAGCGACUAUGUCGUAG |
| | | UGGGUAAAGCUGCACUAUGGGCGCAGCGUCAAUGACGCUGACGGUACAGGCCAC |
| | | AUGGCAGUCGUAACGACGCGGGUGGUAUAGUGCAGCAUCAAAG |
| 40005 | 253 | ACUGGCGCUUUUAUCUGAUUACUUUGAGAGCCAUCACCAGCGACUAUGUCGUAG |
| | | UGGGUAAAGCUGCACUAUGGGCGCAGCAAACAUGGCAGUCCUAAGGACGCGGGU |
| | | UUUGCUGACGGUACAGGCCACAUGGCAGUCGUAACGACGCGGGUGGUAUAGUGC |
| | | AGCAUCAAAG |
| 40006 | 254 | ACUGGCGCUUUUAUCUGAUUACUUUGAGAGCCAUCACCAGCGACUAUGUCGUAG |
| | | UGGGUAAAGCUGCACUAUGGGCGCAGACAUGGCAGUCGUAACGACGCGGGUCUG |
| | | ACGGUACAGGCCACAUGAGGAUCACCCAUGUGGUAUAGUGCAGCAUCAAAG |
| 40007 | 255 | ACUGGCGCUUUUAUCUGAUUACUUUGAGAGCCAUCACCAGCGACUAUGUCGUAG |
| | | UGGGUAAAGCUGCACUAAGGAGUUUAUAUGGAAACCCUUAGUGCAGCAUCAAAG |
| 40008 | 256 | ACUGGCGCUUUUAUCUGAUUACUUUGAGAGCCAUCACCAGCGACUAUGUCGUAG |
| | | UGGGUAAAGCUCAGGAAGCACUAUGGGCGCAGCGUCAAUGACGCUGACGGUACA |
| | | GGCCAGACAAUUAUUGUCUGGUAUAGUGCAGCAGCAGAACAAUUUGCUGAGGGC |
| | | UAUUGAGGCGCAACAGCAUCUGUUGCAACUCACAGUCUGGGGCAUCAAGCAGCU |
| | | CCAGGCAAGAAUCCUGAGCAUCAAAG |
| 40009 | 257 | ACUGGCGCUUUUAUCUGAUUACUUUGAGAGCCAUCACCAGCGACUAUGUCGUAG |
| | | UGGGUAAAGCUGCACGCCCUGAAGAAGGGCGUGCAGCAUCAAAG |
| 40010 | 258 | ACUGGCGCUUUUAUCUGAUUACUUUGAGAGCCAUCACCAGCGACUAUGUCGUAG |
| | | UGGGUAAAGCUGCACGGCUCGUGUAGCUCAUUAGCUCCGAGCCGUGCAGCAUCA |
| | | AAG |
| 40011 | 259 | ACUGGCGCUUUUAUCUGAUUACUUUGAGAGCCAUCACCAGCGACUAUGUCGUAG |
| | | UGGGUAAAGCUGCACCCGUGUGCAUCCGCAGUGUCGGAUCCACGGGUGCAGCAU |
| | | CAAAG |
| 40012 | 260 | ACUGGCGCUUUUAUCUGAUUACUUUGAGAGCCAUCACCAGCGACUAUGUCGUAG |
| | | UGGGUAAAGCUGCACGGAAUCCAUUGCACUCCGGAUUUCACUAGGUGCAGCAUC |
| | | AAAG |
| 40013 | 261 | ACUGGCGCUUUUAUCUGAUUACUUUGAGAGCCAUCACCAGCGACUAUGUCGUAG |
| | | UGGGUAAAGCUGCACAUGCAUGUCUAAGACAGCAUGUGCAGCAUCAAAG |
| 40014 | 262 | ACUGGCGCUUUUAUCUGAUUACUUUGAGAGCCAUCACCAGCGACUAUGUCGUAG |
| | | UGGGUAAAGCUGCACAAAACAUAAGGAAAACCUAUGUUGUGCAGCAUCAAAG |
| 40015 | 263 | ACUGGCGCUUCUAUCUGAUUACUCUGAGCGCCAUCACCAGCGACUAUGUCGUAG |
| | | UGGGUAAAGCCGCUUACGGACUAUGGGCGCAGCGUCAAUGACGCUGACGGUACA |
| | | GGCCAGACAAUUAUUGUCUGGUAUAGUCCGUAAGAGGCAUCAGAG |
| 40016 | 264 | ACUGGCGCUUCUAUCUGAUUACUCUGAGCGCCAUCACCAGCGACUAUGUCGUAG |
| | | UGGGUAAAGCCGCUUACGGGUGGGCGCAGCGUCAAUGACGCUGACGGUACAGGC |
| | | CAGACAAUUAUUGUCUGGUACCCGUAAGAGGCAUCAGAG |
| 40017 | 265 | ACUGGCGCUUCUAUCUGAUUACUCUGAGCGCCAUCACCAGCGACUAUGUCGUAG |
| | | UGGGUAAAGCCGCUUACGGUAUGGGCGCAGCGUCAAUGACGCUGACGGUACAGG |
| | | CCACAUGAGGAUCACCCAUGUGGUAUACCGUAAGAGGCAUCAGAG |
| 40018 | 266 | ACUGGCGCUUUUAUCUGAUUACUUUGAGAGCCAUCACCAGCGACUAUGUCGUAG |
| | | UGGGUAAAGCUCCCUAUGGGCGCAGCGUCAAUGACGCUGACGGUACAGGCCACA |
| | | UGAGGAUCACCCAUGUGGUAUAGGGAGCAUCAAAG |
| 40019 | 267 | ACUGGCGCUUCUAUCUGAUUACUCUGAGCGCCAUCACCAGCGACUAUGUCGUAG |
| | | UGGGUAAAGCCGCUUACGGUAUGGGCGCAGCUCAUGAGGAUCACCCAUGAGCUG |
| | | ACGGUACAGGCCACAUGAGGAUCACCCAUGUGGUAUACCGUAAGAGGCAUCAGA |
| | | G |
| 40020 | 268 | ACUGGCGCUUUUAUCUGAUUACUUUGAGAGCCAUCACCAGCGACUAUGUCGUAG |
| | | UGGGUAAAGCUCCCUAUGGGCGCAGCUCAUGAGGAUCACCCAUGAGCUGACGGU |
| | | ACAGGCCACAUGAGGAUCACCCAUGUGGUAUAGGGAGCAUCAAAG |
| 40021 | 269 | ACUGGCGCUUCUAUCUGAUUACUCUGAGCGCCAUCACCAGCGACUAUGUCGUAG |
| | | UGGGUAAAGCCGCUUACGGUAUGGGCGCAGCGUCAAUGACGCUGACGGUACAGG |
| | | CCACAUGGCAGUCGUAACGACGCGGGUGGUAUACCGUAAGAGGCAUCAGAG |
| 40022 | 270 | ACUGGCGCUUUUAUCUGAUUACUUUGAGAGCCAUCACCAGCGACUAUGUCGUAG |
| | | UGGGUAAAGCUCCCUAUGGGCGCAGCGUCAAUGACGCUGACGGUACAGGCCACA |
| | | UGGCAGUCGUAACGACGCGGGUGGUAUAGGGAGCAUCAAAG |
| 40023 | 271 | ACUGGCGCUUCUAUCUGAUUACUCUGAGCGCCAUCACCAGCGACUAUGUCGUAG |
| | | UGGGUAAAGCCGCUUACGGUAUGGGCGCAGCAAACAUGGCAGUCCUAAGGACGC |
| | | GGGUUUUGCUGACGGUACAGGCCACAUGGCAGUCGUAACGACGCGGGUGGUAUA |
| | | CCGUAAGAGGCAUCAGAG |
| 40024 | 272 | ACUGGCGCUUUUAUCUGAUUACUUUGAGAGCCAUCACCAGCGACUAUGUCGUAG |
| | | UGGGUAAAGCUCCCUAUGGGCGCAGCAAACAUGGCAGUCCUAAGGACGCGGGUU |
| | | UUGCUGACGGUACAGGCCACAUGGCAGUCGUAACGACGCGGGUGGUAUAGGGAG |
| | | CAUCAAAG |
| 40025 | 273 | ACUGGCGCUUCUAUCUGAUUACUCUGAGCGCCAUCACCAGCGACUAUGUCGUAG |
| | | UGGGUAAAGCCGCUUACGGUAUGGGCGCAGACAUGGCAGUCGUAACGACGCGGG |
| | | UCUGACGGUACAGGCCACAUGAGGAUCACCCAUGUGGUAUACCGUAAGAGGCAU |
| | | CAGAG |
| 40026 | 274 | ACUGGCGCUUUUAUCUGAUUACUUUGAGAGCCAUCACCAGCGACUAUGUCGUAG |
| | | UGGGUAAAGCUCCCUAUGGGCGCAGACAUGGCAGUCGUAACGACGCGGGUCUGA |
| | | CGGUACAGGCCACAUGAGGAUCACCCAUGUGGUAUAGGGAGCAUCAAAG |
| 40913 | 275 | ACUGGCGCUUUUAUCUGAUUACUUUGAGAGCCAUCACCAGCGACUAUGU |
| | | CGUAGUGGGUAAAGCUGCACUAUGGGCGCAGCACCUGAGGAUCACCCAG |
| | | GUGCUGACGGUACAGGCCACCUGAGGAUCACCCAGGUGGUAUAGUGCAG |
| | | CAUCAAAG |
| 40914 | 276 | ACUGGCGCUUUUAUCUGAUUACUUUGAGAGCCAUCACCAGCGACUAUGU |
| | | CGUAGUGGGUAAAGCUGCACUAUGGGCGCAGCGCAUGAGGAUCACCCAU |
| | | GCGCUGACGGUACAGGCCGCAUGAGGAUCACCCAUGCGGUAUAGUGCAG |
| | | CAUCAAAG |
| 40915 | 277 | ACUGGCGCUUUUAUCUGAUUACUUUGAGAGCCAUCACCAGCGACUAUGU |
| | | CGUAGUGGGUAAAGCUGCACUAUGGGCGCAGCGCCUGAGGAUCACCCAG |
| | | GCGCUGACGGUACAGGCCGCCUGAGGAUCACCCAGGCGGUAUAGUGCAG |
| | | CAUCAAAG |
| 40916 | 278 | ACUGGCGCUUUUAUCUGAUUACUUUGAGAGCCAUCACCAGCGACUAUGU |
| | | CGUAGUGGGUAAAGCUGCACUAUGGGCGCAGCGCCUGAGCAUCAGCCAG |
| | | GCGCUGACGGUACAGGCCGCCUGAGCAUCAGCCAGGCGGUAUAGUGCAG |
| | | CAUCAAAG |
| 40917 | 279 | ACUGGCGCUUUUAUCUGAUUACUUUGAGAGCCAUCACCAGCGACUAUGU |
| | | CGUAGUGGGUAAAGCUGCACUAUGGGCGCAGCACAUGAGCAUCAGCCAU |
| | | GUGCUGACGGUACAGGCCACAUGAGCAUCAGCCAUGUGGUAUAGUGCAG |
| | | CAUCAAAG |
| 40918 | 280 | ACUGGCGCUUUUAUCUGAUUACUUUGAGAGCCAUCACCAGCGACUAUGU |
| | | CGUAGUGGGUAAAGCUGCACUAUGGGCGCAGCACAUGAGUAUCAACCAU |
| | | GUGCUGACGGUACAGGCCACAUGAGUAUCAACCAUGUGGUAUAGUGCAG |
| | | CAUCAAAG |
| 40919 | 281 | ACUGGCGCUUUUAUCUGAUUACUUUGAGAGCCAUCACCAGCGACUAUGU |
| | | CGUAGUGGGUAAAGCUGCACUAUGGGCGCAGCACAUGAGAAUCAGCCAU |
| | | GUGCUGACGGUACAGGCCACAUGAGAAUCAGCCAUGUGGUAUAGUGCAG |
| | | CAUCAAAG |
| 40920 | 282 | ACUGGCGCUUUUAUCUGAUUACUUUGAGAGCCAUCACCAGCGACUAUGU |
| | | CGUAGUGGGUAAAGCUGCACUAUGGGCGCAGCCCUUGAGGAUCACCCAU |
| | | GUGCUGACGGUACAGGCCCCUUGAGGAUCACCCAUGUGGUAUAGUGCAG |
| | | CAUCAAAG |
| 40921 | 283 | ACUGGCGCUUUUAUCUGAUUACUUUGAGAGCCAUCACCAGCGACUAUGU |
| | | CGUAGUGGGUAAAGCUGCACUAUGGGCGCAGCACUUGAGGAUCACCCAU |
| | | GUGCUGACGGUACAGGCCACUUGAGGAUCACCCAUGUGGUAUAGUGCAG |
| | | CAUCAAAG |
| 40922 | 284 | ACUGGCGCUUUUAUCUGAUUACUUUGAGAGCCAUCACCAGCGACUAUGU |
| | | CGUAGUGGGUAAAGCUGCACUAUGGGCGCAGCACCUGAGGAUCACCCAU |
| | | GUGCUGACGGUACAGGCCACCUGAGGAUCACCCAUGUGGUAUAGUGCAG |
| | | CAUCAAAG |
| 40923 | 285 | ACUGGCGCUUUUAUCUGAUUACUUUGAGAGCCAUCACCAGCGACUAUGUCGUAG |
| | | UGGGUAAAGCUGCACUAUGGGCGCAGCACAUGAGGAUCACCUAUGUGCUGACGG |
| | | UACAGGCCACAUGAGGAUCACCUAUGUGGUAUAGUGCAGCAUCAAAG |
| 40924 | 286 | ACUGGCGCUUUUAUCUGAUUACUUUGAGAGCCAUCACCAGCGACUAUGUCGUAG |
| | | UGGGUAAAGCUGCACUAUGGGCGCAGCACAUUAGGAUCACCAAUGUGCUGACGG |
| | | UACAGGCCACAUUAGGAUCACCAAUGUGGUAUAGUGCAGCAUCAAAG |
| 40925 | 287 | ACUGGCGCUUUUAUCUGAUUACUUUGAGAGCCAUCACCAGCGACUAUGUCGUAG |
| | | UGGGUAAAGCUGCACUAUGGGCGCAGCACAUUAGGAUCACCGAUGUGCUGACGG |
| | | UACAGGCCACAUUAGGAUCACCGAUGUGGUAUAGUGCAGCAUCAAAG |
| 40926 | 288 | ACUGGCGCUUUUAUCUGAUUACUUUGAGAGCCAUCACCAGCGACUAUGUCGUAG |
| | | UGGGUAAAGCUGCACUAUGGGCGCAGCACAUUAGGAUCACCUAUGUGCUGACGG |
| | | UACAGGCCACAUUAGGAUCACCUAUGUGGUAUAGUGCAGCAUCAAAG |
| 40927 | 289 | ACUGGCGCUUUUAUCUGAUUACUUUGAGAGCCAUCACCAGCGACUAUGUCGUAG |
| | | UGGGUAAAGCUGCACUAUGGGCGCAGCACAUGAGGAUUACCCAUGUGCUGACGG |
| | | UACAGGCCACAUGAGGAUUACCCAUGUGGUAUAGUGCAGCAUCAAAG |
| 40928 | 290 | ACUGGCGCUUUUAUCUGAUUACUUUGAGAGCCAUCACCAGCGACUAUGUCGUAG |
| | | UGGGUAAAGCUGCACUAUGGGCGCAGCACAUGAGGAUAACCCAUGUGCUGACGG |
| | | UACAGGCCACAUGAGGAUAACCCAUGUGGUAUAGUGCAGCAUCAAAG |
| 40929 | 291 | ACUGGCGCUUUUAUCUGAUUACUUUGAGAGCCAUCACCAGCGACUAUGUCGUAG |
| | | UGGGUAAAGCUGCACUAUGGGCGCAGCACAUGAGGAUGACCCAUGUGCUGACGG |
| | | UACAGGCCACAUGAGGAUGACCCAUGUGGUAUAGUGCAGCAUCAAAG |
| 40930 | 292 | ACUGGCGCUUUUAUCUGAUUACUUUGAGAGCCAUCACCAGCGACUAUGUCGUAG |
| | | UGGGUAAAGCUGCACUAUGGGCGCAGCACAUGAGGACCACCCAUGUGCUGACGG |
| | | UACAGGCCACAUGAGGACCACCCAUGUGGUAUAGUGCAGCAUCAAAG |
| 40931 | 293 | ACUGGCGCUUUUAUCUGAUUACUUUGAGAGCCAUCACCAGCGACUAUGUCGUAG |
| | | UGGGUAAAGCUGCACUAUGGGCGCAGCAGAUGAGGAUCACCCAUGGGCUGACGG |
| | | UACAGGCCAGAUGAGGAUCACCCAUGGGGUAUAGUGCAGCAUCAAAG |
| 40932 | 294 | ACUGGCGCUUUUAUCUGAUUACUUUGAGAGCCAUCACCAGCGACUAUGUCGUAG |
| | | UGGGUAAAGCUGCACUAUGGGCGCAGCACAUGGGGAUCACCCAUGUGCUGACGG |
| | | UACAGGCCACAUGGGGAUCACCCAUGUGGUAUAGUGCAGCAUCAAAG |
| 40933 | 295 | ACUGGCGCUUUUAUCUGAUUACUUUGAGAGCCAUCACCAGCGACUAUGUCGUAG |
| | | UGGGUAAAGCUGCACUAUGGGCGCAGCACAUGAGGAUCACCCAUGUGCUGACGG |
| | | UACAGGCCACAUGAGGAUCACCCAUGUGGUAUAGUGCAGCAUCAAAG |
| 40934 | 296 | ACUGGCGCUUUUAUCUGAUUACUUUGAGAGCCAUCACCAGCGACUAUGUCGUAG |
| | | UGGGUAAAGCUCACCUGAGGAUCACCCAGGUGAGCAUCAAAG |
| 40935 | 297 | ACUGGCGCUUUUAUCUGAUUACUUUGAGAGCCAUCACCAGCGACUAUGUCGUAG |
| | | UGGGUAAAGCUCGCAUGAGGAUCACCCAUGCGAGCAUCAAAG |
| 40936 | 298 | ACUGGCGCUUUUAUCUGAUUACUUUGAGAGCCAUCACCAGCGACUAUGUCGUAG |
| | | UGGGUAAAGCUCGCCUGAGGAUCACCCAGGCGAGCAUCAAAG |
| 40937 | 299 | ACUGGCGCUUUUAUCUGAUUACUUUGAGAGCCAUCACCAGCGACUAUGUCGUAG |
| | | UGGGUAAAGCUCGCCUGAGCAUCAGCCAGGCGAGCAUCAAAG |
| 40938 | 300 | ACUGGCGCUUUUAUCUGAUUACUUUGAGAGCCAUCACCAGCGACUAUGUCGUAG |
| | | UGGGUAAAGCUCACAUGAGCAUCAGCCAUGUGAGCAUCAAAG |
| 40939 | 301 | ACUGGCGCUUUUAUCUGAUUACUUUGAGAGCCAUCACCAGCGACUAUGUCGUAG |
| | | UGGGUAAAGCUCACAUGAGUAUCAACCAUGUGAGCAUCAAAG |
| 40940 | 302 | ACUGGCGCUUUUAUCUGAUUACUUUGAGAGCCAUCACCAGCGACUAUGUCGUAG |
| | | UGGGUAAAGCUCACAUGAGAAUCAGCCAUGUGAGCAUCAAAG |
| 40941 | 303 | ACUGGCGCUUUUAUCUGAUUACUUUGAGAGCCAUCACCAGCGACUAUGUCGUAG |
| | | UGGGUAAAGCUCCCUUGAGGAUCACCCAUGUGAGCAUCAAAG |
| 40942 | 304 | ACUGGCGCUUUUAUCUGAUUACUUUGAGAGCCAUCACCAGCGACUAUGUCGUAG |
| | | UGGGUAAAGCUCACUUGAGGAUCACCCAUGUGAGCAUCAAAG |
| 40943 | 305 | ACUGGCGCUUUUAUCUGAUUACUUUGAGAGCCAUCACCAGCGACUAUGUCGUAG |
| | | UGGGUAAAGCUCACCUGAGGAUCACCCAUGUGAGCAUCAAAG |
| 40944 | 306 | ACUGGCGCUUUUAUCUGAUUACUUUGAGAGCCAUCACCAGCGACUAUGUCGUAG |
| | | UGGGUAAAGCUCACAUGAGGAUCACCUAUGUGAGCAUCAAAG |
| 40945 | 307 | ACUGGCGCUUUUAUCUGAUUACUUUGAGAGCCAUCACCAGCGACUAUGUCGUAG |
| | | UGGGUAAAGCUCACAUUAGGAUCACCAAUGUGAGCAUCAAAG |
| 40946 | 308 | ACUGGCGCUUUUAUCUGAUUACUUUGAGAGCCAUCACCAGCGACUAUGUCGUAG |
| | | UGGGUAAAGCUCACAUUAGGAUCACCGAUGUGAGCAUCAAAG |
| 40947 | 309 | ACUGGCGCUUUUAUCUGAUUACUUUGAGAGCCAUCACCAGCGACUAUGUCGUAG |
| | | UGGGUAAAGCUCACAUUAGGAUCACCUAUGUGAGCAUCAAAG |
| 40948 | 310 | ACUGGCGCUUUUAUCUGAUUACUUUGAGAGCCAUCACCAGCGACUAUGUCGUAG |
| | | UGGGUAAAGCUCACAUGAGGAUUACCCAUGUGAGCAUCAAAG |
| 40949 | 311 | ACUGGCGCUUUUAUCUGAUUACUUUGAGAGCCAUCACCAGCGACUAUGUCGUAG |
| | | UGGGUAAAGCUCACAUGAGGAUAACCCAUGUGAGCAUCAAAG |
| 40950 | 312 | ACUGGCGCUUUUAUCUGAUUACUUUGAGAGCCAUCACCAGCGACUAUGUCGUAG |
| | | UGGGUAAAGCUCACAUGAGGAUGACCCAUGUGAGCAUCAAAG |
| 40951 | 313 | ACUGGCGCUUUUAUCUGAUUACUUUGAGAGCCAUCACCAGCGACUAUGUCGUAG |
| | | UGGGUAAAGCUCACAUGAGGACCACCCAUGUGAGCAUCAAAG |
| 40952 | 314 | ACUGGCGCUUUUAUCUGAUUACUUUGAGAGCCAUCACCAGCGACUAUGUCGUAG |
| | | UGGGUAAAGCUCAGAUGAGGAUCACCCAUGGGAGCAUCAAAG |
| 40953 | 315 | ACUGGCGCUUUUAUCUGAUUACUUUGAGAGCCAUCACCAGCGACUAUGUCGUAG |
| | | UGGGUAAAGCUCACAUGGGGAUCACCCAUGUGAGCAUCAAAG |
| 40954 | 317 | ACUGGCGCUUCUAUCUGAUUACUCUGAGCGCCAUCACCAGCGACUAUGUCGUAG |
| | | UGGGUAAAGCUCACAUGAGGAUCACCCAUGUGAGCAUCAGAG |
| 40955 | 318 | ACUGGCGCUUCUAUCUGAUUACUCUGAGCGCCAUCACCAGCGACUAUGUCGUAG |
| | | UGGGUAAAGCUGCACUAUGGGCGCAGCGUCAAUGACGCUGACGGUACAGGCCAC |
| | | AUGAGGAUCACCCAUGUGGUAUAGUGCAGCAUCAGAG |
| 40956 | 319 | ACUGGCGCUUCUAUCUGAUUACUCUGAGCGCCAUCACCAGCGACUAUGUCGUAG |
| | | UGGGUAAAGCUGCACUAUGGGCGCAGCUCAUGAGGAUCACCCAUGAGCUGACGG |
| | | UACAGGCCACAUGAGGAUCACCCAUGUGGUAUAGUGCAGCAUCAGAG |
| 40957 | 320 | ACUGGCGCUUCUAUCUGAUUACUCUGAGCGCCAUCACCAGCGACUAUGUCGUAG |
| | | UGGGUAAAGCUGCACUAUGGGCGCAGACAUGGCAGUCGUAACGACGCGGGUCUG |
| | | ACGGUACAGGCCACAUGAGGAUCACCCAUGUGGUAUAGUGCAGCAUCAGAG |
| 40958 | 321 | ACUGGCGCUUUUAUCUGAUUACUUUGAGAGCCAUCACCAGCGACUAUGUCGUAG |
| | | UGGGUAAAGCUGCACUAUGGGGCCACAUGAGGAUCACCCAUGUGGUGUACAGCG |
| | | CAGCGUCAAUGACGCUGACGAUAGUGCAGCAUCAAAG |

[0213] In some embodiments, a sgRNA variant comprises one or more additional modifications to a sequence of SEQ ID NO:2238, SEQ ID NO:2239, SEQ ID NO:2240, SEQ ID NO:2241, SEQ ID NO:2243, SEQ ID NO:2256, SEQ ID NO:2274, SEQ ID NO:2275, SEQ ID NO:2279, SEQ ID NO:2281, SEQ ID NO: 2285, SEQ ID NO: 39984, SEQ ID NO: 39987, or SEQ ID NO: 40003 of Table 2.

[0214] In some embodiments of the gRNA variants of the disclosure, the gRNA variant comprises at least one modification compared to the reference guide scaffold of SEQ ID NO:5, wherein the at least one modification is selected from one or more of: (a) a C18G substitution in the triplex loop; (b) a G55 insertion in the stem bubble; (c) a U1 deletion; (d) a modification of the extended stem loop wherein (i) a 6 nt loop and 13 loop-proximal base pairs are replaced by a Uvsx hairpin; and (ii) a deletion of A99 and a substitution of G65U that results in a loop-distal base that is fully base-paired.

[0215] In some embodiments, a gRNA variant comprises an exogenous stem loop having a long non-coding RNA (lncRNA). As used herein, a lncRNA refers to a non-coding RNA that is longer than approximately 200 bp in length. In some embodiments, the 5′ and 3′ ends of the exogenous stem loop are base paired; i.e., interact to form a region of duplex RNA. In some embodiments, the 5′ and 3′ ends of the exogenous stem loop are base paired, and one or more regions between the 5′ and 3′ ends of the exogenous stem loop are not base paired, forming the loop.

[0216] In some embodiments, the disclosure provide gRNA variants with nucleotide modifications relative to reference gRNA having: (a) substitution of 1 to 15 consecutive or non-consecutive nucleotides in the gRNA variant in one or more regions; (b) a deletion of 1 to 10 consecutive or non-consecutive nucleotides in the gRNA variant in one or more regions; (c) an insertion of 1 to 10 consecutive or non-consecutive nucleotides in the gRNA variant in one or more regions; (d) a substitution of the scaffold stem loop or the extended stem loop with an RNA stem loop sequence from a heterologous RNA source with proximal 5′ and 3′ ends; or any combination of (a)-(d). Any of the substitutions, insertions and deletions described herein can be combined to generate a gRNA variant of the disclosure. For example, a gRNA variant can comprise at least one substitution and at least one deletion relative to a reference gRNA, at least one substitution and at least one insertion relative to a reference gRNA, at least one insertion and at least one deletion relative to a reference gRNA, or at least one substitution, one insertion and one deletion relative to a reference gRNA.

[0217] In some embodiments, a sgRNA variant of the disclosure comprises one or more modifications to the sequence of a previously generated variant, the previously generated variant itself serving as the sequence to be modified. In some cases, one or modifications are introduced to the pseudoknot region of the scaffold. In other cases, one or modifications are introduced to the triplex region of the scaffold. In other cases, one or modifications are introduced to the scaffold bubble. In other cases, one or modifications are introduced to the extended stem region of the scaffold. In still other cases, one of modifications are introduced into two or more of the foregoing regions. Such modifications can comprise an insertion, deletion, or substitution of one or more nucleotides in the foregoing regions, or any combination thereof. Exemplary methods to generate and assess the modifications are described in Example 20.

[0218] In some embodiments, a sgRNA variant comprises one or more modifications to a sequence of SEQ ID NO: 2238, SEQ ID NO: 2239, SEQ ID NO: 2240, SEQ ID NO: 2241, SEQ ID NO:2241, SEQ ID NO:2274, SEQ ID NO:2275, SEQ ID NO: 2279, or SEQ ID NO: 2285, SEQ ID NO: 39984, SEQ ID NO: 39987, or SEQ ID NO: 40003.

[0219] In exemplary embodiments, a gRNA variant comprises one or more modifications relative to gRNA scaffold variant 174 (SEQ ID NO:2238), wherein the resulting gRNA variant exhibits a improved functional characteristic compared to the parent 174, when assessed in an in vitro or in vivo assay under comparable conditions. In other exemplary embodiments, a gRNA variant comprises one or more modifications relative to gRNA scaffold variant 175 (SEQ ID NO:2239), wherein the resulting gRNA variant exhibits a improved functional characteristic compared to the parent 175, when assessed in an in vitro or in vivo assay under comparable conditions. For example, variants with modifications to the triplex loop of gRNA variant 175 show high enrichment relative to the 175 scaffold, particularly mutations to C15 or C17. Additionally, changes to either member of the predicted pair in the pseudoknot stem between G7 and A29 are both highly enriched relative to the 175 scaffold, with converting A29 to a C or a T to form a canonical Watson-Crick pairing (G7:C29), and the second of which would form a GU wobble pair (G7:U29), both of which may be expected to increase stability of the helix relative to the G:A pair. In addition, the insertion of a C at position 54 in guide scaffold 175 results in an enriched modification.

[0220] In some embodiments, the disclosure provides gRNA variants comprising one or more modifications to the gRNA scaffold variant 174 (SEQ ID NO: 2238) selected from the group consisting of the modifications of Table 28, wherein the resulting gRNA variant exhibits an improved functional characteristic compared to the parent 174, when assessed in an in vitro or in vivo assay under comparable conditions. In some embodiments, the improved functional characteristic is one or more functional properties selected from the group consisting of increased editing activity, increased pseudoknot stem stability, increased triplex region stability, increased scaffold stem stability, extended stem stability, reduced off-target folding intermediates, and increased binding affinity to a Class 2, Type V CRISPR protein. In the foregoing embodiments, the gRNA comprising one or more modifications to the gRNA scaffold variant 174 selected from the group consisting of the modifications of Table 28 (with a linked targeting sequence and complexed with a Class 2, Type V CRISPR protein) exhibits an improved enrichment score (log₂) of at least about 2.0, at least about 2.5, at least about 3, or at least about 3.5 greater compared to the score of the gRNA scaffold of SEQ ID NO: 2238 in an in vitro assay.

[0221] In some embodiments, the disclosure provides gRNA variants comprising one or more modifications to the gRNA scaffold variant 175 (SEQ ID NO: 2239) selected from the group consisting of the modifications of Table 29, wherein the resulting gRNA variant exhibits an improved functional characteristic compared to the parent 175, when assessed in an in vitro or in vivo assay under comparable conditions. In some embodiments, the improved functional characteristic is one or more functional properties selected from the group consisting of increased editing activity, increased pseudoknot stem stability, increased triplex region stability, increased scaffold stem stability, extended stem stability, reduced off-target folding intermediates, and increased binding affinity to a Class 2, Type V CRISPR protein. In the foregoing embodiments, the gRNA comprising one or more modifications to the gRNA scaffold variant 175 selected from the group consisting of the modifications of Table 29 (with a linked targeting sequence and complexed with a Class 2, Type V CRISPR protein) exhibits an improved enrichment score (log₂) of at least about 1.2, at least about 1.5, at least about 2.0, at least about 2.5, at least about 3, or at least about 3.5 greater compared to the score of the gRNA scaffold of SEQ ID NO: 2239 in an in vitro assay.

[0222] In a particular embodiment, the one or more modifications of gRNA scaffold variant 174 are selected from the group consisting of nucleotide positions U11, U24, A29, U65, C66, C68, A69, U76, G77, A79, and A87. In a particular embodiment, the modifications of gRNA scaffold variant 174 are U11C, U24C, A29C, U65C, C66G, C68U, an insertion of ACGGA at position 69, an insertion of UCCGU at position 76, G77A, an insertion of GA at position 79, A87G. In another particular embodiment, the modifications of gRNA scaffold variant 175 are selected from the group consisting of nucleotide positions C9, U11, C17, U24, A29, G54, C65, A89, and A96. In a particular embodiment, the modifications of gRNA scaffold variant 174 are C9U, U11C, C17G, U24C, A29C, an insertion of G at position 54, an insertion of C at position 65, A89G, and A96G.

[0223] In exemplary embodiments, a gRNA variant comprises one or more modifications relative to gRNA scaffold variant 215 (SEQ ID NO:2275), wherein the resulting gRNA variant exhibits an improved functional characteristic compared to the parent 215, when assessed in an in vitro or in vivo assay under comparable conditions.

[0224] In exemplary embodiments, a gRNA variant comprises one or more modifications relative to gRNA scaffold variant 221 (SEQ ID NO: 2281), wherein the resulting gRNA variant exhibits an improved functional characteristic compared to the parent 221, when assessed in an in vitro or in vivo assay under comparable conditions.

[0225] In exemplary embodiments, a gRNA variant comprises one or more modifications relative to gRNA scaffold variant 225 (SEQ ID NO: 2285), wherein the resulting gRNA variant exhibits an improved functional characteristic compared to the parent 225, when assessed in an in vitro or in vivo assay under comparable conditions.

[0226] In exemplary embodiments, a gRNA variant comprises one or more modifications relative to gRNA scaffold variant 235 (SEQ ID NO: 39987), wherein the resulting gRNA variant exhibits an improved functional characteristic compared to the parent 225, when assessed in an in vitro or in vivo assay under comparable conditions.

[0227] In exemplary embodiments, a gRNA variant comprises one or more modifications relative to gRNA scaffold variant 251 (SEQ ID NO: 40003), wherein the resulting gRNA variant exhibits an improved functional characteristic compared to the parent 251, when assessed in an in vitro or in vivo assay under comparable conditions.

[0228] In the foregoing embodiments, the improved functional characteristic includes, but is not limited to one or more of increased stability, increased transcription of the gRNA, increased resistance to nuclease activity, increased folding rate of the gRNA, decreased side product formation during folding, increased productive folding, increased binding affinity to a CasX protein, increased binding affinity to a target nucleic acid when complexed with the CasX protein, increased gene editing when complexed with the CasX protein, increased specificity of editing when complexed with the CasX protein, decreased off-target editing when complexed with the CasX protein, and increased ability to utilize a greater spectrum of one or more PAM sequences, including ATC, CTC, GTC, or TTC, in the modifying of target nucleic acid when complexed with the CasX protein. In some cases, the one or more of the improved characteristics of the gRNA variant is at least about 1.1 to about 100,000-fold improved relative to the gRNA from which it was derived. In other cases, the one or more improved characteristics of the gRNA variant is at least about 1.1, at least about 10, at least about 100, at least about 1000, at least about 10,000, at least about 100,000-fold or more improved relative to the gRNA from which it was derived. In other cases, the one or more of the improved characteristics of the gRNA variant is about 1.1 to 100,00-fold, about 1.1 to 10,00-fold, about 1.1 to 1,000-fold, about 1.1 to 500-fold, about 1.1 to 100-fold, about 1.1 to 50-fold, about 1.1 to 20-fold, about 10 to 100,00-fold, about 10 to 10,00-fold, about 10 to 1,000-fold, about 10 to 500-fold, about 10 to 100-fold, about 10 to 50-fold, about 10 to 20-fold, about 2 to 70-fold, about 2 to 50-fold, about 2 to 30-fold, about 2 to 20-fold, about 2 to 10-fold, about 5 to 50-fold, about 5 to 30-fold, about 5 to 10-fold, about 100 to 100,00-fold, about 100 to 10,00-fold, about 100 to 1,000-fold, about 100 to 500-fold, about 500 to 100,00-fold, about 500 to 10,00-fold, about 500 to 1,000-fold, about 500 to 750-fold, about 1,000 to 100,00-fold, about 10,000 to 100,00-fold, about 20 to 500-fold, about 20 to 250-fold, about 20 to 200-fold, about 20 to 100-fold, about 20 to 50-fold, about 50 to 10,000-fold, about 50 to 1,000-fold, about 50 to 500-fold, about 50 to 200-fold, or about 50 to 100-fold, improved relative to the gRNA from which it was derived. In other cases, the one or more improved characteristics of the gRNA variant is about 1.1-fold, 1.2-fold, 1.3-fold, 1.4-fold, 1.5-fold, 1.6-fold, 1.7-fold, 1.8-fold, 1.9-fold, 2-fold, 3-fold, 4-fold, 5-fold, 6-fold, 7-fold, 8-fold, 9-fold, 10-fold, 11-fold, 12-fold, 13-fold, 14-fold, 15-fold, 16-fold, 17-fold, 18-fold, 19-fold, 20-fold, 25-fold, 30-fold, 40-fold, 45-fold, 50-fold, 55-fold, 60-fold, 70-fold, 80-fold, 90-fold, 100-fold, 110-fold, 120-fold, 130-fold, 140-fold, 150-fold, 160-fold, 170-fold, 180-fold, 190-fold, 200-fold, 210-fold, 220-fold, 230-fold, 240-fold, 250-fold, 260-fold, 270-fold, 280-fold, 290-fold, 300-fold, 310-fold, 320-fold, 330-fold, 340-fold, 350-fold, 360-fold, 370-fold, 380-fold, 390-fold, 400-fold, 425-fold, 450-fold, 475-fold, or 500-fold improved relative to the gRNA from which it was derived.

[0229] In some embodiments, the gRNA variant comprises an exogenous extended stem loop, with such differences from a reference gRNA described as follows. In some embodiments, an exogenous extended stem loop has little or no identity to the reference stem loop regions disclosed herein (e.g., SEQ ID NO:15). In some embodiments, an exogenous stem loop is at least 10 bp, at least 20 bp, at least 30 bp, at least 40 bp, at least 50 bp, at least 60 bp, at least 70 bp, at least 80 bp, at least 90 bp, at least 100 bp, at least 200 bp, at least 300 bp, at least 400 bp, at least 500 bp, at least 600 bp, at least 700 bp, at least 800 bp, at least 900 bp, at least 1,000 bp, at least 2,000 bp, at least 3,000 bp, at least 4,000 bp, at least 5,000 bp, at least 6,000 bp, at least 7,000 bp, at least 8,000 bp, at least 9,000 bp, at least 10,000 bp, at least 12,000 bp, at least 15,000 bp or at least 20,000 bp. In some embodiments, the gRNA variant comprises an extended stem loop region comprising at least 10, at least 100, at least 500, at least 1000, or at least 10,000 nucleotides. In some embodiments, the heterologous stem loop increases the stability of the gRNA. In some embodiments, the heterologous RNA stem loop is capable of binding a protein, an RNA structure, a DNA sequence, or a small molecule. In some embodiments, an exogenous stem loop region replacing the stem loop comprises an RNA stem loop or hairpin in which the resulting gRNA has increased stability and, depending on the choice of loop, can interact with certain cellular proteins or RNA. Such exogenous extended stem loops can comprise, for example a thermostable RNA such as MS2 hairpin (ACAUGAGGAUCACCCAUGU (SEQ ID NO: 35)), QP hairpin (UGCAUGUCUAAGACAGCA (SEQ ID NO: 36)), U1 hairpin II (AAUCCAUUGCACUCCGGAUU (SEQ ID NO: 37)), Uvsx (CCUCUUCGGAGG (SEQ ID NO: 38)), PP7 hairpin (AGGAGUUUCUAUGGAAACCCU (SEQ ID NO: 39)), Phage replication loop (AGGUGGGACGACCUCUCGGUCGUCCUAUCU (SEQ ID NO: 40)), Kissing loop_a (UGCUCGCUCCGUUCGAGCA (SEQ ID NO: 41)), Kissing loop_b1 (UGCUCGACGCGUCCUCGAGCA (SEQ ID NO: 42)), Kissing loop_b2 (UGCUCGUUUGCGGCUACGAGCA (SEQ ID NO: 43)), G quadriplex M3q (AGGGAGGGAGGGAGAGG (SEQ ID NO: 44)), G quadriplex telomere basket (GGUUAGGGUUAGGGUUAGG (SEQ ID NO: 45)), Sarcin-ricin loop (CUGCUCAGUACGAGAGGAACCGCAG (SEQ ID NO: 46)) or Pseudoknots (UACACUGGGAUCGCUGAAUUAGAGAUCGGCGUCCUUUCAUUCUAUAUACUUUGG AGUUUUAAAAUGUCUCUAAGUACA (SEQ ID NO: 47)). In some embodiments, the extended stem loop comprises UGGGCGCAGCGUCAAUGACGCUGACGGUACA (Stem IIB; SEQ ID NO: 41843), GCACUAUGGGCGCAGCGUCAAUGACGCUGACGGUACAGGCCAGACAAUUAUUGU CUGGUAUAGUGC (Stem II; SEQ ID NO: 41844), CAGGAAGCACUAUGGGCGCAGCGUCAAUGACGCUGACGGUACAGGCCAGACAAU UAUUGUCUGGUAUAGUGCAGCAGCAGAACAAUUUGCUGAGGGCUAUUGAGGCGC AACAGCAUCUGUUGCAACUCACAGUCUGGGGCAUCAAGCAGCUCCAGGCAAGAA UCCUG (Stem II-V SEQ ID NO: 41845), GCUGACGGUACAGGC (RBE; SEQ ID NO: 41846), and AGGAGCUUUGUUCCUUGGGUUCUUGGGAGCAGCAGGAAGCACUAUGGGCGCAGC GUCAAUGACGCUGACGGUACAGGCCAGACAAUUAUUGUCUGGUAUAGUGCAGCA GCAGAACAAUUUGCUGAGGGCUAUUGAGGCGCAACAGCAUCUGUUGCAACUCAC AGUCUGGGGCAUCAAGCAGCUCCAGGCAAGAAUCCUGGCUGUGGAAAGAUACCU AAAGGAUCAACAGCUCCU (full-length RRE; SEQ ID NO: 41847).

[0230] In some embodiments, a gRNA variant comprises a terminal fusion partner. The term gRNA variant is inclusive of variants that include exogenous sequences such as terminal fusions, or internal insertions. Exemplary terminal fusions may include fusion of the gRNA to a self-cleaving ribozyme or protein binding motif. As used herein, a “ribozyme” refers to an RNA or segment thereof with one or more catalytic activities similar to a protein enzyme. Exemplary ribozyme catalytic activities may include, for example, cleavage and/or ligation of RNA, cleavage and/or ligation of DNA, or peptide bond formation. In some embodiments, such fusions could either improve scaffold folding or recruit DNA repair machinery. For example, a gRNA may in some embodiments be fused to a hepatitis delta virus (HDV) antigenomic ribozyme, HDV genomic ribozyme, hatchet ribozyme (from metagenomic data), env25 pistol ribozyme (representative from Aliistipes putredinis), HH15 Minimal Hammerhead ribozyme, tobacco ringspot virus (TRSV) ribozyme, WT viral Hammerhead ribozyme (and rational variants), or Twisted Sister 1 or RBMX recruiting motif. Hammerhead ribozymes are RNA motifs that catalyze reversible cleavage and ligation reactions at a specific site within an RNA molecule. Hammerhead ribozymes include type I, type II and type III hammerhead ribozymes. The HDV, pistol, and hatchet ribozymes have self-cleaving activities. gRNA variants comprising one or more ribozymes may allow for expanded gRNA function as compared to a gRNA reference. For example, gRNAs comprising self-cleaving ribozymes can, in some embodiments, be transcribed and processed into mature gRNAs as part of polycistronic transcripts. Such fusions may occur at either the 5′ or the 3′ end of the gRNA. In some embodiments, a gRNA variant comprises a fusion at both the 5′ and the 3′ end, wherein each fusion is independently as described herein.

[0231] In the embodiments of the gRNA variants, the gRNA variant further comprises a spacer (or targeting sequence) region located at the 3′ end of the gRNA, capable of hybridizing with a target nucleic acid which comprises at least 14 to about 35 nucleotides wherein the spacer is designed with a sequence that is complementary to a target nucleic acid. In some embodiments, the encoded gRNA variant comprises a targeting sequence of at least 10 to 20 nucleotides complementary to a target nucleic acid. In some embodiments, the targeting sequence has 14, 15, 16, 17, 18, 19, 20, 21, 22, 23, 24, 25, 26, 27, 28, 29, or 30 nucleotides. In some embodiments, the encoded gRNA variant comprises a targeting sequence having 20 nucleotides. In some embodiments, the targeting sequence has 25 nucleotides. In some embodiments, the targeting sequence has 24 nucleotides. In some embodiments, the targeting sequence has 23 nucleotides. In some embodiments, the targeting sequence has 22 nucleotides. In some embodiments, the targeting sequence has 21 nucleotides. In some embodiments, the targeting sequence has 20 nucleotides. In some embodiments, the targeting sequence has 19 nucleotides. In some embodiments, the targeting sequence has 18 nucleotides. In some embodiments, the targeting sequence has 17 nucleotides. In some embodiments, the targeting sequence has 16 nucleotides. In some embodiments, the targeting sequence has 15 nucleotides. In some embodiments, the targeting sequence has 14 nucleotides.

[0232] h. Complex Formation with CasX Protein

[0233] In some embodiments, a gRNA variant has an improved ability to form an RNP complex with a Class 2, Type V protein, including CasX variant proteins comprising any one of the sequences SEQ ID NOS: 49-160, 40208-40369, or 40828-40912 of Table 3, or a sequence having at least about 50%, at least about 60%, at least about 70%, at least about 80%, at least about 85%, at least about 90%, at least about 91%, at least about 92%, at least about 93%, at least about 94%, at least about 95%, at least about 96%, at least about 97%, at least about 98%, or at least about 99% identity thereto. In some embodiments, upon expression, the gRNA variant is complexed as an RNP with a CasX variant protein comprising any one of the sequences SEQ ID NOS: 49-160, 40208-40369, or 40828-40912 of Table 3, or a sequence having at least about 50%, at least about 60%, at least about 70%, at least about 80%, at least about 85%, at least about 90%, at least about 91%, at least about 92%, at least about 93%, at least about 94%, at least about 95%, at least about 96%, at least about 97%, at least about 98%, or at least about 99% identity thereto. In some embodiments, upon expression, the gRNA variant is complexed as an RNP with a CasX variant protein comprising any one of the sequences SEQ ID NOS: 85-160, 40208-40369, or 40828-40912, or a sequence having at least about 50%, at least about 60%, at least about 70%, at least about 80%, at least about 85%, at least about 90%, at least about 91%, at least about 92%, at least about 93%, at least about 94%, at least about 95%, at least about 96%, at least about 97%, at least about 98%, or at least about 99% identity thereto.

[0234] In some embodiments, a gRNA variant has an improved ability to form a complex with a CasX variant protein when compared to a reference gRNA, thereby improving its ability to form a cleavage-competent ribonucleoprotein (RNP) complex with the CasX protein, as described in the Examples. Improving ribonucleoprotein complex formation may, in some embodiments, improve the efficiency with which functional RNPs are assembled. In some embodiments, greater than 90%, greater than 93%, greater than 95%, greater than 96%, greater than 97%, greater than 98% or greater than 99% of RNPs comprising a gRNA variant and its targeting sequence are competent for gene editing of a target nucleic acid.

[0235] Exemplary nucleotide changes that can improve the ability of gRNA variants to form a complex with CasX protein may, in some embodiments, include replacing the scaffold stem with a thermostable stem loop. Without wishing to be bound by any theory, replacing the scaffold stem with a thermostable stem loop could increase the overall binding stability of the gRNA variant with the CasX protein. Alternatively, or in addition, removing a large section of the stem loop could change the gRNA variant folding kinetics and make a functional folded gRNA easier and quicker to structurally-assemble, for example by lessening the degree to which the gRNA variant can get “tangled” in itself. In some embodiments, choice of scaffold stem loop sequence could change with different spacers that are utilized for the gRNA. In some embodiments, scaffold sequence can be tailored to the spacer and therefore the target sequence. Biochemical assays can be used to evaluate the binding affinity of CasX protein for the gRNA variant to form the RNP, including the assays of the Examples. For example, a person of ordinary skill can measure changes in the amount of a fluorescently tagged gRNA that is bound to an immobilized CasX protein, as a response to increasing concentrations of an additional unlabeled “cold competitor” gRNA. Alternatively, or in addition, fluorescence signal can be monitored to or seeing how it changes as different amounts of fluorescently labeled gRNA are flowed over immobilized CasX protein. Alternatively, the ability to form an RNP can be assessed using in vitro cleavage assays against a defined target nucleic acid sequence.

### IV. CRISPR Proteins of the AAV Systems

[0236] The present disclosure provides AAV systems encoding a CRISPR nuclease that have utility in genome editing of eukaryotic cells, as well as being an integral component of the self-inactivating feature of the construct. In some embodiments, the CRISPR nuclease employed in the genome editing systems is a Class 2, Type V nuclease. Although members of Class 2, Type V CRISPR-Cas systems have differences, they share some common characteristics that distinguish them from the Cas9 systems. Firstly, the Class 2, Type V nucleases possess a single RNA-guided RuvC domain-containing effector but no HNH domain, and they recognize T-rich PAM 5′ upstream to the target region on the non-targeted strand, which is different from Cas9 systems which rely on G-rich PAM at 3′ side of target sequences. Type V nucleases generate staggered double-stranded breaks distal to the PAM sequence, unlike Cas9, which generates a blunt end in the proximal site close to the PAM. In addition, Type V nucleases degrade ssDNA in trans when activated by target dsDNA or ssDNA binding in cis. In some embodiments, the Type V nucleases of the embodiments recognize a 5′-TC PAM motif and produce staggered ends cleaved solely by the RuvC domain. In some embodiments, the Type V nuclease is selected from the group consisting of Cas12a, Cas12b, Cas12c, Cas12d (CasY), Cas12j, Cas12k, CasPhi, C2c4, C2c8, C2c5, C2c10, C2c9, CasZ and CasX. In some embodiments, the present disclosure provides AAV systems encoding a CasX variant protein and one or more gRNA acids that upon expression in a transfected cell are able to form an RNP complex and are specifically designed to modify a target nucleic acid sequence in eukaryotic cells, as well as cleave the self-inactivating segments incorporated into the polynucleotide comprising the transgene of the AAV construct.

[0237] The term “CasX protein”, as used herein, refers to a family of proteins, and encompasses all naturally occurring CasX proteins, proteins that share at least 50% identity to naturally occurring CasX proteins, as well as CasX variants possessing one or more improved characteristics relative to a naturally-occurring reference CasX protein, described more fully, below.

[0238] CasX proteins of the disclosure comprise at least one of the following domains: a non-target strand binding (NTSB) domain, a target strand loading (TSL) domain, a helical I domain (which is further divided into helical I-I and I-II subdomains), a helical II domain, an oligonucleotide binding domain (OBD, which is further divided into OBD-I and OBD-II subdomains), and a RuvC DNA cleavage domain (which is further divided into RuvC-I and II subdomains). The RuvC domain may be modified or deleted in a catalytically-dead CasX variant, described more fully, below.

[0239] In some embodiments, a CasX variant protein can bind and/or modify (e.g., nick, catalyze a double-strand break, methylate, demethylate, etc.) a target nucleic acid at a specific sequence targeted by an associated gRNA, which hybridizes to a sequence within the target nucleic acid sequence.

[0240] a. Reference CasX Proteins

[0241] The disclosure provides naturally-occurring CasX proteins (referred to herein as a “reference CasX protein”), which were subsequently modified to create the CasX variants of the disclosure. For example, reference CasX proteins can be isolated from naturally occurring prokaryotes, such as Deltaproteobacteria, Planctomycetes, or Candidatus Sungbacteria species. A reference CasX protein is a type II CRISPR/Cas endonuclease belonging to the CasX (interchangeably referred to as Cas12e) family of proteins that interacts with a guide RNA to form a ribonucleoprotein (RNP) complex.

[0242] In some cases, a reference CasX protein is isolated or derived from Deltaproteobacter. In some embodiments, a reference CasX protein comprises a sequence identical to a sequence of:

| (SEQ ID NO: 1) | |
|---|---|
| 1 | MEKRINKIRK KLSADNATKP VSRSGPMKTL LVRVMTDDLK KRLEKRRKKP EVMPQVISNN |
| 61 | AANNLRMLLD DYTKMKEAIL QVYWQEFKDD HVGLMCKFAQ PASKKIDQNK LKPEMDEKGN |
| 121 | LTTAGFACSQ CGQPLFVYKL EQVSEKGKAY TNYFGRCNVA EHEKLILLAQ LKPEKDSDEA |
| 181 | VTYSLGKFGQ RALDFYSIHV TKESTHPVKP LAQIAGNRYA SGPVGKALSD ACMGTIASFL |
| 241 | SKYQDIIIEH QKVVKGNQKR LESLRELAGK ENLEYPSVTL PPQPHTKEGV DAYNEVIARV |
| 301 | RMWVNLNLWQ KLKLSRDDAK PLLRLKGFPS FPVVERRENE VDWWNTINEV KKLIDAKRDM |
| 361 | GRVFWSGVTA EKRNTILEGY NYLPNENDHK KREGSLENPK KPAKRQFGDL LLYLEKKYAG |
| 421 | DWGKVFDEAW ERIDKKIAGL TSHIEREEAR NAEDAQSKAV LTDWLRAKAS FVLERLKEMD |
| 481 | EKEFYACEIQ LQKWYGDLRG NPFAVEAENR VVDISGFSIG SDGHSIQYRN LLAWKYLENG |
| 541 | KREFYLLMNY GKKGRIRFTD GTDIKKSGKW QGLLYGGGKA KVIDLTFDPD DEQLIILPLA |
| 601 | FGTRQGREFI WNDLLSLETG LIKLANGRVI EKTIYNKKIG RDEPALFVAL TFERREVVDP |
| 661 | SNIKPVNLIG VDRGENIPAV IALTDPEGCP LPEFKDSSGG PTDILRIGEG YKEKQRAIQA |
| 721 | AKEVEQRRAG GYSRKFASKS RNLADDMVRN SARDLFYHAV THDAVLVFEN LSRGFGRQGK |
| 781 | RTFMTERQYT KMEDWLTAKL AYEGLTSKTY LSKTLAQYTS KTCSNCGFTI TTADYDGMLV |
| 841 | RLKKTSDGWA TTLNNKELKA EGQITYYNRY KRQTVEKELS AELDRLSEES GNNDISKWTK |
| 901 | GRRDEALFLL KKRFSHRPVQ EQFVCLDCGH EVHADEQAAL NIARSWLFLN SNSTEFKSYK |
| 961 | SGKQPFVGAW QAFYKRRLKE VWKPNA. |

[0243] In some cases, a reference CasX protein is isolated or derived from Planctomycetes. In some embodiments, a reference CasX protein comprises a sequence identical to a sequence of:

| (SEQ ID NO: 2) | |
|---|---|
| 1 | MQEIKRINKI RRRLVKDSNT KKAGKTGPMK TLLVRVMTPD LRERLENLRK KPENIPQPIS |
| 61 | NTSRANLNKL LTDYTEMKKA ILHVYWEEFQ KDPVGLMSRV AQPAPKNIDQ RKLIPVKDGN |
| 121 | ERLTSSGFAC SQCCQPLYVY KLEQVNDKGK PHTNYFGRCN VSEHERLILL SPHKPEANDE |
| 181 | LVTYSLGKFG QRALDFYSIH VTRESNHPVK PLEQIGGNSC ASGPVGKALS DACMGAVASF |
| 241 | LTKYQDIILE HQKVIKKNEK RLANLKDIAS ANGLAFPKIT LPPQPHTKEG IEAYNNVVAQ |
| 301 | IVIWVNLNLW QKLKIGRDEA KPLQRLKGFP SFPLVERQAN EVDWWDMVCN VKKLINEKKE |
| 361 | DGKVFWQNLA GYKRQEALLP YLSSEEDRKK GKKFARYQFG DLLLHLEKKH GEDWGKVYDE |
| 421 | AWERIDKKVE GLSKHIKLEE ERRSEDAQSK AALTDWLRAK ASFVIEGLKE ADKDEFCRCE |
| 481 | LKLQKWYGDL RGKPFAIEAE NSILDISGFS KQYNCAFIWQ KDGVKKLNLY LIINYFKGGK |
| 541 | LRFKKIKPEA FEANRFYTVI NKKSGEIVPM EVNENFDDPN LIILPLAFGK RQGREFIWND |
| 601 | LLSLETGSLK LANGRVIEKT LYNRRTRQDE PALFVALTFE RREVLDSSNI KPMNLIGIDR |
| 661 | GENIPAVIAL TDPEGCPLSR FKDSLGNPTH ILRIGESYKE KQRTIQAAKE VEQRRAGGYS |
| 721 | RKYASKAKNL ADDMVRNTAR DLLYYAVTQD AMLIFENLSR GFGRQGKRTF MAERQYTRME |
| 781 | DWLTAKLAYE GLPSKTYLSK TLAQYTSKTC SNCGFTITSA DYDRVLEKLK KTATGWMTTI |
| 841 | NGKELKVEGQ ITYYNRYKRQ NVVKDLSVEL DRLSEESVNN DISSWTKGRS GEALSLLKKR |
| 901 | FSHRPVQEKF VCLNCGFETH ADEQAALNIA RSWLFLRSQE YKKYQTNKTT GNTDKRAFVE |
| 961 | TWQSFYRKKL KEVWKPAV. |

[0244] In some cases, a reference CasX protein is isolated or derived from Candidatus Sungbacteria. In some embodiments, a reference CasX protein comprises a sequence identical to a sequence of

| (SEQ ID NO: 3) | |
|---|---|
| 1 | MDNANKPSTK SLVNTTRISD HFGVTPGQVT RVFSFGIIPT KRQYAIIERW FAAVEAARER |
| 61 | LYGMLYAHFQ ENPPAYLKEK FSYETFFKGR PVLNGLRDID PTIMTSAVFT ALRHKAEGAM |
| 121 | AAFHTNHRRL FEEARKKMRE YAECLKANEA LLRGAADIDW DKIVNALRTR LNTCLAPEYD |
| 181 | AVIADFGALC AFRALIAETN ALKGAYNHAL NQMLPALVKV DEPEEAEESP RLRFENGRIN |
| 241 | DLPKFPVAER ETPPDTETII RQLEDMARVI PDTAEILGYI HRIRHKAARR KPGSAVPLPQ |
| 301 | RVALYCAIRM ERNPEEDPST VAGHELGEID RVCEKRRQGL VRTPEDSQIR ARYMDIISER |
| 361 | ATLAHPDRWT EIQFLRSNAA SRRVRAETIS APFEGFSWTS NRTNPAPQYG MALAKDANAP |
| 421 | ADAPELCICL SPSSAAFSVR EKGGDLIYMR PTGGRRGKDN PGKEITWVPG SFDEYPASGV |
| 481 | ALKLRLYFGR SQARRMLINK TWGLLSDNPR VFAANAELVG KKRNPQDRWK LFFHMVISGP |
| 541 | PPVEYLDESS DVRSRARTVI GINRGEVNPL AYAVVSVEDG QVLEEGLLGK KEYIDQLIET |
| 601 | RRRISEYQSR EQTPPRDLRQ RVRHLQDTVL GSARAKIHSL IAFWKGILAI ERLDDQFHGR |
| 661 | EQKIIPKKTY LANKTGFMNA LSFSGAVRVD KKGNPWGGMI EIYPGGISRT CTQCGTVWLA |
| 721 | RRPKNPGHRD AMVVIPDIVD DAAATGFDNV DCDAGTVDYG ELFTLSREWV RLTPRYSRVM |
| 781 | RGTLGDLERA IRQGDDRKSR QMLELALEPQ PQWGQFFCHR CGENGQSDVL AATNLARRAI |
| 841 | SLIRRLPDTD TPPTP. |

[0245] b. Class 2, Type V CasX Variant Proteins

[0246] The present disclosure provides Class 2, Type V, CasX variants of a reference CasX protein or variants derived from other CasX variants (interchangeably referred to herein as “Class 2, Type V CasX variant”, “CasX variant” or “CasX variant protein”), wherein the Class 2, Type V CasX variants comprise at least one modification in at least one domain relative to the reference CasX protein, including but not limited to the sequences of SEQ ID NOS:1-3, or at least one modification relative to another CasX variant. Any change in amino acid sequence of a reference CasX protein or to another CasX variant protein that leads to an improved characteristic of the CasX protein is considered a CasX variant protein of the disclosure. For example, CasX variants can comprise one or more amino acid substitutions, insertions, deletions, or swapped domains, or any combinations thereof, relative to a reference CasX protein sequence.

[0247] The CasX variants of the disclosure have one or more improved characteristics compared to a reference CasX protein of SEQ ID NO:1, SEQ ID NO:2 or SEQ ID NO:3, or the variant from which it was derived; e.g. CasX 491 (SEQ ID NO: 138) or CasX 515 (SEQ ID NO: 145). Exemplary improved characteristics of the CasX variant embodiments include, but are not limited to improved folding of the variant, increased binding affinity to the gRNA, increased binding affinity to the target nucleic acid, improved ability to utilize a greater spectrum of PAM sequences in the editing and/or binding of target nucleic acid, improved unwinding of the target DNA, increased editing activity, improved editing efficiency, improved editing specificity for the target nucleic acid, decreased off-target editing or cleavage, increased percentage of a eukaryotic genome that can be efficiently edited, increased activity of the nuclease, increased target strand loading for double strand cleavage, decreased target strand loading for single strand nicking, increased binding of the non-target strand of DNA, improved protein stability, improved protein:gRNA (RNP) complex stability, and improved fusion characteristics. In the foregoing embodiments, the one or more of the improved characteristics of the CasX variant is at least about 1.1 to about 100,000-fold improved relative to the reference CasX protein of SEQ ID NO: 1, SEQ ID NO: 2, or SEQ ID NO: 3, or CasX 491 (SEQ ID NO: 138) or CasX 515 (SEQ ID NO: 145), when assayed in a comparable fashion. In other embodiments, the improvement is at least about 1.1-fold, at least about 2-fold, at least about 5-fold, at least about 10-fold, at least about 50-fold, at least about 100-fold, at least about 500-fold, at least about 1000-fold, at least about 5000-fold, at least about 10,000-fold, or at least about 100,000-fold compared to the reference CasX protein of SEQ ID NO: 1, SEQ ID NO: 2, or SEQ ID NO: 3, or CasX 491 (SEQ ID NO: 138) or CasX 515 (SEQ ID NO: 145). when assayed in a comparable fashion. In other cases, the one or more improved characteristics of an RNP of the CasX variant and the gRNA variant are at least about 1.1, at least about 10, at least about 100, at least about 1000, at least about 10,000, at least about 100,000-fold or more improved relative to an RNP of the reference CasX protein of SEQ ID NO:1, SEQ ID NO:2, or SEQ ID NO:3 and the gRNA of Table 1 or CasX 491 or CasX 515 with gRNA 174. In other cases, the one or more of the improved characteristics of an RNP of the CasX variant and the gRNA variant are about 1.1 to 100,00-fold, about 1.1 to 10,00-fold, about 1.1 to 1,000-fold, about 1.1 to 500-fold, about 1.1 to 100-fold, about 1.1 to 50-fold, about 1.1 to 20-fold, about 10 to 100,00-fold, about 10 to 10,00-fold, about 10 to 1,000-fold, about 10 to 500-fold, about 10 to 100-fold, about 10 to 50-fold, about 10 to 20-fold, about 2 to 70-fold, about 2 to 50-fold, about 2 to 30-fold, about 2 to 20-fold, about 2 to 10-fold, about 5 to 50-fold, about 5 to 30-fold, about 5 to 10-fold, about 100 to 100,00-fold, about 100 to 10,00-fold, about 100 to 1,000-fold, about 100 to 500-fold, about 500 to 100,00-fold, about 500 to 10,00-fold, about 500 to 1,000-fold, about 500 to 750-fold, about 1,000 to 100,00-fold, about 10,000 to 100,00-fold, about 20 to 500-fold, about 20 to 250-fold, about 20 to 200-fold, about 20 to 100-fold, about 20 to 50-fold, about 50 to 10,000-fold, about 50 to 1,000-fold, about 50 to 500-fold, about 50 to 200-fold, or about 50 to 100-fold, improved relative to an RNP of the reference CasX protein of SEQ ID NO:1, SEQ ID NO:2, or SEQ ID NO:3 and the gRNA of Table 1, or CasX 491 or CasX 515 with gRNA 174, when assayed in a comparable fashion. In other cases, the one or more improved characteristics of an RNP of the CasX variant and the gRNA variant are about 1.1-fold, 1.2-fold, 1.3-fold, 1.4-fold, 1.5-fold, 1.6-fold, 1.7-fold, 1.8-fold, 1.9-fold, 2-fold, 3-fold, 4-fold, 5-fold, 6-fold, 7-fold, 8-fold, 9-fold, 10-fold, 11-fold, 12-fold, 13-fold, 14-fold, 15-fold, 16-fold, 17-fold, 18-fold, 19-fold, 20-fold, 25-fold, 30-fold, 40-fold, 45-fold, 50-fold, 55-fold, 60-fold, 70-fold, 80-fold, 90-fold, 100-fold, 110-fold, 120-fold, 130-fold, 140-fold, 150-fold, 160-fold, 170-fold, 180-fold, 190-fold, 200-fold, 210-fold, 220-fold, 230-fold, 240-fold, 250-fold, 260-fold, 270-fold, 280-fold, 290-fold, 300-fold, 310-fold, 320-fold, 330-fold, 340-fold, 350-fold, 360-fold, 370-fold, 380-fold, 390-fold, 400-fold, 425-fold, 450-fold, 475-fold, or 500-fold improved relative to an RNP of the reference CasX protein of SEQ ID NO:1, SEQ ID NO:2, or SEQ ID NO:3 and the gRNA of Table 1, or CasX 491 or CasX 515 with gRNA 174, when assayed in a comparable fashion.

[0248] In some embodiments, the modification of the CasX variant is a mutation in one or more amino acids of the reference CasX. In other embodiments, the modification is an insertion or substitution of a part or all of a domain from a different CasX protein. In a particular embodiment, the CasX variants of SEQ ID NOS: 144-160, 40208-40369, 40828-40912 have a NTSB and helical 1B domain of SEQ ID NO: 1, while the other domains are derived from SEQ ID NO: 2, in addition to individual modifications in select domains, described herein. Mutations can be introduced in any one or more domains of the reference CasX protein or in a CasX variant to result in a CasX variant, and may include, for example, deletion of part or all of one or more domains, or one or more amino acid substitutions, deletions, or insertions in any domain of the reference CasX protein or the CasX variant from which it was derived. The domains of CasX proteins include the non-target strand binding (NTSB) domain, the target strand loading (TSL) domain, the Helical I domain, the Helical II domain, the oligonucleotide binding domain (OBD), and the RuvC DNA cleavage domain. Without being bound to theory or mechanism, a NTSB domain in a CasX allows for binding to the non-target nucleic acid strand and may aid in unwinding of the non-target and target strands. The NTSB domain is presumed to be responsible for the unwinding, or the capture, of a non-target nucleic acid strand in the unwound state. An exemplary NTSB domain comprises amino acids 100-190 of SEQ ID NO: 1 or amino acids 102-191 of SEQ ID NO: 2. In some embodiments, the NTSB domain of a reference CasX protein comprises a four-stranded beta sheet. In some embodiments, the TSL acts to place or capture the target-strand in a folded state that places the scissile phosphate of the target strand DNA backbone in the RuvC active site. An exemplary TSL comprises amino acids 824-933 of SEQ ID NO: 1 or amino acids 811-920 of SEQ ID NO: 2. Without wishing to be bound by theory, it is thought that in some cases the Helical I domain may contribute to binding of the protospacer adjacent motif (PAM). In some embodiments, the Helical I domain of a reference CasX protein comprises one or more alpha helices. Exemplary Helical I-I and I-II domains comprise amino acids 56-99 and 191-331 of SEQ ID NO: 1, respectively, or amino acids 58-101 and 192-332 of SEQ ID NO: 2, respectively. The Helical II domain is responsible for binding to the guide RNA scaffold stem loop as well as the bound DNA. An exemplary Helical II domain comprises amino acids 332-508 of SEQ ID NO: 1, or amino acids 333-500 of SEQ ID NO: 2. The OBD largely binds the RNA triplex of the guide RNA scaffold. The OBD may also be responsible for binding to the protospacer adjacent motif (PAM). Exemplary OBD I and II domains comprise amino acids 1-55 and 509-659 of SEQ ID NO: 1, respectively, or amino acids 1-57 and 501-646 of SEQ ID NO: 2, respectively. The RuvC has a DED motif active site that is responsible for cleaving both strands of DNA (one by one, most likely the non-target strand first at 11-14 nucleotides (nt) into the targeted sequence and then the target strand next at 2-4 nucleotides after the target sequence, resulting in a staggered cut). Specifically in CasX, the RuvC domain is unique in that it is also responsible for binding the guide RNA scaffold stem loop that is critical for CasX function. Exemplary RuvC I and II domains comprise amino acids 660-823 and 934-986 of SEQ ID NO: 1, respectively, or amino acids 647-810 and 921-978 of SEQ ID NO: 2, respectively, while CasX variants may comprise mutations at positions 1658 and A708 relative to SEQ ID NO: 2, or the mutations of CasX 515, described below.

[0249] In some embodiments, the CasX variant protein comprises at least one modification in at least 1 domain, in at least each of 2 domains, in at least each of 3 domains, in at least each of 4 domains or in at least each of 5 domains of the reference CasX protein, including the sequences of SEQ ID NOS: 1-3. In some embodiments, the CasX variant protein comprises two or more modifications in at least one domain of the reference CasX protein. In some embodiments, the CasX variant protein comprises at least two modifications in at least one domain of the reference CasX protein, at least three modifications in at least one domain of the reference CasX protein or at least four or more modifications in at least one domain of the reference CasX protein. In some embodiments, wherein the CasX variant comprises two or more modifications compared to a reference CasX protein, and each modification is made in a domain independently selected from the group consisting of a NTSB, TSL, Helical I domain, Helical II domain, OBD, and RuvC DNA cleavage domain. In some embodiments, wherein the CasX variant comprises two or more modifications compared to a reference CasX protein, a modification is made in two or more domains. In some embodiments, the at least one modification of the CasX variant protein comprises a deletion of at least a portion of one domain of the reference CasX protein of SEQ ID NOS: 1-3. In some embodiments, the deletion is in the NTSB domain, TSL domain, Helical I domain, Helical II domain, OBD, or RuvC DNA cleavage domain.

[0250] In some cases, the CasX variants of the disclosure comprise modifications in structural regions that may encompass one or more domains. In some embodiments, a CasX variant comprises at least one modification of a region of non-contiguous amino acid residues of the CasX variant that form a channel in which gRNA:target nucleic acid complexing with the CasX variant occurs. In other embodiments, a CasX variant comprises at least one modification of a region of non-contiguous amino acid residues of the CasX variant that form an interface which binds with the gRNA. In other embodiments, a CasX variant comprises at least one modification of a region of non-contiguous amino acid residues of the CasX variant that form a channel which binds with the non-target strand DNA. In other embodiments, a CasX variant comprises at least one modification of a region of non-contiguous amino acid residues of the CasX variant that form an interface which binds with the protospacer adjacent motif (PAM) of the target nucleic acid. In other embodiments, a CasX variant comprises at least one modification of a region of non-contiguous surface-exposed amino acid residues of the CasX variant. In other embodiments, a CasX variant comprises at least one modification of a region of non-contiguous amino acid residues that form a core through hydrophobic packing in a domain of the CasX variant. In the foregoing embodiments of the paragraph, the modifications of the region can comprise one or more of a deletion, an insertion, or a substitution of one or more amino acids of the region; or between 2 to 15 amino acid residues of the region of the CasX variant are substituted with charged amino acids; or between 2 to 15 amino acid residues of a region of the CasX variant are substituted with polar amino acids; or between 2 to 15 amino acid residues of a region of the CasX variant are substituted with amino acids that stack, or have affinity with DNA or RNA bases.

[0251] In other embodiments, the disclosure provides CasX variants wherein the CasX variants comprise at least one modification relative to another CasX variant; e.g., CasX variant 515 and 527 is a variant of CasX variant 491 and CasX variants 668 and 672 are variants of CasX 535. In some embodiments, the at least one modification is selected from the group consisting of an amino acid insertion, deletion, or substitution. All variants that improve one or more functions or characteristics of the CasX variant protein when compared to a reference CasX protein or the variant from which it was derived described herein are envisaged as being within the scope of the disclosure. As described in the Examples, a CasX variant can be mutagenized to create another CasX variant. In a particular embodiment, the disclosure provides, in Example 21, Table 30, variants of CasX 515 (SEQ ID NO: 145) created by introducing modifications to the encoding sequence resulting in amino acid substitutions, deletions, or insertions at one or more positions in one or more domains.

[0252] Suitable mutagenesis methods for generating CasX variant proteins of the disclosure may include, for example, Deep Mutational Evolution (DME), deep mutational scanning (DMS), error prone PCR, cassette mutagenesis, random mutagenesis, staggered extension PCR, gene shuffling, or domain swapping (described in PCT/US20/36506 and WO2020247883A2, incorporated by reference herein). In some embodiments, the CasX variants are designed, for example by selecting multiple desired mutations in a CasX variant identified, for example, using the assays described in the Examples. In certain embodiments, the activity of a reference CasX or the CasX variant protein prior to mutagenesis is used as a benchmark against which the activity of one or more resulting CasX variants are compared, thereby measuring improvements in function of the new CasX variants.

[0253] In some embodiments of the CasX variants described herein, the at least one modification comprises: (a) a substitution of 1 to 100 consecutive or non-consecutive amino acids in the CasX variant compared to a reference CasX of SEQ ID NO:1, SEQ ID NO:2, SEQ ID NO:3, CasX variant 491 (SEQ ID NO: 138) or CasX variant 515 (SEQ ID NO: 145); (b) a deletion of 1 to 100 consecutive or non-consecutive amino acids in the CasX variant compared to a reference CasX or the variant from which it was derived; (c) an insertion of 1 to 100 consecutive or non-consecutive amino acids in the CasX compared to a reference CasX or the variant from which it was derived; or (d) any combination of (a)-(c). In some embodiments, the at least one modification comprises: (a) a substitution of 1-10 consecutive or non-consecutive amino acids in the CasX variant compared to a reference CasX of SEQ ID NO:1, SEQ ID NO:2, SEQ ID NO:3, or the variant from which it was derived; (b) a deletion of 1-5 consecutive or non-consecutive amino acids in the CasX variant compared to a reference CasX or the variant from which it was derived; (c) an insertion of 1-5 consecutive or non-consecutive amino acids in the CasX compared to a reference CasX or the variant from which it was derived; or (d) any combination of (a)-(c).

[0254] In some embodiments, the CasX variant protein comprises or consists of a sequence that has at least 1, at least 2, at least 3, at least 4, at least 5, at least 6, at least 7, at least 8, at least 9, at least 10, at least 20, at least 30, at least 40, at least 50, at least 60, at least 70, at lease 80, at least 90, or at least 100 alterations relative to the sequence of SEQ ID NO:1, SEQ ID NO:2, SEQ ID NO:3, CasX 491 or CasX 515. In some embodiments, the CasX variant protein comprises one more substitutions relative to CasX 491, or SEQ ID NO: 138. In some embodiments, the CasX variant protein comprises one more substitutions relative to CasX 515, or SEQ ID NO: 145. These alterations can be amino acid insertions, deletions, substitutions, or any combinations thereof. The alterations can be in one domain or in any domain or any combination of domains of the CasX variant. Any amino acid can be substituted for any other amino acid in the substitutions described herein. The substitution can be a conservative substitution (e.g., a basic amino acid is substituted for another basic amino acid). The substitution can be a non-conservative substitution (e.g., a basic amino acid is substituted for an acidic amino acid or vice versa). For example, a proline in a reference CasX protein can be substituted for any of arginine, histidine, lysine, aspartic acid, glutamic acid, serine, threonine, asparagine, glutamine, cysteine, glycine, alanine, isoleucine, leucine, methionine, phenylalanine, tryptophan, tyrosine or valine to generate a CasX variant protein of the disclosure.

[0255] Any permutation of the substitution, insertion and deletion embodiments described herein can be combined to generate a CasX variant protein of the disclosure. For example, a CasX variant protein can comprise at least one substitution and at least one deletion relative to a reference CasX protein sequence or a sequence of CasX 491 or CasX 515, at least one substitution and at least one insertion relative to a reference CasX protein sequence or a sequence of CasX 491 or CasX 515, at least one insertion and at least one deletion relative to a reference CasX protein sequence or a sequence of CasX 491 or CasX 515, or at least one substitution, one insertion and one deletion relative to a reference CasX protein sequence or a sequence of CasX 491 or CasX 515.

[0256] In some embodiments, the CasX variant protein comprises between 400 and 2000 amino acids, between 500 and 1500 amino acids, between 700 and 1200 amino acids, between 800 and 1100 amino acids, or between 900 and 1000 amino acids.

[0257] In some embodiments, a CasX variant protein comprises a sequence of SEQ ID NOS: 49-160, 40208-40369, or 40828-40912 as set forth in Table 3. In some embodiments, a CasX variant protein consists of a sequence of SEQ ID NOS: 49-160, 40208-40369, or 40828-40912 as set forth in Table 3. In other embodiments, a CasX variant protein comprises a sequence at least 60% identical, at least 65% identical, at least 70% identical, at least 75% identical, at least 80% identical, at least 81% identical, at least 82% identical, at least 83% identical, at least 84% identical, at least 85% identical, at least 86% identical, at least 86% identical, at least 87% identical, at least 88% identical, at least 89% identical, at least 89% identical, at least 90% identical, at least 91% identical, at least 92% identical, at least 93% identical, at least 94% identical, at least 95% identical, at least 96% identical, at least 97% identical, at least 98% identical, at least 99% identical, at least 99.5% identical to a sequence of SEQ ID NOS: 49-160, 40208-40369, or 40828-40912 as set forth in Table 3. In some embodiments, a CasX variant protein comprises or consists of a sequence of SEQ ID NOS: 49-160, 40208-40369, or 40828-40912 as set forth in Table 3. In other embodiments, a CasX variant protein comprises a sequence at least 60% identical, at least 65% identical, at least 70% identical, at least 75% identical, at least 80% identical, at least 81% identical, at least 82% identical, at least 83% identical, at least 84% identical, at least 85% identical, at least 86% identical, at least 86% identical, at least 87% identical, at least 88% identical, at least 89% identical, at least 89% identical, at least 90% identical, at least 91% identical, at least 92% identical, at least 93% identical, at least 94% identical, at least 95% identical, at least 96% identical, at least 97% identical, at least 98% identical, at least 99% identical, at least 99.5% identical to a sequence of SEQ ID NOS: 85-160, 40208-40369, or 40828-40912. In some embodiments, a CasX variant protein comprises or consists of a sequence of SEQ ID NOS: 85-160, 40208-40369, or 40828-40912.

[0258] c. CasX Variant Proteins with Domains from Multiple Source Proteins

[0259] In certain embodiments, the disclosure provides a chimeric CasX protein for use in the AAV systems comprising protein domains from two or more different CasX proteins, such as two or more reference CasX proteins, or two or more CasX variant protein sequences as described herein. As used herein, a “chimeric CasX protein” refers to a CasX containing at least two domains isolated or derived from different sources, such as two naturally occurring proteins, which may, in some embodiments, be isolated from different species. For example, in some embodiments, a chimeric CasX protein comprises a first domain from a first CasX protein and a second domain from a second, different CasX protein. In some embodiments, the first domain can be selected from the group consisting of the NTSB, TSL, Helical I, Helical IL, OBD and RuvC domains. In some embodiments, the second domain is selected from the group consisting of the NTSB, TSL, Helical I, Helical II, OBD and RuvC domains with the second domain being different from the foregoing first domain. For example, a chimeric CasX protein may comprise an NTSB, TSL, Helical I, Helical II, OBD domains from a CasX protein of SEQ ID NO: 2, and a RuvC domain from a CasX protein of SEQ ID NO: 1, or vice versa. As a further example, a chimeric CasX protein may comprise an NTSB, TSL, Helical II, OBD and RuvC domain from CasX protein of SEQ ID NO: 2, and a Helical I domain from a CasX protein of SEQ ID NO: 1, or vice versa. Thus, in certain embodiments, a chimeric CasX protein may comprise an NTSB, TSL, Helical II, OBD and RuvC domain from a first CasX protein, and a Helical I domain from a second CasX protein. In some embodiments of the chimeric CasX proteins, the domains of the first CasX protein are derived from the sequences of SEQ ID NO: 1, SEQ ID NO: 2 or SEQ ID NO: 3, and the domains of the second CasX protein are derived from the sequences of SEQ ID NO: 1, SEQ ID NO: 2 or SEQ ID NO: 3, and the first and second CasX proteins are not the same. In some embodiments, domains of the first CasX protein comprise sequences derived from SEQ ID NO: 1 and domains of the second CasX protein comprise sequences derived from SEQ ID NO: 2 In some embodiments, domains of the first CasX protein comprise sequences derived from SEQ ID NO: 1 and domains of the second CasX protein comprise sequences derived from SEQ ID NO: 3. In some embodiments, domains of the first CasX protein comprise sequences derived from SEQ ID NO: 2 and domains of the second CasX protein comprise sequences derived from SEQ ID NO: 3.

[0260] In some embodiments, a CasX variant protein comprises at least one chimeric domain comprising a first part from a first CasX protein and a second part from a second, different CasX protein. As used herein, a “chimeric domain” refers to a single domain containing at least two parts isolated or derived from different sources, such as two naturally occurring proteins or portions of domains from two reference CasX proteins. The at least one chimeric domain can be any of the NTSB, TSL, Helical I, Helical IL, OBD or RuvC domains as described herein. In some embodiments, the first portion of a CasX domain comprises a sequence of SEQ ID NO: 1 and the second portion of a CasX domain comprises a sequence of SEQ ID NO: 2. In some embodiments, the first portion of the CasX domain comprises a sequence of SEQ ID NO: 1 and the second portion of the CasX domain comprises a sequence of SEQ ID NO: 3. In some embodiments, the first portion of the CasX domain comprises a sequence of SEQ ID NO: 2 and the second portion of the CasX domain comprises a sequence of SEQ ID NO: 3. In some embodiments, the at least one chimeric domain comprises a chimeric RuvC domain. As an example of the foregoing, the chimeric RuvC domain comprises amino acids 661 to 824 of SEQ ID NO: 1 and amino acids 922 to 978 of SEQ ID NO: 2. As an alternative example of the foregoing, a chimeric RuvC domain comprises amino acids 648 to 812 of SEQ ID NO: 2 and amino acids 935 to 986 of SEQ ID NO: 1. In some embodiments, a CasX protein comprises a first domain from a first CasX protein and a second domain from a second CasX protein, and at least one chimeric domain comprising at least two parts isolated from different CasX proteins using the approach of the embodiments described in this paragraph.

[0261] In some embodiments, a CasX variant protein for use in the AAV systems comprises a sequence set forth in Table 3. In other embodiments, a CasX variant protein comprises a sequence at least 60% identical, at least 65% identical, at least 70a identical, at least 75% identical, at least 80% identical, at least 81% identical, at least 82% identical, at least 83% identical, at least 84% identical, at least 85% identical, at least 86% identical, at least 86% identical, at least 87% identical, at least 88% identical, at least 89% identical, at least 89% identical, at least 90% identical, at least 91% identical, at least 92% identical, at least 93% identical, at least 94% identical, at least 95% identical, at least 96% identical, at least 97% identical, at least 98% identical, at least 99% identical, at least 99.5% identical to a sequence selected from the group consisting of the sequences as set forth in Table 3.

TABLE 3
CasX Variant Sequences

| SEQ | | |
|---|---|---|
| ID NO | Variant | Description of Variant |
| 49 | ND | TSL, Helical I, Helical II, OBD and RuvC domains from SEQ ID NO: 2 and an NTSB domain |
| | | from SEQ ID NO: 1 |
| 50 | ND | NTSB, Helical I, Helical II, OBD and RuvC domains from SEQ ID NO: 2 and a TSL domain |
| | | from SEQ ID NO: 1. |
| 51 | ND | TSL, Helical I, Helical II, OBD and RuvC domains from SEQ ID NO: 1 and an NTSB domain |
| | | from SEQ ID NO: 2 |
| 52 | ND | NTSB, Helical I, Helical II, OBD and RuvC domains from SEQ ID NO: 1 and an TSL domain |
| | | from SEQ ID NO: 2. |
| 53 | ND | NTSB, TSL, Helical I, Helical II and OBD domains SEQ ID NO: 2 and an exogenous RuvC |
| | | domain or a portion thereof from a second CasX protein. |
| 54 | ND | No description |
| 55 | ND | NTSB, TSL, Helical II, OBD and RuvC domains from SEQ ID NO: 2 and a Helical I domain |
| | | from SEQ ID NO: 1 |
| 56 | ND | NTSB, TSL, Helical I, OBD and RuvC domains from SEQ ID NO: 2 and a Helical II domain |
| | | from SEQ ID NO: 1 |
| 57 | ND | NTSB, TSL, Helical I, Helical II and RuvC domains from a first CasX protein and an |
| | | exogenous OBD or a part thereof from a second CasX protein |
| 58 | ND | No description |
| 59 | ND | No description |
| 60 | ND | substitution of L379R, a substitution of C477K, a substitution of A708K, a deletion of P at |
| | | position 793 and a substitution of T620P of SEQ ID NO: 2 |
| 61 | ND | substitution of M771A of SEQ ID NO: 2. |
| 62 | ND | substitution of L379R, a substitution of A708K, a deletion of P at position 793 and a |
| | | substitution of D732N of SEQ ID NO: 2. |
| 63 | ND | substitution of W782Q of SEQ ID NO: 2. |
| 64 | ND | substitution of M771Q of SEQ ID NO: 2 |
| 65 | ND | substitution of R458I and a substitution of A739V of SEQ ID NO: 2. |
| 66 | ND | L379R, a substitution of A708K, a deletion of P at position 793 and a substitution of M771N |
| | | of SEQ ID NO: 2 |
| 67 | ND | substitution of L379R, a substitution of A708K, a deletion of P at position 793 and a |
| | | substitution of A739T of SEQ ID NO: 2 |
| 68 | ND | substitution of L379R, a substitution of C477K, a substitution of A708K, a deletion of P at |
| | | position 793 and a substitution of D489S of SEQ ID NO: 2. |
| 69 | ND | substitution of L379R, a substitution of C477K, a substitution of A708K, a deletion of P at |
| | | position 793 and a substitution of D732N of SEQ ID NO: 2. |
| 70 | ND | substitution of V711K of SEQ ID NO: 2. |
| 71 | ND | substitution of L379R, a substitution of C477K, a substitution of A708K, a deletion of P at |
| | | position 793 and a substitution of Y797L of SEQ ID NO: 2. |
| 72 | 119 | ND |
| 73 | ND | substitution of L379R, a substitution of C477K, a substitution of A708K, a deletion of P at |
| | | position 793 and a substitution of M771N of SEQ ID NO: 2. |
| 74 | ND | substitution of A708K, a deletion of P at position 793 and a substitution of E386S of SEQ ID |
| | | NO: 2. |
| 75 | ND | substitution of L379R, a substitution of C477K, a substitution of A708K and a deletion of P at |
| | | position 793 of SEQ ID NO: 2. |
| 76 | ND | substitution of L792D of SEQ ID NO: 2. |
| 77 | ND | substitution of G791F of SEQ ID NO: 2. |
| 78 | ND | substitution of A708K, a deletion of P at position 793 and a substitution of A739V of SEQ ID |
| | | NO: 2. |
| 79 | ND | substitution of L379R, a substitution of A708K, a deletion of P at position 793 and a |
| | | substitution of A739V of SEQ ID NO: 2. |
| 80 | ND | substitution of C477K, a substitution of A708K and a deletion of P at position 793 of SEQ ID |
| | | NO: 2. |
| 81 | ND | substitution of L249I and a substitution of M771N of SEQ ID NO: 2. |
| 82 | ND | substitution of V747K of SEQ ID NO: 2. |
| 83 | ND | substitution of L379R, a substitution of C477K, a substitution of A708K, a deletion of P at |
| | | position 793 and a substitution of M779N of SEQ ID NO: 2. |
| 84 | ND | L379R, F755M |
| 85 | 429 | ND |
| 86 | 430 | ND |
| 87 | 431 | ND |
| 88 | 432 | ND |
| 89 | 433 | ND |
| 90 | 434 | ND |
| 91 | 435 | ND |
| 92 | 436 | ND |
| 93 | 437 | ND |
| 94 | 438 | ND |
| 95 | 439 | ND |
| 96 | 440 | ND |
| 97 | 441 | ND |
| 98 | 442 | ND |
| 99 | 443 | ND |
| 100 | 444 | ND |
| 101 | 445 | ND |
| 102 | 446 | ND |
| 103 | 447 | ND |
| 104 | 448 | ND |
| 105 | 449 | ND |
| 106 | 450 | ND |
| 107 | 451 | ND |
| 108 | 452 | ND |
| 109 | 453 | ND |
| 110 | 454 | ND |
| 111 | 455 | ND |
| 112 | 456 | ND |
| 113 | 457 | ND |
| 114 | 458 | ND |
| 115 | 459 | ND |
| 116 | 460 | ND |
| 117 | 278 | ND |
| 118 | 279 | ND |
| 119 | 280 | ND |
| 120 | 285 | ND |
| 121 | 286 | ND |
| 122 | 287 | ND |
| 123 | 288 | ND |
| 124 | 290 | ND |
| 125 | 291 | ND |
| 126 | 293 | ND |
| 127 | 300 | ND |
| 128 | 492 | ND |
| 129 | 493 | ND |
| 130 | 387 | ND |
| 131 | 395 | ND |
| 132 | 485 | ND |
| 133 | 486 | ND |
| 134 | 487 | ND |
| 135 | 488 | ND |
| 136 | 489 | ND |
| 137 | 490 | ND |
| 138 | 491 | ND |
| 139 | 494 | ND |
| 140 | 328 | ND |
| 141 | 388 | ND |
| 142 | 389 | ND |
| 143 | 390 | ND |
| 144 | 514 | ND |
| 145 | 515 | ND |
| 146 | 516 | ND |
| 147 | 517 | ND |
| 148 | 518 | ND |
| 149 | 519 | ND |
| 150 | 520 | ND |
| 151 | 522 | ND |
| 152 | 523 | ND |
| 153 | 524 | ND |
| 154 | 525 | ND |
| 155 | 526 | ND |
| 156 | 527 | ND |
| 157 | 528 | ND |
| 158 | 529 | ND |
| 159 | 530 | ND |
| 160 | 531 | ND |
| 40208 | 532 | ND |
| 40209 | 533 | ND |
| 40210 | 534 | ND |
| 40211 | 535 | ND |
| 40212 | 536 | ND |
| 40213 | 537 | ND |
| 40214 | 538 | ND |
| 40215 | 539 | ND |
| 40216 | 540 | ND |
| 40217 | 541 | ND |
| 40218 | 542 | ND |
| 40219 | 543 | ND |
| 40220 | 544 | ND |
| 40221 | 545 | ND |
| 40222 | 546 | ND |
| 40223 | 547 | ND |
| 40224 | 548 | ND |
| 40225 | 550 | ND |
| 40226 | 551 | ND |
| 40227 | 552 | ND |
| 40228 | 553 | ND |
| 40229 | 554 | ND |
| 40230 | 555 | ND |
| 40231 | 556 | ND |
| 40232 | 557 | ND |
| 40233 | 558 | ND |
| 40234 | 559 | ND |
| 40235 | 560 | ND |
| 40236 | 561 | ND |
| 40237 | 562 | ND |
| 40238 | 563 | ND |
| 40239 | 564 | ND |
| 40240 | 565 | ND |
| 40241 | 566 | ND |
| 40242 | 567 | ND |
| 40243 | 568 | ND |
| 40244 | 569 | ND |
| 40246 | 570 | ND |
| 40247 | 571 | ND |
| 40248 | 572 | ND |
| 40249 | 573 | ND |
| 40250 | 574 | ND |
| 40251 | 575 | ND |
| 40252 | 576 | ND |
| 40253 | 577 | ND |
| 40254 | 578 | ND |
| 40255 | 579 | ND |
| 40256 | 580 | ND |
| 40257 | 581 | ND |
| 40258 | 582 | ND |
| 40259 | 583 | ND |
| 40260 | 584 | ND |
| 40261 | 585 | ND |
| 40262 | 586 | ND |
| 40263 | 587 | ND |
| 40264 | 588 | ND |
| 40265 | 589 | ND |
| 40266 | 590 | ND |
| 40267 | 591 | ND |
| 40268 | 592 | ND |
| 40269 | 593 | ND |
| 40270 | 594 | ND |
| 40271 | 595 | ND |
| 40272 | 596 | ND |
| 40273 | 597 | ND |
| 40274 | 598 | ND |
| 40275 | 599 | ND |
| 40276 | 600 | ND |
| 40277 | 601 | ND |
| 40278 | 602 | ND |
| 40279 | 603 | ND |
| 40280 | 604 | ND |
| 40281 | 605 | ND |
| 40282 | 606 | ND |
| 40283 | 607 | ND |
| 40284 | 608 | ND |
| 40285 | 609 | ND |
| 40286 | 610 | ND |
| 40287 | 611 | ND |
| 40288 | 612 | ND |
| 40289 | 613 | ND |
| 40290 | 614 | ND |
| 40291 | 615 | ND |
| 40292 | 616 | ND |
| 40293 | 617 | ND |
| 40294 | 618 | ND |
| 40295 | 619 | ND |
| 40296 | 620 | ND |
| 40297 | 621 | ND |
| 40298 | 622 | ND |
| 40299 | 623 | ND |
| 40300 | 624 | ND |
| 40301 | 625 | ND |
| 40302 | 626 | ND |
| 40303 | 627 | ND |
| 40304 | 628 | ND |
| 40305 | 629 | ND |
| 40306 | 630 | ND |
| 40307 | 631 | ND |
| 40308 | 632 | ND |
| 40309 | 633 | ND |
| 40310 | 634 | ND |
| 40311 | 635 | ND |
| 40312 | 636 | ND |
| 40313 | 637 | ND |
| 40314 | 638 | ND |
| 40315 | 639 | ND |
| 40316 | 640 | ND |
| 40317 | 641 | ND |
| 40318 | 642 | ND |
| 40319 | 643 | ND |
| 40320 | 644 | ND |
| 40321 | 645 | ND |
| 40322 | 646 | ND |
| 40323 | 647 | ND |
| 40324 | 648 | ND |
| 40325 | 649 | ND |
| 40326 | 650 | ND |
| 40327 | 651 | ND |
| 40328 | 652 | ND |
| 40329 | 653 | ND |
| 40330 | 654 | ND |
| 40331 | 655 | ND |
| 40332 | 656 | ND |
| 40333 | 657 | ND |
| 40334 | 658 | ND |
| 40335 | 659 | ND |
| 40336 | 660 | ND |
| 40337 | 661 | ND |
| 40338 | 662 | ND |
| 40339 | 663 | ND |
| 40340 | 664 | ND |
| 40341 | 665 | ND |
| 40342 | 666 | ND |
| 40343 | 667 | ND |
| 40344 | 668 | ND |
| 40345 | 669 | ND |
| 40346 | 671 | ND |
| 40347 | 672 | ND |
| 40348 | 673 | ND |
| 40349 | 674 | ND |
| 40350 | 675 | ND |
| 40351 | 676 | ND |
| 40352 | 677 | ND |
| 40353 | 678 | ND |
| 40354 | 679 | ND |
| 40355 | 680 | ND |
| 40356 | 681 | ND |
| 40357 | 682 | ND |
| 40358 | 683 | ND |
| 40359 | 684 | ND |
| 40360 | 685 | ND |
| 40361 | 686 | ND |
| 40362 | 687 | ND |
| 40363 | 688 | ND |
| 40364 | 689 | ND |
| 40365 | 690 | ND |
| 40366 | 691 | ND |
| 40367 | 692 | ND |
| 40368 | 693 | ND |
| 40369 | 694 | ND |
| 40828 | 701 | ND |
| 40829 | 702 | ND |
| 40830 | 703 | ND |
| 40831 | 704 | ND |
| 40832 | 705 | ND |
| 40833 | 706 | ND |
| 40834 | 707 | ND |
| 40835 | 708 | ND |
| 40836 | 709 | ND |
| 40837 | 710 | ND |
| 40838 | 711 | ND |
| 40839 | 712 | ND |
| 40840 | 713 | ND |
| 40841 | 714 | ND |
| 40842 | 715 | ND |
| 40843 | 716 | ND |
| 40844 | 717 | ND |
| 40845 | 718 | ND |
| 40846 | 719 | ND |
| 40847 | 720 | ND |
| 40848 | 721 | ND |
| 40849 | 722 | ND |
| 40850 | 723 | ND |
| 40851 | 724 | ND |
| 40852 | 725 | ND |
| 40853 | 726 | ND |
| 40854 | 727 | ND |
| 40855 | 728 | ND |
| 40856 | 729 | ND |
| 40857 | 730 | ND |
| 40858 | 731 | ND |
| 40859 | 732 | ND |
| 40860 | 733 | ND |
| 40861 | 734 | ND |
| 40862 | 735 | ND |
| 40863 | 736 | ND |
| 40864 | 737 | ND |
| 40865 | 738 | ND |
| 40866 | 739 | ND |
| 40867 | 740 | ND |
| 40868 | 741 | ND |
| 40869 | 742 | ND |
| 40870 | 743 | ND |
| 40871 | 744 | ND |
| 40872 | 745 | ND |
| 40873 | 746 | ND |
| 40874 | 747 | ND |
| 40875 | 748 | ND |
| 40876 | 749 | ND |
| 40877 | 750 | ND |
| 40878 | 751 | ND |
| 40879 | 752 | ND |
| 40880 | 753 | ND |
| 40881 | 754 | ND |
| 40882 | 755 | ND |
| 40883 | 756 | ND |
| 40884 | 757 | ND |
| 40885 | 758 | ND |
| 40886 | 759 | ND |
| 40887 | 760 | ND |
| 40888 | 761 | ND |
| 40889 | 762 | ND |
| 40890 | 763 | ND |
| 40891 | 764 | ND |
| 40892 | 765 | ND |
| 40893 | 766 | ND |
| 40894 | 767 | ND |
| 40895 | 768 | ND |
| 40896 | 769 | ND |
| 40897 | 770 | ND |
| 40898 | 777 | ND |
| 40899 | 778 | ND |
| 40900 | 779 | ND |
| 40901 | 780 | ND |
| 40902 | 781 | ND |
| 40903 | 782 | ND |
| 40904 | 783 | ND |
| 40905 | 784 | ND |
| 40906 | 785 | ND |
| 40907 | 786 | ND |
| 40908 | 787 | ND |
| 40909 | 788 | ND |
| 40910 | 789 | ND |
| 40911 | 790 | ND |
| 40912 | 791 | ND |

[0262] d. Protein Affinity for the gRNA

[0263] In some embodiments, a CasX variant protein for use in the AAV systems of the disclosure has improved affinity for the gRNA relative to a reference CasX protein, leading to the formation of the ribonucleoprotein complex. Increased affinity of the CasX variant protein for the gRNA may, for example, result in a lower K_{d} for the generation of a RNP complex, which can, in some cases, result in a more stable ribonucleoprotein complex formation. In some embodiments, increased affinity of the CasX variant protein for the gRNA results in increased stability of the ribonucleoprotein complex when delivered to human cells. This increased stability can affect the function and utility of the complex in the cells of a subject, as well as result in improved pharmacokinetic properties in blood, when delivered to a subject. In some embodiments, increased affinity of the CasX variant protein, and the resulting increased stability of the ribonucleoprotein complex, allows for a lower dose of the CasX variant protein to be delivered to the subject or cells while still having the desired activity, for example in vivo or in vitro gene editing. In some embodiments, a higher affinity (tighter binding) of a CasX variant protein to a gRNA allows for a greater amount of editing events when both the CasX variant protein and the gRNA remain in an RNP complex. Increased editing events can be assessed using editing assays such as the EGFP disruption assay described herein.

[0264] In some embodiments, the K_{d} of a CasX variant protein for a gRNA is increased relative to a reference CasX protein by a factor of at least about 1.1, at least about 1.2, at least about 1.3, at least about 1.4, at least about 1.5, at least about 1.6, at least about 1.7, at least about 1.8, at least about 1.9, at least about 2, at least about 3, at least about 4, at least about 5, at least about 6, at least about 7, at least about 8, at least about 9, at least about 10, at least about 15, at least about 20, at least about 25, at least about 30, at least about 35, at least about 40, at least about 45, at least about 50, at least about 60, at least about 70, at least about 80, at least about 90, or at least about 100. In some embodiments, the CasX variant has about 1.1 to about 10-fold increased binding affinity to the gRNA compared to the reference CasX protein of SEQ ID NO: 2.

[0265] In some embodiments, increased affinity of the CasX variant protein for the gRNA results in increased stability of the ribonucleoprotein complex when delivered to mammalian cells, including in vivo delivery to a subject. This increased stability can affect the function and utility of the complex in the cells of a subject, as well as result in improved pharmacokinetic properties in blood, when delivered to a subject. In some embodiments, increased affinity of the CasX variant protein, and the resulting increased stability of the ribonucleoprotein complex, allows for a lower dose of the CasX variant protein to be delivered to the subject or cells while still having the desired activity; for example in vivo or in vitro gene editing. The increased ability to form RNP and keep them in stable form can be assessed using assays such as the in vitro cleavage assays described in the Examples herein. In some embodiments, RNP comprising the CasX variants of the disclosure are able to achieve a k_{cleave} rate when complexed as an RNP that is at last 2-fold, at least 5-fold, or at least 10-fold higher compared to RNP comprising a reference CasX of SEQ ID NOS: 1-3.

[0266] In some embodiments, a higher affinity (tighter binding) of a CasX variant protein to a gRNA allows for a greater amount of editing events when both the CasX variant protein and the gRNA remain in an RNP complex. Increased editing events can be assessed using editing assays such as the assays described herein.

[0267] Without wishing to be bound by theory, in some embodiments amino acid changes in the Helical I domain can increase the binding affinity of the CasX variant protein with the gRNA targeting sequence, while changes in the Helical II domain can increase the binding affinity of the CasX variant protein with the gRNA scaffold stem loop, and changes in the oligonucleotide binding domain (OBD) increase the binding affinity of the CasX variant protein with the gRNA triplex.

[0268] Methods of measuring CasX protein binding affinity for a gRNA include in vitro methods using purified CasX protein and gRNA. The binding affinity for reference CasX and variant proteins can be measured by fluorescence polarization if the gRNA or CasX protein is tagged with a fluorophore. Alternatively, or in addition, binding affinity can be measured by biolayer interferometry, electrophoretic mobility shift assays (EMSAs), or filter binding. Additional standard techniques to quantify absolute affinities of RNA binding proteins such as the reference CasX and variant proteins of the disclosure for specific gRNAs such as reference gRNAs and variants thereof include, but are not limited to, isothermal calorimetry (ITC), and surface plasmon resonance (SPR), as well as the methods of the Examples.

[0269] e. Affinity for Target Nucleic Acid

[0270] In some embodiments, a CasX variant protein for use in the AAV systems of the disclosure has improved binding affinity for a target nucleic acid sequence relative to the affinity of a reference CasX protein for a target nucleic acid sequence. CasX variants with higher affinity for their target nucleic acid may, in some embodiments, cleave the target nucleic acid sequence more rapidly than a reference CasX protein that does not have increased affinity for the target nucleic acid. In some embodiments, the improved affinity for the target nucleic acid sequence comprises improved affinity for the target nucleic acid sequence, improved binding affinity to a wider spectrum of PAM sequences, an improved ability to search DNA for the target nucleic acid sequence, or any combinations thereof. Without wishing to be bound by theory, it is thought that CRISPR/Cas system proteins such as CasX may find their target nucleic acid sequences by one-dimension diffusion along a DNA molecule. The process is thought to include (1) binding of the ribonucleoprotein to the DNA molecule followed by (2) stalling at the target nucleic acid sequence, either of which may be, in some embodiments, affected by improved affinity of CasX proteins for a target nucleic acid sequence, thereby improving function of the CasX variant protein compared to a reference CasX protein.

[0271] In some embodiments, a CasX variant protein for use in the AAV systems has improved binding affinity for the non-target strand of the target nucleic acid. As used herein, the term “non-target strand” refers to the strand of the DNA target nucleic acid sequence that does not form Watson and Crick base pairs with the targeting sequence in the gRNA, and is complementary to the target strand. In some embodiments, the CasX variant protein has about 1.1 to about 100-fold increased binding affinity to the non-target stand of the target nucleic acid compared to the reference protein of SEQ ID NO: 1, SEQ ID NO: 2, or SEQ ID NO: 3, or to the CasX variants 119 (SEQ ID NO: 72) and CasX 491 (SEQ ID NO:138).

[0272] Methods of measuring CasX protein (such as reference or variant) affinity for a target nucleic acid molecule may include electrophoretic mobility shift assays (EMSAs), filter binding, isothermal calorimetry (ITC), and surface plasmon resonance (SPR), fluorescence polarization and biolayer interferometry (BLI). Further methods of measuring CasX protein affinity for a target include in vitro biochemical assays that measure DNA cleavage events over time.

[0273] In some embodiments, the CasX variant protein for use in the AAV systems is catalytically dead (dCasX). In some embodiments, the disclosure provides RNP comprising a catalytically-dead CasX protein that retains the ability to bind target DNA. An exemplary catalytically-dead CasX variant protein comprises one or more mutations in the active site of the RuvC domain of the CasX protein. In some embodiments, a catalytically-dead CasX variant protein comprises substitutions at residues 672, 769 and/or 935 of SEQ ID NO: 1. In some embodiments, a catalytically-dead CasX variant protein comprises substitutions of D672A, E769A and/or D935A in the reference CasX protein of SEQ ID NO: 1. In some embodiments, a catalytically-dead CasX protein comprises substitutions at amino acids 659, 765 and/or 922 of SEQ ID NO: 2. In some embodiments, a catalytically-dead CasX protein comprises D659A, E756A and/or D922A substitutions in a reference CasX protein of SEQ ID NO: 2. In further embodiments, a catalytically-dead reference CasX protein comprises deletions of all or part of the RuvC domain of the reference CasX protein. Exemplary dCasX sequences are provided as SEQ ID NOS: 40808-40827, 41006-41009 in Table 7.

[0274] In some embodiments, improved affinity for DNA of a CasX variant protein also improves the function of catalytically inactive versions of the CasX variant protein. In some embodiments, the catalytically inactive version of the CasX variant protein comprises one or mutations in the DED motif in the RuvC. Catalytically dead CasX variant proteins can, in some embodiments, be used for base editing or epigenetic modifications. With a higher affinity for DNA, in some embodiments, catalytically-dead CasX variant proteins can, relative to catalytically active CasX, find their target DNA faster, remain bound to target DNA for longer periods of time, bind target DNA in a more stable fashion, or a combination thereof, thereby improving the function of the catalytically-dead CasX variant protein.

[0275] f. Improved Specificity for a Target Site

[0276] In some embodiments, a CasX variant protein for use in the AAV systems has improved specificity for a target nucleic acid sequence relative to a reference CasX protein. As used herein, “specificity,” interchangeably referred to as “target specificity,” refers to the degree to which a CRISPR/Cas system ribonucleoprotein complex cleaves off-target sequences that are similar, but not identical to the target nucleic acid sequence; e.g., a CasX variant RNP with a higher degree of specificity would exhibit reduced off-target cleavage of sequences relative to a reference CasX protein. The specificity, and the reduction of potentially deleterious off-target effects, of CRISPR/Cas system proteins can be vitally important in order to achieve an acceptable therapeutic index for use in mammalian subjects.

[0277] Without wishing to be bound by theory, it is possible that amino acid changes in the Helical I and II domains that increase the specificity of the CasX variant protein for the target nucleic acid strand can increase the specificity of the CasX variant protein for the target nucleic acid sequence overall. In some embodiments, amino acid changes that increase specificity of CasX variant proteins for target nucleic acid sequence may also result in decreased affinity of CasX variant proteins for DNA.

[0278] Methods of testing CasX protein (such as variant or reference) target specificity may include guide and Circularization for In vitro Reporting of Cleavage Effects by Sequencing (CIRCLE-seq), or similar methods. In brief, in CIRCLE-seq techniques, genomic DNA is sheared and circularized by ligation of stem-loop adapters, which are nicked in the stem-loop regions to expose 4 nucleotide palindromic overhangs. This is followed by intramolecular ligation and degradation of remaining linear DNA. Circular DNA molecules containing a CasX cleavage site are subsequently linearized with CasX, and adapter adapters are ligated to the exposed ends followed by high-throughput sequencing to generate paired end reads that contain information about the off-target site. Additional assays that can be used to detect off-target events, and therefore CasX protein specificity include assays used to detect and quantify indels (insertions and deletions) formed at those selected off-target sites such as mismatch-detection nuclease assays and next generation sequencing (NGS). Exemplary mismatch-detection assays include nuclease assays, in which genomic DNA from cells treated with CasX and sgRNA is PCR amplified, denatured and rehybridized to form hetero-duplex DNA, containing one wild type strand and one strand with an indel. Mismatches are recognized and cleaved by mismatch detection nucleases, such as Surveyor nuclease or T7 endonuclease I.

[0279] g. Protospacer and PAM Sequences

[0280] Herein, the protospacer is defined as the DNA sequence complementary to the targeting sequence of the guide RNA and the DNA complementary to that sequence, referred to as the target strand and non-target strand, respectively. As used herein, the PAM is a nucleotide sequence proximal to the protospacer that, in conjunction with the targeting sequence of the gRNA, helps the orientation and positioning of the CasX for the potential cleavage of the protospacer strand(s).

[0281] PAM sequences may be degenerate, and specific RNP constructs may have different preferred and tolerated PAM sequences that support different efficiencies of cleavage. Following convention, unless stated otherwise, the disclosure refers to both the PAM and the protospacer sequence and their directionality according to the orientation of the non-target strand. This does not imply that the PAM sequence of the non-target strand, rather than the target strand, is determinative of cleavage or mechanistically involved in target recognition. For example, when reference is to a TTC PAM, it may in fact be the complementary GAA sequence that is required for target cleavage, or it may be some combination of nucleotides from both strands. In the case of the CasX proteins disclosed herein, the PAM is located 5′ of the protospacer with a single nucleotide separating the PAM from the first nucleotide of the protospacer. Thus, in the case of reference CasX, in which the canonical PAM is TTC, the PAM should be understood to mean a sequence following the formula 5′- . . . NNTTCN(protospacer)NNNNNN . . . 3′ where ‘N’ is any DNA nucleotide and ‘(protospacer)’ is a DNA sequence having identity with the targeting sequence of the guide RNA. In the case of a CasX variant with expanded PAM recognition, a TTC, CTC, GTC, or ATC PAM should be understood to mean a sequence following the formulae:

### 5′- . . . NNTTCN(protospacer)NNNNNN . . . 3′;

### 5′- . . . NNCTCN(protospacer)NNNNNN . . . 3′;

### 5′- . . . NNGTCN(protospacer)NNNNNN . . . 3′; or

[0282] 5′- . . . NNATCN(protospacer)NNNNNN . . . 3′. Alternatively, a TC PAM should be understood to mean a sequence following the formula 5′- . . . NNNTCN(protospacer)NNNNNN . . . 3′.

[0283] Additionally, the CasX variant proteins of the disclosure have an enhanced ability to efficiently edit and/or bind target nucleic acid, when complexed with a gRNA as an RNP, utilizing a PAM TC motif, including PAM sequences selected from TTC, ATC, GTC, or CTC, (in a 5′ to 3′ orientation), compared to an RNP of a reference CasX protein and reference gRNA, or to an RNP of another CasX variant from which it was derived, such as CasX 491, and gRNA 174. In the foregoing, the PAM sequence is located at least 1 nucleotide 5′ to the non-target strand of the protospacer having identity with the targeting sequence of the gRNA in an assay system compared to the editing efficiency and/or binding of an RNP comprising a reference CasX protein and reference gRNA in a comparable assay system. In one embodiment, an RNP of a CasX variant and gRNA variant exhibits greater editing efficiency and/or binding of a target sequence in the target nucleic acid compared to an RNP comprising a reference CasX protein and a reference gRNA (or an RNP of another CasX variant from which it was derived, such as CasX 491, and gRNA 174) in a comparable assay system, wherein the PAM sequence of the target DNA is TTC. In another embodiment, an RNP of a CasX variant and gRNA variant exhibits greater editing efficiency and/or binding of a target sequence in the target nucleic acid compared to an RNP comprising a reference CasX protein and a reference gRNA (or an RNP of another CasX variant from which it was derived, such as CasX 491 and gRNA 174) in a comparable assay system, wherein the PAM sequence of the target DNA is ATC. In a particular embodiment of the foregoing, wherein the CasX variant exhibits enhanced editing with an ATC PAM, the CasX variant is 528 (SEQ ID NO: 157). In another embodiment, an RNP of a CasX variant and gRNA variant exhibits greater editing efficiency and/or binding of a target sequence in the target nucleic acid compared to an RNP comprising a reference CasX protein and a reference gRNA (or an RNP of another CasX variant from which it was derived, such as CasX 491, and gRNA 174) in a comparable assay system, wherein the PAM sequence of the target DNA is CTC. In another embodiment, an RNP of a CasX variant and gRNA variant exhibits greater editing efficiency and/or binding of a target sequence in the target nucleic acid compared to an RNP comprising a reference CasX protein and a reference gRNA (or an RNP of another CasX variant from which it was derived and gRNA 174) in a comparable assay system, wherein the PAM sequence of the target DNA is GTC. In the foregoing embodiments, the increased editing efficiency and/or binding affinity for the one or more PAM sequences is at least 1.5-fold, at least 2-fold, at least 4-fold, at least 10-fold, at least 20-fold, at least 30-fold, or at least 40-fold greater or more compared to the editing efficiency and/or binding affinity of an RNP of any one of the CasX proteins of SEQ ID NOS: 1-3 and the gRNA comprising a sequence of Table 1 for the PAM sequences. Exemplary assays demonstrating the improved editing are described herein, in the Examples. In some embodiments, a CasX protein can bind and/or modify (e.g., cleave, nick, methylate, demethylate, etc.) a target nucleic acid and/or a polypeptide associated with target nucleic acid (e.g., methylation or acetylation of a histone tail). In some embodiments, the CasX protein is catalytically-dead (dCasX) but retains the ability to bind a target nucleic acid.

[0284] h. Affinity for Target RNA

[0285] In some embodiments, variants of a reference CasX protein for use in the AAV systems of the disclosure have increased specificity for a target RNA, and increased the activity with respect to a target RNA when compared to the reference CasX protein. For example, CasX variant proteins can display increased binding affinity for target RNAs, or increased cleavage of target RNAs, when compared to reference CasX proteins. In some embodiments, a ribonucleoprotein complex comprising a CasX variant protein binds to a target RNA and/or cleaves the target RNA. In some embodiments, a CasX variant has at least about two-fold to about 10-fold increased binding affinity to the target RNA compared to the reference protein of SEQ ID NO: 1, SEQ ID NO: 2, or SEQ ID NO: 3.

[0286] i. CasX Variant Proteins with Domains from Multiple Source Proteins

[0287] In some embodiments, the disclosure provides AAV encoding a chimeric CasX variant protein comprising protein domains from two or more different CasX proteins, such as two or more naturally occurring CasX proteins, or two or more CasX variant protein sequences as described herein. As used herein, a “chimeric CasX protein” refers to a CasX containing at least two domains isolated or derived from different sources, such as two naturally occurring proteins, which may, in some embodiments, be isolated from different species. For example, in some embodiments, a chimeric CasX protein comprises a first domain from a first CasX protein and a second domain from a second, different CasX protein. In some embodiments, the first domain can be selected from the group consisting of the NTSB, TSL, helical I, helical II, OBD and RuvC domains. In some embodiments, the second domain is selected from the group consisting of the NTSB, TSL, helical I, helical II, OBD and RuvC domains with the second domain being different from the foregoing first domain. For example, a chimeric CasX protein may comprise an NTSB, TSL, helical I, helical IL, OBD domains from a CasX protein of SEQ ID NO: 2, and a RuvC domain from a CasX protein of SEQ ID NO: 1, or vice versa. As a further example, a chimeric CasX protein may comprise an NTSB, TSL, helical II, OBD and RuvC domain from CasX protein of SEQ ID NO: 2, and a helical I domain from a CasX protein of SEQ ID NO: 1, or vice versa. Thus, in certain embodiments, a chimeric CasX protein may comprise an NTSB, TSL, helical II, OBD and RuvC domain from a first CasX protein, and a helical I domain from a second CasX protein. In some embodiments of the chimeric CasX proteins, the domains of the first CasX protein are derived from the sequences of SEQ ID NO: 1, SEQ ID NO: 2 or SEQ ID NO: 3, and the domains of the second CasX protein are derived from the sequences of SEQ ID NO: 1, SEQ ID NO: 2 or SEQ ID NO: 3, and the first and second CasX proteins are not the same. In some embodiments, domains of the first CasX protein comprise sequences derived from SEQ ID NO: 1 and domains of the second CasX protein comprise sequences derived from SEQ ID NO: 2. In some embodiments, domains of the first CasX protein comprise sequences derived from SEQ ID NO: 1 and domains of the second CasX protein comprise sequences derived from SEQ ID NO: 3. In some embodiments, domains of the first CasX protein comprise sequences derived from SEQ ID NO: 2 and domains of the second CasX protein comprise sequences derived from SEQ ID NO: 3. As an example of the foregoing, the chimeric RuvC domain comprises amino acids 660 to 823 of SEQ ID NO: 1 and amino acids 921 to 978 of SEQ ID NO: 2. As an alternative example of the foregoing, a chimeric RuvC domain comprises amino acids 647 to 810 of SEQ ID NO: 2 and amino acids 934 to 986 of SEQ ID NO: 1. In some embodiments, the at least one chimeric domain comprises a chimeric helical I domain wherein the chimeric helical I domain comprises amino acids 56-99 of SEQ ID NO: 1 and amino acids 192-332 of SEQ ID NO: 2. In some embodiments, the chimeric CasX variant is further modified, including the CasX variants selected from the group consisting of the sequences of SEQ ID NO: 40959, SEQ ID NO: 40960, SEQ ID NO: 40968, SEQ ID NO: 40977, SEQ ID NO: 40969, SEQ ID NO: 40970, SEQ ID NO: 40971, SEQ ID NO: 40972, SEQ ID NO: 40973, SEQ ID NO: 40961, SEQ ID NO: 40978, SEQ ID NO: 40962, SEQ ID NO: 40979, SEQ ID NO: 40963, SEQ ID NO: 40980, SEQ ID NO: 40964, SEQ ID NO: 40981, SEQ ID NO: 40965, SEQ ID NO: 40982, SEQ ID NO: 40966, SEQ ID NO: 40983, SEQ ID NO: 40967, SEQ ID NO: 40974, SEQ ID NO: 40975, SEQ ID NO: 40976, SEQ ID NO: 40984, and SEQ ID NO: 40985. In some embodiments, the one or more additional modifications comprises an insertion, substitution or deletion as described herein.

[0288] In the case of split or non-contiguous domains such as helical I, RuvC and OBD, a portion of the non-contiguous domain can be replaced with the corresponding portion from any other source. For example, the helical I-I domain (sometimes referred to as helical I-a) in SEQ ID NO: 2 can be replaced with the corresponding helical I-I sequence from SEQ ID NO: 1, and the like. Domain sequences from reference CasX proteins, and their coordinates, are shown in Table 4. Representative examples of chimeric CasX proteins include the variants of CasX 472-483, 485-491 and 515, the sequences of which are set forth in Table 3.

TABLE 4
Domain coordinates in Reference CasX proteins

| | Coordinates in | Coordinates in |
|---|---|---|
| Domain Name | SEQ ID NO: 1 | SEQ ID NO: 2 |
| OBD-I | 1-55 | 1-57 |
| helical I-I | 56-99 | 58-101 |
| NTSB | 100-190 | 102-191 |
| helical I-II | 191-331 | 192-332 |
| helical II | 332-508 | 333-500 |
| OBD-II | 509-659 | 501-646 |
| RuvC-I | 660-823 | 647-810 |
| TSL | 824-933 | 811-920 |
| RuvC-II | 934-986 | 921-978 |

*OBD I and II, helical I-I and I-II, and RuvC I and II are also referred to herein as OBD a and b, helical I a and b, and RuvC a and b.

[0289] Exemplary domain sequences are provided in Table 5 below.

TABLE 5
Exemplary Domain Sequences
Deltaproteobacter sp. (reference CasX of SEQ ID NO: 1)

| SEQ | | |
|---|---|---|
| ID | Domain | Sequence |
| 40986 | OBD-I | EKRINKIRKKLSADNATKPVSRSGPMKTLLVRVMTDDLKKRLEKRRKKPEVMPQ |
| 40987 | helical I-I | VISNNAANNLRMLLDDYTKMKEAILQVYWQEFKDDHVGLMCKFA |
| 40988 | NTSB | QPASKKIDQNKLKPEMDEKGNLTTAGFACSQCGQPLFVYKLEQVSEKGKAYTNY |
| | | FGRCNVAEHEKLILLAQLKPEKDSDEAVTYSLGKFGQ |
| 40989 | helical I-II | RALDFYSIHVTKESTHPVKPLAQIAGNRYASGPVGKALSDACMGTIASFLSKYQD |
| | | IIIEHQKVVKGNQKRLESLRELAGKENLEYPSVTLPPQPHTKEGVDAYNEVIARVR |
| | | MWVNLNLWQKLKLSRDDAKPLLRLKGFPSF |
| 40990 | helical II | PVVERRENEVDWWNTINEVKKLIDAKRDMGRVFWSGVTAEKRNTILEGYNYLP |
| | | NENDHKKREGSLENPKKPAKRQFGDLLLYLEKKYAGDWGKVFDEAWERIDKKI |
| | | AGLTSHIEREEARNAEDAQSKAVLTDWLRAKASFVLERLKEMDEKEFYACEIQL |
| | | QKWYGDLRG NPFAVEAE |
| 40991 | OBD-II | NRVVDISGFSIGSDGHSIQYRNLLAWKYLENGKREFYLLMNYGKKGRIRFTDGTD |
| | | IKKSGKWQGLLYGGGKAKVIDLTFDPDDEQLIILPLAFGTRQGREFIWNDLLSLET |
| | | GLIKLANGRVIEKTIYNKKIGRDEPALFVALTFERREVVD |
| 40992 | RuvC-I | PSNIKPVNLIGVDRGENIPAVIALTDPEGCPLPEFKDSSGGPTDILRIGEGYKEKQR |
| | | AIQAAKEVEQRRAGGYSRKFASKSRNLADDMVRNSARDLFYHAVTHDAVLVFE |
| | | NLSRGFGRQGKRTFMTERQYTKMEDWLTAKLAYEGLTSKTYLSKTLAQYTSKT |
| | | C |
| 40993 | TSL | SNCGFTITTADYDGMLVRLKKTSDGWATTLNNKELKAEGQITYYNRYKRQTVE |
| | | KELSAELDRLSEESGNNDISKWTKGRRDEALFLLKKRFSHRPVQEQFVCLDCGHE |
| | | VH |
| 40994 | RuvC-II | ADEQAALNIARSWLFLN SNSTEFKSYKSGKQPFVGAWQAFYKRRLKEVWKPNA |

Planctomycetes sp. (Reference CasX of SEQ ID NO: 2)

| SEQ | | |
|---|---|---|
| ID | Domain | Sequence |
| 40995 | OBD-I | QEIKRINKIRRRLVKDSNTKKAGKTGPMKTLLVRVMTPDLRERLENLRKKPENIP |
| | | Q |
| 40996 | helical I-II | PISNTSRANLNKLLTDYTEMKKAILHVYWEEFQKDPVGLMSRVA |
| 40997 | NTSB | QPAPKNIDQRKLIPVKDGNERLTSSGFACSQCCQPLYVYKLEQVNDKGKPHTNYF |
| | | GRCNVSEHERLILLSPHKPEANDELVTYSLGKFGQ |
| 40998 | helical I-II | RALDFYSIHVTRESNHPVKPLEQIGGNSCASGPVGKALSDACMGAVASFLTKYQ |
| | | DIILEHQKVIKKNEKRLANLKDIASANGLAFPKITLPPQPHTKEGIEAYNNVVAQI |
| | | VIWVNLNLWQKLKIGRDEAKPLQRLKGFPSF |
| 40999 | helical II | PLVERQANEVDWWDMVCNVKKLINEKKEDGKVFWQNLAGYKRQEALLPYLSS |
| | | EEDRKKGKKFARYQFGDLLLHLEKKHGEDWGKVYDEAWERIDKKVEGLSKHIK |
| | | LEEERRSEDAQSKAALTDWLRAKASFVIEGLKEADKDEFCRCELKLQKWYGDLR |
| | | GKPFAIEAE |
| 41000 | OBD-II | NSILDISGFSKQYNCAFIWQKDGVKKLNLYLIINYFKGGKLRFKKIKPEAFEANRF |
| | | YTVINKKSGEIVPMEVNFNFDDPNLIILPLAFGKRQGREFIWNDLLSLETGSLK |
| | | LANGRVIEKTLYNRRTRQDEPALFVALTFERREVLD |
| 41001 | RuvC-I | SSNIKPMNLIGIDRGENIPAVIALTDPEGCPLSRFKDSLGNPTHILRIGESYKEKQRT |
| | | IQAAKEVEQRRAGGYSRKYASKAKNLADDMVRNTARDLLYYAVTQDAMLIFEN |
| | | LSRGFGRQGKRTFMAERQYTRMEDWLTAKLAYEGLPSKTYLSKTLAQYTSKTC |
| 41002 | TSL | SNCGFTITSADYDRVLEKLKKTATGWMTTINGKELKVEGQITYYNRYKRQNVVK |
| | | DLSVELDRLSEESVNNDISSWTKGRSGEALSLLKKRFSHRPVQEKFVCLNCGFET |
| | | H |
| 41003 | RuvC-II | ADEQAALNIARSWLFLRSQEYKKYQTNKTTGNTDKRAFVETWQSFYRKKLKEV |
| | | WKPAV |

[0290] A further exemplary helical II domain sequence is provided as SEQ ID NO: 41004, and a further exemplary RuvC a domain sequence is provided as SEQ ID NO: 41005.

[0291] In other embodiments, a CasX variant protein comprises a sequence of SEQ ID NOS: 49-160, 40208-40286, or 40828-40912 as set forth in Table 3, and further comprises one or more NLS disclosed herein at or near either the N-terminus, the C-terminus, or both. In other embodiments, a CasX variant protein comprises a sequence of SEQ ID NOS: 72-160, 40208-40286, or 40828-40912, and further comprises one or more NLS disclosed herein at or near either the N-terminus, the C-terminus, or both. In other embodiments, a CasX variant protein comprises a sequence of SEQ ID NOS: 144-160, 40208-40286, or 40828-40912, and further comprises one or more NLS disclosed herein at or near either the N-terminus, the C-terminus, or both. It will be understood that in some cases, the N-terminal methionine of the CasX variants of the Tables is removed from the expressed CasX variant during post-translational modification. The person of ordinary skill in the art will understand that an NLS near the N or C terminus of a protein can be within 1, 2, 3, 4, 5, 6, 7, 8, 9, 10, 11, 12, 13, 14, 15, 16, 17, 18, 20 or 20 amino acids of the N or C terminus.

[0292] j. CasX Variants Derived from Other CasX Variants

[0293] In further iterations of the generation of variant proteins, a variant protein can be utilized to generate additional CasX variants of the disclosure. For example, CasX 119 (SEQ ID NO: 72), CasX 491 (SEQ ID NO: 138), and CasX 515 (SEQ ID NO: 145) are exemplary variant proteins that are modified to generate additional CasX variants of the disclosure having improvements or additional properties relative to a reference CasX or CasX variants from which they were derived. CasX 119 contains a substitution of L379R, a substitution of A708K and a deletion of P at position 793 of SEQ ID NO: 2. CasX 491 contains NTSB and Helical 1B swap from SEQ ID NO: 1. CasX 515 was derived from CasX 491 by insertion of P at position 793 (relative to SEQ ID NO:2) and was used to create the CasX variants described in Example 21. For example, CasX 668 has an insertion of R at position 26 and a substitution of G223S relative to CasX 515. CasX 672 has substitutions of L169K and G223S relative to CasX 515. CasX 676 has substitutions of L169K and G223S and an insertion of R at position 26 relative to CasX 515.

[0294] Exemplary methods used to generate and evaluate CasX variants derived from other CasX variants are described in the Examples, which were created by introducing modifications to the encoding sequence resulting in amino acid substitutions, deletions, or insertions at one or more positions in one or more domains of the CasX variant. In particular, Example 21 describes the methods used to create variants of CasX 515 (SEQ ID NO: 145) that were then assayed to determine those positions in the sequence that, when modified by an amino acid insertion, deletion or substitution, resulted in an enrichment or improvement in the assays. For purposes of the disclosure, the sequences of the domains of CasX 515 are provided in Table 6 and include an OBD-I domain having the sequence of SEQ ID NO: 40995, an OBD-II domain having the sequence of SEQ ID NO: 41000, NTSB domain having the sequence of SEQ ID NO: 40988, a helical I-I domain having the sequence of SEQ ID NO: 40996, a helical I-II domain having the sequence of SEQ ID NO: 40989, a helical II domain having the sequence of SEQ ID NO: 41004, a RuvC-I domain having the sequence of SEQ ID NO: 41005, a RuvC-II domain having the sequence of SEQ ID NO: 41003, and a TSL domain having the sequence of SEQ ID NO: 41002. By the methods of the disclosure, individual positions in the domains of CasX 515 were modified, assayed, and the resulting positions and exemplary modifications leading to an enrichment or improvement that follow are provided, relative to their position in each domain or subdomain. In some cases, such positions are disclosed in Tables 30-33 of the Examples. In some embodiments, the disclosure provides CasX variants derived from CasX 515 comprising one or more modifications (i.e., an insertion, a deletion, or a substitution) at one or more amino acid positions in the NTSB domain relative to the NTSB domain sequence (SEQ ID NO: 40988) selected from the group consisting of P2, S4, Q9, E15, G20, G33, L41, Y51, F55, L68, A70, E75, K88, and G90, wherein the modification results in an improved characteristic relative to CasX 515. In a particular embodiment, the one or more modifications at one or more amino acid positions in the NTSB domain relative to the NTSB domain sequence (SEQ ID NO: 40988) are selected from the group consisting of \hat{ }G2, \hat{ }I4, \hat{ }L4, Q9P, E15S, G20D, [S30], G33T, L41A, Y51T, F55V, L68D, L68E, L68K, A70Y, A70S, E75A, E75D, E75P, K88Q, and G90Q (where “\hat{ }” represents and insertion and “[ ]” represents a deletion at that position). In some embodiments, the disclosure provides CasX variants derived from CasX 515 comprising one or more modifications at one or more amino acid positions in the helical I-II domain relative to the helical I-II domain sequence (SEQ ID NO: 40989) selected from the group consisting of 124, A25, Y29 G32, G44, S48, S51, Q54, 156, V63, S73, L74, K97, V100, M112, L116, G137, F138, and S140, wherein the modification results in an improved characteristic relative to CasX 515. In a particular embodiment, the one or more modifications at one or more amino acid positions in the helical I-II domain are selected from the group consisting of \hat{ }T24, \hat{ }C25, Y29F, G32Y, G32N, G32H, G32S, G32T, G32A, G32V, [G32], G32S, G32T, G44L, G44H, S48H, S48T, S51T, Q54H, I56T, V63T, S73H, L74Y, K97G, K97S, K97D, K97E, V100L, M112T, M112W, M112R, M112K, L116K, G137R, G137K, G137N, \hat{ }Q138, and S140Q. In some embodiments, the disclosure provides CasX variants derived from CasX 515 comprising one or more modifications at one or more amino acid positions in the helical II domain relative to the helical II domain sequence (SEQ ID NO: 41004) selected from the group consisting of L2, V3, E4, R5, Q6, A7, E9, V10, D11, W12, W13, D14, M15, V16, C17, N18, V19, K20, L22, I23, E25, K26, K31, Q35, L37, A38, K41, R42, Q43, E44, L46, K57, Y65, G68, L70, L71, L72, E75, G79, D81, W82, K84, V85, Y86, D87, I93, K95, K96, E98, L100, K102, I104, K105, E109, R110, D114, K118, A120, L121, W124, L125, R126, A127, A129, I133, E134, G135, L136, E138, D140, K141, D142, E143, F144, C145, C147, E148, L149, K150, L151, Q152, K153, L158, E166, and A167, wherein the modification results in an improved characteristic relative to CasX 515. In a particular embodiment, the one or more modifications at one or more amino acid positions in the helical II domain are selected from the group consisting of \hat{ }A2, \hat{ }H2, [L2]+[V3], V3E, V3Q, V3F, [V3], \hat{ }D3, V3P, E4P, [E4], E4D, E4L, E4R, R5N, Q6V, \hat{ }Q6, \hat{ }G7, \hat{ }H9, \hat{ }A9, VD10, \hat{ }T10, [V10], \hat{ }F10, \hat{ }D11, [D11], D11S, [W12], W12T, W12H, \hat{ }P12, \hat{ }Q13, \hat{ }G12, \hat{ }R13, W13P, W13D, \hat{ }D13, W13L, \hat{ }P14, \hat{ }D14, [D14]+[M15], [M15], \hat{ }T16, \hat{ }P17, N18I, V19N, V19H, K20D, L22D, I23S, E25C, E25P, \hat{ }G25, K26T, K27E, K31L, K31Y, Q35D, Q35P, \hat{ }S37, [L37]+[A38], K41L, \hat{ }R42, [Q43]+[E44], L46N, K57Q, Y65T, G68M, L70V, L71C, L72D, L72N, L72W, L72Y, E75F, E75L, E75Y, G79P, \hat{ }E79, \hat{ }T81, \hat{ }R81, \hat{ }W81, \hat{ }Y81, \hat{ }W82, \hat{ }Y82, W82G, W82R, K84D, K84H, K84P, K84T, V85L, V85A, \hat{ }L85, Y86C, D87G, D87M, D87P, I93C, K95T, K96R, E98G, L100A, K102H, I104T, I104S, I104Q, K105D, \hat{ }K109, E109L, R 110D, [R110], D114E, \hat{ }D114, K118P, A120R, L121T, W124L, L125C, R126D, A127E, A127L, A129T, A129K, I133E, \hat{ }C133, \hat{ }S134, \hat{ }G134, \hat{ }R135, G135P, L136K, L136D, L136S, L136H, [E138], D140R, \hat{ }D140, \hat{ }P141, \hat{ }D142, [E143]+[F144], \hat{ }Q143, F144K, [F144], [F144]+[C145], C145R, \hat{ }G145, C145K, C147D, \hat{ }V148, E148D, \hat{ }H149, L149R, K150R, L151H, Q152C, K153P, L158S, E166L, and \hat{ }F167. In some embodiments, the disclosure provides CasX variants derived from CasX 515 comprising one or more modifications at one or more amino acid positions in the RuvC-I domain relative to the RuvC-I domain sequence (SEQ ID NO: 41005) selected from the group consisting of 14, K5, P6, M7, N8, L9, V12, G49, K63, K80, N83, R90, M125, and L146, wherein the modification results in an improved characteristic relative to CasX 515. In a particular embodiment, the one or more modifications at one or more amino acid positions in the RuvC-I domain are selected from the group consisting of \hat{ }I4, \hat{ }S5, \hat{ }T6, \hat{ }N6, \hat{ }R7, \hat{ }K7, \hat{ }H8, \hat{ }S8, V12L, G49W, G49R, S51R, S51K, K62S, K62T, K62E, V65A, K80E, N83G, R90H, R90G, M125S, M125A, L137Y, \hat{ }P137, [L141], L141R, L141D, \hat{ }Q142, \hat{ }R143, \hat{ }N143, E144N, \hat{ }P146, L146F, P147A, K149Q, T150V, \hat{ }R152, \hat{ }H153, T155Q, \hat{ }H155, \hat{ }R155, \hat{ }L156, [L156], \hat{ }W156, \hat{ }A157, \hat{ }F157, A157S, Q158K, [Y159], T160Y, T160F, \hat{ }I161, S161P, T163P, \hat{ }N163, C164K, and C164M. In some embodiments, the disclosure provides CasX variants derived from CasX 515 comprising one or more modifications at one or more amino acid positions in the OBD-I domain relative to the OBD-I domain sequence (SEQ ID NO: 40995) selected from the group consisting of 14, K5, P6, M7, N8, L9, V12, G49, K63, K80, N83, R90, M125, and L146, wherein the modification results in an improved characteristic relative to CasX 515. In a particular embodiment, the one or more modifications at one or more amino acid positions in the OBD-I domain are selected from the group consisting of \hat{ }G3, I3G, I3E, \hat{ }G4, K4G, K4P, K4S, K4W, K4W, R5P, \hat{ }P5, \hat{ }G5, R5S, \hat{ }S5, R5A, R5P, R5G, R5L, I6A, I6L, \hat{ }G6, N7Q, N7L, N7S, K8G, K15F, D16W, \hat{ }F16, \hat{ }F18, \hat{ }P27, M28P, M28H, V33T, R34P, M36Y, R41P, L47P, \hat{ }P48, E52P, \hat{ }P55, [P55]+[Q56], Q56S, Q56P, \hat{ }D56, \hat{ }T56, and Q56P. In some embodiments, the disclosure provides CasX variants derived from CasX 515 comprising one or more modifications at one or more amino acid positions in the OBD-II domain relative to the OBD-II domain sequence (SEQ ID NO: 41000) selected from the group consisting of 14, K5, P6, M7, N8, L9, V12, G49, K63, K80, N83, R90, M125, and L146, wherein the modification results in an improved characteristic relative to CasX 515. In a particular embodiment, the one or more modifications at one or more amino acid positions in the OBD-I domain are selected from the group consisting of [S2], I3R, I3K, [I3]+[L4], [L4], K11T, \hat{ }P24, K37G, R42E, \hat{ }S53, \hat{ }R58, [K63], M70T, I82T, Q92L, Q92F, Q92V, Q92A, \hat{ }A93, K110Q, R115Q, L121T, \hat{ }A124, \hat{ }R141, \hat{ }D143, \hat{ }A143, \hat{ }W144, and \hat{ }A145. In some embodiments, the disclosure provides CasX variants derived from CasX 515 comprising one or more modifications at one or more amino acid positions in the TSL domain relative to the TSL domain sequence (SEQ ID NO: 41002) selected from the group consisting of S1, N2, C3, G4, F5, 17, K18, V58, S67, T76, G78, S80, G81, E82, S85, V96, and E98, wherein the modification results in an improved characteristic relative to CasX 515. In a particular embodiment, the one or more modifications at one or more amino acid positions in the OBD-I domain are selected from the group consisting of \hat{ }M1, [N2], \hat{ }V2, C3S, \hat{ }G4, \hat{ }W4, F5P, \hat{ }W7, K18G, V58D, \hat{ }A67, T76E, T76D, T76N, G78D, [S80], [G81], \hat{ }E82, \hat{ }N82, S85I, V96C, V96T, and E98D. It will be understood that combinations of any of the same foregoing modifications of the paragraph can similarly be introduced into the CasX variants of the disclosure, resulting in a CasX variant with improved characteristics. For example, in one embodiment, the disclosure provides CasX variant 535 (SEQ ID NO: 40211), which has a single mutation of G223S relative to CasX 515. In another embodiment, the disclosure provides CasX variant 668 (SEQ ID NO: 40344), which has an insertion of R at position 26 and a substitution of G223S relative to CasX 515. In another embodiment, the disclosure provides CasX 672 (SEQ ID NO: 40347), which has substitutions of L169K and G223S relative to CasX 515. In another embodiment, the disclosure provides CasX 676 (SEQ ID NO: 40351), which has substitutions of L169K and G223S and an insertion of R at position 26 relative to CasX 515. CasX variants with improved characteristics relative to CasX 515 include variants of Table 3.

[0295] Exemplary characteristics that can be improved in CasX variant proteins relative to the same characteristics in reference CasX proteins or relative to the CasX variant from which they were derived include, but are not limited to improved folding of the variant, increased binding affinity to the gRNA, increased binding affinity to the target nucleic acid, improved ability to utilize a greater spectrum of PAM sequences in the editing and/or binding of target nucleic acid, improved unwinding of the target DNA, increased editing activity, improved editing efficiency, improved editing specificity for the target nucleic acid, decreased off-target editing or cleavage, increased percentage of a eukaryotic genome that can be efficiently edited, increased activity of the nuclease, increased target strand loading for double strand cleavage, decreased target strand loading for single strand nicking, increased binding of the non-target strand of DNA, improved protein stability, improved protein:gRNA (RNP) complex stability, and improved fusion characteristics. In a particular embodiment, as described in the Examples, such improved characteristics can include, but are not limited to, improved cleavage activity in target nucleic acids having TTC, ATC, and CTC PAM sequences, increased specificity for cleavage of a target nucleic acid sequence, and decreased off-target cleavage of a target nucleic acid.

TABLE 6
CasX 515 domain sequences

| Domain | SEQ ID NO | Amino Acid Sequence |
|---|---|---|
| OBD-I | 40995 | QEIKRINKIRRRLVKDSNTKKAGKTGPMKTLLVRVMTPDLRERLE |
| | 48122 | NLRKKPENIPQ |
| Helical I-I | 40996 | PISNTSRANLNKLLTDYTEMKKAILHVYWEEFQKDPVGLMSRVA |
| | 41824 | |
| NTSB | 40988 | QPASKKIDQNKLKPEMDEKGNLTTAGFACSQCGQPLFVYKLEQV |
| | 41818 | SEKGKAYTNYFGRCNVAEHEKLILLAQLKPEKDSDEAVTYSLGKF |
| | | GQ |
| Helical I-II | 40989 | RALDFYSIHVTKESTHPVKPLAQIAGNRYASGPVGKALSDACMGT |
| | 40819 | IASFLSKYQDIIIEHQKVVKGNQKRLESLRELAGKENLEYPSVTLPP |
| | | QPHTKEGVDAYNEVIARVRMWVNLNLWQKLKLSRDDAKPLLRL |
| | | KGFPSF |
| Helical II | 41004 | PLVERQANEVDWWDMVCNVKKLINEKKEDGKVFWQNLAGYKR |
| | 41820 | QEALRPYLSSEEDRKKGKKFARYQLGDLLLHLEKKHGEDWGKV |
| | | YDEAWERIDKKVEGLSKHIKLEEERRSEDAQSKAALTDWLRAKA |
| | | SFVIEGLKEADKDEFCRCELKLQKWYGDLRGKPFAIEAE |
| OBD-II | 41000 | NSILDISGFSKQYNCAFIWQKDGVKKLNLYLIINYFKGGKLRFKKI |
| | 41823 | KPEAFEANRFYTVINKKSGEIVPMEVNFNFDDPNLIILPLAFGKRQ |
| | | GREFIWNDLLSLETGSLKLANGRVIEKTLYNRRTRQDEPALFVAL |
| | | TFERREVLD |
| RuvC-I | 41005 | SSNIKPMNLIGVDRGENIPAVIALTDPEGCPLSRFKDSLGNPTHILRI |
| | 41812 | GESYKEKQRTIQAKKEVEQRRAGGYSRKYASKAKNLADDMVRN |
| | | TARDLLYYAVTQDAMLIFENLSRGFGRQGKRTFMAERQYTRMED |
| | | WLTAKLAYEGLPSKTYLSKTLAQYTSKTC |
| TSL | 41002 | SNCGFTITSADYDRVLEKLKKTATGWMTTINGKELKVEGQITYYN |
| | 41825 | RYKRQNVVKDLSVELDRLSEESVNNDISSWTKGRSGEALSLLKKR |
| | | FSHRPVQEKFVCLNCGFETH |
| RuvC-II | 41003 | ADEQAALNIARSWLFLRSQEYKKYQTNKTTGNTDKRAFVETWQS |
| | 41826 | FYRKKLKEVWKPAV |

[0296] The CasX variants of the embodiments described herein have the ability to form an RNP complex with the gRNA disclosed herein. In some embodiments, an RNP comprising the CasX variant protein and a gRNA of the disclosure, at a concentration of 20 pM or less, is capable of cleaving a double stranded DNA target with an efficiency of at least 80%. In some embodiments, the RNP at a concentration of 20 pM or less is capable of cleaving a double stranded DNA target with an efficiency of at least 40%, at least 50%, at least 60%, at least 70%, at least 80%, at least 85%, at least 90% or at least 95%. In some embodiments, the RNP at a concentration of 50 pM or less, 40 pM or less, 30 pM or less, 20 pM or less, 10 pM or less, or 5 pM or less, is capable of cleaving a double stranded DNA target with an efficiency of at least 40%, at least 50%, at least 60%, at least 70%, at least 80%, at least 85%, at least 90% or at least 95%. These improved characteristics are described in more detail, below.

[0297] k. Catalytically-Dead CasX Variants

[0298] In some embodiments, for example those embodiments encompassing applications where cleavage of the target nucleic acid sequence is not a desired outcome, improving the catalytic activity of a CasX variant protein comprises altering, reducing, or abolishing the catalytic activity of the CasX variant protein. In some embodiments, the disclosure provides catalytically-dead CasX variant proteins that, while able to bind a target nucleic acid when complexed with a gRNA having a targeting sequence complementary to the target nucleic acid, are not able to cleave the target nucleic acid. Exemplary catalytically-dead CasX proteins comprise one or more mutations in the active site of the RuvC domain of the CasX protein. In some embodiments, a catalytically-dead CasX variant protein comprises substitutions at residues 672, 769 and/or 935 relative to SEQ ID NO: 1. In one embodiment, a catalytically-dead CasX variant protein comprises substitutions of D672A, E769A and/or D935A relative to a reference CasX protein of SEQ ID NO: 1. In other embodiments, a catalytically-dead CasX variant protein comprises substitutions at amino acids 659, 756 and/or 922 relative to a reference CasX protein of SEQ ID NO: 2. In some embodiments, a catalytically-dead CasX variant protein comprises D659A, E756A and/or D922A substitutions relative to a reference CasX protein of SEQ ID NO: 2. In some embodiments, a catalytically-dead CasX variant 527, 668 and 676 proteins comprise D660A, E757A, and D922A modifications to abolish the endonuclease activity. In further embodiments, a catalytically-dead CasX protein comprises deletions of all or part of the RuvC domain of the CasX protein. It will be understood that the same foregoing substitutions can similarly be introduced into the CasX variants of the disclosure, resulting in a catalytically-dead CasX (dCasX) variant. In one embodiment, all or a portion of the RuvC domain is deleted from the CasX variant, resulting in a dCasX variant. Catalytically inactive dCasX variant proteins can, in some embodiments, be used for base editing or epigenetic modifications. With a higher affinity for DNA, in some embodiments, catalytically inactive dCasX variant proteins can, relative to catalytically active CasX, find their target nucleic acid faster, remain bound to target nucleic acid for longer periods of time, bind target nucleic acid in a more stable fashion, or a combination thereof, thereby improving these functions of the catalytically-dead CasX variant protein compared to a CasX variant that retains its cleavage capability. Exemplary dCasX variant sequences are disclosed as SEQ ID NOS: 40808-40827 and 41006-41009 as set forth in Table 7. In some embodiments, a dCasX variant is at least 80% identical, at least 85% identical, at least 90% identical, at least 95% identical, at least 96% identical, at least 97% identical, at least 98% identical, or at least 99% identical to a sequence of SEQ ID NOS: 40808-40827, 41006-41009 and retains the functional properties of a dCasX variant protein. In some embodiments, a dCasX variant comprises a sequence of SEQ ID NOS: 40808-40827, 41006-41009.

TABLE 7
Catalytically-dead CasX Variant Proteins

| SEQ ID NO: | dCasX | Amino Acid Sequence |
|---|---|---|
| 40808 | CAS100 | — |
| 40809 | CAS099 | — |
| | [d491] | |
| 40810 | CAS098 | — |
| 40811 | CAS085 | — |
| 40812 | CAS087 | — |
| 40813 | CAS086 | — |
| 40814 | CAS083 | — |
| 40815 | CAS082 | — |
| 40816 | CAS069 | — |
| 40817 | CAS068 | — |
| 40818 | CAS070 | — |
| 40819 | CAS071 | — |
| 40820 | CAS072 | — |
| 40821 | CAS073 | — |
| 40822 | CAS074 | — |
| 40823 | CAS075 | — |
| 40824 | CAS076 | — |
| 40825 | CAS077 | — |
| 40826 | CAS078 | — |
| 40827 | CAS081 | — |
| 41006 | CAS096 | — |
| 41007 | CAS401 | — |
| 41008 | CAS142 | — |
| 41009 | CAS402 | — |

[0299] l. CasX Fusion Proteins

[0300] In some embodiments, the disclosure provides AAV encoding CasX proteins comprising a heterologous protein fused to the CasX. In some cases, the CasX is a CasX variant of any of the embodiments described herein. In some embodiments, a CasX variant comprises any one of the sequences as set forth in Table 3 fused to one or more proteins or domains thereof with an activity of interest.

[0301] In some embodiments, the CasX fusion protein comprises any one of the variants SEQ ID NOS: 49-160, 40208-40369, or 40828-40912 as set forth in Table 3, fused to one or more proteins or domains thereof that have a different activity of interest, resulting in a fusion protein. For example, in some embodiments, the CasX variant protein is fused to a protein (or domain thereof) that inhibits transcription, modifies a target nucleic acid, or modifies a polypeptide associated with a nucleic acid (e.g., histone modification).

[0302] In some embodiments, a heterologous polypeptide (or heterologous amino acid such as a cysteine residue or a non-natural amino acid) can be inserted at one or more positions within a CasX protein to generate a CasX fusion protein. In other embodiments, a cysteine residue can be inserted at one or more positions within a CasX protein followed by conjugation of a heterologous polypeptide described below. In some alternative embodiments, a heterologous polypeptide or heterologous amino acid can be added at the N- or C-terminus of the CasX variant protein. In other embodiments, a heterologous polypeptide or heterologous amino acid can be inserted internally within the sequence of the CasX protein.

[0303] In some embodiments, the CasX variant fusion protein retains RNA-guided sequence specific target nucleic acid binding and cleavage activity. In some cases, the CasX variant fusion protein has (retains) 50% or more of the activity (e.g., cleavage and/or binding activity) of the corresponding CasX variant protein that does not have the insertion of the heterologous protein. In some cases, the CasX variant fusion protein retains at least about 60%, or at least about 70% or more, at least about 80%, or at least about 90%, or at least about 92%, or at least about 95%, or at least about 98%, or at least about 100% of the activity (e.g., cleavage and/or binding activity) of the corresponding CasX protein that does not have the insertion of the heterologous protein.

[0304] In some cases, the CasX variant fusion protein retains (has) target nucleic acid binding activity relative to the activity of the CasX protein without the inserted heterologous amino acid or heterologous polypeptide. In some cases, the CasX variant fusion protein retains at least about 60%, or at least about 70% or more, at least about 80%, or at least about 90%, or at least about 92%, or at least about 95%, or at least about 98%, or at least about 100% of the binding activity of the corresponding CasX protein that does not have the insertion of the heterologous protein.

[0305] In some cases, the CasX variant fusion protein retains (has) target nucleic acid binding and/or cleavage activity relative to the activity of the parent CasX protein without the inserted heterologous amino acid or heterologous polypeptide. For example, in some cases, the CasX variant fusion protein has (retains) 50% or more of the binding and/or cleavage activity of the corresponding parent CasX protein (the CasX protein that does not have the insertion). For example, in some cases, the CasX variant fusion protein has (retains) 60% or more (70% or more, 80% or more, 90% or more, 92% or more, 95% or more, 98% or more, or 100%) of the binding and/or cleavage activity of the corresponding CasX parent protein (the CasX protein that does not have the insertion). Methods of measuring cleaving and/or binding activity of a CasX protein and/or a CasX fusion protein will be known to one of ordinary skill in the art and any convenient method can be used.

[0306] A variety of heterologous polypeptides are suitable for inclusion in a reference CasX or CasX variant fusion protein of the disclosure. In some cases, the fusion partner can modulate transcription (e.g., inhibit transcription, increase transcription) of a target DNA. For example, in some cases the fusion partner is a protein (or a domain from a protein) that inhibits transcription (e.g., a transcriptional repressor, a protein that functions via recruitment of transcription inhibitor proteins, modification of target DNA such as methylation, recruitment of a DNA modifier, modulation of histones associated with target DNA, recruitment of a histone modifier such as those that modify acetylation and/or methylation of histones, and the like). In some cases the fusion partner is a protein (or a domain from a protein) that increases transcription (e.g., a transcription activator, a protein that acts via recruitment of transcription activator proteins, modification of target DNA such as demethylation, recruitment of a DNA modifier, modulation of histones associated with target DNA, recruitment of a histone modifier such as those that modify acetylation and/or methylation of histones, and the like).

[0307] In some cases, a fusion partner has enzymatic activity that modifies a target nucleic acid sequence; e.g., nuclease activity, methyltransferase activity, demethylase activity, DNA repair activity, DNA damage activity, deamination activity, dismutase activity, alkylation activity, depurination activity, oxidation activity, pyrimidine dimer forming activity, integrase activity, transposase activity, recombinase activity, polymerase activity, ligase activity, helicase activity, photolyase activity or glycosylase activity. In some embodiments, a CasX variant comprises any one of SEQ ID NOS: 49-160, 40208-40369, or 40828-40912 as set forth in Table 3 and a polypeptide with methyltransferase activity, demethylase activity, acetyltransferase activity, deacetylase activity, kinase activity, phosphatase activity, ubiquitin ligase activity, deubiquitinating activity, adenylation activity, deadenylation activity, SUMOylating activity, deSUMOylating activity, ribosylation activity, deribosylation activity, myristoylation activity or demyristoylation activity.

[0308] Examples of proteins (or fragments thereof) that can be used as a fusion partner to increase transcription include but are not limited to: transcriptional activators such as VP16, VP64, VP48, VP160, p65 subdomain (e.g., from NFkB), and activation domain of EDLL and/or TAL activation domain (e.g., for activity in plants); histone lysine methyltransferases such as SET1A, SET1B, MLL1 to 5, ASH1, SYMD2, NSD1, and the like; histone lysine demethylases such as JHDM2a/b, UTX, JMJD3, and the like; histone acetyltransferases such as GCN5, PCAF, CBP, p300, TAF1, TIP60/PLIP, MOZ/MYST3, MORF/MYST4, SRC1, ACTR, P160, CLOCK, and the like; and DNA demethylases such as Ten-Eleven Translocation (TET) dioxygenase 1 (TETICD), TET1, DME, DML1, DML2, ROS1, and the like.

[0309] Examples of proteins (or fragments thereof) that can be used as a fusion partner to decrease transcription include but are not limited to: transcriptional repressors such as the Kruppel associated box (KRAB or SKD); KOX1 repression domain; the Mad mSIN3 interaction domain (SID); the ERF repressor domain (ERD), the SRDX repression domain (e.g., for repression in plants), and the like; histone lysine methyltransferases such as Pr-SET7/8, SUV4-20H1, RIZ1, and the like; histone lysine demethylases such as JMJD2A/JHDM3A, JMJD2B, JMJD2C/GASC1, JMJD2D, JARID1A/RBP2, JARID1B/PLU-1, JARID 1C/SMCX, JARID1D/SMCY, and the like; histone lysine deacetylases such as HDAC1, HDAC2, HDAC3, HDAC8, HDAC4, HDAC5, HDAC7, HDAC9, SIRT1, SIRT2, HDAC11, and the like; DNA methylases such as Hhal DNA m5c-methyltransferase (M.Hhal), DNA methyltransferase 1 (DNMT1), DNA methyltransferase 3a (DNMT3a), DNA methyltransferase 3b (DNMT3b), METI, DRM3 (plants), ZMET2, CMT1, CMT2 (plants), and the like; and periphery recruitment elements such as Lamin A, Lamin B, and the like.

[0310] In some cases, the fusion partner has enzymatic activity that modifies the target nucleic acid sequence (e.g., ssRNA, dsRNA, ssDNA, dsDNA). Examples of enzymatic activity that can be provided by the fusion partner include but are not limited to: nuclease activity such as that provided by a restriction enzyme (e.g., FokI nuclease), methyltransferase activity such as that provided by a methyltransferase (e.g., Hhal DNA m5c-methyltransferase (M.Hhal), DNA methyltransferase 1 (DNMT1), DNA methyltransferase 3a (DNMT3a), DNA methyltransferase 3b (DNMT3b), METI, DRM3 (plants), ZMET2, CMT1, CMT2 (plants), and the like); demethylase activity such as that provided by a demethylase (e.g., Ten-Eleven Translocation (TET) dioxygenase 1 (TET 1 CD), TET1, DME, DML1, DML2, ROS1, and the like), DNA repair activity, DNA damage activity, deamination activity such as that provided by a deaminase (e.g., a cytosine deaminase enzyme, e.g., an APOBEC protein such as rat APOBECl), dismutase activity, alkylation activity, depurination activity, oxidation activity, pyrimidine dimer forming activity, integrase activity such as that provided by an integrase and/or resolvase (e.g., Gin invertase such as the hyperactive mutant of the Gin invertase, GinH106Y; human immunodeficiency virus type 1 integrase (IN); Tn3 resolvase; and the like), transposase activity, recombinase activity such as that provided by a recombinase (e.g., catalytic domain of Gin recombinase), polymerase activity, ligase activity, helicase activity, photolyase activity, and glycosylase activity).

[0311] In some cases, a CasX variant protein for use in the AAV systems of the present disclosure is fused to a polypeptide selected from a domain for increasing transcription (e.g., a VP16 domain, a VP64 domain), a domain for decreasing transcription (e.g., a KRAB domain, e.g., from the Kox1 protein), a core catalytic domain of a histone acetyltransferase (e.g., histone acetyltransferase p300), a protein/domain that provides a detectable signal (e.g., a fluorescent protein such as GFP), a nuclease domain (e.g., a Fokl nuclease), or a base editor (e.g., cytidine deaminase such as APOBEC1).

[0312] In some cases, the fusion partner has enzymatic activity that modifies a protein associated with the target nucleic acid (e.g., ssRNA, dsRNA, ssDNA, dsDNA) (e.g., a histone, an RNA binding protein, a DNA binding protein, and the like). Examples of enzymatic activity (that modifies a protein associated with a target nucleic acid) that can be provided by the fusion partner include but are not limited to: methyltransferase activity such as that provided by a histone methyltransferase (HMT) (e.g., suppressor of variegation 3-9 homolog 1 (SUV39H1, also known as KMT1A), euchromatic histone lysine methyltransferase 2 (G9A, also known as KMT1C and EHMT2), SUV39H2, ESET/SETDB 1, and the like, SET1A, SET1B, MLL1 to 5, ASH1, SYMD2, NSD1, DOT1L, Pr-SET7/8, SUV4-20H1, EZH2, RIZ1), demethylase activity such as that provided by a histone demethylase (e.g., Lysine Demethylase 1A (KDM1A also known as LSD1), JHDM2a/b, JMJD2A/JHDM3A, JMJD2B, JMJD2C/GASC1, JMJD2D, JARID1A/RBP2, JARID1B/PLU-1, JARID1C/SMCX, JARID1D/SMCY, UTX, JMJD3, and the like), acetyltransferase activity such as that provided by a histone acetylase transferase (e.g., catalytic core/fragment of the human acetyltransferase p300, GCN5, PCAF, CBP, TAF1, TIP60/PLIP, MOZ/MYST3, MORF/MYST4, HBO1/MYST2, HMOF/MYST1, SRC1, ACTR, P160, CLOCK, and the like), deacetylase activity such as that provided by a histone deacetylase (e.g., HDAC1, HDAC2, HDAC3, HDAC8, HDAC4, HDAC5, HDAC7, HDAC9, SIRT1, SIRT2, HDAC11, and the like), kinase activity, phosphatase activity, ubiquitin ligase activity, deubiquitinating activity, adenylation activity, deadenylation activity, SUMOylating activity, deSUMOylating activity, ribosylation activity, deribosylation activity, myristoylation activity, and demyristoylation activity.

[0313] Additional examples of suitable fusion partners of the CasX variants are (i) a dihydrofolate reductase (DHFR) destabilization domain (e.g., to generate a chemically controllable subject RNA-guided polypeptide or a conditionally active RNA-guided polypeptide), and (ii) a chloroplast transit peptide.

[0314] In some embodiments, a CasX variant comprises any one of SEQ ID NOS: 49-160, 40208-40369, or 40828-40912 as set forth in Table 3, and a chloroplast transit peptide including, but are not limited to:

(SEQ ID NO: 40790)
MASMISSSAVTTVSRASRGQSAAMAPFGGLKSMTGFPVRKVNTDITSIT
SNGGRVKCMQVWPPIGKKKFETLSYLPPLTRDSRA;
(SEQ ID NO: 39980)
MASMISSSAVTTVSRASRGQSAAMAPFGGLKSMTGFPVRKVNTDITSIT
SNGGRVKS;
(SEQ ID NO: 39968)
MASSMLSSATMVASPAQATMVAPFNGLKSSAAFPATRKANNDITSITSN
GGRVNCMQVWPPIEKKKFETLSYLPDLTDSGGRVNC;
(SEQ ID NO: 39969)
MAQVSRICNGVQNPSLISNLSKSSQRKSPLSVSLKTQQHPRAYPISSSW
GLKKSGMTLIGSELRPLKVMSSVSTAC;
(SEQ ID NO: 39970)
MAQVSRICNGVWNPSLISNLSKSSQRKSPLSVSLKTQQHPRAYPISSSW
GLKKSGMTLIGSELRPLKVMSSVSTAC;
(SEQ ID NO: 39971)
MAQINNMAQGIQTLNPNSNFHKPQVPKSSSFLVFGSKKLKNSANSMLVL
KKDSIFMQLFCSFRISASVATAC;
(SEQ ID NO: 39972)
MAALVTSQLATSGTVLSVTDRFRRPGFQGLRPRNPADAALGMRTVGASA
APKQSRKPHRFDRRCLSMVV;
(SEQ ID NO: 39973)
MAALTTSQLATSATGFGIADRSAPSSLLRHGFQGLKPRSPAGGDATSLS
VTTSARATPKQQRSVQRGSRRFPSVVVC;
(SEQ ID NO: 39974)
MASSVLSSAAVATRSNVAQANMVAPFTGLKSAASFPVSRKQNLDITSIA
SNGGRVQC;
(SEQ ID NO: 39975)
MESLAATSVFAPSRVAVPAARALVRAGTVVPTRRTSSTSGTSGVKCSAA
VTPQASPVISRSAAAA;
and
(SEQ ID NO: 39976)
MGAAATSMQSLKFSNRLVPPSRRLSPVPNNVTCNNLPKSAAPVRTVKCC
ASSWNSTINGAAATTNGASAASS.

[0315] In some cases, a CasX variant protein of the present disclosure for use in the AAV systems can include an endosomal escape peptide. In some cases, an endosomal escape polypeptide comprises the amino acid sequence GLFXALLXLLXSLWXLLLXA (SEQ ID NO: 39977), wherein each X is independently selected from lysine, histidine, and arginine. In some cases, an endosomal escape polypeptide comprises the amino acid sequence GLFHALLHLLHSLWHLLLHA (SEQ ID NO: 39978), or HHHHHHHHH (SEQ ID NO: 39979).

[0316] Non-limiting examples of fusion partners for use with a CasX variant when targeting ssRNA target nucleic acid sequences include (but are not limited to): splicing factors (e.g., RS domains); protein translation components (e.g., translation initiation, elongation, and/or release factors; e.g., eIF4G); RNA methylases; RNA editing enzymes (e.g., RNA deaminases, e.g., adenosine deaminase acting on RNA (ADAR), including A to I and/or C to U editing enzymes); helicases; RNA-binding proteins; and the like. It is understood that a heterologous polypeptide can include the entire protein or in some cases can include a fragment of the protein (e.g., a functional domain).

[0317] In some embodiments, a CasX variant of any one of SEQ ID NOS: 49-160, 40208-40369, or 40828-40912 as set forth in Table 3, comprises a fusion partner of any domain capable of interacting with ssRNA (which, for the purposes of this disclosure, includes intramolecular and/or intermolecular secondary structures, e.g., double-stranded RNA duplexes such as hairpins, stem-loops, etc.), whether transiently or irreversibly, directly or indirectly, including but not limited to an effector domain selected from the group comprising; endonucleases (for example RNase III, the CRR22 DYW domain, Dicer, and PIN (PilT N-terminus) domains from proteins such as SMG5 and SMG6); proteins and protein domains responsible for stimulating RNA cleavage (for example CPSF, CstF, CFIm and CFIIm); exonucleases (for example XRN-1 or Exonuclease T); deadenylases (for example HNT3); proteins and protein domains responsible for nonsense mediated RNA decay (for example UPF1, UPF2, UPF3, UPF3b, RNP SI, Y14, DEK, REF2, and SRm160); proteins and protein domains responsible for stabilizing RNA (for example PABP); proteins and protein domains responsible for repressing translation (for example Ago2 and Ago4); proteins and protein domains responsible for stimulating translation (for example Staufen); proteins and protein domains responsible for (e.g., capable of) modulating translation (e.g., translation factors such as initiation factors, elongation factors, release factors, etc., e.g., eIF4G); proteins and protein domains responsible for polyadenylation of RNA (for example PAP1, GLD-2, and Star-PAP); proteins and protein domains responsible for polyuridinylation of RNA (for example CI Dl and terminal uridylate transferase); proteins and protein domains responsible for RNA localization (for example from IMPI, ZBP1, She2p, She3p, and Bicaudal-D); proteins and protein domains responsible for nuclear retention of RNA (for example Rrp6); proteins and protein domains responsible for nuclear export of RNA (for example TAP, NXF1, THO, TREX, REF, and Aly); proteins and protein domains responsible for repression of RNA splicing (for example PTB, Sam68, and hnRNP A1); proteins and protein domains responsible for stimulation of RNA splicing (for example serine/arginine-rich (SR) domains); proteins and protein domains responsible for reducing the efficiency of transcription (for example FUS (TLS)); and proteins and protein domains responsible for stimulating transcription (for example CDK7 and HIV Tat). Alternatively, the effector domain may be selected from the group comprising endonucleases; proteins and protein domains capable of stimulating RNA cleavage; exonucleases; deadenylases; proteins and protein domains having nonsense mediated RNA decay activity; proteins and protein domains capable of stabilizing RNA; proteins and protein domains capable of repressing translation; proteins and protein domains capable of stimulating translation; proteins and protein domains capable of modulating translation (e.g., translation factors such as initiation factors, elongation factors, release factors, etc., e.g., eIF4G); proteins and protein domains capable of polyadenylation of RNA; proteins and protein domains capable of polyuridinylation of RNA; proteins and protein domains having RNA localization activity; proteins and protein domains capable of nuclear retention of RNA; proteins and protein domains having RNA nuclear export activity; proteins and protein domains capable of repression of RNA splicing; proteins and protein domains capable of stimulation of RNA splicing; proteins and protein domains capable of reducing the efficiency of transcription; and proteins and protein domains capable of stimulating transcription. Another suitable heterologous polypeptide is a PUF RNA-binding domain, which is described in more detail in WO2012068627, which is hereby incorporated by reference in its entirety.

[0318] Some RNA splicing factors that can be used (in whole or as fragments thereof) as a fusion partner for a CasX variant have modular organization, with separate sequence-specific RNA binding modules and splicing effector domains. For example, members of the serine/arginine-rich (SR) protein family contain N-terminal RNA recognition motifs (RRMs) that bind to exonic splicing enhancers (ESEs) in pre-mRNAs and C-terminal RS domains that promote exon inclusion. As another example, the hnRNP protein hnRNP A1 binds to exonic splicing silencers (ESSs) through its RRM domains and inhibits exon inclusion through a C-terminal glycine-rich domain. Some splicing factors can regulate alternative use of splice site (ss) by binding to regulatory sequences between the two alternative sites. For example, ASF/SF2 can recognize ESEs and promote the use of intron proximal sites, whereas hnRNP A1 can bind to ESSs and shift splicing towards the use of intron distal sites. One application for such factors is to generate ESFs that modulate alternative splicing of endogenous genes, particularly disease associated genes. For example, Bcl-x pre-mRNA produces two splicing isoforms with two alternative 5′ splice sites to encode proteins of opposite functions. The long splicing isoform Bcl-xL is a potent apoptosis inhibitor expressed in long-lived post mitotic cells and is up-regulated in many cancer cells, protecting cells against apoptotic signals. The short isoform Bcl-xS is a pro-apoptotic isoform and expressed at high levels in cells with a high turnover rate (e.g., developing lymphocytes). The ratio of the two Bcl-x splicing isoforms is regulated by multiple cis-elements that are located in either the core exon region or the exon extension region (i.e., between the two alternative 5′ splice sites). For more examples, see WO2010075303, which is hereby incorporated by reference in its entirety.

[0319] Further suitable fusion partners for use with a CasX variant include, but are not limited to, proteins (or fragments thereof) that are boundary elements (e.g., CTCF), proteins and fragments thereof that provide periphery recruitment (e.g., Lamin A, Lamin B, etc.), and protein docking elements (e.g., FKBP/FRB, Pill/Abyl, etc.).

[0320] In some cases, a heterologous polypeptide (a fusion partner) for use with a CasX variant provides for subcellular localization, i.e., the heterologous polypeptide contains a subcellular localization sequence (e.g., a nuclear localization signal (NLS) for targeting to the nucleus, a sequence to keep the fusion protein out of the nucleus, e.g., a nuclear export sequence (NES), a sequence to keep the fusion protein retained in the cytoplasm, a mitochondrial localization signal for targeting to the mitochondria, a chloroplast localization signal for targeting to a chloroplast, an ER retention signal, and the like). In some embodiments, a subject RNA-guided polypeptide or a conditionally active RNA-guided polypeptide and/or subject CasX fusion protein does not include a NLS so that the protein is not targeted to the nucleus (which can be advantageous, e.g., when the target nucleic acid sequence is an RNA that is present in the cytosol). In some embodiments, a fusion partner can provide a tag (i.e., the heterologous polypeptide is a detectable label) for ease of tracking and/or purification (e.g., a fluorescent protein, e.g., green fluorescent protein (GFP), yellow fluorescent protein (YFP), red fluorescent protein (RFP), cyan fluorescent protein (CFP), mCherry, tdTomato, and the like; a histidine tag, e.g., a 6×His tag; a hemagglutinin (HA) tag; a FLAG tag; a Myc tag; and the like).

[0321] In some cases, a CasX variant protein for use in the AAV systems includes (is fused to) a nuclear localization signal (NLS) for targeting the CasX/gRNA to the nucleus of the cell. In some cases, a CasX variant protein is fused to 2 or more, 3 or more, 4 or more, or 5 or more 6 or more, 7 or more, 8 or more NLSs. In some cases, one or more NLSs (2 or more, 3 or more, 4 or more, or 5 or more NLSs) are positioned at or near (e.g., within 50 amino acids of) the N-terminus and/or the C-terminus. In some cases, one or more NLSs (2 or more, 3 or more, 4 or more, or 5 or more NLSs) are positioned at or near (e.g., within 50 amino acids of) the N-terminus. In some cases, one or more NLSs (2 or more, 3 or more, 4 or more, or 5 or more NLSs) are positioned at or near (e.g., within 50 amino acids of) the C-terminus. In some cases, an NLS is positioned at the N-terminus and an NLS is positioned at the C-terminus. In some cases, one or more NLSs (2 or more, 3 or more, 4 or more, or 5 or more NLSs) are positioned at or near (e.g., within 50 amino acids of) both the N-terminus and the C-terminus. In some cases, a CasX variant protein includes (is fused to) between 1 and 10 NLSs (e.g., 1-9, 1-8, 1-7, 1-6, 1-5, 2-10, 2-9, 2-8, 2-7, 2-6, or 2-5 NLSs). In some cases, a CasX variant protein includes (is fused to) between 2 and 5 NLSs (e.g., 2-4, or 2-3 NLSs). Non-limiting examples of NLSs suitable for use with a CasX variant include sequences having at least about 80%, at least about 90%, or at least about 95% identity or are identical to sequences derived from: the NLS of the SV40 virus large T-antigen, having the amino acid sequence PKKKRKV (SEQ ID NO: 196); the NLS from nucleoplasmin (e.g., the nucleoplasmin bipartite NLS with the sequence KRPAATKKAGQAKKKK (SEQ ID NO: 197); the c-myc NLS having the amino acid sequence PAAKRVKLD (SEQ ID NO: 248) or RQRRNELKRSP (SEQ ID NO: 161); the hRNPA1 M9 NLS having the sequence NQSSNFGPMKGGNFGGRSSGPYGGGGQYFAKPRNQGGY (SEQ ID NO: 162); the sequence RMRIZFKNKGKDTAELRRRRVEVSVELRKAKKDEQILKRRNV (SEQ ID NO: 163) of the IBB domain from importin-alpha; the sequences VSRKRPRP (SEQ ID NO: 164) and PPKKARED (SEQ ID NO: 165) of the myoma T protein; the sequence PQPKKKPL (SEQ ID NO: 166) of human p53; the sequence SALIKKKKKMAP (SEQ ID NO: 167) of mouse c-abl IV; the sequences DRLRR (SEQ ID NO: 168) and PKQKKRK (SEQ ID NO: 169) of the influenza virus NS1; the sequence RKLKKKIKKL (SEQ ID NO: 170) of the Hepatitis virus delta antigen; the sequence REKKKFLKRR (SEQ ID NO: 171) of the mouse Mxl protein; the sequence KRKGDEVDGVDEVAKKKSKK (SEQ ID NO: 172) of the human poly(ADP-ribose) polymerase; the sequence RKCLQAGMNLEARKTKK (SEQ ID NO: 173) of the steroid hormone receptors (human) glucocorticoid; the sequence PRPRKIPR (SEQ ID NO: 174) of Borna disease virus P protein (BDV-P1); the sequence PPRKKRTVV (SEQ ID NO: 175) of hepatitis C virus nonstructural protein (HCV-NS5A); the sequence NLSKKKKRKREK (SEQ ID NO: 176) of LEF1; the sequence RRPSRPFRKP (SEQ ID NO: 177) of ORF57 simirae; the sequence KRPRSPSS (SEQ ID NO: 178) of EBV LANA; the sequence KRGINDRNFWRGENERKTR (SEQ ID NO: 179) of Influenza A protein; the sequence PRPPKMARYDN (SEQ ID NO: 180) of human RNA helicase A (RHA); the sequence KRSFSKAF (SEQ ID NO: 181) of nucleolar RNA helicase II; the sequence KLKIKRPVK (SEQ ID NO: 182) of TUS-protein; the sequence PKKKRKVPPPPAAKRVKLD (SEQ ID NO: 183) associated with importin-alpha; the sequence PKTRRRPRRSQRKRPPT (SEQ ID NO: 184) from the Rex protein in HTLV-1; the sequence MSRRRKANPTKLSENAKKLAKEVEN (SEQ ID NO: 185) from the EGL-13 protein of Caenorhabditis elegans; and the sequences KTRRRPRRSQRKRPPT (SEQ ID NO: 186), RRKKRRPRRKKRR (SEQ ID NO: 187), PKKKSRKPKKKSRK (SEQ ID NO: 188), HKKKHPDASVNFSEFSK (SEQ ID NO: 189), QRPGPYDRPQRPGPYDRP (SEQ ID NO: 190), LSPSLSPLLSPSLSPL (SEQ ID NO: 191), RGKGGKGLGKGGAKRHRK (SEQ ID NO: 192), PKRGRGRPKRGRGR (SEQ ID NO: 193), PKKKRKVPPPPAAKRVKLD (SEQ ID NO: 194) and PKKKRKVPPPPKKKRKV (SEQ ID NO: 195), PAKRARRGYKC (SEQ ID NO: 40188), KLGPRKATGRW (SEQ ID NO: 40189), PRRKREE (SEQ ID NO: 40190), PYRGRKE (SEQ ID NO: 40191), PLRKRPRR (SEQ ID NO: 40192), PLRKRPRRGSPLRKRPRR (SEQ ID NO: 40193), PAAKRVKLDGGKRTADGSEFESPKKKRKV (SEQ ID NO: 40194), PAAKRVKLDGGKRTADGSEFESPKKKRKVGIHGVPAA (SEQ ID NO: 40195), PAAKRVKLDGGKRTADGSEFESPKKKRKVAEAAAKEAAAKEAAAKA (SEQ ID NO: 40196), PAAKRVKLDGGKRTADGSEFESPKKKRKVPG (SEQ ID NO: 40197), KRKGSPERGERKRHW (SEQ ID NO: 40198), KRTADSQHSTPPKTKRKVEFEPKKKRKV (SEQ ID NO: 40199), and PKKKRKVGGSKRTADSQHSTPPKTKRKVEFEPKKKRKV (SEQ ID NO: 40200). Additional NLS for incorporation in the AAV systems of the disclosure are provided in Tables 15 and 16, indicating NLS for linking to the N- or C-terminus of the CasX. In some embodiments, the one or more NLS are linked to the CasX or to an adjacent NLS by a linker peptide wherein the linker peptide is selected from the group consisting of RS, (G)n (SEQ ID NO: 40201), (GS)n (SEQ ID NO: 40202), (GSGGS)n (SEQ ID NO: 208), (GGSGGS)n (SEQ ID NO: 209), (GGGS)n (SEQ ID NO: 210), GGSG (SEQ ID NO: 211), GGSGG (SEQ ID NO: 212), GSGSG (SEQ ID NO: 213), GSGGG (SEQ ID NO: 214), GGGSG (SEQ ID NO: 215), GSSSG (SEQ ID NO: 216), GPGP (SEQ ID NO: 217), GGP, PPP, PPAPPA (SEQ ID NO: 218), PPPG (SEQ ID NO: 40207), PPPGPPP (SEQ ID NO: 219), PPP(GGGS)n (SEQ ID NO: 40203), (GGGS)nPPP (SEQ ID NO: 40204), AEAAAKEAAAKEAAAKA (SEQ ID NO: 40205), and TPPKTKRKVEFE (SEQ ID NO: 40206), wherein n is 1 to 5. In some embodiments, the AAV constructs of the disclosure comprise polynucleic acids encoding the NLS and linker peptides of any of the foregoing embodiments of the paragraph, as well as the NLS of Tables 15 and 16, and can be, in some cases, configured in relation to the other components of the constructs as depicted in any one of FIG. 24, 33-35 or 42.

[0322] In general, NLS (or multiple NLSs) are of sufficient strength to drive accumulation of a CasX variant fusion protein in the nucleus of a eukaryotic cell. Detection of accumulation in the nucleus may be performed by any suitable technique. For example, a detectable marker may be fused to a CasX variant fusion protein such that location within a cell may be visualized. Cell nuclei may also be isolated from cells, the contents of which may then be analyzed by any suitable process for detecting protein, such as immunohistochemistry, Western blot, or enzyme activity assay. Accumulation in the nucleus may also be determined indirectly.

[0323] In some cases, a CasX variant fusion protein for use in the AAV systems includes a “protein transduction domain” or PTD (also known as a CPP—cell penetrating peptide), which refers to a protein, polynucleotide, carbohydrate, or organic or inorganic compound that facilitates traversing a lipid bilayer, micelle, cell membrane, organelle membrane, or vesicle membrane. A PTD attached to another molecule, which can range from a small polar molecule to a large macromolecule and/or a nanoparticle, facilitates the molecule traversing a membrane, for example going from an extracellular space to an intracellular space, or from the cytosol to within an organelle. In some embodiments, a PTD is covalently linked to the amino terminus of a CasX variant fusion protein. In some embodiments, a PTD is covalently linked to the carboxyl terminus of a CasX variant fusion protein. In some cases, the PTD is inserted internally in the sequence of a CasX variant fusion protein at a suitable insertion site. In some cases, a CasX variant fusion protein includes (is conjugated to, is fused to) one or more PTDs (e.g., two or more, three or more, four or more PTDs). In some cases, a PTD includes one or more nuclear localization signals (NLS). Examples of PTDs include, but are not limited to, peptide transduction domain of HIV TAT comprising YGRKKRRQRRR (SEQ ID NO: 198), RKKRRQRR (SEQ ID NO: 199); YARAAARQARA (SEQ ID NO: 200); THRLPRRRRRR (SEQ ID NO: 201); and GGRRARRRRRR (SEQ ID NO: 202); a polyarginine sequence comprising a number of arginines sufficient to direct entry into a cell (e.g., 3, 4, 5, 6, 7, 8, 9, 10, or 10-50 arginines) (SEQ ID NO: 203); a VP22 domain (Zender et al. (2002) Cancer Gene Ther. 9(6):489-96); an Drosophila Antennapedia protein transduction domain (Noguchi et al. (2003) Diabetes 52(7): 1732-1737); a truncated human calcitonin peptide (Trehin et al. (2004) Pharm. Research 21: 1248-1256); polylysine (Wender et al. (2000) Proc. Natl. Acad. Sci. USA 97: 13003-13008); RRQRRTSKLMKR (SEQ ID NO: 204); Transportan GWTLNSAGYLLGKINLKALAALAKKIL (SEQ ID NO: 205); KALAWEAKLAKALAKALAKHLAKALAKALKCEA (SEQ ID NO: 206); and RQIKIWFQNRRMKWKK (SEQ ID NO: 207). In some embodiments, the PTD is an activatable CPP (ACPP) (Aguilera et al. (2009) IntegrBiol (Camb) June; 1(5-6): 371-381). ACPPs comprise a polycationic CPP (e.g., Arg9 or “R9”) connected via a cleavable linker to a matching polyanion (e.g., Glu9 or “E9”), which reduces the net charge to nearly zero and thereby inhibits adhesion and uptake into cells. Upon cleavage of the linker, the polyanion is released, locally unmasking the polyarginine and its inherent adhesiveness, thus “activating” the ACPP to traverse the membrane.

[0324] In some embodiments, a CasX variant fusion protein can include a CasX protein that is linked to an internally inserted heterologous amino acid or heterologous polypeptide (a heterologous amino acid sequence) via a linker polypeptide (e.g., one or more linker polypeptides). In some embodiments, a CasX variant fusion protein can be linked at the C-terminal and/or N-terminal end to a heterologous polypeptide (fusion partner) via a linker polypeptide (e.g., one or more linker polypeptides). The linker polypeptide may have any of a variety of amino acid sequences. Proteins can be joined by a spacer peptide, generally of a flexible nature, although other chemical linkages are not excluded. Suitable linkers include polypeptides of between 4 amino acids and 40 amino acids in length, or between 4 amino acids and 25 amino acids in length. These linkers are generally produced by using synthetic, linker-encoding oligonucleotides to couple the proteins. Peptide linkers with a degree of flexibility can be used. The linking peptides may have virtually any amino acid sequence, bearing in mind that the preferred linkers will have a sequence that results in a generally flexible peptide. The use of small amino acids, such as glycine and alanine, are of use in creating a flexible peptide. The creation of such sequences is routine to those of skill in the art. A variety of different linkers are commercially available and are considered suitable for use. Example linker polypeptides include glycine polymers (G)n, glycine-serine polymers, glycine-alanine polymers, alanine-serine polymers, glycine-proline polymers, proline polymers and proline-alanine polymers. Example linkers can comprise amino acid sequences including, but not limited to (G)n (SEQ ID NO: 40201), (GS)n (SEQ ID NO: 40202), (GSGGS)n (SEQ ID NO: 208), (GGSGGS)n (SEQ ID NO: 209), (GGGS)n (SEQ ID NO: 210), GGSG (SEQ ID NO: 211), GGSGG (SEQ ID NO: 212), GSGSG (SEQ ID NO: 213), GSGGG (SEQ ID NO: 214), GGGSG (SEQ ID NO: 215), GSSSG (SEQ ID NO: 216), GPGP (SEQ ID NO: 217), GGP, PPP, PPAPPA (SEQ ID NO: 218), PPPG (SEQ ID NO: 40207), PPPGPPP (SEQ ID NO: 219), PPP(GGGS)n (SEQ ID NO: 40203), (GGGS)nPPP (SEQ ID NO: 40204), AEAAAKEAAAKEAAAKA (SEQ ID NO: 40205), and TPPKTKRKVEFE (SEQ ID NO: 40206), where n is 1 to 5, where n is 1 to 5. The ordinarily skilled artisan will recognize that design of a peptide conjugated to any elements described above can include linkers that are all or partially flexible, such that the linker can include a flexible linker as well as one or more portions that confer less flexible structure.

### V. AAV Systems and Methods for Modification of Target Nucleic Acids

[0325] The AAV provided herein are useful for various applications, including as therapeutics, diagnostics, and for research. To effect the methods of the disclosure for gene editing, provided herein are programmable AAV systems. The programmable nature of the CasX and gRNA components of the AAV systems provided herein allows for the precise targeting to achieve the desired effect (nicking, cleaving, etc.) at one or more regions of predetermined interest in the target nucleic acid sequence. In some embodiments, the AAV systems provided herein comprise sequences encoding a CasX protein and a gRNA wherein the targeting sequence of the gRNA is complementary to, and therefore is capable of hybridizing with, a target nucleic acid sequence. In some cases, the AAV system further comprises a donor template nucleic acid.

[0326] In some embodiments of the disclosure, provided herein are methods of modifying a target nucleic acid sequence. In some embodiments, the methods comprise contacting a cell comprising the target nucleic acid sequence with an AAV encoding a CasX protein of the disclosure and a gRNA of the disclosure comprising a targeting sequence, wherein the targeting sequence of the gRNA has a sequence complementary to and that can hybridize with the sequence of the target nucleic acid. Upon hybridization with the target nucleic acid by the CasX and the gRNA, the CasX introduces one or more single-strand breaks or double-strand breaks within or near the target nucleic acid, which may include sequences that contain regulatory elements or non-coding regions of the gene, that results in a permanent indel (deletion or insertion) or mutation in the target nucleic acid, as described herein, with a corresponding modulation of expression or alteration in the function of the gene product, thereby creating an edited cell. In other embodiments, the method comprises contacting a cell comprising the target nucleic acid sequence with an AAV encoding a plurality of gRNAs targeted to different or overlapping portions of the target nucleic acid wherein the CasX protein introduces multiple breaks in the target nucleic acid that result in a permanent indel or mutation in the target nucleic acid, as described herein, with a corresponding modulation of expression or alteration in the function of the gene product, thereby creating an edited cell.

[0327] In some embodiments, the modification of the target nucleic acid results in reduced expression of a gene product of a gene comprising the target nucleic acid, wherein expression is reduced by at least about 10%, at least about 20%, at least about 30%, at least about 40%, at least about 50%, at least about 60%, at least about 70%, at least about 80%, or at least about 90% in comparison to a cell that has not been modified.

[0328] In some embodiments of the method of modifying a target nucleic acid sequence, the gRNA of the AAV vector is a guide DNA (gDNA). In other embodiments, the gRNA is a guide RNA (gRNA). In some embodiments, the gRNA is a single-molecule gRNA (sgRNA). In other embodiments of the method, the gRNA is a dual-molecule gRNA (dgRNA) wherein the activator and the targeter components are linked together by intervening nucleotides. In some embodiments, the gRNA is a chimeric gRNA-gDNA. In some embodiments, the method comprises contacting the target nucleic acid sequence with and AAV encoding a plurality of gRNAs targeted to different or overlapping regions of the target nucleic acid. In some embodiments, the gRNA scaffold comprises any one of the sequences of SEQ ID NOS: 2101-2285, 39981-40026, 40913-40958, and 41817 as set forth in Table 2.

[0329] In some embodiments of the method of modifying a target nucleic acid sequence, the CasX protein incorporated into the AAV vector is a reference CasX selected from SEQ ID NOS: 1-3, or a CasX variant having at least 50%, at least 60%, at least 70%, at least 80%, or at least 90%, or at least 95%, or at least 99% sequence identity to the reference CasX proteins of SEQ ID NOS:1-3. In some embodiments, the CasX variant protein comprises at least one modification relative to a reference CasX protein having a sequence selected from SEQ ID NOS: 1-3. In some embodiments, the at least one modification comprises at least one amino acid substitution, deletion, or insertion in a domain relative to the reference CasX protein. In some embodiments, the at least one modification comprises at least one amino acid deletion in a domain relative to the reference CasX protein. In other embodiments, the at least one modification comprises at least one amino acid insertion in a domain relative to the reference CasX protein. In some embodiments, the at least one modification comprises at least one amino acid substitution in a domain relative to the reference CasX protein. In some embodiments of the methods, the AAV encodes a CasX variant having a sequence of SEQ ID NOS: 49-160, 40208-40369 and 40828-40912 as set forth in Table 3, or a sequence having at least about 50%, at least about 60%, at least about 70%, at least about 80%, at least about 90%, or at least about 95%, or at least about 96%, or at least about 97%, or at least about 98%, or at least about 99% sequence identity thereto. In the embodiments, the CasX variant protein exhibits at least one or more improved characteristics as compared to a reference CasX protein. In some embodiments of the method, the one or more improved characteristics of the CasX variant protein are selected from the group consisting of improved folding of the CasX protein, improved binding affinity to the guide RNA, improved binding affinity to the target nucleic acid sequence, altered binding affinity to one or more PAM sequences, ability to effectively bind a greater spectrum of canonical PAM sequences compared to reference CasX proteins, including TTC, ATC, GTC, and CTC, improved unwinding of the target nucleic acid sequence, increased activity, improved editing efficiency, improved editing specificity, increased activity of the nuclease, increased target strand loading for double strand cleavage, decreased target strand loading for single strand nicking, decreased off-target cleavage, improved binding of the non-target strand of DNA, improved protein stability, improved protein:guide RNA complex stability, improved protein solubility, improved protein:guide RNA complex solubility, improved protein yield, improved protein expression, and improved fusion characteristics. In some embodiments of the methods, the improved characteristic of the CasX variant protein is at least about 1.1 to about 100,000-fold improved relative to the reference protein of SEQ ID NO: 1, SEQ ID NO: 2, or SEQ ID NO: 3. In some embodiments, the improved characteristic of the CasX variant protein is at least about 10 to about 10,000-fold improved relative to the reference protein of SEQ ID NO: 1, SEQ ID NO: 2, or SEQ ID NO:3. In some embodiments, the improved characteristic of the CasX variant protein is at least about 1.1 to about 1000-fold increased binding affinity of the CasX protein to the gRNA compared to the protein of SEQ ID NO: 1, SEQ ID NO: 2, or SEQ ID NO: 3. In some embodiments, the improved characteristic of the CasX variant protein is at least about 1.1, at least 1.5, at least 10, at least 50, at least 100, at least 500, at least 1,000, at least 5,000, or at least a 10,000-fold improved, as compared to a reference CasX protein of SEQ ID NO: 1, SEQ ID NO: 2, or SEQ ID NO: 3. In some embodiments, the CasX variant protein has at least about 1.1 to about 10-fold increased binding affinity to the target nucleic acid sequence compared to the protein of SEQ ID NO: 1, SEQ ID NO: 2, or SEQ ID NO: 3. In some embodiments, the increased binding affinity to the target nucleic acid sequence by the CasX variant protein is to one or more PAM sequences, including TTC, ATC, GTC, and CTC,

[0330] In some embodiments, the modifying of the target nucleic acid sequence is carried out ex vivo. In some embodiments, the modifying of the target nucleic acid sequence is carried out in vitro inside a cell. In some embodiments of the modification of the target nucleic acid sequence in a cell, the cell is a eukaryotic cell selected from the group consisting of a rodent cell, a mouse cell, a rat cell, a primate cell, a non-human primate cell, and a human cell. In particular embodiments, the eukaryotic cell is a human cell. In some embodiments, the modifying of the target nucleic acid sequence is carried out in vivo in a subject. In some embodiments, the subject is selected from the group consisting of mouse, rat, pig, non-human primate, and human.

[0331] In some embodiments, the method of modifying a target nucleic acid sequence comprises contacting a target nucleic acid with an AAV vector encoding a CasX protein and gRNA pair and further comprising a donor template. The donor template may be inserted into the target nucleic acid such that all, some or none of the gene product is expressed. Depending on whether the system is used to knock-down/knock-out or to knock-in a protein-coding sequence, the donor template can be a short single-stranded or double-stranded oligonucleotide, or can be a long single-stranded or double-stranded oligonucleotide. For knock-down/knock-outs, the donor template sequence need not be identical to the genomic sequence that it replaces and may contain one or more single base changes, insertions, deletions, inversions or rearrangements with respect to the genomic sequence. Provided that there are arms with sufficient numbers of nucleotides having sufficient homology flanking the cleavage site(s) of the target nucleic acid sequence targeted by the CasX:gRNA (i.e., 5′ and 3′ to the cleavage site) to support homology-directed repair (“homologous arms”), use of such donor templates can result in a frame-shift or other mutation such that the gene product is not expressed or is expressed at a lower level. In some embodiments, the homologous arms comprise between 10 and 100 nucleotides. The upstream and downstream homology arm sequences share at least about 80%, 85%, 90%, 95%, or 100% homology with the nucleotide sequences within 1-50 bases flanking either side of the cleavage site where the CasX cleaves the target nucleic acid sequence, facilitating insertion of the donor template sequence by HDR. In some embodiments, the donor template sequence comprises a non-homologous or a heterologous sequence flanked by two homologous arms, such that homology-directed repair between the target DNA region and the two flanking arm sequences results in insertion of the non-homologous or heterologous sequence at the target region, resulting in the knock-down or knock-out of the target gene, with a resulting reduction or elimination of expression of the gene product. In such knock-down cases, expression of the gene product is reduced by at least about 10%, at least about 20%, at least about 30%, at least about 40%, at least about 50%, at least about 60%, at least about 70%, at least about 80%, or at least about 90% in comparison to target nucleic acid that has not been modified. In other cases, an exogenous donor template may comprise a corrective sequence to be integrated, and is flanked by an upstream homologous arm and a downstream homologous arm, each having homology to the target nucleic acid sequence that is introduced into a cell. Use of such donor templates can result in expression of functional protein or expression of physiologically normal levels of functional protein after gene editing. In other cases, an exogenous donor template, which may comprise a mutation, a heterologous sequence, or a corrective sequence, is inserted between the ends generated by CasX cleavage by homology-independent targeted integration (HITI) mechanisms. The exogenous sequence inserted by HITI can be any length, for example, a relatively short sequence of between 1 and 50 nucleotides in length, or a longer sequence of about 50-1000 nucleotides in length. The lack of homology can be, for example, having no more than 20-50% sequence identity and/or lacking in specific hybridization at low stringency. In other cases, the lack of homology can further include a criterion of having no more than 5, 6, 7, 8, or 9 bp identity.

[0332] In some embodiments, the AAV vector comprises a donor template sequence wherein the sequence may comprise certain sequence differences as compared to the target nucleic acid sequence, e.g., restriction sites, nucleotide polymorphisms, selectable markers (e.g., drug resistance genes, fluorescent proteins, enzymes etc.), etc., which may be used to assess for successful insertion of the donor nucleic acid at the cleavage site or in some cases may be used for other purposes (e.g., to signify expression at the targeted genomic locus). Alternatively, these sequence differences may include flanking recombination sequences such as FLPs, loxP sequences, or the like, that can be activated at a later time for removal of the marker sequence. In some embodiments of the method, the donor polynucleotide comprises at least about 10, at least about 50, at least about 100, at least about 200, at least about 300, at least about 400, at least about 500, at least about 600, at least about 700 nucleotides. In other embodiments, the donor polynucleotide comprises at least about 10 to about 700 nucleotides, at least about 20 to about 600 nucleotides, at least about 40 to about 400 nucleotides. In some embodiments, the donor template is a single stranded DNA template or a single stranded RNA template.

[0333] In some cases, the methods do not comprise contacting a target nucleic acid sequence with a donor template, and the target nucleic acid sequence is modified such that nucleotides within the target nucleic acid sequence are deleted or inserted according to the cell's own repair pathways; for example, the cellular repair pathway can be NHEJ.

[0334] In other embodiments, the method provides an AAV encoding a CasX comprising one or more nuclear localization signal (NLS) of any or multiples of the embodiments described herein for targeting the CasX/gRNA to the nucleus of the cell. The NLS can be fused at or near the N-terminus, the C-terminus, or both of the CasX protein.

[0335] Introducing recombinant AAV vectors comprising sequences encoding the transgene components (e.g., the CasX, gRNA, promoters and accessory components and, optionally, the donor template sequences) of the disclosure into cells under in vitro conditions can occur in any suitable culture media and under any suitable culture conditions that promote the survival of the cells and production of the CasX:gRNA. Introducing recombinant AAV vectors into a target cell can be carried out in vivo, in vitro or ex vivo. In some embodiments of the method, vectors may be provided directly to a target host cell. For example, cells may be contacted with vectors having nucleic acids encoding the CasX and gRNA of any of the embodiments described herein and, optionally, having a donor template sequence such that the vectors are taken up by the cells. Methods for contacting cells with nucleic acid vectors that are plasmids include electroporation, calcium chloride transfection, microinjection, transduction and lipofection are well known in the art. In some embodiments, the AAV is selected from AAV1, AAV2, AAV3, AAV4, AAV5, AAV6, AAV7, AAV8, AAV9, AAV10, AAV11, AAV12, AAV 44.9, AAV-Rh74, or AAVRh10.

[0336] In some embodiments, the vector is administered to a subject at a therapeutically effective dose. In the foregoing, the subject is selected from the group consisting of mouse, rat, pig, non-human primate, and human. In particular embodiments, the subject is a human. In some embodiments of the methods, the vector is administered to a subject at a dose of at least about 1×10⁵ vector genomes/kg (vg), at least about 1×10⁶ vg/kg, at least about 1×10⁷ vg/kg, at least about 1×10⁸ vg/kg, at least about 1×10⁹ vg/kg, at least about 1×10¹⁰ vg/kg, at least about 1×10¹¹ vg/kg, at least about 1×10¹² vg/kg, at least about 1×10¹³ vg/kg, at least about 1×10¹⁴ vg/kg, at least about 1×10¹⁵ vg/kg, at least about 1×101⁶ vg/kg. The vector can be administered by a route of administration selected from the group consisting of subcutaneous, intradermal, intraneural, intranodal, intramedullary, intramuscular, intralumbar, intrathecal, subarachnoid, intraventricular, intracapsular, intravenous, intralymphatical, or intraperitoneal routes, wherein the administering method is injection, transfusion, or implantation.

[0337] AAV vectors used for providing the nucleic acids encoding gRNAs and the CasX proteins to a target host cell can include suitable promoters or other accessory elements for driving the expression, that is, transcriptional activation of the nucleic acid of interest. In some cases, the encoding nucleic acid of interest will be operably linked to a promoter. This may include ubiquitously acting promoters, for example, the CMV-beta-actin promoter, or inducible promoters, such as promoters that are active in particular cell populations or that respond to the presence of drugs such as tetracycline or kanamycin. By transcriptional activation, it is intended that transcription will be increased above basal levels in the target host cell comprising the vector by at least about 10-fold, by at least about 100-fold, more usually by at least about 1000-fold. In addition, vectors used for providing a nucleic acid encoding a gRNA and/or a CasX protein to a cell may include nucleic acid sequences that encode for selectable markers in the target cells, so as to identify cells that have taken up the CasX protein and/or the gRNA.

### VI. AAV Vectors

[0338] In other embodiments, the present disclosure provides recombinant AAV vectors comprising polynucleotides encoding the CasX proteins, the gRNAs, and the regulatory and accessory elements described herein.

[0339] In some embodiments, the disclosure provides a recombinant adeno-associated virus (rAAV) comprising: a) an AAV capsid protein, and b) the polynucleotide of any one of the embodiments described herein. In the foregoing embodiment, the polynucleotide can comprise sequences of components selected from: a first adeno-associated virus (AAV) inverted terminal repeat (ITR) sequence; a second AAV ITR sequence; a first promoter sequence of any of the embodiments described herein; a second promoter sequence of any of the embodiments described herein; a sequence encoding a CRISPR protein of any of the embodiments described herein; a sequence encoding at least a first guide RNA (gRNA) of any of the embodiments described herein; and one or more accessory element sequences of any of the embodiments described herein. In some embodiments, the polynucleotide comprises one or more sequences selected from the group of sequences set forth in Tables 8-10, 12, 13, and 17-22 and 24-27, or a sequence having at least 85%, at least 90%, at least 95%, at least 95%, at least 96%, at least 97%, at least 98%, or at least 99% identity thereto. In another embodiment, the polynucleotide comprises a sequence selected from the group of sequences set forth in Tables 8-10, 12, 13, and 17-22 and 24-27. In some embodiments, the polynucleotide sequence differs from those set forth in Tables 8-10, 12, 13, and 17-22 and 24-26 only in the selection of the targeting sequences of the gRNA or gRNAs encoded by the polynucleotide, wherein the targeting sequence is a sequence having 15 to 30 nucleotides capable of hybridizing with the sequence of a target nucleic acid. In a particular embodiment, the targeting sequence of the polynucleotide is selected from the group consisting of the sequences set forth in Table 27. In some embodiments, the present disclosure provides a polynucleotide of any of the embodiments described herein, wherein the polynucleotide has the configuration of a construct of any one of FIG. 24, 33-35, or 42.

[0340] In some embodiments, the AAV capsid protein is derived from serotype AAV1, AAV2, AAV3, AAV4, AAV5, AAV6, AAV7, AAV8, AAV9, AAV10, AAV11, AAV12, AAV 44.9, AAV-Rh74, or AAVRh10. In some embodiments, the AAV capsid protein and the 5′ and 3′ ITR are derived from the same serotype of AAV. In other embodiments, the AAV capsid protein and the 5′ and 3′ ITR are derived from different serotypes of AAV. In a particular embodiment, the 5′ and 3′ ITR are derived from AAV1. In another particular embodiment, the 5′ and 3′ ITR are derived from AAV2. In some embodiments, the polynucleotides comprise sequences encoding the reference CasX of SEQ ID NOS: 1-3. In other embodiments, the polynucleotides comprise sequences encoding the CasX variants of any of the embodiments described herein, including the CasX protein variants of SEQ ID NOS: 49-160, 40208-40369 and 40828-40912 as set forth in Table 3, or sequences having at least about 50%, at least about 60%, at least about 70%, at least about 80%, at least about 90%, at least about 95%, at least about 96%, at least about 97%, at least about 98%, or at least about 99% sequence identity thereto. In some embodiments, the polynucleotides encode gRNA scaffold sequences selected from the group consisting of SEQ ID NOS: 2101-2285, 39981-40026, 40913-40958, and 41817 as set forth in Table 2, or sequences having at least about 50%, at least about 60%, at least about 70%, at least about 80%, at least about 90%, at least about 95%, at least about 95%, at least about 96%, at least about 97%, at least about 98%, at least about 99% sequence identity thereto. In some embodiments, the gRNA comprises a targeting sequence having 15 to 30 nucleotides that is complementary to, and therefore hybridizes with, the target nucleic acid in a cell, and is linked to the 3′ end of the gRNA scaffold sequence.

[0341] In other embodiments, the disclosure provides AAV systems comprising a donor template nucleic acid, wherein the donor template comprises a nucleotide sequence having homology to a target nucleic acid sequence. In some embodiments, the donor template is intended for gene editing and comprises all or at least a portion of a target gene wherein upon insertion of the donor template, the gene is either knocked down, knocked out, or the mutation is corrected. In some embodiments, the donor template comprises a sequence that encodes at least a portion of a target nucleic acid exon. In other embodiments, the donor template has a sequence that encodes at least a portion of a target nucleic acid intron. In other embodiments, the donor template has a sequence that encodes at least a portion of a target nucleic acid intron-exon junction. In still other cases, the donor template sequence of the AAV systems comprises one or more mutations relative to a target nucleic acid. In the foregoing embodiments, the donor template can range in size from 10-700 nucleotides. In some embodiments, the donor template is a single-stranded DNA template.

[0342] In other aspects, the disclosure relates to methods to produce polynucleotide sequences encoding the AAV vector of any of the embodiments described herein, as well as methods to express and recover the AAV. In general, the methods include producing a polynucleotide sequence coding for the components of the expression cassette plus the flanking ITRs of any of the embodiments described herein and incorporating the encoding gene into an expression vector appropriate for a host cell. For production of the AAV vector of any of the embodiments described herein, the methods include transforming an appropriate host cell with an expression vector comprising the encoding polynucleotide, together with and the Rep and Cap sequences provided in trans, and culturing the host cell under conditions causing or permitting the resulting AAV to be produced, which are recovered by methods described herein or by standard purification methods known in the art. Rep and Cap can be provided to the packaging host cell as plasmids. Alternatively, the host cell genome may comprise stably integrated Rep and Cap genes. Suitable packaging cell lines are known to one of ordinary skill in the art. See for example, www.cellbiolabs.com/aav-expression-and-packaging. Methods of purifying AAV produced by host cell lines will be known to one of ordinary skill in the art, and include, without limitation, affinity chromatography, gradient centrifugation, and ion exchange chromatography. Standard recombinant techniques in molecular biology are used, along with the methods of the Examples, to make the polynucleotides and AAV vectors of the present disclosure.

[0343] In accordance with the disclosure, nucleic acid sequences that encode the reference CasX, the CasX variants, or the gRNA of any of the embodiments described herein (or their complement) are used to generate recombinant DNA molecules that direct the expression in appropriate host cells. Several cloning strategies are suitable for performing the present disclosure, many of which are used to generate a construct that comprises a gene coding for a composition of the present disclosure, or its complement. In some embodiments, the cloning strategy is used to create a gene that encodes a construct that comprises nucleotides encoding the reference CasX, the CasX variants, or the gRNA that is used to transform a host cell for expression of the composition.

[0344] In some approaches, a construct is first prepared containing the DNA sequences encoding the components of the AAV vector and transgene. Exemplary methods for the preparation of such constructs are described in the Examples. The construct is then used to create an expression vector suitable for transforming a host packaging cell, such as a eukaryotic host cell for the expression and recovery of the AAV vector comprising the transgene. The eukaryotic host packaging cell can be selected from BHK cells, HEK293 cells, HEK293T cells, NS0 cells, SP2/0 cells, YO myeloma cells, P3X63 mouse myeloma cells, PER cells, PER.C6 cells, hybridoma cells, NIH3T3 cells, COS cells, HeLa cells, CHO cells, or other eukaryotic cells known in the art suitable for the production of recombinant AAV. A number of transfection techniques are generally known in the art; see, e.g., Sambrook et al. (1989) Molecular Cloning, a laboratory manual, Cold Spring Harbor Laboratories, New York. Particularly suitable transfection methods include calcium phosphate co-precipitation, direct microinjection into cultured cells, electroporation, liposome mediated gene transfer, lipid-mediated transduction, and nucleic acid delivery using high-velocity microprojectiles. Exemplary methods for the creation of expression vectors, the transformation of host cells and the expression and recovery of the nucleic acids and the AAV vectors are described in the Examples.

[0345] The gene encoding the AAV vector can be made in one or more steps, either fully synthetically or by synthesis combined with enzymatic processes, such as restriction enzyme-mediated cloning, PCR and overlap extension, including methods more fully described in the Examples. The methods disclosed herein can be used, for example, to ligate sequences of polynucleotides encoding the various components (e.g., ITRs, CasX and gRNA, promoters and accessory elements) of a desired sequence to create the expression vector.

[0346] In some embodiments, host cells transfected with the above-described AAV expression vectors are rendered capable of providing AAV helper functions in order to replicate and encapsidate the nucleotide sequences flanked by the AAV ITRs to produce rAAV viral particles. AAV helper functions are generally AAV-derived coding sequences which can be expressed to provide AAV gene products that, in turn, function in trans for productive AAV replication. AAV helper functions are used herein to complement necessary AAV functions that are missing from the AAV expression vectors. Thus, AAV helper functions include one, or both of the major AAV ORFs (open reading frames), encoding the rep and cap coding regions, or functional homologues thereof. Accessory functions can be introduced into and then expressed in host cells using methods known to those of skill in the art. Commonly, accessory functions are provided by infection of the host cells with an unrelated helper virus. In some embodiments, accessory functions are provided using an accessory function vector. Depending on the host/vector system utilized, any of a number of suitable transcription and translation control elements, including constitutive and inducible promoters, transcription enhancer elements, transcription terminators, etc., may be used in the expression vector.

[0347] In some embodiments, the nucleotide sequence encoding the components of the AAV vector is codon optimized. This type of optimization can entail a mutation of an encoding nucleotide sequence to mimic the codon preferences of the intended host organism or cell while encoding the same CasX protein or other protein component. Thus, the codons can be changed, but the encoded protein remains unchanged. For example, if the intended host cell was a human cell, a human codon-optimized CasX-encoding nucleotide sequence could be used. The gene design can be performed using algorithms that optimize codon usage and amino acid composition appropriate for the host cell utilized in the production of the AAV vector. In one method of the disclosure, a library of polynucleotides encoding the components of the constructs is created and then assembled, as described above. The resulting genes are then assembled and the resulting genes used to transform a host cell and produce and recover the AAV vector compositions for evaluation of its properties, as described herein. In some embodiments, as described more fully below, the nucleotide sequence encoding the components of the AAV vector are engineered to remove CpG dinucleotides in order to reduce the immunogenicity of the components, while retaining their functional characteristics.

[0348] In some embodiments, a nucleotide sequence encoding a gRNA is operably linked to a regulatory element. In some embodiments, a nucleotide sequence encoding a CasX protein is operably linked to a regulatory element. In other cases, the nucleotide encoding the CasX and gRNA are linked and are operably linked to a single regulatory element. Exemplary accessory elements include a transcription promoter, a transcription enhancer element, a transcription termination signal, internal ribosome entry site (IRES) or P2A peptide to permit translation of multiple genes from a single transcript, polyadenylation sequences to promote downstream transcriptional termination, sequences for optimization of initiation of translation, and translation termination sequences. In some cases, the promoter is a constitutively active promoter. In some cases, the promoter is a regulatable promoter. In some cases, the promoter is an inducible promoter. In some cases, the promoter is a tissue-specific promoter. In some cases, the promoter is a cell type-specific promoter. In some cases, the transcriptional accessory element (e.g., the promoter) is functional in a targeted cell type or targeted cell population. For example, in some cases, the transcriptional accessory element can be functional in eukaryotic cells, e.g., packaging host cells for the production of the AAV vector. In some cases, the accessory element is a transcription activator that works in concert with a promoter to initiate transcription. By transcriptional activation, it is intended that transcription will be increased above basal levels in the target cell by 10-fold, by 100-fold, more usually by 1000-old.

[0349] Non-limiting examples of eukaryotic promoters (promoters functional in a eukaryotic cell) include EF-1alpha, EF-1alpha core promoter, those from cytomegalovirus (CMV) immediate early, herpes simplex virus (HSV) thymidine kinase, early and late SV40, long terminal repeats (LTRs) from retrovirus, and mouse metallothionein-I. Further non-limiting examples of eukaryotic promoters include the CMV promoter full-length promoter, the minimal CMV promoter, the chicken β-actin promoter, the RSV promoter, the HIV-Ltr promoter, the hPGK promoter, the HSV TK promoter, the Mini-TK promoter, the human synapsin I promoter which confers neuron-specific expression, the Mecp2 promoter for selective expression in neurons, the minimal IL-2 promoter, the Rous sarcoma virus enhancer/promoter (RSV), the spleen focus-forming virus long terminal repeat (LTR) promoter, the SV40 enhancer, the TBG promoter from the human thyroxine-binding globulin gene (Liver specific), the PGK promoter, the human ubiquitin C promoter, the UCOE promoter (Promoter of HNRPA2B1-CBX3), the Histone H2 promoter, the Histone H3 promoter, the Ula1 small nuclear RNA promoter (226 nt), the U1b2 small nuclear RNA promoter (246 nt) 26, the TTR minimal enhancer/promoter, the b-kinesin promoter, the ROSA26 promoter and the glyceraldehyde 3-phosphate dehydrogenase (GAPDH) promoter. In some embodiments, the promoter operably linked to the sequence encoding the first and/or the second gRNA is U6 (Kunkel, G R et al. U6 small nuclear RNA is transcribed by RNA polymerase III. Proc Natl Acad Sci USA. 83(22):8575 (1986)).

[0350] Non-limiting examples of pol II promoters suitable for use in the AAV constructs of the disclosure include, but are not limited to polyubiquitin C (UBC), cytomegalovirus (CMV), simian virus 40 (SV40), chicken beta-Actin promoter and rabbit beta-Globin splice acceptor site fusion (CAG), chicken β-actin promoter with cytomegalovirus enhancer (CB7), PGK, Jens Tornoe (JeT), GUSB, CBA hybrid (CBh), elongation factor-1 alpha (EF-1alpha), beta-actin, Rous sarcoma virus (RSV), silencing-prone spleen focus forming virus (SFFV), CMVd1 promoter, truncated human CMV (tCMVd2), minimal CMV promoter, chicken β-actin promoter, chicken β-actin promoter with cytomegalovirus enhancer (CB7), HSV TK promoter, Mini-TK promoter, minimal IL-2 promoter, GRP94 promoter, Super Core Promoter 1, Super Core Promoter 2, MLC, MCK, GRK1 protein promoter, Rho promoter, CAR protein promoter, hSyn Promoter, U1A promoter, Ribsomal Rpl and Rps promoters (e.g., hRpl30 and hRps18), CMV53 promoter, minimal SV40 promoter, CMV53 promoter, SFCp promoter, pJB42CAT5 promoter, MLP promoter, EFS promoter, MeP426 promoter, MecP2 promoter, MHCK7 promoter, beta-glucuronidase (GUSB), CK7 promoter, and CK8e promoter. In some embodiments, an AAV construct of the disclosure comprises a pol II promoter comprising a sequence as set forth in Table 8, or a sequence having at least 85%, at least 90%, at least 95%, at least 95%, at least 96%, at least 97%, at least 98%, or at least 99% identity thereto. In a particular embodiment, the pol II promoter is EF-1alpha, wherein the promoter enhances transfection efficiency, the transgene transcription or expression of the CRISPR nuclease, the proportion of expression-positive clones and the copy number of the episomal vector in long-term culture. In another particular embodiment, the pol II promoter is JeT, wherein the promoter enhances transfection efficiency, the transgene transcription or expression of the CRISPR nuclease, the proportion of expression-positive clones and the copy number of the episomal vector in long-term culture. In some embodiments, the pol II promoter is a truncated version of the foregoing promoters. In some embodiments the pol II promoter in an AAV construct of the disclosure has less than about 400 nucleotides, less than about 350 nucleotides, less than about 300 nucleotides, less than about 200 nucleotides, less than about 150 nucleotides, less than about 100 nucleotides, less than about 80 nucleotides, or less than about 40 nucleotides. In some embodiments the pol II promoter in an AAV construct of the disclosure has between about 40 to about 585 nucleotides, between about 100 to about 400 nucleotides, or between about 150 to about 300 nucleotides. In some embodiments, the AAV constructs of the disclosure comprise polynucleic acids encoding the pol II promoters of any of the foregoing embodiments of the paragraph, as well as the promoters of Table 8, and can be, in some cases, configured in relation to the other components of the constructs as depicted in any one of FIG. 24, 33-35 or 42.

[0351] In some embodiments, an AAV construct of the disclosure comprises a pol II promoter with a linked intron, wherein the intron enhances the ability of the promoter to increase transfection efficiency, the transgene transcription or expression of the CRISPR nuclease, the proportion of expression-positive clones and the copy number of the episomal vector in long-term culture. Exemplary embodiments of such promoter-intron combinations are described in the Examples.

[0352] Non-limiting examples of pol III promoters suitable for use in the AAV constructs of the disclosure include, but are notlimited to U6, mini U6, 7SK, and H1 variants, BiH1 (Bidrectional H1 promoter), BiU6, Bi7SK, BiH1 (Bidirectional U6, 7SK, and H1 promoters), gorilla U6, rhesus U6, human 7SK, and human H1 promoters. In the foregoing embodiment, the pol III promoter enhances the transcription of the gRNA encoded by the AAV. In some embodiments, an AAV construct of the disclosure comprises a pol III promoter comprising a sequence as set forth in Table 9, or a sequence having at least 85%, at least 90%, at least 95%, at least 95%, at least 96%, at least 97%, at least 98%, or at least 99% identity thereto. In some embodiments, the pol III promoter is a truncated version of the foregoing promoters. In some embodiments the pol III promoter in an AAV construct of the disclosure has less than about 250 nucleotides, less than about 220 nucleotides, less than about 200 nucleotides, less than about 160 nucleotides, less than about 140 nucleotides, less than about 130 nucleotides, less than about 120 nucleotides, less than about 100 nucleotides, less than about 80 nucleotides, or less than about 70 nucleotides. In some embodiments the pol III promoter in an AAV construct of the disclosure has between about 70 to about 245 nucleotides, between about 100 to about 220 nucleotides, or between about 120 to about 160 nucleotides. In some embodiments, the AAV constructs of the disclosure comprise polynucleic acids encoding the pol III promoters of any of the foregoing embodiments of the paragraph, as well as the promoters of Table 9, and can be, in some cases, configured in relation to the other components of the constructs as depicted in any one of FIG. 24, 33-35 or 42.

[0353] Selection of the appropriate promoter is well within the level of ordinary skill in the art, as it relates to controlling expression, e.g., for modifying a gene or other target nucleic acid. The expression vector may also contain a ribosome binding site for translation initiation and a transcription terminator. The expression vector may also include appropriate sequences for amplifying expression. The expression vector may also include nucleotide sequences encoding protein tags (e.g., 6×His tag, hemagglutinin tag, fluorescent protein, etc.) that can be fused to the CasX protein, thus resulting in a chimeric CasX protein that are used for purification or detection.

[0354] In some embodiments, the present disclosure provides a polynucleotide sequence encoding a gRNA and/or a CasX protein that is operably linked to an inducible promoter, a constitutively active promoter, a spatially restricted promoter (i.e., transcriptional control element, enhancer, tissue specific promoter, cell type specific promoter, etc.), or a temporally restricted promoter.

[0355] In certain embodiments, suitable promoters can be derived from viruses and can therefore be referred to as viral promoters, or they can be derived from any organism, including prokaryotic or eukaryotic organisms. Suitable promoters can be used to drive expression by any RNA polymerase (e.g., pol I, pol IL, pol III). Exemplary promoters include, but are not limited to the SV40 early promoter, mouse mammary tumor virus long terminal repeat (LTR) promoter; adenovirus major late promoter (Ad MLP); a herpes simplex virus (HSV) promoter, a cytomegalovirus (CMV) promoter such as the CMV immediate early promoter region (CMVIE), a rous sarcoma virus (RSV) promoter, a human U6 small nuclear promoter (U6), an enhanced U6 promoter, a human HI promoter (HI), a Pol II promoter, a 7SK promoter, tRNA promoters and the like. In some embodiments, the present disclosure provides a polynucleotide sequence wherein two gRNA of the transgene are operably linked to a single bidirectional promoter (e.g., bidrectional H1 promoter or bidirectional U6 promoter) placed between the two encoded gRNA sequences, wherein the promoter is capable of initiating transcription of both gRNA sequences. In other embodiments, the disclosure provides AAV constructs comprising promoters oriented in the reverse direction (i.e., 3′ to 5′). Exemplary reverse and bidirectional promoters are described in the Examples and Table 8 and are portrayed schematically in FIGS. 24 and 34.

[0356] In some embodiments, the present disclosure provides a polynucleotide sequence wherein one or more components of the transgene are operably linked to (under the control of) an inducible promoter operable in a eukaryotic cell. Examples of inducible promoters may include, but are not limited to, T7 RNA polymerase promoter, T3 RNA polymerase promoter, isopropyl-beta-D-thiogalactopyranoside (IPTG)-regulated promoter, lactose induced promoter, heat shock promoter, tetracycline-regulated promoter, kanamycin-regulated promoter, steroid-regulated promoter, metal-regulated promoter, estrogen receptor-regulated promoter, etc. Inducible promoters can therefore, in some embodiments, be regulated by molecules including, but not limited to, doxycycline, estrogen and/or an estrogen analog, IPTG, etc. Additional examples of inducible promoters include, without limitation, chemically/biochemically-regulated and physically-regulated promoters such as alcohol-regulated promoters, kanamycin-regulated promoters, tetracycline-regulated promoters (e.g., anhydrotetracycline (aTc)-responsive promoters and other tetracycline-responsive promoter systems, which include a tetracycline repressor protein (tetR), a tetracycline operator sequence (tetO) and a tetracycline transactivator fusion protein (tTA), steroid-regulated promoters (e.g., promoters based on the rat glucocorticoid receptor, human estrogen receptor, moth ecdysone receptors, and promoters from the steroid/retinoid/thyroid receptor superfamily), metal-regulated promoters (e.g., promoters derived from metallothionein (proteins that bind and sequester metal ions) genes from yeast, mouse and human), pathogenesis-regulated promoters (e.g., induced by salicylic acid, ethylene or benzothiadiazole (BTH)), temperature/heat-inducible promoters (e.g., heat shock promoters), and light-regulated promoters (e.g., light responsive promoters from plant cells).

[0357] In some cases, the promoter is a spatially restricted promoter (i.e., cell type specific promoter, tissue specific promoter, etc.) such that in a multi-cellular organism, the promoter is active (i.e., “ON”) in a subset of specific cells. Spatially restricted promoters may also be referred to as enhancers, transcriptional accessory elements, control sequences, etc. Any convenient spatially restricted promoter may be used as long as the promoter is functional in the targeted host cell (e.g., eukaryotic cell; prokaryotic cell).

[0358] In some cases, the promoter is a reversible promoter. Suitable reversible promoters, including reversible inducible promoters are known in the art. Such reversible promoters may be isolated and derived from many organisms, e.g., eukaryotes and prokaryotes. Modification of reversible promoters derived from a first organism for use in a second organism, e.g., a first prokaryote and a second a eukaryote, a first eukaryote and a second a prokaryote, etc., is well known in the art. Such reversible promoters, and systems based on such reversible promoters but also comprising additional control proteins, include, but are not limited to, alcohol regulated promoters (e.g., alcohol dehydrogenase I (alcA) gene promoter, promoters responsive to alcohol transactivator proteins (AlcR, etc.), tetracycline regulated promoters, (e.g., promoter systems including Tet Activators, TetON, TetOFF, etc.), steroid regulated promoters (e.g., rat glucocorticoid receptor promoter systems, human estrogen receptor promoter systems, retinoid promoter systems, thyroid promoter systems, ecdysone promoter systems, mifepristone promoter systems, etc.), metal regulated promoters (e.g., metallothionein promoter systems, etc.), pathogenesis-related regulated promoters (e.g., salicylic acid regulated promoters, ethylene regulated promoters, benzothiadiazole regulated promoters, etc.), temperature regulated promoters (e.g., heat shock inducible promoters (e.g., HSP-70, HSP-90, soybean heat shock promoter, etc.), light regulated promoters, synthetic inducible promoters, and the like.

[0359] Recombinant expression vectors of the disclosure can also comprise elements that facilitate robust expression components of the disclosure (e.g., the CasX or the gRNA). For example, recombinant expression vectors utilized in the AAV constructs of the disclosure can include one or more of a polyadenylation signal (poly(A)), an intronic sequence or a post-transcriptional accessory element (PTRE) such as a woodchuck hepatitis post-transcriptional accessory element (WPRE). Non-limiting examples of PTRE suitable for the AAV constructs of the disclosure include the sequences of Table 12, or a sequence having at least 85%, at least 90%, at least 95%, at least 95%, at least 96%, at least 97%, at least 98%, or at least 99% identity thereto. Exemplary poly(A) sequences suitable for inclusion in the expression vectors of the disclosure include hGH poly(A) signal (short), HSV TK poly(A) signal, synthetic polyadenylation signals, SV40 poly(A) signal, SV40 Late PolyA signal, β-globin poly(A) signal, β-globin poly(A) short, and the like. Non-limiting examples of poly(A) signals suitable for the AAV constructs of the disclosure include the sequences of Table 10, or a sequence having at least 85%, at least 90%, at least 95%, at least 95%, at least 96%, at least 97%, at least 98%, or at least 99% identity thereto. Non-limiting examples of introns suitable for the AAV constructs of the disclosure include the sequences of Table 17, or a sequence having at least 85%, at least 90%, at least 95%, at least 95%, at least 96%, at least 97%, at least 98%, or at least 99% identity thereto. A person of ordinary skill in the art will be able to select suitable elements to include in the recombinant expression vectors described herein.

[0360] The polynucleotides encoding the transgene components can be individually cloned into the AAV expression vector. In some embodiments, the polynucleotide is a recombinant expression vector that comprises a nucleotide sequence encoding a CasX protein. In other embodiments, the disclosure provides a recombinant expression vector comprising a polynucleotide sequence encoding a CasX protein and a nucleotide sequence encoding a first gRNA and, optionally, a second gRNA. In some cases, the nucleotide sequence encoding the CasX protein variant and/or the nucleotide sequence encoding the gRNA are each operably linked to a promoter that is operable in a cell type of choice. In other embodiments, the nucleotide sequence encoding the CasX protein variant and the nucleotide sequence encoding the gRNA are provided in separate vectors.

[0361] The nucleic acid sequences encoding the transgene components are inserted into the vector by a variety of procedures. In general, DNA is inserted into an appropriate restriction endonuclease site(s) using techniques known in the art. Vector components generally include, but are not limited to, one or more of a signal sequence, an origin of replication, one or more marker genes, an enhancer element, a promoter, and a transcription termination sequence. Construction of suitable vectors containing one or more of these components employs standard ligation techniques which are known to the skilled artisan. Such techniques are well known in the art and well described in the scientific and patent literature. Various vectors are publicly available.

[0362] The recombinant expression vectors can be delivered to the target host cells by a variety of methods, as described more fully, below, and in the Examples. Such methods include, e.g., viral infection, transfection, lipofection, electroporation, calcium phosphate precipitation, polyethyleneimine (PEI)-mediated transfection, DEAE-dextran mediated transfection, liposome-mediated transfection, particle gun technology, nucleofection, electroporation, cell squeezing, calcium phosphate precipitation, direct microinjection, nanoparticle-mediated nucleic acid delivery, and the like. A number of transfection techniques are generally known in the art; see, e.g., Sambrook et al. (1989) Molecular Cloning, a laboratory manual, Cold Spring Harbor Laboratories, New York. Packaging cells are typically used to form virus particles; such cells include HEK293 cells or HEK293T cells (and other cells known in the art), which package adenovirus.

[0363] In some embodiments, host cells transfected with the above-described AAV expression vectors are rendered capable of providing AAV helper functions in order to replicate and encapsidate the nucleotide sequences flanked by the AAV ITRs to produce rAAV viral particles. AAV helper functions are generally AAV-derived coding sequences which can be expressed to provide AAV gene products that, in turn, function in trans for productive AAV replication. In some embodiments, packaging cells are transfected with plasmids comprising AAV helper functions to complement necessary AAV functions that are missing from the AAV expression vectors. Thus, AAV helper function plasmids include one, or both of the major AAV ORFs (open reading frames), encoding the rep and cap coding regions, or functional homologues thereof, and the adenoviral helper genes comprising E2A, E4, and VA genes, operably linked to a promoter. Accessory functions can be introduced into and then expressed in host cells using methods known to those of skill in the art. Commonly, accessory functions are provided by infection of the host cells with an unrelated helper virus. In some embodiments, accessory functions are provided using an accessory function vector. Depending on the host/vector system utilized, any of a number of suitable transcription and translation accessory elements, including constitutive and inducible promoters, transcription enhancer elements, transcription terminators, etc., may be used in the expression vector.

### VII. Applications

[0364] The AAV systems provided herein are useful in methods for modifying the target nucleic acid sequence in various applications, including therapeutics, diagnostics, and research.

[0365] In the methods of modifying a target nucleic acid sequence in a cell described herein, the methods utilize any of the embodiments of the AAV systems described herein. In some cases, the methods knock-down the expression of the mutant gene product. In other cases, the methods knock-out the expression of the

[0366] mutant gene product. In still other cases, the methods result in the expression of functional protein of the gene product.

[0367] In some embodiments, the methods comprise contacting the target nucleic acid sequence with an AAV encoding a CasX protein and a guide nucleic acid comprising a targeting sequence, wherein said contacting results in modification of the target nucleic acid sequence by the CasX protein of the RNP. In some embodiments, the methods comprise introducing into a cell the AAV encoding the CasX protein and the gRNA, wherein the targeting sequence of the gRNA comprises a sequence complementary to a portion of the target nucleic acid, wherein the contacting results in the modification of the target nucleic acid of the RNP. In some embodiments, the encoded scaffold of the gRNA comprises a sequence selected from the group consisting of SEQ ID NOS: 2101-2285, 39981-40026, 40913-40958, and 41817 as set forth in Table 2, or a sequence having at least about 50%, at least about 60%, at least about 70%, at least about 80%, at least about 90%, at least about 95%, at least about 95%, at least about 96%, at least about 97%, at least about 98%, or at least about 99% sequence identity thereto, and the encoded CasX protein is a reference CasX protein SEQ ID NO: 1, SEQ ID NO: 2, or SEQ ID NO: 3 or a CasX variant comprising a sequence selected from the group consisting of SEQ ID NOS: 49-160, 40208-40369 and 40828-40912 as set forth in Table 3, or a sequence having at least about 50%, at least about 60%, at least about 70%, at least about 80%, at least about 90%, at least about 95%, at least about 95%, at least about 96%, at least about 97%, at least about 98%, at least about 99% sequence identity thereto.

[0368] In some embodiments, the modified target nucleic acid comprises a single-stranded break, resulting in a mutation, an insertion, or a deletion by the repair mechanisms of the cell. In other embodiments, the modified target nucleic acid comprises a double-stranded break, resulting in a mutation, an insertion, or a deletion by the repair mechanisms of the cell. For example, the CasX:gRNA system encoded by the AAV can introduce into the cell an indel, e.g., a frameshift mutation, at or near the initiation point of the gene. In other embodiments, the modified target nucleic acid of the cell has been modified by the insertion of the donor template wherein the gene comprising the target nucleic acid has been knocked down or knocked out.

[0369] In other embodiments, the method comprises contacting the target nucleic acid sequence with an AAV encoding a plurality (e.g., two or more) of gRNAs targeted to different or overlapping regions of the target nucleic acid with one or more mutations or duplications. In the foregoing, the resulting modification can be an insertion, deletion, substitution, duplication, or inversion of one or more nucleotides as compared to the target nucleic acid sequence.

### VIII. Therapeutic Methods

[0370] The present disclosure provides methods of treating a disease in a subject in need thereof. In some embodiments, the methods of the disclosure can prevent, treat and/or ameliorate a disease of a subject by the administering to the subject of an AAV composition of the disclosure. In some embodiments, the composition administered to the subject further comprises pharmaceutically acceptable carrier, diluent or excipient.

[0371] In some embodiments, the disclosure provides methods of treating a disease in a subject in need thereof comprising modifying a target nucleic acid in a cell of the subject, the modifying comprising administering to the subject a therapeutically effective dose of an AAV vector of any of the embodiments described herein wherein the targeting sequence of the encoded gRNA has a sequence that hybridizes with the target nucleic acid, resulting in the modification of the target nucleic acid by the CasX protein.

[0372] In other embodiments, the methods of treating a disease in a subject in need thereof comprise administering to the subject a therapeutically effective dose of an AAV vector of any of the embodiments described herein wherein the targeting sequence of the encoded gRNA has a sequence that hybridizes with the target nucleic acid and wherein the AAV further comprises a donor template comprises one or more mutations or a heterologous sequence that is inserted into or replaces the target nucleic acid sequence to knock-down or knock-out the gene comprising the target nucleic acid. In the foregoing, the insertion of the donor template serves to disrupt expression of the gene and the resulting gene product. In some embodiments of the foregoing methods, the donor DNA template ranges in size from 10-15,000 nucleotides. In other embodiments of the foregoing methods, the donor template ranges in size from 100-1,000 nucleotides. In some cases, the donor template is a single-stranded RNA or DNA template.

[0373] The modified cell of the treated subject can be a eukaryotic cell selected from the group consisting of a rodent cell, a mouse cell, a rat cell, a primate cell, a non-human primate cell, and a human cell. In some embodiments, the eukaryotic cell of the treated subject is a human cell.

[0374] In some embodiments, the method comprises administering to the subject the AAV vector of the embodiments described herein via an administration route selected from the group consisting of subcutaneous, intradermal, intraneural, intranodal, intramedullary, intramuscular, intralumbar, intrathecal, subarachnoid, intraventricular, intracapsular, intravenous, intralymphatical, intraocular or intraperitoneal routes, wherein the administering method is injection, transfusion, or implantation. In some embodiments of the methods of treating a disease in a subject, the subject is selected from the group consisting of mouse, rat, pig, non-human primate, and human. In a particular embodiment, the subject is a human.

[0375] In some embodiments of the method of treating a disease in a subject in need thereof, the AAV vector is administered at a dose of at least about 1×10⁵ vector genomes/kg (vg), at least about 1×10⁶ vg/kg, at least about 1×10⁷ vg/kg, at least about 1×10⁸ vg/kg, at least about 1×10⁹ vg/kg, at least about 1×10¹⁰ vg/kg, at least about 1×10¹¹ vg/kg, at least about 1×10¹² vg/kg, at least about 1×10¹³ vg/kg, at least about 1×10¹⁴ vg/kg, at least about 1×10¹⁵ vg/kg, at least about 1×101⁶ vg/kg. In organ systems like the eye, the AAV vector is administered at a dose of at least about 1×10⁵ vector genomes (vg), at least about 1×10⁶ vg, at least about 1×10⁷ vg, at least about 1×10⁸ vg, at least about 1×10⁹ vg, at least about 1×10¹⁰ vg, at least about 1×10¹¹ vg, at least about 1×10¹² vg, at least about 1×10¹³ vg, at least about 1×10¹⁴ vg, at least about 1×10¹⁵ vg, at least about 1×101⁶ vg.

[0376] A number of therapeutic strategies have been used to design the compositions for use in the methods of treatment of a subject with a disease. In some embodiments, the invention provides a method of treatment of a subject having a disease, the method comprising administering to the subject an AAV vector of any of the embodiments disclosed herein according to a treatment regimen comprising one or more consecutive doses using a therapeutically effective dose. In some embodiments of the treatment regimen, the therapeutically effective dose of the AAV vector is administered as a single dose. In other embodiments of the treatment regimen, the therapeutically effective dose is administered to the subject as two or more doses over a period of at least two weeks, or at least one month, or at least two months, or at least three months, or at least four months, or at least five months, or at least six months. In some embodiments of the treatment regiment, the effective doses are administered by a route selected from the group consisting of subcutaneous, intradermal, intraneural, intranodal, intramedullary, intramuscular, intralumbar, intrathecal, subarachnoid, intraventricular, intracapsular, intravenous, intralymphatical, intraocular, subretinal, intravitreal, or intraperitoneal routes, wherein the administering method is injection, transfusion, or implantation.

[0377] In some embodiments, the administering of the therapeutically effective amount of an AAV vector to knock down or knock out expression of a gene having one or more mutations leads to the prevention or amelioration of the underlying disease such that an improvement is observed in the subject, notwithstanding that the subject may still be afflicted with the underlying disease. In some embodiments, the administration of the therapeutically effective amount of the AAV vector leads to an improvement in at least one clinically-relevant parameter for the disease. In some embodiments of the method of treatment, the subject is selected from mouse, rat, pig, dog, non-human primate, and human.

[0378] In some embodiments, the disclosure provides compositions of any of the AAV embodiments described herein for use as a medicament for the treatment of a human in need thereof. In some embodiments, the medicament is administered to the subject according to a treatment regimen comprising one or more consecutive doses using a therapeutically effective dose.

### IX. AAV Engineered to Reduce Immunogenicity Retain Editing Properties

[0379] AAV-associated pathogen associated molecular patterns (PAMPs) that contribute to immune responses in mammalians hosts include: i) ligands present on rAAV viral capsids that bind toll-like receptor 2 (TLR2), a cell-surface PRR on non-parenchymal cells in the liver; and ii) unmethylated CpG dinucleotides in viral DNA that bind TLR9, an endosomal PRR in plasmacytoid dendritic cells (pDCs) and B cells (Faust, S M, et al. CpG-depleted adeno-associated virus vectors evade immune detection. J. Clinical Invest. 123:2294 (2013)). In particular, CpG dinucleotide motifs (CpG PAMPs) in AAV vectors are immunostimulatory because of their high degree of hypomethylation, relative to mammalian CpG motifs, which have a high degree of methylation. Accordingly, reducing the frequency of unmethylated CpGs in AAV vector genomes to a level below the threshold that activates human TLR9 is expected to reduce the immune response to exogenously administered AAV-based biologics. Similarly, methylation of CpG PAMPs in AAV constructs is similarly expected to reduce the immune response to AAV-based biologics.

[0380] In some embodiments, the present disclosure provides AAV vectors wherein one or more components of the transgene are codon-optimized for depletion of CpG dinucleotides by the substitution of homologous nucleotide sequences from mammalian species, wherein the one or more components substantially retain their functional properties upon expression in a transduced cell; e.g., ability to drive expression of the CRISPR nuclease, ability to drive expression of the gRNA, enhance the expression of the CRISPR nuclease and/or the gRNA, and enhanced ability to edit a target nucleic acid sequence. In some embodiments, the present disclosure provides AAV vectors wherein one or more AAV transgene component sequences selected from the group consisting of 5′ ITR, 3′ ITR, pol III promoter, pol II promoter, encoding sequence for CRISPR nuclease, encoding sequence for gRNA, accessory element, and poly(A) are codon-optimized for depletion of all or a portion of the CpG dinucleotides, wherein the resulting AAV vector transgene is substantially devoid of CpG dinucleotides. In some embodiments, the present disclosure provides AAV vectors wherein one or more AAV transgene component sequences selected from the group consisting of 5′ ITR, 3′ ITR, pol III promoter, pol II promoter, encoding sequence for a CRISPR nuclease, encoding sequence for gRNA, poly(A), and accessory element comprise less than about 10%, less than about 5%, or less than about 1% CpG dinucleotides. In some embodiments, the present disclosure provides AAV vectors wherein one or more AAV transgene component sequences selected from the group consisting of 5′ ITR, 3 ITR, pol III promoter, pol II promoter, encoding sequence for the CRISPR nuclease, encoding sequence for the gRNA, and poly(A) are devoid of CpG dinucleotides. In some embodiments, the present disclosure provides AAV vectors wherein the transgene comprises less than about 10%, less than about 5%, or less than about 1% CpG dinucleotides. In some embodiments, the present disclosure provides AAV vectors wherein the one or more AAV component sequences codon-optimized for depletion of CpG dinucleotides are selected from the group of sequences consisting of SEQ ID NOS: 41045-41055, as set forth in Table 25, or a sequence having at least about 80%, at least about 90%, at least about 95%, at least about 96%, at least about 97%, at least about 98%, or at least about 99% sequence identity thereto. In some embodiments, the disclosure provides AAV vectors having one or more components of the transgene codon-optimized for depletion of CpG dinucleotides, wherein the expressed CRISPR nuclease and gRNA retain at least about 60%, at least about 70%, at least about 80%, or at least about 90% of the editing potential for a target nucleic acid compared to an AAV vector wherein the transgene has not been codon-optimized for depletion of CpG dinucleotides, when assayed in an in vitro assay under comparable conditions. In a particular embodiment, the present disclosure provides AAV vectors wherein the one or more AAV component sequences codon-optimized for depletion of CpG dinucleotides that retain editing potential are selected from the group of sequences consisting of SEQ ID NOS: 41045-41055, as set forth in Table 25, or a sequence having at least about 80%, at least about 90%, at least about 95%, at least about 96%, at least about 97%, at least about 98%, or at least about 99% sequence identity thereto.

[0381] The embodiments of the AAV vector comprising the one or more components of the transgene codon-optimized for depletion of CpG dinucleotides have, as an improved characteristic, a lower potential for inducing an immune response, either in vivo (when administered to a subject) or in in vitro mammalian cell assays designed to detect markers of an inflammatory response. In some embodiments, the administration of a therapeutically effective dose of the AAV vector comprising the one or more components of the transgene codon-optimized for depletion of CpG dinucleotides to a subject results in a reduced immune response compared to the immune response of a comparable AAV vector wherein the transgene has not been codon-optimized for depletion of CpG dinucleotides, wherein the reduced response is determined by the measurement of one or more parameters such as production of antibodies or a delayed-type hypersensitivity to an AAV component, or the production of inflammatory cytokines and markers, such as, but not limited to TLR9, interleukin-1 (IL-1), IL-6, IL-12, IL-18, tumor necrosis factor alpha (TNF-α), interferon gamma (IFNγ), and granulocyte-macrophage colony stimulating factor (GM-CSF). In some embodiments, the AAV vector comprising the one or more components of the transgene that are substantially devoid of CpG dinucleotides elicits reduced production of one or more inflammatory markers selected from the group consisting of TLR9, interleukin-1 (IL-1), IL-6, IL-12, IL-18, tumor necrosis factor alpha (TNF-α), interferon gamma (IFNγ), and granulocyte-macrophage colony stimulating factor (GM-CSF) of at least about 10%, at least about 20%, at least about 30%, at least about 40%, at least about 50%, at least about 60%, at least about 80%, or at least about 90% compared to the comparable AAV that is not CpG depleted, when assayed in a cell-based vitro assay using cells known in the art appropriate for such assays; e.g., monocytes, macrophages, T-cells, B-cells, etc. In a particular embodiment, the AAV vector comprising the one or more components of the transgene codon-optimized for depletion of CpG dinucleotides exhibits a reduced activation of TLR9 in hNPCs in an in vitro assay of at least about 10%, at least about 20%, at least about 30%, at least about 40%, at least about 50%, at least about 60%, at least about 80%, or at least about 90% compared to the comparable AAV that is not CpG depleted.

### X. Kits and Articles of Manufacture

[0382] In other embodiments, provided herein are kits comprising an AAV vector of any of the embodiments of the disclosure, and a suitable container (for example a tube, vial or plate).

[0383] In some embodiments, the kit further comprises a buffer, a nuclease inhibitor, a protease inhibitor, a liposome, a therapeutic agent, a label, a label visualization reagent, or any combination of the foregoing. In some embodiments, the kit further comprises a pharmaceutically acceptable carrier, diluent or excipient.

[0384] In some embodiments, the kit comprises appropriate control compositions for gene modifying applications, and instructions for use.

### XI. Enumerated Embodiments

[0385] The following sets of enumerated embodiments are included for illustrative purposes and are not intend to limit the scope of the invention.

### Set I:

[0386] The embodiments of Set I refer to tables provided in U.S. provisional application 63/123,112 and to sequence listing submitted with U.S. provisional application 63/123,112 on Dec. 9, 2020.

[0387] Embodiment I-1. A polynucleotide, comprising
[0388] a. a first adeno-associated virus (AAV) inverted terminal repeat (ITR) sequence;
[0389] b. a second AAV ITR sequence;
[0390] c. a first promoter sequence;
[0391] d. a sequence encoding a CRISPR protein;
[0392] e. a sequence encoding at least a first guide RNA (gRNA); and, optionally,
[0393] f. at least one accessory element sequence.

[0394] Embodiment I-2. The polynucleotide of embodiment I-1, wherein the CRISPR protein sequence and the sequence encoding the at least first gRNA are less than about 3100, less than about 3090, less than about 3080, less than about 3070, less than about 3060, less than about 3050, or less than about 3040 nucleotides in length.

[0395] Embodiment I-3. The polynucleotide of embodiment I-1 or I-2, wherein the sequences of the first promoter and the at least one accessory element have greater than at least about 1300, at least about 1350, at least about 1360, at least about 1370, at least about 1380, at least about 1390, at least about 1400, at least about 1500, at least about 1600 nucleotides, at least 1650, at least about 1700, at least about 1750, at least about 1800, at least about 1850, or at least about 1900 nucleotides in combined length.

[0396] Embodiment I-4. The polynucleotide of embodiment I-1 or I-2, wherein the sequences of the first promoter and the at least one accessory element have greater than 1314 nucleotides in combined length.

[0397] Embodiment I-5. The polynucleotide of embodiment I-1 or I-2, wherein the sequences of the first promoter and the at least one accessory element have greater than 1381 nucleotides in combined length.

[0398] Embodiment I-6. The polynucleotide of any one of the preceding embodiments, wherein the first promoter sequence and the sequence encoding the CRISPR protein are operably linked.

[0399] Embodiment I-7. The polynucleotide of any one of the preceding embodiments, wherein the sequences encoding the CRISPR protein and the at least first guide RNA are operably linked to the first promoter.

[0400] Embodiment I-8. The polynucleotide of any one of the preceding embodiments, wherein the at least one accessory element is operably linked to the CRISPR protein.

[0401] Embodiment I-9. The polynucleotide of any one of embodiments I-1 to I-6, further comprising a second promoter.

[0402] Embodiment I-10. The polynucleotide of embodiment I-9, wherein the second promoter sequence and the sequence encoding the gRNA are operably linked.

[0403] Embodiment I-11. The polynucleotide of embodiment I-9 or I-10, wherein the sequences of the first promoter, the second promoter and the at least one accessory element are greater than at least about 1300, at least about 1350, at least about 1360, at least about 1370, at least about 1380, at least about 1390, at least about 1400, at least about 1500, at least about 1600 nucleotides, at least 1650, at least about 1700, at least about 1750, at least about 1800, at least about 1850, or at least about 1900 nucleotides in combined length.

[0404] Embodiment I-12. The polynucleotide of embodiment I-9 or I-10, wherein the sequences of the first promoter, the second promoter, and the at least one accessory element are greater than 1314 nucleotides in combined length.

[0405] Embodiment I-13. The polynucleotide of embodiment I-9 or I-10, wherein the sequences of the first promoter, the second promoter, and the at least one accessory element are greater than 1381 nucleotides in combined length.

[0406] Embodiment I-14. The polynucleotide of any one of embodiments I-1 to I-13, comprising two or more accessory elements.

[0407] Embodiment I-15. The polynucleotide of embodiment I-14, wherein the sequences of the first promoter, the second promoter, and the two or more accessory elements are greater than at least about 1300, at least about 1350, at least about 1360, at least about 1370, at least about 1380, at least about 1390, at least about 1400, at least about 1500, at least about 1600 nucleotides, at least 1650, at least about 1700, at least about 1750, at least about 1800, at least about 1850, or at least about 1900 nucleotides in combined length.

[0408] Embodiment I-16. The polynucleotide of embodiment I-14, wherein the sequences of the first promoter, the second promoter, and the two or more accessory elements are greater than 1314 nucleotides in combined length.

[0409] Embodiment I-17. The polynucleotide of embodiment I-14, wherein the sequences of the first promoter, the second promoter, and the two or more accessory elements are greater than 1381 nucleotides in combined length.

[0410] Embodiment I-18. The polynucleotide of any one of embodiments I-1 to I-17, wherein the polynucleotide comprises a second promoter, wherein at least 25%, 26%, 27%, 28%, 29%, 30%, 31%, 32%, 33%, 34%, or at least 35% or more of the length of the polynucleotide sequence comprises the sequences of the first and second promoters and the at least one accessory element in combined length.

[0411] Embodiment I-19. The polynucleotide of any one of the preceding embodiments, wherein the at least one accessory element is selected from the group consisting of a poly(A) signal, a gene enhancer element, an intron, a posttranscriptional regulatory element, a nuclear localization signal (NLS), a deaminase, a DNA glycosylase inhibitor, a third promoter, a second guide RNA, a stimulator of CRISPR-mediated homology-directed repair, an activator or repressor of transcription, and a self-cleaving sequence.

[0412] Embodiment I-20. The polynucleotide of any one of the preceding embodiments, wherein the accessory element(s) enhance the expression, binding, activity, or performance of the CRISPR protein as compared to the CRISPR protein in the absence of said accessory element.

[0413] Embodiment I-21. The polynucleotide of embodiment I-20, wherein the enhanced performance is an increase in editing of a target nucleic acid in an in vitro assay of at least about 10%, at least about 20%, at least about 30%, at least about 40%, at least about 50%, at least about 60%, at least about 70%, at least about 80%, at least about 90%, at least about 100%, at least about 1500%, at least about 200%, or at least about 300%.

[0414] Embodiment I-22. The polynucleotide of any one of the preceding embodiments, wherein the CRISPR protein is a Class 2 CRISPR protein.

[0415] Embodiment I-23. The polynucleotide of embodiment I-22, wherein the CRISPR protein is a Class 2, Type V CRISPR protein.

[0416] Embodiment I-24. The polynucleotide of embodiment I-23, wherein the Class 2, Type V CRISPR protein is a CasX.

[0417] Embodiment I-25. The polynucleotide of embodiment I-24, wherein the CasX comprises a sequence selected from the group consisting of SEQ ID NOS: 1-3 and 49-160 as set forth in Table 3, or a sequence having at least 85%, at least 90%, at least 95%, at least 95%, at least 96%, at least 97%, at least 98%, or at least 99% identity thereto.

[0418] Embodiment I-26. The polynucleotide of embodiment I-24, wherein the CasX comprises a sequence selected from the group consisting of the sequences of SEQ ID NOS: 1-3 and 49-160 as set forth in Table 3.

[0419] Embodiment I-27. The polynucleotide of any one of the preceding embodiments, wherein the first gRNA comprises a sequence selected from the group of sequences of SEQ ID NOS: 2101-2285 as set forth in Table 2, or a sequence having at least 85%, at least 90%, at least 95%, at least 95%, at least 96%, at least 97%, at least 98% identity thereto.

[0420] Embodiment I-28. The polynucleotide of any one of the preceding embodiments, wherein the first gRNA comprises a sequence selected from the group of sequences of SEQ ID NOS: 2101-2285 as set forth in Table 2.

[0421] Embodiment I-29. The polynucleotide of embodiment I-28, wherein the first gRNA comprises a targeting sequence complementary to a target nucleic acid sequence, wherein the targeting sequence has at least 15 to 20 nucleotides.

[0422] Embodiment I-30. The polynucleotide of any one of embodiments I-19 to I-29, wherein the second gRNA comprises a sequence selected from the sequences of SEQ ID NOS: 2101-2285 as set forth in Table 2.

[0423] Embodiment I-31. The polynucleotide of embodiment I-30, wherein the second gRNA comprises a targeting sequence complementary to a target nucleic acid sequence different than the target nucleic acid of embodiment I-28, wherein the targeting sequence has at least 15 to 20 nucleotides.

[0424] Embodiment I-32. The polynucleotide of any one of the preceding embodiments, comprising a sequence of Tables 4, 5, 6, 7, 9, 10, and 12, or a sequence having at least 85%, at least 90%, at least 95%, at least 95%, at least 96%, at least 97%, at least 98%, or at least 99% identity thereto.

[0425] Embodiment I-33. The polynucleotide of any one of embodiments I-1 to I-31, comprising a sequence of Tables 4, 5, 6, 7, 9, 10, and 12.

[0426] Embodiment I-34. The polynucleotide of any one of the preceding embodiments, wherein the accessory element is a post-transcriptional regulatory element (PTRE) selected from the group consisting of cytomegalovirus immediate/early intronA, hepatitis B virus PRE (HPRE), Woodchuck Hepatitis virus PRE (WPRE), and 5′ untranslated region (UTR) of human heat shock protein 70 mRNA (Hsp70).

[0427] Embodiment I-35. The polynucleotide of any one of the preceding embodiments, wherein the first promoter sequence has at least about 200, at least about 300, at least about 400, at least about 500, at least about 600, at least about 700, or at least about 800 nucleotides.

[0428] Embodiment I-36. The polynucleotide of any one of embodiments I-9 to I-35, wherein the second promoter sequence has at least about 200, at least about 300, at least about 400, at least about 500, at least about 600, at least about 700, or at least about 800 nucleotides.

[0429] Embodiment I-37. The polynucleotide of any one of the preceding embodiments, wherein the polynucleotide has the configuration of a construct of FIG. 15, FIG. 21, or FIG. 22.

[0430] Embodiment I-38. The polynucleotide of any one of the preceding embodiments, wherein the 5′ and 3′ ITRs are derived from serotype AAV1, AAV2, AAV3, AAV4, AAV5, AAV6, AAV7, AAV8, AAV9, AAV10, AAV11, AAV12, AAV 44.9, AAV-Rh74, or AAVRh10.

[0431] Embodiment I-39. A recombinant adeno-associated virus (rAAV) comprising: a) an AAV capsid protein, and b) the polynucleotide of any one of embodiments I-1 to I-38.

[0432] Embodiment I-40. The rAAV of embodiment I-39, wherein the AAV capsid protein is derived from serotype AAV1, AAV2, AAV3, AAV4, AAV5, AAV6, AAV7, AAV8, AAV9, AAV10, AAV11, AAV12, AAV 44.9, AAV-Rh74, or AAVRh10.

[0433] Embodiment I-41. The rAAV of embodiment I-40, wherein the AAV capsid protein and the 5′ and 3′ ITR are derived from the same serotype of AAV.

[0434] Embodiment I-42. The rAAV of embodiment I-40, wherein the AAV capsid protein and the 5′ and 3′ ITR are derived from different serotypes of AAV.

[0435] Embodiment I-43. A pharmaceutical composition, comprising the rAAV of any one of embodiments I-39 to I-42 and a pharmaceutically acceptable carrier, diluent or excipient.

[0436] Embodiment I-44. A method for modifying a target nucleic acid in a population of mammalian cells, comprising contacting a plurality of the cells with an effective amount of the rAAV of any one of embodiments I-39 to I-42 or the pharmaceutical composition of embodiment I-43, wherein the target nucleic acid of the cells targeted by the gRNA is modified by the CRISPR protein.

[0437] Embodiment I-45. The method according to embodiment I-44, wherein the modifying comprises introducing an insertion, deletion, substitution, duplication, or inversion of one or more nucleotides in the target nucleic acid of the cells of the population.

[0438] Embodiment I-46. A method of making an rAAV vector, comprising:
[0439] i) providing a population of cells; and
[0440] ii) transfecting the population of cells with a vector comprising the polynucleotide of any one of embodiments I-1 to I-38.

[0441] Embodiment I-47. The method of embodiment I-46, wherein the population of cells express an AAV rep gene and AAV cap gene.

[0442] Embodiment I-48. The method of embodiment I-46, the method further comprising transfecting the cells with one or more vectors encoding an AAV rep gene and an AAV cap gene.

[0443] Embodiment I-49. The method of any one of embodiments I-46 to I-48, the method further comprising recovering the rAAV vector.

### Set II:

[0444] The embodiments of Set II refer to tables provided in U.S. provisional application 63/235,638 and to sequence listing submitted with U.S. provisional application 63/235,638 on Aug. 20, 2021.

[0445] Embodiment II-1. A polynucleotide, comprising
[0446] a. a first adeno-associated virus (AAV) inverted terminal repeat (ITR) sequence;
[0447] b. a second AAV ITR sequence;
[0448] c. a first promoter sequence;
[0449] d. a sequence encoding a CRISPR protein;
[0450] e. a sequence encoding at least a first guide RNA (gRNA); and,
[0451] f. optionally, at least one accessory element sequence.

[0452] Embodiment II-2. The polynucleotide of embodiment II-1, wherein the sequence encoding the CRISPR protein and the sequence encoding the at least first gRNA are less than about 3100, less than about 3090, less than about 3080, less than about 3070, less than about 3060, less than about 3050, or less than about 3040 nucleotides in length.

[0453] Embodiment II-3. The polynucleotide of embodiment II-1 or II-2, wherein the sequences of the first promoter and the at least one accessory element have greater than at least about 1300, at least about 1350, at least about 1360, at least about 1370, at least about 1380, at least about 1390, at least about 1400, at least about 1500, at least about 1600 nucleotides, at least 1650, at least about 1700, at least about 1750, at least about 1800, at least about 1850, or at least about 1900 nucleotides in combined length.

[0454] Embodiment II-4. The polynucleotide of embodiment II-1 or II-2, wherein the sequences of the first promoter and the at least one accessory element have greater than 1314 nucleotides in combined length.

[0455] Embodiment II-5. The polynucleotide of embodiment II-1 or II-2, wherein the sequences of the first promoter and the at least one accessory element have greater than 1381 nucleotides in combined length.

[0456] Embodiment II-6. The polynucleotide of any one of the preceding embodiments, wherein the first promoter sequence and the sequence encoding the CRISPR protein are operably linked.

[0457] Embodiment II-7. The polynucleotide of embodiment II-6, wherein the first promoter is a pol II promoter.

[0458] Embodiment II-8. The polynucleotide of embodiment II-6 or II-7, wherein the promoter is selected from the group consisting of polyubiquitin C (UBC), cytomegalovirus (CMV), simian virus 40 (SV40), chicken beta-Actin promoter and rabbit beta-Globin splice acceptor site fusion (CAG), chicken β-actin promoter with cytomegalovirus enhancer (CB7), PGK, Jens Tornoe (JeT), GUSB, CBA hybrid (CBh), elongation factor-1 alpha (EF-1alpha), beta-actin, Rous sarcoma virus (RSV), silencing-prone spleen focus forming virus (SFFV), CMVd1 promoter, truncated human CMV (tCMVd2), minimal CMV promoter, chicken β-actin promoter, HSV TK promoter, Mini-TK promoter, minimal IL-2 promoter, GRP94 promoter, Super Core Promoter 1, Super Core Promoter 2, MLC, MCK, GRK1 protein promoter, Rho promoter, CAR protein promoter, hSyn Promoter, U1A promoter, Ribsomal Rpl and Rps promoters (e.g., hRpl30 and hRps18), CMV53 promoter, minimal SV40 promoter, CMV53 promoter, SFCp promoter, pJB42CAT5 promoter, MLP promoter, EFS promoter, MeP426 promoter, MecP2 promoter, MHCK7 promoter, beta-glucuronidase (GUSB), CK7 promoter, and CK8e promoter.

[0459] Embodiment II-9. The polynucleotide of embodiment II-8, wherein the promoter is a truncated variant of the UBC, CMV, SV40, CAG, CB7, PGK, JeT, GUSB, CB, EF-1alpha, beta-actin, RSV, SFFV, CMVd1, tCMVd2, minimal CMV, chicken β-actin, HSV TK, Mini-TK, minimal IL-2, GRP94, Super Core Promoter 1, Super Core Promoter 2, MLC, MCK, GRK1 protein Rho, CAR protein, hSyn, U1A r, Ribsomal Rpl, and Rps (e.g., hRpl30 and hRps18), CMV53, SV40 promoter, CMV53, SFCp, pJB42CAT5, MLP, EFS, MeP426, MecP2, MHCK7, (GUSB, CK7, or CK8e promoter.

[0460] Embodiment II-10. The polynucleotide of embodiment II-8 or II-9, wherein the promoter has less than about 400 nucleotides, less than about 350 nucleotides, less than about 300 nucleotides, less than about 200 nucleotides, less than about 150 nucleotides, less than about 100 nucleotides, less than about 80 nucleotides, or less than about 40 nucleotides.

[0461] Embodiment II-11. The polynucleotide of embodiment II-8 or II-9, wherein the promoter has between about 40 to about 585 nucleotides, between about 100 to about 400 nucleotides, or between about 150 to about 300 nucleotides.

[0462] Embodiment II-12. The polynucleotide of any one of the preceding embodiments, wherein the promoter is selected from the group consisting of SEQ ID NOS: 40370-40400 as set forth in Table 4, or a sequence having at least 85%, at least 90%, at least 95%, at least 95%, at least 96%, at least 97%, at least 98%, or at least 99% identity thereto.

[0463] Embodiment II-13. The polynucleotide of any one of the preceding embodiments, wherein the at least one accessory element is operably linked to the CRISPR protein.

[0464] Embodiment II-14. The polynucleotide of any one of embodiments II-1 to II-6, further comprising a second promoter.

[0465] Embodiment II-15. The polynucleotide of embodiment II-14, wherein the second promoter sequence and the sequence encoding the gRNA are operably linked.

[0466] Embodiment II-16. The polynucleotide of embodiment II-14 or II-15, wherein the second promoter is a pol III promoter.

[0467] Embodiment II-17. The polynucleotide of any one of embodiments II-10 to II-12, wherein the second promoter is selected from the group consisting of U6, mini U61, mini U62, mini U63, BiH1 (Bidrectional H1 promoter), BiU6 (Bidirectional U6 promoter), gorilla U6, rhesus U6, human 7sk, and human H1 promoters.

[0468] Embodiment II-18. The polynucleotide of embodiment II-17, wherein the promoter is a truncated variant of the U6, mini U61, mini U62, mini U63, BiH1, BiU6, gorilla U6, rhesus U6, human 7sk, or human H1 promoter.

[0469] Embodiment II-19. The polynucleotide of embodiment II-17 or II-18, wherein the promoter has less than about 250 nucleotides, less than about 220 nucleotides, less than about 200 nucleotides, less than about 160 nucleotides, less than about 140 nucleotides, less than about 130 nucleotides, less than about 120 nucleotides, less than about 100 nucleotides, less than about 80 nucleotides, or less than about 70 nucleotides.

[0470] Embodiment II-20. The polynucleotide of embodiment II-17 or II-18, wherein the promoter has between about 70 to about 245 nucleotides, between about 100 to about 220 nucleotides, or between about 120 to about 160 nucleotides.

[0471] Embodiment II-21. The polynucleotide of any one of embodiments II-14 to II-20, wherein the promoter is selected from the group consisting SEQ ID NOS: 40401-40400 as set forth in Table 5, or a sequence having at least 85%, at least 90%, at least 95%, at least 95%, at least 96%, at least 97%, at least 98%, or at least 99% identity thereto.

[0472] Embodiment II-22. The polynucleotide of any one of embodiments II-14 to II-21, wherein the second promoter enhances transcription of the gRNA.

[0473] Embodiment II-23. The polynucleotide of any one of embodiments II-14 to II-22, wherein the sequences of the first promoter and the second promoter are greater than at least about 1300, at least about 1350, at least about 1360, at least about 1370, at least about 1380, at least about 1390, at least about 1400, at least about 1500, at least about 1600 nucleotides, at least 1650, at least about 1700, at least about 1750, at least about 1800, at least about 1850, or at least about 1900 nucleotides in combined length.

[0474] Embodiment II-24. The polynucleotide of any one of embodiments II-14 to II-23, wherein the sequences of the first promoter, the second promoter and the at least one accessory element are greater than at least about 1300, at least about 1350, at least about 1360, at least about 1370, at least about 1380, at least about 1390, at least about 1400, at least about 1500, at least about 1600 nucleotides, at least 1650, at least about 1700, at least about 1750, at least about 1800, at least about 1850, or at least about 1900 nucleotides in combined length.

[0475] Embodiment II-25. The polynucleotide of any one of embodiments II-14 to II-24, wherein the sequences of the first promoter, the second promoter, and the at least one accessory element are greater than 1314 nucleotides in combined length.

[0476] Embodiment II-26. The polynucleotide of any one of embodiments II-14 to II-24, wherein the sequences of the first promoter, the second promoter, and the at least one accessory element are greater than 1381 nucleotides in combined length.

[0477] Embodiment II-27. The polynucleotide of any one of the preceding embodiments, comprising two or more accessory elements.

[0478] Embodiment II-28. The polynucleotide of embodiment II-27, wherein the sequences of the first promoter, the second promoter, and the two or more accessory elements are greater than at least about 1300, at least about 1350, at least about 1360, at least about 1370, at least about 1380, at least about 1390, at least about 1400, at least about 1500, at least about 1600, at least 1650, at least about 1700, at least about 1750, at least about 1800, at least about 1850, or greater than at least about 1900 nucleotides in combined length.

[0479] Embodiment II-29. The polynucleotide of embodiment II-27, wherein the sequences of the first promoter, the second promoter, and the two or more accessory elements are greater than 1314 nucleotides in combined length.

[0480] Embodiment II-30. The polynucleotide of embodiment II-27, wherein the sequences of the first promoter, the second promoter, and the two or more accessory elements are greater than 1381 nucleotides in combined length.

[0481] Embodiment II-31. The polynucleotide of any one of embodiment II-14 to II-30, wherein at least 25%, 26%, 27%, 28%, 29%, 30%, 31%, 32%, 33%, 34%, or at least 35% or more of the length of the polynucleotide sequence comprises the sequences of the first and second promoters and the at least one accessory element in combined length.

[0482] Embodiment II-32. The polynucleotide of any one of the preceding embodiments, wherein the accessory elements are selected from the group consisting of a poly(A) signal, a gene enhancer element, an intron, a posttranscriptional regulatory element (PTRE), a nuclear localization signal (NLS), a deaminase, a DNA glycosylase inhibitor, a third promoter, a second guide RNA, a stimulator of CRISPR-mediated homology-directed repair, and an activator or repressor of transcription.

[0483] Embodiment II-33. The polynucleotide of any one of the preceding embodiments, wherein the accessory elements enhance the transcription, transcription termination, expression, binding, activity, or performance of the CRISPR protein as compared to an otherwise identical polynucleotide lacking said accessory elements.

[0484] Embodiment II-34. The polynucleotide of embodiment II-33, wherein the enhanced performance is an increase in editing of a target nucleic acid by the CRISPR protein in an in vitro assay of at least about 10%, at least about 20%, at least about 30%, at least about 40%, at least about 50%, at least about 60%, at least about 70%, at least about 80%, at least about 90%, at least about 100%, at least about 150%, at least about 200%, or at least about 300%.

[0485] Embodiment II-35. The polynucleotide of any one of the preceding embodiments, wherein the CRISPR protein is a Class 2 CRISPR protein.

[0486] Embodiment II-36. The polynucleotide of embodiment II-35, wherein the CRISPR protein is a Class 2, Type V CRISPR protein.

[0487] Embodiment II-37. The polynucleotide of embodiment II-36, wherein the Class 2, Type V CRISPR protein is a CasX.

[0488] Embodiment II-38. The polynucleotide of embodiment II-37, wherein the encoded CasX comprises a sequence selected from the group consisting of SEQ ID NOS: 1-3, 49-160, and 40208-40369 as set forth in Table 3, and SEQ ID NOS: 40808-40827, as set forth in Table 21, or a sequence having at least 85%, at least 90%, at least 95%, at least 95%, at least 96%, at least 97%, at least 98%, or at least 99% identity thereto.

[0489] Embodiment II-39. The polynucleotide of embodiment II-37, wherein the encoded CasX comprises a sequence selected from the group consisting of the sequences of SEQ ID NOS: 1-3, 49-160 and 40208-40369, as set forth in Table 3 and SEQ ID NOS: 40808-40827, as set forth in Table 21.

[0490] Embodiment II-40. The polynucleotide of any one of embodiments II-35 to II-39, wherein the polynucleotide encodes one or more NLS linked to the sequence encoding the CasX.

[0491] Embodiment II-41. The polynucleotide of embodiment II-40, wherein the sequences encoding the one or more NLS are positioned at or near the 5′ end of the sequence encoding the CasX protein.

[0492] Embodiment II-42. The polynucleotide of embodiment II-40 or II-41, wherein the sequences encoding the one or more NLS are positioned at or near at the 3′ end of the sequence encoding the CasX protein.

[0493] Embodiment II-43. The polynucleotide of embodiment II-41 or II-42, wherein the polynucleotide encodes at least two NLS, wherein the sequences encoding the at least two NLS are positioned at or near the 5′ and 3′ ends of the sequence encoding the CasX protein.

[0494] Embodiment II-44. The polynucleotide of any one of embodiments II-40 to II-43, wherein the one or more encoded NLS are selected from the group of sequences consisting of PKKKRKV (SEQ ID NO: 196), KRPAATKKAGQAKKKK (SEQ ID NO: 197), PAAKRVKLD (SEQ ID NO: 248), RQRRNELKRSP (SEQ ID NO: 161), NQSSNFGPMKGGNFGGRSSGPYGGGGQYFAKPRNQGGY (SEQ ID NO: 162), RMRIZFKNKGKDTAELRRRRVEVSVELRKAKKDEQILKRRNV (SEQ ID NO: 163), VSRKRPRP (SEQ ID NO: 164), PPKKARED (SEQ ID NO: 165), PQPKKKPL (SEQ ID NO: 166), SALIKKKKKMAP (SEQ ID NO: 167), DRLRR (SEQ ID NO: 168), PKQKKRK (SEQ ID NO: 169), RKLKKKIKKL (SEQ ID NO: 170), REKKKFLKRR (SEQ ID NO: 171), KRKGDEVDGVDEVAKKKSKK (SEQ ID NO: 172), RKCLQAGMNLEARKTKK (SEQ ID NO: 173), PRPRKIPR (SEQ ID NO: 174), PPRKKRTVV (SEQ ID NO: 175), NLSKKKKRKREK (SEQ ID NO: 176), RRPSRPFRKP (SEQ ID NO: 177), KRPRSPSS (SEQ ID NO: 178), KRGINDRNFWRGENERKTR (SEQ ID NO: 179), PRPPKMARYDN (SEQ ID NO: 180), KRSFSKAF (SEQ ID NO: 181), KLKIKRPVK (SEQ ID NO: 182), PKKKRKVPPPPAAKRVKLD (SEQ ID NO: 183), PKTRRRPRRSQRKRPPT (SEQ ID NO: 184), SRRRKANPTKLSENAKKLAKEVEN (SEQ ID NO: 185), KTRRRPRRSQRKRPPT (SEQ ID NO: 186), RRKKRRPRRKKRR (SEQ ID NO: 187), PKKKSRKPKKKSRK (SEQ ID NO: 188), HKKKHPDASVNFSEFSK (SEQ ID NO: 189), QRPGPYDRPQRPGPYDRP (SEQ ID NO: 190), LSPSLSPLLSPSLSPL (SEQ ID NO: 191), RGKGGKGLGKGGAKRHRK (SEQ ID NO: 192), PKRGRGRPKRGRGR (SEQ ID NO: 193), PKKKRKVPPPPKKKRKV (SEQ ID NO: 195), PAKRARRGYKC (SEQ ID NO: 40408), KLGPRKATGRW (SEQ ID NO: 40809), PRRKREE (SEQ ID NO: 40810), PYRGRKE (SEQ ID NO: 40811), PLRKRPRR (SEQ ID NO: 40812), PLRKRPRRGSPLRKRPRR (SEQ ID NO: 40813), PAAKRVKLDGGKRTADGSEFESPKKKRKV (SEQ ID NO: 40814), PAAKRVKLDGGKRTADGSEFESPKKKRKVGIHGVPAA (SEQ ID NO: 40815), PAAKRVKLDGGKRTADGSEFESPKKKRKVAEAAAKEAAAKEAAAKA (SEQ ID NO: 40816), PAAKRVKLDGGKRTADGSEFESPKKKRKVPG (SEQ ID NO: 40452), KRKGSPERGERKRHW, KRTADSQHSTPPKTKRKVEFEPKKKRKV (SEQ ID NO: 40817), and PKKKRKVGGSKRTADSQHSTPPKTKRKVEFEPKKKRKV (SEQ ID NO: 40818) wherein the one or more NLS are linked to the CasX variant or to adjacent NLS with a linker peptide wherein the linker peptide is selected from the group consisting of (G)n (SEQ ID NO: 40201), (GS)n (SEQ ID NO: 40202), (GSGGS)n (SEQ ID NO: 208), (GGSGGS)n (SEQ ID NO: 209), (GGGS)n (SEQ ID NO: 210), GGSG (SEQ ID NO: 211), GGSGG (SEQ ID NO: 212), GSGSG (SEQ ID NO: 213), GSGGG (SEQ ID NO: 214), GGGSG (SEQ ID NO: 215), GSSSG (SEQ ID NO: 216), GPGP (SEQ ID NO: 217), GGP, PPP, PPAPPA (SEQ ID NO: 218), PPPG (SEQ ID NO: 40207), PPPGPPP (SEQ ID NO: 219), PPP(GGGS)n (SEQ ID NO: 40203), (GGGS)nPPP (SEQ ID NO: 40204), AEAAAKEAAAKEAAAKA (SEQ ID NO: 40205), and TPPKTKRKVEFE (SEQ ID NO: 40206), where n is 1 to 5.

[0495] Embodiment II-45. The polynucleotide of any one of embodiments II-40 to II-44, wherein the one or more encoded NLS are selected from the group consisting of SEQ ID NOS: 40443-40501 as set forth in Table 11 and Table 12, or a sequence having at least 85%, at least 90%, at least 95%, at least 95%, at least 96%, at least 97%, at least 98% identity thereto.

[0496] Embodiment II-46. The polynucleotide of any one of embodiments II-40 to II-43, wherein the one or more encoded NLS are selected from the group of sequences consisting of SEQ ID NOS: 40443-40501 as set forth in Table 11 and Table 12.

[0497] Embodiment II-47. The polynucleotide of any one of the preceding embodiments, wherein the first gRNA comprises a sequence selected from the group consisting of SEQ ID NOS: 2101-2285, and 39981-40026, as set forth in Table 2, or a sequence having at least 85%, at least 90%, at least 95%, at least 95%, at least 96%, at least 97%, at least 98% identity thereto.

[0498] Embodiment II-48. The polynucleotide of any one of the preceding embodiments, wherein the first gRNA comprises a sequence selected from the group consisting of SEQ ID NOS: 2101-2285, and 39981-40026, as set forth in Table 2.

[0499] Embodiment II-49. The polynucleotide of embodiment II-48, wherein the first gRNA comprises a targeting sequence complementary to a target nucleic acid sequence, wherein the targeting sequence has at least 15 to 30 nucleotides.

[0500] Embodiment II-50. The polynucleotide of embodiment II-49, wherein the targeting sequence has 18, 19, or 20 nucleotides.

[0501] Embodiment II-51. The polynucleotide of any one of embodiments II-32 to II-50, wherein the second gRNA comprises a sequence selected from the group consisting of SEQ ID NOS: 2101-2285, and 39981-40026, as set forth in Table 2, or a sequence having at least 85%, at least 90%, at least 95%, at least 95%, at least 96%, at least 97%, at least 98% identity thereto.

[0502] Embodiment II-52. The polynucleotide of any one of embodiments II-32 to II-51, wherein the second gRNA comprises a sequence selected from the group consisting of SEQ ID NOS: 2101-2285, and 39981-40026, as set forth in Table 2.

[0503] Embodiment II-53. The polynucleotide of embodiment II-51 or II-52, wherein the second gRNA comprises a targeting sequence complementary to a target nucleic acid sequence different than the target nucleic acid of embodiment II-49 or II-50, wherein the targeting sequence has at least 15 to 30 nucleotides.

[0504] Embodiment II-54. The polynucleotide of embodiment II-53, wherein the targeting sequence has 18, 19, or 20 nucleotides.

[0505] Embodiment II-55. The polynucleotide of any one of the preceding embodiments, wherein the accessory element is a post-transcriptional regulatory element (PTRE) selected from the group consisting of cytomegalovirus immediate/early intronA, hepatitis B virus PRE (HPRE), Woodchuck Hepatitis virus PRE (WPRE), and 5′ untranslated region (UTR) of human heat shock protein 70 mRNA (Hsp70).

[0506] Embodiment II-56. The polynucleotide of any one of embodiments II-1 to II-55, wherein the accessory element is a PTRE selected from the group consisting SEQ ID NOS: 40431-40442 as set forth in Table 8, or a sequence having at least 85%, at least 90%, at least 95%, at least 95%, at least 96%, at least 97%, at least 98% identity thereto.

[0507] Embodiment II-57. The polynucleotide of any one of the preceding embodiments, wherein the 5′ and 3′ ITRs are derived from serotype AAV1, AAV2, AAV3, AAV4, AAV5, AAV6, AAV7, AAV8, AAV9, AAV10, AAV11, AAV12, AAV 44.9, AAV-Rh74, or AAVRh10.

[0508] Embodiment II-58. The polynucleotide of any one of the preceding embodiments, wherein the 5′ and 3′ ITRs are derived from serotype AAV2.

[0509] Embodiment II-59. The polynucleotide of any one of the preceding embodiments, comprising one or more sequences selected from the group consisting of the sequences of Tables 4, 5, 6, 8, 9, 13-16 and 20, or a sequence having at least 85%, at least 90%, at least 95%, at least 95%, at least 96%, at least 97%, at least 98%, or at least 99% identity thereto.

[0510] Embodiment II-60. The polynucleotide of any one of the preceding embodiments, comprising one or more sequences selected from the group consisting of the sequences of Tables 4, 5, 6, 8, 9, 13-16 and 20.

[0511] Embodiment II-61. The polynucleotide of any one of the preceding embodiments, wherein the polynucleotide has the configuration of a construct depicted in any one of FIG. 24, 33-35, or 42.

[0512] Embodiment II-62. A recombinant adeno-associated virus (rAAV) comprising: a) an AAV capsid protein, and b) the polynucleotide of any one of embodiments II-1 to II-58.

[0513] Embodiment II-63. The rAAV of embodiment II-62, wherein the AAV capsid protein is derived from serotype AAV1, AAV2, AAV3, AAV4, AAV5, AAV6, AAV7, AAV8, AAV9, AAV10, AAV11, AAV12, AAV 44.9, AAV-Rh74, or AAVRh10.

[0514] Embodiment II-64. The rAAV of embodiment II-63, wherein the AAV capsid protein and the 5′ and 3′ ITR are derived from the same serotype of AAV.

[0515] Embodiment II-65. The rAAV of embodiment II-63, wherein the AAV capsid protein and the 5′ and 3′ ITR are derived from different serotypes of AAV.

[0516] Embodiment II-66. The rAAV of embodiment II-65, wherein the 5′ and 3′ ITR are derived from AAV serotype 2.

[0517] Embodiment II-67. A pharmaceutical composition, comprising the rAAV of any one of embodiment II-62 and a pharmaceutically acceptable carrier, diluent or excipient.

[0518] Embodiment II-68. A method for modifying a target nucleic acid in a population of mammalian cells, comprising contacting a plurality of the cells with an effective amount of the rAAV of any one of embodiments II-62-66 or the pharmaceutical composition of embodiment II-67, wherein the target nucleic acid of the cells targeted by the gRNA is modified by the CRISPR protein.

[0519] Embodiment II-69. The method according to embodiment II-68, wherein the modifying comprises introducing an insertion, deletion, substitution, duplication, or inversion of one or more nucleotides in the target nucleic acid of the cells of the population.

[0520] Embodiment II-70. The method of embodiment II-68 or II-69, wherein the rAAV is administered to a subject at a dose of at least about 1×10⁸ vector genomes (vg), at least about 1×10⁵ vector genomes/kg (vg/kg), at least about 1×10⁶ vg/kg, at least about 1×10⁷ vg/kg, at least about 1×10⁸ vg/kg, at least about 1×10⁹ vg/kg, at least about 1×10¹⁰ vg/kg, at least about 1×10¹¹ vg/kg, at least about 1×10¹² vg/kg, at least about 1×10¹³ vg/kg, at least about 1×10¹⁴ vg/kg, at least about 1×10¹⁵ vg/kg, or at least about 1×10¹⁶ vg/kg.

[0521] Embodiment II-71. The method of embodiment II-68 or II-69, wherein the rAAV is administered to a subject at a dose of at least about 1×10⁵ vg/kg to about 1×10¹⁶ vg/kg, at least about 1×10⁶ vg/kg to about 1×10¹⁵ vg/kg, or at least about 1×10⁷ vg/kg to about 1×10¹⁴ vg/kg.

[0522] Embodiment II-72. The method of any one of embodiments 11-68 to II-71, wherein the rAAV is administered to the subject by a route of administration selected from subcutaneous, intradermal, intraneural, intranodal, intramedullary, intramuscular, intralumbar, intrathecal, subarachnoid, intraventricular, intracapsular, intravenous, intralymphatical, intraocular or intraperitoneal routes, and wherein the administering method is injection, transfusion, or implantation.

[0523] Embodiment II-73. The method of any one of embodiments 11-68 to II-72, wherein the subject is selected from the group consisting of mouse, rat, pig, and non-human primate.

[0524] Embodiment II-74. The method of any one of embodiments II-68 to II-72, wherein the subject is a human.

[0525] Embodiment II-75. A method of making an rAAV vector, comprising:
[0526] a. providing a population of packaging cells; and
[0527] b. transfecting the population of cells with:
   [0528] i) a vector comprising the polynucleotide of any one of embodiments II-1 to II-57;
   [0529] ii) a vector comprising an aap (assembly) gene; and
   [0530] iii) a vector comprising the rep and cap genomes.

[0531] Embodiment II-76. The method of embodiment II-70, the method further comprising recovering the rAAV vector.

### Set III:

[0532] The embodiments of Set III refer to tables provided in the present specification and to sequence listing submitted herewith.

[0533] Embodiment III-1. A polynucleotide comprising the following component sequences:
[0534] a. a first AAV inverted terminal repeat (ITR) sequence;
[0535] b. a second AAV ITR sequence;
[0536] c. a first promoter sequence;
[0537] d. a sequence encoding a CRISPR protein;
[0538] e. a sequence encoding a first guide RNA (gRNA); and,
[0539] f. optionally, at least one accessory element sequence,
   wherein the polynucleotide is configured for incorporation into a recombinant adeno-associated virus (AAV).

[0540] Embodiment III-2. The polynucleotide of embodiment III-1, wherein the sequences encoding the CRISPR protein and the first gRNA are less than about 3100, less than about 3090, less than about 3080, less than about 3070, less than about 3060, less than about 3050, or less than about 3040 nucleotides in combined length.

[0541] Embodiment III-3. The polynucleotide of embodiment III-1 or III-2, wherein the sequences of the first promoter and the at least one accessory element have greater than at least about 1300, at least about 1350, at least about 1360, at least about 1370, at least about 1380, at least about 1390, at least about 1400, at least about 1500, at least about 1600 nucleotides, at least 1650, at least about 1700, at least about 1750, at least about 1800, at least about 1850, or at least about 1900 nucleotides in combined length.

[0542] Embodiment III-4. The polynucleotide of embodiment III-1 or III-2, wherein the sequences of the first promoter and the at least one accessory element have greater than 1314 nucleotides in combined length.

[0543] Embodiment III-5. The polynucleotide of embodiment III-1 or III-2, wherein the sequences of the first promoter and the at least one accessory element have greater than 1381 nucleotides in combined length.

[0544] Embodiment III-6. The polynucleotide of any one of embodiments III-1 to III-5, wherein the first promoter sequence and the sequence encoding the CRISPR protein are operably linked.

[0545] Embodiment III-7. The polynucleotide of embodiment III-6, wherein the first promoter is a pol II promoter.

[0546] Embodiment III-8. The polynucleotide of embodiment III-6 or III-7, wherein the first promoter is selected from the group consisting of polyubiquitin C (UBC) promoter, cytomegalovirus (CMV) promoter, simian virus 40 (SV40) promoter, chicken beta-Actin promoter and rabbit beta-Globin splice acceptor site fusion (CAG), chicken β-actin promoter with cytomegalovirus enhancer (CB7), PGK promoter, Jens Tornoe (JeT) promoter, GUSB promoter, CBA hybrid (CBh) promoter, elongation factor-1 alpha (EF-1alpha) promoter, beta-actin promoter, Rous sarcoma virus (RSV) promoter, silencing-prone spleen focus forming virus (SFFV) promoter, CMVd1 promoter, truncated human CMV (tCMVd2), minimal CMV promoter, hepB promoter, chicken β-actin promoter, HSV TK promoter, Mini-TK promoter, minimal IL-2 promoter, GRP94 promoter, Super Core Promoter 1, Super Core Promoter 2, Super Core Promoter 3, adenovirus major late (AdML) promoter, MLC promoter, MCK promoter, GRK1 protein promoter, Rho promoter, CAR protein promoter, hSyn Promoter, U1a promoter, Ribosomal Protein Large subunit 30 (Rpl30) promoter, Ribosomal Protein Small subunit 18 (Rps18) promoter, CMV53 promoter, minimal SV40 promoter, CMV53 promoter, SFCp promoter, Mecp2 promoter, pJB42CAT5 promoter, MLP promoter, EFS promoter, MeP426 promoter, MecP2 promoter, MHCK7 promoter, beta-glucuronidase (GUSB) promoter, CK7 promoter, and CK8e promoter.

[0547] Embodiment III-9. The polynucleotide of embodiment III-8, wherein the first promoter is a truncated variant of the UBC, CMV, SV40, CAG, CB7, PGK, JeT, GUSB, CB, EF-1alpha, beta-actin, RSV, SFFV, CMVd1, tCMVd2, minimal CMV, chicken β-actin, HSV TK, Mini-TK, minimal IL-2, GRP94, Super Core Promoter 1, Super Core Promoter 2, MLC, MCK, GRK1 protein Rho, CAR protein, hSyn, U1a, Ribosomal Protein Large subunit 30 (Rpl30), Ribosomal Protein Small subunit 18 (Rps18), CMV53, minimal SV40, CMV53, SFCp, pJB42CAT5, MLP, EFS, MeP426, MecP2, MHCK7, CK7, or CK8e promoter.

[0548] Embodiment III-10. The polynucleotide of embodiment III-7 or III-8, wherein the first promoter sequence has less than about 400 nucleotides, less than about 350 nucleotides, less than about 300 nucleotides, less than about 200 nucleotides, less than about 150 nucleotides, less than about 100 nucleotides, less than about 80 nucleotides, or less than about 40 nucleotides.

[0549] Embodiment III-11. The polynucleotide of embodiment III-7 or III-8, wherein the first promoter sequence has between about 40 to about 585 nucleotides, between about 100 to about 400 nucleotides, or between about 150 to about 300 nucleotides.

[0550] Embodiment III-12. The polynucleotide of any one of embodiments III-1 to III-11, wherein the first promoter is selected from the group consisting of SEQ ID NOS: 40370-40400 as set forth in Table 8, or a sequence having at least 85%, at least 90%, at least 95%, at least 95%, at least 96%, at least 97%, at least 98%, or at least 99% identity thereto.

[0551] Embodiment III-13. The polynucleotide of any one of embodiments III-1 to III-12, wherein the first promoter is selected from the group consisting of SEQ ID NOS: 41030-41044 as set forth in Table 24, or a sequence having at least 85%, at least 90%, at least 95%, at least 95%, at least 96%, at least 97%, at least 98%, or at least 99% identity thereto.

[0552] Embodiment III-14. The polynucleotide of any one of embodiments III-1 to III-13, wherein the at least one accessory element is operably linked to the sequence encoding the CRISPR protein.

[0553] Embodiment III-15. The polynucleotide of any one of embodiments III-1 to III-14, further comprising a second promoter.

[0554] Embodiment III-16. The polynucleotide of embodiment III-15, wherein the second promoter sequence and the sequence encoding the first gRNA are operably linked.

[0555] Embodiment III-17. The polynucleotide of embodiment III-15 or III-16, wherein the second promoter is a pol III promoter.

[0556] Embodiment III-18. The polynucleotide of any one of embodiments III-15 to III-17, wherein the second promoter is selected from the group consisting of U6, mini U61, mini U62, mini U63, BiH1 (Bidrectional H1 promoter), BiU6 (Bidirectional U6 promoter), gorilla U6, rhesus U6, human 7sk, and human H1 promoters.

[0557] Embodiment III-19. The polynucleotide of embodiment III-18, wherein the second promoter is a truncated variant of the U6, mini U61, mini U62, mini U63, BiH1, BiU6, gorilla U6, rhesus U6, human 7sk, or human H1 promoters.

[0558] Embodiment III-20. The polynucleotide of embodiment III-18 or III-19, wherein the second promoter sequence has less than about 250 nucleotides, less than about 220 nucleotides, less than about 200 nucleotides, less than about 160 nucleotides, less than about 140 nucleotides, less than about 130 nucleotides, less than about 120 nucleotides, less than about 100 nucleotides, less than about 80 nucleotides, or less than about 70 nucleotides.

[0559] Embodiment III-21. The polynucleotide of embodiment III-18 or III-19, wherein the second promoter sequence has between about 70 to about 245 nucleotides, between about 100 to about 220 nucleotides, or between about 120 to about 160 nucleotides.

[0560] Embodiment III-22. The polynucleotide of any one of embodiments III-15 to III-21, wherein the second promoter sequence is selected from the group consisting SEQ ID NOS: 40401-40420 and 41010-41029 as set forth in Table 9, or a sequence having at least 85%, at least 90%, at least 95%, at least 95%, at least 96%, at least 97%, at least 98%, or at least 99% identity thereto.

[0561] Embodiment III-23. The polynucleotide of any one of embodiments III-15 to III-22, wherein the second promoter enhances transcription of the first gRNA.

[0562] Embodiment III-24. The polynucleotide of any one of embodiments III-15 to III-23, wherein the sequences of the first promoter and the second promoter are greater than at least about 1300, at least about 1350, at least about 1360, at least about 1370, at least about 1380, at least about 1390, at least about 1400, at least about 1500, at least about 1600 nucleotides, at least 1650, at least about 1700, at least about 1750, at least about 1800, at least about 1850, or at least about 1900 nucleotides in combined length.

[0563] Embodiment III-25. The polynucleotide of any one of embodiments III-15 to III-24, wherein the sequences of the first promoter, the second promoter and the at least one accessory element are greater than at least about 1300, at least about 1350, at least about 1360, at least about 1370, at least about 1380, at least about 1390, at least about 1400, at least about 1500, at least about 1600 nucleotides, at least 1650, at least about 1700, at least about 1750, at least about 1800, at least about 1850, or at least about 1900 nucleotides in combined length.

[0564] Embodiment III-26. The polynucleotide of any one of embodiments 15 to III-25, wherein the sequences of the first promoter, the second promoter, and the at least one accessory element are greater than 1314 nucleotides in combined length.

[0565] Embodiment III-27. The polynucleotide of any one of embodiments III-15 to III-26, wherein the sequences of the first promoter, the second promoter, and the at least one accessory element are greater than 1381 nucleotides in combined length.

[0566] Embodiment III-28. The polynucleotide of any one of embodiments III-1 to III-27, comprising two or more accessory element sequences.

[0567] Embodiment III-29. The polynucleotide of embodiment III-28, wherein the sequences of the first promoter, the second promoter, and the two or more accessory elements are greater than at least about 1300, at least about 1350, at least about 1360, at least about 1370, at least about 1380, at least about 1390, at least about 1400, at least about 1500, at least about 1600, at least 1650, at least about 1700, at least about 1750, at least about 1800, at least about 1850, or greater than at least about 1900 nucleotides in combined length.

[0568] Embodiment III-30. The polynucleotide of embodiment III-28, wherein the sequences of the first promoter, the second promoter, and the two or more accessory elements are greater than 1314 nucleotides in combined length.

[0569] Embodiment III-31. The polynucleotide of embodiment III-28, wherein the sequences of the first promoter, the second promoter, and the two or more accessory elements are greater than 1381 nucleotides in combined length.

[0570] Embodiment III-32. The polynucleotide of any one of embodiment III-15 to III-31, wherein at least 25%, 26%, 27%, 28%, 29%, 30%, 31%, 32%, 33%, 34%, or at least 35% or more of the length of the polynucleotide sequence comprises the sequences of the first and second promoters and the at least one accessory element.

[0571] Embodiment III-33. The polynucleotide of any one of embodiments III-1 to III-32, wherein the accessory elements are selected from the group consisting of a poly(A) signal, a gene enhancer element, an intron, a posttranscriptional regulatory element (PTRE), a nuclear localization signal (NLS), a deaminase, a DNA glycosylase inhibitor, a stimulator of CRISPR-mediated homology-directed repair, and an activator of transcription, and a repressor of transcription.

[0572] Embodiment III-34. The polynucleotide of any one of embodiments III-1 to III-32, wherein the accessory elements enhance the transcription, transcription termination, expression, binding of a target nucleic acid, editing of a target nucleic acid, or performance of the CRISPR protein as compared to an otherwise identical polynucleotide lacking said accessory elements.

[0573] Embodiment III-35. The polynucleotide of embodiment III-34, wherein the enhanced performance is an increase in editing of a target nucleic acid by the expressed CRISPR protein and the first gRNA in an in vitro assay of at least about 10%, at least about 20%, at least about 30%, at least about 40%, at least about 50%, at least about 60%, at least about 70%, at least about 80%, at least about 90%, at least about 100%, at least about 150%, at least about 200%, or at least about 300%.

[0574] Embodiment III-36. The polynucleotide of any one of embodiments III-1 to III-35, wherein the encoded CRISPR protein is a Class 2 CRISPR protein.

[0575] Embodiment III-37. The polynucleotide of embodiment III-36, wherein the encoded CRISPR protein is a Class 2, Type V CRISPR protein.

[0576] Embodiment III-38. The polynucleotide of embodiment III-37, wherein the encoded Class 2, Type V CRISPR protein comprises:
[0577] a. a NTSB domain comprising a sequence of QPASKKIDQNKLKPEMDEKGNLTTAGFACSQCGQPLFVYKLEQVSEKGKAYTN YFGRCNVAEHEKLILLAQLKPEKDSDEAVTYSLGKFGQ (SEQ ID NO: 41818), or a sequence having at least 80% at least 90%, at least 95%, at least 96%, at least 97%, at least 98% or at least 99% identity thereto;
[0578] b. a helical I-II domain comprising a sequence of RALDFYSIHVTKESTHPVKPLAQIAGNRYASGPVGKALSDACMGTIASFLSKYQD IIIEHQKVVKGNQKRLESLRELAGKENLEYPSVTLPPQPHTKEGVDAYNEVIARV RMWVNLNLWQKLKLSRDDAKPLLRLKGFPSF (SEQ ID NO: 41819), or a sequence having at least 80%, at least 90%, at least 95%, at least 96%, at least 97%, at least 98% or at least 99% identity thereto;
[0579] c. a helical II domain comprising a sequence of PLVERQANEVDWWDMVCNVKKLINEKKEDGKVFWQNLAGYKRQEALRPYLSS EEDRKKGKKFARYQLGDLLLHLEKKHGEDWGKVYDEAWERIDKKVEGLSKHI KLEEERRSEDAQSKAALTDWLRAKASFVIEGLKEADKDEFCRCELKLQKWYGD LRGKPFAIEAE (SEQ ID NO: 41820), or a sequence having at least 80%, at least 90%, at least 95%, at least 96%, at least 97%, at least 98% or at least 99% identity thereto; and
[0580] d. a RuvC-I domain comprising a sequence of SSNIKPMNLIGVDRGENIPAVIALTDPEGCPLSRFKDSLGNPTHILRIGESYKEKQR TIQAKKEVEQRRAGGYSRKYASKAKNLADDMVRNTARDLLYYAVTQDAMLIF ENLSRGFGRQGKRTFMAERQYTRMEDWLTAKLAYEGLPSKTYLSKTLAQYTSK TC (SEQ ID NO: 41821), or a sequence having at least 80%, at least 90%, at least 95%, at least 96%, at least 97%, at least 98% or at least 99% identity thereto.

[0581] Embodiment III-39. The polynucleotide of embodiment III-38, wherein the encoded Class 2, Type V CRISPR protein comprises an OBD-I domain comprising a sequence of QEIKRINKIRRRLVKDSNTKKAGKTGPMKTLLVRVMTPDLRERLENLRKKPENIPQ (SEQ ID NO: 41822), or a sequence having at least 80%, at least 90%, at least 95%, at least 96%, at least 97%, at least 98%, or at least 99% identity thereto.

[0582] Embodiment III-40. The polynucleotide of embodiment III-38 or III-39, wherein the encoded Class 2, Type V CRISPR protein comprises an OBD-II domain comprising a sequence of NSILDISGFSKQYNCAFIWQKDGVKKLNLYLIINYFKGGKLRFKKIKPEAFEANRFYTVIN KKSGEIVPMEVNFNFDDPNLIILPLAFGKRQGREFIWNDLLSLETGSLKLANGRVIEKTL YNRRTRQDEPALFVALTFERREVLD (SEQ ID NO: 41823), or a sequence having at least 80%, at least 90%, at least 95%, at least 96%, at least 97%, at least 98%, or at least 99% identity thereto.

[0583] Embodiment III-41. The polynucleotide of any one of embodiments III-38 to III-40, wherein the encoded Class 2, Type V CRISPR protein comprises a helical I-I domain comprising a sequence of PISNTSRANLNKLLTDYTEMKKAILHVYWEEFQKDPVGLMSRVA (SEQ ID NO: 41824), or a sequence having at least 80%, at least 90%, at least 95%, at least 96%, at least 97%, at least 98%, or at least 99% identity thereto.

[0584] Embodiment III-42. The polynucleotide of any one of embodiments III-38 to III-41, wherein the encoded Class 2, Type V CRISPR protein comprises a TSL domain comprising a sequence of SNCGFTITSADYDRVLEKLKKTATGWMTTINGKELKVEGQITYYNRYKRQNVVKDLSV ELDRLSEESVNNDISSWTKGRSGEALSLLKKRFSHRPVQEKFVCLNCGFETH (SEQ ID NO: 41825), or a sequence having at least 80%, at least 90%, at least 95%, at least 96%, at least 97%, at least 98%, or at least 99% identity thereto.

[0585] Embodiment III-43. The polynucleotide of any one of embodiments III-38 to III-42, wherein the encoded Class 2, Type V CRISPR protein comprises a RuvC-II domain comprising a sequence of ADEQAALNIARSWLFLRSQEYKKYQTNKTTGNTDKRAFVETWQSFYRKKLKEVWKPA V (SEQ ID NO: 41826), or a sequence having at least 80%, at least 90%, at least 95%, at least 96%, at least 97%, at least 98%, or at least 99% identity thereto.

[0586] Embodiment III-44. The polynucleotide of any one of embodiments III-38 to III-43, wherein the encoded Class 2, Type V CRISPR protein comprises the sequence of SEQ ID NO: 145, or a sequence having at least 80%, at least 90%, at least 95%, at least 96%, at least 97%, at least 98%, or at least 99% identity thereto.

[0587] Embodiment III-45. The polynucleotide of any one of embodiments III-38 to III-44, wherein the encoded Class 2, Type V CRISPR protein comprises at least one modification in one or more domains.

[0588] Embodiment III-46. The polynucleotide of embodiment III-45, wherein the at least one modification comprises:
[0589] a. at least one amino acid substitution in a domain;
[0590] b. at least one amino acid deletion in a domain;
[0591] c. at least one amino acid insertion in a domain; or
[0592] d. any combination of (a)-(c).

[0593] Embodiment III-47. The polynucleotide of embodiment III-45 or III-46, comprising a modification at one or more amino acid positions in the NTSB domain relative to SEQ ID NO: 41818 selected from the group consisting of P2, S4, Q9, E15, G20, G33, L41, Y51, F55, L68, A70, E75, K88, and G90.

[0594] Embodiment III-48. The polynucleotide of embodiment III-47, wherein the one or more modifications at one or more amino acid positions in the NTSB domain are selected from the group consisting of an insertion of G at position 2, an insertion of I at position 4, an insertion of L at position 4, Q9P, E15S, G20D, a deletion of S at position 30, G33T, L41A, Y51T, F55V, L68D, L68E, L68K, A70Y, A70S, E75A, E75D, E75P, K88Q, and G90Q relative to SEQ ID NO: 41818.

[0595] Embodiment III-49. The polynucleotide of any one of embodiments III-45 to III-48, comprising a modification at one or more amino acid positions in the helical I-II domain relative to SEQ ID NO: 41819 selected from the group consisting of 124, A25, Y29 G32, G44, S48, S51, Q54, 156, V63, S73, L74, K97, V100, M112, L116, G137, F138, and S140.

[0596] Embodiment III-50. The polynucleotide of embodiment III-49, wherein the one or more modifications at one or more amino acid positions in the helical I-II domain are selected from the group consisting of an insertion of T at position 24, an insertion of C at position 25, Y29F, G32Y, G32N, G32H, G32S, G32T, G32A, G32V, a deletion of G at position 32, G32S, G32T, G44L, G44H, S48H, S48T, S51T, Q54H, I56T, V63T, S73H, L74Y, K97G, K97S, K97D, K97E, V100L, M112T, M112W, M112R, M112K, L116K, G137R, G137K, G137N, an insertion of Q at position 138, and S140Q relative to SEQ ID NO: 41819.

[0597] Embodiment III-51. The polynucleotide of any one of embodiments III-45 to III-50, comprising a modification at one or more amino acid positions in the helical II domain relative to SEQ ID NO: 41820 selected from the group consisting of L2, V3, E4, R5, Q6, A7, E9, V10, D11, W12, W13, D14, M15, V16, C17, N18, V19, K20, L22, I23, E25, K26, K31, Q35, L37, A38, K41, R 42, Q43, E44, L46, K57, Y65, G68, L70, L71, L72, E75, G79, D81, W82, K84, V85, Y86, D87, 193, K95, K96, E98, L100, K102, 1104, K105, E109, R 110, D 114, K 118, A120, L121, W124, L125, R126, A127, A129, 1133, E134, G135, L136, E138, D140, K141, D142, E143, F144, C145, C147, E148, L149, K150, L151, Q152, K153, L158, E166, and A167.

[0598] Embodiment III-52. The polynucleotide of embodiment III-51, wherein the one or more modifications at one or more amino acid positions in the helical II domain are selected from the group consisting of an insertion of A at position 2, an insertion of H at position 2, a deletion of L at position 2 and a deletion of V at position 3, V3E, V3Q, V3F, a deletion of V at position 3, an insertion of D at position 3, V3P, E4P, a deletion of E at position 4, E4D, E4L, E4R, R5N, Q6V, an insertion of Q at position 6, an insertion of G at position 7, an insertion of H at position 9, an insertion of A at position 9, VD10, an insertion of T1 at position 0, a deletion of V at position 10, an insertion of F at position 10, an insertion of D at position 11, a deletion of D at position 11, D11S, a deletion of W at position 12, W12T, W12H, an insertion of P at position 12, an insertion of Q at position 13, an insertion of G at position 12, an insertion of R at position 13, W13P, W13D, an insertion of D at position 13, W13L, an insertion of P at position 14, an insertion of D at position 14, a deletion of D at position 14 and a deletion of M at position 15, a deletion of M at position 15, an insertion of T at position 16, an insertion of P at position 17, N18I, V19N, V19H, K20D, L22D, 123S, E25C, E25P, an insertion of G at position 25, K26T, K27E, K31L, K31Y, Q35D, Q35P, an insertion of S at position 37, a deletion of L at position 37 and a deletion of A at position 38, K41L, an insertion of R at position 42, a deletion of Q at position 43 and a deletion of E at position 44, L46N, K57Q, Y65T, G68M, L70V, L71C, L72D, L72N, L72W, L72Y, E75F, E75L, E75Y, G79P, an insertion of E at position 79, an insertion of T at position 81, an insertion of R at position 81, an insertion of W at position 81, an insertion of Y at position 81, an insertion of W at position 82, an insertion of Y at position 82, W82G, W82R, K84D, K84H, K84P, K84T, V85L, V85A, an insertion of L at position 85, Y86C, D87G, D87M, D87P, I93C, K95T, K96R, E98G, L100A, K102H, I104T, I104S, I104Q, K105D, an insertion of K at position 109, E109L, R110D, a deletion of R at position 110, D114E, an insertion of D at position 114, K118P, A120R, L121T, W124L, L125C, R126D, A127E, A127L, A129T, A129K, I133E, an insertion of C at position 133, an insertion of S at position 134, an insertion of G at position 134, an insertion of R at position 135, G135P, L136K, L136D, L136S, L136H, a deletion of E at position 138, D140R, an insertion of D at position 140, an insertion of P at position 141, an insertion of D at position 142, a deletion of E at position 143+a deletion of F at position 144, an insertion of Q at position 143, F144K, a deletion of F at position 144, a deletion of F at position 144 and a deletion of C at position 145, C145R, an insertion of G at position 145, C145K, C147D, an insertion of V at position 148, E148D, an insertion of H at position 149, L149R, K150R, L151H, Q152C, K153P, L158S, E166L, and an insertion of F at position 167 relative to SEQ ID NO: 41820.

[0599] Embodiment III-53. The polynucleotide of any one of embodiments III-45 to III-52, comprising a modification at one or more amino acid positions in the RuvC-I domain relative to SEQ ID NO: 41821 selected from the group consisting of 14, K5, P6, M7, N8, L9, V12, G49, K63, K80, N83, R90, M125, and L146.

[0600] Embodiment III-54. The polynucleotide of embodiment III-53, wherein the one or more modifications at one or more amino acid positions in the RuvC-I domain are selected from the group consisting of an insertion of I at position 4, an insertion of S at position 5, an insertion of T at position 6, an insertion of N at position 6, an insertion of R at position 7, an insertion of K at position 7, an insertion of H at position 8, an insertion of S at position 8, V12L, G49W, G49R, S51R, S51K, K62S, K62T, K62E, V65A, K80E, N83G, R90H, R90G, M125S, M125A, L137Y, an insertion of P at position 137, a deletion of L at position 141, L141R, L141D, an insertion of Q at position 142, an insertion of R at position 143, an insertion of N at position 143, E144N, an insertion of P at position 146, L146F, P147A, K149Q, T150V, an insertion of R at position 152, an insertion of H153, T155Q, an insertion of H at position 155, an insertion of R at position 155, an insertion of L at position 156, a deletion of L at position 156, an insertion of W at position 156, an insertion of A at position 157, an insertion of F at position 157, A157S, Q158K, a deletion of Y at position 159, T160Y, T160F, an insertion of I at position 161, S161P, T163P, an insertion of N at position 163, C164K, and C164M relative to SEQ ID NO: 41821.

[0601] Embodiment III-55. The polynucleotide of any one of embodiments III-45 to III-54, comprising a modification at one or more amino acid positions in the OBD-I domain relative to SEQ ID NO: 41822 selected from the group consisting of I3, K4, R5, 16, N7, K8, K15, D16, N18, P27, M28, V33, R34, M36, R41, L47, R48, E52, P55, and Q56.

[0602] Embodiment III-56. The polynucleotide of embodiment III-55, wherein the one or more modifications at one or more amino acid positions in the OBD-I domain are selected from the group consisting of an insertion of G at position 3, I3G, I3E, an insertion of G at position 4, K4G, K4P, K4S, K4W, K4W, R5P, an insertion of P at position 5, an insertion of G at position 5, R5S, an insertion of S at position 5, R5A, R5P, R5G, R5L, I6A, I6L, an insertion of G at position 6, N7Q, N7L, N7S, K8G, K15F, D16W, an insertion of F at position 16, an insertion of F18, an insertion of P at position 27, M28P, M28H, V33T, R34P, M36Y, R41P, L47P, an insertion of P at position 48, E52P, an insertion of P at position 55, a deletion of P at position 55 and a deletion of Q at position 56, Q56S, Q56P, an insertion of D at position 56, an insertion of T at position 56, and Q56P relative to SEQ ID NO: 41822.

[0603] Embodiment III-57. The polynucleotide of any one of embodiments III-45 to III-56, comprising a modification at one or more amino acid positions in the OBD-II domain relative to SEQ ID NO: 41823 selected from the group consisting of S2, I3, L4, K11, V24, K37, R42, A53, T58, K63, M70, 182, Q92, G93, K110, L121, R124, R141, E143, V144, and L145.

[0604] Embodiment III-58. The polynucleotide of embodiment III-57, wherein the one or more modifications at one or more amino acid positions in the OBD-II domain are selected from the group consisting of a deletion of S at position 2, I3R, I3K, a deletion of I at position 3 and a deletion of L4, a deletion of L at position 4, K11T, an insertion of P at position 24, K37G, R42E, an insertion of S at position 53, an insertion of R at position 58, a deletion of K at position 63, M70T, I82T, Q92I, Q92F, Q92V, Q92A, an insertion of A at position 93, K110Q, R115Q, L121T, an insertion of A at position 124, an insertion of R at position 141, an insertion of D at position 143, an insertion of A at position 143, an insertion of W at position 144, and an insertion of A at position 145 relative to SEQ ID NO: 41823. 105511 Embodiment III-59. The polynucleotide of any one of embodiments III-45 to III-58, comprising a modification at one or more amino acid positions in the TSL domain relative to SEQ ID NO: 41825 selected from the group consisting of S1, N2, C3, G4, F5, 17, K18, V58, S67, T76, G78, S80, G81, E82, S85, V96, and E98.

[0605] Embodiment III-60. The polynucleotide of embodiment III-59, wherein the one or more modifications at one or more amino acid positions in the OBD-II domain are selected from the group consisting of an insertion of M at position 1, a deletion of N at position 2, an insertion of V at position 2, C3S, an insertion of G at position 4, an insertion of W at position 4, F5P, an insertion of W at position 7, K18G, V58D, an insertion of A at position 67, T76E, T76D, T76N, G78D, a deletion of S at position 80, a deletion of G at position 81, an insertion of E at position 82, an insertion of N at position 82, S85I, V96C, V96T, and E98D relative to SEQ ID NO: 41825.

[0606] Embodiment III-61. The polynucleotide of any one of embodiments III-45 to III-60, wherein the expressed Class 2, Type V CRISPR protein exhibits an improved characteristic relative to SEQ ID NO: 2 or SEQ ID NO: 145, wherein the improved characteristic comprises increased binding affinity to a gRNA, increased binding affinity to the target nucleic acid, improved ability to utilize a greater spectrum of PAM sequences in the editing of the target nucleic acid, improved unwinding of the target nucleic acid, increased editing activity, improved editing efficiency, improved editing specificity for cleavage of the target nucleic acid, decreased off-target editing or cleavage of the target nucleic acid, increased percentage of a eukaryotic genome that can be edited, increased activity of the nuclease, increased target strand loading for double strand cleavage, decreased target strand loading for single strand nicking, increased binding of the non-target strand of DNA, improved protein stability, increased protein:gRNA (RNP) complex stability, and improved fusion characteristics.

[0607] Embodiment III-62. The polynucleotide of embodiment III-61, wherein the improved characteristic comprises increased cleavage activity at a target nucleic sequence comprising an TTC, ATC, GTC, or CTC PAM sequence.

[0608] Embodiment III-63. The polynucleotide of embodiment III-62, wherein the improved characteristic comprises increased cleavage activity at a target nucleic acid sequence comprising an ATC or CTC PAM sequence relative to cleavage activity of the sequence of SEQ ID NO: 145. 105561 Embodiment III-64. The polynucleotide of embodiment III-63, wherein the improved cleavage activity is an enrichment score (log₂) of at least about 1.5, at least about 2.0, at least about 2.5, at least about 3, at least about 3.5, at least about 4, at least about 4.5, at least about 5, at least about 6, at least about 7, at least about 8 or more greater compared to score of the sequence of SEQ ID NO: 145 in an in vitro assay.

[0609] Embodiment III-65. The polynucleotide of embodiment III-63, wherein the improved characteristic comprises increased cleavage activity at a target nucleic acid sequence comprising an CTC PAM sequence relative to the sequence of SEQ ID NO: 145.

[0610] Embodiment III-66. The polynucleotide of embodiment III-65, wherein the improved cleavage activity is an enrichment score (log₂) of at least about 2, at least about 2.5, at least about 3, at least about 3.5, at least about 4, at least about 4.5, at least about 5, or at least about 6 or more greater compared to the score of the sequence of SEQ ID NO: 145 in an in vitro assay.

[0611] Embodiment III-67. The polynucleotide of embodiment III-62, wherein the improved characteristic comprises increased cleavage activity at a target nucleic acid sequence comprising an TTC PAM sequence relative to the sequence of SEQ ID NO: 145.

[0612] Embodiment III-68. The polynucleotide of embodiment III-67, wherein the improved cleavage activity is an enrichment score of at least about 1.5, at least about 2.0, at least about 2.5, at least about 3, at least about 3.5, at least about 4, at least about 4.5, at least about 5, or at least about 6 log 2 or more greater compared to the sequence of SEQ ID NO: 145 in an in vitro assay.

[0613] Embodiment III-69. The polynucleotide of embodiment III-61, wherein the improved characteristic comprises increased specificity for cleavage of the target nucleic acid sequence relative to the sequence of SEQ ID NO: 145.

[0614] Embodiment III-70. The polynucleotide of embodiment III-69, wherein the increased specificity is an enrichment score of at least about 2.0, at least about 2.5, at least about 3, at least about 3.5, at least about 4, at least about 4.5, at least about 5, or at least about 6 log 2 or more greater compared to the sequence of SEQ ID NO: 145 in an in vitro assay.

[0615] Embodiment III-71. The polynucleotide of embodiment III-61, wherein the improved characteristic comprises decreased off-target cleavage of the target nucleic acid sequence.

[0616] Embodiment III-72. The polynucleotide of embodiment III-37, wherein the encoded Class 2, Type V CRISPR protein is selected from the group consisting of Cas12f, Cas12j (CasPhi), and CasX.

[0617] Embodiment III-73. The polynucleotide of embodiment III-72, wherein the encoded CasX comprises a sequence selected from the group consisting of SEQ ID NOS: 1-3, 49-160, and 40208-40369, or a sequence having at least 85%, at least 90%, at least 95%, at least 95%, at least 96%, at least 97%, at least 98%, or at least 99% identity thereto.

[0618] Embodiment III-74. The polynucleotide of embodiment III-72, wherein the encoded CasX comprises a sequence selected from the group consisting of the sequences of SEQ ID NOS: 1-3, 49-160, 40208-40369 and 40828-40912.

[0619] Embodiment III-75. The polynucleotide of embodiment III-72, wherein the CasX sequence of the polynucleotide comprises a sequence selected from the group consisting of SEQ ID NOS: 40577-40588, as set forth in Table 21, or a sequence having at least 85%, at least 90%, at least 95%, at least 95%, at least 96%, at least 97%, at least 98%, or at least 99% identity thereto.

[0620] Embodiment III-76. The polynucleotide of embodiment III-72, wherein the CasX sequence of the polynucleotide comprises a sequence selected from the group consisting of SEQ ID NOS: 40577-40588, as set forth in Table 21.

[0621] Embodiment III-77. The polynucleotide of any one of embodiments III-1 to III-76, wherein the polynucleotide encodes one or more NLS linked to the sequence encoding the CRISPR protein.

[0622] Embodiment III-78. The polynucleotide of embodiment III-77, wherein the sequences encoding the one or more NLS are positioned at or near the 5′ end of the sequence encoding the CRISPR protein.

[0623] Embodiment III-79. The polynucleotide of embodiment III-78 or III-79, wherein the sequences encoding the one or more NLS are positioned at or near at the 3′ end of the sequence encoding the CRISPR protein.

[0624] Embodiment III-80. The polynucleotide of embodiment III-78 or III-79, wherein the polynucleotide encodes at least two NLS, wherein the sequences encoding the at least two NLS are positioned at or near the 5′ and 3′ ends of the sequence encoding the CRISPR protein.

[0625] Embodiment III-81. The polynucleotide of any one of embodiments III-77 to III-80, wherein the one or more encoded NLS are selected from the group of sequences consisting of PKKKRKV (SEQ ID NO: 196), KRPAATKKAGQAKKKK (SEQ ID NO: 197), PAAKRVKLD (SEQ ID NO: 248), RQRRNELKRSP (SEQ ID NO: 161), NQSSNFGPMKGGNFGGRSSGPYGGGGQYFAKPRNQGGY (SEQ ID NO: 162), RMRIZFKNKGKDTAELRRRRVEVSVELRKAKKDEQILKRRNV (SEQ ID NO: 163), VSRKRPRP (SEQ ID NO: 164), PPKKARED (SEQ ID NO: 165), PQPKKKPL (SEQ ID NO: 166), SALIKKKKKMAP (SEQ ID NO: 167), DRLRR (SEQ ID NO: 168), PKQKKRK (SEQ ID NO: 169), RKLKKKIKKL (SEQ ID NO: 170), REKKKFLKRR (SEQ ID NO: 171), KRKGDEVDGVDEVAKKKSKK (SEQ ID NO: 172), RKCLQAGMNLEARKTKK (SEQ ID NO: 173), PRPRKIPR (SEQ ID NO: 174), PPRKKRTVV (SEQ ID NO: 175), NLSKKKKRKREK (SEQ ID NO: 176), RRPSRPFRKP (SEQ ID NO: 177), KRPRSPSS (SEQ ID NO: 178), KRGINDRNFWRGENERKTR (SEQ ID NO: 179), PRPPKMARYDN (SEQ ID NO: 180), KRSFSKAF (SEQ ID NO: 181), KLKIKRPVK (SEQ ID NO: 182), PKKKRKVPPPPAAKRVKLD (SEQ ID NO: 183), PKTRRRPRRSQRKRPPT (SEQ ID NO: 184), SRRRKANPTKLSENAKKLAKEVEN (SEQ ID NO: 41827), KTRRRPRRSQRKRPPT (SEQ ID NO: 186), RRKKRRPRRKKRR (SEQ ID NO: 187), PKKKSRKPKKKSRK (SEQ ID NO: 188), HKKKHPDASVNFSEFSK (SEQ ID NO: 189), QRPGPYDRPQRPGPYDRP (SEQ ID NO: 190), LSPSLSPLLSPSLSPL (SEQ ID NO: 191), RGKGGKGLGKGGAKRHRK (SEQ ID NO: 192), PKRGRGRPKRGRGR (SEQ ID NO: 193), PKKKRKVPPPPKKKRKV (SEQ ID NO: 195), PAKRARRGYKC (SEQ ID NO: 40188), KLGPRKATGRW (SEQ ID NO: 40189), PRRKREE (SEQ ID NO: 40190), PYRGRKE (SEQ ID NO: 40191), PLRKRPRR (SEQ ID NO: 40192), PLRKRPRRGSPLRKRPRR (SEQ ID NO: 40193), PAAKRVKLDGGKRTADGSEFESPKKKRKV (SEQ ID NO: 40194), PAAKRVKLDGGKRTADGSEFESPKKKRKVGIHGVPAA (SEQ ID NO: 40195), PAAKRVKLDGGKRTADGSEFESPKKKRKVAEAAAKEAAAKEAAAKA (SEQ ID NO: 40196), PAAKRVKLDGGKRTADGSEFESPKKKRKVPG (SEQ ID NO: 40710), KRKGSPERGERKRHW (SEQ ID NO: 40198), KRTADSQHSTPPKTKRKVEFEPKKKRKV (SEQ ID NO: 41828), and PKKKRKVGGSKRTADSQHSTPPKTKRKVEFEPKKKRKV (SEQ ID NO: 40200) wherein the one or more NLS are linked to the CRISPR variant or to adjacent NLS with a linker peptide wherein the linker peptide is selected from the group consisting of RS, (G)n (SEQ ID NO: 40201), (GS)n (SEQ ID NO: 40202), (GSGGS)n (SEQ ID NO: 208), (GGSGGS)n (SEQ ID NO: 209), (GGGS)n (SEQ ID NO: 210), GGSG (SEQ ID NO: 211), GGSGG (SEQ ID NO: 212), GSGSG (SEQ ID NO: 213), GSGGG (SEQ ID NO: 214), GGGSG (SEQ ID NO: 215), GSSSG (SEQ ID NO: 216), GPGP (SEQ ID NO: 217), GGP, PPP, PPAPPA (SEQ ID NO: 218), PPPG (SEQ ID NO: 40207), PPPGPPP (SEQ ID NO: 219), PPP(GGGS)n (SEQ ID NO: 40203), (GGGS)nPPP (SEQ ID NO: 40204), AEAAAKEAAAKEAAAKA (SEQ ID NO: 40205), and TPPKTKRKVEFE (SEQ ID NO: 40206), wherein n is 1 to 5.

[0626] Embodiment III-82. The polynucleotide of any one of embodiments III-77 to III-80, wherein the one or more encoded NLS are selected from the group consisting of SEQ ID NOS: 40443-40501 as set forth in Table 15 and Table 16, or a sequence having at least 85%, at least 90%, at least 95%, at least 95%, at least 96%, at least 97%, at least 98% identity thereto.

[0627] Embodiment III-83. The polynucleotide of any one of embodiments III-77 to III-80, wherein the one or more encoded NLS are selected from the group of sequences consisting of SEQ ID NOS: 40443-40501 as set forth in Table 15 and Table 16.

[0628] Embodiment III-84. The polynucleotide of any one of embodiments III-1 to III-83, wherein the encoded first gRNA comprises a sequence selected from the group consisting of SEQ ID NOS: 2101-2285, 39981-40026, 40913-40958, and 41817 as set forth in Table 2, or a sequence having at least 85%, at least 90%, at least 95%, at least 95%, at least 96%, at least 97%, at least 98% identity thereto.

[0629] Embodiment III-85. The polynucleotide of any one of embodiments III-1 to III-84, wherein the encoded first gRNA comprises a sequence selected from the group consisting of SEQ ID NOS: 2101-2285, 39981-40026, 40913-40958, and 41817 as set forth in Table 2.

[0630] Embodiment III-86. The polynucleotide of embodiment III-85, wherein the encoded first gRNA comprises a targeting sequence complementary to a target nucleic acid sequence, wherein the targeting sequence has at least 15 to 30 nucleotides.

[0631] Embodiment III-87. The polynucleotide of embodiment III-86, wherein the targeting sequence has 18, 19, or 20 nucleotides.

[0632] Embodiment III-88. The polynucleotide of any one of embodiments III-1 to III-87, comprising a sequence encoding a second gRNA and a third promoter operably linked to the second gRNA.

[0633] Embodiment III-89. The polynucleotide of embodiment III-88, wherein the third promoter is a pol III promoter.

[0634] Embodiment III-90. The polynucleotide of embodiment III-88 or III-89, wherein the third promoter is selected from the group consisting of U6, mini U61, mini U62, mini U63, BiH1 (Bidrectional H1 promoter), BiU6 (Bidirectional U6 promoter), gorilla U6, rhesus U6, human 7sk, and human H1 promoters.

[0635] Embodiment III-91. The polynucleotide of embodiment III-90, wherein the third promoter is a truncated variant of the U6, mini U61, mini U62, mini U63, BiH1, BiU6, gorilla U6, rhesus U6, human 7sk, or human H1 promoters.

[0636] Embodiment III-92. The polynucleotide of any one of embodiments III-88 to III-91, wherein the third promoter has less than about 250 nucleotides, less than about 220 nucleotides, less than about 200 nucleotides, less than about 160 nucleotides, less than about 140 nucleotides, less than about 130 nucleotides, less than about 120 nucleotides, less than about 100 nucleotides, less than about 80 nucleotides, or less than about 70 nucleotides.

[0637] Embodiment III-93. The polynucleotide of any one of embodiments III-88 to III-91, wherein the third promoter has between about 70 to about 245 nucleotides, between about 100 to about 220 nucleotides, or between about 120 to about 160 nucleotides.

[0638] Embodiment III-94. The polynucleotide of any one of embodiments III-88 to III-93, wherein the third promoter is selected from the group consisting SEQ ID NOS: 40401-40420 and 41010-41029 as set forth in Table 9, or a sequence having at least 85%, at least 90%, at least 95%, at least 95%, at least 96%, at least 97%, at least 98%, or at least 99% identity thereto.

[0639] Embodiment III-95. The polynucleotide of any one of embodiments III-88 to III-94, wherein the third promoter enhances transcription of the second gRNA.

[0640] Embodiment III-96. The polynucleotide of any one of embodiments III-88 to III-95, wherein the encoded second gRNA comprises a sequence selected from the group consisting of SEQ ID NOS: 2101-2285, and 39981-40026, 40913-40958, and 41817 as set forth in Table 2, or a sequence having at least 85%, at least 90%, at least 95%, at least 95%, at least 96%, at least 97%, at least 98% identity thereto.

[0641] Embodiment III-97. The polynucleotide of any one of embodiments III-88 to III-95, wherein the encoded second gRNA comprises a sequence selected from the group consisting of SEQ ID NOS: 2101-2285, 39981-40026, 40913-40958, and 41817 as set forth in Table 2.

[0642] Embodiment III-98. The polynucleotide of any one of embodiments III-89 to III-97, wherein the encoded second gRNA comprises a targeting sequence complementary to a target nucleic acid sequence different than the target nucleic acid of embodiment III-86 or embodiment III-87, wherein the targeting sequence has at least 15 to 30 nucleotides.

[0643] Embodiment III-99. The polynucleotide of embodiment III-98, wherein the targeting sequence has 18, 19, or 20 nucleotides.

[0644] Embodiment III-100. The polynucleotide of any one of embodiments III-86 to III-99, wherein the targeting sequence is selected from the group consisting of SEQ ID NOS: 41056-41776 as set forth in Table 27, or a sequence having at least 80%, at least 90%, or at least 95% sequence identity thereto.

[0645] Embodiment III-101. The polynucleotide of any one of embodiments III-86 to III-99, wherein the targeting sequence is selected from the group consisting of SEQ ID NOS: 41056-41776 as set forth in Table 27.

[0646] Embodiment III-102. The polynucleotide of any one of embodiments III-86 to III-101, wherein the encoded first and second gRNA comprise a scaffold sequence having one or more modifications relative to SEQ ID NO: 2238, wherein the one or more modifications result in an improved characteristic in the expressed first and second gRNA.

[0647] Embodiment III-103. The polynucleotide of embodiment III-102, wherein the one or more modifications comprise one or more nucleotide substitutions, insertions, and/or deletions as set forth in Table 28.

[0648] Embodiment III-104. The polynucleotide of embodiment III-102 or III-103, wherein the improved characteristic is one or more functional properties selected from the group consisting of increased editing activity, increased pseudoknot stem stability, increased triplex region stability, increased scaffold stem stability, extended stem stability, reduced off-target folding intermediates, and increased binding affinity to a Class 2, Type V CRISPR protein, optionally in an in vitro assay.

[0649] Embodiment III-105. The polynucleotide of any one of embodiments III-102 to III-104, wherein the expressed gRNA scaffold exhibits an improved enrichment score (log₂) of at least about 2.0, at least about 2.5, at least about 3, or at least about 3.5 greater compared to the score of the gRNA scaffold of SEQ ID NO: 2238 in an in vitro assay.

[0650] Embodiment III-106. The polynucleotide of embodiments III-84 to III-101, wherein the encoded first and second gRNA comprise a scaffold sequence having one or more modifications relative to SEQ ID NO: 2239, wherein the one or more modifications result in an improved characteristic in the expressed first and second gRNA.

[0651] Embodiment III-107. The polynucleotide of embodiment III-106, wherein the one or more modifications comprise one or more nucleotide substitutions, insertions, and/or deletions as set forth in Table 29. 106001 Embodiment III-108. The polynucleotide of embodiment III-106 or III-107, wherein the improved characteristic is one or more functional properties selected from the group consisting of increased editing activity, increased pseudoknot stem stability, increased triplex region stability, increased scaffold stem stability, extended stem stability, reduced off-target folding intermediates, and increased binding affinity to a Class 2, Type V CRISPR protein, optionally in an in vitro assay.

[0652] Embodiment III-109. The polynucleotide of any one of embodiments III-106 to III-108, wherein the expressed gRNA scaffold exhibits an improved enrichment score (log₂) of at least about 1.2, at least about 1.5, at least about 2.0, at least about 2.5, at least about 3, or at least about 3.5 greater compared to the score of the gRNA scaffold of SEQ ID NO: 2239 in an in vitro assay.

[0653] Embodiment III-110. The polynucleotide of any one of embodiments III-106 to III-109, comprising one or more modifications at positions relative to the sequence of SEQ ID NO: 2239 selected from the group consisting of C9, U11, C17, U24, A29, U54, G64, A88, and A95.

[0654] Embodiment III-111. The polynucleotide of embodiment III-110, comprising one or more modifications relative to the sequence of SEQ ID NO: 2239 selected from the group consisting of C9U, U11C, C17G, U24C, A29C, an insertion of G at position 54, an insertion of C at position 64, A88G, and A95G.

[0655] Embodiment III-112. The polynucleotide of embodiment III-111, comprising modifications relative to the sequence of SEQ ID NO: 2239 consisting of C9U, U11C, C17G, U24C, A29C, an insertion of G at position 54, an insertion of C at position 64, A88G, and A95G.

[0656] Embodiment III-113. The polynucleotide of any one of embodiments III-106 to III-112, wherein the improved characteristic is selected from the group consisting of pseudoknot stem stability, triplex region stability, scaffold bubble stability, extended stem stability, and binding affinity to a Class 2, Type V CRISPR protein.

[0657] Embodiment III-114. The polynucleotide of embodiment III-112, wherein the insertion of C at position 64 and the A88G substitution relative to the sequence of SEQ ID NO: 2239 resolves an asymmetrical bulge element of the extended stem, enhancing the stability of the extended stem of the gRNA scaffold.

[0658] Embodiment III-115. The polynucleotide of embodiment III-112, wherein the substitutions of U11C, U24C, and A95G increase the stability of the triplex region of the gRNA scaffold.

[0659] Embodiment III-116. The polynucleotide of embodiment III-112, wherein the substitution of A29C increases the stability of the pseudoknot stem.

[0660] Embodiment III-117. The polynucleotide of any one of embodiments III-1 to III-116, wherein the accessory element is a post-transcriptional regulatory element (PTRE) selected from the group consisting of cytomegalovirus immediate/early intronA, hepatitis B virus PRE (HPRE), Woodchuck Hepatitis virus PRE (WPRE), and 5′ untranslated region (UTR) of human heat shock protein 70 mRNA (Hsp70).

[0661] Embodiment III-118. The polynucleotide of embodiment III-117, wherein the accessory element is a PTRE selected from the group consisting SEQ ID NOS: 40431-40442 as set forth in Table 12, or a sequence having at least 85%, at least 90%, at least 95%, at least 95%, at least 96%, at least 97%, at least 98% identity thereto.

[0662] Embodiment III-119. The polynucleotide of any one of embodiments III-1 to III-118, wherein the 5′ and 3′ ITRs are derived from serotype AAV1, AAV2, AAV3, AAV4, AAV5, AAV6, AAV7, AAV8, AAV9, AAV10, AAV11, AAV12, AAV 44.9, AAV-Rh74, or AAVRh10.

[0663] Embodiment III-120. The polynucleotide of embodiment III-119, wherein the 5′ and 3′ ITRs are derived from serotype AAV2.

[0664] Embodiment III-121. The polynucleotide of any one of embodiments III-1 to III-120, comprising one or more sequences selected from the group consisting of the sequences of Tables 8-10, 12, 13, 17-22 and 24-27, or a sequence having at least 85%, at least 90%, at least 95%, at least 95%, at least 96%, at least 97%, at least 98%, or at least 99% identity thereto.

[0665] Embodiment III-122. The polynucleotide of any one of embodiments III-1 to III-121, comprising one or more sequences selected from the group consisting of the sequences of Tables 8-10, 12, 13, 17-22 and 24-27.

[0666] Embodiment III-123. The polynucleotide of any one of embodiments III-1 to III-122, comprising one or more sequences selected from the group consisting of the sequences of Table 26, or a sequence having at least 85%, at least 90%, at least 95%, at least 95%, at least 96%, at least 97%, at least 98%, or at least 99% identity thereto.

[0667] Embodiment III-124. The polynucleotide of any one of embodiments III-1 to III-123, comprising one or more sequences selected from the group consisting of the sequences of Table 26.

[0668] Embodiment III-125. The polynucleotide of embodiment III-124, comprising a sequence of a construct selected from the group of constructs of 1-174, 177-186, and 188-198 as set forth in Table 26.

[0669] Embodiment III-126. The polynucleotide of any one of embodiments III-123 to III-125, wherein the sequence further comprises a targeting sequence selected from the group of sequences of SEQ ID NOS: 41056-41776 as set forth in Table 27, wherein the targeting sequence is linked to the 3′ end of the polynucleotide sequence encoding the gRNA.

[0670] Embodiment III-127. The polynucleotide of any one of embodiments III-1 to III-126, wherein one or more AAV component sequences selected from the group consisting of 5′ ITR, 3′ ITR, pol III promoter, pol II promoter, encoding sequence for CRISPR nuclease, encoding sequence for gRNA, accessory element, and poly(A) are modified for depletion of all or a portion of the CpG dinucleotides of the sequences

[0671] Embodiment III-128. The polynucleotide of embodiment III-127, wherein one or more AAV component sequences selected from the group consisting of 5′ ITR, 3′ ITR, pol III promoter, pol II promoter, encoding sequence for a CRISPR nuclease, encoding sequence for gRNA, and poly(A), and accessory element comprise less than about 10%, less than about 5%, or less than about 1% CpG dinucleotides.

[0672] Embodiment III-129. The polynucleotide of embodiment III-127, wherein one or more AAV component sequences selected from the group consisting of 5′ ITR, 3′ ITR, pol III promoter, pol II promoter, encoding sequence for a CRISPR nuclease, encoding sequence for gRNA, and poly(A), and accessory element are devoid of CpG dinucleotides.

[0673] Embodiment III-130. The polynucleotide of any one of embodiment III-127 to III-129, wherein the one or more AAV component sequences codon-optimized for depletion of all or a portion of the CpG dinucleotides are selected from the group consisting of SEQ ID NOS: 41045-41055 as set forth in Table 25.

[0674] Embodiment III-131. The polynucleotide of any one of embodiments III-1 to III-130, wherein the polynucleotide has the configuration of a construct depicted in any one of FIG. 24, 33-35, or 42.

[0675] Embodiment III-132. A recombinant adeno-associated virus vector (rAAV) comprising: a) an AAV capsid protein, and b) the polynucleotide of any one of embodiments III-1 to III-131.

[0676] Embodiment III-133. The rAAV of embodiment III-132, wherein the AAV capsid protein is derived from serotype AAV1, AAV2, AAV3, AAV4, AAV5, AAV6, AAV7, AAV8, AAV9, AAV10, AAV 11, AAV12, AAV 44.9, AAV-Rh74, or AAVRh10.

[0677] Embodiment III-134. The rAAV of embodiment III-133, wherein the AAV capsid protein and the 5′ and 3′ ITR are derived from the same serotype of AAV.

[0678] Embodiment III-135. The rAAV of embodiment III-133, wherein the AAV capsid protein and the 5′ and 3′ ITR are derived from different serotypes of AAV.

[0679] Embodiment III-136. The rAAV of embodiment III-135, wherein the 5′ and 3′ ITR are derived from AAV serotype 2.

[0680] Embodiment III-137. The rAAV of any of embodiments III-132 to III-136, wherein upon transduction of a cell with the rAAV, the CRISPR protein and gRNA are capable of being expressed.

[0681] Embodiment III-138. The rAAV of embodiment III-137, wherein upon expression, the gRNA is capable of forming a ribonucleoprotein (RNP) complex with the CRISPR protein.

[0682] Embodiment III-139. The rAAV of embodiment III-137 or III-138, wherein the AAV polynucleotide component sequences modified for depletion of all or a portion of the CpG dinucleotides substantially retain their functional properties upon expression.

[0683] Embodiment III-140. The rAAV of embodiment III-137 or III-138, wherein the AAV polynucleotide component sequences modified for depletion of all or a portion of the CpG dinucleotides exhibit a lower potential for inducing an immune response compared to an rAAV wherein the AAV polynucleotide is not modified for depletion of the CpG dinucleotides.

[0684] Embodiment III-141. The rAAV of embodiment III-140, wherein the lower potential for inducing an immune response is exhibited in an in vitro mammalian cell assay designed to detect production of one or more markers of an inflammatory response selected from the group consisting of TLR9, interleukin-1 (IL-1), IL-6, IL-12, IL-18, tumor necrosis factor alpha (TNF-α), interferon gamma (IFNγ), and granulocyte-macrophage colony stimulating factor (GM-CSF).

[0685] Embodiment III-142. The rAAV of embodiment III-141, wherein the rAAV comprising the AAV polynucleotide component sequences modified for depletion of all or a portion of the CpG dinucleotides elicits reduced production of the one or more inflammatory markers of at least about 10%, at least about 20%, at least about 30%, at least about 40%, at least about 50%, at least about 60%, at least about 80%, or at least about 90% less compared to the comparable rAAV that is not CpG depleted.

[0686] Embodiment III-143. The rAAV of embodiment III-140, wherein administration of a dose of the rAAV comprising the AAV polynucleotide component sequences modified for depletion of all or a portion of the CpG dinucleotides to a subject elicits a reduced immune response compared to an administered dose of the comparable rAAV that is not CpG depleted.

[0687] Embodiment III-144. The rAAV of embodiment III-143, wherein the reduced immune response is a reduction of the production of anti-rAAV antibodies or a delayed-type hypersensitivity reaction to an rAAV component in the subject.

[0688] Embodiment III-145. The rAAV of embodiment III-143, wherein the reduced immune response is determined by the measurement of one or more inflammatory markers in the blood of the subject selected from the group consisting of TLR9, interleukin-1 (IL-1), IL-6, IL-12, IL-18, tumor necrosis factor alpha (TNF-α), interferon gamma (IFNγ), and granulocyte-macrophage colony stimulating factor (GM-CSF), wherein the one or more markers are reduced by at least about 10%, at least about 20%, at least about 30%, at least about 40%, at least about 50%, at least about 60%, at least about 80%, or at least about 90% compared to the comparable rAAV that is not CpG depleted.

[0689] Embodiment III-146. The rAAV of any one of embodiments III-143 to III-145, wherein the subject is selected from mouse, rat, pig, dog, and non-human primate.

[0690] Embodiment III-147. The rAAV of any one of embodiments III-143 to III-145, wherein the subject is human.

[0691] Embodiment III-148. A pharmaceutical composition, comprising the rAAV of any one of embodiment III-132 and a pharmaceutically acceptable carrier, diluent or excipient.

[0692] Embodiment III-149. A method for modifying a target nucleic acid in a population of mammalian cells, comprising contacting a plurality of the cells with an effective amount of the rAAV of any one of embodiments III-132 to III-147, wherein the target nucleic acid of a gene of the cells targeted by the expressed gRNA is modified by the expressed CRISPR protein.

[0693] Embodiment III-150. The method of embodiment III-149, wherein the gene of the cells comprises one or more mutations.

[0694] Embodiment III-151. The method of embodiment III-149 or III-150, wherein the modifying comprises introducing an insertion, deletion, substitution, duplication, or inversion of one or more nucleotides in the target nucleic acid of the cells of the population.

[0695] Embodiment III-152. The method of any one of embodiments III-149 to III-151, wherein the gene is knocked down or knocked out.

[0696] Embodiment III-153. The method of any one of embodiments III-149 to III-151, wherein the gene is modified such that a functional gene product can be expressed.

[0697] Embodiment III-154. A method of treating a disease in a subject caused by one or more mutations in a gene of the subject, comprising administering a therapeutically effective dose of the rAAV of any one of embodiments III-132 to III-145 to the subject.

[0698] Embodiment III-155. The method of embodiment III-149, wherein the rAAV is administered to a subject at a dose of at least about 1×10⁸ vector genomes (vg), at least about 1×10⁵ vector genomes/kg (vg/kg), at least about 1×10⁶ vg/kg, at least about 1×10⁷ vg/kg, at least about 1×10⁸ vg/kg, at least about 1×10⁹ vg/kg, at least about 1×10¹⁰ vg/kg, at least about 1×10¹¹ vg/kg, at least about 1×10¹² vg/kg, at least about 1×10¹³ vg/kg, at least about 1×10¹⁴ vg/kg, at least about 1×10¹⁵ vg/kg, or at least about 1×10¹⁶ vg/kg.

[0699] Embodiment III-156. The method of embodiment III-154, wherein the rAAV is administered to a subject at a dose of at least about 1×10⁵ vg/kg to about 1×10¹⁶ vg/kg, at least about 1×10⁶ vg/kg to about 1×10¹⁵ vg/kg, or at least about 1×10⁷ vg/kg to about 1×10¹⁴ vg/kg.

[0700] Embodiment III-157. The method of any one of embodiments III-154 to III-156, wherein the rAAV is administered to the subject by a route of administration selected from subcutaneous, intradermal, intraneural, intranodal, intramedullary, intramuscular, intralumbar, intrathecal, subarachnoid, intraventricular, intracapsular, intravenous, intralymphatical, intraocular or intraperitoneal routes, and wherein the administering method is injection, transfusion, or implantation.

[0701] Embodiment III-158. The method of any one of embodiments III-149 to III-157, wherein the subject is selected from the group consisting of mouse, rat, pig, and non-human primate.

[0702] Embodiment III-159. The method of any one of embodiments III-149 to III-157, wherein the subject is a human.

[0703] Embodiment III-160. A method of making an rAAV vector, comprising:
[0704] a. providing a population of packaging cells; and
[0705] b. transfecting the population of cells with:
   [0706] i) a vector comprising the polynucleotide of any one of embodiments III-1 to III-131;
   [0707] ii) a vector comprising an aap (assembly) gene; and
   [0708] iii) a vector comprising rep and cap genomes.

[0709] Embodiment III-161. The method of embodiment III-160, wherein the packaging cell is selected from the group consisting of BHK cells, HEK293 cells, HEK293T cells, NS0 cells, SP2/0 cells, YO myeloma cells, P3X63 mouse myeloma cells, PER cells, PER.C6 cells, hybridoma cells, NIH3T3 cells, COS cells, HeLa cells, and CHO cells.

[0710] Embodiment III-162. The method of embodiment III-160 or III-161, the method further comprising recovering the rAAV vector.

[0711] Embodiment III-163. The method of any one of embodiments III-160 to III-162, wherein the component sequences of the AAV polynucleotide are encompassed in a single rAAV particle.

[0712] Embodiment III-164. A method of reducing the immunogenicity of an rAAV, comprising deleting all or a portion of the CpG dinucleotides of the sequences of the AAV component sequences selected from the group consisting of 5′ ITR, 3′ ITR, pol III promoter, pol II promoter, encoding sequence for CRISPR nuclease, encoding sequence for gRNA, accessory element, and poly(A).

[0713] Embodiment III-165. The method of embodiment III-164, wherein the one or more AAV polynucleotide component sequences comprise less than about 10%, less than about 5%, or less than about 1% CpG dinucleotides.

[0714] Embodiment III-166. The method of embodiment III-165, wherein one or more AAV polynucleotide component sequences are devoid of CpG dinucleotides.

[0715] Embodiment III-167. The method of any one of embodiment III-164 to III-166, wherein the one or more AAV polynucleotide component sequences are selected from the group consisting of SEQ ID NOS: 41045-41055 as set forth in Table 25.

[0716] Embodiment III-168. The method of any one of embodiments III-164 to III-167, wherein the rAAV exhibits a lower potential for inducing production of one or more markers of an inflammatory response in an in vitro mammalian cell assay compared to a comparable rAAV wherein the CpG dinucleotides have not been deleted, wherein the one or more inflammatory markers are selected from the group consisting of TLR9, interleukin-1 (IL-1), IL-6, IL-12, IL-18, tumor necrosis factor alpha (TNF-α), interferon gamma (IFNγ), and granulocyte-macrophage colony stimulating factor (GM-CSF).

[0717] Embodiment III-169. The method of embodiment III-168, wherein the rAAV elicits reduced production of the one or more inflammatory markers of at least about 10%, at least about 20%, at least about 30%, at least about 40%, at least about 50%, at least about 60%, at least about 80%, or at least about 90% less compared to the comparable rAAV that is not CpG depleted.

[0718] Embodiment III-170. The method of any one of embodiments III-164 to III-167, wherein administration of a dose of the rAAV comprising the AAV polynucleotide component sequences modified for depletion of all or a portion of the CpG dinucleotides to a subject elicits a reduced immune response compared to an administered dose of the comparable rAAV that is not CpG depleted.

[0719] Embodiment III-171. The method of embodiment III-170, wherein the reduced immune response is a reduction of the production of anti-rAAV antibodies or a delayed-type hypersensitivity reaction to an rAAV component in the subject.

[0720] Embodiment III-172. The method of embodiment III-170, wherein the reduced immune response is determined by the measurement of one or more inflammatory markers in the blood of the subject selected from the group consisting of TLR9, interleukin-1 (IL-1), IL-6, IL-12, IL-18, tumor necrosis factor alpha (TNF-α), interferon gamma (IFNγ), and granulocyte-macrophage colony stimulating factor (GM-CSF), wherein the one or more markers are reduced by at least about 10%, at least about 20%, at least about 30%, at least about 40%, at least about 50%, at least about 60%, at least about 80%, or at least about 90% compared to the comparable rAAV that is not CpG depleted.

[0721] Embodiment III-173. The method of any one of embodiments III-164 to III-172, wherein the subject is selected from mouse, rat, pig, dog, and non-human primate.

[0722] Embodiment III-174. The method of any one of embodiments III-164 to III-172, wherein the subject is human.

[0723] Embodiment III-175. A composition of an rAAV of any one of embodiments III-132 to III-147, for use as a medicament for the treatment of a human in need thereof.

[0724] The present description sets forth numerous exemplary configurations, methods, parameters, and the like. It should be recognized, however, that such description is not intended as a limitation on the scope of the present disclosure, but is instead provided as a description of exemplary embodiments. The following examples are included for illustrative purposes and are not intended to limit the scope of the invention.

### EXAMPLES

### Example 1: Small Class 2, Type V CRISPR Proteins can Edit the Genome when Expressed from an AAV Episome In Vitro

[0725] Experiments were conducted to demonstrate that small Class 2, Type V CRISPR proteins can edit a genome when expressed from an AAV plasmid or an AAV vector in vitro.

### Materials and Methods:

[0726] The AAV transgene was conceptually broken up between ITRs into different parts, which consisted of the therapeutic cargo and accessory elements relevant to expression of the therapeutic cargo in mammalian cells. AAV vectorology consisted of identifying a parts list and subsequently designing, building, and testing vectors in both plasmid and AAV form in mammalian cells. A schematic and one configuration of its components is shown in FIG. 1.

[0727] In this first example, three plasmids were constructed (construct 1, construct 2, and construct 3; see Table 26 for component sequences), where the only difference in the plasmid sequence between the ITRs was in the affinity tag region.

### Cloning and QC:

[0728] AAV vectors were cloned using a 4-part Golden Gate Assembly consisting of a pre-digested AAV backbone, small CRISPR protein-encoding DNA, and flanking 5′ and 3′ DNA sequences. 5′ sequences contained enhancer, protein promoter and N-terminal NLS, while 3′ sequences contained C-terminal NLS, WPRE, poly(A) signal, RNA promoter and guide RNA containing spacer 12.7, targeting tDTomato (DNA sequence: CTGCATTCTAGTTGTGGTTT (SEQ ID NO: 40800)). 5′ and 3′ parts were ordered as gene fragments from Twist, PCR-amplified, and assembled into AAV vectors through cyclical Golden Gate reactions using T4 Ligase and BbsI.

[0729] Assembled AAV vectors were then transformed into chemically-competent E. coli (Stbl3s). Transformed cells were recovered for 1 hour in a 37° C. shaking incubator, plated on Kanamycin LB-Agar plates and allowed to grow at 37° C. for 12-16 hours. Colony PCR was performed to determine clones that contained full transgenes. Correct clones were inoculated in 50 mL of LB media with kanamycin and grown overnight. Plasmids were then midiprepped the following day and sequence-verified. To assess the quality of midipreps, constructs were processed in restriction digests with XmaI (which cuts in each of the ITRs) and XhoI (which cuts once in the AAV genome). Digests and uncut constructs were then run on a 1% agarose gel and imaged on a ChemiDoc. If the plasmid was >90% supercoiled, the correct size, and the ITRs were intact, the construct was tested via nucleofection and/or transduction

### Method for Plasmid Nucleofection:

[0730] Plasmids containing the AAV genome were transfected in a mouse immortalized neural progenitor cell (NPC) line isolated from the Ai9-tdTomato mouse (tdTomato mNPCs) using the Lonza P3 Primary Cell 96-well Nucleofector Kit. Briefly, Ai9 is a Cre reporter tool strain designed to have a loxP flanked STOP cassette preventing the transcription of a CAG promoter-driven tdTomato marker. Ai9 mice, or Ai9 mNPCs, express tdTomato following Cre-mediated recombination to remove the STOP cassette. Sequence-validated plasmids were diluted to concentrations of 200 ng/μl, 100 ng/μl, 50 ng/μL and 25 ng/μL, and 5 μL of each (1000 ng, 500 ng, 250 ng and 125 ng) were added to P3 solution containing 200,000 tdTomato mNPCs. The combined solution was nucleofected using a Lonza 4D Nucleofector System following program EH-100. Following nucleofection, the solution was quenched with pre-equilibrated mNPC medium (DMEM/F12 with GlutaMax, 10 mM HEPES, 1×MEM Non-Essential Amino Acids, 1× penicillin/streptomycin, 1:1000 2-mercaptoethanol, 1× B-27 supplement, minus vitamin A, 1× N2 with supplemented growth factors bFGF and EGF (20 ng/mL final concentration). The solution was then aliquoted in triplicate (approx. 67,000 cells per well) in a 96-well plate coated with PLF (1× Poly-DL-ornithine hydrobromide, 10 mg/mL in sterile diH20, 1× laminin, and 1× fibronectin). 48 hours after transfection, treated cells were replenished with fresh mNPC media containing growth factors. 5 days after transfection, tdTomato mNPCs were lifted and activity was assessed by FACS.

### Aav Production:

[0731] Suspension HEK293T cells were adapted from parental HEK293T and grown in FreeStyle 293 media. For screening purposes, small scale cultures (20-30 mL cultured in 125 mL Erlenmeyer flasks and agitated at 110 rpm) were diluted to a density of 1.5e+6 cells/mL on the day of transfection. Endotoxin-free pAAV plasmids with the transgene flanked by ITR repeats were co-transfected with plasmids supplying the adenoviral helper genes for replication and AAV rep/cap genome using PEIMax (Polysciences) in serum-free OPTIMEM media. Cultures were supplemented with 10% CDM4HEK293 (HyClone) 3 hours post-transfection. Three days later, cultures were centrifuged at 1000 rpm for 10 minutes to separate the supernatant from the cell pellet. The supernatant was mixed with 40% PEG 2.5M NaCl (8% final concentration) and incubated on ice for at least 2 hours to precipitate AAV viral particles. The cell pellet, containing the majority of the AAV vectors, was resuspended in lysis media (0.15 M NaCl, 50 mM Tris HCl, 0.05% Tween, pH 8.5), sonicated on ice (15 seconds, 30% amplitude) and treated with Benzonase (250 U/μL, Novagen) for 30 minutes at 37° C. Crude lysate and PEG-treated supernatant were then centrifuged at 4000 rpm for 20 minutes at 4° C. to resuspend the PEG precipitated AAV (pellet) with cell debris-free crude lysate (supernatant), and then clarified further using a 0.45 μM filter.

[0732] To determine the viral genome titer, 1 μL from crude lysate viruses was digested with DNase and ProtK, followed by quantitative PCR. 5 μL of digested virus was used in a 25 μL qPCR reaction composed of IDT primetime master mix and a set of primer and 6′FAM/Zen/IBFQ probe (IDT) designed to amplify the CMV promoter region (Fwd 5′-CATCTACGTATTAGTCATCGCTATTACCA-3′ (SEQ ID NO: 40801)); Rev 5′-GAAATCCCCGTGAGTCAAACC-3′ (SEQ ID NO: 40802)), Probe 5′-TCAATGGGCGTGGATAG-3′ (SEQ ID NO: 40803)) or a 62 nucleotide-fragment located in the AAV2-ITR (Fwd 5′-GGAACCCCTAGTGATGGAGTT-3′ (SEQ ID NO: 40804); Rev 5′-CGGCCTCAGTGAGCGA-3′ (SEQ ID NO: 40805), Probe 5′-CACTCCCTCTCTGCGCGCTCG-3′). Ten-fold serial dilutions (5 μl each of 2e+9 to 2e+4 DNA copies/mL) of an AAV ITR plasmid was used as reference standards to calculate the titer (viral genome (vg)/mL) of viral samples. QPCR program was set up as: initial denaturation step at 95° ° C. for 5 minutes, followed by 40 cycles of denaturation at 95° C. for 1 min and annealing/extension at 60° C. for 1 min.

### Aav Transduction:

[0733] 10,000 cells/well of mNPCs were seeded on PLF-coated wells in 96-well plates 48-hours before AAV transduction. All viral infection conditions were performed in triplicate, with normalized number of vg among experimental vectors, in a series of 3-fold dilution of multiplicity of infection (MOI) ranging from ˜1.0e+6 to 1.0e+4 vg/cell. Final volumes of 50 μL of AAV vectors diluted in pre-equilibrated mNPC medium supplemented with bFGF/EGF growth factors (20 ng/ml final concentration) were applied to each well. 48 hours post-transfection, complete media change was performed with fresh media supplemented with growth factors. Editing activity (tdT+ cell quantification) was assessed by FACS 5 days post-transfection.

### Method for Assessing Activity by FACS:

[0734] Five days after transfection, treated tdTomato mNPCs in 96-well plates were washed with dPBS and treated with 50 μL TrypLE for 15 minutes. Following cell dissociation, treated wells were quenched with media containing DMEM, 10% FBS and 1× penicillin/streptomycin. Resuspended cells were transferred to round-bottom 96-well plates and centrifuged for 5 min at 1000× g. Cell pellets were then resuspended with dPBS containing 1×DAPI, and plates were loaded into an Attune NxT Flow Cytometer Autosampler. The Attune NxT flow cytometer was run using the following gating parameters: FSC-A×SSC-A to select cells, FSC-H×FSC-A to select single cells, FSC-A× VL1-A to select DAPI-negative alive cells, and FSC-A× YL1-A to select tdTomato positive cells.

### Results:

[0735] The graph in FIG. 2 shows that CasX variant 491 and guide variant 174 with spacer 12.7 targeting the tdTomato stop cassette, when delivered by nucleofection of an AAV transgene plasmid, was able to edit the target stop cassette in mNPCs (measured by percentage of cells that are tdTom+ by FACS). Among the vectors tested, CasX 491.174 delivered in construct 3 (with 80% tdTomato+ cells) outperformed the others. FIG. 3 shows that all three vectors tested achieved editing at the tdTomato locus in a dose-dependent manner. FIG. 4 shows results of editing using construct 3 in an AAV vector, which demonstrated a dose-dependent response, achieving a high degree of editing.

[0736] The experiments demonstrate that small Class 2, Type V CRISPR proteins (such as CasX) and targeted guides can edit the genome when expressed from an AAV transgene plasmid or episome in vitro.

### Example 2: Packaging of Small Class 2, Type V CRISPR Systems within an AAV Vector

[0737] Experiments were conducted to demonstrate that systems of small Class 2, Type V CRISPR proteins such as CasX and gRNA can be encoded and efficiently packaged within a single AAV vector.

### Materials and Methods:

[0738] For this experiment, AAV vectors were generated with transgenes packaging CasX variant 438, gRNA scaffold 174 and spacer 12.7 using the methods for AAV production, purification and characterization, as described in Example 1. For characterization, AAV viral genomes were titered by qPCR, and the empty-full ratio was quantified using scanning transmission electron microscopy (STEM). The AAV were negatively stained with 1% uranyl acetate and visualized. Empty particles were identified by presence of a dark electron dense circle at the center of the capsid.

### Results:

[0739] The genomic DNA titers (by qPCR) for the AAV preparation was measured to be 6e12 vg/mL, generated from 1 L of HEK293T cell culture. FIG. 5 is an image from a scanning transmission electron microscopy (STEM) micrograph showing that an estimated 90% of the particles in this AAV formulation contained viral genomes; e.g., were full. Under the conditions of the experiment, the results demonstrate that CasX variant proteins and gRNA can be efficiently packaged in single AAV vector particles, resulting in high titers and high packaging efficiency.

### Example 3: In Vivo Editing of a Genome with Small Class 2, Type V CRISPR Proteins Expressed from an AAV Episome

[0740] Experiments were conducted to demonstrate that small Class 2, Type V CRISPR proteins, such as CasX, are capable of editing the genome when expressed from an AAV episome in vivo.

### Materials and Methods:

[0741] For this experiment, AAV vectors were generated using the methods for AAV production, purification and characterization, as described in Example 1.

[0742] In vivo AAV administration and tissue processing:

[0743] P0-P1 pups from Ai9 mice were injected with AAV with a transgene encoding CasX variant 491 and guide variant 174 with spacer 12.7. Briefly, mice were cryo-anesthetized and 1-2 μL of AAV vector (˜1e11 viral genomes (vg)) was unilaterally injected into the intracerebroventricular (ICV) space using a Hamilton syringe (10 μL, Model 1701 RN SYR Cat No: 7653-01) fitted with a 33-gauge needle (small hub RN NDL—custom length 0.5 inches, point 4 (45 degrees)). Post-injection, pups were recovered on a warm heating pad before being returned to their cages. 1 month after ICV injections, animals were terminally anesthetized with an intraperitoneal injection of ketamine/xylazine, and perfused transcardially with saline and fixative (4% paraformaldehyde). Brains were dissected and further post-fixed in 4% PFA, followed by infiltration with 30% sucrose solution, and embedding in OCT compound. OCT-embedded brains were coronally sectioned using a cryostat. Sections were then mounted on slides, counter-stained with DAPI to label cell nuclei, coverslipped and imaged on a fluorescence microscope. Images were processed using ImageJ software and editing levels were quantified by counting the number of tdTom+ cells as a percentage of DAPI-labeled nuclei.

[0744] In a subsequent experiment to assess editing in peripheral tissues, particularly in the liver and in the heart, P0-P1 pups from Ai9 mice were cryo-anesthetized and were intravenously injected with ˜1e12 viral genomes (vg) of the same AAV construct in a 40 μL volume. Post-injection, pups were recovered on a warm heating pad before being returned to their cages. 1 month post-administration, animals were terminally anesthetized and heart and liver tissues were necropsied and processed as described above.

### Results:

[0745] FIG. 6 provides comparative immunohistochemistry (IHC) images of brain tissue processed from an Ai9 mouse that received an ICV injection of AAV packaging CasX variant 491 and guide scaffold 174 with spacer 12.7 (top) against an ICV injection of AAV packaging CasX variant 491 and guide 174 with spacer 12.7 and stained with 4′,6-diamidino-2-phenylindole. The signal from cells in the tdTom channel indicates that the tdTom locus within these cells was successfully edited. The tdTom+ cells (in white) are distributed evenly across all regions of the brain, indicating that ICV-administered AAV packaging the encoded CasX, guide and spacer are able to reach and edit these cells (top panel) as compared to a non-targeting control (bottom panel). The FIG. 6 images are representative of those obtained from 3 mice for each group. Additionally, the results presented in FIG. 59A (liver) and 59B (heart) demonstrate that the AAV were able to distribute within the liver and the heart (edited cells in white) and edit the genome when expressed from single AAV episomes in vivo.

[0746] The results demonstrate that that AAV encoding small CRISPR proteins (such as CasX) and a targeting guide can distribute within the tissues, when delivered either locally (brain) or systemically, and edit the genome when expressed from single AAV episomes in vivo.

### Example 4: Small CRISPR Protein Potency is Enhanced by AAV Vector Protein Promoter Choice

[0747] Experiments were conducted to demonstrate that small CRISPR protein expression, such as CasX, can be enhanced by utilizing different promoters in an AAV construct for the encoded protein. Cargo space in the AAV transgene can be maximized with the use of short promoters in combination with CasX. Additionally, experiments were conducted to demonstrate that expression can be enhanced with the use of promoters that would otherwise be too long to be efficiently packaged in AAV vector, if they were combined with larger CRISPR proteins, such as Cas9. The use of long, cell-type-specific promoters to enhance small CRISPR proteins is an advantage to the AAV system described herein, and not possible in traditional CRISPR systems due to the size of other CRISPR proteins.

### Materials and Methods:

[0748] Cloning and QC were conducted as described in Example 1. Promoter variants were cloned upstream of CasX protein in an AAV-cis plasmid. The sequences of the additional components of the AAV constructs, with the exception of sequences encoding the CasX (Table 21) and the one or more gRNA (Tables 18 and 19), are listed in Table 26.

TABLE 8
Promoter variant sequences

| SEQ ID | Construct | Promoter | | Size |
|---|---|---|---|---|
| NO: | ID | based on | Sequence | (bp) |
| 40370 | 1, 2, 3, | CMV | GACATTGATTATTGACTAGTTATTAATAGTAATCAATTAC | 584 |
| | 7, 44 | | GGGGTCATTAGTTCATAGCCCATATATGGAGTTCCGCGT | |
| | | | TACATAACTTACGGTAAATGGCCCGCCTGGCTGACCGCC | |
| | | | CAACGACCCCCGCCCATTGACGTCAATAATGACGTATGT | |
| | | | TCCCATAGTAACGCCAATAGGGACTTTCCATTGACGTCA | |
| | | | ATGGGTGGAGTATTTACGGTAAACTGCCCACTTGGCAGT | |
| | | | ACATCAAGTGTATCATATGCCAAGTACGCCCCCTATTGA | |
| | | | CGTCAATGACGGTAAATGGCCCGCCTGGCATTATGCCCA | |
| | | | GTACATGACCTTATGGGACTTTCCTACTTGGCAGTACATC | |
| | | | TACGTATTAGTCATCGCTATTACCATGGTGATGCGGTTTT | |
| | | | GGCAGTACATCAATGGGCGTGGATAGCGGTTTGACTCAC | |
| | | | GGGGATTTCCAAGTCTCCACCCCATTGACGTCAATGGGA | |
| | | | GTTTGTTTTGGCACCAAAATCAACGGGACTTTCCAAAAT | |
| | | | GTCGTAACAACTCCGCCCCATTGACGCAAATGGGCGGTA | |
| | | | GGCGTGTACGGTGGGAGGTCTATATAAGCAGAGCT | |
| 40371 | 4 | UbC | GGCCTCCGCGCCGGGTTTTGGCGCCTCCCGCGGGCGCCCC | 400 |
| | | | CCTCCTCACGGCGAGCGCTGCCACGTCAGACGAAGGGCG | |
| | | | CAGCGAGCGTCCTGATCCTTCCGCCCGGACGCTCAGGAC | |
| | | | AGCGGCCCGCTGCTCATAAGACTCGGCCTTAGAACCCCA | |
| | | | GTATCAGCAGAAGGACATTTTAGGACGGGACTTGGGTGA | |
| | | | CTCTAGGGCACTGGTTTTCTTTCCAGAGAGCGGAACAGGC | |
| | | | GAGGAAAAGTAGTCCCTTCTCGGCGATTCTGCGGAGGGA | |
| | | | TCTCCGTGGGGCGGTGAACGCCGATGATTATATAAGGAC | |
| | | | GCGCCGGGTGTGGCACAGCTAGTTCCGTCGCAGCCGGGA | |
| | | | TTTGGGTCGCGGTTCTTGTTTGTGGATCGCTGTGATCGTC | |
| | | | ACTTGGT | |
| 40372 | 5 | EFS | TGGCTCCGGTGCCCGTCAGTGGGCAGAGCGCACATCGCC | 234 |
| | | | CACAGTCCCCGAGAAGTTGGGGGGAGGGGTCGGCAATTG | |
| | | | AACCGGTGCCTAGAGAAGGTGGCGCGGGGTAAACTGGGA | |
| | | | AAGTGATGTCGTGTACTGGCTCCGCCTTTTTCCCGAGGGT | |
| | | | GGGGGAGAACCGTATATAAGTGCAGTAGTCGCCGTGAAC | |
| | | | GTTCTTTTTCGCAACGGGTTTGCCGCCAGAACACAGGT | |
| 40373 | 6 | CMV-s | CGTTACATAACTTACGGTAAATGGCCCGCCTGGCTGACCG | 335 |
| | | | CCCAACGACCCCCGCCCATTGACGTCAATAATGACGTAT | |
| | | | GTTCCCATAGTAACGCCAATAGGGACTTTCCATTGACGTC | |
| | | | AATGGGTGGAGTATTTACGGTAAACTGCCCACTTGGCAG | |
| | | | TACATCAAGTGTATCATATGCCAAGTACGCCCCCTATTGA | |
| | | | CGTCAATGACGGTAAATGGCCCGCCTGGCATTATGCCCA | |
| | | | GTACATGACCTTATGGGACTTTCCTACTTGGCAGTACATC | |
| | | | TACGTATTAGTCATCGCTATTACCATGAGAGGGTATATAA | |
| | | | TGGAAGCTCGACTTCCAG | |
| 40374 | 8 | CMVd1 | CCAAAATCAACGGGACTTTCCAAAATGTCGTAATAACCC | 100 |
| | | | CGCCCCGTTGACGCAAATGGGCGGTAGGCGTGTACGGTG | |
| | | | GGAGGTCTATATAAGCAGAGCT | |
| 40375 | 9 | CMVd2 | GACGCAAATGGGCGGTAGGCGTGTACGGTGGGAGGTCTA | 52 |
| | | | TATAAGCAGAGCT | |
| 40376 | 10 | miniCMV | GGTAGGCGTGTACGGTGGGAGGTCTATATAAGCAGAGCT | 39 |
| 40377 | 11, 26 | HSVTK | ATGACACAAACCCCGCCCAGCGTCTTGTCATTGGCGAATT | 146 |
| | | | CGAACACGCAGATGCAGTCGGGGCGGCGCGGTCCCAGGT | |
| | | | CCACTTCGCATATTAAGGTGACGCGTGTGGCCTCGAACAC | |
| | | | CGAGCGACCCTGCAGCGACCCGCTTAA | |
| 40378 | 12 | miniTK | TTCGCATATTAAGGTGACGCGTGTGGCCTCGAACACCGA | 63 |
| | | | GCGACCCTGCAGCGACCCGCTTAA | |
| 40379 | 13 | miniIL2 | CATTTTGACACCCCCATAATATTTTTCCAGAATTAACAGT | 114 |
| | | | ATAAATTGCATCTCTTGTTCAAGAGTTCCCTATCACTCTC | |
| | | | TTTAATCACTACTCACAGTAACCTCAACTCCTGC | |
| 40380 | 14 | GRP94 | ACTAGTTTCATCACCACCGCCACCCCCCCGCCCCCCCGC | 710 |
| | | | CATCTGAAAGGGTTCTAGGGGATTTGCAACCTCTCTCGT | |
| | | | GTGTTTCTTCTTTCCGAGAAGCGCCGCCACACGAGAAAG | |
| | | | CTGGCCGCGAAAGTCGTGCTGGAATCACTTCCAACGAAA | |
| | | | CCCCAGGCATAGATGGGAAAGGGTGAAGAACACGTTGC | |
| | | | CATGGCTACCGTTTCCCCGGTCACGGAATAAACGCTCTC | |
| | | | TAGGATCCGGAAGTAGTTCCGCCGCGACCTCTCTAAAAG | |
| | | | GATGGATGTGTTCTCTGCTTACATTCATTGGACGTTTTCC | |
| | | | CTTAGAGGCCAAGGCCGCCCAGGCAAAGGGGCGGTCCC | |
| | | | ACGCGTGAGGGGCCCGCGGAGCCATTTGATTGGAGAAA | |
| | | | AGCTGCAAACCCTGACCAATCGGAAGGAGCCACGCTTCG | |
| | | | GGCATCGGTCACCGCACCTGGACAGCTCCGATTGGTGGA | |
| | | | CTTCCGCCCCCCCTCACGAATCCTCATTGGGTGCCGTGG | |
| | | | GTGCGTGGTGCGGCGCGATTGGTGGGTTCATGTTTCCCG | |
| | | | TCCCCCGCCCGCGAGAAGTGGGGGTGAAAAGCGGCCCG | |
| | | | ACCTGCTTGGGGTGTAGTGGGCGGACCGCGCGGCTGGAG | |
| | | | GTGTGAGGATCCGAACCCAGGGGTGGGGGGTGGAGGCG | |
| | | | GCTCCTGCGATCGAAGGGGACTTGAGACT | |
| | | | CACCGGCCGCACGTC | |
| 40381 | 15 | Supercore 1 | GTACTTATATAAGGGGGTGGGGGCGCGTTCGTCCTCAGT | 81 |
| | | | CGCGATCGAACACTCGAGCCGAGCAGACGTGCCTACGG | |
| | | | ACCG | |
| 40382 | 16 | Supercore 2 | AGGTCTATATAAGCAGAGCTCGTTTAGTGAACCGTCAGA | 81 |
| | | | TCGCCTGGAGACGTCGAGCCGAGTGGTTGTGCCTCCATA | |
| | | | GAA | |
| 40383 | 17 | Supercore 3 | AGGTCTATATAAGCAGAGCTCGTTTAGTGAACCGTCAGT | 81 |
| | | | CCGCCTGGAGACCTGCAGCCGAGTGGTCGTGCCTCCATA | |
| | | | GAA | |
| 40384 | 18 | Mecp2 | AGCTGAATGGGGTCCGCCTCTTTTCCCTGCCTAAACAGA | 229 |
| | | | CAGGAACTCCTGCCAATTGAGGGCGTCACCGCTAAGGCT | |
| | | | CCGCCCCAGCCTGGGCTCCACAACCAATGAAGGGTAATC | |
| | | | TCGACAAAGAGCAAGGGGTGGGGCGCGGGCGCGCAGGT | |
| | | | GCAGCAGCACACAGGCTGGTCGGGAGGGCGGGGCGCGA | |
| | | | CGTCTGCCGTGCGGGGTCCCGGCATCGGTTGCGCGC | |
| 40385 | 19 | CMVmini | GGTAGGCGTGTACGGTGGGAGGCCTATATAAGCAGAGC | 68 |
| | | | TCGTTTAGTGAACCGTCAGATCGCCTGGAG | |
| 40386 | 20 | CMVmini2 | AGGTCTATATAAGCAGAGCTCTCTGGCTAACTAGAGAAC | 65 |
| | | | CCACTGCTTAACTGGCTTATCGAAAT | |
| 40387 | 21 | miniCMVIE | GGTAGGCGTGTACGGTGGGAGGTCTATATAAGCAGAGCT | 39 |
| 40388 | 22 | adML | GGGGCTATAAAAGGGGGTGGGGGCGCGTTCGTCCTCACT | 81 |
| | | | CTCTTCCGCATCGCTGTCTGCGAGGGCCAGCTGTTGGGG | |
| | | | TGA | |
| 40389 | 23 | hepB | GGGGGAGGAGATTAGGTTAAAGGTCTTTGTATTAGGAGG | 107 |
| | | | CTGTAGGCATAAATTGGTCTGTTCACCAGCACCATGCAA | |
| | | | CTTTTTCACCTCTGCCTAATCATCTCATG | |
| 40390 | 54 | RSV | TGTAGTCTTATGCAATACTCTTGTAGTCTTGCAACATGGT | 227 |
| | | | AACGATGAGTTAGCAACATGCCTTACAAGGAGAGAAAAA | |
| | | | GCACCGTGCATGCCGATTGGTGGAAGTAAGGTGGTACGA | |
| | | | TCGTGCCTTATTAGGAAGGCAACAGACGGGTCTGACATG | |
| | | | GATTGGACGAACCACTGAATTGCCGCATTGCAGAGATAT | |
| | | | TGTATTTAAGTGCCTAGCTCGATACATAAAC | |
| 40391 | 55 | hSyn | AGTGCAAGTGGGTTTTAGGACCAGGATGAGGCGGGGTGG | 448 |
| | | | GGGTGCCTACCTGACGACCGACCCCGACCCACTGGACAA | |
| | | | GCACCCAACCCCCATTCCCCAAATTGCGCATCCCCTATCA | |
| | | | GAGAGGGGGAGGGGAAACAGGATGCGGCGAGGCGCGTG | |
| | | | CGCACTGCCAGCTTCAGCACCGCGGACAGTGCCTTCGCCC | |
| | | | CCGCCTGGCGGCGCGCGCCACCGCCGCCTCAGCACTGAA | |
| | | | GGCGCGCTGACGTCACTCGCCGGTCCCCCGCAAACTCCCC | |
| | | | TTCCCGGCCACCTTGGTCGCGTCCGCGCCGCCGCCGGCCC | |
| | | | AGCCGGACCGCACCACGCGAGGCGCGAGATAGGGGGGC | |
| | | | ACGGGCGCGACCATCTGCGCTGCGGCGCCGGCGACTCAG | |
| | | | CGCTGCCTCAGTCTGCGGTGGGCAGCGGAGGAGTCGTGT | |
| | | | CGTGCCTGAGAGCGCAG | |
| 40392 | 56 | SV40 | GTGTGTCAGTTAGGGTGTGGAAAGTCCCCAGGCTCCCCA | 330 |
| | | | GCAGGCAGAAGTATGCAAAGCATGCATCTCAATTAGTCA | |
| | | | GCAACCAGGTGTGGAAAGTCCCCAGGCTCCCCAGCAGGC | |
| | | | AGAAGTATGCAAAGCATGCATCTCAATTAGTCAGCAACC | |
| | | | ATAGTCCCGCCCCTAACTCCGCCCATCCCGCCCCTAACTC | |
| | | | CGCCCAGTTCCGCCCATTCTCCGCCCCATGGCTGACTAAT | |
| | | | TTTTTTTATTTATGCAGAGGCCGAGGCCGCCTCGGCCTCT | |
| | | | GAGCTATTCCAGAAGTAGTGAGGAGGCTTTTTTGGAGGC | |
| | | | CTAGGCTTTTGCAAA | |
| 40393 | 57 | hPGK | GGGGTTGGGGTTGCGCCTTTTCCAAGGCAGCCCTGGGTTT | 551 |
| | | | GCGCAGGGACGCGGCTGCTCTGGGCGTGGTTCCGGGAAA | |
| | | | CGCAGCGGCGCCGACCCTGGGTCTCGCACATTCTTCACGT | |
| | | | CCGTTCGCAGCGTCACCCGGATCTTCGCCGCTACCCTTGT | |
| | | | GGGCCCCCCGGCGACGCTTCCTGCTCCGCCCCTAAGTCGG | |
| | | | GAAGGTTCCTTGCGGTTCGCGGCGTGCCGGACGTGACAA | |
| | | | ACGGAAGCCGCACGTCTCACTAGTACCCTCGCAGACGGA | |
| | | | CAGCGCCAGGGAGCAATGGCAGCGCGCCGACCGCGATGG | |
| | | | GCTGTGGCCAATAGCGGCTGCTCAGCAGGGCGCGCCGAG | |
| | | | AGCAGCGGCCGGGAAGGGGCGGTGCGGGAGGCGGGGTG | |
| | | | TGGGGCGGTAGTGTGGGCCCTGTTCCTGCCCGCGCGGTGT | |
| | | | TCCGCATTCTGCAAGCCTCCGGAGCGCACGTCGGCAGTC | |
| | | | GGCTCCCTCGTTGACCGAATCACCGACCTCTCTCCCCAG | |
| 40394 | 58 | Jet | GGGCGGAGTTAGGGCGGAGCCAATCAGCGTGCGCCGTTC | 164 |
| | | | CGAAAGTTGCCTTTTATGGCTGGGCGGAGAATGGGCGGT | |
| | | | GAACGCCGATGATTATATAAGGACGCGCCGGGTGTGGCA | |
| | | | CAGCTAGTTCCGTCGCAGCCGGGATTTGGGTCGCGGTTCT | |
| | | | TGTTTGT | |
| 40395 | 59 | Jet + UsP | GGGCGGAGTTAGGGCGGAGCCAATCAGCGTGCGCCGTTC | 326 |
| | | intron | CGAAAGTTGCCTTTTATGGCTGGGCGGAGAATGGGCGGT | |
| | | | GAACGCCGATGATTATATAAGGACGCGCCGGGTGTGGCA | |
| | | | CAGCTAGTTCCGTCGCAGCCGGGATTTGGGTCGCGGTTCT | |
| | | | TGTTTGTGGATCCCTGTGATCGTCACTTGGTAAGTCACTG | |
| | | | ACTGTCTATGCCTGGGAAAGGGTGGGCAGGAGATGGGGC | |
| | | | AGTGCAGGAAAAGTGGCACTATGAACCCTGCAGCCCTAG | |
| | | | GAATGCATCTAGACAATTGTACTAACCTTCTTCTCTTTCCT | |
| | | | CTCCTGACAG | |
| 40396 | 60 | hRLP30 | CCCCGCAGCCATTCTAGCTAGCGGTACCAATAGCAACCG | 325 |
| | | | GCAGCTGCCCTCCGCTTTTGCTCCGCCCCTTCTGCTTGCG | |
| | | | ATCTGTTTCCGCTTCCGGTCCCGCAGTTCCGGCTCTGCCG | |
| | | | TGAAGAGCTTTGCATTGTGGGAAGTCTTTCCTTTCTCGTT | |
| | | | CCCCGGCCATCTTAGCGGCTGCTGTTGGTGAGTGGGCTCC | |
| | | | TACCGACCGAGGTTTAGGCAGCGCGGGGAGCTTTGCGGG | |
| | | | TTGCCATTTGTAACTCCGGATCCTAAAATTCCTGTCCTGTT | |
| | | | CTCTGTCTCTTCTAGGTTGGGGGCCGTCCCGCTCCTAAGG | |
| | | | CAGGAA | |
| 40397 | 61 | hRPS18 | AGCCCCGGAACCTTCGCTGTTCTCTTACCTATGAACCTTA | 243 |
| | | | CGAACTGTAAAGAAAGGCGCACCGGAAGTTGTGGTACCC | |
| | | | AAGCCATACTCTCATAAATCCAGCCAGGTCGCGCTGAAA | |
| | | | CAGTTTCCGGAAGCACTTCTCCTAGATCGCACCGCCTCTT | |
| | | | CCTCCTGGAAGCTATATAATGATATCGCGTCACTTCCGCT | |
| | | | CTCTCTTCCACAGGAGGCCTACACGCCGCCGCTTGTGCTG | |
| | | | CAGCC | |
| 40398 | 62 | CBA | CCACGTTCTGCTTCACTCTCCCCATCTCCCCCCCCTCCCC | 493 |
| | | | ACCCCCAATTTTGTATTTATTTATTTTTTAATTATTTTGTG | |
| | | | CAGCGATGGGGGCGGGGGGGGGGGGGGGGCGCGCGCCA | |
| | | | GGCGGGGCGGGGCGGGGCGAGGGGCGGGGCGGGGCGA | |
| | | | GGCGGAGAGGTGCGGCGGCAGCCAATCAGAGCGGCGCG | |
| | | | CTCCGAAAGTTTCCTTTTATGGCGAGGCGGCGGCGGCGG | |
| | | | CGGCCCTATAAAAAGCGAAGCGCGCGGCGGGCGGGAGC | |
| | | | GGGATCAGCCACCGCGGTGGCGGCCTAGAGTCGACGAG | |
| | | | GAACTGAAAAACCAGAAAGTTAACTGGTAAGTTTAGTCT | |
| | | | TTTTGTCTTTTATTTCAGGTCCCGGATCCGGTGGTGGTGC | |
| | | | AAATCAAAGAACTGCTCCTCAGTGGATGTTGCCTTTACT | |
| | | | TCTAGGCCTGTACGGAAGTGTTACTTCTGCTCTAAAAGC | |
| | | | TGCGGAATTGTACCCGCGGCCGATCCA | |
| 40399 | 63 | CBH | CGTTACATAACTTACGGTAAATGGCCCGCCTGGCTGACC | 565 |
| | | | GCCCAACGACCCCCGCCCATTGACGTCAATAGTAACGCC | |
| | | | AATAGGGACTTTCCATTGACGTCAATGGGTGGAGTATTT | |
| | | | ACGGTAAACTGCCCACTTGGCAGTACATCAAGTGTATCA | |
| | | | TATGCCAAGTACGCCCCCTATTGACGTCAATGACGGTAA | |
| | | | ATGGCCCGCCTGGCATTGTGCCCAGTACATGACCTTATG | |
| | | | GGACTTTCCTACTTGGCAGTACATCTACGTATTAGTCATC | |
| | | | GCTATTACCATGGTCGAGGTGAGCCCCACGTTCTGCTTC | |
| | | | ACTCTCCCCATCTCCCCCCCCTCCCCACCCCCAATTTTGT | |
| | | | ATTTATTTATTTTTTAATTATTTTGTGCAGCGATGGGGGC | |
| | | | GGGGGGGGGGGGGGGGCGCGCGCCAGGCGGGGCGGGG | |
| | | | CGGGGCGAGGGGGGGGCGGGGCGAGGCGGAGAGGTG | |
| | | | CGGCGGCAGCCAATCAGAGCGGCGCGCTCCGAAAGTTTC | |
| | | | CTTTTATGGCGAGGCGGCGGCGGCGGCGGCCCTATAAAA | |
| | | | AGCGAAGCGCGCGGCGGGCG | |
| 40400 | 64 | CMV core | GTGATGCGGTTTTGGCAGTACATCAATGGGCGTGGATAG | 204 |
| | | | CGGTTTGACTCACGGGGATTTCCAAGTCTCCACCCCATTG | |
| | | | ACGTCAATGGGAGTTTGTTTTGGCACCAAAATCAACGGG | |
| | | | ACTTTCCAAAATGTCGTAACAACTCCGCCCCATTGACGCA | |
| | | | AATGGGCGGTAGGCGTGTACGGTGGGAGGTCTATATAAG | |
| | | | CAGAGCT | |

### Method for Plasmid Nucleofection:

[0749] Immortalized neural progenitor cells were nucleofected as described in Example 1. Sequence-validated plasmids were diluted to concentrations of 200 ng/ul, 100 ng/ul, 50 ng/μL and 25 ng/μL, and 5 μL of each (1000 ng, 500 ng, 250 ng and 125 ng) were added to P3 solution containing 200,000 tdTomato mNPCs.

[0750] AAV viral production and QC, and AAV transduction and editing level assessment in mNPTC-tdT cells by FACS were conducted as described in Example 1.

### Results:

[0751] The results of FIG. 7 demonstrate that several different promoters with CasX protein 438, scaffold variant 174 and spacer targeting the tdTomato stop cassette (spacer 12.7, with sequence CTGCATTCTAGTTGTGGTTT (SEQ ID NO: 40800)), when delivered by nucleofection of AAV transgene plasmid, edit the target stop cassette in mNPCs at a dose of 1000 ng. These promoters ranged in length from over 700 nucleotides to as short as 81 nucleotides (Table 8). Among the promoters tested, construct 7 and 14 showed considerable editing potency.

[0752] The results of FIG. 8 demonstrate that several short promoters combined with CasX variant 491, scaffold variant 174 and spacer 12.7, when delivered by nucleofection of AAV transgene plasmid, edit the target stop cassette in mNPCs at a dose of 500 ng. Other than construct 2, which had a promoter of 584 nucleotides, all of the constructs had promoters less than 250 nucleotides in length. Among the protein promoters tested, construct 15 showed considerable editing potency, especially given its short length (81 nucleotides).

[0753] The results of FIG. 9 demonstrate that four lead promoters with CasX variant 491 and scaffold variant 174 with spacer 12.7, when delivered by nucleofection of AAV transgene plasmid, edit the target stop cassette in mNPCs at doses of 125 ng and 62.5 ng. Constructs 4, 5 and 6 have promoter lengths less than or equal to 400 nucleotides, and thus may maximize editing potency while minimizing AAV cargo capacity.

[0754] The results of FIG. 10 demonstrate that use of four promoter variants in the AAV also result in robust editing. Briefly, AAVs (AAV.3, AAV.4, AAV.5 and AAV.6) were generated with transgene constructs 3-6, respectively. Each construct showed dose-dependent editing at the target locus (FIG. 10, left panel). At an MOI of 2e5, AAV.4 showed editing at 38%±3% at the target locus, outperforming the other constructs (FIG. 10, right panel).

[0755] In the experiments portrayed in FIG. 11, several new protein promoters were compared against the top 4 protein promoter variants identified previously (AAV.3, AAV.4, AAV.5 and AAV.6). Briefly, AAVs were generated with corresponding transgene constructs and transduced in tdTomato mNPCs. At an MOI of 3e5 5 days after transduction, multiple promoters displayed improved editing (FIG. 11). In particular, constructs 58 and 59 had editing activity above 30% while minimizing transgene size (FIG. 12). Construct 58 and 59 contained promoters that are 420 and 258 bp smaller, respectively, than construct 3, yet resulted in similar or improved editing of the target locus. In particular, inclusion of an intron in the promoter of construct 59 led to increased editing compared to construct 58, lacking the intron, suggesting that the inclusion of introns in the AAV construct promoters is beneficial.

[0756] The results demonstrate that expression of small CRISPR proteins (such as CasX) can be enhanced by utilizing long promoters that would otherwise be unusable with traditional CRISPR proteins due to the size constraints of the AAV genome. Furthermore, combining short promoters with small CRISPR proteins (such as CasX) allows for significant reductions in AAV transgene cargo capacity without compromising expression efficiency. This conservation of space allows for the inclusion of additional accessory elements, such as enhancers and regulatory elements in the transgene, which would enable increased editing potential.

### Example 5: Small CRISPR Systems Potency is Enhanced by AAV Vector RNA Promoter Choice

[0757] Experiments were conducted to demonstrate that the editing potency of small CRISPR systems (such as CasX) can be enhanced if certain promoters are chosen for expression of the guide RNA, which recognizes target DNA for editing, in an AAV vector. By using RNA promoters with different strengths, guide RNA expression can be modulated, which affects editing potency. The AAV platform based on the CasX system provides enough cargo space in the AAV to include at least 2 independent promoters for the expression of two guide RNAs. By combining promoters with different levels of expression, expression of multiple guide RNAs can be tuned within a single AAV transgene. Engineering shorter versions of RNA promoters that result in retained editing potency also enables increased engineering space for the addition of other accessory elements in the AAV transgene.

### Materials and Methods:

[0758] The methods of Example 1 were used for cloning and quality control of the constructs, as well as for plasmid nucleofection and AAV production, transduction, and FACS analyses. The sequences of the Pol III promoters are presented in Table 9. The sequences of the additional components of the AAV constructs, with the exception of sequences encoding the CasX (Table 21) and the one or more gRNA (Tables 18 and 19), are listed in Table 26.

TABLE 9
Construct RNA promoter sequences

| SEQ | | | | |
|---|---|---|---|---|
| ID | Construct | Pol III | | Promoter |
| NO: | ID | promoter | Sequences of engineered promoters | size (bp) |
| 40401 | 3, 53, | human U6 | GAGGGCCTATTTCCCATGATTCCTTCATATTTGCATA | 241 |
| | 157 | | TACGATACAAGGCTGTTAGAGAGATAATTGGAATTA | |
| | | | ATTTGACTGTAAACACAAAGATATTAGTACAAAATA | |
| | | | CGTGACGTAGAAAGTAATAATTTCTTGGGTAGTTTGC | |
| | | | AGTTTTAAAATTATGTTTTAAAATGGACTATCATATG | |
| | | | CTTACCGTAACTTGAAAGTATTTCGATTTCTTGGCTTT | |
| | | | ATATATCTTGTGGAAAGGAC | |
| 40402 | 32, 158 | H1 | GAACGCTGACGTCATCAACCCGCTCCAAGGAATCGC | 215 |
| | | | GGGCCCAGTGTCACTAGGCGGGAACACCCAGCGCGC | |
| | | | GTGCGCCCTGGCAGGAAGATGGCTGTGAGGGACAGG | |
| | | | GGAGTGGCGCCCTGCAATATTTGCATGTCGCTATGTG | |
| | | | TTCTGGGAAATCACCATAAACGTGAAATGTCTTTGGA | |
| | | | TTTGGGAATCTTATAAGTTCTGTATGAGACCAC | |
| 40403 | 33 | 7SK | CTGCAGTATTTAGCATGCCCCACCCATCTGCAAGGCA | 244 |
| | | | TTCTGGATAGTGTCAAAACAGCCGGAAATCAAGTCC | |
| | | | GTTTATCTCAAACTTTAGCATTTTGGGAATAAATGAT | |
| | | | ATTTGCTATGCTGGTTAAATTAGATTTTAGTTAAATTT | |
| | | | CCTGCTGAAGCTCTAGTACGATAAGTAACTTGACCTA | |
| | | | AGTGTAAAGTTGAGATTTCCTTCAGGTTTATATAGCT | |
| | | | TGTGCGCCGCCTGGGTACCTCG | |
| 40404 | 85/89 | hU6 | GAGGGCCTATTTCCCATGATTCCTTCATATTTGCATA | 103 |
| | | variant 1 | TACGATAGCTTACCGTAACTTGAAAGTATTTCGATTT | |
| | | | CTTGGCTTTATATATCTTGTGGAAAGGAC | |
| 40405 | 86 | hU6 | TTTCGATTTCTTGGCTTTATATATCTTGTGGAAAGGA | 38 |
| | | variant 2 | C | |
| 40406 | 87 | hU6 | ATACGATAGCTTACCGTAACTTGAAAGTATTTCGATT | 67 |
| | | variant 3 | TCTTGGCTTTATATATCTTGTGGAAAGGAC | |
| 40407 | 88 | hU6 | GAGGGCCTATTTCCCATGATTCCTTCATATTTGCATTT | 79 |
| | | variant 4 | TCGATTTCTTGGCTTTATATATCTTGTGGAAAGGACG | |
| | | | AAAC | |
| 40408 | 90 | hU6 | GAGGGCCTATTTCCCATGATTCCTTCATATTTGCATA | 111 |
| | | variant 5 | TTTGCATATACGATAGCTTACCGTAACTTGAAAGTAT | |
| | | | TTCGATTTCTTGGCTTTATATATCTTGTGGAAAGGAC | |
| 40409 | 91 | hU6 | GAGGGCCTATTTCCCATGATTCCTTCATATTTGCATA | 127 |
| | | variant 6 | TTTGCATATTTGCATATTTGCATATACGATAGCTTAC | |
| | | | CGTAACTTGAAAGTATTTCGATTTCTTGGCTTTATAT | |
| | | | ATCTTGTGGAAAGGAC | |
| 40410 | 92 | hU6 | GAGGGCCTATTTCCCATGATTCCTTCATATTTCCCAT | 123 |
| | | variant 7 | GATTCCTTCATATTTGCATATACGATAGCTTACCGTA | |
| | | | ACTTGAAAGTATTTCGATTTCTTGGCTTTATATATCTT | |
| | | | GTGGAAAGGAC | |
| 40411 | 93 | hU6 | GAGGGCCTATTTCCCATGATTCCTTCATATTTCCCAT | 143 |
| | | variant 8 | GATTCCTTCATATTTCCCATGATTCCTTCATATTTGCA | |
| | | | TATACGATAGCTTACCGTAACTTGAAAGTATTTCGAT | |
| | | | TTCTTGGCTTTATATATCTTGTGGAAAGGAC | |
| 40412 | 94 | hU6 | GAGGGCCTATTTCCCATGATTCCTTCATATTTGCATA | 131 |
| | | variant 9 | TTTCCCATGATTCCTTCATATTTGCATATACGATAGCT | |
| | | | TACCGTAACTTGAAAGTATTTCGATTTCTTGGCTTTAT | |
| | | | ATATCTTGTGGAAAGGAC | |
| 40413 | 95 | hU6 | GAGGGCCTATTTCCCATGATTCCTTCATATTTGCATA | 159 |
| | | variant 10 | TTTCCCATGATTCCTTCATATTTGCATATTTCCCATGA | |
| | | | TTCCTTCATATTTGCATATACGATAGCTTACCGTAAC | |
| | | | TTGAAAGTATTTCGATTTCTTGGCTTTATATATCTTGT | |
| | | | GGAAAGGAC | |
| 40414 | 96 | hU6 | GAGGGCCTATTTCCCATGATTCCTTCATATGCAAATA | 103 |
| | | variant 11 | TACGATAGCTTACCGTAACTTGAAAGTATTTCGATTT | |
| | | | CTTGGCTTTATATATCTTGTGGAAAGGAC | |
| 40415 | 97 | hU6 | GAGGGCCTATTTCCCATGATTCCTTCATATGCAAATA | 111 |
| | | variant 12 | TGCAAATATACGATAGCTTACCGTAACTTGAAAGTAT | |
| | | | TTCGATTTCTTGGCTTTATATATCTTGTGGAAAGGAC | |
| 40416 | 98 | hU6 | GAGGGCCTATTTCCCATGATTCCTTCATATGCAAATA | 127 |
| | | variant 13 | TGCAAATATGCAAATATGCAAATATACGATAGCTTA | |
| | | | CCGTAACTTGAAAGTATTTCGATTTCTTGGCTTTATAT | |
| | | | ATCTTGTGGAAAGGAC | |
| 40417 | 99 | hU6 | GAGGGCCTATGCAAATATGAAGGAATCATGGGAAAT | 103 |
| | | variant 14 | ATACGATAGCTTACCGTAACTTGAAAGTATTTCGATT | |
| | | | TCTTGGCTTTATATATCTTGTGGAAAGGAC | |
| 40418 | 100 | hU6 | GAGGGCCTATGCAAATATGAAGGAATCATGGGAAAT | 131 |
| | | variant 15 | ATGCAAATATGAAGGAATCATGGGAAATATACGATA | |
| | | | GCTTACCGTAACTTGAAAGTATTTCGATTTCTTGGCT | |
| | | | TTATATATCTTGTGGAAAGGAC | |
| 40419 | 101 | hU6 | GAGGGCCTATGCAAATATGAAGGAATCATGGGAAAT | 159 |
| | | variant 16 | ATGCAAATATGAAGGAATCATGGGAAATATGCAAAT | |
| | | | ATGAAGGAATCATGGGAAATATACGATAGCTTACCG | |
| | | | TAACTTGAAAGTATTTCGATTTCTTGGCTTTATATATC | |
| | | | TTGTGGAAAGGAC | |
| 40420 | 102 | hU6 | GAGGGCCTATTTCCCATGATTCCTTCATATTTGCATA | 128 |
| | | variant 17 | TACGTTTGACTGTAAATACGTGACGTAGAATAGCTTA | |
| | | | CCGTAACTTGAAAGTATTTCGATTTCTTGGCTTTATAT | |
| | | | ATCTTGTGGAAAGGAC | |
| 41010 | 159 | H1 core | ATATTTGCATGTCGCTATGTGTTCTGGGAAATCACCATAAAC | 91 |
| | | | GTGAAATGTCTTTGGATTTGGGAATCTTATAAGTTCTGTATG | |
| | | | AGACCAC | |
| 41011 | 160 | H1 core + | ATATTTAGCATGTCGCTATGTGTTCTGGGAAATCACCATAAA | 92 |
| | | 7SK | CGTGAAATGTCTTTGGATTTGGGAATCTTATAAGTTCTGTAT | |
| | | hybrid 1 | GAGACCAC | |
| 41012 | 161 | H1 core + | ATATTTGCATGTCTGCAAGGCATTCTGGATAGTCACCATAAA | 92 |
| | | 7SK | CGTGAAATGTCTTTGGATTTGGGAATCTTATAAGTTCTGTAT | |
| | | hybrid 2 | GAGACCAC | |
| 41013 | 162 | H1 core + | ATATTTGCATGTCGCTATGTGTTCTGGGAAATTGACCTAAGT | 91 |
| | | 7SK | GTAAAGTGTCTTTGGATTTGGGAATCTTATAAGTTCTGTATG | |
| | | hybrid 3 | AGACCAC | |
| 41014 | 163 | H1 core + | ATATTTAGCATTCTGCAAGGCATTCTGGATAGTGACCTAAGT | 91 |
| | | 7SK | GTAAAGTGTCTTTGGATTTGGGAATCTTATATATTCTGTATG | |
| | | hybrid 4 | AGACCAC | |
| 41015 | 164 | H1 core + | ATATTTAGCATTCTGCAAGGCATTCTGGATAGTCACCATAAA | 92 |
| | | 7SK | CGTGAAATGTCTTTGGATTTGGGAATCTTATAAGTTCTGTAT | |
| | | hybrid 5 | GAGACCAC | |
| 41016 | 165 | H1 core + | ATATTTGCATGTCGCTATGTGTTCTGGGAAACTTGACCTAAG | 91 |
| | | 7SK | TGTAAAGTTGAGATTTCCTTCAGGTTTTATAAGTTCTGTATG | |
| | | hybrid 6 | AGACCAC | |
| 41017 | 166 | H1 core + | ATATTTGCATGTCGCTATGTGTTCTGGGAAATCACCATAAAC | 91 |
| | | 7SK | GTGAAATTTGAGATTTCCTTCAGGTTTTATAAGTTCTGTATG | |
| | | hybrid 7 | AGACCAC | |
| 41018 | 167 | H1 core + | ATATTTGCATGTCGCTATGTGTTCTGGGAAACTTGACCTAAG | 91 |
| | | 7SK | TGTAAAGTTGAGATTTCCTTCAGGTTTATATAGTTCTGTATG | |
| | | hybrid 8 | AGACCAC | |
| 41019 | 168 | H1 core + | ATATTTAGCATGTCGCTATGTGTTCTGGGAAACTTGACCTAA | 92 |
| | | 7SK | GTGTAAAGTTGAGATTTCCTTCAGGTTTATATAGTTCTGTAT | |
| | | hybrid 9 | GAGACCAC | |
| 41020 | 169 | H1 core + | ATATTTGCATGATTTCCCATGATTCCTTCATTCACCATAAAC | 91 |
| | | U6 | GTGAAATGTCTTTGGATTTGGGAATCTTATAAGTTCTGTATG | |
| | | hybrid 1 | AGACCAC | |
| 41021 | 170 | H1 core + | ATATTTGCATGTCGCTATGTGTTCTGGGAAATCTTACCGTAA | 94 |
| | | U6 | CTTGAAAGTAGTCTTTGGATTTGGGAATCTTATAAGTTCTGT | |
| | | hybrid 2 | ATGAGACCAC | |
| 41022 | 171 | H1 core + | ATATTTGCATATTTCCCATGATTCCTTCATCTTACCGTAACT | 92 |
| | | 7SK + U6 | TGAAAGTAGTCTTTGGATTTGGGAATCTTATATATTCTGTAT | |
| | | hybrid 1 | GAGACCAC | |
| 41023 | 172 | H1 core + | ATATTTGCATATTTCCCATGATTCCTTCATTCACCATAAACG | 90 |
| | | U6 | TGAAATGTCTTTGGATTTGGGAATCTTATAAGTTCTGTATGA | |
| | | hybrid 3 | GACCAC | |
| 41024 | 173 | H1 core + | ATATTTGCATGTCGCTATGTGTTCTGGGAAACTCTTACCGTA | 94 |
| | | 7SK + U6 | ACTTGAAAGTATGAGATTTCCTTCAGGTTTTATAAGTTCTGT | |
| | | hybrid 2 | ATGAGACCAC | |
| 41025 | 174 | H1 core + | ATATTTGCATGTCGCTATGTGTTCTGGGAAACTCTTACCGTA | 94 |
| | | 7SK + U6 | ACTTGAAAGTATGAGATTTCCTTCAGGTTTATATAGTTCTGT | |
| | | hybrid 3 | ATGAGACCAC | |
| 41026 | | hU6 | GCCACCTCTTTTGCATATTGGCACCCACAATCCACCGCGGCT | 247 |
| | | isoform 2 | ATGAGGCCAGTATAAGGCGGTAAAATTACGATAAGATATGGG | |
| | | | ATTTTACGTGATCGAAGACATCAAAGTAAGCGTAAGCACGAA | |
| | | | AGTTGTTCTGCAACATACCACTGTAGGAAATTATGCTAAATA | |
| | | | TGAAACCGACCATAAGTTATCCTAACCAAAAGATGATTTGAT | |
| | | | TGAAGGGCTTAAAATAGGTGTGACAGTAACCCTTGAGTC | |
| 41027 | | hU6 | TCCCTTACCCAGGGTGCCCCGGGCGCTCATTTGCATGTCCCA | 249 |
| | | isoform 3 | CCCAACAGGTAAACCTGACAGATCGGTCGCGGCCAGGTACGG | |
| | | | CCTGGCGGTCAGAGCACCAAACTTACGAGCCTTGTGATGAGT | |
| | | | TCCGTTACATGAAATTCTCCTAAAGGCTCCAAGATGGACAGG | |
| | | | AAAGCGCTCGATTCGGTTACCGTAAGGAAAACAAATGAGAAA | |
| | | | CTCCCGTGCCTTATAAGACCTGGGGACGGACTTATTTGC | |
| 41028 | | hU6 | CCCTTACCCAGGGTGCCCCGGGCGCTCATTTGCATGTCCCAC | 249 |
| | | isoform 4 | CCAACAGGTAAACCTGACAGGTCATCGCGGCCAGGTACGACC | |
| | | | TGGCGGTCAGAGCACCAAACATACGAGCCTTGTGATGAGTTC | |
| | | | CGTTGCATGAAATTCTCCCAAAGGCTCCAAGATGGACAGGAA | |
| | | | AGGGCGCGGTTCGGTCACCGTAAGTAGAATAGGTGAAAGACT | |
| | | | CCCGTGCCTTATAAGGCCTGTGGGTGACTTCTTCTCAAC | |
| 41029 | | hU6 | CAGGCTCTGCCCCGCCTCCGGGGCTATTTGCATACGACCATT | 249 |
| | | isoform 5 | TCCAGTAATTCCCAGCAGCCACCGTAGCTATATTTGGTAGAA | |
| | | | CAACGAGCACTTTCTCAACTCCAGTCAATAACTACGTTAGTT | |
| | | | GCATTACACATTGGGCTAATATAAATAGAGGTTAAATCTCTA | |
| | | | GGTCATTTAAGAGAAGTCGGCCTATGTGTACAGACATTTGTT | |
| | | | CCAGGGGCTTTAAATAGCTGGTGGTGGAACTCAATATTC | |

[0759] The results portrayed in FIG. 13 demonstrate that three distinct RNA promoters with protein 491, scaffold variant 174 and spacer 12.7, when delivered by nucleofection of AAV transgene plasmid, edit the target stop cassette in mNPCs at doses of 250 ng and 125 ng. Constructs 3 and 32 have similar activity, editing at the target locus with 42% efficiency. Construct 33 shows ˜56% of the activity of constructs 3 and 32.

[0760] The results portrayed in FIG. 14 demonstrate that the same three distinct promoters with protein 491, scaffold variant 174 and spacer 12.7 when delivered as AAV edit the target stop cassette in mNPCs. AAV.3, AAV.32, AAV.33 were generated with transgene constructs 3, 32 and 33 respectively. Each vector displayed dose-dependent editing at the target locus (FIG. 14, left panel). At an MOI of 3e5, AAV.32 and AAV.33 had 50-60% of the potency of AAV.3 (FIG. 14, right panel).

[0761] The results of FIG. 15 demonstrate that constructs having one of four different truncations of the U6 promoter with protein 491, scaffold variant 174 and spacer 12.7, when delivered by nucleofection of AAV transgene plasmid, were each able to edit the target stop cassette at differential levels in mNPCs at doses of 250 ng and 125 ng. Construct 85 had 33% of the potency of the base construct 53 while constructs 86, 87 and 88 didn't show any editing with, and were comparable to, a non-targeting control.

[0762] FIG. 16 presents results of an experiment comparing editing in mNPCs between base construct 53 to construct 85, when delivered as AAV. AAV.85 was able to edit at 7% compared to 15% for AAV.53 at an MOI of 3e5, consistent with the results from FIG. 15.

[0763] The results of FIG. 17 demonstrate that that constructs with engineered U6 promoters designed to minimize the size of the promoter relative to the base U6 of construct 53, with encoded CasX protein 491, scaffold variant 174 and spacer 12.7, when delivered by nucleofection of AAV transgene plasmid, were able to edit the target stop cassette at differential levels in mNPCs at doses of 250 ng and 125 ng. One cluster of constructs (89, 90, 92, 93, 96, 97, 98, and 99) all edited in the range of 15-20%, compared to 55% for construct 53. Other Pol II variants (construct 94, 95 and 100) all exhibited higher levels of editing at around 32% editing while construct 101 resulted in 48% editing. These promoters are all smaller than the Pol III promoter in the base construct 53, as shown in the scatterplot of FIG. 18, depicting transgene size of all AAV variants tested having engineered U6 RNA promoters on the X-axis vs. percent of mNPCs edited on the Y-axis.

[0764] The results of FIG. 19 show that constructs with engineered U6 promoters with protein 491, scaffold variant 174 and spacer 12.7, when delivered as AAV, were able to edit the target stop cassette in mNPCs in a dose-dependent fashion. Variable rates of editing with AAV with constructs AAV.94, AAV.95, AAV.100, and AAV.101 were seen, all editing at rates between the base construct AAV.53 and AAV.89, which has the same Pol III promoter as AAV.85 from FIGS. 15 and 16.

[0765] The results of FIG. 20 show that constructs with engineered U6 promoters with CasX protein 491, scaffold variant 174 and spacer 12.7, when delivered as AAV, were able to edit the target stop cassette in mNPCs. Variable rates of editing with AAV with constructs AAV.94, AAV.95, AAV.100, and AAV.101 were seen, all editing at rates between the base construct AAV.53 and AAV.89, which has the same Pol III promoter as AAV.85 from FIGS. 15 and 16. FIG. 21 shows the results as a scatterplot of editing versus transgene size.

[0766] The results depicted in FIG. 64 demonstrate that constructs of rationally engineered Pol III promoters, with sequences encoding for CasX protein 491, scaffold variant 174, and spacer 12.7, were able to edit the target tdTomato stop cassette at varying efficiencies when nucleofected as AAV transgene plasmids into mouse NPCs at doses 250 ng and 125 ng. Constructs 159 to 174 were designed to minimize the size of the promoter relative to the base U6 (construct ID 157) or H1 (construct ID 158) promoter, and constructs 160 to 174 were engineered as short, hybrid variants based on a core region of the H1 promoter (construct 159) with variations of domain swaps from 7SK and/or U6 promoters. FIG. 64 shows that most of these promoter variants, which are substantially shorter than the base U6 and H1 promoters, were able to function as Pol III promoters to drive sufficient gRNA transcription and editing at the tdTomato locus. Specifically, constructs 159, 161, 162, 165, and 167 were able to achieve at least 30% editing at the higher dose of 250 ng. These variants serve as promoter alternatives in AAV construct design that would permit significant reductions in AAV cargo capacity while driving adequate gRNA expression for targeted editing.

[0767] The results of the experiments demonstrate that expression of small CRISPR system (such as CasX and guides) can be modulated in a selective way by utilizing alternative RNA promoters. While most other CRISPR systems do not have sufficient space to include a separate promoter to express the guide RNA, the CRISPR system described herein enables the use of several possible gRNA promoters of varying lengths in the transgene to differentially control expression and editing. The data also support that shorter versions of Pol III promoters can be engineered that retain the ability to facilitate transcription of functional guides. This quality is an important feature of the AAV system described herein in order to save transgene space for additional engineering or inclusion of additional promoters and/or accessory elements. Furthermore, adjusting other elements in our system allows for the combination of multiple gRNA promoters, including ones with varying potencies.

### Example 6: Small CRISPR Protein Potency is Enhanced by the Choice of Poly(A) in AAV Vectors

[0768] Experiments were conducted to demonstrate that small CRISPR proteins (such as CasX) can be expressed in an AAV genome utilizing a variety of polyadenylation (poly(A)) signals. Specifically, smaller CRISPR systems enable the inclusion of larger poly(A) signals. In addition, experiments were conducted to demonstrate that the inclusion of shorter synthetic poly(A) signals in the constructs allows for further reductions in AAV transgene cargo capacity.

### Materials and Methods:

### Cloning and QC:

[0769] Poly(A) signals within the AAV genome were separated by restriction enzyme sites to allow for modular cloning. Parts were ordered as gene fragments from Twist, PCR amplified, digested with corresponding restriction enzymes, cleaned, then ligated into a vector also digested with the same enzymes.

[0770] The methods of Example 1 were used for cloning and quality control of the constructs, as well as for plasmid nucleofection and FACS analyses. The sequences of the poly(A) sequences are presented in Table 10. The sequences of the additional components of the AAV constructs, with the exception of sequences encoding the CasX (Table 21) and the one or more gRNA (Tables 18 and 19), are listed in Table 26.

TABLE 10
Poly(A) sequences

| SEQ | | | | |
|---|---|---|---|---|
| ID | Construct | | | Size |
| NO: | ID | Poly(A) | Sequence | (bp) |
| 40421 | 1, 3, 37 | bGH | CTGTGCCTTCTAGTTGCCAGCCATCTGTTGTTTGCCCCTCCCC | 208 |
| | | | CGTGCCTTCCTTGACCCTGGAAGGTGCCACTCCCACTGTCCTT | |
| | | | TCCTAATAAAATGAGGAAATTGCATCGCATTGTCTGAGTAGG | |
| | | | TGTCATTCTATTCTGGGGGGTGGGGTGGGGCAGGACAGCAAG | |
| | | | GGGGAGGATTGGGAAGAGAATAGCAGGCATGCTGGGGA | |
| 40422 | 24 | hGH | GGGTGGCATCCCTGTGACCCCTCCCCAGTGCCTCTCCTGGCCC | 623 |
| | | | TGGAAGTTGCCACTCCAGTGCCCACCAGCCTTGTCCTAATAA | |
| | | | AATTAAGTTGCATCATTTTGTCTGACTAGGTGTCCTTCTATAA | |
| | | | TATTATGGGGTGGAGGGGGGTGGTATGGAGCAAGGGGCAAG | |
| | | | TTGGGAAGACAACCTGTAGGGCCTGCGGGGTCTATTGGGAAC | |
| | | | CAAGCTGGAGTGCAGTGGCACAATCTTGGCTCACTGCAATCT | |
| | | | CCGCCTCCTGGGTTCAAGCGATTCTCCTGCCTCAGCCTCCCGA | |
| | | | GTTGTTGGGATTCCAGGCATGCATGACCAGGCTCAGCTAATT | |
| | | | TTTGTTTTTTTGGTAGAGACGGGGTTTCACCATATTGGCCAGG | |
| | | | CTGGTCTCCAACTCCTAATCTCAGGTGATCTACCCACCTTGGC | |
| | | | CTCCCAAATTGCTGGGATTACAGGCGTGAACCACTGCTCCCTT | |
| | | | CCCTGTCCTTCTGATTTTAAAATAACTATACCAGCAGGAGGA | |
| | | | CGTCCAGACACAGCATAGGCTACCTGGCCATGCCCAACCGGT | |
| | | | GGGACATTTGAGTTGCTTGCTTGGCACTGTCCTCTCATGCGTT | |
| | | | GGGTCCACTCAGTAGATGCCTGTTGAATT | |
| 40423 | 25 | hGH | GGGTGGCATCCCTGTGACCCCTCCCCAGTGCCTCTCCTGGCCC | 477 |
| | | short | TGGAAGTTGCCACTCCAGTGCCCACCAGCCTTGTCCTAATAA | |
| | | | AATTAAGTTGCATCATTTTGTCTGACTAGGTGTCCTTCTATAA | |
| | | | TATTATGGGGTGGAGGGGGGTGGTATGGAGCAAGGGGCAAG | |
| | | | TTGGGAAGACAACCTGTAGGGCCTGCGGGGTCTATTGGGAAC | |
| | | | CAAGCTGGAGTGCAGTGGCACAATCTTGGCTCACTGCAATCT | |
| | | | CCGCCTCCTGGGTTCAAGCGATTCTCCTGCCTCAGCCTCCCGA | |
| | | | GTTGTTGGGATTCCAGGCATGCATGACCAGGCTCAGCTAATT | |
| | | | TTTGTTTTTTTGGTAGAGACGGGGTTTCACCATATTGGCCAGG | |
| | | | CTGGTCTCCAACTCCTAATCTCAGGTGATCTACCCACCTTGGC | |
| | | | CTCCCAAATTGCTGGGATTACAGGCGTGAACCACTGCTCCCTT | |
| | | | CCCTGTCCTT | |
| 40424 | 26 | HSVTK | CGGCAATAAAAAGACAGAATAAAACGCACGGGTGTTGGGTC | 49 |
| | | | GTTTGTTC | |
| 40425 | 27 | SynPolyA | AATAAAAGATCTTTATTTTCATTAGATCTGTGTGTTGGTTTTTT | 49 |
| | | | GTGTG | |
| 40426 | 28 | SV40 | AACTTGTTTATTGCAGCTTATAATGGTTACAAATAAAGCAAT | 122 |
| | | | AGCATCACAAATTTCACAAATAAAGCATTTTTTTCACTGCATT | |
| | | | CTAGTTGTGGTTTGTCCAAACTCATCAATGTATCTTA | |
| 40427 | 29 | SV40 | AACTTGTTTATTGCAGCTTATAATGGTTACAAATAAAGCAAT | 82 |
| | | short | AGCATCACAAATTTCACAAATAAAGCATTTTTTTCACTGC | |
| 40428 | 30 | bglob | GCTCGCTTTCTTGCTGTCCAATTTCTATTAAAGGTTCCTTTGTT | 395 |
| | | | CCCTAAGTCCAACTACTAAACTGGGGGATATTATGAAGGGCC | |
| | | | TTGAGCATCTGGATTCTGCCTAATAAAAAACATTTATTTTCAT | |
| | | | TGCAATGATGTATTTAAATTATTTCTGAATATTTTACTAAAAA | |
| | | | GGGAATGTGGGAGGTCAGTGCATTTAAAACATAAAGAAATG | |
| | | | AAGAGCTAGTTCAAACCTTGGGAAAATACACTATATCTTAAA | |
| | | | CTCCATGAAAGAAGGTGAGGCTGCAAACAGCTAATGCACATT | |
| | | | GGCAACAGCCCCTGATGCCTATGCCTTATTCATCCCTCAGAA | |
| | | | AAGGATTCAAGTAGAGGCTTGATTTGGAGGTTAAAGTTTTGC | |
| | | | TATGCTGTATTTTA | |
| 40429 | 31 | bglobsh | AATAAAGGAAATTTATTTTCATTGCAATAGTGTGTTGGAATTT | 56 |
| | | ort | TTTGTGTCTCTCA | |
| 40430 | 34 | SV40po | TATTTGTGAAATTTGTGATGCTATTGCTTTATTTGTAACCATCT | 181 |
| | | lyA late | AGCTTTATTTGTGAAATTTGTGATGCTATTGCTTTATTTGTAA | |
| | | | CCATTATAAGCTGCAATAAACAAGTTAACAACAACAATTGCA | |
| | | | TTCATTTTATGTTTCAGGTTCAGGGGGAGATGTGGGAGGTTTT | |
| | | | TTAAAGCGG | |

[0771] Methods for plasmid nucleofection and assessing activity by FACS were conducted as described in Example 1.

### Results:

[0772] The results portrayed in FIG. 22 demonstrate that constructs with several alternative poly(A) signals with CasX variant 491, scaffold variant 174 and spacer 12.7, when delivered by nucleofection of AAV transgene plasmid, were able to edit the target stop cassette in mNPCs at doses of 250 ng and 125 ng. Construct 3 showed the highest potency out of the three constructs tested in this experiment, editing the target locus at 60% efficiency (250 ng dose). Constructs 28 and 29, which have poly(A) sequences that are 59% and 39% of the size of the poly(A) sequence of construct 3, respectively (see Table 11), edited at 21% and 24% respectively (250 ng dose).

TABLE 11
Poly(A) construct variants

| Construct ID | Poly(A) Signal Size (bp) | AAV Transgene Size (bp) |
|---|---|---|
| 3 | 208 | 4550 |
| 25 | 477 | 4795 |
| 26 | 49 | 4367 |
| 27 | 49 | 4367 |
| 28 | 122 | 4440 |
| 29 | 82 | 4400 |
| 30 | 395 | 4713 |
| 31 | 56 | 4374 |
| 34 | 186 | 4565 |
| 37 | 208 | 4619 |

[0773] The results portrayed in FIG. 23 demonstrate that the two different poly(A) signals with protein 491, scaffold variant 174 and spacer 12.7, when delivered as an AAV vector, were able to edit the target stop cassette in mNPCs. AAV.34 and AAV.37 were generated with transgene constructs 34 (with a poly(A) of 186 nucleotides and a total transgene length of 4565 nucleotides) and 37 (with a poly(A) of 208 nucleotides and a total transgene length of 4619 nucleotides), respectively. Each vector displayed dose-dependent editing at the target locus, and AAV.34, which contains a shorter poly(A) signal, had approximately 75% of the editing potency of AAV.37 for both doses.

[0774] Under the conditions of the experiments, the results demonstrate that the expression of small CRISPR proteins (such as CasX) can be modulated by poly(A) signals of varying lengths. Longer poly(A) sequences can be utilized in the AAV constructs for enhanced CasX activity, while shorter poly(A) sequences can be utilized in the AAV constructs to make more sequence space available for the inclusion of additional accessory elements within the AAV transgene.

### Example 7: Small CRISPR Protein Potency is Modulated by the Position of the Regulatory Elements in the AAV Vector

[0775] Orientation (forward or reverse) and position (upstream or downstream of CRISPR gene) of regulatory elements such as the gRNA promoter and guide scaffold complex can modulate underlying expression of small CRISPR protein and overall editing efficiency of CRISPR systems in AAV vectors. The goal of these experiments was to assess the best orientation and position of regulatory elements within the AAV genome to enhance the potency of small CRISPR proteins and guide RNA.

### Materials and Methods:

[0776] AAV vector production and QC, nucleofection, AAV viral production and editing level assessment in mNPTC-tdT cells by FACS were conducted as described in Example 1.

### Results:

[0777] Construct 44 (configuration shown in FIG. 24, second from top) contains a Pol III promoter driving expression of guide scaffold 174 and spacer 12.7 in the reverse orientation of construct 3 (top configuration in FIG. 15). FIG. 25 demonstrates that construct 44, when delivered by nucleofection of an AAV transgene plasmid, modifies the target stop cassette in mNPCs similarly to construct 3 at in a dose-dependent manner.

[0778] FIG. 26 shows that construct 44, delivered as an AAV vector, edits the target stop cassette in mNPCs, further supporting the utility of this construct. AAV.3 and AAV.44 were generated with transgene constructs 3 and 44, respectively. Each vector displayed dose-dependent editing at the target locus (FIG. 26, left panel, in which the vector was assayed using 3-fold dilutions). FIG. 26, right panel, shows editing results at an MOI of 3×10⁵, in which AAV.44 had 60% of the editing potency of the original configuration of vector AAV.3.

[0779] This experiment demonstrates that the orientation of parts within the AAV genome can be varied, yet result in sufficient expression of the CRISPR proteins and the guide RNA. This shows that specific orientations or positions of the regulatory elements relative to the encoded protein or RNA components may allow controlled modulation of expression in CasX-packaging AAV constructs that contain one or multiple guides.

### Example 8: Small CRISPR Protein Potency is Enhanced by Inclusion of Additional Regulatory Elements in the AAV Vector that are not Possible with a Larger Protein

[0780] The purpose these experiments was to demonstrate that transcriptional levels mediated by AAV vectors delivering small CRISPR proteins (such as CasX) can be enhanced by inclusion of different regulatory elements (intronic sequences, enhancers, etc.) that conventionally do not fit in AAV vectors expressing large transgene (e.g., spCas9) plasmids.

### Materials and Methods:

[0781] Cloning and QC: A 4-part Golden Gate Assembly consisting of a pre-digested AAV backbone, small CRISPR protein-encoding DNA, and flanking 5′ and 3′ DNA sequences was used to generate AAV-cis plasmid as described in Example 1. 5′ sequences contain enhancer, protein promoter and N-terminal NLS, while 3′ sequences contain C-terminal NLS, WPRE, poly(A) signal, RNA promoter and guide RNA containing spacer 12.7. 5′ and 3′ parts were ordered as gene fragments from Twist, PCR-amplified, and assembled and assembled into AAV vectors. Cloning and plasmid QC, nucleofection, and FACS methods were conducted as described in Example 1.

[0782] Enhancement in editing by the inclusion of post-translation regulatory element (PTRE) 1, 2, 3 in the AAV cis plasmid 3 was tested in combination of different promoters driving expression of CasX. A first set of promoters were tested; transgene plasmids 4, 35, 36 37, transgene plasmid 5, 38, 39, 40 and transgene plasmids 6, 42, 43 have the CasX protein expression driven by the CMV, UbC, EFS, CMV-s promoters, respectively. A second set of constructs tested included PTREs between the protein and poly(A) sequences and were generated with the promoter Jet, JetUsp compared to UbC promoter (transgene 58, 72, 73, 74; transgene 59, 75, 76, 77 and transgene 53, 80 and 81 respectively) driving expression of CasX. The sequences of the PTRE are listed in Table 12, and enhancer plus promoter sequences are listed in Table 13. The sequences of the additional components of the AAV constructs, with the exception of sequences encoding the CasX (Table 21) and the one or more gRNA (Tables 18 and 19), are listed in Table 26.

TABLE 12
Constructs and sequences of post-transcription elements tested on base
construct ID 4, 5, 6, 53, 58, and 59

| SEQ ID | Construct | | | Size |
|---|---|---|---|---|
| NO: | ID | PTRE | SEQUENCE | (bp) |
| 40431 | 35, 38, | 1 | AATCAACCTCTGGATTACAAAATTTGTGAAA | 598 |
| | 72, 75 | | GATTGACTGGTATTCTTAACTATGTTGCTCCT | |
| | | | TTTACGCTATGTGGATACGCTGCTTTAATGCC | |
| | | | TTTGTATCATGCTATTGCTTCCCGTATGGCTT | |
| | | | TCATTTTCTCCTCCTTGTATAAATCCTGGTTG | |
| | | | CTGTCTCTTTATGAGGAGTTGTGGCCCGTTGT | |
| | | | CAGGCAACGTGGCGTGGTGTGCACTGTGTTT | |
| | | | GCTGACGCAACCCCCACTGGTTGGGGCATTG | |
| | | | CCACCACCTGTCAGCTCCTTTCCGGGACTTTC | |
| | | | GCTTTCCCCCTCCCTATTGCCACGGCGGAACT | |
| | | | CATCGCCGCCTGCCTTGCCCGCTGCTGGACA | |
| | | | GGGGCTCGGCTGTTGGGCACTGACAATTCCG | |
| | | | TGGTGTTGTCGGGGAAGCTGACGTCCTTTCC | |
| | | | ATGGCTGCTCGCCTGTGTTGCCACCTGGATTC | |
| | | | TGCGCGGGACGTCCTTCTGCTACGTCCCTTCG | |
| | | | GCCCTCAATCCAGCGGACCTTCCTTCCCGCG | |
| | | | GCCTGCTGCCGGCTCTGCGGCCTCTTCCGCGT | |
| | | | CTTCGCCTTCGCCCTCAGACGAGTCGGATCTC | |
| | | | CCTTTGGGCCGCCTCCCCGCCTG | |
| 40432 | 36, 39, | 2 | ATCGATAATCAACCTCTGGATTACAAAATTT | 593 |
| | 42, 73, 76, | | GTGAAAGATTGACTGGTATTCTTAACTATGTT | |
| | 80 | | GCTCCTTTTACGCTATGTGGATACGCTGCTTT | |
| | | | AATGCCTTTGTATCATGCTATTGCTTCCCGTA | |
| | | | TGGCTTTCATTTTCTCCTCCTTGTATAAATCCT | |
| | | | GGTTGCTGTCTCTTTATGAGGAGTTGTGGCCC | |
| | | | GTTGTCAGGCAACGTGGCGTGGTGTGCACTG | |
| | | | TGTTTGCTGACGCAACCCCCACTGGTTGGGG | |
| | | | CATTGCCACCACCTGTCAGCTCCTTTCCGGGA | |
| | | | CTTTCGCTTTCCCCCTCCCTATTGCCACGGCG | |
| | | | GAACTCATCGCCGCCTGCCTTGCCCGCTGCTG | |
| | | | GACAGGGGCTCGGCTGTTGGGCACTGACAAT | |
| | | | TCCGTGGTGTTGTCGGGGAAATCATCGTCCTT | |
| | | | TCCTTGGCTGCTCGCCTGTGTTGCCACCTGGA | |
| | | | TTCTGCGCGGGACGTCCTTCTGCTACGTCCCT | |
| | | | TCGGCCCTCAATCCAGCGGACCTTCCTTCCCG | |
| | | | CGGCCTGCTGCCGGCTCTGCGGCCTCTTCCGC | |
| | | | GTCTTCGCCTTCGCCCTCAGACGAGTCGGATC | |
| | | | TCCCTTTGGGCCGCCTCCCC | |
| 40433 | 37, 40, | 3 | GATAATCAACCTCTGGATTACAAAATTTGTG | 247 |
| | 43, 74, | | AAAGATTGACTGGTATTCTTAACTATGTTGCT | |
| | 77, 81 | | CCTTTTACGCTATGTGGATACGCTGCTTTAAT | |
| | | | GCCTTTGTATCATGCTATTGCTTCCCGTATGG | |
| | | | CTTTCATTTTCTCCTCCTTGTATAAATCCTGGT | |
| | | | TAGTTCTTGCCACGGCGGAACTCATCGCCGC | |
| | | | CTGCCTTGCCCGCTGCTGGACAGGGGCTCGG | |
| | | | CTGTTGGGCACTGACAATTCCGTGG | |

TABLE 13
Enhancer elements and sequences tested in combination with the CMV core promoter

| SEQ ID | | | Core | | Size |
|---|---|---|---|---|---|
| NO: | ID | Enhancer | promoter | Sequence | (bp) |
| 40434 | 3 | CMV | CMV | GACATTGATTATTGACTAGTTATTAATAGTA | 584 |
| | | | | ATCAATTACGGGGTCATTAGTTCATAGCCCA | |
| | | | | TATATGGAGTTCCGCGTTACATAACTTACGG | |
| | | | | TAAATGGCCCGCCTGGCTGACCGCCCAACG | |
| | | | | ACCCCCGCCCATTGACGTCAATAATGACGTA | |
| | | | | TGTTCCCATAGTAACGCCAATAGGGACTTTC | |
| | | | | CATTGACGTCAATGGGTGGAGTATTTACGGT | |
| | | | | AAACTGCCCACTTGGCAGTACATCAAGTGTA | |
| | | | | TCATATGCCAAGTACGCCCCCTATTGACGTC | |
| | | | | AATGACGGTAAATGGCCCGCCTGGCATTAT | |
| | | | | GCCCAGTACATGACCTTATGGGACTTTCCTA | |
| | | | | CTTGGCAGTACATCTACGTATTAGTCATCGC | |
| | | | | TATTACCATGGTGATGCGGTTTTGGCAGTAC | |
| | | | | ATCAATGGGCGTGGATAGCGGTTTGACTCAC | |
| | | | | GGGGATTTCCAAGTCTCCACCCCATTGACGT | |
| | | | | CAATGGGAGTTTGTTTTGGCACCAAAATCAA | |
| | | | | CGGGACTTTCCAAAATGTCGTAACAACTCCG | |
| | | | | CCCCATTGACGCAAATGGGCGGTAGGCGTG | |
| | | | | TACGGTGGGAGGTCTATATAAGCAGAGCT | |
| 40435 | 64 | N/A | CMV | GTGATGCGGTTTTGGCAGTACATCAATGGGC | 204 |
| | | | | GTGGATAGCGGTTTGACTCACGGGGATTTCC | |
| | | | | AAGTCTCCACCCCATTGACGTCAATGGGAGT | |
| | | | | TTGTTTTGGCACCAAAATCAACGGGACTTTC | |
| | | | | CAAAATGTCGTAACAACTCCGCCCCATTGAC | |
| | | | | GCAAATGGGCGGTAGGCGTGTACGGTGGGA | |
| | | | | GGTCTATATAAGCAGAGCT | |
| 40436 | 65 | Syn 1 | CMV | AAGATGCGTCAATTAATTTGCGTCAATTTGC | 414 |
| | | | | GCTCAATTTGCGTCAATCTTGCTGTCATTTG | |
| | | | | CGTCAATTTGCGTCAATATGCGTCAATATAT | |
| | | | | GCGTCAATTCGAATTCGCACTAATGATGACT | |
| | | | | AATGGTGGCTAATGGTGACTAATGGTGACA | |
| | | | | ATGCGTGACTAATGGTGATAATGAGTGCAT | |
| | | | | ATGGTGACTAATGGTGACTAATGGTGGTGAT | |
| | | | | GCGGTTTTGGCAGTACATCAATGGGCGTGG | |
| | | | | ATAGCGGTTTGACTCACGGGGATTTCCAAGT | |
| | | | | CTCCACCCCATTGACGTCAATGGGAGTTTGT | |
| | | | | TTTGGCACCAAAATCAACGGGACTTTCCAAA | |
| | | | | ATGTCGTAACAACTCCGCCCCATTGACGCAA | |
| | | | | ATGGGCGGTAGGCGTGTACGGTGGGAGGTC | |
| | | | | TATATAAGCAGAGCT | |
| 40437 | 66 | NPC5 | CMV | TGGGACAGAAAACGAGAAACCAGGGTTGTC | 314 |
| | | | | AGCGGGGCCCGCGCCGGCCGCCCCTTGGCC | |
| | | | | CGCGGGATACCCCGGGCGCCCAGTGCCCAG | |
| | | | | GCCGGGCAGGCGGCACTCACGTGATGCGGT | |
| | | | | TTTGGCAGTACATCAATGGGCGTGGATAGC | |
| | | | | GGTTTGACTCACGGGGATTTCCAAGTCTCCA | |
| | | | | CCCCATTGACGTCAATGGGAGTTTGTTTTGG | |
| | | | | CACCAAAATCAACGGGACTTTCCAAAATGT | |
| | | | | CGTAACAACTCCGCCCCATTGACGCAAATG | |
| | | | | GGCGGTAGGCGTGTACGGTGGGAGGTCTAT | |
| | | | | ATAAGCAGAGCT | |
| 40438 | 67 | NPC7 | CMV | CGGAAGCGAGGGTGTCGCTCGCCCCCGGGC | 324 |
| | | | | CCGGGTCCGCCCCGCTCCGAGGCCTGCTCGG | |
| | | | | AAGAAAGACCTCGGTGCGCAGTTCTCGTCG | |
| | | | | CGCTCCCACACCTGGTCCGCCCAGTCGGAGT | |
| | | | | GATGCGGTTTTGGCAGTACATCAATGGGCGT | |
| | | | | GGATAGCGGTTTGACTCACGGGGATTTCCAA | |
| | | | | GTCTCCACCCCATTGACGTCAATGGGAGTTT | |
| | | | | GTTTTGGCACCAAAATCAACGGGACTTTCCA | |
| | | | | AAATGTCGTAACAACTCCGCCCCATTGACGC | |
| | | | | AAATGGGCGGTAGGCGTGTACGGTGGGAGG | |
| | | | | TCTATATAAGCAGAGCT | |
| 40439 | 68 | NPC127 | CMV | GTGATGCGGTTTTGGCAGTACATCAATGGGC | 304 |
| | | | | GTGGATAGGCGGGCCGGGAGCGAGGGAGGC | |
| | | | | GGCGCCGGGGGACGCGCCGGGCTCGGCCTG | |
| | | | | GCGACCGTTGCCCGCTCGCGTCCATCCATCC | |
| | | | | ATTCATTCGGGCGGCAGCGGTTTGACTCACG | |
| | | | | GGGATTTCCAAGTCTCCACCCCATTGACGTC | |
| | | | | AATGGGAGTTTGTTTTGGCACCAAAATCAAC | |
| | | | | GGGACTTTCCAAAATGTCGTAACAACTCCGC | |
| | | | | CCCATTGACGCAAATGGGCGGTAGGCGTGT | |
| | | | | ACGGTGGGAGGTCTATATAAGCAGAGCT | |
| 40440 | 69 | NPC190 | CMV | AGGCGGGCCGGGAGCGAGGGAGGCGGCGC | 364 |
| | | | | CGGGGGACGCGCCGGGCTCGGCCTGGCGAC | |
| | | | | CGTTGCCCGCTCGCGTCCATCCATCCATTCA | |
| | | | | TTCGGGCGGCGTGATGCGGTTTTGGCAGTAC | |
| | | | | ATCAATGGGCGTGGATAGCGGTTTGACTCAC | |
| | | | | GGGGATTTCCAAGTCTCCACCCCATTGACGT | |
| | | | | CAATGGGAGTTTGTTTTGGCACCAAAATCAA | |
| | | | | CGGGACTTTCCAAAATGTCGTAACAACTCCG | |
| | | | | CCCCATTGACGCAAATGGGCGGTAGGCGTG | |
| | | | | TACGGTGGGAGGTCTATATAAGCAGAGCT | |
| 40441 | 70 | NPC249 | CMV | CCTTCCCCTCCAGTGCTCCTCGGAGCCCTTC | 274 |
| | | | | CCTATACTTCCTCCAAGCTCCACCCTCGATC | |
| | | | | AGCCCTGCGTGATGCGGTTTTGGCAGTACAT | |
| | | | | CAATGGGCGTGGATAGCGGTTTGACTCACG | |
| | | | | GGGATTTCCAAGTCTCCACCCCATTGACGTC | |
| | | | | AATGGGAGTTTGTTTTGGCACCAAAATCAAC | |
| | | | | GGGACTTTCCAAAATGTCGTAACAACTCCGC | |
| | | | | CCCATTGACGCAAATGGGCGGTAGGCGTGT | |
| | | | | ACGGTGGGAGGTCTATATAAGCAGAGCT | |
| 40442 | 71 | NPC286 | CMV | AGAGGTGGTGGGGCTGAGCCGAGGTGGGGC | 354 |
| | | | | CGTGGCCAGGGGGAGGGGGTGCTAGGCCGG | |
| | | | | AAGGGGCTGCAGCCGAGGGTGGCCCTGATT | |
| | | | | TTGTGGCCGGCCAGGAGCGAAGGGGTCCCT | |
| | | | | TTCTGTCCCCTGAGCACCGTCGCCTCCTTTGT | |
| | | | | GATGCGGTTTTGGCAGTACATCAATGGGCGT | |
| | | | | GGATAGCGGTTTGACTCACGGGGATTTCCAA | |
| | | | | GTCTCCACCCCATTGACGTCAATGGGAGTTT | |
| | | | | GTTTTGGCACCAAAATCAACGGGACTTTCCA | |
| | | | | AAATGTCGTAACAACTCCGCCCCATTGACGC | |
| | | | | AAATGGGCGGTAGGCGTGTACGGTGGGAGG | |
| | | | | TCTATATAAGCAGAGCT | |

### Results:

[0783] The effects of PTREs on transgene expression were assessed by cloning 3 enhancer sequences (PTRE1, PTRE2, and PTR3) into an AAV-cis plasmid (construct 3) and construct plasmids containing shorter protein promoters (constructs 4, 5, 6, 53, 57 and 58 contain 400, 234, 335, 400, 164 and 326 bp promoter sequences, respectively).

[0784] AAV-cis plasmid activity was first confirmed by nucleofection in mNPC-tdt cells. For each vector, addition of PTRE enhanced editing activity at various levels (FIG. 27). Table 14 provides the lengths of promoter and PTREs. The addition of PTRE2 to the transgene cassette showed the highest CasX editing activity enhancement, with a 2-fold increase in editing levels for construct 36 compared to construct 4 (58.5% vs 25%), a 1.5-fold increase for construct 39 (35.4% vs 22.9%) compared to construct 5 and a 3-fold increase for construct 42 compared to construct 6 (30.5% vs 12%). The shortest enhancer sequence, PTRE3, also increased protein activity at various levels among construct 37 and 43 compared to other vectors.

[0785] Improvements in editing levels were also observed when constructs were packaged into AAV. Inclusion of PTRE2 in transgene increased editing across the AAV vectors in a similar manner. Trends in on-target editing observed in mNPCs with the AAV infection generally correlated with the AAV plasmid nucleofection data set (FIG. 28).

[0786] The trend was confirmed by testing another set of promoters with inclusion of these enhancer sequences. Across all AAV vectors tested, constructs including a PTRE1 and PTRE2 in genomes yielded an average 1.5-fold increase compared to base vectors (FIG. 29). Unique combinations of short promoter and these post-transcriptional sequences led to the identification of vectors with increased editing levels with shorter promoter (e.g., AAV.74), which represents an advantage both for AAV manufacturing being under the carrying capacity limit of AAV, and allows for inclusion of more regulatory elements and CRISPR elements (e.g., guides) (FIG. 30).

[0787] The results also demonstrate that inclusion of PTRE1 in the transgene plasmid improved editing levels across all promoters evaluated (FIG. 31), with less variability, while PTRE2 yielded the highest transgene improvement but with more variability across the promoters tested.

[0788] Several constructs with tissue-specific neuronal enhancers upstream of a single constitutive promoter were tested. In this assay, 7 neuronal enhancer sequences (constructs 65-72) were cloned into a single AAV-cis plasmid (64) harboring a core CMV promoter and all demonstrated improved editing via nucleofection over base construct 64 (FIG. 32). These constructs also outperformed construct 53, which contains a UbC promoter but did not outperform construct 3 which harbors the full CMV promoter (CMV enhancer+CMV core promoter).

TABLE 14
Constructs with or without PTREs and indicated sequence lengths
Construct
(Sequence length indicated below)

| | 3 | 4 | 35 | 36 | 37 | 5 | 38 | 39 | 40 | 6 | 42 | 43 |
|---|---|---|---|---|---|---|---|---|---|---|---|---|
| Promoter | 584 | 400 | | | | 234 | | | | 335 | | |
| Length | | | | | | | | | | | | |
| PTRE 1 | — | — | 592 | — | — | — | 592 | — | — | — | — | — |
| PTRE 2 | — | — | — | 593 | — | — | — | 593 | — | — | 593 | — |
| PTRE 3 | — | — | — | — | 247 | — | — | — | 247 | — | — | 247 |
| AAV | 4550 | 4349 | 4964 | 4965 | 4619 | 4183 | 4798 | 4799 | 4453 | 4284 | 4900 | 4554 |
| transgene | | | | | | | | | | | | |

[0789] The results demonstrate that use of small promoters in the AAV transgene constructs permits the inclusion of additional accessory elements. These additional accessory elements, such as post-transcriptional regulatory elements to AAV-transgenes expressing CasX under the control of short but strong promoter sequences enable increased CasX expression and on-target editing while reducing cargo size such that all components can be incorporated into a single AAV vector.

### Example 9: Small CRISPR Protein Potency is Enhanced by Inclusion and Combining Additional Regulatory Elements in the AAV Vector

[0790] The goal of these experiments was to demonstrate that CRISPR protein and gRNA complex-mediated editing can be enhanced in an all-in-one single AAV vector that can include more than one guide RNA. Furthermore, experiments were conducted to show that the inclusion and combination of many regulatory elements can enhance potency and that larger AAV genomes having more regulatory sequence yield greater editing activity. The length of accessory and regulatory sequence that is possible to include with the CasX system in an AAV transgene is beyond what is possible with traditionally used CRISPR proteins, which are limited by the length of the larger Cas proteins, such as Cas9.

### Materials and Methods:

[0791] Plasmid cloning, QC, and nucleofection were conducted as described in Example 1.

[0792] Orientations of multiple RNA transcriptional unit blocks (FIG. 35) referred as “guide RNA stacks” (each stack composed of a sgRNA scaffold-spacer 174.12.7, 1.74.12.2 or 174.NT driven by the U6 promoter) were investigated by cloning two guide RNA stacks in a tail to tail orientation (plasmid ID 45-49) on the 3′ end of the poly(A) or still in the same transcriptional orientation than the CasX protein/promoter, one on each side of the protein (plasmid ID=50-52). Pentagon shaped boxes for protein promoter and Pol III promoter depict orientation of transcription (tapered point; 5′ to 3′ or 3′ to 5′ orientation). Spacer sequences are 12.2 (TATAGCATACATTATACGAA SEQ ID NO: 40807)); 12.7 (CTGCATTCTAGTTGTGGTTT (SEQ ID NO: 40800)); and NT (GGGTCTTCGAGAAGACCC (SEQ ID NO: 40505)). AAV vector production and titering were conducted as described in Example 1. AAV transduction and editing assessment via FACs sorting were conducted as described in Example 1.

### Results:

[0793] FIG. 33 is a schematic of the architecture of the constructs, showing how the guide RNA components were combined in the various constructs (architecture 1 and architecture 2). FIG. 34 shows additional configurations. The results of the editing assay portrayed in FIG. 36 demonstrate that the constructs delivered as AAV transgene plasmids to mNPCs in architecture 1 edit with enhanced potency. Different combinations of spacers and non-targeting spacers demonstrate that each individual guide RNA is active, although, architectures with one targeting spacer and one non-targeting spacer (constructs 45 and 46) yielded approximately 18% lower editing levels. Certain combinations of targeting spacers yielded increased efficacy. Spacer 12.7 with the sequence of CTGCATTCTAGTTGTGGTTT (SEQ ID NO: 40800), in combination with spacer 12.2 (construct 48), with the sequence of TATAGCATACATTATACGAA (SEQ ID NO: 40807), edited with significant potency in guide RNA architecture 1, while two sets of 12.7 (construct 47) edited with 10% greater potency than the single guide architecture of construct 3. 125 and 62.5 ng of each CasX construct was nucleofected in mNPCs, and editing was assessed by FACS 5 days post-transfection. Data are presented as mean±SEM for n=3 replicates.

[0794] The results of FIG. 37 show that guide RNA stack architecture 2 (see FIG. 33) delivered as AAV transgene plasmid to mNPCs also edit the target nucleic acid. 125 and 62.5 ng of each CasX construct was nucleofected in mNPCs, and editing was assessed by FACS 5 days post-transfection. Data are presented as mean±SEM for n=3 replicates.

[0795] The results of FIG. 38 show that constructs 3, 45, 46, 47, and 48 delivered as AAVs in guide RNA architecture 1 edit the target stop cassette in mNPCs. AAV.3, AAV.45, AAV.46, AAV.47 and AAV.48 were generated with transgene constructs 3 and 45, 46, 47 and 48, respectively. Each vector displayed dose-dependent editing at the target locus (FIG. 38, left panel). At an MOI of 3e5, AAV.47 had <5% less potency than the original orientation vector AAV.3 (FIG. 38, right panel).

[0796] These experiments demonstrate the feasibility of the use of multiple guide RNAs in combination with the full Cas protein sequence in one AAV genome, which was previously un-achievable with the use of larger CRISPR proteins, such as Cas9, due to the packaging constraints of the AAV capsid. Furthermore, these experiments also show that multiple guide RNAs in an all-in-one vector also retain the ability to edit the target nucleic acid.

### Example 10: Small CRISPR Protein Potency is Enhanced by Nuclear Localization Sequence (NLS) Choice

[0797] Experiments were conducted to determine whether alteration of the nuclear localization sequence (NLS) utilized in constructs can modulate editing outcomes in the AAV setting. In the larger context of optimizing the AAV for editing with CasX proteins, this initial screen served as a first attempt to determine which NLS should be used in constructs moving forward.

### Materials and Methods.

[0798] Cloning and QC: AAV vectors were cloned using a 4-part Golden Gate Assembly consisting of a pre-digested AAV backbone, small CRISPR protein-encoding DNA, and flanking 5′ and 3′ DNA sequences. 5′ sequences contain enhancer, protein promoter and N-terminal NLS, while 3′ sequences contain C-terminal NLS, WPRE, poly(A) signal, RNA promoter and guide RNA containing spacer 12.7. 5′ and 3′ parts were ordered as gene fragments from Twist, PCR-amplified, and assembled into AAV vectors through cyclical Golden Gate reactions using T4 Ligase and BbsI. NLS sequences are presented in Tables 15 and 16.

[0799] Methods for the assembly and QC of AAV vectors and nucleofection were conducted as described in Example 1. The sequences of the additional components of the AAV constructs, with the exception of sequences encoding the CasX (Table 21) and the one or more gRNA (Tables 18 and 19), are listed in Table 26.

TABLE 15
5′ NLS sequences

| SEQ ID | | 5′ NLS |
|---|---|---|
| NO: | NLS Amino Acid Sequence* | ID |
| 40443 | PKKKRKVSR | 1 |
| 40444 | PKKKRKVGGSPKKKRKVGGSPKKKRKVGGSPKKKRKVSR | 2 |
| 40445 | PKKKRKVGGSPKKKRKVGGSPKKKRKVGGSPKKKRKVGGSPKKKRKV | 3 |
| | GGSPKKKRKVSR | |
| 40446 | PAAKRVKLDSR | 4 |
| 40447 | PAAKRVKLDGGSPAAKRVKLDSR | 5 |
| 40448 | PAAKRVKLDGGSPAAKRVKLDGGSPAAKRVKLDGGSPAAKRVKLDSR | 6 |
| 40449 | PAAKRVKLDGGSPAAKRVKLDGGSPAAKRVKLDGGSPAAKRVKLDGGS | 7 |
| | PAAKRVKLDGGSPAAKRVKLDSR | |
| 40450 | KRPAATKKAGQAKKKKSR | 8 |
| 40451 | KRPAATKKAGQAKKKKGGSKRPAATKKAGQAKKKKSR | 9 |
| 40452 | PAAKRVKLDGGSPKKKRKVSR | 10 |
| 40453 | PAAKKKKLDGGSPKKKRKVSR | 11 |
| 40454 | PAAKKKKLDSR | 12 |
| 40455 | PAAKKKKLDGGSPAAKKKKLDGGSPAAKKKKLDSR | 13 |
| 40456 | PAAKKKKLDGGSPAAKKKKLDGGSPAAKKKKLDGGSPAAKKKKLDSR | 14 |
| 40457 | PAKRARRGYKCSR | 15 |
| 40458 | PAKRARRGYKCGSPAKRARRGYKCSR | 16 |
| 40459 | PRRKREESR | 17 |
| 40443 | PYRGRKESR | 18 |
| 40444 | PLRKRPRRSR | 19 |
| 40445 | PLRKRPRRGSPLRKRPRRSR | 20 |
| 40446 | PAAKRVKLDGGKRTADGSEFESPKKKRKVGGS | 21 |
| 40447 | PAAKRVKLDGGKRTADGSEFESPKKKRKVPPPPG | 22 |
| 40448 | PAAKRVKLDGGKRTADGSEFESPKKKRKVGIHGVPAAPG | 23 |
| 40449 | PAAKRVKLDGGKRTADGSEFESPKKKRKVGGGSGGGSPG | 24 |
| 40450 | PAAKRVKLDGGKRTADGSEFESPKKKRKVPGGGSGGGSPG | 25 |
| 40451 | PAAKRVKLDGGKRTADGSEFESPKKKRKVAEAAAKEAAAKEAAAKAPG | 26 |
| 40452 | PAAKRVKLDGGKRTADGSEFESPKKKRKVPG | 27 |
| 40453 | PAAKRVKLDGGSPKKKRKVGGS | 28 |
| 40454 | PAAKRVKLDPPPPKKKRKVPG | 29 |
| 40455 | PAAKRVKLDPG | 30 |
| 40456 | PAAKRVKLDGGGSGGGSGGGS | 31 |
| 40457 | PAAKRVKLDPPP | 32 |
| 40458 | PAAKRVKLDGGGSGGGSGGGSPPP | 33 |
| 40459 | PKKKRKVPPP | 34 |
| 40460 | PKKKRKVGGS | 35 |

*Sequences in bold are NLS, while unbolded sequences are linkers.

TABLE 16
3′ NLS sequences

| SEQ ID | | 3′ NLS |
|---|---|---|
| NO: | NLS Amino Acid Sequence* | ID |
| 40461 | GSPKKKRKV | 1 |
| 40462 | GSPKKKRKVGGSPKKKRKVGGSPKKKRKVGGSPKKKRKV | 2 |
| 40463 | GSPKKKRKVGGSPKKKRKVGGSPKKKRKVGGSPKKKRKVGGSPKKK | 3 |
| | RKVGGSPKKKRKV | |
| 40464 | GSPAAKRVKLD | 4 |
| 40465 | GSPAAKRVKLDGGSPAAKRVKLD | 5 |
| 40466 | GSPAAKRVKLDGGSPAAKRVKLDGGSPAAKRVKLDGGSPAAKRVKLD | 6 |
| 40467 | GSPAAKRVKLDGGSPAAKRVKLDGGSPAAKRVKLDGGSPAAKRVKLD | 7 |
| | GGSPAAKRVKLDGGSPAAKRVKLD | |
| 40468 | GSKRPAATKKAGQAKKKK | 8 |
| 40469 | KRPAATKKAGQAKKKKGGSKRPAATKKAGQAKKKK | 9 |
| 40470 | GSPAAKRVKLGGSPAAKRVKLGGSPKKKRKVGGSPKKKRKV | 10 |
| 40471 | GSKLGPRKATGRWGS | 77 |
| 40472 | GSKRKGSPERGERKRHWGS | 12 |
| 40473 | GSPKKKRKVGSGSKRPAATKKAGQAKKKKLE | 73 |
| 40474 | GPKRTADSQHSTPPKTKRKVEFEPKKKRKV | 14 |
| 40475 | GGGSGGGSKRTADSQHSTPPKTKRKVEFEPKKKRKV | 15 |
| 40476 | AEAAAKEAAAKEAAAKAKRTADSQHSTPPKTKRKVEFEPKKKRKV | 16 |
| 40477 | GPPKKKRKVGGSKRTADSQHSTPPKTKRKVEFEPKKKRKV | 17 |
| 40478 | GPAEAAAKEAAAKEAAAKAPAAKRVKLD | 18 |
| 40479 | GPGGGSGGGSGGGSPAAKRVKLD | 19 |
| 40480 | GPPKKKRKVPPPPAAKRVKLD | 20 |
| 40481 | GPPAAKRVKLD | 21 |
| 40482 | GSPKKKRKV | 22 |
| 40483 | GSPAAKRVKLD | 23 |
| 40484 | VGSKRPAATKKAGQAKKKK | 24 |
| 40485 | TGGGPGGGAAAGSGSPKKKRKVGSGSKRPAATKKAGQAKKKKLE | 25 |
| 40486 | TGGGPGGGAAAGSGSPKKKRKVGSGSKRPAATKKAGQAKKKKLE | 26 |
| 40487 | TGGGPGGGAAAGSGSPKKKRKVGSGS | 27 |
| 40488 | PPPPKKKRKVPPP | 28 |
| 40489 | GGSPKKKRKVPPP | 29 |
| 40490 | PPPPKKKRKV | 30 |
| 40491 | GGSPKKKRKV | 31 |
| 40492 | GGSPKKKRKVGGSGGSGGS | 32 |
| 40493 | GGSPKKKRKVGGSPKKKRKV | 33 |
| 40494 | GGSGGSGGSPKKKRKVGGSPKKKRKV | 34 |
| 40495 | VGGGSGGGSGGGSPAAKRVKLD | 35 |
| 40496 | VPPPPAAKRVKLD | 36 |
| 40497 | VPPPGGGSGGGSGGGSPAAKRVKLD | 37 |
| 40498 | VGGGSGGGSGGGSPAAKRVKLD | 38 |
| 40499 | VPPPPAAKRVKLD | 39 |
| 40500 | VPPPGGGSGGGSGGGSPAAKRVKLD | 40 |
| 40501 | VGSPAAKRVKLD | 41 |

[0800] AAV transduction and editing level assessment in mNPTC-tdT cells by FACS were conducted as described in Example 1.

### Results:

[0801] Initial plasmid nucleofection revealed that a number of NLS permutations displayed improved editing when compared to control (1×SV40 NLS on both the N- and C-termini). In particular, N-terminal variants containing Cmyc or Nucleoplasmin NLSs significantly outperformed SV40 NLS combinations (FIG. 39). This trend in N-terminal NLS variation was replicated in AAV transduction, where Cmyc and Nucleoplasmin NLS variants again outperformed SV40 NLS variants (FIG. 40). Finally, variations holding the Cmyc constant (FIG. 41) were tested, and the results demonstrate that the best constructs contained a Cmyc NLS on both the N- and C-terminals.

[0802] The data suggests that selecting the amino acid sequence of the NLS can enhance editing outcomes in the AAV setting. Specifically, N-terminal Cmyc-containing NLS variants showed a clear improvement compared to N-terminal SV40 NLS variants. In addition, C-terminal Cmyc and Nuc variants improve editing over SV40 NLS variants. Repetitions of the SV40 NLS seem to be deleterious for editing efficiency on both the N- and C-terminals.

### Example 11: Small CRISPR Protein Expression is Enhanced by Addition of Introns in the 5′ UTR

[0803] The goal of this experiment is to demonstrate that transcriptional levels mediated by AAV vectors delivering small CRISPR proteins (such as CasX) can be enhanced by inclusion of different regulatory elements such as intronic sequences taken from viral, mouse, or human genomes that conventionally do not fit in AAV vectors expressing large transgene (e.g., spCas9) plasmids.

### Methods:

[0804] A 4-part Golden Gate Assembly consisting of a pre-digested AAV backbone, small CRISPR protein-encoding DNA, and flanking 5′ and 3′ DNA sequences will be used to generate AAV-cis plasmid. 5′ sequences will contain protein promoters including UbC, JeT, CMV, CAG, CBH, hSyn, or other Pol2 promoter, intronic region, and N-terminal NLS, while 3′ sequences will contain C-terminal NLS, poly A signal, RNA promoter and guide RNA containing spacer 12.7. 5′ and 3′ parts will be PCR-amplified and assembled as described in Example 1 into. Cloning and plasmid QC, AAV viral production and editing level assessment in mNPTC-tdT cells by FACS will be conducted as described in Example 1. Non-limiting examples of intron sequences to be incorporated into the constructs are listed in Table 17.

[0805] Enhancement in editing by the inclusion of intron 36 (transgene plasmid 59) will be tested against transgene plasmid 58, which was the base construct not containing the intron. The rest of the introns are prophetic intron sequences that can be used in future constructs coding for CasX and have been derived from viral, mouse, and human origin.

TABLE 17
Intron sequences for incorporation into base construct 58

| | SEQ ID | | Size |
|---|---|---|---|
| Intron | NO: | Sequence | (bp) |
| 1 | 40599 | GTGGCCCAGGCAGGCAGACCCACCAGGGGTCCCTGAAGGCCAGCCCT | 54 |
| | | TGAGAAG | |
| 2 | 40600 | GTCATACAACTTTCCTGAAGTTGTATGACCTCTCTGAGCCTTAGTCT | 67 |
| | | CCTCGTTTGTAAAATGAGAG | |
| 3 | 40601 | GTAAGAGCATAGTGCACAGGACTGCTGGTGGCCAGGAGGCCCAGCCC | 62 |
| | | TGGATCTTCCTCCAG | |
| 4 | 40602 | GTATGAGACACCACACCTGCCCATTTTTGTTTGGTTTTTTAATGGGC | 49 |
| | | AG | |
| 5 | 40603 | GTACAAATATATATCAAATTCATAGATATCTATTGGTACCTCATATA | 59 |
| | | AGTACCATAGAG | |
| 6 | 40604 | GTTCCGGAGCCCCGGCGCGGGCGGGTTCTGGGGTGTAGACGCTGCTG | 67 |
| | | GCCAGCCCGCCCCAGCCGAG | |
| 7 | 40605 | GTGTTTGACGGCATCCCACCGCCCTACGACAAGAAAAAGCGGATGGT | 66 |
| | | GGTTCCTGCTGCCCTCAAG | |
| 8 | 40606 | GTCGCCAGGTAGGGCTGGGGGCCGAGGGACCGGCTCGGGGGCGGGGG | 86 |
| | | GGAAGTGTGCCTGACCGGTCTCTGTCCTCAGCGAGGGAG | |
| 9 | 40607 | GTGGGTCCCAGCCCCGCCCGCTGCCCGGCCGCCCCGCAGGTCCCCCG | 67 |
| | | TGACACCGGCTCCTCCTCAG | |
| 10 | 40608 | GTAAGTGCAGAGGCTGGCAGAGGGCAGCCCATGCCCCCACCTGCCAC | 70 |
| | | CTCACAAGCCTCTCCTCCCACAG | |
| 11 | 40609 | GTGAGTCTATGGGACCCTTGATGTTTTCTTTCCCCTTCTTTTCTATG | 476 |
| | | GTTAAGTTCATGTCATAGGAAGGGGAGAAGTAACAGGGTACACATAT | |
| | | TGACCAAATCAGGGTAATTTTGCATTTGTAATTTTAAAAAATGCTTT | |
| | | CTTCTTTTAATATACTTTTTTGTTTATCTTATTTCTAATACTTTCCC | |
| | | TAATCTCTTTCTTTCAGGGCAATAATGATACAATGTATCATGCCTCT | |
| | | TTGCACCATTCTAAAGAATAACAGTGATAATTTCTGGGTTAAGGCAA | |
| | | TAGCAATATTTCTGCATATAAATATTTCTGCATATAAATTGTAACTG | |
| | | ATGTAAGAGGTTTCATATTGCTAATAGCAGCTACAATCCAGCTACCA | |
| | | TTCTGCTTTTATTTTATGGTTGGGATAAGGCTGGATTATTCTGAGTC | |
| | | CAAGCTAGGCCCTTTTGCTAATCATGTTCATACCTCTTATCTTCCTC | |
| | | CCACAG | |
| 12 | 40610 | GTAAGTGGAGACTAGGGGGCTGGGGTTGCACCCTCCCAGTCTGACTC | 69 |
| | | CTCACTGCCGCCGCCTCCTCAG | |
| 13 | 40611 | GTGAGCTGGCGCCCCCAGGGCGGCTCCGGGCCCAGGCCCGTCCAGGG | 69 |
| | | CATAACCCCCTGTCTCCCCTAG | |
| 14 | 40612 | GTAGGCGCCTGGGGGGGGCAGGAGGGTACACGGGCGTAAACTGAGTC | 70 |
| | | TCACCGCTTTCCTCTCCCTGCAG | |
| 15 | 40613 | GTGAGTTGGGACTAGGGGTTGGGTCTGGGTCCAGACCCGGCCCAGCC | 70 |
| | | ATCACACACCTGCCCTCCCTCAG | |
| 16 | 40614 | GTACGATGGCACCTCCGGCAAAGAGAGCCAGGAGAGGTAAGGGTGTG | 108 |
| | | TTAGTAAAGTGGGGGGAGGGGAAAGATTTAATAACTTAACTAAGTAT | |
| | | GTGTTTTTTTATAG | |
| 17 | 40615 | GTGAGCTGCGCGCGCGCGGCGGGGGGCGGGCGCCCGGACCCCGCTGA | 69 |
| | | GGCTGCGCCCCTGTCCCCGCAG | |
| 18 | 40616 | GTTCGAGCTTTTGGAGTACGTCGTCTTTAGGTTGGGGGGAGGGGTTT | 206 |
| | | TATGCGATGGAGTTTCCCCACACTGAGTGGGTGGAGACTGAAGTTAG | |
| | | GCCAGCTTGGCACTTGATGTAATTCTCCTTGGAATTTGCCCTTTTTG | |
| | | AGTTTGGATCTTGGTTCATTCTCAAGCCTCAGACAGTGGTTCAAAGT | |
| | | TTTTTTCTTCCATTTCAG | |
| 19 | 40617 | GTGTGTGCTGGGCAGGGTTGGGGGCTGGGGGCCAGGGCATGCCAGGC | 70 |
| | | TCTGATTGCCACCCCCTTTTTAG | |
| 20 | 40618 | GTAAGGCAGGCTCCCTGGGGCGGCAGGTGGGTTGCATGGAGCCAGGC | 68 |
| | | TGACCCTCCATGTCCCCCCAG | |
| 21 | 40619 | GTTTGTTTCCTTTTTTAAAATACATTGAGTATGCTTGCCTTTTAGAT | 299 |
| | | ATAGAAATATCTGATGCTGTCTACTTCACTAAATTTTGATTACATGA | |
| | | TTTGACAGCAATATTGAAGAGTCTAACAGCCAGCACGCAGGTTGGTA | |
| | | AGTACTGTGGGAACATCACAGATTTTGGCTCCATGCCCTAAAGAGAA | |
| | | ATTGGCTTTCAGATTATTTGGATTAAAAACAAAGACTTTCTTAAGAG | |
| | | ATGTAAAATTTTCATGATGTTTTCTTTTTTGCTAAAACTAAAGAATT | |
| | | ATTCTTTTACATTTCAG | |
| 22 | 40620 | GTCGCTGCGACGCTGCCTTCGCCCCGTGCCCCGCTCCGCCGCCGCCT | 226 |
| | | CGCGCCGCCCGCCCCGGCTCTGACTGACCGCGTTACTCCCACAGGTG | |
| | | AGCGGGCGGGACGGCCCTTCTCCTCCGGGCTGTAATTAGCTGAGCAA | |
| | | GAGGTAAGGGTTTAAGGGATGGTTGGTTGGTGGGGTATTAATGTTTA | |
| | | ATTACCTGGAGCACCTGCCTGAAATCACTTTTTTTCAG | |
| 23 | 40621 | GTAAGAGTCAGAGCTGGCAGGGACGTACAGTGGCCACGACTGGGGTA | 71 |
| | | CTGAGCTGCAGTTCACCTGGCAGA | |
| 24 | 40622 | GTGGGTAGGGTTTGGGGGAGAGCGTGGGCTGGGGTTCAGGGACACCC | 69 |
| | | TCTCACCACTGCCCTCCCACAG | |
| 25 | 40623 | GTAAGTATACAATTGGATGTGCTAAATTGAACAAAATAGGTTCTTGT | 87 |
| | | GCTATTTTACTTAGGTTTCTCTTTTTTTCCCCACACATAG | |
| 26 | 40624 | AGGTAAGGGTTTAAGGGATGGTTGGTTGGTGGGGTATTAATGTTTAA | 84 |
| | | TTACCTGGAGCACCTGCCTGAAATCACTTTTTTTCAG | |
| 27 | 40625 | GTAAGGGTTTAAGGGATGGTTGGTTGGTGGGGTATTAATGTTTAATT | 82 |
| | | ACCTGTTTTACAGGCCTGAAATCACTTGGTTTTAG | |
| 28 | 40626 | GTGAGCCAGGCCGTGGGAGGGCGCCCCCGAGACTGCCACCTGCTCAC | 66 |
| | | CACCCCCCTCTGCTCGTAG | |
| 29 | 40627 | GTGAGTGGGCGCCCCGGCGGGGTGGGCAGTGGGCGGGCCCGAGCTGA | 65 |
| | | CCGCACCCCTCCCCACAG | |
| 30 | 40628 | GTGCGTGAGCGGGGACTGGCGGGGGGTGCCCCCACGGGACCGCGCTG | 66 |
| | | AACCCGGCCCCCCACACAG | |
| 31 | 40629 | GTAGGATGGCGCCTCCTGCAAAAAGAGCAAGAGGTAAGGGTAGTTTT | 106 |
| | | AAGGGGGTGGTGGGCATACATATAAAACTAACTGCAAATAATTTTTT | |
| | | TATATATTACAG | |
| 32 | 40630 | GTAGGCCCTGGCCTGCAGGGACTGTGGGTGCCCCCTGTCCAGTACCC | 69 |
| | | TCACCATGACCCTGTTGCCCAG | |
| 33 | 40631 | GTGAGTCAGGGTGGGGCTGGCCCCCTGCTTCGTGCCCATCCGCGCTC | 68 |
| | | TGACTCTCTGCCCACCTGCAG | |
| 34 | 40632 | GTACTACGGCCTGGGTAGGGAATGGTGGGTGGGGGCGGGGGACCCCT | 68 |
| | | TACCAAGGCCACCCTCTGCAG | |
| 35 | 40633 | GTAAGTTTAGTCTTTTTGTCTTTTATTTCAGGTCCCGGATCCGGTGG | 97 |
| | | TGGTGCAAATCAAAGAACTGCTCCTCAGTGGATGTTGCCTTTACTTC | |
| | | TAG | |
| 36 | 40634 | GTAAGTCACTGACTGTCTATGCCTGGGAAAGGGTGGGCAGGAGATGG | 140 |
| | | GGCAGTGCAGGAAAAGTGGCACTATGAACCCTGCAGCCCTAGGAATG | |
| | | CATCTAGACAATTGTACTAACCTTCTTCTCTTTCCTCTCCTGACAG | |
| 37 | 40635 | GTAAGTATCAAGGTTACAAGACAGGTTTAAGGAGACCAATAGAAACT | 133 |
| | | GGGCTTGTCGAGACAGAGGAGACTCTTGCGTTTCTGATAGGCACCTA | |
| | | TTGGTCTTACTGACATCCACTTTGCCTTTCTCTCCACAG | |
| 38 | 40636 | GTAAATTTCTAGTTTTTCTCCTTCATTTTCTTGGTTAGGACCCTTTT | 190 |
| | | CTCTTTTTATTTTTTTGAGCTTTGATCTTTCTTTAAACTGATCTATT | |
| | | TTTTAATTGATTGGTTATGGTGTAAATATTACATAGCTTTAACTGAT | |
| | | AATCTGATTACTTTATTTCGTGTGTCTATGATGATGATGATAGTTAC | |
| | | AG | |
| 39 | 40637 | GTAAGTACCGCCTATAGAGTCTATAGGCCCACCCCCTTGGCTTCTTA | 271 |
| | | TGCATGCTATACTGTTTTTGGCTTGGGGTCTATACACCCCCGCTTCC | |
| | | TCATGTTATAGGTGATGGTATAGCTTAGCCTATAGGTGTGGGTTATT | |
| | | GACCATTATTGACCACTCCAACGGTGGAGGGCAGTGTAGTCTGAGCA | |
| | | GTACTCGTTGCTGCCGCGCGCGCCACCAGACATAATAGCTGACAGAC | |
| | | TAACAGACTGTTCCTTTCCATGGGTCTTTTCTGCAG | |
| 40 | 40638 | GTAAGTACCGCCTATAGACTCTATAGGCACACCCCTTTGGCTCTTAT | 96 |
| | | GCATGCTGACAGACTAACAGACTGTTCCTTTCCTGGGTCTTTTCTGC | |
| | | AG | |
| 41 | 40639 | GTAAGTACCGCCTATAGACTCTATAGGCACACCCCTTTGGCTCTTAT | 110 |
| | | GCATGAATTAATACGACTCACTATAGGGAGACAGACTGTTCCTTTCC | |
| | | TGGGTCTTTTCTGCAG | |
| 42 | 40640 | GTAAGTACCGCCTATAGACTCTATAGGCACACCCCTTTGGCTCTTAT | 270 |
| | | GCATGCTATACTGTTTTTGGCTTGGGGCCTATACACCCCCGCTTCCT | |
| | | TATGCTATAGGTGATGGTATAGCTTAGCCTATAGGTGTGGGTTATTG | |
| | | ACCATTATTGACCACTCCAACGGTGGAGGGCAGTGTAGTCTGAGCAG | |
| | | TACTCGTTGCTGCCGCGCGCGCCACCAGACATAATAGCTGACAGACT | |
| | | AACAGACTGTTCCTTTCCATGGGTCTTTTCTGCAG | |
| 43 | 40641 | GTAAGTACTTTGCTACATCCATACTCCATCCTTCCCATCCCTTATTC | 116 |
| | | CTTTGAACCTTTCAGTTCGAGCTTTCCCACTTCATCGCAGCTTGACT | |
| | | AACAGCTACCCCGCTTGAGCAG | |
| 44 | 40642 | GTAGGTTCAACCACTGATGCCTAGGCACACCGAAACGACTAACCCTA | 67 |
| | | ATTCTTATCCTTTACTTCAG | |
| 45 | 40643 | GTAAATATAAAATTTTTAAGTGTATAATGTGTTAAACTACTGATTCT | 66 |
| | | AATTGTTTGTGTATTTTAG | |

### Results:

[0806] The effects of introns on transgene expression is to be assessed by cloning 50 different introns into AAV-cis plasmid and then assaying for editing in the tdTomato assay.

[0807] When compared to the base construct without an intron, the addition of an intronic sequence generally increases the overall editing efficiency of AAV transgenes.

[0808] The results are expected to support that the addition of introns to AAV-transgenes expressing CasX under the control of short but strong promoter sequences will enable increased CasX expression and on-target editing while reducing cargo size, further optimizing the AAV system.

### Example 12: Improved Guide Variants Demonstrate Enhanced On-Target Activity In Vitro

[0809] Experiments were conducted to identify engineered guide RNA variants with increased activity at different genomic targets, including the therapeutically-relevant mouse and human Rho exon 1. Previous assays identified many different “hotspot” regions (e.g., stem loop) within the scaffold sequences holding the potential to significantly increase editing efficiency as well as specificity. Additionally, screens were conducted to identify scaffold variants that would increase the overall activity of our CRISPR system in an AAV vector across multiple different PAM-spacer combinations, without triggering off-target or non-specific editing. Achieving increased editing efficiency compared to current benchmark vectors would allow reduced viral vector doses to be used in in vivo studies, improving the safety of AAV-mediated CasX-guide systems.

### Methods:

[0810] New gRNA scaffold and spacer variants were inserted into an AAV transgene construct for plasmid and viral vector validation (encoding sequences in Tables 18 and 19). CasX 491 variant protein was used for all constructs evaluated in this experiment, however the disclosure contemplates utilizing any of the CasX variants, including those of Table 3 and the encoding sequences of Table 21. We conceptually broke up the AAV transgene between ITRs into different parts, which consisted of our therapeutic cargo and accessory elements relevant to expression in mammalian cells and our nuclease-guide RNA complex (protein nuclease, scaffold, spacer). A schematic and its conceptual parts is shown in FIG. 42. The nucleic acid sequences of the remaining components common to the various constructs are presented in Table 26, the encoding sequences of the guides are presented in Tables 18 and 19, and the encoding sequences of the CasX are presented in Table 21 such that the various permutations of the transgene can be elucidated.

[0811] Cloning: Each part in the AAV genome was separated by restriction enzyme sites to allow for modular cloning. Parts were ordered as gene fragments from Twist, PCR amplified, and digested with corresponding restriction enzymes, cleaned, then ligated into a vector also digested with the same enzymes. New AAV constructs were then transformed into chemically competent E. coli (Turbos or Stbl3s). Transformed cells were recovered for 1 hour in a 37° C. shaking incubator then plated on Kanamycin LB-Agar plates and allowed to grow at 37° C. for 12-16 hours. Colonies were picked into 6 mL of 2xyt treated with Kanamycin and allowed to grow for 7-14 hours, then mini-prepped and Sanger sequenced. The transformation and miniprep protocol were then repeated and spacer-cloned vectors were sequence verified again. Validated constructs were maxi-prepped. To assess the quality of maxi-preps, constructs were processed in two separate digests with XmaI (which cuts at several sites in each of the ITRs) and XhoI which cuts once in the AAV genome. These digests and the uncut construct were then run on a 1% Agarose gel and imaged on a ChemiDoc. If the plasmid was >90% supercoiled, the correct size, and the ITRs were intact, the construct moved on to be tested via nucleofection and subsequently used for AAV vector production.

TABLE 18
Guide sequences cloned into p59.491.U6.X.Y. plasmids (X = guide ; Y = spacer)

| | SEQ | | SEQ | | SEQ | |
|---|---|---|---|---|---|---|
| Guide.spacer | ID | Spacer | ID | sgRNA Guide | ID | sgRNA Guide + |
| Construct | NO: | Sequence | NO: | Sequence | NO: | Spacer Sequence |
| 174.11.30 | 40502 | AAGGGGCTC | 40506 | ACTGGCGCTTTTA | 40517 | ACTGGCGCTTTTATC |
| | | CGCACCACG | | TCTGATTACTTTG | | TGATTACTTTGAGAG |
| | | CC | | AGAGCCATCACCA | | CCATCACCAGCGACT |
| | | | | GCGACTATGTCGT | | ATGTCGTAGTGGGTA |
| | | | | AGTGGGTAAAGCT | | AAGCTCCCTCTTCGG |
| | | | | CCCTCTTCGGAGG | | AGGGAGCATCAAAGA |
| | | | | GAGCATCAAAG | | AGGGGCTCCGCACCA |
| | | | | | | CGCC |
| 229.11.30 | 40502 | AAGGGGCTC | 40507 | ACTGGCACTTTTA | 40518 | ACTGGCACTTTTATC |
| | | CGCACCACG | | TCTGATTACTTTG | | TGATTACTTTGAGAG |
| | | CC | | AGAGCCATCACCA | | CCATCACCAGCGACT |
| | | | | GCGACTATGTCGT | | ATGTCGTATGGGTAA |
| | | | | ATGGGTAAAGCGC | | AGCGCTTACGGACTT |
| | | | | TTACGGACTTCGG | | CGGTCCGTAAGAAGC |
| | | | | TCCGTAAGAAGCA | | ATCAAAGAAGGGGCT |
| | | | | TCAAAG | | CCGCACCACGCC |
| 230.11.30 | 40502 | AAGGGGCTC | 40508 | ACTGGCACTTCTA | 40519 | ACTGGCACTTCTATC |
| | | CGCACCACG | | TCTGATTACTCTG | | TGATTACTCTGAGAG |
| | | CC | | AGAGCCATCACCA | | CCATCACCAGCGACT |
| | | | | GCGACTATGTCGT | | ATGTCGTATGGGTAA |
| | | | | ATGGGTAAAGCGC | | AGCGCTTACGGACTT |
| | | | | TTACGGACTTCGG | | CGGTCCGTAAGAAGC |
| | | | | TCCGTAAGAAGCA | | ATCAGAAAGGGGCTC |
| | | | | TCAGA | | CGCACCACGCC |
| 231.11.30 | 40502 | AAGGGGCTC | 40509 | ACTGGCGCTTCTA | 40520 | ACTGGCGCTTCTATC |
| | | CGCACCACG | | TCTGATTACTCTG | | TGATTACTCTGAGAG |
| | | CC | | AGAGCCATCACCA | | CCATCACCAGCGACT |
| | | | | GCGACTATGTCGT | | ATGTCGTATGGGTAA |
| | | | | ATGGGTAAAGCCG | | AGCCGCTTACGGACT |
| | | | | CTTACGGACTTCG | | TCGGTCCGTAAGAGG |
| | | | | GTCCGTAAGAGGC | | CATCAGAGAAGGGGC |
| | | | | ATCAGAG | | TCCGCACCACGCC |
| 232.11.30 | 40502 | AAGGGGCTC | 40510 | ACTGGCACTTCTA | 40521 | ACTGGCACTTCTATC |
| | | CGCACCACG | | TCTGATTACTCTG | | TGATTACTCTGAGCG |
| | | CC | | AGCGCCATCACCA | | CCATCACCAGCGACT |
| | | | | GCGACTATGTCGT | | ATGTCGTATGGGTAA |
| | | | | ATGGGTAAAGCCG | | AGCCGCTTACGGACT |
| | | | | CTTACGGACTTCG | | TCGGTCCGTAAGAGG |
| | | | | GTCCGTAAGAGGC | | CATCAGAGAAGGGGC |
| | | | | ATCAGAG | | TCCGCACCACGCC |
| 233.11.30 | 40502 | AAGGGGCTC | 40511 | ACTGGCGCTTCTA | 40522 | ACTGGCGCTTCTATC |
| | | CGCACCACG | | TCTGATTACTCTG | | TGATTACTCTGAGCG |
| | | CC | | AGCGCCATCACCA | | CCATCACCAGCGACT |
| | | | | GCGACTATGTCGT | | ATGTCGTATGGGTAA |
| | | | | ATGGGTAAAGCCG | | AGCCGCTTACGGACT |
| | | | | CTTACGGACTTCG | | TCGGTCCGTAAGAGG |
| | | | | GTCCGTAAGAGGC | | CATCAGAGAAGGGGC |
| | | | | ATCAGAG | | TCCGCACCACGCC |
| 234.11.30 | 40502 | AAGGGGCTC | 40512 | ACTGGCGCTTCTA | 40523 | ACTGGCGCTTCTATC |
| | | CGCACCACG | | TCTGATTACTCTG | | TGATTACTCTGAGCG |
| | | CC | | AGCGCCATCACCA | | CCATCACCAGCGACT |
| | | | | GCGACTATGTCGT | | ATGTCGTATGGGTAA |
| | | | | ATGGGTAAAGCGC | | AGCGCCTTACGGACT |
| | | | | CTTACGGACTTCG | | TCGGTCCGTAAGGAG |
| | | | | GTCCGTAAGGAGC | | CATCAGAGAAGGGGC |
| | | | | ATCAGAG | | TCCGCACCACGCC |
| 235.11.30 | 40502 | AAGGGGCTC | 40513 | ACTGGCGCTTCTA | 40524 | ACTGGCGCTTCTATC |
| | | CGCACCACG | | TCTGATTACTCTG | | TGATTACTCTGAGCG |
| | | CC | | AGCGCCATCACCA | | CCATCACCAGCGACT |
| | | | | GCGACTATGTCGT | | ATGTCGTAGTGGGTA |
| | | | | AGTGGGTAAAGCC | | AAGCCGCTTACGGAC |
| | | | | GCTTACGGACTTC | | TTCGGTCCGTAAGAG |
| | | | | GGTCCGTAAGAGG | | GCATCAGAGAAGGGG |
| | | | | CATCAGAG | | CTCCGCACCACGCC |
| 236.11.30 | 40502 | AAGGGGCTC | 40514 | ACGGGACTTTCTA | 40525 | ACGGGACTTTCTATC |
| | | CGCACCACG | | TCTGATTACTCTG | | TGATTACTCTGAAGT |
| | | CC | | AAGTCCCTCACCA | | CCCTCACCAGCGACT |
| | | | | GCGACTATGTCGT | | ATGTCGTATGGGTAA |
| | | | | ATGGGTAAAGCCG | | AGCCGCTTACGGACT |
| | | | | CTTACGGACTTCG | | TCGGTCCGTAAGAGG |
| | | | | GTCCGTAAGAGGC | | CATCAGAGAAGGGGC |
| | | | | ATCAGAG | | TCCGCACCACGCC |
| 237.11.30 | 40502 | AAGGGGCTC | 40515 | ACCTGTAGTTCTA | 40526 | ACCTGTAGTTCTATC |
| | | CGCACCACG | | TCTGATTACTCTG | | TGATTACTCTGACTA |
| | | CC | | ACTACAGTCACCA | | CAGTCACCAGCGACT |
| | | | | GCGACTATGTCGT | | ATGTCGTATGGGTAA |
| | | | | ATGGGTAAAGCCG | | AGCCGCTTACGGACT |
| | | | | CTTACGGACTTCG | | TCGGTCCGTAAGAGG |
| | | | | GTCCGTAAGAGGC | | CATCAGAGAAGGGGC |
| | | | | ATCAGAG | | TCCGCACCACGCC |
| 174.11.31 | 40503 | AAGTGGCTC | 40516 | ACTGGCGCTTTTA | 40517 | ACTGGCGCTTTTATC |
| | | CGCACCACG | | TCTGATTACTTTG | | TGATTACTTTGAGAG |
| | | CC | | AGAGCCATCACCA | | CCATCACCAGCGACT |
| | | | | GCGACTATGTCGT | | ATGTCGTAGTGGGTA |
| | | | | AGTGGGTAAAGCT | | AAGCTCCCTCTTCGG |
| | | | | CCCTCTTCGGAGG | | AGGGAGCATCAAAGA |
| | | | | GAGCATCAAAG | | AGGGGCTCCGCACCA |
| | | | | | | CGCC |
| 235.11.31 | 40503 | AAGTGGCTC | 40506 | ACTGGCGCTTCTA | 40527 | ACTGGCGCTTCTATC |
| | | CGCACCACG | | TCTGATTACTCTG | | TGATTACTCTGAGCG |
| | | CC | | AGCGCCATCACCA | | CCATCACCAGCGACT |
| | | | | GCGACTATGTCGT | | ATGTCGTAGTGGGTA |
| | | | | AGTGGGTAAAGCC | | AAGCCGCTTACGGAC |
| | | | | GCTTACGGACTTC | | TTCGGTCCGTAAGAG |
| | | | | GGTCCGTAAGAGG | | GCATCAGAGAAGTGG |
| | | | | CATCAGAG | | CTCCGCACCACGCC |
| 174.11.1 | 40504 | AAGGGGCTG | 40506 | ACTGGCGCTTTTA | 40528 | ACTGGCGCTTTTATC |
| | | CGTACCACA | | TCTGATTACTTTG | | TGATTACTTTGAGAG |
| | | CC | | AGAGCCATCACCA | | CCATCACCAGCGACT |
| | | | | GCGACTATGTCGT | | ATGTCGTAGTGGGTA |
| | | | | AGTGGGTAAAGCT | | AAGCTCCCTCTTCGG |
| | | | | CCCTCTTCGGAGG | | AGGGAGCATCAAAGA |
| | | | | GAGCATCAAAG | | AGGGGCTGCGTACCA |
| | | | | | | CACC |
| 235.11.1 | 40504 | AAGGGGCTG | 40514 | ACTGGCGCTTCTA | 40529 | ACTGGCGCTTCTATC |
| | | CGTACCACA | | TCTGATTACTCTG | | TGATTACTCTGAGCG |
| | | CC | | AGCGCCATCACCA | | CCATCACCAGCGACT |
| | | | | GCGACTATGTCGT | | ATGTCGTAGTGGGTA |
| | | | | AGTGGGTAAAGCC | | AAGCCGCTTACGGAC |
| | | | | GCTTACGGACTTC | | TTCGGTCCGTAAGAG |
| | | | | GGTCCGTAAGAGG | | GCATCAGAGAAGGGG |
| | | | | CATCAGAG | | CTGCGTACCACACC |
| 235.NT | 40505 | GGGTCTTCG | 40506 | ACTGGCGCTTCTA | 40530 | ACTGGCGCTTCTATC |
| | | AGAAGACCC | | TCTGATTACTCTG | | TGATTACTCTGAGCG |
| | | | | AGCGCCATCACCA | | CCATCACCAGCGACT |
| | | | | GCGACTATGTCGT | | ATGTCGTAGTGGGTA |
| | | | | AGTGGGTAAAGCC | | AAGCCGCTTACGGAC |
| | | | | GCTTACGGACTTC | | TTCGGTCCGTAAGAG |
| | | | | GGTCCGTAAGAGG | | GCATCAGAGGGGTCT |
| | | | | CATCAGAG | | TCGAGAAGACCC |

TABLE 19
Guide sequences cloned into p59.491.U6.X.Y. plasmids. (X = guide , Y = spacer) with
spacer length variants

| Guide.spacer | Spacer | SEQ ID | Spacer | SEQ ID | Guide | SEQ ID | |
|---|---|---|---|---|---|---|---|
| Construct | length | NO: | Sequence | NO: | Sequence | NO: | Guide + Spacer Sequence |
| 174.11.30 | 20 nt | 40531 | AAGGGGCT | 40543 | ACTGGCGCT | 40545 | ACTGGCGCTTTTATCTGA |
| | | | CCGCACCA | | TTTATCTGA | | TTACTTTGAGAGCCATCA |
| | | | CGCC | | TTACTTTGA | | CCAGCGACTATGTCGTAG |
| | | | | | GAGCCATCA | | TGGGTAAAGCTCCCTCTT |
| | | | | | CCAGCGACT | | CGGAGGGAGCATCAAAGA |
| | | | | | ATGTCGTAG | | AGGGGCTCCGCACCACGC |
| | | | | | TGGGTAAAG | | C |
| | | | | | CTCCCTCTT | | |
| | | | | | CGGAGGGAG | | |
| | | | | | CATCAAAG | | |
| 174.11.39 | 19 nt | 40532 | AAGGGGCT | 40543 | ACTGGCGCT | 40546 | ACTGGCGCTTTTATCTGA |
| | | | CCGCACCA | | TTTATCTGA | | TTACTTTGAGAGCCATCA |
| | | | CGC | | TTACTTTGA | | CCAGCGACTATGTCGTAG |
| | | | | | GAGCCATCA | | TGGGTAAAGCTCCCTCTT |
| | | | | | CCAGCGACT | | CGGAGGGAGCATCAAAGA |
| | | | | | ATGTCGTAG | | AGGGGCTCCGCACCACGC |
| | | | | | TGGGTAAAG | | |
| | | | | | CTCCCTCTT | | |
| | | | | | CGGAGGGAG | | |
| | | | | | CATCAAAG | | |
| 174.11.38 | 18 nt | 40533 | AAGGGGCT | 40543 | ACTGGCGCT | 40547 | ACTGGCGCTTTTATCTGA |
| | | | CCGCACCA | | TTTATCTGA | | TTACTTTGAGAGCCATCA |
| | | | CG | | TTACTTTGA | | CCAGCGACTATGTCGTAG |
| | | | | | GAGCCATCA | | TGGGTAAAGCTCCCTCTT |
| | | | | | CCAGCGACT | | CGGAGGGAGCATCAAAGA |
| | | | | | ATGTCGTAG | | AGGGGCTCCGCACCACG |
| | | | | | TGGGTAAAG | | |
| | | | | | CTCCCTCTT | | |
| | | | | | CGGAGGGAG | | |
| | | | | | CATCAAAG | | |
| 174.11.31 | 20 nt | 40534 | AAGTGGCT | 40543 | ACTGGCGCT | 40548 | ACTGGCGCTTTTATCTGA |
| | | | CCGCACCA | | TTTATCTGA | | TTACTTTGAGAGCCATCA |
| | | | CGCC | | TTACTTTGA | | CCAGCGACTATGTCGTAG |
| | | | | | GAGCCATCA | | TGGGTAAAGCTCCCTCTT |
| | | | | | CCAGCGACT | | CGGAGGGAGCATCAAAGA |
| | | | | | ATGTCGTAG | | AGTGGCTCCGCACCACGC |
| | | | | | TGGGTAAAG | | C |
| | | | | | CTCCCTCTT | | |
| | | | | | CGGAGGGAG | | |
| | | | | | CATCAAAG | | |
| 174.11.37 | 19 nt | 40535 | AAGTGGCT | 40543 | ACTGGCGCT | 40549 | ACTGGCGCTTTTATCTGA |
| | | | CCGCACCA | | TTTATCTGA | | TTACTTTGAGAGCCATCA |
| | | | CGC | | TTACTTTGA | | CCAGCGACTATGTCGTAG |
| | | | | | GAGCCATCA | | TGGGTAAAGCTCCCTCTT |
| | | | | | CCAGCGACT | | CGGAGGGAGCATCAAAGA |
| | | | | | ATGTCGTAG | | AGTGGCTCCGCACCACGC |
| | | | | | TGGGTAAAG | | |
| | | | | | CTCCCTCTT | | |
| | | | | | CGGAGGGAG | | |
| | | | | | CATCAAAG | | |
| 174.11.36 | 18 nt | 40536 | AAGTGGCT | 40543 | ACTGGCGCT | 40550 | ACTGGCGCTTTTATCTGA |
| | | | CCGCACCA | | TTTATCTGA | | TTACTTTGAGAGCCATCA |
| | | | CG | | TTACTTTGA | | CCAGCGACTATGTCGTAG |
| | | | | | GAGCCATCA | | TGGGTAAAGCTCCCTCTT |
| | | | | | CCAGCGACT | | CGGAGGGAGCATCAAAGA |
| | | | | | ATGTCGTAG | | AGTGGCTCCGCACCACG |
| | | | | | TGGGTAAAG | | |
| | | | | | CTCCCTCTT | | |
| | | | | | CGGAGGGAG | | |
| | | | | | CATCAAAG | | |
| 235.11.1 | 20 nt | 40537 | AAGGGGCT | 40544 | ACTGGCGCT | 40551 | ACTGGCGCTTCTATCTGA |
| | | | GCGTACCA | | TCTATCTGA | | TTACTCTGAGCGCCATCA |
| | | | CACC | | TTACTCTGA | | CCAGCGACTATGTCGTAG |
| | | | | | GCGCCATCA | | TGGGTAAAGCCGCTTACG |
| | | | | | CCAGCGACT | | GACTTCGGTCCGTAAGAG |
| | | | | | ATGTCGTAG | | GCATCAGAGAAGGGGCTG |
| | | | | | TGGGTAAAG | | CGTACCACACC |
| | | | | | CCGCTTACG | | |
| | | | | | GACTTCGGT | | |
| | | | | | CCGTAAGAG | | |
| | | | | | GCATCAGAG | | |
| 235.11.41 | 19 nt | 40538 | AAGGGGCT | 40544 | ACTGGCGCT | 40552 | ACTGGCGCTTCTATCTGA |
| | | | GCGTACCA | | TCTATCTGA | | TTACTCTGAGCGCCATCA |
| | | | CAC | | TTACTCTGA | | CCAGCGACTATGTCGTAG |
| | | | | | GCGCCATCA | | TGGGTAAAGCCGCTTACG |
| | | | | | CCAGCGACT | | GACTTCGGTCCGTAAGAG |
| | | | | | ATGTCGTAG | | GCATCAGAGAAGGGGCTG |
| | | | | | TGGGTAAAG | | CGTACCACAC |
| | | | | | CCGCTTACG | | |
| | | | | | GACTTCGGT | | |
| | | | | | CCGTAAGAG | | |
| | | | | | GCATCAGAG | | |
| 235.11.40 | 18 nt | 40539 | AAGGGGCT | 40544 | ACTGGCGCT | 40553 | ACTGGCGCTTCTATCTGA |
| | | | GCGTACCA | | TCTATCTGA | | TTACTCTGAGCGCCATCA |
| | | | CA | | TTACTCTGA | | CCAGCGACTATGTCGTAG |
| | | | | | GCGCCATCA | | TGGGTAAAGCCGCTTACG |
| | | | | | CCAGCGACT | | GACTTCGGTCCGTAAGAG |
| | | | | | ATGTCGTAG | | GCATCAGAGAAGGGGCTG |
| | | | | | TGGGTAAAG | | CGTACCACA |
| | | | | | CCGCTTACG | | |
| | | | | | GACTTCGGT | | |
| | | | | | CCGTAAGAG | | |
| | | | | | GCATCAGAG | | |
| 235.11.2 | 20 nt | 40540 | AAGTGGCT | 40544 | ACTGGCGCT | 40554 | ACTGGCGCTTCTATCTGA |
| | | | GCGTACCA | | TCTATCTGA | | TTACTCTGAGCGCCATCA |
| | | | CACC | | TTACTCTGA | | CCAGCGACTATGTCGTAG |
| | | | | | GCGCCATCA | | TGGGTAAAGCCGCTTACG |
| | | | | | CCAGCGACT | | GACTTCGGTCCGTAAGAG |
| | | | | | ATGTCGTAG | | GCATCAGAGAAGTGGCTG |
| | | | | | TGGGTAAAG | | CGTACCACACC |
| | | | | | CCGCTTACG | | |
| | | | | | GACTTCGGT | | |
| | | | | | CCGTAAGAG | | |
| | | | | | GCATCAGAG | | |
| 235.11.43 | 19 nt | 40541 | AAGTGGCT | 40544 | ACTGGCGCT | 40555 | ACTGGCGCTTCTATCTGA |
| | | | GCGTACCA | | TCTATCTGA | | TTACTCTGAGCGCCATCA |
| | | | CAC | | TTACTCTGA | | CCAGCGACTATGTCGTAG |
| | | | | | GCGCCATCA | | TGGGTAAAGCCGCTTACG |
| | | | | | CCAGCGACT | | GACTTCGGTCCGTAAGAG |
| | | | | | ATGTCGTAG | | GCATCAGAGAAGTGGCTG |
| | | | | | TGGGTAAAG | | CGTACCACAC |
| | | | | | CCGCTTACG | | |
| | | | | | GACTTCGGT | | |
| | | | | | CCGTAAGAG | | |
| | | | | | GCATCAGAG | | |
| 235.11.42 | 18 nt | 40542 | AAGTGGCT | 40544 | ACTGGCGCT | 40556 | ACTGGCGCTTCTATCTGA |
| | | | GCGTACCA | | TCTATCTGA | | TTACTCTGAGCGCCATCA |
| | | | CA | | TTACTCTGA | | CCAGCGACTATGTCGTAG |
| | | | | | GCGCCATCA | | TGGGTAAAGCCGCTTACG |
| | | | | | CCAGCGACT | | GACTTCGGTCCGTAAGAG |
| | | | | | ATGTCGTAG | | GCATCAGAGAAGTGGCTG |
| | | | | | TGGGTAAAG | | CGTACCACA |
| | | | | | CCGCTTACG | | |
| | | | | | GACTTCGGT | | |
| | | | | | CCGTAAGAG | | |
| | | | | | GCATCAGAG | | |

TABLE 20
Sequences of AAV vector components common to the plasmids

| | Part | SEQ ID | |
|---|---|---|---|
| Component | Name | NO: | Nucleic Acid Sequence |
| 5′ITR | | 40557 | CCTGCAGGCAGCTGCGCGCTCGCTCGCTCACTGAGGCCGCCCGGGCGTCGGGCGAC |
| | | | CTTTGGTCGCCCGGCCTCAGTGAGCGAGCGAGCGCGCAGAGAGGGAGTGGCCAACT |
| | | | CCATCACTAGGGGTTCCT |
| buffer seq | | 40558 | GCGGCCTCTAGACTCGAGGCGTT |
| enhancer | CMV | 140559 | GACATTGATTATTGACTAGTTATTAATAGTAATCAATTACGGGGTCATTAGTTCAT |
| | | | AGCCCATATATGGAGTTCCGCGTTACATAACTTACGGTAAATGGCCCGCCTGGCTG |
| | | | ACCGCCCAACGACCCCCGCCCATTGACGTCAATAATGACGTATGTTCCCATAGTAA |
| | | | CGCCAATAGGGACTTTCCATTGACGTCAATGGGTGGAGTATTTACGGTAAACTGCC |
| | | | CACTTGGCAGTACATCAAGTGTATCATATGCCAAGTACGCCCCCTATTGACGTCAA |
| | | | TGACGGTAAATGGCCCGCCTGGCATTATGCCCAGTACATGACCTTATGGGACTTTC |
| | | | CTACTTGGCAGTACATCTACGTATTAGTCATCGCTATTACCATG |
| Pol II | CMV | 40435 | GTGATGCGGTTTTGGCAGTACATCAATGGGCGTGGATAGCGGTTTGACTCACGGGG |
| promoter | | | ATTTCCAAGTCTCCACCCCATTGACGTCAATGGGAGTTTGTTTTGGCACCAAAATC |
| | | | AACGGGACTTTCCAAAATGTCGTAACAACTCCGCCCCATTGACGCAAATGGGCGGT |
| | | | AGGCGTGTACGGTGGGAGGTCTATATAAGCAGAGCT |
| buffer seq | | 40561 | CTCTGGCTAACTACC |
| kozac | | 40562 | GGTGCCACCATG |
| start codon | MA | 40563 | ATGGCC |
| 5′NLS | SV40 | 40564 | CCAAAGAAGAAGCGGAAGGTC |
| 5′linker | SR | 40565 | TCTAGA |
| 3′NLS | GS | 40566 | GGATCC |
| linker | | | |
| 3′NLS | SV40 | 249 | CCAAAAAAGAAGAGAAAGGTA |
| tag | HA | 40568 | TACCCATATGATGTCCCTGACTACGCT |
| linker | GS | 40569 | GGATCCTAA |
| buffer seq | | 40570 | GAATTCCTAGAGCTCGCTGATCAGCCTCGA |
| Poly(A) | BgH | 40571 | CTGTGCCTTCTAGTTGCCAGCCATCTGTTGTTTGCCCCTCCCCCGTGCCTTCCTTG |
| | polyA | | ACCCTGGAAGGTGCCACTCCCACTGTCCTTTCCTAATAAAATGAGGAAATTGCATC |
| | | | GCATTGTCTGAGTAGGTGTCATTCTATTCTGGGGGGTGGGGTGGGGCAGGACAGCA |
| | | | AGGGGGAGGATTGGGAAGAGAATAGCAGGCATGCTGGGGA |
| buffer seq | | 40572 | GGTACCGT |
| Pol III | U6 | 40573 | GAGGGCCTATTTCCCATGATTCCTTCATATTTGCATATACGATACAAGGCTGTTAG |
| promoter | promoter | | AGAGATAATTGGAATTAATTTGACTGTAAACACAAAGATATTAGTACAAAATACGT |
| | | | GACGTAGAAAGTAATAATTTCTTGGGTAGTTTGCAGTTTTAAAATTATGTTTTAAA |
| | | | ATGGACTATCATATGCTTACCGTAACTTGAAAGTATTTCGATTTCTTGGCTTTATA |
| | | | TATCTTGTGGAAAGGAC |
| buffer | | 40574 | GAAACACC |
| buffer | | 40575 | TTTTTTTTGGCGGCCGC |
| 3′ITR | | 40576 | AGGAACCCCTAGTGATGGAGTTGGCCACTCCCTCTCTGCGCGCTCGCTCGCTCACT |
| | | | GAGGCCGGGCGACCAAAGGTCGCCCGACGCCCGGGCTTTGCCCGGGCGGCCTCAGT |
| | | | GAGCGAGCGAGCGCGCAGCTGCCTGCAGG |

TABLE 21
Sequence of CasX utilized in AAV

| CasX | SEQ ID NO: | Nucleic Acid Sequence |
|---|---|---|
| 438 | 40577 | ND |
| 491 | 40578 | ND |
| 527 | 40579 | ND |
| 535 | 40580 | ND |
| 536 | 40581 | ND |
| 537 | 40582 | ND |
| 583 | 40583 | ND |
| 668 | 40584 | ND |
| 672 | 40585 | ND |
| 669 | 40586 | ND |
| 670 | 40587 | ND |
| 676 | 40588 | ND |

* ND = no description sequence provided in sequence listing.

[0812] Reporter cell lines: A neural progenitor cell line isolated from the Ai9-tdTomato was cultured in suspension in pre-equilibrated mNPC medium (DMEM/F12 with GlutaMax, 10 mM HEPES, 1×MEM Non-Essential Amino Acids, 1× penicillin/streptomycin, 1:1000 2-mercaptoethanol, 1× B-27 supplement, minus vitamin A, 1× N2 with supplemented growth factors bFGF and EGF). Prior to testing, cells were dissociated using accutase, with gentle resuspension, monitoring for complete separation of the neurospheres. Cells were then quenched with media, spun down and resuspended in fresh media. Cells were counted and directly used for nucleofection or 10,000 cells were plated in a 96-well plate coated with PLF (1× Poly-DL-ornithine hydrobromide, 10 mg/mL in sterile diH20, 1× Laminin, and 1× Fibronectin), 2 days prior to AAV transduction.

[0813] A HEK293T dual reporter cell line was generated by knocking into HEK293T cells two transgene cassettes that constitutively expressed exon 1 of the human RHO gene linked to GFP and exon 1 of the human P23H.RHO gene linked to mscarlet. The modified cells were expanded by serial passage every 3-5 days and maintained in Fibroblast (FR) medium, consisting of Dulbecco's Modified Eagle Medium (DMEM; Corning Cellgro, #10-013-CV) supplemented with 10% fetal bovine serum (FBS; Seradigm, #1500-500), and 100 Units/mL penicillin and 100 mg/mL streptomycin (100×-Pen-Strep; GIBCO #15140-122), and can additionally include sodium pyruvate (100×, Thermofisher #11360070), non-essential amino acids (100× ThermoFisher #11140050), HEPES buffer (100× ThermoFisher #15630080), and 2-mercaptoethanol (1000× ThermoFisher #21985023). The cells were incubated at 37° C. and 5% CO2. After 1-2 weeks, GFP+/mscarlet+ cells were bulk sorted into FB medium. The reporter lines were expanded by serial passage every 3-5 days and maintained in FB medium in an incubator at 37° C. and 5% C02. Reporter clones were generated by a limiting dilution method. The clonal lines were characterized via flow cytometry, genomic sequencing, and functional modification of the RHO locus using a previously validated RHO targeting CasX molecule. The optimal reporter lines were identified as ones that: i) had a single copies of WTRHO.GFP and mutRHO.mscarlet correctly integrated per cell; ii) maintained doubling times equivalent to unmodified cells; and iii) resulted in reduction in GFP and mscarlet fluorescence upon disruption of the RHO gene when assayed using the methods described below.

[0814] Plasmid nucleofection: AAV cis-plasmids driving expression of the CasX-scaffold-guide system were nucleofected in mNPCs using the Lonza P3 Primary Cell 96-well Nucleofector Kit. For the ARPE-19 line, the Lonza SF solution and supplement was used. Plasmids were diluted to concentrations of 200 ng/p, 100 ng/μL. 5 μL of DNA per construct was added to the P3 or SF solution containing 200,000 tdTomato mNPCs or ARPE-19 cells respectively. The combined solution was nucleofected using a Lonza 4D Nucleofector System according to manufacturer's guidelines. Following nucleofection, the solution was quenched with appropriate culture media. The solution was then aliquoted in triplicate (approx. 67,000 cells per well) in a 96-well plate. 48 hours after transfection, treated mNPCs were replenished with fresh mNPC media containing growth factors and treated ARPE-19 cells were replenished with fresh FB medium. 5 days after transfection, tdTomato mNPCs and ARPE-19 cells were lifted and activity was assessed by FACS.

[0815] AAV vectors production: Suspension HEK293T cells were adapted from parental HEK293T and grown in FreeStyle 293 media. For screening purposes, small scale cultures (20-30 mL cultured in 125 mL Erlenmeyer flasks and agitated at 110 rpm) were diluted to a density of 1.5e+6 cells/mL on the day of transfection. Endotoxin-free pAAV plasmids with the transgene flanked by ITR repeats were co-transfected with plasmids supplying the adenoviral helper genes for replication and AAV rep/cap genome using PEIMax (Polysciences) in serum-free OPTIMEM media. Cultures were supplemented with 10% CDM4HEK293 (HyClone) 3 hours post-transfection. Three days later, cultures were centrifuged at 1000 rpm for 10 minutes to separate the supernatant from the cell pellet. The supernatant was mixed with 40% PEG 2.5M NaCl (8% final concentration) and incubated on ice for at least 2 hours to precipitate AAV viral particles. The cell pellet, containing the majority of the AAV vectors, was resuspended in lysis media (0.15M NaCl, 50 mM Tris HCl, 0.05% Tween, pH 8.5), sonicated on ice (15 seconds, 30% amplitude) and treated with Benzonase (250 U/μL, Novagen) for 30 minutes at 37° C. Crude lysate and PEG-treated supernatant were then spin at 4000 rpm for 20 minutes at 4° C. to resuspend the PEG precipitated AAV (pellet) with cell debris-free crude lysate (supernatant) clarified further using a 0.45 μM filter.

[0816] To determine the viral genome titer, 1 μL from crude lysate viruses was digested with DNase and ProtK, followed by quantitative PCR. 5 μL of digested virus was used in a 25 μL qPCR reaction composed of IDT primetime master mix and a set of primer and 6′FAM/Zen/IBFQ probe (IDT) designed to amplify the CMV promoter region (Fwd 5′-CATCTACGTATTAGTCATCGCTATTACCA-3′ (SEQ ID NO: 40801); Rev 5′-GAAATCCCCGTGAGTCAAACC-3′ (SEQ ID NO: 40802), Probe 5′-TCAATGGGCGTGGATAG-3′ (SEQ ID NO: 40803) or a 62 bp-fragment located in the AAV2-ITR (Fwd 5′-GGAACCCCTAGTGATGGAGTT-3′ (SEQ ID NO: 40804); Rev 5′-CGGCCTCAGTGAGCGA-3′ (SEQ ID NO: 40805), Probe 5′-CACTCCCTCTCTGCGCGCTCG-3′ (SEQ ID NO: 40806). Ten-fold serial dilutions (5 μl each of 2e+9 to 2e+4 DNA copies/mL) of an AAV ITR plasmid was used as reference standards to calculate the titer (viral genome (vg)/mL) of viral samples. QPCR program was set up as an initial denaturation step at 95′C for 5 minutes, followed by 40 cycles of denaturation at 95′C for 1 min, and annealing/extension at 60° C. for 1 min.

[0817] AAV transduction: 10,000 cells/well of mNPCs were seeded on PLF-coated wells in 96-well plates 48-hours before AAV transduction. All viral infection conditions were performed in triplicate, with normalized number of vg among experimental vectors, in a series of 3-fold dilution of multiplicity of infection (MOI) ranging from ˜1.0e+6 to 1.0e+4 vg/cell. Calculations were based on an estimated number of 20,000 cells per well at the time of transfection. Final volume of 50 μL of AAV vectors diluted in pre-equilibrated mNPC medium supplemented with bFGF/EGF growth factors (20 ng/ml final concentration) were applied to each well. 48 hours post-transfection, complete media change was performed with fresh media supplemented with growth factors. Editing activity (tdT+ cell quantification) was assessed by FACS 5 days post-transfection.

[0818] Assessing editing activity by FACS: 5 days after transfection, treated tdTomato mNPCs or ARPE-19 cells in 96-well plates were washed with dPBS and treated with 50 μL TrypLE and Trypsin (0.25%) for 15 and 5 minutes respectively. Following cell dissociation, treated wells were quenched with media containing DMEM, 10% FBS and 1× penicillin/streptomycin. Resuspended cells were transferred to round-bottom 96-well plates and centrifuged for 5 min at 1000× g. Cell pellets were then resuspended with dPBS containing 1×DAPI, and plates were loaded into an Attune NxT Flow Cytometer Autosampler. The Attune NxT flow cytometer was run using the following gating parameters: FSC-A×SSC-A to select cells, FSC-H×FSC-A to select single cells, FSC-A×VL1-A to select DAPI-negative alive cells, and FSC-A×YL1-A to select tdTomato positive cells.

[0819] NGS analysis of indels at mRHO exon 1 locus: 5 days after transfection, treated tdTomato mNPCs in 96-well plates were washed with dPBS and treated with 50 μL TrypLE and trypsin (0.25%) for 15 and 5 minutes respectively. Following cell dissociation, treated wells were quenched with media containing DMEM, 10% FBS and 1× penicillin/streptomycin. Cells were then spun down and resulting cell pellets washed with PBS prior to processing them for gDNA extraction using the Zymo mini DNA kit according to the manufacturer's instructions. For assessing editing levels occurring at the mouse RHO exon 1 locus, amplicons were amplified from 200 ng of gDNA with a set of primers (Fwd 5′-ACACTCTTTCCCTACACGACGCTCTTCCGATCTNNNNNNNGCAGCCTTGGTCTCTGT CTACG-3′ (SEQ ID NO: 40595); Rev 5′-GTGACTGGAGTTCAGACGTGTGCTCTTCCGATCTGCCCCAGTCTCTCTGCTCATACC-3′ (SEQ ID NO: 40596), bead-purified (Beckman coulter, Agencourt Ampure XP) and then re-amplified to incorporate illumina adapter sequence. Specifically, these primers contained an additional sequence at the 5′ ends to introduce Illumina read and 2 sequences as well as a 16 nt random sequence that functions as a unique molecular identifier (UMI). Quality and quantification of the amplicon was assessed using a Fragment Analyzer DNA analyzer kit (Agilent, dsDNA 35-1500 bp). Amplicons were sequenced on the Illumina Miseq according to the manufacturer's instructions. Raw fastq files from sequencing were processed as follows: (1) the sequences were trimmed for quality and for adapter sequences using the program cutadapt (v. 2.1); (2) the sequences from read 1 and read 2 were merged into a single insert sequence using the program flash2 (v2.2.00); and (3) the consensus insert sequences were run through the program CRISPResso2 (v 2.0.29), along with the expected amplicon sequence and the spacer sequence. This program quantifies the percent of reads that were modified in a window around the 3′ end of the spacer (30 bp window centered at −3 bp from 3′ end of spacer). The activity of the CasX molecule was quantified as the total percent of reads that contain insertions, substitutions and/or deletions anywhere within this window.

### Results

[0820] Different editing experiments were conducted to quantify on-target cleavage mediated by CasX 491 paired with gRNA scaffold variants (guides 174 & 229-237) with different spacers targeting multiple genomic loci of interest. Constructs were cloned into the AAV backbone p59, flanked by ITR2 sequences, driving expression of the protein Cas 491 under the control of a CMV promoter, as well as the scaffold-spacer under the control of the human U6 promoter.

[0821] The mNPC-tdT reporter cell line was used to assess single-cut efficiency at the endogenous mouse RHO exon 1 locus (spacer 11.30, CTC PAM). A dual reporter system integrated in a ARPE-19 derived cell line was also used to assess on-target editing at the exogenously expressed human WT Rho locus (spacer 11.1, CTC PAM).

[0822] Scaffold variants with spacer 11.30 were tested via nucleofection in the mouse NPC cell line at two different doses, 1000 ng and 500 ng. Constructs were compared to the current benchmark gRNA scaffold 174 activity. Constructs expressing scaffold variants 231, 233, 234, 235 performed at higher levels than ones with scaffold 174.11.30 (FIGS. 43A and 43B). Scaffold 235 displayed a 2-fold increased activity at mRHO exon 1 locus compared to gRNA scaffold 174. We further validated that scaffold 235 consistently improved activity without increased off-target cleavage by nucleofecting the dual reporter ARPE-19 cell line with construct p590.4910.1740.11.1 and p590.4910.2350.11.1, as well as a non-target spacer control. Spacer 11.1 was targeting the exogenously expressed hRHO-GFP gene. Scaffold 235 displayed 3-fold increased activity compared to 174 (9% vs 3% of Rho-GFP− cells respectively, FIGS. 44A and 44B). Allele-specificity was assessed by looking at the frequency of hP23H-RHO-Scarlett-cell population, whose sequence differs from the wild-type by 1 bp.

[0823] We also sought to demonstrate that these scaffold variants packaged efficiently in AAV and remained potent when delivered virally. mNPC transduced with AAV vectors expressing guide scaffold 235 with spacer 11.30 (on-target, mouse WT RHO) showed increased activity at the on-target locus (>5-fold increase, FIGS. 45A and 45B) compared to ones infected with AAV.491.174.11.30 at 3.0e+5 MOI, with significant no off-target indels detectable with both AAV.491.174.11.31 and AAV.491.235.11.31 vectors targeting the P23H-RHO SNP, respectively.

[0824] Assessing effects of spacer length: Another set of experiments was conducted to test whether spacer length variants could improve on-target activity. Spacers 11.39, 11.38 and spacer 11.37 (19 nt P23H RHO), 11.36 (18 nt P23H RHO) were designed from parental spacer 11.30 (20 nt WT RHO) and 11.31 (20 nt P23H RHO), respectively, harboring 1 or 2 bp truncations on the 3′ end of the sequence. mfNPC-tdT cells were nucleofected with 1000 ng and 500 ng of constructs p590.4910.1740.11.30 (20 nt WT RHO), p590.4910.1740.11.39 (19 nt WT RHO), p49.491.174.11.38 (18 nt WT RHO), and editing levels were assessed 5 days later. All truncated spacer versions improved editing levels (FIGS. 46A and 46C), with highest improvement observed with p59.491.11.39 constructs (˜2-fold improvement achieved with the 19 bp spacer relative to the 20 bp spacer length construct). No increase in off-target cleavage was observed with truncation spacer variants of the 11.31 spacer targeting the mouse P23H-RHO locus (FIG. 46B).

[0825] These results support that scaffold variants with structural mutations can be engineered with increased activity in dual reporter systems investigating therapeutically relevant genomic targets such as the mouse and human RHO exon 1 loci. Furthermore, while the newly characterized scaffold displayed overall >2-fold increase in activity, no off-target cleavage with a 1-bp mismatch spacer region was detected. This is relevant for allele-specific therapeutic strategy such as adRP P23H Rho, which mutated allele differs from WT sequence by 1 nucleotide, targeted by spacer 11.31. This study further validates the use of guide scaffold 235 in AAV vectors designed for P23H RHO rescue and genotoxic studies as well as for other therapeutic targets.

### Example 13: Improved Scaffold and Guide Variants Demonstrate Enhanced On-Target Activity In Vivo

[0826] Experiments were conducted to demonstrate that engineered CasX & sgRNA-guide and spacer variants harboring structural mutations that improve selectivity and on-target activity lead to increase edits when delivered in vivo to photoreceptors in the mouse retina, with a spacer targeting the P23 residue at a therapeutically relevant level in the WT. Here, we assessed whether vector expressing CasX variant 491, guide variant 235 and spacer 11.39 improves editing levels compared to parental CasX 491, guide variant 174 and spacer 11.30 in vivo.

### Materials and Methods:

[0827] Generation of AAV Plasmids and Viral Vectors: The CasX variant 491 under the control of the RHO promoter, and sgRNA.guide variant 174 with spacer 11.30 and spacer 11.31 (AAGTGGCTCCGCACCACGCC (SEQ ID NO: 40503)) or sgRNA-guide variant 235 with spacer 11.39 (AAGGGGCTCCGCACCACGCC (SEQ ID NO: 40531)) and 11.37 (AAGTGGCTCCGCACCACGC (SEQ ID NO: 40535)) targeting mouse RHO exon 1 at P23 residues) under the U6 promoter were cloned into the p59 plasmid flanked with AAV2 ITR.

[0828] Cloning: Each part in the AAV genome was separated by restriction enzyme sites to allow for modular cloning. Parts were ordered as gene fragments from Twist, PCR amplified, and digested with corresponding restriction enzymes, cleaned, then ligated into a vector also digested with the same enzymes. Cas X variant 491 under the RHO promoter and scaffold variants 174 and 235, under the control of the human U6 promoter, were cloned into an AAV backbone, flanked by AAV2 ITRs. Spacers 11.30, 11.31 and variants 11.39, 11.37 were cloned respectively into pAAV.RHO.491.174 and pAAV.RHO.491.235 using Golden Gate cloning. New AAV constructs were then transformed into chemically competent E. coli (Stbl3s). Validated constructs were maxi-prepped. To assess the quality of maxi-preps, constructs were processed in two separate digests with XmaI (which cuts at several sites in each of the ITRs) and XhoI which cuts once in the AAV genome. If the plasmid was >90% supercoiled, the correct size, and the ITRs were intact, the construct was subsequently used for AAV vector production.

[0829] AAV vectors production: Suspension HEK293T cells were adapted from parental HEK293T and grown in FreeStyle 293 media. 500 mL cultures (1 L Erlenmeyer flasks, agitated at 110 rpm) were diluted to a density of 2e+6 cells/mL on the day of transfection. Endotoxin-free pAAV plasmids with the transgene flanked by ITR repeats were co-transfected with plasmids supplying the adenoviral helper genes for replication and AAV rep/cap genome using PEIMax (Polysciences) in serum-free OPTIMEM media. Cultures were supplemented with 10% CDM4HEK293 (HyClone) 3 hours post-transfection. Three days later, cultures were centrifuged at 1000 rpm for 10 minutes to separate the supernatant from the cell pellet. The supernatant was mixed with 40% PEG 2.5M NaCl (8% final concentration) and incubated on ice for at least 2 hours to precipitate AAV viral particles. The cell pellet, containing the majority of the AAV vectors, was resuspended in lysis media (0.15 M NaCl, 50 mM Tris HCl, 0.05% Tween, pH 8.5), sonicated on ice (15 seconds, 30% amplitude) and treated with Benzonase (250 U/μL, Novagen) for 30 minutes at 37° C. Crude lysate and PEG-treated supernatant were then spin at 4000 rpm for 20 minutes at 4° C. to resuspend the PEG precipitated AAV (pellet) with cell debris-free crude lysate (supernatant) clarified further using a 0.45 μM filter. AAV lysates were purified using affinity chromatography (POROS CaptureSelect AAVX, ThermoFisher). Eluate was buffer exchanged and concentrated in PBS+200 mM NaCl+0.001% Pluronic.

[0830] To determine the viral genome titer, 1 μL from crude lysate viruses was digested with DNase and ProtK, followed by quantitative PCR. 5 μL of digested virus was used in a 25 μL qPCR reaction composed of IDT primetime master mix and a set of primer and 6′FAM/Zen/IBFQ probe (IDT) designed to amplify a 62 bp-fragment located in the AAV2-ITR (Fwd 5′-GGAACCCCTAGTGATGGAGTT-3′ (SEQ ID NO: 40804); Rev 5′-CGGCCTCAGTGAGCGA-3′ (SEQ ID NO: 40805), Probe 5′-CACTCCCTCTCTGCGCGCTCG-3′ (SEQ ID NO: 40806)). An AAV ITR plasmid was used as reference standards to calculate the titer (viral genome (vg)/mL) of viral samples. QPCR program was set up as: initial denaturation step at 95′C for 5 minutes, followed by 40 cycles of denaturation at 95′C for 1 min, and annealing/extension at 60° C. for 1 min.

[0831] Subretinal injections C57BL6J mice were obtained from the Jackson Laboratories and were maintained in a normal 12 hour light/dark cycle. Subretinal injections were performed on 3-4 weeks old mice. Mice were anesthetized with isoflurane inhalation. Proparacaine (0.5%) was applied topically on the cornea and the eyes were dilated with drops of tropicamide (1%) and phenylephrine (2.5%). Eyes were kept lubricated with genteal gel during the surgery. Under a surgical microscope, an ultrafine 30 ½-gauge disposable needle was passed through the sclera, at the equator and next to the limbus, to create a small hole into the vitreous cavity. Using a blunt-end needle, 1-1.5 μL of virus was injected directly into the subretinal space, between the RPE and retinal layer. Each mouse from the experimental groups was injected with 1.5.0e+9 viral genome (vg)/eye.

[0832] NGS analysis: 3 weeks post-injection, animals were sacrificed and the eyes enucleated in fresh PBS. Whole retinae were isolated from the eye cups and processed for gDNA extraction using the DNeasy Blood & Tissue Kit (Qiagen) according to the manufacturer's instructions. Amplicons were amplified from 200 ng of gDNA with a set of primers (Fwd 5′-ACACTCTTTCCCTACACGACGCTCTTCCGATCTNNNNNNNGCAGCCTTGGTCTCTGT CTACG-3′ (SEQ ID NO: 40595); Rev 5′-GTGACTGGAGTTCAGACGTGTGCTCTTCCGATCTGCCCCAGTCTCTCTGCTCATACC-3′ (SEQ ID NO: 40596)) targeting the mouse RHO, exon 1 locus, bead-purified (Beckman coulter, Agencourt Ampure XP) and then re-amplified to incorporate illumina adapter sequence. Specifically, these primers contained an additional sequence at the 5′ ends to introduce Illumina read and 2 sequences, as well as a 16 nt random sequence that functions as a unique molecular identifier (UMI). Quality and quantification of the amplicon was assessed using a Fragment Analyzer DNA analyzer kit (Agilent, dsDNA 35-1500 bp). Amplicons were sequenced on the Illumina Miseq according to the manufacturer's instructions. Raw fastq files from sequencing were processed as follows: (1) the sequences were trimmed for quality and for adapter sequences using the program cutadapt (v. 2.1); (2) the sequences from read 1 and read 2 were merged into a single insert sequence using the program flash2 (v2.2.00); and (3) the consensus insert sequences were run through the program CRISPResso2 (v 2.0.29), along with the expected amplicon sequence and the spacer sequence. This program quantifies the percent of reads that were modified in a window around the 3′ end of the spacer (30 bp window centered at −3 bp from 3′ end of spacer). The activity of the CasX molecule was quantified as the total percent of reads that contain insertions, substitutions and/or deletions anywhere within this window.

### Results:

[0833] The benchmark vector, AAV.491.174.11.30 (on-target) achieved ˜8% editing across all samples (FIG. 47A; n=8 retinas). A similar vector with spacer 11.31 (off-target, 1 bp mismatch from 11.30 targeting P23H-RHO SNP) showed background level of editing (˜0.4%). An AAV vector expressing scaffold variant 235 and spacer 11.39 achieved over a 2-fold improvement relative to the AAV.491.174.11.30 parental vector (FIG. 47B), with a mean of 16% editing, and as high as 25% in some retinas. This increase in on-target editing remained selective, as no increase in off-target with spacer 11.37 (targeting P23H-RHO SNP, 1 bp-mismatch compared to spacer 11.39) levels compared to AAV.491.174.11.31 parental vector.

[0834] These experiments demonstrate proof-of-concept that CasX 491 expression driven by a rod photoreceptor-selective promoter with scaffold 174, and a spacer targeting the mouse P23 RHO locus can achieve therapeutic-relevant levels of edits at the P23 mouse locus when subretinally delivered via AAV in the murine retina. These results also support that editing levels achieved from engineered sgRNA guide (235) and spacer variants (11.39) screened previously in vitro translate as well in vivo, and retain allele-specific selectivity. This study further validates the use of guide scaffold 235 in AAV vectors designed for P23H RHO rescue and genotoxic studies, as well as for other therapeutic targets.

[0835] The results of Examples 11 and 12 support that scaffold variants with structural mutation can be engineered with increased activity in dual reporter systems investigating therapeutically relevant genomic targets such as the mouse and human RHO exon 1 loci. Furthermore, while the newly characterized 235 scaffold displayed an overall >2-fold increase in activity, no off-target cleavage with 1-bp mismatch spacer region was detected. This is relevant for allele-specific therapeutic strategy such as adRP P23H Rho, which mutated allele differs from WT sequence by 1 nucleotide, targeted by spacer 11.31. The present study was conducted to further validate the use of guide scaffold 235 in AAV vectors designed for mouse P23H RHO rescue and genotoxic studies, as well as for other therapeutic targets.

### Example 14: Improved CasX Variants Demonstrate Enhanced On-Target Activity In Vitro

[0836] The CasX protospacer adjacent motif allows for genomic targeting with precision, which is necessary for various genome editing therapeutic applications, such as autosomal dominant RHO, which requires an allele-specific targeting of the P23H mutation without altering the wild-type sequence.

[0837] Experiments were conducted to investigate whether rationally-designed engineered CasX nucleases, with introduced mutations predicted to increase CTC-PAM mediated on-target activity while keeping fidelity high, and with reduced off-target events, improved editing levels at the endogenous mouse RHO locus when delivered in vivo to rod photoreceptors cells,

[0838] Additionally, experiments were conducted to further validate the use of guide scaffold 235 in AAV vectors designed for mouse P23H RHO rescue and genotoxic studies, as well as for other therapeutic targets.

### Methods:

[0839] CasX protein variants identified in different assays looking at PAM activity were selected for their increased activity at CTC PAM. The CasX proteins were cloned into an AAV transgene construct for plasmid and viral vector validation. We conceptually broke up the AAV transgene between ITRs into different parts, which consisted of our therapeutic cargo and accessory elements relevant to expression in mammalian cells and our nuclease-guide RNA complex (Protein, scaffold, spacer).

[0840] Cloning: Each part in the AAV genome was separated by restriction enzyme sites to allow for modular cloning. Parts were ordered as gene fragments from Twist, PCR amplified, and digested with corresponding restriction enzymes, cleaned, then ligated into a vector also digested with the same enzymes. New AAV constructs were then transformed into chemically competent E coli (Stbl3s). Validated constructs were maxi-prepped. To assess the quality of maxi-preps, constructs were processed in two separate digests with XmaI (which cuts at several sites in each of the ITRs) and XhoI which cuts once in the AAV genome. These digests and the uncut construct were then run on a 1% agarose gel. If the plasmid was >90% supercoiled, the correct size, and the ITRs were intact, the construct moved on to be tested via nucleofection and subsequently used for AAV vector production.

[0841] Reporter cell lines: An immortalized neural progenitor cell line isolated from the Ai9-tdTomato was cultured in suspension in pre-equilibrated mNPC medium (DMEM/F12 with GlutaMax, 10 mM HEPES, 1×MEM Non-Essential Amino Acids, 1× penicillin/streptomycin, 1:1000 2-mercaptoethanol, 1× B-27 supplement, minus vitamin A, 1× N2 with supplemented growth factors bFGF and EGF. Prior to testing, cells were lifted using accutase, with gentle resuspension, monitoring for complete separation of the neurospheres. Cells were then quenched with media, spun down and resuspended in fresh media. Cells were counted and directly used for nucleofection or 10,000 cells were plated in a 96-well plate coated with PLF (1× Poly-DL-ornithine hydrobromide, 10 mg/mL in sterile diH20, 1× Laminin, and 1× Fibronectin), 2 days prior to AAV transduction.

[0842] A HEK293T dual reporter cell line was generated by knocking into HEK293T cells two transgene cassettes that constitutively expressed exon 1 of the human RHO gene linked to GFP and exon 1 of the human P23H.RHO gene linked to mscarlet. The modified cells were expanded by serial passage every 3-5 days and maintained in Fibroblast (FB) medium, consisting of Dulbecco's Modified Eagle Medium (DMEM; Corning Cellgro, #10-013-CV) supplemented with 10% fetal bovine serum (FBS; Seradigm, #1500-500), and 100 Units/mL penicillin and 100 mg/mL streptomycin (100×-Pen-Strep; GIBCO #15140-122), and can additionally include sodium pyruvate (100×, Thermofisher #11360070), non-essential amino acids (100× ThermoFisher #11140050), HEPES buffer (100× ThermoFisher #15630080), and 2-mercaptoethanol (1000× ThermoFisher #21985023). The cells were incubated at 37° C. and 5% CO2. After 1-2 weeks, GFP+/mscarlet+ cells were bulk sorted into FB medium. The reporter lines were expanded by serial passage every 3-5 days and maintained in FB medium in an incubator at 37° C. and 5% C02. Reporter clones were generated by a limiting dilution method. The clonal lines were characterized via flow cytometry, genomic sequencing, and functional modification of the RHO locus using a previously validated RHO targeting CasX molecule. The optimal reporter lines were identified as ones that: i) had a single copies of WT-RHO.GFP and P23H-RHO.mscarlet correctly integrated per cell; ii) maintained doubling times equivalent to unmodified cells; and iii) resulted in reduction in GFP and mscarlet fluorescence upon disruption of the RHO gene when assayed using the methods described below.

[0843] Plasmid nucleofection: AAV cis-plasmids driving expression of the CasX-scaffold-guide system were nucleofected in mNPCs using the Lonza P3 Primary Cell 96-well Nucleofector Kit. For the ARPE-19 line, the Lonza SF solution and supplement was used. Plasmids were diluted to concentrations of 200 ng/ul, 100 ng/μL. 5 μL of DNA per construct was added to the P3 or SF solution containing 200,000 tdTomato mNPCs or ARPE-19 cells respectively. The combined solution was nucleofected using a Lonza 4D Nucleofector System according to manufacturer's guidelines. Following nucleofection, the solution was quenched with appropriate culture media. The solution was then aliquoted in triplicate (approx. 67,000 cells per well) in a 96-well plate. 48 hours after transfection, treated cells were replenished with fresh mNPC media containing growth factors. 5 days after transfection, tdTomato mNPCs were lifted and activity was assessed by FACS.

[0844] AAV vectors production: Suspension HEK293T cells were adapted from parental HEK293T and grown in FreeStyle 293 media. For screening purposes, small scale cultures (20-30 mL cultured in 125 mL Erlenmeyer flasks and agitated at 110 rpm) were diluted to a density of 1.5e+6 cells/mL on the day of transfection. Endotoxin-free pAAV plasmids with the transgene flanked by ITR repeats were co-transfected with plasmids supplying the adenoviral helper genes for replication and AAV rep/cap genome using PEIMax (Polysciences) in serum-free OPTIMEM media. Cultures were supplemented with 10% CDM4HEK293 (HyClone) 3 hours post-transfection. Three days later, cultures were centrifuged at 1000 rpm for 10 minutes to separate the supernatant from the cell pellet. The supernatant was mixed with 40% PEG 2.5M NaCl (8% final concentration) and incubated on ice for at least 2 hours to precipitate AAV viral particles. The cell pellet, containing the majority of the AAV vectors, was resuspended in lysis media (0.15M NaCl, 50 mM Tris HCl, 0.05% Tween, pH 8.5), sonicated on ice (15 seconds, 30% amplitude) and treated with Benzonase (250 U/μL, Novagen) for 30 minutes at 37° C. Crude lysate and PEG-treated supernatant were then spin at 4000 rpm for 20 minutes at 4° C. to resuspend the PEG precipitated AAV (pellet) with cell debris-free crude lysate (supernatant). clarified further using a 0.45 μM filter.

[0845] To determine the viral genome titer, 1 μL from crude lysate viruses was digested with DNase and ProtK, followed by quantitative PCR. 5 μL of digested virus was used in a 25 μL qPCR reaction composed of IDT primetime master mix and a set of primer and 6′FAM/Zen/IBFQ probe (IDT) designed to amplify the CMV promoter region (Fwd 5′-CATCTACGTATTAGTCATCGCTATTACCA-3′ (SEQ ID NO: 40801)); Rev 5′-GAAATCCCCGTGAGTCAAACC-3′ (SEQ ID NO: 40802)), Probe 5′-TCAATGGGCGTGGATAG-3′ (SEQ ID NO: 40803)) or a 62 nucleotide-fragment located in the AAV2-ITR (Fwd 5′-GGAACCCCTAGTGATGGAGTT-3′ (SEQ ID NO: 40804); Rev 5′-CGGCCTCAGTGAGCGA-3′ (SEQ ID NO: 40805), Probe 5′-CACTCCCTCTCTGCGCGCTCG-3′). Ten-fold serial dilutions (5 μl each of 2e+9 to 2e+4 DNA copies/mL) of an AAV ITR plasmid was used as reference standards to calculate the titer (viral genome (vg)/mL) of viral samples. QPCR program was set up as: initial denaturation step at 95′C for 5 minutes, followed by 40 cycles of denaturation at 95′C for 1 min and annealing/extension at 60° C. for 1 min.

[0846] AAV transduction: 10,000 cells/well of mNPCs were seeded on PLF-coated wells in 96-well plates 48-hours before AAV transduction. All viral infection conditions were performed in triplicate, with normalized number of vg among experimental vectors, in a series of 3-fold dilution of multiplicity of infection (MOI) ranging from ˜1.0e+6 to 1.0e+4 vg/cell. Calculations were based on an estimated number of 20,000 cells per well at the time of transfection. Final volumes of 50 μL of AAV vectors diluted in pre-equilibrated mNPC medium supplemented with bFGF/EGF growth factors (20 ng/ml final concentration) were applied to each well. 48 hours post-transfection, complete media change was performed with fresh media supplemented with growth factors. Editing activity (tdT+ cell quantification) was assessed by FACS 5 days post-transfection.

[0847] Assessing editing activity by FACS: 5 days after transfection, treated tdTomato mNPCs or ARPE-19 cells in 96-well plates were washed with dPBS and treated with 50 μL TrypLE and Trypsin (0.25%) for 15 and 5 minutes, respectively. Following cell dissociation, treated wells were quenched with media containing DMEM, 10% FBS and 1× penicillin/streptomycin. Resuspended cells were transferred to round-bottom 96-well plates and centrifuged for 5 min at 1000× g. Cell pellets were then resuspended with dPBS containing 1×DAPI, and plates were loaded into an Attune NxT Flow Cytometer Autosampler. The Attune NxT flow cytometer was run using the following gating parameters: FSC-A×SSC-A to select cells, FSC-H×FSC-A to select single cells, FSC-A×VL1-A to select DAPI-negative alive cells, and FSC-A×YL1-A to select tdTomato positive cells.

[0848] NGS analysis of indels at mRHO exon 1 locus: 5 days after transfection, treated tdTomato mNPCs in 96-well plates were washed with dPBS and treated with 50 μL TrypLE and trypsin (0.25%) for 15 and 5 minutes, respectively. Following cell dissociation, treated wells were quenched with media containing DMEM, 10% FBS and 1× penicillin/streptomycin. Cells were then spun down and resulting cell pellets washed with PBS prior to processing them for gDNA extraction using the Zymo mini DNA kit according to the manufacturer's instructions. For assessing editing levels occurring at the mouse RHO exon 1 locus, amplicons were amplified from 200 ng of gDNA with a set of primers (Fwd 5′-ACACTCTTTCCCTACACGACGCTCTTCCGATCTNNNNNNNGCAGCCTTGGTCTCTGT CTACG-3′ (SEQ ID NO: 40595); Rev 5′-GTGACTGGAGTTCAGACGTGTGCTCTTCCGATCTGCCCCAGTCTCTCTGCTCATACC-3′ (SEQ ID NO: 40596)), bead-purified (Beckman coulter, Agencourt Ampure XP) and then re-amplified to incorporate illumina adapter sequence. Specifically, these primers contained an additional sequence at the 5′ ends to introduce Illumina read and 2 sequences as well as a 16 nt random sequence that functions as a unique molecular identifier (UMI). Quality and quantification of the amplicon was assessed using a Fragment Analyzer DNA analyzer kit (Agilent, dsDNA 35-1500 bp). Amplicons were sequenced on the Illumina Miseq according to the manufacturer's instructions. Raw fastq files from sequencing were processed as follows: (1) the sequences were trimmed for quality and for adapter sequences using the program cutadapt (v. 2.1); (2) the sequences from read 1 and read 2 were merged into a single insert sequence using the program flash2 (v2.2.00); and (3) the consensus insert sequences were run through the program CRISPResso2 (v 2.0.29), along with the expected amplicon sequence and the spacer sequence. This program quantifies the percent of reads that were modified in a window around the 3′ end of the spacer (30 bp window centered at −3 bp from 3′ end of spacer). The activity of the CasX molecule was quantified as the total percent of reads that contain insertions, substitutions and/or deletions anywhere within this window

### Results:

[0849] Engineered mutations in prior assays identified CasX variants with the ability to increase both overall activity, specificity of the nuclease, as well as increased activity with spacers targeting CTC-PAM sites. These mutations to the CasX 491 protein gave rise to CasX variant proteins 515, 527, 528, 535, 536 and 537 (see Table 3 for sequences).

[0850] Multiple editing screens were conducted to quantify on-target editing levels mediated by these CasX variant proteins paired with gRNA scaffolds 174 or 235 and different spacers targeting multiple genomic loci of interest (the encoding sequences of the guides and spacers are presented in Tables 18 and 19). Constructs were cloned into the AAV backbone p59, flanked by ITR2 sequences, driving expression of the Cas X under the control of a CMV promoter, as well the scaffold-spacer under the control of the human U6 promoter. The mNPC-tdT reporter cell line was used to assess single-cut efficiency at the endogenous mouse RHO exon 1 locus (spacer 11.39, CTC PAM, FIG. 48A). A dual reporter system integrated in a ARPE-19 derived cell line was also used to assess on-target editing at the exogenously expressed human WT Rho locus (spacer 11.41, CTC PAM) or at the P23H-RHO locus (spacer 11.43, CTC PAM, FIG. 48B).

[0851] The CasX protein variants with spacer 11.39 were tested via nucleofection in the mouse NPC cell line at two different doses, 1000 ng and 500 ng. Constructs were compared to the parental CasX 491 activity. AAV constructs expressing CasX 535 and 537 with scaffold 174 and spacer 11.30 demonstrated the greatest editing activity at the mRHO exon 1 locus of any of the CasX variants (by percent editing, FIG. 48A), which was increased 1.5-fold relative to CasX 491 (FIG. 48C, normalized to 1), without increased off-target cleavage, shown by the nucleofection of the protein variants with spacer 11.37 (targeting mutant P23H-Rho allele, FIG. 48B).

[0852] Experiments were then conducted to determine whether the improvements observed at the mouse RHO locus with the mutated variants translated at the human RHO locus, which is more clinically-relevant. The dual reporter ARPE-19 cell line was nucleofected with constructs expressing the CasX variant proteins paired with either sgRNA-scaffold 235 with spacer 11.41 or spacer11.43, targeting human RHO. CasX 535 and 537 also displayed over 1.5-fold increased editing activity compared to CasX 491 (˜4.3% and 4.1% editing compared to 2.4% editing of Rho-GFP− cells respectively, FIGS. 49A and 49B) when targeting the exogenous WT-RHO-GFP locus. Constructs expressing CasX variants 515, 527 and 536 edited at similar levels to CasX 491. Interestingly, when using a spacer targeting the P23H-RHO-mscarlet locus, all the variant proteins demonstrated improved editing compared to CasX 491. The highest activity levels were achieved by constructs expressing CasX 527 (2-fold increase) and CasX 535 (1.8-fold increase).

[0853] Finally, we sought to demonstrate that these protein variants packaged efficiently in AAV and remained potent when delivered virally. mNPC transduced with AAV vectors expressing CasX 527, 535 and 537 and guide scaffold 235 with spacer 11.39 (on target, mouse WT RHO) showed increased activity at the on-target locus (>2-fold increase, FIGS. 50A and 50B) relative to AAV CasX 491 and guide scaffold 235 with spacer 11.39 with transduction at 3.0e+5 MOI. Fold-improvement in activity were observed in a dose-dependent manner.

[0854] These results support that CasX variants with structural mutations can be engineered resulting in increased editing activity in dual reporter systems at therapeutically-relevant genomic targets, such as the mouse and human RHO exon 1 loci. Furthermore, while the newly-characterized variants displayed an overall 1.5-2-fold increase in activity, they retained allele-specific targeting with no off-target cleavage detected with a 1-bp mismatch spacer. This is relevant for allele-specific therapeutic strategy, such as editing at adRP P23H Rho, where the mutated allele differs from WT sequence by 1 nucleotide (targeted by spacer 11.37). This study further validates the use of CasX variants 527, 535, 536 with scaffold 235 in AAV vectors designed for P23H RHO rescue and genotoxic studies, as well as for other therapeutic targets.

### Example 15: AAV Constructs with CasX and Targeted Guides Edit the P23 RHO Locus In Vivo in C57BL/6J Mice

[0855] Experiments were conducted to demonstrate the ability of CasX to edit in vivo the endogenous RHO locus in the mouse retina, with a spacer targeting the P23 residue at a therapeutically relevant level, to generate proof-of-concept data that will justify and inform experiments in the P23H mouse disease model. Here, we assessed whether CasX variant 491 and guide variant 174, and a spacer targeting the P23 locus of the mouse RHO gene can generate significant, detectable in the retina when injected subretinally, and evaluate efficacy and safety of two different viral doses (1.0e+9 and 1.0e+10 vg). Rescue of 10% of rod photoreceptors can restore vision in cases of AdRP. Therefore, editing 10% of the RHO loci in rod photoreceptors in the retina may provide a therapeutic benefit in a disease context by reducing the levels of the mutant rhodopsin protein and preventing rod photoreceptor degeneration.

### Materials and Methods:

### Generation of AAV Plasmids and Viral Vectors

[0856] The CasX variant 491 under the control of the CMV promoter and RNA guide variant 174/spacer 11.30 (AAGGGGCTCCGCACCACGCC (SEQ ID NO: 40502), targeting mouse RHO exon 1 at P23 residues) under the U6 promoter were cloned into a pAAV plasmid flanked with AAV2 ITR. AAV.491.174.11.30 vectors were produced in HEK293 cells using the triple-transfection method.

### Subretinal Injections

[0857] C57BL/6J mice were obtained from the Jackson Laboratories and maintained in a normal 12 hour light/dark cycle. Subretinal injections were performed on 5-6 weeks old mice. Mice were anesthetized with isoflurane inhalation. Proparacaine (0.5%) was applied topically on the cornea and the eyes were dilated with drops of tropicamide (1%) and phenylephrine (2.5%). Eyes were kept lubricated with genteal gel during the surgery. Under a surgical microscope, an ultrafine 30 ½-gauge disposable needle was passed through the sclera, at the equator and next to the limbus, to create a small hole into the vitreous cavity. Using a blunt-end needle, 1-1.5 μL of virus was injected directly into the subretinal space, between the RPE and retinal layer. Each experimental group (n=5) were injected in one eye with 1e+9 vg or 1e+10 viral genome (vg)/eye, and the contralateral eye injected with the AAV formulation buffer.

### NGS Analysis

[0858] 3 weeks post-injection, animals were sacrificed and the eyes enucleated in fresh PBS. Whole retinae were isolated from the eye cups and processed for gDNA extraction using the DNeasy Blood & Tissue Kit (Qiagen) according to the manufacturer's instructions. Amplicons were amplified from 200 ng of gDNA with a set of primers (Fwd 5′-ACACTCTTTCCCTACACGACGCTCTTCCGATCTNNNNNNNGCAGCCTTGGTCTCTGT CTACG-3′ (SEQ ID NO: 40595); Rev 5′-GTGACTGGAGTTCAGACGTGTGCTCTTCCGATCTGCCCCAGTCTCTCTGCTCATACC-3′ (SEQ ID NO: 40596)) targeting the mouse RHO, exon 1 locus, bead-purified (Beckman coulter, Agencourt Ampure XP) and then re-amplified to incorporate illumina adapter sequence. Specifically, these primers contained an additional sequence at the 5′ ends to introduce Illumina read and 2 sequences as well as a 16 nt random sequence that functions as a unique molecular identifier (UMI). Quality and quantification of the amplicon was assessed using a Fragment Analyzer DNA analyzer kit (Agilent, dsDNA 35-1500 bp). Amplicons were sequenced on the Illumina Miseq according to the manufacturer's instructions. Raw fastq files from sequencing were processed as follows: (1) the sequences were trimmed for quality and for adapter sequences using the program cutadapt (v. 2.1); (2) the sequences from read 1 and read 2 were merged into a single insert sequence using the program flash2 (v2.2.00); and (3) the consensus insert sequences were run through the program CRISPResso2 (v 2.0.29), along with the expected amplicon sequence and the spacer sequence. This program quantifies the percent of reads that were modified in a window around the 3′ end of the spacer (30 bp window centered at −3 bp from 3′ end of spacer). The activity of the CasX molecule was quantified as the total percent of reads that contain insertions, substitutions and/or deletions anywhere within this window.

### Immunohistology:

[0859] Mice were euthanized 3-4 weeks post-injection. Enucleated eyes were placed in 10% formalin overnight at 4° C. Retinae were dissected out from the eye cups, rinsed in PBS thoroughly and immersed in 15%-30/o sucrose gradient. Tissues were embedded in optimal cutting temperature (OCT), froze on dry ice before being transferred to ˜80′C storage. 20 μM sections were cut using a cryostat. The sections were blocked for ≥1 hour at room temperature in blocking buffer (2% normal goat serum, 1% BSA, 0.1% Triton-X 100) before antibody labeling. The antibodies used were anti-mouse HA (abcam, 1:500) and Alexa Fluor 488 rabbit anti-mouse (Invitrogen, 1:2000). Sections were counterstained with DAPI to label nuclei, mounted on slides and imaged on a fluorescent microscope.

### Results:

[0860] We assessed the ability of CasX to edit the P23 RHO locus in the mouse retina. Two therapeutically relevant doses, 1.0e+9 and 1.0E+10 vg of AAV-CasX.491.174.11.30 were administered in the subretinal space of 5-6 weeks old C57BL/6J mice. Three weeks post-injections, retinae were harvested and editing levels quantified via NGS and the CRISPResso analysis pipeline. The spacer 11.30 targets the WT P23 genomic locus (FIG. 51) located at the beginning of the first exon of RHO. Overexpression of CasX-491.174.11.30 led to significant, dose-dependent, editing of mRHO exon 1 locus in treated-compared to sham-injected retinae (FIGS. 52A-52B). The left panel (FIG. 52A) shows the quantification in % of total indels detected by NGS at the mouse P23 RHO locus in AAV-CasX or sham-injected retinae compared to the mouse reference genome. The right panel (FIG. 52B) shows the fraction (%) of edits predicted to lead to frameshift mutations in RHO protein. Data are presented as average of NGS readouts of editing outcomes from the entire retina, from six to eight animals per experimental cohort. The highest AAV dose, 1e+10 vg/eye, increased indels rate by 4-fold compared to the 1.0e+9 vg dose, with 40.3±22% versus 12.3±5% RHO editing detected respectively. The majority of indels generated by CasX.491 were deletions (left panel), predicted to translate to a high frequency of frameshift-mutations (64.7 versus 76.9% for 1.0e+9 and 1.0e+10 vg/dose respectively), and hypothetically high levels of RHO protein knock down. These results suggest that with a spacer driving allele-specific target of mutant P23H locus in the P23H+/− mouse model, CasX could efficiently editing 10% of rod photoreceptor, with the majority of edits translating to a knocking-down the mutant P23H Rho and significantly delay photoreceptor degeneration.

[0861] Immunohistochemistry performed on injected retinal cross-sectioned confirmed CasX expression in the photoreceptors layers, but also showed spread of the virus to the inner layers as show in in FIGS. 53A-53F. The treatment groups were 1.0e+9 vg of AAV-CasX (FIGS. 53B and 53E); 1.0e+10 vg AAV-CasX (FIGS. 53C and 53F); or PBS (FIGS. 53A and 53D). Levels of HA-tagged CasX was assessed by Anti-HA antibody staining (lower panels of FIGS. 53E, and 53F) in the photoreceptor cell bodies in the located in the outer nuclear layer (ONL) as well as outer segments, in retinas injected with both the 1e9 vg (FIGS. 53B and 53E) and 1e10 vg (FIGS. 53C and 53F). The control retinas that received a sham (FIGS. 53A and 53C) injection only showed background levels of signal for HA staining (FIG. 53D) in the RPE/sclera and had no detectable level in the ONL/INL layer. Additionally, gross histological analysis showed that the retinal structure was maintained after subretinal administration of AAV packaging CasX constructs.

[0862] Under the conditions of the experiments, the results demonstrate proof-of-concept that CasX 491, scaffold 174, and a spacer targeting the mouse P23 RHO locus can achieve therapeutically-relevant levels of edits at the P23 mouse locus when subretinally delivered via AAV in the murine retina.

### Example 16: AAV-Mediated Selective Expression of CasX in Photoreceptors Result in Strong On-Target Activity In Vivo by NGS and Structural Analysis

[0863] Experiments were conducted to demonstrate the ability of CasX to edit selectively photoreceptors in the mouse retina by restricting its expression with a selective photoreceptor promoter, with a spacer targeting the P23 residue at a therapeutically relevant level in the wild-type retina. We further show strong correlation between editing and proteomic levels in a transgenic reporter model expressing GFP only in rod photoreceptors. Here, we assessed whether CasX variant 491 and guide variant 174 with a spacer targeting the integrated GFP locus generated significant, detectable editing levels in the retina when injected subretinally, and evaluated the efficacy of two different viral doses (1.0e+9 and 1.0e+10 vg per eye).

### Methods:

[0864] Generation of AAV Plasmids and Viral Vectors: The CasX variant 491 under the control of the various photoreceptor-specific promoters (RP1, RP2, RP3 based on endogenous rhodopsin RHO promoter, and RP4, RP5 based on endogenous G-coupled Retinal Kinase GRK1 promoter; sequences in Table 22) as well as the CMV promoter, and the sgRNA guide variant 174/spacer 11.30 (AAGGGGCTCCGCACCACGCC (SEQ ID NO: 40502)), targeting mouse RHO exon 1 at P23 residues) under the U6 promoter were cloned into pAAV plasmid flanked with AAV2 ITR. A WPRE sequence amplified with EcoRI restriction sites on each side was inserted into EcoRI digested p59.RP4.491.174.11.30, and p59.RP5.491.174.11.30 plasmids. For the efficacy study in the Nrl-GFP model, spacer 4.76 (TGTGGTCGGGGTAGCGGCTG (SEQ ID NO: 17)) targeting GFP was cloned into AAV-cis plasmid p59.RP1.491.174 using the Golden Gate cloning with bbsI restriction sites flanking the spacer region.

TABLE 22
Rho promoter sequences

| Promoter | PR construct | SEQ ID NO: | DNA Sequence |
|---|---|---|---|
| RHO | RP1 | 40589 | ND |
| RHO535-CAG | RP2 | 40590 | ND |
| RHO-intron | RP3 | 40591 | ND |
| GRK | RP4 | 40592 | ND |
| GRK-SV40 | RP5 | 40593 | ND |
| GRK-CAG | RP6 | 40594 | ND |

* ND = no description, sequence provided in sequence listing.

[0865] AAV vector production: Suspension HEK293T cells were adapted from parental HEK293T and grown in FreeStyle 293 media. 500 mL cultures (1 L Erlenmeyer flasks, agitated at 110 rpm) were diluted to a density of 2e+6 cells/mL on the day of transfection. Endotoxin-free pAAV plasmids with the transgene flanked by ITR repeats were co-transfected with plasmids supplying the adenoviral helper genes for replication and AAV rep/cap genome using PEIMax (Polysciences) in serum-free OPTIMEM media. Cultures were supplemented with 10% CDM4HEK293 (HyClone) 3 hours post-transfection. Three days later, cultures were centrifuged at 1000 rpm for 10 minutes to separate the supernatant from the cell pellet. The supernatant was mixed with 40% PEG 2.5M NaCl (8% final concentration) and incubated on ice for at least 2 hours to precipitate AAV viral particles. The cell pellet, containing the majority of the AAV vectors, was resuspended in lysis media (0.15M NaCl, 50 mM Tris HCl, 0.05% Tween, pH 8.5), sonicated on ice (15 seconds, 30% amplitude) and treated with Benzonase (250 U/μL, Novagen) for 30 minutes at 37° C. Crude lysate and PEG-treated supernatant were then spin at 4000 rpm for 20 minutes at 4° C. to resuspend the PEG precipitated AAV (pellet) with cell debris-free crude lysate (supernatant) clarified further using a 0.45 μM filter. AAV lysates were purified using affinity chromatography (POROS CaptureSelect AAVX, ThermoFisher). Eluate was buffer exchanged and concentrated in PBS+200 mM NaCl+0.001% Pluronic. To determine the viral genome titer, 1 μL from crude lysate viruses was digested with DNase and ProtK, followed by quantitative PCR. 5 μL of digested virus was used in a 25 μL qPCR reaction composed of IDT primetime master mix and a set of primer and 6′FAM/Zen/IBFQ probe (IDT) designed to amplify a 62 bp-fragment located in the AAV2-ITR (Fwd 5′-GGAACCCCTAGTGATGGAGTT-3′ (SEQ ID NO: 40804); Rev 5′-CGGCCTCAGTGAGCGA-3′ (SEQ ID NO: 40805), Probe 5′-CACTCCCTCTCTGCGCGCTCG-3′ (SEQ ID NO: 40806)). An AAV ITR plasmid was used as reference standards to calculate the titer (viral genome (vg)/mL) of viral samples. QPCR program was set up as: initial denaturation step at 95′C for 5 minutes, followed by 40 cycles of denaturation at 95′C for 1 min and annealing/extension at 60° C. for 1 min.

[0866] The AAV vector AAV.RP1.491.174.4.76 was produced at the University of North Carolina (UNC) Vector Core using the triple transfection methods in HEK239T.

[0867] Subretinal injections: C57BL/6J mice and heterozygous Nrl-GFP/C57BL/5J mice (Jackson Laboratories) were maintained in a normal 12 hour light/dark cycle. Subretinal injections were performed on 4-5 week-old mice. Mice were anesthetized with isoflurane inhalation. Proparacaine (0.5%) was applied topically on the cornea and the eyes were dilated with drops of tropicamide (1%) and phenylephrine (2.5%). Eyes were kept lubricated with genteal gel during the surgery. Under a surgical microscope, an ultrafine 30 ½-gauge disposable needle was passed through the sclera, at the equator and next to the limbus, to create a small hole into the vitreous cavity. Using a blunt-end needle, 1-1.5 μL of virus was injected directly into the subretinal space, between the RPE and retinal layer. Each mouse from the experimental groups was injected in one eye with 1.0e+9, 5.0e+9 or 1.0e+10 genome (vg)/eye, and the contralateral eye injected with the AAV formulation buffer.

[0868] Western blot: To generate protein lysates, eyes were freshly enucleated and dissected in ice-cold PBS, snap-frozen in dry ice, and resuspended in RIPA buffer (150 mM NaCl, 1% NP40, 0.5% deoxycholate, 0.1% SDS, 50 mM Tris pH8.0, dH20) freshly supplemented with protease inhibitors (5 mg/mL final concentration), DTT and PMSF (final concentration 1 mM respectively) in individual 1.5 mL Eppendorf tube per retina. Retinal tissue was further homogenized in small pieces using a RNA-free disposable pellet pestles (Fisher scientific, #12-141-364) and incubated on ice for 30 minutes, flipping the tube occasionally to gently mix. Samples were then centrifuged at 4° C. at full speed for 20 minutes to pellet genomic DNA. Protein extracts and gDNA cell pellets were then separated. For protein extracts, supernatants were collected. Protein concentration were determined by BCA assay and read on Tecan plate reader. 15 μg of total protein lysate of mouse retina were separated by SDS-PAGE (Bio-Rad TGX gels) and transferred to polyvinylidene difluoride membranes using the Transblot Turbo. The membranes were blocked with 5% nonfat dry milk for 1 h at room temperature and incubated overnight at 4° C. with the primary antibody. Then, blots were washed with Tris-buffered saline with the Tween-20 (137 mM sodium chloride, 20 mM Tris, 0.1% Tween-20, pH 7.6) for three times and incubated with the horseradish peroxidase-conjugated anti-rabbit or anti-mouse secondary antibody for 1 h at room temperature. After washing three times, the membranes were developed using Chemiluminescent substrate ECL and imaged on the ChemicDoc (X). Blot images were processed with ImageLab.

[0869] NGS analysis: Animals were sacrificed and the eyes enucleated in fresh PBS. Whole retinae were isolated from the eye cups and processed for gDNA extraction as described previously in western blot section. Genomic gDNA pellets were processed with the DNeasy Blood & Tissue Kit (Qiagen) according to the manufacturer's instructions. Amplicons were amplified from 200 ng of gDNA with a set of primers (Table 23) targeting the genomic region of interest. Amplicons were bead-purified (Beckman coulter, Agencourt Ampure XP) and then re-amplified to incorporate illumina adapter sequence. Specifically, these primers contained an additional sequence at the 5′ ends to introduce Illumina read and 2 sequences as well as a 16 nt random sequence that functions as a unique molecular identifier (UMI). Quality and quantification of the amplicon was assessed using a Fragment Analyzer DNA analyzer kit (Agilent, dsDNA 35-1500 bp). Amplicons were sequenced on the Illumina Miseq according to the manufacturer's instructions. Raw fastq files from sequencing were processed as follows: (1) the sequences were trimmed for quality and for adapter sequences using the program cutadapt (v. 2.1); (2) the sequences from read 1 and read 2 were merged into a single insert sequence using the program flash2 (v2.2.00); and (3) the consensus insert sequences were run through the program CRISPResso2 (v 2.0.29), along with the expected amplicon sequence and the spacer sequence. This program quantifies the percent of reads that were modified in a window around the 3′ end of the spacer (30 bp window centered at −3 bp from 3′ end of spacer). The activity of the CasX molecule was quantified as the total percent of reads that contain insertions, substitutions and/or deletions anywhere within this window.

TABLE 23
NGS primer sequences

| | | SEQ ID | |
|---|---|---|---|
| Primer | Target | NO: | Sequence (5′-3′) |
| 1F | RHO | 40595 | ACACTCTTTCCCTACACGACGCTCTTCCGATCTNNNNN |
| | exon 1 | | NNGCAGCCTTGGTCTCTGTCTACG |
| 1R | RHO | 40596 | GTGACTGGAGTTCAGACGTGTGCTCTTCCGATCTGCCC |
| | exon 1 | | CAGTCTCTCTGCTCATACC |
| 2F | GFP | 40597 | ACACTCTTTCCCTACACGACGCTCTTCCGATCTNNNNN |
| | | | NNNNNNNNNNNGACGTAAACGGCCACAAGTTCAGC |
| 2R | GFP | 40598 | GTGACTGGAGTTCAGACGTGTGCTCTTCCGATCTCGTTC |
| | | | TTCTGCTTGTCGGCCATGA |

[0870] Immunohistology: Enucleated eyes were placed in 10% formalin overnight at 4° C. Retinae were dissected out from the eye cups, rinsed in PBS thoroughly and immersed in 15%-30% sucrose gradient. Tissues were embedded in optimal cutting temperature (OCT), frozen on dry ice before being transferred to ˜80′C storage. 20 μM sections were cut using a cryostat. The sections were blocked for >1 hour at room temperature in the blocking buffer (2% normal goat serum, 1% BSA, 0.1% Triton-X 100) before antibody labeling. The antibodies used were: anti-mouse HA (abcam, 1:500); Alexa Fluor 488 rabbit anti-mouse (Invitrogen, 1:2000). Slides were counterstained with Hoechst 33342 (Thermo Fisher Scientific, Hemel Hempstead, UK) and mounted with Prolong Diamond antifade mounting medium (Thermo Fisher Scientific, Hemel Hempstead, UK). Confocal fluorescence imaging was subsequently performed using the LSM-710 inverted confocal microscope system (Carl Zeiss, Cambridge, UK).

### Results:

[0871] Editing levels were quantified at the mRHO exon locus in 3 week-old C57BL/6J that were injected subretinally with AAV vectors expressing CasX 491 under the control of multiple engineered retinal and ubiquitous promoters to identify promoters driving strong levels of editing in the photoreceptors, with spacer 11.30. Rod-specific RP1, RP2, RP3, RP4 promoters mediated very similar levels of editing (˜20%). Vectors AAV.RP5.491.174.11.30 and AAV RP5.491.WPRE.174.11.30 led to lower expression levels (˜10 and 8% respectively, FIG. 54A). We identified optimized vectors AAV.RP1.491.174.11.30 as most potent vectors for further functional and distribution study, with the goal of achieving high levels of editing in vivo in photoreceptors as well as making the transgene plasmid significantly smaller in size to package within the AAV (100-400 bp shorter than other constructs with similar level of activity (FIG. 54B). This optimized construct was further validated by conducting an efficacy study in a transgenic model expressing GFP in rod photoreceptors, a convenient model used in the field to validate rod-specific or knock down of protein. AAV.RP1.491.174.4.76 vectors were injected at 2 different doses to study efficacy. 4 and 12-weeks post-injections, we quantified levels of editing at the integrated GFP locus by NGS, and observed detectable editing levels. With the 1.0E+9 vg/eye dose arm, we observed ˜8% of editing levels. With the increased dose group injected with 1.0e+10 vg, 10% editing levels were detectable at 4-weeks, which increased by 2-fold in the follow-up time point, 12-weeks post-injections (FIG. 55).

[0872] Editing levels were confirmed by structural and proteomic analysis. Western blot analysis of 12-week post-injection retinal lysates showed strong correlation between levels of editing and reduction in GFP protein (FIGS. 56A and 56C), with protein knock-down detected with as low as 5% editing in whole-retina. GFP protein levels were significantly lower than the vehicle group in the AAV-CasX-treated retinas at the 1.0e+10 vg/eye dose (FIG. 56B).

[0873] These results were also confirmed by in vivo fundus imaging of GFP fluorescence. The ratio of superior to inferior retina mean grey values showed a reduction in 20% and 50% GFP fluorescence by week 12 (FIG. 57A). A complete decrease in GFP fluorescence over time was visible within the quadrant who received the subretinal injection only in the injected retinas compared to the vehicle group (FIG. 57B).

[0874] Immunochemistry staining confirmed (FIGS. 58A-58L) the decrease of GFP protein expression in rod photoreceptors. Representative confocal images show strong GFP expression in the retinae injected with only the AAV formulation buffer. Whole retina is expressing GFP, matching with the nuclei staining (FIGS. 58A-C). No HA expression was detectable, as a read-out of AAV-mediated CasX transgene expression (FIG. 58D).

[0875] Retinae injected with 1.0e+9 and 1.0e+10 showed strong decrease in GFP expression in whole retina sections, in a dose-dependent manner (FIGS. 58E-58L), which correlated with detectable levels of HA only rod outer segments (OS) and outer nuclear layers (ONL), confirming the promoter RP1 selectivity for rod photoreceptors. High dose treatment resulted in complete knockdown of injected retina (˜50% of GFP knockdown in whole-retina, as injection is limited to the superior gradient) while the 1.0e+9 vg dose decreased ˜50% of GFP expression in localized area (FIGS. 58G and 58K) compared to control (FIG. 58C).

[0876] The results demonstrate proof-of-concept that CasX 491, scaffold 174, and a spacer targeting the mouse P23 RHO locus can achieve therapeutic-relevant levels of edits at the P23 mouse locus when only expressed in rod-photoreceptors, the therapeutic cell target, via AAV-mediated subretinal delivery. Further, the specificity and efficacy of the vector was demonstrated by conducting a follow-up study targeting a GFP locus integrated in a reporter model overexpressing GFP in photoreceptors in which the results show a strong correlation between editing levels and protein knock-down assessed by western blot, fundus imaging and histology.

### Example 17: Demonstration that the CasX:gNA System can Edit Human Neural Progenitor Cells and Induced Neurons Efficiently when Packaged and Delivered Via AAVs

[0877] Experiments were performed to demonstrate the efficiency of AAV-expressed CasX:gNA system in editing human neural progenitor cells (hNPCs) and induced neurons (iNs) in vitro.

### Materials and Methods:

### AAV Construct Cloning:

[0878] CasX variant 491 and guide scaffold variant 235 were used in these experiments.

[0879] To evaluate the editing capability of AAV-expressed CasX:gNA system in hNPCs, AAV constructs containing a UbC promoter driving CasX expression and a Pol III promoter scaffold driving the expression of a gRNA with scaffold variant 235 and spacer 7.37 (GGCCGAGAUGUCUCGCUCCG; SEQ ID NO: 379; incorporated in construct ID 183), which targeted the endogenous B2M locus, were generated using standard molecular cloning techniques. Cloned and sequence-validated constructs were maxi-prepped and subjected to quality assessment prior to transfection for AAV production.

[0880] For experiments assessing the editing capability of AAV-expressed CasX:gNA system in human iNs, AAV constructs encoding for CasX protein and gRNA with AAVS1-targeting spacer 31.12 (UUCUCGGCGCUGCACCACGU; SEQ ID NO: 41830; incorporated in construct ID 188), 31.63 (CAAGAGGAGAAGCAGUUUGG; SEQ ID NO: 41831; incorporated in construct ID 189), or 31.82 (GGGGCCUGUGCCAUCUCUCG; SEQ ID NO: 41832; construct ID 190), were similarly generated as described. The non-targeting spacer 0.1 (AGGGGUCUUCGAGAAGACCC; SEQ ID NO: 41833) was also used in these experiments. For experiments assessing various protein promoters driving the expression of CasX 491 with gRNA spacer 7.37 to edit the B2M locus in human iNs, AAV constructs containing these protein promoter variants were similarly generated as described (see Table 24 for sequences of protein promoter variants). The sequences of the additional components of the AAV constructs, except for sequences encoding the CasX protein (Table 21), are listed in Table 26.

TABLE 24
Sequences of protein promoter variants, construct IDs of AAV constructs that
comprise each respective protein promoter variant, and SEQ ID NOs for the
sequences of each protein promoter variant.

| Promoter | | Construct | SEQ ID |
|---|---|---|---|
| variant | Sequence | ID | NO: |
| UbC | GGCCTCCGCGCCGGGTTTTGGCGCCTCCCGCGGGCGCCCCC | 183 | 41030 |
| | CTCCTCACGGCGAGCGCTGCCACGTCAGACGAAGGGCGCAG | | |
| | CGAGCGTCCTGATCCTTCCGCCCGGACGCTCAGGACAGCGG | | |
| | CCCGCTGCTCATAAGACTCGGCCTTAGAACCCCAGTATCAG | | |
| | CAGAAGGACATTTTAGGACGGGACTTGGGTGACTCTAGGGC | | |
| | ACTGGTTTTCTTTCCAGAGAGCGGAACAGGCGAGGAAAAGT | | |
| | AGTCCCTTCTCGGCGATTCTGCGGAGGGATCTCCGTGGGGC | | |
| | GGTGAACGCCGATGATTATATAAGGACGCGCCGGGTGTGGC | | |
| | ACAGCTAGTTCCGTCGCAGCCGGGATTTGGGTCGCGGTTCT | | |
| | TGTTTGTGGATCGCTGTGATCGTCACTTGGT | | |
| Jet | GGGCGGAGTTAGGGCGGAGCCAATCAGCGTGCGCCGTTCCG | 191 | 41031 |
| | AAAGTTGCCTTTTATGGCTGGGCGGAGAATGGGCGGTGAAC | | |
| | GCCGATGATTATATAAGGACGCGCCGGGTGTGGCACAGCTA | | |
| | GTTCCGTCGCAGCCGGGATTTGGGTCGCGGTTCTTGTTTGT | | |
| U1a | AATGGAGGCGGTACTATGTAGATGAGAATTCAGGAGCAAAC | 177 | 41032 |
| | TGGGAAAAGCAACTGCTTCCAAATATTTGTGATTTTTACAG | | |
| | TGTAGTTTTGGAAAAACTCTTAGCCTACCAATTCTTCTAAG | | |
| | TGTTTTAAAATGTGGGAGCCAGTACACATGAAGTTATAGAG | | |
| | TGTTTTAATGAGGCTTAAATATTTACCGTAACTATGAAATG | | |
| | CTACGCATATCATGCTGTTCAGGCTCCGTGGCCACGCAACT | | |
| | CATACT | | |
| MeP426 | AGCTGAATGGGGTCCGCCTCTTTTCCCTGCCTAAACAGACA | 192 | 41033 |
| | GGAACTCCTGCCAATTGAGGGCGTCACCGCTAAGGCTCCGC | | |
| | CCCAGCCTGGGCTCCACAACCAATGAAGGGTAATCTCGACA | | |
| | AAGAGCAAGGGGTGGGGCGCGGGCGCGCAGGTGCAGCAGCA | | |
| | CACAGGCTGGTCGGGAGGGCGGGGCGCGACGTCTGCCGTGC | | |
| | GGGGTCCCGGCATCGGTTGCGCGC | | |
| miniCMV | GTAGGCGTGTACGGTGGGAGGTCTATATAAGCAGAGCT | 193 | 41034 |
| SFCp | GGATCCTACTGACGAGGGGCTTGTCCAAACAAGCCCGGGCA | 194 | 41035 |
| | TGCCTAAACATGCCCTGATGCAATCCTGACGTCGTGAAGCA | | |
| | ATGATTATGCAATTTGAGCATGTCCAGACTAGCCCTGACGG | | |
| | ATGACGCTTGACGCAATTCCTGAGGCAAGTCTGAGCTTGTT | | |
| | CAAACTTGTCTTGAAGAAATTATGACGGACTGACGTATGGT | | |
| | GCAATATTGGGGCAATGCTTGACGTTCGCGGTAGGCGTGTA | | |
| | CGGTGGGAGGTCTATATAAGCAGAGCTCGTTTAGTGAACCG | | |
| | TCAGATCGCCTGGAGACGCCATCCACGCTGTTTTGACCTCC | | |
| | ATAGAAGTCACCGGGACCGATCCAGC | | |
| miniSV40 | TGCATCTCAATTAGTCAGCAACCATAGTCCCGCCCCTAACT | 195 | 41036 |
| | CCGCCCATCCCGCCCCTAACTCCGCCCAGTTCCGCCCATTC | | |
| | TCCGCCCCATGGCTGACTAATTTTTTTTATTTATGCAGAGG | | |
| | CCGAGGCCGCCTCGGCCTCTGAGCTATTCCAGAAGTAGTGA | | |
| | GGAGGCTTTTTTGGAGGCCTAGGCTTTTGCAAA | | |
| pJB42CAT5 | CTGACAAATTCAGTATAAAAGCTTGGGGCTGGGGCCGAGCA | 196 | 41037 |
| | CTGGGGACTTTGAGGGTGGCCAGGCCAGCGTAGGAGGCCAG | | |
| | CGTAGGATCCTGCTGGGAGCGGGGAACTGAGGGAAGCGACG | | |
| | CCGAGAAAGCAGGCGTACCACGGAGGGAGAGAAAAGCTCCG | | |
| | GAAGCCCAGCAGCG | | |
| MLP | GGGGGGCTATAAAAGGGGGTGGGGGCGTTCGTCCTCACTCT | 197 | 41038 |
| CMV core | GTGATGCGGTTTTGGCAGTACATCAATGGGCGTGGATAGCG | 198 | 41039 |
| | GTTTGACTCACGGGGATTTCCAAGTCTCCACCCCATTGACG | | |
| | TCAATGGGAGTTTGTTTTGGCACCAAAATCAACGGGACTTT | | |
| | CCAAAATGTCGTAACAACTCCGCCCCATTGACGCAAATGGG | | |
| | CGGTAGGCGTGTACGGTGGGAGGTCTATATAAGCAGAGCT | | |
| EFS | TGGCTCCGGTGCCCGTCAGTGGGCAGAGCGCACATCGCCCA | ND | 41040 |
| | CAGTCCCCGAGAAGTTGGGGGGAGGGGTCGGCAATTGAACC | | |
| | GGTGCCTAGAGAAGGTGGCGCGGGGTAAACTGGGAAAGTGA | | |
| | TGTCGTGTACTGGCTCCGCCTTTTTCCCGAGGGTGGGGGAG | | |
| | AACCGTATATAAGTGCAGTAGTCGCCGTGAACGTTCTTTTT | | |
| | CGCAACGGGTTTGCCGCCAGAACACAGGT | | |
| miniEF1α | GGGCAGAGCGCACATCGCCCACAGTCCCCGAGAAGTTGGGG | ND | 41041 |
| | GGAGGGGTCGGCAATTGATCCGGTGCCTAGAGAAGGTGGCG | | |
| | CGGGGTAAACTGGGAAAGTGATGTCGTGTACTGGCTCCGCC | | |
| | TTTTTCCCGAGGGTGGGGGAGAACCGTATATAAGTGCAGTA | | |
| | GTCGCCGTGAACGTTCTTTTTCGCAACGGGTTTGCCGCCAG | | |
| | AACACAG | | |
| hRPL30 | CCCCGCAGCCATTCTAGCTAGCGGTACCAATAGCAACCGGC | ND | 41042 |
| | AGCTGCCCTCCGCTTTTGCTCCGCCCCTTCTGCTTGCGATC | | |
| | TGTTTCCGCTTCCGGTCCCGCAGTTCCGGCTCTGCCGTGAA | | |
| | GAGCTTTGCATTGTGGGAAGTCTTTCCTTTCTCGTTCCCCG | | |
| | GCCATCTTAGCGGCTGCTGTTGGTGAGTGGGCTCCTACCGA | | |
| | CCGAGGTTTAGGCAGCGCGGGGAGCTTTGCGGGTTGCCATT | | |
| | TGTAACTCCGGATCCTAAAATTCCTGTCCTGTTCTCTGTCT | | |
| | CTTCTAGGTTGGGGGCCGTCCCGCTCCTAAGGCAGGAA | | |
| hRPS18 | AGCCCCGGAACCTTCGCTGTTCTCTTACCTATGAACCTTAC | ND | 41043 |
| | GAACTGTAAAGAAAGGCGCACCGGAAGTTGTGGTACCCAAG | | |
| | CCATACTCTCATAAATCCAGCCAGGTCGCGCTGAAACAGTT | | |
| | TCCGGAAGCACTTCTCCTAGATCGCACCGCCTCTTCCTCCT | | |
| | GGAAGCTATATAATGATATCGCGTCACTTCCGCTCTCTCTT | | |
| | CCACAGGAGGCCTACACGCCGCCGCTTGTGCTGCAGCC | | |
| hRPL13a | ACAGCGCTGACCGCGGAGGTCCAACCGGAAGAATGTCCGGA | ND | 41044 |
| | TTGGACATTCGGAAGAGGGCCCGCCTTCCCTGGGGAATCTC | | |
| | TGCGCACGCGCAGAACGCTTCGACCAATGAAAACACAGGAA | | |
| | GCCGTCCGCGCAACCGCGTTGCGTCACTTCTGCCGCCCCTG | | |
| | TTTCAAGGGATAAGAAACCCTGCGACAAAACCTCCTCCTTT | | |
| | TCCAAGCGGCTGCCGAAG | | |

*ND = no description.

### Aav Production:

[0881] Suspension-adapted HEK293T cells, maintained in FreeStyle 293 media, were seeded in 20-30 mL of media at 1.5E6 cells/mL on the day of transfection. Endotoxin-free pAAV plasmids with the transgene flanked by ITR repeats were co-transfected with plasmids supplying the adenoviral helper genes for replication and AAV rep/cap genome using PEI Max (Polysciences) in serum-free Opti-MEM media. Cultures were supplemented with 10% CDM4HEK293 (HyClone) three hours post-transfection. Three days later, cultures were centrifuged to separate the supernatant from the cell pellet. The supernatant was mixed with 40% PEG 2.5M NaCl and incubated on ice to precipitate AAV viral particles. The cell pellet, containing majority of the AAV vectors, was resuspended in lysis media (0.15 M NaCl, 50 mM Tris HCl, 0.05% Tween, pH 8.5), sonicated on ice, and treated with Benzonase (250 U/μL, Novagen) for 30 minutes at 37° C. The PEG-treated supernatant was centrifuged to pellet the precipitated AAV, while the crude lysate was centrifuged to remove cell debris from the virus containing supernatant, before combining the collected virus for further clarification using a 0.45 μm filter. AAV lysates were purified using affinity chromatography (POROS CaptureSelect AAVX, ThermoFisher), and the eluate was buffer exchanged and concentrated in PBS+200 mM NaCl+0.001% Pluronic.

[0882] To determine the viral genome (vg) titer, 1 μL from crude lysate viruses was digested with DNase and ProtK, followed by quantitative PCR. 5 μL of digested virus was used in a 25 μL qPCR reaction composed of IDT primetime master mix and a set of primer and 6′FAM/Zen/IBFQ probe (IDT) designed to amplify a 62 bp-fragment located in the AAV2-ITR. An AAV ITR plasmid was used as reference standards to calculate the titer (vg/mL) of viral samples. The qPCR program was set up as: initial denaturation step at 95′C for 5 minutes, followed by 40 cycles of denaturation at 95′C for 1 minute, and annealing/extension at 60° C. for 1 minute.

Culturing hNPCs In Vitro:

[0883] Immortalized hNPCs were cultured in hNPC medium (DMEM/F12 with GlutaMax, 10 mM HEPES, 1×NEAA, 1× B-27 without vitamin A, 1× N2 supplemented growth factors hFGF and EGF, Pen/Strep, and 2-mercaptoethanol). Prior to testing, cells were lifted with TrypLE, gently resuspended to dissociate neurospheres, quenched with media, spun down, and resuspended in fresh media. Cells were counted and directly seeded at a density of ˜10,000 cells per well on a 96-well plate coated with PLF (poly-DL-ornithine hydrobromide, laminin, and fibronectin) 24 hours prior to AAV transduction.

AAV Transduction of hNPCs, Followed by HLA Immunostaining and Flow Cytometry:

[0884] ˜7,000 cells/well of hNPCs were seeded on PLF-coated 96-well plates. 24 hours later, seeded cells were treated with AAVs expressing the CasX:gRNA system. All viral infection conditions were performed at least in duplicate, with normalized number of viral genomes (vg) among experimental vectors, in a series of three-fold serial dilution of MOI ranging from 1E4 to 1E6 vg/cell. Five days post-transduction, AAV-treated hNPCs were lifted with TrypLE. After cell dissociation, staining buffer (3% fetal bovine serum in dPBS) was used for quenching. The dissociated cells were transferred to a round-bottom 96-well plate, followed by centrifugation and resuspension of cell pellets with staining buffer. After another centrifugation, cell pellets were resuspended in staining buffer containing the antibody (BioLegend) that would detect the B2M-dependent HLA protein expressed on the cell surface. After HLA immunostaining, cells were stained with DAPI to label cell nuclei. HLA+ hNPCs were measured using the Attune NxT flow cytometer. Decreased or lack of HLA protein expression would indicate successful editing at the B2M locus in these hNPCs. A subset of transduced hNPCs were also lifted for genomic DNA extraction and editing analysis via next-generation sequencing (NGS).

### NGS Processing and Analysis:

[0885] Genomic DNA (gDNA) from harvested cells were extracted using the Zymo Quick-DNA Miniprep Plus kit following the manufacturer's instructions. Target amplicons were formed by amplifying regions of interest from 200 ng of extracted gDNA with a set of primers specific to the target locus, such as the human B2M locus. These gene-specific primers contain an additional sequence at the 5′ end to introduce an Illumina adapter and a 16-nucleotide unique molecule identifier. Amplified DNA products were purified with the Ampure XP DNA cleanup kit. Quality and quantification of the amplicon were assessed using a Fragment Analyzer DNA Analysis kit (Agilent, dsDNA 35-1500 bp). Amplicons were sequenced on the Illumina Miseq according to the manufacturer's instructions. Raw fastq files from sequencing were quality-controlled and processed using cutadapt v2.1, flash2 v2.2.00, and CRISPResso2 v2.0.29. Each sequence was quantified for containing an insertion or deletion (indel) relative to the reference sequence, in a window around the 3′ end of the spacer (30 bp window centered at −3 bp from 3′ end of spacer). CasX activity was quantified as the total percent of reads that contain insertions, substitutions, and/or deletions anywhere within this window for each sample.

Reprogramming of Induced Pluripotent Stem Cells (iPSCs):

[0886] Fibroblast cells from a patient were obtained from the Coriell Cell Repository. iPSCs were generated from these lines by episomal reprogramming and genetically engineered to ectopically express Neurogenin 2 (Neurog2) to accelerate neuronal differentiation. Three iPSC clones were selected for downstream experiments.

### Neuronal Cell Culture:

[0887] All neuronal cell culture was performed using N2B27-based media. To induce neuronal differentiation, iPSCs were plated in neuronal plating media (N2B27 base media with 1 μg/mL doxycycline, 200 μM L-ascorbic acid, 1 μM dibutyryl cAMP sodium salt, 10 μM CultureOne, 100 ng/ml of BDNF, 100 ng/ml of GDNF). iNs were dissociated, aliquoted, and frozen for long term storage after three days of differentiation (DIV3). DIV3 iNs were thawed and seeded on a 96-well plate at 30,000 cells per well. iNs were cultured for one week in plating media and thereafter, half-media changes were performed once every week using feeding media (N2B27 base media with 200 μM L-ascorbic acid, 1 μM dibutyryl cAMP sodium salt, 200 ng/ml of BDNF, 200 ng/ml of GDNF).

### AAV Transduction of iNs In Vitro:

[0888] 24 hours prior to transduction, ˜30,000-50,000 iNs per well were seeded on Matrigel-coated 96-well plates. AAVs expressing the CasX:gRNA system were then diluted in neuronal plating media and added to cells, with six wells per condition used as replicates. Cells were transduced at various MOIs (1E4 or 1E5 vg/cell for FIG. 61; 2E4 or 6.67E3 for FIG. 62). Seven days post-transduction, iNs were replenished using feeding media. 14 days post-transduction, cells were lifted using lysis buffer, 6-well replicates were pooled, and gDNA was harvested and prepared for editing analysis at either the human AAVS1 or B2M locus using NGS.

### Results:

[0889] FIG. 60 shows the quantification of percent editing at the B2M locus measured via two different assessments (as indel rate quantified genotypically by NGS and as a phenotypic readout B2M-cell population detected by flow cytometry) in human NPCs five days post-transduction with AAVs at various MOIs. Efficient editing at the human B2M locus was observed, with the highest level of editing achieved at the MOI of ˜3E5: ˜50% indel rate and ˜13% of cells exhibiting the B2M protein knockout phenotype. FIG. 61 also illustrates efficient editing at the AAVS1 locus in human iNs, with construct ID 189 achieving ˜90% editing at the higher MOI of 1E5. As expected, no editing was observed at the AAVS1 locus with the non-targeting spacer.

[0890] FIG. 62 shows that robust editing at the B2M locus was achieved for several of the various protein promoters used to drive expression of CasX variant 491. Briefly, AAVs were generated with the indicated transgene constructs and transduced into human iNs at either an MOI of 2E4 or 6.67E3. AAV constructs 177 and 183 contained promoters that demonstrated the highest editing activity, with at least 80% efficiency at either MOI.

[0891] The results of these experiments demonstrate that CasX variant 491 and guide scaffold 235 with spacer targeting either the human B2M locus or the human AAVS1 locus can edit on-target efficiently when packaged and delivered in vitro via AAVs into human NPCs or iNs.

### Example 18: CpG-Depleted AAVs Demonstrate Effective CasX-Mediated Editing and Induce Less TLR9-Mediated Immune Response In Vitro

[0892] Pathogen-associated molecular patterns (PAMPs) such as unmethylated CpG motifs are small molecular motifs conserved within a class of microbes. They are recognized by toll-like receptors (TLRs) and other pattern recognition receptors in eukaryotes and often induce a non-specific immune activation. In the context of gene therapy, therapeutics containing PAMPs are often not as well-tolerated and are rapidly cleared from the patient given the strong immune response triggered, which ultimately leads to reduced therapeutic efficiency. CpG motifs are short single-stranded DNA sequences containing the dinucleotide CG. When these CpG motifs are unmethylated, they act as PAMPs and therefore potently stimulate the immune response.

[0893] Experiments were performed to deplete CpG motifs in the AAV construct encoding CasX variant 491, guide scaffold variant 235, and spacer 7.37 targeting the endogenous B2M locus (construct ID 183), and to demonstrate that CpG-depleted AAV vectors were able to edit effectively in vitro. Furthermore, experiments will be performed to assess the effects of CpG depletion on the activation of TLR9-mediated immune response in vitro. Individual elements of the AAV genome and their respective CpG-reduced versions are initially subjected to in vitro assessments of editing activity and immunogenicity to identify the optimal CpG-depleted sequences that yield potent editing but reduce undesired TLR9 activation, before being combined to generate an AAV genome with drastically reduced CpG presence for further evaluation.

### Materials and Methods:

### Generation of CpG-Depleted AAV Plasmids:

[0894] Nucleotide substitutions to replace native CpG motifs were designed in silico based on homologous nucleotide sequences from related species for the following elements: the murine U1a snRNA (small nuclear RNA) gene promoter, the human UbC (polyubiquitin C) gene promoter, the bGHpA (bovine growth hormone polyadenylation) sequence, and the human U6 promoter. The coding sequence for CasX 491 was codon optimized for CpG depletion, and the AAV2 ITRs were CpG-depleted as previously described (Pan X, Yue Y, Bofisi M. et al., 2021, Rational engineering of a functional CpG-free ITR for AAV gene therapy. Gene Ther. https://doi.org/10.1038/s41434-021-00296-0). All resulting sequences (Table 25) were ordered as gene fragments with the appropriate overhangs for cloning and isothermal assembly to replace individually the corresponding elements of the existing base AAV plasmid (construct ID 183). Spacer 7.37 (GGCCGAGAUGUCUCGCUCCG; SEQ ID NO: 379), which targets the endogenous gene beta-2-microglobulin (B2M), was used for the relevant experiments discussed in this example. Following isothermal assembly, AAV constructs were transformed into chemically competent E. coli cells (Stbl3s), which were plated on kanamycin LB-agar plates following recovery at 37° C. for 1 hour. Single colonies were picked for colony PCR and Sanger-sequenced. Sequence-validated constructs were midi-prepped for subsequent nucleofection and AAV vector production. The sequences of the additional components of the AAV constructs not depleted for CpG, except for sequences encoding CasX (Table 21), are listed in Table 26. Based on the demonstration of robust expression of CRISPR components and retention of editing activity, AAV constructs with the remaining unaltered components of Table 26 will be modified to deplete the CpG motifs and evaluated using the methods described in Example 17.

TABLE 25
Sequences of CpG-depleted AAV elements.

| CpG-depleted | | Construct | SEQ ID |
|---|---|---|---|
| element | Sequence | ID | NO: |
| CpG-depleted UbC | — | 184 | 41045 |
| promoter | | | |
| Strongly CpG- | — | 185 | 41046 |
| depleted UbC | | | |
| promoter | | | |
| CpG-free UbC | — | 186 | 41047 |
| promoter | | | |
| CpG-depleted Ula | — | 178 | 41048 |
| promoter | | | |
| CpG-free Ula | — | 179 | 41049 |
| promoter | | | |
| CpG-depleted U6 | — | 180 | 41050 |
| promoter | | | |
| CpG-free U6 | — | 181 | 41051 |
| promoter | | | |
| CpG-free cMycNLS- | | ND | 41052 |
| Stx491-cMycNLS | | | |
| CpG-free bGH-polyA | — | 182 | 41053 |
| sequence | | | |
| CpG-free 5′ITR | — | ND | 41054 |
| CpG-free 3′ITR | — | ND | 41055 |

[0895] Production of AAV vectors were performed as described earlier in Example 17.

[0896] Viral genome titer was determined as described earlier in Example 17.

Culturing Human Neural Progenitor Cells (hNPCs) In Vitro:

[0897] Immortalized hNPCs were cultured in hNPC medium (DMEM/F12 with GlutaMax, 10 mM HEPES, 1×NEAA, 1× B-27 without vitamin A, 1× N2 supplemented growth factors hTFGF and EGF, Pen/Strep, and 2-mercaptoethanol). Prior to testing, cells were lifted with TrypLE, gently resuspended to dissociate neurospheres, quenched with media, spun down, and resuspended in fresh media. Cells were counted and directly used for nucleofection or will be seeded at a density of ˜10,000 cells per well on a 96-well plate coated with PLF (p)oly-DL-ornithine hydrobromide, laminin, and fibronectin) 48 hours prior to AAV transduction.

Plasmid Nucleofection into Human Neural Progenitor Cells (hNPCs):

[0898] AAV plasmids encoding the CasX:gRNA system, with or without CpG depletion of the individual elements of the AAV genome, were nucleofected into hNPCs using the Lonza P3 Primary Cell 96-well Nucleofector Kit. Plasmids were diluted into two concentrations: 50 ng/μL and 25 ng/μL. 5 μL of DNA was mixed with 20 μL of 200,000 hNPCs in the Lonza P3 solution supplemented with 18% V/V P3 supplement. The combined solution was nucleofected using the Lonza 4D Nucleofector System following program EH-100. The nucleofected solution was subsequently quenched with the appropriate culture media and then divided into three wells of a 96-well plate coated with PLF. Seven days post-nucleofection, hNPCs were lifted for B2M protein expression analysis via HLA immunostaining followed by flow cytometry. Subsequently, stacking of individual CpG-depleted elements to create a combined AAV genome with substantial CpG depletion will be performed and similarly tested for editing assessment at the B2M locus in vitro.

### Editing Activity Assessment by HLA Immunostaining and Flow Cytometry:

[0899] Seven days after nucleofection, AAV-treated hNPCs were lifted with TrypLE. After cell dissociation, staining buffer (3% fetal bovine serum in dPBS) was used for quenching. The dissociated cells were transferred to a round-bottom 96-well plate, followed by centrifugation and resuspension of cell pellets with staining buffer. After another centrifugation, cell pellets were resuspended in staining buffer containing the antibody (BioLegend) that would detect the B2M-dependent HLA protein expressed on the cell surface. After HLA immunostaining, cells were stained with DAPI to label cell nuclei. HLA+ hNPCs were measured using the Attune NxT flow cytometer.

AAV Transduction of hNPCs In Vitro:

[0900] ˜10,000 cells/well of hNPCs will be seeded on PLF-coated 96-well plates. 48 hours later, seeded cells will be treated with AAVs expressing the CasX:gRNA system, with or without CpG depletion of the individual elements of the AAV genome. All viral infection conditions will be performed at least in duplicate. 5-7 days post-transduction, hNPCs will be lifted for editing activity assessment via HLA immunostaining followed by flow cytometry as described. Subsequently, stacking of individual CpG-depleted elements to create a combined AAV genome with substantial CpG depletion will be performed and similarly tested for editing assessment at the B2M locus in vitro.

[0901] Use of human TLR9 reporter HEK293 cells (HEK-Blue™ hTLR9) for the in vitro immunogenicity assessment post-transduction with CpG-containing (CpG⁺) or CpG-depleted (CpG) AAVs:

[0902] The HEK-Blue™ hTLR9 line (InvivoGen) is derived from HEK293 cells, specifically designed for the study of TLR9-induced NF-κB signaling. These HEK-Blue™ hTLR9 cells overexpress the human TLR9 gene, as well as a SEAP (secreted embryonic alkaline phosphatase) reporter gene under the control of an NF-κB inducible promoter. SEAP levels in the cell culture medium supernatant, which can be quantified using colorimetric assays, report TLR9 activation.

[0903] For this experiment, 5,000 HEK-Blue™ hTLR9 cells will be plated in each well of a 96-well plate in DMEM medium with 10% FBS and Pen/Strep. The next day, seeded cells were transduced with CpG⁺ or CpG⁻ AAVs expressing the CasX:gRNA system. All viral infection conditions will be performed at least in duplicate, with normalized number of viral genomes (vg) among experimental vectors, in a series of three-fold serial dilution of MOI starting with the effective MOI of 1E6 vg/cell. Levels of secreted SEAP in the cell culture medium supernatant will be assessed using the HEK-Blue™ Detection kit at 1, 2, 3, and 4 days post-transduction following the manufacturer's instructions.

### Results:

[0904] FIG. 63 shows the findings of an assay assessing the editing activity at the B2M locus in hNPCs nucleofected with CpG-containing (CpG⁺) or CpG-depleted (CpG) AAV vectors. Editing activity was measured as the percentage of hNPCs that were edited at the B2M locus, resulting in reduced/lack of B2M expression (B2M⁻) on the cell surface. FIG. 63 illustrates that reducing or depleting CpG motifs within the sequences of the U1a promoter (construct ID 178 and 179), Pol III U6 promoter (construct ID 180 and 181), or bGH poly(A) (construct ID 182) did not substantially decrease editing activity compared to the editing level achieved with the original CpG⁺ AAV construct (construct ID 177). Specifically, CpG⁻ U1a, CpG⁻ U6, or CpG⁻ bGH resulted in ˜80%, ˜94%, or ˜83% editing of the editing level attained with the base CpG⁺ AAV construct. However, reducing or depleting CpG motifs within the UbC promoter sequence (construct ID 184, 185, and 186) substantially diminished editing activity compared to the level seen with the base UbC construct (construct ID 183), highlighting context-dependent effects of CpG depletion on AAV editing activity and underscoring the importance to screen individual CpG-depleted AAV elements that would yield potent editing. These findings will be validated in experiments involving hNPC transduction with CpG⁺ or CpG⁻ AAVs. Individual CpG elements will also be stacked to generate a combined AAV genome with maximal CpG depletion, which will be evaluated for editing activity in vitro.

[0905] The experiments using HEK-Blue™ hTLR9 cells to assess TLR9-modulated immune response are expected to show reduced levels of secreted SEAP from cells treated with CpG AAVs in comparison to levels from cells treated with unmodified CpG⁺ AAVs. Reduced SEAP levels would indicate decreased TLR9-mediated immune activation.

### Example 19: In Vivo Administration of AAV Vectors with or without CpG-Depleted Genomes to Assess the Effects on Inflammatory Cytokine Production and CasX-Mediated Editing

[0906] Experiments will be performed to assess the effects of administering AAV vectors with or without CpG-depleted genomes in vivo. Briefly, AAV particles expressing the CasX:gRNA system (with or without CpG depletion) will be administered into C57BL/6J mice. In these experiments, the combined AAV genome with substantial CpG depletion will be used for assessment. After AAV administration, mice will be bled at various time points to collect blood samples. Production of inflammatory cytokines such as IL-1s, IL-6, IL-12, and TNF-α will be measured using ELISA.

### Materials and Methods:

### Generation of CpG-Depleted AAV Plasmids:

[0907] To assess the generation of transgene-specific T cells, a SIINFEKL peptide will be cloned into an AAV transgene plasmid on the N-terminus of the CasX protein. The SIINFEKL peptide is an ovalbumin-derived peptide that is well-characterized and has widely available reagents to probe for T cells specific for this peptide epitope. The nucleic acid sequence encoding this peptide will be cloned as an N-terminal fusion to CasX in an AAV construct with a ROSA26-targeting spacer.

[0908] Production of AAV vectors will be performed as described earlier in Example 17.

[0909] Viral genome titer will be determined as described earlier in Example 17.

### Measurement of Inflammatory Cytokines to Assess Humoral Immune Activation:

[0910] ˜1E12 vg AAVs will be injected intravenously into C57BL/6J mice. Blood will be drawn daily from the tail vein or saphenous vein for seven days after AAV injection. Collected blood serum will be assessed for the levels of inflammatory cytokines, such as IL-1p, IL-6, IL-12, and TNF-α using commercially available ELISA kits according to the manufacturer's recommendations for murine blood samples (Abcam). Briefly, 50 μL of standard, control buffer, and sample will be loaded to the wells of an ELISA plate, pre-coated with a specific antibody to IL-10, IL-6, IL-12, or TNF-α, incubated at room temperature (RT) for two hours, washed, and incubated with horseradish peroxidase enzyme (HRP) for two hours at RT, followed by additional washes. Wells will be treated with TMB ELISA substrate and incubated for 30 minutes at RT in the dark, followed by quenching with H₂SO₄. Absorbance will be measured at 450 nm using a TECAN spectrophotometer with wavelength correction at 570 nm.

### Assessment of Transgene-Specific T Cell Populations:

[0911] Ten days after intravenous injection with AAVs, blood will be collected from mice, and T cells will be isolated using the EasySep™ Mouse T Cell Isolation kit. Isolated T cells will be incubated with the following: FITC mouse anti-human CD4 antibody (BD Biosciences), APC mouse anti-human CD8 antibody (BD Biosciences), and BV421 ovalbumin SIINFEKL MHC tetramer (Tetramer Shop). The percentage of CD4+ and CD8+ T cells specific to the SIINFEKL MHC tetramer will be quantified using flow cytometry. FITC, APC, and BV421 will be excited by the 488 nm, 561 nm, and 405 nm lasers and signal will be quantified with bandpass filters 440/50, 530/30 and 780/60 respectively.

### Quantification of CasX-Specific Antibodies:

[0912] Recombinantly produced and purified CasX variant 491 (methods to produce and purify are described in WO2020247882A1, incorporated by reference in its entirety) will be directly attached to the wells of a polystyrene 96-well plate by passive adsorption, using a carbonate/bicarbonate buffer at pH >9. Serum samples will then be assessed for the presence of CasX 491-specific antibodies using standard ELISA techniques employing commercially available HRP-conjugated secondary antibody kits according to the manufacturer's recommendations (Bethyl Laboratories). Absorbance will be measured at 450 nm using a TECAN spectrophotometer with wavelength correction at 570 nm.

### Quantification of AAV-Mediated Genome Editing at the ROSA26 Locus:

[0913] To demonstrate that CpG AAVs exhibit enhanced CasX editing activity relative to CpG⁺ AAVs in vivo, ˜1E12 AAV particles containing CasX protein 491 with gRNA targeting the ROSA26 locus will be administered intravenously via the facial vein of C57BL/6J neonates. Animals will be subsequently cared for following institutional animal use protocols at Scribe. Four weeks post-injection, mice will be euthanized, and the liver and/or muscle tissue will be harvested for gDNA extraction using the Zymo Quick DNA/RNA miniprep Kit following the manufacturer's instructions. Target amplicons will be amplified from 200 ng of extracted gDNA with a set of primers targeting the mouse ROSA26 locus of interest and processed as described earlier in Example 17.

### Results:

[0914] In vivo experiments measuring serum inflammatory cytokine levels are expected to show that CpG AAVs would significantly dampen production of inflammatory cytokines, such as EL-10, EL-6, E1-12, and TNF-α, thereby reducing immunogenicity and toxicity. In addition, CP AAVs are likely to cause less TLR9 activation leading to reduced expansion of T cells against the SHINFEKL peptide fused to CasX. Therefore, injections with CPU AAVs are expected to yield decreased levels of SIINFEKL-specific CD4+ and CD8+ T cells compared to levels from AAV constructs containing CpG elements.

[0915] Since CpG AAVs are likely to cause less humoral immune activation and non-specific inflammation, as well as less T-cell mediated immunity, titers of CasX-reactive antibodies are also expected to be reduced (i.e., lower ELISA signal quantifying CasX antibodies are anticipated).

[0916] Finally, editing capabilities of CpG AAVs will be assessed by harvesting muscle and/or liver tissue for genomic DNA extraction and subjected to NGS to determine editing levels at the ROSA26 locus. Enhanced CasX editing activity at the ROSA26 locus is anticipated with CpG AAVs, given their expected likelihood to elicit less humoral immune response in vivo.

TABLE 26
AAV constructs and component sequences*

| | | SEQ ID | | |
|---|---|---|---|---|
| Component | Name | NO: | Sequence | Constructs |
| 5′ ITR | AAV2 ITR | 40557 | ND | 1-174, 177-186, 188-198 |
| | CpG-free 5′ | 41777 | ND | ND |
| | ITR | | | |
| Enhancer + | CMV | 40645 | ND | 1-3, 7, 24-33, 44-52, 103-117 |
| core | | | | |
| promoter | | | | |
| | N/A | 40400 | ND | 1-3, 7, 24-33, 44-52, 64-71, 103- |
| | | | | 117, 156 |
| | Syn 1 | 40647 | ND | 65 |
| | NPC5 | 40648 | ND | 66 |
| | NPC7 | 40649 | ND | 67 |
| | NPC127 | 40650 | ND | 68 |
| | NPC190 | 40651 | ND | 69 |
| | NPC249 | 40652 | ND | 70 |
| | NPC286 | 40653 | ND | 71 |
| Protein | CMV | 40654 | ND | 1-3, 7, 24-33, 44-52, 103-117 |
| promoter | | | | |
| | UbC | 40655 | ND | 4, 34-37, 53, 78, 79-102, 119-155, |
| | | | | 157-174, 183, 188-190 |
| | EFS | 40372 | ND | 5, 38-40 |
| | CMV-s | 40657 | ND | 6, 41-43 |
| | CMVd1 | 40374 | ND | 8 |
| | CMVd2 | 40375 | ND | 9 |
| | miniCMV | 40376 | ND | 10 |
| | HSVTK | 40377 | ND | 11 |
| | miniTK | 40378 | ND | 12 |
| | miniIL2 | 40379 | ND | 13 |
| | GRP94 | 40664 | ND | 14 |
| | Supercore 1 | 40381 | ND | 15 |
| | Supercore 2 | 40382 | ND | 16 |
| | Supercore 3 | 40383 | ND | 17 |
| | Mecp2 | 40384 | ND | 18, 192 |
| | CMVmini | 40385 | ND | 19 |
| | CMVmini2 | 40386 | ND | 20 |
| | miniCMVIE | 40387 | ND | 21, 193 |
| | adML | 40388 | ND | 22 |
| | hepB | 40389 | ND | 23 |
| | RSV | 40390 | ND | 54 |
| | hSyn | 40675 | ND | 55 |
| | SV40 | 40676 | ND | 56 |
| | hPGK | 40677 | ND | 57 |
| | Jet | 40394 | ND | 58, 72-74, 191 |
| | Jet+UsP intron | 40679 | ND | 59, 75-77 |
| | hRLP30 | 40680 | ND | 60 |
| | hRPS18 | 40397 | ND | 61 |
| | CBA | 40682 | ND | 62 |
| | CBH | 40683 | ND | 63 |
| | CMV core | 40400 | ND | 64, 198 |
| | Ula | 41778 | ND | 177, 180, 181, 182, |
| | CpG-depleted | 41779 | ND | 178 |
| | Ula | | | |
| | CpG-free Ula | 41780 | ND | 179 |
| | CpG-depleted | 41781 | ND | 180 |
| | U6 | | | |
| | CpG-free U6 | 41782 | ND | 181 |
| | CpG- depleted | 41783 | ND | 184 |
| | UbC | | | |
| | Strongly CpG- | 41784 | ND | 185 |
| | depleted UbC | | | |
| | CpG-free UbC | 41785 | ND | 186 |
| | SFCp | 41786 | ND | 194 |
| | miniSV40 | 41787 | ND | 195 |
| | pJB42CAT5 | 41788 | ND | 196 |
| | MLP | 41789 | ND | 197 |
| | miniEFla | 41790 | ND | ND |
| | hRPL13a | 41791 | ND | ND |
| 5′ NLS aa | 1X SV40 NLS | 40685 | MAPKKKRKVSR | |
| sequence | | | | |
| | 4X SV40 NLS | 40686 | MAPKKKRKVGGSP | 121-123 |
| | | | KKKRKVGGSPKKK | |
| | | | RKVGGSPKKKRKV | |
| | | | SR | |
| | 1X Cmyc NLS | 40446 | PAAKRVKLDSR | 83, 84, 89-102, 124-131, 135-137, |
| | | | | 141-155, 157-174, 177-186, 188-198 |
| | 2X Cmyc NLS | 40447 | PAAKRVKLDGGSP | 127-129 |
| | | | AAKRVKLDSR | |
| | 4X Cmyc NLS | 40448 | PAAKRVKLDGGSP | 130, 131 |
| | | | AAKRVKLDGGSPA | |
| | | | AKRVKLDGGSPAA | |
| | | | KRVKLDSR | |
| | 6X Cmyc NLS | 40449 | PAAKRVKLDGGSP | 135-137, 142 |
| | | | AAKRVKLDGGSPA | |
| | | | AKRVKLDGGSPAA | |
| | | | KRVKLDGGSPAAK | |
| | | | RVKLDGGSPAAKR | |
| | | | VKLDSR | |
| | 1X | 40450 | KRPAATKKAGQAK | 132-134 |
| | Nucleoplasmin | | KKKSR | |
| | NLS | | | |
| | 2X | 40451 | KRPAATKKAGQAK | 138-140 |
| | Nucleoplasmin | | KKKGGSKRPAATK | |
| | NLS | | KAGQAKKKKSR | |
| | 1X Cmyc 1X | 40452 | PAAKRVKLDGGSP | ND |
| | SV40 NLS | | KKKRKVSR | |
| | 1X Cmyc 2′ 1X | 40453 | PAAKKKKLDGGSP | ND |
| | SV40 NLS | | KKKRKVSR | |
| | 1X Cmyc 2′ | 40454 | PAAKKKKLDSR | ND |
| | NLS | | | |
| | 3X Cmyc 2′ | 40455 | PAAKKKKLDGGSP | ND |
| | NLS | | AAKKKKLDGGSPA | |
| | | | AKKKKLDSR | |
| | 4X Cmyc 2′ | 40456 | PAAKKKKLDGGSP | ND |
| | NLS | | AAKKKKLDGGSPA | |
| | | | AKKKKLDGGSPAA | |
| | | | KKKKLDSR | |
| | 1X CPV NLS | 40457 | PAKRARRGYKCSR | ND |
| | IN | | | |
| | 2X CPV NLS | 40458 | PAKRARRGYKCGS | ND |
| | IN | | PAKRARRGYKCSR | |
| | 1X hBOVc | 40459 | PRRKREESR | ND |
| | NLS IN | | | |
| | 1X hBOVc | 40460 | PYRGRKESR | ND |
| | NLS 2N | | | |
| | 1X SIRT NLS | 40702 | PLRKRPRRSR | ND |
| | 2X SIRT NLS | 40703 | PLRKRPRRGSPLR | ND |
| | | | KRPRRSR | |
| | 1X Cmyc NLS | 40704 | PAAKRVKLDGGKR | ND |
| | 1X BPSV40 | | TADGSEFESPKKK | |
| | NLS GGS | | RKVGGS | |
| | 1X Cmyc NLS | 40705 | PAAKRVKLDGGKR | ND |
| | 1X BPSV40 | | TADGSEFESPKKK | |
| | NLS PPPPG | | RKVPPPPG | |
| | 1X Cmyc NLS | 40706 | PAAKRVKLDGGKR | ND |
| | 1X BPSV40 | | TADGSEFESPKKK | |
| | NLS px330 PG | | RKVGIHGVPAAPG | |
| | 1X Cmyc NLS | 40707 | PAAKRVKLDGGKR | ND |
| | 1X BPSV40 | | TADGSEFESPKKK | |
| | NLS (GGGS)2 | | RKVGGGSGGGSPG | |
| | PG | | | |
| | 1X Cmyc NLS | 40708 | PAAKRVKLDGGKR | ND |
| | 1X BPSV40 | | TADGSEFESPKKK | |
| | NLS | | RKVPGGGSGGGSP | |
| | P(GGGS)2 PG | | G | |
| | 1X Cmyc NLS | 40709 | PAAKRVKLDGGKR | ND |
| | 1X BPSV40 | | TADGSEFESPKKK | |
| | NLS alpha PG | | RKVAEAAAKEAAA | |
| | | | KEAAAKAPG | |
| | 1X Cmyc NLS | 40710 | PAAKRVKLDGGKR | ND |
| | 1X BPSV40 | | TADGSEFESPKKK | |
| | NLS PG | | RKVPG | |
| | 1X Cmyc GGS | 40711 | PAAKRVKLDGGSP | ND |
| | 1X SV40 GGS | | KKKRKVGGS | |
| | 1X Cmyc PPP | 40712 | PAAKRVKLDPPPP | ND |
| | 1X SV40 PG | | KKKRKVPG | |
| | 1X Cmyc PG | 40713 | PAAKRVKLDPG | ND |
| | 1X Cmyc | 40714 | PAAKRVKLDGGGS | ND |
| | (GGGS)3 | | GGGSGGGS | |
| | 1X Cmyc PPP | 40715 | PAAKRVKLDPPP | ND |
| | 1X Cmyc | 40716 | PAAKRVKLDGGGS | ND |
| | (GGGS)3 PPP | | GGGSGGGSPPP | |
| | 1X SV40 PPP | 40717 | PKKKRKVPPP | ND |
| | 1X SV40 GGS | 40718 | PKKKRKVGGS | ND |
| CasX | CpG-free | 41792 | ND | ND |
| | cMycNLS- | | | |
| | Stx491- | | | |
| | cMycNLS | | | |
| 3′ NLS aa | 1X SV40 NLS | 40461 | GSPKKKRKV | |
| sequence | | | | |
| | 4X SV40 NLS | 40462 | GSPKKKRKVGGSP | 149 |
| | | | KKKRKVGGSPKKK | |
| | | | RKVGGSPKKKRKV | |
| | 6S SV40 NLS | 40463 | GSPKKKRKVGGSP | ND |
| | | | KKKRKVGGSPKKK | |
| | | | RKVGGSPKKKRKV | |
| | | | GGSPKKKRKVGGS | |
| | | | PKKKRKV | |
| | 1X Cmyc NLS | 40464 | GSPAAKRVKLD | 141, 142, 150, 157-174, 177-186, |
| | | | | 188-198 |
| | 2X Cmyc NLS | 40465 | GSPAAKRVKLDGG | 151 |
| | | | SPAAKRVKLD | |
| | 4x Cmyc NLS | 40466 | GSPAAKRVKLDGG | ND |
| | | | SPAAKRVKLDGGS | |
| | | | PAAKRVKLDGGSP | |
| | | | AAKRVKLD | |
| | 6x Cmyc NLS | 40467 | GSPAAKRVKLDGG | 152 |
| | | | SPAAKRVKLDGGS | |
| | | | PAAKRVKLDGGSP | |
| | | | AAKRVKLDGGSPA | |
| | | | AKRVKLDGGSPAA | |
| | | | KRVKLD | |
| | 1X | 40468 | GSKRPAATKKAGQ | 119, 122, 125, 128, 130, 133, 136, |
| | Nucleoplasmin | | AKKKK | 139, 153 |
| | NLS | | | |
| | 2X | 40469 | KRPAATKKAGQAK | 120, 123, 126, 129, 131, 134, 137, |
| | Nucleoplasmin | | KKKGGSKRPAATK | 140, 154 |
| | NLS | | KAGQAKKKK | |
| | 2x | 40470 | GSPAAKRVKLGGS | 155 |
| | Nucleoplasmin | | PAAKRVKLGGSPK | |
| | 2x SV40 NLS | | KKRKVGGSPKKKR | |
| | | | KV | |
| | B19 NLS 1C | 40471 | GSKLGPRKATGRW | ND |
| | | | GS | |
| | BoV NLS 3C | 40472 | GSKRKGSPERGER | ND |
| | | | KRHWGS | |
| | 1X SV40 GS | 40473 | GSPKKKRKVGSGS | ND |
| | 1X | | KRPAATKKAGQAK | |
| | Nuceloplasmin | | KKKLE | |
| | NLS | | | |
| | GP vBPSV40 | 40474 | GPKRTADSQHSTP | 143 |
| | 12aa SV40 NLS | | PKTKRKVEFEPKK | |
| | | | KRKV | |
| | (GGGs)2vBPS | 40475 | GGGSGGGSKRTAD | ND |
| | V40 12aa SV40 | | SQHSTPPKTKRKV | |
| | | | EFEPKKKRKV | |
| | 3′alphahelix | 40476 | AEAAAKEAAAKEA | 144 |
| | vBPSV40 12aa | | AAKAKRTADSQHS | |
| | SV40 | | TPPKTKRKVEFEP | |
| | | | KKKRKV | |
| | GP SV40 GGS | 40477 | GPPKKKRKVGGSK | ND |
| | vBPSV40 12aa | | RTADSQHSTPPKT | |
| | SV40 | | KRKVEFEPKKKRK | |
| | | | V | |
| | GP alpha helix | 40478 | GPAEAAAKEAAAK | 145 |
| | Cmyc NLS | | EAAAKAPAAKRVK | |
| | | | LD | |
| | GP (GGGS)3 | 40479 | GPGGGSGGGSGGG | 146 |
| | Cmyc NLS | | SPAAKRVKLD | |
| | GP SV40 PPP | 40480 | GPPKKKRKVPPPP | 148 |
| | Cmyc NLS | | AAKRVKLD | |
| | GP Cmyc NLS | 40481 | GPPAAKRVKLD | 147 |
| | TGGGPGGGA | 40485 | TGGGPGGGAAAGS | ND |
| | AAGSGS- | | GSPKKKRKVGSGS | |
| | 1xSV40-GS- | | KRPAATKKAGQAK | |
| | Nuc | | KKKLE | |
| | TGGGPGGGA | 40487 | TGGGPGGGAAAGS | ND |
| | AAGSGS- | | GSPKKKRKVGSGS | |
| | 1xSV40-GS | | | |
| | PPPlinker | 40488 | PPPPKKKRKVPPP | ND |
| | 1xSV40 | | | |
| | PPPlinker | | | |
| | GGSlinker | 40489 | GGSPKKKRKVPPP | ND |
| | 1xSV40 | | | |
| | PPPlinker | | | |
| | PPPlinker | 40490 | PPPPKKKRKV | ND |
| | 1×SV40 | | | |
| | GGSlinker | 40491 | GGSPKKKRKV | ND |
| | 1xSV40 | | | |
| | GGSlinker | 40492 | GGSPKKKRKVGGS | ND |
| | 1xSV40 | | GGSGGS | |
| | (GGS)3linker | | | |
| | GGSlinker | 40493 | GGSPKKKRKVGGS | ND |
| | 2xSV40 | | PKKKRKV | |
| | (GGS)3linker | 40494 | GGSGGSGGSPKKK | ND |
| | 1xSV40 GGS | | RKVGGSPKKKRKV | |
| | 1XSV40 | | | |
| | PPP(GGGS)3li | 40749 | PPPGGGSGGGSGG | ND |
| | nker 1xCmyc | | GSPAAKRVKLD | |
| | PPPlinker | 40750 | PPPPAAKRVKLD | ND |
| | 1xCmyc | | | |
| | PPP(GGGS)3 | 40749 | PPPGGGSGGGSGG | ND |
| | linker 1xCmyc | | GSPAAKRVKLD | |
| PTRE | WPRE1 | 40752 | ND | 35, 38, 41, 72, 75, 78, 81, 83 |
| | WPRE2 | 40753 | ND | 36, 39, 42, 73, 76, 79, 82, 84, |
| | | | | 188-190 |
| | WPRE3 | 40433 | ND | 34, 37, 40, 43, 74, 77, 80 |
| PolyA | bGH | 40421 | ND | 1-23, 32, 33, 35-174, 177-181, 183- |
| signal | | | | 186, 188-198 |
| | hGH | 40756 | ND | 24 |
| | hGHshort | 40757 | ND | 25 |
| | HSVTK | 40424 | ND | 26 |
| | SynPolyA | 40425 | ND | 27 |
| | SV40 | 40426 | ND | 28 |
| | SV40short | 40427 | ND | 29 |
| | bglob | 40762 | ND | 30 |
| | bglobshort | 40429 | ND | 31 |
| | SV40polyA late | 40430 | ND | 34 |
| | CpG-free bGH | 41816 | ND | 182 |
| RNA | human U6 | 40401 | ND | 1-31, 34-84, 103-157, 177-179, |
| promoter | | | | 182-186, 188-198 |
| | H1 | 40402 | ND | 32, 158 |
| | 7SK | 40403 | ND | 33 |
| | hU6 variant 1 | 40404 | ND | 85, 89 |
| | hU6 variant 2 | 40405 | ND | 86 |
| | hU6 variant 3 | 40406 | ND | 87 |
| | hU6 variant 4 | 40407 | ND | 88 |
| | hU6 variant 5 | 40408 | ND | 90 |
| | hU6 variant 6 | 40409 | ND | 91 |
| | hU6 variant 7 | 40410 | ND | 92 |
| | hU6 variant 8 | 40411 | ND | 93 |
| | hU6 variant 9 | 40412 | ND | 94 |
| | hU6 variant 10 | 40413 | ND | 95 |
| | hU6 variant 1 1 | 40414 | ND | 96 |
| | hU6 variant 12 | 40415 | ND | 97 |
| | hU6 variant 13 | 40416 | ND | 98 |
| | hU6 variant 14 | 40417 | ND | 99 |
| | hU6 variant 15 | 40418 | ND | 100 |
| | hU6 variant 16 | 40419 | ND | 101 |
| | hU6 variant 17 | 40420 | ND | 102 |
| | H1 core | 41793 | ND | 159 |
| | H1 core + 7SK | 41794 | ND | 160 |
| | hybrid 1 | | | |
| | H1 core + 7SK | 41795 | ND | 161 |
| | hybrid 2 | | | |
| | H1 core + 7SK | 41796 | ND | 162 |
| | hybrid 3 | | | |
| | H1 core + 7SK | 41797 | ND | 163 |
| | hybrid 4 | | | |
| | H1 core + 7SK | 41798 | ND | 164 |
| | hybrid 5 | | | |
| | H1 core + 7SK | 41799 | ND | 165 |
| | hybrid 6 | | | |
| | H1 core + 7SK | 41800 | ND | 166 |
| | hybrid 7 | | | |
| | H1 core + 7SK | 41801 | ND | 167 |
| | hybrid 8 | | | |
| | H1 core + 7SK | 41802 | ND | 168 |
| | hybrid 9 | | | |
| | H1 core + U6 | 41803 | ND | 169 |
| | hybrid 1 | | | |
| | H1 core + U6 | 41804 | ND | 170 |
| | hybrid 2 | | | |
| | H1 core + 7SK | 41805 | ND | 171 |
| | + U6 hybrid 1 | | | |
| | H1 core + U6 | 41806 | ND | 172 |
| | hybrid 3 | | | |
| | H1 core + 7SK | 41807 | ND | 173 |
| | + U6 hybrid 2 | | | |
| | H1 core + 7SK | 41808 | ND | 174 |
| | + U6 hybrid 3 | | | |
| | hU6 isoform 2 | 41809 | ND | ND |
| | hU6 isoform 3 | 41810 | ND | ND |
| | hU6 isoform 4 | 41811 | ND | ND |
| | hU6 isoform 5 | 41812 | ND | ND |
| | hU6-CpG | 41813 | ND | 180 |
| | reduced | | | |
| | hU6-CpG | 41814 | ND | 181 |
| | depleted | | | |
| 3′ ITR | AAV2 ITR | 40576 | ND | 1-174, 177-186, 188-198 |
| | CpG-free 3′ | 41815 | ND | ND |
| | ITR | | | |

*Table lists component sequences except for sequences encoding nuclease, guide RNA, and linking peptides; ND = no description, sequence provided in sequence listing.

TABLE 27
Encoded targeting sequences incorporated
into AAV constructs

| Target | SEQ ID NOs of Targeting Sequences |
|---|---|
| Huntington (HTT) | 41056-41289 |
| Spacers | |
| PCSK9 Spacers | 41290-41319 |
| B2M Spacers | 41320-41477 |
| SOD1 Spacers | 41478-41571 |
| Rho Spacers | 41572-41611 |
| TRAC Spacers | 41612-41653 |
| DMD Spacers | 41654-41736 |
| BCL11A Spacers | 41737-41738 |
| C9Orf72 Spacers | 411739-41740 |
| PTBP1 Spacers | 41741-41776 |

### Example 20: Guide RNA Guide Scaffold Platform Evolution

[0917] Experiments were conducted to identify guide RNA guide scaffold variants that exhibit improved activity for double-stranded DNA (dsDNA) cleavage. In order to accomplish this, a large-scale library of scaffold variants was designed and tested in a pooled manner for functional knockout of a reporter gene in human cells. Scaffold variants leading to improved knockout were determined by sequencing the functional elements within the pool and subsequent computational analysis.

### Materials and Methods

### Library Design

### Assessment of RNA Secondary Structure Stability

[0918] RNAfold (v2.4.14) (Lorenz R, et al. ViennaRNA Package 2.0. Algorithms Mol Biol. 6:26 (2011)) was used to predict the secondary structure stability of RNA sequences, similar to what was done in Jarmoskaite I., et al. “A quantitative and predictive model for RNA binding by human pumilio proteins”, Mol Cell. 74(5):966 (2019). To assess the ΔΔG_BC value, the ensemble free energy (AG) of the unconstrained ensemble was calculated, then the ensemble free energy (AG) of the constrained ensemble was calculated. The ΔΔG_BC is the difference between the constrained and unconstrained AG values. A constraint string was used that reflects the base-pairing of the pseudoknot stem, scaffold stem, and extended stem, and requires the bases of the triplex to be unpaired.

### Calculation of Pseudoknot Stem Secondary Structure Stability

[0919] Pseudoknot structure stability was calculated for the entire stem-loop spanning positions 3-33, using the triplex loop sequence from guide scaffold 175. Further, a constraint string was generated that enforced pairing of the pseudoknot bases and unpairing of the bases in the triplex loop. Changes in stability could thus only be due to the differences in the sequence of the pseudoknot stem. For example, the pseudoknot sequence AAAACG_CGTTTT was turned into a stem-loop sequence by inserting the triplex loop sequence CUUUAUCUCAUUACUUUGA (SEQ ID NO: 41834), so that the final sequence would be AAAACGCUUUAUCUCAUUACUUUGACGTTTT (SEQ ID NO: 41835), and the constraint string was: ‘((((((xxxxxxxxxxxxxxxxxxx))))))’ (SEQ ID NO: 41836, where x=n).

### Molecular Biology

### Molecular Biology of Library Construction

[0920] The designed library of guide RNA scaffold variants was synthesized and obtained from Twist Biosciences, then amplified by PCR with primers specific to the library. These primers amplify additional sequence at the 5′ and 3′ ends of the library to introduce sequence recognition sites for the restriction enzyme SapI. PCR was performed with Q5 DNA Polymerase (New England Biolabs) and performed according to the manufacturer's instructions. Typical PCR conditions were: 10 ng of template library DNA, lx Q5 DNA Polymerase Buffer, 300 nM dNTPs, 300 nM each primer, 0.25 μl of Q5 DNA Polymerase in a 50 μl reaction. On a thermal cycler a typical program would be: cycle for 95° C. for 5 min; then 20 cycles of 98° C. for 15 s, 65° C. for 20 s, 72° C. for 1 min; with a final extension of 2 min at 72° C. Amplified DNA product was purified with DNA Clean and Concentrator kit (Zymo Research). This PCR amplicon, as well as plasmid pKB4, was then digested with the restriction enzyme SapI (New England Biolabs) and both were independently gel purified by agarose gel electrophoresis followed by gel extraction (Zymo) according to the manufacturer's instructions. Libraries were then ligated using T4 DNA Ligase (New England Biolabs), purified with DNA Clean and Concentrator kit (Zymo), and transformed into MegaX DH10B TiR Electrocomp Cells (ThermoFisher Scientific) all according to the manufacturer's instructions. Transformed libraries were recovered for one hour in SOC media, then grown overnight at 37° C. with shaking in 5 mL of 2xyt media. Plasmid DNA was then miniprepped from the cultures (QIAGEN). Plasmid DNA was then further cloned by digestion with restriction enzyme Esp3I (New England Biolabs), followed by ligation with annealed oligonucleotides possessing complementary single stranded DNA overhangs and the desired spacer sequence for targeting GFP. The oligonucleotides possessed 5′ phosphorylation modifications, and were annealed by heating to 95° C. for 1 min, followed by reduction of the temperature by two degrees per minutes until a final temperature of 25° C. was reached. Ligation was performed as a Golden Gate Assembly Reaction, where typical reaction conditions consisted of 1 μg of pre-digested plasmid library, 1 μM annealed oligonucleotides, 2 μL T4 DNA Ligase, 2 μL Esp3I, and 1× T4 DNA Ligase Buffer in a total volume of 40 μL water. The reaction was cycled 25 times between 37° C. for 3 minutes and 16° C. for 5 minutes. As above, the library was purified, transformed, grown overnight, and miniprepped. The resulting library of plasmids was then used for the production of lentivirus.

### Library Screening

### LV Production

[0921] Lentiviral particles were generated by transfecting LentiX HEK293T cells, seeded 24h prior, at a confluency of 70-90%. Plasmids containing the pooled library were introduced to a second generation lentiviral system containing the packaging and VSV-G envelope plasmids with polyethylenimine, in serum-free media. For particle production, media is changed 12 hours post-transfection, and viruses harvested at 36-48h post-transfection. Viral supernatant filtered using 0.45 μm PES membrane filters and diluted in cell culture media when appropriate, prior to addition to target cells.

[0922] 72 hours post-filtration, aliquots of lentiviral supernatant were titered by TaqMan qPCR. Viral genomic RNA was isolated using a phenol-chloroform extraction (TRIzol), followed by alcohol precipitation. Quality and quantity of extraction was evaluated by nano-drop reading. Any residual plasmid DNA was then digested with DNase I just prior to cDNA production by ThermoFischer SuperScript IV Reverse Transcriptase. Viral cDNA was subject to serial dilutions through 1:1000 and combined with WPRE based primers and TaqMan Master Mix prior to qPCR by Bio-Rad CFX96. All sample dilutions are added in duplicate and averaged prior to titer calculations against a known, plasmid-based standard curve. Water is always measured as a negative control.

LV Screening (Transduction, Maintenance, Gating, Sorting, gDNA Isolation)

[0923] Target reporter cells are passed 24-48h prior to transduction to ensure cellular division occurs. At the point of transduction, the cells were trypsinized, counted, and diluted to appropriate density. Cells were resuspended with no treatment, library- or control-containing neat lentiviral supernatant at a low MOI (0.1-5, by viral genome) to minimize dual lentiviral integrations. The lentiviral-cellular mixtures were seeded at 40-60% confluency prior to incubation at 37° C., 5% CO₂. Cells were selected for successful transduction 48h post-transduction with puromycin at 1-3 μg/ml for 4-6 days followed by recovery in HEK or Fb medium.

[0924] Post-selection, cells were suspended in 4′,6-diamidino-2-phenylindole (DAPI) and phosphate-buffered saline (PBS). Cells were then filtered by Corning strainer-cap FACS tube (Prod. 352235) and sorted on the Sony MA900. Cells were sorted for knockdown of the fluorescent reporter, in addition to gating for single, live cells via standard methods. Sorted cells from the experiment were lysed, and the genome was extracted using a Zymo Quick-DNA Miniprep Plus following the manufacturer's protocol.

### Processing for Next Generation Sequencing (NGS)

[0925] Genomic DNA was amplified via PCR with primers specific to the guide RNA-encoding DNA, to form a target amplicon. These primers contain additional sequence at the 5′ ends to introduce Illumina read and 2 sequences. Typical PCR conditions would be: 2 μg of gDNA, lx Kapa Hifi buffer, 300 nM dNTPs, 300 nM each primer, 0.75 μl of Kapa Hifi Hotstart DNA polymerase in a 50 μl reaction. On a thermal cycler, cycle for 95° C. for 5 min; then 15 cycles of 98° C. for 15 s, 62° C. for 20 s, 72° C. for 1 min; with a final extension of 2 min at 72° C. Amplified DNA product is purified with Ampure XP DNA cleanup kit. A second PCR step was done with indexing adapters to allow multiplexing on the Illumina platform. 20 μl of the purified product from the previous step was combined with 1× Kapa GC buffer, 300 nM dNTPs, 200 nM each primer, 0.75 μl of Kapa Hifi Hotstart DNA polymerase in a 50 μl reaction. On a thermal cycler, cycle for 95° C. for 5 min; then 5-16 cycles of 98° C. for 15 s, 65° C. for 15 s, 72° C. for 30 s; with a final extension of 2 min at 72° C. Amplified DNA product is purified with Ampure XP DNA cleanup kit. Quality and quantification of the amplicon was assessed using a Fragment Analyzer DNA analyzer kit (Agilent, dsDNA 35-1500 bp). Amplicons were sequenced on the Illumina Miseq (v3, 150 cycles of single-end sequencing) according to the manufacturer's instructions. NGS analysis (sample processing and data analysis)

[0926] Reads were trimmed for adapter sequences with cutadapt (version 2.1), and the guide sequence (comprising the scaffold sequence and spacer sequence) was extracted for each read (also using cutadapt v 2.1 linked adapters to extract the sequence between the upstream and downstream amplicon sequence). Unique guide RNA sequences were counted, and then each scaffold sequence was compared to the list of designed sequences and to the sequence of guide scaffolds 174 (SEQ ID NO: 2238) and 175 (SEQ ID NO: 2239) to determine the identity of each.

[0927] Read counts for each unique guide RNA sequence were normalized for sequencing depth using mean normalization. Enrichment was calculated for each sequence by dividing the normalized read count in each GFP-sample by the normalized read count in the associated naive sample. For both selections (R2 and R4), the GFP- and naive populations were processed for NGS on three separate days, forming an enrichment value for each scaffold in triplicate. An overall enrichment score per scaffold was calculated after summing the read counts for the naive and GFP-samples across triplicates.

[0928] Two enrichment scores from different selections were combined by a weighted average of the individual log₂ enrichment scores, weighted by their relative representations within the naive population.

[0929] Error on the log 2 enrichment scores was estimated calculating a 95% confidence interval on the average enrichment score across triplicate samples. These errors are propagated when combining the enrichment values for the two separate selections.

### Results and Discussion

### Library Design, Ordering, and Cloning

[0930] A library of guide RNA variants was designed to both test variation to the RNA scaffold in an unbiased manner and in a targeted manner that focused on key modules within the RNA scaffold.

[0931] In the unbiased portion of the library, all single nucleotide substitutions, insertions, and deletions were designed to each residue of guide scaffolds 174 (SEQ ID NO: 2238) and 175 (SEQ ID NO: 2239) (˜2800 individual sequences). Double mutants were designed to specifically focus on areas that could possibly be interacting; thus if in the CryoEM structure (PDBid: 6NY2), two residues were involved in a canonical or non-canonical base pairing interaction, or two residues were predicted to pair in the lowest-energy structure predicted by RNAfold (v2.4.14), then the corresponding residues in guide scaffolds 174 and 174 were mutated (including all possible substitutions, insertions, and deletions of both residues). Adjacent residues to these ‘interacting’ residues were also mutated; however for these only substitutions of each of the two residues were included. In the final library, ˜27K sequences were designed with two mutations relative to guide scaffolds 174 or 175.

[0932] In the portion of the library devoted to specific mutagenesis of key regions of the RNA scaffold, modifications were designed to: the pseudoknot region, the triplex region, the scaffold bubble, and the extended stem (see FIG. 65 for region identification). In each of these targeted sections of the library, the entire domain was mutagenized in a hypothesis-driven manner (FIG. 66). As an example, for the triplex region, each of the base triplets that comprise the triplex was mutagenized to a different triplex-forming motif (see FIG. 67). This type of mutagenesis is distinct from that employed in the scaffold stem bubble, in which all possible substitutions of the bases surrounding the bubble were mutagenized (i.e., with up to 5 mutations relative to guide sequences 174 or 175). In contrast again, the 5 base-pairs comprising the pseudoknot stem were completely replaced with alternate Watson-Crick pairing sequence (up to 10 distinct bases mutagenized).

[0933] A final targeted section of the library was meant to optimize for sequences that were more likely to form secondary structures amenable to binding of the protein. In short, the secondary structure stability of a sequence was predicted under two conditions: 1) in the absence of any constraints, 2) constrained such that the key secondary structure elements such as pseudoknot stem, scaffold stem, and extended stem are formed (see Materials and Methods). Our hypothesis was that the difference in stability between these two conditions (called here ΔΔG_BC) would be minimal for sequences that are more amenable to protein binding, and thus we should search for sequences in which this difference is minimal).

[0934] The designed library was ordered from Twist (˜40K distinct sequences), and synthesized to include golden gate sites for cloning into a lentiviral plasmid backbone that also expressed the protein STX119 (see Materials and Methods). A spacer sequence targeting the GFP gene was cloned into the library vector, effectively creating single-guide RNAs from each RNA scaffold variant to target the GFP gene. The representation of the designed library variants was assessed with next generation sequencing (see Materials and Methods).

### Library Screening and Assessment

[0935] The plasmid library containing the guide RNA variants and a single CasX protein (version 119) was made into lentiviral particles (see Materials and Methods); particles were titered based on copy number of viral genomes using a qPCR assay (see Materials and Methods). A cell line stably expressing GFP was transduced with the lentiviral particle library at a low multiplicity of infection (MOI) to enforce that each cell integrated at most one library member. The cell pool was selected to retain only cells that had a genomic integration. Finally, the cell population was sorted for GFP expression, and a population of GFP negative cells was obtained. These GFP negative cells contained the library members that effectively targeted the CasX RNP to the GFP protein, causing an indel and subsequent loss of function.

[0936] Genomic DNA from the unsorted cell population (“naive”) and the GFP negative population was processed to isolate the sequence of the guide RNA library members in each cell. To determine the representation of guide RNAs in the naive and GFP negative populations, next generation sequencing was performed. Enrichment scores were calculated for each library member by dividing the library member's representation in the GFP-population by its representation in the naive population: A high enrichment score indicates a library member that is much more frequent in the active, GFP negative population than in the starting pool, and thus is an active variant capable of effectively generating an indel within the GFP gene (enrichment value >1, log₂ enrichment >0). A low enrichment score indicates a library member that is depleted in the active GFP-population compared to the naive, and thus ineffective at forming an indel (enrichment value <1, log₂ enrichment <0). As a final statistic for comparison, the relative enrichment value was calculated as the enrichment of a library member (in the GFP negative vs naive population), divided by the enrichment of the reference scaffold sequence (in the GFP negative vs naive population). (In log space, these values are simply subtracted.) The enrichment values of the reference scaffold sequences are shown in FIG. 68).

[0937] The screen was performed multiple times, with independent production of lentiviral particles, transduction of cells, selection and sorting to obtain naive and GFP negative populations, and sequencing to learn enrichment values of each library member. These screens were called R2 and R4, and largely reproduce the enrichment values obtained for single nucleotide variants on guide scaffolds 174 and 175 (FIG. 69). The screen was able to identify many possible combinations of mutations that were enriched in the functional GFP-population, and thus can lead to functional RNPs. In contrast, no guides that contained non-targeting spacers were enriched, confirming that enrichment is a selective cutoff (data not shown). The full set of mutations on guide scaffolds 174 and 175 that were enriched are given in Tables 28 and 29, respectively. These lists reveal the sequence diversity still capable of achieving targeted, functional RNPs.

### Single Nucleotide Mutations Indicate Mutable Regions of the Scaffold:

[0938] To determine scaffold mutations that lead to similar or improved activity relative to guide scaffolds 174 and 175, enrichment values of single nucleotide substitutions, insertions, or deletions were plotted (FIG. 70). Generally, single nucleotide changes on guide scaffold 174 were more tolerated than guide scaffold 175, perhaps reflecting higher activity of guide scaffold 174 in this context and thus a higher tolerance to mutations that dampen activity (FIG. 68 and FIG. 71). Single nucleotide mutations on 175 that were favorable were also favorable in the context of guide scaffold 174 in the vast majority of cases (FIG. 71), and thus the values for mutations on guide scaffold 175 were taken to be a more stringent readout of mutation effects. Key mutable areas were revealed by this analysis, as described in the following paragraphs:

[0939] The most notable feature was the extended stem, which showed similar enrichment values as the reference sequences for scaffolds 174 or 175, suggesting that the scaffold could tolerate changes in this region, similar to what has been seen in the past and would be predicted by structural analysis of the CasX RNP in which the extended stem is seen to have little contact with the protein.

[0940] The triplex loop was another area that showed high enrichment relative to the reference scaffold, especially when made in guide scaffold 175 (e.g., especially mutations to C15 or C17). Notably, the C17 position in 175 is already mutated to a G in scaffold 174, which is one of the two highly enriched mutations at this position to scaffold 175.

[0941] Changes to either member of the predicted pair in the pseudoknot stem between G7 and A29 were both highly enriched relative to the reference, especially in guide scaffold 175. This pair is a noncanonical G:A pairing in both guide scaffolds 174 and 175. The most strongly enriched mutation at these positions were in guide scaffold 175, converting A29 to a C or a T; the first of which would form a canonical Watson-Crick pairing (G7:C29), and the second of which would form a GU wobble pair (G7:U29), both of which may be expected to increase stability of the helix relative to the G:A pair. Converting the G7 to a T was also highly enriched, which would form a canonical pair (U7:A29) at this position. Clearly, these positions favor being more stably paired. In general, the 5′ end was mutable, with few changes leading to de-enrichment.

[0942] Finally, the insertion of a C at position 54 in guide scaffold 175 was highly enriched, whereas deletion of either the A or the inserted G at the analogous position in guide scaffold 174 both had similar enrichment values as the reference. Taken together, the guide scaffold may prefer having two nucleotides in this scaffold stem bubble, but it may not be a strong preference. These results are further examined in the sections below.

### Pseudoknot Stem Stability is Integral to Scaffold Activity

[0943] To further explore the effect of the pseudoknot stem on scaffold activity, the pseudoknot stem was modified in the following ways: (1) the base pairs within the stem were shuffled, such that each new pseudoknot has the same composition of base pairs, but in a different order within the stem; (2) the base pairs were completely replaced with random, WC-paired sequence. Two hundred ninety one (291) pseudoknot stems were tested. Analysis of the first set of sequences shows a strong preference for the G-A pair to be in the first position of the pseudoknot stem, relative to the other possible positions (positions 2-6; in the wildtype sequence it is in position 5;

[0944] FIG. 72), while the results demonstrate that having a GA pair at each of the positions 2-6 in the pseudoknot stem is generally unfavorable, with low average enrichment. Having the G-A bases at position 1 likely stabilizes the pseudoknot stem by allowing the rest of the helix to form from stacking, Watson-Crick pairs only. This result further supports that the scaffold prefers a fully-paired pseudoknot stem.

[0945] A substantial number of pseudoknot sequences had positive log 2 enrichment, suggesting that replacing this sequence with alternate base pairs was generally tolerated (pseudoknot structure in FIG. 73). To further test the hypothesis that a more stable helix in the pseudoknot stem would result in a more active scaffold, the secondary structure stability of each pseudoknot stem was calculated (Materials and Methods). A strong relationship was observed between pseudoknot stability and enrichment, and thus activity (FIG. 74: more active scaffold have stable pseudoknot stems), with guide scaffolds with stable pseudoknot stems (≤−7 kcal/mol) having high enrichment and guide scaffolds with destabilized pseudoknot stems (≥−3 kcal/mol) having very low enrichment.

### Double Mutations Indicate Mutable Regions of the Guide Scaffold:

[0946] Double mutations to each reference guide scaffold were examined to further identify mutable regions within the scaffold, and potential mutations to improve scaffold activity. Focusing on just a single pair of positions-positions 7 and 29 which are predicted to form a noncanonical G:A pair in the pseudoknot stem and supports mutagenesis (see sections above)-we plot all 64 double mutations for this pair of positions (FIG. 75). Canonical pairs are favored at these two positions (e.g. substitution of a C at position 7 and a G at position 29 creates a G:C pair and is enriched; substitution of a C at position 7 and an insertion of a G at position 29 similarly creates a G:C pair, substitution of an A at position 7 and a U at position 29 creates an A:U pair). No pair of insertions was enriched, perhaps because inserting a canonical pair here is not sufficient to stabilize the helix given that the G:A pair is shifted up a position in the helix and not removed entirely. Surprisingly, several enriched double mutations did not form canonical pairs; e.g. substitutions of U at position 7 and C at position 29 (which forms a noncanonical U:C pair), substitutions of U at position 7 and U at position 29 (forming a U:U pair), as well as a few others (FIG. 75). It is possible that a purine:purine pair is substantially more disruptive to the helix than other noncanonical pairs. Indeed, substitution of an A at position 7 and G at position 29 again forms an A:G pair, which is not enriched at this position.

[0947] Enrichment values of double substitutions within each of the key structural elements of guide scaffold 175 were determined from heat maps in which each position could have up to three substitutions. It was determined that the scaffold stem was the least tolerant to mutation, suggesting a tightly constrained sequence in this region.

[0948] The results demonstrate substantial changes may be made to the guide scaffold that still result in functional gene knockout when utilized in an editing assay. In particular, the results demonstrate key positions that may be utilized to improve activity through modifications in the guide scaffold, including increased secondary structure stability of the pseudoknot stem within the scaffold.

TABLE 28
Guide 174 mutations and resulting relative enrichment

| Log₂ | |
|---|---|
| enrichment | Mutations on gRNA scaffold 174* (SEQ ID NO: 2238) |
| 3.25 to 3.5 | G79A, A80G; T34A, G78T; G7T, G75A; G78A, A80T; \hat{ }C2, A33T; \hat{ }A1, C68T; |
| | TG3CT, CGC6TAG, GAG28CTA, CA32AG; TG3CA, GC7AA, GA28TT, CA32TG; |
| | \hat{ }C4, C6G, T12_, G17C, GAG28CCC, C32G, A80C; T9C, T14A, T71A, C73A; |
| | C70A, G77T |
| 3.0 to 3.25 | A29T, G78T; T9C, G17C, A27T, G79_; C2G, A21G; \hat{ }A81, C81; T71A, C73A; |
| | T14C, T16G; \hat{ }T64, \hat{ }G81; T9C, G17C, \hat{ }TG65; C2G, T16A; |
| | G7C, TC14AT, G17A, T34A; G75A, G77A; G7C, A21T; T-.3.CA, GC.7.-T, G28_, |
| | -A.33.TG, \hat{ }T84; T65C, C82T; |
| | GCTCCC63_\hat{ }AATGAAAA70, \hat{ }TTTTCATT76, GGGAGC77_; \hat{ }C2, G7A, A27T; |
| | T9C, G17C, C67G; \hat{ }A78, \hat{ }T78; T3C, GCG5AGA, AGC29GCT, A33G; |
| | T9C, G17C, G78C; T3C, GC5TG, AGC29CAA, A33G; T9A, \hat{ }T68, G77A; |
| | G7A, T9G; T65A, \hat{ }G77; \hat{ }G70, \hat{ }C75; C2T, G79C; \hat{ }C66, G78A; A29C, G75A; |
| | C15A, A60G; C67G, \hat{ }A78; T14C, G17T, G40A, A76G; T34A, CT64TC; |
| | \hat{ }A69, T69A; T45G, G79T; T69C, \hat{ }C76; C2A, G54C; A13C, C15A, G74C; |
| | C70G, \hat{ }A75; A76G, G77C; C67T, G78C; TG3CC, A29C, CA32GG; \hat{ }T7, A29C; |
| | C2A, T34A; \hat{ }A66, \hat{ }A66; C66T, A80C; \hat{ }G17; \hat{ }C76, \hat{ }A76; A29C; |
| | C15G, C67G, T72G; \hat{ }T70, \hat{ }A70; C15G, T16G; C64T, C66A; T69G, G74C; |
| | \hat{ }A3, G74C; \hat{ }T65, \hat{ }T80 |
| 2.9 to 3.0 | A29C, A33T; C64T, G78A; \hat{ }C64, A80T; \hat{ }A74; T65A, \hat{ }A80; \hat{ }T69, G75T; |
| | \hat{ }C79, \hat{ }A79; A29G, T59A; T69G, G75C, G78A; \hat{ }G70, \hat{ }A70; |
| | G7A, TC14CG, G17A, C64T; \hat{ }T69, \hat{ }A76; T9C, G17C, C68T, T72C; \hat{ }T69, A76G; |
| | A33T, C66G; C66T, C67G; TTC71ACA, \hat{ }GGATGT75; A13G, T14A; |
| | T69A, G74C; G74T, A76G; G77C, G78A; A27C, T84G; C2_C66G; T71C, G75C; |
| | TC14AG, G78A; T3G, A33T; T9C, G28A; \hat{ }A1, C2T; C68T, T72C; |
| | TGGC3CCAG, C8A, GA26_, --A.33.TGG; C64T, C66G; \hat{ }A67, C67G; |
| | C68T, G74A, G77C; G7T; C2T, G78T; C68_G77T; T25C, A29C; \hat{ }A78, G78A; |
| | \hat{ }C78, G78C; G7C, A60G; T34A, T45A; T3_G7A, \hat{ }A9, \hat{ }T28, A29G, A33_; |
| | \hat{ }CAG70, T72G, G--.74.AGT; A27G, A29C; T9C, G17C, T47C; \hat{ }T19; \hat{ }A65, \hat{ }T65; |
| | C67G, C68T |
| 2.8 to 2.9 | T3C, G5T, C8G, GA28CC, CCA31AAG; T69C, A76G; C66T, A80T; \hat{ }G13; |
| | C2_T65G; G7C, T9G; T9C, G17C, TT71AC; C6G, A29T; \hat{ }C66, \hat{ }C79; |
| | C70A, A76T; T3A, CG6AC, AG29GT, A33G; \hat{ }T7, T12_; \hat{ }T69, \hat{ }A76, A88C; |
| | C35G, G58C; \hat{ }A79, \hat{ }T79; T16_C67T, G79_; G7T, T9A; A29T, C37T, C66G, \hat{ }G77; |
| | C2_, G81A; C15G, T34G; T3_\hat{ }T9, \hat{ }C28, A29C, C32_; \hat{ }T76, \hat{ }A76; G7C, A27T; |
| | C2_G79C; TGGC3ACAG, GA26_, --A.33.TGT; \hat{ }G65, \hat{ }G77; |
| | \hat{ }AC1, GC5_C8T, GA26_G30A, \hat{ }GT34; T9C, G17C, C66T, A80T; T71G, T72G; |
| | G4C, CT8GC, G17C, GA28AC, C32G, T69C, G75C; C41A, G51T; \hat{ }T78; |
| | T9C, G17C, T65A, A80C; AG29CA, C82G; T9G, C82T; T45A, T47C; C2T, T3A; |
| | T65A, A80G; C2G, G4A, C32T; G7C, T59G; T9C, T14G; C2G, A29C, T52A; |
| | T9C, G17C, -A.53.CC; T9C, T69_A76_; C68A, G75C; A1G, A33T; |
| | T3_, \hat{ }T9, G28_\hat{ }G32; \hat{ }G70, G75C; \hat{ }C54, G54C; \hat{ }T79, G79A; G17C, C70T, A76G; |
| | G77A; \hat{ }T69, A76C; T65A, \hat{ }C80; \hat{ }A66, G79_; T9G, \hat{ }G85; \hat{ }TGGAAGAT63, C--- |
| | 66.TCGG, C68A, GGAGGGAG74_\hat{ }A83; \hat{ }T2; G7A, A29C; \hat{ }A69, \hat{ }C76; |
| | C6A, A29C; C2_, T9C, G17C, GA79TG |
| 2.7 to 2.8 | T34A, \hat{ }T37; A36T, T65C; C2_, T69G; C73A, G74C; G17_; \hat{ }G65, \hat{ }A65; |
| | \hat{ }T67, C67T; C2G, A29T; T9C, G17C, \hat{ }C66, \hat{ }G74; C70A, T71C; T14A, C15T; |
| | G4C, C32G, G78C; T9C, G17C, T34A; \hat{ }A66, \hat{ }C79; AGT53GTG; G79_; |
| | T9G, T14A; \hat{ }C64, \hat{ }C80; T65C, \hat{ }G66; \hat{ }GT1, G7A, T9C; A60T, G78T; |
| | T9C, G17C, C67A, G79A; TC65CG, A80G; T14C, T16C; T3_; |
| | \hat{ }CGAAC70, T71A, G74C; G7T, C8G; T3A, GC7CG, GA28CG, A33T; C66T, G78T; |
| | A1G, T9C, G17C; T69C, C70A; C70T, T72G; T69C, T71G, A80T; T16G, A29C; |
| | T11G, A29C; G17A, \hat{ }TA75, A88C; G7T, G40A, A61G; \hat{ }AC81, A88C; \hat{ }A71; |
| | G5C, C8G, GA28AC, C31G, C73T; G74T, A76C; \hat{ }T68, \hat{ }A76; C2_, C70A; |
| | T9C, G28T; G28T, A29C; \hat{ }C29; A29C, GA75AC; \hat{ }T52, G54C; G7A, T9C, G17C; |
| | T9C, G17C, G79A; --A.29.CAC; \hat{ }A68, G77A; \hat{ }T69; G7C, T9C; A80C, C82T; |
| | \hat{ }C75, G75T; T14A, A29C; T72C, C73A; T9C, G17C, C66A, G79_; C2_, A33T; |
| | \hat{ }T2, C64T; \hat{ }AT79, A88C; C66G, A80C; \hat{ }A67, \hat{ }T78; \hat{ }G67, G78A; \hat{ }A76; |
| | A21G, \hat{ }C66, \hat{ }T77; C2A, A36G, T69A; G63T, T71C; T9C, G17C, -G.77.CT; |
| | \hat{ }T2, T34A; C68T, \hat{ }C77; T9C, G17C, T72C; T69A, C70T; CT15TA, A18T; |
| | TGG3ACA, C8G, GA28CC, CCA31TGT; T9C, A29C; C6G, G30C; -T.3.AA, C67G; |
| | C73_; \hat{ }G68, \hat{ }A76; T69C, \hat{ }A76; A80G; T69C, A76_; \hat{ }G68, \hat{ }T77 |
| 2.6 to 2.7 | T9A, A29C; A76G; T9C, G17C, AG76CC; T9C, \hat{ }A13; \hat{ }A67, \hat{ }T78, A88C; |
| | C70A, T72A; C66G, \hat{ }T79; \hat{ }T64, C64T; \hat{ }A70, C70G; \hat{ }G65, A80C; |
| | T9C, G17C, C66T, G78C; C2_, T9G; T69_, A76T; T3A, G7A, A29T, A33G; |
| | T45G, C68A; \hat{ }T65, \hat{ }T80, A88C; C66G; C64T, T71G; C2G, G54T; A1G, T3A; |
| | \hat{ }G70, G75T; T65A, \hat{ }T80; -T.3.AC, GC.7.A-, |
| | GAG28TGC, CA32GG, T72A, \hat{ }G74, A76G; A21C; T69G, \hat{ }A76; C68G, C70A; |
| | C67T, A80T; \hat{ }A70, \hat{ }C75; T9A, T14C; T3A, CGC6TCT, GAG28AGA, A33T; |
| | G54_; C68T; \hat{ }T65, G79C; C2_; C67G, G79T; CT2TG, G7A, G77C; T71G, G74A; |
| | C66T, G81A; A29T; --A.29.CAT, A88C; T69_\hat{ }C76; T9C, G17C, \hat{ }G68; |
| | \hat{ }A69, T69C; A29C, G30T; T69_; G17C; \hat{ }A67, G78C; T65A; \hat{ }G79, \hat{ }T79; |
| | A76G, G77T; \hat{ }GC1, A88C; A27T, A29C; \hat{ }CA79, A88C; T69_, G75T; |
| | C38G, \hat{ }C56, G77A; C68T, G77C; A29C, AG39GT, T52C; G79T, A80T; |
| | G7T, A61T; T16C; \hat{ }A13; G7C, C15G; G5C, C8G, GA28AC, C31G; C2_G77C; |
| | A29C, T52A; G75C, A76G; T9C, G17C, \hat{ }C76; C8G, A29C; |
| | TGG3GTC, C8G, GA28AC, CCA31GAC; |
| | C64_\hat{ }GTG67, C68A, G77T, \hat{ }CAC79, G81_; \hat{ }T68, G79_; \hat{ }A70, C70A; |
| | T65A, AG76GA; \hat{ }C70, \hat{ }C70; C68G, G77T; C6T, A29T; \hat{ }T81; \hat{ }G67, \hat{ }A67; |
| | TGG3GCA, C8A, A29C, CCA31TGC; G7A, A27C, A29G, A80G; G78A; |
| | T52G, G54C; T9C, G17C, T65A, C67T; A1C, \hat{ }C64, \hat{ }T81; \hat{ }T80, A80C; |
| | C67A, C73T; C73T, A80C; C67A, T69C; G7A, A76T, A80G; C2_, C15G; |
| | T69C, G77T; CT2_, G79T; G7C, \hat{ }G28; \hat{ }C79; \hat{ }A80; \hat{ }G1, \hat{ }C1; \hat{ }G65, A80T; |
| | G7T, A29_; -T.3.AC, GC.7.A-, GAG28TGC, CA32GG, T65A; |
| | T9C, \hat{ }T14, G17C, \hat{ }C29; A29T, T69C; T9C, A29G; C64T, T65C; |
| | \hat{ }TG70, T71A, C73_, G75T; T65G, C66T; T59C, \hat{ }C66; T72A, G74A; C2T, T72C; |
| | T71C, A76G; T65G, A80T; TG3_\hat{ }TG7, GA26_, \hat{ }AG33 |
| 2.5 to 2.6 | T9C, G17C, \hat{ }G81; --A.29.CAT; C68T, A76G; A29C, G79A; G17C, C67G, C70T; |
| | \hat{ }G66, C66G; A29T, G63A, C66A; G28C, A29C; T3G, C67A; T69C, T71C; |
| | T3A, GC7CA, GA28TG, A33G; C70G, G74A; \hat{ }C2, G4C, C8_\hat{ }CGC28, CCA31_; |
| | C2_, C68T; C66A, A80T; T3A, G5C, GC7AA, GA28TT, C31G, A33T; |
| | T9C, G17C, T72G; T9C, G17C, A29C; \hat{ }C70, G75T; C66T; C66T, G78A; |
| | A36T, G54C, C68T; \hat{ }G9, A29T; A76C; T69C, G77C; \hat{ }A77, \hat{ }G77; T71G, G74C; |
| | C67T; C73G; T71G, AG76GA; \hat{ }C64, T65C; T3G, C68A; G74C; C67T, T69A; |
| | \hat{ }A69; \hat{ }A66, C66T; T71C; T14G, T16C; T9C, G79T; T65C; \hat{ }C15, G17C; |
| | \hat{ }T65, \hat{ }C79; C70G, T71G; G74C, G75T; C2_, C68G; G7T, A27G; \hat{ }CA76, A88C; |
| | \hat{ }T65, \hat{ }A65; T9C, G17C, T45A; A18C, \hat{ }A66; A80C; G7C, TC14CT, G17A; |
| | TG3GC, G7A, A29T, CA32GC; T16G, A29C, G63T, T71C; C2A, G54T, T71C; |
| | \hat{ }T8, A29C; T9C, TG16GC; C70T, G77T; G75T, A76G; T69A; T16A, A18G; |
| | G77A, G78C; A1_, T59C; T14G, T16G; \hat{ }A60, G81A; A29G, A83G; |
| | T34A, GA79TC; T69C, G75A; G7T, T59A; G7T, C82G; A36T, G81T; C2_, G81T; |
| | T14C, T72_; --A.29.CAC, A88C; TGG3_, \hat{ }AAG9, GA28CT, C31G, A33G; |
| | G17C, A18G; C66G, G77A; \hat{ }C5, C6T, C8_, G28C, GC30CG; C82T; G54A, \hat{ }G56; |
| | C2_, C66T; G17C, A18C; G17C, G54_; G28A, T65C; C6T, A29C; G7A, T9C, \hat{ }T79; |
| | T9C, GA17CT; G74A, G75T; C68A, C70G; G42C, C50G; \hat{ }C70, \hat{ }C75; \hat{ }T66, \hat{ }C66; |
| | T3C, CGC6GCT, G28_, \hat{ }A32, A33G; C73A, G74A; |
| | TG3AC, C6A, AG29CT, CA32GG; C67A, G79A; A76_; C73G, G74T; |
| | TG3CA, GC7AG, GA28CG, CA32TG; T9C, T14C, T71A, C73A; G81C; |
| | A1G, T16A; T69A, \hat{ }G74; C68_; C2A, A60C; T9C, G54T; T14C, C15G; |
| | \hat{ }G66, \hat{ }G66; T16C, A18G; \hat{ }G68, G77C; A29T, -G.78.CC; G7T, \hat{ }T61; CT2_, T72G; |
| | A1G; T65C, C66A; G7C, T34A; \hat{ }C35, T59G; \hat{ }AG77, A88C; \hat{ }TG67, A88C; |
| 2.4 to 2.5 | G54C, T59A; T69G, G75C; C68A, A76G; \hat{ }AT65, A88C; C68T, G77T; G7T, A29C; |
| | T65A, T71A, G74A; T16A; \hat{ }C65, \hat{ }A65; \hat{ }T67, G79_; \hat{ }G71; \hat{ }C18; \hat{ }C29, A29T; |
| | G79A; T69G, T71A; T71C, T72C; C2_, T3_; \hat{ }T67, G78T; |
| | CTCCCTCT64_, C73G, AGG76TTC, \hat{ }TCCCA82; T65A, A83G; C70A, G74A; |
| | G7C, TC14AT, G17A, T34C; G7T, A33C, A36C, A76G; T-.3.CA, GC.7.A-, |
| | AG29GC, CA32TG; C2_A80G; -T.3.AC, C6T, C8_, G28C, G30C, CA32GT; |
| | G7C, A83G; C2_, C67A; T3G, A29C, T34G, G77A; C2G, A21G, T65C; |
| | G40A, T59A; \hat{ }A66, \hat{ }G66; G81A; C2_, A29G; \hat{ }T64, G81A; |
| | \hat{ }CGC2, CGC6_, GAG28_, \hat{ }AGG33; \hat{ }C77; T69A, A76G; \hat{ }T78, \hat{ }T78; C66A, \hat{ }C79; |
| | C2_, G7A, T34A; T3C, C6T, G30A, A33G, \hat{ }C55; GC7CG, GA28AG; |
| | T3C, G5C, GC7TA, G28T, C31G, A33G; \hat{ }T68, \hat{ }C77; \hat{ }T77, G77A; A27G, \hat{ }GT77; |
| | \hat{ }G66, \hat{ }T79, A88C; T9C, G69, \hat{ }A76; C68T, G75C; \hat{ }T81, \hat{ }T81; \hat{ }C66; T9C, G28C; |
| | T14A, A29C, C66T; \hat{ }A65; T3A, G5C, C8A, A29C, C31G, A33T; CT2_, T71A; |
| | G7C, C15G, A33T; G77A, \hat{ }T78; G63T, C82A; G7A, C15G, G54A, A60C, G79T; |
| | \hat{ }A13, \hat{ }G13; T72G, C73T; A36C, G54T; T3G, G7T; \hat{ }G65, T65C; T65G, C66G; |
| | G77C; T45G; C15A; C41T, G51A; T14A; C2T, G54T; A76T; T71A, A76G; |
| | \hat{ }G66, \hat{ }T79; \hat{ }A7, A29C; TGG3AAC, C8G, GA28CC, CCA31GTG; \hat{ }A1; \hat{ }T29; |
| | T71G, G74T; T45A; \hat{ }AT78, A88C; \hat{ }A3, GG4CC, C8_, GA28CG, CCA31GAT; |
| | C66T, C70G; C2_\hat{ }A66, \hat{ }C79; \hat{ }TA76, A88C; |
| | TG3GA, CG6GA, AG29TC, CA32TC; \hat{ }C80, A80G; G79C; C67G, \hat{ }G77; |
| | \hat{ }C66, G79A; G7A, T16C, \hat{ }T68; G7C, T9C, G17C, G75C; C2_\hat{ }T58; \hat{ }A65, \hat{ }C80; |
| | A1G, -C.68.GA; G17C, T65G; TG3CC, C6T, C8G, GAG28ACA, CA32GG; |
| | T72C, G75A; C64G, A80T; G7A, C66T; C66G, \hat{ }C79; C15A, G17A; \hat{ }AG66, A88C; |
| | A36_; G79T; T9C, G17C, \hat{ }T58; T10G, A29T; \hat{ }G69, \hat{ }C76; \hat{ }A69, A76_; |
| | G7A, A29G; A53_; T65G, \hat{ }A80; C70A, C73A; T59C, G74T; C67A; G54T, \hat{ }G56; |
| | \hat{ }G66; C2_, A29C; C38_, G54_; T3_, C6T, \hat{ }C8, \hat{ }G28, G30A, A33_; |
| | -TG.3.ACC, C6A, C8_\hat{ }CTC28, A29G, CCA31_; T9C, T14A; C64_; T14G, G54A; |
| | T71C, C73G, A83C; T9C, G17C; A53G, G54T; C66A, A80G; \hat{ }G63, \hat{ }G81; \hat{ }G1; |
| | \hat{ }C78, \hat{ }C78 |
| 2.3 to 2.4 | G7A, T9C; \hat{ }T67, \hat{ }G67; C2_, C67T; A80_; \hat{ }G1, A13C; \hat{ }G66, G79C; T69A, A76T; |
| | T9C, T14C; A76G, G78C; T16G, G17T; T69C, G77A; T65_, A80G; |
| | G7C, T14C, T34G; C66T, C67T; A53G, -A.80.TC; C67T, G77C; C73A, G74T; |
| | A36G, C68G; T9C, G17C, \hat{ }C78; TGG3GCT, C8G, \hat{ }AC28, CA32_; \hat{ }T18; |
| | \hat{ }C29, \hat{ }T29; \hat{ }GGGCG63, C68T, TTCGGA71_\hat{ }CCGCC82; |
| | T9C, G17C, C66T, A80G; \hat{ }A67, \hat{ }G67; C2_, G79T; |
| | T3A, CGC6GAT, GAG28ATC, A33T; C2_, A21G, G79C; C2_, A21G; C64T, G77A; |
| | C8A, G79C; C67G, \hat{ }A78, A80C; T69C, \hat{ }A70; G74T, G75C; \hat{ }T76, A76G; |
| | A76T, A80G; \hat{ }C64; \hat{ }C29, C50T; |
| | \hat{ }AGCTTA65, \hat{ }ATTG68, T69A, T72C, G77T, GA--.79.AGCT; A29T, G30A; |
| | T65C, A80C; \hat{ }C76, \hat{ }T76; T9C; \hat{ }G67, G79_; C68T, G79T; |
| | \hat{ }CTCA3, GCGC5_\hat{ }CAT28, CCA31_; \hat{ }GA70, A88C; -T.3.AC, GC.7.A-, |
| | GAG28TGC, CA32GG; A21G; \hat{ }G69, T69C; G7A, \hat{ }C66, \hat{ }G74; \hat{ }T65, \hat{ }A79; |
| | T65G; G74A, A76C; G74T, G75A; \hat{ }G68, G77T; T9G, G79T; \hat{ }AG67, A88C; \hat{ }C81; |
| | \hat{ }A67, G78T; C37A, G57T; G54C, G79T; G75T, G77A; G40A, TAG52CCT; \hat{ }G15; |
| | C67A, C68A; A36T, \hat{ }C55; A36T, T59A, T65C; C67T, \hat{ }G68; T71C, A76C; |
| | G7C, A29G, T65A; \hat{ }A78; T69C, G75T; \hat{ }TC66, A88C; CT2_, T59A; |
| | T9C, G17C, T65G; C70G, G75T; C2_, C73T, G75A; |
| | TG3CC, C6G, C8T, G28A, G30C, CA32GG; C64G, C66T; T11C, A29C; |
| | T9C, \hat{ }G15, G17C, T65C; T69G, G74T; \hat{ }GA65, A88C; G7C, A61G; \hat{ }T65, \hat{ }A80; |
| | C68_\hat{ }C79; G7A, \hat{ }T29, G79T; A27T; A1_, T9G, T59C; T14G, -G.79.TT; |
| | T14C, T16A; C70A, G74T; T65A, G78A; \hat{ }T65, \hat{ }G77; T9C, G17C, \hat{ }G68, G77C; |
| | C66A, \hat{ }A79; G7T, T9C, G17C; \hat{ }G69, A76T; C2_, A21C; \hat{ }T29, A29T; \hat{ }G69, \hat{ }T69; |
| | C6T, T10C, T84G; T65C, C67T; C15T; G78C; G7T, A27G, C44T; \hat{ }C68, \hat{ }A68; |
| | A1G, T9C, G17C, A76G; A36T, T59A; T14A, T16A; \hat{ }C66, G79_; |
| | -T.3.AA, G7_, AG29GC, CA32TG; C8G, \hat{ }A70, \hat{ }T75; C66A; \hat{ }C64, A80_; T69C; |
| | T71G, A76T; CT68TC, G74A; G54C, C68T; T9C, G17C, G81T; C2_, A13G; |
| | T65A, \hat{ }C81; \hat{ }C66, \hat{ }A78; \hat{ }C70, \hat{ }A75; \hat{ }T68, G77T; A29T, C50T, A53G, G79T; |
| | C68T, A76T; T16C, A18T, A80C; \hat{ }TGGAAGAT63, |
| | C---.66.TCGG, C68A, GGAGGGAG74_\hat{ }A83, A86C; |
| | -T.3.AA, G7_, AG29GC, CA32TT; T9G, A29G; C68A; A27C, A29T; A36T, G54C; |
| | \hat{ }A4; \hat{ }A73 |
| 2.2 to 2.3 | \hat{ }C66, A76_; \hat{ }G65; \hat{ }T1, T59C; A36T; T3C, GCG5CGA, AGC29TCG, A33G; |
| | T9C, TG16GC, C68T, G79A; G7A, T14A, G17A, T34A; T65G, G79T; |
| | G7C, TC14CT, G17A, T34A; T3C, C67A; G77C, G78T; C2T, \hat{ }G56; C6T, A83G; |
| | G7T, C8A; C66G, G79_; TG3_, C--.8.TCG, \hat{ }C28, \hat{ }C30, CA32_; C67T, T69G; |
| | CT2_, T9C; G78T, G79A; C2_, T9C, C15A, G17C; T9C, G17C, \hat{ }TG67; |
| | G75T, A76C; \hat{ }C76; G79A, A80T; TT71GG, G74C; C70_, G75C; \hat{ }G66, G79T; |
| | T34A, A60G; A29T, C64T, C66A; \hat{ }CT29, A88C; \hat{ }G69; A53C, G79T; \hat{ }T80, A80G; |
| | \hat{ }G67, C67A; C67A, G78C; T9C, G17C, C70T, T72A; -T.3.AC, GC.7.A-, A29_, |
| | A-33.GT; C2G, \hat{ }T58; A27G, \hat{ }A70; A39G, G78C; -G.78.AA, A80C; C66G, C67A; |
| | \hat{ }G68, \hat{ }A68; T69C, T71A; G7T, G40C, AG53GA; T9C, G17C, G79T; C8A, C66T; |
| | G74T, A80C; G7C, T14G; \hat{ }C77, G77T; G58T, G79C; T14C; \hat{ }T65, \hat{ }A80, A88C; |
| | C68A, \hat{ }C77; GC--.63.ATTA, CCC66ATT, G--GG.77.AATAT, GC81AT; |
| | T11G, A29T; T14A, T16G; T71C, G75A; \hat{ }T67, \hat{ }C78; T65C, G81A; G79C, A80T; |
| | \hat{ }C66, \hat{ }G74; A53C, G54A; \hat{ }C66, \hat{ }C79, A88C; G79C, A80G; |
| | T9C, G17C, \hat{ }C66, \hat{ }G74, A88C; C2_, T16C; T69G; \hat{ }G68, \hat{ }A76, A88C; |
| | T71A, G74C; G74T; G7T, C37A; \hat{ }CA68, A88C; \hat{ }T12, \hat{ }G12; A29T, C64T, C70T; |
| | G7C, A29G; G7A, T14A; T69C, C70G; G79T, A80C; C2T, G54C; \hat{ }T58; |
| | G7T, G30A, G81T; A29C, A83G; C2_, T69C; T3C, G5C, G7C, A29G, C31G, A33G; |
| | T72G; C64A; T34G, T59C; A1G, A60C; T65A, G79A; A27T, \hat{ }C29; \hat{ }G67, \hat{ }G77; |
| | \hat{ }G68, C68A; C64G; C66T, G77A; \hat{ }C64, \hat{ }A80; C2_, C73T; A29G; \hat{ }T7; |
| | A1_, A46C, T59C; T9C, G17C, A76T; G78C, A80G; \hat{ }C66, A76C; \hat{ }T29, \hat{ }T29; |
| | A27T, CT68TC, G74A; G75C, A76C; \hat{ }TT81, A88C; \hat{ }G77, A80G; \hat{ }C5, G7T; |
| | \hat{ }C66, T69C; C15A, T16A; C73T; \hat{ }A65, \hat{ }A80; \hat{ }T65, G79_; G40A, T52C; |
| | G7T, A60T; TG3GA, GC7CA, A29G, CA32TC; \hat{ }TA70, A88C; \hat{ }C66, \hat{ }A66; \hat{ }G67; |
| | A36C, \hat{ }T55, C68T; T65_; G63_, C82_; C2A, A29G |
| 2.1 to 2.2 | A83G; G75_; C68_, G79_; C2_, A46C; \hat{ }C4; \hat{ }A69, \hat{ }A69; G42A, C50T; |
| | A53G, \hat{ }T55; A36G, \hat{ }C58; TG3AC, C8A, GA28TC, CA32GG, T59C, C66A; |
| | C2_, A46C, C66T; C64T, G81T; \hat{ }A68, G77T; \hat{ }T80, A80T; T25G, A29T; |
| | G4A, C32T, G54_; \hat{ }T68; A76C, G78A; T9C, T14C, G17C; CT2_A33C; |
| | \hat{ }CA65, A88C; A60C; \hat{ }A69, \hat{ }T69; T9C, G17C, -T.65.GC; A18C, A61G, A80C; |
| | CT15TG, A21C; T72G, A76T; G7C, A29C; \hat{ }G79, \hat{ }C79; T69G, \hat{ }T76; C70A, G74C; |
| | T9G, A29C; C2_, G54A; C15G, T72A, G74A; \hat{ }A75; |
| | T3_, C6T, \hat{ }C8, A29_, C32A, \hat{ }C34; \hat{ }C29, A80C; G74A, A76T; C68T, T69C; |
| | T3_, C64T; A80T; CT2_, T9A; \hat{ }C29, A36C; \hat{ }GA67, A88C; T9C, G17C, T59A; |
| | A60T, C64T; T65A, G79T; A29C, T65C; \hat{ }T7, A13C; C8A, C82T; A76G, \hat{ }C77; |
| | T3G, GC7CT, GA28AG, CA32AC; ---TT.71.AAGAA, G75_; G7T, C15G; |
| | \hat{ }C79, \hat{ }C79; TG3GA, CG6AC, A29G, CA32TC, C68T, T72C; T72C; G63C, C82T; |
| | \hat{ }TG56, G57T; T14C, A29T, A36T; \hat{ }T68, \hat{ }T68; T69G, T71G; \hat{ }G66, C66T; |
| | \hat{ }G68, G77A; G54C, G79A; G7T, C67G; C66G, G78A; A60C, A76G, A80G; G40A, |
| | -A.76.CC; C2T, C67A, \hat{ }T78; T9C, G17C, G77A, G79T; G77T, G78A; \hat{ }T78, \hat{ }C78; |
| | \hat{ }T68, G77C; \hat{ }A67, \hat{ }G77; C73T, G75A; A29T, C66A, G74T; C2G, A36G; |
| | T3G, G5A, GC7CA, A29G, C31T, A33C; T69A, T71C; \hat{ }CG2, G5_, C8_, |
| | -G.28.CGC, CA32_; \hat{ }GT79, A88C; C68A, G77T; C64T; G40A, G77C; |
| | C68G, C70G; C2T, G78A; T9C, G17C, \hat{ }C66, A76C; G7T, A29G, C82T; |
| | C2_, T65G, A80G; TGG3GCT, C8G, \hat{ }CC28, CC31_; A29G, T69C, A80G; |
| | T34A, A36_; T9C, G17C, A27G; C15T, T16C; G7T, T9C, G17C, G40A, TA52AT; |
| | A36G, T71A; C6T; \hat{ }G69, A76_; C66A, G79A; \hat{ }C68, \hat{ }T68; A21T, C67A; |
| | A21C, T72G, G77T; T71G, A76G; C2T, G54A; T71G, G77A; |
| | T9C, G17C, A29G, G81A; G7A, A36T, G54C, C68T; T3A, T59A; \hat{ }G70; \hat{ }T77; |
| | \hat{ }T68, \hat{ }C77, A88C; TC14GT, T72C; T9C, G17C, T72_; \hat{ }C73; G7C, T14C; |
| | A36T, \hat{ }T58; G54T; T59C; A29C, C50T, A60T; G54A, C70G, \hat{ }T75; \hat{ }C66, G77C; |
| | C15G, G17C; C64G, \hat{ }C81; T3A, G5C, GC7AG, GA28CT, C31G, A33G; |
| | A29C, C32A; \hat{ }G28; A21G, A53G; G75A, A76T; G7C, TC14CT, G17C, T34A; |
| | G28A |

*mutated sequences are ‘;’-separated and multiple mutations per sequence are ‘,’-separated

TABLE 29
Guide 175 mutations and resulting relative enrichment

| Log₂ | |
|---|---|
| enrich- | |
| ment | Mutations on scaffold 175* (SEQ ID NO: 2239) |
| 3.2 to | C73A, \hat{ }T78; C6T, A29C, G71C, \hat{ }G80 |
| 3.5 | |
| 3.1 to | C17G, A87C; T3G, CGC6ACT, GAG28AGT, |
| 3.2 | A33C; G7T, C9T, C17G, CG81GA; |
| | T16G, A29C; C9T, C17G, C65A, A87G |
| 3.0 to | A68T, T83G; A27G, T92C; TGG3ATC, |
| 3.1 | GC7AG, GA28CT, CCA31GAT; |
| | \hat{ }C65, A87G; G7T, A29T; T3G, GC7AA, |
| | GA28TT, A33C; C9T, C17G, C65_; |
| | G7T, T14G; \hat{ }G54, G78T; C9T, |
| | C17G, \hat{ }A80; TC16AT, G64C |
| 2.9 to | C15T, T34A; C9T, C17G, A88T; G7A, |
| 3.0 | C15G; \hat{ }C76, \hat{ }G76; CT2_, C15_, T58A; |
| | C2_, C15G; C9T, A29C; C9T, C17G, A85T, |
| | A88T; C9T, C17G, \hat{ }CA63; G7T, C9G; |
| | A87T, A88C; C73G, G78A; A29T, |
| | A91G; TG3GA, G7A, A29G, CA32TC; |
| | \hat{ }G14, A29T, A87G; C9T, C17G, T74C; C2_, \hat{ }A53 |
| 2.8 to | C9T, A33T; G7T, T67G, G82C; \hat{ }T5, C9_, |
| 2.9 | GAGC28CGCA; G7T, \hat{ }A68, \hat{ }A82; |
| | G7T, \hat{ }C60; T14G, A29C; A29T, T66A; |
| | T3A, CG6TC, AG29GA, A33T; |
| | C2T, TC75AT; \hat{ }CG76, A88C; G7T, T14A, T83_; |
| | -T.3.GA, C6T, C9_, G28C, G30C, CA32TC; CT2_, |
| | C15T; TG3_, \hat{ }GT8, G30C, C32G; |
| | T14_, A29C; C9G, C17G, A29C, T79G; |
| | TG3AC, G7C, A29G, CA32GT, G86C, A88C; |
| | T3A, GC7CA, A29G, A33T; G7C, C80A |
| 2.7 to | G7T, A91C; \hat{ }C2, G4C, G7_, A29_, C32G, |
| 2.8 | \hat{ }G34; CT2_A88C; C65G, A88C; G7T, |
| | -T.79.AA; A29C; T3A, GC7CA, A29G; |
| | C8G, A29C, A88_; A29T; C2_, A29C; |
| | A29C, C31T, A33G; T14G, C15T; C9T, |
| | C15A; \hat{ }GA1, G7A, C15A, C17G; |
| | C15A, T16A; CT2_A29C; C9T, C17G, G78_; |
| | C9T, C17G, G-.78.AT; C73T, C76G |
| 2.6 to | C9T, C17G, C65_ \hat{ }A84; C9T, C17G, G70T, C81A; T74A, |
| 2.7 | T79A; T3C, C6T, AG29CA, A33G; G7A, \hat{ }T29; |
| | C76G, G77C; GG77CA, A87G; T16G, A29T; T3A, G5A, |
| | A29C, C31T, A33G; C9T, C17G, \hat{ }AA53; |
| | TG3CA, GC7AA, GA28TT, CA32TG; G7A, |
| | A29C; T3G, G7T; CT2_, A68G; |
| | T14_, A29T; C2_, C9T, C17G; \hat{ }G3, GC.7.-T, |
| | G28_ \hat{ }C34; G7T, \hat{ }T92; G7T, \hat{ }G69, G82T; |
| | \hat{ }GGCAGATCTGA64, T66C, A68C, GA71AG, |
| | \hat{ }C75, G77T, T79C, CGTAAGAA81_; |
| | T3A, C6G, AG29CC, A33T; C80T, \hat{ }A81; |
| | C81T; CT2_, C17A; C15A, T16G; |
| | C2_T16G; G71_, C80T; TG3AC, |
| | GC7AG, GA28CT, CA32GG; T3A, G5C, G7T, C31G, A33T; |
| | T3G, G7T, C9T, C17G; G64T, A85T; G7C, T14_; C9T, |
| | A29T; G7T, \hat{ }G14; A88G, \hat{ }C89; CT2_A33T; C81T, \hat{ }A82; |
| | C9T, C17G, A29C, C32A; C9T, C17G, \hat{ }GA77 |
| 2.5 to | G7C, C15G; C9T, C17G, TC75GT; TG3CA, |
| 2.6 | CG6GA, AG29TC, CA32GG; G7T; |
| | T14A, T16G; G7T, C9T, G71_, \hat{ }T79; C15A; |
| | CT2_, A33T, C73_; C2A, C9T, C17G; |
| | CGC6TCA, GAG28TGA; C15G, A29C; C2_, |
| | T16G, A91C; \hat{ }T81, C81T; |
| | TG3AA, A29C, CA32TG; G4A, G7T, C32T; |
| | T3C, CGC6GCT, GAG28AGC, A33G; |
| | T3A, G7A, A29T, A33G; -G.4.CC, G7_, |
| | AGCC29GCGG; C65T, G86_; C9T, \hat{ }A16; |
| | A36G, \hat{ }C57; A1_, T16G; C6T, G7T; \hat{ }G14, |
| | A29T; \hat{ }AT16, A88C; C8G, A29C; |
| | \hat{ }G64, A87C; \hat{ }G70, \hat{ }T79; T16A, \hat{ }C29; TG3GA, |
| | C6G, C8T, GAG28ACC, CA32TC, G71T; G7T, A29C; |
| | T3G, GCGSAGT, GC30CT, A33C; \hat{ }C2, \hat{ }T14, |
| | A29T; C9T, C17G, A88_; C9T, T16A |
| 2.4 to | TGG3ACA, A29C, CCA31TGT; T3_, G5A, |
| 2.5 | G7C, \hat{ }G9, \hat{ }C28, A29G, C31T, A33_; |
| | C15A, A29T; G64A, \hat{ }T65; CT2_, A27G; |
| | \hat{ }A16, \hat{ }T16; G7T, C15A; G7T, C9T, C17G; C2G, |
| | A29T, T66A; TG3GA, CGC6TTA, G28T, G30A, CA32TC; |
| | A1C, G82C; A27C, A29C; C9T, C17G, \hat{ }GA71; |
| | T3C, \hat{ }T6, CC.8.T-, C17G, GAG28AGA, A33G, \hat{ }G54; |
| | \hat{ }T16, A27T, A29C; G64C, \hat{ }A87; \hat{ }C14, A29C; |
| | \hat{ }A65, \hat{ }T65; C2T, C9T, C17G; C9T, C17A; |
| | G70A, C81A; C2G, A36T; G5C, C8G, GA28CC, |
| | CC31GA; C6T, A29C; C80T, \hat{ }G81; |
| | T-.3.CA, G7_, AG29GC, CA32TG; \hat{ }C78, |
| | G78A; G7A, T14_, CT65TC; -T.3.AA, G7_, |
| | AG29GC, CA32TG; \hat{ }C29, A29T; G7A, A29T; |
| | TG3GA, GC7CA, A29G, CA32TC; \hat{ }T64, G64A; |
| | C15A, A29C; T75A, G77T; \hat{ }A3, \hat{ }T3; A27T, A29C; |
| | T14A, A29C; T74C, G77A; G7C, A29G; C9T, C17_; |
| | G5A, G7A, A29T, C31T; \hat{ }C63, \hat{ }A63; G7T, A91G |
| 2.3 to | CT2_, G64T, T66G; G28T, A29C; T3G, G5T, |
| 2.4 | GC7CG, GA28CG, C31A; TG3AC, G7C, A29G, CA32GT; |
| | C9T, C15A, C17G, A29C, \hat{ }TG55, G57A; |
| | \hat{ }C14, A29T; C9T, C17G, GC64TG; G7A, \hat{ }T29, |
| | A36C; \hat{ }T16, \hat{ }G54; TG3CA, C8A, GA28TC, CA32GG; |
| | G7T, C9T, C69G; C9T, C17G, \hat{ }A70; |
| | A72_, T79G; T3A, G5T, |
| | C8T, GA28AC, C31A, A33T; C9T, C17G, A29C; \hat{ }G54; |
| | G7A, TC14CT, C17A; C9T, C17G; \hat{ }G70, \hat{ }T79, A88C; |
| | \hat{ }A64, \hat{ }G64; T14G, A29T; C9T, T16_; \hat{ }A14, \hat{ }T14; |
| | \hat{ }AC1, GCG.5.--T, GC30_, \hat{ }GT34; A29C, A91G; |
| | C2_, T14A; C9T, \hat{ }A17; C9T, C17G, G78A; |
| | T3G, G5A, A29C, C31T, A33C; C9T, \hat{ }G17; G7T, |
| | A29G; TG3GA, C6G, C8T, GAG28ACC, CA32TC; |
| | \hat{ }T1, CG6TC, C9T, C17G; C17A; \hat{ }T17, \hat{ }A17; |
| | T3A, G5C, GC7AG, GA28CT, C31G, A33G; \hat{ }GC72, |
| | A88C; T3G, G7T, A33C; TG3CA, CG6GA, AG29TC, |
| | CA32TG; T3G, G5C, C8G, GA28CC, C31G, A33C; |
| | \hat{ }T3, C80G; C9T, C17G, T45G, \hat{ }G54; |
| | C9T, C17G, A72C, T74G; |
| | G5C, C8G, GA28AC, C31G; A29T, G56T; G7T, C63A |
| 2.2 to | A36T, A85C, A87T; T14A, C17G; C9T, C17G, \hat{ }G54; |
| 2.3 | G4C, C8G, GA28AC, C32G, A87G; \hat{ }T72; A85C, |
| | A87C; G7T, T92C; C9T, C17G, \hat{ }C63; TG3AA, |
| | C6T, AG29CA, CA32TT; C9T, C17G, A85G, A88G; |
| | G64C, \hat{ }G88; G7A, \hat{ }T29, A68C; \hat{ }A13, T14C; C9T, |
| | C17G, G54, A85C, A88C; -GG.4.CAT, C9_, |
| | GAGCC28CGATG; TG3AC, C6A, AG29CT, CA32GG; |
| | C9T, \hat{ }C63; C9T, A88C; A27T, A29T; C9T, C17G, |
| | \hat{ }G54, A91C; G86A, A88T; TG3CA, GC7AA, GA28TT, |
| | CA32TG, C69T; T74G, G77T; TGG3ACA, C8G, |
| | GA28CC, CCA31TGG; G7A, C17A, \hat{ }G81; G7T, A59G; |
| | \hat{ }A65, \hat{ }G86; C73T, G78T; \hat{ }C72, \hat{ }T79; A1G, C9T, |
| | C17G; \hat{ }G1, C9T, C17G; \hat{ }G72, \hat{ }C72; C2_, A29T; |
| | \hat{ }T14, A29T; \hat{ }G64, \hat{ }T87; \hat{ }A65; \hat{ }C18, |
| | \hat{ }T18; \hat{ }G64, A88C; |
| | C9A, A29C, G57T; G7C, \hat{ }G28; G77A; G7A, TC14CT, |
| | C17G; C2_; G7C, T14A, \hat{ }T86; C9T, C17G, A53G; |
| | T3G, GC7CT, GA28AG, G86T; C9T, C17G, A29C, |
| | A91G; C9T, T16_, A91C; CT2_, \hat{ }G64, C65A; C15_; |
| | T16G, C17T; G7T, G28A |
| 2.1 to | C9T, C17G, A29T; A87C; \hat{ }CT18, A88C; C9T, C17G, |
| 2.2 | \hat{ }G64; C17G; C15T; \hat{ }T16, T79C; \hat{ }A64, G64A; |
| | A1C, T3G, C9T, C17G; GA28CC, \hat{ }T65; C15A, C17A; |
| | G78C, T79G; A29C, T58G; C2_, G7A, -C.65.AA; |
| | CT2_, A29T; T3A, A33T; G4A, CGC6GTA, |
| | G28T, G30C, C32T, T67_; C9T, C17G, C65_, A91C; \hat{ }T65, |
| | A87G; A88_; G7T, C9A; C9T, C17G, C65A; |
| | TG3GC, C6T, AG29CA, C32G; G7T, T16A; |
| | G7T, G70C, C80A; G7T, T14A; |
| | TG3AA, GC7CG, GA28CG, CA32TG; \hat{ }G54, A91C; |
| | C73_, G78_; T3C, GC5TG, C8T, GA26_, G30A, \hat{ }CG34; |
| | \hat{ }CT3, A29C; C2T, T14G; G7C, A29T; C9T, TC16GG; |
| | T3G, C8T, GA28AC, A33C; \hat{ }G16, \hat{ }T16; |
| | C9T, C17G, A36C; TGG3AAC, C8G, GAG28_, A---.33.GGGT; |
| | C9T, C17G, A87G; \hat{ }T72, T79G; \hat{ }G17, C17T; |
| | CT2_, A39C, A88C; T3G, A33C; T3_A33G; |
| | C-.2.TG, TC75CA; G7C, C9T, C17G, \hat{ }G92; C9T, C17G, |
| | G82C; C9A, A29C; C2_, C9T, C17G, A91C; |
| | C2_, A29C, A91C; CT2_, C9T, C17G; G7T, A60G; |
| | \hat{ }C71, \hat{ }T71; C2_, G77T, A91C; C2_, A29G; \hat{ }T71, |
| | C80G; T3A, G7A, A29G, A33T; C9T, A29G |
| 2.0 to | C65T, \hat{ }A66; CT2_, C15_, T58A, A72C; C9T, C17G, |
| 2.1 | C73A, C76A; C2_, A91C; C80T; T3A, |
| | G7C, C9T, C17G; \hat{ }C63, \hat{ }G88; G7T, A61T; |
| | GC62_, C65G, T67G, A72T, T79A, AAGA.84.---C, G89C; |
| | T3G, C9T; T16A, C17A; C6T, A29T; T3C, GC5CG, |
| | C8T, GAGC28ACCG, A33G; G7A, C15T; \hat{ }T2; C15G; |
| | C9G, A29T; C15T, A29T; G7T, \hat{ }C14; \hat{ }A64, A88T; |
| | A29C, G30A; C2_, A29C, A46C; C9T, C17G, A72T, |
| | G78A; \hat{ }A87, \hat{ }T87; C9T, A59C; TG3AC, C8A, |
| | GA28TC, CA32GG; C9T, C17G, \hat{ }G64, \hat{ }G88; |
| | A29C, G71A, C80T; T3C, A29T, AC68TA; \hat{ }A17; |
| | C9T, C17G, G64T, T66C; G7A, T16G; |
| | C17T, C65G, G86C; C69T, G82C; A1T, C2A; T14A, |
| | \hat{ }C29; \hat{ }A15, C15T; G7T, T16G; T3A, GC7CA, |
| | GA28TG, A33G; \hat{ }T81; T16C, A29C; A29C, A91C; |
| | G71A, A88T; \hat{ }C65, A87G, A91C; C9T, |
| | C17G, A29T, \hat{ }A53; G71T; \hat{ }A80, \hat{ }A80; |
| | C9T, C17G, A36G; C9T, C17G, T--.54.CTG; |
| | T16A, A29T; \hat{ }G77, T79C; |
| | C9T, C17G, G64C; TG3AC, CG6GA, |
| | AG29TC, CA32GG; A36T, C37T; |
| | A29C, \hat{ }C65, A85_; C15G, |
| | A29T; \hat{ }A70, C81T; A29T, A33G; C73A, C80T; C9T, |
| | C17G, G82_; C9T; C69T, A84G; C2_, C9T, C17G, A46C |
| 1.9 to | C2_, A29G, A91C; A68G, T83C; C9T, |
| 2.0 | T14A, C17A, \hat{ }AG85; \hat{ }T66, \hat{ }G85; G62T, CT65_, C69A, |
| | G71A, C80T, G82T, A85C, AGC88_; T3_, G5T, \hat{ }A8, |
| | -A.29.TC, C31A, A33_; G7A, T14C, C17A; |
| | T3G, CG6TC, AG29GA; \hat{ }T54; \hat{ }C8, \hat{ }T8; |
| | G7T, AA87TG; A72C, C73A; C2_, C6T; \hat{ }C29; |
| | G71C, C81_; C9T, C17G, G64_, A88_; C2_, A88T; |
| | T3G, G5C, GC7TG, G28C, C31G; |
| | C9T, C15T, C17G, A36C; G7T, T34G; |
| | T14A; \hat{ }T73, \hat{ }C78; \hat{ }G64; \hat{ }G15, C15T; |
| | A36C, \hat{ }A57; A-.72.GC, \hat{ }T79; |
| | T16A, A29C, \hat{ }A58; C9T, C17G, \hat{ }T52; C2_, A85T; |
| | \hat{ }C29, A29G; G7T, T14C; C2A, |
| | \hat{ }T57; G7T, C15G, T34G; T14G, C17T; T14C, C15T; |
| | T3G, G5A, GC7TA, G28T, C31T, |
| | A33C; \hat{ }C71, \hat{ }T79; \hat{ }T14, A29C; \hat{ }A1, A36C; |
| | \hat{ }C63, \hat{ }G89; G7C, A91G; T14C, A29C; |
| | C9T, C17G, G78T, C80T; \hat{ }G69, G82C; |
| | TGG3GCA, G7T, CCA31TGC; |
| | C6T, A29C, G71C, \hat{ }G80, A91C; A13C, A29C; |
| | \hat{ }C63, A88T; G7T, T14_; C2_, GG77AA; |
| | C9T, C17G, T58A; C2_, G77T; C2_, T3_; |
| | C9T, C17G, \hat{ }AA53, A88C; |
| | G7T, C9T; G7A; CG6GC, AG29GC, C32A; |
| | C63T, TTA66GCC, GA71_, TC79_, |
| | TAA83GGC, A87C, G89_; G7C, C17G; |
| | C2_, A46C; C9G, A29T, C37T, \hat{ }A56 |
| 1.8 to | \hat{ }G69, A72C, G82C; \hat{ }G70, T79G; |
| 1.9 | G7A, C15A; \hat{ }T36, \hat{ }A57; \hat{ } G70, \hat{ }C79; |
| | TGGCG3CACAT, GCCA30TGTG; |
| | G71A; TG3AC, C8A, A29C, CA32GT; |
| | T10G, A29C; \hat{ }A65, G77A, \hat{ }G86; |
| | C9T, C17G, A88_, A91C; \hat{ }C78, \hat{ }A78; |
| | G7T, C90T; T3G, G5A, GC7TG, |
| | G28C, C31T, A33C; G7T, C9G, G86T; |
| | A29C, C31T, A33C; A29C, |
| | G70A; A-.88.GC, A91C; \hat{ }A17, A36C; |
| | T3C, GCG5TGA, AGC29TCA, A33G; |
| | T3C, CGC6GCT, GAG28AGA, A33G, A88C; |
| | C35G, \hat{ }C58; T74A, G78C; |
| | C9T, CA17GT; G7A, C17G; C9T, C17G, \hat{ }GT70; |
| | CTG2_, A29C; C2_, A68G; \hat{ }T64, \hat{ }T88; |
| | T3G, A33T; C2_, T16G, A29C; \hat{ }A1; |
| | A36T, \hat{ }G55; C9T, C17G, C63A; |
| | C9T, A18G; C2T, A36T; \hat{ }A81, \hat{ }A81; |
| | C9T, T14G, C17G; -A.72.CC, |
| | A91C; A29T, T79G; G7A, A29T, A59G; G7C, \hat{ }C78; |
| | \hat{ }AG64, A88C; CT2_, C9T, C17G, |
| | C69T; C2_, A46C, A91C; \hat{ }C89, A91C; |
| | \hat{ }C29, A68C; C2_, G64T; -C.15.GT, |
| | A27C; CT2_, T10G, A88C; T14C, A29T; |
| | C9T, C17G, C76T; A84G, A87C; |
| | G7C, C9T, T14A, C17G, T34A; G70T, C81A; |
| | T14G; \hat{ }T3, A29T; G7T, \hat{ }T29; |
| | A29T, C65A, T67G; G64C, A87G; |
| | C9T, T14A, C17G; \hat{ }T57, |
| | A87G; TGG3ATC, A29C, CCA31GAT |
| 1.7 to | C2_, G70A; C9T, C17G, \hat{ }GA77, A88C; |
| 1.8 | C9G, C17G, A29C; \hat{ }T70, \hat{ }T81; |
| | G7C, C9T, C17G; T3G, CGC6TTG, |
| | G28C, G30A, A33C; \hat{ }A16, A68T; |
| | C9T, C17G, T67C; G7T, \hat{ }C14, A33C; |
| | G7A, T14_; \hat{ }C14, \hat{ }T14; |
| | C9T, C17G, GG77TT; C2T, C80T; \hat{ }T64, A88_; \hat{ }G54, |
| | A68C; G7T, CT9AG; |
| | C9T, C17G, T79G; T79G, C80T; \hat{ }AT3, |
| | A88C; \hat{ }AG54, A88C; C2G, A33C; |
| | C2_, A88T, A91C; C9T, C17G, T58C; C2_, C73T; |
| | TGG3CCC, C8G, GA28CC, CCA31GGG; |
| | G7T, T10G; C9T, C17G, \hat{ }A80, A91C; |
| | \hat{ }T64; T14_, A29C, A91C; G7A, G28T, |
| | AAAGCGCTTA59_; G7T, G71_; |
| | \hat{ }A17, \hat{ }A17; T14_, A29T, A91C; C17G, A72G, |
| | T74C; \hat{ }T88; CT2_, A94C; |
| | A27G, A29C; A85T, A87G; C9T, C17G, \hat{ }AA79; |
| | C9T, T14A, C17G, T34A, \hat{ }G64, G86T; C9T, |
| | C17G, T45G; C2_, C9T, C17G, C65T; |
| | \hat{ }G3, G5C, C9_, GA28CG, C32A; |
| | T74G, G78T; TG3_, --C.8.GCT, G28_, \hat{ }G33; |
| | A39T, T54A; C2_A72G; C9T, C15T, C17G; |
| | TG3CA, CG6GA, AG29GC, CA32TG; |
| | G64C, A88G; C15A, C17G; C2_, C65A; |
| | \hat{ } G64, G86A; \hat{ }C29, A36C; G64T, T66A; |
| | TG3GT, A29C, C32A; \hat{ }A64; C81G; |
| | C9T, A72T, T79C; C9T, C17G, G77T |
| 1.6 to | A72G; \hat{ }C14, A29C, A36C; T3C, C9T, |
| 1.7 | C17G; G4C, C8G, GA28AC, C32G; |
| | C2_, G71C, \hat{ }G80; C76T; C9T, T14A; |
| | C2G, C9T, C17G; G70T, C81G; C17G, \hat{ }T54; |
| | A72C; C2_, C9G, C17G; TG3GC, C8T, GA28AC, C32G; |
| | TGG3GCT, C8G, \hat{ }CC28, CC31_; |
| | C9T, C17G, A39T, A-.53.GC; \hat{ }T16; T67C, A87C; |
| | \hat{ }G81, C81T; C76G, G78C; A1C, G56A; |
| | TG3CA, GC7AG, GA28CT, CA32GG; |
| | C9T, C17G, C65G, \hat{ }A87; G86A, A88C; G7T, |
| | C9T, C17G, \hat{ }A72, G78A; \hat{ }G70, C80A; |
| | \hat{ }A17, A68C; C2_, C80G; \hat{ }C71, \hat{ }T79, A88C; |
| | C9T, C17G, \hat{ }T57; \hat{ }T2, C9T, C17G; T45G; |
| | G64C; T14_; C65T, G86A; C69T; \hat{ }C65; G64T, C65A; |
| | T3G, GC7CT, GA28AG; \hat{ }A1, \hat{ }A53; T3A, |
| | G5C, GC7AT, GA28AT, C31G, A33T; |
| | C9T, C17G, \hat{ }CA72; C9T, C17G, C73A, T79A; C2_, |
| | A53G; TGG3GTC, C8G, GA28CC, CC31GA; |
| | \hat{ }C5, G7T, C9T, C17G; G71T, C80T; |
| | C15T, T16G; G7C, C9T, C17G, C76A, |
| | G78T; G64T, T66C; \hat{ }C65, A91C; C73T; |
| | A72C, G78T; \hat{ }C63; A68G, C81T; \hat{ }GT87, |
| | A88C; C9T, C17G, \hat{ }A78; |
| | T3A, GC5AG, C8T, GAGC28ACCT, A33T; |
| | \hat{ }A1, \hat{ }T54; A29C, G56A; C2_, C80T; |
| | \hat{ }TA17, A88C; A72G, C73T; A29C, C31T, T83C; G7T, |
| | A27T; T3C, G7T, G40A, \hat{ }T54; A88C; ; G64T, A87C; |
| | T3_, \hat{ }T9, G28_, \hat{ }G32; \hat{ }GT16, A88C; |
| | -T.3.AC, G7A, C9_, GAG28TGC, |
| | CA32GG, A84C, G86T; \hat{ }T65; C76A, G77T; |
| | \hat{ }G14, A29C; G64C, A88C; A72_, |
| | T79G, A91C; \hat{ }C29, A68C, A72C; |
| | TG3AT, GC7TT, G28A, CA32AT; |
| | C9T, C17G, T--.54.CTG, A88C; G7T, A59C; |
| | CC8GT, C17G; G7C, T14C, \hat{ }T86; \hat{ }CA3, |
| | GC5_, C8G, GA26_, G30C, \hat{ }TG34 |
| 1.5 to | T3A, \hat{ }A5, G7_, AGC29GCT, |
| 1.6 | A33G; C9T, C17G, \hat{ }C73, G78C; G71A, A72G; |
| | AG27TA, A88T; G7T, A91T; \hat{ }T57, |
| | A91C; \hat{ }T2, A68C; \hat{ }T2, A36C; G7T, T10C; |
| | \hat{ }A64, A88G; TG3CA, C6T, C8T, |
| | GAG28ACA, CA32TG; \hat{ }T54, A68C, A72C; |
| | G7T, A61G; GCGC5CAAG, |
| | GAGC28CTTG; C6T, CT9TC, C17G, A29C; |
| | \hat{ }CA63, A88C; C2_, C9T, C17G, A36C; \hat{ }G64, \hat{ }G86; |
| | \hat{ }CGGCAGAT65, T67G, \hat{ }GC69, |
| | G70T, A72G, \hat{ }GCTC75, G77T, T79C, CGTAA81_; |
| | C73T, \hat{ }G74; T14G, T16A; \hat{ }AT14, |
| | A88C; G64C, A88T; C2_, A39T, \hat{ }A55; |
| | C2_, C15T; \hat{ }G70, C81T; \hat{ }A81, |
| | C81T; \hat{ }T72, A72T; C2_, C69T; T75G, T79G; |
| | A88_, A91C; \hat{ }T7, G7T; G7A, |
| | A29T, \hat{ }A77; CC8AT, C17G; C2_, T52C; |
| | G7A, C9T, TC16CG; G70A; |
| | C9T, C17G, AA87TC; \hat{ }A53, A91C; |
| | T3A, G5C, GC7CT, GA28AG, |
| | C31G, A33T; \hat{ }G70, \hat{ }C79, A88C; \hat{ }T72, \hat{ }G77; |
| | C9T, C17G, C69T; T-.3.CA, |
| | G7A, C9_, AG29GC, CA32TG; TGG.3.-AA, |
| | G9, \hat{ }CGC28, A29T, CCA31_; GCGC.62.--AA, |
| | T67C, C69A, GA71AC, TC79GT, |
| | G82T, AAGA.84.---G, GC89TT; |
| | A85G, A87G; TG3_, C--.8.TCG, |
| | GAG28CGA, C32G; T66C, A85G; |
| | \hat{ }A16, G86T, A88T; TT74GG, G--.77.AAC; |
| | C2_, T79C; C9T, \hat{ }A13, C17G, \hat{ }G54; |
| | \hat{ }C63, G64T; C2_, T83C; \hat{ }C73, |
| | \hat{ }C73; -T.3.AA, G7_, A29_, A-.33.GT, G70A; |
| | \hat{ }T16, A91C; \hat{ }T64, \hat{ }G64; T79C; |
| | C9T, C17G, G77A; \hat{ }T64, \hat{ }T64; C2_, G71A; |
| | T14C, C17G; G7C, TC14CA, C17G; A85C, A88C; |
| | \hat{ }A3, GG4TC, C9_, GA28CG, |
| | CCA31AAT; --C.63.TTT, C65_, CGGA.69.T---, |
| | TCCG.79.--- A, G86C, G89A; C9T, |
| | C17G, \hat{ }C57; C15G, T16A; C9T, C17G, \hat{ }CA64; |
| | AG39TA, T52C, T54A; C2A, A87G |
| 1.4 to | -C.15.GT, A36C; A29C, T83C; G7T, |
| 1.5 | A27G; \hat{ }C29, \hat{ }C29; \hat{ }T80, \hat{ }C80; |
| | TGGC3ACAG, GA26_, --A.33.TGG; |
| | A72G, \hat{ }T73; C9T, C17G, T66A, A85G; |
| | \hat{ }C15, \hat{ }G15; TG3_, --C.8.GCT, |
| | GAG28CGC, C32G; \hat{ }T19; G28A, A29C; |
| | \hat{ }G70, \hat{ }G80; CT2_, A36C, |
| | A39C; C9T, C17G, \hat{ }CC79; \hat{ }G54, A68C, A72C; |
| | \hat{ }CT78, A88C; T74G, G78C; |
| | TTC74AGG, \hat{ }AT78; C9T, C17G, C76G; |
| | \hat{ }GGCAGCTCTGA64, T66C, |
| | A68C, GA71AG, \hat{ }C75, G77T, T79C, |
| | CGTAAGAA81_; \hat{ }A1, A68C; \hat{ }A4; A72G, |
| | G78C; T3G, C8T, GA28CC, A33C; G7C, -C.80.AT; |
| | C9T, C17G, A59T; G26C, C93G; |
| | G7C, T14A, \hat{ }T86, A91C; \hat{ } G64, \hat{ }T87, A88C; |
| | A1G, A29C; C9T, C17G, \hat{ }AT78; |
| | G28T, GCCA30TTTG; C2_, T75A, G78A; |
| | TG3GA, CG6AC, AG29GT, |
| | CA32TC; A36G, \hat{ }C57, A91C; \hat{ }C72, A72C; |
| | C9T, C17G, \hat{ }G82; A27T; TG3CC, |
| | CGC6TTG, G28C, G30A, CA32GG, C80G; |
| | \hat{ }A1, \hat{ }A53, A88C; A72C, C80A; |
| | G7T, C73G; \hat{ }A15, A87G; T14_, \hat{ }C29; |
| | G7A, T14_, A91C; C15T, T16A; |
| | C15T, C17G; C65_, A88_A94C; \hat{ }A16; |
| | C9T, C17G, \hat{ }G54, A68C; -T.3.AC, |
| | G5A, C9_, GAG28CGT, CA32GG; \hat{ }T15, \hat{ }C15; |
| | C9T, T14A, C17G, T34C, \hat{ }G64, |
| | G86T; \hat{ }T71, C80G, A91C; -C.15.GT, A68C; |
| | \hat{ }G87, \hat{ }T87; C73_, G78_, A94C; |
| | C2G; G77C, T79A; G70C; A68G; \hat{ }T81, A91C; |
| | C9T, C17G, T79A; \hat{ }T72, \hat{ }T72 |
| 1.3 to | T66A, A88C; C76G, G77T; A53G, |
| 1.4 | A59C; CTG2_, G7T; A72_, \hat{ }T79; |
| | \hat{ }AA80, A88C; TGG3CAA, C8G, |
| | GA28CC, CCA31TGG; \hat{ }C78, \hat{ }T78; --G.28.TGA, |
| | T79C; \hat{ }T72, \hat{ }G77, A88C; A72G, \hat{ }C79; |
| | T3G, G5A, G7A, A29G, C31T, A33C; |
| | T14G, A21G; \hat{ }T2, A72C; G7T, T14G, \hat{ }CG64; |
| | T3G, G71A; G64A, A87G; T3C, C6T, AG29CC, A33G; |
| | T45A; G7A, C9T, T14A, C17G; TG3CT, |
| | CGC6TAT, GAG28ATA, CA32AG; |
| | C9T, C17G, \hat{ }T83; G7T, C9T, |
| | A53T; C9T, C17G, T75G; G7C, T14C, A72_; |
| | \hat{ }A65, A87G, \hat{ } 89; C9T, C17G, |
| | G70C, C81G; G7T, A59T; AG29CA, A72T, \hat{ }G77; |
| | T74C, G78A; C2A; C9T, C17G, C73T, |
| | T75G; \hat{ }G54, A72C; \hat{ }AA81, A88C; |
| | \hat{ }T54, A68C; C65A, G86A; \hat{ }A1, |
| | A72C; T3G, C9T, C17G; C2_, A33T; A87T; |
| | \hat{ }A65, \hat{ }T86; A53G; A85G, A87C; |
| | T3G, G5C, GC7TG, G28C, C31G, TC75_; |
| | -T.3.AC, G7A, C9_, GAG28TGC, |
| | CA32GG, G71T; G7C, C15A; G64A, A85G, A88_; |
| | \hat{ }A74; \hat{ }TG64, A88C; A29C, A60T; |
| | C9T, C17G, C80G; \hat{ }T64, \hat{ }A87; G7T, \hat{ }A59; |
| | G77C, G78C; A72C, \hat{ }T79; \hat{ }T73, \hat{ }C78, |
| | A88C; \hat{ }C29, A91C; \hat{ }A64, A88C; |
| | \hat{ }G54, T58A; TGGCG3CACTT, |
| | GCCA30AGTG; C9T, C17G, A21T; |
| | G4C, C8G, GA28AC, C32G, \hat{ }G82; |
| | A36C, A53G; C9T, C17G, G71T; |
| | C9T, CA17GT, T45A, G70C; \hat{ }A81; |
| | G7A, A72T; CT2_, T10G; G64T, A87G; |
| | \hat{ }G70, T79A; C2_, C9T, C17G, T52C; |
| | C2_, T45C; C9T, C17G, \hat{ }C35, A36G; |
| | G7T, T58A; \hat{ }A73, \hat{ }C73 |
| 1.2 to | C2G, C73G; G7T, \hat{ }T14; T75C, |
| 1.3 | C76T; \hat{ }A80, \hat{ }C80; A1_, A46C; C9T, C17_, A91C; |
| | C35G, \hat{ }C58, A68C; C2T, T3A; \hat{ }C29, |
| | A72C; T79G, C80A; G71A, C81_; G7T, G28T; |
| | CT2_, T45G; A29C, G92; C9T, C17G, T67C, A84G; |
| | T3C, \hat{ }T6, C9_, GAG28AGA, A33G; A36T; A85C, |
| | A88T; TG3GC, C6A, C8T, GAG28ACT, |
| | CA32GC; T10C, A29C; A1_, C2_; \hat{ }C65, A87T; |
| | A72T, C81T; C15A, T79A; \hat{ }GA1, |
| | G7A, C15A, C17G, A88C; \hat{ }A16, T16A; |
| | A29T, A60C; C76A, G78A; A29T, |
| | C31T; A29C, G86C; \hat{ }G70, T79G, A91C; |
| | \hat{ }T54, A72C; \hat{ }GAAC73, T74A, |
| | GG.77.C-; T14_, A29C, A46C; |
| | C9T, C17G, \hat{ }A72, \hat{ }A78; T14C, |
| | C15A; \hat{ }A17, \hat{ }G17; C9T, C17G, CG76AC; |
| | T74C, T79C; G7A, TC14AA, |
| | C17A; \hat{ }T64, \hat{ }A64; \hat{ }T81, \hat{ }A81; C2A, A36T; |
| | C9T, C17G, G82T; T74A, G77A; \hat{ }A1, |
| | A33C, A36C; G7C, TC14CT, T34A; |
| | A36T, A53G; \hat{ }A65, \hat{ }A84; A1_; G7T, \hat{ }T60; |
| | T3A, G5C, G7T, C31G, A33T, |
| | T52G, C54; T75G, G77T; G5C, G7A, A29T, C31T; |
| | TGGC3CCAG, C8T, GA26_, |
| | G30A, --A.33.TGG; C9T, \hat{ }C17; C2_, T14A, A91C; |
| | G77A, G78T; \hat{ }G64, G86A, A91C; |
| | T16A, C17G; C9T, C17G, T34A; A87G; A39G, |
| | -T.54.GC; A39G, -T.54.GC, A91C; \hat{ }A5, |
| | C6T, C9_, G28C, GC30CT; A72C, G77A; |
| | C2_, A91C, A94C; C2_, G7C; |
| | A84G; C73A, G78T; \hat{ }T78, \hat{ }A78; |
| | TGG3GTC, C8G, GA28AC, |
| | CCA31GAC; G7A, G14; C76T, G77A; C2_, G7T; |
| | G7A, T14A; \hat{ }A17, A68C, A72C; |
| | TGG3CCA, GC7CG, GA28CG, CCA31TGG; |
| | T79G; \hat{ }A72, C78; C15G, A29T, |
| | G57C, A59T; T14A, G74; G7T, C65T, A87C; |
| | C9T, C17G, G70T |

*mutated sequences are
‘;’-separated and multiple mutations per sequence are ‘,’-separated

### Example 21: The CcdB Selection Assay Identifies CasX Protein Variants with Improved dsDNA Cleavage or Improved Spacer Specificity at TTC, ATC, and CTC PAM Sequences

[0949] Experiments were conduected to identify the set of variants derived from CasX 515 (SEQ ID NO: 145) that are biochemically competent and that exhibit improved activity or improved spacer specificity compared to CasX 515 for double-stranded DNA (dsDNA) cleavage at target DNA sequences associated with a PAM sequence of either TTC or ATC or CTC. In order to accomplish this, first, a set of spacers was identified with survival above background levels in a CcdB selection experiment using CasX 515 and guide scaffold 174. Second, CcdB selections were performed with these spacers to determine the set of variants derived from CasX 515 that are biochemically competent for dsDNA cleavage at the canonical “wild-type” PAM sequence TTC. Third, CcdB selection experiments were performed to determine the set of variants of CasX 515 that enable improved dsDNA cleavage at either PAM sequences of type ATC or of type CTC. Fourth, plasmid counter-selection experiments were performed to determine the set of variants derived from CasX 515 that resulted in improved spacer specificity.

### Materials and Methods:

[0950] For CcdB selection experiments, 300 ng of plasmid DNA (p73) expressing the indicated CasX protein (or library) and sgRNA was electroporated into E. coli strain BW25113 harboring a plasmid expressing the CcdB toxic protein. After transformation, the culture was allowed to recover in glucose-rich media for 20 minutes at 37° C. with shaking, after which IPTG was added to a final concentration of 1 mM and the culture was further incubated for an additional 40 minutes. A recovered culture was then titered on LB agar plates (Teknova Cat #L9315) containing an antibiotic selective for the plasmid. Cells were titered on plates containing either glucose (CcdB toxin is not expressed) or arabinose (CcdB toxin is expressed), and the relative survival was calculated and plotted, as shown in FIG. 76. Next, a culture was electroporated and recovered as above, and a fraction of the recovery was saved for titering. The remainder of the recovered culture was split after the recovery period, and grown in media containing either glucose or arabinose, in order to collect samples of the pooled library either with no selection, or with strong selection, respectively. These cultures were harvested and the surviving plasmid pool was extracted using a Plasmid Miniprep Kit (QIAGEN) according to the manufacturer's instructions. The entire process was repeated for a total of three rounds of selection.

[0951] The final plasmid pool was isolated and a PCR amplification of the p73 plasmid was performed using primers specific for unique molecular identifier (UMI). These UMI sequences had been designed such that each specific UMI is associated with one and only one single mutation of the CasX 515 protein. Typical PCR conditions were used for the amplication The pool of variants of the CasX 515 contained many possible amino acid substitutions, as well as possible insertions, and single amino acid deletions in an approach termed Deep Mutational Evolution (DME). Amplified DNA product was purified with Ampure XP DNA cleanup kit, with elution in 30 μl of water. Amplicons were then prepared for sequencing with a second PCR to add adapter sequences compatible with next-generation sequencing (NGS) on either a MiSeq instrument or a NextSeq instrument (Illumina) according to the manufacturer's instructions. NGS of the prepared samples was performed. Returned raw data files were processed as follows: (1) the sequences were trimmed for quality and for adapter sequences; (2) the sequences from read 1 and read 2 were merged into a single insert sequence; and (3) each sequence was quantified for containing a UMI associated with a mutation relative to the reference sequence for CasX 515. Incidences of individual mutations relative to CasX 515 were counted. Mutation counts post-selection were divided by mutation counts pre-selection, and a pseudocount of ten was used to generate an “enrichment score”. The log base two (log₂) of this score was calculated and plotted as heat maps in which the enrichment score for biological replicates for a single spacer was determined at each amino acid position for insertions, deletions, or substitutions (not shown). The library was passed through the CcdB selection with two TTC PAM spacers performed in triplicate (spacers 23.2 AGAGCGTGATATTACCCTGT, SEQ ID NO: 41837, and 23.13 CCCTTTGACGTTGGAGTCCA, SEQ ID NO: 41838) and one TTC PAM spacer performed in duplicate (spacer 23.11 TCCCCGATATGCACCACCGG, SEQ ID NO: 41839), and the mean of triplicate measurements was plotted on a log₂ enrichment scale as a heatmap for the measured variants of CasX 515. Variants of CasX 515 that retained full cleavage competence compared to CasX 515 exhibited log 2 enrichment values around zero; variants with loss of cleavage function exhibited log 2 values less than zero, while variants with improved cleavage using this selection resulted in log 2 values greater than zero compared to the values of CasX 515. Experiments to generate additional heat maps (not shown) were performed using the following single spacers (11.2 AAGTGGCTGCGTACCACACC, SEQ ID NO: 41840; 23.27 GTACATCCACAAACAGACGA, SEQ ID NO: 41840; and 23.19 CCGATATGCACCACCGGGTA, SEQ ID NO: 41842, respectively) for selectivity.

[0952] For plasmid counter-selection experiments, additional rounds of bacterial selection were performed on the final plasmid pool that resulted from CcdB selection with TTC PAM spacers. The overall scheme of the counter-selection is to allow replication of only those cells of E. coli which contain two populations of plasmids simultaneously. The first plasmid (p73) expresses a CasX protein (under inducible expression by ATc) and a sgRNA (constitutively expressed), as well as an antibiotic resistance gene (chloramphenicol). Note that this plasmid can also be used for standard forward selection assays, such as CcdB, and that the spacer sequence is completely free to vary as desired by the experimentalist. The second plasmid (p74) serves only to express an antibiotic resistance gene (kanamycin) but has been modified to contain (or not contain) target sites matching the spacer encoded in p73. Furthermore, these target sites can be designed to incorporate “mismatches” relative to the spacer sequence, consisting of non-canonical Watson-Crick base-pairing between the RNA of the spacer and the DNA of the target site. If the RNP expressed from p73 is able to cleave a target site in p74, the cell will remain only resistant to chloramphenicol. In contrast, if the RNP cannot cleave the target site, the cell will remain resistant to both chloramphenicol and kanamycin. Finally, the dual plasmid replication system described above can be achieved in two ways. In sequential methods, either plasmid can be delivered to a cell first, after which the strain is made electrocompetent and the second plasmid is delivered (both by electroporation). Previous work has shown that either order of plasmid delivery is sufficient for successful counter-selection, and both schemes were performed: in an experiment named “Screen 5”, p73 is electroporated into competent cells harboring p74, while in Screen 6 the inverse is true. Cultures were electroporated, recovered, titered, and grown under selective conditions as above for a single round, and plasmid recovery followed by amplification, NGS, and enrichment calculation were also performed as above.

[0953] Finally, additional CcdB selections were performed in a similar manner, but with guide scaffold 235 and with alternative promoters WGAN45, Ran2, and Ran4, all targeting the toxic CcdB plasmid with spacer 23.2. These promoters are expected to more weakly express the guide RNA compared to the above CcdB selections and are thus expected to reduce the total concentration of CasX RNP in a bacterial cell. This physiological effect should reduce the overall survival of bacterial cells in the selective assay, thus increasing the dynamic range of enrichment scores and correlating more precisely with RNP nuclease activity at the TTC PAM spacer 23.2. For each promoter, three rounds of selection were performed in triplicate as above, and each round of experimentation resulted in enrichment data as above. These experiments are hereafter referred to as Screen 7.

### Results:

[0954] The results of the library screen heat maps demonstrated that CasX 515 complexed with guide scaffold 174 was capable of cleaving the CcdB expression plasmid when targeted using spacers (listed below) that target DNA sequences associated with TTC PAM sequences. In contrast, spacers utilizing alternative PAM sequences exhibited far more variable survival. ATC PAM spacers (listed below) ranged in survival from a few percent to much less than 0.1%, while CTC PAM spacers (listed below) enabled survival in a range from >50% to less than 1%. Finally, GTC PAM spacers (listed below) only enabled survival at or below 0.1%. These benchmarking data support the experimental design of this selection pipeline and demonstrate the robust selective power of the CcdB bacterial assay. Specifically, CasX proteins unable to cleave double-stranded DNA are de-enriched by at least four orders of magnitude, while CasX proteins biochemically competent for cleavage will survive the assay.

[0955] Heatmaps were used to identify the set of variants of CasX 515 that were biochemically competent for dsDNA cleavage at target DNA sequences associated with a TTC PAM sequence, as well as those variants exhibiting improved for dsDNA cleavage at target DNA sequences associated with PAM sequences of CTC (spacers 11.2 and 23.27) and ATC (spacer (23.19).

[0956] These three datasets, either individually, or combined, represent underlying biochemical differences between variants and identify regions of interest for future engineering of improved CasX therapeutics for human genome editing. As evidence for this, internal controls were included uniformly as part of the naive library, such as the presence of a stop codon at each position throughout the protein. These stop codons were consistently observed to be lost throughout rounds of selection, consistent with the expectation that partially truncated CasX 515 should not enable dsDNA cleavage. Similarly, variants with a loss of activity reflected in the heatmap data were observed to have become depleted during the selection, and thus have a severe loss of fitness for double-stranded DNA cleavage in this assay. However, variants with an enrichment value of one or greater (and a corresponding log 2 enrichment value of zero or greater) are, at minimum, neutral with respect to biochemical cleavage. Importantly, if one or more of the mutations identified in this specific subset of variants exhibit desirable properties for a therapeutic molecule, these mutations establish a structure-function relationship shown to be compatible with biochemical function. More specifically, these mutations can affect properties such as CasX protein transcription, translation, folding, stability, ribonucleoprotein (RNP) formation, PAM recognition, double-stranded DNA unwinding, non-target strand cleavage, and target strand cleavage.

[0957] For those variants competent for cleavage at sequences associated with CTC and ATC PAM sequences, enriched variants in these datasets (enrichment >1, equivalent to log 2 enrichment for values of approximately 0) represent mutations that specifically improve cleavage of CTC or ATC PAM target sites. Mutations meeting these criteria can be further subcategorized in two general ways: either the mutation improves cleavage rates by improving the recognition of the PAM (Type 1) or the mutation improves the overall cleavage rate of the molecule regardless of the PAM sequence (Type 2).

[0958] As examples of the first type, substitution mutations at position 223 were found to be enriched by several hundred-fold in all samples tested. This location encodes a glycine in both wild-type reference CasX proteins CasX 1 and 2, which is measured to be 6.34 angstroms from the −4 nucleotide position of the DNA non-target strand in the published CryoEM structure of CasX 1 (PDB ID: 6NY2). These substitution mutations at position 223 are thus physically proximal to the altered nucleotide of the novel PAM, and likely interact directly with the DNA. Further supporting this conclusion, many of the enriched substitutions encoded amino acids which are capable of forming additional hydrogen bonds relative to the replaced amino acid (glycine). These findings demonstrate that improved recognition of novel PAM sequences can be achieved in the CasX protein by introducing mutations that interact with one or both of the DNA strands, especially when physically proximal to the PAM DNA sequence (within ten angstroms). Additional features of the heat maps for ATC and CTC spacers represented mutations enabling increased recognition of non-canonical PAM sequences, but their mechanism of action has not yet been investigated.

[0959] As examples for the second type of mutation, the results of the heat maps were used to identify mutations that improve the overall cleavage rate compared to CasX 515, but without necessarily specifically recognizing the PAM sequence of the DNA. For example, a variant of CasX 515 consisting of an insertion of arginine at position 27 was measured to have an enrichment value greater than one in the selection with spacer 11.2 (CTC PAM) and spacer 23.19 (ATC PAM). This variant had previously been identified by a comparable selection on a CTC PAM spacer, where this mutation was enriched by orders of magnitude (data not shown). The position of this amino acid mutation is physically proximal (9.29 angstroms) to the DNA target strand at position −1 in the above structural model. These insights suggest a mechanism where the mature R-loop formed by CasX RNP with double-stranded DNA is stabilized by the side chain of the arginine, perhaps by ionic interactions of the positively charged side chain with the negatively charged backbone of the DNA target strand. Such an interaction is beneficial to overall cleavage kinetics without altering the PAM specificity. These data support the conclusion that some enriched mutations represent variants that improve the overall cleavage activity of CasX 515 by physically interacting with either or both of the DNA strands when physically proximal to them (within ten angstroms).

[0960] The data support the conclusion that many of the mutations measured to improve cleavage at sequences associated with the CTC or ATC PAM sequences identified from the heat maps can be classified as either of the two types of mutations specified above. For mutations of type one, variants consisting of mutations to position 223 with a large enrichment score in at least one of the spacers tested at CTC PAMs are listed in Table 30, with the associated maximum enrichment score. For mutations of type two, a smaller list of mutations was chosen systematically from among the thousands of enriched variants. To identify those mutations highly likely to improve the overall cleavage activity compared to CasX 515, the following approach was taken. First, mutations were filtered for those which were most consistently enriched across CTC or ATM PAM spacers. A lower bound (LB) was defined for the enrichment score of each mutation for each spacer. LB was defined as the combined log₂ enrichment score across biological triplicates, minus the standard deviation of the log₂ enrichment scores for the individual replicates. Second, the subset of these mutations was taken in which LB>1 for at least two out of three independent experimental datasets (one ATC PAM selection and two CTC PAM selections). Third, this subset of mutations was further reduced by excluding those for which a negative log₂ enrichment was measured in any of the three TTC PAM selections. Finally, individual mutations were manually selected based on a combination of structural features and strong enrichment score in at least one experiment. The resulting 274 mutations meeting these criteria are listed in Table 31, along with the maximum observed log 2 enrichment score from the two CTC or one ATC PAM experiments represented in the resulting heat maps, as well as the domain in which the mutation is located.

[0961] In contrast to Class I mutations, there exists another category of mutations that improve the ability of the CasX RNP to discriminate between on-target and off-target sites in genomic DNA, as determined by the spacer sequence, termed Class II, which improve the spacer specificity of the nuclease activity of the CasX protein. Two additional experiments were performed to specifically identify Class II mutations, where these experiments consisted of plasmid counter-selections and resulted in enrichment scores representing the sensitivity of the generated variant, compared to CasX 515, to a single mismatch between the spacer sequence of the guide RNA and the intended target DNA. The resulting enrichment scores were ranked for all observed mutations across the experimental data, and the following analyses were performed to identify a subset of mutations likely to improve the spacer specificity of the CasX protein without substantially reducing the nuclease activity at the desired on-target site. First, mutations from Screen 5 were ranked by their average enrichment score across three technical replicates using Spacer 23.2. Those mutations which were physically proximal to the nucleotide mismatch, as inferred from published models of the CasX RNP bound to a target site (PDB ID: 6NY2), were removed in order to discard those Class II mutations that might only confer improvements to specificity at Spacer 23.2 only, rather than universally across spacers. Finally, these Class II mutations were discarded if their cleavage activity at on-target TTC PAM sites was negatively impacted by the mutation if their average log 2 enrichment from the three TTC PAM CcdB selections was less than zero. The resulting mutations meeting these criteria are listed in Table 32, along with the maximum observed log₂ enrichment score from Screen 5 and the domain in which the mutation is located. Additionally, Class II mutations were identified from the counter-selection experiment Screen 6. These mutations were similarly ranked by their mean enrichment scores, but different filtering steps were applied. In particular, mutations were identified from each of the following categories: those with the highest mean enrichment scores from either Spacer 23.2, Spacer 23.11, or Spacer 23.13; those with the highest combined mean enrichment scores from Spacer 23.2 and Spacer 23.11; those with the highest combined mean enrichment scores from Spacer 23.11 and Spacer 23.13; or those with the highest combined mean enrichment scores from Spacer 23.2 in Screen 5 and Spacer 23.2 in Screen 6. These resulting mutations are listed in Table 32, along with the maximum observed log 2 enrichment score from Screen 6 and the domain in which the mutation is located.

[0962] In addition to the Class I or Class II mutations, there exists another category of mutations that has been directly observed to improve the dsDNA editing activity at TTC PAM sequences. These mutations, termed Class III mutations, demonstrated improved nuclease activity by way of exhibiting enrichment scores above that of CasX 515 when targeting the CcdB plasmid using Spacer 23.2 in Screen 7. A computational filtering step was used to identify a subset of these enriched mutations which are of particular interest. Specifically, mutations were identified that had an average enrichment value across three replicates that was greater than zero for each of the three promoters tested. Finally, features of the enrichment scores across the amino acid sequence were used to identify additional mutations at enriched positions. Example features of interest included the following: insertions or deletions at the junction of protein domains in order to facilitate topological changes; substitutions of an amino acid for proline in order to kink the polypeptide backbone; substitutions of an amino acid for a positively charged amino acid in order to add ionic bonding between the protein and the negatively charged nucleic acid backbone of either the guide RNA or either strand of the target DNA; deletions of an amino acid where consecutive deletions are both highly enriched; substitutions to a position that contains many highly enriched substitutions; substitutions of an amino acid for a highly enriched amino acid at the extreme N-terminus of the protein. These resulting mutations are listed in Table 33, along with the maximum observed log 2 enrichment score from Screen 6 and the domain in which the mutation is located.

TABLE 30
Mutations to CasX 515 (SEQ ID NO: 145)
that improve cleavage activity at CTC
PAM sequences by physically interacting
with the PAM nucleotides of the DNA

| | | | Maximum | |
|---|---|---|---|---|
| | | | observed log₂ | |
| | | | enrichment in | |
| Position | Reference | Alternate | Ccdb selections | Domain |
| 223 | G | Y | 4.6 | helical I-II |
| 223 | G | N | 5.7 | helical I-II |
| 223 | G | H | 4.2 | helical I-II |
| 223 | G | S | 4.6 | helical I-II |
| 223 | G | T | 3.8 | helical I-II |
| 223 | G | A | 6.3 | helical I-II |
| 223 | G | V | 3.6 | helical I-II |

TABLE 31
Mutations to CasX 515 (SEQ ID NO: 145) systematically identified from all datasets
to improve cleavage activity at ATC and CTC PAM sequences

| | | | Maximum observed log₂ | |
|---|---|---|---|---|
| Position | Reference | Alternate | enrichment in CcdB selections | Domain |
| 3 | — | G | 3.0 | OBD-I |
| 3 | I | G | 3.5 | OBD-I |
| 3 | I | E | 4.5 | OBD-I |
| 4 | — | G | 2.5 | OBD-I |
| 4 | K | G | 2.5 | OBD-I |
| 4 | K | P | 3.1 | OBD-I |
| 4 | K | S | 3.3 | OBD-I |
| 4 | K | W | 2.8 | OBD-I |
| 5 | — | P | 3.5 | OBD-I |
| 5 | — | G | 3.1 | OBD-I |
| 5 | R | S | 3.7 | OBD-I |
| 5 | — | S | 2.2 | OBD-I |
| 5 | R | A | 3.2 | OBD-I |
| 5 | R | P | 3.6 | OBD-I |
| 5 | R | G | 3.2 | OBD-I |
| 5 | R | L | 2.7 | OBD-I |
| 6 | I | A | 3.3 | OBD-I |
| 6 | — | G | 3.7 | OBD-I |
| 7 | N | Q | 3.1 | OBD-I |
| 7 | N | L | 2.7 | OBD-I |
| 7 | N | S | 3.7 | OBD-I |
| 8 | K | G | 3.3 | OBD-I |
| 15 | K | F | 3.0 | OBD-I |
| 16 | D | W | 2.8 | OBD-I |
| 16 | — | F | 4.2 | OBD-I |
| 18 | — | F | 3.5 | OBD-I |
| 28 | M | H | 2.5 | OBD-I |
| 33 | V | T | 2.0 | OBD-I |
| 34 | R | P | 3.6 | OBD-I |
| 36 | M | Y | 2.4 | OBD-I |
| 41 | R | P | 2.2 | OBD-I |
| 47 | L | P | 2.2 | OBD-I |
| 52 | E | P | 3.2 | OBD-I |
| 55 | — | P | 2.7 | OBD-I |
| 55 | PQ | — | 3.0 | OBD-I |
| 56 | Q | S | 1.9 | OBD-I |
| 56 | — | D | 2.5 | OBD-I |
| 56 | — | T | 2.8 | OBD-I |
| 56 | Q | P | 3.9 | OBD-I |
| 58 | — | A | 2.2 | helical I-I |
| 63 | R | S | 3.0 | helical I-I |
| 63 | R | Q | 2.7 | helical I-I |
| 72 | D | E | 2.7 | helical I-I |
| 81 | L | V | 2.8 | helical I-I |
| 81 | L | T | 2.7 | helical I-I |
| 85 | W | G | 3.2 | helical I-I |
| 85 | W | F | 2.7 | helical I-I |
| 85 | W | E | 2.9 | helical I-I |
| 85 | W | D | 3.1 | helical I-I |
| 85 | W | A | 2.8 | helical I-I |
| 85 | W | Q | 3.0 | helical I-I |
| 85 | W | R | 3.7 | helical I-I |
| 88 | F | M | 2.4 | helical I-I |
| 89 | Q | D | 2.5 | helical I-I |
| 93 | V | L | 1.9 | helical I-I |
| 109 | Q | P | 1.8 | NTSB |
| 115 | E | S | 1.8 | NTSB |
| 120 | G | D | 2.4 | NTSB |
| 133 | G | T | 2.2 | NTSB |
| 141 | L | A | 2.2 | NTSB |
| 168 | L | K | 3.1 | NTSB |
| 170 | A | Y | 2.7 | NTSB |
| 170 | A | S | 1.7 | NTSB |
| 175 | E | A | 2.0 | NTSB |
| 175 | E | D | 2.8 | NTSB |
| 175 | E | P | 3.8 | NTSB |
| 223 | G | — | 1.4 | helical I-II |
| 223 | G | S | 8.8 | helical I-II |
| 223 | G | T | 3.7 | helical I-II |
| 242 | S | T | 1.9 | helical I-II |
| 247 | I | T | 1.8 | helical I-II |
| 254 | V | T | 2.5 | helical I-II |
| 265 | L | Y | 1.9 | helical I-II |
| 288 | K | G | 4.2 | helical I-II |
| 288 | K | S | 4.0 | helical I-II |
| 291 | V | L | 2.6 | helical I-II |
| 303 | M | T | 2.3 | helical I-II |
| 303 | M | W | 2.7 | helical I-II |
| 328 | G | N | 3.3 | helical I-II |
| 331 | S | Q | 2.7 | helical I-II |
| 334 | — | A | 2.3 | helical II |
| 334 | LV | — | 3.0 | helical II |
| 335 | V | E | 2.8 | helical II |
| 335 | V | Q | 2.7 | helical II |
| 335 | V | F | 2.5 | helical II |
| 335 | V | — | 3.2 | helical II |
| 336 | E | P | 2.9 | helical II |
| 336 | E | — | 3.1 | helical II |
| 336 | E | D | 2.7 | helical II |
| 336 | E | L | 2.4 | helical II |
| 336 | E | R | 2.7 | helical II |
| 337 | R | N | 2.5 | helical II |
| 338 | Q | V | 2.5 | helical II |
| 338 | — | Q | 3.0 | helical II |
| 339 | — | G | 2.6 | helical II |
| 341 | — | H | 2.9 | helical II |
| 341 | — | A | 2.0 | helical II |
| 342 | V | D | 2.7 | helical II |
| 342 | — | T | 2.3 | helical II |
| 342 | V | — | 3.0 | helical II |
| 342 | — | F | 2.5 | helical II |
| 343 | — | D | 3.3 | helical II |
| 343 | D | — | 2.0 | helical II |
| 344 | W | — | 3.1 | helical II |
| 344 | W | T | 2.8 | helical II |
| 344 | W | H | 2.8 | helical II |
| 344 | — | P | 3.0 | helical II |
| 344 | — | G | 2.6 | helical II |
| 345 | — | R | 3.2 | helical II |
| 345 | W | P | 3.1 | helical II |
| 345 | W | D | 2.3 | helical II |
| 345 | — | D | 2.9 | helical II |
| 345 | W | L | 2.3 | helical II |
| 346 | — | P | 2.4 | helical II |
| 346 | — | D | 2.9 | helical II |
| 347 | M | — | 2.6 | helical II |
| 348 | — | T | 3.3 | helical II |
| 350 | N | I | 2.3 | helical II |
| 351 | V | N | 2.8 | helical II |
| 351 | V | H | 3.1 | helical II |
| 352 | K | D | 2.2 | helical II |
| 354 | L | D | 3.1 | helical II |
| 355 | I | S | 2.6 | helical II |
| 357 | E | C | 2.1 | helical II |
| 357 | E | P | 2.8 | helical II |
| 358 | K | T | 2.8 | helical II |
| 359 | K | E | 2.7 | helical II |
| 363 | K | L | 3.3 | helical II |
| 363 | K | Y | 2.2 | helical II |
| 367 | Q | D | 2.8 | helical II |
| 367 | Q | P | 3.0 | helical II |
| 369 | — | S | 2.6 | helical II |
| 369 | LA | — | 2.4 | helical II |
| 373 | K | L | 2.2 | helical II |
| 374 | — | R | 2.0 | helical II |
| 397 | Y | T | 2.5 | helical II |
| 400 | G | M | 2.0 | helical II |
| 402 | L | V | 2.4 | helical II |
| 403 | L | C | 2.3 | helical II |
| 404 | L | D | 2.5 | helical II |
| 404 | L | N | 2.5 | helical II |
| 404 | L | W | 2.3 | helical II |
| 404 | L | Y | 2.1 | helical II |
| 407 | E | F | 2.6 | helical II |
| 407 | E | L | 2.2 | helical II |
| 407 | E | Y | 2.6 | helical II |
| 411 | G | P | 2.6 | helical II |
| 411 | — | E | 3.2 | helical II |
| 413 | — | T | 2.7 | helical II |
| 413 | — | R | 2.4 | helical II |
| 413 | — | W | 3.0 | helical II |
| 413 | — | Y | 3.7 | helical II |
| 414 | — | W | 2.6 | helical II |
| 414 | — | Y | 3.1 | helical II |
| 414 | W | G | 3.0 | helical II |
| 414 | W | R | 2.6 | helical II |
| 416 | K | D | 2.7 | helical II |
| 416 | K | H | 2.0 | helical II |
| 416 | K | P | 2.6 | helical II |
| 416 | K | T | 2.3 | helical II |
| 417 | V | L | 2.6 | helical II |
| 417 | V | A | 2.5 | helical II |
| 418 | Y | C | 2.7 | helical II |
| 419 | D | G | 3.2 | helical II |
| 419 | D | M | 2.4 | helical II |
| 419 | D | P | 2.4 | helical II |
| 425 | I | C | 2.2 | helical II |
| 427 | K | T | 2.4 | helical II |
| 428 | K | R | 2.5 | helical II |
| 430 | E | G | 1.9 | helical II |
| 432 | L | A | 1.9 | helical II |
| 434 | K | H | 2.2 | helical II |
| 436 | I | T | 2.4 | helical II |
| 436 | I | S | 3.0 | helical II |
| 436 | I | Q | 2.7 | helical II |
| 437 | K | D | 3.1 | helical II |
| 442 | R | D | 2.5 | helical II |
| 442 | R | — | 2.7 | helical II |
| 446 | D | E | 2.3 | helical II |
| 446 | — | D | 2.3 | helical II |
| 450 | K | P | 2.3 | helical II |
| 452 | A | R | 2.0 | helical II |
| 453 | L | T | 3.2 | helical II |
| 456 | W | L | 2.2 | helical II |
| 457 | L | C | 2.2 | helical II |
| 459 | A | L | 2.0 | helical II |
| 461 | A | T | 2.7 | helical II |
| 461 | A | K | 2.1 | helical II |
| 465 | I | E | 3.1 | helical II |
| 465 | — | C | 2.9 | helical II |
| 466 | — | S | 3.5 | helical II |
| 466 | — | G | 2.5 | helical II |
| 467 | — | R | 2.4 | helical II |
| 467 | G | P | 2.0 | helical II |
| 468 | L | K | 3.6 | helical II |
| 468 | L | D | 3.2 | helical II |
| 468 | L | S | 3.0 | helical II |
| 468 | L | H | 3.3 | helical II |
| 470 | E | — | 2.4 | helical II |
| 472 | D | R | 2.2 | helical II |
| 472 | — | D | 2.4 | helical II |
| 473 | — | P | 2.6 | helical II |
| 474 | — | D | 2.7 | helical II |
| 475 | EF | — | 2.8 | helical II |
| 475 | — | Q | 2.7 | helical II |
| 476 | F | K | 2.8 | helical II |
| 476 | F | — | 2.2 | helical II |
| 477 | — | G | 2.8 | helical II |
| 479 | C | D | 3.1 | helical II |
| 480 | — | V | 2.2 | helical II |
| 480 | E | D | 2.3 | helical II |
| 481 | — | H | 2.2 | helical II |
| 481 | L | R | 2.9 | helical II |
| 482 | K | R | 2.1 | helical II |
| 483 | L | H | 2.7 | helical II |
| 484 | Q | C | 2.1 | helical II |
| 485 | K | P | 3.0 | helical II |
| 490 | L | S | 2.8 | helical II |
| 498 | E | L | 2.1 | helical II |
| 499 | — | F | 1.6 | helical II |
| 511 | K | T | 6.8 | OBD-II |
| 524 | — | P | 2.4 | OBD-II |
| 553 | — | S | 2.4 | OBD-II |
| 558 | — | R | 1.9 | OBD-II |
| 570 | M | T | 2.7 | OBD-II |
| 582 | I | T | 1.9 | OBD-II |
| 592 | Q | I | 2.1 | OBD-II |
| 592 | Q | F | 2.8 | OBD-II |
| 592 | Q | V | 2.0 | OBD-II |
| 592 | Q | A | 2.9 | OBD-II |
| 641 | — | R | 2.3 | OBD-II |
| 643 | — | D | 2.7 | OBD-II |
| 644 | — | W | 2.5 | OBD-II |
| 645 | — | A | 2.4 | OBD-II |
| 650 | — | I | 2.5 | RuvC-I |
| 651 | — | S | 2.4 | RuvC-I |
| 652 | — | T | 2.4 | RuvC-I |
| 652 | — | N | 2.3 | RuvC-I |
| 653 | — | R | 2.3 | RuvC-I |
| 653 | — | K | 2.2 | RuvC-I |
| 654 | — | H | 2.2 | RuvC-I |
| 654 | — | S | 2.3 | RuvC-I |
| 658 | V | L | 1.9 | RuvC-I |
| 695 | G | W | 1.4 | RuvC-I |
| 695 | G | R | 3.5 | RuvC-I |
| 708 | K | S | 3.0 | RuvC-I |
| 708 | K | T | 2.9 | RuvC-I |
| 708 | K | E | 3.1 | RuvC-I |
| 711 | V | A | 1.6 | RuvC-I |
| 726 | K | E | 2.0 | RuvC-I |
| 729 | N | G | 2.8 | RuvC-I |
| 736 | R | H | 2.7 | RuvC-I |
| 736 | R | G | 2.4 | RuvC-I |
| 771 | M | S | 3.7 | RuvC-I |
| 771 | M | A | 3.3 | RuvC-I |
| 792 | L | F | 2.5 | RuvC-I |
| 868 | V | D | 1.9 | TSL |
| 877 | — | A | 2.0 | TSL |
| 886 | T | E | 1.8 | TSL |
| 886 | T | D | 2.5 | TSL |
| 886 | T | N | 1.6 | TSL |
| 888 | G | D | 2.5 | TSL |
| 890 | S | — | 3.0 | TSL |
| 891 | G | — | 2.7 | TSL |
| 892 | — | E | 2.0 | TSL |
| 892 | — | N | 2.9 | TSL |
| 895 | S | I | 1.7 | TSL |
| 908 | E | D | 1.7 | TSL |
| 932 | S | M | 2.5 | RuvC-II |
| 932 | S | V | 2.6 | RuvC-II |
| 944 | — | L | 1.4 | RuvC-II |
| 947 | — | G | 1.9 | RuvC-II |
| 949 | T | — | 1.9 | RuvC-II |
| 951 | G | I | 3.7 | RuvC-II |

TABLE 32
Mutations to CasX 515 (SEQ ID NO: 145) systematically identified from all datasets
to improve spacer specificity

| | | | Maximum observed log₂ | |
|---|---|---|---|---|
| Position | Reference | Alternate | enrichment in counter-selections | Domain |
| 6 | I | L | 2.25 | OBD-I |
| 48 | — | P | 2 | OBD-I |
| 87 | — | G | 3.96 | helical I-I |
| 90 | K | V | 4.84 | helical I-I |
| 155 | F | V | 2.13 | NTSB |
| 215 | — | T | 2.03 | helical I-II |
| 216 | — | C | 3.03 | helical I-II |
| 220 | Y | F | 2.1 | helical I-II |
| 264 | S | H | 3.16 | helical I-II |
| 329 | — | Q | 2.71 | helical I-II |
| 343 | D | S | 2.69 | helical II |
| 346 | DM | — | 2.96 | helical II |
| 349 | — | P | 2.06 | helical II |
| 357 | — | G | 2.11 | helical II |
| 375 | QE | — | 2.34 | helical II |
| 378 | L | N | 2.38 | helical II |
| 389 | K | Q | 2.29 | helical II |
| 417 | — | L | 2.75 | helical II |
| 441 | E | L | 2.36 | helical II |
| 458 | R | D | 2.2 | helical II |
| 459 | A | E | 2.65 | helical II |
| 476 | FC | — | 2.34 | helical II |
| 503 | IL | — | 2.15 | OBD-II |
| 537 | K | G | 2.85 | OBD-II |
| 621 | L | T | 2.45 | OBD-II |
| 624 | — | A | 3 | OBD-II |
| 783 | L | Y | 2.08 | RuvC-I |
| 783 | — | P | 2.6 | RuvC-I |
| 787 | L | — | 2.49 | RuvC-I |
| 787 | L | R | 3.58 | RuvC-I |
| 787 | L | D | 5.58 | RuvC-I |
| 788 | — | Q | 2.65 | RuvC-I |
| 789 | — | R | 2.5 | RuvC-I |
| 789 | — | N | 2.71 | RuvC-I |
| 790 | E | N | 2.45 | RuvC-I |
| 792 | — | P | 2.85 | RuvC-I |
| 793 | P | A | 2.93 | RuvC-I |
| 795 | K | Q | 2.45 | RuvC-I |
| 796 | T | V | 2.75 | RuvC-I |
| 798 | — | R | 4.07 | RuvC-I |
| 799 | — | H | 2.79 | RuvC-I |
| 801 | T | Q | 3.16 | RuvC-I |
| 801 | — | H | 3.34 | RuvC-I |
| 801 | — | R | 2.86 | RuvC-I |
| 802 | — | L | 2.88 | RuvC-I |
| 802 | L | — | 2.87 | RuvC-I |
| 802 | — | W | 3.08 | RuvC-I |
| 803 | — | A | 3.19 | RuvC-I |
| 803 | — | F | 3.14 | RuvC-I |
| 803 | A | S | 5.79 | RuvC-I |
| 804 | Q | K | 3.05 | RuvC-I |
| 805 | Y | — | 3.29 | RuvC-I |
| 806 | T | Y | 3.07 | RuvC-I |
| 806 | T | F | 2.49 | RuvC-I |
| 807 | — | I | 3.21 | RuvC-I |
| 807 | S | P | 2.61 | RuvC-I |
| 809 | T | P | 3.2 | RuvC-I |
| 809 | — | N | 3.1 | RuvC-I |
| 810 | C | K | 3.19 | RuvC-I |
| 810 | C | M | 3.08 | RuvC-I |
| 811 | — | M | 2.51 | TSL |
| 812 | N | — | 3.07 | TSL |
| 812 | — | V | 2.68 | TSL |
| 813 | C | S | 2.3 | TSL |
| 814 | — | G | 3.15 | TSL |
| 814 | — | W | 3.04 | TSL |
| 815 | F | P | 3.09 | TSL |
| 817 | — | W | 2.87 | TSL |
| 828 | K | G | 1.99 | TSL |
| 906 | V | C | 2.01 | TSL |

TABLE 33
Mutations to CasX 515 (SEQ ID NO: 145) systematically identified from all datasets
to improve cleavage activity at TTC PAM sequences

| | | | Maximum observed log₂ | |
|---|---|---|---|---|
| | | | enrichment in Ccdb | |
| Position | Reference | Alternate | selections | Domain |
| 4 | K | W | 3.51 | OBD-I |
| 5 | R | P | 4.01 | OBD-I |
| 27 | — | P | 4.69 | OBD-I |
| 28 | M | P | 3.69 | OBD-I |
| 56 | Q | P | 3.78 | OBD-I |
| 85 | W | A | 3.96 | helical I-I |
| 102 | — | G | 4.75 | NTSB |
| 104 | — | I | 4.43 | NTSB |
| 104 | — | L | 4.52 | NTSB |
| 130 | S | — | 4.02 | NTSB |
| 151 | Y | T | 3.46 | NTSB |
| 168 | L | D | 3.32 | NTSB |
| 168 | L | E | 4.08 | NTSB |
| 188 | K | Q | 4.96 | NTSB |
| 190 | G | Q | 4.1 | NTSB |
| 223 | G | — | 1.63 | helical I-II |
| 235 | G | L | 4.64 | helical I-II |
| 235 | G | H | 4.97 | helical I-II |
| 239 | S | H | 3.93 | helical I-II |
| 239 | S | T | 4.97 | helical I-II |
| 245 | Q | H | 5 | helical I-II |
| 288 | K | D | 5.08 | helical I-II |
| 288 | K | E | 4.79 | helical I-II |
| 303 | M | R | 3.71 | helical I-II |
| 303 | M | K | 3.29 | helical I-II |
| 307 | L | K | 3.55 | helical I-II |
| 328 | G | R | 3.91 | helical I-II |
| 328 | G | K | 4.58 | helical I-II |
| 334 | — | H | 5.65 | helical II |
| 335 | — | D | 5.5 | helical II |
| 335 | V | P | 5.1 | helical II |
| 345 | — | Q | 5.22 | helical II |
| 441 | — | K | 5.07 | helical II |
| 477 | C | R | 2.94 | helical II |
| 477 | C | K | 3.49 | helical II |
| 502 | S | — | 4.04 | OBD-II |
| 503 | I | R | 3.72 | OBD-II |
| 503 | I | K | Not detected | OBD-II |
| 504 | L | — | 4.24 | OBD-II |
| 542 | R | E | 4.54 | OBD-II |
| 563 | K | — | 3.25 | OBD-II |
| 593 | — | A | 1.83 | OBD-II |
| 610 | K | Q | 3.46 | OBD-II |
| 615 | R | Q | 3.67 | OBD-II |
| 643 | — | A | 2.42 | OBD-II |
| 697 | S | R | 2.67 | RuvC-I |
| 697 | S | K | 2.55 | RuvC-I |
| 906 | V | T | 4.65 | TSL |

The application's sequence listing, which the Patent Office published only in electronic form, follows.

SEQUENCE LISTING (41847 sequences)

SEQ ID NO: 1 - protein, 986 aa, Unknown
  Deltaproteobacteria sp.
MEKRINKIRKKLSADNATKPVSRSGPMKTLLVRVMTDDLKKRLEKRRKKPEVMPQVISNNAANNLRMLLDDYTKMKEAILQVYWQEFKDDHVGLMCKFAQPASKKIDQNKLKPEMDEKGNLTTAGFACSQCGQPLFVYKLEQVSEKGKAYTNYFGRCNVAEHEKLILLAQLKPEKDSDEAVTYSLGKFGQRALDFYSIHVTKESTHPVKPLAQIAGNRYASGPVGKALSDACMGTIASFLSKYQDIIIEHQKVVKGNQKRLESLRELAGKENLEYPSVTLPPQPHTKEGVDAYNEVIARVRMWVNLNLWQKLKLSRDDAKPLLRLKGFPSFPVVERRENEVDWWNTINEVKKLIDAKRDMGRVFWSGVTAEKRNTILEGYNYLPNENDHKKREGSLENPKKPAKRQFGDLLLYLEKKYAGDWGKVFDEAWERIDKKIAGLTSHIEREEARNAEDAQSKAVLTDWLRAKASFVLERLKEMDEKEFYACEIQLQKWYGDLRGNPFAVEAENRVVDISGFSIGSDGHSIQYRNLLAWKYLENGKREFYLLMNYGKKGRIRFTDGTDIKKSGKWQGLLYGGGKAKVIDLTFDPDDEQLIILPLAFGTRQGREFIWNDLLSLETGLIKLANGRVIEKTIYNKKIGRDEPALFVALTFERREVVDPSNIKPVNLIGVDRGENIPAVIALTDPEGCPLPEFKDSSGGPTDILRIGEGYKEKQRAIQAAKEVEQRRAGGYSRKFASKSRNLADDMVRNSARDLFYHAVTHDAVLVFENLSRGFGRQGKRTFMTERQYTKMEDWLTAKLAYEGLTSKTYLSKTLAQYTSKTCSNCGFTITTADYDGMLVRLKKTSDGWATTLNNKELKAEGQITYYNRYKRQTVEKELSAELDRLSEESGNNDISKWTKGRRDEALFLLKKRFSHRPVQEQFVCLDCGHEVHADEQAALNIARSWLFLNSNSTEFKSYKSGKQPFVGAWQAFYKRRLKEVWKPNA

SEQ ID NO: 2 - protein, 978 aa, Unknown
  Planctomycetes sp.
MQEIKRINKIRRRLVKDSNTKKAGKTGPMKTLLVRVMTPDLRERLENLRKKPENIPQPISNTSRANLNKLLTDYTEMKKAILHVYWEEFQKDPVGLMSRVAQPAPKNIDQRKLIPVKDGNERLTSSGFACSQCCQPLYVYKLEQVNDKGKPHTNYFGRCNVSEHERLILLSPHKPEANDELVTYSLGKFGQRALDFYSIHVTRESNHPVKPLEQIGGNSCASGPVGKALSDACMGAVASFLTKYQDIILEHQKVIKKNEKRLANLKDIASANGLAFPKITLPPQPHTKEGIEAYNNVVAQIVIWVNLNLWQKLKIGRDEAKPLQRLKGFPSFPLVERQANEVDWWDMVCNVKKLINEKKEDGKVFWQNLAGYKRQEALLPYLSSEEDRKKGKKFARYQFGDLLLHLEKKHGEDWGKVYDEAWERIDKKVEGLSKHIKLEEERRSEDAQSKAALTDWLRAKASFVIEGLKEADKDEFCRCELKLQKWYGDLRGKPFAIEAENSILDISGFSKQYNCAFIWQKDGVKKLNLYLIINYFKGGKLRFKKIKPEAFEANRFYTVINKKSGEIVPMEVNFNFDDPNLIILPLAFGKRQGREFIWNDLLSLETGSLKLANGRVIEKTLYNRRTRQDEPALFVALTFERREVLDSSNIKPMNLIGIDRGENIPAVIALTDPEGCPLSRFKDSLGNPTHILRIGESYKEKQRTIQAAKEVEQRRAGGYSRKYASKAKNLADDMVRNTARDLLYYAVTQDAMLIFENLSRGFGRQGKRTFMAERQYTRMEDWLTAKLAYEGLPSKTYLSKTLAQYTSKTCSNCGFTITSADYDRVLEKLKKTATGWMTTINGKELKVEGQITYYNRYKRQNVVKDLSVELDRLSEESVNNDISSWTKGRSGEALSLLKKRFSHRPVQEKFVCLNCGFETHADEQAALNIARSWLFLRSQEYKKYQTNKTTGNTDKRAFVETWQSFYRKKLKEVWKPAV

SEQ ID NO: 3 - protein, 855 aa, Unknown
  Candidatus Sungbacteria sp.
MDNANKPSTKSLVNTTRISDHFGVTPGQVTRVFSFGIIPTKRQYAIIERWFAAVEAARERLYGMLYAHFQENPPAYLKEKFSYETFFKGRPVLNGLRDIDPTIMTSAVFTALRHKAEGAMAAFHTNHRRLFEEARKKMREYAECLKANEALLRGAADIDWDKIVNALRTRLNTCLAPEYDAVIADFGALCAFRALIAETNALKGAYNHALNQMLPALVKVDEPEEAEESPRLRFFNGRINDLPKFPVAERETPPDTETIIRQLEDMARVIPDTAEILGYIHRIRHKAARRKPGSAVPLPQRVALYCAIRMERNPEEDPSTVAGHFLGEIDRVCEKRRQGLVRTPFDSQIRARYMDIISFRATLAHPDRWTEIQFLRSNAASRRVRAETISAPFEGFSWTSNRTNPAPQYGMALAKDANAPADAPELCICLSPSSAAFSVREKGGDLIYMRPTGGRRGKDNPGKEITWVPGSFDEYPASGVALKLRLYFGRSQARRMLTNKTWGLLSDNPRVFAANAELVGKKRNPQDRWKLFFHMVISGPPPVEYLDFSSDVRSRARTVIGINRGEVNPLAYAVVSVEDGQVLEEGLLGKKEYIDQLIETRRRISEYQSREQTPPRDLRQRVRHLQDTVLGSARAKIHSLIAFWKGILAIERLDDQFHGREQKIIPKKTYLANKTGFMNALSFSGAVRVDKKGNPWGGMIEIYPGGISRTCTQCGTVWLARRPKNPGHRDAMVVIPDIVDDAAATGFDNVDCDAGTVDYGELFTLSREWVRLTPRYSRVMRGTLGDLERAIRQGDDRKSRQMLELALEPQPQWGQFFCHRCGFNGQSDVLAATNLARRAISLIRRLPDTDTPPTP

SEQ ID NO: 4 - RNA, 108 nt, Artificial Sequence
  gRNA sequence
acaucuggcgcguuuauuccauuacuuuggagccagucccagcgacuaugucguauggacgaagcgcuuauuuaucggagagaaaccgauaaguaaaacgcaucaaag

SEQ ID NO: 5 - RNA, 108 nt, Artificial Sequence
  gRNA sequence
uacuggcgcuuuuaucucauuacuuugagagccaucaccagcgacuaugucguauggguaaagcgcuuauuuaucggagagaaauccgauaaauaagaagcaucaaag

SEQ ID NO: 6 - RNA, 81 nt, Artificial Sequence
  gRNA sequence
acaucuggcgcguuuauuccauuacuuuggagccagucccagcgacuaugucguauggacgaagcgcuuauuuaucggaga

SEQ ID NO: 7 - RNA, 78 nt, Artificial Sequence
  gRNA sequence
acaucuggcgcguuuauuccauuacuuuggagccagucccagcgacuaugucguauggacgaagcgcuuauuuaucgg

SEQ ID NO: 8 - RNA, 80 nt, Artificial Sequence
  gRNA sequence
uacuggcgcuuuuaucucauuacuuugagagccaucaccagcgacuaugucguauggguaaagcgcuuauuuaucggaga

SEQ ID NO: 9 - RNA, 77 nt, Artificial Sequence
  gRNA sequence
uacuggcgcuuuuaucucauuacuuugagagccaucaccagcgacuaugucguauggguaaagcgcuuauuuaucgg

SEQ ID NO: 10 - RNA, 25 nt, Artificial Sequence
  gRNA sequence
guuuacacacucccucucauagggu

SEQ ID NO: 11 - RNA, 25 nt, Artificial Sequence
  gRNA sequence
guuuacacacucccucucaugaggu

SEQ ID NO: 12 - RNA, 25 nt, Artificial Sequence
  gRNA sequence
uuuuacauacccccucucaugggau

SEQ ID NO: 13 - RNA, 25 nt, Artificial Sequence
  gRNA sequence
guuuacacacucccucucauggggg

SEQ ID NO: 14 - RNA, 20 nt, Artificial Sequence
  gRNA sequence
ccagcgacuaugucguaugg

SEQ ID NO: 15 - RNA, 39 nt, Artificial Sequence
  gRNA sequence
gcgcuuauuuaucggagagaaauccgauaaauaagaagc

SEQ ID NO: 16 - RNA, 74 nt, Artificial Sequence
  gRNA sequence
ggcgcuuuuaucucauuacuuugagagccaucaccagcgacuaugucguauggguaaagcgcuuauuuaucgga

SEQ ID NO: 17 - DNA, 20 bp, Artificial Sequence
  E6 primer sequence
tgtggtcggggtagcggctg

SEQ ID NO: 18 - DNA, 20 bp, Artificial Sequence
  E7 primer sequence
tcaagtccgccatgcccgaa

SEQ ID NO: 19 - RNA, 21 nt, Artificial Sequence
  stem loop sequence
  misc_feature (4)..(18): n is any ribonucleotide
  misc_feature (8)..(18): individual ribonucleotides may be absent
uuunnnnnnnnnnnnnnnuuu

SEQ ID NO: 20 - RNA, 20 nt, Artificial Sequence
  scaffold stem loop
ccagcgacuaugucguaugg

SEQ ID NO: 21 - RNA, 39 nt, Artificial Sequence; identical to SEQ ID NO: 15
  sgRNA extended stem loop

SEQ ID NO: 22 - RNA, 81 nt, Unknown; identical to SEQ ID NO: 6
  Deltaproteobacteria spp.

SEQ ID NO: 23 - RNA, 78 nt, Unknown; identical to SEQ ID NO: 7
  Deltaproteobacteria spp.

SEQ ID NO: 24 - RNA, 23 nt, Unknown
  Deltaproteobacteria spp.
ccgauaaguaaaacgcaucaaag

SEQ ID NO: 25 - RNA, 80 nt, Unknown; identical to SEQ ID NO: 8
  Planctomycetes spp.

SEQ ID NO: 26 - RNA, 77 nt, Unknown; identical to SEQ ID NO: 9
  Planctomycetes spp.

SEQ ID NO: 27 - RNA, 26 nt, Unknown
  Planctomycetes spp.
ucuccgauaaauaagaagcaucaaag

SEQ ID NO: 28 - RNA, 25 nt, Unknown
  Candidatus Sungbacteria sp.
guuuacacacucccucucauagggu

SEQ ID NO: 29 - RNA, 25 nt, Unknown
  Candidatus Sungbacteria sp.
guuuacacacucccucucaugaggu

SEQ ID NO: 30 - RNA, 25 nt, Unknown
  Candidatus Sungbacteria sp.
uuuuacauacccccucucaugggau

SEQ ID NO: 31 - RNA, 25 nt, Unknown
  Candidatus Sungbacteria sp.
guuuacacacucccucucauggggg

SEQ ID NO: 32 - RNA, 21 nt, Artificial Sequence
  scaffold stem loop
ccagcgacuaugucguagugg

SEQ ID NO: 33 - protein, 3142 aa, Homo sapiens
MATLEKLMKAFESLKSFQQQQQQQQQQQQQQQQQQQQQPPPPPPPPPPPQLPQPPPQAQPLLPQPQPPPPPPPPPPGPAVAEEPLHRPKKELSATKKDRVNHCLTICENIVAQSVRNSPEFQKLLGIAMELFLLCSDDAESDVRMVADECLNKVIKALMDSNLPRLQLELYKEIKKNGAPRSLRAALWRFAELAHLVRPQKCRPYLVNLLPCLTRTSKRPEESVQETLAAAVPKIMASFGNFANDNEIKVLLKAFIANLKSSSPTIRRTAAGSAVSICQHSRRTQYFYSWLLNVLLGLLVPVEDEHSTLLILGVLLTLRYLVPLLQQQVKDTSLKGSFGVTRKEMEVSPSAEQLVQVYELTLHHTQHQDHNVVTGALELLQQLFRTPPPELLQTLTAVGGIGQLTAAKEESGGRSRSGSIVELIAGGGSSCSPVLSRKQKGKVLLGEEEALEDDSESRSDVSSSALTASVKDEISGELAASSGVSTPGSAGHDIITEQPRSQHTLQADSVDLASCDLTSSATDGDEEDILSHSSSQVSAVPSDPAMDLNDGTQASSPISDSSQTTTEGPDSAVTPSDSSEIVLDGTDNQYLGLQIGQPQDEDEEATGILPDEASEAFRNSSMALQQAHLLKNMSHCRQPSDSSVDKFVLRDEATEPGDQENKPCRIKGDIGQSTDDDSAPLVHCVRLLSASFLLTGGKNVLVPDRDVRVSVKALALSCVGAAVALHPESFFSKLYKVPLDTTEYPEEQYVSDILNYIDHGDPQVRGATAILCGTLICSILSRSRFHVGDWMGTIRTLTGNTFSLADCIPLLRKTLKDESSVTCKLACTAVRNCVMSLCSSSYSELGLQLIIDVLTLRNSSYWLVRTELLETLAEIDFRLVSFLEAKAENLHRGAHHYTGLLKLQERVLNNVVIHLLGDEDPRVRHVAAASLIRLVPKLFYKCDQGQADPVVAVARDQSSVYLKLLMHETQPPSHFSVSTITRIYRGYNLLPSITDVTMENNLSRVIAAVSHELITSTTRALTFGCCEALCLLSTAFPVCIWSLGWHCGVPPLSASDESRKSCTVGMATMILTLLSSAWFPLDLSAHQDALILAGNLLAASAPKSLRSSWASEEEANPAATKQEEVWPALGDRALVPMVEQLFSHLLKVINICAHVLDDVAPGPAIKAALPSLTNPPSLSPIRRKGKEKEPGEQASVPLSPKKGSEASAASRQSDTSGPVTTSKSSSLGSFYHLPSYLKLHDVLKATHANYKVTLDLQNSTEKFGGFLRSALDVLSQILELATLQDIGKCVEEILGYLKSCFSREPMMATVCVQQLLKTLFGTNLASQFDGLSSNPSKSQGRAQRLGSSSVRPGLYHYCFMAPYTHFTQALADASLRNMVQAEQENDTSGWFDVLQKVSTQLKTNLTSVTKNRADKNAIHNHIRLFEPLVIKALKQYTTTTCVQLQKQVLDLLAQLVQLRVNYCLLDSDQVFIGFVLKQFEYIEVGQFRESEAIIPNIFFFLVLLSYERYHSKQIIGIPKIIQLCDGIMASGRKAVTHAIPALQPIVHDLFVLRGTNKADAGKELETQKEVVVSMLLRLIQYHQVLEMFILVLQQCHKENEDKWKRLSRQIADIILPMLAKQQMHIDSHEALGVLNTLFEILAPSSLRPVDMLLRSMFVTPNTMASVSTVQLWISGILAILRVLISQSTEDIVLSRIQELSFSPYLISCTVINRLRDGDSTSTLEEHSEGKQIKNLPEETFSRFLLQLVGILLEDIVTKQLKVEMSEQQHTFYCQELGTLLMCLIHIFKSGMFRRITAAATRLFRSDGCGGSFYTLDSLNLRARSMITTHPALVLLWCQILLLVNHTDYRWWAEVQQTPKRHSLSSTKLLSPQMSGEEEDSDLAAKLGMCNREIVRRGALILFCDYVCQNLHDSEHLTWLIVNHIQDLISLSHEPPVQDFISAVHRNSAASGLFIQAIQSRCENLSTPTMLKKTLQCLEGIHLSQSGAVLTLYVDRLLCTPFRVLARMVDILACRRVEMLLAANLQSSMAQLPMEELNRIQEYLQSSGLAQRHQRLYSLLDRFRLSTMQDSLSPSPPVSSHPLDGDGHVSLETVSPDKDWYVHLVKSQCWTRSDSALLEGAELVNRIPAEDMNAFMMNSEFNLSLLAPCLSLGMSEISGGQKSALFEAAREVTLARVSGTVQQLPAVHHVFQPELPAEPAAYWSKLNDLFGDAALYQSLPTLARALAQYLVVVSKLPSHLHLPPEKEKDIVKFVVATLEALSWHLIHEQIPLSLDLQAGLDCCCLALQLPGLWSVVSSTEFVTHACSLIYCVHFILEAVAVQPGEQLLSPERRTNTPKAISEEEEEVDPNTQNPKYITAACEMVAEMVESLQSVLALGHKRNSGVPAFLTPLLRNIIISLARLPLVNSYTRVPPLVWKLGWSPKPGGDFGTAFPEIPVEFLQEKEVFKEFIYRINTLGWTSRTQFEETWATLLGVLVTQPLVMEQEESPPEEDTERTQINVLAVQAITSLVLSAMTVPVAGNPAVSCLEQQPRNKPLKALDTRFGRKLSIIRGIVEQEIQAMVSKRENIATHHLYQAWDPVPSLSPATTGALISHEKLLLQINPERELGSMSYKLGQVSIHSVWLGNSITPLREEEWDEEEEEEADAPAPSSPPTSPVNSRKHRAGVDIHSCSQFLLELYSRWILPSSSARRTPAILISEVVRSLLVVSDLFTERNQFELMYVTLTELRRVHPSEDEILAQYLVPATCKAAAVLGMDKAVAEPVSRLLESTLRSSHLPSRVGALHGVLYVLECDLLDDTAKQLIPVISDYLLSNLKGIAHCVNIHSQQHVLVMCATAFYLIENYPLDVGPEFSASIIQMCGVMLSGSEESTPSIIYHCALRGLERLLLSEQLSRLDAESLVKLSVDRVNVHSPHRAMAALGLMLTCMYTGKEKVSPGRTSDPNPAAPDSESVIVAMERVSVLFDRIRKGFPCEARVVARILPQFLDDFFPPQDIMNKVIGEFLSNQQPYPQFMATVVYKVFQTLHSTGQSSMVRDWVMLSLSNFTQRAPVAMATWSLSCFFVSASTSPWVAAILPHVISRMGKLEQVDVNLFCLVATDFYRHQIEEELDRRAFQSVLEVVAAPGSPYHRLLTCLRNVHKVTTC

SEQ ID NO: 34 - RNA, 31 nt, Artificial Sequence
  tracrRNA stem loop
  misc_feature (4)..(28): n is any ribonucleotide
  misc_feature (8)..(28): individual ribonucleotides may be absent
uuunnnnnnnnnnnnnnnnnnnnnnnnnuuu

SEQ ID NO: 35 - RNA, 19 nt, Artificial Sequence
  MS2 stem loop
acaugaggaucacccaugu

SEQ ID NO: 36 - RNA, 18 nt, Artificial Sequence
  Qbeta stem loop
ugcaugucuaagacagca

SEQ ID NO: 37 - RNA, 20 nt, Artificial Sequence
  U1 hairpin II stem loop
aauccauugcacuccggauu

SEQ ID NO: 38 - RNA, 12 nt, Artificial Sequence
  Uvsx stem loop
ccucuucggagg

SEQ ID NO: 39 - RNA, 21 nt, Artificial Sequence
  PP7 stem loop
aggaguuucuauggaaacccu

SEQ ID NO: 40 - RNA, 30 nt, Artificial Sequence
  phage replication loop
aggugggacgaccucucggucguccuaucu

SEQ ID NO: 41 - RNA, 19 nt, Artificial Sequence
  kissing loop a
ugcucgcuccguucgagca

SEQ ID NO: 42 - RNA, 21 nt, Artificial Sequence
  kissing loop b1
ugcucgacgcguccucgagca

SEQ ID NO: 43 - RNA, 22 nt, Artificial Sequence
  kissing loop b2
ugcucguuugcggcuacgagca

SEQ ID NO: 44 - RNA, 17 nt, Artificial Sequence
  G quadriplex M3q
agggagggagggagagg

SEQ ID NO: 45 - RNA, 19 nt, Artificial Sequence
  G quadriplex telomere basket
gguuaggguuaggguuagg

SEQ ID NO: 46 - RNA, 25 nt, Artificial Sequence
  Sarcin-ricin loop
cugcucaguacgagaggaaccgcag

SEQ ID NO: 47 - RNA, 78 nt, Artificial Sequence
  pseudoknots
uacacugggaucgcugaauuagagaucggcguccuuucauucuauauacuuuggaguuuuaaaaugucucuaaguaca

SEQ ID NO: 48 - protein, 4 aa, Artificial Sequence
  CXXC zing finger/ribbon domain
  SITE (2)..(3): Xaa is any amino acid
CXXC

SEQ ID NO: 49 - protein, 978 aa, Artificial Sequence
  CasX variant
MQEIKRINKIRRRLVKDSNTKKAGKTGPMKTLLVRVMTPDLRERLENLRKKPENIPQPISNTSRANLNKLLTDYTEMKKAILHVYWEEFQKDPVGLMSRVAQPASKKIDQNKLKPEMDEKGNLTTAGFACSQCGQPLFVYKLEQVSEKGKAYTNYFGRCNVAEHEKLILLAQLKPEKDSDEAVTYSLGKFGQRALDFYSIHVTRESNHPVKPLEQIGGNSCASGPVGKALSDACMGAVASFLTKYQDIILEHQKVIKKNEKRLANLKDIASANGLAFPKITLPPQPHTKEGIEAYNNVVAQIVIWVNLNLWQKLKIGRDEAKPLQRLKGFPSFPLVERQANEVDWWDMVCNVKKLINEKKEDGKVFWQNLAGYKRQEALRPYLSSEEDRKKGKKFARYQFGDLLLHLEKKHGEDWGKVYDEAWERIDKKVEGLSKHIKLEEERRSEDAQSKAALTDWLRAKASFVIEGLKEADKDEFCRCELKLQKWYGDLRGKPFAIEAENSILDISGFSKQYNCAFIWQKDGVKKLNLYLIINYFKGGKLRFKKIKPEAFEANRFYTVINKKSGEIVPMEVNFNFDDPNLIILPLAFGKRQGREFIWNDLLSLETGSLKLANGRVIEKTLYNRRTRQDEPALFVALTFERREVLDSSNIKPMNLIGIDRGENIPAVIALTDPEGCPLSRFKDSLGNPTHILRIGESYKEKQRTIQAKKEVEQRRAGGYSRKYASKAKNLADDMVRNTARDLLYYAVTQDAMLIFENLSRGFGRQGKRTFMAERQYTRMEDWLTAKLAYEGLSKTYLSKTLAQYTSKTCSNCGFTITSADYDRVLEKLKKTATGWMTTINGKELKVEGQITYYNRYKRQNVVKDLSVELDRLSEESVNNDISSWTKGRSGEALSLLKKRFSHRPVQEKFVCLNCGFETHADEQAALNIARSWLFLRSQEYKKYQTNKTTGNTDKRAFVETWQSFYRKKLKEVWKPAV

SEQ ID NO: 50 - protein, 977 aa, Artificial Sequence
  CasX variant
MQEIKRINKIRRRLVKDSNTKKAGKTGPMKTLLVRVMTPDLRERLENLRKKPENIPQPISNTSRANLNKLLTDYTEMKKAILHVYWEEFQKDPVGLMSRVAQPAPKNIDQRKLIPVKDGNERLTSSGFACSQCCQPLYVYKLEQVNDKGKPHTNYFGRCNVSEHERLILLSPHKPEANDELVTYSLGKFGQRALDFYSIHVTRESNHPVKPLEQIGGNSCASGPVGKALSDACMGAVASFLTKYQDIILEHQKVIKKNEKRLANLKDIASANGLAFPKITLPPQPHTKEGIEAYNNVVAQIVIWVNLNLWQKLKIGRDEAKPLQRLKGFPSFPLVERQANEVDWWDMVCNVKKLINEKKEDGKVFWQNLAGYKRQEALRPYLSSEEDRKKGKKFARYQFGDLLLHLEKKHGEDWGKVYDEAWERIDKKVEGLSKHIKLEEERRSEDAQSKAALTDWLRAKASFVIEGLKEADKDEFCRCELKLQKWYGDLRGKPFAIEAENSILDISGFSKQYNCAFIWQKDGVKKLNLYLIINYFKGGKLRFKKIKPEAFEANRFYTVINKKSGEIVPMEVNFNFDDPNLIILPLAFGKRQGREFIWNDLLSLETGSLKLANGRVIEKTLYNRRTRQDEPALFVALTFERREVLDSSNIKPMNLIGIDRGENIPAVIALTDPEGCPLSRFKDSLGNPTHILRIGESYKEKQRTIQAKKEVEQRRAGGYSRKYASKAKNLADDMVRNTARDLLYYAVTQDAMLIFENLSRGFGRQGKRTFMAERQYTRMEDWLTAKLAYEGLSKTYLSKTLAQYTSKTCSNCGFTITTADYDGMLVRLKKTSDGWATTLNNKELKAEGQITYYNRYKRQTVEKELSAELDRLSEESGNNDISKWTKGRRDEALFLLKKRFSHRPVQEQFVCLDCGHEVHADEQAALNIARSWLFLRSQEYKKYQTNKTTGNTDKRAFVETWQSFYRKKLKEVWKPAV

SEQ ID NO: 51 - protein, 985 aa, Artificial Sequence
  CasX variant
MEKRINKIRKKLSADNATKPVSRSGPMKTLLVRVMTDDLKKRLEKRRKKPEVMPQVISNNAANNLRMLLDDYTKMKEAILQVYWQEFKDDHVGLMCKFAQPAPKNIDQRKLIPVKDGNERLTSSGFACSQCCQPLYVYKLEQVNDKGKPHTNYFGRCNVSEHERLILLSPHKPEANDELVTYSLGKFGQRALDFYSIHVTKESTHPVKPLAQIAGNRYASGPVGKALSDACMGTIASFLSKYQDIIIEHQKVVKGNQKRLESLRELAGKENLEYPSVTLPPQPHTKEGVDAYNEVIARVRMWVNLNLWQKLKLSRDDAKPLLRLKGFPSFPVVERRENEVDWWNTINEVKKLIDAKRDMGRVFWSGVTAEKRNTILEGYNYLPNENDHKKREGSLENPKKPAKRQFGDLLLYLEKKYAGDWGKVFDEAWERIDKKIAGLTSHIEREEARNAEDAQSKAVLTDWLRAKASFVLERLKEMDEKEFYACEIQLQKWYGDLRGNPFAVEAENRVVDISGFSIGSDGHSIQYRNLLAWKYLENGKREFYLLMNYGKKGRIRFTDGTDIKKSGKWQGLLYGGGKAKVIDLTFDPDDEQLIILPLAFGTRQGREFIWNDLLSLETGLIKLANGRVIEKTIYNKKIGRDEPALFVALTFERREVVDPSNIKPVNLIGVDRGENIPAVIALTDPEGCPLPEFKDSSGGPTDILRIGEGYKEKQRAIQAAKEVEQRRAGGYSRKFASKSRNLADDMVRNSARDLFYHAVTHDAVLVFENLSRGFGRQGKRTFMTERQYTKMEDWLTAKLAYEGLTSKTYLSKTLAQYTSKTCSNCGFTITTADYDGMLVRLKKTSDGWATTLNNKELKAEGQITYYNRYKRQTVEKELSAELDRLSEESGNNDISKWTKGRRDEALFLLKKRFSHRPVQEQFVCLDCGHEVHADEQAALNIARSWLFLNSNSTEFKSYKSGKQPFVGAWQAFYKRRLKEVWKPNA

SEQ ID NO: 52 - protein, 986 aa, Artificial Sequence
  CasX variant
MEKRINKIRKKLSADNATKPVSRSGPMKTLLVRVMTDDLKKRLEKRRKKPEVMPQVISNNAANNLRMLLDDYTKMKEAILQVYWQEFKDDHVGLMCKFAQPASKKIDQNKLKPEMDEKGNLTTAGFACSQCGQPLFVYKLEQVSEKGKAYTNYFGRCNVAEHEKLILLAQLKPEKDSDEAVTYSLGKFGQRALDFYSIHVTKESTHPVKPLAQIAGNRYASGPVGKALSDACMGTIASFLSKYQDIIIEHQKVVKGNQKRLESLRELAGKENLEYPSVTLPPQPHTKEGVDAYNEVIARVRMWVNLNLWQKLKLSRDDAKPLLRLKGFPSFPVVERRENEVDWWNTINEVKKLIDAKRDMGRVFWSGVTAEKRNTILEGYNYLPNENDHKKREGSLENPKKPAKRQFGDLLLYLEKKYAGDWGKVFDEAWERIDKKIAGLTSHIEREEARNAEDAQSKAVLTDWLRAKASFVLERLKEMDEKEFYACEIQLQKWYGDLRGNPFAVEAENRVVDISGFSIGSDGHSIQYRNLLAWKYLENGKREFYLLMNYGKKGRIRFTDGTDIKKSGKWQGLLYGGGKAKVIDLTFDPDDEQLIILPLAFGTRQGREFIWNDLLSLETGLIKLANGRVIEKTIYNKKIGRDEPALFVALTFERREVVDPSNIKPVNLIGVDRGENIPAVIALTDPEGCPLPEFKDSSGGPTDILRIGEGYKEKQRAIQAAKEVEQRRAGGYSRKFASKSRNLADDMVRNSARDLFYHAVTHDAVLVFENLSRGFGRQGKRTFMTERQYTKMEDWLTAKLAYEGLTSKTYLSKTLAQYTSKTCSNCGFTITSADYDRVLEKLKKTATGWMTTINGKELKVEGQITYYNRYKRQNVVKDLSVELDRLSEESVNNDISSWTKGRSGEALSLLKKRFSHRPVQEKFVCLNCGFETHADEQAALNIARSWLFLNSNSTEFKSYKSGKQPFVGAWQAFYKRRLKEVWKPNA

SEQ ID NO: 53 - protein, 921 aa, Artificial Sequence
  CasX variant
MQEIKRINKIRRRLVKDSNTKKAGKTGPMKTLLVRVMTPDLRERLENLRKKPENIPQPISNTSRANLNKLLTDYTEMKKAILHVYWEEFQKDPVGLMSRVAQPAPKNIDQRKLIPVKDGNERLTSSGFACSQCCQPLYVYKLEQVNDKGKPHTNYFGRCNVSEHERLILLSPHKPEANDELVTYSLGKFGQRALDFYSIHVTRESNHPVKPLEQIGGNSCASGPVGKALSDACMGAVASFLTKYQDIILEHQKVIKKNEKRLANLKDIASANGLAFPKITLPPQPHTKEGIEAYNNVVAQIVIWVNLNLWQKLKIGRDEAKPLQRLKGFPSFPLVERQANEVDWWDMVCNVKKLINEKKEDGKVFWQNLAGYKRQEALRPYLSSEEDRKKGKKFARYQFGDLLLHLEKKHGEDWGKVYDEAWERIDKKVEGLSKHIKLEEERRSEDAQSKAALTDWLRAKASFVIEGLKEADKDEFCRCELKLQKWYGDLRGKPFAIEAENSILDISGFSKQYNCAFIWQKDGVKKLNLYLIINYFKGGKLRFKKIKPEAFEANRFYTVINKKSGEIVPMEVNFNFDDPNLIILPLAFGKRQGREFIWNDLLSLETGSLKLANGRVIEKTLYNRRTRQDEPALFVALTFERREVLDSSNIKPVNLIGVDRGENIPAVIALTDPEGCPLPEFKDSSGGPTDILRIGEGYKEKQRAIQAAKEVEQRRAGGYSRKFASKSRNLADDMVRNSARDLFYHAVTHDAVLVFENLSRGFGRQGKRTFMTERQYTKMEDWLTAKLAYEGLTSKTYLSKTLAQYTSKTCSNCGFTITSADYDRVLEKLKKTATGWMTTINGKELKVEGQITYYNRYKRQNVVKDLSVELDRLSEESVNNDISSWTKGRSGEALSLLKKRFSHRPVQEKFVCLNCGFETHA

SEQ ID NO: 54 - protein, 920 aa, Artificial Sequence
  CasX variant
MQEIKRINKIRRRLVKDSNTKKAGKTGPMKTLLVRVMTPDLRERLENLRKKPENIPQPISNTSRANLNKLLTDYTEMKKAILHVYWEEFQKDPVGLMSRVAQPAPKNIDQRKLIPVKDGNERLTSSGFACSQCCQPLYVYKLEQVNDKGKPHTNYFGRCNVSEHERLILLSPHKPEANDELVTYSLGKFGQRALDFYSIHVTRESNHPVKPLEQIGGNSCASGPVGKALSDACMGAVASFLTKYQDIILEHQKVIKKNEKRLANLKDIASANGLAFPKITLPPQPHTKEGIEAYNNVVAQIVIWVNLNLWQKLKIGRDEAKPLQRLKGFPSFPLVERQANEVDWWDMVCNVKKLINEKKEDGKVFWQNLAGYKRQEALRPYLSSEEDRKKGKKFARYQFGDLLLHLEKKHGEDWGKVYDEAWERIDKKVEGLSKHIKLEEERRSEDAQSKAALTDWLRAKASFVIEGLKEADKDEFCRCELKLQKWYGDLRGKPFAIEAENSILDISGFSKQYNCAFIWQKDGVKKLNLYLIINYFKGGKLRFKKIKPEAFEANRFYTVINKKSGEIVPMEVNFNFDDPNLIILPLAFGKRQGREFIWNDLLSLETGSLKLANGRVIEKTLYNRRTRQDEPALFVALTFERREVLDSSNIKPMNLIGIDRGENIPAVIALTDPEGCPLSRFKDSLGNPTHILRIGESYKEKQRTIQAKKEVEQRRAGGYSRKYASKAKNLADDMVRNTARDLLYYAVTQDAMLIFENLSRGFGRQGKRTFMAERQYTRMEDWLTAKLAYEGLSKTYLSKTLAQYTSKTCSNCGFTITSADYDRVLEKLKKTATGWMTTINGKELKVEGQITYYNRYKRQNVVKDLSVELDRLSEESVNNDISSWTKGRSGEALSLLKKRFSHRPVQEKFVCLNCGFETHA

SEQ ID NO: 55 - protein, 977 aa, Artificial Sequence
  CasX variant
MQEIKRINKIRRRLVKDSNTKKAGKTGPMKTLLVRVMTPDLRERLENLRKKPENIPQPISNNAANNLRMLLDDYTKMKEAILQVYWQEFKDDHVGLMCKFAQPAPKNIDQRKLIPVKDGNERLTSSGFACSQCCQPLYVYKLEQVNDKGKPHTNYFGRCNVSEHERLILLSPHKPEANDELVTYSLGKFGQRALDFYSIHVTKESTHPVKPLAQIAGNRYASGPVGKALSDACMGTIASFLSKYQDIIIEHQKVVKGNQKRLESLRELAGKENLEYPSVTLPPQPHTKEGVDAYNEVIARVRMWVNLNLWQKLKLSRDDAKPLLRLKGFPSFPLVERQANEVDWWDMVCNVKKLINEKKEDGKVFWQNLAGYKRQEALRPYLSSEEDRKKGKKFARYQFGDLLLHLEKKHGEDWGKVYDEAWERIDKKVEGLSKHIKLEEERRSEDAQSKAALTDWLRAKASFVIEGLKEADKDEFCRCELKLQKWYGDLRGKPFAIEAENSILDISGFSKQYNCAFIWQKDGVKKLNLYLIINYFKGGKLRFKKIKPEAFEANRFYTVINKKSGEIVPMEVNFNFDDPNLIILPLAFGKRQGREFIWNDLLSLETGSLKLANGRVIEKTLYNRRTRQDEPALFVALTFERREVLDSSNIKPMNLIGIDRGENIPAVIALTDPEGCPLSRFKDSLGNPTHILRIGESYKEKQRTIQAKKEVEQRRAGGYSRKYASKAKNLADDMVRNTARDLLYYAVTQDAMLIFENLSRGFGRQGKRTFMAERQYTRMEDWLTAKLAYEGLSKTYLSKTLAQYTSKTCSNCGFTITSADYDRVLEKLKKTATGWMTTINGKELKVEGQITYYNRYKRQNVVKDLSVELDRLSEESVNNDISSWTKGRSGEALSLLKKRFSHRPVQEKFVCLNCGFETHADEQAALNIARSWLFLRSQEYKKYQTNKTTGNTDKRAFVETWQSFYRKKLKEVWKPAV

SEQ ID NO: 56 - protein, 986 aa, Artificial Sequence
  CasX variant
MQEIKRINKIRRRLVKDSNTKKAGKTGPMKTLLVRVMTPDLRERLENLRKKPENIPQPISNTSRANLNKLLTDYTEMKKAILHVYWEEFQKDPVGLMSRVAQPAPKNIDQRKLIPVKDGNERLTSSGFACSQCCQPLYVYKLEQVNDKGKPHTNYFGRCNVSEHERLILLSPHKPEANDELVTYSLGKFGQRALDFYSIHVTRESNHPVKPLEQIGGNSCASGPVGKALSDACMGAVASFLTKYQDIILEHQKVIKKNEKRLANLKDIASANGLAFPKITLPPQPHTKEGIEAYNNVVAQIVIWVNLNLWQKLKIGRDEAKPLQRLKGFPSFPVVERRENEVDWWNTINEVKKLIDAKRDMGRVFWSGVTAEKRNTILEGYNYLPNENDHKKREGSLENPKKPAKRQFGDLLLYLEKKYAGDWGKVFDEAWERIDKKIAGLTSHIEREEARNAEDAQSKAVLTDWLRAKASFVLERLKEMDEKEFYACEIQLQKWYGDLRGNPFAVEAENSILDISGFSKQYNCAFIWQKDGVKKLNLYLIINYFKGGKLRFKKIKPEAFEANRFYTVINKKSGEIVPMEVNFNFDDPNLIILPLAFGKRQGREFIWNDLLSLETGSLKLANGRVIEKTLYNRRTRQDEPALFVALTFERREVLDSSNIKPMNLIGIDRGENIPAVIALTDPEGCPLSRFKDSLGNPTHILRIGESYKEKQRTIQAKKEVEQRRAGGYSRKYASKAKNLADDMVRNTARDLLYYAVTQDAMLIFENLSRGFGRQGKRTFMAERQYTRMEDWLTAKLAYEGLSKTYLSKTLAQYTSKTCSNCGFTITSADYDRVLEKLKKTATGWMTTINGKELKVEGQITYYNRYKRQNVVKDLSVELDRLSEESVNNDISSWTKGRSGEALSLLKKRFSHRPVQEKFVCLNCGFETHADEQAALNIARSWLFLRSQEYKKYQTNKTTGNTDKRAFVETWQSFYRKKLKEVWKPAV

SEQ ID NO: 57 - protein, 925 aa, Artificial Sequence
  CasX variant
MISNTSRANLNKLLTDYTEMKKAILHVYWEEFQKDPVGLMSRVAQPAPKNIDQRKLIPVKDGNERLTSSGFACSQCCQPLYVYKLEQVNDKGKPHTNYFGRCNVSEHERLILLSPHKPEANDELVTYSLGKFGQRALDFYSIHVTRESNHPVKPLEQIGGNSCASGPVGKALSDACMGAVASFLTKYQDIILEHQKVIKKNEKRLANLKDIASANGLAFPKITLPPQPHTKEGIEAYNNVVAQIVIWVNLNLWQKLKIGRDEAKPLQRLKGFPSFPLVERQANEVDWWDMVCNVKKLINEKKEDGKVFWQNLAGYKRQEALRPYLSSEEDRKKGKKFARYQFGDLLLHLEKKHGEDWGKVYDEAWERIDKKVEGLSKHIKLEEERRSEDAQSKAALTDWLRAKASFVIEGLKEADKDEFCRCELKLQKWYGDLRGKPFAIEAENRVVDISGFSIGSDGHSIQYRNLLAWKYLENGKREFYLLMNYGKKGRIRFTDGTDIKKSGKWQGLLYGGGKAKVIDLTFDPDDEQLIILPLAFGTRQGREFIWNDLLSLETGLIKLANGRVIEKTIYNKKIGRDEPALFVALTFERREVVDPSNIKPMNLIGIDRGENIPAVIALTDPEGCPLSRFKDSLGNPTHILRIGESYKEKQRTIQAKKEVEQRRAGGYSRKYASKAKNLADDMVRNTARDLLYYAVTQDAMLIFENLSRGFGRQGKRTFMAERQYTRMEDWLTAKLAYEGLSKTYLSKTLAQYTSKTCSNCGFTITSADYDRVLEKLKKTATGWMTTINGKELKVEGQITYYNRYKRQNVVKDLSVELDRLSEESVNNDISSWTKGRSGEALSLLKKRFSHRPVQEKFVCLNCGFETHADEQAALNIARSWLFLRSQEYKKYQTNKTTGNTDKRAFVETWQSFYRKKLKEVWKPAV

SEQ ID NO: 58 - protein, 975 aa, Artificial Sequence
  CasX variant
MEKRINKIRKKLSADNATKPVSRSGPMKTLLVRVMTDDLKKRLEKRRKKPEVMPQVISNTSRANLNKLLTDYTEMKKAILHVYWEEFQKDPVGLMSRVAQPAPKNIDQRKLIPVKDGNERLTSSGFACSQCCQPLYVYKLEQVNDKGKPHTNYFGRCNVSEHERLILLSPHKPEANDELVTYSLGKFGQRALDFYSIHVTRESNHPVKPLEQIGGNSCASGPVGKALSDACMGAVASFLTKYQDIILEHQKVIKKNEKRLANLKDIASANGLAFPKITLPPQPHTKEGIEAYNNVVAQIVIWVNLNLWQKLKIGRDEAKPLQRLKGFPSFPLVERQANEVDWWDMVCNVKKLINEKKEDGKVFWQNLAGYKRQEALRPYLSSEEDRKKGKKFARYQFGDLLLHLEKKHGEDWGKVYDEAWERIDKKVEGLSKHIKLEEERRSEDAQSKAALTDWLRAKASFVIEGLKEADKDEFCRCELKLQKWYGDLRGKPFAIEAENSILDISGFSKQYNCAFIWQKDGVKKLNLYLIINYFKGGKLRFKKIKPEAFEANRFYTVINKKSGEIVPMEVNFNFDDPNLIILPLAFGKRQGREFIWNDLLSLETGSLKLANGRVIEKTLYNRRTRQDEPALFVALTFERREVLDSSNIKPMNLIGIDRGENIPAVIALTDPEGCPLSRFKDSLGNPTHILRIGESYKEKQRTIQAKKEVEQRRAGGYSRKYASKAKNLADDMVRNTARDLLYYAVTQDAMLIFENLSRGFGRQGKRTFMAERQYTRMEDWLTAKLAYEGLSKTYLSKTLAQYTSKTCSNCGFTITSADYDRVLEKLKKTATGWMTTINGKELKVEGQITYYNRYKRQNVVKDLSVELDRLSEESVNNDISSWTKGRSGEALSLLKKRFSHRPVQEKFVCLNCGFETHADEQAALNIARSWLFLRSQEYKKYQTNKTTGNTDKRAFVETWQSFYRKKLKEVWKPAV

SEQ ID NO: 59 - protein, 982 aa, Artificial Sequence
  CasX variant
MQEIKRINKIRRRLVKDSNTKKAGKTGPMKTLLVRVMTPDLRERLENLRKKPENIPQPISNTSRANLNKLLTDYTEMKKAILHVYWEEFQKDPVGLMSRVAQPAPKNIDQRKLIPVKDGNERLTSSGFACSQCCQPLYVYKLEQVNDKGKPHTNYFGRCNVSEHERLILLSPHKPEANDELVTYSLGKFGQRALDFYSIHVTRESNHPVKPLEQIGGNSCASGPVGKALSDACMGAVASFLTKYQDIILEHQKVIKKNEKRLANLKDIASANGLAFPKITLPPQPHTKEGIEAYNNVVAQIVIWVNLNLWQKLKIGRDEAKPLQRLKGFPSFPLVERQANEVDWWDMVCNVKKLINEKKEDGKVFWQNLAGYKRQEALRPYLSSEEDRKKGKKFARYQFGDLLLHLEKKHGEDWGKVYDEAWERIDKKVEGLSKHIKLEEERRSEDAQSKAALTDWLRAKASFVIEGLKEADKDEFCRCELKLQKWYGDLRGKPFAIEAENRVVDISGFSIGSDGHSIQYRNLLAWKYLENGKREFYLLMNYGKKGRIRFTDGTDIKKSGKWQGLLYGGGKAKVIDLTFDPDDEQLIILPLAFGTRQGREFIWNDLLSLETGLIKLANGRVIEKTIYNKKIGRDEPALFVALTFERREVVDPSNIKPMNLIGIDRGENIPAVIALTDPEGCPLSRFKDSLGNPTHILRIGESYKEKQRTIQAKKEVEQRRAGGYSRKYASKAKNLADDMVRNTARDLLYYAVTQDAMLIFENLSRGFGRQGKRTFMAERQYTRMEDWLTAKLAYEGLSKTYLSKTLAQYTSKTCSNCGFTITSADYDRVLEKLKKTATGWMTTINGKELKVEGQITYYNRYKRQNVVKDLSVELDRLSEESVNNDISSWTKGRSGEALSLLKKRFSHRPVQEKFVCLNCGFETHADEQAALNIARSWLFLRSQEYKKYQTNKTTGNTDKRAFVETWQSFYRKKLKEVWKPAV

SEQ ID NO: 60 - protein, 977 aa, Artificial Sequence
  CasX variant
MQEIKRINKIRRRLVKDSNTKKAGKTGPMKTLLVRVMTPDLRERLENLRKKPENIPQPISNTSRANLNKLLTDYTEMKKAILHVYWEEFQKDPVGLMSRVAQPAPKNIDQRKLIPVKDGNERLTSSGFACSQCCQPLYVYKLEQVNDKGKPHTNYFGRCNVSEHERLILLSPHKPEANDELVTYSLGKFGQRALDFYSIHVTRESNHPVKPLEQIGGNSCASGPVGKALSDACMGAVASFLTKYQDIILEHQKVIKKNEKRLANLKDIASANGLAFPKITLPPQPHTKEGIEAYNNVVAQIVIWVNLNLWQKLKIGRDEAKPLQRLKGFPSFPLVERQANEVDWWDMVCNVKKLINEKKEDGKVFWQNLAGYKRQEALRPYLSSEEDRKKGKKFARYQFGDLLLHLEKKHGEDWGKVYDEAWERIDKKVEGLSKHIKLEEERRSEDAQSKAALTDWLRAKASFVIEGLKEADKDEFKRCELKLQKWYGDLRGKPFAIEAENSILDISGFSKQYNCAFIWQKDGVKKLNLYLIINYFKGGKLRFKKIKPEAFEANRFYTVINKKSGEIVPMEVNFNFDDPNLIILPLAFGKRQGREFIWNDLLSLETGSLKLANGRVIEKPLYNRRTRQDEPALFVALTFERREVLDSSNIKPMNLIGIDRGENIPAVIALTDPEGCPLSRFKDSLGNPTHILRIGESYKEKQRTIQAKKEVEQRRAGGYSRKYASKAKNLADDMVRNTARDLLYYAVTQDAMLIFENLSRGFGRQGKRTFMAERQYTRMEDWLTAKLAYEGLSKTYLSKTLAQYTSKTCSNCGFTITSADYDRVLEKLKKTATGWMTTINGKELKVEGQITYYNRYKRQNVVKDLSVELDRLSEESVNNDISSWTKGRSGEALSLLKKRFSHRPVQEKFVCLNCGFETHADEQAALNIARSWLFLRSQEYKKYQTNKTTGNTDKRAFVETWQSFYRKKLKEVWKPAV

SEQ ID NO: 61 - protein, 977 aa, Artificial Sequence
  CasX variant
MQEIKRINKIRRRLVKDSNTKKAGKTGPMKTLLVRVMTPDLRERLENLRKKPENIPQPISNTSRANLNKLLTDYTEMKKAILHVYWEEFQKDPVGLMSRVAQPAPKNIDQRKLIPVKDGNERLTSSGFACSQCCQPLYVYKLEQVNDKGKPHTNYFGRCNVSEHERLILLSPHKPEANDELVTYSLGKFGQRALDFYSIHVTRESNHPVKPLEQIGGNSCASGPVGKALSDACMGAVASFLTKYQDIILEHQKVIKKNEKRLANLKDIASANGLAFPKITLPPQPHTKEGIEAYNNVVAQIVIWVNLNLWQKLKIGRDEAKPLQRLKGFPSFPLVERQANEVDWWDMVCNVKKLINEKKEDGKVFWQNLAGYKRQEALLPYLSSEEDRKKGKKFARYQFGDLLLHLEKKHGEDWGKVYDEAWERIDKKVEGLSKHIKLEEERRSEDAQSKAALTDWLRAKASFVIEGLKEADKDEFCRCELKLQKWYGDLRGKPFAIEAENSILDISGFSKQYNCAFIWQKDGVKKLNLYLIINYFKGGKLRFKKIKPEAFEANRFYTVINKKSGEIVPMEVNFNFDDPNLIILPLAFGKRQGREFIWNDLLSLETGSLKLANGRVIEKTLYNRRTRQDEPALFVALTFERREVLDSSNIKPMNLIGIDRGENIPAVIALTDPEGCPLSRFKDSLGNPTHILRIGESYKEKQRTIQAAKEVEQRRAGGYSRKYASKAKNLADDMVRNTARDLLYYAVTQDAMLIFENLSRGFGRQGKRTFAAERQYTRMEDWLTAKLAYEGLPSKTYLSKTLAQYTSKTCSNCGFTITSADYDRVLEKLKKTATGWMTTINGKELKVEGQITYYNRYKRQNVVKDLSVELDRLSEESVNNDISSWTKGRSGEALSLLKKRFSHRPVQEKFVCLNCGFETHADEQAALNIARSWLFLRSQEYKKYQTNKTTGNTDKRAFVETWQSFYRKKLKEVWKPA

SEQ ID NO: 62 - protein, 977 aa, Artificial Sequence
  CasX variant
MQEIKRINKIRRRLVKDSNTKKAGKTGPMKTLLVRVMTPDLRERLENLRKKPENIPQPISNTSRANLNKLLTDYTEMKKAILHVYWEEFQKDPVGLMSRVAQPAPKNIDQRKLIPVKDGNERLTSSGFACSQCCQPLYVYKLEQVNDKGKPHTNYFGRCNVSEHERLILLSPHKPEANDELVTYSLGKFGQRALDFYSIHVTRESNHPVKPLEQIGGNSCASGPVGKALSDACMGAVASFLTKYQDIILEHQKVIKKNEKRLANLKDIASANGLAFPKITLPPQPHTKEGIEAYNNVVAQIVIWVNLNLWQKLKIGRDEAKPLQRLKGFPSFPLVERQANEVDWWDMVCNVKKLINEKKEDGKVFWQNLAGYKRQEALRPYLSSEEDRKKGKKFARYQFGDLLLHLEKKHGEDWGKVYDEAWERIDKKVEGLSKHIKLEEERRSEDAQSKAALTDWLRAKASFVIEGLKEADKDEFCRCELKLQKWYGDLRGKPFAIEAENSILDISGFSKQYNCAFIWQKDGVKKLNLYLIINYFKGGKLRFKKIKPEAFEANRFYTVINKKSGEIVPMEVNFNFDDPNLIILPLAFGKRQGREFIWNDLLSLETGSLKLANGRVIEKTLYNRRTRQDEPALFVALTFERREVLDSSNIKPMNLIGIDRGENIPAVIALTDPEGCPLSRFKDSLGNPTHILRIGESYKEKQRTIQAKKEVEQRRAGGYSRKYASKAKNLANDMVRNTARDLLYYAVTQDAMLIFENLSRGFGRQGKRTFMAERQYTRMEDWLTAKLAYEGLSKTYLSKTLAQYTSKTCSNCGFTITSADYDRVLEKLKKTATGWMTTINGKELKVEGQITYYNRYKRQNVVKDLSVELDRLSEESVNNDISSWTKGRSGEALSLLKKRFSHRPVQEKFVCLNCGFETHADEQAALNIARSWLFLRSQEYKKYQTNKTTGNTDKRAFVETWQSFYRKKLKEVWKPAV

SEQ ID NO: 63 - protein, 978 aa, Artificial Sequence
  CasX variant
MQEIKRINKIRRRLVKDSNTKKAGKTGPMKTLLVRVMTPDLRERLENLRKKPENIPQPISNTSRANLNKLLTDYTEMKKAILHVYWEEFQKDPVGLMSRVAQPAPKNIDQRKLIPVKDGNERLTSSGFACSQCCQPLYVYKLEQVNDKGKPHTNYFGRCNVSEHERLILLSPHKPEANDELVTYSLGKFGQRALDFYSIHVTRESNHPVKPLEQIGGNSCASGPVGKALSDACMGAVASFLTKYQDIILEHQKVIKKNEKRLANLKDIASANGLAFPKITLPPQPHTKEGIEAYNNVVAQIVIWVNLNLWQKLKIGRDEAKPLQRLKGFPSFPLVERQANEVDWWDMVCNVKKLINEKKEDGKVFWQNLAGYKRQEALLPYLSSEEDRKKGKKFARYQFGDLLLHLEKKHGEDWGKVYDEAWERIDKKVEGLSKHIKLEEERRSEDAQSKAALTDWLRAKASFVIEGLKEADKDEFCRCELKLQKWYGDLRGKPFAIEAENSILDISGFSKQYNCAFIWQKDGVKKLNLYLIINYFKGGKLRFKKIKPEAFEANRFYTVINKKSGEIVPMEVNFNFDDPNLIILPLAFGKRQGREFIWNDLLSLETGSLKLANGRVIEKTLYNRRTRQDEPALFVALTFERREVLDSSNIKPMNLIGIDRGENIPAVIALTDPEGCPLSRFKDSLGNPTHILRIGESYKEKQRTIQAAKEVEQRRAGGYSRKYASKAKNLADDMVRNTARDLLYYAVTQDAMLIFENLSRGFGRQGKRTFMAERQYTRMEDQLTAKLAYEGLPSKTYLSKTLAQYTSKTCSNCGFTITSADYDRVLEKLKKTATGWMTTINGKELKVEGQITYYNRYKRQNVVKDLSVELDRLSEESVNNDISSWTKGRSGEALSLLKKRFSHRPVQEKFVCLNCGFETHADEQAALNIARSWLFLRSQEYKKYQTNKTTGNTDKRAFVETWQSFYRKKLKEVWKPAV

SEQ ID NO: 64 - protein, 978 aa, Artificial Sequence
  CasX variant
MQEIKRINKIRRRLVKDSNTKKAGKTGPMKTLLVRVMTPDLRERLENLRKKPENIPQPISNTSRANLNKLLTDYTEMKKAILHVYWEEFQKDPVGLMSRVAQPAPKNIDQRKLIPVKDGNERLTSSGFACSQCCQPLYVYKLEQVNDKGKPHTNYFGRCNVSEHERLILLSPHKPEANDELVTYSLGKFGQRALDFYSIHVTRESNHPVKPLEQIGGNSCASGPVGKALSDACMGAVASFLTKYQDIILEHQKVIKKNEKRLANLKDIASANGLAFPKITLPPQPHTKEGIEAYNNVVAQIVIWVNLNLWQKLKIGRDEAKPLQRLKGFPSFPLVERQANEVDWWDMVCNVKKLINEKKEDGKVFWQNLAGYKRQEALLPYLSSEEDRKKGKKFARYQFGDLLLHLEKKHGEDWGKVYDEAWERIDKKVEGLSKHIKLEEERRSEDAQSKAALTDWLRAKASFVIEGLKEADKDEFCRCELKLQKWYGDLRGKPFAIEAENSILDISGFSKQYNCAFIWQKDGVKKLNLYLIINYFKGGKLRFKKIKPEAFEANRFYTVINKKSGEIVPMEVNFNFDDPNLIILPLAFGKRQGREFIWNDLLSLETGSLKLANGRVIEKTLYNRRTRQDEPALFVALTFERREVLDSSNIKPMNLIGIDRGENIPAVIALTDPEGCPLSRFKDSLGNPTHILRIGESYKEKQRTIQAAKEVEQRRAGGYSRKYASKAKNLADDMVRNTARDLLYYAVTQDAMLIFENLSRGFGRQGKRTFQAERQYTRMEDWLTAKLAYEGLPSKTYLSKTLAQYTSKTCSNCGFTITSADYDRVLEKLKKTATGWMTTINGKELKVEGQITYYNRYKRQNVVKDLSVELDRLSEESVNNDISSWTKGRSGEALSLLKKRFSHRPVQEKFVCLNCGFETHADEQAALNIARSWLFLRSQEYKKYQTNKTTGNTDKRAFVETWQSFYRKKLKEVWKPAV

SEQ ID NO: 65 - protein, 978 aa, Artificial Sequence
  CasX variant
MQEIKRINKIRRRLVKDSNTKKAGKTGPMKTLLVRVMTPDLRERLENLRKKPENIPQPISNTSRANLNKLLTDYTEMKKAILHVYWEEFQKDPVGLMSRVAQPAPKNIDQRKLIPVKDGNERLTSSGFACSQCCQPLYVYKLEQVNDKGKPHTNYFGRCNVSEHERLILLSPHKPEANDELVTYSLGKFGQRALDFYSIHVTRESNHPVKPLEQIGGNSCASGPVGKALSDACMGAVASFLTKYQDIILEHQKVIKKNEKRLANLKDIASANGLAFPKITLPPQPHTKEGIEAYNNVVAQIVIWVNLNLWQKLKIGRDEAKPLQRLKGFPSFPLVERQANEVDWWDMVCNVKKLINEKKEDGKVFWQNLAGYKRQEALLPYLSSEEDRKKGKKFARYQFGDLLLHLEKKHGEDWGKVYDEAWERIDKKVEGLSKHIKLEEERRSEDAQSKAALTDWLIAKASFVIEGLKEADKDEFCRCELKLQKWYGDLRGKPFAIEAENSILDISGFSKQYNCAFIWQKDGVKKLNLYLIINYFKGGKLRFKKIKPEAFEANRFYTVINKKSGEIVPMEVNFNFDDPNLIILPLAFGKRQGREFIWNDLLSLETGSLKLANGRVIEKTLYNRRTRQDEPALFVALTFERREVLDSSNIKPMNLIGIDRGENIPAVIALTDPEGCPLSRFKDSLGNPTHILRIGESYKEKQRTIQAAKEVEQRRAGGYSRKYASKAKNLADDMVRNTVRDLLYYAVTQDAMLIFENLSRGFGRQGKRTFMAERQYTRMEDWLTAKLAYEGLPSKTYLSKTLAQYTSKTCSNCGFTITSADYDRVLEKLKKTATGWMTTINGKELKVEGQITYYNRYKRQNVVKDLSVELDRLSEESVNNDISSWTKGRSGEALSLLKKRFSHRPVQEKFVCLNCGFETHADEQAALNIARSWLFLRSQEYKKYQTNKTTGNTDKRAFVETWQSFYRKKLKEVWKPAV

SEQ ID NO: 66 - protein, 977 aa, Artificial Sequence
  CasX variant
MQEIKRINKIRRRLVKDSNTKKAGKTGPMKTLLVRVMTPDLRERLENLRKKPENIPQPISNTSRANLNKLLTDYTEMKKAILHVYWEEFQKDPVGLMSRVAQPAPKNIDQRKLIPVKDGNERLTSSGFACSQCCQPLYVYKLEQVNDKGKPHTNYFGRCNVSEHERLILLSPHKPEANDELVTYSLGKFGQRALDFYSIHVTRESNHPVKPLEQIGGNSCASGPVGKALSDACMGAVASFLTKYQDIILEHQKVIKKNEKRLANLKDIASANGLAFPKITLPPQPHTKEGIEAYNNVVAQIVIWVNLNLWQKLKIGRDEAKPLQRLKGFPSFPLVERQANEVDWWDMVCNVKKLINEKKEDGKVFWQNLAGYKRQEALRPYLSSEEDRKKGKKFARYQFGDLLLHLEKKHGEDWGKVYDEAWERIDKKVEGLSKHIKLEEERRSEDAQSKAALTDWLRAKASFVIEGLKEADKDEFCRCELKLQKWYGDLRGKPFAIEAENSILDISGFSKQYNCAFIWQKDGVKKLNLYLIINYFKGGKLRFKKIKPEAFEANRFYTVINKKSGEIVPMEVNFNFDDPNLIILPLAFGKRQGREFIWNDLLSLETGSLKLANGRVIEKTLYNRRTRQDEPALFVALTFERREVLDSSNIKPMNLIGIDRGENIPAVIALTDPEGCPLSRFKDSLGNPTHILRIGESYKEKQRTIQAKKEVEQRRAGGYSRKYASKAKNLADDMVRNTARDLLYYAVTQDAMLIFENLSRGFGRQGKRTFNAERQYTRMEDWLTAKLAYEGLSKTYLSKTLAQYTSKTCSNCGFTITSADYDRVLEKLKKTATGWMTTINGKELKVEGQITYYNRYKRQNVVKDLSVELDRLSEESVNNDISSWTKGRSGEALSLLKKRFSHRPVQEKFVCLNCGFETHADEQAALNIARSWLFLRSQEYKKYQTNKTTGNTDKRAFVETWQSFYRKKLKEVWKPAV

SEQ ID NO: 67 - protein, 977 aa, Artificial Sequence
  CasX variant
MQEIKRINKIRRRLVKDSNTKKAGKTGPMKTLLVRVMTPDLRERLENLRKKPENIPQPISNTSRANLNKLLTDYTEMKKAILHVYWEEFQKDPVGLMSRVAQPAPKNIDQRKLIPVKDGNERLTSSGFACSQCCQPLYVYKLEQVNDKGKPHTNYFGRCNVSEHERLILLSPHKPEANDELVTYSLGKFGQRALDFYSIHVTRESNHPVKPLEQIGGNSCASGPVGKALSDACMGAVASFLTKYQDIILEHQKVIKKNEKRLANLKDIASANGLAFPKITLPPQPHTKEGIEAYNNVVAQIVIWVNLNLWQKLKIGRDEAKPLQRLKGFPSFPLVERQANEVDWWDMVCNVKKLINEKKEDGKVFWQNLAGYKRQEALRPYLSSEEDRKKGKKFARYQFGDLLLHLEKKHGEDWGKVYDEAWERIDKKVEGLSKHIKLEEERRSEDAQSKAALTDWLRAKASFVIEGLKEADKDEFCRCELKLQKWYGDLRGKPFAIEAENSILDISGFSKQYNCAFIWQKDGVKKLNLYLIINYFKGGKLRFKKIKPEAFEANRFYTVINKKSGEIVPMEVNFNFDDPNLIILPLAFGKRQGREFIWNDLLSLETGSLKLANGRVIEKTLYNRRTRQDEPALFVALTFERREVLDSSNIKPMNLIGIDRGENIPAVIALTDPEGCPLSRFKDSLGNPTHILRIGESYKEKQRTIQAKKEVEQRRAGGYSRKYASKAKNLADDMVRNTTRDLLYYAVTQDAMLIFENLSRGFGRQGKRTFMAERQYTRMEDWLTAKLAYEGLSKTYLSKTLAQYTSKTCSNCGFTITSADYDRVLEKLKKTATGWMTTINGKELKVEGQITYYNRYKRQNVVKDLSVELDRLSEESVNNDISSWTKGRSGEALSLLKKRFSHRPVQEKFVCLNCGFETHADEQAALNIARSWLFLRSQEYKKYQTNKTTGNTDKRAFVETWQSFYRKKLKEVWKPAV

SEQ ID NO: 68 - protein, 977 aa, Artificial Sequence
  CasX variant
MQEIKRINKIRRRLVKDSNTKKAGKTGPMKTLLVRVMTPDLRERLENLRKKPENIPQPISNTSRANLNKLLTDYTEMKKAILHVYWEEFQKDPVGLMSRVAQPAPKNIDQRKLIPVKDGNERLTSSGFACSQCCQPLYVYKLEQVNDKGKPHTNYFGRCNVSEHERLILLSPHKPEANDELVTYSLGKFGQRALDFYSIHVTRESNHPVKPLEQIGGNSCASGPVGKALSDACMGAVASFLTKYQDIILEHQKVIKKNEKRLANLKDIASANGLAFPKITLPPQPHTKEGIEAYNNVVAQIVIWVNLNLWQKLKIGRDEAKPLQRLKGFPSFPLVERQANEVDWWDMVCNVKKLINEKKEDGKVFWQNLAGYKRQEALRPYLSSEEDRKKGKKFARYQFGDLLLHLEKKHGEDWGKVYDEAWERIDKKVEGLSKHIKLEEERRSEDAQSKAALTDWLRAKASFVIEGLKEADKDEFKRCELKLQKWYGSLRGKPFAIEAENSILDISGFSKQYNCAFIWQKDGVKKLNLYLIINYFKGGKLRFKKIKPEAFEANRFYTVINKKSGEIVPMEVNFNFDDPNLIILPLAFGKRQGREFIWNDLLSLETGSLKLANGRVIEKTLYNRRTRQDEPALFVALTFERREVLDSSNIKPMNLIGIDRGENIPAVIALTDPEGCPLSRFKDSLGNPTHILRIGESYKEKQRTIQAKKEVEQRRAGGYSRKYASKAKNLADDMVRNTARDLLYYAVTQDAMLIFENLSRGFGRQGKRTFMAERQYTRMEDWLTAKLAYEGLSKTYLSKTLAQYTSKTCSNCGFTITSADYDRVLEKLKKTATGWMTTINGKELKVEGQITYYNRYKRQNVVKDLSVELDRLSEESVNNDISSWTKGRSGEALSLLKKRFSHRPVQEKFVCLNCGFETHADEQAALNIARSWLFLRSQEYKKYQTNKTTGNTDKRAFVETWQSFYRKKLKEVWKPAV

SEQ ID NO: 69 - protein, 977 aa, Artificial Sequence
  CasX variant
MQEIKRINKIRRRLVKDSNTKKAGKTGPMKTLLVRVMTPDLRERLENLRKKPENIPQPISNTSRANLNKLLTDYTEMKKAILHVYWEEFQKDPVGLMSRVAQPAPKNIDQRKLIPVKDGNERLTSSGFACSQCCQPLYVYKLEQVNDKGKPHTNYFGRCNVSEHERLILLSPHKPEANDELVTYSLGKFGQRALDFYSIHVTRESNHPVKPLEQIGGNSCASGPVGKALSDACMGAVASFLTKYQDIILEHQKVIKKNEKRLANLKDIASANGLAFPKITLPPQPHTKEGIEAYNNVVAQIVIWVNLNLWQKLKIGRDEAKPLQRLKGFPSFPLVERQANEVDWWDMVCNVKKLINEKKEDGKVFWQNLAGYKRQEALRPYLSSEEDRKKGKKFARYQFGDLLLHLEKKHGEDWGKVYDEAWERIDKKVEGLSKHIKLEEERRSEDAQSKAALTDWLRAKASFVIEGLKEADKDEFKRCELKLQKWYGDLRGKPFAIEAENSILDISGFSKQYNCAFIWQKDGVKKLNLYLIINYFKGGKLRFKKIKPEAFEANRFYTVINKKSGEIVPMEVNFNFDDPNLIILPLAFGKRQGREFIWNDLLSLETGSLKLANGRVIEKTLYNRRTRQDEPALFVALTFERREVLDSSNIKPMNLIGIDRGENIPAVIALTDPEGCPLSRFKDSLGNPTHILRIGESYKEKQRTIQAKKEVEQRRAGGYSRKYASKAKNLANDMVRNTARDLLYYAVTQDAMLIFENLSRGFGRQGKRTFMAERQYTRMEDWLTAKLAYEGLSKTYLSKTLAQYTSKTCSNCGFTITSADYDRVLEKLKKTATGWMTTINGKELKVEGQITYYNRYKRQNVVKDLSVELDRLSEESVNNDISSWTKGRSGEALSLLKKRFSHRPVQEKFVCLNCGFETHADEQAALNIARSWLFLRSQEYKKYQTNKTTGNTDKRAFVETWQSFYRKKLKEVWKPAV

SEQ ID NO: 70 - protein, 978 aa, Artificial Sequence
  CasX variant
MQEIKRINKIRRRLVKDSNTKKAGKTGPMKTLLVRVMTPDLRERLENLRKKPENIPQPISNTSRANLNKLLTDYTEMKKAILHVYWEEFQKDPVGLMSRVAQPAPKNIDQRKLIPVKDGNERLTSSGFACSQCCQPLYVYKLEQVNDKGKPHTNYFGRCNVSEHERLILLSPHKPEANDELVTYSLGKFGQRALDFYSIHVTRESNHPVKPLEQIGGNSCASGPVGKALSDACMGAVASFLTKYQDIILEHQKVIKKNEKRLANLKDIASANGLAFPKITLPPQPHTKEGIEAYNNVVAQIVIWVNLNLWQKLKIGRDEAKPLQRLKGFPSFPLVERQANEVDWWDMVCNVKKLINEKKEDGKVFWQNLAGYKRQEALLPYLSSEEDRKKGKKFARYQFGDLLLHLEKKHGEDWGKVYDEAWERIDKKVEGLSKHIKLEEERRSEDAQSKAALTDWLRAKASFVIEGLKEADKDEFCRCELKLQKWYGDLRGKPFAIEAENSILDISGFSKQYNCAFIWQKDGVKKLNLYLIINYFKGGKLRFKKIKPEAFEANRFYTVINKKSGEIVPMEVNFNFDDPNLIILPLAFGKRQGREFIWNDLLSLETGSLKLANGRVIEKTLYNRRTRQDEPALFVALTFERREVLDSSNIKPMNLIGIDRGENIPAVIALTDPEGCPLSRFKDSLGNPTHILRIGESYKEKQRTIQAAKEKEQRRAGGYSRKYASKAKNLADDMVRNTARDLLYYAVTQDAMLIFENLSRGFGRQGKRTFMAERQYTRMEDWLTAKLAYEGLPSKTYLSKTLAQYTSKTCSNCGFTITSADYDRVLEKLKKTATGWMTTINGKELKVEGQITYYNRYKRQNVVKDLSVELDRLSEESVNNDISSWTKGRSGEALSLLKKRFSHRPVQEKFVCLNCGFETHADEQAALNIARSWLFLRSQEYKKYQTNKTTGNTDKRAFVETWQSFYRKKLKEVWKPAV

SEQ ID NO: 71 - protein, 977 aa, Artificial Sequence
  CasX variant
MQEIKRINKIRRRLVKDSNTKKAGKTGPMKTLLVRVMTPDLRERLENLRKKPENIPQPISNTSRANLNKLLTDYTEMKKAILHVYWEEFQKDPVGLMSRVAQPAPKNIDQRKLIPVKDGNERLTSSGFACSQCCQPLYVYKLEQVNDKGKPHTNYFGRCNVSEHERLILLSPHKPEANDELVTYSLGKFGQRALDFYSIHVTRESNHPVKPLEQIGGNSCASGPVGKALSDACMGAVASFLTKYQDIILEHQKVIKKNEKRLANLKDIASANGLAFPKITLPPQPHTKEGIEAYNNVVAQIVIWVNLNLWQKLKIGRDEAKPLQRLKGFPSFPLVERQANEVDWWDMVCNVKKLINEKKEDGKVFWQNLAGYKRQEALRPYLSSEEDRKKGKKFARYQFGDLLLHLEKKHGEDWGKVYDEAWERIDKKVEGLSKHIKLEEERRSEDAQSKAALTDWLRAKASFVIEGLKEADKDEFKRCELKLQKWYGDLRGKPFAIEAENSILDISGFSKQYNCAFIWQKDGVKKLNLYLIINYFKGGKLRFKKIKPEAFEANRFYTVINKKSGEIVPMEVNFNFDDPNLIILPLAFGKRQGREFIWNDLLSLETGSLKLANGRVIEKTLYNRRTRQDEPALFVALTFERREVLDSSNIKPMNLIGIDRGENIPAVIALTDPEGCPLSRFKDSLGNPTHILRIGESYKEKQRTIQAKKEVEQRRAGGYSRKYASKAKNLADDMVRNTARDLLYYAVTQDAMLIFENLSRGFGRQGKRTFMAERQYTRMEDWLTAKLAYEGLSKTLLSKTLAQYTSKTCSNCGFTITSADYDRVLEKLKKTATGWMTTINGKELKVEGQITYYNRYKRQNVVKDLSVELDRLSEESVNNDISSWTKGRSGEALSLLKKRFSHRPVQEKFVCLNCGFETHADEQAALNIARSWLFLRSQEYKKYQTNKTTGNTDKRAFVETWQSFYRKKLKEVWKPAV

SEQ ID NO: 72 - protein, 977 aa, Artificial Sequence
  CasX variant
MQEIKRINKIRRRLVKDSNTKKAGKTGPMKTLLVRVMTPDLRERLENLRKKPENIPQPISNTSRANLNKLLTDYTEMKKAILHVYWEEFQKDPVGLMSRVAQPAPKNIDQRKLIPVKDGNERLTSSGFACSQCCQPLYVYKLEQVNDKGKPHTNYFGRCNVSEHERLILLSPHKPEANDELVTYSLGKFGQRALDFYSIHVTRESNHPVKPLEQIGGNSCASGPVGKALSDACMGAVASFLTKYQDIILEHQKVIKKNEKRLANLKDIASANGLAFPKITLPPQPHTKEGIEAYNNVVAQIVIWVNLNLWQKLKIGRDEAKPLQRLKGFPSFPLVERQANEVDWWDMVCNVKKLINEKKEDGKVFWQNLAGYKRQEALRPYLSSEEDRKKGKKFARYQFGDLLLHLEKKHGEDWGKVYDEAWERIDKKVEGLSKHIKLEEERRSEDAQSKAALTDWLRAKASFVIEGLKEADKDEFCRCELKLQKWYGDLRGKPFAIEAENSILDISGFSKQYNCAFIWQKDGVKKLNLYLIINYFKGGKLRFKKIKPEAFEANRFYTVINKKSGEIVPMEVNFNFDDPNLIILPLAFGKRQGREFIWNDLLSLETGSLKLANGRVIEKTLYNRRTRQDEPALFVALTFERREVLDSSNIKPMNLIGIDRGENIPAVIALTDPEGCPLSRFKDSLGNPTHILRIGESYKEKQRTIQAKKEVEQRRAGGYSRKYASKAKNLADDMVRNTARDLLYYAVTQDAMLIFENLSRGFGRQGKRTFMAERQYTRMEDWLTAKLAYEGLSKTYLSKTLAQYTSKTCSNCGFTITSADYDRVLEKLKKTATGWMTTINGKELKVEGQITYYNRYKRQNVVKDLSVELDRLSEESVNNDISSWTKGRSGEALSLLKKRFSHRPVQEKFVCLNCGFETHADEQAALNIARSWLFLRSQEYKKYQTNKTTGNTDKRAFVETWQSFYRKKLKEVWKPAV

SEQ ID NO: 73 - protein, 977 aa, Artificial Sequence
  CasX variant
MQEIKRINKIRRRLVKDSNTKKAGKTGPMKTLLVRVMTPDLRERLENLRKKPENIPQPISNTSRANLNKLLTDYTEMKKAILHVYWEEFQKDPVGLMSRVAQPAPKNIDQRKLIPVKDGNERLTSSGFACSQCCQPLYVYKLEQVNDKGKPHTNYFGRCNVSEHERLILLSPHKPEANDELVTYSLGKFGQRALDFYSIHVTRESNHPVKPLEQIGGNSCASGPVGKALSDACMGAVASFLTKYQDIILEHQKVIKKNEKRLANLKDIASANGLAFPKITLPPQPHTKEGIEAYNNVVAQIVIWVNLNLWQKLKIGRDEAKPLQRLKGFPSFPLVERQANEVDWWDMVCNVKKLINEKKEDGKVFWQNLAGYKRQEALRPYLSSEEDRKKGKKFARYQFGDLLLHLEKKHGEDWGKVYDEAWERIDKKVEGLSKHIKLEEERRSEDAQSKAALTDWLRAKASFVIEGLKEADKDEFKRCELKLQKWYGDLRGKPFAIEAENSILDISGFSKQYNCAFIWQKDGVKKLNLYLIINYFKGGKLRFKKIKPEAFEANRFYTVINKKSGEIVPMEVNFNFDDPNLIILPLAFGKRQGREFIWNDLLSLETGSLKLANGRVIEKTLYNRRTRQDEPALFVALTFERREVLDSSNIKPMNLIGIDRGENIPAVIALTDPEGCPLSRFKDSLGNPTHILRIGESYKEKQRTIQAKKEVEQRRAGGYSRKYASKAKNLADDMVRNTARDLLYYAVTQDAMLIFENLSRGFGRQGKRTFNAERQYTRMEDWLTAKLAYEGLSKTYLSKTLAQYTSKTCSNCGFTITSADYDRVLEKLKKTATGWMTTINGKELKVEGQITYYNRYKRQNVVKDLSVELDRLSEESVNNDISSWTKGRSGEALSLLKKRFSHRPVQEKFVCLNCGFETHADEQAALNIARSWLFLRSQEYKKYQTNKTTGNTDKRAFVETWQSFYRKKLKEVWKPAV

SEQ ID NO: 74 - protein, 977 aa, Artificial Sequence
  CasX variant
MQEIKRINKIRRRLVKDSNTKKAGKTGPMKTLLVRVMTPDLRERLENLRKKPENIPQPISNTSRANLNKLLTDYTEMKKAILHVYWEEFQKDPVGLMSRVAQPAPKNIDQRKLIPVKDGNERLTSSGFACSQCCQPLYVYKLEQVNDKGKPHTNYFGRCNVSEHERLILLSPHKPEANDELVTYSLGKFGQRALDFYSIHVTRESNHPVKPLEQIGGNSCASGPVGKALSDACMGAVASFLTKYQDIILEHQKVIKKNEKRLANLKDIASANGLAFPKITLPPQPHTKEGIEAYNNVVAQIVIWVNLNLWQKLKIGRDEAKPLQRLKGFPSFPLVERQANEVDWWDMVCNVKKLINEKKEDGKVFWQNLAGYKRQEALLPYLSSESDRKKGKKFARYQFGDLLLHLEKKHGEDWGKVYDEAWERIDKKVEGLSKHIKLEEERRSEDAQSKAALTDWLRAKASFVIEGLKEADKDEFCRCELKLQKWYGDLRGKPFAIEAENSILDISGFSKQYNCAFIWQKDGVKKLNLYLIINYFKGGKLRFKKIKPEAFEANRFYTVINKKSGEIVPMEVNFNFDDPNLIILPLAFGKRQGREFIWNDLLSLETGSLKLANGRVIEKTLYNRRTRQDEPALFVALTFERREVLDSSNIKPMNLIGIDRGENIPAVIALTDPEGCPLSRFKDSLGNPTHILRIGESYKEKQRTIQAKKEVEQRRAGGYSRKYASKAKNLADDMVRNTARDLLYYAVTQDAMLIFENLSRGFGRQGKRTFMAERQYTRMEDWLTAKLAYEGLSKTYLSKTLAQYTSKTCSNCGFTITSADYDRVLEKLKKTATGWMTTINGKELKVEGQITYYNRYKRQNVVKDLSVELDRLSEESVNNDISSWTKGRSGEALSLLKKRFSHRPVQEKFVCLNCGFETHADEQAALNIARSWLFLRSQEYKKYQTNKTTGNTDKRAFVETWQSFYRKKLKEVWKPAV

SEQ ID NO: 75 - protein, 977 aa, Artificial Sequence
  CasX variant
MQEIKRINKIRRRLVKDSNTKKAGKTGPMKTLLVRVMTPDLRERLENLRKKPENIPQPISNTSRANLNKLLTDYTEMKKAILHVYWEEFQKDPVGLMSRVAQPAPKNIDQRKLIPVKDGNERLTSSGFACSQCCQPLYVYKLEQVNDKGKPHTNYFGRCNVSEHERLILLSPHKPEANDELVTYSLGKFGQRALDFYSIHVTRESNHPVKPLEQIGGNSCASGPVGKALSDACMGAVASFLTKYQDIILEHQKVIKKNEKRLANLKDIASANGLAFPKITLPPQPHTKEGIEAYNNVVAQIVIWVNLNLWQKLKIGRDEAKPLQRLKGFPSFPLVERQANEVDWWDMVCNVKKLINEKKEDGKVFWQNLAGYKRQEALRPYLSSEEDRKKGKKFARYQFGDLLLHLEKKHGEDWGKVYDEAWERIDKKVEGLSKHIKLEEERRSEDAQSKAALTDWLRAKASFVIEGLKEADKDEFKRCELKLQKWYGDLRGKPFAIEAENSILDISGFSKQYNCAFIWQKDGVKKLNLYLIINYFKGGKLRFKKIKPEAFEANRFYTVINKKSGEIVPMEVNFNFDDPNLIILPLAFGKRQGREFIWNDLLSLETGSLKLANGRVIEKTLYNRRTRQDEPALFVALTFERREVLDSSNIKPMNLIGIDRGENIPAVIALTDPEGCPLSRFKDSLGNPTHILRIGESYKEKQRTIQAKKEVEQRRAGGYSRKYASKAKNLADDMVRNTARDLLYYAVTQDAMLIFENLSRGFGRQGKRTFMAERQYTRMEDWLTAKLAYEGLSKTYLSKTLAQYTSKTCSNCGFTITSADYDRVLEKLKKTATGWMTTINGKELKVEGQITYYNRYKRQNVVKDLSVELDRLSEESVNNDISSWTKGRSGEALSLLKKRFSHRPVQEKFVCLNCGFETHADEQAALNIARSWLFLRSQEYKKYQTNKTTGNTDKRAFVETWQSFYRKKLKEVWKPAV

SEQ ID NO: 76 - protein, 978 aa, Artificial Sequence
  CasX variant
MQEIKRINKIRRRLVKDSNTKKAGKTGPMKTLLVRVMTPDLRERLENLRKKPENIPQPISNTSRANLNKLLTDYTEMKKAILHVYWEEFQKDPVGLMSRVAQPAPKNIDQRKLIPVKDGNERLTSSGFACSQCCQPLYVYKLEQVNDKGKPHTNYFGRCNVSEHERLILLSPHKPEANDELVTYSLGKFGQRALDFYSIHVTRESNHPVKPLEQIGGNSCASGPVGKALSDACMGAVASFLTKYQDIILEHQKVIKKNEKRLANLKDIASANGLAFPKITLPPQPHTKEGIEAYNNVVAQIVIWVNLNLWQKLKIGRDEAKPLQRLKGFPSFPLVERQANEVDWWDMVCNVKKLINEKKEDGKVFWQNLAGYKRQEALLPYLSSEEDRKKGKKFARYQFGDLLLHLEKKHGEDWGKVYDEAWERIDKKVEGLSKHIKLEEERRSEDAQSKAALTDWLRAKASFVIEGLKEADKDEFCRCELKLQKWYGDLRGKPFAIEAENSILDISGFSKQYNCAFIWQKDGVKKLNLYLIINYFKGGKLRFKKIKPEAFEANRFYTVINKKSGEIVPMEVNFNFDDPNLIILPLAFGKRQGREFIWNDLLSLETGSLKLANGRVIEKTLYNRRTRQDEPALFVALTFERREVLDSSNIKPMNLIGIDRGENIPAVIALTDPEGCPLSRFKDSLGNPTHILRIGESYKEKQRTIQAAKEVEQRRAGGYSRKYASKAKNLADDMVRNTARDLLYYAVTQDAMLIFENLSRGFGRQGKRTFMAERQYTRMEDWLTAKLAYEGDPSKTYLSKTLAQYTSKTCSNCGFTITSADYDRVLEKLKKTATGWMTTINGKELKVEGQITYYNRYKRQNVVKDLSVELDRLSEESVNNDISSWTKGRSGEALSLLKKRFSHRPVQEKFVCLNCGFETHADEQAALNIARSWLFLRSQEYKKYQTNKTTGNTDKRAFVETWQSFYRKKLKEVWKPAV

SEQ ID NO: 77 - protein, 978 aa, Artificial Sequence
  CasX variant
MQEIKRINKIRRRLVKDSNTKKAGKTGPMKTLLVRVMTPDLRERLENLRKKPENIPQPISNTSRANLNKLLTDYTEMKKAILHVYWEEFQKDPVGLMSRVAQPAPKNIDQRKLIPVKDGNERLTSSGFACSQCCQPLYVYKLEQVNDKGKPHTNYFGRCNVSEHERLILLSPHKPEANDELVTYSLGKFGQRALDFYSIHVTRESNHPVKPLEQIGGNSCASGPVGKALSDACMGAVASFLTKYQDIILEHQKVIKKNEKRLANLKDIASANGLAFPKITLPPQPHTKEGIEAYNNVVAQIVIWVNLNLWQKLKIGRDEAKPLQRLKGFPSFPLVERQANEVDWWDMVCNVKKLINEKKEDGKVFWQNLAGYKRQEALLPYLSSEEDRKKGKKFARYQFGDLLLHLEKKHGEDWGKVYDEAWERIDKKVEGLSKHIKLEEERRSEDAQSKAALTDWLRAKASFVIEGLKEADKDEFCRCELKLQKWYGDLRGKPFAIEAENSILDISGFSKQYNCAFIWQKDGVKKLNLYLIINYFKGGKLRFKKIKPEAFEANRFYTVINKKSGEIVPMEVNFNFDDPNLIILPLAFGKRQGREFIWNDLLSLETGSLKLANGRVIEKTLYNRRTRQDEPALFVALTFERREVLDSSNIKPMNLIGIDRGENIPAVIALTDPEGCPLSRFKDSLGNPTHILRIGESYKEKQRTIQAAKEVEQRRAGGYSRKYASKAKNLADDMVRNTARDLLYYAVTQDAMLIFENLSRGFGRQGKRTFMAERQYTRMEDWLTAKLAYEFLPSKTYLSKTLAQYTSKTCSNCGFTITSADYDRVLEKLKKTATGWMTTINGKELKVEGQITYYNRYKRQNVVKDLSVELDRLSEESVNNDISSWTKGRSGEALSLLKKRFSHRPVQEKFVCLNCGFETHADEQAALNIARSWLFLRSQEYKKYQTNKTTGNTDKRAFVETWQSFYRKKLKEVWKPAV

SEQ ID NO: 78 - protein, 977 aa, Artificial Sequence
  CasX variant
MQEIKRINKIRRRLVKDSNTKKAGKTGPMKTLLVRVMTPDLRERLENLRKKPENIPQPISNTSRANLNKLLTDYTEMKKAILHVYWEEFQKDPVGLMSRVAQPAPKNIDQRKLIPVKDGNERLTSSGFACSQCCQPLYVYKLEQVNDKGKPHTNYFGRCNVSEHERLILLSPHKPEANDELVTYSLGKFGQRALDFYSIHVTRESNHPVKPLEQIGGNSCASGPVGKALSDACMGAVASFLTKYQDIILEHQKVIKKNEKRLANLKDIASANGLAFPKITLPPQPHTKEGIEAYNNVVAQIVIWVNLNLWQKLKIGRDEAKPLQRLKGFPSFPLVERQANEVDWWDMVCNVKKLINEKKEDGKVFWQNLAGYKRQEALLPYLSSEEDRKKGKKFARYQFGDLLLHLEKKHGEDWGKVYDEAWERIDKKVEGLSKHIKLEEERRSEDAQSKAALTDWLRAKASFVIEGLKEADKDEFCRCELKLQKWYGDLRGKPFAIEAENSILDISGFSKQYNCAFIWQKDGVKKLNLYLIINYFKGGKLRFKKIKPEAFEANRFYTVINKKSGEIVPMEVNFNFDDPNLIILPLAFGKRQGREFIWNDLLSLETGSLKLANGRVIEKTLYNRRTRQDEPALFVALTFERREVLDSSNIKPMNLIGIDRGENIPAVIALTDPEGCPLSRFKDSLGNPTHILRIGESYKEKQRTIQAKKEVEQRRAGGYSRKYASKAKNLADDMVRNTVRDLLYYAVTQDAMLIFENLSRGFGRQGKRTFMAERQYTRMEDWLTAKLAYEGLSKTYLSKTLAQYTSKTCSNCGFTITSADYDRVLEKLKKTATGWMTTINGKELKVEGQITYYNRYKRQNVVKDLSVELDRLSEESVNNDISSWTKGRSGEALSLLKKRFSHRPVQEKFVCLNCGFETHADEQAALNIARSWLFLRSQEYKKYQTNKTTGNTDKRAFVETWQSFYRKKLKEVWKPAV

SEQ ID NO: 79 - protein, 977 aa, Artificial Sequence
  CasX variant
MQEIKRINKIRRRLVKDSNTKKAGKTGPMKTLLVRVMTPDLRERLENLRKKPENIPQPISNTSRANLNKLLTDYTEMKKAILHVYWEEFQKDPVGLMSRVAQPAPKNIDQRKLIPVKDGNERLTSSGFACSQCCQPLYVYKLEQVNDKGKPHTNYFGRCNVSEHERLILLSPHKPEANDELVTYSLGKFGQRALDFYSIHVTRESNHPVKPLEQIGGNSCASGPVGKALSDACMGAVASFLTKYQDIILEHQKVIKKNEKRLANLKDIASANGLAFPKITLPPQPHTKEGIEAYNNVVAQIVIWVNLNLWQKLKIGRDEAKPLQRLKGFPSFPLVERQANEVDWWDMVCNVKKLINEKKEDGKVFWQNLAGYKRQEALRPYLSSEEDRKKGKKFARYQFGDLLLHLEKKHGEDWGKVYDEAWERIDKKVEGLSKHIKLEEERRSEDAQSKAALTDWLRAKASFVIEGLKEADKDEFCRCELKLQKWYGDLRGKPFAIEAENSILDISGFSKQYNCAFIWQKDGVKKLNLYLIINYFKGGKLRFKKIKPEAFEANRFYTVINKKSGEIVPMEVNFNFDDPNLIILPLAFGKRQGREFIWNDLLSLETGSLKLANGRVIEKTLYNRRTRQDEPALFVALTFERREVLDSSNIKPMNLIGIDRGENIPAVIALTDPEGCPLSRFKDSLGNPTHILRIGESYKEKQRTIQAKKEVEQRRAGGYSRKYASKAKNLADDMVRNTVRDLLYYAVTQDAMLIFENLSRGFGRQGKRTFMAERQYTRMEDWLTAKLAYEGLSKTYLSKTLAQYTSKTCSNCGFTITSADYDRVLEKLKKTATGWMTTINGKELKVEGQITYYNRYKRQNVVKDLSVELDRLSEESVNNDISSWTKGRSGEALSLLKKRFSHRPVQEKFVCLNCGFETHADEQAALNIARSWLFLRSQEYKKYQTNKTTGNTDKRAFVETWQSFYRKKLKEVWKPAV

SEQ ID NO: 80 - protein, 977 aa, Artificial Sequence
  CasX variant
MQEIKRINKIRRRLVKDSNTKKAGKTGPMKTLLVRVMTPDLRERLENLRKKPENIPQPISNTSRANLNKLLTDYTEMKKAILHVYWEEFQKDPVGLMSRVAQPAPKNIDQRKLIPVKDGNERLTSSGFACSQCCQPLYVYKLEQVNDKGKPHTNYFGRCNVSEHERLILLSPHKPEANDELVTYSLGKFGQRALDFYSIHVTRESNHPVKPLEQIGGNSCASGPVGKALSDACMGAVASFLTKYQDIILEHQKVIKKNEKRLANLKDIASANGLAFPKITLPPQPHTKEGIEAYNNVVAQIVIWVNLNLWQKLKIGRDEAKPLQRLKGFPSFPLVERQANEVDWWDMVCNVKKLINEKKEDGKVFWQNLAGYKRQEALLPYLSSEEDRKKGKKFARYQFGDLLLHLEKKHGEDWGKVYDEAWERIDKKVEGLSKHIKLEEERRSEDAQSKAALTDWLRAKASFVIEGLKEADKDEFKRCELKLQKWYGDLRGKPFAIEAENSILDISGFSKQYNCAFIWQKDGVKKLNLYLIINYFKGGKLRFKKIKPEAFEANRFYTVINKKSGEIVPMEVNFNFDDPNLIILPLAFGKRQGREFIWNDLLSLETGSLKLANGRVIEKTLYNRRTRQDEPALFVALTFERREVLDSSNIKPMNLIGIDRGENIPAVIALTDPEGCPLSRFKDSLGNPTHILRIGESYKEKQRTIQAKKEVEQRRAGGYSRKYASKAKNLADDMVRNTARDLLYYAVTQDAMLIFENLSRGFGRQGKRTFMAERQYTRMEDWLTAKLAYEGLSKTYLSKTLAQYTSKTCSNCGFTITSADYDRVLEKLKKTATGWMTTINGKELKVEGQITYYNRYKRQNVVKDLSVELDRLSEESVNNDISSWTKGRSGEALSLLKKRFSHRPVQEKFVCLNCGFETHADEQAALNIARSWLFLRSQEYKKYQTNKTTGNTDKRAFVETWQSFYRKKLKEVWKPAV

SEQ ID NO: 81 - protein, 978 aa, Artificial Sequence
  CasX variant
MQEIKRINKIRRRLVKDSNTKKAGKTGPMKTLLVRVMTPDLRERLENLRKKPENIPQPISNTSRANLNKLLTDYTEMKKAILHVYWEEFQKDPVGLMSRVAQPAPKNIDQRKLIPVKDGNERLTSSGFACSQCCQPLYVYKLEQVNDKGKPHTNYFGRCNVSEHERLILLSPHKPEANDELVTYSLGKFGQRALDFYSIHVTRESNHPVKPLEQIGGNSCASGPVGKALSDACMGAVASFLTKYQDIIIEHQKVIKKNEKRLANLKDIASANGLAFPKITLPPQPHTKEGIEAYNNVVAQIVIWVNLNLWQKLKIGRDEAKPLQRLKGFPSFPLVERQANEVDWWDMVCNVKKLINEKKEDGKVFWQNLAGYKRQEALLPYLSSEEDRKKGKKFARYQFGDLLLHLEKKHGEDWGKVYDEAWERIDKKVEGLSKHIKLEEERRSEDAQSKAALTDWLRAKASFVIEGLKEADKDEFCRCELKLQKWYGDLRGKPFAIEAENSILDISGFSKQYNCAFIWQKDGVKKLNLYLIINYFKGGKLRFKKIKPEAFEANRFYTVINKKSGEIVPMEVNFNFDDPNLIILPLAFGKRQGREFIWNDLLSLETGSLKLANGRVIEKTLYNRRTRQDEPALFVALTFERREVLDSSNIKPMNLIGIDRGENIPAVIALTDPEGCPLSRFKDSLGNPTHILRIGESYKEKQRTIQAAKEVEQRRAGGYSRKYASKAKNLADDMVRNTARDLLYYAVTQDAMLIFENLSRGFGRQGKRTFNAERQYTRMEDWLTAKLAYEGLPSKTYLSKTLAQYTSKTCSNCGFTITSADYDRVLEKLKKTATGWMTTINGKELKVEGQITYYNRYKRQNVVKDLSVELDRLSEESVNNDISSWTKGRSGEALSLLKKRFSHRPVQEKFVCLNCGFETHADEQAALNIARSWLFLRSQEYKKYQTNKTTGNTDKRAFVETWQSFYRKKLKEVWKPAV

SEQ ID NO: 82 - protein, 978 aa, Artificial Sequence
  CasX variant
MQEIKRINKIRRRLVKDSNTKKAGKTGPMKTLLVRVMTPDLRERLENLRKKPENIPQPISNTSRANLNKLLTDYTEMKKAILHVYWEEFQKDPVGLMSRVAQPAPKNIDQRKLIPVKDGNERLTSSGFACSQCCQPLYVYKLEQVNDKGKPHTNYFGRCNVSEHERLILLSPHKPEANDELVTYSLGKFGQRALDFYSIHVTRESNHPVKPLEQIGGNSCASGPVGKALSDACMGAVASFLTKYQDIILEHQKVIKKNEKRLANLKDIASANGLAFPKITLPPQPHTKEGIEAYNNVVAQIVIWVNLNLWQKLKIGRDEAKPLQRLKGFPSFPLVERQANEVDWWDMVCNVKKLINEKKEDGKVFWQNLAGYKRQEALLPYLSSEEDRKKGKKFARYQFGDLLLHLEKKHGEDWGKVYDEAWERIDKKVEGLSKHIKLEEERRSEDAQSKAALTDWLRAKASFVIEGLKEADKDEFCRCELKLQKWYGDLRGKPFAIEAENSILDISGFSKQYNCAFIWQKDGVKKLNLYLIINYFKGGKLRFKKIKPEAFEANRFYTVINKKSGEIVPMEVNFNFDDPNLIILPLAFGKRQGREFIWNDLLSLETGSLKLANGRVIEKTLYNRRTRQDEPALFVALTFERREVLDSSNIKPMNLIGIDRGENIPAVIALTDPEGCPLSRFKDSLGNPTHILRIGESYKEKQRTIQAAKEVEQRRAGGYSRKYASKAKNLADDMVRNTARDLLYYAKTQDAMLIFENLSRGFGRQGKRTFMAERQYTRMEDWLTAKLAYEGLPSKTYLSKTLAQYTSKTCSNCGFTITSADYDRVLEKLKKTATGWMTTINGKELKVEGQITYYNRYKRQNVVKDLSVELDRLSEESVNNDISSWTKGRSGEALSLLKKRFSHRPVQEKFVCLNCGFETHADEQAALNIARSWLFLRSQEYKKYQTNKTTGNTDKRAFVETWQSFYRKKLKEVWKPAV

SEQ ID NO: 83 - protein, 977 aa, Artificial Sequence
  CasX variant
MQEIKRINKIRRRLVKDSNTKKAGKTGPMKTLLVRVMTPDLRERLENLRKKPENIPQPISNTSRANLNKLLTDYTEMKKAILHVYWEEFQKDPVGLMSRVAQPAPKNIDQRKLIPVKDGNERLTSSGFACSQCCQPLYVYKLEQVNDKGKPHTNYFGRCNVSEHERLILLSPHKPEANDELVTYSLGKFGQRALDFYSIHVTRESNHPVKPLEQIGGNSCASGPVGKALSDACMGAVASFLTKYQDIILEHQKVIKKNEKRLANLKDIASANGLAFPKITLPPQPHTKEGIEAYNNVVAQIVIWVNLNLWQKLKIGRDEAKPLQRLKGFPSFPLVERQANEVDWWDMVCNVKKLINEKKEDGKVFWQNLAGYKRQEALRPYLSSEEDRKKGKKFARYQFGDLLLHLEKKHGEDWGKVYDEAWERIDKKVEGLSKHIKLEEERRSEDAQSKAALTDWLRAKASFVIEGLKEADKDEFKRCELKLQKWYGDLRGKPFAIEAENSILDISGFSKQYNCAFIWQKDGVKKLNLYLIINYFKGGKLRFKKIKPEAFEANRFYTVINKKSGEIVPMEVNFNFDDPNLIILPLAFGKRQGREFIWNDLLSLETGSLKLANGRVIEKTLYNRRTRQDEPALFVALTFERREVLDSSNIKPMNLIGIDRGENIPAVIALTDPEGCPLSRFKDSLGNPTHILRIGESYKEKQRTIQAKKEVEQRRAGGYSRKYASKAKNLADDMVRNTARDLLYYAVTQDAMLIFENLSRGFGRQGKRTFMAERQYTRNEDWLTAKLAYEGLSKTYLSKTLAQYTSKTCSNCGFTITSADYDRVLEKLKKTATGWMTTINGKELKVEGQITYYNRYKRQNVVKDLSVELDRLSEESVNNDISSWTKGRSGEALSLLKKRFSHRPVQEKFVCLNCGFETHADEQAALNIARSWLFLRSQEYKKYQTNKTTGNTDKRAFVETWQSFYRKKLKEVWKPAV

SEQ ID NO: 84 - protein, 978 aa, Artificial Sequence
  CasX variant
MQEIKRINKIRRRLVKDSNTKKAGKTGPMKTLLVRVMTPDLRERLENLRKKPENIPQPISNTSRANLNKLLTDYTEMKKAILHVYWEEFQKDPVGLMSRVAQPAPKNIDQRKLIPVKDGNERLTSSGFACSQCCQPLYVYKLEQVNDKGKPHTNYFGRCNVSEHERLILLSPHKPEANDELVTYSLGKFGQRALDFYSIHVTRESNHPVKPLEQIGGNSCASGPVGKALSDACMGAVASFLTKYQDIILEHQKVIKKNEKRLANLKDIASANGLAFPKITLPPQPHTKEGIEAYNNVVAQIVIWVNLNLWQKLKIGRDEAKPLQRLKGFPSFPLVERQANEVDWWDMVCNVKKLINEKKEDGKVFWQNLAGYKRQEALLPYLSSEEDRKKGKKFARYQFGDLLLHLEKKHGEDWGKVYDEAWERIDKKVEGLSKHIKLEEERRSEDAQSKAALTDWLRAKASFVIEGLKEADKDEFCRCELKLQKWYGDLRGKPFAIEAENSILDISGFSKQYNCAFIWQKDGVKKLNLYLIINYFKGGKLRFKKIKPEAFEANRFYTVINKKSGEIVPMEVNFNFDDPNLIILPLAFGKRQGREFIWNDLLSLETGSLKLANGRVIEKTLYNRRTRQDEPALFVALTFERREVLDSSNIKPMNLIGIDRGENIPAVIALTDPEGCPLSRFKDSLGNPTHILRIGESYKEKQRTIQAAKEVEQRRAGGYSRKYASKAKNLADDMVRNTARDLLYYAVTQDAMLIMENLSRGFGRQGKRTFMAERQYTRMEDWLTAKLAYEGLPSKTYLSKTLAQYTSKTCSNCGFTITSADYDRVLEKLKKTATGWMTTINGKELKVEGQITYYNRYKRQNVVKDLSVELDRLSEESVNNDISSWTKGRSGEALSLLKKRFSHRPVQEKFVCLNCGFETHADEQAALNIARSWLFLRSQEYKKYQTNKTTGNTDKRAFVETWQSFYRKKLKEVWKPAV

SEQ ID NO: 85 - protein, 977 aa, Artificial Sequence
  CasX variant
MQEIKRINKIRRRLVKDSNTKKAGKTGPMKTLLVRVMTPDLRERLENLRKKPENIPQPISNTSRANLNKLLTDYTEMKKAILHVYWEEFQKDPVGLMSRVAQPAPKNIDQRKLIPVKDGNERLTSSGFACSQCCQPLYVYKLEQVNDKGKPHTNYFGRCNVSEHERLILLSPHKPEANDELVTYSLGKFGQRALDFYSIHVTRESNHPVKPLEQIGGNSCASGPVGKALSDACMGAVASFLTKYQDIILEHQKVIKKNEKRLANLKDIASANGLAFPKITLPPQPHTKEGIEAYNNVVAQIVIWVNLNLWQKLKIGRDEAKPLQRLKGFPSFPLVERQANEVDWWDMVCNVKKLINEKKEDGKVFWQNLAGYKRQEALRPYLSSEEDRKKGKKFARYQFGDLLLHLEKKHGEDWGKVYDEAWERIDKKVEGLSKHIKLEEERRSEDAQSKAALTDWLRAKASFVIEGLKEADKDEFCRCELKLQKWYGDLRGKPFAIEAENSILDISGFSKQYNCAFIWQKDGVKKLNLYLIINYFKGGKLRFKKIKPEAFEANRFYTVINKKSGEIVPMEVNFNFDDPNLIILPLAFGKRQGREFIWNDLLSLETGSLKLANGRVIEKTLYNRRTRQDEPALFVALTFERREVLDSSNIKPMNLIGIDRGENIPAVIALTDPEGCPLSRFKDSLGNPTHILRIGESYKEKQRTIQAKKEVEQRRAGGYSRKYASKAKNLADDMVRNTARDLLYYAVTQDAMLIFENLSRGFGRQGKRTFMAERQYTRMEDWLTAKLAYEGLSKTYLSKTLAQYTSKTCSNCGFTITSADYDRVLEKLKKTATGWMTTINGKELKVEGQITYYNRRKRQNVVKDLSVELDRLSEESVNNDISSWTKGRSGEALSLLKKRFSHRPVQEKFVCLNCGFETHADEQAALNIARSWLFLRSQEYKKYQTNKTTGNTDKRAFVETWQSFYRKKLKEVWKPAV

SEQ ID NO: 86 - protein, 977 aa, Artificial Sequence
  CasX variant
MQEIKRINKIRRRLVKDSNTKKAGKTGPMKTLLVRVMTPDLRERLENLRKKPENIPQPISNTSRANLNKLLTDYTEMKKAILHVYWEEFQKDPVGLMSRVAQPAPKNIDQRKLIPVKDGNERLTSSGFACSQCCQPLYVYKLEQVNDKGKPHTNYFGRCNVSEHERLILLSPHKPEANDELVTYSLGKFGQRALDFYSIHVTRESNHPVKPLEQIGGNSCASGPVGKALSDACMGAVASFLTKYQDIILEHQKVIKKNEKRLANLKDIASANGLAFPKITLPPQPHTKEGIEAYNNVVAQIVIWVNLNLWQKLKIGRDEAKPLQRLKGFPSFPLVERQANEVDWWDMVCNVKKLINEKKEDGKVFWQNLAGYKRQEALRPYLSSEEDRKKGKKFARYQFGDLLLHLEKKHGEDWGKVYDEAWERIDKKVEGLSKHIKLEEERRSEDAQSKAALTDWLRAKASFVIEGLKEADKDEFCRCELKLQKWYGDLRGKPFAIEAENSILDISGFSKQYNCAFIWQKDGVKKLNLYLIINYFKGGKLRFKKIKPEAFEANRFYTVINKKSGEIVPMEVNFNFDDPNLIILPLAFGKRQGREFIWNDLLSLETGSLKLANGRVIEKTLYNRRTRQDEPALFVALTFERREVLDSSNIKPMNLIGVDRGENIPAVIALTDPEGCPLSRFKDSLGNPTHILRIGESYKEKQRTIQAKKEVEQRRAGGYSRKYASKAKNLADDMVRNTARDLLYYAVTQDAMLIFENLSRGFGRQGKRTFMAERQYTRMEDWLTAKLAYEGLSKTYLSKTLAQYTSKTCSNCGFTITSADYDRVLEKLKKTATGWMTTINGKELKVEGQITYYNRRKRQNVVKDLSVELDRLSEESVNNDISSWTKGRSGEALSLLKKRFSHRPVQEKFVCLNCGFETHADEQAALNIARSWLFLRSQEYKKYQTNKTTGNTDKRAFVETWQSFYRKKLKEVWKPAV

SEQ ID NO: 87 - protein, 977 aa, Artificial Sequence
  CasX variant
MQEIKRINKIRRRLVKDSNTKKAGKTGPMKTLLVRVMTPDLRERLENLRKKPENIPQPISNTSRANLNKLLTDYTEMKKAILHVYWEEFQKDPVGLMSRVAQPAPKNIDQRKLIPVKDGNERLTSSGFACSQCCQPLYVYKLEQVNDKGKPHTNYFGRCNVSEHERLILLSPHKPEANDELVTYSLGKFGQRALDFYSIHVTRESNHPVKPLEQIGGNSCASGPVGKALSDACMGAVASFLTKYQDIILEHQKVIKKNEKRLANLKDIASANGLAFPKITLPPQPHTKEGIEAYNNVVAQIVIWVNLNLWQKLKIGRDEAKPLQRLKGFPSFPLVERQANEVDWWDMVCNVKKLINEKKEDGKVFWQNLAGYKRQEALRPYLSSENDRKKGKKFARYQFGDLLLHLEKKHGEDWGKVYDEAWERIDKKVEGLSKHIKLEEERRSEDAQSKAALTDWLRAKASFVIEGLKEADKDEFCRCELKLQKWYGDLRGKPFAIEAENSILDISGFSKQYNCAFIWQKDGVKKLNLYLIINYFKGGKLRFKKIKPEAFEANRFYTVINKKSGEIVPMEVNFNFDDPNLIILPLAFGKRQGREFIWNDLLSLETGSLKLANGRVIEKTLYNRRTRQDEPALFVALTFERREVLDSSNIKPMNLIGVDRGENIPAVIALTDPEGCPLSRFKDSLGNPTHILRIGESYKEKQRTIQAKKEVEQRRAGGYSRKYASKAKNLADDMVRNTARDLLYYAVTQDAMLIFENLSRGFGRQGKRTFMAERQYTRMEDWLTAKLAYEGLSKTYLSKTLAQYTSKTCSNCGFTITSADYDRVLEKLKKTATGWMTTINGKELKVEGQITYYNRRKRQNVVKDLSVELDRLSEESVNNDISSWTKGRSGEALSLLKKRFSHRPVQEKFVCLNCGFETHADEQAALNIARSWLFLRSQEYKKYQTNKTTGNTDKRAFVETWQSFYRKKLKEVWKPAV

SEQ ID NO: 88 - protein, 977 aa, Artificial Sequence
  CasX variant
MQEIKRINKIRRRLVKDSNTKKAGKTGPMKTLLVRVMTPDLRERLENLRKKPENIPQPISNTSRANLNKLLTDYTEMKKAILHVYWEEFQKDPVGLMSRVAQPAPKNIDQRKLIPVKDGNERLTSSGFACSQCCQPLYVYKLEQVNDKGKPHTNYFGRCNVSEHERLILLSPHKPEANDELVTYSLGKFGQRALDFYSIHVTRESNHPVKPLEQIGGNSCASGPVGKALSDACMGAVASFLTKYQDIILEHQKVIKKNEKRLANLKDIASANGLAFPKITLPPQPHTKEGIEAYNNVVAQIVIWVNLNLWQKLKIGRDEAKPLQRLKGFPSFPLVERQANEVDWWDMVCNVKKLINEKKEDGKVFWQNLAGYKRQEALRPYLSSEEDRKKGKKFARYQFGDLLKHLEKKHGEDWGKVYDEAWERIDKKVEGLSKHIKLEEERRSEDAQSKAALTDWLRAKASFVIEGLKEADKDEFCRCELKLQKWYGDLRGKPFAIEAENSILDISGFSKQYNCAFIWQKDGVKKLNLYLIINYFKGGKLRFKKIKPEAFEANRFYTVINKKSGEIVPMEVNFNFDDPNLIILPLAFGKRQGREFIWNDLLSLETGSLKLANGRVIEKTLYNRRTRQDEPALFVALTFERREVLDSSNIKPMNLIGVDRGENIPAVIALTDPEGCPLSRFKDSLGNPTHILRIGESYKEKQRTIQAKKEVEQRRAGGYSRKYASKAKNLADDMVRNTARDLLYYAVTQDAMLIFENLSRGFGRQGKRTFMAERQYTRMEDWLTAKLAYEGLSKTYLSKTLAQYTSKTCSNCGFTITSADYDRVLEKLKKTATGWMTTINGKELKVEGQITYYNRRKRQNVVKDLSVELDRLSEESVNNDISSWTKGRSGEALSLLKKRFSHRPVQEKFVCLNCGFETHADEQAALNIARSWLFLRSQEYKKYQTNKTTGNTDKRAFVETWQSFYRKKLKEVWKPAV

SEQ ID NO: 89 - protein, 978 aa, Artificial Sequence
  CasX variant
MQEIKRINKIRRRLVKDSNTKKAGKTGPMKTLLVRVMTPDLRERLENLRKKPENIPQPISNTSRANLNKLLTDYTEMKKAILHVYWEEFQKDPVGLMSRVAQPAPKNIDQRKLIPVKDGNERLTSSGFACSQCCQPLYVYKLEQVNDKGKPHTNYFGRCNVSEHERLILLSPHKPEANDELVTYSLGKFGQVRALDFYSIHVTRESNHPVKPLEQIGGNSCASGPVGKALSDACMGAVASFLTKYQDIILEHQKVIKKNEKRLANLKDIASANGLAFPKITLPPQPHTKEGIEAYNNVVAQIVIWVNLNLWQKLKIGRDEAKPLQRLKGFPSFPLVERQANEVDWWDMVCNVKKLINEKKEDGKVFWQNLAGYKRQEALRPYLSSEEDRKKGKKFARYQFGDLLLHLEKKHGEDWGKVYDEAWERIDKKVEGLSKHIKLEEERRSEDAQSKAALTDWLRAKASFVIEGLKEADKDEFCRCELKLQKWYGDLRGKPFAIEAENSILDISGFSKQYNCAFIWQKDGVKKLNLYLIINYFKGGKLRFKKIKPEAFEANRFYTVINKKSGEIVPMEVNFNFDDPNLIILPLAFGKRQGREFIWNDLLSLETGSLKLANGRVIEKTLYNRRTRQDEPALFVALTFERREVLDSSNIKPMNLIGVDRGENIPAVIALTDPEGCPLSRFKDSLGNPTHILRIGESYKEKQRTIQAKKEVEQRRAGGYSRKYASKAKNLADDMVRNTARDLLYYAVTQDAMLIFENLSRGFGRQGKRTFMAERQYTRMEDWLTAKLAYEGLSKTYLSKTLAQYTSKTCSNCGFTITSADYDRVLEKLKKTATGWMTTINGKELKVEGQITYYNRRKRQNVVKDLSVELDRLSEESVNNDISSWTKGRSGEALSLLKKRFSHRPVQEKFVCLNCGFETHADEQAALNIARSWLFLRSQEYKKYQTNKTTGNTDKRAFVETWQSFYRKKLKEVWKPAV

SEQ ID NO: 90 - protein, 977 aa, Artificial Sequence
  CasX variant
MQEIKRINKIRRRLVKDSNTKKAGKTGPMKTLLVRVMTPDLRERLENLRKKPENIPQPISNTSRANLNKLLTDYTEMKKAILHVYWEEFQKDPVGLMSRVAQPAPKNIDQRKLIPVKDGNERLTSSGFACSQCCQPLYVYKLEQVNDKGKPHTNYFGRCNVSEHERLILLSPHKPEANDELVTYSLGKFGQRALDFYSIHVTRESNHPVKPLEQIGGNSCASGPVGKALSDACMGAVASFLTKYQDIILEHQKVIKKNEKRLANLKDIASANGLAFPKITLPPQPHTKEGIEAYNNVVAQIVIWVNLNLWQKLKIGRDEAKPLQRLKGFPSFPLVERQANEVDWWDMVCNVKKLINEKKEDGKVFWQNLAGYKRQEALRPYLSSENDRKKGKKFARYQFGDLLKHLEKKHGEDWGKVYDEAWERIDKKVEGLSKHIKLEEERRSEDAQSKAALTDWLRAKASFVIEGLKEADKDEFCRCELKLQKWYGDLRGKPFAIEAENSILDISGFSKQYNCAFIWQKDGVKKLNLYLIINYFKGGKLRFKKIKPEAFEANRFYTVINKKSGEIVPMEVNFNFDDPNLIILPLAFGKRQGREFIWNDLLSLETGSLKLANGRVIEKTLYNRRTRQDEPALFVALTFERREVLDSSNIKPMNLIGVDRGENIPAVIALTDPEGCPLSRFKDSLGNPTHILRIGESYKEKQRTIQAKKEVEQRRAGGYSRKYASKAKNLADDMVRNTARDLLYYAVTQDAMLIFENLSRGFGRQGKRTFMAERQYTRMEDWLTAKLAYEGLSKTYLSKTLAQYTSKTCSNCGFTITSADYDRVLEKLKKTATGWMTTINGKELKVEGQITYYNRRKRQNVVKDLSVELDRLSEESVNNDISSWTKGRSGEALSLLKKRFSHRPVQEKFVCLNCGFETHADEQAALNIARSWLFLRSQEYKKYQTNKTTGNTDKRAFVETWQSFYRKKLKEVWKPAV

SEQ ID NO: 91 - protein, 977 aa, Artificial Sequence
  CasX variant
MQEIKRINKIRRRLVKDSNTKKAGKTGPMKTLLVRVMTPDLRERLENLRKKPENIPQPISNTSRANLNKLLTDYTEMKKAILHVYWEEFQKDPVGLMSRVAQPAPKNIDQRKLIPVKDGNERLTSSGFACSQCCQPLYVYKLEQVNDKGKPHTNYFGRCNVSEHERLILLSPHKPEANDELVTYSLGKFGQRALDFYSIHVTRESNHPVKPLEQIGGNSCASGPVGKALSDACMGAVASFLTKYQDIILEHQKVIKKNEKRLANLKDIASANGLAFPKITLPPQPHTKEGIEAYNNVVAQIVIWVNLNLWQKLKIGRDEAKPLQRLKGFPSFPLVERQANEVDWWDMVCNVKKLINEKKEDGKVFWQNLAGYKRQEALRPYLSSEEDRKKGKKFARYQLGDLLLHLEKKHGEDWGKVYDEAWERIDKKVEGLSKHIKLEEERRSEDAQSKAALTDWLRAKASFVIEGLKEADKDEFCRCELKLQKWYGDLRGKPFAIEAENSILDISGFSKQYNCAFIWQKDGVKKLNLYLIINYFKGGKLRFKKIKPEAFEANRFYTVINKKSGEIVPMEVNFNFDDPNLIILPLAFGKRQGREFIWNDLLSLETGSLKLANGRVIEKTLYNRRTRQDEPALFVALTFERREVLDSSNIKPMNLIGVDRGENIPAVIALTDPEGCPLSRFKDSLGNPTHILRIGESYKEKQRTIQAKKEVEQRRAGGYSRKYASKAKNLADDMVRNTARDLLYYAVTQDAMLIFENLSRGFGRQGKRTFMAERQYTRMEDWLTAKLAYEGLSKTYLSKTLAQYTSKTCSNCGFTITSADYDRVLEKLKKTATGWMTTINGKELKVEGQITYYNRRKRQNVVKDLSVELDRLSEESVNNDISSWTKGRSGEALSLLKKRFSHRPVQEKFVCLNCGFETHADEQAALNIARSWLFLRSQEYKKYQTNKTTGNTDKRAFVETWQSFYRKKLKEVWKPAV

SEQ ID NO: 92 - protein, 977 aa, Artificial Sequence
  CasX variant
MQEIKRINKIRRRLVKDSNTKKAGKTGPMKTLLVRVMTPDLRERLENLRKKPENIPQPISNTSRANLNKLLTDYTEMKKAILHVYWEEFQKDPVGLMSRVAQPAPKNIDQRKLIPVKDGNERLTSSGFACSQCCQPLYVYKLEQVNDKGKPHTNYFGRCNVSEHERLILLSPHKPEANDELVTYSLGKFGQRALDFYSIHVTRESNHPVKPLEQIGGNSCASGPVGKALSDACMGAVASFLTKYQDIILEHQKVIKKNEKRLANLKDIASANGLAFPKITLPPQPHTKEGIEAYNNVVAQIVIWVNLNLWQKLKIGRDEAKPLQRLKGFPSFPLVERQANEVDWWDMVCNVKKLINEKKEDGKVFWQNLAGYKRQEALRPYLSSENDRKKGKKFARYQLGDLLLHLEKKHGEDWGKVYDEAWERIDKKVEGLSKHIKLEEERRSEDAQSKAALTDWLRAKASFVIEGLKEADKDEFCRCELKLQKWYGDLRGKPFAIEAENSILDISGFSKQYNCAFIWQKDGVKKLNLYLIINYFKGGKLRFKKIKPEAFEANRFYTVINKKSGEIVPMEVNFNFDDPNLIILPLAFGKRQGREFIWNDLLSLETGSLKLANGRVIEKTLYNRRTRQDEPALFVALTFERREVLDSSNIKPMNLIGVDRGENIPAVIALTDPEGCPLSRFKDSLGNPTHILRIGESYKEKQRTIQAKKEVEQRRAGGYSRKYASKAKNLADDMVRNTARDLLYYAVTQDAMLIFENLSRGFGRQGKRTFMAERQYTRMEDWLTAKLAYEGLSKTYLSKTLAQYTSKTCSNCGFTITSADYDRVLEKLKKTATGWMTTINGKELKVEGQITYYNRRKRQNVVKDLSVELDRLSEESVNNDISSWTKGRSGEALSLLKKRFSHRPVQEKFVCLNCGFETHADEQAALNIARSWLFLRSQEYKKYQTNKTTGNTDKRAFVETWQSFYRKKLKEVWKPAV

SEQ ID NO: 93 - protein, 977 aa, Artificial Sequence
  CasX variant
MQEIKRINKIRRRLVKDSNTKKAGKTGPMKTLLVRVMTPDLRERLENLRKKPENIPQPISNTSRANLNKLLTDYTEMKKAILHVYWEEFQKDPVGLMSRVAQPAPKNIDQRKLIPVKDGNERLTSSGFACSQCCQPLYVYKLEQVNDKGKPHTNYFGRCNVSEHERLILLSPHKPEANDELVTYSLGKFGQRALDFYSIHVTRESNHPVKPLEQIGGNSCASGPVGKALSDACMGAVASFLTKYQDIILEHQKVIKKNEKRLANLKDIASANGLAFPKITLPPQPHTKEGIEAYNNVVAQIVIWVNLNLWQKLKIGRDEAKPLQRLKGFPSFPLVERQANEVDWWDMVCNVKKLINEKKEDGKVFWQNLAGYKRQEALRPYLSSEEDRKKGKKFARYQLGDLLLHLEKKHGEDWGKVYDEAWERIDKKVEGLSKHIKLEEERRSEDAQSKAALTDWLRAKASFVIEGLKEADKDEFSRCELKLQKWYGDLRGKPFAIEAENSILDISGFSKQYNCAFIWQKDGVKKLNLYLIINYFKGGKLRFKKIKPEAFEANRFYTVINKKSGEIVPMEVNFNFDDPNLIILPLAFGKRQGREFIWNDLLSLETGSLKLANGRVIEKTLYNRRTRQDEPALFVALTFERREVLDSSNIKPMNLIGVDRGENIPAVIALTDPEGCPLSRFKDSLGNPTHILRIGESYKEKQRTIQAKKEVEQRRAGGYSRKYASKAKNLADDMVRNTARDLLYYAVTQDAMLIFENLSRGFGRQGKRTFMAERQYTRMEDWLTAKLAYEGLSKTYLSKTLAQYTSKTCSNCGFTITSADYDRVLEKLKKTATGWMTTINGKELKVEGQITYYNRRKRQNVVKDLSVELDRLSEESVNNDISSWTKGRSGEALSLLKKRFSHRPVQEKFVCLNCGFETHADEQAALNIARSWLFLRSQEYKKYQTNKTTGNTDKRAFVETWQSFYRKKLKEVWKPAV

SEQ ID NO: 94 - protein, 977 aa, Artificial Sequence
  CasX variant
MQEIKRINKIRRRLVKDSNTKKAGKTGPMKTLLVRVMTPDLRERLENLRKKPENIPQPISNTSRANLNKLLTDYTEMKKAILHVYWEEFQKDPVGLMSRVAQPAPKNIDQRKLIPVKDGNERLTSSGFACSQCCQPLYVYKLEQVNDKGKPHTNYFGRCNVSEHERLILLSPHKPEANDELVTYSLGKFGQRALDFYSIHVTRESNHPVKPLEQIGGNSCASGPVGKALSDACMGAVASFLTKYQDIILEHQKVIKKNEKRLANLKDIASANGLAFPKITLPPQPHTKEGIEAYNNVVAQIVIWVNLNLWQKLKIGRDEAKPLQRLKGFPSFPLVERQANEVDWWDMVCNVKKLINEKKEDGKVFWQNLAGYKRQEALRPYLSSEEDRKKGKKFARYQLGDLLKHLEKKHGEDWGKVYDEAWERIDKKVEGLSKHIKLEEERRSEDAQSKAALTDWLRAKASFVIEGLKEADKDEFCRCELKLQKWYGDLRGKPFAIEAENSILDISGFSKQYNCAFIWQKDGVKKLNLYLIINYFKGGKLRFKKIKPEAFEANRFYTVINKKSGEIVPMEVNFNFDDPNLIILPLAFGKRQGREFIWNDLLSLETGSLKLANGRVIEKTLYNRRTRQDEPALFVALTFERREVLDSSNIKPMNLIGVDRGENIPAVIALTDPEGCPLSRFKDSLGNPTHILRIGESYKEKQRTIQAKKEVEQRRAGGYSRKYASKAKNLADDMVRNTARDLLYYAVTQDAMLIFENLSRGFGRQGKRTFMAERQYTRMEDWLTAKLAYEGLSKTYLSKTLAQYTSKTCSNCGFTITSADYDRVLEKLKKTATGWMTTINGKELKVEGQITYYNRRKRQNVVKDLSVELDRLSEESVNNDISSWTKGRSGEALSLLKKRFSHRPVQEKFVCLNCGFETHADEQAALNIARSWLFLRSQEYKKYQTNKTTGNTDKRAFVETWQSFYRKKLKEVWKPAV

SEQ ID NO: 95 - protein, 977 aa, Artificial Sequence
  CasX variant
MQEIKRINKIRRRLVKDSNTKKAGKTGPMKTLLVRVMTPDLRERLENLRKKPENIPQPISNTSRANLNKLLTDYTEMKKAILHVYWEEFQKDPVGLMSRVAQPAPKNIDQRKLIPVKDGNERLTSSGFACSQCCQPLYVYKLEQVNDKGKPHTNYFGRCNVSEHERLILLSPHKPEANDELVTYSLGKFGQRALDFYSIHVTRESNHPVKPLEQIGGNSCASGPVGKALSDACMGAVASFLTKYQDIILEHQKVIKKNEKRLANLKDIASANGLAFPKITLPPQPHTKEGIEAYNNVVAQIVIWVNLNLWQKLKIGRDEAKPLQRLKGFPSFPLVERQANEVDWWDMVCNVKKLINEKKEDGKVFWQNLAGYKRQEALRPYLSSENDRKKGKKFARYQLGDLLKHLEKKHGEDWGKVYDEAWERIDKKVEGLSKHIKLEEERRSEDAQSKAALTDWLRAKASFVIEGLKEADKDEFSRCELKLQKWYGDLRGKPFAIEAENSILDISGFSKQYNCAFIWQKDGVKKLNLYLIINYFKGGKLRFKKIKPEAFEANRFYTVINKKSGEIVPMEVNFNFDDPNLIILPLAFGKRQGREFIWNDLLSLETGSLKLANGRVIEKTLYNRRTRQDEPALFVALTFERREVLDSSNIKPMNLIGVDRGENIPAVIALTDPEGCPLSRFKDSLGNPTHILRIGESYKEKQRTIQAKKEVEQRRAGGYSRKYASKAKNLADDMVRNTARDLLYYAVTQDAMLIFENLSRGFGRQGKRTFMAERQYTRMEDWLTAKLAYEGLSKTYLSKTLAQYTSKTCSNCGFTITSADYDRVLEKLKKTATGWMTTINGKELKVEGQITYYNRRKRQNVVKDLSVELDRLSEESVNNDISSWTKGRSGEALSLLKKRFSHRPVQEKFVCLNCGFETHADEQAALNIARSWLFLRSQEYKKYQTNKTTGNTDKRAFVETWQSFYRKKLKEVWKPAV

SEQ ID NO: 96 - protein, 977 aa, Artificial Sequence
  CasX variant
MQEIKRINKIRRRLVKDSNTKKAGKTGPMKTLLVRVMTPDLRERLENLRKKPENIPQPISNTSRANLNKLLTDYTEMKKAILHVYWEEFQKDPVGLMSRVAQPAPKNIDQRKLIPVKDGNERLTSSGFACSQCCQPLYVYKLEQVNDKGKPHTNYFGRCNVSEHERLILLSPHKPEANDELVTYSLGKFGQRALDFYSIHVTRESNHPVKPLEQIGGNSCASGPVGKALSDACMGAVASFLTKYQDIILEHQKVIKKNEKRLANLKDIASANGLAFPKITLPPQPHTKEGIEAYNNVVAQIVIWVNLNLWQKLKIGRDEAKPLQRLKGFPSFPLVERQANEVDWWDMVCNVKKLINEKKEDGKVFWQNLAGYKRQEALRPYLSSEEDRKKGKKFARYQLGDLLLHLEKKHGEDWGKVYDEAWERIDKKVEGLSKHIKLEEERRSEDAQSKAALTDWLRAKASFVIEGLKEADKDEFCRCELKLQKWYGDLRGKPFAIEAENSILDISGFSKQYNCAFIWQKDGVKKLNLYLIINYFKGGKLRFKKIKPEAFEANRFYTVINKKSGEIVPMEVNFNFDDPNLIILPLAFGKRQGREFIWNDLLSLETGSLKLANGRVIEKTLYNRRTRQDEPALFVALTFERREVLDSSNIKPMNLIGVDRGENIPAVIALTDPEGCPLSRFKDSLGNPTHILRIGESYKEKQRTIQAKKEVEQRRAGGYSRKYASKAKNLADDMVRNTARDLLYYAVTQDAMLIFENLSRGFGRQGKRTFMAERQYTRMEDWLTAKLAYEGLSKTLLSKTLAQYTSKTCSNCGFTITSADYDRVLEKLKKTATGWMTTINGKELKVEGQITYYNRRKRQNVVKDLSVELDRLSEESVNNDISSWTKGRSGEALSLLKKRFSHRPVQEKFVCLNCGFETHADEQAALNIARSWLFLRSQEYKKYQTNKTTGNTDKRAFVETWQSFYRKKLKEVWKPAV

SEQ ID NO: 97 - protein, 977 aa, Artificial Sequence
  CasX variant
MQEIKRINKIRRRLVKDSNTKKAGKTGPMKTLLVRVMTPDLRERLENLRKKPENIPQPISNTSRANLNKLLTDYTEMKKAILHVYWEEFQKDPVGLMSRVAQPAPKNIDQRKLIPVKDGNERLTSSGFACSQCCQPLYVYKLEQVNDKGKPHTNYFGRCNVSEHERLILLSPHKPEANDELVTYSLGKFGQRALDFYSIHVTRESNHPVKPLEQIGGNSCASGPVGKALSDACMGAVASFLTKYQDIILEHQKVIKKNEKRLANLKDIASANGLAFPKITLPPQPHTKEGIEAYNNVVAQIVIWVNLNLWQKLKIGRDEAKPLQRLKGFPSFPLVERQANEVDWWDMVCNVKKLINEKKEDGKVFWQNLAGYKRQEALRPYLSSENDRKKGKKFARYQLGDLLLHLEKKHGEDWGKVYDEAWERIDKKVEGLSKHIKLEEERRSEDAQSKAALTDWLRAKASFVIEGLKEADKDEFCRCELKLQKWYGDLRGKPFAIEAENSILDISGFSKQYNCAFIWQKDGVKKLNLYLIINYFKGGKLRFKKIKPEAFEANRFYTVINKKSGEIVPMEVNFNFDDPNLIILPLAFGKRQGREFIWNDLLSLETGSLKLANGRVIEKTLYNRRTRQDEPALFVALTFERREVLDSSNIKPMNLIGVDRGENIPAVIALTDPEGCPLSRFKDSLGNPTHILRIGESYKEKQRTIQAKKEVEQRRAGGYSRKYASKAKNLADDMVRNTARDLLYYAVTQDAMLIFENLSRGFGRQGKRTFMAERQYTRMEDWLTAKLAYEGLSKTLLSKTLAQYTSKTCSNCGFTITSADYDRVLEKLKKTATGWMTTINGKELKVEGQITYYNRRKRQNVVKDLSVELDRLSEESVNNDISSWTKGRSGEALSLLKKRFSHRPVQEKFVCLNCGFETHADEQAALNIARSWLFLRSQEYKKYQTNKTTGNTDKRAFVETWQSFYRKKLKEVWKPAV

SEQ ID NO: 98 - protein, 977 aa, Artificial Sequence
  CasX variant
MQEIKRINKIRRRLVKDSNTKKAGKTGPMKTLLVRVMTPDLRERLENLRKKPENIPQPISNTSRANLNKLLTDYTEMKKAILHVYWEEFQKDPVGLMSRVAQPAPKNIDQRKLIPVKDGNERLTSSGFACSQCCQPLYVYKLEQVNDKGKPHTNYFGRCNVSEHERLILLSPHKPEANDELVTYSLGKFGQRALDFYSIHVTRESNHPVKPLEQIGGNSCASGPVGKALSDACMGAVASFLTKYQDIILEHQKVIKKNEKRLANLKDIASANGLAFPKITLPPQPHTKEGIEAYNNVVAQIVIWVNLNLWQKLKIGRDEAKPLQRLKGFPSFPLVERQANEVDWWDMVCNVKKLINEKKEDGKVFWQNLAGYKRQEALRPYLSSENDRKKGKKFARYQLGDLLKHLEKKHGEDWGKVYDEAWERIDKKVEGLSKHIKLEEERRSEDAQSKAALTDWLRAKASFVIEGLKEADKDEFSRCELKLQKWYGDLRGKPFAIEAENSILDISGFSKQYNCAFIWQKDGVKKLNLYLIINYFKGGKLRFKKIKPEAFEANRFYTVINKKSGEIVPMEVNFNFDDPNLIILPLAFGKRQGREFIWNDLLSLETGSLKLANGRVIEKTLYNRRTRQDEPALFVALTFERREVLDSSNIKPMNLIGVDRGENIPAVIALTDPEGCPLSRFKDSLGNPTHILRIGESYKEKQRTIQAKKEVEQRRAGGYSRKYASKAKNLADDMVRNTARDLLYYAVTQDAMLIFENLSRGFGRQGKRTFMAERQYTRMEDWLTAKLAYEGLSKTLLSKTLAQYTSKTCSNCGFTITSADYDRVLEKLKKTATGWMTTINGKELKVEGQITYYNRRKRQNVVKDLSVELDRLSEESVNNDISSWTKGRSGEALSLLKKRFSHRPVQEKFVCLNCGFETHADEQAALNIARSWLFLRSQEYKKYQTNKTTGNTDKRAFVETWQSFYRKKLKEVWKPAV

SEQ ID NO: 99 - protein, 977 aa, Artificial Sequence
  CasX variant
MQEIKRINKIRRRLVKDSNTKKAGKTGPMKTLLVRVMTPDLRERLENLRKKPENIPQPISNTSRANLNKLLTDYTEMKKAILHVYWEEFQKDPVGLMSRVAQPAPKNIDQRKLIPVKDGNERLTSSGFACSQCCQPLYVYKLEQVNDKGKPHTNYFGRCNVSEHERLILLSPHKPEANDELVTYSLGKFGQRALDFYSIHVTRESNHPVKPLEQIGGNSCASGPVGKALSDACMGAVASFLTKYQDIILEHQKVIKKNEKRLANLKDIASANGLAFPKITLPPQPHTKEGIEAYNNVVAQIVIWVNLNLWQKLKIGRDEAKPLQRLKGFPSFPLVERQANEVDWWDMVCNVKKLINEKKEDGKVFWQNLAGYKRQEALRPYLSSEEDRKKGKKFARYQFGDLLLHLEKKHGEDWGKVYDEAWERIDKKVEGLSKHIKLEEERRSEDAQSKAALTDWLRAKASFVIEGLKEADKDEFCRCELKLQKWYGDLRGKPFAIEAENSILDISGFSKQYNCAFIWQKDGVKKLNLYLIINYFKGGKLRFKKIKPEAFEANRFYTVINKKSGEIVPMEVNFNFDDPNLIILPLAFGKRQGREFIWNDLLSLETGSLKLANGRVIEKTLYNRRTRQDEPALFVALTFERREVLDSSNIKPMNLIGVDRGENIPAVIALTDPEGCPLSRFKDSLGNPTHILRIGESYKEKQRTIQAKKEVEQRRAGGYSRKYASKAKNLADDMVRNTARDLLYYAVTQDAMLIFENLSRGFGRQGKRTFMAERQYTRMEDWLTAKLAYEGLSKTLLSKTLAQYTSKTCSNCGFTITSADYDRVLEKLKKTATGWMTTINGKELKVEGQITYYNRRKRQNVVKDLSVELDRLSEESVNNDISSWTKGRSGEALSLLKKRFSHRPVQEKFVCLNCGFETHADEQAALNIARSWLFLRSQEYKKYQTNKTTGNTDKRAFVETWQSFYRKKLKEVWKPAV

SEQ ID NO: 100 - protein, 977 aa, Artificial Sequence
  CasX variant
MQEIKRINKIRRRLVKDSNTKKAGKTGPMKTLLVRVMTPDLRERLENLRKKPENIPQPISNTSRANLNKLLTDYTEMKKAILHVYWEEFQKDPVGLMSRVAQPAPKNIDQRKLIPVKDGNERLTSSGFACSQCCQPLYVYKLEQVNDKGKPHTNYFGRCNVSEHERLILLSPHKPEANDELVTYSLGKFGQRALDFYSIHVTRESNHPVKPLEQIGGNSCASGPVGKALSDACMGAVASFLTKYQDIILEHQKVIKKNEKRLANLKDIASANGLAFPKITLPPQPHTKEGIEAYNNVVAQIVIWVNLNLWQKLKIGRDEAKPLQRLKGFPSFPLVERQANEVDWWDMVCNVKKLINEKKEDGKVFWQNLAGYKRQEALRPYLSSEEDRKKGKKFARYQFGDLLKHLEKKHGEDWGKVYDEAWERIDKKVEGLSKHIKLEEERRSEDAQSKAALTDWLRAKASFVIEGLKEADKDEFCRCELKLQKWYGDLRGKPFAIEAENSILDISGFSKQYNCAFIWQKDGVKKLNLYLIINYFKGGKLRFKKIKPEAFEANRFYTVINKKSGEIVPMEVNFNFDDPNLIILPLAFGKRQGREFIWNDLLSLETGSLKLANGRVIEKTLYNRRTRQDEPALFVALTFERREVLDSSNIKPMNLIGVDRGENIPAVIALTDPEGCPLSRFKDSLGNPTHILRIGESYKEKQRTIQAKKEVEQRRAGGYSRKYASKAKNLADDMVRNTARDLLYYAVTQDAMLIFENLSRGFGRQGKRTFMAERQYTRMEDWLTAKLAYEGLSKTLLSKTLAQYTSKTCSNCGFTITSADYDRVLEKLKKTATGWMTTINGKELKVEGQITYYNRRKRQNVVKDLSVELDRLSEESVNNDISSWTKGRSGEALSLLKKRFSHRPVQEKFVCLNCGFETHADEQAALNIARSWLFLRSQEYKKYQTNKTTGNTDKRAFVETWQSFYRKKLKEVWKPAV

SEQ ID NO: 101 - protein, 977 aa, Artificial Sequence
  CasX variant
MQEIKRINKIRRRLVKDSNTKKAGKTGPMKTLLVRVMTPDLRERLENLRKKPENIPQPISNTSRANLNKLLTDYTEMKKAILHVYWEEFQKDPVGLMSRVAQPAPKNIDQRKLIPVKDGNERLTSSGFACSQCCQPLYVYKLEQVNDKGKPHTNYFGRCNVSEHERLILLSPHKPEANDELVTYSLGKFGQRALDFYSIHVTRESNHPVKPLEQIGGNSCASGPVGKALSDACMGAVASFLTKYQDIILEHQKVIKKNEKRLANLKDIASANGLAFPKITLPPQPHTKEGIEAYNNVVAQIVIWVNLNLWQKLKIGRDEAKPLQRLKGFPSFPLVERQANEVDWWDMVCNVKKLINEKKEDGKVFWQNLAGYKRQEALRPYLSSENDRKKGKKFARYQFGDLLLHLEKKHGEDWGKVYDEAWERIDKKVEGLSKHIKLEEERRSEDAQSKAALTDWLRAKASFVIEGLKEADKDEFCRCELKLQKWYGDLRGKPFAIEAENSILDISGFSKQYNCAFIWQKDGVKKLNLYLIINYFKGGKLRFKKIKPEAFEANRFYTVINKKSGEIVPMEVNFNFDDPNLIILPLAFGKRQGREFIWNDLLSLETGSLKLANGRVIEKTLYNRRTRQDEPALFVALTFERREVLDSSNIKPMNLIGVDRGENIPAVIALTDPEGCPLSRFKDSLGNPTHILRIGESYKEKQRTIQAKKEVEQRRAGGYSRKYASKAKNLADDMVRNTARDLLYYAVTQDAMLIFENLSRGFGRQGKRTFMAERQYTRMEDWLTAKLAYEGLSKTLLSKTLAQYTSKTCSNCGFTITSADYDRVLEKLKKTATGWMTTINGKELKVEGQITYYNRRKRQNVVKDLSVELDRLSEESVNNDISSWTKGRSGEALSLLKKRFSHRPVQEKFVCLNCGFETHADEQAALNIARSWLFLRSQEYKKYQTNKTTGNTDKRAFVETWQSFYRKKLKEVWKPAV

SEQ ID NO: 102 - protein, 977 aa, Artificial Sequence
  CasX variant
MQEIKRINKIRRRLVKDSNTKKAGKTGPMKTLLVRVMTPDLRERLENLRKKPENIPQPISNTSRANLNKLLTDYTEMKKAILHVYWEEFQKDPVGLMSRVAQPAPKNIDQRKLIPVKDGNERLTSSGFACSQCCQPLYVYKLEQVNDKGKPHTNYFGRCNVSEHERLILLSPHKPEANDELVTYSLGKFGQRALDFYSIHVTRESNHPVKPLEQIGGNSCASGPVGKALSDACMGAVASFLTKYQDIILEHQKVIKKNEKRLANLKDIASANGLAFPKITLPPQPHTKEGIEAYNNVVAQIVIWVNLNLWQKLKIGRDEAKPLQRLKGFPSFPLVERQANEVDWWDMVCNVKKLINEKKEDGKVFWQNLAGYKRQEALRPYLSSENDRKKGKKFARYQFGDLLKHLEKKHGEDWGKVYDEAWERIDKKVEGLSKHIKLEEERRSEDAQSKAALTDWLRAKASFVIEGLKEADKDEFSRCELKLQKWYGDLRGKPFAIEAENSILDISGFSKQYNCAFIWQKDGVKKLNLYLIINYFKGGKLRFKKIKPEAFEANRFYTVINKKSGEIVPMEVNFNFDDPNLIILPLAFGKRQGREFIWNDLLSLETGSLKLANGRVIEKTLYNRRTRQDEPALFVALTFERREVLDSSNIKPMNLIGVDRGENIPAVIALTDPEGCPLSRFKDSLGNPTHILRIGESYKEKQRTIQAKKEVEQRRAGGYSRKYASKAKNLADDMVRNTARDLLYYAVTQDAMLIFENLSRGFGRQGKRTFMAERQYTRMEDWLTAKLAYEGLSKTLLSKTLAQYTSKTCSNCGFTITSADYDRVLEKLKKTATGWMTTINGKELKVEGQITYYNRRKRQNVVKDLSVELDRLSEESVNNDISSWTKGRSGEALSLLKKRFSHRPVQEKFVCLNCGFETHADEQAALNIARSWLFLRSQEYKKYQTNKTTGNTDKRAFVETWQSFYRKKLKEVWKPAV

SEQ ID NO: 103 - protein, 977 aa, Artificial Sequence
  CasX variant
MQEIKRINKIRRRLVKDSNTKKAGKTGPMKTLLVRVMTPDLRERLENLRKKPENIPQPISNTSRANLNKLLTDYTEMKKAILHVYWEEFQKDPVGLMSRVAQPAPKNIDQRKLIPVKDGNERLTSSGFACSQCCQPLYVYKLEQVNDKGKPHTNYFGRCNVSEHERLILLSPHKPEANDELVTYSLGKFGQRALDFYSIHVTRESNHPVKPLEQIGGNSCASGPVGKALSDACMGAVASFLTKYQDIILEHQKVIKKNEKRLANLKDIASANGLAFPKITLPPQPHTKEGIEAYNNVVAQIVIWVNLNLWQKLKIGRDEAKPLQRLKGFPSFPLVERQANEVDWWDMVCNVKKLINEKKEDGKVFWQNLAGYKRQEALRPYLSSENDRKKGKKFARYQFGDLLLHLEKKHGEDWGKVYDEAWERIDKKVEGLSKHIKLEEERRSEDAQSKAALTDWLRAKASFVIEGLKEADKDEFCRCELKLQKWYGDLRGKPFAIEAENSILDISGFSKQYNCAFIWQKDGVKKLNLYLIINYFKGGKLRFKKIKPEAFEANRFYTVINKKSGEIVPMEVNFNFDDPNLIILPLAFGKRQGREFIWNDLLSLETGSLKLANGRVIEKTLYNRRTRQDEPALFVALTFERREVLDSSNIKPMNLIGIDRGENIPAVIALTDPEGCPLSRFKDSLGNPTHILRIGESYKEKQRTIQAKKEVEQRRAGGYSRKYASKAKNLADDMVRNTARDLLYYAVTQDAMLIFENLSRGFGRQGKRTFMAERQYTRMEDWLTAKLAYEGLSKTYLSKTLAQYTSKTCSNCGFTITSADYDRVLEKLKKTATGWMTTINGKELKVEGQITYYNRRKRQNVVKDLSVELDRLSEESVNNDISSWTKGRSGEALSLLKKRFSHRPVQEKFVCLNCGFETHADEQAALNIARSWLFLRSQEYKKYQTNKTTGNTDKRAFVETWQSFYRKKLKEVWKPAV

SEQ ID NO: 104 - protein, 977 aa, Artificial Sequence
  CasX variant
MQEIKRINKIRRRLVKDSNTKKAGKTGPMKTLLVRVMTPDLRERLENLRKKPENIPQPISNTSRANLNKLLTDYTEMKKAILHVYWEEFQKDPVGLMSRVAQPAPKNIDQRKLIPVKDGNERLTSSGFACSQCCQPLYVYKLEQVNDKGKPHTNYFGRCNVSEHERLILLSPHKPEANDELVTYSLGKFGQRALDFYSIHVTRESNHPVKPLEQIGGNSCASGPVGKALSDACMGAVASFLTKYQDIILEHQKVIKKNEKRLANLKDIASANGLAFPKITLPPQPHTKEGIEAYNNVVAQIVIWVNLNLWQKLKIGRDEAKPLQRLKGFPSFPLVERQANEVDWWDMVCNVKKLINEKKEDGKVFWQNLAGYKRQEALRPYLSSENDRKKGKKFARYQFGDLLKHLEKKHGEDWGKVYDEAWERIDKKVEGLSKHIKLEEERRSEDAQSKAALTDWLRAKASFVIEGLKEADKDEFCRCELKLQKWYGDLRGKPFAIEAENSILDISGFSKQYNCAFIWQKDGVKKLNLYLIINYFKGGKLRFKKIKPEAFEANRFYTVINKKSGEIVPMEVNFNFDDPNLIILPLAFGKRQGREFIWNDLLSLETGSLKLANGRVIEKTLYNRRTRQDEPALFVALTFERREVLDSSNIKPMNLIGIDRGENIPAVIALTDPEGCPLSRFKDSLGNPTHILRIGESYKEKQRTIQAKKEVEQRRAGGYSRKYASKAKNLADDMVRNTARDLLYYAVTQDAMLIFENLSRGFGRQGKRTFMAERQYTRMEDWLTAKLAYEGLSKTYLSKTLAQYTSKTCSNCGFTITSADYDRVLEKLKKTATGWMTTINGKELKVEGQITYYNRRKRQNVVKDLSVELDRLSEESVNNDISSWTKGRSGEALSLLKKRFSHRPVQEKFVCLNCGFETHADEQAALNIARSWLFLRSQEYKKYQTNKTTGNTDKRAFVETWQSFYRKKLKEVWKPAV

SEQ ID NO: 105 - protein, 977 aa, Artificial Sequence
  CasX variant
MQEIKRINKIRRRLVKDSNTKKAGKTGPMKTLLVRVMTPDLRERLENLRKKPENIPQPISNTSRANLNKLLTDYTEMKKAILHVYWEEFQKDPVGLMSRVAQPAPKNIDQRKLIPVKDGNERLTSSGFACSQCCQPLYVYKLEQVNDKGKPHTNYFGRCNVSEHERLILLSPHKPEANDELVTYSLGKFGQRALDFYSIHVTRESNHPVKPLEQIGGNSCASGPVGKALSDACMGAVASFLTKYQDIILEHQKVIKKNEKRLANLKDIASANGLAFPKITLPPQPHTKEGIEAYNNVVAQIVIWVNLNLWQKLKIGRDEAKPLQRLKGFPSFPLVERQANEVDWWDMVCNVKKLINEKKEDGKVFWQNLAGYKRQEALRPYLSSPEDRKKGKKFARYQFGDLLLHLEKKHGEDWGKVYDEAWERIDKKVEGLSKHIKLEEERRSEDAQSKAALTDWLRAKASFVIEGLKEADKDEFCRCELKLQKWYGDLRGKPFAIEAENSILDISGFSKQYNCAFIWQKDGVKKLNLYLIINYFKGGKLRFKKIKPEAFEANRFYTVINKKSGEIVPMEVNFNFDDPNLIILPLAFGKRQGREFIWNDLLSLETGSLKLANGRVIEKTLYNRRTRQDEPALFVALTFERREVLDSSNIKPMNLIGIDRGENIPAVIALTDPEGCPLSRFKDSLGNPTHILRIGESYKEKQRTIQAKKEVEQRRAGGYSRKYASKAKNLANDMVRNTARDLLYYAVTQDAMLIFENLSRGFGRQGKRTFMAERQYTRMEDWLTAKLAYEGLSKTYLSKTLAQYTSKTCSNCGFTITSADYDRVLEKLKKTATGWMTTINGKELKVEGQITYYNRRKRQNVVKDLSVELDRLSEESVNNDISSWTKGRSGEALSLLKKRFSHRPVQEKFVCLNCGFETHADEQAALNIARSWLFLRSQEYKKYQTNKTTGNTDKRAFVETWQSFYRKKLKEVWKPAV

SEQ ID NO: 106 - protein, 977 aa, Artificial Sequence
  CasX variant
MQEIKRINKIRRRLVKDSNTKKAGKTGPMKTLLVRVMTPDLRERLENLRKKPENIPQPISNTSRANLNKLLTDYTEMKKAILHVYWEEFQKDPVGLMSRVAQPAPKNIDQRKLIPVKDGNERLTSSGFACSQCCQPLYVYKLEQVNDKGKPHTNYFGRCNVSEHERLILLSPHKPEANDELVTYSLGKFGQRALDFYSIHVTRESNHPVKPLEQIGGNSCASGPVGKALSDACMGAVASFLTKYQDIILEHQKVIKKNEKRLANLKDIASANGLAFPKITLPPQPHTKEGIEAYNNVVAQIVIWVNLNLWQKLKIGRDEAKPLQRLKGFPSFPLVERQANEVDWWDMVCNVKKLINEKKEDGKVFWQNLAGYKRQEALRPYLSSPEDRKKGKKFARYQFGDLLLHLEKKHGEDWGKVYDEAWERIDKKVEGLSKHIKLEEERRSEDAQSKAALTDWLRAKASFVIEGLKEADKDEFCRCELKLQKWYGDLRGKPFAIEAENSILDISGFSKQYNCAFIWQKDGVKKLNLYLIINYFKGGKLRFKKIKPEAFEANRFYTVINKKSGEIVPMEVNFNFDDPNLIILPLAFGKRQGREFIWNDLLSLETGSLKLANGRVIEKTLYNRRTRQDEPALFVALTFERREVLDSSNIKPMNLIGVDRGENIPAVIALTDPEGCPLSRFKDSLGNPTHILRIGESYKEKQRTIQAKKEVEQRRAGGYSRKYASKAKNLANDMVRNTARDLLYYAVTQDAMLIFENLSRGFGRQGKRTFMAERQYTRMEDWLTAKLAYEGLSKTYLSKTLAQYTSKTCSNCGFTITSADYDRVLEKLKKTATGWMTTINGKELKVEGQITYYNRRKRQNVVKDLSVELDRLSEESVNNDISSWTKGRSGEALSLLKKRFSHRPVQEKFVCLNCGFETHADEQAALNIARSWLFLRSQEYKKYQTNKTTGNTDKRAFVETWQSFYRKKLKEVWKPAV

SEQ ID NO: 107 - protein, 977 aa, Artificial Sequence
  CasX variant
MQEIKRINKIRRRLVKDSNTKKAGKTGPMKTLLVRVMTPDLRERLENLRKKPENIPQPISNTSRANLNKLLTDYTEMKKAILHVYWEEFQKDPVGLMSRVAQPAPKNIDQRKLIPVKDGNERLTSSGFACSQCCQPLYVYKLEQVNDKGKPHTNYFGRCNVSEHERLILLSPHKPEANDELVTYSLGKFGQRALDFYSIHVTRESNHPVKPLEQIGGNSCASGPVGKALSDACMGAVASFLTKYQDIILEHQKVIKKNEKRLANLKDIASANGLAFPKITLPPQPHTKEGIEAYNNVVAQIVIWVNLNLWQKLKIGRDEAKPLQRLKGFPSFPLVERQANEVDWWDMVCNVKKLINEKKEDGKVFWQNLAGYKRQEALRPYLSSPEDRKKGKKFARYQLGDLLLHLEKKHGEDWGKVYDEAWERIDKKVEGLSKHIKLEEERRSEDAQSKAALTDWLRAKASFVIEGLKEADKDEFCRCELKLQKWYGDLRGKPFAIEAENSILDISGFSKQYNCAFIWQKDGVKKLNLYLIINYFKGGKLRFKKIKPEAFEANRFYTVINKKSGEIVPMEVNFNFDDPNLIILPLAFGKRQGREFIWNDLLSLETGSLKLANGRVIEKTLYNRRTRQDEPALFVALTFERREVLDSSNIKPMNLIGVDRGENIPAVIALTDPEGCPLSRFKDSLGNPTHILRIGESYKEKQRTIQAKKEVEQRRAGGYSRKYASKAKNLANDMVRNTARDLLYYAVTQDAMLIFENLSRGFGRQGKRTFMAERQYTRMEDWLTAKLAYEGLSKTYLSKTLAQYTSKTCSNCGFTITSADYDRVLEKLKKTATGWMTTINGKELKVEGQITYYNRRKRQNVVKDLSVELDRLSEESVNNDISSWTKGRSGEALSLLKKRFSHRPVQEKFVCLNCGFETHADEQAALNIARSWLFLRSQEYKKYQTNKTTGNTDKRAFVETWQSFYRKKLKEVWKPAV

SEQ ID NO: 108 - protein, 977 aa, Artificial Sequence
  CasX variant
MQEIKRINKIRRRLVKDSNTKKAGKTGPMKTLLVRVMTPDLRERLENLRKKPENIPQPISNTSRANLNKLLTDYTEMKKAILHVYWEEFQKDPVGLMSRVAQPAPKNIDQRKLIPVKDGNERLTSSGFACSQCCQPLYVYKLEQVNDKGKPHTNYFGRCNVSEHERLILLSPHKPEANDELVTYSLGKFGQRALDFYSIHVTRESNHPVKPLEQIGGNSCASGPVGKALSDACMGAVASFLTKYQDIILEHQKVIKKNEKRLANLKDIASANGLAFPKITLPPQPHTKEGIEAYNNVVAQIVIWVNLNLWQKLKIGRDEAKPLQRLKGFPSFPLVERQANEVDWWDMVCNVKKLINEKKEDGKVFWQNLAGYKRQEALRPYLSSPNDRKKGKKFARYQFGDLLLHLEKKHGEDWGKVYDEAWERIDKKVEGLSKHIKLEEERRSEDAQSKAALTDWLRAKASFVIEGLKEADKDEFCRCELKLQKWYGDLRGKPFAIEAENSILDISGFSKQYNCAFIWQKDGVKKLNLYLIINYFKGGKLRFKKIKPEAFEANRFYTVINKKSGEIVPMEVNFNFDDPNLIILPLAFGKRQGREFIWNDLLSLETGSLKLANGRVIEKTLYNRRTRQDEPALFVALTFERREVLDSSNIKPMNLIGVDRGENIPAVIALTDPEGCPLSRFKDSLGNPTHILRIGESYKEKQRTIQAKKEVEQRRAGGYSRKYASKAKNLANDMVRNTARDLLYYAVTQDAMLIFENLSRGFGRQGKRTFMAERQYTRMEDWLTAKLAYEGLSKTYLSKTLAQYTSKTCSNCGFTITSADYDRVLEKLKKTATGWMTTINGKELKVEGQITYYNRRKRQNVVKDLSVELDRLSEESVNNDISSWTKGRSGEALSLLKKRFSHRPVQEKFVCLNCGFETHADEQAALNIARSWLFLRSQEYKKYQTNKTTGNTDKRAFVETWQSFYRKKLKEVWKPAV

SEQ ID NO: 109 - protein, 977 aa, Artificial Sequence
  CasX variant
MQEIKRINKIRRRLVKDSNTKKAGKTGPMKTLLVRVMTPDLRERLENLRKKPENIPQPISNTSRANLNKLLTDYTEMKKAILHVYWEEFQKDPVGLMSRVAQPAPKNIDQRKLIPVKDGNERLTSSGFACSQCCQPLYVYKLEQVNDKGKPHTNYFGRCNVSEHERLILLSPHKPEANDELVTYSLGKFGQRALDFYSIHVTRESNHPVKPLEQIGGNSCASGPVGKALSDACMGAVASFLTKYQDIILEHQKVIKKNEKRLANLKDIASANGLAFPKITLPPQPHTKEGIEAYNNVVAQIVIWVNLNLWQKLKIGRDEAKPLQRLKGFPSFPLVERQANEVDWWDMVCNVKKLINEKKEDGKVFWQNLAGYKRQEALRPYLSSPEDRKKGKKFARYQFGDLLKHLEKKHGEDWGKVYDEAWERIDKKVEGLSKHIKLEEERRSEDAQSKAALTDWLRAKASFVIEGLKEADKDEFCRCELKLQKWYGDLRGKPFAIEAENSILDISGFSKQYNCAFIWQKDGVKKLNLYLIINYFKGGKLRFKKIKPEAFEANRFYTVINKKSGEIVPMEVNFNFDDPNLIILPLAFGKRQGREFIWNDLLSLETGSLKLANGRVIEKTLYNRRTRQDEPALFVALTFERREVLDSSNIKPMNLIGVDRGENIPAVIALTDPEGCPLSRFKDSLGNPTHILRIGESYKEKQRTIQAKKEVEQRRAGGYSRKYASKAKNLANDMVRNTARDLLYYAVTQDAMLIFENLSRGFGRQGKRTFMAERQYTRMEDWLTAKLAYEGLSKTYLSKTLAQYTSKTCSNCGFTITSADYDRVLEKLKKTATGWMTTINGKELKVEGQITYYNRRKRQNVVKDLSVELDRLSEESVNNDISSWTKGRSGEALSLLKKRFSHRPVQEKFVCLNCGFETHADEQAALNIARSWLFLRSQEYKKYQTNKTTGNTDKRAFVETWQSFYRKKLKEVWKPAV

SEQ ID NO: 110 - protein, 977 aa, Artificial Sequence
  CasX variant
MQEIKRINKIRRRLVKDSNTKKAGKTGPMKTLLVRVMTPDLRERLENLRKKPENIPQPISNTSRANLNKLLTDYTEMKKAILHVYWEEFQKDPVGLMSRVAQPAPKNIDQRKLIPVKDGNERLTSSGFACSQCCQPLYVYKLEQVNDKGKPHTNYFGRCNVSEHERLILLSPHKPEANDELVTYSLGKFGQRALDFYSIHVTRESNHPVKPLEQIGGNSCASGPVGKALSDACMGAVASFLTKYQDIILEHKKVIKKNEKRLANLKDIASANGLAFPKITLPPQPHTKEGIEAYNNVVAQIVIWVNLNLWQKLKIGRDEAKPLQRLKGFPSFPLVERQANEVDWWDMVCNVKKLINEKKEDGKVFWQNLAGYKRQEALRPYLSSPEDRKKGKKFARYQFGDLLLHLEKKHGEDWGKVYDEAWERIDKKVEGLSKHIKLEEERRSEDAQSKAALTDWLRAKASFVIEGLKEADKDEFCRCELKLQKWYGDLRGKPFAIEAENSILDISGFSKQYNCAFIWQKDGVKKLNLYLIINYFKGGKLRFKKIKPEAFEANRFYTVINKKSGEIVPMEVNFNFDDPNLIILPLAFGKRQGREFIWNDLLSLETGSLKLANGRVIEKPLYNRRTRQDEPALFVALTFERREVLDSSNIKPMNLIGIDRGENIPAVIALTDPEGCPLSRFKDSLGNPTHILRIGESYKEKQRTIQAKKEVEQRRAGGYSRKYASKAKNLADDMVRNTARDLLYYAVTQDAMLIFENLSRGFGRQGKRTFMAERQYTRMEDWLTAKLAYEGLSKTYLSKTLAQYTSKTCSNCGFTITSADYDRVLEKLKKTATGWMTTINGKELKVEGQITYYNRRKRQNVVKDLSVELDRLSEESVNNDISSWTKGRSGEALSLLKKRFSHRPVQEKFVCLNCGFETHADEQAALNIARSWLFLRSQEYKKYQTNKTTGNTDKRAFVETWQSFYRKKLKEVWKPAV

SEQ ID NO: 111 - protein, 977 aa, Artificial Sequence
  CasX variant
MQEIKRINKIRRRLVKDSNTKKAGKTGPMKTLLVRVMTPDLRERLENLRKKPENIPQPISNTSRANLNKLLTDYTEMKKAILHVYWEEFQKDPVGLMSRVAQPAPKNIDQRKLIPVKDGNERLTSSGFACSQCCQPLYVYKLEQVNDKGKPHTNYFGRCNVSEHERLILLSPHKPEANDELVTYSLGKFGQRALDFYSIHVTRESNHPVKPLEQIGGNSCASGPVGKALSDACMGAVASFLTKYQDIILEHKKVIKKNEKRLANLKDIASANGLAFPKITLPPQPHTKEGIEAYNNVVAQIVIWVNLNLWQKLKIGRDEAKPLQRLKGFPSFPLVERQANEVDWWDMVCNVKKLINEKKEDGKVFWQNLAGYKRQEALRPYLSSPEDRKKGKKFARYQFGDLLLHLEKKHGEDWGKVYDEAWERIDKKVEGLSKHIKLEEERRSEDAQSKAALTDWLRAKASFVIEGLKEADKDEFCRCELKLQKWYGDLRGKPFAIEAENSILDISGFSKQYNCAFIWQKDGVKKLNLYLIINYFKGGKLRFKKIKPEAFEANRFYTVINKKSGEIVPMEVNFNFDDPNLIILPLAFGKRQGREFIWNDLLSLETGSLKLANGRVIEKPLYNRRTRQDEPALFVALTFERREVLDSSNIKPMNLIGVDRGENIPAVIALTDPEGCPLSRFKDSLGNPTHILRIGESYKEKQRTIQAKKEVEQRRAGGYSRKYASKAKNLADDMVRNTARDLLYYAVTQDAMLIFENLSRGFGRQGKRTFMAERQYTRMEDWLTAKLAYEGLSKTYLSKTLAQYTSKTCSNCGFTITSADYDRVLEKLKKTATGWMTTINGKELKVEGQITYYNRRKRQNVVKDLSVELDRLSEESVNNDISSWTKGRSGEALSLLKKRFSHRPVQEKFVCLNCGFETHADEQAALNIARSWLFLRSQEYKKYQTNKTTGNTDKRAFVETWQSFYRKKLKEVWKPAV

SEQ ID NO: 112 - protein, 977 aa, Artificial Sequence
  CasX variant
MQEIKRINKIRRRLVKDSNTKKAGKTGPMKTLLVRVMTPDLRERLENLRKKPENIPQPISNTSRANLNKLLTDYTEMKKAILHVYWEEFQKDPVGLMSRVAQPAPKNIDQRKLIPVKDGNERLTSSGFACSQCCQPLYVYKLEQVNDKGKPHTNYFGRCNVSEHERLILLSPHKPEANDELVTYSLGKFGQRALDFYSIHVTRESNHPVKPLEQIGGNSCASGPVGKALSDACMGAVASFLTKYQDIILEHKKVIKKNEKRLANLKDIASANGLAFPKITLPPQPHTKEGIEAYNNVVAQIVIWVNLNLWQKLKIGRDEAKPLQRLKGFPSFPLVERQANEVDWWDMVCNVKKLINEKKEDGKVFWQNLAGYKRQEALRPYLSSPNDRKKGKKFARYQFGDLLLHLEKKHGEDWGKVYDEAWERIDKKVEGLSKHIKLEEERRSEDAQSKAALTDWLRAKASFVIEGLKEADKDEFCRCELKLQKWYGDLRGKPFAIEAENSILDISGFSKQYNCAFIWQKDGVKKLNLYLIINYFKGGKLRFKKIKPEAFEANRFYTVINKKSGEIVPMEVNFNFDDPNLIILPLAFGKRQGREFIWNDLLSLETGSLKLANGRVIEKPLYNRRTRQDEPALFVALTFERREVLDSSNIKPMNLIGVDRGENIPAVIALTDPEGCPLSRFKDSLGNPTHILRIGESYKEKQRTIQAKKEVEQRRAGGYSRKYASKAKNLADDMVRNTARDLLYYAVTQDAMLIFENLSRGFGRQGKRTFMAERQYTRMEDWLTAKLAYEGLSKTYLSKTLAQYTSKTCSNCGFTITSADYDRVLEKLKKTATGWMTTINGKELKVEGQITYYNRRKRQNVVKDLSVELDRLSEESVNNDISSWTKGRSGEALSLLKKRFSHRPVQEKFVCLNCGFETHADEQAALNIARSWLFLRSQEYKKYQTNKTTGNTDKRAFVETWQSFYRKKLKEVWKPAV

SEQ ID NO: 113 - protein, 977 aa, Artificial Sequence
  CasX variant
MQEIKRINKIRRRLVKDSNTKKAGKTGPMKTLLVRVMTPDLRERLENLRKKPENIPQPISNTSRANLNKLLTDYTEMKKAILHVYWEEFQKDPVGLMSRVAQPAPKNIDQRKLIPVKDGNERLTSSGFACSQCCQPLYVYKLEQVNDKGKPHTNYFGRCNVSEHERLILLSPHKPEANDELVTYSLGKFGQRALDFYSIHVTRESNHPVKPLEQIGGNSCASGPVGKALSDACMGAVASFLTKYQDIILEHKKVIKKNEKRLANLKDIASANGLAFPKITLPPQPHTKEGIEAYNNVVAQIVIWVNLNLWQKLKIGRDEAKPLQRLKGFPSFPLVERQANEVDWWDMVCNVKKLINEKKEDGKVFWQNLAGYKRQEALRPYLSSPEDRKKGKKFARYQLGDLLLHLEKKHGEDWGKVYDEAWERIDKKVEGLSKHIKLEEERRSEDAQSKAALTDWLRAKASFVIEGLKEADKDEFCRCELKLQKWYGDLRGKPFAIEAENSILDISGFSKQYNCAFIWQKDGVKKLNLYLIINYFKGGKLRFKKIKPEAFEANRFYTVINKKSGEIVPMEVNFNFDDPNLIILPLAFGKRQGREFIWNDLLSLETGSLKLANGRVIEKPLYNRRTRQDEPALFVALTFERREVLDSSNIKPMNLIGVDRGENIPAVIALTDPEGCPLSRFKDSLGNPTHILRIGESYKEKQRTIQAKKEVEQRRAGGYSRKYASKAKNLADDMVRNTARDLLYYAVTQDAMLIFENLSRGFGRQGKRTFMAERQYTRMEDWLTAKLAYEGLSKTYLSKTLAQYTSKTCSNCGFTITSADYDRVLEKLKKTATGWMTTINGKELKVEGQITYYNRRKRQNVVKDLSVELDRLSEESVNNDISSWTKGRSGEALSLLKKRFSHRPVQEKFVCLNCGFETHADEQAALNIARSWLFLRSQEYKKYQTNKTTGNTDKRAFVETWQSFYRKKLKEVWKPAV

SEQ ID NO: 114 - protein, 977 aa, Artificial Sequence
  CasX variant
MQEIKRINKIRRRLVKDSNTKKAGKTGPMKTLLVRVMTPDLRERLENLRKKPENIPQPISNTSRANLNKLLTDYTEMKKAILHVYWEEFQKDPVGLMSRVAQPAPKNIDQRKLIPVKDGNERLTSSGFACSQCCQPLYVYKLEQVNDKGKPHTNYFGRCNVSEHERLILLSPHKPEANDELVTYSLGKFGQRALDFYSIHVTRESNHPVKPLEQIGGNSCASGPVGKALSDACMGAVASFLTKYQDIILEHKKVIKKNEKRLANLKDIASANGLAFPKITLPPQPHTKEGIEAYNNVVAQIVIWVNLNLWQKLKIGRDEAKPLQRLKGFPSFPLVERQANEVDWWDMVCNVKKLINEKKEDGKVFWQNLAGYKRQEALRPYLSSPEDRKKGKKFARYQFGDLLKHLEKKHGEDWGKVYDEAWERIDKKVEGLSKHIKLEEERRSEDAQSKAALTDWLRAKASFVIEGLKEADKDEFCRCELKLQKWYGDLRGKPFAIEAENSILDISGFSKQYNCAFIWQKDGVKKLNLYLIINYFKGGKLRFKKIKPEAFEANRFYTVINKKSGEIVPMEVNFNFDDPNLIILPLAFGKRQGREFIWNDLLSLETGSLKLANGRVIEKPLYNRRTRQDEPALFVALTFERREVLDSSNIKPMNLIGVDRGENIPAVIALTDPEGCPLSRFKDSLGNPTHILRIGESYKEKQRTIQAKKEVEQRRAGGYSRKYASKAKNLADDMVRNTARDLLYYAVTQDAMLIFENLSRGFGRQGKRTFMAERQYTRMEDWLTAKLAYEGLSKTYLSKTLAQYTSKTCSNCGFTITSADYDRVLEKLKKTATGWMTTINGKELKVEGQITYYNRRKRQNVVKDLSVELDRLSEESVNNDISSWTKGRSGEALSLLKKRFSHRPVQEKFVCLNCGFETHADEQAALNIARSWLFLRSQEYKKYQTNKTTGNTDKRAFVETWQSFYRKKLKEVWKPAV

SEQ ID NO: 115 - protein, 977 aa, Artificial Sequence
  CasX variant
MQEIKRINKIRRRLVKDSNTKKAGKTGPMKTLLVRVMTPDLRERLENLRKKPENIPQPISNTSRANLNKLLTDYTEMKKAILHVYWEEFQKDPVGLMSRVAQPAPKNIDQRKLIPVKDGNERLTSSGFACSQCCQPLYVYKLEQVNDKGKPHTNYFGRCNVSEHERLILLSPHKPEANDELVTYSLGKFGQRALDFYSIHVTRESNHPVKPLEQIGGNSCASGPVGKALSDACMGAVASFLTKYQDIILEHQKVIKKNEKRLANLKDIASANGLAFPKITLPPQPHTKEGIEAYNNVVAQIVIWVNLNLWQKLKIGRDEAKPLQRLKGFPSFPLVERQANEVDWWDMVCNVKKLINEKKEDGKVFWQNLAGYKRQEALRPYLSSENDRKKGKKFARYQFGDLLLHLEKKHGEDWGKVYDEAWERIDKKVEGLSKHIKLEEERRSEDAQSKAALTDWLRAKASFVIEGLKEADKDEFCRCELKLQKWYGDLRGKPFAIEAENSILDISGFSKQYNCAFIWQKDGVKKLNLYLIINYFKGGKLRFKKIKPEAFEANRFYTVINKKSGEIVPMEVNFNFDDPNLIILPLAFGKRQGREFIWNDLLSLETGSLKLANGRVIEKPLYNRRTRQDEPALFVALTFERREVLDSSNIKPMNLIGVDRGENIPAVIALTDPEGCPLSRFKDSLGNPTHILRIGESYKEKQRTIQAKKEVEQRRAGGYSRKYASKAKNLADDMVRNTARDLLYYAVTQDAMLIFENLSRGFGRQGKRTFMAERQYTRMEDWLTAKLAYEGLSKTYLSKTLAQYTSKTCSNCGFTITSADYDRVLEKLKKTATGWMTTINGKELKVEGQITYYNRRKRQNVVKDLSVELDRLSEESVNNDISSWTKGRSGEALSLLKKRFSHRPVQEKFVCLNCGFETHADEQAALNIARSWLFLRSQEYKKYQTNKTTGNTDKRAFVETWQSFYRKKLKEVWKPAV

SEQ ID NO: 116 - protein, 977 aa, Artificial Sequence
  CasX variant
MQEIKRINKIRRRLVKDSNTKKAGKTGPMKTLLVRVMTPDLRERLENLRKKPENIPQPISNTSRANLNKLLTDYTEMKKAILHVYWEEFQKDPVGLMSRVAQPAPKNIDQRKLIPVKDGNERLTSSGFACSQCCQPLYVYKLEQVNDKGKPHTNYFGRCNVSEHERLILLSPHKPEANDELVTYSLGKFGQRALDFYSIHVTRESNHPVKPLEQIGGNSCASGPVGKALSDACMGAVASFLTKYQDIILEHKKVIKKNEKRLANLKDIASANGLAFPKITLPPQPHTKEGIEAYNNVVAQIVIWVNLNLWQKLKIGRDEAKPLQRLKGFPSFPLVERQANEVDWWDMVCNVKKLINEKKEDGKVFWQNLAGYKRQEALRPYLSSPEDRKKGKKFARYQFGDLLLHLEKKHGEDWGKVYDEAWERIDKKVEGLSKHIKLEEERRSEDAQSKAALTDWLRAKASFVIEGLKEADKDEFCRCELKLQKWYGDLRGKPFAIEAENSILDISGFSKQYNCAFIWQKDGVKKLNLYLIINYFKGGKLRFKKIKPEAFEANRFYTVINKKSGEIVPMEVNFNFDDPNLIILPLAFGKRQGREFIWNDLLSLETGSLKLANGRVIEKPLYNRRTRQDEPALFVALTFERREVLDSSNIKPMNLIGIDRGENIPAVIALTDPEGCPLSRFKDSLGNPTHILRIGESYKEKQRTIQAKKEVEQRRAGGYSRKYASKAKNLADDMVRNTARDLLYYAVTQDAMLIFENLSRGFGRQGKRTFMAERQYTRMEDWLTAKLAYEGLSKTYLSKTLAQYTSKTCSNCGFTITSADYDRVLEKLKKTATGWMTTINGKELKVEGQITYYNRYKRQNVVKDLSVELDRLSEESVNNDISSWTKGRSGEALSLLKKRFSHRPVQEKFVCLNCGFETHADEQAALNIARSWLFLRSQEYKKYQTNKTTGNTDKRAFVETWQSFYRKKLKEVWKPAV

SEQ ID NO: 117 - protein, 976 aa, Artificial Sequence
  CasX variant
QEIKRINKIRRRLVKDSNTKKAGKTGPMKTLLVRVMTPDLRERLENLRKKPENIPQPISNTSRANLNKLLTDYTEMKKAILHVYWEEFQKDPVGLMSRVAQPAPKNIDQRKLIPVKDGNERLTSSGFACSQCCQPLYVYKLEQVNDKGKPHTNYFGRCNVSEHERLILLSPHKPEANDELVTYSLGKFGQRALDFYSIHVTRESNHPVKPLEQIGGNSCASGPVGKALSDACMGAVASFLTKYQDIILEHQKVIKKNEKRLANLKDIASANGLAFPKITLPPQPHTKEGIEAYNNVVAQIVIWVNLNLWQKLKIGRDEAKPLQRLKGFPSFPLVERQANEVDWWDMVCNVKKLINEKKEDGKVFWQNLAGYKRQEALRPYLSSEEDRKKGKKFARYQFGDLLLHLEKKHGEDWGKVYDEAWERIDKKVEGLSKHIKLEEERRSEDAQSKAALTDWLRAKASFVIEGLKEADKDEFCRCELKLQKWYGDLRGKPFAIEAENSILDISGFSKQYNCAFIWQKDGVKKLNLYLIINYFKGGKLRFKKIKPEAFEANRFYTVINKKSGEIVPMEVNFNFDDPNLIILPLAFGKRQGREFIWNDLLSLETGSLKLANGRVIEKTLYNRRTRQDEPALFVALTFERREVLDSSNIKPMNLIGIDRGENIPAVIALTDPEGCPLSRFKDSLGNPTHILRIGESYKEKQRTIQAKKEVEQRRAGGYSRKYASKAKNLADDMVRNTARDLLYYAVTQDAMLIFENLSRGFGRQGKRTFMAERQYTRMEDWLTAKLAYEGLSKTYLSKTLAQYTSKTCSNCGFTITSADYDRVLEKLKKTATGWMTTINGKELKVEGQITYYNRYKRQNVVKDLSVELDRLSEESVNNDISSWTKGRSGEALSLLKKRFSHRPVQEKFVCLNCGFETHADEQAALNIARSWLFLRSQEYKKYQTNKTTGNTDKRAFVETWQSFYRKKLKEVWKPAV

SEQ ID NO: 118 - protein, 977 aa, Artificial Sequence; identical to SEQ ID NO: 72
  CasX variant

SEQ ID NO: 119 - protein, 977 aa, Artificial Sequence; identical to SEQ ID NO: 72
  CasX variant

SEQ ID NO: 120 - protein, 977 aa, Artificial Sequence; identical to SEQ ID NO: 72
  CasX variant

SEQ ID NO: 121 - protein, 977 aa, Artificial Sequence; identical to SEQ ID NO: 72
  CasX variant

SEQ ID NO: 122 - protein, 977 aa, Artificial Sequence; identical to SEQ ID NO: 72
  CasX variant

SEQ ID NO: 123 - protein, 978 aa, Artificial Sequence
  CasX variant
MQEIKRINKIRRRLVKDSNTKKAGKTGPMKTLLVRVMTPDLRERLENLRKKPENIPQPISNTSRANLNKLLTDYTEMKKAILHVYWEEFQKDPVGLMSRVAQPAPKNIDQRKLIPVKDGNERLTMSSGFACSQCCQPLYVYKLEQVNDKGKPHTNYFGRCNVSEHERLILLSPHKPEANDELVTYSLGKFGQRALDFYSIHVTRESNHPVKPLEQIGGNSCASGPVGKALSDACMGAVASFLTKYQDIILEHQKVIKKNEKRLANLKDIASANGLAFPKITLPPQPHTKEGIEAYNNVVAQIVIWVNLNLWQKLKIGRDEAKPLQRLKGFPSFPLVERQANEVDWWDMVCNVKKLINEKKEDGKVFWQNLAGYKRQEALRPYLSSEEDRKKGKKFARYQFGDLLLHLEKKHGEDWGKVYDEAWERIDKKVEGLSKHIKLEEERRSEDAQSKAALTDWLRAKASFVIEGLKEADKDEFCRCELKLQKWYGDLRGKPFAIEAENSILDISGFSKQYNCAFIWQKDGVKKLNLYLIINYFKGGKLRFKKIKPEAFEANRFYTVINKKSGEIVPMEVNFNFDDPNLIILPLAFGKRQGREFIWNDLLSLETGSLKLANGRVIEKTLYNRRTRQDEPALFVALTFERREVLDSSNIKPMNLIGIDRGENIPAVIALTDPEGCPLSRFKDSLGNPTHILRIGESYKEKQRTIQAKKEVEQRRAGGYSRKYASKAKNLADDMVRNTARDLLYYAVTQDAMLIFENLSRGFGRQGKRTFMAERQYTRMEDWLTAKLAYEGLSKTYLSKTLAQYTSKTCSNCGFTITSADYDRVLEKLKKTATGWMTTINGKELKVEGQITYYNRYKRQNVVKDLSVELDRLSEESVNNDISSWTKGRSGEALSLLKKRFSHRPVQEKFVCLNCGFETHADEQAALNIARSWLFLRSQEYKKYQTNKTTGNTDKRAFVETWQSFYRKKLKEVWKPAV

SEQ ID NO: 124 - protein, 977 aa, Artificial Sequence; identical to SEQ ID NO: 72
  CasX variant

SEQ ID NO: 125 - protein, 977 aa, Artificial Sequence; identical to SEQ ID NO: 72
  CasX variant

SEQ ID NO: 126 - protein, 977 aa, Artificial Sequence; identical to SEQ ID NO: 72
  CasX variant

SEQ ID NO: 127 - protein, 977 aa, Artificial Sequence; identical to SEQ ID NO: 72
  CasX variant

SEQ ID NO: 128 - protein, 977 aa, Artificial Sequence; identical to SEQ ID NO: 72
  CasX variant

SEQ ID NO: 129 - protein, 977 aa, Artificial Sequence; identical to SEQ ID NO: 72
  CasX variant

SEQ ID NO: 130 - protein, 977 aa, Artificial Sequence
  CasX variant
QEIKRINKIRRRLVKDSNTKKAGKTGPMKTLLVRVMTPDLRERLENLRKKPENIPQPISNTSRANLNKLLTDYTEMKKAILHVYWEEFQKDPVGLMSRVAQPASKKIDQNKLKPEMDEKGNLTTAGFACSQCGQPLFVYKLEQVSEKGKAYTNYFGRCNVAEHEKLILLAQLKPEKDSDEAVTYSLGKFGQRALDFYSIHVTRESNHPVKPLEQIGGNSCASGPVGKALSDACMGAVASFLTKYQDIILEHQKVIKKNEKRLANLKDIASANGLAFPKITLPPQPHTKEGIEAYNNVVAQIVIWVNLNLWQKLKIGRDEAKPLQRLKGFPSFPLVERQANEVDWWDMVCNVKKLINEKKEDGKVFWQNLAGYKRQEALRPYLSSEEDRKKGKKFARYQFGDLLLHLEKKHGEDWGKVYDEAWERIDKKVEGLSKHIKLEEERRSEDAQSKAALTDWLRAKASFVIEGLKEADKDEFCRCELKLQKWYGDLRGKPFAIEAENSILDISGFSKQYNCAFIWQKDGVKKLNLYLIINYFKGGKLRFKKIKPEAFEANRFYTVINKKSGEIVPMEVNFNFDDPNLIILPLAFGKRQGREFIWNDLLSLETGSLKLANGRVIEKTLYNRRTRQDEPALFVALTFERREVLDSSNIKPMNLIGIDRGENIPAVIALTDPEGCPLSRFKDSLGNPTHILRIGESYKEKQRTIQAKKEVEQRRAGGYSRKYASKAKNLADDMVRNTARDLLYYAVTQDAMLIFENLSRGFGRQGKRTFMAERQYTRMEDWLTAKLAYEGLSKTYLSKTLAQYTSKTCSNCGFTITSADYDRVLEKLKKTATGWMTTINGKELKVEGQITYYNRYKRQNVVKDLSVELDRLSEESVNNDISSWTKGRSGEALSLLKKRFSHRPVQEKFVCLNCGFETHADEQAALNIARSWLFLRSQEYKKYQTNKTTGNTDKRAFVETWQSFYRKKLKEVWKPAV

SEQ ID NO: 131 - protein, 976 aa, Artificial Sequence
  CasX variant
QEIKRINKIRRRLVKDSNTKKAGKTGPMKTLLVRVMTPDLRERLENLRKKPENIPQPISNTSRANLNKLLTDYTEMKKAILHVYWEEFQKDPVGLMSRVAQPAPKNIDQRKLIPVKDGNERLTSSGFACSQCCQPLYVYKLEQVNDKGKPHTNYFGRCNVSEHERLILLSPHKPEANDELVTYSLGKFGQRALDFYSIHVTKESTHPVKPLAQIAGNRYASGPVGKALSDACMGTIASFLSKYQDIIIEHQKVVKGNQKRLESLRELAGKENLEYPSVTLPPQPHTKEGVDAYNEVIARVRMWVNLNLWQKLKLSRDDAKPLLRLKGFPSFPLVERQANEVDWWDMVCNVKKLINEKKEDGKVFWQNLAGYKRQEALRPYLSSEEDRKKGKKFARYQFGDLLLHLEKKHGEDWGKVYDEAWERIDKKVEGLSKHIKLEEERRSEDAQSKAALTDWLRAKASFVIEGLKEADKDEFCRCELKLQKWYGDLRGKPFAIEAENSILDISGFSKQYNCAFIWQKDGVKKLNLYLIINYFKGGKLRFKKIKPEAFEANRFYTVINKKSGEIVPMEVNFNFDDPNLIILPLAFGKRQGREFIWNDLLSLETGSLKLANGRVIEKTLYNRRTRQDEPALFVALTFERREVLDSSNIKPMNLIGIDRGENIPAVIALTDPEGCPLSRFKDSLGNPTHILRIGESYKEKQRTIQAKKEVEQRRAGGYSRKYASKAKNLADDMVRNTARDLLYYAVTQDAMLIFENLSRGFGRQGKRTFMAERQYTRMEDWLTAKLAYEGLSKTYLSKTLAQYTSKTCSNCGFTITSADYDRVLEKLKKTATGWMTTINGKELKVEGQITYYNRYKRQNVVKDLSVELDRLSEESVNNDISSWTKGRSGEALSLLKKRFSHRPVQEKFVCLNCGFETHADEQAALNIARSWLFLRSQEYKKYQTNKTTGNTDKRAFVETWQSFYRKKLKEVWKPAV

SEQ ID NO: 132 - protein, 976 aa, Artificial Sequence
  CasX variant
QEIKRINKIRRRLVKDSNTKKAGKTGPMKTLLVRVMTPDLRERLENLRKKPENIPQPISNTSRANLNKLLTDYTEMKKAILHVYWEEFQKDPVGLMSRVAQPAPKNIDQRKLIPVKDGNERLTSSGFACSQCCQPLYVYKLEQVNDKGKPHTNYFGRCNVSEHERLILLSPHKPEANDELVTYSLGKFGQRALDFYSIHVTKESTHPVKPLAQIAGNRYASGPVGKALSDACMGTIASFLSKYQDIIIEHQKVVKGNQKRLESLRELAGKENLEYPSVTLPPQPHTKEGVDAYNEVIARVRMWVNLNLWQKLKLSRDDAKPLLRLKGFPSFPLVERQANEVDWWDMVCNVKKLINEKKEDGKVFWQNLAGYKRQEALRPYLSSEEDRKKGKKFARYQLGDLLLHLEKKHGEDWGKVYDEAWERIDKKVEGLSKHIKLEEERRSEDAQSKAALTDWLRAKASFVIEGLKEADKDEFCRCELKLQKWYGDLRGKPFAIEAENSILDISGFSKQYNCAFIWQKDGVKKLNLYLIINYFKGGKLRFKKIKPEAFEANRFYTVINKKSGEIVPMEVNFNFDDPNLIILPLAFGKRQGREFIWNDLLSLETGSLKLANGRVIEKTLYNRRTRQDEPALFVALTFERREVLDSSNIKPMNLIGVDRGENIPAVIALTDPEGCPLSRFKDSLGNPTHILRIGESYKEKQRTIQAKKEVEQRRAGGYSRKYASKAKNLADDMVRNTARDLLYYAVTQDAMLIFENLSRGFGRQGKRTFMAERQYTRMEDWLTAKLAYEGLSKTYLSKTLAQYTSKTCSNCGFTITSADYDRVLEKLKKTATGWMTTINGKELKVEGQITYYNRRKRQNVVKDLSVELDRLSEESVNNDISSWTKGRSGEALSLLKKRFSHRPVQEKFVCLNCGFETHADEQAALNIARSWLFLRSQEYKKYQTNKTTGNTDKRAFVETWQSFYRKKLKEVWKPAV

SEQ ID NO: 133 - protein, 976 aa, Artificial Sequence
  CasX variant
QEIKRINKIRRRLVKDSNTKKAGKTGPMKTLLVRVMTPDLRERLENLRKKPENIPQPISNTSRANLNKLLTDYTEMKKAILHVYWEEFQKDPVGLMSRVAQPAPKNIDQRKLIPVKDGNERLTSSGFACSQCCQPLYVYKLEQVNDKGKPHTNYFGRCNVSEHERLILLSPHKPEANDELVTYSLGKFGQRALDFYSIHVTKESTHPVKPLAQIAGNRYASGPVGKALSDACMGTIASFLSKYQDIIIEHQKVVKGNQKRLESLRELAGKENLEYPSVTLPPQPHTKEGVDAYNEVIARVRMWVNLNLWQKLKLSRDDAKPLLRLKGFPSFPLVERQANEVDWWDMVCNVKKLINEKKEDGKVFWQNLAGYKRQEALRPYLSSEEDRKKGKKFARYQLGDLLKHLEKKHGEDWGKVYDEAWERIDKKVEGLSKHIKLEEERRSEDAQSKAALTDWLRAKASFVIEGLKEADKDEFCRCELKLQKWYGDLRGKPFAIEAENSILDISGFSKQYNCAFIWQKDGVKKLNLYLIINYFKGGKLRFKKIKPEAFEANRFYTVINKKSGEIVPMEVNFNFDDPNLIILPLAFGKRQGREFIWNDLLSLETGSLKLANGRVIEKTLYNRRTRQDEPALFVALTFERREVLDSSNIKPMNLIGVDRGENIPAVIALTDPEGCPLSRFKDSLGNPTHILRIGESYKEKQRTIQAKKEVEQRRAGGYSRKYASKAKNLADDMVRNTARDLLYYAVTQDAMLIFENLSRGFGRQGKRTFMAERQYTRMEDWLTAKLAYEGLSKTYLSKTLAQYTSKTCSNCGFTITSADYDRVLEKLKKTATGWMTTINGKELKVEGQITYYNRRKRQNVVKDLSVELDRLSEESVNNDISSWTKGRSGEALSLLKKRFSHRPVQEKFVCLNCGFETHADEQAALNIARSWLFLRSQEYKKYQTNKTTGNTDKRAFVETWQSFYRKKLKEVWKPAV

SEQ ID NO: 134 - protein, 976 aa, Artificial Sequence
  CasX variant
QEIKRINKIRRRLVKDSNTKKAGKTGPMKTLLVRVMTPDLRERLENLRKKPENIPQPISNTSRANLNKLLTDYTEMKKAILHVYWEEFQKDPVGLMSRVAQPAPKNIDQRKLIPVKDGNERLTSSGFACSQCCQPLYVYKLEQVNDKGKPHTNYFGRCNVSEHERLILLSPHKPEANDELVTYSLGKFGQRALDFYSIHVTKESTHPVKPLAQIAGNRYASGPVGKALSDACMGTIASFLSKYQDIIIEHQKVVKGNQKRLESLRELAGKENLEYPSVTLPPQPHTKEGVDAYNEVIARVRMWVNLNLWQKLKLSRDDAKPLLRLKGFPSFPLVERQANEVDWWDMVCNVKKLINEKKEDGKVFWQNLAGYKRQEALRPYLSSEEDRKKGKKFARYQLGDLLLHLEKKHGEDWGKVYDEAWERIDKKVEGLSKHIKLEEERRSEDAQSKAALTDWLRAKASFVIEGLKEADKDEFCRCELKLQKWYGDLRGKPFAIEAENSILDISGFSKQYNCAFIWQKDGVKKLNLYLIINYFKGGKLRFKKIKPEAFEANRFYTVINKKSGEIVPMEVNFNFDDPNLIILPLAFGKRQGREFIWNDLLSLETGSLKLANGRVIEKTLYNRRTRQDEPALFVALTFERREVLDSSNIKPMNLIGVDRGENIPAVIALTDPEGCPLSRFKDSLGNPTHILRIGESYKEKQRTIQAKKEVEQRRAGGYSRKYASKAKNLADDMVRNTARDLLYYAVTQDAMLIFENLSRGFGRQGKRTFMAERQYTRMEDWLTAKLAYEGLSKTYLSKTLAQYTSKTCSNCGFTITSADYDRVLEKLKKTATGWMTTINGKELKVEGQITYYNRYKRQNVVKDLSVELDRLSEESVNNDISSWTKGRSGEALSLLKKRFSHRPVQEKFVCLNCGFETHADEQAALNIARSWLFLRSQEYKKYQTNKTTGNTDKRAFVETWQSFYRKKLKEVWKPAV

SEQ ID NO: 135 - protein, 977 aa, Artificial Sequence
  CasX variant
QEIKRINKIRRRLVKDSNTKKAGKTGPMKTLLVRVMTPDLRERLENLRKKPENIPQPISNTSRANLNKLLTDYTEMKKAILHVYWEEFQKDPVGLMSRVAQPASKKIDQNKLKPEMDEKGNLTTAGFACSQCGQPLFVYKLEQVSEKGKAYTNYFGRCNVAEHEKLILLAQLKPEKDSDEAVTYSLGKFGQRALDFYSIHVTKESTHPVKPLAQIAGNRYASGPVGKALSDACMGTIASFLSKYQDIIIEHQKVVKGNQKRLESLRELAGKENLEYPSVTLPPQPHTKEGVDAYNEVIARVRMWVNLNLWQKLKLSRDDAKPLLRLKGFPSFPLVERQANEVDWWDMVCNVKKLINEKKEDGKVFWQNLAGYKRQEALRPYLSSEEDRKKGKKFARYQFGDLLLHLEKKHGEDWGKVYDEAWERIDKKVEGLSKHIKLEEERRSEDAQSKAALTDWLRAKASFVIEGLKEADKDEFCRCELKLQKWYGDLRGKPFAIEAENSILDISGFSKQYNCAFIWQKDGVKKLNLYLIINYFKGGKLRFKKIKPEAFEANRFYTVINKKSGEIVPMEVNFNFDDPNLIILPLAFGKRQGREFIWNDLLSLETGSLKLANGRVIEKTLYNRRTRQDEPALFVALTFERREVLDSSNIKPMNLIGIDRGENIPAVIALTDPEGCPLSRFKDSLGNPTHILRIGESYKEKQRTIQAKKEVEQRRAGGYSRKYASKAKNLADDMVRNTARDLLYYAVTQDAMLIFENLSRGFGRQGKRTFMAERQYTRMEDWLTAKLAYEGLSKTYLSKTLAQYTSKTCSNCGFTITSADYDRVLEKLKKTATGWMTTINGKELKVEGQITYYNRYKRQNVVKDLSVELDRLSEESVNNDISSWTKGRSGEALSLLKKRFSHRPVQEKFVCLNCGFETHADEQAALNIARSWLFLRSQEYKKYQTNKTTGNTDKRAFVETWQSFYRKKLKEVWKPAV

SEQ ID NO: 136 - protein, 977 aa, Artificial Sequence
  CasX variant
QEIKRINKIRRRLVKDSNTKKAGKTGPMKTLLVRVMTPDLRERLENLRKKPENIPQPISNTSRANLNKLLTDYTEMKKAILHVYWEEFQKDPVGLMSRVAQPASKKIDQNKLKPEMDEKGNLTTAGFACSQCGQPLFVYKLEQVSEKGKAYTNYFGRCNVAEHEKLILLAQLKPEKDSDEAVTYSLGKFGQRALDFYSIHVTKESTHPVKPLAQIAGNRYASGPVGKALSDACMGTIASFLSKYQDIIIEHQKVVKGNQKRLESLRELAGKENLEYPSVTLPPQPHTKEGVDAYNEVIARVRMWVNLNLWQKLKLSRDDAKPLLRLKGFPSFPLVERQANEVDWWDMVCNVKKLINEKKEDGKVFWQNLAGYKRQEALRPYLSSEEDRKKGKKFARYQLGDLLLHLEKKHGEDWGKVYDEAWERIDKKVEGLSKHIKLEEERRSEDAQSKAALTDWLRAKASFVIEGLKEADKDEFCRCELKLQKWYGDLRGKPFAIEAENSILDISGFSKQYNCAFIWQKDGVKKLNLYLIINYFKGGKLRFKKIKPEAFEANRFYTVINKKSGEIVPMEVNFNFDDPNLIILPLAFGKRQGREFIWNDLLSLETGSLKLANGRVIEKTLYNRRTRQDEPALFVALTFERREVLDSSNIKPMNLIGVDRGENIPAVIALTDPEGCPLSRFKDSLGNPTHILRIGESYKEKQRTIQAKKEVEQRRAGGYSRKYASKAKNLADDMVRNTARDLLYYAVTQDAMLIFENLSRGFGRQGKRTFMAERQYTRMEDWLTAKLAYEGLSKTYLSKTLAQYTSKTCSNCGFTITSADYDRVLEKLKKTATGWMTTINGKELKVEGQITYYNRRKRQNVVKDLSVELDRLSEESVNNDISSWTKGRSGEALSLLKKRFSHRPVQEKFVCLNCGFETHADEQAALNIARSWLFLRSQEYKKYQTNKTTGNTDKRAFVETWQSFYRKKLKEVWKPAV

SEQ ID NO: 137 - protein, 977 aa, Artificial Sequence
  CasX variant
QEIKRINKIRRRLVKDSNTKKAGKTGPMKTLLVRVMTPDLRERLENLRKKPENIPQPISNTSRANLNKLLTDYTEMKKAILHVYWEEFQKDPVGLMSRVAQPASKKIDQNKLKPEMDEKGNLTTAGFACSQCGQPLFVYKLEQVSEKGKAYTNYFGRCNVAEHEKLILLAQLKPEKDSDEAVTYSLGKFGQRALDFYSIHVTKESTHPVKPLAQIAGNRYASGPVGKALSDACMGTIASFLSKYQDIIIEHQKVVKGNQKRLESLRELAGKENLEYPSVTLPPQPHTKEGVDAYNEVIARVRMWVNLNLWQKLKLSRDDAKPLLRLKGFPSFPLVERQANEVDWWDMVCNVKKLINEKKEDGKVFWQNLAGYKRQEALRPYLSSEEDRKKGKKFARYQLGDLLKHLEKKHGEDWGKVYDEAWERIDKKVEGLSKHIKLEEERRSEDAQSKAALTDWLRAKASFVIEGLKEADKDEFCRCELKLQKWYGDLRGKPFAIEAENSILDISGFSKQYNCAFIWQKDGVKKLNLYLIINYFKGGKLRFKKIKPEAFEANRFYTVINKKSGEIVPMEVNFNFDDPNLIILPLAFGKRQGREFIWNDLLSLETGSLKLANGRVIEKTLYNRRTRQDEPALFVALTFERREVLDSSNIKPMNLIGVDRGENIPAVIALTDPEGCPLSRFKDSLGNPTHILRIGESYKEKQRTIQAKKEVEQRRAGGYSRKYASKAKNLADDMVRNTARDLLYYAVTQDAMLIFENLSRGFGRQGKRTFMAERQYTRMEDWLTAKLAYEGLSKTYLSKTLAQYTSKTCSNCGFTITSADYDRVLEKLKKTATGWMTTINGKELKVEGQITYYNRRKRQNVVKDLSVELDRLSEESVNNDISSWTKGRSGEALSLLKKRFSHRPVQEKFVCLNCGFETHADEQAALNIARSWLFLRSQEYKKYQTNKTTGNTDKRAFVETWQSFYRKKLKEVWKPAV

SEQ ID NO: 138 - protein, 977 aa, Artificial Sequence
  CasX variant
QEIKRINKIRRRLVKDSNTKKAGKTGPMKTLLVRVMTPDLRERLENLRKKPENIPQPISNTSRANLNKLLTDYTEMKKAILHVYWEEFQKDPVGLMSRVAQPASKKIDQNKLKPEMDEKGNLTTAGFACSQCGQPLFVYKLEQVSEKGKAYTNYFGRCNVAEHEKLILLAQLKPEKDSDEAVTYSLGKFGQRALDFYSIHVTKESTHPVKPLAQIAGNRYASGPVGKALSDACMGTIASFLSKYQDIIIEHQKVVKGNQKRLESLRELAGKENLEYPSVTLPPQPHTKEGVDAYNEVIARVRMWVNLNLWQKLKLSRDDAKPLLRLKGFPSFPLVERQANEVDWWDMVCNVKKLINEKKEDGKVFWQNLAGYKRQEALRPYLSSEEDRKKGKKFARYQLGDLLLHLEKKHGEDWGKVYDEAWERIDKKVEGLSKHIKLEEERRSEDAQSKAALTDWLRAKASFVIEGLKEADKDEFCRCELKLQKWYGDLRGKPFAIEAENSILDISGFSKQYNCAFIWQKDGVKKLNLYLIINYFKGGKLRFKKIKPEAFEANRFYTVINKKSGEIVPMEVNFNFDDPNLIILPLAFGKRQGREFIWNDLLSLETGSLKLANGRVIEKTLYNRRTRQDEPALFVALTFERREVLDSSNIKPMNLIGVDRGENIPAVIALTDPEGCPLSRFKDSLGNPTHILRIGESYKEKQRTIQAKKEVEQRRAGGYSRKYASKAKNLADDMVRNTARDLLYYAVTQDAMLIFENLSRGFGRQGKRTFMAERQYTRMEDWLTAKLAYEGLSKTYLSKTLAQYTSKTCSNCGFTITSADYDRVLEKLKKTATGWMTTINGKELKVEGQITYYNRYKRQNVVKDLSVELDRLSEESVNNDISSWTKGRSGEALSLLKKRFSHRPVQEKFVCLNCGFETHADEQAALNIARSWLFLRSQEYKKYQTNKTTGNTDKRAFVETWQSFYRKKLKEVWKPAV

SEQ ID NO: 139 - protein, 977 aa, Artificial Sequence
  CasX variant
QEIKRINKIRRRLVKDSNTKKAGKTGPMKTLLVRVMTPDLRERLENLRKKPENIPQPISNTSRANLNKLLTDYTEMKKAILHVYWEEFQKDPVGLMSRVAQPASKKIDQNKLKPEMDEKGNLTTAGFACSQCGQPLFVYKLEQVSEKGKAYTNYFGRCNVAEHEKLILLAQLKPEKDSDEAVTYSLGKFGQRALDFYSIHVTRESNHPVKPLEQIGGNSCASGPVGKALSDACMGAVASFLTKYQDIILEHQKVIKKNEKRLANLKDIASANGLAFPKITLPPQPHTKEGIEAYNNVVAQIVIWVNLNLWQKLKIGRDEAKPLQRLKGFPSFPLVERQANEVDWWDMVCNVKKLINEKKEDGKVFWQNLAGYKRQEALRPYLSSEEDRKKGKKFARYQLGDLLLHLEKKHGEDWGKVYDEAWERIDKKVEGLSKHIKLEEERRSEDAQSKAALTDWLRAKASFVIEGLKEADKDEFCRCELKLQKWYGDLRGKPFAIEAENSILDISGFSKQYNCAFIWQKDGVKKLNLYLIINYFKGGKLRFKKIKPEAFEANRFYTVINKKSGEIVPMEVNFNFDDPNLIILPLAFGKRQGREFIWNDLLSLETGSLKLANGRVIEKTLYNRRTRQDEPALFVALTFERREVLDSSNIKPMNLIGVDRGENIPAVIALTDPEGCPLSRFKDSLGNPTHILRIGESYKEKQRTIQAKKEVEQRRAGGYSRKYASKAKNLADDMVRNTARDLLYYAVTQDAMLIFENLSRGFGRQGKRTFMAERQYTRMEDWLTAKLAYEGLSKTYLSKTLAQYTSKTCSNCGFTITSADYDRVLEKLKKTATGWMTTINGKELKVEGQITYYNRYKRQNVVKDLSVELDRLSEESVNNDISSWTKGRSGEALSLLKKRFSHRPVQEKFVCLNCGFETHADEQAALNIARSWLFLRSQEYKKYQTNKTTGNTDKRAFVETWQSFYRKKLKEVWKPAV

SEQ ID NO: 140 - protein, 978 aa, Artificial Sequence
  CasX variant
MQEIKRINKIRRRLVKDSNTKKAGKTGPMKTLLVRVMTPDLRERLENLRKKPENIPQPISNTSRANLNKLLTDYTEMKKAILHVYWEEFQKDPVGLMSRVAQPAPKNIDQRKLIPVKDGNERLTSSGFACSQCCQPLYVYKLEQVNDKGKPHTNYFGRCNVSEHERLILLSPHKPEANDELVTYSLGKFGQRALDFYSIHVTRESNHPVKPLEQIGGNSCASGPVGKALSDACMGAVASFLTKYQDIILEHQKVIKKNEKRLANLKDIASANGLAFPKITLPPQPHTKEGIEAYNNVVAQIVIWVNLNLWQKLKIGRDEAKPLQRLKGFPSFPLVERQANEVDWWDMVCNVKKLINEKKEDGKVFWQNLAGYKRQEALLPYLSSEEDRKKGKKFARYQFGDLLLHLEKKHGEDWGKVYDEAWERIDKKVEGLSKHIKLEEERRSEDAQSKAALTDWLRAKASFVIEGLKEADKDEFCRCELKLQKWYGDLRGKPFAIEAENSILDISGFSKQYNCAFIWQKDGVKKLNLYLIINYFKGGKLRFKKIKPEAFEANRFYTVINKKSGEIVPMEVNFNFDDPNLIILPLAFGKRQGREFIWNDLLSLETGSLKLANGRVIEKTLYNRRTRQDEPALFVALTFERREVLDSSNIKPMNLIGIDRGENIPAVIALTDPEGCPLSRFKDSLGNPTHILRIGESYKEKQRTIQAAKEVEQRRAGGYSRKYASKAKNLADDMVRNTARDLLYYAVTQDAMLIFENLSRGFGRQGKRTFMAERQYTRMEDWLTAKLAYEGLPSKTYLSKTLAQYTSKTCSNCGFTITSADYDRVLEKLKKTATGWMTTINGKELKVEGQITYYNRYKRQNVVKDLGVELDRLSEESVNNDISSWTKGRSGEALSLLKKRFSHRPVQEKFVCLNCGFETHADEQAALNIARSWLFLRSQEYKKYQTNKTTGNTDKRAFVETWQSFYRKKLKEVWKPAV

SEQ ID NO: 141 - protein, 986 aa, Artificial Sequence; identical to SEQ ID NO: 56
  CasX variant

SEQ ID NO: 142 - protein, 978 aa, Artificial Sequence
  CasX variant
MQEIKRINKIRRRLVKDSNTKKAGKTGPMKTLLVRVMTPDLRERLENLRKKPENIPQPISNTSRANLNKLLTDYTEMKKAILHVYWEEFQKDPVGLMSRVAQPAPKNIDQRKLIPVKDGNERLTSSGFACSQCCQPLYVYKLEQVNDKGKPHTNYFGRCNVSEHERLILLSPHKPEANDELVTYSLGKFGQRALDFYSIHVTRESNHPVKPLEQIGGNSCASGPVGKALSDACMGAVASFLTKYQDIILEHQKVIKKNEKRLANLKDIASANGLAFPKITLPPQPHTKEGIEAYNNVVAQIVIWVNLNLWQKLKIGRDEAKPLQRLKGFPSFPLVERQANEVDWWDMVCNVKKLINEKKEDGKVFWQNLAGYKRQEALRPYLSSEEDRKKGKKFARYQFGDLLLHLEKKHGEDWGKVYDEAWERIDKKVEGLSKHIKLEEERRSEDAQSKAALTDWLRAKASFVIEGLKEADKDEFCRCELKLQKWYGDLRGKPFAIEAENSILDISGFSKQYNCAFIWQKDGVKKLNLYLIINYFKGGKLRFKKIKPEAFEANRFYTVINKKSGEIVPMEVNFNFDDPNLIILPLAFGKRQGREFIWNDLLSLETGSLKLANGRVIEKTLYNRRTRQDEPALFVALTFERREVLDSSNIKPVNLIGVDRGENIPAVIALTDPEGCPLPEFKDSSGGPTDILRIGEGYKEKQRAIQAAKEVEQRRAGGYSRKFASKSRNLADDMVRNSARDLFYHAVTHDAVLVFENLSRGFGRQGKRTFMTERQYTKMEDWLTAKLAYEGLTSKTYLSKTLAQYTSKTCSNCGFTITSADYDRVLEKLKKTATGWMTTINGKELKVEGQITYYNRYKRQNVVKDLSVELDRLSEESVNNDISSWTKGRSGEALSLLKKRFSHRPVQEKFVCLNCGFETHADEQAALNIARSWLFLRSQEYKKYQTNKTTGNTDKRAFVETWQSFYRKKLKEVWKPAV

SEQ ID NO: 143 - protein, 972 aa, Artificial Sequence
  CasX variant
MQEIKRINKIRRRLVKDSNTKKAGKTGPMKTLLVRVMTPDLRERLENLRKKPENIPQPISNTSRANLNKLLTDYTEMKKAILHVYWEEFQKDPVGLMSRVAQPAPKNIDQRKLIPVKDGNERLTSSGFACSQCCQPLYVYKLEQVNDKGKPHTNYFGRCNVSEHERLILLSPHKPEANDELVTYSLGKFGQRALDFYSIHVTRESNHPVKPLEQIGGNSCASGPVGKALSDACMGAVASFLTKYQDIILEHQKVIKKNEKRLANLKDIASANGLAFPKITLPPQPHTKEGIEAYNNVVAQIVIWVNLNLWQKLKIGRDEAKPLQRLKGFPSFPLVERQANEVDWWDMVCNVKKLINEKKEDGKVFWQNLAGYKRQEALRPYLSSEEDRKKGKKFARYQFGDLLLHLEKKHGEDWGKVYDEAWERIDKKVEGLSKHIKLEEERRSEDAQSKAALTDWLRAKASFVIEGLKEADKDEFCRCELKLQKWYGDLRGKPFAIEAENSILDISGFSKQYNCAFIWQKDGVKKLNLYLIINYFKGGKLRFKKIKPEAFEANRFYTVINKKSGEIVPMEVNFNFDDPNLIILPLAFGKRQGREFIWNDLLSLETGSLKLANGRVIEKTLYNRRTRQDEPALFVALTFERREVLDSSNIKPMNLIGIDRGENIPAVIALTDPEGCPLSRFKDSLGNPTHILRIGESYKEKQRTIQAKKEVEQRRAGGYSRKYASKAKNLADDMVRNTARDLLYYAVTQDAMLIFENLSRGFGRQGKRTFMAERQYTRMEDWLTAKLAYEGLSKTYLSKTLAQYTSKTCSNCGFTITSADYDRVLEKLKKTATGWMTTINGKELKVEGQITYYNRYKRQNVVKDLSVELDRLSEESVNNDISSWTKGRSGEALSLLKKRFSHRPVQEKFVCLNCGFETHADEQAALNIARSWLFLNSNSTEFKSYKSGKQPFVGAWQAFYKRRLKEVWKPNA

SEQ ID NO: 144 - protein, 978 aa, Artificial Sequence
  CasX variant
QEIKRINKIRRRLVKDSNTKKAGKTGPMKTLLVRVMTPDLRERLENLRKKPENIPQPISNTSRANLNKLLTDYTEMKKAILHVYWEEFQKDPVGLMSRVAQPASKKIDQNKLKPEMDEKGNLTTAGFACSQCGQPLFVYKLEQVSEKGKAYTNYFGRCNVAEHEKLILLAQLKPEKDSDEAVTYSLGKFGQRALDFYSIHVTKESTHPVKPLAQIAGNRYASGPVGKALSDACMGTIASFLSKYQDIIIEHQKVVKGNQKRLESLRELAGKENLEYPSVTLPPQPHTKEGVDAYNEVIARVRMWVNLNLWQKLKLSRDDAKPLLRLKGFPSFPLVERQANEVDWWDMVCNVKKLINEKKEDGKVFWQNLAGYKRQEALRPYLSSEEDRKKGKKFARYQLGDLLLHLEKKHGEDWGKVYDEAWERIDKKVEGLSKHIKLEEERRSEDAQSKAALTDWLRAKASFVIEGLKEADKDEFCRCELKLQKWYGDLRGKPFAIEAENSILDISGFSKQYNCAFIWQKDGVKKLNLYLIINYFKGGKLRFKKIKPEAFEANRFYTVINKKSGEIVPMEVNFNFDDPNLIILPLAFGKRQGREFIWNDLLSLETGSLKLANGRVIEKTLYNRRTRQDEPALFVALTFERREVLDSSNIKPMNLIGVDRGENIPAVIALTDPEGCPLSRFKDSLGNPTHILRIGESYKEKQRTIQAKKEVEQRRAGGYSRKYASKAKNLADDMVRNTARDLLYYAVTQDAMLIFENLSRGFGRQGKRTFMAERQYTRMEDWLTAKLAYEGLSKTYLSKTLAQYTSKTCSNCGFTIHTSADYDRVLEKLKKTATGWMTTINGKELKVEGQITYYNRYKRQNVVKDLSVELDRLSEESVNNDISSWTKGRSGEALSLLKKRFSHRPVQEKFVCLNCGFETHADEQAALNIARSWLFLRSQEYKKYQTNKTTGNTDKRAFVETWQSFYRKKLKEVWKPAV

SEQ ID NO: 145 - protein, 978 aa, Artificial Sequence
  CasX variant
QEIKRINKIRRRLVKDSNTKKAGKTGPMKTLLVRVMTPDLRERLENLRKKPENIPQPISNTSRANLNKLLTDYTEMKKAILHVYWEEFQKDPVGLMSRVAQPASKKIDQNKLKPEMDEKGNLTTAGFACSQCGQPLFVYKLEQVSEKGKAYTNYFGRCNVAEHEKLILLAQLKPEKDSDEAVTYSLGKFGQRALDFYSIHVTKESTHPVKPLAQIAGNRYASGPVGKALSDACMGTIASFLSKYQDIIIEHQKVVKGNQKRLESLRELAGKENLEYPSVTLPPQPHTKEGVDAYNEVIARVRMWVNLNLWQKLKLSRDDAKPLLRLKGFPSFPLVERQANEVDWWDMVCNVKKLINEKKEDGKVFWQNLAGYKRQEALRPYLSSEEDRKKGKKFARYQLGDLLLHLEKKHGEDWGKVYDEAWERIDKKVEGLSKHIKLEEERRSEDAQSKAALTDWLRAKASFVIEGLKEADKDEFCRCELKLQKWYGDLRGKPFAIEAENSILDISGFSKQYNCAFIWQKDGVKKLNLYLIINYFKGGKLRFKKIKPEAFEANRFYTVINKKSGEIVPMEVNFNFDDPNLIILPLAFGKRQGREFIWNDLLSLETGSLKLANGRVIEKTLYNRRTRQDEPALFVALTFERREVLDSSNIKPMNLIGVDRGENIPAVIALTDPEGCPLSRFKDSLGNPTHILRIGESYKEKQRTIQAKKEVEQRRAGGYSRKYASKAKNLADDMVRNTARDLLYYAVTQDAMLIFENLSRGFGRQGKRTFMAERQYTRMEDWLTAKLAYEGLPSKTYLSKTLAQYTSKTCSNCGFTITSADYDRVLEKLKKTATGWMTTINGKELKVEGQITYYNRYKRQNVVKDLSVELDRLSEESVNNDISSWTKGRSGEALSLLKKRFSHRPVQEKFVCLNCGFETHADEQAALNIARSWLFLRSQEYKKYQTNKTTGNTDKRAFVETWQSFYRKKLKEVWKPAV

SEQ ID NO: 146 - protein, 977 aa, Artificial Sequence
  CasX variant
QEIKRINKIRRRLVKDSNTKKAGKTGPMKTLLVRVMTPDLRERLENLRKKPENIPQPISNTSRANLNKLLTDYTEMKKAILHVYWEEFQKDPVGLMSRVAQPASKKIDQNKLKPEMDEKGNLTTAGFACSQCGQPLFVYKLEQVSEKGKAYTNYFGRCNVAEHEKLILLAQLKPEKDSDEAVTYSLGKFGQRALDFYSIHVTKESTHPVKPLAQIAGNRYASGPVGKALSDACMGTIASFLSKYQDIIIEHQKVVKGNQKRLESLRELAGKENLEYPSVTLPPQPHTKEGVDAYNEVIARVRMWVNHNLWQKLKLSRDDAKPLLRLKGFPSFPLVERQANEVDWWDMVCNVKKLINEKKEDGKVFWQNLAGYKRQEALRPYLSSEEDRKKGKKFARYQLGDLLLHLEKKHGEDWGKVYDEAWERIDKKVEGLSKHIKLEEERRSEDAQSKAALTDWLRAKASFVIEGLKEADKDEFCRCELKLQKWYGDLRGKPFAIEAENSILDISGFSKQYNCAFIWQKDGVKKLNLYLIINYFKGGKLRFKKIKPEAFEANRFYTVINKKSGEIVPMEVNFNFDDPNLIILPLAFGKRQGREFIWNDLLSLETGSLKLANGRVIEKTLYNRRTRQDEPALFVALTFERREVLDSSNIKPMNLIGVDRGENIPAVIALTDPEGCPLSRFKDSLGNPTHILRIGESYKEKQRTIQAKKEVEQRRAGGYSRKYASKAKNLADDMVRNTARDLLYYAVTQDAMLIFENLSRGFGRQGKRTFMAERQYTRMEDWLTAKLAYEGLSKTYLSKTLAQYTSKTCSNCGFTITSADYDRVLEKLKKTATGWMTTINGKELKVEGQITYYNRYKRQNVVKDLSVELDRLSEESVNNDISSWTKGRSGEALSLLKKRFSHRPVQEKFVCLNCGFETHADEQAALNIARSWLFLRSQEYKKYQTNKTTGNTDKRAFVETWQSFYRKKLKEVWKPAV

SEQ ID NO: 147 - protein, 978 aa, Artificial Sequence
  CasX variant
QEIKRINKIRRRLVKDSNTKKAGKTGPMKTLLVRVMTPDLRERLENLRKKPENIPQPISNTSRANLNKLLTDYTEMKKAILHVYWEEFQKDPVGLMSRVAQPASKKIDQNKLKPEMDEKGNLTTAGFACSQCGQPLFVYKLEQVSEKGKAYTNYFGRCNVAEHEKLILLAQLKPEKDSDEAVTYSLGKFGQRALDFYSIHVTKESTHPVKPLAQIAGNRYASGAPVGKALSDACMGTIASFLSKYQDIIIEHQKVVKGNQKRLESLRELAGKENLEYPSVTLPPQPHTKEGVDAYNEVIARVRMWVNLNLWQKLKLSRDDAKPLLRLKGFPSFPLVERQANEVDWWDMVCNVKKLINEKKEDGKVFWQNLAGYKRQEALRPYLSSEEDRKKGKKFARYQLGDLLLHLEKKHGEDWGKVYDEAWERIDKKVEGLSKHIKLEEERRSEDAQSKAALTDWLRAKASFVIEGLKEADKDEFCRCELKLQKWYGDLRGKPFAIEAENSILDISGFSKQYNCAFIWQKDGVKKLNLYLIINYFKGGKLRFKKIKPEAFEANRFYTVINKKSGEIVPMEVNFNFDDPNLIILPLAFGKRQGREFIWNDLLSLETGSLKLANGRVIEKTLYNRRTRQDEPALFVALTFERREVLDSSNIKPMNLIGVDRGENIPAVIALTDPEGCPLSRFKDSLGNPTHILRIGESYKEKQRTIQAKKEVEQRRAGGYSRKYASKAKNLADDMVRNTARDLLYYAVTQDAMLIFENLSRGFGRQGKRTFMAERQYTRMEDWLTAKLAYEGLSKTYLSKTLAQYTSKTCSNCGFTITSADYDRVLEKLKKTATGWMTTINGKELKVEGQITYYNRYKRQNVVKDLSVELDRLSEESVNNDISSWTKGRSGEALSLLKKRFSHRPVQEKFVCLNCGFETHADEQAALNIARSWLFLRSQEYKKYQTNKTTGNTDKRAFVETWQSFYRKKLKEVWKPAV

SEQ ID NO: 148 - protein, 979 aa, Artificial Sequence
  CasX variant
RQEIKRINKIRRRLVKDSNTKKAGKTGPMKTLLVRVMTPDLRERLENLRKKPENIPQPISNTSRANLNKLLTDYTEMKKAILHVYWEEFQKDPVGLMSRVAQPASKKIDQNKLKPEMDEKGNLTTAGFACSQCGQPLFVYKLEQVSEKGKAYTNYFGRCNVAEHEKLILLAQLKPEKDSDEAVTYSLGKFGQRALDFYSIHVTKESTHPVKPLAQIAGNRYASGAPVGKALSDACMGTIASFLSKYQDIIIEHQKVVKGNQKRLESLRELAGKENLEYPSVTLPPQPHTKEGVDAYNEVIARVRMWVNLNLWQKLKLSRDDAKPLLRLKGFPSFPLVERQANEVDWWDMVCNVKKLINEKKEDGKVFWQNLAGYKRQEALRPYLSSEEDRKKGKKFARYQLGDLLLHLEKKHGEDWGKVYDEAWERIDKKVEGLSKHIKLEEERRSEDAQSKAALTDWLRAKASFVIEGLKEADKDEFCRCELKLQKWYGDLRGKPFAIEAENSILDISGFSKQYNCAFIWQKDGVKKLNLYLIINYFKGGKLRFKKIKPEAFEANRFYTVINKKSGEIVPMEVNFNFDDPNLIILPLAFGKRQGREFIWNDLLSLETGSLKLANGRVIEKTLYNRRTRQDEPALFVALTFERREVLDSSNIKPMNLIGVDRGENIPAVIALTDPEGCPLSRFKDSLGNPTHILRIGESYKEKQRTIQAKKEVEQRRAGGYSRKYASKAKNLADDMVRNTARDLLYYAVTQDAMLIFENLSRGFGRQGKRTFMAERQYTRMEDWLTAKLAYEGLSKTYLSKTLAQYTSKTCSNCGFTITSADYDRVLEKLKKTATGWMTTINGKELKVEGQITYYNRYKRQNVVKDLSVELDRLSEESVNNDISSWTKGRSGEALSLLKKRFSHRPVQEKFVCLNCGFETHADEQAALNIARSWLFLRSQEYKKYQTNKTTGNTDKRAFVETWQSFYRKKLKEVWKPAV

SEQ ID NO: 149 - protein, 978 aa, Artificial Sequence
  CasX variant
QEIKRINKIRRRLVKDSNTKKAGKTGPMKTLLVRVMTPDLRERLENLRKKPENIPQPISNTSRANLNKLLTDYTEMKKAILHVYWEEFQKDPVGLMSRVAQPASKKIDQNKLKPEMDEKGNLTTAGFACSQCGQPLFVYKLEQVSEKGKAYTNYFGRCNVAEHEKLILLAQLKPEKDSDEAVTYSLGKFGQRALDFYSIHVTKESTHPVKPLAQIAGNRYASGPVGKALSDACMGTIASFLSKYQDIIIEHQKVVKGNQKRLESLRELAGKENLEYPSVTLPPQPHTKEGVDAYNEVIARVRMWVNLNLWQKLKLSRDDAKPLLRLKGFPSFPLVERQANEVDWWDMVCNVKKLINEKKEDGKVFWQNLAGYKRQEALRPYLSSEEDRKKGKKFARYQLGDLLLHLEKKHGEDWGKVYDEAWERIDKKVEGLSKHIKLEEERRSEDAQSKAALTDWLRAKASFVIEGLKEADKDEFCRCELKLQKWYGDLRGKPFAIEAENSILDISGFSKQYNCAFIWQKDGVKKLNLYLIINYFKGGKLRFKKIKPEAFEANRFYTVINKKSGEIVPMEVNFNFDDPNLIILPLAFGKRQGREFIWNDLLSLETGSLKLANGRVIEKTLYNRRTRQDEPALFVALTFERREVLDSSNIKPMNLIGVDRGENIPAVIALTDPEGCPLSRFKDSLGNPTHIQLRIGESYKEKQRTIQAKKEVEQRRAGGYSRKYASKAKNLADDMVRNTARDLLYYAVTQDAMLIFENLSRGFGRQGKRTFMAERQYTRMEDWLTAKLAYEGLSKTYLSKTLAQYTSKTCSNCGFTITSADYDRVLEKLKKTATGWMTTINGKELKVEGQITYYNRYKRQNVVKDLSVELDRLSEESVNNDISSWTKGRSGEALSLLKKRFSHRPVQEKFVCLNCGFETHADEQAALNIARSWLFLRSQEYKKYQTNKTTGNTDKRAFVETWQSFYRKKLKEVWKPAV

SEQ ID NO: 150 - protein, 977 aa, Artificial Sequence
  CasX variant
QEIKRINKIRRRLVKDSNTKKAGKTGPMKTLLVRVMTPDLRERLENLRKKPENIPQPISNTSRANLNKLLTDYTEMKKAILHVYWEEFQKDPVGLMSRVAQPASKKIDQNKLKPEMDEKGNLTTAGFACSQCGQPLFVYKLEQVSEKGKAYTNYFGRCNVAEHEKLILLAQLKPEKDSDEAVTYSLGKFGQRALDFYSIHVTKESTHPVKPLAQIAGNRYASGPVGKALSDACMGTIASFLSKYQDIIIEHQKVVKGNQKRLESLRELAGKENLEYPSVTLPPQPHTKEGVDAYNEVIARVRMWVNLNLWQKLKLSRDDAKPLLRLKGFPSFPLVERQANEVDWWDMVCNVKKLINEKKEDGKVFWQNLAGYKRQEALRPYLSSEEDRKKGKKFARYQLGDLLLHLEKKHGEDWGKVYDEAWERIDKKVEGLSKHIKLEEERRSEDAQSKAALTDWLRAKASFVIEGLKEADKDEFCRCELKLQKWYGDLRGKPFAIEAENSILDISGFSKQYNCAFIWQKDGVKKLNLYLIINYFKGGKLRFKKIKPEAFEANRFYTVINKKSGEIVPMEVNFNFDDPNLIILPLAFGKRQGREFIWNDLLSLETGSLKLANGRVIEKTLYNRRTRQDEPALFVALTFERREVLDSSNIKPMNLIGVDRGENIPAVIALTDPEGCPLSRFKDSLGNPTHILRIGESYKEKQRTTQAKKEVEQRRAGGYSRKYASKAKNLADDMVRNTARDLLYYAVTQDAMLIFENLSRGFGRQGKRTFMAERQYTRMEDWLTAKLAYEGLSKTYLSKTLAQYTSKTCSNCGFTITSADYDRVLEKLKKTATGWMTTINGKELKVEGQITYYNRYKRQNVVKDLSVELDRLSEESVNNDISSWTKGRSGEALSLLKKRFSHRPVQEKFVCLNCGFETHADEQAALNIARSWLFLRSQEYKKYQTNKTTGNTDKRAFVETWQSFYRKKLKEVWKPAV

SEQ ID NO: 151 - protein, 977 aa, Artificial Sequence
  CasX variant
QEIKRINKIRRRLVKDSNTKKAGKTGPMKTLLVRVMTPDLRERLENLRKKPENIPQPISNTSRANLNKLLTDYTEMKKAILHVYWEEFQKDPVGLMSRVAQPASKKIDQNKLKPEMDEKGNLTTAGFACSQCGQPLFVYKLEQVSEKGKAYTNYFGRCNVAEHEKLILLAQLKPEKDSDEAVTYSLGKFGQRALDFYSIHVTKESTHPVKPLAQIAGNRYASGPVGKALSDACMGTIASFLSKYQDIIIEHQKVVKGNQKRLESLRELAGKENLEYPSVTLPPQPHTKEGVDAYNEVIARVRMWVNLNLWQKLKLSRDDAKPLLRLKGFPSFPLVERQANEVDWWDMVCNVKKLINEKKEDGKVFWQNLAGYKRQEALRPYLSSEEDRKKGKKFARYQLGDLLLHLEKKHGEDWGKVYDEAWERIDKKVEGLSKHIKLEEERRSEDAQSKAALTDWLRAKASFVIEGLKEADKDEFCRCELKLQKWYGDLRGKPFAIEAENSILDISGFSKQYNCAFIWQKDGVKKLNLYLIINYFKGGKLRFKKIKPEAFEANRFYTVINKKSGEIVPMEVNFNFDDPNLIILPLAFGKRQGREFIWNDLLSLETGSLKLANGRVIEKTLYNRRTRQDEPALFVALTFERREVLDSSNIKPMNLIGVDRGENIPAVIALTDPEGCPLSRFKRSLGNPTHILRIGESYKEKQRTIQAKKEVEQRRAGGYSRKYASKAKNLADDMVRNTARDLLYYAVTQDAMLIFENLSRGFGRQGKRTFMAERQYTRMEDWLTAKLAYEGLSKTYLSKTLAQYTSKTCSNCGFTITSADYDRVLEKLKKTATGWMTTINGKELKVEGQITYYNRYKRQNVVKDLSVELDRLSEESVNNDISSWTKGRSGEALSLLKKRFSHRPVQEKFVCLNCGFETHADEQAALNIARSWLFLRSQEYKKYQTNKTTGNTDKRAFVETWQSFYRKKLKEVWKPAV

SEQ ID NO: 152 - protein, 977 aa, Artificial Sequence
  CasX variant
QEIKRINKIRRRLVKDSNTKKAGKTYPMKTLLVRVMTPDLRERLENLRKKPENIPQPISNTSRANLNKLLTDYTEMKKAILHVYWEEFQKDPVGLMSRVAQPASKKIDQNKLKPEMDEKGNLTTAGFACSQCGQPLFVYKLEQVSEKGKAYTNYFGRCNVAEHEKLILLAQLKPEKDSDEAVTYSLGKFGQRALDFYSIHVTKESTHPVKPLAQIAGNRYASGPVGKALSDACMGTIASFLSKYQDIIIEHQKVVKGNQKRLESLRELAGKENLEYPSVTLPPQPHTKEGVDAYNEVIARVRMWVNLNLWQKLKLSRDDAKPLLRLKGFPSFPLVERQANEVDWWDMVCNVKKLINEKKEDGKVFWQNLAGYKRQEALRPYLSSEEDRKKGKKFARYQLGDLLLHLEKKHGEDWGKVYDEAWERIDKKVEGLSKHIKLEEERRSEDAQSKAALTDWLRAKASFVIEGLKEADKDEFCRCELKLQKWYGDLRGKPFAIEAENSILDISGFSKQYNCAFIWQKDGVKKLNLYLIINYFKGGKLRFKKIKPEAFEANRFYTVINKKSGEIVPMEVNFNFDDPNLIILPLAFGKRQGREFIWNDLLSLETGSLKLANGRVIEKTLYNRRTRQDEPALFVALTFERREVLDSSNIKPMNLIGVDRGENIPAVIALTDPEGCPLSRFKDSLGNPTHILRIGESYKEKQRTIQAKKEVEQRRAGGYSRKYASKAKNLADDMVRNTARDLLYYAVTQDAMLIFENLSRGFGRQGKRTFMAERQYTRMEDWLTAKLAYEGLSKTYLSKTLAQYTSKTCSNCGFTITSADYDRVLEKLKKTATGWMTTINGKELKVEGQITYYNRYKRQNVVKDLSVELDRLSEESVNNDISSWTKGRSGEALSLLKKRFSHRPVQEKFVCLNCGFETHADEQAALNIARSWLFLRSQEYKKYQTNKTTGNTDKRAFVETWQSFYRKKLKEVWKPAV

SEQ ID NO: 153 - protein, 977 aa, Artificial Sequence
  CasX variant
QEIKRINKIRRRLVKDSNTKKAGKTGPMKTLLVRVMTPDLRERLENLRKKPENIPQPISNTSRANLNKLLTDYTEMKKAILHVYWEEFQKDPVGLMSRVAQPASKKIDQNKLKPEMDEKGNLTTAGFACSQCGQPLFVYKLEQVSEKGKAYTNYFGRCNVAEHEKLILLAQLKPEKDSDEAVTYSLGKFGQRALDFYSIHVTKESTHPVKPLAQIAGNRYASGPVGKALSDACMGTIASFLSKYQDIIIEHQKVVKGNQKRLESLRELAGKENLEYPSVTLPPQPHTKEGVDAYNEVIARVRMWVNLNLWQKLKLSRDDAKPLLRLKGFPSFPLVERQANEVDWWDMVCNVKKLINEKKEDGKVFWQNLAGYKRQEALRPYLSSEEDRKKGKKFARYQLGDLLLHLEKKHGEDWGKVYDEAWERIDKKVEGLSKHIKLEEERRSEDAQSKAALTDWLRAKASFVIEGLKEADKDEFCRCELKLQKWYGDLRGKPFAIEAENSILDISGFSKQYNCAFIWQKDGVKKLNLYLIINYFKGGKLRFKKIKPEAFEANRFYTVINKKSGEIVPMEVNFNFDDPNLIILPLAFGKRQGREFIWNDLLSLETGSLKLANGRVIEKTLYNRRTRQDEPALFVALTFERREVLDSSNIKPMNLIGVDRGENIPAVIALTDPEGCPLSRFKDSLGNPTHILRIGESYKEKQRTIQAKKEVEQRRAGGYSRKYASKAKNLADDMVRNTARDLLYYAVTQDAMLIFENLSRGFGRQGKRTFMAERQYTRMEDWLTAKLAYEGLSKTYLSKTLAQYTSKTCSNCGFTIHSADYDRVLEKLKKTATGWMTTINGKELKVEGQITYYNRYKRQNVVKDLSVELDRLSEESVNNDISSWTKGRSGEALSLLKKRFSHRPVQEKFVCLNCGFETHADEQAALNIARSWLFLRSQEYKKYQTNKTTGNTDKRAFVETWQSFYRKKLKEVWKPAV

SEQ ID NO: 154 - protein, 977 aa, Artificial Sequence
  CasX variant
QEIKRINKIRRRLVKDSNTKKAGKTGPMKTLLVRVMTPDLRERLENLRKKPENIPQPISNTSRANLNKLLTDYTEMKKAILHVYWEEFQKDPVGLMSRVAQPASKKIDQNKLKPEMDEKGNLTTAGFACSQCGQPLFVYKLEQVSEKGKAYTNYFGRCNVAEHEKLILLAQLKPEKDSDEAVTYSLGKFGQRALDFYSIHVTKESTHPVKPLAQIAGNRYASGPVGKALSDACMGTIASFLSKYQDIIIEHQKVVKGNQKRLESLRELAGKENLEYPSVTLPPQPHTKEGVDAYNEVIARVRMWVNLNLWQKLKLSRDDAKPLLRLKGFPSFPLVERQANEVDWWDMVCNVKKLINEKKEDGKVFWQNLAGYKRQEALRPYLSSEEDRKKGKKFARYQLGDLLLHLEKKHGEDWGKVYDEAWERIDKKVEGLSKHIKLEEERRSEDAQSKAALTDWLRAKASFVIEGLKEADKDEFCRCELKLQKWYGDLRGKPFAIEAENSILDISGFSKQYNCAFIWQKDGVKKLNLYLIINYFKGGKLRFKKIKPEAFEANRFYTVINKKSGEIVPMEVNFNFDDPNLIILPLAFGKRQGREFIWNDLLSLETGSLKLANGRVIEKTLYNRRTRQDEPALFVALTFERREVLDSSNIKPMNLIGVDRGENIPAVIALTDPEGCPLSRFKDSLGNPTHILRIGESYKEKQRTIQAKKEVEQRRAGGYSRKYASKAKNLADDMVRNTARDLLYYAATQDAMLIFENLSRGFGRQGKRTFMAERQYTRMEDWLTAKLAYEGLSKTYLSKTLAQYTSKTCSNCGFTITSADYDRVLEKLKKTATGWMTTINGKELKVEGQITYYNRYKRQNVVKDLSVELDRLSEESVNNDISSWTKGRSGEALSLLKKRFSHRPVQEKFVCLNCGFETHADEQAALNIARSWLFLRSQEYKKYQTNKTTGNTDKRAFVETWQSFYRKKLKEVWKPAV

SEQ ID NO: 155 - protein, 977 aa, Artificial Sequence
  CasX variant
QEIKRINKIRRRLVKDSNTKKAGKTGPMKTLLVRVMTPDLRERLENLRKKPENIPQPISNTSRANLNKLLTDYTEMKKAILHVYWEEFQKDPVGLMSRVAQPASKKIDQNKLKPEMDEKGNLTTAGFACSQCGQPLFVYKLEQVSEKGKAYTNYFGRCNVAEHEKLILLAQLKPEKDSDEAVTYSLGKFGQRALDFYSIHVTKESTHPVKPLAQIAGNRYASGPVGKALSDACMGTIASFLSKYQDIIIEHQKVVKGNQKRLESLRELAGKENLEYPSVTLPPQPHTKEGVDAYNEVIARVRMWVNLNLWQKLKLSRDDAKPLLRLKGFPSFPLVERQANEVDWWDMVCNVKKLINEKKEDGKVFWQNLAGYKRQEALRPYLSSEEDRKKGKKFARYQLGDLLLHLEKKHGEDWGKVYDEAWERIDKKVEGLSKHIKLEEERRSEDAQSKAALTDWLRAKASFVIEGLKEADKDEFCRCELKLQKWYGDLRGKPFAIEAENSILDISGFSKQYNCAFIWQKDGVKKLNLYLIINYFKGGKLRFKKIKPEAFEANRFYTVINKKSGEIVPMEVNFNFDDPNLIILPLAFGKRQGREFIWNDLLSLETGSLKLANGRVIEKTLYNRRTRQDEPALFVALTFERREVLDSSNIKPMNLIGVDRGENIPAVIALTDPEGCPLSRFKDSLGNPTHILRIGESYKEKQRTIQAAKEVEQRRAGGYSRKYASKAKNLADDMVRNTARDLLYYAVTQDAMLIFENLSRGFGRQGKRTFMAERQYTRMEDWLTAKLAYEGLSKTYLSKTLAQYTSKTCSNCGFTITSADYDRVLEKLKKTATGWMTTINGKELKVEGQITYYNRYKRQNVVKDLSVELDRLSEESVNNDISSWTKGRSGEALSLLKKRFSHRPVQEKFVCLNCGFETHADEQAALNIARSWLFLRSQEYKKYQTNKTTGNTDKRAFVETWQSFYRKKLKEVWKPAV

SEQ ID NO: 156 - protein, 978 aa, Artificial Sequence
  CasX variant
QEIKRINKIRRRLVKDSNTKKAGKTRGPMKTLLVRVMTPDLRERLENLRKKPENIPQPISNTSRANLNKLLTDYTEMKKAILHVYWEEFQKDPVGLMSRVAQPASKKIDQNKLKPEMDEKGNLTTAGFACSQCGQPLFVYKLEQVSEKGKAYTNYFGRCNVAEHEKLILLAQLKPEKDSDEAVTYSLGKFGQRALDFYSIHVTKESTHPVKPLAQIAGNRYASGPVGKALSDACMGTIASFLSKYQDIIIEHQKVVKGNQKRLESLRELAGKENLEYPSVTLPPQPHTKEGVDAYNEVIARVRMWVNLNLWQKLKLSRDDAKPLLRLKGFPSFPLVERQANEVDWWDMVCNVKKLINEKKEDGKVFWQNLAGYKRQEALRPYLSSEEDRKKGKKFARYQLGDLLLHLEKKHGEDWGKVYDEAWERIDKKVEGLSKHIKLEEERRSEDAQSKAALTDWLRAKASFVIEGLKEADKDEFCRCELKLQKWYGDLRGKPFAIEAENSILDISGFSKQYNCAFIWQKDGVKKLNLYLIINYFKGGKLRFKKIKPEAFEANRFYTVINKKSGEIVPMEVNFNFDDPNLIILPLAFGKRQGREFIWNDLLSLETGSLKLANGRVIEKTLYNRRTRQDEPALFVALTFERREVLDSSNIKPMNLIGVDRGENIPAVIALTDPEGCPLSRFKDSLGNPTHILRIGESYKEKQRTIQAKKEVEQRRAGGYSRKYASKAKNLADDMVRNTARDLLYYAVTQDAMLIFENLSRGFGRQGKRTFMAERQYTRMEDWLTAKLAYEGLSKTYLSKTLAQYTSKTCSNCGFTITSADYDRVLEKLKKTATGWMTTINGKELKVEGQITYYNRYKRQNVVKDLSVELDRLSEESVNNDISSWTKGRSGEALSLLKKRFSHRPVQEKFVCLNCGFETHADEQAALNIARSWLFLRSQEYKKYQTNKTTGNTDKRAFVETWQSFYRKKLKEVWKPAV

SEQ ID NO: 157 - protein, 978 aa, Artificial Sequence
  CasX variant
QEIKRINKIRRRLVKDSNTKKAGKTGPMKTLLVRVMTPDLRERLENLRKKPENIPQPISNTSRANLNKLLTDYTEMKKAILHVYWEEFQKDPVGLMSRVAQPASKKIDQNKLKPEMDEKGNLTTAGFACSQCGQPLFVYKLEQVSEKGKAYTNYFGRCNVAEHEKLILLAQLKPEKDSDEAVTYSLGKFGQRALDFYSIHVTKESTHPVKPLAQIAGNRYASYPVGKALSDACMGTIASFLSKYQDIIIEHQKVVKGNQKRLESLRELAGKENLEYPSVTLPPQPHTKEGVDAYNEVIARVRMWVNLNLWQKLKLSRDDAKPLLRLKGFPSFPLVERQANEVDWWDMVCNVKKLINEKKEDGKVFWQNLAGYKRQEALRPYLSSEEDRKKGKKFARYQLGDLLLHLEKKHGEDWGKVYDEAWERIDKKVEGLSKHIKLEEERRSEDAQSKAALTDWLRAKASFVIEGLKEADKDEFCRCELKLQKWYGDLRGKPFAIEAENSILDISGFSKQYNCAFIWQKDGVKKLNLYLIINYFKGGKLRFKKIKPEAFEANRFYTVINKKSGEIVPMEVNFNFDDPNLIILPLAFGKRQGREFIWNDLLSLETGSLKLANGRVIEKTLYNRRTRQDEPALFVALTFERREVLDSSNIKPMNLIGVDRGENIPAVIALTDPEGCPLSRFKDSLGNPTHILRIGESYKEKQRTIQAKKEVEQRRAGGYSRKYASKAKNLADDMVRNTARDLLYYAVTQDAMLIFENLSRGFGRQGKRTFMAERQYTRMEDWLTAKLAYEGLPSKTYLSKTLAQYTSKTCSNCGFTITSADYDRVLEKLKKTATGWMTTINGKELKVEGQITYYNRYKRQNVVKDLSVELDRLSEESVNNDISSWTKGRSGEALSLLKKRFSHRPVQEKFVCLNCGFETHADEQAALNIARSWLFLRSQEYKKYQTNKTTGNTDKRAFVETWQSFYRKKLKEVWKPAV

SEQ ID NO: 158 - protein, 978 aa, Artificial Sequence
  CasX variant
QEIKRINKIRRRLVKDSNTKKAGKTGPMKTLLVRVMTPDLRERLENLRKKPENIPQPISNTSRANLNKLLTDYTEMKKAILHVYWEEFQKDPVGLMSRVAQPASKKIDQNKLKPEMDEKGNLTTAGFACSQCGQPLFVYKLEQVSEKGKAYTNYFGRCNVAEHEKLILLAQLKPEKDSDEAVTYSLGKFGQRALDFYSIHVTKESTHPVKPLAQIAGNRYASNPVGKALSDACMGTIASFLSKYQDIIIEHQKVVKGNQKRLESLRELAGKENLEYPSVTLPPQPHTKEGVDAYNEVIARVRMWVNLNLWQKLKLSRDDAKPLLRLKGFPSFPLVERQANEVDWWDMVCNVKKLINEKKEDGKVFWQNLAGYKRQEALRPYLSSEEDRKKGKKFARYQLGDLLLHLEKKHGEDWGKVYDEAWERIDKKVEGLSKHIKLEEERRSEDAQSKAALTDWLRAKASFVIEGLKEADKDEFCRCELKLQKWYGDLRGKPFAIEAENSILDISGFSKQYNCAFIWQKDGVKKLNLYLIINYFKGGKLRFKKIKPEAFEANRFYTVINKKSGEIVPMEVNFNFDDPNLIILPLAFGKRQGREFIWNDLLSLETGSLKLANGRVIEKTLYNRRTRQDEPALFVALTFERREVLDSSNIKPMNLIGVDRGENIPAVIALTDPEGCPLSRFKDSLGNPTHILRIGESYKEKQRTIQAKKEVEQRRAGGYSRKYASKAKNLADDMVRNTARDLLYYAVTQDAMLIFENLSRGFGRQGKRTFMAERQYTRMEDWLTAKLAYEGLPSKTYLSKTLAQYTSKTCSNCGFTITSADYDRVLEKLKKTATGWMTTINGKELKVEGQITYYNRYKRQNVVKDLSVELDRLSEESVNNDISSWTKGRSGEALSLLKKRFSHRPVQEKFVCLNCGFETHADEQAALNIARSWLFLRSQEYKKYQTNKTTGNTDKRAFVETWQSFYRKKLKEVWKPAV

SEQ ID NO: 159 - protein, 979 aa, Artificial Sequence
  CasX variant
QEIKRINKIRRRLVKDSNTKKAGKTGPMKTLLVRVMTPDLRERLENLRKKPENIPQPISNTSRANLNKLLTDYTEMKKAILHVYWEEFQKDPVGLMSRVAQPASKKIDQNKLKPEMDEKGNLTTAGFACSQCGQPLFVYKLEQVSEKGKAYTNYFGRCNVAEHEKLILLAQLKPEKDSDEAVTYSLGKFGQRALDFYSIHVTKESTHPVKPLAQIAGNRYASGPVGKALSDACMGTIASFLSKYQDIIIEHQKVVKGNQKRLESLRELAGKENLEYPSVTLPPQPHTKEGVDAYNEVIARVRMWVNLNLWQKLKLSRDDAKPLLRLKGFPSFPLVERQANEVDWWDMVCNVKKLINEKKEDGKVFWQNLAGYKRQEALRPYLSSEEDRKKGKKFARYQLGDLLLHLEKKHGEDWGKVYDEAWERIDKKVEGLSKHIKLEEERRSEDAQSKAALTDWLRAKASFVIEGLKEADKDEFCRCELKLQKWYGDLRGKPFAIEAENSILDISGFSKQYNCAFIWQKDGVKKLNLYLIINYFKGWGKLRFKKIKPEAFEANRFYTVINKKSGEIVPMEVNFNFDDPNLIILPLAFGKRQGREFIWNDLLSLETGSLKLANGRVIEKTLYNRRTRQDEPALFVALTFERREVLDSSNIKPMNLIGVDRGENIPAVIALTDPEGCPLSRFKDSLGNPTHILRIGESYKEKQRTIQAKKEVEQRRAGGYSRKYASKAKNLADDMVRNTARDLLYYAVTQDAMLIFENLSRGFGRQGKRTFMAERQYTRMEDWLTAKLAYEGLPSKTYLSKTLAQYTSKTCSNCGFTITSADYDRVLEKLKKTATGWMTTINGKELKVEGQITYYNRYKRQNVVKDLSVELDRLSEESVNNDISSWTKGRSGEALSLLKKRFSHRPVQEKFVCLNCGFETHADEQAALNIARSWLFLRSQEYKKYQTNKTTGNTDKRAFVETWQSFYRKKLKEVWKPAV

SEQ ID NO: 160 - protein, 979 aa, Artificial Sequence
  CasX variant
QEIKRINKIRRRLVKDSNTKKAGKTGPMKTLLVRVMTPDLRERLENLRKKPENIPQPISNTSRANLNKLLTDYTEMKKAILHVYWEEFQKDPVGLMSRVAQPASKKIDQNKLKPEMDEKGNLTTAGFACSQCGQPLFVYKLEQVSEKGKAYTNYFGRCNVAEHEKLILLAQLKPEKDSDEAVTYSLGKFGQRALDFYSIHVTKESTHPVKPLAQIAGNRYASGPVGKALSDACMGTIASFLSKYQDIIIEHQKVVKGNQKRLESLRELAGKENLEYPSVTLPPQPHTKEGVDAYNEVIARVRMWVNLNLWQKLKLSRDDAKPLLRLKGFPSFPLVERQANEVDWWDMVCNVKKLINEKKEDGKVFWQNLAGYKRQEALRPYLSSEEDRKKGKKFARYQLGDLLLHLEKKHGEDWGKVYDEAWERIDKKVEGLSKHIKLEEERRSEDAQSKAALTDWLRAKASFVIEGLKEADKDEFCRCELKLQKWYGDLRGKPFAIEAENSILDISGFSKQYNCAFIWQKDGVKKLNLYLIINYFKGYGKLRFKKIKPEAFEANRFYTVINKKSGEIVPMEVNFNFDDPNLIILPLAFGKRQGREFIWNDLLSLETGSLKLANGRVIEKTLYNRRTRQDEPALFVALTFERREVLDSSNIKPMNLIGVDRGENIPAVIALTDPEGCPLSRFKDSLGNPTHILRIGESYKEKQRTIQAKKEVEQRRAGGYSRKYASKAKNLADDMVRNTARDLLYYAVTQDAMLIFENLSRGFGRQGKRTFMAERQYTRMEDWLTAKLAYEGLPSKTYLSKTLAQYTSKTCSNCGFTITSADYDRVLEKLKKTATGWMTTINGKELKVEGQITYYNRYKRQNVVKDLSVELDRLSEESVNNDISSWTKGRSGEALSLLKKRFSHRPVQEKFVCLNCGFETHADEQAALNIARSWLFLRSQEYKKYQTNKTTGNTDKRAFVETWQSFYRKKLKEVWKPAV

SEQ ID NO: 161 - protein, 11 aa, Artificial Sequence
  nuclear localization signal
RQRRNELKRSP

SEQ ID NO: 162 - protein, 38 aa, Artificial Sequence
  nuclear localization signal
NQSSNFGPMKGGNFGGRSSGPYGGGGQYFAKPRNQGGY

SEQ ID NO: 163 - protein, 42 aa, Artificial Sequence
  nuclear localization signal
RMRIZFKNKGKDTAELRRRRVEVSVELRKAKKDEQILKRRNV

SEQ ID NO: 164 - protein, 8 aa, Artificial Sequence
  nuclear localization signal
VSRKRPRP

SEQ ID NO: 165 - protein, 8 aa, Artificial Sequence
  nuclear localization signal
PPKKARED

SEQ ID NO: 166 - protein, 8 aa, Artificial Sequence
  nuclear localization signal
PQPKKKPL

SEQ ID NO: 167 - protein, 12 aa, Artificial Sequence
  nuclear localization signal
SALIKKKKKMAP

SEQ ID NO: 168 - protein, 5 aa, Artificial Sequence
  nuclear localization signal
DRLRR

SEQ ID NO: 169 - protein, 7 aa, Artificial Sequence
  nuclear localization signal
PKQKKRK

SEQ ID NO: 170 - protein, 10 aa, Artificial Sequence
  nuclear localization signal
RKLKKKIKKL

SEQ ID NO: 171 - protein, 10 aa, Artificial Sequence
  nuclear localization signal
REKKKFLKRR

SEQ ID NO: 172 - protein, 20 aa, Artificial Sequence
  nuclear localization signal
KRKGDEVDGVDEVAKKKSKK

SEQ ID NO: 173 - protein, 17 aa, Artificial Sequence
  nuclear localization signal
RKCLQAGMNLEARKTKK

SEQ ID NO: 174 - protein, 8 aa, Artificial Sequence
  nuclear localization signal
PRPRKIPR

SEQ ID NO: 175 - protein, 9 aa, Artificial Sequence
  nuclear localization signal
PPRKKRTVV

SEQ ID NO: 176 - protein, 12 aa, Artificial Sequence
  nuclear localization signal
NLSKKKKRKREK

SEQ ID NO: 177 - protein, 10 aa, Artificial Sequence
  nuclear localization signal
RRPSRPFRKP

SEQ ID NO: 178 - protein, 8 aa, Artificial Sequence
  nuclear localization signal
KRPRSPSS

SEQ ID NO: 179 - protein, 19 aa, Artificial Sequence
  nuclear localization signal
KRGINDRNFWRGENERKTR

SEQ ID NO: 180 - protein, 11 aa, Artificial Sequence
  nuclear localization signal
PRPPKMARYDN

SEQ ID NO: 181 - protein, 8 aa, Artificial Sequence
  nuclear localization signal
KRSFSKAF

SEQ ID NO: 182 - protein, 9 aa, Artificial Sequence
  nuclear localization signal
KLKIKRPVK

SEQ ID NO: 183 - protein, 19 aa, Artificial Sequence
  nuclear localization signal
PKKKRKVPPPPAAKRVKLD

SEQ ID NO: 184 - protein, 17 aa, Artificial Sequence
  nuclear localization signal
PKTRRRPRRSQRKRPPT

SEQ ID NO: 185 - protein, 25 aa, Artificial Sequence
  nuclear localization signal
MSRRRKANPTKLSENAKKLAKEVEN

SEQ ID NO: 186 - protein, 16 aa, Artificial Sequence
  nuclear localization signal
KTRRRPRRSQRKRPPT

SEQ ID NO: 187 - protein, 13 aa, Artificial Sequence
  nuclear localization signal
RRKKRRPRRKKRR

SEQ ID NO: 188 - protein, 14 aa, Artificial Sequence
  nuclear localization signal
PKKKSRKPKKKSRK

SEQ ID NO: 189 - protein, 17 aa, Artificial Sequence
  nuclear localization signal
HKKKHPDASVNFSEFSK

SEQ ID NO: 190 - protein, 18 aa, Artificial Sequence
  nuclear localization signal
QRPGPYDRPQRPGPYDRP

SEQ ID NO: 191 - protein, 16 aa, Artificial Sequence
  nuclear localization signal
LSPSLSPLLSPSLSPL

SEQ ID NO: 192 - protein, 18 aa, Artificial Sequence
  nuclear localization signal
RGKGGKGLGKGGAKRHRK

SEQ ID NO: 193 - protein, 14 aa, Artificial Sequence
  nuclear localization signal
PKRGRGRPKRGRGR

SEQ ID NO: 194 - protein, 19 aa, Artificial Sequence
  nuclear localization signal
PKKKRKVPPPPAAKRVKLD

SEQ ID NO: 195 - protein, 17 aa, Artificial Sequence
  nuclear localization signal
PKKKRKVPPPPKKKRKV

SEQ ID NO: 196 - protein, 7 aa, Artificial Sequence
  nuclear localization signal
PKKKRKV

SEQ ID NO: 197 - protein, 16 aa, Artificial Sequence
  nuclear localization signal
KRPAATKKAGQAKKKK

SEQ ID NO: 198 - protein, 11 aa, Artificial Sequence
  peptide transduction domain
YGRKKRRQRRR

SEQ ID NO: 199 - protein, 8 aa, Artificial Sequence
  peptide transduction domain
RKKRRQRR

SEQ ID NO: 200 - protein, 11 aa, Artificial Sequence
  peptide transduction domain
YARAAARQARA

SEQ ID NO: 201 - protein, 11 aa, Artificial Sequence
  peptide transduction domain
THRLPRRRRRR

SEQ ID NO: 202 - protein, 11 aa, Artificial Sequence
  peptide transduction domain
GGRRARRRRRR

SEQ ID NO: 203 - protein, 50 aa, Artificial Sequence
  peptide transduction domain
  SITE (4)..(50): individual amino acid residues may be present or absent
RRRRRRRRRRRRRRRRRRRRRRRRRRRRRRRRRRRRRRRRRRRRRRRRRR

SEQ ID NO: 204 - protein, 12 aa, Artificial Sequence
  peptide transduction domain
RRQRRTSKLMKR

SEQ ID NO: 205 - protein, 27 aa, Artificial Sequence
  peptide transduction domain
GWTLNSAGYLLGKINLKALAALAKKIL

SEQ ID NO: 206 - protein, 33 aa, Artificial Sequence
  peptide transduction domain
KALAWEAKLAKALAKALAKHLAKALAKALKCEA

SEQ ID NO: 207 - protein, 16 aa, Artificial Sequence
  peptide transduction domain
RQIKIWFQNRRMKWKK

SEQ ID NO: 208 - protein, 25 aa, Artificial Sequence
  Linker
  SITE (6)..(10): grouped amino acid residues may be present or absent
  SITE (11)..(15): grouped amino acid residues may be present or absent
  SITE (16)..(20): grouped amino acid residues may be present or absent
  SITE (21)..(25): grouped amino acid residues may be present or absent
GSGGSGSGGSGSGGSGSGGSGSGGS

SEQ ID NO: 209 - protein, 30 aa, Artificial Sequence
  Linker
  SITE (7)..(12): grouped amino acid residues may be present or absent
  SITE (13)..(18): grouped amino acid residues may be present or absent
  SITE (19)..(24): grouped amino acid residues may be present or absent
  SITE (25)..(30): grouped amino acid residues may be present or absent
GGSGGSGGSGGSGGSGGSGGSGGSGGSGGS

SEQ ID NO: 210 - protein, 20 aa, Artificial Sequence
  Linker
  SITE (5)..(8): grouped amino acid residues may be present or absent
  SITE (9)..(12): grouped amino acid residues may be present or absent
  SITE (13)..(16): grouped amino acid residues may be present or absent
  SITE (17)..(20): grouped amino acid residues may be present or absent
GGGSGGGSGGGSGGGSGGGS

SEQ ID NO: 211 - protein, 4 aa, Artificial Sequence
  Linker
GGSG

SEQ ID NO: 212 - protein, 5 aa, Artificial Sequence
  Linker
GGSGG

SEQ ID NO: 213 - protein, 5 aa, Artificial Sequence
  Linker
GSGSG

SEQ ID NO: 214 - protein, 5 aa, Artificial Sequence
  Linker
GSGGG

SEQ ID NO: 215 - protein, 5 aa, Artificial Sequence
  Linker
GGGSG

SEQ ID NO: 216 - protein, 5 aa, Artificial Sequence
  Linker
GSSSG

SEQ ID NO: 217 - protein, 4 aa, Artificial Sequence
  Linker
GPGP

SEQ ID NO: 218 - protein, 6 aa, Artificial Sequence
  Linker
PPAPPA

SEQ ID NO: 219 - protein, 7 aa, Artificial Sequence
  Linker
PPPGPPP

SEQ ID NO: 220 - DNA, 3120 bp, Artificial Sequence
  SV40 NLS-CasX-SV40 NLS-TEV cleavage site - TwinStrep tag
atggctccgaagaagaagcgaaaggtcagccaggaaattaaacgcatcaacaagatccgccgtcgtctggtaaaagacagcaatacgaaaaaagccggaaaaaccggtccgatgaaaacgctgctggtgcgcgtgatgacgccggatctccgcgaacgtcttgagaatttgcgtaagaaacctgaaaatattccgcaaccgatttctaacacctcgcgcgccaatctgaataaactgctgaccgattacaccgaaatgaagaaagcgattctgcacgtttactgggaagagttccagaaagacccggtcggtctgatgagccgcgttgcgcaacctgcgccgaaaaatatcgatcagcgcaagttaatcccggttaaagatggtaatgaacgtttaacctccagcggctttgcctgcagtcagtgctgccagccactttatgtttataaacttgaacaggttaacgataaagggaaaccccataccaattatttcggccgctgcaatgtcagcgaacatgaacgcctgattttgttaagcccgcataaaccggaagcgaatgacgaactggtgacctattccctgggtaaatttggtcagcgggcgctggatttttacagcattcatgtgacgcgggaaagtaaccatccggtaaagccactggaacaaatcggcggtaacagctgcgcctctggcccggttggcaaagcgcttagcgatgcctgtatgggcgcggtggcgagctttctgacaaaataccaggatattatcctggagcatcagaaggtgatcaaaaagaacgagaaacgtctggcaaatttaaaggatattgcctccgctaacggcctggcgttcccgaagattaccttaccgccgcagccgcacaccaaagaaggtatcgaagcgtataacaacgttgttgcccagatcgtcatctgggtgaatctcaacctgtggcaaaaactgaaaattggtcgtgatgaagcaaaaccgttgcagcgactgaaaggattcccgtcgtttccgctggttgaacgacaggcgaacgaagtggattggtgggatatggtttgtaacgtcaaaaaattgatcaacgaaaaaaaggaagatggcaaagttttctggcaaaatctggcgggttacaaacgtcaggaggcgttgcttccgtatctctcttcagaagaagatcgcaaaaaaggcaagaagtttgctcgctatcagtttggcgatttattactgcatctggaaaaaaaacacggcgaagactggggcaaagtgtacgatgaagcctgggagcgtatcgacaaaaaagtggaaggtttgtcgaaacatattaaactcgaagaagagcgccgcagtgaagatgcgcagtcaaaagcagcgctgacggactggttacgtgcgaaagccagttttgtgattgaaggattaaaagaagctgataaagatgaattttgccgttgcgaactgaaactgcaaaaatggtatggcgacctgcgcggcaaaccgttcgccattgaggcagaaaatagcatccttgatatctccggtttcagcaaacaatataactgcgcgtttatttggcagaaagacggcgtgaaaaagcttaacctgtatctgatcattaactattttaaaggcgggaaactgcgtttcaagaaaatcaagccggaagcatttgaagccaatcgtttttataccgttattaataaaaaaagcggtgaaatcgtgccgatggaagttaattttaactttgatgatccgaacttgattattctgccgctggcattcggtaaacggcagggccgtgagtttatctggaacgacctgttatcgctggaaacgggcagcctgaaattagccaacggtcgcgtcattgaaaaaacgctctacaaccgccgcacccgccaggatgagccggcactgtttgtcgcgctgacctttgaacggcgtgaagtcctcgatagcagcaacatcaaaccaatgaaccttatcggtattgatcgtggtgaaaacattcctgccgttatcgccctgactgatccagaaggctgcccgctttctcgcttcaaagattcactgggcaacccgacccatatcctccgtattggcgagagctacaaagagaaacagcgtaccattcaggcagccaaagaagtggagcagcgtcgcgcgggcggctatagccgtaaatatgccagcaaagctaaaaacctggcggatgacatggtgcgtaacacggcgcgcgatttgctgtactacgccgtcacccaggacgcgatgctgatttttgagaacctctcccgcggttttgggcgtcagggtaaacgcacgtttatggcggaacgccagtatacgcgtatggaggactggctgaccgcgaagctggcctatgaaggcttgccgtctaaaacttacctgagcaagaccctggctcagtacaccagtaaaacctgtagtaattgcggctttaccatcaccagcgccgattatgaccgcgtgctggaaaagctgaagaaaaccgccaccggctggatgaccaccatcaatggtaaagagcttaaagtcgaagggcagattacttattacaaccgttataagcggcaaaacgtggtgaaagatctgtcggttgagctggaccgtttgtctgaagaaagcgtgaacaatgatatcagctcctggaccaaaggtcgttccggcgaagcgttaagtctgttgaaaaagcgctttagccatcgcccggtgcaggaaaaattcgtttgcctgaactgtggcttcgaaacccacgccgacgagcaagcggcgctcaatattgcgcgtagctggctgttcctgcgcagccaggaatataaaaaatatcaaaccaacaaaacaactggcaataccgacaagcgtgcctttgttgaaacctggcagagcttctatcgcaaaaaactgaaagaggtctggaaaccggcggtagcgccaaagaaaaaacgcaaagtgagcgaaaatctttattttcaaggtagcgcatggagtcatcctcaattcgagaaaggtggaggttctggcggtggatcgggaggttcagcgtggagccacccgcagttcgaaaaaggaaggggatccggctgctaa

SEQ ID NO: 221 - protein, 976 aa, Artificial Sequence; identical to SEQ ID NO: 117
  CasX variant

SEQ ID NO: 222 - protein, 976 aa, Artificial Sequence
  CasX variant
QEIKRINKIRRRLVKDSNTKKAGKTGPMKTLLVRVMTPDLRERLENLRKKPENIPQPISNTSRANLNKLLTDYTEMKKAILHVYWEEFQKDPVGLMSRVAQPAPKNIDQRKLIPVKDGNERLTSSGFACSQCCQPLYVYKLEQVNDKGKPHTNYFGRCNVSEHERLILLSPHKPEANDELVTYSLGKFGQRALDFYSIHVTRESNHPVKPLEQIGGNSCASGPVGKALSDACMGAVASFLTKYQDIILEHKKVIKKNEKRLANLKDIASANGLAFPKITLPPQPHTKEGIEAYNNVVAQIVIWVNLNLWQKLKIGRDEAKPLQRLKGFPSFPLVERQANEVDWWDMVCNVKKLINEKKEDGKVFWQNLAGYKRQEALRPYLSSPEDRKKGKKFARYQLGDLLLHLEKKHGEDWGKVYDEAWERIDKKVEGLSKHIKLEEERRSEDAQSKAALTDWLRAKASFVIEGLKEADKDEFCRCELKLQKWYGDLRGKPFAIEAENSILDISGFSKQYNCAFIWQKDGVKKLNLYLIINYFKGGKLRFKKIKPEAFEANRFYTVINKKSGEIVPMEVNFNFDDPNLIILPLAFGKRQGREFIWNDLLSLETGSLKLANGRVIEKPLYNRRTRQDEPALFVALTFERREVLDSSNIKPMNLIGVDRGENIPAVIALTDPEGCPLSRFKDSLGNPTHILRIGESYKEKQRTIQAKKEVEQRRAGGYSRKYASKAKNLADDMVRNTARDLLYYAVTQDAMLIFENLSRGFGRQGKRTFMAERQYTRMEDWLTAKLAYEGLSKTYLSKTLAQYTSKTCSNCGFTITSADYDRVLEKLKKTATGWMTTINGKELKVEGQITYYNRRKRQNVVKDLSVELDRLSEESVNNDISSWTKGRSGEALSLLKKRFSHRPVQEKFVCLNCGFETHADEQAALNIARSWLFLRSQEYKKYQTNKTTGNTDKRAFVETWQSFYRKKLKEVWKPAV

SEQ ID NO: 223 - protein, 976 aa, Artificial Sequence
  CasX variant
QEIKRINKIRRRLVKDSNTKKAGKTGPMKTLLVRVMTPDLRERLENLRKKPENIPQPISNTSRANLNKLLTDYTEMKKAILHVYWEEFQKDPVGLMSRVAQPAPKNIDQRKLIPVKDGNERLTSSGFACSQCCQPLYVYKLEQVNDKGKPHTNYFGRCNVSEHERLILLSPHKPEANDELVTYSLGKFGQRALDFYSIHVTRESNHPVKPLEQIGGNSCASGPVGKALSDACMGAVASFLTKYQDIILEHQKVIKKNEKRLANLKDIASANGLAFPKITLPPQPHTKEGIEAYNNVVAQIVIWVNLNLWQKLKIGRDEAKPLQRLKGFPSFPLVERQANEVDWWDMVCNVKKLINEKKEDGKVFWQNLAGYKRQEALRPYLSSEEDRKKGKKFARYQLGDLLKHLEKKHGEDWGKVYDEAWERIDKKVEGLSKHIKLEEERRSEDAQSKAALTDWLRAKASFVIEGLKEADKDEFCRCELKLQKWYGDLRGKPFAIEAENSILDISGFSKQYNCAFIWQKDGVKKLNLYLIINYFKGGKLRFKKIKPEAFEANRFYTVINKKSGEIVPMEVNFNFDDPNLIILPLAFGKRQGREFIWNDLLSLETGSLKLANGRVIEKTLYNRRTRQDEPALFVALTFERREVLDSSNIKPMNLIGVDRGENIPAVIALTDPEGCPLSRFKDSLGNPTHILRIGESYKEKQRTIQAKKEVEQRRAGGYSRKYASKAKNLADDMVRNTARDLLYYAVTQDAMLIFENLSRGFGRQGKRTFMAERQYTRMEDWLTAKLAYEGLSKTYLSKTLAQYTSKTCSNCGFTITSADYDRVLEKLKKTATGWMTTINGKELKVEGQITYYNRRKRQNVVKDLSVELDRLSEESVNNDISSWTKGRSGEALSLLKKRFSHRPVQEKFVCLNCGFETHADEQAALNIARSWLFLRSQEYKKYQTNKTTGNTDKRAFVETWQSFYRKKLKEVWKPAV

SEQ ID NO: 224 - DNA, 2928 bp, Artificial Sequence
  CasX variant
caagagatcaagagaatcaacaagatcagaaggagactggtcaaggacagcaacacaaagaaggccggcaagacaggccccatgaaaaccctgctcgtcagagtgatgacccctgacctgagagagcggctggaaaacctgagaaagaagcccgagaacatccctcagcctatcagcaacaccagcagggccaacctgaacaagctgctgaccgactacaccgagatgaagaaagccatcctgcacgtgtactgggaagagttccagaaagaccccgtgggcctgatgagcagagttgctcagcccgctcctaagaacatcgaccagagaaagctgatccccgtgaaggacggcaacgagagactgacctctagcggctttgcctgcagccagtgttgccagcctctgtacgtgtacaagctggaacaagtgaacgacaagggcaagccccacaccaactacttcggcagatgcaacgtgtccgagcacgagaggctgatcctgctgtctcctcacaagcccgaggccaacgatgagctggtcacatacagcctgggcaagttcggacagagagccctggacttctacagcatccacgtgaccagggagagcaatcaccctgtgaagcccctggaacagatcggcggcaatagctgtgcctctggacctgtgggaaaagccctgagcgacgcctgtatgggagccgtggcatccttcctgaccaagtaccaggacatcatcctggaacaccagaaagtgatcaagaagaacgagaaaagactggccaacctcaaggatatcgccagcgctaacggcctggcctttcctaagatcaccctgcctccacagcctcacaccaaagagggcatcgaggcctacaacaacgtggtggcccagatcgtgatttgggtcaacctgaatctgtggcagaagctgaagatcggcagggacgaagccaagccactgcagagactgaagggcttccctagcttccctctggtggaaagacaggccaatgaagtggattggtgggacatggtctgcaacgtgaagaagctgatcaacgagaagaaagaggatggcaaggttttctggcagaacctggccggctacaagagacaagaagccctgaggccttacctgagcagcgaagaggaccggaagaagggcaagaagttcgccagataccagttcggcgacctgctgctgcacctggaaaagaagcacggcgaggactggggcaaagtgtacgatgaggcctgggagagaatcgacaagaaggtggaaggcctgagcaagcacattaagctggaagaggaaagaaggagcgaggacgcccaatctaaagccgctctgaccgattggctgagagccaaggccagctttgtgatcgagggcctgaaagaggccgacaaggacgagttctgcagatgcgagctgaagctgcagaagtggtacggcgatctgagaggcaagcccttcgccattgaggccgagaacagcatcctggacatcagcggcttcagcaagcagtacaactgcgccttcatttggcagaaagacggcgtcaagaaactgaacctgtacctgatcatcaattacttcaaaggcggcaagctgcggttcaagaagatcaaacccgaggccttcgaggctaacagattctacaccgtgatcaacaaaaagtccggcgagatcgtgcccatggaagtgaacttcaacttcgacgaccccaacctgattatcctgcctctggccttcggcaagagacagggcagagagttcatctggaacgatctgctgagcctggaaaccggctctctgaagctggccaatggcagagtgatcgagaaaaccctgtacaacaggagaaccagacaggacgagcctgctctgtttgtggccctgaccttcgagagaagagaggtgctggacagcagcaacatcaagcccatgaacctgatcggcatcgaccggggcgagaatatccctgctgtgatcgccctgacagaccctgaaggatgcccactgagcagattcaaggactccctgggcaaccctacacacatcctgagaatcggcgagagctacaaagagaagcagaggacaatccaggccaagaaagaggtggaacagagaagagccggcggatactctaggaagtacgccagcaaggccaagaatctggccgacgacatggtccgaaacaccgccagagatctgctgtactacgccgtgacacaggacgccatgctgatcttcgagaatctgagcagaggcttcggccggcagggcaagagaacctttatggccgagaggcagtacaccagaatggaagattggctcacagctaaactggcctacgagggactgagcaagacctacctgtccaaaacactggcccagtatacctccaagacctgcagcaattgcggcttcaccatcaccagcgccgactacgacagagtgctggaaaagctcaagaaaaccgccaccggctggatgaccaccatcaacggcaaagagctgaaggttgagggccagatcacctactacaacaggtacaagaggcagaacgtcgtgaaggatctgagcgtggaactggacagactgagcgaagagagcgtgaacaacgacatcagcagctggacaaagggcagatcaggcgaggctctgagcctgctgaagaagaggtttagccacagacctgtgcaagagaagttcgtgtgcctgaactgcggcttcgagacacacgccgatgaacaggctgccctgaacattgccagaagctggctgttcctgagaagccaagagtacaagaagtaccagaccaacaagaccaccggcaacaccgacaagagggcctttgtggaaacctggcagagcttctacagaaaaaagctgaaagaagtctggaagcccgccgtg

SEQ ID NO: 225 - DNA, 2928 bp, Artificial Sequence
  CasX variant
caagagatcaagagaatcaacaagatcagaaggagactggtcaaggacagcaacacaaagaaggccggcaagacaggccccatgaaaaccctgctcgtcagagtgatgacccctgacctgagagagcggctggaaaacctgagaaagaagcccgagaacatccctcagcctatcagcaacaccagcagggccaacctgaacaagctgctgaccgactacaccgagatgaagaaagccatcctgcacgtgtactgggaagagttccagaaagaccccgtgggcctgatgagcagagttgctcagcccgctcctaagaacatcgaccagagaaagctgatccccgtgaaggacggcaacgagagactgacctctagcggctttgcctgcagccagtgttgccagcctctgtacgtgtacaagctggaacaagtgaacgacaagggcaagccccacaccaactacttcggcagatgcaacgtgtccgagcacgagaggctgatcctgctgtctcctcacaagcccgaggccaacgatgagctggtcacatacagcctgggcaagttcggacagagagccctggacttctacagcatccacgtgaccagggagagcaatcaccctgtgaagcccctggaacagatcggcggcaatagctgtgcctctggacctgtgggaaaagccctgagcgacgcctgtatgggagccgtggcatccttcctgaccaagtaccaggacatcatcctggaacacaagaaagtgatcaagaagaacgagaaaagactggccaacctcaaggatatcgccagcgctaacggcctggcctttcctaagatcaccctgcctccacagcctcacaccaaagagggcatcgaggcctacaacaacgtggtggcccagatcgtgatttgggtcaacctgaatctgtggcagaagctgaagatcggcagggacgaagccaagccactgcagagactgaagggcttccctagcttccctctggtggaaagacaggccaatgaagtggattggtgggacatggtctgcaacgtgaagaagctgatcaacgagaagaaagaggatggcaaggttttctggcagaacctggccggctacaagagacaagaagccctgaggccttacctgagcagccccgaggaccggaagaagggcaagaagttcgccagataccagctgggcgacctgctgctgcacctggaaaagaagcacggcgaggactggggcaaagtgtacgatgaggcctgggagagaatcgacaagaaggtggaaggcctgagcaagcacattaagctggaagaggaaagaaggagcgaggacgcccaatctaaagccgctctgaccgattggctgagagccaaggccagctttgtgatcgagggcctgaaagaggccgacaaggacgagttctgcagatgcgagctgaagctgcagaagtggtacggcgatctgagaggcaagcccttcgccattgaggccgagaacagcatcctggacatcagcggcttcagcaagcagtacaactgcgccttcatttggcagaaagacggcgtcaagaaactgaacctgtacctgatcatcaattacttcaaaggcggcaagctgcggttcaagaagatcaaacccgaggccttcgaggctaacagattctacaccgtgatcaacaaaaagtccggcgagatcgtgcccatggaagtgaacttcaacttcgacgaccccaacctgattatcctgcctctggccttcggcaagagacagggcagagagttcatctggaacgatctgctgagcctggaaaccggctctctgaagctggccaatggcagagtgatcgagaaacccctgtacaacaggagaaccagacaggacgagcctgctctgtttgtggccctgaccttcgagagaagagaggtgctggacagcagcaacatcaagcccatgaacctgatcggcgtggaccggggcgagaatatccctgctgtgatcgccctgacagaccctgaaggatgcccactgagcagattcaaggactccctgggcaaccctacacacatcctgagaatcggcgagagctacaaagagaagcagaggacaatccaggccaagaaagaggtggaacagagaagagccggcggatactctaggaagtacgccagcaaggccaagaatctggccgacgacatggtccgaaacaccgccagagatctgctgtactacgccgtgacacaggacgccatgctgatcttcgagaatctgagcagaggcttcggccggcagggcaagagaacctttatggccgagaggcagtacaccagaatggaagattggctcacagctaaactggcctacgagggactgagcaagacctacctgtccaaaacactggcccagtatacctccaagacctgcagcaattgcggcttcaccatcaccagcgccgactacgacagagtgctggaaaagctcaagaaaaccgccaccggctggatgaccaccatcaacggcaaagagctgaaggttgagggccagatcacctactacaacaggaggaagaggcagaacgtcgtgaaggatctgagcgtggaactggacagactgagcgaagagagcgtgaacaacgacatcagcagctggacaaagggcagatcaggcgaggctctgagcctgctgaagaagaggtttagccacagacctgtgcaagagaagttcgtgtgcctgaactgcggcttcgagacacacgccgatgaacaggctgccctgaacattgccagaagctggctgttcctgagaagccaagagtacaagaagtaccagaccaacaagaccaccggcaacaccgacaagagggcctttgtggaaacctggcagagcttctacagaaaaaagctgaaagaagtctggaagcccgccgtg

SEQ ID NO: 226 - DNA, 2928 bp, Artificial Sequence
  CasX variant
caagagatcaagagaatcaacaagatcagaaggagactggtcaaggacagcaacacaaagaaggccggcaagacaggccccatgaaaaccctgctcgtcagagtgatgacccctgacctgagagagcggctggaaaacctgagaaagaagcccgagaacatccctcagcctatcagcaacaccagcagggccaacctgaacaagctgctgaccgactacaccgagatgaagaaagccatcctgcacgtgtactgggaagagttccagaaagaccccgtgggcctgatgagcagagttgctcagcccgctcctaagaacatcgaccagagaaagctgatccccgtgaaggacggcaacgagagactgacctctagcggctttgcctgcagccagtgttgccagcctctgtacgtgtacaagctggaacaagtgaacgacaagggcaagccccacaccaactacttcggcagatgcaacgtgtccgagcacgagaggctgatcctgctgtctcctcacaagcccgaggccaacgatgagctggtcacatacagcctgggcaagttcggacagagagccctggacttctacagcatccacgtgaccagggagagcaatcaccctgtgaagcccctggaacagatcggcggcaatagctgtgcctctggacctgtgggaaaagccctgagcgacgcctgtatgggagccgtggcatccttcctgaccaagtaccaggacatcatcctggaacaccagaaagtgatcaagaagaacgagaaaagactggccaacctcaaggatatcgccagcgctaacggcctggcctttcctaagatcaccctgcctccacagcctcacaccaaagagggcatcgaggcctacaacaacgtggtggcccagatcgtgatttgggtcaacctgaatctgtggcagaagctgaagatcggcagggacgaagccaagccactgcagagactgaagggcttccctagcttccctctggtggaaagacaggccaatgaagtggattggtgggacatggtctgcaacgtgaagaagctgatcaacgagaagaaagaggatggcaaggttttctggcagaacctggccggctacaagagacaagaagccctgaggccttacctgagcagcgaagaggaccggaagaagggcaagaagttcgccagataccagctgggcgacctgctgaagcacctggaaaagaagcacggcgaggactggggcaaagtgtacgatgaggcctgggagagaatcgacaagaaggtggaaggcctgagcaagcacattaagctggaagaggaaagaaggagcgaggacgcccaatctaaagccgctctgaccgattggctgagagccaaggccagctttgtgatcgagggcctgaaagaggccgacaaggacgagttctgcagatgcgagctgaagctgcagaagtggtacggcgatctgagaggcaagcccttcgccattgaggccgagaacagcatcctggacatcagcggcttcagcaagcagtacaactgcgccttcatttggcagaaagacggcgtcaagaaactgaacctgtacctgatcatcaattacttcaaaggcggcaagctgcggttcaagaagatcaaacccgaggccttcgaggctaacagattctacaccgtgatcaacaaaaagtccggcgagatcgtgcccatggaagtgaacttcaacttcgacgaccccaacctgattatcctgcctctggccttcggcaagagacagggcagagagttcatctggaacgatctgctgagcctggaaaccggctctctgaagctggccaatggcagagtgatcgagaaaaccctgtacaacaggagaaccagacaggacgagcctgctctgtttgtggccctgaccttcgagagaagagaggtgctggacagcagcaacatcaagcccatgaacctgatcggcgtggaccggggcgagaatatccctgctgtgatcgccctgacagaccctgaaggatgcccactgagcagattcaaggactccctgggcaaccctacacacatcctgagaatcggcgagagctacaaagagaagcagaggacaatccaggccaagaaagaggtggaacagagaagagccggcggatactctaggaagtacgccagcaaggccaagaatctggccgacgacatggtccgaaacaccgccagagatctgctgtactacgccgtgacacaggacgccatgctgatcttcgagaatctgagcagaggcttcggccggcagggcaagagaacctttatggccgagaggcagtacaccagaatggaagattggctcacagctaaactggcctacgagggactgagcaagacctacctgtccaaaacactggcccagtatacctccaagacctgcagcaattgcggcttcaccatcaccagcgccgactacgacagagtgctggaaaagctcaagaaaaccgccaccggctggatgaccaccatcaacggcaaagagctgaaggttgagggccagatcacctactacaacaggaggaagaggcagaacgtcgtgaaggatctgagcgtggaactggacagactgagcgaagagagcgtgaacaacgacatcagcagctggacaaagggcagatcaggcgaggctctgagcctgctgaagaagaggtttagccacagacctgtgcaagagaagttcgtgtgcctgaactgcggcttcgagacacacgccgatgaacaggctgccctgaacattgccagaagctggctgttcctgagaagccaagagtacaagaagtaccagaccaacaagaccaccggcaacaccgacaagagggcctttgtggaaacctggcagagcttctacagaaaaaagctgaaagaagtctggaagcccgccgtg

SEQ ID NO: 227 - protein, 977 aa, Artificial Sequence; identical to SEQ ID NO: 135
  CasX variant

SEQ ID NO: 228 - protein, 977 aa, Artificial Sequence; identical to SEQ ID NO: 138
  CasX variant

SEQ ID NO: 229 - protein, 978 aa, Artificial Sequence; identical to SEQ ID NO: 145
  CasX variant

SEQ ID NO: 230 - protein, 978 aa, Artificial Sequence; identical to SEQ ID NO: 156
  CasX variant

SEQ ID NO: 231 - DNA, 2931 bp, Artificial Sequence
  CasX variant
caagagatcaagagaatcaacaagatcagaaggagactggtcaaggacagcaacacaaagaaggccggcaagacaggccccatgaaaaccctgctcgtcagagtgatgacccctgacctgagagagcggctggaaaacctgagaaagaagcccgagaacatccctcagcctatcagcaacaccagcagggccaacctgaacaagctgctgaccgactacaccgagatgaagaaagccatcctgcacgtgtactgggaagagttccagaaagaccccgtgggcctgatgagcagagttgctcagcctgccagcaagaagatcgaccagaacaagctgaagcccgagatggacgagaagggcaatctgaccacagccggctttgcctgctctcagtgtggccagcctctgttcgtgtacaagctggaacaggtgtccgagaaaggcaaggcctacaccaactacttcggcagatgtaacgtggccgagcacgagaagctgattctgctggcccagctgaaacctgagaaggactctgatgaggccgtgacctacagcctgggcaagtttggacagagagccctggacttctacagcatccacgtgaccaaagaaagcacacaccccgtgaagcccctggctcagatcgccggcaatagatacgcctctggacctgtgggcaaagccctgtccgatgcctgcatgggaacaatcgccagcttcctgagcaagtaccaggacatcatcatcgagcaccagaaggtggtcaagggcaaccagaagagactggaaagcctgagggagctggccggcaaagagaacctggaataccccagcgtgaccctgcctcctcagcctcacacaaaagaaggcgtggacgcctacaacgaagtgatcgccagagtgagaatgtgggtcaacctgaacctgtggcagaagctgaaactgtccagggacgacgccaagcctctgctgagactgaagggcttccctagcttccctctggtggaaagacaggccaatgaagtggattggtgggacatggtctgcaacgtgaagaagctgatcaacgagaagaaagaggatggcaaggttttctggcagaacctggccggctacaagagacaagaagccctgaggccttacctgagcagcgaagaggaccggaagaagggcaagaagttcgccagataccagttcggcgacctgctgctgcacctggaaaagaagcacggcgaggactggggcaaagtgtacgatgaggcctgggagagaatcgacaagaaggtggaaggcctgagcaagcacattaagctggaagaggaaagaaggagcgaggacgcccaatctaaagccgctctgaccgattggctgagagccaaggccagctttgtgatcgagggcctgaaagaggccgacaaggacgagttctgcagatgcgagctgaagctgcagaagtggtacggcgatctgagaggcaagcccttcgccattgaggccgagaacagcatcctggacatcagcggcttcagcaagcagtacaactgcgccttcatttggcagaaagacggcgtcaagaaactgaacctgtacctgatcatcaattacttcaaaggcggcaagctgcggttcaagaagatcaaacccgaggccttcgaggctaacagattctacaccgtgatcaacaaaaagtccggcgagatcgtgcccatggaagtgaacttcaacttcgacgaccccaacctgattatcctgcctctggccttcggcaagagacagggcagagagttcatctggaacgatctgctgagcctggaaaccggctctctgaagctggccaatggcagagtgatcgagaaaaccctgtacaacaggagaaccagacaggacgagcctgctctgtttgtggccctgaccttcgagagaagagaggtgctggacagcagcaacatcaagcccatgaacctgatcggcatcgaccggggcgagaatatccctgctgtgatcgccctgacagaccctgaaggatgcccactgagcagattcaaggactccctgggcaaccctacacacatcctgagaatcggcgagagctacaaagagaagcagaggacaatccaggccaagaaagaggtggaacagagaagagccggcggatactctaggaagtacgccagcaaggccaagaatctggccgacgacatggtccgaaacaccgccagagatctgctgtactacgccgtgacacaggacgccatgctgatcttcgagaatctgagcagaggcttcggccggcagggcaagagaacctttatggccgagaggcagtacaccagaatggaagattggctcacagctaaactggcctacgagggactgagcaagacctacctgtccaaaacactggcccagtatacctccaagacctgcagcaattgcggcttcaccatcaccagcgccgactacgacagagtgctggaaaagctcaagaaaaccgccaccggctggatgaccaccatcaacggcaaagagctgaaggttgagggccagatcacctactacaacaggtacaagaggcagaacgtcgtgaaggatctgagcgtggaactggacagactgagcgaagagagcgtgaacaacgacatcagcagctggacaaagggcagatcaggcgaggctctgagcctgctgaagaagaggtttagccacagacctgtgcaagagaagttcgtgtgcctgaactgcggcttcgagacacacgccgatgaacaggctgccctgaacattgccagaagctggctgttcctgagaagccaagagtacaagaagtaccagaccaacaagaccaccggcaacaccgacaagagggcctttgtggaaacctggcagagcttctacagaaaaaagctgaaagaagtctggaagcccgccgtg

SEQ ID NO: 232 - DNA, 2931 bp, Artificial Sequence
  CasX variant
caagagatcaagagaatcaacaagatcagaaggagactggtcaaggacagcaacacaaagaaggccggcaagacaggccccatgaaaaccctgctcgtcagagtgatgacccctgacctgagagagcggctggaaaacctgagaaagaagcccgagaacatccctcagcctatcagcaacaccagcagggccaacctgaacaagctgctgaccgactacaccgagatgaagaaagccatcctgcacgtgtactgggaagagttccagaaagaccccgtgggcctgatgagcagagttgctcagcctgccagcaagaagatcgaccagaacaagctgaagcccgagatggacgagaagggcaatctgaccacagccggctttgcctgctctcagtgtggccagcctctgttcgtgtacaagctggaacaggtgtccgagaaaggcaaggcctacaccaactacttcggcagatgtaacgtggccgagcacgagaagctgattctgctggcccagctgaaacctgagaaggactctgatgaggccgtgacctacagcctgggcaagtttggacagagagccctggacttctacagcatccacgtgaccaaagaaagcacacaccccgtgaagcccctggctcagatcgccggcaatagatacgcctctggacctgtgggcaaagccctgtccgatgcctgcatgggaacaatcgccagcttcctgagcaagtaccaggacatcatcatcgagcaccagaaggtggtcaagggcaaccagaagagactggaaagcctgagggagctggccggcaaagagaacctggaataccccagcgtgaccctgcctcctcagcctcacacaaaagaaggcgtggacgcctacaacgaagtgatcgccagagtgagaatgtgggtcaacctgaacctgtggcagaagctgaaactgtccagggacgacgccaagcctctgctgagactgaagggcttccctagcttccctctggtggaaagacaggccaatgaagtggattggtgggacatggtctgcaacgtgaagaagctgatcaacgagaagaaagaggatggcaaggttttctggcagaacctggccggctacaagagacaagaagccctgaggccttacctgagcagcgaagaggaccggaagaagggcaagaagttcgccagataccagctgggcgacctgctgctgcacctggaaaagaagcacggcgaggactggggcaaagtgtacgatgaggcctgggagagaatcgacaagaaggtggaaggcctgagcaagcacattaagctggaagaggaaagaaggagcgaggacgcccaatctaaagccgctctgaccgattggctgagagccaaggccagctttgtgatcgagggcctgaaagaggccgacaaggacgagttctgcagatgcgagctgaagctgcagaagtggtacggcgatctgagaggcaagcccttcgccattgaggccgagaacagcatcctggacatcagcggcttcagcaagcagtacaactgcgccttcatttggcagaaagacggcgtcaagaaactgaacctgtacctgatcatcaattacttcaaaggcggcaagctgcggttcaagaagatcaaacccgaggccttcgaggctaacagattctacaccgtgatcaacaaaaagtccggcgagatcgtgcccatggaagtgaacttcaacttcgacgaccccaacctgattatcctgcctctggccttcggcaagagacagggcagagagttcatctggaacgatctgctgagcctggaaaccggctctctgaagctggccaatggcagagtgatcgagaaaaccctgtacaacaggagaaccagacaggacgagcctgctctgtttgtggccctgaccttcgagagaagagaggtgctggacagcagcaacatcaagcccatgaacctgatcggcgtggaccggggcgagaatatccctgctgtgatcgccctgacagaccctgaaggatgcccactgagcagattcaaggactccctgggcaaccctacacacatcctgagaatcggcgagagctacaaagagaagcagaggacaatccaggccaagaaagaggtggaacagagaagagccggcggatactctaggaagtacgccagcaaggccaagaatctggccgacgacatggtccgaaacaccgccagagatctgctgtactacgccgtgacacaggacgccatgctgatcttcgagaatctgagcagaggcttcggccggcagggcaagagaacctttatggccgagaggcagtacaccagaatggaagattggctcacagctaaactggcctacgagggactgagcaagacctacctgtccaaaacactggcccagtatacctccaagacctgcagcaattgcggcttcaccatcaccagcgccgactacgacagagtgctggaaaagctcaagaaaaccgccaccggctggatgaccaccatcaacggcaaagagctgaaggttgagggccagatcacctactacaacaggtacaagaggcagaacgtcgtgaaggatctgagcgtggaactggacagactgagcgaagagagcgtgaacaacgacatcagcagctggacaaagggcagatcaggcgaggctctgagcctgctgaagaagaggtttagccacagacctgtgcaagagaagttcgtgtgcctgaactgcggcttcgagacacacgccgatgaacaggctgccctgaacattgccagaagctggctgttcctgagaagccaagagtacaagaagtaccagaccaacaagaccaccggcaacaccgacaagagggcctttgtggaaacctggcagagcttctacagaaaaaagctgaaagaagtctggaagcccgccgtg

SEQ ID NO: 233 - DNA, 2934 bp, Artificial Sequence
  CasX variant
caagagatcaagagaatcaacaagatcagaaggagactggtcaaggacagcaacacaaagaaggccggcaagacaggccccatgaaaaccctgctcgtcagagtgatgacccctgacctgagagagcggctggaaaacctgagaaagaagcccgagaacatccctcagcctatcagcaacaccagcagggccaacctgaacaagctgctgaccgactacaccgagatgaagaaagccatcctgcacgtgtactgggaagagttccagaaagaccccgtgggcctgatgagcagagttgctcagcctgccagcaagaagatcgaccagaacaagctgaagcccgagatggacgagaagggcaatctgaccacagccggctttgcctgctctcagtgtggccagcctctgttcgtgtacaagctggaacaggtgtccgagaaaggcaaggcctacaccaactacttcggcagatgtaacgtggccgagcacgagaagctgattctgctggcccagctgaaacctgagaaggactctgatgaggccgtgacctacagcctgggcaagtttggacagagagccctggacttctacagcatccacgtgaccaaagaaagcacacaccccgtgaagcccctggctcagatcgccggcaatagatacgcctctggacctgtgggcaaagccctgtccgatgcctgcatgggaacaatcgccagcttcctgagcaagtaccaggacatcatcatcgagcaccagaaggtggtcaagggcaaccagaagagactggaaagcctgagggagctggccggcaaagagaacctggaataccccagcgtgaccctgcctcctcagcctcacacaaaagaaggcgtggacgcctacaacgaagtgatcgccagagtgagaatgtgggtcaacctgaacctgtggcagaagctgaaactgtccagggacgacgccaagcctctgctgagactgaagggcttccctagcttccctctggtggaaagacaggccaatgaagtggattggtgggacatggtctgcaacgtgaagaagctgatcaacgagaagaaagaggatggcaaggttttctggcagaacctggccggctacaagagacaagaagccctgaggccttacctgagcagcgaagaggaccggaagaagggcaagaagttcgccagataccagctgggcgacctgctgctgcacctggaaaagaagcacggcgaggactggggcaaagtgtacgatgaggcctgggagagaatcgacaagaaggtggaaggcctgagcaagcacattaagctggaagaggaaagaaggagcgaggacgcccaatctaaagccgctctgaccgattggctgagagccaaggccagctttgtgatcgagggcctgaaagaggccgacaaggacgagttctgcagatgcgagctgaagctgcagaagtggtacggcgatctgagaggcaagcccttcgccattgaggccgagaacagcatcctggacatcagcggcttcagcaagcagtacaactgcgccttcatttggcagaaagacggcgtcaagaaactgaacctgtacctgatcatcaattacttcaaaggcggcaagctgcggttcaagaagatcaaacccgaggccttcgaggctaacagattctacaccgtgatcaacaaaaagtccggcgagatcgtgcccatggaagtgaacttcaacttcgacgaccccaacctgattatcctgcctctggccttcggcaagagacagggcagagagttcatctggaacgatctgctgagcctggaaaccggctctctgaagctggccaatggcagagtgatcgagaaaaccctgtacaacaggagaaccagacaggacgagcctgctctgtttgtggccctgaccttcgagagaagagaggtgctggacagcagcaacatcaagcccatgaacctgatcggcgtggaccggggcgagaatatccctgctgtgatcgccctgacagaccctgaaggatgcccactgagcagattcaaggactccctgggcaaccctacacacatcctgagaatcggcgagagctacaaagagaagcagaggacaatccaggccaagaaagaggtggaacagagaagagccggcggatactctaggaagtacgccagcaaggccaagaatctggccgacgacatggtccgaaacaccgccagagatctgctgtactacgccgtgacacaggacgccatgctgatcttcgagaatctgagcagaggcttcggccggcagggcaagagaacctttatggccgagaggcagtacaccagaatggaagattggctcacagctaaactggcctacgagggactgcccagcaagacctacctgtccaaaacactggcccagtatacctccaagacctgcagcaattgcggcttcaccatcaccagcgccgactacgacagagtgctggaaaagctcaagaaaaccgccaccggctggatgaccaccatcaacggcaaagagctgaaggttgagggccagatcacctactacaacaggtacaagaggcagaacgtcgtgaaggatctgagcgtggaactggacagactgagcgaagagagcgtgaacaacgacatcagcagctggacaaagggcagatcaggcgaggctctgagcctgctgaagaagaggtttagccacagacctgtgcaagagaagttcgtgtgcctgaactgcggcttcgagacacacgccgatgaacaggctgccctgaacattgccagaagctggctgttcctgagaagccaagagtacaagaagtaccagaccaacaagaccaccggcaacaccgacaagagggcctttgtggaaacctggcagagcttctacagaaaaaagctgaaagaagtctggaagcccgccgtg

SEQ ID NO: 234 - DNA, 2934 bp, Artificial Sequence
  CasX variant
caagagatcaagagaatcaacaagatcagaaggagactggtcaaggacagcaacacaaagaaggccggcaagacacggggccccatgaaaaccctgctcgtcagagtgatgacccctgacctgagagagcggctggaaaacctgagaaagaagcccgagaacatccctcagcctatcagcaacaccagcagggccaacctgaacaagctgctgaccgactacaccgagatgaagaaagccatcctgcacgtgtactgggaagagttccagaaagaccccgtgggcctgatgagcagagttgctcagcctgccagcaagaagatcgaccagaacaagctgaagcccgagatggacgagaagggcaatctgaccacagccggctttgcctgctctcagtgtggccagcctctgttcgtgtacaagctggaacaggtgtccgagaaaggcaaggcctacaccaactacttcggcagatgtaacgtggccgagcacgagaagctgattctgctggcccagctgaaacctgagaaggactctgatgaggccgtgacctacagcctgggcaagtttggacagagagccctggacttctacagcatccacgtgaccaaagaaagcacacaccccgtgaagcccctggctcagatcgccggcaatagatacgcctctggacctgtgggcaaagccctgtccgatgcctgcatgggaacaatcgccagcttcctgagcaagtaccaggacatcatcatcgagcaccagaaggtggtcaagggcaaccagaagagactggaaagcctgagggagctggccggcaaagagaacctggaataccccagcgtgaccctgcctcctcagcctcacacaaaagaaggcgtggacgcctacaacgaagtgatcgccagagtgagaatgtgggtcaacctgaacctgtggcagaagctgaaactgtccagggacgacgccaagcctctgctgagactgaagggcttccctagcttccctctggtggaaagacaggccaatgaagtggattggtgggacatggtctgcaacgtgaagaagctgatcaacgagaagaaagaggatggcaaggttttctggcagaacctggccggctacaagagacaagaagccctgaggccttacctgagcagcgaagaggaccggaagaagggcaagaagttcgccagataccagctgggcgacctgctgctgcacctggaaaagaagcacggcgaggactggggcaaagtgtacgatgaggcctgggagagaatcgacaagaaggtggaaggcctgagcaagcacattaagctggaagaggaaagaaggagcgaggacgcccaatctaaagccgctctgaccgattggctgagagccaaggccagctttgtgatcgagggcctgaaagaggccgacaaggacgagttctgcagatgcgagctgaagctgcagaagtggtacggcgatctgagaggcaagcccttcgccattgaggccgagaacagcatcctggacatcagcggcttcagcaagcagtacaactgcgccttcatttggcagaaagacggcgtcaagaaactgaacctgtacctgatcatcaattacttcaaaggcggcaagctgcggttcaagaagatcaaacccgaggccttcgaggctaacagattctacaccgtgatcaacaaaaagtccggcgagatcgtgcccatggaagtgaacttcaacttcgacgaccccaacctgattatcctgcctctggccttcggcaagagacagggcagagagttcatctggaacgatctgctgagcctggaaaccggctctctgaagctggccaatggcagagtgatcgagaaaaccctgtacaacaggagaaccagacaggacgagcctgctctgtttgtggccctgaccttcgagagaagagaggtgctggacagcagcaacatcaagcccatgaacctgatcggcgtggaccggggcgagaatatccctgctgtgatcgccctgacagaccctgaaggatgcccactgagcagattcaaggactccctgggcaaccctacacacatcctgagaatcggcgagagctacaaagagaagcagaggacaatccaggccaagaaagaggtggaacagagaagagccggcggatactctaggaagtacgccagcaaggccaagaatctggccgacgacatggtccgaaacaccgccagagatctgctgtactacgccgtgacacaggacgccatgctgatcttcgagaatctgagcagaggcttcggccggcagggcaagagaacctttatggccgagaggcagtacaccagaatggaagattggctcacagctaaactggcctacgagggactgagcaagacctacctgtccaaaacactggcccagtatacctccaagacctgcagcaattgcggcttcaccatcaccagcgccgactacgacagagtgctggaaaagctcaagaaaaccgccaccggctggatgaccaccatcaacggcaaagagctgaaggttgagggccagatcacctactacaacaggtacaagaggcagaacgtcgtgaaggatctgagcgtggaactggacagactgagcgaagagagcgtgaacaacgacatcagcagctggacaaagggcagatcaggcgaggctctgagcctgctgaagaagaggtttagccacagacctgtgcaagagaagttcgtgtgcctgaactgcggcttcgagacacacgccgatgaacaggctgccctgaacattgccagaagctggctgttcctgagaagccaagagtacaagaagtaccagaccaacaagaccaccggcaacaccgacaagagggcctttgtggaaacctggcagagcttctacagaaaaaagctgaaagaagtctggaagcccgccgtg

SEQ ID NO: 235 - protein, 987 aa, Artificial Sequence
  CasX variant
MAPKKKRKVSRQEIKRINKIRRRLVKDSNTKKAGKTGPMKTLLVRVMTPDLRERLENLRKKPENIPQPISNTSRANLNKLLTDYTEMKKAILHVYWEEFQKDPVGLMSRVAQPAPKNIDQRKLIPVKDGNERLTSSGFACSQCCQPLYVYKLEQVNDKGKPHTNYFGRCNVSEHERLILLSPHKPEANDELVTYSLGKFGQRALDFYSIHVTRESNHPVKPLEQIGGNSCASGPVGKALSDACMGAVASFLTKYQDIILEHQKVIKKNEKRLANLKDIASANGLAFPKITLPPQPHTKEGIEAYNNVVAQIVIWVNLNLWQKLKIGRDEAKPLQRLKGFPSFPLVERQANEVDWWDMVCNVKKLINEKKEDGKVFWQNLAGYKRQEALRPYLSSEEDRKKGKKFARYQFGDLLLHLEKKHGEDWGKVYDEAWERIDKKVEGLSKHIKLEEERRSEDAQSKAALTDWLRAKASFVIEGLKEADKDEFCRCELKLQKWYGDLRGKPFAIEAENSILDISGFSKQYNCAFIWQKDGVKKLNLYLIINYFKGGKLRFKKIKPEAFEANRFYTVINKKSGEIVPMEVNFNFDDPNLIILPLAFGKRQGREFIWNDLLSLETGSLKLANGRVIEKTLYNRRTRQDEPALFVALTFERREVLDSSNIKPMNLIGIDRGENIPAVIALTDPEGCPLSRFKDSLGNPTHILRIGESYKEKQRTIQAKKEVEQRRAGGYSRKYASKAKNLADDMVRNTARDLLYYAVTQDAMLIFENLSRGFGRQGKRTFMAERQYTRMEDWLTAKLAYEGLSKTYLSKTLAQYTSKTCSNCGFTITSADYDRVLEKLKKTATGWMTTINGKELKVEGQITYYNRYKRQNVVKDLSVELDRLSEESVNNDISSWTKGRSGEALSLLKKRFSHRPVQEKFVCLNCGFETHADEQAALNIARSWLFLRSQEYKKYQTNKTTGNTDKRAFVETWQSFYRKKLKEVWKPAV

SEQ ID NO: 236 - protein, 986 aa, Artificial Sequence
  CasX variant
MQEIKRINKIRRRLVKDSNTKKAGKTGPMKTLLVRVMTPDLRERLENLRKKPENIPQPISNTSRANLNKLLTDYTEMKKAILHVYWEEFQKDPVGLMSRVAQPAPKNIDQRKLIPVKDGNERLTSSGFACSQCCQPLYVYKLEQVNDKGKPHTNYFGRCNVSEHERLILLSPHKPEANDELVTYSLGKFGQRALDFYSIHVTRESNHPVKPLEQIGGNSCASGPVGKALSDACMGAVASFLTKYQDIILEHQKVIKKNEKRLANLKDIASANGLAFPKITLPPQPHTKEGIEAYNNVVAQIVIWVNLNLWQKLKIGRDEAKPLQRLKGFPSFPLVERQANEVDWWDMVCNVKKLINEKKEDGKVFWQNLAGYKRQEALRPYLSSEEDRKKGKKFARYQFGDLLLHLEKKHGEDWGKVYDEAWERIDKKVEGLSKHIKLEEERRSEDAQSKAALTDWLRAKASFVIEGLKEADKDEFCRCELKLQKWYGDLRGKPFAIEAENSILDISGFSKQYNCAFIWQKDGVKKLNLYLIINYFKGGKLRFKKIKPEAFEANRFYTVINKKSGEIVPMEVNFNFDDPNLIILPLAFGKRQGREFIWNDLLSLETGSLKLANGRVIEKTLYNRRTRQDEPALFVALTFERREVLDSSNIKPMNLIGIDRGENIPAVIALTDPEGCPLSRFKDSLGNPTHILRIGESYKEKQRTIQAKKEVEQRRAGGYSRKYASKAKNLADDMVRNTARDLLYYAVTQDAMLIFENLSRGFGRQGKRTFMAERQYTRMEDWLTAKLAYEGLSKTYLSKTLAQYTSKTCSNCGFTITSADYDRVLEKLKKTATGWMTTINGKELKVEGQITYYNRYKRQNVVKDLSVELDRLSEESVNNDISSWTKGRSGEALSLLKKRFSHRPVQEKFVCLNCGFETHADEQAALNIARSWLFLRSQEYKKYQTNKTTGNTDKRAFVETWQSFYRKKLKEVWKPAVTSPKKKRKV

SEQ ID NO: 237 - protein, 996 aa, Artificial Sequence
  CasX variant
MQEIKRINKIRRRLVKDSNTKKAGKTGPMKTLLVRVMTPDLRERLENLRKKPENIPQPISNTSRANLNKLLTDYTEMKKAILHVYWEEFQKDPVGLMSRVAQPAPKNIDQRKLIPVKDGNERLTSSGFACSQCCQPLYVYKLEQVNDKGKPHTNYFGRCNVSEHERLILLSPHKPEANDELVTYSLGKFGQRALDFYSIHVTRESNHPVKPLEQIGGNSCASGPVGKALSDACMGAVASFLTKYQDIILEHQKVIKKNEKRLANLKDIASANGLAFPKITLPPQPHTKEGIEAYNNVVAQIVIWVNLNLWQKLKIGRDEAKPLQRLKGFPSFPLVERQANEVDWWDMVCNVKKLINEKKEDGKVFWQNLAGYKRQEALRPYLSSEEDRKKGKKFARYQFGDLLLHLEKKHGEDWGKVYDEAWERIDKKVEGLSKHIKLEEERRSEDAQSKAALTDWLRAKASFVIEGLKEADKDEFCRCELKLQKWYGDLRGKPFAIEAENSILDISGFSKQYNCAFIWQKDGVKKLNLYLIINYFKGGKLRFKKIKPEAFEANRFYTVINKKSGEIVPMEVNFNFDDPNLIILPLAFGKRQGREFIWNDLLSLETGSLKLANGRVIEKTLYNRRTRQDEPALFVALTFERREVLDSSNIKPMNLIGIDRGENIPAVIALTDPEGCPLSRFKDSLGNPTHILRIGESYKEKQRTIQAKKEVEQRRAGGYSRKYASKAKNLADDMVRNTARDLLYYAVTQDAMLIFENLSRGFGRQGKRTFMAERQYTRMEDWLTAKLAYEGLSKTYLSKTLAQYTSKTCSNCGFTITSADYDRVLEKLKKTATGWMTTINGKELKVEGQITYYNRYKRQNVVKDLSVELDRLSEESVNNDISSWTKGRSGEALSLLKKRFSHRPVQEKFVCLNCGFETHADEQAALNIARSWLFLRSQEYKKYQTNKTTGNTDKRAFVETWQSFYRKKLKEVWKPAVTSPKKKRKVPPPPKKKRKV

SEQ ID NO: 238 - protein, 1006 aa, Artificial Sequence
  CasX variant
MQEIKRINKIRRRLVKDSNTKKAGKTGPMKTLLVRVMTPDLRERLENLRKKPENIPQPISNTSRANLNKLLTDYTEMKKAILHVYWEEFQKDPVGLMSRVAQPAPKNIDQRKLIPVKDGNERLTSSGFACSQCCQPLYVYKLEQVNDKGKPHTNYFGRCNVSEHERLILLSPHKPEANDELVTYSLGKFGQRALDFYSIHVTRESNHPVKPLEQIGGNSCASGPVGKALSDACMGAVASFLTKYQDIILEHQKVIKKNEKRLANLKDIASANGLAFPKITLPPQPHTKEGIEAYNNVVAQIVIWVNLNLWQKLKIGRDEAKPLQRLKGFPSFPLVERQANEVDWWDMVCNVKKLINEKKEDGKVFWQNLAGYKRQEALRPYLSSEEDRKKGKKFARYQFGDLLLHLEKKHGEDWGKVYDEAWERIDKKVEGLSKHIKLEEERRSEDAQSKAALTDWLRAKASFVIEGLKEADKDEFCRCELKLQKWYGDLRGKPFAIEAENSILDISGFSKQYNCAFIWQKDGVKKLNLYLIINYFKGGKLRFKKIKPEAFEANRFYTVINKKSGEIVPMEVNFNFDDPNLIILPLAFGKRQGREFIWNDLLSLETGSLKLANGRVIEKTLYNRRTRQDEPALFVALTFERREVLDSSNIKPMNLIGIDRGENIPAVIALTDPEGCPLSRFKDSLGNPTHILRIGESYKEKQRTIQAKKEVEQRRAGGYSRKYASKAKNLADDMVRNTARDLLYYAVTQDAMLIFENLSRGFGRQGKRTFMAERQYTRMEDWLTAKLAYEGLSKTYLSKTLAQYTSKTCSNCGFTITSADYDRVLEKLKKTATGWMTTINGKELKVEGQITYYNRYKRQNVVKDLSVELDRLSEESVNNDISSWTKGRSGEALSLLKKRFSHRPVQEKFVCLNCGFETHADEQAALNIARSWLFLRSQEYKKYQTNKTTGNTDKRAFVETWQSFYRKKLKEVWKPAVTSPKKKRKVPPPHKKKHPDASVNFSEFSK

SEQ ID NO: 239 - protein, 1007 aa, Artificial Sequence
  CasX variant
MQEIKRINKIRRRLVKDSNTKKAGKTGPMKTLLVRVMTPDLRERLENLRKKPENIPQPISNTSRANLNKLLTDYTEMKKAILHVYWEEFQKDPVGLMSRVAQPAPKNIDQRKLIPVKDGNERLTSSGFACSQCCQPLYVYKLEQVNDKGKPHTNYFGRCNVSEHERLILLSPHKPEANDELVTYSLGKFGQRALDFYSIHVTRESNHPVKPLEQIGGNSCASGPVGKALSDACMGAVASFLTKYQDIILEHQKVIKKNEKRLANLKDIASANGLAFPKITLPPQPHTKEGIEAYNNVVAQIVIWVNLNLWQKLKIGRDEAKPLQRLKGFPSFPLVERQANEVDWWDMVCNVKKLINEKKEDGKVFWQNLAGYKRQEALRPYLSSEEDRKKGKKFARYQFGDLLLHLEKKHGEDWGKVYDEAWERIDKKVEGLSKHIKLEEERRSEDAQSKAALTDWLRAKASFVIEGLKEADKDEFCRCELKLQKWYGDLRGKPFAIEAENSILDISGFSKQYNCAFIWQKDGVKKLNLYLIINYFKGGKLRFKKIKPEAFEANRFYTVINKKSGEIVPMEVNFNFDDPNLIILPLAFGKRQGREFIWNDLLSLETGSLKLANGRVIEKTLYNRRTRQDEPALFVALTFERREVLDSSNIKPMNLIGIDRGENIPAVIALTDPEGCPLSRFKDSLGNPTHILRIGESYKEKQRTIQAKKEVEQRRAGGYSRKYASKAKNLADDMVRNTARDLLYYAVTQDAMLIFENLSRGFGRQGKRTFMAERQYTRMEDWLTAKLAYEGLSKTYLSKTLAQYTSKTCSNCGFTITSADYDRVLEKLKKTATGWMTTINGKELKVEGQITYYNRYKRQNVVKDLSVELDRLSEESVNNDISSWTKGRSGEALSLLKKRFSHRPVQEKFVCLNCGFETHADEQAALNIARSWLFLRSQEYKKYQTNKTTGNTDKRAFVETWQSFYRKKLKEVWKPAVTSPKKKRKVPPPQRPGPYDRPQRPGPYDRP

SEQ ID NO: 240 - protein, 1005 aa, Artificial Sequence
  CasX variant
MQEIKRINKIRRRLVKDSNTKKAGKTGPMKTLLVRVMTPDLRERLENLRKKPENIPQPISNTSRANLNKLLTDYTEMKKAILHVYWEEFQKDPVGLMSRVAQPAPKNIDQRKLIPVKDGNERLTSSGFACSQCCQPLYVYKLEQVNDKGKPHTNYFGRCNVSEHERLILLSPHKPEANDELVTYSLGKFGQRALDFYSIHVTRESNHPVKPLEQIGGNSCASGPVGKALSDACMGAVASFLTKYQDIILEHQKVIKKNEKRLANLKDIASANGLAFPKITLPPQPHTKEGIEAYNNVVAQIVIWVNLNLWQKLKIGRDEAKPLQRLKGFPSFPLVERQANEVDWWDMVCNVKKLINEKKEDGKVFWQNLAGYKRQEALRPYLSSEEDRKKGKKFARYQFGDLLLHLEKKHGEDWGKVYDEAWERIDKKVEGLSKHIKLEEERRSEDAQSKAALTDWLRAKASFVIEGLKEADKDEFCRCELKLQKWYGDLRGKPFAIEAENSILDISGFSKQYNCAFIWQKDGVKKLNLYLIINYFKGGKLRFKKIKPEAFEANRFYTVINKKSGEIVPMEVNFNFDDPNLIILPLAFGKRQGREFIWNDLLSLETGSLKLANGRVIEKTLYNRRTRQDEPALFVALTFERREVLDSSNIKPMNLIGIDRGENIPAVIALTDPEGCPLSRFKDSLGNPTHILRIGESYKEKQRTIQAKKEVEQRRAGGYSRKYASKAKNLADDMVRNTARDLLYYAVTQDAMLIFENLSRGFGRQGKRTFMAERQYTRMEDWLTAKLAYEGLSKTYLSKTLAQYTSKTCSNCGFTITSADYDRVLEKLKKTATGWMTTINGKELKVEGQITYYNRYKRQNVVKDLSVELDRLSEESVNNDISSWTKGRSGEALSLLKKRFSHRPVQEKFVCLNCGFETHADEQAALNIARSWLFLRSQEYKKYQTNKTTGNTDKRAFVETWQSFYRKKLKEVWKPAVTSPKKKRKVPPPLSPSLSPLLSPSLSPL

SEQ ID NO: 241 - protein, 1008 aa, Artificial Sequence
  CasX variant
MQEIKRINKIRRRLVKDSNTKKAGKTGPMKTLLVRVMTPDLRERLENLRKKPENIPQPISNTSRANLNKLLTDYTEMKKAILHVYWEEFQKDPVGLMSRVAQPAPKNIDQRKLIPVKDGNERLTMSSGFACSQCCQPLYVYKLEQVNDKGKPHTNYFGRCNVSEHERLILLSPHKPEANDELVTYSLGKFGQRALDFYSIHVTRESNHPVKPLEQIGGNSCASGPVGKALSDACMGAVASFLTKYQDIILEHQKVIKKNEKRLANLKDIASANGLAFPKITLPPQPHTKEGIEAYNNVVAQIVIWVNLNLWQKLKIGRDEAKPLQRLKGFPSFPLVERQANEVDWWDMVCNVKKLINEKKEDGKVFWQNLAGYKRQEALRPYLSSEEDRKKGKKFARYQFGDLLLHLEKKHGEDWGKVYDEAWERIDKKVEGLSKHIKLEEERRSEDAQSKAALTDWLRAKASFVIEGLKEADKDEFCRCELKLQKWYGDLRGKPFAIEAENSILDISGFSKQYNCAFIWQKDGVKKLNLYLIINYFKGGKLRFKKIKPEAFEANRFYTVINKKSGEIVPMEVNFNFDDPNLIILPLAFGKRQGREFIWNDLLSLETGSLKLANGRVIEKTLYNRRTRQDEPALFVALTFERREVLDSSNIKPMNLIGIDRGENIPAVIALTDPEGCPLSRFKDSLGNPTHILRIGESYKEKQRTIQAKKEVEQRRAGGYSRKYASKAKNLADDMVRNTARDLLYYAVTQDAMLIFENLSRGFGRQGKRTFMAERQYTRMEDWLTAKLAYEGLSKTYLSKTLAQYTSKTCSNCGFTITSADYDRVLEKLKKTATGWMTTINGKELKVEGQITYYNRYKRQNVVKDLSVELDRLSEESVNNDISSWTKGRSGEALSLLKKRFSHRPVQEKFVCLNCGFETHADEQAALNIARSWLFLRSQEYKKYQTNKTTGNTDKRAFVETWQSFYRKKLKEVWKPAVTSPKKKRKVPPPRGKGGKGLGKGGAKRHRK

SEQ ID NO: 242 - protein, 1013 aa, Artificial Sequence
  CasX variant
MQEIKRINKIRRRLVKDSNTKKAGKTGPMKTLLVRVMTPDLRERLENLRKKPENIPQPISNTSRANLNKLLTDYTEMKKAILHVYWEEFQKDPVGLMSRVAQPAPKNIDQRKLIPVKDGNERLTSSGFACSQCCQPLYVYKLEQVNDKGKPHTNYFGRCNVSEHERLILLSPHKPEANDELVTYSLGKFGQRALDFYSIHVTRESNHPVKPLEQIGGNSCASGPVGKALSDACMGAVASFLTKYQDIILEHQKVIKKNEKRLANLKDIASANGLAFPKITLPPQPHTKEGIEAYNNVVAQIVIWVNLNLWQKLKIGRDEAKPLQRLKGFPSFPLVERQANEVDWWDMVCNVKKLINEKKEDGKVFWQNLAGYKRQEALRPYLSSEEDRKKGKKFARYQFGDLLLHLEKKHGEDWGKVYDEAWERIDKKVEGLSKHIKLEEERRSEDAQSKAALTDWLRAKASFVIEGLKEADKDEFCRCELKLQKWYGDLRGKPFAIEAENSILDISGFSKQYNCAFIWQKDGVKKLNLYLIINYFKGGKLRFKKIKPEAFEANRFYTVINKKSGEIVPMEVNFNFDDPNLIILPLAFGKRQGREFIWNDLLSLETGSLKLANGRVIEKTLYNRRTRQDEPALFVALTFERREVLDSSNIKPMNLIGIDRGENIPAVIALTDPEGCPLSRFKDSLGNPTHILRIGESYKEKQRTIQAKKEVEQRRAGGYSRKYASKAKNLADDMVRNTARDLLYYAVTQDAMLIFENLSRGFGRQGKRTFMAERQYTRMEDWLTAKLAYEGLSKTYLSKTLAQYTSKTCSNCGFTITSADYDRVLEKLKKTATGWMTTINGKELKVEGQITYYNRYKRQNVVKDLSVELDRLSEESVNNDISSWTKGRSGEALSLLKKRFSHRPVQEKFVCLNCGFETHADEQAALNIARSWLFLRSQEYKKYQTNKTTGNTDKRAFVETWQSFYRKKLKEVWKPAVTSPKKKRKVPPPSRRRKANPTKLSENAKKLAKEVEN

SEQ ID NO: 243 - protein, 998 aa, Artificial Sequence
  CasX variant
MQEIKRINKIRRRLVKDSNTKKAGKTGPMKTLLVRVMTPDLRERLENLRKKPENIPQPISNTSRANLNKLLTDYTEMKKAILHVYWEEFQKDPVGLMSRVAQPAPKNIDQRKLIPVKDGNERLTSSGFACSQCCQPLYVYKLEQVNDKGKPHTNYFGRCNVSEHERLILLSPHKPEANDELVTYSLGKFGQRALDFYSIHVTRESNHPVKPLEQIGGNSCASGPVGKALSDACMGAVASFLTKYQDIILEHQKVIKKNEKRLANLKDIASANGLAFPKITLPPQPHTKEGIEAYNNVVAQIVIWVNLNLWQKLKIGRDEAKPLQRLKGFPSFPLVERQANEVDWWDMVCNVKKLINEKKEDGKVFWQNLAGYKRQEALRPYLSSEEDRKKGKKFARYQFGDLLLHLEKKHGEDWGKVYDEAWERIDKKVEGLSKHIKLEEERRSEDAQSKAALTDWLRAKASFVIEGLKEADKDEFCRCELKLQKWYGDLRGKPFAIEAENSILDISGFSKQYNCAFIWQKDGVKKLNLYLIINYFKGGKLRFKKIKPEAFEANRFYTVINKKSGEIVPMEVNFNFDDPNLIILPLAFGKRQGREFIWNDLLSLETGSLKLANGRVIEKTLYNRRTRQDEPALFVALTFERREVLDSSNIKPMNLIGIDRGENIPAVIALTDPEGCPLSRFKDSLGNPTHILRIGESYKEKQRTIQAKKEVEQRRAGGYSRKYASKAKNLADDMVRNTARDLLYYAVTQDAMLIFENLSRGFGRQGKRTFMAERQYTRMEDWLTAKLAYEGLSKTYLSKTLAQYTSKTCSNCGFTITSADYDRVLEKLKKTATGWMTTINGKELKVEGQITYYNRYKRQNVVKDLSVELDRLSEESVNNDISSWTKGRSGEALSLLKKRFSHRPVQEKFVCLNCGFETHADEQAALNIARSWLFLRSQEYKKYQTNKTTGNTDKRAFVETWQSFYRKKLKEVWKPAVTSPKKKRKVPPPPAAKRVKLD

SEQ ID NO: 244 - protein, 997 aa, Artificial Sequence
  CasX variant
MQEIKRINKIRRRLVKDSNTKKAGKTGPMKTLLVRVMTPDLRERLENLRKKPENIPQPISNTSRANLNKLLTDYTEMKKAILHVYWEEFQKDPVGLMSRVAQPAPKNIDQRKLIPVKDGNERLTSSGFACSQCCQPLYVYKLEQVNDKGKPHTNYFGRCNVSEHERLILLSPHKPEANDELVTYSLGKFGQRALDFYSIHVTRESNHPVKPLEQIGGNSCASGPVGKALSDACMGAVASFLTKYQDIILEHQKVIKKNEKRLANLKDIASANGLAFPKITLPPQPHTKEGIEAYNNVVAQIVIWVNLNLWQKLKIGRDEAKPLQRLKGFPSFPLVERQANEVDWWDMVCNVKKLINEKKEDGKVFWQNLAGYKRQEALRPYLSSEEDRKKGKKFARYQFGDLLLHLEKKHGEDWGKVYDEAWERIDKKVEGLSKHIKLEEERRSEDAQSKAALTDWLRAKASFVIEGLKEADKDEFCRCELKLQKWYGDLRGKPFAIEAENSILDISGFSKQYNCAFIWQKDGVKKLNLYLIINYFKGGKLRFKKIKPEAFEANRFYTVINKKSGEIVPMEVNFNFDDPNLIILPLAFGKRQGREFIWNDLLSLETGSLKLANGRVIEKTLYNRRTRQDEPALFVALTFERREVLDSSNIKPMNLIGIDRGENIPAVIALTDPEGCPLSRFKDSLGNPTHILRIGESYKEKQRTIQAKKEVEQRRAGGYSRKYASKAKNLADDMVRNTARDLLYYAVTQDAMLIFENLSRGFGRQGKRTFMAERQYTRMEDWLTAKLAYEGLSKTYLSKTLAQYTSKTCSNCGFTITSADYDRVLEKLKKTATGWMTTINGKELKVEGQITYYNRYKRQNVVKDLSVELDRLSEESVNNDISSWTKGRSGEALSLLKKRFSHRPVQEKFVCLNCGFETHADEQAALNIARSWLFLRSQEYKKYQTNKTTGNTDKRAFVETWQSFYRKKLKEVWKPAVTSPKKKRKVPPPKRSFSKAF

SEQ ID NO: 245 - protein, 1008 aa, Artificial Sequence
  CasX variant
MQEIKRINKIRRRLVKDSNTKKAGKTGPMKTLLVRVMTPDLRERLENLRKKPENIPQPISNTSRANLNKLLTDYTEMKKAILHVYWEEFQKDPVGLMSRVAQPAPKNIDQRKLIPVKDGNERLTSSGFACSQCCQPLYVYKLEQVNDKGKPHTNYFGRCNVSEHERLILLSPHKPEANDELVTYSLGKFGQRALDFYSIHVTRESNHPVKPLEQIGGNSCASGPVGKALSDACMGAVASFLTKYQDIILEHQKVIKKNEKRLANLKDIASANGLAFPKITLPPQPHTKEGIEAYNNVVAQIVIWVNLNLWQKLKIGRDEAKPLQRLKGFPSFPLVERQANEVDWWDMVCNVKKLINEKKEDGKVFWQNLAGYKRQEALRPYLSSEEDRKKGKKFARYQFGDLLLHLEKKHGEDWGKVYDEAWERIDKKVEGLSKHIKLEEERRSEDAQSKAALTDWLRAKASFVIEGLKEADKDEFCRCELKLQKWYGDLRGKPFAIEAENSILDISGFSKQYNCAFIWQKDGVKKLNLYLIINYFKGGKLRFKKIKPEAFEANRFYTVINKKSGEIVPMEVNFNFDDPNLIILPLAFGKRQGREFIWNDLLSLETGSLKLANGRVIEKTLYNRRTRQDEPALFVALTFERREVLDSSNIKPMNLIGIDRGENIPAVIALTDPEGCPLSRFKDSLGNPTHILRIGESYKEKQRTIQAKKEVEQRRAGGYSRKYASKAKNLADDMVRNTARDLLYYAVTQDAMLIFENLSRGFGRQGKRTFMAERQYTRMEDWLTAKLAYEGLSKTYLSKTLAQYTSKTCSNCGFTITSADYDRVLEKLKKTATGWMTTINGKELKVEGQITYYNRYKRQNVVKDLSVELDRLSEESVNNDISSWTKGRSGEALSLLKKRFSHRPVQEKFVCLNCGFETHADEQAALNIARSWLFLRSQEYKKYQTNKTTGNTDKRAFVETWQSFYRKKLKEVWKPAVTSPKKKRKVPPPKRGINDRNFWRGENERKTR

SEQ ID NO: 246 - protein, 1007 aa, Artificial Sequence
  CasX variant
MAPKKKRKVSRMQEIKRINKIRRRLVKDSNTKKAGKTGPMKTLLVRVMTPDLRERLENLRKKPENIPQPISNTSRANLNKLLTDYTEMKKAILHVYWEEFQKDPVGLMSRVAQPAPKNIDQRKLIPVKDGNERLTSSGFACSQCCQPLYVYKLEQVNDKGKPHTNYFGRCNVSEHERLILLSPHKPEANDELVTYSLGKFGQRALDFYSIHVTRESNHPVKPLEQIGGNSCASGPVGKALSDACMGAVASFLTKYQDIILEHQKVIKKNEKRLANLKDIASANGLAFPKITLPPQPHTKEGIEAYNNVVAQIVIWVNLNLWQKLKIGRDEAKPLQRLKGFPSFPLVERQANEVDWWDMVCNVKKLINEKKEDGKVFWQNLAGYKRQEALRPYLSSEEDRKKGKKFARYQFGDLLLHLEKKHGEDWGKVYDEAWERIDKKVEGLSKHIKLEEERRSEDAQSKAALTDWLRAKASFVIEGLKEADKDEFCRCELKLQKWYGDLRGKPFAIEAENSILDISGFSKQYNCAFIWQKDGVKKLNLYLIINYFKGGKLRFKKIKPEAFEANRFYTVINKKSGEIVPMEVNFNFDDPNLIILPLAFGKRQGREFIWNDLLSLETGSLKLANGRVIEKTLYNRRTRQDEPALFVALTFERREVLDSSNIKPMNLIGIDRGENIPAVIALTDPEGCPLSRFKDSLGNPTHILRIGESYKEKQRTIQAKKEVEQRRAGGYSRKYASKAKNLADDMVRNTARDLLYYAVTQDAMLIFENLSRGFGRQGKRTFMAERQYTRMEDWLTAKLAYEGLSKTYLSKTLAQYTSKTCSNCGFTITSADYDRVLEKLKKTATGWMTTINGKELKVEGQITYYNRYKRQNVVKDLSVELDRLSEESVNNDISSWTKGRSGEALSLLKKRFSHRPVQEKFVCLNCGFETHADEQAALNIARSWLFLRSQEYKKYQTNKTTGNTDKRAFVETWQSFYRKKLKEVWKPAVTSPKKKRKVPPPPKKKRKV

SEQ ID NO: 247 - protein, 1009 aa, Artificial Sequence
  CasX variant
MAPKKKRKVSRMQEIKRINKIRRRLVKDSNTKKAGKTGPMKTLLVRVMTPDLRERLENLRKKPENIPQPISNTSRANLNKLLTDYTEMKKAILHVYWEEFQKDPVGLMSRVAQPAPKNIDQRKLIPVKDGNERLTSSGFACSQCCQPLYVYKLEQVNDKGKPHTNYFGRCNVSEHERLILLSPHKPEANDELVTYSLGKFGQRALDFYSIHVTRESNHPVKPLEQIGGNSCASGPVGKALSDACMGAVASFLTKYQDIILEHQKVIKKNEKRLANLKDIASANGLAFPKITLPPQPHTKEGIEAYNNVVAQIVIWVNLNLWQKLKIGRDEAKPLQRLKGFPSFPLVERQANEVDWWDMVCNVKKLINEKKEDGKVFWQNLAGYKRQEALRPYLSSEEDRKKGKKFARYQFGDLLLHLEKKHGEDWGKVYDEAWERIDKKVEGLSKHIKLEEERRSEDAQSKAALTDWLRAKASFVIEGLKEADKDEFCRCELKLQKWYGDLRGKPFAIEAENSILDISGFSKQYNCAFIWQKDGVKKLNLYLIINYFKGGKLRFKKIKPEAFEANRFYTVINKKSGEIVPMEVNFNFDDPNLIILPLAFGKRQGREFIWNDLLSLETGSLKLANGRVIEKTLYNRRTRQDEPALFVALTFERREVLDSSNIKPMNLIGIDRGENIPAVIALTDPEGCPLSRFKDSLGNPTHILRIGESYKEKQRTIQAKKEVEQRRAGGYSRKYASKAKNLADDMVRNTARDLLYYAVTQDAMLIFENLSRGFGRQGKRTFMAERQYTRMEDWLTAKLAYEGLSKTYLSKTLAQYTSKTCSNCGFTITSADYDRVLEKLKKTATGWMTTINGKELKVEGQITYYNRYKRQNVVKDLSVELDRLSEESVNNDISSWTKGRSGEALSLLKKRFSHRPVQEKFVCLNCGFETHADEQAALNIARSWLFLRSQEYKKYQTNKTTGNTDKRAFVETWQSFYRKKLKEVWKPAVTSPKKKRKVPPPPAAKRVKLD

SEQ ID NO: 248 - protein, 9 aa, Artificial Sequence
  nuclear localization signal
PAAKRVKLD

SEQ ID NO: 249 - DNA, 21 bp, Artificial Sequence
  nuclear localization signal
ccaaagaagaagcggaaggtc

SEQ ID NO: 250 - DNA, 51 bp, Artificial Sequence
  nuclear localization signal
cacaagaagaaacatccagacgcatcagtcaactttagcgagttcagtaaa

SEQ ID NO: 251 - DNA, 54 bp, Artificial Sequence
  nuclear localization signal
cagcgccctgggccttacgataggccgcaaagacccggaccgtatgatcgccct

SEQ ID NO: 252 - DNA, 48 bp, Artificial Sequence
  nuclear localization signal
ctcagcccgagtcttagtccactgctttccccgtccctgtctccactg

SEQ ID NO: 253 - DNA, 54 bp, Artificial Sequence
  nuclear localization signal
cggggcaagggtggcaaggggcttggcaaggggggggcaaagaggcacaggaag

SEQ ID NO: 254 - DNA, 72 bp, Artificial Sequence
  nuclear localization signal
agccgccgcagaaaagccaatcctacaaaactgtcagaaaatgcgaaaaaacttgctaaggaggtggaaaac

SEQ ID NO: 255 - DNA, 27 bp, Artificial Sequence
  nuclear localization signal
cctgccgcaaagcgagtgaaattggac

SEQ ID NO: 256 - DNA, 24 bp, Artificial Sequence
  nuclear localization signal
aagcggtccttcagtaaggccttt

SEQ ID NO: 257 - DNA, 57 bp, Artificial Sequence
  nuclear localization signal
aaacggggaataaacgaccggaacttctggcgcggggaaaacgagcgcaaaacccga

SEQ ID NO: 258 - protein, 997 aa, Artificial Sequence
  CasX variant
MAPKKKRKVSRQEIKRINKIRRRLVKDSNTKKAGKTGPMKTLLVRVMTPDLRERLENLRKKPENIPQPISNTSRANLNKLLTDYTEMKKAILHVYWEEFQKDPVGLMSRVAQPASKKIDQNKLKPEMDEKGNLTTAGFACSQCGQPLFVYKLEQVSEKGKAYTNYFGRCNVAEHEKLILLAQLKPEKDSDEAVTYSLGKFGQRALDFYSIHVTRESNHPVKPLEQIGGNSCASGPVGKALSDACMGAVASFLTKYQDIILEHQKVIKKNEKRLANLKDIASANGLAFPKITLPPQPHTKEGIEAYNNVVAQIVIWVNLNLWQKLKIGRDEAKPLQRLKGFPSFPLVERQANEVDWWDMVCNVKKLINEKKEDGKVFWQNLAGYKRQEALRPYLSSEEDRKKGKKFARYQFGDLLLHLEKKHGEDWGKVYDEAWERIDKKVEGLSKHIKLEEERRSEDAQSKAALTDWLRAKASFVIEGLKEADKDEFCRCELKLQKWYGDLRGKPFAIEAENSILDISGFSKQYNCAFIWQKDGVKKLNLYLIINYFKGGKLRFKKIKPEAFEANRFYTVINKKSGEIVPMEVNFNFDDPNLIILPLAFGKRQGREFIWNDLLSLETGSLKLANGRVIEKTLYNRRTRQDEPALFVALTFERREVLDSSNIKPMNLIGIDRGENIPAVIALTDPEGCPLSRFKDSLGNPTHILRIGESYKEKQRTIQAKKEVEQRRAGGYSRKYASKAKNLADDMVRNTARDLLYYAVTQDAMLIFENLSRGFGRQGKRTFMAERQYTRMEDWLTAKLAYEGLSKTYLSKTLAQYTSKTCSNCGFTITSADYDRVLEKLKKTATGWMTTINGKELKVEGQITYYNRYKRQNVVKDLSVELDRLSEESVNNDISSWTKGRSGEALSLLKKRFSHRPVQEKFVCLNCGFETHADEQAALNIARSWLFLRSQEYKKYQTNKTTGNTDKRAFVETWQSFYRKKLKEVWKPAVTSPKKKRKV

SEQ ID NO: 259 - protein, 1005 aa, Artificial Sequence
  CasX variant
MAPKKKRKVSRQEIKRINKIRRRLVKDSNTKKAGKTGPMKTLLVRVMTPDLRERLENLRKKPENIPQPISNTSRANLNKLLTDYTEMKKAILHVYWEEFQKDPVGLMSRVAQPAPKNIDQRKLIPVKDGNERLTSSGFACSQCCQPLYVYKLEQVNDKGKPHTNYFGRCNVSEHERLILLSPHKPEANDELVTYSLGKFGQRALDFYSIHVTKESTHPVKPLAQIAGNRYASGPVGKALSDACMGTIASFLSKYQDIIIEHQKVVKGNQKRLESLRELAGKENLEYPSVTLPPQPHTKEGVDAYNEVIARVRMWVNLNLWQKLKLSRDDAKPLLRLKGFPSFPLVERQANEVDWWDMVCNVKKLINEKKEDGKVFWQNLAGYKRQEALRPYLSSEEDRKKGKKFARYQFGDLLLHLEKKHGEDWGKVYDEAWERIDKKVEGLSKHIKLEEERRSEDAQSKAALTDWLRAKASFVIEGLKEADKDEFCRCELKLQKWYGDLRGKPFAIEAENSILDISGFSKQYNCAFIWQKDGVKKLNLYLIINYFKGGKLRFKKIKPEAFEANRFYTVINKKSGEIVPMEVNFNFDDPNLIILPLAFGKRQGREFIWNDLLSLETGSLKLANGRVIEKTLYNRRTRQDEPALFVALTFERREVLDSSNIKPMNLIGIDRGENIPAVIALTDPEGCPLSRFKDSLGNPTHILRIGESYKEKQRTIQAKKEVEQRRAGGYSRKYASKAKNLADDMVRNTARDLLYYAVTQDAMLIFENLSRGFGRQGKRTFMAERQYTRMEDWLTAKLAYEGLSKTYLSKTLAQYTSKTCSNCGFTITSADYDRVLEKLKKTATGWMTTINGKELKVEGQITYYNRYKRQNVVKDLSVELDRLSEESVNNDISSWTKGRSGEALSLLKKRFSHRPVQEKFVCLNCGFETHADEQAALNIARSWLFLRSQEYKKYQTNKTTGNTDKRAFVETWQSFYRKKLKEVWKPAVTSPKKKRKVTSPKKKRKV

SEQ ID NO: 260 - protein, 996 aa, Artificial Sequence
  CasX variant
MAPKKKRKVSRQEIKRINKIRRRLVKDSNTKKAGKTGPMKTLLVRVMTPDLRERLENLRKKPENIPQPISNTSRANLNKLLTDYTEMKKAILHVYWEEFQKDPVGLMSRVAQPAPKNIDQRKLIPVKDGNERLTSSGFACSQCCQPLYVYKLEQVNDKGKPHTNYFGRCNVSEHERLILLSPHKPEANDELVTYSLGKFGQRALDFYSIHVTKESTHPVKPLAQIAGNRYASGPVGKALSDACMGTIASFLSKYQDIIIEHQKVVKGNQKRLESLRELAGKENLEYPSVTLPPQPHTKEGVDAYNEVIARVRMWVNLNLWQKLKLSRDDAKPLLRLKGFPSFPLVERQANEVDWWDMVCNVKKLINEKKEDGKVFWQNLAGYKRQEALRPYLSSEEDRKKGKKFARYQLGDLLLHLEKKHGEDWGKVYDEAWERIDKKVEGLSKHIKLEEERRSEDAQSKAALTDWLRAKASFVIEGLKEADKDEFCRCELKLQKWYGDLRGKPFAIEAENSILDISGFSKQYNCAFIWQKDGVKKLNLYLIINYFKGGKLRFKKIKPEAFEANRFYTVINKKSGEIVPMEVNFNFDDPNLIILPLAFGKRQGREFIWNDLLSLETGSLKLANGRVIEKTLYNRRTRQDEPALFVALTFERREVLDSSNIKPMNLIGVDRGENIPAVIALTDPEGCPLSRFKDSLGNPTHILRIGESYKEKQRTIQAKKEVEQRRAGGYSRKYASKAKNLADDMVRNTARDLLYYAVTQDAMLIFENLSRGFGRQGKRTFMAERQYTRMEDWLTAKLAYEGLSKTYLSKTLAQYTSKTCSNCGFTITSADYDRVLEKLKKTATGWMTTINGKELKVEGQITYYNRRKRQNVVKDLSVELDRLSEESVNNDISSWTKGRSGEALSLLKKRFSHRPVQEKFVCLNCGFETHADEQAALNIARSWLFLRSQEYKKYQTNKTTGNTDKRAFVETWQSFYRKKLKEVWKPAVTSPKKKRKV

SEQ ID NO: 261 - protein, 996 aa, Artificial Sequence
  CasX variant
MAPKKKRKVSRQEIKRINKIRRRLVKDSNTKKAGKTGPMKTLLVRVMTPDLRERLENLRKKPENIPQPISNTSRANLNKLLTDYTEMKKAILHVYWEEFQKDPVGLMSRVAQPAPKNIDQRKLIPVKDGNERLTSSGFACSQCCQPLYVYKLEQVNDKGKPHTNYFGRCNVSEHERLILLSPHKPEANDELVTYSLGKFGQRALDFYSIHVTKESTHPVKPLAQIAGNRYASGPVGKALSDACMGTIASFLSKYQDIIIEHQKVVKGNQKRLESLRELAGKENLEYPSVTLPPQPHTKEGVDAYNEVIARVRMWVNLNLWQKLKLSRDDAKPLLRLKGFPSFPLVERQANEVDWWDMVCNVKKLINEKKEDGKVFWQNLAGYKRQEALRPYLSSEEDRKKGKKFARYQLGDLLKHLEKKHGEDWGKVYDEAWERIDKKVEGLSKHIKLEEERRSEDAQSKAALTDWLRAKASFVIEGLKEADKDEFCRCELKLQKWYGDLRGKPFAIEAENSILDISGFSKQYNCAFIWQKDGVKKLNLYLIINYFKGGKLRFKKIKPEAFEANRFYTVINKKSGEIVPMEVNFNFDDPNLIILPLAFGKRQGREFIWNDLLSLETGSLKLANGRVIEKTLYNRRTRQDEPALFVALTFERREVLDSSNIKPMNLIGVDRGENIPAVIALTDPEGCPLSRFKDSLGNPTHILRIGESYKEKQRTIQAKKEVEQRRAGGYSRKYASKAKNLADDMVRNTARDLLYYAVTQDAMLIFENLSRGFGRQGKRTFMAERQYTRMEDWLTAKLAYEGLSKTYLSKTLAQYTSKTCSNCGFTITSADYDRVLEKLKKTATGWMTTINGKELKVEGQITYYNRRKRQNVVKDLSVELDRLSEESVNNDISSWTKGRSGEALSLLKKRFSHRPVQEKFVCLNCGFETHADEQAALNIARSWLFLRSQEYKKYQTNKTTGNTDKRAFVETWQSFYRKKLKEVWKPAVTSPKKKRKV

SEQ ID NO: 262 - protein, 996 aa, Artificial Sequence
  CasX variant
MAPKKKRKVSRQEIKRINKIRRRLVKDSNTKKAGKTGPMKTLLVRVMTPDLRERLENLRKKPENIPQPISNTSRANLNKLLTDYTEMKKAILHVYWEEFQKDPVGLMSRVAQPAPKNIDQRKLIPVKDGNERLTSSGFACSQCCQPLYVYKLEQVNDKGKPHTNYFGRCNVSEHERLILLSPHKPEANDELVTYSLGKFGQRALDFYSIHVTKESTHPVKPLAQIAGNRYASGPVGKALSDACMGTIASFLSKYQDIIIEHQKVVKGNQKRLESLRELAGKENLEYPSVTLPPQPHTKEGVDAYNEVIARVRMWVNLNLWQKLKLSRDDAKPLLRLKGFPSFPLVERQANEVDWWDMVCNVKKLINEKKEDGKVFWQNLAGYKRQEALRPYLSSEEDRKKGKKFARYQLGDLLLHLEKKHGEDWGKVYDEAWERIDKKVEGLSKHIKLEEERRSEDAQSKAALTDWLRAKASFVIEGLKEADKDEFCRCELKLQKWYGDLRGKPFAIEAENSILDISGFSKQYNCAFIWQKDGVKKLNLYLIINYFKGGKLRFKKIKPEAFEANRFYTVINKKSGEIVPMEVNFNFDDPNLIILPLAFGKRQGREFIWNDLLSLETGSLKLANGRVIEKTLYNRRTRQDEPALFVALTFERREVLDSSNIKPMNLIGVDRGENIPAVIALTDPEGCPLSRFKDSLGNPTHILRIGESYKEKQRTIQAKKEVEQRRAGGYSRKYASKAKNLADDMVRNTARDLLYYAVTQDAMLIFENLSRGFGRQGKRTFMAERQYTRMEDWLTAKLAYEGLSKTYLSKTLAQYTSKTCSNCGFTITSADYDRVLEKLKKTATGWMTTINGKELKVEGQITYYNRYKRQNVVKDLSVELDRLSEESVNNDISSWTKGRSGEALSLLKKRFSHRPVQEKFVCLNCGFETHADEQAALNIARSWLFLRSQEYKKYQTNKTTGNTDKRAFVETWQSFYRKKLKEVWKPAVTSPKKKRKV

SEQ ID NO: 263 - protein, 997 aa, Artificial Sequence
  CasX variant
MAPKKKRKVSRQEIKRINKIRRRLVKDSNTKKAGKTGPMKTLLVRVMTPDLRERLENLRKKPENIPQPISNTSRANLNKLLTDYTEMKKAILHVYWEEFQKDPVGLMSRVAQPASKKIDQNKLKPEMDEKGNLTTAGFACSQCGQPLFVYKLEQVSEKGKAYTNYFGRCNVAEHEKLILLAQLKPEKDSDEAVTYSLGKFGQRALDFYSIHVTKESTHPVKPLAQIAGNRYASGPVGKALSDACMGTIASFLSKYQDIIIEHQKVVKGNQKRLESLRELAGKENLEYPSVTLPPQPHTKEGVDAYNEVIARVRMWVNLNLWQKLKLSRDDAKPLLRLKGFPSFPLVERQANEVDWWDMVCNVKKLINEKKEDGKVFWQNLAGYKRQEALRPYLSSEEDRKKGKKFARYQFGDLLLHLEKKHGEDWGKVYDEAWERIDKKVEGLSKHIKLEEERRSEDAQSKAALTDWLRAKASFVIEGLKEADKDEFCRCELKLQKWYGDLRGKPFAIEAENSILDISGFSKQYNCAFIWQKDGVKKLNLYLIINYFKGGKLRFKKIKPEAFEANRFYTVINKKSGEIVPMEVNFNFDDPNLIILPLAFGKRQGREFIWNDLLSLETGSLKLANGRVIEKTLYNRRTRQDEPALFVALTFERREVLDSSNIKPMNLIGIDRGENIPAVIALTDPEGCPLSRFKDSLGNPTHILRIGESYKEKQRTIQAKKEVEQRRAGGYSRKYASKAKNLADDMVRNTARDLLYYAVTQDAMLIFENLSRGFGRQGKRTFMAERQYTRMEDWLTAKLAYEGLSKTYLSKTLAQYTSKTCSNCGFTITSADYDRVLEKLKKTATGWMTTINGKELKVEGQITYYNRYKRQNVVKDLSVELDRLSEESVNNDISSWTKGRSGEALSLLKKRFSHRPVQEKFVCLNCGFETHADEQAALNIARSWLFLRSQEYKKYQTNKTTGNTDKRAFVETWQSFYRKKLKEVWKPAVTSPKKKRKV

SEQ ID NO: 264 - protein, 997 aa, Artificial Sequence
  CasX variant
MAPKKKRKVSRQEIKRINKIRRRLVKDSNTKKAGKTGPMKTLLVRVMTPDLRERLENLRKKPENIPQPISNTSRANLNKLLTDYTEMKKAILHVYWEEFQKDPVGLMSRVAQPASKKIDQNKLKPEMDEKGNLTTAGFACSQCGQPLFVYKLEQVSEKGKAYTNYFGRCNVAEHEKLILLAQLKPEKDSDEAVTYSLGKFGQRALDFYSIHVTKESTHPVKPLAQIAGNRYASGPVGKALSDACMGTIASFLSKYQDIIIEHQKVVKGNQKRLESLRELAGKENLEYPSVTLPPQPHTKEGVDAYNEVIARVRMWVNLNLWQKLKLSRDDAKPLLRLKGFPSFPLVERQANEVDWWDMVCNVKKLINEKKEDGKVFWQNLAGYKRQEALRPYLSSEEDRKKGKKFARYQLGDLLLHLEKKHGEDWGKVYDEAWERIDKKVEGLSKHIKLEEERRSEDAQSKAALTDWLRAKASFVIEGLKEADKDEFCRCELKLQKWYGDLRGKPFAIEAENSILDISGFSKQYNCAFIWQKDGVKKLNLYLIINYFKGGKLRFKKIKPEAFEANRFYTVINKKSGEIVPMEVNFNFDDPNLIILPLAFGKRQGREFIWNDLLSLETGSLKLANGRVIEKTLYNRRTRQDEPALFVALTFERREVLDSSNIKPMNLIGVDRGENIPAVIALTDPEGCPLSRFKDSLGNPTHILRIGESYKEKQRTIQAKKEVEQRRAGGYSRKYASKAKNLADDMVRNTARDLLYYAVTQDAMLIFENLSRGFGRQGKRTFMAERQYTRMEDWLTAKLAYEGLSKTYLSKTLAQYTSKTCSNCGFTITSADYDRVLEKLKKTATGWMTTINGKELKVEGQITYYNRRKRQNVVKDLSVELDRLSEESVNNDISSWTKGRSGEALSLLKKRFSHRPVQEKFVCLNCGFETHADEQAALNIARSWLFLRSQEYKKYQTNKTTGNTDKRAFVETWQSFYRKKLKEVWKPAVTSPKKKRKV

SEQ ID NO: 265 - protein, 997 aa, Artificial Sequence
  CasX variant
MAPKKKRKVSRQEIKRINKIRRRLVKDSNTKKAGKTGPMKTLLVRVMTPDLRERLENLRKKPENIPQPISNTSRANLNKLLTDYTEMKKAILHVYWEEFQKDPVGLMSRVAQPASKKIDQNKLKPEMDEKGNLTTAGFACSQCGQPLFVYKLEQVSEKGKAYTNYFGRCNVAEHEKLILLAQLKPEKDSDEAVTYSLGKFGQRALDFYSIHVTKESTHPVKPLAQIAGNRYASGPVGKALSDACMGTIASFLSKYQDIIIEHQKVVKGNQKRLESLRELAGKENLEYPSVTLPPQPHTKEGVDAYNEVIARVRMWVNLNLWQKLKLSRDDAKPLLRLKGFPSFPLVERQANEVDWWDMVCNVKKLINEKKEDGKVFWQNLAGYKRQEALRPYLSSEEDRKKGKKFARYQLGDLLKHLEKKHGEDWGKVYDEAWERIDKKVEGLSKHIKLEEERRSEDAQSKAALTDWLRAKASFVIEGLKEADKDEFCRCELKLQKWYGDLRGKPFAIEAENSILDISGFSKQYNCAFIWQKDGVKKLNLYLIINYFKGGKLRFKKIKPEAFEANRFYTVINKKSGEIVPMEVNFNFDDPNLIILPLAFGKRQGREFIWNDLLSLETGSLKLANGRVIEKTLYNRRTRQDEPALFVALTFERREVLDSSNIKPMNLIGVDRGENIPAVIALTDPEGCPLSRFKDSLGNPTHILRIGESYKEKQRTIQAKKEVEQRRAGGYSRKYASKAKNLADDMVRNTARDLLYYAVTQDAMLIFENLSRGFGRQGKRTFMAERQYTRMEDWLTAKLAYEGLSKTYLSKTLAQYTSKTCSNCGFTITSADYDRVLEKLKKTATGWMTTINGKELKVEGQITYYNRRKRQNVVKDLSVELDRLSEESVNNDISSWTKGRSGEALSLLKKRFSHRPVQEKFVCLNCGFETHADEQAALNIARSWLFLRSQEYKKYQTNKTTGNTDKRAFVETWQSFYRKKLKEVWKPAVTSPKKKRKV

SEQ ID NO: 266 - protein, 997 aa, Artificial Sequence
  CasX variant
MAPKKKRKVSRQEIKRINKIRRRLVKDSNTKKAGKTGPMKTLLVRVMTPDLRERLENLRKKPENIPQPISNTSRANLNKLLTDYTEMKKAILHVYWEEFQKDPVGLMSRVAQPASKKIDQNKLKPEMDEKGNLTTAGFACSQCGQPLFVYKLEQVSEKGKAYTNYFGRCNVAEHEKLILLAQLKPEKDSDEAVTYSLGKFGQRALDFYSIHVTKESTHPVKPLAQIAGNRYASGPVGKALSDACMGTIASFLSKYQDIIIEHQKVVKGNQKRLESLRELAGKENLEYPSVTLPPQPHTKEGVDAYNEVIARVRMWVNLNLWQKLKLSRDDAKPLLRLKGFPSFPLVERQANEVDWWDMVCNVKKLINEKKEDGKVFWQNLAGYKRQEALRPYLSSEEDRKKGKKFARYQLGDLLLHLEKKHGEDWGKVYDEAWERIDKKVEGLSKHIKLEEERRSEDAQSKAALTDWLRAKASFVIEGLKEADKDEFCRCELKLQKWYGDLRGKPFAIEAENSILDISGFSKQYNCAFIWQKDGVKKLNLYLIINYFKGGKLRFKKIKPEAFEANRFYTVINKKSGEIVPMEVNFNFDDPNLIILPLAFGKRQGREFIWNDLLSLETGSLKLANGRVIEKTLYNRRTRQDEPALFVALTFERREVLDSSNIKPMNLIGVDRGENIPAVIALTDPEGCPLSRFKDSLGNPTHILRIGESYKEKQRTIQAKKEVEQRRAGGYSRKYASKAKNLADDMVRNTARDLLYYAVTQDAMLIFENLSRGFGRQGKRTFMAERQYTRMEDWLTAKLAYEGLSKTYLSKTLAQYTSKTCSNCGFTITSADYDRVLEKLKKTATGWMTTINGKELKVEGQITYYNRYKRQNVVKDLSVELDRLSEESVNNDISSWTKGRSGEALSLLKKRFSHRPVQEKFVCLNCGFETHADEQAALNIARSWLFLRSQEYKKYQTNKTTGNTDKRAFVETWQSFYRKKLKEVWKPAVTSPKKKRKV

SEQ ID NO: 267 - protein, 997 aa, Artificial Sequence
  CasX variant
MAPKKKRKVSRQEIKRINKIRRRLVKDSNTKKAGKTGPMKTLLVRVMTPDLRERLENLRKKPENIPQPISNTSRANLNKLLTDYTEMKKAILHVYWEEFQKDPVGLMSRVAQPASKKIDQNKLKPEMDEKGNLTTAGFACSQCGQPLFVYKLEQVSEKGKAYTNYFGRCNVAEHEKLILLAQLKPEKDSDEAVTYSLGKFGQRALDFYSIHVTRESNHPVKPLEQIGGNSCASGPVGKALSDACMGAVASFLTKYQDIILEHQKVIKKNEKRLANLKDIASANGLAFPKITLPPQPHTKEGIEAYNNVVAQIVIWVNLNLWQKLKIGRDEAKPLQRLKGFPSFPLVERQANEVDWWDMVCNVKKLINEKKEDGKVFWQNLAGYKRQEALRPYLSSEEDRKKGKKFARYQLGDLLLHLEKKHGEDWGKVYDEAWERIDKKVEGLSKHIKLEEERRSEDAQSKAALTDWLRAKASFVIEGLKEADKDEFCRCELKLQKWYGDLRGKPFAIEAENSILDISGFSKQYNCAFIWQKDGVKKLNLYLIINYFKGGKLRFKKIKPEAFEANRFYTVINKKSGEIVPMEVNFNFDDPNLIILPLAFGKRQGREFIWNDLLSLETGSLKLANGRVIEKTLYNRRTRQDEPALFVALTFERREVLDSSNIKPMNLIGVDRGENIPAVIALTDPEGCPLSRFKDSLGNPTHILRIGESYKEKQRTIQAKKEVEQRRAGGYSRKYASKAKNLADDMVRNTARDLLYYAVTQDAMLIFENLSRGFGRQGKRTFMAERQYTRMEDWLTAKLAYEGLSKTYLSKTLAQYTSKTCSNCGFTITSADYDRVLEKLKKTATGWMTTINGKELKVEGQITYYNRYKRQNVVKDLSVELDRLSEESVNNDISSWTKGRSGEALSLLKKRFSHRPVQEKFVCLNCGFETHADEQAALNIARSWLFLRSQEYKKYQTNKTTGNTDKRAFVETWQSFYRKKLKEVWKPAVTSPKKKRKV

SEQ ID NO: 268 - DNA, 2991 bp, Artificial Sequence
  CasX variant
atggccccaaagaagaagcggaaggtctctagacaagagatcaagagaatcaacaagatcagaaggagactggtcaaggacagcaacacaaagaaggccggcaagacaggccccatgaaaaccctgctcgtcagagtgatgacccctgacctgagagagcggctggaaaacctgagaaagaagcccgagaacatccctcagcctatcagcaacaccagcagggccaacctgaacaagctgctgaccgactacaccgagatgaagaaagccatcctgcacgtgtactgggaagagttccagaaagaccccgtgggcctgatgagcagagttgctcagcctgccagcaagaagatcgaccagaacaagctgaagcccgagatggacgagaagggcaatctgaccacagccggctttgcctgctctcagtgtggccagcctctgttcgtgtacaagctggaacaggtgtccgagaaaggcaaggcctacaccaactacttcggcagatgtaacgtggccgagcacgagaagctgattctgctggcccagctgaaacctgagaaggactctgatgaggccgtgacctacagcctgggcaagtttggacagagagccctggacttctacagcatccacgtgaccagggagagcaatcaccctgtgaagcccctggaacagatcggcggcaatagctgtgcctctggacctgtgggaaaagccctgagcgacgcctgtatgggagccgtggcatccttcctgaccaagtaccaggacatcatcctggaacaccagaaagtgatcaagaagaacgagaaaagactggccaacctcaaggatatcgccagcgctaacggcctggcctttcctaagatcaccctgcctccacagcctcacaccaaagagggcatcgaggcctacaacaacgtggtggcccagatcgtgatttgggtcaacctgaatctgtggcagaagctgaagatcggcagggacgaagccaagccactgcagagactgaagggcttccctagcttccctctggtggaaagacaggccaatgaagtggattggtgggacatggtctgcaacgtgaagaagctgatcaacgagaagaaagaggatggcaaggttttctggcagaacctggccggctacaagagacaagaagccctgaggccttacctgagcagcgaagaggaccggaagaagggcaagaagttcgccagataccagttcggcgacctgctgctgcacctggaaaagaagcacggcgaggactggggcaaagtgtacgatgaggcctgggagagaatcgacaagaaggtggaaggcctgagcaagcacattaagctggaagaggaaagaaggagcgaggacgcccaatctaaagccgctctgaccgattggctgagagccaaggccagctttgtgatcgagggcctgaaagaggccgacaaggacgagttctgcagatgcgagctgaagctgcagaagtggtacggcgatctgagaggcaagcccttcgccattgaggccgagaacagcatcctggacatcagcggcttcagcaagcagtacaactgcgccttcatttggcagaaagacggcgtcaagaaactgaacctgtacctgatcatcaattacttcaaaggcggcaagctgcggttcaagaagatcaaacccgaggccttcgaggctaacagattctacaccgtgatcaacaaaaagtccggcgagatcgtgcccatggaagtgaacttcaacttcgacgaccccaacctgattatcctgcctctggccttcggcaagagacagggcagagagttcatctggaacgatctgctgagcctggaaaccggctctctgaagctggccaatggcagagtgatcgagaaaaccctgtacaacaggagaaccagacaggacgagcctgctctgtttgtggccctgaccttcgagagaagagaggtgctggacagcagcaacatcaagcccatgaacctgatcggcatcgaccggggcgagaatatccctgctgtgatcgccctgacagaccctgaaggatgcccactgagcagattcaaggactccctgggcaaccctacacacatcctgagaatcggcgagagctacaaagagaagcagaggacaatccaggccaagaaagaggtggaacagagaagagccggcggatactctaggaagtacgccagcaaggccaagaatctggccgacgacatggtccgaaacaccgccagagatctgctgtactacgccgtgacacaggacgccatgctgatcttcgagaatctgagcagaggcttcggccggcagggcaagagaacctttatggccgagaggcagtacaccagaatggaagattggctcacagctaaactggcctacgagggactgagcaagacctacctgtccaaaacactggcccagtatacctccaagacctgcagcaattgcggcttcaccatcaccagcgccgactacgacagagtgctggaaaagctcaagaaaaccgccaccggctggatgaccaccatcaacggcaaagagctgaaggttgagggccagatcacctactacaacaggtacaagaggcagaacgtcgtgaaggatctgagcgtggaactggacagactgagcgaagagagcgtgaacaacgacatcagcagctggacaaagggcagatcaggcgaggctctgagcctgctgaagaagaggtttagccacagacctgtgcaagagaagttcgtgtgcctgaactgcggcttcgagacacacgccgatgaacaggctgccctgaacattgccagaagctggctgttcctgagaagccaagagtacaagaagtaccagaccaacaagaccaccggcaacaccgacaagagggcctttgtggaaacctggcagagcttctacagaaaaaagctgaaagaagtctggaagcccgccgtgactagtccaaaaaagaagagaaaggta

SEQ ID NO: 269 - DNA, 2988 bp, Artificial Sequence
  CasX variant
atggccccaaagaagaagcggaaggtctctagacaagagatcaagagaatcaacaagatcagaaggagactggtcaaggacagcaacacaaagaaggccggcaagacaggccccatgaaaaccctgctcgtcagagtgatgacccctgacctgagagagcggctggaaaacctgagaaagaagcccgagaacatccctcagcctatcagcaacaccagcagggccaacctgaacaagctgctgaccgactacaccgagatgaagaaagccatcctgcacgtgtactgggaagagttccagaaagaccccgtgggcctgatgagcagagttgctcagcccgctcctaagaacatcgaccagagaaagctgatccccgtgaaggacggcaacgagagactgacctctagcggctttgcctgcagccagtgttgccagcctctgtacgtgtacaagctggaacaagtgaacgacaagggcaagccccacaccaactacttcggcagatgcaacgtgtccgagcacgagaggctgatcctgctgtctcctcacaagcccgaggccaacgatgagctggtcacatacagcctgggcaagttcggacagagagccctggacttctacagcatccacgtgaccaaagaaagcacacaccccgtgaagcccctggctcagatcgccggcaatagatacgcctctggacctgtgggcaaagccctgtccgatgcctgcatgggaacaatcgccagcttcctgagcaagtaccaggacatcatcatcgagcaccagaaggtggtcaagggcaaccagaagagactggaaagcctgagggagctggccggcaaagagaacctggaataccccagcgtgaccctgcctcctcagcctcacacaaaagaaggcgtggacgcctacaacgaagtgatcgccagagtgagaatgtgggtcaacctgaacctgtggcagaagctgaaactgtccagggacgacgccaagcctctgctgagactgaagggcttccctagcttccctctggtggaaagacaggccaatgaagtggattggtgggacatggtctgcaacgtgaagaagctgatcaacgagaagaaagaggatggcaaggttttctggcagaacctggccggctacaagagacaagaagccctgaggccttacctgagcagcgaagaggaccggaagaagggcaagaagttcgccagataccagttcggcgacctgctgctgcacctggaaaagaagcacggcgaggactggggcaaagtgtacgatgaggcctgggagagaatcgacaagaaggtggaaggcctgagcaagcacattaagctggaagaggaaagaaggagcgaggacgcccaatctaaagccgctctgaccgattggctgagagccaaggccagctttgtgatcgagggcctgaaagaggccgacaaggacgagttctgcagatgcgagctgaagctgcagaagtggtacggcgatctgagaggcaagcccttcgccattgaggccgagaacagcatcctggacatcagcggcttcagcaagcagtacaactgcgccttcatttggcagaaagacggcgtcaagaaactgaacctgtacctgatcatcaattacttcaaaggcggcaagctgcggttcaagaagatcaaacccgaggccttcgaggctaacagattctacaccgtgatcaacaaaaagtccggcgagatcgtgcccatggaagtgaacttcaacttcgacgaccccaacctgattatcctgcctctggccttcggcaagagacagggcagagagttcatctggaacgatctgctgagcctggaaaccggctctctgaagctggccaatggcagagtgatcgagaaaaccctgtacaacaggagaaccagacaggacgagcctgctctgtttgtggccctgaccttcgagagaagagaggtgctggacagcagcaacatcaagcccatgaacctgatcggcatcgaccggggcgagaatatccctgctgtgatcgccctgacagaccctgaaggatgcccactgagcagattcaaggactccctgggcaaccctacacacatcctgagaatcggcgagagctacaaagagaagcagaggacaatccaggccaagaaagaggtggaacagagaagagccggcggatactctaggaagtacgccagcaaggccaagaatctggccgacgacatggtccgaaacaccgccagagatctgctgtactacgccgtgacacaggacgccatgctgatcttcgagaatctgagcagaggcttcggccggcagggcaagagaacctttatggccgagaggcagtacaccagaatggaagattggctcacagctaaactggcctacgagggactgagcaagacctacctgtccaaaacactggcccagtatacctccaagacctgcagcaattgcggcttcaccatcaccagcgccgactacgacagagtgctggaaaagctcaagaaaaccgccaccggctggatgaccaccatcaacggcaaagagctgaaggttgagggccagatcacctactacaacaggtacaagaggcagaacgtcgtgaaggatctgagcgtggaactggacagactgagcgaagagagcgtgaacaacgacatcagcagctggacaaagggcagatcaggcgaggctctgagcctgctgaagaagaggtttagccacagacctgtgcaagagaagttcgtgtgcctgaactgcggcttcgagacacacgccgatgaacaggctgccctgaacattgccagaagctggctgttcctgagaagccaagagtacaagaagtaccagaccaacaagaccaccggcaacaccgacaagagggcctttgtggaaacctggcagagcttctacagaaaaaagctgaaagaagtctggaagcccgccgtgactagtccaaaaaagaagagaaaggta

SEQ ID NO: 270 - DNA, 2988 bp, Artificial Sequence
  CasX variant
atggccccaaagaagaagcggaaggtctctagacaagagatcaagagaatcaacaagatcagaaggagactggtcaaggacagcaacacaaagaaggccggcaagacaggccccatgaaaaccctgctcgtcagagtgatgacccctgacctgagagagcggctggaaaacctgagaaagaagcccgagaacatccctcagcctatcagcaacaccagcagggccaacctgaacaagctgctgaccgactacaccgagatgaagaaagccatcctgcacgtgtactgggaagagttccagaaagaccccgtgggcctgatgagcagagttgctcagcccgctcctaagaacatcgaccagagaaagctgatccccgtgaaggacggcaacgagagactgacctctagcggctttgcctgcagccagtgttgccagcctctgtacgtgtacaagctggaacaagtgaacgacaagggcaagccccacaccaactacttcggcagatgcaacgtgtccgagcacgagaggctgatcctgctgtctcctcacaagcccgaggccaacgatgagctggtcacatacagcctgggcaagttcggacagagagccctggacttctacagcatccacgtgaccaaagaaagcacacaccccgtgaagcccctggctcagatcgccggcaatagatacgcctctggacctgtgggcaaagccctgtccgatgcctgcatgggaacaatcgccagcttcctgagcaagtaccaggacatcatcatcgagcaccagaaggtggtcaagggcaaccagaagagactggaaagcctgagggagctggccggcaaagagaacctggaataccccagcgtgaccctgcctcctcagcctcacacaaaagaaggcgtggacgcctacaacgaagtgatcgccagagtgagaatgtgggtcaacctgaacctgtggcagaagctgaaactgtccagggacgacgccaagcctctgctgagactgaagggcttccctagcttccctctggtggaaagacaggccaatgaagtggattggtgggacatggtctgcaacgtgaagaagctgatcaacgagaagaaagaggatggcaaggttttctggcagaacctggccggctacaagagacaagaagccctgaggccttacctgagcagcgaagaggaccggaagaagggcaagaagttcgccagataccagctgggcgacctgctgctgcacctggaaaagaagcacggcgaggactggggcaaagtgtacgatgaggcctgggagagaatcgacaagaaggtggaaggcctgagcaagcacattaagctggaagaggaaagaaggagcgaggacgcccaatctaaagccgctctgaccgattggctgagagccaaggccagctttgtgatcgagggcctgaaagaggccgacaaggacgagttctgcagatgcgagctgaagctgcagaagtggtacggcgatctgagaggcaagcccttcgccattgaggccgagaacagcatcctggacatcagcggcttcagcaagcagtacaactgcgccttcatttggcagaaagacggcgtcaagaaactgaacctgtacctgatcatcaattacttcaaaggcggcaagctgcggttcaagaagatcaaacccgaggccttcgaggctaacagattctacaccgtgatcaacaaaaagtccggcgagatcgtgcccatggaagtgaacttcaacttcgacgaccccaacctgattatcctgcctctggccttcggcaagagacagggcagagagttcatctggaacgatctgctgagcctggaaaccggctctctgaagctggccaatggcagagtgatcgagaaaaccctgtacaacaggagaaccagacaggacgagcctgctctgtttgtggccctgaccttcgagagaagagaggtgctggacagcagcaacatcaagcccatgaacctgatcggcgtggaccggggcgagaatatccctgctgtgatcgccctgacagaccctgaaggatgcccactgagcagattcaaggactccctgggcaaccctacacacatcctgagaatcggcgagagctacaaagagaagcagaggacaatccaggccaagaaagaggtggaacagagaagagccggcggatactctaggaagtacgccagcaaggccaagaatctggccgacgacatggtccgaaacaccgccagagatctgctgtactacgccgtgacacaggacgccatgctgatcttcgagaatctgagcagaggcttcggccggcagggcaagagaacctttatggccgagaggcagtacaccagaatggaagattggctcacagctaaactggcctacgagggactgagcaagacctacctgtccaaaacactggcccagtatacctccaagacctgcagcaattgcggcttcaccatcaccagcgccgactacgacagagtgctggaaaagctcaagaaaaccgccaccggctggatgaccaccatcaacggcaaagagctgaaggttgagggccagatcacctactacaacaggaggaagaggcagaacgtcgtgaaggatctgagcgtggaactggacagactgagcgaagagagcgtgaacaacgacatcagcagctggacaaagggcagatcaggcgaggctctgagcctgctgaagaagaggtttagccacagacctgtgcaagagaagttcgtgtgcctgaactgcggcttcgagacacacgccgatgaacaggctgccctgaacattgccagaagctggctgttcctgagaagccaagagtacaagaagtaccagaccaacaagaccaccggcaacaccgacaagagggcctttgtggaaacctggcagagcttctacagaaaaaagctgaaagaagtctggaagcccgccgtgactagtccaaaaaagaagagaaaggta

SEQ ID NO: 271 - DNA, 2988 bp, Artificial Sequence
  CasX variant
atggccccaaagaagaagcggaaggtctctagacaagagatcaagagaatcaacaagatcagaaggagactggtcaaggacagcaacacaaagaaggccggcaagacaggccccatgaaaaccctgctcgtcagagtgatgacccctgacctgagagagcggctggaaaacctgagaaagaagcccgagaacatccctcagcctatcagcaacaccagcagggccaacctgaacaagctgctgaccgactacaccgagatgaagaaagccatcctgcacgtgtactgggaagagttccagaaagaccccgtgggcctgatgagcagagttgctcagcccgctcctaagaacatcgaccagagaaagctgatccccgtgaaggacggcaacgagagactgacctctagcggctttgcctgcagccagtgttgccagcctctgtacgtgtacaagctggaacaagtgaacgacaagggcaagccccacaccaactacttcggcagatgcaacgtgtccgagcacgagaggctgatcctgctgtctcctcacaagcccgaggccaacgatgagctggtcacatacagcctgggcaagttcggacagagagccctggacttctacagcatccacgtgaccaaagaaagcacacaccccgtgaagcccctggctcagatcgccggcaatagatacgcctctggacctgtgggcaaagccctgtccgatgcctgcatgggaacaatcgccagcttcctgagcaagtaccaggacatcatcatcgagcaccagaaggtggtcaagggcaaccagaagagactggaaagcctgagggagctggccggcaaagagaacctggaataccccagcgtgaccctgcctcctcagcctcacacaaaagaaggcgtggacgcctacaacgaagtgatcgccagagtgagaatgtgggtcaacctgaacctgtggcagaagctgaaactgtccagggacgacgccaagcctctgctgagactgaagggcttccctagcttccctctggtggaaagacaggccaatgaagtggattggtgggacatggtctgcaacgtgaagaagctgatcaacgagaagaaagaggatggcaaggttttctggcagaacctggccggctacaagagacaagaagccctgaggccttacctgagcagcgaagaggaccggaagaagggcaagaagttcgccagataccagctgggcgacctgctgaagcacctggaaaagaagcacggcgaggactggggcaaagtgtacgatgaggcctgggagagaatcgacaagaaggtggaaggcctgagcaagcacattaagctggaagaggaaagaaggagcgaggacgcccaatctaaagccgctctgaccgattggctgagagccaaggccagctttgtgatcgagggcctgaaagaggccgacaaggacgagttctgcagatgcgagctgaagctgcagaagtggtacggcgatctgagaggcaagcccttcgccattgaggccgagaacagcatcctggacatcagcggcttcagcaagcagtacaactgcgccttcatttggcagaaagacggcgtcaagaaactgaacctgtacctgatcatcaattacttcaaaggcggcaagctgcggttcaagaagatcaaacccgaggccttcgaggctaacagattctacaccgtgatcaacaaaaagtccggcgagatcgtgcccatggaagtgaacttcaacttcgacgaccccaacctgattatcctgcctctggccttcggcaagagacagggcagagagttcatctggaacgatctgctgagcctggaaaccggctctctgaagctggccaatggcagagtgatcgagaaaaccctgtacaacaggagaaccagacaggacgagcctgctctgtttgtggccctgaccttcgagagaagagaggtgctggacagcagcaacatcaagcccatgaacctgatcggcgtggaccggggcgagaatatccctgctgtgatcgccctgacagaccctgaaggatgcccactgagcagattcaaggactccctgggcaaccctacacacatcctgagaatcggcgagagctacaaagagaagcagaggacaatccaggccaagaaagaggtggaacagagaagagccggcggatactctaggaagtacgccagcaaggccaagaatctggccgacgacatggtccgaaacaccgccagagatctgctgtactacgccgtgacacaggacgccatgctgatcttcgagaatctgagcagaggcttcggccggcagggcaagagaacctttatggccgagaggcagtacaccagaatggaagattggctcacagctaaactggcctacgagggactgagcaagacctacctgtccaaaacactggcccagtatacctccaagacctgcagcaattgcggcttcaccatcaccagcgccgactacgacagagtgctggaaaagctcaagaaaaccgccaccggctggatgaccaccatcaacggcaaagagctgaaggttgagggccagatcacctactacaacaggaggaagaggcagaacgtcgtgaaggatctgagcgtggaactggacagactgagcgaagagagcgtgaacaacgacatcagcagctggacaaagggcagatcaggcgaggctctgagcctgctgaagaagaggtttagccacagacctgtgcaagagaagttcgtgtgcctgaactgcggcttcgagacacacgccgatgaacaggctgccctgaacattgccagaagctggctgttcctgagaagccaagagtacaagaagtaccagaccaacaagaccaccggcaacaccgacaagagggcctttgtggaaacctggcagagcttctacagaaaaaagctgaaagaagtctggaagcccgccgtgactagtccaaaaaagaagagaaaggta

SEQ ID NO: 272 - DNA, 2988 bp, Artificial Sequence
  CasX variant
atggccccaaagaagaagcggaaggtctctagacaagagatcaagagaatcaacaagatcagaaggagactggtcaaggacagcaacacaaagaaggccggcaagacaggccccatgaaaaccctgctcgtcagagtgatgacccctgacctgagagagcggctggaaaacctgagaaagaagcccgagaacatccctcagcctatcagcaacaccagcagggccaacctgaacaagctgctgaccgactacaccgagatgaagaaagccatcctgcacgtgtactgggaagagttccagaaagaccccgtgggcctgatgagcagagttgctcagcccgctcctaagaacatcgaccagagaaagctgatccccgtgaaggacggcaacgagagactgacctctagcggctttgcctgcagccagtgttgccagcctctgtacgtgtacaagctggaacaagtgaacgacaagggcaagccccacaccaactacttcggcagatgcaacgtgtccgagcacgagaggctgatcctgctgtctcctcacaagcccgaggccaacgatgagctggtcacatacagcctgggcaagttcggacagagagccctggacttctacagcatccacgtgaccaaagaaagcacacaccccgtgaagcccctggctcagatcgccggcaatagatacgcctctggacctgtgggcaaagccctgtccgatgcctgcatgggaacaatcgccagcttcctgagcaagtaccaggacatcatcatcgagcaccagaaggtggtcaagggcaaccagaagagactggaaagcctgagggagctggccggcaaagagaacctggaataccccagcgtgaccctgcctcctcagcctcacacaaaagaaggcgtggacgcctacaacgaagtgatcgccagagtgagaatgtgggtcaacctgaacctgtggcagaagctgaaactgtccagggacgacgccaagcctctgctgagactgaagggcttccctagcttccctctggtggaaagacaggccaatgaagtggattggtgggacatggtctgcaacgtgaagaagctgatcaacgagaagaaagaggatggcaaggttttctggcagaacctggccggctacaagagacaagaagccctgaggccttacctgagcagcgaagaggaccggaagaagggcaagaagttcgccagataccagctgggcgacctgctgctgcacctggaaaagaagcacggcgaggactggggcaaagtgtacgatgaggcctgggagagaatcgacaagaaggtggaaggcctgagcaagcacattaagctggaagaggaaagaaggagcgaggacgcccaatctaaagccgctctgaccgattggctgagagccaaggccagctttgtgatcgagggcctgaaagaggccgacaaggacgagttctgcagatgcgagctgaagctgcagaagtggtacggcgatctgagaggcaagcccttcgccattgaggccgagaacagcatcctggacatcagcggcttcagcaagcagtacaactgcgccttcatttggcagaaagacggcgtcaagaaactgaacctgtacctgatcatcaattacttcaaaggcggcaagctgcggttcaagaagatcaaacccgaggccttcgaggctaacagattctacaccgtgatcaacaaaaagtccggcgagatcgtgcccatggaagtgaacttcaacttcgacgaccccaacctgattatcctgcctctggccttcggcaagagacagggcagagagttcatctggaacgatctgctgagcctggaaaccggctctctgaagctggccaatggcagagtgatcgagaaaaccctgtacaacaggagaaccagacaggacgagcctgctctgtttgtggccctgaccttcgagagaagagaggtgctggacagcagcaacatcaagcccatgaacctgatcggcgtggaccggggcgagaatatccctgctgtgatcgccctgacagaccctgaaggatgcccactgagcagattcaaggactccctgggcaaccctacacacatcctgagaatcggcgagagctacaaagagaagcagaggacaatccaggccaagaaagaggtggaacagagaagagccggcggatactctaggaagtacgccagcaaggccaagaatctggccgacgacatggtccgaaacaccgccagagatctgctgtactacgccgtgacacaggacgccatgctgatcttcgagaatctgagcagaggcttcggccggcagggcaagagaacctttatggccgagaggcagtacaccagaatggaagattggctcacagctaaactggcctacgagggactgagcaagacctacctgtccaaaacactggcccagtatacctccaagacctgcagcaattgcggcttcaccatcaccagcgccgactacgacagagtgctggaaaagctcaagaaaaccgccaccggctggatgaccaccatcaacggcaaagagctgaaggttgagggccagatcacctactacaacaggtacaagaggcagaacgtcgtgaaggatctgagcgtggaactggacagactgagcgaagagagcgtgaacaacgacatcagcagctggacaaagggcagatcaggcgaggctctgagcctgctgaagaagaggtttagccacagacctgtgcaagagaagttcgtgtgcctgaactgcggcttcgagacacacgccgatgaacaggctgccctgaacattgccagaagctggctgttcctgagaagccaagagtacaagaagtaccagaccaacaagaccaccggcaacaccgacaagagggcctttgtggaaacctggcagagcttctacagaaaaaagctgaaagaagtctggaagcccgccgtgactagtccaaaaaagaagagaaaggta

SEQ ID NO: 273 - DNA, 2991 bp, Artificial Sequence
  CasX variant
atggccccaaagaagaagcggaaggtctctagacaagagatcaagagaatcaacaagatcagaaggagactggtcaaggacagcaacacaaagaaggccggcaagacaggccccatgaaaaccctgctcgtcagagtgatgacccctgacctgagagagcggctggaaaacctgagaaagaagcccgagaacatccctcagcctatcagcaacaccagcagggccaacctgaacaagctgctgaccgactacaccgagatgaagaaagccatcctgcacgtgtactgggaagagttccagaaagaccccgtgggcctgatgagcagagttgctcagcctgccagcaagaagatcgaccagaacaagctgaagcccgagatggacgagaagggcaatctgaccacagccggctttgcctgctctcagtgtggccagcctctgttcgtgtacaagctggaacaggtgtccgagaaaggcaaggcctacaccaactacttcggcagatgtaacgtggccgagcacgagaagctgattctgctggcccagctgaaacctgagaaggactctgatgaggccgtgacctacagcctgggcaagtttggacagagagccctggacttctacagcatccacgtgaccaaagaaagcacacaccccgtgaagcccctggctcagatcgccggcaatagatacgcctctggacctgtgggcaaagccctgtccgatgcctgcatgggaacaatcgccagcttcctgagcaagtaccaggacatcatcatcgagcaccagaaggtggtcaagggcaaccagaagagactggaaagcctgagggagctggccggcaaagagaacctggaataccccagcgtgaccctgcctcctcagcctcacacaaaagaaggcgtggacgcctacaacgaagtgatcgccagagtgagaatgtgggtcaacctgaacctgtggcagaagctgaaactgtccagggacgacgccaagcctctgctgagactgaagggcttccctagcttccctctggtggaaagacaggccaatgaagtggattggtgggacatggtctgcaacgtgaagaagctgatcaacgagaagaaagaggatggcaaggttttctggcagaacctggccggctacaagagacaagaagccctgaggccttacctgagcagcgaagaggaccggaagaagggcaagaagttcgccagataccagttcggcgacctgctgctgcacctggaaaagaagcacggcgaggactggggcaaagtgtacgatgaggcctgggagagaatcgacaagaaggtggaaggcctgagcaagcacattaagctggaagaggaaagaaggagcgaggacgcccaatctaaagccgctctgaccgattggctgagagccaaggccagctttgtgatcgagggcctgaaagaggccgacaaggacgagttctgcagatgcgagctgaagctgcagaagtggtacggcgatctgagaggcaagcccttcgccattgaggccgagaacagcatcctggacatcagcggcttcagcaagcagtacaactgcgccttcatttggcagaaagacggcgtcaagaaactgaacctgtacctgatcatcaattacttcaaaggcggcaagctgcggttcaagaagatcaaacccgaggccttcgaggctaacagattctacaccgtgatcaacaaaaagtccggcgagatcgtgcccatggaagtgaacttcaacttcgacgaccccaacctgattatcctgcctctggccttcggcaagagacagggcagagagttcatctggaacgatctgctgagcctggaaaccggctctctgaagctggccaatggcagagtgatcgagaaaaccctgtacaacaggagaaccagacaggacgagcctgctctgtttgtggccctgaccttcgagagaagagaggtgctggacagcagcaacatcaagcccatgaacctgatcggcatcgaccggggcgagaatatccctgctgtgatcgccctgacagaccctgaaggatgcccactgagcagattcaaggactccctgggcaaccctacacacatcctgagaatcggcgagagctacaaagagaagcagaggacaatccaggccaagaaagaggtggaacagagaagagccggcggatactctaggaagtacgccagcaaggccaagaatctggccgacgacatggtccgaaacaccgccagagatctgctgtactacgccgtgacacaggacgccatgctgatcttcgagaatctgagcagaggcttcggccggcagggcaagagaacctttatggccgagaggcagtacaccagaatggaagattggctcacagctaaactggcctacgagggactgagcaagacctacctgtccaaaacactggcccagtatacctccaagacctgcagcaattgcggcttcaccatcaccagcgccgactacgacagagtgctggaaaagctcaagaaaaccgccaccggctggatgaccaccatcaacggcaaagagctgaaggttgagggccagatcacctactacaacaggtacaagaggcagaacgtcgtgaaggatctgagcgtggaactggacagactgagcgaagagagcgtgaacaacgacatcagcagctggacaaagggcagatcaggcgaggctctgagcctgctgaagaagaggtttagccacagacctgtgcaagagaagttcgtgtgcctgaactgcggcttcgagacacacgccgatgaacaggctgccctgaacattgccagaagctggctgttcctgagaagccaagagtacaagaagtaccagaccaacaagaccaccggcaacaccgacaagagggcctttgtggaaacctggcagagcttctacagaaaaaagctgaaagaagtctggaagcccgccgtgactagtccaaaaaagaagagaaaggta

SEQ ID NO: 274 - DNA, 2991 bp, Artificial Sequence
  CasX variant
atggccccaaagaagaagcggaaggtctctagacaagagatcaagagaatcaacaagatcagaaggagactggtcaaggacagcaacacaaagaaggccggcaagacaggccccatgaaaaccctgctcgtcagagtgatgacccctgacctgagagagcggctggaaaacctgagaaagaagcccgagaacatccctcagcctatcagcaacaccagcagggccaacctgaacaagctgctgaccgactacaccgagatgaagaaagccatcctgcacgtgtactgggaagagttccagaaagaccccgtgggcctgatgagcagagttgctcagcctgccagcaagaagatcgaccagaacaagctgaagcccgagatggacgagaagggcaatctgaccacagccggctttgcctgctctcagtgtggccagcctctgttcgtgtacaagctggaacaggtgtccgagaaaggcaaggcctacaccaactacttcggcagatgtaacgtggccgagcacgagaagctgattctgctggcccagctgaaacctgagaaggactctgatgaggccgtgacctacagcctgggcaagtttggacagagagccctggacttctacagcatccacgtgaccaaagaaagcacacaccccgtgaagcccctggctcagatcgccggcaatagatacgcctctggacctgtgggcaaagccctgtccgatgcctgcatgggaacaatcgccagcttcctgagcaagtaccaggacatcatcatcgagcaccagaaggtggtcaagggcaaccagaagagactggaaagcctgagggagctggccggcaaagagaacctggaataccccagcgtgaccctgcctcctcagcctcacacaaaagaaggcgtggacgcctacaacgaagtgatcgccagagtgagaatgtgggtcaacctgaacctgtggcagaagctgaaactgtccagggacgacgccaagcctctgctgagactgaagggcttccctagcttccctctggtggaaagacaggccaatgaagtggattggtgggacatggtctgcaacgtgaagaagctgatcaacgagaagaaagaggatggcaaggttttctggcagaacctggccggctacaagagacaagaagccctgaggccttacctgagcagcgaagaggaccggaagaagggcaagaagttcgccagataccagctgggcgacctgctgctgcacctggaaaagaagcacggcgaggactggggcaaagtgtacgatgaggcctgggagagaatcgacaagaaggtggaaggcctgagcaagcacattaagctggaagaggaaagaaggagcgaggacgcccaatctaaagccgctctgaccgattggctgagagccaaggccagctttgtgatcgagggcctgaaagaggccgacaaggacgagttctgcagatgcgagctgaagctgcagaagtggtacggcgatctgagaggcaagcccttcgccattgaggccgagaacagcatcctggacatcagcggcttcagcaagcagtacaactgcgccttcatttggcagaaagacggcgtcaagaaactgaacctgtacctgatcatcaattacttcaaaggcggcaagctgcggttcaagaagatcaaacccgaggccttcgaggctaacagattctacaccgtgatcaacaaaaagtccggcgagatcgtgcccatggaagtgaacttcaacttcgacgaccccaacctgattatcctgcctctggccttcggcaagagacagggcagagagttcatctggaacgatctgctgagcctggaaaccggctctctgaagctggccaatggcagagtgatcgagaaaaccctgtacaacaggagaaccagacaggacgagcctgctctgtttgtggccctgaccttcgagagaagagaggtgctggacagcagcaacatcaagcccatgaacctgatcggcgtggaccggggcgagaatatccctgctgtgatcgccctgacagaccctgaaggatgcccactgagcagattcaaggactccctgggcaaccctacacacatcctgagaatcggcgagagctacaaagagaagcagaggacaatccaggccaagaaagaggtggaacagagaagagccggcggatactctaggaagtacgccagcaaggccaagaatctggccgacgacatggtccgaaacaccgccagagatctgctgtactacgccgtgacacaggacgccatgctgatcttcgagaatctgagcagaggcttcggccggcagggcaagagaacctttatggccgagaggcagtacaccagaatggaagattggctcacagctaaactggcctacgagggactgagcaagacctacctgtccaaaacactggcccagtatacctccaagacctgcagcaattgcggcttcaccatcaccagcgccgactacgacagagtgctggaaaagctcaagaaaaccgccaccggctggatgaccaccatcaacggcaaagagctgaaggttgagggccagatcacctactacaacaggaggaagaggcagaacgtcgtgaaggatctgagcgtggaactggacagactgagcgaagagagcgtgaacaacgacatcagcagctggacaaagggcagatcaggcgaggctctgagcctgctgaagaagaggtttagccacagacctgtgcaagagaagttcgtgtgcctgaactgcggcttcgagacacacgccgatgaacaggctgccctgaacattgccagaagctggctgttcctgagaagccaagagtacaagaagtaccagaccaacaagaccaccggcaacaccgacaagagggcctttgtggaaacctggcagagcttctacagaaaaaagctgaaagaagtctggaagcccgccgtgactagtccaaaaaagaagagaaaggta

SEQ ID NO: 275 - DNA, 2991 bp, Artificial Sequence
  CasX variant
atggccccaaagaagaagcggaaggtctctagacaagagatcaagagaatcaacaagatcagaaggagactggtcaaggacagcaacacaaagaaggccggcaagacaggccccatgaaaaccctgctcgtcagagtgatgacccctgacctgagagagcggctggaaaacctgagaaagaagcccgagaacatccctcagcctatcagcaacaccagcagggccaacctgaacaagctgctgaccgactacaccgagatgaagaaagccatcctgcacgtgtactgggaagagttccagaaagaccccgtgggcctgatgagcagagttgctcagcctgccagcaagaagatcgaccagaacaagctgaagcccgagatggacgagaagggcaatctgaccacagccggctttgcctgctctcagtgtggccagcctctgttcgtgtacaagctggaacaggtgtccgagaaaggcaaggcctacaccaactacttcggcagatgtaacgtggccgagcacgagaagctgattctgctggcccagctgaaacctgagaaggactctgatgaggccgtgacctacagcctgggcaagtttggacagagagccctggacttctacagcatccacgtgaccaaagaaagcacacaccccgtgaagcccctggctcagatcgccggcaatagatacgcctctggacctgtgggcaaagccctgtccgatgcctgcatgggaacaatcgccagcttcctgagcaagtaccaggacatcatcatcgagcaccagaaggtggtcaagggcaaccagaagagactggaaagcctgagggagctggccggcaaagagaacctggaataccccagcgtgaccctgcctcctcagcctcacacaaaagaaggcgtggacgcctacaacgaagtgatcgccagagtgagaatgtgggtcaacctgaacctgtggcagaagctgaaactgtccagggacgacgccaagcctctgctgagactgaagggcttccctagcttccctctggtggaaagacaggccaatgaagtggattggtgggacatggtctgcaacgtgaagaagctgatcaacgagaagaaagaggatggcaaggttttctggcagaacctggccggctacaagagacaagaagccctgaggccttacctgagcagcgaagaggaccggaagaagggcaagaagttcgccagataccagctgggcgacctgctgaagcacctggaaaagaagcacggcgaggactggggcaaagtgtacgatgaggcctgggagagaatcgacaagaaggtggaaggcctgagcaagcacattaagctggaagaggaaagaaggagcgaggacgcccaatctaaagccgctctgaccgattggctgagagccaaggccagctttgtgatcgagggcctgaaagaggccgacaaggacgagttctgcagatgcgagctgaagctgcagaagtggtacggcgatctgagaggcaagcccttcgccattgaggccgagaacagcatcctggacatcagcggcttcagcaagcagtacaactgcgccttcatttggcagaaagacggcgtcaagaaactgaacctgtacctgatcatcaattacttcaaaggcggcaagctgcggttcaagaagatcaaacccgaggccttcgaggctaacagattctacaccgtgatcaacaaaaagtccggcgagatcgtgcccatggaagtgaacttcaacttcgacgaccccaacctgattatcctgcctctggccttcggcaagagacagggcagagagttcatctggaacgatctgctgagcctggaaaccggctctctgaagctggccaatggcagagtgatcgagaaaaccctgtacaacaggagaaccagacaggacgagcctgctctgtttgtggccctgaccttcgagagaagagaggtgctggacagcagcaacatcaagcccatgaacctgatcggcgtggaccggggcgagaatatccctgctgtgatcgccctgacagaccctgaaggatgcccactgagcagattcaaggactccctgggcaaccctacacacatcctgagaatcggcgagagctacaaagagaagcagaggacaatccaggccaagaaagaggtggaacagagaagagccggcggatactctaggaagtacgccagcaaggccaagaatctggccgacgacatggtccgaaacaccgccagagatctgctgtactacgccgtgacacaggacgccatgctgatcttcgagaatctgagcagaggcttcggccggcagggcaagagaacctttatggccgagaggcagtacaccagaatggaagattggctcacagctaaactggcctacgagggactgagcaagacctacctgtccaaaacactggcccagtatacctccaagacctgcagcaattgcggcttcaccatcaccagcgccgactacgacagagtgctggaaaagctcaagaaaaccgccaccggctggatgaccaccatcaacggcaaagagctgaaggttgagggccagatcacctactacaacaggaggaagaggcagaacgtcgtgaaggatctgagcgtggaactggacagactgagcgaagagagcgtgaacaacgacatcagcagctggacaaagggcagatcaggcgaggctctgagcctgctgaagaagaggtttagccacagacctgtgcaagagaagttcgtgtgcctgaactgcggcttcgagacacacgccgatgaacaggctgccctgaacattgccagaagctggctgttcctgagaagccaagagtacaagaagtaccagaccaacaagaccaccggcaacaccgacaagagggcctttgtggaaacctggcagagcttctacagaaaaaagctgaaagaagtctggaagcccgccgtgactagtccaaaaaagaagagaaaggta

SEQ ID NO: 276 - DNA, 2991 bp, Artificial Sequence
  CasX variant
atggccccaaagaagaagcggaaggtctctagacaagagatcaagagaatcaacaagatcagaaggagactggtcaaggacagcaacacaaagaaggccggcaagacaggccccatgaaaaccctgctcgtcagagtgatgacccctgacctgagagagcggctggaaaacctgagaaagaagcccgagaacatccctcagcctatcagcaacaccagcagggccaacctgaacaagctgctgaccgactacaccgagatgaagaaagccatcctgcacgtgtactgggaagagttccagaaagaccccgtgggcctgatgagcagagttgctcagcctgccagcaagaagatcgaccagaacaagctgaagcccgagatggacgagaagggcaatctgaccacagccggctttgcctgctctcagtgtggccagcctctgttcgtgtacaagctggaacaggtgtccgagaaaggcaaggcctacaccaactacttcggcagatgtaacgtggccgagcacgagaagctgattctgctggcccagctgaaacctgagaaggactctgatgaggccgtgacctacagcctgggcaagtttggacagagagccctggacttctacagcatccacgtgaccaaagaaagcacacaccccgtgaagcccctggctcagatcgccggcaatagatacgcctctggacctgtgggcaaagccctgtccgatgcctgcatgggaacaatcgccagcttcctgagcaagtaccaggacatcatcatcgagcaccagaaggtggtcaagggcaaccagaagagactggaaagcctgagggagctggccggcaaagagaacctggaataccccagcgtgaccctgcctcctcagcctcacacaaaagaaggcgtggacgcctacaacgaagtgatcgccagagtgagaatgtgggtcaacctgaacctgtggcagaagctgaaactgtccagggacgacgccaagcctctgctgagactgaagggcttccctagcttccctctggtggaaagacaggccaatgaagtggattggtgggacatggtctgcaacgtgaagaagctgatcaacgagaagaaagaggatggcaaggttttctggcagaacctggccggctacaagagacaagaagccctgaggccttacctgagcagcgaagaggaccggaagaagggcaagaagttcgccagataccagctgggcgacctgctgctgcacctggaaaagaagcacggcgaggactggggcaaagtgtacgatgaggcctgggagagaatcgacaagaaggtggaaggcctgagcaagcacattaagctggaagaggaaagaaggagcgaggacgcccaatctaaagccgctctgaccgattggctgagagccaaggccagctttgtgatcgagggcctgaaagaggccgacaaggacgagttctgcagatgcgagctgaagctgcagaagtggtacggcgatctgagaggcaagcccttcgccattgaggccgagaacagcatcctggacatcagcggcttcagcaagcagtacaactgcgccttcatttggcagaaagacggcgtcaagaaactgaacctgtacctgatcatcaattacttcaaaggcggcaagctgcggttcaagaagatcaaacccgaggccttcgaggctaacagattctacaccgtgatcaacaaaaagtccggcgagatcgtgcccatggaagtgaacttcaacttcgacgaccccaacctgattatcctgcctctggccttcggcaagagacagggcagagagttcatctggaacgatctgctgagcctggaaaccggctctctgaagctggccaatggcagagtgatcgagaaaaccctgtacaacaggagaaccagacaggacgagcctgctctgtttgtggccctgaccttcgagagaagagaggtgctggacagcagcaacatcaagcccatgaacctgatcggcgtggaccggggcgagaatatccctgctgtgatcgccctgacagaccctgaaggatgcccactgagcagattcaaggactccctgggcaaccctacacacatcctgagaatcggcgagagctacaaagagaagcagaggacaatccaggccaagaaagaggtggaacagagaagagccggcggatactctaggaagtacgccagcaaggccaagaatctggccgacgacatggtccgaaacaccgccagagatctgctgtactacgccgtgacacaggacgccatgctgatcttcgagaatctgagcagaggcttcggccggcagggcaagagaacctttatggccgagaggcagtacaccagaatggaagattggctcacagctaaactggcctacgagggactgagcaagacctacctgtccaaaacactggcccagtatacctccaagacctgcagcaattgcggcttcaccatcaccagcgccgactacgacagagtgctggaaaagctcaagaaaaccgccaccggctggatgaccaccatcaacggcaaagagctgaaggttgagggccagatcacctactacaacaggtacaagaggcagaacgtcgtgaaggatctgagcgtggaactggacagactgagcgaagagagcgtgaacaacgacatcagcagctggacaaagggcagatcaggcgaggctctgagcctgctgaagaagaggtttagccacagacctgtgcaagagaagttcgtgtgcctgaactgcggcttcgagacacacgccgatgaacaggctgccctgaacattgccagaagctggctgttcctgagaagccaagagtacaagaagtaccagaccaacaagaccaccggcaacaccgacaagagggcctttgtggaaacctggcagagcttctacagaaaaaagctgaaagaagtctggaagcccgccgtgactagtccaaaaaagaagagaaaggta

SEQ ID NO: 277 - DNA, 2991 bp, Artificial Sequence
  CasX variant
atggccccaaagaagaagcggaaggtctctagacaagagatcaagagaatcaacaagatcagaaggagactggtcaaggacagcaacacaaagaaggccggcaagacaggccccatgaaaaccctgctcgtcagagtgatgacccctgacctgagagagcggctggaaaacctgagaaagaagcccgagaacatccctcagcctatcagcaacaccagcagggccaacctgaacaagctgctgaccgactacaccgagatgaagaaagccatcctgcacgtgtactgggaagagttccagaaagaccccgtgggcctgatgagcagagttgctcagcctgccagcaagaagatcgaccagaacaagctgaagcccgagatggacgagaagggcaatctgaccacagccggctttgcctgctctcagtgtggccagcctctgttcgtgtacaagctggaacaggtgtccgagaaaggcaaggcctacaccaactacttcggcagatgtaacgtggccgagcacgagaagctgattctgctggcccagctgaaacctgagaaggactctgatgaggccgtgacctacagcctgggcaagtttggacagagagccctggacttctacagcatccacgtgaccagggagagcaatcaccctgtgaagcccctggaacagatcggcggcaatagctgtgcctctggacctgtgggaaaagccctgagcgacgcctgtatgggagccgtggcatccttcctgaccaagtaccaggacatcatcctggaacaccagaaagtgatcaagaagaacgagaaaagactggccaacctcaaggatatcgccagcgctaacggcctggcctttcctaagatcaccctgcctccacagcctcacaccaaagagggcatcgaggcctacaacaacgtggtggcccagatcgtgatttgggtcaacctgaatctgtggcagaagctgaagatcggcagggacgaagccaagccactgcagagactgaagggcttccctagcttccctctggtggaaagacaggccaatgaagtggattggtgggacatggtctgcaacgtgaagaagctgatcaacgagaagaaagaggatggcaaggttttctggcagaacctggccggctacaagagacaagaagccctgaggccttacctgagcagcgaagaggaccggaagaagggcaagaagttcgccagataccagctgggcgacctgctgctgcacctggaaaagaagcacggcgaggactggggcaaagtgtacgatgaggcctgggagagaatcgacaagaaggtggaaggcctgagcaagcacattaagctggaagaggaaagaaggagcgaggacgcccaatctaaagccgctctgaccgattggctgagagccaaggccagctttgtgatcgagggcctgaaagaggccgacaaggacgagttctgcagatgcgagctgaagctgcagaagtggtacggcgatctgagaggcaagcccttcgccattgaggccgagaacagcatcctggacatcagcggcttcagcaagcagtacaactgcgccttcatttggcagaaagacggcgtcaagaaactgaacctgtacctgatcatcaattacttcaaaggcggcaagctgcggttcaagaagatcaaacccgaggccttcgaggctaacagattctacaccgtgatcaacaaaaagtccggcgagatcgtgcccatggaagtgaacttcaacttcgacgaccccaacctgattatcctgcctctggccttcggcaagagacagggcagagagttcatctggaacgatctgctgagcctggaaaccggctctctgaagctggccaatggcagagtgatcgagaaaaccctgtacaacaggagaaccagacaggacgagcctgctctgtttgtggccctgaccttcgagagaagagaggtgctggacagcagcaacatcaagcccatgaacctgatcggcgtggaccggggcgagaatatccctgctgtgatcgccctgacagaccctgaaggatgcccactgagcagattcaaggactccctgggcaaccctacacacatcctgagaatcggcgagagctacaaagagaagcagaggacaatccaggccaagaaagaggtggaacagagaagagccggcggatactctaggaagtacgccagcaaggccaagaatctggccgacgacatggtccgaaacaccgccagagatctgctgtactacgccgtgacacaggacgccatgctgatcttcgagaatctgagcagaggcttcggccggcagggcaagagaacctttatggccgagaggcagtacaccagaatggaagattggctcacagctaaactggcctacgagggactgagcaagacctacctgtccaaaacactggcccagtatacctccaagacctgcagcaattgcggcttcaccatcaccagcgccgactacgacagagtgctggaaaagctcaagaaaaccgccaccggctggatgaccaccatcaacggcaaagagctgaaggttgagggccagatcacctactacaacaggtacaagaggcagaacgtcgtgaaggatctgagcgtggaactggacagactgagcgaagagagcgtgaacaacgacatcagcagctggacaaagggcagatcaggcgaggctctgagcctgctgaagaagaggtttagccacagacctgtgcaagagaagttcgtgtgcctgaactgcggcttcgagacacacgccgatgaacaggctgccctgaacattgccagaagctggctgttcctgagaagccaagagtacaagaagtaccagaccaacaagaccaccggcaacaccgacaagagggcctttgtggaaacctggcagagcttctacagaaaaaagctgaaagaagtctggaagcccgccgtgactagtccaaaaaagaagagaaaggta

SEQ ID NO: 278 - DNA, 22 bp, Artificial Sequence
  T7 promoter primer
gaaattaatacgactcactata

SEQ ID NO: 279 - DNA, 87 bp, Artificial Sequence
  sg2 backbone fwd primer
gaaattaatacgactcactataggtactggcgcttttatctcattactttgagagccatcaccagcgactatgtcgtatgggtaaag

SEQ ID NO: 280 - DNA, 78 bp, Artificial Sequence
  sg2 backbone rev primer
ctttgatgcttcttatttatcggatttctctccgataaataagcgctttacccatacgacatagtcgctggtgatggc

SEQ ID NO: 281 - DNA, 54 bp, Artificial Sequence
  sg2.7.37 spacer primer
cggagcgagacatctcggccctttgatgcttcttatttatcggatttctctccg

SEQ ID NO: 282 - DNA, 90 bp, Artificial Sequence
  sg32 backbone fwd primer
gaaattaatacgactcactataggtactggcgcttttatctcattactttgagagccatcaccagcgactatgtcgtatgggtaaagcgc

SEQ ID NO: 283 - DNA, 46 bp, Artificial Sequence
  sg32 backbone rev primer
ctttgatgcttccctccgaagagggcgctttacccatacgacatag

SEQ ID NO: 284 - DNA, 43 bp, Artificial Sequence
  sg32.7.37 spacer primer
cggagcgagacatctcggccctttgatgcttccctccgaagag

SEQ ID NO: 285 - DNA, 90 bp, Artificial Sequence
  sg64 backbone fwd primer
gaaattaatacgactcactataggtactggcgcctttatctcattactttgagagccatcaccagcgactatgtcgtatgggtaaagcgc

SEQ ID NO: 286 - DNA, 54 bp, Artificial Sequence
  sg64 backbone rev primer
ctttgatgcttcttacggaccgaagtccgtaagcgctttacccatacgacatag

SEQ ID NO: 287 - DNA, 45 bp, Artificial Sequence
  sg64.7.37 spacer primer
cggagcgagacatctcggccctttgatgcttcttacggaccgaag

SEQ ID NO: 288 - DNA, 87 bp, Artificial Sequence
  sg174 backbone fwd primer
gaaattaatacgactcactataactggcgcttttatctgattactttgagagccatcaccagcgactatgtcgtagtgggtaaagct

SEQ ID NO: 289 - DNA, 50 bp, Artificial Sequence
  sg174 backbone rev primer
ctttgatgctccctccgaagagggagctttacccactacgacatagtcgc

SEQ ID NO: 290 - DNA, 36 bp, Artificial Sequence
  sg174.7.37 spacer primer
cggagcgagacatctcggccctttgatgctccctcc

SEQ ID NO: 291 - RNA, 130 nt, Artificial Sequence
  sgRNA
gguacuggcgcuuuuaucucauuacuuugagagccaucaccagcgacuaugucguauggguaaagcgcuuauuuaucggagagaaauccgauaaauaagaagcaucaaagggccgagaugucucgcuccg

SEQ ID NO: 292 - RNA, 107 nt, Artificial Sequence
  sgRNA
gguacuggcgcuuuuaucucauuacuuugagagccaucaccagcgacuaugucguauggguaaagcgcccucuucggagggaagcaucaaagggccgagaugucucg

SEQ ID NO: 293 - RNA, 120 nt, Artificial Sequence
  sgRNA
gguacuggcgccuuuaucucauuacuuugagagccaucaccagcgacuaugucguauggguaaagcgcuuacggacuucgguccguaagaagcaucaaagggccgagaugucucgcuccg

SEQ ID NO: 294 - RNA, 109 nt, Artificial Sequence
  sgRNA
acuggcgcuuuuaucugauuacuuugagagccaucaccagcgacuaugucguaguggguaaagcucccucuucggagggagcaucaaagggccgagaugucucgcuccg

SEQ ID NO: 295 - DNA, 20 bp, Artificial Sequence
  spacer sequence
gaggaggacggcctggccga

SEQ ID NO: 296 - DNA, 20 bp, Artificial Sequence
  spacer sequence
accgctgcgccaaggtgcgg

SEQ ID NO: 297 - DNA, 20 bp, Artificial Sequence
  spacer sequence
gccaggccgtcctcctcgga

SEQ ID NO: 298 - DNA, 20 bp, Artificial Sequence
  spacer sequence
gtgctcgggtgcttcggcca

SEQ ID NO: 299 - DNA, 20 bp, Artificial Sequence
  spacer sequence
atggccttcttcctggcttc

SEQ ID NO: 300 - DNA, 20 bp, Artificial Sequence
  spacer sequence
gcaccaccacgtaggtgcca

SEQ ID NO: 301 - DNA, 20 bp, Artificial Sequence
  spacer sequence
tcctggcttcctggtgaaga

SEQ ID NO: 302 - DNA, 20 bp, Artificial Sequence
  spacer sequence
tggcttcctggtgaagatga

SEQ ID NO: 303 - DNA, 20 bp, Artificial Sequence
  spacer sequence
ccaggaagccaggaagaagg

SEQ ID NO: 304 - DNA, 20 bp, Artificial Sequence
  spacer sequence
tccttgcatggggccaggat

SEQ ID NO: 305 - DNA, 20 bp, Artificial Sequence
  spacer sequence
ggcggcaagttctgctcagc

SEQ ID NO: 306 - DNA, 20 bp, Artificial Sequence
  spacer sequence
tctccacgatcgtcagcgtg

SEQ ID NO: 307 - DNA, 20 bp, Artificial Sequence
  spacer sequence
acgatcgtcagcgtgagtgc

SEQ ID NO: 308 - DNA, 20 bp, Artificial Sequence
  spacer sequence
ctctagcaatggatcgtggg

SEQ ID NO: 309 - DNA, 20 bp, Artificial Sequence
  spacer sequence
caaacaaatgtgtcacaaag

SEQ ID NO: 310 - DNA, 20 bp, Artificial Sequence
  spacer sequence
gatgtgtatatcacagacaa

SEQ ID NO: 311 - DNA, 20 bp, Artificial Sequence
  spacer sequence
ggaataatgctgttgttgaa

SEQ ID NO: 312 - DNA, 20 bp, Artificial Sequence
  spacer sequence
aaatccagtgacaagtctgt

SEQ ID NO: 313 - DNA, 20 bp, Artificial Sequence
  spacer sequence
aggccacagcactgttgctc

SEQ ID NO: 314 - DNA, 20 bp, Artificial Sequence
  spacer sequence
agaagacaccttcttcccca

SEQ ID NO: 315 - DNA, 20 bp, Artificial Sequence
  spacer sequence
tccccagcccaggtaagggc

SEQ ID NO: 316 - DNA, 20 bp, Artificial Sequence
  spacer sequence
ccagcccaggtaagggcagc

SEQ ID NO: 317 - DNA, 20 bp, Artificial Sequence
  spacer sequence
agtccctcaagtccttccag

SEQ ID NO: 318 - DNA, 20 bp, Artificial Sequence
  spacer sequence
agcagcagcagcagcagcag

SEQ ID NO: 319 - DNA, 20 bp, Artificial Sequence
  spacer sequence
tcagccgccgccgcaggcac

SEQ ID NO: 320 - DNA, 20 bp, Artificial Sequence
  spacer sequence
agggtcgccatggcggtctc

SEQ ID NO: 321 - DNA, 20 bp, Artificial Sequence
  spacer sequence
tcagcttttccagggtcgcc

SEQ ID NO: 322 - DNA, 20 bp, Artificial Sequence
  spacer sequence
gccgcagccgcccccgccgc

SEQ ID NO: 323 - DNA, 20 bp, Artificial Sequence
  spacer sequence
gccacagccgggccgggtgg

SEQ ID NO: 324 - DNA, 20 bp, Artificial Sequence
  spacer sequence
tcagccacagccgggccggg

SEQ ID NO: 325 - DNA, 20 bp, Artificial Sequence
  spacer sequence
cggtcggtgcagcggctcct

SEQ ID NO: 326 - DNA, 20 bp, Artificial Sequence
  spacer sequence
ccacaccttcactggtccat

SEQ ID NO: 327 - DNA, 20 bp, Artificial Sequence
  spacer sequence
taaaggaaagtaatggacca

SEQ ID NO: 328 - DNA, 20 bp, Artificial Sequence
  spacer sequence
ctggtccattactttccttt

SEQ ID NO: 329 - DNA, 20 bp, Artificial Sequence
  spacer sequence
atgttcatgagtttggagat

SEQ ID NO: 330 - DNA, 20 bp, Artificial Sequence
  spacer sequence
tgagtttggagataatacag

SEQ ID NO: 331 - DNA, 20 bp, Artificial Sequence
  spacer sequence
atagacacatcggccacacc

SEQ ID NO: 332 - DNA, 20 bp, Artificial Sequence
  spacer sequence
ttattaggcatgttggagac

SEQ ID NO: 333 - DNA, 20 bp, Artificial Sequence
  spacer sequence
caggagaccattgcatcatt

SEQ ID NO: 334 - DNA, 20 bp, Artificial Sequence
  spacer sequence
ggcctggaggctatccagcg

SEQ ID NO: 335 - DNA, 20 bp, Artificial Sequence
  spacer sequence
ggccgagatgtctcgctccg

SEQ ID NO: 336 - DNA, 20 bp, Artificial Sequence
  spacer sequence
aggccagaaagagagagtag

SEQ ID NO: 337 - DNA, 20 bp, Artificial Sequence
  spacer sequence
cgctggatagcctccaggcc

SEQ ID NO: 338 - DNA, 20 bp, Artificial Sequence
  spacer sequence
tgaagctgacagcattcggg

SEQ ID NO: 339 - RNA, 20 nt, Artificial Sequence
  spacer sequence
gaggaggacggccuggccga

SEQ ID NO: 340 - RNA, 20 nt, Artificial Sequence
  spacer sequence
accgcugcgccaaggugcgg

SEQ ID NO: 341 - RNA, 20 nt, Artificial Sequence
  spacer sequence
gccaggccguccuccucgga

SEQ ID NO: 342 - RNA, 20 nt, Artificial Sequence
  spacer sequence
gugcucgggugcuucggcca

SEQ ID NO: 343 - RNA, 20 nt, Artificial Sequence
  spacer sequence
auggccuucuuccuggcuuc

SEQ ID NO: 344 - RNA, 20 nt, Artificial Sequence
  spacer sequence
gcaccaccacguaggugcca

SEQ ID NO: 345 - RNA, 20 nt, Artificial Sequence
  spacer sequence
uccuggcuuccuggugaaga

SEQ ID NO: 346 - RNA, 20 nt, Artificial Sequence
  spacer sequence
uggcuuccuggugaagauga

SEQ ID NO: 347 - RNA, 20 nt, Artificial Sequence
  spacer sequence
ccaggaagccaggaagaagg

SEQ ID NO: 348 - RNA, 20 nt, Artificial Sequence
  spacer sequence
uccuugcauggggccaggau

SEQ ID NO: 349 - RNA, 20 nt, Artificial Sequence
  spacer sequence
ggcggcaaguucugcucagc

SEQ ID NO: 350 - RNA, 20 nt, Artificial Sequence
  spacer sequence
ucuccacgaucgucagcgug

SEQ ID NO: 351 - RNA, 20 nt, Artificial Sequence
  spacer sequence
acgaucgucagcgugagugc

SEQ ID NO: 352 - RNA, 20 nt, Artificial Sequence
  spacer sequence
cucuagcaauggaucguggg

SEQ ID NO: 353 - RNA, 20 nt, Artificial Sequence
  spacer sequence
caaacaaaugugucacaaag

SEQ ID NO: 354 - RNA, 20 nt, Artificial Sequence
  spacer sequence
gauguguauaucacagacaa

SEQ ID NO: 355 - RNA, 20 nt, Artificial Sequence
  spacer sequence
ggaauaaugcuguuguugaa

SEQ ID NO: 356 - RNA, 20 nt, Artificial Sequence
  spacer sequence
aaauccagugacaagucugu

SEQ ID NO: 357 - RNA, 20 nt, Artificial Sequence
  spacer sequence
aggccacagcacuguugcuc

SEQ ID NO: 358 - RNA, 20 nt, Artificial Sequence
  spacer sequence
agaagacaccuucuucccca

SEQ ID NO: 359 - RNA, 20 nt, Artificial Sequence
  spacer sequence
uccccagcccagguaagggc

SEQ ID NO: 360 - RNA, 20 nt, Artificial Sequence
  spacer sequence
ccagcccagguaagggcagc

SEQ ID NO: 361 - RNA, 20 nt, Artificial Sequence
  spacer sequence
agucccucaaguccuuccag

SEQ ID NO: 362 - RNA, 20 nt, Artificial Sequence
  spacer sequence
agcagcagcagcagcagcag

SEQ ID NO: 363 - RNA, 20 nt, Artificial Sequence
  spacer sequence
ucagccgccgccgcaggcac

SEQ ID NO: 364 - RNA, 20 nt, Artificial Sequence
  spacer sequence
agggucgccauggcggucuc

SEQ ID NO: 365 - RNA, 20 nt, Artificial Sequence
  spacer sequence
ucagcuuuuccagggucgcc

SEQ ID NO: 366 - RNA, 20 nt, Artificial Sequence
  spacer sequence
gccgcagccgcccccgccgc

SEQ ID NO: 367 - RNA, 20 nt, Artificial Sequence
  spacer sequence
gccacagccgggccgggugg

SEQ ID NO: 368 - RNA, 20 nt, Artificial Sequence
  spacer sequence
ucagccacagccgggccggg

SEQ ID NO: 369 - RNA, 20 nt, Artificial Sequence
  spacer sequence
cggucggugcagcggcuccu

SEQ ID NO: 370 - RNA, 20 nt, Artificial Sequence
  spacer sequence
ccacaccuucacugguccau

SEQ ID NO: 371 - RNA, 20 nt, Artificial Sequence
  spacer sequence
uaaaggaaaguaauggacca

SEQ ID NO: 372 - RNA, 20 nt, Artificial Sequence
  spacer sequence
cugguccauuacuuuccuuu

SEQ ID NO: 373 - RNA, 20 nt, Artificial Sequence
  spacer sequence
auguucaugaguuuggagau

SEQ ID NO: 374 - RNA, 20 nt, Artificial Sequence
  spacer sequence
ugaguuuggagauaauacag

SEQ ID NO: 375 - RNA, 20 nt, Artificial Sequence
  spacer sequence
auagacacaucggccacacc

SEQ ID NO: 376 - RNA, 20 nt, Artificial Sequence
  spacer sequence
uuauuaggcauguuggagac

SEQ ID NO: 377 - RNA, 20 nt, Artificial Sequence
  spacer sequence
caggagaccauugcaucauu

SEQ ID NO: 378 - RNA, 20 nt, Artificial Sequence
  spacer sequence
ggccuggaggcuauccagcg

SEQ ID NO: 379 - RNA, 20 nt, Artificial Sequence
  spacer sequence
ggccgagaugucucgcuccg

SEQ ID NO: 380 - RNA, 20 nt, Artificial Sequence
  spacer sequence
aggccagaaagagagaguag

SEQ ID NO: 381 - RNA, 20 nt, Artificial Sequence
  spacer sequence
cgcuggauagccuccaggcc

SEQ ID NO: 382 - RNA, 20 nt, Artificial Sequence
  spacer sequence
ugaagcugacagcauucggg

SEQ ID NO: 383 - DNA, 60 bp, Artificial Sequence
  spacer target oligo
tgaagctgacagcattcgggccgagatgtctcgctccgtggccttagctgtgctcgcgct

SEQ ID NO: 384 - DNA, 60 bp, Artificial Sequence; identical to SEQ ID NO: 383
  spacer target oligo

SEQ ID NO: 385 - DNA, 89 bp, Artificial Sequence
  HDV antigenomic ribozyme
gggtcggcatggcatctccacctcctcgcggtccgacctgggcatccgaaggaggacgcacgtccactcggatggctaagggagagcca

SEQ ID NO: 386 - DNA, 86 bp, Artificial Sequence
  HDV genomic ribozyme
ggccggcatggtcccagcctcctcgctggcgccggctgggcaacattccgaggggaccgtcccctcggtaatggcgaatgggaccc

SEQ ID NO: 387 - DNA, 69 bp, Artificial Sequence
  HDV ribozyme
gatggccggcatggtcccagcctcctcgctggcgccggctgggcaacaccttcgggtggcgaatgggac

SEQ ID NO: 388 - DNA, 78 bp, Artificial Sequence
  HDV ribozyme
ttttggccggcatggtcccagcctcctcgctggcgccggctgggcaacatgcttcggcatggcgaatgggaccccggg

SEQ ID NO: 389 - DNA, 78 bp, Artificial Sequence
  Hatchet
cattcctcagaaaatgacaaacctgtggggcgtaagtagatcttcggatctatgatcgtgcagacgttaaaatcaggt

SEQ ID NO: 390 - DNA, 64 bp, Artificial Sequence
  env25 pistol ribozyme (with CUUCGG loop)
cgtggttagggccacgttaaatagttgcttaagccctaagcgttgatcttcggatcaggtgcaa

SEQ ID NO: 391 - DNA, 60 bp, Artificial Sequence
  HH15 Minimal Hammerhead ribozyme
gggagccccgctgatgaggtcggggagaccgaaagggacttcggtccctacggggctccc

SEQ ID NO: 392 - DNA, 52 bp, Artificial Sequence
  sTRSV WT viral Hammerhead ribozyme
cctgtcaccggatgtgctttccggtctgatgagtccgtgaggacgaaacagg

SEQ ID NO: 393 - DNA, 63 bp, Artificial Sequence
  Hammerhead ribozyme
cgactactgatgagtccgtgaggacgaaacgagtaagctcgtctagtcgcgtgtagcgaagca

SEQ ID NO: 394 - DNA, 49 bp, Artificial Sequence
  Hammerhead ribozyme, smaller scar
cgactactgatgagtccgtgaggacgaaacgagtaagctcgtctagtcg

SEQ ID NO: 395 - DNA, 63 bp, Artificial Sequence
  Hammerhead ribozyme, guide scaffold scar
ccagtactgatgagtccgtgaggacgaaacgagtaagctcgtctactggcgcttttatctcat

SEQ ID NO: 396 - DNA, 77 bp, Artificial Sequence
  Twisted Sister 1
acccgcaaggccgacggcatccgccgccgctggtgcaagtccagccgccccttcgggggcgggcgctcatgggtaac

SEQ ID NO: 397 - DNA, 76 bp, Artificial Sequence
  Env-9 Twister
ggcaataaagcggttacaagcccgcaaaaatagcagagtaatgtcgcgatagcgcggcattaatgcagctttattg

SEQ ID NO: 398 - DNA, 36 bp, Artificial Sequence
  RBMX recruiting motif
ccacccccaccaccacccccacccccaccaccaccc

SEQ ID NO: 399 - DNA, 20 bp, Artificial Sequence
  spacer sequence
agtccctcaagtccttccag

SEQ ID NO: 400 - DNA, 20 bp, Artificial Sequence
  spacer sequence
agcagcagcagcagcagcag

SEQ ID NO: 401 - DNA, 20 bp, Artificial Sequence
  spacer sequence
tcagccgccgccgcaggcac

SEQ ID NO: 402 - DNA, 20 bp, Artificial Sequence
  spacer sequence
agggtcgccatggcggtctc

SEQ ID NO: 403 - DNA, 20 bp, Artificial Sequence
  spacer sequence
tcagcttttccagggtcgcc

SEQ ID NO: 404 - RNA, 20 nt, Artificial Sequence
  spacer sequence
agucccucaaguccuuccag

SEQ ID NO: 405 - RNA, 20 nt, Artificial Sequence
  spacer sequence
agcagcagcagcagcagcag

SEQ ID NO: 406 - RNA, 20 nt, Artificial Sequence
  spacer sequence
ucagccgccgccgcaggcac

SEQ ID NO: 407 - RNA, 20 nt, Artificial Sequence
  spacer sequence
agggucgccauggcggucuc

SEQ ID NO: 408 - RNA, 20 nt, Artificial Sequence
  spacer sequence
ucagcuuuuccagggucgcc

SEQ ID NO: 409 - RNA, 24 nt, Artificial Sequence
  mutant HTT spacer sequence
uucguugaaaagaaaaccuuaccg

SEQ ID NO: 410 - RNA, 24 nt, Artificial Sequence
  mutant HTT spacer sequence
uucuuuucaacgaaaagcagcccc

SEQ ID NO: 411 - RNA, 24 nt, Artificial Sequence
  mutant HTT spacer sequence
uucaacgaaaagcagcccccaagc

SEQ ID NO: 412 - RNA, 24 nt, Artificial Sequence
  mutant HTT spacer sequence
uuccuagcuugaacuuccccuuua

SEQ ID NO: 413 - RNA, 24 nt, Artificial Sequence
  mutant HTT spacer sequence
uucaaauacaauguccagcacaca

SEQ ID NO: 414 - RNA, 24 nt, Artificial Sequence
  mutant HTT spacer sequence
uuccugguaauuuguguuugugug

SEQ ID NO: 415 - RNA, 24 nt, Artificial Sequence
  mutant HTT spacer sequence
uucaucccagugagaaagaucaag

SEQ ID NO: 416 - RNA, 24 nt, Artificial Sequence
  mutant HTT spacer sequence
uucucacugggaugaacuagcagc

SEQ ID NO: 417 - RNA, 24 nt, Artificial Sequence
  mutant HTT spacer sequence
uucaagcuaguaacgaugcuaacg

SEQ ID NO: 418 - RNA, 24 nt, Artificial Sequence
  mutant HTT spacer sequence
uucccgcagcuaggcuaaagaguc

SEQ ID NO: 419 - RNA, 24 nt, Artificial Sequence
  mutant HTT spacer sequence
uucuuugauuguguuucuuauuug

SEQ ID NO: 420 - RNA, 24 nt, Artificial Sequence
  mutant HTT spacer sequence
uucucaucaaauaagaaacacaau

SEQ ID NO: 421 - RNA, 24 nt, Artificial Sequence
  mutant HTT spacer sequence
uucuaaaauacaguauaccuccuc

SEQ ID NO: 422 - RNA, 24 nt, Artificial Sequence
  mutant HTT spacer sequence
uucaaacacagaggagguauacug

SEQ ID NO: 423 - RNA, 24 nt, Artificial Sequence
  mutant HTT spacer sequence
uucugauuguuaaucauaaagucu

SEQ ID NO: 424 - RNA, 24 nt, Artificial Sequence
  mutant HTT spacer sequence
uucuagacuuuaugauuaacaauc

SEQ ID NO: 425 - RNA, 24 nt, Artificial Sequence
  mutant HTT spacer sequence
uuccucauugcacuuccauguugg

SEQ ID NO: 426 - RNA, 24 nt, Artificial Sequence
  mutant HTT spacer sequence
uucauuugggauauuugaccugcg

SEQ ID NO: 427 - RNA, 24 nt, Artificial Sequence
  mutant HTT spacer sequence
uucugaagagcuacaacgcagguc

SEQ ID NO: 428 - RNA, 24 nt, Artificial Sequence
  mutant HTT spacer sequence
uucuuguucucucuuuuucuuugg

SEQ ID NO: 429 - RNA, 24 nt, Artificial Sequence
  mutant HTT spacer sequence
uucaaauggagaauacggguaaca

SEQ ID NO: 430 - RNA, 24 nt, Artificial Sequence
  mutant HTT spacer sequence
uuccaaguaguaguuaguaaucaa

SEQ ID NO: 431 - RNA, 24 nt, Artificial Sequence
  mutant HTT spacer sequence
uucacagcaaauaauuuuggaaag

SEQ ID NO: 432 - RNA, 24 nt, Artificial Sequence
  mutant HTT spacer sequence
uuccaaaauuauuugcugugaauu

SEQ ID NO: 433 - RNA, 24 nt, Artificial Sequence
  mutant HTT spacer sequence
uucuaauucacagcaaauaauuuu

SEQ ID NO: 434 - RNA, 24 nt, Artificial Sequence
  mutant HTT spacer sequence
uuccuaaacuucuaauucacagca

SEQ ID NO: 435 - RNA, 24 nt, Artificial Sequence
  mutant HTT spacer sequence
uucauucucaaguuaguuuuagau

SEQ ID NO: 436 - RNA, 24 nt, Artificial Sequence
  mutant HTT spacer sequence
uucucaaguuaguuuuagauuaga

SEQ ID NO: 437 - RNA, 24 nt, Artificial Sequence
  mutant HTT spacer sequence
uucaguccuuucugcccaccagca

SEQ ID NO: 438 - RNA, 24 nt, Artificial Sequence
  mutant HTT spacer sequence
uuucugcccaccagcacaugcuuu

SEQ ID NO: 439 - RNA, 24 nt, Artificial Sequence
  mutant HTT spacer sequence
uucugcccaccagcacaugcuuuc

SEQ ID NO: 440 - RNA, 24 nt, Artificial Sequence
  mutant HTT spacer sequence
uucuacuuguagauugauuuaggg

SEQ ID NO: 441 - RNA, 24 nt, Artificial Sequence
  mutant HTT spacer sequence
uucucccuaaaucaaucuacaagu

SEQ ID NO: 442 - RNA, 24 nt, Artificial Sequence
  mutant HTT spacer sequence
uuccuagucagucucgccuuaccu

SEQ ID NO: 443 - RNA, 24 nt, Artificial Sequence
  mutant HTT spacer sequence
uucuccugcuccgccugcaccaug

SEQ ID NO: 444 - RNA, 24 nt, Artificial Sequence
  mutant HTT spacer sequence
uucccuaaaaacaaaaacauccau

SEQ ID NO: 445 - RNA, 24 nt, Artificial Sequence
  mutant HTT spacer sequence
uuuuagggaaucagaggcaaucau

SEQ ID NO: 446 - RNA, 24 nt, Artificial Sequence
  mutant HTT spacer sequence
uucuauugucuguccccuuacccg

SEQ ID NO: 447 - RNA, 24 nt, Artificial Sequence
  mutant HTT spacer sequence
uucacucacuugcuuuucuauugu

SEQ ID NO: 448 - RNA, 24 nt, Artificial Sequence
  mutant HTT spacer sequence
uucaugcugccaagggaugcugac

SEQ ID NO: 449 - RNA, 24 nt, Artificial Sequence
  mutant HTT spacer sequence
uucuagcguugaaguacugucccc

SEQ ID NO: 450 - RNA, 24 nt, Artificial Sequence
  mutant HTT spacer sequence
uucuucuagcguugaaguacuguc

SEQ ID NO: 451 - RNA, 24 nt, Artificial Sequence
  mutant HTT spacer sequence
uuccucacugaggaugaaauggca

SEQ ID NO: 452 - RNA, 24 nt, Artificial Sequence
  mutant HTT spacer sequence
uucauccucagugaggaaggugau

SEQ ID NO: 453 - RNA, 24 nt, Artificial Sequence
  mutant HTT spacer sequence
uucaucccacagugguuugccuau

SEQ ID NO: 454 - RNA, 24 nt, Artificial Sequence
  mutant HTT spacer sequence
uuccauugcucccagcauuauaau

SEQ ID NO: 455 - RNA, 24 nt, Artificial Sequence
  mutant HTT spacer sequence
uucucuucccccgagucccuuugg

SEQ ID NO: 456 - RNA, 24 nt, Artificial Sequence
  mutant HTT spacer sequence
uucccccgagucccuuuggcuccc

SEQ ID NO: 457 - RNA, 24 nt, Artificial Sequence
  mutant HTT spacer sequence
uucuauccuguccccaaguucauc

SEQ ID NO: 458 - RNA, 24 nt, Artificial Sequence
  mutant HTT spacer sequence
uucuggugaugacaauuuauuaau

SEQ ID NO: 459 - RNA, 24 nt, Artificial Sequence
  mutant HTT spacer sequence
uucuagucccaaaucugggugcua

SEQ ID NO: 460 - RNA, 24 nt, Artificial Sequence
  mutant HTT spacer sequence
uucuguacacacguguccuugaca

SEQ ID NO: 461 - RNA, 24 nt, Artificial Sequence
  mutant HTT spacer sequence
uucagaaugccucaucuggucaaa

SEQ ID NO: 462 - RNA, 24 nt, Artificial Sequence
  mutant HTT spacer sequence
uucccgcugcgccguuucugcaua

SEQ ID NO: 463 - RNA, 24 nt, Artificial Sequence
  mutant HTT spacer sequence
uucugccagcgcauguguccuuuc

SEQ ID NO: 464 - RNA, 24 nt, Artificial Sequence
  mutant HTT spacer sequence
uuccccuugaaaggacacaugcgc

SEQ ID NO: 465 - RNA, 24 nt, Artificial Sequence
  mutant HTT spacer sequence
uuccucaucggagagcacacccug

SEQ ID NO: 466 - RNA, 24 nt, Artificial Sequence
  mutant HTT spacer sequence
uucaguugcguugauuugauuuuu

SEQ ID NO: 467 - RNA, 24 nt, Artificial Sequence
  mutant HTT spacer sequence
uucagagguucgguggacacaggc

SEQ ID NO: 468 - RNA, 24 nt, Artificial Sequence
  mutant HTT spacer sequence
uucgguggacacaggcagcugccc

SEQ ID NO: 469 - RNA, 24 nt, Artificial Sequence
  mutant HTT spacer sequence
uucugggugcuggagauaucaugg

SEQ ID NO: 470 - RNA, 24 nt, Artificial Sequence
  mutant HTT spacer sequence
uucuaccaauuuucuauuuuugga

SEQ ID NO: 471 - RNA, 24 nt, Artificial Sequence
  mutant HTT spacer sequence
uuccaccucugaaaccccgaaauu

SEQ ID NO: 472 - RNA, 24 nt, Artificial Sequence
  mutant HTT spacer sequence
uucucaaauuucgggguuucagag

SEQ ID NO: 473 - RNA, 24 nt, Artificial Sequence
  mutant HTT spacer sequence
uucgcuaugaaggccuuuaacaaa

SEQ ID NO: 474 - RNA, 24 nt, Artificial Sequence
  mutant HTT spacer sequence
uucagguucgcuaugaaggccuuu

SEQ ID NO: 475 - RNA, 24 nt, Artificial Sequence
  mutant HTT spacer sequence
uucauagcgaaccugaagucaagc

SEQ ID NO: 476 - RNA, 24 nt, Artificial Sequence
  mutant HTT spacer sequence
uucccccuguuagcaaaaacgaag

SEQ ID NO: 477 - RNA, 24 nt, Artificial Sequence
  mutant HTT spacer sequence
uucguuuuugcuaacagggggaaa

SEQ ID NO: 478 - RNA, 24 nt, Artificial Sequence
  mutant HTT spacer sequence
uucccauuggaucucucagcccau

SEQ ID NO: 479 - RNA, 24 nt, Artificial Sequence
  mutant HTT spacer sequence
uuccggccaaaaucaaagcaucuu

SEQ ID NO: 480 - RNA, 24 nt, Artificial Sequence
  mutant HTT spacer sequence
uucucuaacaaaccccccuucucu

SEQ ID NO: 481 - RNA, 24 nt, Artificial Sequence
  mutant HTT spacer sequence
uuccgugcuguucugaagauccag

SEQ ID NO: 482 - RNA, 24 nt, Artificial Sequence
  mutant HTT spacer sequence
uucagaacagcacggaaaaguuug

SEQ ID NO: 483 - RNA, 24 nt, Artificial Sequence
  mutant HTT spacer sequence
uucuccgcucagccuuggauguuc

SEQ ID NO: 484 - RNA, 24 nt, Artificial Sequence
  mutant HTT spacer sequence
uccgcucagccuuggauguucuuu

SEQ ID NO: 485 - RNA, 24 nt, Artificial Sequence
  mutant HTT spacer sequence
uuccugcaucagcuuuauuuguuc

SEQ ID NO: 486 - RNA, 24 nt, Artificial Sequence
  mutant HTT spacer sequence
uucuggccauuuugaggguucuga

SEQ ID NO: 487 - RNA, 24 nt, Artificial Sequence
  mutant HTT spacer sequence
cucaaaauggccagaauucccgau

SEQ ID NO: 488 - RNA, 24 nt, Artificial Sequence
  mutant HTT spacer sequence
uucaacucuuaucuugaaaccaau

SEQ ID NO: 489 - RNA, 24 nt, Artificial Sequence
  mutant HTT spacer sequence
uucaagauaagaguugaaauaauu

SEQ ID NO: 490 - RNA, 24 nt, Artificial Sequence
  mutant HTT spacer sequence
uuccucuguggcagaggggauggc

SEQ ID NO: 491 - RNA, 24 nt, Artificial Sequence
  mutant HTT spacer sequence
cucuguggcagaggggauggcugc

SEQ ID NO: 492 - RNA, 24 nt, Artificial Sequence
  mutant HTT spacer sequence
uucucucguggugacaggucacag

SEQ ID NO: 493 - RNA, 24 nt, Artificial Sequence
  mutant HTT spacer sequence
uucgcaguuuuugcuugaguugua

SEQ ID NO: 494 - RNA, 24 nt, Artificial Sequence
  mutant HTT spacer sequence
uucagacccuaauccugcagcccc

SEQ ID NO: 495 - RNA, 24 nt, Artificial Sequence
  mutant HTT spacer sequence
uucucaugaagcaaagcaagccuc

SEQ ID NO: 496 - RNA, 24 nt, Artificial Sequence
  mutant HTT spacer sequence
uucaugagaaccuagaccuugcug

SEQ ID NO: 497 - RNA, 24 nt, Artificial Sequence
  mutant HTT spacer sequence
uucuugguuuugacauggacgcga

SEQ ID NO: 498 - RNA, 24 nt, Artificial Sequence
  mutant HTT spacer sequence
uucucuuuguucuguuguaauuuu

SEQ ID NO: 499 - RNA, 24 nt, Artificial Sequence
  mutant HTT spacer sequence
uucauauccgccuauaccauacaa

SEQ ID NO: 500 - RNA, 24 nt, Artificial Sequence
  mutant HTT spacer sequence
uucuaccuucauauccgccuauac

SEQ ID NO: 501 - RNA, 24 nt, Artificial Sequence
  mutant HTT spacer sequence
uuccugagcaauggcgugagaaac

SEQ ID NO: 502 - RNA, 24 nt, Artificial Sequence
  mutant HTT spacer sequence
uucucacgccauugcucaggaaca

SEQ ID NO: 503 - RNA, 24 nt, Artificial Sequence
  mutant HTT spacer sequence
uucaucuaccgcaucaacacacua

SEQ ID NO: 504 - RNA, 24 nt, Artificial Sequence
  mutant HTT spacer sequence
uucaagaagccugauaaaaucucu

SEQ ID NO: 505 - RNA, 24 nt, Artificial Sequence
  mutant HTT spacer sequence
uucugucagcgucacauacaucag

SEQ ID NO: 506 - RNA, 24 nt, Artificial Sequence
  mutant HTT spacer sequence
uucacagcuaucuucucaucaaua

SEQ ID NO: 507 - RNA, 24 nt, Artificial Sequence
  mutant HTT spacer sequence
uucuucacagcuaucuucucauca

SEQ ID NO: 508 - RNA, 24 nt, Artificial Sequence
  mutant HTT spacer sequence
uucuucucuuuguucuguuguaau

SEQ ID NO: 509 - RNA, 20 nt, Artificial Sequence
  HTT spacer sequence ATCN PAM
aaagaaaaaaacauugcccu

SEQ ID NO: 510 - RNA, 20 nt, Artificial Sequence
  HTT spacer sequence ATCN PAM
uaaauugggugugcuagccc

SEQ ID NO: 511 - RNA, 20 nt, Artificial Sequence
  HTT spacer sequence ATCN PAM
agugggggggccccuccaug

SEQ ID NO: 512 - RNA, 20 nt, Artificial Sequence
  HTT spacer sequence ATCN PAM
uuccauucauccuauccaac

SEQ ID NO: 513 - RNA, 20 nt, Artificial Sequence
  HTT spacer sequence ATCN PAM
uauccaacuauucuacauua

SEQ ID NO: 514 - RNA, 20 nt, Artificial Sequence
  HTT spacer sequence ATCN PAM
aacuauucuacauuaauuac

SEQ ID NO: 515 - RNA, 20 nt, Artificial Sequence
  HTT spacer sequence ATCN PAM
auucagaucagucaaaaaau

SEQ ID NO: 516 - RNA, 20 nt, Artificial Sequence
  HTT spacer sequence ATCN PAM
gaauagauuaagcacaagua

SEQ ID NO: 517 - RNA, 20 nt, Artificial Sequence
  HTT spacer sequence ATCN PAM
gucaaaaaauauccauucac

SEQ ID NO: 518 - RNA, 20 nt, Artificial Sequence
  HTT spacer sequence ATCN PAM
auucacuuuugucuuccucc

SEQ ID NO: 519 - RNA, 20 nt, Artificial Sequence
  HTT spacer sequence ATCN PAM
auaucuaaguuuuuuuugca

SEQ ID NO: 520 - RNA, 20 nt, Artificial Sequence
  HTT spacer sequence ATCN PAM
aaguuuuuuuugcaauccaa

SEQ ID NO: 521 - RNA, 20 nt, Artificial Sequence
  HTT spacer sequence ATCN PAM
aacugaaaaaagacaaaagu

SEQ ID NO: 522 - RNA, 20 nt, Artificial Sequence
  HTT spacer sequence ATCN PAM
uuucaccaaaugggacucau

SEQ ID NO: 523 - RNA, 20 nt, Artificial Sequence
  HTT spacer sequence ATCN PAM
gaugacaguccagugccuuc

SEQ ID NO: 524 - RNA, 20 nt, Artificial Sequence
  HTT spacer sequence ATCN PAM
gauuuuacaugagucccauu

SEQ ID NO: 525 - RNA, 20 nt, Artificial Sequence
  HTT spacer sequence ATCN PAM
cagcccugcuuccuccuggc

SEQ ID NO: 526 - RNA, 20 nt, Artificial Sequence
  HTT spacer sequence ATCN PAM
gcauaguuuaaacguucaca

SEQ ID NO: 527 - RNA, 20 nt, Artificial Sequence
  HTT spacer sequence ATCN PAM
guuaaggcacugagguguga

SEQ ID NO: 528 - RNA, 20 nt, Artificial Sequence
  HTT spacer sequence ATCN PAM
ccucacaucacagugcagca

SEQ ID NO: 529 - RNA, 20 nt, Artificial Sequence
  HTT spacer sequence ATCN PAM
cagugcagcacaagugcacc

SEQ ID NO: 530 - RNA, 20 nt, Artificial Sequence
  HTT spacer sequence ATCN PAM
agacaacaaauggggggcac

SEQ ID NO: 531 - RNA, 20 nt, Artificial Sequence
  HTT spacer sequence ATCN PAM
ccccccuggggcgcaggcag

SEQ ID NO: 532 - RNA, 20 nt, Artificial Sequence
  HTT spacer sequence ATCN PAM
uucauccucagggggaccug

SEQ ID NO: 533 - RNA, 20 nt, Artificial Sequence
  HTT spacer sequence ATCN PAM
ucagggggaccuguaaccag

SEQ ID NO: 534 - RNA, 20 nt, Artificial Sequence
  HTT spacer sequence ATCN PAM
gguuacaggucccccugagg

SEQ ID NO: 535 - RNA, 20 nt, Artificial Sequence
  HTT spacer sequence ATCN PAM
acggggaugccugaggcgua

SEQ ID NO: 536 - RNA, 20 nt, Artificial Sequence
  HTT spacer sequence ATCN PAM
ccguggaucugguuacaggu

SEQ ID NO: 537 - RNA, 20 nt, Artificial Sequence
  HTT spacer sequence ATCN PAM
cagcuuccaguuccuccagc

SEQ ID NO: 538 - RNA, 20 nt, Artificial Sequence
  HTT spacer sequence ATCN PAM
cuguccaagacucacaguaa

SEQ ID NO: 539 - RNA, 20 nt, Artificial Sequence
  HTT spacer sequence ATCN PAM
ucucuguccaagacucacag

SEQ ID NO: 540 - RNA, 20 nt, Artificial Sequence
  HTT spacer sequence ATCN PAM
ccucacaugcucccaacaau

SEQ ID NO: 541 - RNA, 20 nt, Artificial Sequence
  HTT spacer sequence ATCN PAM
ccaccugacacuagggaaac

SEQ ID NO: 542 - RNA, 20 nt, Artificial Sequence
  HTT spacer sequence ATCN PAM
gcucaccauuauucaccuuu

SEQ ID NO: 543 - RNA, 20 nt, Artificial Sequence
  HTT spacer sequence ATCN PAM
gagagcugguaagugacagc

SEQ ID NO: 544 - RNA, 20 nt, Artificial Sequence
  HTT spacer sequence ATCN PAM
gguauucugggaauucuugg

SEQ ID NO: 545 - RNA, 20 nt, Artificial Sequence
  HTT spacer sequence ATCN PAM
cuccucuuaaggucgaacaa

SEQ ID NO: 546 - RNA, 20 nt, Artificial Sequence
  HTT spacer sequence ATCN PAM
auuacgugaagcucucgacu

SEQ ID NO: 547 - RNA, 20 nt, Artificial Sequence
  HTT spacer sequence ATCN PAM
cucagggcucuccuucccug

SEQ ID NO: 548 - RNA, 20 nt, Artificial Sequence
  HTT spacer sequence ATCN PAM
cucccugcgccgacucuguc

SEQ ID NO: 549 - RNA, 20 nt, Artificial Sequence
  HTT spacer sequence ATCN PAM
gcacucaggcuguggucagc

SEQ ID NO: 550 - RNA, 20 nt, Artificial Sequence
  HTT spacer sequence ATCN PAM
aggucaugccaccccuccca

SEQ ID NO: 551 - RNA, 20 nt, Artificial Sequence
  HTT spacer sequence ATCN PAM
ggaacacuggcuuuccagca

SEQ ID NO: 552 - RNA, 20 nt, Artificial Sequence
  HTT spacer sequence ATCN PAM
gcugaaaacgaauucaucag

SEQ ID NO: 553 - RNA, 20 nt, Artificial Sequence
  HTT spacer sequence ATCN PAM
guagccuggcuagaaguuau

SEQ ID NO: 554 - RNA, 20 nt, Artificial Sequence
  HTT spacer sequence ATCN PAM
cucaaaucccaagucccugg

SEQ ID NO: 555 - RNA, 20 nt, Artificial Sequence
  HTT spacer sequence ATCN PAM
caagucccuggaacaggguc

SEQ ID NO: 556 - RNA, 20 nt, Artificial Sequence
  HTT spacer sequence ATCN PAM
cccagaaguauacagcuggg

SEQ ID NO: 557 - RNA, 20 nt, Artificial Sequence
  HTT spacer sequence ATCN PAM
cugucaucgccccucacccu

SEQ ID NO: 558 - RNA, 20 nt, Artificial Sequence
  HTT spacer sequence ATCN PAM
ccccucacccucagccacca

SEQ ID NO: 559 - RNA, 20 nt, Artificial Sequence
  HTT spacer sequence ATCN PAM
cugcacuucgggaccaaaca

SEQ ID NO: 560 - RNA, 20 nt, Artificial Sequence
  HTT spacer sequence ATCN PAM
guuuggucccgaagugcaga

SEQ ID NO: 561 - RNA, 20 nt, Artificial Sequence
  HTT spacer sequence ATCN PAM
agaccuugccccacccccca

SEQ ID NO: 562 - RNA, 20 nt, Artificial Sequence
  HTT spacer sequence ATCN PAM
gccacuucguuuccagggug

SEQ ID NO: 563 - RNA, 20 nt, Artificial Sequence
  HTT spacer sequence ATCN PAM
cuaaucugggccuggaaugu

SEQ ID NO: 564 - RNA, 20 nt, Artificial Sequence
  HTT spacer sequence ATCN PAM
gggccuggaauguuuacagg

SEQ ID NO: 565 - RNA, 20 nt, Artificial Sequence
  HTT spacer sequence ATCN PAM
cucaguaaggcagauuuaua

SEQ ID NO: 566 - RNA, 20 nt, Artificial Sequence
  HTT spacer sequence ATCN PAM
gccuuacugagugaugugua

SEQ ID NO: 567 - RNA, 20 nt, Artificial Sequence
  HTT spacer sequence ATCN PAM
acccagccagcauaacccac

SEQ ID NO: 568 - RNA, 20 nt, Artificial Sequence
  HTT spacer sequence ATCN PAM
uugaggaggaauugacccuc

SEQ ID NO: 569 - RNA, 20 nt, Artificial Sequence
  HTT spacer sequence ATCN PAM
ugagugauauuaauaugcuc

SEQ ID NO: 570 - RNA, 20 nt, Artificial Sequence
  HTT spacer sequence ATCN PAM
cucaggaugaauuuguguuu

SEQ ID NO: 571 - RNA, 20 nt, Artificial Sequence
  HTT spacer sequence ATCN PAM
ccaaagagcauauuaauauc

SEQ ID NO: 572 - RNA, 20 nt, Artificial Sequence
  HTT spacer sequence ATCN PAM
cucccagguccagguaagug

SEQ ID NO: 573 - RNA, 20 nt, Artificial Sequence
  HTT spacer sequence ATCN PAM
auagaaagucauaaccaagc

SEQ ID NO: 574 - RNA, 20 nt, Artificial Sequence
  HTT spacer sequence ATCN PAM
gaaacaaaagucucagugcu

SEQ ID NO: 575 - RNA, 20 nt, Artificial Sequence
  HTT spacer sequence ATCN PAM
auaaagcaggacaagcugac

SEQ ID NO: 576 - RNA, 20 nt, Artificial Sequence
  HTT spacer sequence ATCN PAM
ugacuuugaacacucccagg

SEQ ID NO: 577 - RNA, 20 nt, Artificial Sequence
  HTT spacer sequence ATCN PAM
uguaaguauuauccugacuu

SEQ ID NO: 578 - RNA, 20 nt, Artificial Sequence
  HTT spacer sequence ATCN PAM
gaacacuuuauaccaagaaa

SEQ ID NO: 579 - RNA, 20 nt, Artificial Sequence
  HTT spacer sequence ATCN PAM
uauugguguuuaaaagacug

SEQ ID NO: 580 - RNA, 20 nt, Artificial Sequence
  HTT spacer sequence ATCN PAM
gucuuuuaaacaccaauaug

SEQ ID NO: 581 - RNA, 20 nt, Artificial Sequence
  HTT spacer sequence ATCN PAM
ucacaccuggcuaauuuuug

SEQ ID NO: 582 - RNA, 20 nt, Artificial Sequence
  HTT spacer sequence ATCN PAM
cagcuacucgggaggcuaag

SEQ ID NO: 583 - RNA, 20 nt, Artificial Sequence
  HTT spacer sequence ATCN PAM
uggcucacugcaaccuccgc

SEQ ID NO: 584 - RNA, 20 nt, Artificial Sequence
  HTT spacer sequence ATCN PAM
cgccacugcacucaagccug

SEQ ID NO: 585 - RNA, 20 nt, Artificial Sequence
  HTT spacer sequence ATCN PAM
ugccacugcucucuagccug

SEQ ID NO: 586 - RNA, 20 nt, Artificial Sequence
  HTT spacer sequence ATCN PAM
caccuuacugcagccuccaa

SEQ ID NO: 587 - RNA, 20 nt, Artificial Sequence
  HTT spacer sequence ATCN PAM
cuuaagcucagggguuggag

SEQ ID NO: 588 - RNA, 20 nt, Artificial Sequence
  HTT spacer sequence ATCN PAM
uccugaguagcugagacuac

SEQ ID NO: 589 - RNA, 20 nt, Artificial Sequence
  HTT spacer sequence ATCN PAM
ccaccaccacccgacccaaa

SEQ ID NO: 590 - RNA, 20 nt, Artificial Sequence
  HTT spacer sequence ATCN PAM
cagugagacccugucucuac

SEQ ID NO: 591 - RNA, 20 nt, Artificial Sequence
  HTT spacer sequence ATCN PAM
uagugcuuugggaggcugag

SEQ ID NO: 592 - RNA, 20 nt, Artificial Sequence
  HTT spacer sequence ATCN PAM
aaacaaaacaaagcuggcca

SEQ ID NO: 593 - RNA, 20 nt, Artificial Sequence
  HTT spacer sequence ATCN PAM
uauaaagguuaaccagacag

SEQ ID NO: 594 - RNA, 20 nt, Artificial Sequence
  HTT spacer sequence ATCN PAM
gcagucauugggagacccgg

SEQ ID NO: 595 - RNA, 20 nt, Artificial Sequence
  HTT spacer sequence ATCN PAM
acuuuccaggguagcucccu

SEQ ID NO: 596 - RNA, 20 nt, Artificial Sequence
  HTT spacer sequence ATCN PAM
gcucucccucuggccaccca

SEQ ID NO: 597 - RNA, 20 nt, Artificial Sequence
  HTT spacer sequence ATCN PAM
gagagaccagaaccuaggac

SEQ ID NO: 598 - RNA, 20 nt, Artificial Sequence
  HTT spacer sequence ATCN PAM
acuggucaguuugaucagug

SEQ ID NO: 599 - RNA, 20 nt, Artificial Sequence
  HTT spacer sequence ATCN PAM
aacugaccaguagaucugag

SEQ ID NO: 600 - RNA, 20 nt, Artificial Sequence
  HTT spacer sequence ATCN PAM
guggauuuaucucacacugu

SEQ ID NO: 601 - RNA, 20 nt, Artificial Sequence
  HTT spacer sequence ATCN PAM
acugaucaaacugaccagua

SEQ ID NO: 602 - RNA, 20 nt, Artificial Sequence
  HTT spacer sequence ATCN PAM
cacacuguccucaguguugu

SEQ ID NO: 603 - RNA, 20 nt, Artificial Sequence
  HTT spacer sequence ATCN PAM
aguccaaagcaguuauuuug

SEQ ID NO: 604 - RNA, 20 nt, Artificial Sequence
  HTT spacer sequence ATCN PAM
uucucuacuuauuuuugauu

SEQ ID NO: 605 - RNA, 20 nt, Artificial Sequence
  HTT spacer sequence ATCN PAM
aaaauaaguagagaaugauu

SEQ ID NO: 606 - RNA, 20 nt, Artificial Sequence
  HTT spacer sequence ATCN PAM
gcucagaggcagaauuccaa

SEQ ID NO: 607 - RNA, 20 nt, Artificial Sequence
  HTT spacer sequence ATCN PAM
guuugggaggccucuaaugc

SEQ ID NO: 608 - RNA, 20 nt, Artificial Sequence
  HTT spacer sequence ATCN PAM
ucagugacuagcauuagagg

SEQ ID NO: 609 - RNA, 20 nt, Artificial Sequence
  HTT spacer sequence ATCN PAM
guagauggaucguguguuca

SEQ ID NO: 610 - RNA, 20 nt, Artificial Sequence
  HTT spacer sequence ATCN PAM
acagaugccccuuauccuca

SEQ ID NO: 611 - RNA, 20 nt, Artificial Sequence
  HTT spacer sequence ATCN PAM
aucuacagaugccccuuauc

SEQ ID NO: 612 - RNA, 20 nt, Artificial Sequence
  HTT spacer sequence ATCN PAM
uguguucagggugacccuag

SEQ ID NO: 613 - RNA, 20 nt, Artificial Sequence
  HTT spacer sequence ATCN PAM
auuuuauacucuccugcagg

SEQ ID NO: 614 - RNA, 20 nt, Artificial Sequence
  HTT spacer sequence ATCN PAM
cuggauaccaggauccagag

SEQ ID NO: 615 - RNA, 20 nt, Artificial Sequence
  HTT spacer sequence ATCN PAM
agggauuccuauauuacagg

SEQ ID NO: 616 - RNA, 20 nt, Artificial Sequence
  HTT spacer sequence ATCN PAM
ugguauccagggauuccuau

SEQ ID NO: 617 - RNA, 20 nt, Artificial Sequence
  HTT spacer sequence ATCN PAM
agagguagccgucagaacau

SEQ ID NO: 618 - RNA, 20 nt, Artificial Sequence
  HTT spacer sequence ATCN PAM
gggaacccucuaaacuuugu

SEQ ID NO: 619 - RNA, 20 nt, Artificial Sequence
  HTT spacer sequence ATCN PAM
uccuugcucagccuucccag

SEQ ID NO: 620 - RNA, 20 nt, Artificial Sequence
  HTT spacer sequence ATCN PAM
cuugaacucaggaguucaag

SEQ ID NO: 621 - RNA, 20 nt, Artificial Sequence
  HTT spacer sequence ATCN PAM
uaccgcauuuuucauuuccc

SEQ ID NO: 622 - RNA, 20 nt, Artificial Sequence
  HTT spacer sequence ATCN PAM
cauuugauuaguuucccuca

SEQ ID NO: 623 - RNA, 20 nt, Artificial Sequence
  HTT spacer sequence ATCN PAM
aaugagaugaacaaagucuc

SEQ ID NO: 624 - RNA, 20 nt, Artificial Sequence
  HTT spacer sequence ATCN PAM
cugcugugucccgaggugug

SEQ ID NO: 625 - RNA, 20 nt, Artificial Sequence
  HTT spacer sequence ATCN PAM
aagacacucacaccucggga

SEQ ID NO: 626 - RNA, 20 nt, Artificial Sequence
  HTT spacer sequence ATCN PAM
aguaaaaaucaaagacacuc

SEQ ID NO: 627 - RNA, 20 nt, Artificial Sequence
  HTT spacer sequence ATCN PAM
agaccacccggcuaacacgg

SEQ ID NO: 628 - RNA, 20 nt, Artificial Sequence
  HTT spacer sequence ATCN PAM
ccugaccuugugauccaccu

SEQ ID NO: 629 - RNA, 20 nt, Artificial Sequence
  HTT spacer sequence ATCN PAM
caaggucaggagaucgagac

SEQ ID NO: 630 - RNA, 20 nt, Artificial Sequence
  HTT spacer sequence ATCN PAM
accugccucggccucccaaa

SEQ ID NO: 631 - RNA, 20 nt, Artificial Sequence
  HTT spacer sequence ATCN PAM
cagcacuuugggaggccgag

SEQ ID NO: 632 - RNA, 20 nt, Artificial Sequence
  HTT spacer sequence ATCN PAM
caaaaaaaaaaaaacagugu

SEQ ID NO: 633 - RNA, 20 nt, Artificial Sequence
  HTT spacer sequence ATCN PAM
ggccauggcacuccagccug

SEQ ID NO: 634 - RNA, 20 nt, Artificial Sequence
  HTT spacer sequence ATCN PAM
cggcucccugaaccuccagg

SEQ ID NO: 635 - RNA, 20 nt, Artificial Sequence
  HTT spacer sequence ATCN PAM
ccugaaccuggagguucagg

SEQ ID NO: 636 - RNA, 20 nt, Artificial Sequence
  HTT spacer sequence ATCN PAM
cagcuacucgggaggcugag

SEQ ID NO: 637 - RNA, 20 nt, Artificial Sequence
  HTT spacer sequence ATCN PAM
aggcgugguggcacaugccu

SEQ ID NO: 638 - RNA, 20 nt, Artificial Sequence
  HTT spacer sequence ATCN PAM
ggcguucaagaccagcccga

SEQ ID NO: 639 - RNA, 20 nt, Artificial Sequence
  HTT spacer sequence ATCN PAM
caggugauccguccgccuug

SEQ ID NO: 640 - RNA, 20 nt, Artificial Sequence
  HTT spacer sequence ATCN PAM
ccugagaucaggcguucaag

SEQ ID NO: 641 - RNA, 20 nt, Artificial Sequence
  HTT spacer sequence ATCN PAM
guccgccuuggccucccaaa

SEQ ID NO: 642 - RNA, 20 nt, Artificial Sequence
  HTT spacer sequence ATCN PAM
cagcacuuugggaggccaag

SEQ ID NO: 643 - RNA, 20 nt, Artificial Sequence
  HTT spacer sequence ATCN PAM
cacuggccgggcacaguggc

SEQ ID NO: 644 - RNA, 20 nt, Artificial Sequence
  HTT spacer sequence ATCN PAM
cugccucagccucccaagca

SEQ ID NO: 645 - RNA, 20 nt, Artificial Sequence
  HTT spacer sequence ATCN PAM
uggcucacugcaaccuccac

SEQ ID NO: 646 - RNA, 20 nt, Artificial Sequence
  HTT spacer sequence ATCN PAM
caaaaaauaaauaauuuuua

SEQ ID NO: 647 - RNA, 20 nt, Artificial Sequence
  HTT spacer sequence ATCN PAM
gggcugggugggguggcuca

SEQ ID NO: 648 - RNA, 20 nt, Artificial Sequence
  HTT spacer sequence ATCN PAM
cagcacuuugggaggccgaa

SEQ ID NO: 649 - RNA, 20 nt, Artificial Sequence
  HTT spacer sequence ATCN PAM
accagcuucggccucccaaa

SEQ ID NO: 650 - RNA, 20 nt, Artificial Sequence
  HTT spacer sequence ATCN PAM
cuugagguugggaguucaug

SEQ ID NO: 651 - RNA, 20 nt, Artificial Sequence
  HTT spacer sequence ATCN PAM
ggcuugucaugaacucccaa

SEQ ID NO: 652 - RNA, 20 nt, Artificial Sequence
  HTT spacer sequence ATCN PAM
acauagagaaaccccaucuc

SEQ ID NO: 653 - RNA, 20 nt, Artificial Sequence
  HTT spacer sequence ATCN PAM
cuacuaaaaagacaaaauua

SEQ ID NO: 654 - RNA, 20 nt, Artificial Sequence
  HTT spacer sequence ATCN PAM
uagcuacuggggaaucugag

SEQ ID NO: 655 - RNA, 20 nt, Artificial Sequence
  HTT spacer sequence ATCN PAM
gaggcaggagaaucacuuga

SEQ ID NO: 656 - RNA, 20 nt, Artificial Sequence
  HTT spacer sequence ATCN PAM
cuugaacccaggagggagag

SEQ ID NO: 657 - RNA, 20 nt, Artificial Sequence
  HTT spacer sequence ATCN PAM
caggucacugcaaccucucc

SEQ ID NO: 658 - RNA, 20 nt, Artificial Sequence
  HTT spacer sequence ATCN PAM
ucucaggucacugcaaccuc

SEQ ID NO: 659 - RNA, 20 nt, Artificial Sequence
  HTT spacer sequence ATCN PAM
guugaucuuuuccuuuaugc

SEQ ID NO: 660 - RNA, 20 nt, Artificial Sequence
  HTT spacer sequence ATCN PAM
acagauucaacuauauauau

SEQ ID NO: 661 - RNA, 20 nt, Artificial Sequence
  HTT spacer sequence ATCN PAM
uuuccuuuaugcuuuagugc

SEQ ID NO: 662 - RNA, 20 nt, Artificial Sequence
  HTT spacer sequence ATCN PAM
ucaugaccuuggguaaaggg

SEQ ID NO: 663 - RNA, 20 nt, Artificial Sequence
  HTT spacer sequence ATCN PAM
aucaucuuucacauuuaggu

SEQ ID NO: 664 - RNA, 20 nt, Artificial Sequence
  HTT spacer sequence ATCN PAM
ucuuucacauuuaggucuau

SEQ ID NO: 665 - RNA, 20 nt, Artificial Sequence
  HTT spacer sequence ATCN PAM
uucacauuuaggucuauaau

SEQ ID NO: 666 - RNA, 20 nt, Artificial Sequence
  HTT spacer sequence ATCN PAM
auucuuuaauuauagaccua

SEQ ID NO: 667 - RNA, 20 nt, Artificial Sequence
  HTT spacer sequence ATCN PAM
cacaccauacacaaaaauca

SEQ ID NO: 668 - RNA, 20 nt, Artificial Sequence
  HTT spacer sequence ATCN PAM
aguuguucuguauuaacuuc

SEQ ID NO: 669 - RNA, 20 nt, Artificial Sequence
  HTT spacer sequence ATCN PAM
ugguuauaaauuuaguguau

SEQ ID NO: 670 - RNA, 20 nt, Artificial Sequence
  HTT spacer sequence ATCN PAM
uaccuugauucuauauuccu

SEQ ID NO: 671 - RNA, 20 nt, Artificial Sequence
  HTT spacer sequence ATCN PAM
agguaugauacacggacacu

SEQ ID NO: 672 - RNA, 20 nt, Artificial Sequence
  HTT spacer sequence ATCN PAM
uugagcggccaguaccacac

SEQ ID NO: 673 - RNA, 20 nt, Artificial Sequence
  HTT spacer sequence ATCN PAM
uccugccacugcauuccagc

SEQ ID NO: 674 - RNA, 20 nt, Artificial Sequence
  HTT spacer sequence ATCN PAM
ucccaccucagccuccugag

SEQ ID NO: 675 - RNA, 20 nt, Artificial Sequence
  HTT spacer sequence ATCN PAM
cagcacuuugggaggcuugg

SEQ ID NO: 676 - RNA, 20 nt, Artificial Sequence
  HTT spacer sequence ATCN PAM
uaguccguuuguguugcuau

SEQ ID NO: 677 - RNA, 20 nt, Artificial Sequence
  HTT spacer sequence ATCN PAM
agccucagguauuccuuaua

SEQ ID NO: 678 - RNA, 20 nt, Artificial Sequence
  HTT spacer sequence ATCN PAM
ggugagagccucagguuuuu

SEQ ID NO: 679 - RNA, 20 nt, Artificial Sequence
  HTT spacer sequence ATCN PAM
ggacacacuggguccucuuc

SEQ ID NO: 680 - RNA, 20 nt, Artificial Sequence
  HTT spacer sequence ATCN PAM
ugucaucuggacacacuggg

SEQ ID NO: 681 - RNA, 20 nt, Artificial Sequence
  HTT spacer sequence ATCN PAM
cucuugcuuuuucucucauc

SEQ ID NO: 682 - RNA, 20 nt, Artificial Sequence
  HTT spacer sequence ATCN PAM
uuucaccucagacuccugag

SEQ ID NO: 683 - RNA, 20 nt, Artificial Sequence
  HTT spacer sequence ATCN PAM
cuugagcccagaaguucgag

SEQ ID NO: 684 - RNA, 20 nt, Artificial Sequence
  HTT spacer sequence ATCN PAM
uccugccucagucugccaag

SEQ ID NO: 685 - RNA, 20 nt, Artificial Sequence
  HTT spacer sequence ATCN PAM
cuugauagcccggguggugg

SEQ ID NO: 686 - RNA, 20 nt, Artificial Sequence
  HTT spacer sequence ATCN PAM
agugauccuccugccucagu

SEQ ID NO: 687 - RNA, 20 nt, Artificial Sequence
  HTT spacer sequence ATCN PAM
uggcucgcugcaaccuccac

SEQ ID NO: 688 - RNA, 20 nt, Artificial Sequence
  HTT spacer sequence ATCN PAM
ugcuacugcaguccagccua

SEQ ID NO: 689 - RNA, 20 nt, Artificial Sequence
  HTT spacer sequence ATCN PAM
uuuccuuccuuuucagugaa

SEQ ID NO: 690 - RNA, 20 nt, Artificial Sequence
  HTT spacer sequence ATCN PAM
ccucucaguagcacuucugc

SEQ ID NO: 691 - RNA, 20 nt, Artificial Sequence
  HTT spacer sequence ATCN PAM
uuguguuucuucagaguggg

SEQ ID NO: 692 - RNA, 20 nt, Artificial Sequence
  HTT spacer sequence ATCN PAM
uaauggaagugaugcaggaa

SEQ ID NO: 693 - RNA, 20 nt, Artificial Sequence
  HTT spacer sequence ATCN PAM
cuuccauuaggaugcaaaua

SEQ ID NO: 694 - RNA, 20 nt, Artificial Sequence
  HTT spacer sequence ATCN PAM
cuuucucuuucuuuccugca

SEQ ID NO: 695 - RNA, 20 nt, Artificial Sequence
  HTT spacer sequence ATCN PAM
ucacuuucucuuucuuuccu

SEQ ID NO: 696 - RNA, 20 nt, Artificial Sequence
  HTT spacer sequence ATCN PAM
gugguccucaaguggcgaca

SEQ ID NO: 697 - RNA, 20 nt, Artificial Sequence
  HTT spacer sequence ATCN PAM
gcagaccugcgccugugccc

SEQ ID NO: 698 - RNA, 20 nt, Artificial Sequence
  HTT spacer sequence ATCN PAM
uuuggaaaagcacuuggcag

SEQ ID NO: 699 - RNA, 20 nt, Artificial Sequence
  HTT spacer sequence ATCN PAM
uccuuuauacuccucagcac

SEQ ID NO: 700 - RNA, 20 nt, Artificial Sequence
  HTT spacer sequence ATCN PAM
cgagcuccgucaaugcggag

SEQ ID NO: 701 - RNA, 20 nt, Artificial Sequence
  HTT spacer sequence ATCN PAM
ccacaucuacuccacugcuc

SEQ ID NO: 702 - RNA, 20 nt, Artificial Sequence
  HTT spacer sequence ATCN PAM
acuccacugcuccccuuccu

SEQ ID NO: 703 - RNA, 20 nt, Artificial Sequence
  HTT spacer sequence ATCN PAM
uuaggcucagggaccuuggc

SEQ ID NO: 704 - RNA, 20 nt, Artificial Sequence
  HTT spacer sequence ATCN PAM
uuugacuuacauggaccaua

SEQ ID NO: 705 - RNA, 20 nt, Artificial Sequence
  HTT spacer sequence ATCN PAM
gccuggugacuuagcuuuau

SEQ ID NO: 706 - RNA, 20 nt, Artificial Sequence
  HTT spacer sequence ATCN PAM
acauuguauuaugggaagga

SEQ ID NO: 707 - RNA, 20 nt, Artificial Sequence
  HTT spacer sequence ATCN PAM
ucuccuucccauaauacaau

SEQ ID NO: 708 - RNA, 20 nt, Artificial Sequence
  HTT spacer sequence ATCN PAM
gacccaaggacagccaaacc

SEQ ID NO: 709 - RNA, 20 nt, Artificial Sequence
  HTT spacer sequence ATCN PAM
ccugugcuccccuggcagca

SEQ ID NO: 710 - RNA, 20 nt, Artificial Sequence
  HTT spacer sequence ATCN PAM
ccaucaccugugcuccccug

SEQ ID NO: 711 - RNA, 20 nt, Artificial Sequence
  HTT spacer sequence ATCN PAM
aucaccaucaccugugcucc

SEQ ID NO: 712 - RNA, 20 nt, Artificial Sequence
  HTT spacer sequence ATCN PAM
gacccucauccaucaccauc

SEQ ID NO: 713 - RNA, 20 nt, Artificial Sequence
  HTT spacer sequence ATCN PAM
ucagacccucauccaucacc

SEQ ID NO: 714 - RNA, 20 nt, Artificial Sequence
  HTT spacer sequence ATCN PAM
gcagaggugugggugacuug

SEQ ID NO: 715 - RNA, 20 nt, Artificial Sequence
  HTT spacer sequence ATCN PAM
aaaguagccauuugcacacc

SEQ ID NO: 716 - RNA, 20 nt, Artificial Sequence
  HTT spacer sequence ATCN PAM
caaaauuaagugaccugaag

SEQ ID NO: 717 - RNA, 20 nt, Artificial Sequence
  HTT spacer sequence ATCN PAM
caguaaccagucauuuugca

SEQ ID NO: 718 - RNA, 20 nt, Artificial Sequence
  HTT spacer sequence ATCN PAM
cugaagguccugaaaaauca

SEQ ID NO: 719 - RNA, 20 nt, Artificial Sequence
  HTT spacer sequence ATCN PAM
aaggccuacuaacuucucac

SEQ ID NO: 720 - RNA, 20 nt, Artificial Sequence
  HTT spacer sequence ATCN PAM
acuaaggucaaauaaaaagu

SEQ ID NO: 721 - RNA, 20 nt, Artificial Sequence
  HTT spacer sequence ATCN PAM
uuaaaguaaaguuaaucuac

SEQ ID NO: 722 - RNA, 20 nt, Artificial Sequence
  HTT spacer sequence ATCN PAM
acaaaauacuucaagucucu

SEQ ID NO: 723 - RNA, 20 nt, Artificial Sequence
  HTT spacer sequence ATCN PAM
cugcucugucaugggacagc

SEQ ID NO: 724 - RNA, 20 nt, Artificial Sequence
  HTT spacer sequence ATCN PAM
agacauguucugaggcuggc

SEQ ID NO: 725 - RNA, 20 nt, Artificial Sequence
  HTT spacer sequence ATCN PAM
gagccagccucagaacaugu

SEQ ID NO: 726 - RNA, 20 nt, Artificial Sequence
  HTT spacer sequence ATCN PAM
agaagaaaacaaauaucuga

SEQ ID NO: 727 - RNA, 20 nt, Artificial Sequence
  HTT spacer sequence ATCN PAM
aaacaaauaguaauuauauu

SEQ ID NO: 728 - RNA, 20 nt, Artificial Sequence
  HTT spacer sequence ATCN PAM
uauuuacaucuguagaacca

SEQ ID NO: 729 - RNA, 20 nt, Artificial Sequence
  HTT spacer sequence ATCN PAM
guagaaccacuggccauuua

SEQ ID NO: 730 - RNA, 20 nt, Artificial Sequence
  HTT spacer sequence ATCN PAM
uuaaaaacaguugcaguuuu

SEQ ID NO: 731 - RNA, 20 nt, Artificial Sequence
  HTT spacer sequence ATCN PAM
uucagaguucauucuuuaaa

SEQ ID NO: 732 - RNA, 20 nt, Artificial Sequence
  HTT spacer sequence ATCN PAM
uuuuaaauagcuaauauaac

SEQ ID NO: 733 - RNA, 20 nt, Artificial Sequence
  HTT spacer sequence ATCN PAM
gucacuguugaauuuuauug

SEQ ID NO: 734 - RNA, 20 nt, Artificial Sequence
  HTT spacer sequence ATCN PAM
agcaauuuauaauuucaagg

SEQ ID NO: 735 - RNA, 20 nt, Artificial Sequence
  HTT spacer sequence ATCN PAM
uacagaguaaauaucuagca

SEQ ID NO: 736 - RNA, 20 nt, Artificial Sequence
  HTT spacer sequence ATCN PAM
cagagccuuaaauacuuaag

SEQ ID NO: 737 - RNA, 20 nt, Artificial Sequence
  HTT spacer sequence ATCN PAM
ugaguuaggcacaaaauuac

SEQ ID NO: 738 - RNA, 20 nt, Artificial Sequence
  HTT spacer sequence ATCN PAM
uaucaugaguuaggcacaaa

SEQ ID NO: 739 - RNA, 20 nt, Artificial Sequence
  HTT spacer sequence ATCN PAM
cuuuguaaccacugagaagg

SEQ ID NO: 740 - RNA, 20 nt, Artificial Sequence
  HTT spacer sequence ATCN PAM
uuuauuagcuaccugcacuc

SEQ ID NO: 741 - RNA, 20 nt, Artificial Sequence
  HTT spacer sequence ATCN PAM
uguauaggcugggcuuggug

SEQ ID NO: 742 - RNA, 20 nt, Artificial Sequence
  HTT spacer sequence ATCN PAM
cagcacuuugggaggccgag

SEQ ID NO: 743 - RNA, 20 nt, Artificial Sequence
  HTT spacer sequence ATCN PAM
gccuaccucggccucccaaa

SEQ ID NO: 744 - RNA, 20 nt, Artificial Sequence
  HTT spacer sequence ATCN PAM
cgaggucaggaauuugagau

SEQ ID NO: 745 - RNA, 20 nt, Artificial Sequence
  HTT spacer sequence ATCN PAM
caaauuccugaccucgugau

SEQ ID NO: 746 - RNA, 20 nt, Artificial Sequence
  HTT spacer sequence ATCN PAM
gccugaccgacgugaugaaa

SEQ ID NO: 747 - RNA, 20 nt, Artificial Sequence
  HTT spacer sequence ATCN PAM
cgucggucaggcugaucuca

SEQ ID NO: 748 - RNA, 20 nt, Artificial Sequence
  HTT spacer sequence ATCN PAM
cuacuaaaaauacaaaaacu

SEQ ID NO: 749 - RNA, 20 nt, Artificial Sequence
  HTT spacer sequence ATCN PAM
cagcuacucaggaggcugag

SEQ ID NO: 750 - RNA, 20 nt, Artificial Sequence
  HTT spacer sequence ATCN PAM
aggaggcggagguugcaaug

SEQ ID NO: 751 - RNA, 20 nt, Artificial Sequence
  HTT spacer sequence ATCN PAM
cagcucauugcaaccuccgc

SEQ ID NO: 752 - RNA, 20 nt, Artificial Sequence
  HTT spacer sequence ATCN PAM
cgccacugcacuccagccug

SEQ ID NO: 753 - RNA, 20 nt, Artificial Sequence
  HTT spacer sequence ATCN PAM
uuuucuuucuuucuuuuuuu

SEQ ID NO: 754 - RNA, 20 nt, Artificial Sequence
  HTT spacer sequence ATCN PAM
uauauaaaaaugcagaaaau

SEQ ID NO: 755 - RNA, 20 nt, Artificial Sequence
  HTT spacer sequence ATCN PAM
cagcacuuugggaggccgag

SEQ ID NO: 756 - RNA, 20 nt, Artificial Sequence
  HTT spacer sequence ATCN PAM
gcccgccucggccucccaaa

SEQ ID NO: 757 - RNA, 20 nt, Artificial Sequence
  HTT spacer sequence ATCN PAM
cgaggucaggagaucgagac

SEQ ID NO: 758 - RNA, 20 nt, Artificial Sequence
  HTT spacer sequence ATCN PAM
ccugaccucgugaucugccc

SEQ ID NO: 759 - RNA, 20 nt, Artificial Sequence
  HTT spacer sequence ATCN PAM
agaccauccuggccaacgug

SEQ ID NO: 760 - RNA, 20 nt, Artificial Sequence
  HTT spacer sequence ATCN PAM
uggccaacguggugaaaccc

SEQ ID NO: 761 - RNA, 20 nt, Artificial Sequence
  HTT spacer sequence ATCN PAM
uccugccucagccucccaag

SEQ ID NO: 762 - RNA, 20 nt, Artificial Sequence
  HTT spacer sequence ATCN PAM
uuugaacucgggaggcagag

SEQ ID NO: 763 - RNA, 20 nt, Artificial Sequence
  HTT spacer sequence ATCN PAM
uggcucacugcaaccucugc

SEQ ID NO: 764 - RNA, 20 nt, Artificial Sequence
  HTT spacer sequence ATCN PAM
caaaaaaaaaaaacaaaaaa

SEQ ID NO: 765 - RNA, 20 nt, Artificial Sequence
  HTT spacer sequence ATCN PAM
caauuuucuguuuuuuaauu

SEQ ID NO: 766 - RNA, 20 nt, Artificial Sequence
  HTT spacer sequence ATCN PAM
auaauacacacuuugucuug

SEQ ID NO: 767 - RNA, 20 nt, Artificial Sequence
  HTT spacer sequence ATCN PAM
ucccauuagacacucaacau

SEQ ID NO: 768 - RNA, 20 nt, Artificial Sequence
  HTT spacer sequence ATCN PAM
uucacauguccaucuuccca

SEQ ID NO: 769 - RNA, 20 nt, Artificial Sequence
  HTT spacer sequence ATCN PAM
uauauucauuauacuacaaa

SEQ ID NO: 770 - RNA, 20 nt, Artificial Sequence
  HTT spacer sequence ATCN PAM
cagcauugugagaggccgag

SEQ ID NO: 771 - RNA, 20 nt, Artificial Sequence
  HTT spacer sequence ATCN PAM
acccgccucggccucucaca

SEQ ID NO: 772 - RNA, 20 nt, Artificial Sequence
  HTT spacer sequence ATCN PAM
cgaggucaggagaucgagac

SEQ ID NO: 773 - RNA, 20 nt, Artificial Sequence
  HTT spacer sequence ATCN PAM
ccugaccucgugauccaccc

SEQ ID NO: 774 - RNA, 20 nt, Artificial Sequence
  HTT spacer sequence ATCN PAM
agaccauccuggcuaacaug

SEQ ID NO: 775 - RNA, 20 nt, Artificial Sequence
  HTT spacer sequence ATCN PAM
uggcuaacauggugaaaccc

SEQ ID NO: 776 - RNA, 20 nt, Artificial Sequence
  HTT spacer sequence ATCN PAM
cagcuacuugguaggcugag

SEQ ID NO: 777 - RNA, 20 nt, Artificial Sequence
  HTT spacer sequence ATCN PAM
cuugaaccugggagguggag

SEQ ID NO: 778 - RNA, 20 nt, Artificial Sequence
  HTT spacer sequence ATCN PAM
cggcucagugcaaccuccac

SEQ ID NO: 779 - RNA, 20 nt, Artificial Sequence
  HTT spacer sequence ATCN PAM
ugccacuacaccccagccug

SEQ ID NO: 780 - RNA, 20 nt, Artificial Sequence
  HTT spacer sequence ATCN PAM
auacgugucacacgcagcua

SEQ ID NO: 781 - RNA, 20 nt, Artificial Sequence
  HTT spacer sequence ATCN PAM
cuucaaaccccacuauggua

SEQ ID NO: 782 - RNA, 20 nt, Artificial Sequence
  HTT spacer sequence ATCN PAM
ccccgccuuuccuuuacaag

SEQ ID NO: 783 - RNA, 20 nt, Artificial Sequence
  HTT spacer sequence ATCN PAM
cuuccugccuucauacuugc

SEQ ID NO: 784 - RNA, 20 nt, Artificial Sequence
  HTT spacer sequence ATCN PAM
cccacuugaaacuccuuaca

SEQ ID NO: 785 - RNA, 20 nt, Artificial Sequence
  HTT spacer sequence ATCN PAM
ugcuugauccuuugcuaagg

SEQ ID NO: 786 - RNA, 20 nt, Artificial Sequence
  HTT spacer sequence ATCN PAM
agcaggauacaccaggcccu

SEQ ID NO: 787 - RNA, 20 nt, Artificial Sequence
  HTT spacer sequence ATCN PAM
uuugcuaaggacuugaucuu

SEQ ID NO: 788 - RNA, 20 nt, Artificial Sequence
  HTT spacer sequence ATCN PAM
aguccuuagcaaaggaucaa

SEQ ID NO: 789 - RNA, 20 nt, Artificial Sequence
  HTT spacer sequence ATCN PAM
uuuuaggcagcaggaacaau

SEQ ID NO: 790 - RNA, 20 nt, Artificial Sequence
  HTT spacer sequence ATCN PAM
aaggguuuaaggcagagaau

SEQ ID NO: 791 - RNA, 20 nt, Artificial Sequence
  HTT spacer sequence ATCN PAM
ccugucaaaacccccucaca

SEQ ID NO: 792 - RNA, 20 nt, Artificial Sequence
  HTT spacer sequence ATCN PAM
ggguugugcugcuguuaccc

SEQ ID NO: 793 - RNA, 20 nt, Artificial Sequence
  HTT spacer sequence ATCN PAM
ucucggguaacagcagcaca

SEQ ID NO: 794 - RNA, 20 nt, Artificial Sequence
  HTT spacer sequence ATCN PAM
uaggguaaaaacacaguaaa

SEQ ID NO: 795 - RNA, 20 nt, Artificial Sequence
  HTT spacer sequence ATCN PAM
guaaaguauuuuuaguaaau

SEQ ID NO: 796 - RNA, 20 nt, Artificial Sequence
  HTT spacer sequence ATCN PAM
ggguuuucauguuuaauuug

SEQ ID NO: 797 - RNA, 20 nt, Artificial Sequence
  HTT spacer sequence ATCN PAM
uaauagcauuuguuuucuug

SEQ ID NO: 798 - RNA, 20 nt, Artificial Sequence
  HTT spacer sequence ATCN PAM
uaaaagacauuaaaucauaa

SEQ ID NO: 799 - RNA, 20 nt, Artificial Sequence
  HTT spacer sequence ATCN PAM
guuuauucagaaaagguaaa

SEQ ID NO: 800 - RNA, 20 nt, Artificial Sequence
  HTT spacer sequence ATCN PAM
uagaugguagaacucagcug

SEQ ID NO: 801 - RNA, 20 nt, Artificial Sequence
  HTT spacer sequence ATCN PAM
augauguauuuuaccuuuuc

SEQ ID NO: 802 - RNA, 20 nt, Artificial Sequence
  HTT spacer sequence ATCN PAM
uagccauauguccguauucu

SEQ ID NO: 803 - RNA, 20 nt, Artificial Sequence
  HTT spacer sequence ATCN PAM
uggucccuuacauggauaua

SEQ ID NO: 804 - RNA, 20 nt, Artificial Sequence
  HTT spacer sequence ATCN PAM
auguaagggaccaagauaac

SEQ ID NO: 805 - RNA, 20 nt, Artificial Sequence
  HTT spacer sequence ATCN PAM
auguguuuguaggauuuggg

SEQ ID NO: 806 - RNA, 20 nt, Artificial Sequence
  HTT spacer sequence ATCN PAM
uacaaacacauagaugaaau

SEQ ID NO: 807 - RNA, 20 nt, Artificial Sequence
  HTT spacer sequence ATCN PAM
cccaaauccuacaaacacau

SEQ ID NO: 808 - RNA, 20 nt, Artificial Sequence
  HTT spacer sequence ATCN PAM
ucccccaaauccuacaaaca

SEQ ID NO: 809 - RNA, 20 nt, Artificial Sequence
  HTT spacer sequence ATCN PAM
caaaaaaaaaaauuauauau

SEQ ID NO: 810 - RNA, 20 nt, Artificial Sequence
  HTT spacer sequence ATCN PAM
cgccacugcauuccagccug

SEQ ID NO: 811 - RNA, 20 nt, Artificial Sequence
  HTT spacer sequence ATCN PAM
gcuugccgcaaccuccgccu

SEQ ID NO: 812 - RNA, 20 nt, Artificial Sequence
  HTT spacer sequence ATCN PAM
cuugaacccaugaggcggag

SEQ ID NO: 813 - RNA, 20 nt, Artificial Sequence
  HTT spacer sequence ATCN PAM
cagcuacucaagcugaggca

SEQ ID NO: 814 - RNA, 20 nt, Artificial Sequence
  HTT spacer sequence ATCN PAM
guaaucccagcuacucaagc

SEQ ID NO: 815 - RNA, 20 nt, Artificial Sequence
  HTT spacer sequence ATCN PAM
agaggucaggaguucaagac

SEQ ID NO: 816 - RNA, 20 nt, Artificial Sequence
  HTT spacer sequence ATCN PAM
gccugccucggccucacaga

SEQ ID NO: 817 - RNA, 20 nt, Artificial Sequence
  HTT spacer sequence ATCN PAM
caacacucugugaggccgag

SEQ ID NO: 818 - RNA, 20 nt, Artificial Sequence
  HTT spacer sequence ATCN PAM
auguaacuagauuucugcuu

SEQ ID NO: 819 - RNA, 20 nt, Artificial Sequence
  HTT spacer sequence ATCN PAM
aguuacauugauauuuuuaa

SEQ ID NO: 820 - RNA, 20 nt, Artificial Sequence
  HTT spacer sequence ATCN PAM
acuucuaguuacuaccucuu

SEQ ID NO: 821 - RNA, 20 nt, Artificial Sequence
  HTT spacer sequence ATCN PAM
uccugucucaaacagugaaa

SEQ ID NO: 822 - RNA, 20 nt, Artificial Sequence
  HTT spacer sequence ATCN PAM
cuguccugccugccuguggg

SEQ ID NO: 823 - RNA, 20 nt, Artificial Sequence
  HTT spacer sequence ATCN PAM
cugagagaagaagaauaacc

SEQ ID NO: 824 - RNA, 20 nt, Artificial Sequence
  HTT spacer sequence ATCN PAM
ucagacucggucuggguagc

SEQ ID NO: 825 - RNA, 20 nt, Artificial Sequence
  HTT spacer sequence ATCN PAM
ccuugauugaggaggcugag

SEQ ID NO: 826 - RNA, 20 nt, Artificial Sequence
  HTT spacer sequence ATCN PAM
aggagauccucagacucggu

SEQ ID NO: 827 - RNA, 20 nt, Artificial Sequence
  HTT spacer sequence ATCN PAM
uacaaccugcaggacccugg

SEQ ID NO: 828 - RNA, 20 nt, Artificial Sequence
  HTT spacer sequence ATCN PAM
uccuaagcugccacccaggg

SEQ ID NO: 829 - RNA, 20 nt, Artificial Sequence
  HTT spacer sequence ATCN PAM
gaacgccuuuccucuuaccc

SEQ ID NO: 830 - RNA, 20 nt, Artificial Sequence
  HTT spacer sequence ATCN PAM
gagcuucgucaugggccaua

SEQ ID NO: 831 - RNA, 20 nt, Artificial Sequence
  HTT spacer sequence ATCN PAM
acuucccuuccugcagcccu

SEQ ID NO: 832 - RNA, 20 nt, Artificial Sequence
  HTT spacer sequence ATCN PAM
gcaguucaggagccagacag

SEQ ID NO: 833 - RNA, 20 nt, Artificial Sequence
  HTT spacer sequence ATCN PAM
caucucucucugcacgcagc

SEQ ID NO: 834 - RNA, 20 nt, Artificial Sequence
  HTT spacer sequence ATCN PAM
cucucugcacgcagccucag

SEQ ID NO: 835 - RNA, 20 nt, Artificial Sequence
  HTT spacer sequence ATCN PAM
cuccuucugcucuugucagc

SEQ ID NO: 836 - RNA, 20 nt, Artificial Sequence
  HTT spacer sequence ATCN PAM
guacccuuuaacccggugga

SEQ ID NO: 837 - RNA, 20 nt, Artificial Sequence
  HTT spacer sequence ATCN PAM
ucuuugcuguuauguuuuuc

SEQ ID NO: 838 - RNA, 20 nt, Artificial Sequence
  HTT spacer sequence ATCN PAM
cuauuuaauuaguuaauuuu

SEQ ID NO: 839 - RNA, 20 nt, Artificial Sequence
  HTT spacer sequence ATCN PAM
caugcucagggacuggucca

SEQ ID NO: 840 - RNA, 20 nt, Artificial Sequence
  HTT spacer sequence ATCN PAM
uggaugacuggugaauguac

SEQ ID NO: 841 - RNA, 20 nt, Artificial Sequence
  HTT spacer sequence ATCN PAM
aggauuuacugagcccauca

SEQ ID NO: 842 - RNA, 20 nt, Artificial Sequence
  HTT spacer sequence ATCN PAM
uaauguuaagagccagaaau

SEQ ID NO: 843 - RNA, 20 nt, Artificial Sequence
  HTT spacer sequence ATCN PAM
cauucuguaauuaaaagggc

SEQ ID NO: 844 - RNA, 20 nt, Artificial Sequence
  HTT spacer sequence ATCN PAM
gaccuuucuggcuugcccuu

SEQ ID NO: 845 - RNA, 20 nt, Artificial Sequence
  HTT spacer sequence ATCN PAM
cuggcagaacagccauaccc

SEQ ID NO: 846 - RNA, 20 nt, Artificial Sequence
  HTT spacer sequence ATCN PAM
cuuuuccucaggucuuagaa

SEQ ID NO: 847 - RNA, 20 nt, Artificial Sequence
  HTT spacer sequence ATCN PAM
gugugccuuuuuuuuuuuuu

SEQ ID NO: 848 - RNA, 20 nt, Artificial Sequence
  HTT spacer sequence ATCN PAM
caaaagccuaaaugacgaca

SEQ ID NO: 849 - RNA, 20 nt, Artificial Sequence
  HTT spacer sequence ATCN PAM
auguauuuuuccauaccaac

SEQ ID NO: 850 - RNA, 20 nt, Artificial Sequence
  HTT spacer sequence ATCN PAM
ugagcugaauguuuggggca

SEQ ID NO: 851 - RNA, 20 nt, Artificial Sequence
  HTT spacer sequence ATCN PAM
acaggguugugaguuuuccc

SEQ ID NO: 852 - RNA, 20 nt, Artificial Sequence
  HTT spacer sequence ATCN PAM
aaacugcugacuccuguuac

SEQ ID NO: 853 - RNA, 20 nt, Artificial Sequence
  HTT spacer sequence ATCN PAM
cugguucauggaaacaugug

SEQ ID NO: 854 - RNA, 20 nt, Artificial Sequence
  HTT spacer sequence ATCN PAM
uuugagucuugcugguauug

SEQ ID NO: 855 - RNA, 20 nt, Artificial Sequence
  HTT spacer sequence ATCN PAM
cuaauucauucauuuauaca

SEQ ID NO: 856 - RNA, 20 nt, Artificial Sequence
  HTT spacer sequence ATCN PAM
guuauguacaguggguccuu

SEQ ID NO: 857 - RNA, 20 nt, Artificial Sequence
  HTT spacer sequence ATCN PAM
caccaccgguauucaaaagg

SEQ ID NO: 858 - RNA, 20 nt, Artificial Sequence
  HTT spacer sequence ATCN PAM
ccacccagaagcuucuccaa

SEQ ID NO: 859 - RNA, 20 nt, Artificial Sequence
  HTT spacer sequence ATCN PAM
uaagacggguccuucacaca

SEQ ID NO: 860 - RNA, 20 nt, Artificial Sequence
  HTT spacer sequence ATCN PAM
acccaauccuaagacggguc

SEQ ID NO: 861 - RNA, 20 nt, Artificial Sequence
  HTT spacer sequence ATCN PAM
ugugucucccccgacacaca

SEQ ID NO: 862 - RNA, 20 nt, Artificial Sequence
  HTT spacer sequence ATCN PAM
cgccacugcauuccagccug

SEQ ID NO: 863 - RNA, 20 nt, Artificial Sequence
  HTT spacer sequence ATCN PAM
uggcucacugcaaccuccac

SEQ ID NO: 864 - RNA, 20 nt, Artificial Sequence
  HTT spacer sequence ATCN PAM
uuugaaccuggaagguggag

SEQ ID NO: 865 - RNA, 20 nt, Artificial Sequence
  HTT spacer sequence ATCN PAM
cagcuacucaggaggcugac

SEQ ID NO: 866 - RNA, 20 nt, Artificial Sequence
  HTT spacer sequence ATCN PAM
agccuggccaacauggugaa

SEQ ID NO: 867 - RNA, 20 nt, Artificial Sequence
  HTT spacer sequence ATCN PAM
ugccacugcacucuagccug

SEQ ID NO: 868 - RNA, 20 nt, Artificial Sequence
  HTT spacer sequence ATCN PAM
cagcucacuacagccucgac

SEQ ID NO: 869 - RNA, 20 nt, Artificial Sequence
  HTT spacer sequence ATCN PAM
ucucaccucagccucccuag

SEQ ID NO: 870 - RNA, 20 nt, Artificial Sequence
  HTT spacer sequence ATCN PAM
aacuauuagccaggcauagu

SEQ ID NO: 871 - RNA, 20 nt, Artificial Sequence
  HTT spacer sequence ATCN PAM
uuugagcucagagguuugag

SEQ ID NO: 872 - RNA, 20 nt, Artificial Sequence
  HTT spacer sequence ATCN PAM
ucucaccucugccuccccag

SEQ ID NO: 873 - RNA, 20 nt, Artificial Sequence
  HTT spacer sequence ATCN PAM
caccucugccuccccaggug

SEQ ID NO: 874 - RNA, 20 nt, Artificial Sequence
  HTT spacer sequence ATCN PAM
cagcaccuggggaggcagag

SEQ ID NO: 875 - RNA, 20 nt, Artificial Sequence
  HTT spacer sequence ATCN PAM
caggcguaagccacugugcc

SEQ ID NO: 876 - RNA, 20 nt, Artificial Sequence
  HTT spacer sequence ATCN PAM
gaaaaaaaauaaaauuagcc

SEQ ID NO: 877 - RNA, 20 nt, Artificial Sequence
  HTT spacer sequence ATCN PAM
uuugagagguuuuaagguau

SEQ ID NO: 878 - RNA, 20 nt, Artificial Sequence
  HTT spacer sequence ATCN PAM
ugccuuuuccuccuaccucu

SEQ ID NO: 879 - RNA, 20 nt, Artificial Sequence
  HTT spacer sequence ATCN PAM
gcauuuucaaauagguccua

SEQ ID NO: 880 - RNA, 20 nt, Artificial Sequence
  HTT spacer sequence ATCN PAM
ggugauaagagaugagcuca

SEQ ID NO: 881 - RNA, 20 nt, Artificial Sequence
  HTT spacer sequence ATCN PAM
ccugauguaaauaaacaucu

SEQ ID NO: 882 - RNA, 20 nt, Artificial Sequence
  HTT spacer sequence ATCN PAM
cuuaucaccugauguaaaua

SEQ ID NO: 883 - RNA, 20 nt, Artificial Sequence
  HTT spacer sequence ATCN PAM
uuacugcugggccuggaagg

SEQ ID NO: 884 - RNA, 20 nt, Artificial Sequence
  HTT spacer sequence ATCN PAM
aaggcccagacgcccuucca

SEQ ID NO: 885 - RNA, 20 nt, Artificial Sequence
  HTT spacer sequence ATCN PAM
gcucccuguuuaucuugaau

SEQ ID NO: 886 - RNA, 20 nt, Artificial Sequence
  HTT spacer sequence ATCN PAM
ugaaucuggaauuuggacag

SEQ ID NO: 887 - RNA, 20 nt, Artificial Sequence
  HTT spacer sequence ATCN PAM
ggaauuuggacagccgaccu

SEQ ID NO: 888 - RNA, 20 nt, Artificial Sequence
  HTT spacer sequence ATCN PAM
uugaggucggcuguccaaau

SEQ ID NO: 889 - RNA, 20 nt, Artificial Sequence
  HTT spacer sequence ATCN PAM
gcagacacacuuaagccaga

SEQ ID NO: 890 - RNA, 20 nt, Artificial Sequence
  HTT spacer sequence ATCN PAM
ugaaucugagcccuggugug

SEQ ID NO: 891 - RNA, 20 nt, Artificial Sequence
  HTT spacer sequence ATCN PAM
gagcccuggugugcagaugc

SEQ ID NO: 892 - RNA, 20 nt, Artificial Sequence
  HTT spacer sequence ATCN PAM
gcacaccagggcucagauuc

SEQ ID NO: 893 - RNA, 20 nt, Artificial Sequence
  HTT spacer sequence ATCN PAM
ugggcggccccaccccugcc

SEQ ID NO: 894 - RNA, 20 nt, Artificial Sequence
  HTT spacer sequence ATCN PAM
ggaccacggggcuggggggg

SEQ ID NO: 895 - RNA, 20 nt, Artificial Sequence
  HTT spacer sequence ATCN PAM
uggagguccgagcugggcgu

SEQ ID NO: 896 - RNA, 20 nt, Artificial Sequence
  HTT spacer sequence ATCN PAM
aaacuucccucugcagcggc

SEQ ID NO: 897 - RNA, 20 nt, Artificial Sequence
  HTT spacer sequence ATCN PAM
gcgccagugggcggcuuuuc

SEQ ID NO: 898 - RNA, 20 nt, Artificial Sequence
  HTT spacer sequence ATCN PAM
gucacucacacuucagugug

SEQ ID NO: 899 - RNA, 20 nt, Artificial Sequence
  HTT spacer sequence ATCN PAM
cagggguggcagagggacug

SEQ ID NO: 900 - RNA, 20 nt, Artificial Sequence
  HTT spacer sequence ATCN PAM
ccucucugugccucaguuug

SEQ ID NO: 901 - RNA, 20 nt, Artificial Sequence
  HTT spacer sequence ATCN PAM
guugacacuggggacagcug

SEQ ID NO: 902 - RNA, 20 nt, Artificial Sequence
  HTT spacer sequence ATCN PAM
aggcaggcuguccaccccag

SEQ ID NO: 903 - RNA, 20 nt, Artificial Sequence
  HTT spacer sequence ATCN PAM
ccggcccaugucaccugcaa

SEQ ID NO: 904 - RNA, 20 nt, Artificial Sequence
  HTT spacer sequence ATCN PAM
ucacucccuugcagcccucg

SEQ ID NO: 905 - RNA, 20 nt, Artificial Sequence
  HTT spacer sequence ATCN PAM
ccucucccugccacccgcca

SEQ ID NO: 906 - RNA, 20 nt, Artificial Sequence
  HTT spacer sequence ATCN PAM
gucuuccuucugccugcccc

SEQ ID NO: 907 - RNA, 20 nt, Artificial Sequence
  HTT spacer sequence ATCN PAM
ggugagaggggugcugacag

SEQ ID NO: 908 - RNA, 20 nt, Artificial Sequence
  HTT spacer sequence ATCN PAM
uggaggccuggggacucccu

SEQ ID NO: 909 - RNA, 20 nt, Artificial Sequence
  HTT spacer sequence ATCN PAM
ugggggagcccaccaaggag

SEQ ID NO: 910 - RNA, 20 nt, Artificial Sequence
  HTT spacer sequence ATCN PAM
cugggggguggggagcucca

SEQ ID NO: 911 - RNA, 20 nt, Artificial Sequence
  HTT spacer sequence ATCN PAM
cgucucucugggccccugga

SEQ ID NO: 912 - RNA, 20 nt, Artificial Sequence
  HTT spacer sequence ATCN PAM
uggcugaguuugcgcccuuc

SEQ ID NO: 913 - RNA, 20 nt, Artificial Sequence
  HTT spacer sequence ATCN PAM
ugggugugaacucagaugcc

SEQ ID NO: 914 - RNA, 20 nt, Artificial Sequence
  HTT spacer sequence ATCN PAM
gaguucacacccaagauccu

SEQ ID NO: 915 - RNA, 20 nt, Artificial Sequence
  HTT spacer sequence ATCN PAM
cacagcuggaaacugguggc

SEQ ID NO: 916 - RNA, 20 nt, Artificial Sequence
  HTT spacer sequence ATCN PAM
uggccaggaggcuucccccu

SEQ ID NO: 917 - RNA, 20 nt, Artificial Sequence
  HTT spacer sequence ATCN PAM
augaccugagggcugugaag

SEQ ID NO: 918 - RNA, 20 nt, Artificial Sequence
  HTT spacer sequence ATCN PAM
ccccuacggacacucauagc

SEQ ID NO: 919 - RNA, 20 nt, Artificial Sequence
  HTT spacer sequence ATCN PAM
ggaguggccaguguugggca

SEQ ID NO: 920 - RNA, 20 nt, Artificial Sequence
  HTT spacer sequence ATCN PAM
ugaggucaagagaggacaga

SEQ ID NO: 921 - RNA, 20 nt, Artificial Sequence
  HTT spacer sequence ATCN PAM
gcccaccucccaaagugcug

SEQ ID NO: 922 - RNA, 20 nt, Artificial Sequence
  HTT spacer sequence ATCN PAM
cagcacuuugggaggugggc

SEQ ID NO: 923 - RNA, 20 nt, Artificial Sequence
  HTT spacer sequence ATCN PAM
cugugcagccugggugggug

SEQ ID NO: 924 - RNA, 20 nt, Artificial Sequence
  HTT spacer sequence ATCN PAM
cuccuccugacggcccaccc

SEQ ID NO: 925 - RNA, 20 nt, Artificial Sequence
  HTT spacer sequence ATCN PAM
gagccgggcgggcagccaug

SEQ ID NO: 926 - RNA, 20 nt, Artificial Sequence
  HTT spacer sequence ATCN PAM
uuccuccaggauaggcggcu

SEQ ID NO: 927 - RNA, 20 nt, Artificial Sequence
  HTT spacer sequence ATCN PAM
uggaggaaggauuccagggu

SEQ ID NO: 928 - RNA, 20 nt, Artificial Sequence
  HTT spacer sequence ATCN PAM
ugucuacccucccgugcaca

SEQ ID NO: 929 - RNA, 20 nt, Artificial Sequence
  HTT spacer sequence ATCN PAM
ggaaacugagggucaggaag

SEQ ID NO: 930 - RNA, 20 nt, Artificial Sequence
  HTT spacer sequence ATCN PAM
gcaaaacgggaugacagaag

SEQ ID NO: 931 - RNA, 20 nt, Artificial Sequence
  HTT spacer sequence ATCN PAM
cguuuugcagaucaggaaac

SEQ ID NO: 932 - RNA, 20 nt, Artificial Sequence
  HTT spacer sequence ATCN PAM
agcagcgugguccagagcca

SEQ ID NO: 933 - RNA, 20 nt, Artificial Sequence
  HTT spacer sequence ATCN PAM
uucaagggugacgcgagaga

SEQ ID NO: 934 - RNA, 20 nt, Artificial Sequence
  HTT spacer sequence ATCN PAM
ggggccgggaaaccaagcag

SEQ ID NO: 935 - RNA, 20 nt, Artificial Sequence
  HTT spacer sequence ATCN PAM
cagaucgugcuggaacugcu

SEQ ID NO: 936 - RNA, 20 nt, Artificial Sequence
  HTT spacer sequence ATCN PAM
gugaucgggggccgggaaac

SEQ ID NO: 937 - RNA, 20 nt, Artificial Sequence
  HTT spacer sequence ATCN PAM
ugcuggaacugcuggcccca

SEQ ID NO: 938 - RNA, 20 nt, Artificial Sequence
  HTT spacer sequence ATCN PAM
augaagaaagggccagucac

SEQ ID NO: 939 - RNA, 20 nt, Artificial Sequence
  HTT spacer sequence ATCN PAM
gguccaucuuugucagcugg

SEQ ID NO: 940 - RNA, 20 nt, Artificial Sequence
  HTT spacer sequence ATCN PAM
uugucagcuggccucuggga

SEQ ID NO: 941 - RNA, 20 nt, Artificial Sequence
  HTT spacer sequence ATCN PAM
ccccaggcaacugcuccagg

SEQ ID NO: 942 - RNA, 20 nt, Artificial Sequence
  HTT spacer sequence ATCN PAM
gaggagcccugagggguugg

SEQ ID NO: 943 - RNA, 20 nt, Artificial Sequence
  HTT spacer sequence ATCN PAM
auacccccaucccuguagcu

SEQ ID NO: 944 - RNA, 20 nt, Artificial Sequence
  HTT spacer sequence ATCN PAM
cuguagcugagcugauucca

SEQ ID NO: 945 - RNA, 20 nt, Artificial Sequence
  HTT spacer sequence ATCN PAM
gcucagcuacagggaugggg

SEQ ID NO: 946 - RNA, 20 nt, Artificial Sequence
  HTT spacer sequence ATCN PAM
gauguuuacugcgcuccugc

SEQ ID NO: 947 - RNA, 20 nt, Artificial Sequence
  HTT spacer sequence ATCN PAM
gauucacaaggaagcagagg

SEQ ID NO: 948 - RNA, 20 nt, Artificial Sequence
  HTT spacer sequence ATCN PAM
ggccucccaugaguuagacc

SEQ ID NO: 949 - RNA, 20 nt, Artificial Sequence
  HTT spacer sequence ATCN PAM
ccaggcccgagcuagggccu

SEQ ID NO: 950 - RNA, 20 nt, Artificial Sequence
  HTT spacer sequence ATCN PAM
aggcugaaggaacuccccca

SEQ ID NO: 951 - RNA, 20 nt, Artificial Sequence
  HTT spacer sequence ATCN PAM
agggguguuguaaucuagug

SEQ ID NO: 952 - RNA, 20 nt, Artificial Sequence
  HTT spacer sequence ATCN PAM
agugaugcucuucuguggca

SEQ ID NO: 953 - RNA, 20 nt, Artificial Sequence
  HTT spacer sequence ATCN PAM
cuagauuacaacaccccugg

SEQ ID NO: 954 - RNA, 20 nt, Artificial Sequence
  HTT spacer sequence ATCN PAM
cuucccaccuuguccagggg

SEQ ID NO: 955 - RNA, 20 nt, Artificial Sequence
  HTT spacer sequence ATCN PAM
ggggucauucugggagccug

SEQ ID NO: 956 - RNA, 20 nt, Artificial Sequence
  HTT spacer sequence ATCN PAM
auggugaccuguccgccugc

SEQ ID NO: 957 - RNA, 20 nt, Artificial Sequence
  HTT spacer sequence ATCN PAM
gagccuaaugugccagucag

SEQ ID NO: 958 - RNA, 20 nt, Artificial Sequence
  HTT spacer sequence ATCN PAM
gauaauaucagacuguugug

SEQ ID NO: 959 - RNA, 20 nt, Artificial Sequence
  HTT spacer sequence ATCN PAM
gauuggaaacuccaccaacu

SEQ ID NO: 960 - RNA, 20 nt, Artificial Sequence
  HTT spacer sequence ATCN PAM
gacuguugugcuuuggucuc

SEQ ID NO: 961 - RNA, 20 nt, Artificial Sequence
  HTT spacer sequence ATCN PAM
cagccuccucccuucccccu

SEQ ID NO: 962 - RNA, 20 nt, Artificial Sequence
  HTT spacer sequence ATCN PAM
accgcugccagggccaccga

SEQ ID NO: 963 - RNA, 20 nt, Artificial Sequence
  HTT spacer sequence ATCN PAM
caagccaacacacguuuagg

SEQ ID NO: 964 - RNA, 20 nt, Artificial Sequence
  HTT spacer sequence ATCN PAM
ggccuuuugcuuggacuugc

SEQ ID NO: 965 - RNA, 20 nt, Artificial Sequence
  HTT spacer sequence ATCN PAM
uuccccauugcccuccuaau

SEQ ID NO: 966 - RNA, 20 nt, Artificial Sequence
  HTT spacer sequence ATCN PAM
agaaaagcuggccugggagc

SEQ ID NO: 967 - RNA, 20 nt, Artificial Sequence
  HTT spacer sequence ATCN PAM
ccucucucggaaacgccccu

SEQ ID NO: 968 - RNA, 20 nt, Artificial Sequence
  HTT spacer sequence ATCN PAM
gcggaccgccucgggcagcg

SEQ ID NO: 969 - RNA, 20 nt, Artificial Sequence
  HTT spacer sequence ATCN PAM
gcccagccaucagcggaccg

SEQ ID NO: 970 - RNA, 20 nt, Artificial Sequence
  HTT spacer sequence ATCN PAM
gccugccaggccaggcccca

SEQ ID NO: 971 - RNA, 20 nt, Artificial Sequence
  HTT spacer sequence ATCN PAM
guggucagcagagugaguuu

SEQ ID NO: 972 - RNA, 20 nt, Artificial Sequence
  HTT spacer sequence ATCN PAM
uccccucugcccuggucaaa

SEQ ID NO: 973 - RNA, 20 nt, Artificial Sequence
  HTT spacer sequence ATCN PAM
cccgagcugggggaagugac

SEQ ID NO: 974 - RNA, 20 nt, Artificial Sequence
  HTT spacer sequence ATCN PAM
ccucuuguggccucaggcgu

SEQ ID NO: 975 - RNA, 20 nt, Artificial Sequence
  HTT spacer sequence ATCN PAM
uccgccuucucugggcaggg

SEQ ID NO: 976 - RNA, 20 nt, Artificial Sequence
  HTT spacer sequence ATCN PAM
caugaggcugcacuuccugu

SEQ ID NO: 977 - RNA, 20 nt, Artificial Sequence
  HTT spacer sequence ATCN PAM
agcugcuggggcggggugug

SEQ ID NO: 978 - RNA, 20 nt, Artificial Sequence
  HTT spacer sequence ATCN PAM
aggccuccgggcugauuagg

SEQ ID NO: 979 - RNA, 20 nt, Artificial Sequence
  HTT spacer sequence ATCN PAM
gcccggaggccucgaugacc

SEQ ID NO: 980 - RNA, 20 nt, Artificial Sequence
  HTT spacer sequence ATCN PAM
cugaaaugccuuccccucgg

SEQ ID NO: 981 - RNA, 20 nt, Artificial Sequence
  HTT spacer sequence ATCN PAM
caccucauuaggcagcugca

SEQ ID NO: 982 - RNA, 20 nt, Artificial Sequence
  HTT spacer sequence ATCN PAM
ugggguccugggugcuggcu

SEQ ID NO: 983 - RNA, 20 nt, Artificial Sequence
  HTT spacer sequence ATCN PAM
cagagagccccugccccaag

SEQ ID NO: 984 - RNA, 20 nt, Artificial Sequence
  HTT spacer sequence ATCN PAM
accuucccauuuucuugagg

SEQ ID NO: 985 - RNA, 20 nt, Artificial Sequence
  HTT spacer sequence ATCN PAM
ucaagaaaaugggaagguug

SEQ ID NO: 986 - RNA, 20 nt, Artificial Sequence
  HTT spacer sequence ATCN PAM
cccuccuggucacauccuca

SEQ ID NO: 987 - RNA, 20 nt, Artificial Sequence
  HTT spacer sequence ATCN PAM
ucuuccuuccccagcaacuu

SEQ ID NO: 988 - RNA, 20 nt, Artificial Sequence
  HTT spacer sequence ATCN PAM
ucugcagagguggggguugg

SEQ ID NO: 989 - RNA, 20 nt, Artificial Sequence
  HTT spacer sequence ATCN PAM
agcgggccuugccccaugcc

SEQ ID NO: 990 - RNA, 20 nt, Artificial Sequence
  HTT spacer sequence ATCN PAM
aggggacagcuauuccaggg

SEQ ID NO: 991 - RNA, 20 nt, Artificial Sequence
  HTT spacer sequence ATCN PAM
uuggugcugccuuuucccag

SEQ ID NO: 992 - RNA, 20 nt, Artificial Sequence
  HTT spacer sequence ATCN PAM
gugaggcgccccuggcaucu

SEQ ID NO: 993 - RNA, 20 nt, Artificial Sequence
  HTT spacer sequence ATCN PAM
ccccgggggggccuccuuga

SEQ ID NO: 994 - RNA, 20 nt, Artificial Sequence
  HTT spacer sequence ATCN PAM
uggucacgucaccuccucca

SEQ ID NO: 995 - RNA, 20 nt, Artificial Sequence
  HTT spacer sequence ATCN PAM
ccuguagccccugugcaggg

SEQ ID NO: 996 - RNA, 20 nt, Artificial Sequence
  HTT spacer sequence ATCN PAM
cagcagucugcugcucccuc

SEQ ID NO: 997 - RNA, 20 nt, Artificial Sequence
  HTT spacer sequence ATCN PAM
ccaagucacuccugaggcug

SEQ ID NO: 998 - RNA, 20 nt, Artificial Sequence
  HTT spacer sequence ATCN PAM
gacagggagguggcacagcc

SEQ ID NO: 999 - RNA, 20 nt, Artificial Sequence
  HTT spacer sequence ATCN PAM
gcccggggggggggcgguca

SEQ ID NO: 1000 - RNA, 20 nt, Artificial Sequence
  HTT spacer sequence ATCN PAM
ccagggagcaguaagggcau

SEQ ID NO: 1001 - RNA, 20 nt, Artificial Sequence
  HTT spacer sequence ATCN PAM
gggucuccuccucuccgccc

SEQ ID NO: 1002 - RNA, 20 nt, Artificial Sequence
  HTT spacer sequence ATCN PAM
agacuccaccccugccuguc

SEQ ID NO: 1003 - RNA, 20 nt, Artificial Sequence
  HTT spacer sequence ATCN PAM
uguccccugcccgggccccg

SEQ ID NO: 1004 - RNA, 20 nt, Artificial Sequence
  HTT spacer sequence ATCN PAM
cccuuccccuguccggccag

SEQ ID NO: 1005 - RNA, 20 nt, Artificial Sequence
  HTT spacer sequence ATCN PAM
gggugggagagcaggccaca

SEQ ID NO: 1006 - RNA, 20 nt, Artificial Sequence
  HTT spacer sequence ATCN PAM
gggaaaaaaacccauguuag

SEQ ID NO: 1007 - RNA, 20 nt, Artificial Sequence
  HTT spacer sequence ATCN PAM
cagcacuuugggaggccaag

SEQ ID NO: 1008 - RNA, 20 nt, Artificial Sequence
  HTT spacer sequence ATCN PAM
acccgccuuggccucccaaa

SEQ ID NO: 1009 - RNA, 20 nt, Artificial Sequence
  HTT spacer sequence ATCN PAM
cagcuacucgggaggcugag

SEQ ID NO: 1010 - RNA, 20 nt, Artificial Sequence
  HTT spacer sequence ATCN PAM
uugcucacuccaaccucugc

SEQ ID NO: 1011 - RNA, 20 nt, Artificial Sequence
  HTT spacer sequence ATCN PAM
ggucucucugucacccaggc

SEQ ID NO: 1012 - RNA, 20 nt, Artificial Sequence
  HTT spacer sequence ATCN PAM
caaaaaaaaaggggccgggc

SEQ ID NO: 1013 - RNA, 20 nt, Artificial Sequence
  HTT spacer sequence ATCN PAM
cagcacuuugggaggccgag

SEQ ID NO: 1014 - RNA, 20 nt, Artificial Sequence
  HTT spacer sequence ATCN PAM
gccggccucggccucccaaa

SEQ ID NO: 1015 - RNA, 20 nt, Artificial Sequence
  HTT spacer sequence ATCN PAM
ccugaggucaggaguucaag

SEQ ID NO: 1016 - RNA, 20 nt, Artificial Sequence
  HTT spacer sequence ATCN PAM
cagcuauaggaggcugaggc

SEQ ID NO: 1017 - RNA, 20 nt, Artificial Sequence
  HTT spacer sequence ATCN PAM
uggcucauugcaaccucugu

SEQ ID NO: 1018 - RNA, 20 nt, Artificial Sequence
  HTT spacer sequence ATCN PAM
ugccacugcauucuagccug

SEQ ID NO: 1019 - RNA, 20 nt, Artificial Sequence
  HTT spacer sequence ATCN PAM
auauacacacacacacguaa

SEQ ID NO: 1020 - RNA, 20 nt, Artificial Sequence
  HTT spacer sequence ATCN PAM
uuuuucccuaacguuacgug

SEQ ID NO: 1021 - RNA, 20 nt, Artificial Sequence
  HTT spacer sequence ATCN PAM
cagcgaaugcauuaaggcag

SEQ ID NO: 1022 - RNA, 20 nt, Artificial Sequence
  HTT spacer sequence ATCN PAM
gucagcgggugccacaggcu

SEQ ID NO: 1023 - RNA, 20 nt, Artificial Sequence
  HTT spacer sequence ATCN PAM
uggcuccucugugcaccacu

SEQ ID NO: 1024 - RNA, 20 nt, Artificial Sequence
  HTT spacer sequence ATCN PAM
ggacaagcuccugggucagg

SEQ ID NO: 1025 - RNA, 20 nt, Artificial Sequence
  HTT spacer sequence ATCN PAM
ccgugguacuuuucguaccg

SEQ ID NO: 1026 - RNA, 20 nt, Artificial Sequence
  HTT spacer sequence ATCN PAM
ugguggcuccugaccucugc

SEQ ID NO: 1027 - RNA, 20 nt, Artificial Sequence
  HTT spacer sequence ATCN PAM
ccacucuguucccuuguuau

SEQ ID NO: 1028 - RNA, 20 nt, Artificial Sequence
  HTT spacer sequence ATCN PAM
cgcccuggugcugggauccg

SEQ ID NO: 1029 - RNA, 20 nt, Artificial Sequence
  HTT spacer sequence ATCN PAM
cagcaccagggcgagauaac

SEQ ID NO: 1030 - RNA, 20 nt, Artificial Sequence
  HTT spacer sequence ATCN PAM
gggauaagcagggugcuguc

SEQ ID NO: 1031 - RNA, 20 nt, Artificial Sequence
  HTT spacer sequence ATCN PAM
cggaucccagcaccagggcg

SEQ ID NO: 1032 - RNA, 20 nt, Artificial Sequence
  HTT spacer sequence ATCN PAM
cagggaaggucugagaugcu

SEQ ID NO: 1033 - RNA, 20 nt, Artificial Sequence
  HTT spacer sequence ATCN PAM
cagaccuucccugggaugag

SEQ ID NO: 1034 - RNA, 20 nt, Artificial Sequence
  HTT spacer sequence ATCN PAM
caugcuuggcuaacucaugu

SEQ ID NO: 1035 - RNA, 20 nt, Artificial Sequence
  HTT spacer sequence ATCN PAM
uccacaugaguuagccaagc

SEQ ID NO: 1036 - RNA, 20 nt, Artificial Sequence
  HTT spacer sequence ATCN PAM
gccagcguccugggagcaau

SEQ ID NO: 1037 - RNA, 20 nt, Artificial Sequence
  HTT spacer sequence ATCN PAM
guuccacccagacacguuga

SEQ ID NO: 1038 - RNA, 20 nt, Artificial Sequence
  HTT spacer sequence ATCN PAM
uugugacaucuguuccaccc

SEQ ID NO: 1039 - RNA, 20 nt, Artificial Sequence
  HTT spacer sequence ATCN PAM
guuagggaggcagccaccuc

SEQ ID NO: 1040 - RNA, 20 nt, Artificial Sequence
  HTT spacer sequence ATCN PAM
aagcuacugucacccucugu

SEQ ID NO: 1041 - RNA, 20 nt, Artificial Sequence
  HTT spacer sequence ATCN PAM
cgggugcaggguguggcguu

SEQ ID NO: 1042 - RNA, 20 nt, Artificial Sequence
  HTT spacer sequence ATCN PAM
ggcacaggggaggcacucag

SEQ ID NO: 1043 - RNA, 20 nt, Artificial Sequence
  HTT spacer sequence ATCN PAM
gagucucugcggaugcgugg

SEQ ID NO: 1044 - RNA, 20 nt, Artificial Sequence
  HTT spacer sequence ATCN PAM
gcagagacucggaugaggaa

SEQ ID NO: 1045 - RNA, 20 nt, Artificial Sequence
  HTT spacer sequence ATCN PAM
caagagccccuggggaggcu

SEQ ID NO: 1046 - RNA, 20 nt, Artificial Sequence
  HTT spacer sequence ATCN PAM
guuuaaaacagaagcagcuc

SEQ ID NO: 1047 - RNA, 20 nt, Artificial Sequence
  HTT spacer sequence ATCN PAM
ggagaacaaaacgagcaguu

SEQ ID NO: 1048 - RNA, 20 nt, Artificial Sequence
  HTT spacer sequence ATCN PAM
ccaacugcucguuuuguucu

SEQ ID NO: 1049 - RNA, 20 nt, Artificial Sequence
  HTT spacer sequence ATCN PAM
caagaggugacugugggcag

SEQ ID NO: 1050 - RNA, 20 nt, Artificial Sequence
  HTT spacer sequence ATCN PAM
caggagggucugguuggcgg

SEQ ID NO: 1051 - RNA, 20 nt, Artificial Sequence
  HTT spacer sequence ATCN PAM
agaggaagcagaagcagagg

SEQ ID NO: 1052 - RNA, 20 nt, Artificial Sequence
  HTT spacer sequence ATCN PAM
gccgggcaccuuccucaucu

SEQ ID NO: 1053 - RNA, 20 nt, Artificial Sequence
  HTT spacer sequence ATCN PAM
gcuguggccgggacacccca

SEQ ID NO: 1054 - RNA, 20 nt, Artificial Sequence
  HTT spacer sequence ATCN PAM
gcucagugacugcugcugcc

SEQ ID NO: 1055 - RNA, 20 nt, Artificial Sequence
  HTT spacer sequence ATCN PAM
augaggaugcuggggccggg

SEQ ID NO: 1056 - RNA, 20 nt, Artificial Sequence
  HTT spacer sequence ATCN PAM
auaggcaagggcagcagcag

SEQ ID NO: 1057 - RNA, 20 nt, Artificial Sequence
  HTT spacer sequence ATCN PAM
ucaucgauaggcaagggcag

SEQ ID NO: 1058 - RNA, 20 nt, Artificial Sequence
  HTT spacer sequence ATCN PAM
cgggggaccccuggcugcag

SEQ ID NO: 1059 - RNA, 20 nt, Artificial Sequence
  HTT spacer sequence ATCN PAM
ggccagccccaggcacccca

SEQ ID NO: 1060 - RNA, 20 nt, Artificial Sequence
  HTT spacer sequence ATCN PAM
cugcauguccgucccccaug

SEQ ID NO: 1061 - RNA, 20 nt, Artificial Sequence
  HTT spacer sequence ATCN PAM
cuccccacagaacugguguc

SEQ ID NO: 1062 - RNA, 20 nt, Artificial Sequence
  HTT spacer sequence ATCN PAM
gccccuccccugacaccagu

SEQ ID NO: 1063 - RNA, 20 nt, Artificial Sequence
  HTT spacer sequence ATCN PAM
gcaggcccugggccuucucc

SEQ ID NO: 1064 - RNA, 20 nt, Artificial Sequence
  HTT spacer sequence ATCN PAM
agaccacacuccccugggcu

SEQ ID NO: 1065 - RNA, 20 nt, Artificial Sequence
  HTT spacer sequence ATCN PAM
ccuccuccuggccuguggcc

SEQ ID NO: 1066 - RNA, 20 nt, Artificial Sequence
  HTT spacer sequence ATCN PAM
ggacucuggagaauuuuuuc

SEQ ID NO: 1067 - RNA, 20 nt, Artificial Sequence
  HTT spacer sequence ATCN PAM
cuugagaaaaaauucuccag

SEQ ID NO: 1068 - RNA, 20 nt, Artificial Sequence
  HTT spacer sequence ATCN PAM
ugagccgccucugcugcuug

SEQ ID NO: 1069 - RNA, 20 nt, Artificial Sequence
  HTT spacer sequence ATCN PAM
caagaaccuuuccuggggac

SEQ ID NO: 1070 - RNA, 20 nt, Artificial Sequence
  HTT spacer sequence ATCN PAM
ggagaugugagaacauugca

SEQ ID NO: 1071 - RNA, 20 nt, Artificial Sequence
  HTT spacer sequence ATCN PAM
ccggaugccccacugggccu

SEQ ID NO: 1072 - RNA, 20 nt, Artificial Sequence
  HTT spacer sequence ATCN PAM
accaacagcuuggccuugcu

SEQ ID NO: 1073 - RNA, 20 nt, Artificial Sequence
  HTT spacer sequence ATCN PAM
uucagagcucagagugaaaa

SEQ ID NO: 1074 - RNA, 20 nt, Artificial Sequence
  HTT spacer sequence ATCN PAM
guuugucugucuguccuucu

SEQ ID NO: 1075 - RNA, 20 nt, Artificial Sequence
  HTT spacer sequence ATCN PAM
gggccuuggagauucagugg

SEQ ID NO: 1076 - RNA, 20 nt, Artificial Sequence
  HTT spacer sequence ATCN PAM
ccaaggcccagaugggcacc

SEQ ID NO: 1077 - RNA, 20 nt, Artificial Sequence
  HTT spacer sequence ATCN PAM
ccaagucaauggcacaguuc

SEQ ID NO: 1078 - RNA, 20 nt, Artificial Sequence
  HTT spacer sequence ATCN PAM
agaaccuugcccucuucucu

SEQ ID NO: 1079 - RNA, 20 nt, Artificial Sequence
  HTT spacer sequence ATCN PAM
ucaaaggaugagggagcguu

SEQ ID NO: 1080 - RNA, 20 nt, Artificial Sequence
  HTT spacer sequence ATCN PAM
uuugaggauggaaccaucua

SEQ ID NO: 1081 - RNA, 20 nt, Artificial Sequence
  HTT spacer sequence ATCN PAM
ugguaccugcagucaccucc

SEQ ID NO: 1082 - RNA, 20 nt, Artificial Sequence
  HTT spacer sequence ATCN PAM
acguggacagggaaccaacc

SEQ ID NO: 1083 - RNA, 20 nt, Artificial Sequence
  HTT spacer sequence ATCN PAM
agacaugaacauuaggaggu

SEQ ID NO: 1084 - RNA, 20 nt, Artificial Sequence
  HTT spacer sequence ATCN PAM
aacaugagcacacagugaca

SEQ ID NO: 1085 - RNA, 20 nt, Artificial Sequence
  HTT spacer sequence ATCN PAM
ugccagggugcggggcacac

SEQ ID NO: 1086 - RNA, 20 nt, Artificial Sequence
  HTT spacer sequence ATCN PAM
ggcagugugccccgcacccu

SEQ ID NO: 1087 - RNA, 20 nt, Artificial Sequence
  HTT spacer sequence ATCN PAM
ucagaaaccuggugcauagu

SEQ ID NO: 1088 - RNA, 20 nt, Artificial Sequence
  HTT spacer sequence ATCN PAM
gaaaccuggugcauaguuua

SEQ ID NO: 1089 - RNA, 20 nt, Artificial Sequence
  HTT spacer sequence ATCN PAM
cgcgcccucaccugaagcgg

SEQ ID NO: 1090 - RNA, 20 nt, Artificial Sequence
  HTT spacer sequence ATCN PAM
aggaggugcccgucagccca

SEQ ID NO: 1091 - RNA, 20 nt, Artificial Sequence
  HTT spacer sequence ATCN PAM
cccagccccugcugcccauc

SEQ ID NO: 1092 - RNA, 20 nt, Artificial Sequence
  HTT spacer sequence ATCN PAM
gauccccugccagggcaggg

SEQ ID NO: 1093 - RNA, 20 nt, Artificial Sequence
  HTT spacer sequence ATCN PAM
gaugggcagcaggggcuggg

SEQ ID NO: 1094 - RNA, 20 nt, Artificial Sequence
  HTT spacer sequence ATCN PAM
ccugccagggcagggccacu

SEQ ID NO: 1095 - RNA, 20 nt, Artificial Sequence
  HTT spacer sequence ATCN PAM
gcuggggacguucucugccc

SEQ ID NO: 1096 - RNA, 20 nt, Artificial Sequence
  HTT spacer sequence ATCN PAM
acccuggcggggaaguugcu

SEQ ID NO: 1097 - RNA, 20 nt, Artificial Sequence
  HTT spacer sequence ATCN PAM
gccgggcauaggcacccugg

SEQ ID NO: 1098 - RNA, 20 nt, Artificial Sequence
  HTT spacer sequence ATCN PAM
agggugccuaugcccggcgg

SEQ ID NO: 1099 - RNA, 20 nt, Artificial Sequence
  HTT spacer sequence ATCN PAM
gccucaccauggccaccauc

SEQ ID NO: 1100 - RNA, 20 nt, Artificial Sequence
  HTT spacer sequence ATCN PAM
uccccugcuguaggcuggga

SEQ ID NO: 1101 - RNA, 20 nt, Artificial Sequence
  HTT spacer sequence ATCN PAM
ccaggaagccuuggcagcca

SEQ ID NO: 1102 - RNA, 20 nt, Artificial Sequence
  HTT spacer sequence ATCN PAM
ggcgacggccugcugucucc

SEQ ID NO: 1103 - RNA, 20 nt, Artificial Sequence
  HTT spacer sequence ATCN PAM
gcucagcccccuggcccugc

SEQ ID NO: 1104 - RNA, 20 nt, Artificial Sequence
  HTT spacer sequence ATCN PAM
gccgcaucacggaaccccag

SEQ ID NO: 1105 - RNA, 20 nt, Artificial Sequence
  HTT spacer sequence ATCN PAM
cggaaccccagggcgauaga

SEQ ID NO: 1106 - RNA, 20 nt, Artificial Sequence
  HTT spacer sequence ATCN PAM
cccugggguuccgugaugcg

SEQ ID NO: 1107 - RNA, 20 nt, Artificial Sequence
  HTT spacer sequence ATCN PAM
ccacaggcgcccucuaucgc

SEQ ID NO: 1108 - RNA, 20 nt, Artificial Sequence
  HTT spacer sequence ATCN PAM
ggggcuggcacacaggggca

SEQ ID NO: 1109 - RNA, 20 nt, Artificial Sequence
  HTT spacer sequence ATCN PAM
cuauggaaucaagccuccag

SEQ ID NO: 1110 - RNA, 20 nt, Artificial Sequence
  HTT spacer sequence ATCN PAM
agccuccagccccuaggccu

SEQ ID NO: 1111 - RNA, 20 nt, Artificial Sequence
  HTT spacer sequence ATCN PAM
ucugcuuccugccagagacg

SEQ ID NO: 1112 - RNA, 20 nt, Artificial Sequence
  HTT spacer sequence ATCN PAM
uugcugaccugggcucgccu

SEQ ID NO: 1113 - RNA, 20 nt, Artificial Sequence
  HTT spacer sequence ATCN PAM
gcaaagggaacgucagccuc

SEQ ID NO: 1114 - RNA, 20 nt, Artificial Sequence
  HTT spacer sequence ATCN PAM
gccuggaggccaggaaggcc

SEQ ID NO: 1115 - RNA, 20 nt, Artificial Sequence
  HTT spacer sequence ATCN PAM
gcccaggggcaggggccaag

SEQ ID NO: 1116 - RNA, 20 nt, Artificial Sequence
  HTT spacer sequence ATCN PAM
gagggccacuugcguucuca

SEQ ID NO: 1117 - RNA, 20 nt, Artificial Sequence
  HTT spacer sequence ATCN PAM
uggaggggguucucggggga

SEQ ID NO: 1118 - RNA, 20 nt, Artificial Sequence
  HTT spacer sequence ATCN PAM
cauccuggaggggguucucg

SEQ ID NO: 1119 - RNA, 20 nt, Artificial Sequence
  HTT spacer sequence ATCN PAM
ccgggcgccuccccaagcag

SEQ ID NO: 1120 - RNA, 20 nt, Artificial Sequence
  HTT spacer sequence ATCN PAM
gucucucaggucucauuggc

SEQ ID NO: 1121 - RNA, 20 nt, Artificial Sequence
  HTT spacer sequence ATCN PAM
uggggcugccuggcaccaug

SEQ ID NO: 1122 - RNA, 20 nt, Artificial Sequence
  HTT spacer sequence ATCN PAM
cuccauuggggcccccucgg

SEQ ID NO: 1123 - RNA, 20 nt, Artificial Sequence
  HTT spacer sequence ATCN PAM
uuccucaucucuccauuggg

SEQ ID NO: 1124 - RNA, 20 nt, Artificial Sequence
  HTT spacer sequence ATCN PAM
gaacgugacacgcggaggca

SEQ ID NO: 1125 - RNA, 20 nt, Artificial Sequence
  HTT spacer sequence ATCN PAM
cuugccuccgcgugucacgu

SEQ ID NO: 1126 - RNA, 20 nt, Artificial Sequence
  HTT spacer sequence ATCN PAM
ugcccagaagccaggacaug

SEQ ID NO: 1127 - RNA, 20 nt, Artificial Sequence
  HTT spacer sequence ATCN PAM
cgauggcgguggcaaaccag

SEQ ID NO: 1128 - RNA, 20 nt, Artificial Sequence
  HTT spacer sequence ATCN PAM
ggaugccaguggagaagagg

SEQ ID NO: 1129 - RNA, 20 nt, Artificial Sequence
  HTT spacer sequence ATCN PAM
ccuaggacccccucuauggc

SEQ ID NO: 1130 - RNA, 20 nt, Artificial Sequence
  HTT spacer sequence ATCN PAM
cgauaagggcuggggagguc

SEQ ID NO: 1131 - RNA, 20 nt, Artificial Sequence
  HTT spacer sequence ATCN PAM
ugauuccucauccccuagga

SEQ ID NO: 1132 - RNA, 20 nt, Artificial Sequence
  HTT spacer sequence ATCN PAM
gaccuccccagcccuuaucg

SEQ ID NO: 1133 - RNA, 20 nt, Artificial Sequence
  HTT spacer sequence ATCN PAM
accagcagccgccggagcgc

SEQ ID NO: 1134 - RNA, 20 nt, Artificial Sequence
  HTT spacer sequence ATCN PAM
cauggugggcugcucugacc

SEQ ID NO: 1135 - RNA, 20 nt, Artificial Sequence
  HTT spacer sequence ATCN PAM
gccccuuuagggugcucgcc

SEQ ID NO: 1136 - RNA, 20 nt, Artificial Sequence
  HTT spacer sequence ATCN PAM
cgcaggccagaacggccccu

SEQ ID NO: 1137 - RNA, 20 nt, Artificial Sequence
  HTT spacer sequence ATCN PAM
ccgaagccugcguuuccugc

SEQ ID NO: 1138 - RNA, 20 nt, Artificial Sequence
  HTT spacer sequence ATCN PAM
cggaccuggccccaccccac

SEQ ID NO: 1139 - RNA, 20 nt, Artificial Sequence
  HTT spacer sequence ATCN PAM
ggguuccccgcggcuucaag

SEQ ID NO: 1140 - RNA, 20 nt, Artificial Sequence
  HTT spacer sequence ATCN PAM
cgaucccgaucccgaucccg

SEQ ID NO: 1141 - RNA, 20 nt, Artificial Sequence
  HTT spacer sequence ATCN PAM
ggauccggguuccccgcggc

SEQ ID NO: 1142 - RNA, 20 nt, Artificial Sequence
  HTT spacer sequence ATCN PAM
cgaucccgaucccgauccca

SEQ ID NO: 1143 - RNA, 20 nt, Artificial Sequence
  HTT spacer sequence ATCN PAM
ggaucgggauccggguuccc

SEQ ID NO: 1144 - RNA, 20 nt, Artificial Sequence
  HTT spacer sequence ATCN PAM
cgaucccgaucccaacccca

SEQ ID NO: 1145 - RNA, 20 nt, Artificial Sequence
  HTT spacer sequence ATCN PAM
ggaucgggaucgggauccgg

SEQ ID NO: 1146 - RNA, 20 nt, Artificial Sequence
  HTT spacer sequence ATCN PAM
cgaucccaaccccaacccca

SEQ ID NO: 1147 - RNA, 20 nt, Artificial Sequence
  HTT spacer sequence ATCN PAM
ggaucgggaucgggaucggg

SEQ ID NO: 1148 - RNA, 20 nt, Artificial Sequence
  HTT spacer sequence ATCN PAM
caaccccaaccccagccccg

SEQ ID NO: 1149 - RNA, 20 nt, Artificial Sequence
  HTT spacer sequence ATCN PAM
cggggcgcgggccggggcug

SEQ ID NO: 1150 - RNA, 20 nt, Artificial Sequence
  HTT spacer sequence ATCN PAM
cgcgugcgucccggucccgc

SEQ ID NO: 1151 - RNA, 20 nt, Artificial Sequence
  HTT spacer sequence ATCN PAM
cugcacguucucuuccggcc

SEQ ID NO: 1152 - RNA, 20 nt, Artificial Sequence
  HTT spacer sequence ATCN PAM
ucugcgcccugcgggccugg

SEQ ID NO: 1153 - RNA, 20 nt, Artificial Sequence
  HTT spacer sequence ATCN PAM
uucccccucagccgccuguc

SEQ ID NO: 1154 - RNA, 20 nt, Artificial Sequence
  HTT spacer sequence ATCN PAM
gcaagcauuuuagaaggugg

SEQ ID NO: 1155 - RNA, 20 nt, Artificial Sequence
  HTT spacer sequence ATCN PAM
cacguggccgacccuaacca

SEQ ID NO: 1156 - RNA, 20 nt, Artificial Sequence
  HTT spacer sequence ATCN PAM
gguuagggucggccacguga

SEQ ID NO: 1157 - RNA, 20 nt, Artificial Sequence
  HTT spacer sequence ATCN PAM
gguggcacacauaccgccuu

SEQ ID NO: 1158 - RNA, 20 nt, Artificial Sequence
  HTT spacer sequence ATCN PAM
auuaggaagagguggggcuu

SEQ ID NO: 1159 - RNA, 20 nt, Artificial Sequence
  HTT spacer sequence ATCN PAM
cuaugaaacugccauugcaa

SEQ ID NO: 1160 - RNA, 20 nt, Artificial Sequence
  HTT spacer sequence ATCN PAM
cacugucggcaaauuuugca

SEQ ID NO: 1161 - RNA, 20 nt, Artificial Sequence
  HTT spacer sequence ATCN PAM
uuguuuuaaacuaaguuccu

SEQ ID NO: 1162 - RNA, 20 nt, Artificial Sequence
  HTT spacer sequence ATCN PAM
ucuuuguuuuaaacuaaguu

SEQ ID NO: 1163 - RNA, 20 nt, Artificial Sequence
  HTT spacer sequence ATCN PAM
ccaggaaagguuuccuuugg

SEQ ID NO: 1164 - RNA, 20 nt, Artificial Sequence
  HTT spacer sequence ATCN PAM
guuggucccacaaaagcagg

SEQ ID NO: 1165 - RNA, 20 nt, Artificial Sequence
  HTT spacer sequence ATCN PAM
uguggcuaaucuguuggucc

SEQ ID NO: 1166 - RNA, 20 nt, Artificial Sequence
  HTT spacer sequence ATCN PAM
uguagccucccgcugcguga

SEQ ID NO: 1167 - RNA, 20 nt, Artificial Sequence
  HTT spacer sequence ATCN PAM
ccaggagcaguuuggggagg

SEQ ID NO: 1168 - RNA, 20 nt, Artificial Sequence
  HTT spacer sequence ATCN PAM
ccaucguaaagccuaagauc

SEQ ID NO: 1169 - RNA, 20 nt, Artificial Sequence
  HTT spacer sequence ATCN PAM
uaaagccuaagaucagcacu

SEQ ID NO: 1170 - RNA, 20 nt, Artificial Sequence
  HTT spacer sequence ATCN PAM
uaggcuuuacgauggugaug

SEQ ID NO: 1171 - RNA, 20 nt, Artificial Sequence
  HTT spacer sequence ATCN PAM
gcacuuggugggucaccugg

SEQ ID NO: 1172 - RNA, 20 nt, Artificial Sequence
  HTT spacer sequence ATCN PAM
gauguuguggcacccaggaa

SEQ ID NO: 1173 - RNA, 20 nt, Artificial Sequence
  HTT spacer sequence ATCN PAM
gaugagccuggguggugcca

SEQ ID NO: 1174 - RNA, 20 nt, Artificial Sequence
  HTT spacer sequence ATCN PAM
cagggagucgaagcuguuuu

SEQ ID NO: 1175 - RNA, 20 nt, Artificial Sequence
  HTT spacer sequence ATCN PAM
cugaccugaccaauggguac

SEQ ID NO: 1176 - RNA, 20 nt, Artificial Sequence
  HTT spacer sequence ATCN PAM
uuaaaaacuccaaaccccag

SEQ ID NO: 1177 - RNA, 20 nt, Artificial Sequence
  HTT spacer sequence ATCN PAM
gggguuuggaguuuuuaaag

SEQ ID NO: 1178 - RNA, 20 nt, Artificial Sequence
  HTT spacer sequence ATCN PAM
agaaagggcauuugcaacag

SEQ ID NO: 1179 - RNA, 20 nt, Artificial Sequence
  HTT spacer sequence ATCN PAM
acccuuccagcuggaucacg

SEQ ID NO: 1180 - RNA, 20 nt, Artificial Sequence
  HTT spacer sequence ATCN PAM
agcuggaaggguggauaaaa

SEQ ID NO: 1181 - RNA, 20 nt, Artificial Sequence
  HTT spacer sequence ATCN PAM
cgcgcccucuucaaugacau

SEQ ID NO: 1182 - RNA, 20 nt, Artificial Sequence
  HTT spacer sequence ATCN PAM
aggacggaaggugccggcag

SEQ ID NO: 1183 - RNA, 20 nt, Artificial Sequence
  HTT spacer sequence ATCN PAM
cauagcaaggccucaaugga

SEQ ID NO: 1184 - RNA, 20 nt, Artificial Sequence
  HTT spacer sequence ATCN PAM
acaaauuuucucugccacac

SEQ ID NO: 1185 - RNA, 20 nt, Artificial Sequence
  HTT spacer sequence ATCN PAM
ugggccuacacagugacaaa

SEQ ID NO: 1186 - RNA, 20 nt, Artificial Sequence
  HTT spacer sequence ATCN PAM
accaacuaggcuggcugucu

SEQ ID NO: 1187 - RNA, 20 nt, Artificial Sequence
  HTT spacer sequence ATCN PAM
agaagagucugggguuguca

SEQ ID NO: 1188 - RNA, 20 nt, Artificial Sequence
  HTT spacer sequence ATCN PAM
acaaaucuagaagagucugg

SEQ ID NO: 1189 - RNA, 20 nt, Artificial Sequence
  HTT spacer sequence ATCN PAM
gugcaccugccagaccuguc

SEQ ID NO: 1190 - RNA, 20 nt, Artificial Sequence
  HTT spacer sequence ATCN PAM
ggggaggcuggguaagauuu

SEQ ID NO: 1191 - RNA, 20 nt, Artificial Sequence
  HTT spacer sequence ATCN PAM
uacccagccuccccagaugg

SEQ ID NO: 1192 - RNA, 20 nt, Artificial Sequence
  HTT spacer sequence ATCN PAM
ccaagcugcuggcuucagcc

SEQ ID NO: 1193 - RNA, 20 nt, Artificial Sequence
  HTT spacer sequence ATCN PAM
ucagugugagaggcaguuac

SEQ ID NO: 1194 - RNA, 20 nt, Artificial Sequence
  HTT spacer sequence ATCN PAM
ucuuccuugcucaaagaucc

SEQ ID NO: 1195 - RNA, 20 nt, Artificial Sequence
  HTT spacer sequence ATCN PAM
uugagcaaggaagaagaugc

SEQ ID NO: 1196 - RNA, 20 nt, Artificial Sequence
  HTT spacer sequence ATCN PAM
cacaccccguuagaagcugg

SEQ ID NO: 1197 - RNA, 20 nt, Artificial Sequence
  HTT spacer sequence ATCN PAM
uuacaucucaccacggucac

SEQ ID NO: 1198 - RNA, 20 nt, Artificial Sequence
  HTT spacer sequence ATCN PAM
caccacggucaccguggcua

SEQ ID NO: 1199 - RNA, 20 nt, Artificial Sequence
  HTT spacer sequence ATCN PAM
agccacggugaccgugguga

SEQ ID NO: 1200 - RNA, 20 nt, Artificial Sequence
  HTT spacer sequence ATCN PAM
cggaggucacaucuagccac

SEQ ID NO: 1201 - RNA, 20 nt, Artificial Sequence
  HTT spacer sequence ATCN PAM
cagugaccagcccugcccag

SEQ ID NO: 1202 - RNA, 20 nt, Artificial Sequence
  HTT spacer sequence ATCN PAM
caugaggugugaacuugacc

SEQ ID NO: 1203 - RNA, 20 nt, Artificial Sequence
  HTT spacer sequence ATCN PAM
caggaaagaaggccgggguc

SEQ ID NO: 1204 - RNA, 20 nt, Artificial Sequence
  HTT spacer sequence ATCN PAM
ccuggggaaugccucggccu

SEQ ID NO: 1205 - RNA, 20 nt, Artificial Sequence
  HTT spacer sequence ATCN PAM
cgaaugccacugccacuucc

SEQ ID NO: 1206 - RNA, 20 nt, Artificial Sequence
  HTT spacer sequence ATCN PAM
agagggaggucagcccucag

SEQ ID NO: 1207 - RNA, 20 nt, Artificial Sequence
  HTT spacer sequence ATCN PAM
ucugauucugaccugaaacu

SEQ ID NO: 1208 - RNA, 20 nt, Artificial Sequence
  HTT spacer sequence ATCN PAM
gaagaugugcaaguuacgca

SEQ ID NO: 1209 - RNA, 20 nt, Artificial Sequence
  HTT spacer sequence ATCN PAM
caggucggcacagacgcaac

SEQ ID NO: 1210 - RNA, 20 nt, Artificial Sequence
  HTT spacer sequence ATCN PAM
acugaaggacguaaguagga

SEQ ID NO: 1211 - RNA, 20 nt, Artificial Sequence
  HTT spacer sequence ATCN PAM
cccacagucccucugcugga

SEQ ID NO: 1212 - RNA, 20 nt, Artificial Sequence
  HTT spacer sequence ATCN PAM
gagaagggaaacaucaccca

SEQ ID NO: 1213 - RNA, 20 nt, Artificial Sequence
  HTT spacer sequence ATCN PAM
gcaaacuuguuucauuuaua

SEQ ID NO: 1214 - RNA, 20 nt, Artificial Sequence
  HTT spacer sequence ATCN PAM
ccaguccccaugaggcuugu

SEQ ID NO: 1215 - RNA, 20 nt, Artificial Sequence
  HTT spacer sequence ATCN PAM
gcugcgacugguucacugcg

SEQ ID NO: 1216 - RNA, 20 nt, Artificial Sequence
  HTT spacer sequence ATCN PAM
ggaauggucuguguguuauc

SEQ ID NO: 1217 - RNA, 20 nt, Artificial Sequence
  HTT spacer sequence ATCN PAM
cagaggugcauuucaggauu

SEQ ID NO: 1218 - RNA, 20 nt, Artificial Sequence
  HTT spacer sequence ATCN PAM
ugaaaugcaccucugggauc

SEQ ID NO: 1219 - RNA, 20 nt, Artificial Sequence
  HTT spacer sequence ATCN PAM
ggugacguuuuaacagaaac

SEQ ID NO: 1220 - RNA, 20 nt, Artificial Sequence
  HTT spacer sequence ATCN PAM
caccaacauuauagcauuau

SEQ ID NO: 1221 - RNA, 20 nt, Artificial Sequence
  HTT spacer sequence ATCN PAM
accugccuuggccccccaau

SEQ ID NO: 1222 - RNA, 20 nt, Artificial Sequence
  HTT spacer sequence ATCN PAM
gcucaacugcagaacuggca

SEQ ID NO: 1223 - RNA, 20 nt, Artificial Sequence
  HTT spacer sequence ATCN PAM
cccugggaggccagggcugu

SEQ ID NO: 1224 - RNA, 20 nt, Artificial Sequence
  HTT spacer sequence ATCN PAM
ccgacucugcgaugacucac

SEQ ID NO: 1225 - RNA, 20 nt, Artificial Sequence
  HTT spacer sequence ATCN PAM
cagagucggggauuucgugu

SEQ ID NO: 1226 - RNA, 20 nt, Artificial Sequence
  HTT spacer sequence ATCN PAM
ugcugcagggagcucgcagc

SEQ ID NO: 1227 - RNA, 20 nt, Artificial Sequence
  HTT spacer sequence ATCN PAM
caaauaugaagggaaguaaa

SEQ ID NO: 1228 - RNA, 20 nt, Artificial Sequence
  HTT spacer sequence ATCN PAM
uugcaaaaucacaaauauga

SEQ ID NO: 1229 - RNA, 20 nt, Artificial Sequence
  HTT spacer sequence ATCN PAM
aaugacugacugccaccagc

SEQ ID NO: 1230 - RNA, 20 nt, Artificial Sequence
  HTT spacer sequence ATCN PAM
ccuggcggacugcagccacc

SEQ ID NO: 1231 - RNA, 20 nt, Artificial Sequence
  HTT spacer sequence ATCN PAM
gugaggagggcuuggagagg

SEQ ID NO: 1232 - RNA, 20 nt, Artificial Sequence
  HTT spacer sequence ATCN PAM
uggggccucuccaagcccuc

SEQ ID NO: 1233 - RNA, 20 nt, Artificial Sequence
  HTT spacer sequence ATCN PAM
uuccacgccaucauggggcc

SEQ ID NO: 1234 - RNA, 20 nt, Artificial Sequence
  HTT spacer sequence ATCN PAM
gguaugugaggggaccccgc

SEQ ID NO: 1235 - RNA, 20 nt, Artificial Sequence
  HTT spacer sequence ATCN PAM
cauccgguaugugaggggac

SEQ ID NO: 1236 - RNA, 20 nt, Artificial Sequence
  HTT spacer sequence ATCN PAM
ucucuagcagacaccacgag

SEQ ID NO: 1237 - RNA, 20 nt, Artificial Sequence
  HTT spacer sequence ATCN PAM
cuguccugucgcacuuggaa

SEQ ID NO: 1238 - RNA, 20 nt, Artificial Sequence
  HTT spacer sequence ATCN PAM
acucaccuuggcuugcuuug

SEQ ID NO: 1239 - RNA, 20 nt, Artificial Sequence
  HTT spacer sequence ATCN PAM
caagaagaaaauuaauaagc

SEQ ID NO: 1240 - RNA, 20 nt, Artificial Sequence
  HTT spacer sequence ATCN PAM
ugucccuccaggacguggug

SEQ ID NO: 1241 - RNA, 20 nt, Artificial Sequence
  HTT spacer sequence ATCN PAM
cugggcugcuauuuccaacu

SEQ ID NO: 1242 - RNA, 20 nt, Artificial Sequence
  HTT spacer sequence ATCN PAM
aacccuggcaaugccgcccg

SEQ ID NO: 1243 - RNA, 20 nt, Artificial Sequence
  HTT spacer sequence ATCN PAM
uuucuuccaucucaugcauc

SEQ ID NO: 1244 - RNA, 20 nt, Artificial Sequence
  HTT spacer sequence ATCN PAM
caugcaucgcaucucggaga

SEQ ID NO: 1245 - RNA, 20 nt, Artificial Sequence
  HTT spacer sequence ATCN PAM
caucucggagaacaaauuug

SEQ ID NO: 1246 - RNA, 20 nt, Artificial Sequence
  HTT spacer sequence ATCN PAM
cggagaacaaauuugauagc

SEQ ID NO: 1247 - RNA, 20 nt, Artificial Sequence
  HTT spacer sequence ATCN PAM
aauuuguucuccgagaugcg

SEQ ID NO: 1248 - RNA, 20 nt, Artificial Sequence
  HTT spacer sequence ATCN PAM
gcaagugacgcuaucaaauu

SEQ ID NO: 1249 - RNA, 20 nt, Artificial Sequence
  HTT spacer sequence ATCN PAM
ggcaaagaugauauaagugc

SEQ ID NO: 1250 - RNA, 20 nt, Artificial Sequence
  HTT spacer sequence ATCN PAM
uugccagauguuuccugaau

SEQ ID NO: 1251 - RNA, 20 nt, Artificial Sequence
  HTT spacer sequence ATCN PAM
ucuuugccagauguuuccug

SEQ ID NO: 1252 - RNA, 20 nt, Artificial Sequence
  HTT spacer sequence ATCN PAM
aaagucauucucuccugacu

SEQ ID NO: 1253 - RNA, 20 nt, Artificial Sequence
  HTT spacer sequence ATCN PAM
cagaugacacaccauuuuua

SEQ ID NO: 1254 - RNA, 20 nt, Artificial Sequence
  HTT spacer sequence ATCN PAM
gggaugugggguuaagcaga

SEQ ID NO: 1255 - RNA, 20 nt, Artificial Sequence
  HTT spacer sequence ATCN PAM
augacugugaggucuggugg

SEQ ID NO: 1256 - RNA, 20 nt, Artificial Sequence
  HTT spacer sequence ATCN PAM
guagccaaaucgccaacgua

SEQ ID NO: 1257 - RNA, 20 nt, Artificial Sequence
  HTT spacer sequence ATCN PAM
ccaacguauuccaaaagaaa

SEQ ID NO: 1258 - RNA, 20 nt, Artificial Sequence
  HTT spacer sequence ATCN PAM
acguacuucuaauuuugcuu

SEQ ID NO: 1259 - RNA, 20 nt, Artificial Sequence
  HTT spacer sequence ATCN PAM
aucuuccuaacaacagagau

SEQ ID NO: 1260 - RNA, 20 nt, Artificial Sequence
  HTT spacer sequence ATCN PAM
auggaagagcagcuuuuggu

SEQ ID NO: 1261 - RNA, 20 nt, Artificial Sequence
  HTT spacer sequence ATCN PAM
uccuaacaacagagaucuca

SEQ ID NO: 1262 - RNA, 20 nt, Artificial Sequence
  HTT spacer sequence ATCN PAM
cuguuguuaggaagaucgau

SEQ ID NO: 1263 - RNA, 20 nt, Artificial Sequence
  HTT spacer sequence ATCN PAM
caguuccucauaggauucag

SEQ ID NO: 1264 - RNA, 20 nt, Artificial Sequence
  HTT spacer sequence ATCN PAM
uaugaggaacugagaucucu

SEQ ID NO: 1265 - RNA, 20 nt, Artificial Sequence
  HTT spacer sequence ATCN PAM
aaaacacaaaacauacugca

SEQ ID NO: 1266 - RNA, 20 nt, Artificial Sequence
  HTT spacer sequence ATCN PAM
caaaaauaaauauauauaca

SEQ ID NO: 1267 - RNA, 20 nt, Artificial Sequence
  HTT spacer sequence ATCN PAM
cagcucacugaaacuuccgc

SEQ ID NO: 1268 - RNA, 20 nt, Artificial Sequence
  HTT spacer sequence ATCN PAM
cuugaacccaggaggcggaa

SEQ ID NO: 1269 - RNA, 20 nt, Artificial Sequence
  HTT spacer sequence ATCN PAM
cagaaccugaggaaacccgc

SEQ ID NO: 1270 - RNA, 20 nt, Artificial Sequence
  HTT spacer sequence ATCN PAM
acccuuucccaggagucugc

SEQ ID NO: 1271 - RNA, 20 nt, Artificial Sequence
  HTT spacer sequence ATCN PAM
aacguggagagugaggaaga

SEQ ID NO: 1272 - RNA, 20 nt, Artificial Sequence
  HTT spacer sequence ATCN PAM
gggcugucgcucuccucugu

SEQ ID NO: 1273 - RNA, 20 nt, Artificial Sequence
  HTT spacer sequence ATCN PAM
uccucgacauucaucuuucc

SEQ ID NO: 1274 - RNA, 20 nt, Artificial Sequence
  HTT spacer sequence ATCN PAM
uuccauccuaccaagagcgu

SEQ ID NO: 1275 - RNA, 20 nt, Artificial Sequence
  HTT spacer sequence ATCN PAM
uaccaagagcguggaaacca

SEQ ID NO: 1276 - RNA, 20 nt, Artificial Sequence
  HTT spacer sequence ATCN PAM
uacuuuguaggaaagcaaac

SEQ ID NO: 1277 - RNA, 20 nt, Artificial Sequence
  HTT spacer sequence ATCN PAM
uuaucuagcacgaagccauc

SEQ ID NO: 1278 - RNA, 20 nt, Artificial Sequence
  HTT spacer sequence ATCN PAM
agcacgaagccaucauucag

SEQ ID NO: 1279 - RNA, 20 nt, Artificial Sequence
  HTT spacer sequence ATCN PAM
uucagaucaucugcugacau

SEQ ID NO: 1280 - RNA, 20 nt, Artificial Sequence
  HTT spacer sequence ATCN PAM
gaaugauggcuucgugcuag

SEQ ID NO: 1281 - RNA, 20 nt, Artificial Sequence
  HTT spacer sequence ATCN PAM
ucugcugacauauguuuugg

SEQ ID NO: 1282 - RNA, 20 nt, Artificial Sequence
  HTT spacer sequence ATCN PAM
gcugacauauguuuugguuu

SEQ ID NO: 1283 - RNA, 20 nt, Artificial Sequence
  HTT spacer sequence ATCN PAM
ucauccuuuccaagcauucu

SEQ ID NO: 1284 - RNA, 20 nt, Artificial Sequence
  HTT spacer sequence ATCN PAM
uuuccaagcauucuucgaag

SEQ ID NO: 1285 - RNA, 20 nt, Artificial Sequence
  HTT spacer sequence ATCN PAM
cauuccuuccugcucaggcu

SEQ ID NO: 1286 - RNA, 20 nt, Artificial Sequence
  HTT spacer sequence ATCN PAM
uguuagagggcugcgccuuc

SEQ ID NO: 1287 - RNA, 20 nt, Artificial Sequence
  HTT spacer sequence ATCN PAM
ugucauaugcaucgggcuaa

SEQ ID NO: 1288 - RNA, 20 nt, Artificial Sequence
  HTT spacer sequence ATCN PAM
ggcuaagguagaaagaagaa

SEQ ID NO: 1289 - RNA, 20 nt, Artificial Sequence
  HTT spacer sequence ATCN PAM
ucucguugagcuugucucuc

SEQ ID NO: 1290 - RNA, 20 nt, Artificial Sequence
  HTT spacer sequence ATCN PAM
cauaaagcauauaccucgga

SEQ ID NO: 1291 - RNA, 20 nt, Artificial Sequence
  HTT spacer sequence ATCN PAM
ucuccacgguaagacaggcu

SEQ ID NO: 1292 - RNA, 20 nt, Artificial Sequence
  HTT spacer sequence ATCN PAM
ucuucuccacgguaagacag

SEQ ID NO: 1293 - RNA, 20 nt, Artificial Sequence
  HTT spacer sequence ATCN PAM
agaacacucacuaacccacc

SEQ ID NO: 1294 - RNA, 20 nt, Artificial Sequence
  HTT spacer sequence ATCN PAM
gcucuuuccgggacuucggu

SEQ ID NO: 1295 - RNA, 20 nt, Artificial Sequence
  HTT spacer sequence ATCN PAM
aaaacugacucucaaagcuu

SEQ ID NO: 1296 - RNA, 20 nt, Artificial Sequence
  HTT spacer sequence ATCN PAM
ucagaacaaagguguacaaa

SEQ ID NO: 1297 - RNA, 20 nt, Artificial Sequence
  HTT spacer sequence ATCN PAM
ggcaaaacaccuuauuucuc

SEQ ID NO: 1298 - RNA, 20 nt, Artificial Sequence
  HTT spacer sequence ATCN PAM
aggaacguugucuggugagg

SEQ ID NO: 1299 - RNA, 20 nt, Artificial Sequence
  HTT spacer sequence ATCN PAM
ucagcaucgcugucacuguc

SEQ ID NO: 1300 - RNA, 20 nt, Artificial Sequence
  HTT spacer sequence ATCN PAM
cugucacuguccacaauguc

SEQ ID NO: 1301 - RNA, 20 nt, Artificial Sequence
  HTT spacer sequence ATCN PAM
agaagcauaaugacauugug

SEQ ID NO: 1302 - RNA, 20 nt, Artificial Sequence
  HTT spacer sequence ATCN PAM
ucauuuagauuguagaugcu

SEQ ID NO: 1303 - RNA, 20 nt, Artificial Sequence
  HTT spacer sequence ATCN PAM
aaaugaagaugaagaauuga

SEQ ID NO: 1304 - RNA, 20 nt, Artificial Sequence
  HTT spacer sequence ATCN PAM
acaaucuaaaugaagaugaa

SEQ ID NO: 1305 - RNA, 20 nt, Artificial Sequence
  HTT spacer sequence ATCN PAM
ugagaaaaaaagcaucuaca

SEQ ID NO: 1306 - RNA, 20 nt, Artificial Sequence
  HTT spacer sequence ATCN PAM
ucuucuccucggggcucaug

SEQ ID NO: 1307 - RNA, 20 nt, Artificial Sequence
  HTT spacer sequence ATCN PAM
ucuccucggggcucauguug

SEQ ID NO: 1308 - RNA, 20 nt, Artificial Sequence
  HTT spacer sequence ATCN PAM
cugaauacauuggauuuauc

SEQ ID NO: 1309 - RNA, 20 nt, Artificial Sequence
  HTT spacer sequence ATCN PAM
aauguauucagagauaaacg

SEQ ID NO: 1310 - RNA, 20 nt, Artificial Sequence
  HTT spacer sequence ATCN PAM
cuuucuuuguacucuuuuag

SEQ ID NO: 1311 - RNA, 20 nt, Artificial Sequence
  HTT spacer sequence ATCN PAM
cacaaaaaauucuugugauu

SEQ ID NO: 1312 - RNA, 20 nt, Artificial Sequence
  HTT spacer sequence ATCN PAM
caagaauuuuuugugagauu

SEQ ID NO: 1313 - RNA, 20 nt, Artificial Sequence
  HTT spacer sequence ATCN PAM
cuguccucucacagcuuucu

SEQ ID NO: 1314 - RNA, 20 nt, Artificial Sequence
  HTT spacer sequence ATCN PAM
gcagagcaaaauuuuaaaac

SEQ ID NO: 1315 - RNA, 20 nt, Artificial Sequence
  HTT spacer sequence ATCN PAM
cacuauuuaaaucacaaggu

SEQ ID NO: 1316 - RNA, 20 nt, Artificial Sequence
  HTT spacer sequence ATCN PAM
caaggucuagcuggcaauca

SEQ ID NO: 1317 - RNA, 20 nt, Artificial Sequence
  HTT spacer sequence ATCN PAM
gaugggagcacauuacaugu

SEQ ID NO: 1318 - RNA, 20 nt, Artificial Sequence
  HTT spacer sequence ATCN PAM
gauugccagcuagaccuugu

SEQ ID NO: 1319 - RNA, 20 nt, Artificial Sequence
  HTT spacer sequence ATCN PAM
agcaguacaggcuagcacau

SEQ ID NO: 1320 - RNA, 20 nt, Artificial Sequence
  HTT spacer sequence ATCN PAM
acccccuuccugcuagaagc

SEQ ID NO: 1321 - RNA, 20 nt, Artificial Sequence
  HTT spacer sequence ATCN PAM
gccaucucugccucuaaaaa

SEQ ID NO: 1322 - RNA, 20 nt, Artificial Sequence
  HTT spacer sequence ATCN PAM
cugccucuaaaaauauuagu

SEQ ID NO: 1323 - RNA, 20 nt, Artificial Sequence
  HTT spacer sequence ATCN PAM
ggaauaugauucuaugggua

SEQ ID NO: 1324 - RNA, 20 nt, Artificial Sequence
  HTT spacer sequence ATCN PAM
caauaauguagaauaacuca

SEQ ID NO: 1325 - RNA, 20 nt, Artificial Sequence
  HTT spacer sequence ATCN PAM
auauaguuuaagaaagaaag

SEQ ID NO: 1326 - RNA, 20 nt, Artificial Sequence
  HTT spacer sequence ATCN PAM
uauggaauuuacggcauaaa

SEQ ID NO: 1327 - RNA, 20 nt, Artificial Sequence
  HTT spacer sequence ATCN PAM
cauuaauauuaauauauuaa

SEQ ID NO: 1328 - RNA, 20 nt, Artificial Sequence
  HTT spacer sequence ATCN PAM
cauuaauauuaauauauuaa

SEQ ID NO: 1329 - RNA, 20 nt, Artificial Sequence
  HTT spacer sequence ATCN PAM
cauuaauauuaauauauuaa

SEQ ID NO: 1330 - RNA, 20 nt, Artificial Sequence
  HTT spacer sequence ATCN PAM
cauuaauauuaauauauuaa

SEQ ID NO: 1331 - RNA, 20 nt, Artificial Sequence
  HTT spacer sequence ATCN PAM
cauuaucaauauauuaauau

SEQ ID NO: 1332 - RNA, 20 nt, Artificial Sequence
  HTT spacer sequence ATCN PAM
auauauuaauauuauaauca

SEQ ID NO: 1333 - RNA, 20 nt, Artificial Sequence
  HTT spacer sequence ATCN PAM
cauuaucaauauauuaauau

SEQ ID NO: 1334 - RNA, 20 nt, Artificial Sequence
  HTT spacer sequence ATCN PAM
auauauuaauauuauaauua

SEQ ID NO: 1335 - RNA, 20 nt, Artificial Sequence
  HTT spacer sequence ATCN PAM
auauuauauuaauauuauau

SEQ ID NO: 1336 - RNA, 20 nt, Artificial Sequence
  HTT spacer sequence ATCN PAM
auauuauuuuaauauuauau

SEQ ID NO: 1337 - RNA, 20 nt, Artificial Sequence
  HTT spacer sequence ATCN PAM
auauaauauuaauauaauau

SEQ ID NO: 1338 - RNA, 20 nt, Artificial Sequence
  HTT spacer sequence ATCN PAM
auauuauuauauuaauauua

SEQ ID NO: 1339 - RNA, 20 nt, Artificial Sequence
  HTT spacer sequence ATCN PAM
auauuauauuaauauuauau

SEQ ID NO: 1340 - RNA, 20 nt, Artificial Sequence
  HTT spacer sequence ATCN PAM
auauuauuuuaauauuauau

SEQ ID NO: 1341 - RNA, 20 nt, Artificial Sequence
  HTT spacer sequence ATCN PAM
auauaauauuaauauaauau

SEQ ID NO: 1342 - RNA, 20 nt, Artificial Sequence
  HTT spacer sequence ATCN PAM
auauuauuauauuaauauua

SEQ ID NO: 1343 - RNA, 20 nt, Artificial Sequence
  HTT spacer sequence ATCN PAM
auauuauauuaauacuacau

SEQ ID NO: 1344 - RNA, 20 nt, Artificial Sequence
  HTT spacer sequence ATCN PAM
auauuauauuaauacuauau

SEQ ID NO: 1345 - RNA, 20 nt, Artificial Sequence
  HTT spacer sequence ATCN PAM
guaacuauauuaauauaguu

SEQ ID NO: 1346 - RNA, 20 nt, Artificial Sequence
  HTT spacer sequence ATCN PAM
ggaccccacgcugcucucgg

SEQ ID NO: 1347 - RNA, 20 nt, Artificial Sequence
  HTT spacer sequence ATCN PAM
ugccuuccggcuccccgugc

SEQ ID NO: 1348 - RNA, 20 nt, Artificial Sequence
  HTT spacer sequence ATCN PAM
ugggccggaagacgcgccac

SEQ ID NO: 1349 - RNA, 20 nt, Artificial Sequence
  HTT spacer sequence ATCN PAM
ggaacuucugccuguuaacu

SEQ ID NO: 1350 - RNA, 20 nt, Artificial Sequence
  HTT spacer sequence ATCN PAM
guucgaggugaaaguuaaca

SEQ ID NO: 1351 - RNA, 20 nt, Artificial Sequence
  HTT spacer sequence ATCN PAM
gcgaguaagccgagccugcg

SEQ ID NO: 1352 - RNA, 20 nt, Artificial Sequence
  HTT spacer sequence ATCN PAM
cccucgccucgcgcgcgcaa

SEQ ID NO: 1353 - RNA, 20 nt, Artificial Sequence
  HTT spacer sequence ATCN PAM
ccccgguucuucuuggcccc

SEQ ID NO: 1354 - RNA, 20 nt, Artificial Sequence
  HTT spacer sequence ATCN PAM
gccggcggcggcggcgccag

SEQ ID NO: 1355 - RNA, 20 nt, Artificial Sequence
  HTT spacer sequence ATCN PAM
uggccaacucgcugcugcug

SEQ ID NO: 1356 - RNA, 20 nt, Artificial Sequence
  HTT spacer sequence ATCN PAM
uuauguauagcuugauuaau

SEQ ID NO: 1357 - RNA, 20 nt, Artificial Sequence
  HTT spacer sequence ATCN PAM
agcuauacauaaugaugcuu

SEQ ID NO: 1358 - RNA, 20 nt, Artificial Sequence
  HTT spacer sequence ATCN PAM
aauauuauauauucaacuuc

SEQ ID NO: 1359 - RNA, 20 nt, Artificial Sequence
  HTT spacer sequence ATCN PAM
auguauaucuaauauuauau

SEQ ID NO: 1360 - RNA, 20 nt, Artificial Sequence
  HTT spacer sequence ATCN PAM
ccacaaaaaccacaaaauua

SEQ ID NO: 1361 - RNA, 20 nt, Artificial Sequence
  HTT spacer sequence ATCN PAM
cuugaguccagggguuccag

SEQ ID NO: 1362 - RNA, 20 nt, Artificial Sequence
  HTT spacer sequence ATCN PAM
uacccucccacuucagccuc

SEQ ID NO: 1363 - RNA, 20 nt, Artificial Sequence
  HTT spacer sequence ATCN PAM
cagcacuuugggaggcugaa

SEQ ID NO: 1364 - RNA, 20 nt, Artificial Sequence
  HTT spacer sequence ATCN PAM
gacagauaagaaauacuaag

SEQ ID NO: 1365 - RNA, 20 nt, Artificial Sequence
  HTT spacer sequence ATCN PAM
auguaguagucagccaaauu

SEQ ID NO: 1366 - RNA, 20 nt, Artificial Sequence
  HTT spacer sequence ATCN PAM
cagcacuuugggaggccgag

SEQ ID NO: 1367 - RNA, 20 nt, Artificial Sequence
  HTT spacer sequence ATCN PAM
uuuuucuuuaagguaacuau

SEQ ID NO: 1368 - RNA, 20 nt, Artificial Sequence
  HTT spacer sequence ATCN PAM
uuuuggcuuuauuaaagcuc

SEQ ID NO: 1369 - RNA, 20 nt, Artificial Sequence
  HTT spacer sequence ATCN PAM
guaggauucuucaugcuugu

SEQ ID NO: 1370 - RNA, 20 nt, Artificial Sequence
  HTT spacer sequence ATCN PAM
uacagauuauuuuguuugag

SEQ ID NO: 1371 - RNA, 20 nt, Artificial Sequence
  HTT spacer sequence ATCN PAM
aggcauaccuaccguguuca

SEQ ID NO: 1372 - RNA, 20 nt, Artificial Sequence
  HTT spacer sequence ATCN PAM
gaagcagaaguggcccaaaa

SEQ ID NO: 1373 - RNA, 20 nt, Artificial Sequence
  HTT spacer sequence ATCN PAM
uuauaaaaauggaaaauugg

SEQ ID NO: 1374 - RNA, 20 nt, Artificial Sequence
  HTT spacer sequence ATCN PAM
uguuggauuagggcccaccc

SEQ ID NO: 1375 - RNA, 20 nt, Artificial Sequence
  HTT spacer sequence ATCN PAM
aacaugauugguauccuuau

SEQ ID NO: 1376 - RNA, 20 nt, Artificial Sequence
  HTT spacer sequence ATCN PAM
ccaaauaagaucacugucug

SEQ ID NO: 1377 - RNA, 20 nt, Artificial Sequence
  HTT spacer sequence ATCN PAM
uauuuggagauaggguauuu

SEQ ID NO: 1378 - RNA, 20 nt, Artificial Sequence
  HTT spacer sequence ATCN PAM
cugucugaggguuaggggcu

SEQ ID NO: 1379 - RNA, 20 nt, Artificial Sequence
  HTT spacer sequence ATCN PAM
uaacugcuauucauacauuc

SEQ ID NO: 1380 - RNA, 20 nt, Artificial Sequence
  HTT spacer sequence ATCN PAM
ugggcuuuggagccagccag

SEQ ID NO: 1381 - RNA, 20 nt, Artificial Sequence
  HTT spacer sequence ATCN PAM
cagugcccucuuuauacuau

SEQ ID NO: 1382 - RNA, 20 nt, Artificial Sequence
  HTT spacer sequence ATCN PAM
caacgacggugucaguuacu

SEQ ID NO: 1383 - RNA, 20 nt, Artificial Sequence
  HTT spacer sequence ATCN PAM
cuagagccaagcuuagugcc

SEQ ID NO: 1384 - RNA, 20 nt, Artificial Sequence
  HTT spacer sequence ATCN PAM
cuguaucccuagagccaagc

SEQ ID NO: 1385 - RNA, 20 nt, Artificial Sequence
  HTT spacer sequence ATCN PAM
guuuuuauucaucccuguau

SEQ ID NO: 1386 - RNA, 20 nt, Artificial Sequence
  HTT spacer sequence ATCN PAM
ccuucugagaagcugacagu

SEQ ID NO: 1387 - RNA, 20 nt, Artificial Sequence
  HTT spacer sequence ATCN PAM
auccuaaagauccauauuga

SEQ ID NO: 1388 - RNA, 20 nt, Artificial Sequence
  HTT spacer sequence ATCN PAM
uaaagauccauauugagugg

SEQ ID NO: 1389 - RNA, 20 nt, Artificial Sequence
  HTT spacer sequence ATCN PAM
uuaggauagauuaauacagc

SEQ ID NO: 1390 - RNA, 20 nt, Artificial Sequence
  HTT spacer sequence ATCN PAM
auauugagugggaagaaaaa

SEQ ID NO: 1391 - RNA, 20 nt, Artificial Sequence
  HTT spacer sequence ATCN PAM
uuaaaauuacuuuauguaga

SEQ ID NO: 1392 - RNA, 20 nt, Artificial Sequence
  HTT spacer sequence ATCN PAM
agcuaccucagccuccucag

SEQ ID NO: 1393 - RNA, 20 nt, Artificial Sequence
  HTT spacer sequence ATCN PAM
cuugaguccaggaagucaag

SEQ ID NO: 1394 - RNA, 20 nt, Artificial Sequence
  HTT spacer sequence ATCN PAM
caaaaaagaaaaaaaauggu

SEQ ID NO: 1395 - RNA, 20 nt, Artificial Sequence
  HTT spacer sequence ATCN PAM
uauuuaaucuccacaacaag

SEQ ID NO: 1396 - RNA, 20 nt, Artificial Sequence
  HTT spacer sequence ATCN PAM
ccacaacaagccuacuagau

SEQ ID NO: 1397 - RNA, 20 nt, Artificial Sequence
  HTT spacer sequence ATCN PAM
aguaggcuuguuguggagau

SEQ ID NO: 1398 - RNA, 20 nt, Artificial Sequence
  HTT spacer sequence ATCN PAM
cagcaucuaguaggcuuguu

SEQ ID NO: 1399 - RNA, 20 nt, Artificial Sequence
  HTT spacer sequence ATCN PAM
caaugugcaaauaccccaga

SEQ ID NO: 1400 - RNA, 20 nt, Artificial Sequence
  HTT spacer sequence ATCN PAM
aggugcuguucugggguauu

SEQ ID NO: 1401 - RNA, 20 nt, Artificial Sequence
  HTT spacer sequence ATCN PAM
ggaccaguagugaaagacaa

SEQ ID NO: 1402 - RNA, 20 nt, Artificial Sequence
  HTT spacer sequence ATCN PAM
caugccugccaagggcaagc

SEQ ID NO: 1403 - RNA, 20 nt, Artificial Sequence
  HTT spacer sequence ATCN PAM
gccugcagaaaggagcuacc

SEQ ID NO: 1404 - RNA, 20 nt, Artificial Sequence
  HTT spacer sequence ATCN PAM
ucccaucgucugugcagccc

SEQ ID NO: 1405 - RNA, 20 nt, Artificial Sequence
  HTT spacer sequence ATCN PAM
caucgucugugcagcccuca

SEQ ID NO: 1406 - RNA, 20 nt, Artificial Sequence
  HTT spacer sequence ATCN PAM
ucugugcagcccucagagga

SEQ ID NO: 1407 - RNA, 20 nt, Artificial Sequence
  HTT spacer sequence ATCN PAM
cuggcuugaaggugagguuu

SEQ ID NO: 1408 - RNA, 20 nt, Artificial Sequence
  HTT spacer sequence ATCN PAM
uugagcagagaacaaguccc

SEQ ID NO: 1409 - RNA, 20 nt, Artificial Sequence
  HTT spacer sequence ATCN PAM
ucaguggugcuucugugccc

SEQ ID NO: 1410 - RNA, 20 nt, Artificial Sequence
  HTT spacer sequence ATCN PAM
acaagugcccugagacaugg

SEQ ID NO: 1411 - RNA, 20 nt, Artificial Sequence
  HTT spacer sequence ATCN PAM
ugcuuguuuuccacuugugg

SEQ ID NO: 1412 - RNA, 20 nt, Artificial Sequence
  HTT spacer sequence ATCN PAM
agagggcaaaauacugcauc

SEQ ID NO: 1413 - RNA, 20 nt, Artificial Sequence
  HTT spacer sequence ATCN PAM
ggcaagugacagcucagcuc

SEQ ID NO: 1414 - RNA, 20 nt, Artificial Sequence
  HTT spacer sequence ATCN PAM
ucccccucaaauccagucca

SEQ ID NO: 1415 - RNA, 20 nt, Artificial Sequence
  HTT spacer sequence ATCN PAM
uguggugugggacgugaguc

SEQ ID NO: 1416 - RNA, 20 nt, Artificial Sequence
  HTT spacer sequence ATCN PAM
aacaugacauauuguucagg

SEQ ID NO: 1417 - RNA, 20 nt, Artificial Sequence
  HTT spacer sequence ATCN PAM
uguuuacagauuuggaaacu

SEQ ID NO: 1418 - RNA, 20 nt, Artificial Sequence
  HTT spacer sequence ATCN PAM
guaaacaagaucuaacauga

SEQ ID NO: 1419 - RNA, 20 nt, Artificial Sequence
  HTT spacer sequence ATCN PAM
ugaauaaaaauacaugcuua

SEQ ID NO: 1420 - RNA, 20 nt, Artificial Sequence
  HTT spacer sequence ATCN PAM
uaacauuucuguuugagugg

SEQ ID NO: 1421 - RNA, 20 nt, Artificial Sequence
  HTT spacer sequence ATCN PAM
uccugaauuugggagaaaaa

SEQ ID NO: 1422 - RNA, 20 nt, Artificial Sequence
  HTT spacer sequence ATCN PAM
ccuuccauuuuuuacuacga

SEQ ID NO: 1423 - RNA, 20 nt, Artificial Sequence
  HTT spacer sequence ATCN PAM
aagcauuaguaggcacuauu

SEQ ID NO: 1424 - RNA, 20 nt, Artificial Sequence
  HTT spacer sequence ATCN PAM
ggcaugauaccauucauuag

SEQ ID NO: 1425 - RNA, 20 nt, Artificial Sequence
  HTT spacer sequence ATCN PAM
ugaagauauaaggagaauuu

SEQ ID NO: 1426 - RNA, 20 nt, Artificial Sequence
  HTT spacer sequence ATCN PAM
uuuagauuuucugaucugca

SEQ ID NO: 1427 - RNA, 20 nt, Artificial Sequence
  HTT spacer sequence ATCN PAM
aaaggauuuuuuuuccugag

SEQ ID NO: 1428 - RNA, 20 nt, Artificial Sequence
  HTT spacer sequence ATCN PAM
gaaaaucuaaaggauuuuuu

SEQ ID NO: 1429 - RNA, 20 nt, Artificial Sequence
  HTT spacer sequence ATCN PAM
gcaguuauaaaguuggcugu

SEQ ID NO: 1430 - RNA, 20 nt, Artificial Sequence
  HTT spacer sequence ATCN PAM
aucuuuccuuuaguacuauu

SEQ ID NO: 1431 - RNA, 20 nt, Artificial Sequence
  HTT spacer sequence ATCN PAM
uuccuuuaguacuauuguag

SEQ ID NO: 1432 - RNA, 20 nt, Artificial Sequence
  HTT spacer sequence ATCN PAM
uucuuuaaaaggaacuacaa

SEQ ID NO: 1433 - RNA, 20 nt, Artificial Sequence
  HTT spacer sequence ATCN PAM
ucuuucuuuaaaaggaacua

SEQ ID NO: 1434 - RNA, 20 nt, Artificial Sequence
  HTT spacer sequence ATCN PAM
uuuauccguuuuaaaaauug

SEQ ID NO: 1435 - RNA, 20 nt, Artificial Sequence
  HTT spacer sequence ATCN PAM
guuuuaaaaauuggauuguc

SEQ ID NO: 1436 - RNA, 20 nt, Artificial Sequence
  HTT spacer sequence ATCN PAM
aauuuuuaaaacggauaaaa

SEQ ID NO: 1437 - RNA, 20 nt, Artificial Sequence
  HTT spacer sequence ATCN PAM
uauaccucaacaacaaaaag

SEQ ID NO: 1438 - RNA, 20 nt, Artificial Sequence
  HTT spacer sequence ATCN PAM
agaacauagaaagaaaucuu

SEQ ID NO: 1439 - RNA, 20 nt, Artificial Sequence
  HTT spacer sequence ATCN PAM
aauaucuagaacauagaaag

SEQ ID NO: 1440 - RNA, 20 nt, Artificial Sequence
  HTT spacer sequence ATCN PAM
guuaagcaucuaauaucuag

SEQ ID NO: 1441 - RNA, 20 nt, Artificial Sequence
  HTT spacer sequence ATCN PAM
ccugaacccgggaggcagag

SEQ ID NO: 1442 - RNA, 20 nt, Artificial Sequence
  HTT spacer sequence ATCN PAM
agugagaacuguaaggcuua

SEQ ID NO: 1443 - RNA, 20 nt, Artificial Sequence
  HTT spacer sequence ATCN PAM
uuacaguccaccacaugcug

SEQ ID NO: 1444 - RNA, 20 nt, Artificial Sequence
  HTT spacer sequence ATCN PAM
cuuugcuucacccagaaaag

SEQ ID NO: 1445 - RNA, 20 nt, Artificial Sequence
  HTT spacer sequence ATCN PAM
uuuucugggugaagcaaagg

SEQ ID NO: 1446 - RNA, 20 nt, Artificial Sequence
  HTT spacer sequence ATCN PAM
guugcuugucacaaagacug

SEQ ID NO: 1447 - RNA, 20 nt, Artificial Sequence
  HTT spacer sequence ATCN PAM
cagaacugccugaagagacg

SEQ ID NO: 1448 - RNA, 20 nt, Artificial Sequence
  HTT spacer sequence ATCN PAM
aagaauucaaugugccucuu

SEQ ID NO: 1449 - RNA, 20 nt, Artificial Sequence
  HTT spacer sequence ATCN PAM
ccauauugagcaaccaccca

SEQ ID NO: 1450 - RNA, 20 nt, Artificial Sequence
  HTT spacer sequence ATCN PAM
uaugcuuuugaaaauguaaa

SEQ ID NO: 1451 - RNA, 20 nt, Artificial Sequence
  HTT spacer sequence ATCN PAM
cagcauuuuggaaggcugag

SEQ ID NO: 1452 - RNA, 20 nt, Artificial Sequence
  HTT spacer sequence ATCN PAM
gcccgccucagccuuccaaa

SEQ ID NO: 1453 - RNA, 20 nt, Artificial Sequence
  HTT spacer sequence ATCN PAM
ugaggucaggagaucgagac

SEQ ID NO: 1454 - RNA, 20 nt, Artificial Sequence
  HTT spacer sequence ATCN PAM
ccugaccucaugauccgccc

SEQ ID NO: 1455 - RNA, 20 nt, Artificial Sequence
  HTT spacer sequence ATCN PAM
agaccauccugaccaacaca

SEQ ID NO: 1456 - RNA, 20 nt, Artificial Sequence
  HTT spacer sequence ATCN PAM
ugaccaacacagugaaaccc

SEQ ID NO: 1457 - RNA, 20 nt, Artificial Sequence
  HTT spacer sequence ATCN PAM
cuugaaccaggaggcggagg

SEQ ID NO: 1458 - RNA, 20 nt, Artificial Sequence
  HTT spacer sequence ATCN PAM
guaucagucaggauucaacc

SEQ ID NO: 1459 - RNA, 20 nt, Artificial Sequence
  HTT spacer sequence ATCN PAM
gucaggauucaaccagagaa

SEQ ID NO: 1460 - RNA, 20 nt, Artificial Sequence
  HTT spacer sequence ATCN PAM
ugacugauacagaugccacu

SEQ ID NO: 1461 - RNA, 20 nt, Artificial Sequence
  HTT spacer sequence ATCN PAM
cuguucuuaacaccuuccaa

SEQ ID NO: 1462 - RNA, 20 nt, Artificial Sequence
  HTT spacer sequence ATCN PAM
guuggaagguguuaagaaca

SEQ ID NO: 1463 - RNA, 20 nt, Artificial Sequence
  HTT spacer sequence ATCN PAM
cuuaaaaaaaaaaaaaaaag

SEQ ID NO: 1464 - RNA, 20 nt, Artificial Sequence
  HTT spacer sequence ATCN PAM
caucucuuaaaaaaaaaaaa

SEQ ID NO: 1465 - RNA, 20 nt, Artificial Sequence
  HTT spacer sequence ATCN PAM
cgcuauguugcucaggcugg

SEQ ID NO: 1466 - RNA, 20 nt, Artificial Sequence
  HTT spacer sequence ATCN PAM
cuccaaucaggcagaauaug

SEQ ID NO: 1467 - RNA, 20 nt, Artificial Sequence
  HTT spacer sequence ATCN PAM
ggcagaauaugaaguugccg

SEQ ID NO: 1468 - RNA, 20 nt, Artificial Sequence
  HTT spacer sequence ATCN PAM
gcaacuucauauucugccug

SEQ ID NO: 1469 - RNA, 20 nt, Artificial Sequence
  HTT spacer sequence ATCN PAM
ucggcaacuucauauucugc

SEQ ID NO: 1470 - RNA, 20 nt, Artificial Sequence
  HTT spacer sequence ATCN PAM
cuucgguccucaucaucggc

SEQ ID NO: 1471 - RNA, 20 nt, Artificial Sequence
  HTT spacer sequence ATCN PAM
uagauagauucuucaaugau

SEQ ID NO: 1472 - RNA, 20 nt, Artificial Sequence
  HTT spacer sequence ATCN PAM
aagauugacaguccacaauc

SEQ ID NO: 1473 - RNA, 20 nt, Artificial Sequence
  HTT spacer sequence ATCN PAM
aucuaagauugacaguccac

SEQ ID NO: 1474 - RNA, 20 nt, Artificial Sequence
  HTT spacer sequence ATCN PAM
uugaagaaucuaucuaagau

SEQ ID NO: 1475 - RNA, 20 nt, Artificial Sequence
  HTT spacer sequence ATCN PAM
acaaauuuuuauucuaaaga

SEQ ID NO: 1476 - RNA, 20 nt, Artificial Sequence
  HTT spacer sequence ATCN PAM
cagcacuucgggaggcugag

SEQ ID NO: 1477 - RNA, 20 nt, Artificial Sequence
  HTT spacer sequence ATCN PAM
uccuuccucagccucccgaa

SEQ ID NO: 1478 - RNA, 20 nt, Artificial Sequence
  HTT spacer sequence ATCN PAM
cuuuagcccaggaguucgag

SEQ ID NO: 1479 - RNA, 20 nt, Artificial Sequence
  HTT spacer sequence ATCN PAM
cgaacuccugggcuaaagag

SEQ ID NO: 1480 - RNA, 20 nt, Artificial Sequence
  HTT spacer sequence ATCN PAM
gcauggccaacauagugaga

SEQ ID NO: 1481 - RNA, 20 nt, Artificial Sequence
  HTT spacer sequence ATCN PAM
cuacaaaaaaauaaacaaaa

SEQ ID NO: 1482 - RNA, 20 nt, Artificial Sequence
  HTT spacer sequence ATCN PAM
guagucccagcuacuuggga

SEQ ID NO: 1483 - RNA, 20 nt, Artificial Sequence
  HTT spacer sequence ATCN PAM
aacaaaaugcaaaagaggaa

SEQ ID NO: 1484 - RNA, 20 nt, Artificial Sequence
  HTT spacer sequence ATCN PAM
aauuguuaguuuccucauga

SEQ ID NO: 1485 - RNA, 20 nt, Artificial Sequence
  HTT spacer sequence ATCN PAM
cuuagaaaauugauucagug

SEQ ID NO: 1486 - RNA, 20 nt, Artificial Sequence
  HTT spacer sequence ATCN PAM
auuuucuaagagaucuaauu

SEQ ID NO: 1487 - RNA, 20 nt, Artificial Sequence
  HTT spacer sequence ATCN PAM
ugggguuuguuguacagauu

SEQ ID NO: 1488 - RNA, 20 nt, Artificial Sequence
  HTT spacer sequence ATCN PAM
guacaacaaaccccaugaug

SEQ ID NO: 1489 - RNA, 20 nt, Artificial Sequence
  HTT spacer sequence ATCN PAM
cccagguauuaagcuuagca

SEQ ID NO: 1490 - RNA, 20 nt, Artificial Sequence
  HTT spacer sequence ATCN PAM
uaaccaaaaccaagugggcu

SEQ ID NO: 1491 - RNA, 20 nt, Artificial Sequence
  HTT spacer sequence ATCN PAM
gaaaaucaauuacuauaaua

SEQ ID NO: 1492 - RNA, 20 nt, Artificial Sequence
  HTT spacer sequence ATCN PAM
auuacuauaauacaccauau

SEQ ID NO: 1493 - RNA, 20 nt, Artificial Sequence
  HTT spacer sequence ATCN PAM
ugugguuuuuaaauauuuua

SEQ ID NO: 1494 - RNA, 20 nt, Artificial Sequence
  HTT spacer sequence ATCN PAM
uaauaaaaauagaaaaagua

SEQ ID NO: 1495 - RNA, 20 nt, Artificial Sequence
  HTT spacer sequence ATCN PAM
augaaauacccacagccaac

SEQ ID NO: 1496 - RNA, 20 nt, Artificial Sequence
  HTT spacer sequence ATCN PAM
uacuuaaaugugaaagacua

SEQ ID NO: 1497 - RNA, 20 nt, Artificial Sequence
  HTT spacer sequence ATCN PAM
ugcagccuuaccagacucac

SEQ ID NO: 1498 - RNA, 20 nt, Artificial Sequence
  HTT spacer sequence ATCN PAM
aaaaaaaaagaaauuaagaa

SEQ ID NO: 1499 - RNA, 20 nt, Artificial Sequence
  HTT spacer sequence ATCN PAM
aaaaagaauaaaauacuuaa

SEQ ID NO: 1500 - RNA, 20 nt, Artificial Sequence
  HTT spacer sequence ATCN PAM
ccuguucguggaucagaaga

SEQ ID NO: 1501 - RNA, 20 nt, Artificial Sequence
  HTT spacer sequence ATCN PAM
acgaacaggagaugucuuuc

SEQ ID NO: 1502 - RNA, 20 nt, Artificial Sequence
  HTT spacer sequence ATCN PAM
gaagacuuaauauuguuaag

SEQ ID NO: 1503 - RNA, 20 nt, Artificial Sequence
  HTT spacer sequence ATCN PAM
uaacaauauuaagucuucug

SEQ ID NO: 1504 - RNA, 20 nt, Artificial Sequence
  HTT spacer sequence ATCN PAM
auuuggggaguacugccauc

SEQ ID NO: 1505 - RNA, 20 nt, Artificial Sequence
  HTT spacer sequence ATCN PAM
auagauucaauauaaucccu

SEQ ID NO: 1506 - RNA, 20 nt, Artificial Sequence
  HTT spacer sequence ATCN PAM
agacaguaugguccuggcau

SEQ ID NO: 1507 - RNA, 20 nt, Artificial Sequence
  HTT spacer sequence ATCN PAM
ugccaggaccauacugucuu

SEQ ID NO: 1508 - RNA, 20 nt, Artificial Sequence
  HTT spacer sequence ATCN PAM
uuaaacggucuugauagaau

SEQ ID NO: 1509 - RNA, 20 nt, Artificial Sequence
  HTT spacer sequence ATCN PAM
agaccguuuaaugauuaaca

SEQ ID NO: 1510 - RNA, 20 nt, Artificial Sequence
  HTT spacer sequence ATCN PAM
accugcuauuuaguuucaga

SEQ ID NO: 1511 - RNA, 20 nt, Artificial Sequence
  HTT spacer sequence ATCN PAM
guugaggucaggaguucaag

SEQ ID NO: 1512 - RNA, 20 nt, Artificial Sequence
  HTT spacer sequence ATCN PAM
acauaacucugccucccaaa

SEQ ID NO: 1513 - RNA, 20 nt, Artificial Sequence
  HTT spacer sequence ATCN PAM
aaguuguagcguauuucaga

SEQ ID NO: 1514 - RNA, 20 nt, Artificial Sequence
  HTT spacer sequence ATCN PAM
auucauccacagacaccugg

SEQ ID NO: 1515 - RNA, 20 nt, Artificial Sequence
  HTT spacer sequence ATCN PAM
acagacaccuggguuguuuu

SEQ ID NO: 1516 - RNA, 20 nt, Artificial Sequence
  HTT spacer sequence ATCN PAM
gcacacccauguucauugca

SEQ ID NO: 1517 - RNA, 20 nt, Artificial Sequence
  HTT spacer sequence ATCN PAM
ccugaagucaggaguuugag

SEQ ID NO: 1518 - RNA, 20 nt, Artificial Sequence
  HTT spacer sequence ATCN PAM
acccaccucggccucccaaa

SEQ ID NO: 1519 - RNA, 20 nt, Artificial Sequence
  HTT spacer sequence ATCN PAM
cuaaugguuauguauuuggu

SEQ ID NO: 1520 - RNA, 20 nt, Artificial Sequence
  HTT spacer sequence ATCN PAM
ggagguauuucugguaaagg

SEQ ID NO: 1521 - RNA, 20 nt, Artificial Sequence
  HTT spacer sequence ATCN PAM
acauucugucacaacaucug

SEQ ID NO: 1522 - RNA, 20 nt, Artificial Sequence
  HTT spacer sequence ATCN PAM
augacuaaccccaaaacaga

SEQ ID NO: 1523 - RNA, 20 nt, Artificial Sequence
  HTT spacer sequence ATCN PAM
aaaccacccagcuccucagu

SEQ ID NO: 1524 - RNA, 20 nt, Artificial Sequence
  HTT spacer sequence ATCN PAM
gugggguguggaacuggccg

SEQ ID NO: 1525 - RNA, 20 nt, Artificial Sequence
  HTT spacer sequence ATCN PAM
aacaagaauaaguaagauga

SEQ ID NO: 1526 - RNA, 20 nt, Artificial Sequence
  HTT spacer sequence ATCN PAM
caaacacuagaauaccauua

SEQ ID NO: 1527 - RNA, 20 nt, Artificial Sequence
  HTT spacer sequence ATCN PAM
uuuuggaaagcaguucaaau

SEQ ID NO: 1528 - RNA, 20 nt, Artificial Sequence
  HTT spacer sequence ATCN PAM
gagagcaaagaccaagccug

SEQ ID NO: 1529 - RNA, 20 nt, Artificial Sequence
  HTT spacer sequence ATCN PAM
caggaccaguaucagagagc

SEQ ID NO: 1530 - RNA, 20 nt, Artificial Sequence
  HTT spacer sequence ATCN PAM
caauaucccaggaccaguau

SEQ ID NO: 1531 - RNA, 20 nt, Artificial Sequence
  HTT spacer sequence ATCN PAM
gauuucuuccugucuucauc

SEQ ID NO: 1532 - RNA, 20 nt, Artificial Sequence
  HTT spacer sequence ATCN PAM
gauucuuaucacaauauccc

SEQ ID NO: 1533 - RNA, 20 nt, Artificial Sequence
  HTT spacer sequence ATCN PAM
gggaugccacagaggccagg

SEQ ID NO: 1534 - RNA, 20 nt, Artificial Sequence
  HTT spacer sequence ATCN PAM
cagaugaagacaggaagaaa

SEQ ID NO: 1535 - RNA, 20 nt, Artificial Sequence
  HTT spacer sequence ATCN PAM
uucaguccacgcuuuugucc

SEQ ID NO: 1536 - RNA, 20 nt, Artificial Sequence
  HTT spacer sequence ATCN PAM
cucuccugggcauguacaca

SEQ ID NO: 1537 - RNA, 20 nt, Artificial Sequence
  HTT spacer sequence ATCN PAM
ugccuauuucauacaguuac

SEQ ID NO: 1538 - RNA, 20 nt, Artificial Sequence
  HTT spacer sequence ATCN PAM
cuguuuuacagaaggagaaa

SEQ ID NO: 1539 - RNA, 20 nt, Artificial Sequence
  HTT spacer sequence ATCN PAM
agcagcaugcuucccaugug

SEQ ID NO: 1540 - RNA, 20 nt, Artificial Sequence
  HTT spacer sequence ATCN PAM
uucuauuucacugcuuuuuu

SEQ ID NO: 1541 - RNA, 20 nt, Artificial Sequence
  HTT spacer sequence ATCN PAM
uuuucuagaguugcccauaa

SEQ ID NO: 1542 - RNA, 20 nt, Artificial Sequence
  HTT spacer sequence ATCN PAM
guacauaccuuuccagccau

SEQ ID NO: 1543 - RNA, 20 nt, Artificial Sequence
  HTT spacer sequence ATCN PAM
aguuuaaaaucaguacauac

SEQ ID NO: 1544 - RNA, 20 nt, Artificial Sequence
  HTT spacer sequence ATCN PAM
uucagccucagccuccugag

SEQ ID NO: 1545 - RNA, 20 nt, Artificial Sequence
  HTT spacer sequence ATCN PAM
cguacuauagccuugaaguc

SEQ ID NO: 1546 - RNA, 20 nt, Artificial Sequence
  HTT spacer sequence ATCN PAM
ucccguacuauagccuugaa

SEQ ID NO: 1547 - RNA, 20 nt, Artificial Sequence
  HTT spacer sequence ATCN PAM
agccugugaauagccacugc

SEQ ID NO: 1548 - RNA, 20 nt, Artificial Sequence
  HTT spacer sequence ATCN PAM
cuguugguucaguggcuaga

SEQ ID NO: 1549 - RNA, 20 nt, Artificial Sequence
  HTT spacer sequence ATCN PAM
uugagguucuuuuuucaaag

SEQ ID NO: 1550 - RNA, 20 nt, Artificial Sequence
  HTT spacer sequence ATCN PAM
uuugaaaaaagaaccucaaa

SEQ ID NO: 1551 - RNA, 20 nt, Artificial Sequence
  HTT spacer sequence ATCN PAM
aggaggcggagguugcagug

SEQ ID NO: 1552 - RNA, 20 nt, Artificial Sequence
  HTT spacer sequence ATCN PAM
aggcucacugcaaccuccgc

SEQ ID NO: 1553 - RNA, 20 nt, Artificial Sequence
  HTT spacer sequence ATCN PAM
ugccacugcacuccagcccu

SEQ ID NO: 1554 - RNA, 20 nt, Artificial Sequence
  HTT spacer sequence ATCN PAM
caaaaaaaaaaaaaaaaaaa

SEQ ID NO: 1555 - RNA, 20 nt, Artificial Sequence
  HTT spacer sequence ATCN PAM
uuuuuuuuuuuuuuuuuuuu

SEQ ID NO: 1556 - RNA, 20 nt, Artificial Sequence
  HTT spacer sequence ATCN PAM
ugcuagagggagccacaguc

SEQ ID NO: 1557 - RNA, 20 nt, Artificial Sequence
  HTT spacer sequence ATCN PAM
ccuuugagcagaaugguuca

SEQ ID NO: 1558 - RNA, 20 nt, Artificial Sequence
  HTT spacer sequence ATCN PAM
augagaaaaacaaguuucag

SEQ ID NO: 1559 - RNA, 20 nt, Artificial Sequence
  HTT spacer sequence ATCN PAM
gccuuuuccuagaacucugu

SEQ ID NO: 1560 - RNA, 20 nt, Artificial Sequence
  HTT spacer sequence ATCN PAM
gcucucccaguacacuguug

SEQ ID NO: 1561 - RNA, 20 nt, Artificial Sequence
  HTT spacer sequence ATCN PAM
uugccaacugugagaaucca

SEQ ID NO: 1562 - RNA, 20 nt, Artificial Sequence
  HTT spacer sequence ATCN PAM
acauggaauuuugagcaaaa

SEQ ID NO: 1563 - RNA, 20 nt, Artificial Sequence
  HTT spacer sequence ATCN PAM
cuucucuuggugacuucacc

SEQ ID NO: 1564 - RNA, 20 nt, Artificial Sequence
  HTT spacer sequence ATCN PAM
agcauggaaaccagcuucuu

SEQ ID NO: 1565 - RNA, 20 nt, Artificial Sequence
  HTT spacer sequence ATCN PAM
gggcaaagugacugagcugg

SEQ ID NO: 1566 - RNA, 20 nt, Artificial Sequence
  HTT spacer sequence ATCN PAM
ucuuuccaucugggcaaagu

SEQ ID NO: 1567 - RNA, 20 nt, Artificial Sequence
  HTT spacer sequence ATCN PAM
uggaaauuccacaaugcgga

SEQ ID NO: 1568 - RNA, 20 nt, Artificial Sequence
  HTT spacer sequence ATCN PAM
aaagguguuuggaaaugugu

SEQ ID NO: 1569 - RNA, 20 nt, Artificial Sequence
  HTT spacer sequence ATCN PAM
uaaggaaaugacucacagac

SEQ ID NO: 1570 - RNA, 20 nt, Artificial Sequence
  HTT spacer sequence ATCN PAM
caaaacaaaacaaaacaaaa

SEQ ID NO: 1571 - RNA, 20 nt, Artificial Sequence
  HTT spacer sequence ATCN PAM
cgccauugcacuccagucua

SEQ ID NO: 1572 - RNA, 20 nt, Artificial Sequence
  HTT spacer sequence ATCN PAM
cagcucaccacaaccuccgc

SEQ ID NO: 1573 - RNA, 20 nt, Artificial Sequence
  HTT spacer sequence ATCN PAM
cuugaacucaggaggcggag

SEQ ID NO: 1574 - RNA, 20 nt, Artificial Sequence
  HTT spacer sequence ATCN PAM
cccgaggucgggaguucaag

SEQ ID NO: 1575 - RNA, 20 nt, Artificial Sequence
  HTT spacer sequence ATCN PAM
gcccuccucagccucccaaa

SEQ ID NO: 1576 - RNA, 20 nt, Artificial Sequence
  HTT spacer sequence ATCN PAM
cagcacuuugggaggcugag

SEQ ID NO: 1577 - RNA, 20 nt, Artificial Sequence
  HTT spacer sequence ATCN PAM
uauuuaaacaacaccccggg

SEQ ID NO: 1578 - RNA, 20 nt, Artificial Sequence
  HTT spacer sequence ATCN PAM
aggagacccaucauauuuaa

SEQ ID NO: 1579 - RNA, 20 nt, Artificial Sequence
  HTT spacer sequence ATCN PAM
accaacuacaguggucucca

SEQ ID NO: 1580 - RNA, 20 nt, Artificial Sequence
  HTT spacer sequence ATCN PAM
ccagaccagaacugcugcug

SEQ ID NO: 1581 - RNA, 20 nt, Artificial Sequence
  HTT spacer sequence ATCN PAM
cuuuaaauccccagaccaga

SEQ ID NO: 1582 - RNA, 20 nt, Artificial Sequence
  HTT spacer sequence ATCN PAM
cuccagguaacuaguaaggu

SEQ ID NO: 1583 - RNA, 20 nt, Artificial Sequence
  HTT spacer sequence ATCN PAM
uauggaguucaagaacuuuu

SEQ ID NO: 1584 - RNA, 20 nt, Artificial Sequence
  HTT spacer sequence ATCN PAM
gagucacacccgggcagugu

SEQ ID NO: 1585 - RNA, 20 nt, Artificial Sequence
  HTT spacer sequence ATCN PAM
guuaugcaccugcagcuuga

SEQ ID NO: 1586 - RNA, 20 nt, Artificial Sequence
  HTT spacer sequence ATCN PAM
aaucguaugcuugcucuaau

SEQ ID NO: 1587 - RNA, 20 nt, Artificial Sequence
  HTT spacer sequence ATCN PAM
uaugcuugcucuaaucccuc

SEQ ID NO: 1588 - RNA, 20 nt, Artificial Sequence
  HTT spacer sequence ATCN PAM
cuccaugauagauauuucug

SEQ ID NO: 1589 - RNA, 20 nt, Artificial Sequence
  HTT spacer sequence ATCN PAM
uggagggauuagagcaagca

SEQ ID NO: 1590 - RNA, 20 nt, Artificial Sequence
  HTT spacer sequence ATCN PAM
aucauggagggauuagagca

SEQ ID NO: 1591 - RNA, 20 nt, Artificial Sequence
  HTT spacer sequence ATCN PAM
acccucuguuugaauauguc

SEQ ID NO: 1592 - RNA, 20 nt, Artificial Sequence
  HTT spacer sequence ATCN PAM
gccuuuaaugaucugcaaau

SEQ ID NO: 1593 - RNA, 20 nt, Artificial Sequence
  HTT spacer sequence ATCN PAM
uuaaaggcagauuagcaaga

SEQ ID NO: 1594 - RNA, 20 nt, Artificial Sequence
  HTT spacer sequence ATCN PAM
gcaaauguaaugacucagau

SEQ ID NO: 1595 - RNA, 20 nt, Artificial Sequence
  HTT spacer sequence ATCN PAM
gagucauuacauuugcagau

SEQ ID NO: 1596 - RNA, 20 nt, Artificial Sequence
  HTT spacer sequence ATCN PAM
uauuaagacugacauguuuu

SEQ ID NO: 1597 - RNA, 20 nt, Artificial Sequence
  HTT spacer sequence ATCN PAM
uagcacuucgggaggccaag

SEQ ID NO: 1598 - RNA, 20 nt, Artificial Sequence
  HTT spacer sequence ATCN PAM
gccuaccuuggccucccgaa

SEQ ID NO: 1599 - RNA, 20 nt, Artificial Sequence
  HTT spacer sequence ATCN PAM
cuugagcccagaaguuccag

SEQ ID NO: 1600 - RNA, 20 nt, Artificial Sequence
  HTT spacer sequence ATCN PAM
ggaacuucugggcucaagcg

SEQ ID NO: 1601 - RNA, 20 nt, Artificial Sequence
  HTT spacer sequence ATCN PAM
gccuaggcaacauggcaaga

SEQ ID NO: 1602 - RNA, 20 nt, Artificial Sequence
  HTT spacer sequence ATCN PAM
cuauuuaaauauuuaauaua

SEQ ID NO: 1603 - RNA, 20 nt, Artificial Sequence
  HTT spacer sequence ATCN PAM
ucuuuuuuaauguauuuauu

SEQ ID NO: 1604 - RNA, 20 nt, Artificial Sequence
  HTT spacer sequence ATCN PAM
uaauuauacugagucuuucu

SEQ ID NO: 1605 - RNA, 20 nt, Artificial Sequence
  HTT spacer sequence ATCN PAM
auacaaucauaauuauacug

SEQ ID NO: 1606 - RNA, 20 nt, Artificial Sequence
  HTT spacer sequence ATCN PAM
guuaaaaaguaaucuauaca

SEQ ID NO: 1607 - RNA, 20 nt, Artificial Sequence
  HTT spacer sequence ATCN PAM
uuuguuugggaacccaagua

SEQ ID NO: 1608 - RNA, 20 nt, Artificial Sequence
  HTT spacer sequence ATCN PAM
agauucuaaucgugcauuug

SEQ ID NO: 1609 - RNA, 20 nt, Artificial Sequence
  HTT spacer sequence ATCN PAM
ggauuaaagggcaccgaggc

SEQ ID NO: 1610 - RNA, 20 nt, Artificial Sequence
  HTT spacer sequence ATCN PAM
ugcauuugcuuuuuccaagu

SEQ ID NO: 1611 - RNA, 20 nt, Artificial Sequence
  HTT spacer sequence ATCN PAM
cugcugucaugguuuuaggc

SEQ ID NO: 1612 - RNA, 20 nt, Artificial Sequence
  HTT spacer sequence ATCN PAM
cuuccagcagcgugaucuug

SEQ ID NO: 1613 - RNA, 20 nt, Artificial Sequence
  HTT spacer sequence ATCN PAM
cgcugcuggaagugauacga

SEQ ID NO: 1614 - RNA, 20 nt, Artificial Sequence
  HTT spacer sequence ATCN PAM
ugggcccgccaucgugaucu

SEQ ID NO: 1615 - RNA, 20 nt, Artificial Sequence
  HTT spacer sequence ATCN PAM
ugaucucaucucuagcaggg

SEQ ID NO: 1616 - RNA, 20 nt, Artificial Sequence
  HTT spacer sequence ATCN PAM
cgauggcgggcccaagauca

SEQ ID NO: 1617 - RNA, 20 nt, Artificial Sequence
  HTT spacer sequence ATCN PAM
caucucuagcagggaaauaa

SEQ ID NO: 1618 - RNA, 20 nt, Artificial Sequence
  HTT spacer sequence ATCN PAM
cuagcagggaaauaaucggc

SEQ ID NO: 1619 - RNA, 20 nt, Artificial Sequence
  HTT spacer sequence ATCN PAM
gcccugcccgccaggcugcu

SEQ ID NO: 1620 - RNA, 20 nt, Artificial Sequence
  HTT spacer sequence ATCN PAM
uggaauuacgggugaguuuu

SEQ ID NO: 1621 - RNA, 20 nt, Artificial Sequence
  HTT spacer sequence ATCN PAM
cuguccuuauuacuuccaau

SEQ ID NO: 1622 - RNA, 20 nt, Artificial Sequence
  HTT spacer sequence ATCN PAM
agcaaagagcuuccuuugug

SEQ ID NO: 1623 - RNA, 20 nt, Artificial Sequence
  HTT spacer sequence ATCN PAM
acuuugcacuuucuccagaa

SEQ ID NO: 1624 - RNA, 20 nt, Artificial Sequence
  HTT spacer sequence ATCN PAM
aacaaugcacagugaagacu

SEQ ID NO: 1625 - RNA, 20 nt, Artificial Sequence
  HTT spacer sequence ATCN PAM
cuccuucuauguuuucuaag

SEQ ID NO: 1626 - RNA, 20 nt, Artificial Sequence
  HTT spacer sequence ATCN PAM
guagucccccgccucccauu

SEQ ID NO: 1627 - RNA, 20 nt, Artificial Sequence
  HTT spacer sequence ATCN PAM
cagccagccagagcuuaucu

SEQ ID NO: 1628 - RNA, 20 nt, Artificial Sequence
  HTT spacer sequence ATCN PAM
cuguuugcucucagccucca

SEQ ID NO: 1629 - RNA, 20 nt, Artificial Sequence
  HTT spacer sequence ATCN PAM
ucaagcacagccaagucaca

SEQ ID NO: 1630 - RNA, 20 nt, Artificial Sequence
  HTT spacer sequence ATCN PAM
ugccauugcgcuccagccug

SEQ ID NO: 1631 - RNA, 20 nt, Artificial Sequence
  HTT spacer sequence ATCN PAM
ugggucacugcagccucaac

SEQ ID NO: 1632 - RNA, 20 nt, Artificial Sequence
  HTT spacer sequence ATCN PAM
ccaaaaaaaaaaaaaaaaaa

SEQ ID NO: 1633 - RNA, 20 nt, Artificial Sequence
  HTT spacer sequence ATCN PAM
ucccaccacagccuucugag

SEQ ID NO: 1634 - RNA, 20 nt, Artificial Sequence
  HTT spacer sequence ATCN PAM
cacucugucacccaggcugg

SEQ ID NO: 1635 - RNA, 20 nt, Artificial Sequence
  HTT spacer sequence ATCN PAM
caucucaaaaacaaagcaaa

SEQ ID NO: 1636 - RNA, 20 nt, Artificial Sequence
  HTT spacer sequence ATCN PAM
caaaaacaaagcaaaacaaa

SEQ ID NO: 1637 - RNA, 20 nt, Artificial Sequence
  HTT spacer sequence ATCN PAM
aagcauuuaagcaaaagaaa

SEQ ID NO: 1638 - RNA, 20 nt, Artificial Sequence
  HTT spacer sequence ATCN PAM
uuggccucucccaaggaacc

SEQ ID NO: 1639 - RNA, 20 nt, Artificial Sequence
  HTT spacer sequence ATCN PAM
cuuacuuucucuccucuugu

SEQ ID NO: 1640 - RNA, 20 nt, Artificial Sequence
  HTT spacer sequence ATCN PAM
uuacuaauucaagggccagu

SEQ ID NO: 1641 - RNA, 20 nt, Artificial Sequence
  HTT spacer sequence ATCN PAM
ugaccaaguuggauuuauuc

SEQ ID NO: 1642 - RNA, 20 nt, Artificial Sequence
  HTT spacer sequence ATCN PAM
aacuuggucaugauguauua

SEQ ID NO: 1643 - RNA, 20 nt, Artificial Sequence
  HTT spacer sequence ATCN PAM
aauaauguaauuuaucacgu

SEQ ID NO: 1644 - RNA, 20 nt, Artificial Sequence
  HTT spacer sequence ATCN PAM
cguuaccagaauaaagggaa

SEQ ID NO: 1645 - RNA, 20 nt, Artificial Sequence
  HTT spacer sequence ATCN PAM
cuugguuaaauccuuaauag

SEQ ID NO: 1646 - RNA, 20 nt, Artificial Sequence
  HTT spacer sequence ATCN PAM
gccacuaacaauuagaaaau

SEQ ID NO: 1647 - RNA, 20 nt, Artificial Sequence
  HTT spacer sequence ATCN PAM
guaacauuuccauuuucuaa

SEQ ID NO: 1648 - RNA, 20 nt, Artificial Sequence
  HTT spacer sequence ATCN PAM
agaaacaucaaaaucuaaga

SEQ ID NO: 1649 - RNA, 20 nt, Artificial Sequence
  HTT spacer sequence ATCN PAM
cagcuacucgggaggcugag

SEQ ID NO: 1650 - RNA, 20 nt, Artificial Sequence
  HTT spacer sequence ATCN PAM
cuugaaaccugggagacaga

SEQ ID NO: 1651 - RNA, 20 nt, Artificial Sequence
  HTT spacer sequence ATCN PAM
cggcucacugcaaccucugu

SEQ ID NO: 1652 - RNA, 20 nt, Artificial Sequence
  HTT spacer sequence ATCN PAM
uaaaaacagaacacgaacuu

SEQ ID NO: 1653 - RNA, 20 nt, Artificial Sequence
  HTT spacer sequence ATCN PAM
uugguuucauaagcguaggc

SEQ ID NO: 1654 - RNA, 20 nt, Artificial Sequence
  HTT spacer sequence ATCN PAM
ccuccauucauaauggugag

SEQ ID NO: 1655 - RNA, 20 nt, Artificial Sequence
  HTT spacer sequence ATCN PAM
cggcuuugaugagcagagag

SEQ ID NO: 1656 - RNA, 20 nt, Artificial Sequence
  HTT spacer sequence ATCN PAM
aagccgggauugcccagguu

SEQ ID NO: 1657 - RNA, 20 nt, Artificial Sequence
  HTT spacer sequence ATCN PAM
uccaagccgcaacacagcuc

SEQ ID NO: 1658 - RNA, 20 nt, Artificial Sequence
  HTT spacer sequence ATCN PAM
uggaagcagccagugugaac

SEQ ID NO: 1659 - RNA, 20 nt, Artificial Sequence
  HTT spacer sequence ATCN PAM
agggccucccagcuauucuc

SEQ ID NO: 1660 - RNA, 20 nt, Artificial Sequence
  HTT spacer sequence ATCN PAM
ccaucgagggccucccagcu

SEQ ID NO: 1661 - RNA, 20 nt, Artificial Sequence
  HTT spacer sequence ATCN PAM
gggacuugaggacccuugga

SEQ ID NO: 1662 - RNA, 20 nt, Artificial Sequence
  HTT spacer sequence ATCN PAM
aaggguccucaagucccuga

SEQ ID NO: 1663 - RNA, 20 nt, Artificial Sequence
  HTT spacer sequence ATCN PAM
aaauccaaggguccucaagu

SEQ ID NO: 1664 - RNA, 20 nt, Artificial Sequence
  HTT spacer sequence ATCN PAM
aagggaaaggggccugcugu

SEQ ID NO: 1665 - RNA, 20 nt, Artificial Sequence
  HTT spacer sequence ATCN PAM
ggucccacagcaggccccuu

SEQ ID NO: 1666 - RNA, 20 nt, Artificial Sequence
  HTT spacer sequence ATCN PAM
caaaggccacgagggccagg

SEQ ID NO: 1667 - RNA, 20 nt, Artificial Sequence
  HTT spacer sequence ATCN PAM
ugcgaggguuuuagcugcuc

SEQ ID NO: 1668 - RNA, 20 nt, Artificial Sequence
  HTT spacer sequence ATCN PAM
gcccagaguuggcccacaca

SEQ ID NO: 1669 - RNA, 20 nt, Artificial Sequence
  HTT spacer sequence ATCN PAM
ucaugcucacacccucgugc

SEQ ID NO: 1670 - RNA, 20 nt, Artificial Sequence
  HTT spacer sequence ATCN PAM
uccaacugcuccccguguug

SEQ ID NO: 1671 - RNA, 20 nt, Artificial Sequence
  HTT spacer sequence ATCN PAM
gagcagacaacacggggagc

SEQ ID NO: 1672 - RNA, 20 nt, Artificial Sequence
  HTT spacer sequence ATCN PAM
ucugacgugaccaucugagc

SEQ ID NO: 1673 - RNA, 20 nt, Artificial Sequence
  HTT spacer sequence ATCN PAM
aggacucccaagaagcucau

SEQ ID NO: 1674 - RNA, 20 nt, Artificial Sequence
  HTT spacer sequence ATCN PAM
cauuucuuccuauucugaug

SEQ ID NO: 1675 - RNA, 20 nt, Artificial Sequence
  HTT spacer sequence ATCN PAM
gaauaggaagaaaugagauc

SEQ ID NO: 1676 - RNA, 20 nt, Artificial Sequence
  HTT spacer sequence ATCN PAM
uauauaucccacagccaaua

SEQ ID NO: 1677 - RNA, 20 nt, Artificial Sequence
  HTT spacer sequence ATCN PAM
cacagccaauaugggauaaa

SEQ ID NO: 1678 - RNA, 20 nt, Artificial Sequence
  HTT spacer sequence ATCN PAM
cauauuggcugugggauaua

SEQ ID NO: 1679 - RNA, 20 nt, Artificial Sequence
  HTT spacer sequence ATCN PAM
cuuaaggaccagagaccagg

SEQ ID NO: 1680 - RNA, 20 nt, Artificial Sequence
  HTT spacer sequence ATCN PAM
accccuugcucaaugcucaa

SEQ ID NO: 1681 - RNA, 20 nt, Artificial Sequence
  HTT spacer sequence ATCN PAM
ccuauggguguguuccaugg

SEQ ID NO: 1682 - RNA, 20 nt, Artificial Sequence
  HTT spacer sequence ATCN PAM
aaucuccuauggguguguuc

SEQ ID NO: 1683 - RNA, 20 nt, Artificial Sequence
  HTT spacer sequence ATCN PAM
cacuucacaggugacuacgg

SEQ ID NO: 1684 - RNA, 20 nt, Artificial Sequence
  HTT spacer sequence ATCN PAM
ugagacugaaaccaaacaca

SEQ ID NO: 1685 - RNA, 20 nt, Artificial Sequence
  HTT spacer sequence ATCN PAM
agcucaucuugagacugaaa

SEQ ID NO: 1686 - RNA, 20 nt, Artificial Sequence
  HTT spacer sequence ATCN PAM
ucuaaccuccgguacccacu

SEQ ID NO: 1687 - RNA, 20 nt, Artificial Sequence
  HTT spacer sequence ATCN PAM
accgcuguguccacgggacu

SEQ ID NO: 1688 - RNA, 20 nt, Artificial Sequence
  HTT spacer sequence ATCN PAM
guagguaucacuaagcauuu

SEQ ID NO: 1689 - RNA, 20 nt, Artificial Sequence
  HTT spacer sequence ATCN PAM
cuaagcauuuguugaaugaa

SEQ ID NO: 1690 - RNA, 20 nt, Artificial Sequence
  HTT spacer sequence ATCN PAM
gucauucauucaacaaaugc

SEQ ID NO: 1691 - RNA, 20 nt, Artificial Sequence
  HTT spacer sequence ATCN PAM
cugaaaugucuucaaaucug

SEQ ID NO: 1692 - RNA, 20 nt, Artificial Sequence
  HTT spacer sequence ATCN PAM
guauaacuaugcaaagaagu

SEQ ID NO: 1693 - RNA, 20 nt, Artificial Sequence
  HTT spacer sequence ATCN PAM
cagcaaacaacucacaugug

SEQ ID NO: 1694 - RNA, 20 nt, Artificial Sequence
  HTT spacer sequence ATCN PAM
cagugccaacuucugaauaa

SEQ ID NO: 1695 - RNA, 20 nt, Artificial Sequence
  HTT spacer sequence ATCN PAM
aggagaauauucucaggcuu

SEQ ID NO: 1696 - RNA, 20 nt, Artificial Sequence
  HTT spacer sequence ATCN PAM
ucaaggagaauauucucagg

SEQ ID NO: 1697 - RNA, 20 nt, Artificial Sequence
  HTT spacer sequence ATCN PAM
ugguaagugggcaagccuuu

SEQ ID NO: 1698 - RNA, 20 nt, Artificial Sequence
  HTT spacer sequence ATCN PAM
aauggguagacuuuguuaga

SEQ ID NO: 1699 - RNA, 20 nt, Artificial Sequence
  HTT spacer sequence ATCN PAM
aagucccucuaacaaagucu

SEQ ID NO: 1700 - RNA, 20 nt, Artificial Sequence
  HTT spacer sequence ATCN PAM
aacuuucuguauccaagucc

SEQ ID NO: 1701 - RNA, 20 nt, Artificial Sequence
  HTT spacer sequence ATCN PAM
uuaaguccacuuucugcauc

SEQ ID NO: 1702 - RNA, 20 nt, Artificial Sequence
  HTT spacer sequence ATCN PAM
uuuuaaaaugaacacauacc

SEQ ID NO: 1703 - RNA, 20 nt, Artificial Sequence
  HTT spacer sequence ATCN PAM
cugcuucuugccuaaacaca

SEQ ID NO: 1704 - RNA, 20 nt, Artificial Sequence
  HTT spacer sequence ATCN PAM
uuaauugaaaauuaugacca

SEQ ID NO: 1705 - RNA, 20 nt, Artificial Sequence
  HTT spacer sequence ATCN PAM
uagcucacugcagccuugaa

SEQ ID NO: 1706 - RNA, 20 nt, Artificial Sequence
  HTT spacer sequence ATCN PAM
cagcuuucugcauagcuggg

SEQ ID NO: 1707 - RNA, 20 nt, Artificial Sequence
  HTT spacer sequence ATCN PAM
cuacaaaaaaaauuuaaaaa

SEQ ID NO: 1708 - RNA, 20 nt, Artificial Sequence
  HTT spacer sequence ATCN PAM
gcacccugcucugugacaca

SEQ ID NO: 1709 - RNA, 20 nt, Artificial Sequence
  HTT spacer sequence ATCN PAM
uugcauucuggguaugacuc

SEQ ID NO: 1710 - RNA, 20 nt, Artificial Sequence
  HTT spacer sequence ATCN PAM
ccgccuuagacgccuguccu

SEQ ID NO: 1711 - RNA, 20 nt, Artificial Sequence
  HTT spacer sequence ATCN PAM
ggcagaggcauaaaaggaga

SEQ ID NO: 1712 - RNA, 20 nt, Artificial Sequence
  HTT spacer sequence ATCN PAM
aauucauguaugacacccug

SEQ ID NO: 1713 - RNA, 20 nt, Artificial Sequence
  HTT spacer sequence ATCN PAM
ccuuccauuaaaugagaauu

SEQ ID NO: 1714 - RNA, 20 nt, Artificial Sequence
  HTT spacer sequence ATCN PAM
ugguaucgccuuccauuaaa

SEQ ID NO: 1715 - RNA, 20 nt, Artificial Sequence
  HTT spacer sequence ATCN PAM
gacuuguccaagguuguguc

SEQ ID NO: 1716 - RNA, 20 nt, Artificial Sequence
  HTT spacer sequence ATCN PAM
ccaagcuaugugguugaucg

SEQ ID NO: 1717 - RNA, 20 nt, Artificial Sequence
  HTT spacer sequence ATCN PAM
accacauagcuuggagauug

SEQ ID NO: 1718 - RNA, 20 nt, Artificial Sequence
  HTT spacer sequence ATCN PAM
gaacaggguacggugcagag

SEQ ID NO: 1719 - RNA, 20 nt, Artificial Sequence
  HTT spacer sequence ATCN PAM
ugagaaaugguuagaaguga

SEQ ID NO: 1720 - RNA, 20 nt, Artificial Sequence
  HTT spacer sequence ATCN PAM
cuucuaaccauuucucauga

SEQ ID NO: 1721 - RNA, 20 nt, Artificial Sequence
  HTT spacer sequence ATCN PAM
gugugcuccccugccuuguu

SEQ ID NO: 1722 - RNA, 20 nt, Artificial Sequence
  HTT spacer sequence ATCN PAM
ccuaaaaacacagaaaaagg

SEQ ID NO: 1723 - RNA, 20 nt, Artificial Sequence
  HTT spacer sequence ATCN PAM
uggcgcaggaggggaaccug

SEQ ID NO: 1724 - RNA, 20 nt, Artificial Sequence
  HTT spacer sequence ATCN PAM
gaaaggcacucccggguggg

SEQ ID NO: 1725 - RNA, 20 nt, Artificial Sequence
  HTT spacer sequence ATCN PAM
cacccgggagugccuuucag

SEQ ID NO: 1726 - RNA, 20 nt, Artificial Sequence
  HTT spacer sequence ATCN PAM
uggcaucccacccgggagug

SEQ ID NO: 1727 - RNA, 20 nt, Artificial Sequence
  HTT spacer sequence ATCN PAM
gaggacugugguccccaaga

SEQ ID NO: 1728 - RNA, 20 nt, Artificial Sequence
  HTT spacer sequence ATCN PAM
gcaucagaggacuguggucc

SEQ ID NO: 1729 - RNA, 20 nt, Artificial Sequence
  HTT spacer sequence ATCN PAM
caccugugaguagcuacugc

SEQ ID NO: 1730 - RNA, 20 nt, Artificial Sequence
  HTT spacer sequence ATCN PAM
agcagcgauuaaggauauuu

SEQ ID NO: 1731 - RNA, 20 nt, Artificial Sequence
  HTT spacer sequence ATCN PAM
cugcuggaugugguggugca

SEQ ID NO: 1732 - RNA, 20 nt, Artificial Sequence
  HTT spacer sequence ATCN PAM
uuaaucgcugcuggaugugg

SEQ ID NO: 1733 - RNA, 20 nt, Artificial Sequence
  HTT spacer sequence ATCN PAM
cuacagcccuggaggucaaa

SEQ ID NO: 1734 - RNA, 20 nt, Artificial Sequence
  HTT spacer sequence ATCN PAM
gccuugccucagccuccuga

SEQ ID NO: 1735 - RNA, 20 nt, Artificial Sequence
  HTT spacer sequence ATCN PAM
ggcuaauuuuaaaaaauugu

SEQ ID NO: 1736 - RNA, 20 nt, Artificial Sequence
  HTT spacer sequence ATCN PAM
uaguacuuugggaggcugag

SEQ ID NO: 1737 - RNA, 20 nt, Artificial Sequence
  HTT spacer sequence ATCN PAM
accugccucagccucccaaa

SEQ ID NO: 1738 - RNA, 20 nt, Artificial Sequence
  HTT spacer sequence ATCN PAM
cuugaggucaagaguucgag

SEQ ID NO: 1739 - RNA, 20 nt, Artificial Sequence
  HTT spacer sequence ATCN PAM
cagcuacucaggaggccgag

SEQ ID NO: 1740 - RNA, 20 nt, Artificial Sequence
  HTT spacer sequence ATCN PAM
cuugaacccgggcggcagag

SEQ ID NO: 1741 - RNA, 20 nt, Artificial Sequence
  HTT spacer sequence ATCN PAM
cggcucacugcaaccucugc

SEQ ID NO: 1742 - RNA, 20 nt, Artificial Sequence
  HTT spacer sequence ATCN PAM
caauauuuugggaggccaag

SEQ ID NO: 1743 - RNA, 20 nt, Artificial Sequence
  HTT spacer sequence ATCN PAM
accugccuuggccucccaaa

SEQ ID NO: 1744 - RNA, 20 nt, Artificial Sequence
  HTT spacer sequence ATCN PAM
ccugaagucaggaguucaag

SEQ ID NO: 1745 - RNA, 20 nt, Artificial Sequence
  HTT spacer sequence ATCN PAM
cuugaaccugggaggcggag

SEQ ID NO: 1746 - RNA, 20 nt, Artificial Sequence
  HTT spacer sequence ATCN PAM
agccauugcacuccagccua

SEQ ID NO: 1747 - RNA, 20 nt, Artificial Sequence
  HTT spacer sequence ATCN PAM
uucccuucugugcgguuaaa

SEQ ID NO: 1748 - RNA, 20 nt, Artificial Sequence
  HTT spacer sequence ATCN PAM
agcuggugguuuaaccgcac

SEQ ID NO: 1749 - RNA, 20 nt, Artificial Sequence
  HTT spacer sequence ATCN PAM
cuaaaaauugaaagcaaaau

SEQ ID NO: 1750 - RNA, 20 nt, Artificial Sequence
  HTT spacer sequence ATCN PAM
aauuuuuuuuuuuuuuuuuu

SEQ ID NO: 1751 - RNA, 20 nt, Artificial Sequence
  HTT spacer sequence ATCN PAM
cgccacugcacaccagccug

SEQ ID NO: 1752 - RNA, 20 nt, Artificial Sequence
  HTT spacer sequence ATCN PAM
cggcucacuguaagcuccgc

SEQ ID NO: 1753 - RNA, 20 nt, Artificial Sequence
  HTT spacer sequence ATCN PAM
uggcuaacacggugaaaccc

SEQ ID NO: 1754 - RNA, 20 nt, Artificial Sequence
  HTT spacer sequence ATCN PAM
agaccauccuggcuaacacg

SEQ ID NO: 1755 - RNA, 20 nt, Artificial Sequence
  HTT spacer sequence ATCN PAM
ccugaccuugugauccgccc

SEQ ID NO: 1756 - RNA, 20 nt, Artificial Sequence
  HTT spacer sequence ATCN PAM
caaggucaggagaucgagac

SEQ ID NO: 1757 - RNA, 20 nt, Artificial Sequence
  HTT spacer sequence ATCN PAM
gcccgccucggccucccaaa

SEQ ID NO: 1758 - RNA, 20 nt, Artificial Sequence
  HTT spacer sequence ATCN PAM
cagcacuuugggaggccgag

SEQ ID NO: 1759 - RNA, 20 nt, Artificial Sequence
  HTT spacer sequence ATCN PAM
aauuuuuuaauguuauaauu

SEQ ID NO: 1760 - RNA, 20 nt, Artificial Sequence
  HTT spacer sequence ATCN PAM
uuggaaccacauaaauguuu

SEQ ID NO: 1761 - RNA, 20 nt, Artificial Sequence
  HTT spacer sequence ATCN PAM
uaagaugucuagauuccauc

SEQ ID NO: 1762 - RNA, 20 nt, Artificial Sequence
  HTT spacer sequence ATCN PAM
uacgauacacucuauuuugc

SEQ ID NO: 1763 - RNA, 20 nt, Artificial Sequence
  HTT spacer sequence ATCN PAM
agacaucuuacgauacacuc

SEQ ID NO: 1764 - RNA, 20 nt, Artificial Sequence
  HTT spacer sequence ATCN PAM
cugaccauccccaaguaauu

SEQ ID NO: 1765 - RNA, 20 nt, Artificial Sequence
  HTT spacer sequence ATCN PAM
ccaaguaauuauuuuaacuc

SEQ ID NO: 1766 - RNA, 20 nt, Artificial Sequence
  HTT spacer sequence ATCN PAM
auacauauauaguauguaaa

SEQ ID NO: 1767 - RNA, 20 nt, Artificial Sequence
  HTT spacer sequence ATCN PAM
ccaccguauauucagugaaa

SEQ ID NO: 1768 - RNA, 20 nt, Artificial Sequence
  HTT spacer sequence ATCN PAM
ccaccggugcuguuuccguu

SEQ ID NO: 1769 - RNA, 20 nt, Artificial Sequence
  HTT spacer sequence ATCN PAM
cggcaccaacggaaacagca

SEQ ID NO: 1770 - RNA, 20 nt, Artificial Sequence
  HTT spacer sequence ATCN PAM
uugauagaguccuagaagug

SEQ ID NO: 1771 - RNA, 20 nt, Artificial Sequence
  HTT spacer sequence ATCN PAM
aggauacauucaacgaaaua

SEQ ID NO: 1772 - RNA, 20 nt, Artificial Sequence
  HTT spacer sequence ATCN PAM
gacaaauugcguaugaauuc

SEQ ID NO: 1773 - RNA, 20 nt, Artificial Sequence
  HTT spacer sequence ATCN PAM
ggcaauaucugacaaauugc

SEQ ID NO: 1774 - RNA, 20 nt, Artificial Sequence
  HTT spacer sequence ATCN PAM
auuuuuauaagaaaaauaag

SEQ ID NO: 1775 - RNA, 20 nt, Artificial Sequence
  HTT spacer sequence ATCN PAM
uugucuuauuuuucuuauaa

SEQ ID NO: 1776 - RNA, 20 nt, Artificial Sequence
  HTT spacer sequence ATCN PAM
cagcacuuugggaggccagg

SEQ ID NO: 1777 - RNA, 20 nt, Artificial Sequence
  HTT spacer sequence ATCN PAM
ucccacccuggccucccaaa

SEQ ID NO: 1778 - RNA, 20 nt, Artificial Sequence
  HTT spacer sequence ATCN PAM
cuugagcccaggaguucaag

SEQ ID NO: 1779 - RNA, 20 nt, Artificial Sequence
  HTT spacer sequence ATCN PAM
acauuucauuuucuuuucuu

SEQ ID NO: 1780 - RNA, 20 nt, Artificial Sequence
  HTT spacer sequence ATCN PAM
guacaaggggaggaaacuga

SEQ ID NO: 1781 - RNA, 20 nt, Artificial Sequence
  HTT spacer sequence ATCN PAM
ugucucaguuuccuccccuu

SEQ ID NO: 1782 - RNA, 20 nt, Artificial Sequence
  HTT spacer sequence ATCN PAM
ggcugggucugugcuccuca

SEQ ID NO: 1783 - RNA, 20 nt, Artificial Sequence
  HTT spacer sequence ATCN PAM
cgugcaugcaucugagucag

SEQ ID NO: 1784 - RNA, 20 nt, Artificial Sequence
  HTT spacer sequence ATCN PAM
gagucagaggccggcuuucc

SEQ ID NO: 1785 - RNA, 20 nt, Artificial Sequence
  HTT spacer sequence ATCN PAM
ugcagacuguuuuaaaauga

SEQ ID NO: 1786 - RNA, 20 nt, Artificial Sequence
  HTT spacer sequence ATCN PAM
uacccuggccuacaguaggu

SEQ ID NO: 1787 - RNA, 20 nt, Artificial Sequence
  HTT spacer sequence ATCN PAM
ucagcuucuaauaucauacc

SEQ ID NO: 1788 - RNA, 20 nt, Artificial Sequence
  HTT spacer sequence ATCN PAM
ucaacuuauucaccacuuau

SEQ ID NO: 1789 - RNA, 20 nt, Artificial Sequence
  HTT spacer sequence ATCN PAM
uucuacacacucaacagaau

SEQ ID NO: 1790 - RNA, 20 nt, Artificial Sequence
  HTT spacer sequence ATCN PAM
aaaacauucuguugagugug

SEQ ID NO: 1791 - RNA, 20 nt, Artificial Sequence
  HTT spacer sequence ATCN PAM
gucucaaaaaaauuauaaag

SEQ ID NO: 1792 - RNA, 20 nt, Artificial Sequence
  HTT spacer sequence ATCN PAM
caccacugcagggcaagagu

SEQ ID NO: 1793 - RNA, 20 nt, Artificial Sequence
  HTT spacer sequence ATCN PAM
ugguucaccgcagccucgac

SEQ ID NO: 1794 - RNA, 20 nt, Artificial Sequence
  HTT spacer sequence ATCN PAM
cuuaagcccagaaggucgag

SEQ ID NO: 1795 - RNA, 20 nt, Artificial Sequence
  HTT spacer sequence ATCN PAM
uccugccucagccuccagag

SEQ ID NO: 1796 - RNA, 20 nt, Artificial Sequence
  HTT spacer sequence ATCN PAM
cacccagcuaauuuuuuuaa

SEQ ID NO: 1797 - RNA, 20 nt, Artificial Sequence
  HTT spacer sequence ATCN PAM
uuuuuuauagagacaggguc

SEQ ID NO: 1798 - RNA, 20 nt, Artificial Sequence
  HTT spacer sequence ATCN PAM
uccgaccuuggccucccaaa

SEQ ID NO: 1799 - RNA, 20 nt, Artificial Sequence
  HTT spacer sequence ATCN PAM
uucuauauucaacgcauuaa

SEQ ID NO: 1800 - RNA, 20 nt, Artificial Sequence
  HTT spacer sequence ATCN PAM
uucauguguagcugucccug

SEQ ID NO: 1801 - RNA, 20 nt, Artificial Sequence
  HTT spacer sequence ATCN PAM
acuacagaacaguaaauaaa

SEQ ID NO: 1802 - RNA, 20 nt, Artificial Sequence
  HTT spacer sequence ATCN PAM
auaaaaauauaaugaauauu

SEQ ID NO: 1803 - RNA, 20 nt, Artificial Sequence
  HTT spacer sequence ATCN PAM
aguguuucugucuuaucaag

SEQ ID NO: 1804 - RNA, 20 nt, Artificial Sequence
  HTT spacer sequence ATCN PAM
agugguggccuaugauuaaa

SEQ ID NO: 1805 - RNA, 20 nt, Artificial Sequence
  HTT spacer sequence ATCN PAM
uaggccaccacuugauaaga

SEQ ID NO: 1806 - RNA, 20 nt, Artificial Sequence
  HTT spacer sequence ATCN PAM
ggaagcccuuuaaucauagg

SEQ ID NO: 1807 - RNA, 20 nt, Artificial Sequence
  HTT spacer sequence ATCN PAM
auagccaggcaaaaaucgaa

SEQ ID NO: 1808 - RNA, 20 nt, Artificial Sequence
  HTT spacer sequence ATCN PAM
aauuuuccugcugcuaguga

SEQ ID NO: 1809 - RNA, 20 nt, Artificial Sequence
  HTT spacer sequence ATCN PAM
ggauuucagaccucgguuug

SEQ ID NO: 1810 - RNA, 20 nt, Artificial Sequence
  HTT spacer sequence ATCN PAM
ggauguguccuguguguuca

SEQ ID NO: 1811 - RNA, 20 nt, Artificial Sequence
  HTT spacer sequence ATCN PAM
cuguggccaaaccgaggucu

SEQ ID NO: 1812 - RNA, 20 nt, Artificial Sequence
  HTT spacer sequence ATCN PAM
cagaaggacagaggguucga

SEQ ID NO: 1813 - RNA, 20 nt, Artificial Sequence
  HTT spacer sequence ATCN PAM
gggugccugagugccucaga

SEQ ID NO: 1814 - RNA, 20 nt, Artificial Sequence
  HTT spacer sequence ATCN PAM
acccugaauggaccggggcc

SEQ ID NO: 1815 - RNA, 20 nt, Artificial Sequence
  HTT spacer sequence ATCN PAM
acuaguguguccaaaccgag

SEQ ID NO: 1816 - RNA, 20 nt, Artificial Sequence
  HTT spacer sequence ATCN PAM
cuaaccugucagaguguuga

SEQ ID NO: 1817 - RNA, 20 nt, Artificial Sequence
  HTT spacer sequence ATCN PAM
ccagcagccucaacacucug

SEQ ID NO: 1818 - RNA, 20 nt, Artificial Sequence
  HTT spacer sequence ATCN PAM
uguaggcugcccucagcuuc

SEQ ID NO: 1819 - RNA, 20 nt, Artificial Sequence
  HTT spacer sequence ATCN PAM
guaagaagcugagggcagcc

SEQ ID NO: 1820 - RNA, 20 nt, Artificial Sequence
  HTT spacer sequence ATCN PAM
ggaugacaccgcaggucucc

SEQ ID NO: 1821 - RNA, 20 nt, Artificial Sequence
  HTT spacer sequence ATCN PAM
cgauucugcccucacuucgc

SEQ ID NO: 1822 - RNA, 20 nt, Artificial Sequence
  HTT spacer sequence ATCN PAM
ccccacucugguuauuccaa

SEQ ID NO: 1823 - RNA, 20 nt, Artificial Sequence
  HTT spacer sequence ATCN PAM
uuggaauaaccagagugggg

SEQ ID NO: 1824 - RNA, 20 nt, Artificial Sequence
  HTT spacer sequence ATCN PAM
gggggcagugccagccaacc

SEQ ID NO: 1825 - RNA, 20 nt, Artificial Sequence
  HTT spacer sequence ATCN PAM
cagggcagugaaaaacccca

SEQ ID NO: 1826 - RNA, 20 nt, Artificial Sequence
  HTT spacer sequence ATCN PAM
aucccagggcagugaaaaac

SEQ ID NO: 1827 - RNA, 20 nt, Artificial Sequence
  HTT spacer sequence ATCN PAM
uggaugaaucauacaaaugu

SEQ ID NO: 1828 - RNA, 20 nt, Artificial Sequence
  HTT spacer sequence ATCN PAM
aagaugagcugaauugccac

SEQ ID NO: 1829 - RNA, 20 nt, Artificial Sequence
  HTT spacer sequence ATCN PAM
uacaaauguuuaaaaauauu

SEQ ID NO: 1830 - RNA, 20 nt, Artificial Sequence
  HTT spacer sequence ATCN PAM
caauaaagcuaauauuuuua

SEQ ID NO: 1831 - RNA, 20 nt, Artificial Sequence
  HTT spacer sequence ATCN PAM
ucaaguccaccaguuugaag

SEQ ID NO: 1832 - RNA, 20 nt, Artificial Sequence
  HTT spacer sequence ATCN PAM
aguccaccaguuugaagugu

SEQ ID NO: 1833 - RNA, 20 nt, Artificial Sequence
  HTT spacer sequence ATCN PAM
guuguauuacacacuucaaa

SEQ ID NO: 1834 - RNA, 20 nt, Artificial Sequence
  HTT spacer sequence ATCN PAM
ccaccaucuaauuucacaac

SEQ ID NO: 1835 - RNA, 20 nt, Artificial Sequence
  HTT spacer sequence ATCN PAM
aauuucacaacuuuuuuuuu

SEQ ID NO: 1836 - RNA, 20 nt, Artificial Sequence
  HTT spacer sequence ATCN PAM
uggcucacugcaacguccac

SEQ ID NO: 1837 - RNA, 20 nt, Artificial Sequence
  HTT spacer sequence ATCN PAM
cuugugccugggagguggac

SEQ ID NO: 1838 - RNA, 20 nt, Artificial Sequence
  HTT spacer sequence ATCN PAM
ggaacuacaggcgccugccg

SEQ ID NO: 1839 - RNA, 20 nt, Artificial Sequence
  HTT spacer sequence ATCN PAM
ggaguuugagaccagccugg

SEQ ID NO: 1840 - RNA, 20 nt, Artificial Sequence
  HTT spacer sequence ATCN PAM
caggugaucugccugccuuc

SEQ ID NO: 1841 - RNA, 20 nt, Artificial Sequence
  HTT spacer sequence ATCN PAM
ccugagaucaggaguuugag

SEQ ID NO: 1842 - RNA, 20 nt, Artificial Sequence
  HTT spacer sequence ATCN PAM
gccugccuucgccucccaaa

SEQ ID NO: 1843 - RNA, 20 nt, Artificial Sequence
  HTT spacer sequence ATCN PAM
cagcauuuugggaggcgaag

SEQ ID NO: 1844 - RNA, 20 nt, Artificial Sequence
  HTT spacer sequence ATCN PAM
aaauuuaacuuaauuuccau

SEQ ID NO: 1845 - RNA, 20 nt, Artificial Sequence
  HTT spacer sequence ATCN PAM
ggacuaaacguauacuuuuc

SEQ ID NO: 1846 - RNA, 20 nt, Artificial Sequence
  HTT spacer sequence ATCN PAM
gacagccaaguccccaccaa

SEQ ID NO: 1847 - RNA, 20 nt, Artificial Sequence
  HTT spacer sequence ATCN PAM
augaaaugauucagggacau

SEQ ID NO: 1848 - RNA, 20 nt, Artificial Sequence
  HTT spacer sequence ATCN PAM
uuucauagaucagacagcca

SEQ ID NO: 1849 - RNA, 20 nt, Artificial Sequence
  HTT spacer sequence ATCN PAM
accuccucccauuugacuuu

SEQ ID NO: 1850 - RNA, 20 nt, Artificial Sequence
  HTT spacer sequence ATCN PAM
aagaaucaagaaugauaccg

SEQ ID NO: 1851 - RNA, 20 nt, Artificial Sequence
  HTT spacer sequence ATCN PAM
agaaugauaccgaggaguau

SEQ ID NO: 1852 - RNA, 20 nt, Artificial Sequence
  HTT spacer sequence ATCN PAM
uucuugauucuuugaucgac

SEQ ID NO: 1853 - RNA, 20 nt, Artificial Sequence
  HTT spacer sequence ATCN PAM
ucugaaaacuucucagaaua

SEQ ID NO: 1854 - RNA, 20 nt, Artificial Sequence
  HTT spacer sequence ATCN PAM
aucugcaggaugguaaguca

SEQ ID NO: 1855 - RNA, 20 nt, Artificial Sequence
  HTT spacer sequence ATCN PAM
gcaggaugguaagucaggcu

SEQ ID NO: 1856 - RNA, 20 nt, Artificial Sequence
  HTT spacer sequence ATCN PAM
ugcagauagauuuggcaucc

SEQ ID NO: 1857 - RNA, 20 nt, Artificial Sequence
  HTT spacer sequence ATCN PAM
ucagcaaguccuggucaccc

SEQ ID NO: 1858 - RNA, 20 nt, Artificial Sequence
  HTT spacer sequence ATCN PAM
caguggcaggagcaugggga

SEQ ID NO: 1859 - RNA, 20 nt, Artificial Sequence
  HTT spacer sequence ATCN PAM
gacaaaaagagccagugaga

SEQ ID NO: 1860 - RNA, 20 nt, Artificial Sequence
  HTT spacer sequence ATCN PAM
ugucuggaaacuuuucucac

SEQ ID NO: 1861 - RNA, 20 nt, Artificial Sequence
  HTT spacer sequence ATCN PAM
ggaaaugacuuaauuggguu

SEQ ID NO: 1862 - RNA, 20 nt, Artificial Sequence
  HTT spacer sequence ATCN PAM
aaacccaauuaagucauuuc

SEQ ID NO: 1863 - RNA, 20 nt, Artificial Sequence
  HTT spacer sequence ATCN PAM
aaccaugaauuuuacugugu

SEQ ID NO: 1864 - RNA, 20 nt, Artificial Sequence
  HTT spacer sequence ATCN PAM
uucauguauuuugagguggg

SEQ ID NO: 1865 - RNA, 20 nt, Artificial Sequence
  HTT spacer sequence ATCN PAM
cuggcagguggcuaaacccu

SEQ ID NO: 1866 - RNA, 20 nt, Artificial Sequence
  HTT spacer sequence ATCN PAM
ccuugcugugacucgcgggu

SEQ ID NO: 1867 - RNA, 20 nt, Artificial Sequence
  HTT spacer sequence ATCN PAM
gccucugggacuggacugug

SEQ ID NO: 1868 - RNA, 20 nt, Artificial Sequence
  HTT spacer sequence ATCN PAM
gugagggaaacucucuuugu

SEQ ID NO: 1869 - RNA, 20 nt, Artificial Sequence
  HTT spacer sequence ATCN PAM
uuguugaaugaaaauaaaug

SEQ ID NO: 1870 - RNA, 20 nt, Artificial Sequence
  HTT spacer sequence ATCN PAM
uguauguuccaggcaccguc

SEQ ID NO: 1871 - RNA, 20 nt, Artificial Sequence
  HTT spacer sequence ATCN PAM
cugucugcucugcccagcag

SEQ ID NO: 1872 - RNA, 20 nt, Artificial Sequence
  HTT spacer sequence ATCN PAM
uugucaagccuugaguguug

SEQ ID NO: 1873 - RNA, 20 nt, Artificial Sequence
  HTT spacer sequence ATCN PAM
gaggaagcaacacucaaggc

SEQ ID NO: 1874 - RNA, 20 nt, Artificial Sequence
  HTT spacer sequence ATCN PAM
cagggcucugugaagaguga

SEQ ID NO: 1875 - RNA, 20 nt, Artificial Sequence
  HTT spacer sequence ATCN PAM
cucuucacagagcccugcga

SEQ ID NO: 1876 - RNA, 20 nt, Artificial Sequence
  HTT spacer sequence ATCN PAM
caucacucuucacagagccc

SEQ ID NO: 1877 - RNA, 20 nt, Artificial Sequence
  HTT spacer sequence ATCN PAM
cugcaaagcccccaauggcc

SEQ ID NO: 1878 - RNA, 20 nt, Artificial Sequence
  HTT spacer sequence ATCN PAM
ccgaggucugcgucaccuuu

SEQ ID NO: 1879 - RNA, 20 nt, Artificial Sequence
  HTT spacer sequence ATCN PAM
cuucucacaccugcucugcc

SEQ ID NO: 1880 - RNA, 20 nt, Artificial Sequence
  HTT spacer sequence ATCN PAM
gccaucacuucucacaccug

SEQ ID NO: 1881 - RNA, 20 nt, Artificial Sequence
  HTT spacer sequence ATCN PAM
gacagcggucaucugccauc

SEQ ID NO: 1882 - RNA, 20 nt, Artificial Sequence
  HTT spacer sequence ATCN PAM
ugaaucugacagcggucauc

SEQ ID NO: 1883 - RNA, 20 nt, Artificial Sequence
  HTT spacer sequence ATCN PAM
auccugaaucugacagcggu

SEQ ID NO: 1884 - RNA, 20 nt, Artificial Sequence
  HTT spacer sequence ATCN PAM
ugaaggcaggugguggagaa

SEQ ID NO: 1885 - RNA, 20 nt, Artificial Sequence
  HTT spacer sequence ATCN PAM
uggagucagccugaagucuu

SEQ ID NO: 1886 - RNA, 20 nt, Artificial Sequence
  HTT spacer sequence ATCN PAM
gagaaaaagaagcuccauaa

SEQ ID NO: 1887 - RNA, 20 nt, Artificial Sequence
  HTT spacer sequence ATCN PAM
agagcccaugcggaccugaa

SEQ ID NO: 1888 - RNA, 20 nt, Artificial Sequence
  HTT spacer sequence ATCN PAM
uguugaaccugccguucccu

SEQ ID NO: 1889 - RNA, 20 nt, Artificial Sequence
  HTT spacer sequence ATCN PAM
uucuaacucuggccuggagg

SEQ ID NO: 1890 - RNA, 20 nt, Artificial Sequence
  HTT spacer sequence ATCN PAM
ccccagugacccccagccac

SEQ ID NO: 1891 - RNA, 20 nt, Artificial Sequence
  HTT spacer sequence ATCN PAM
uccauccccccagugacccc

SEQ ID NO: 1892 - RNA, 20 nt, Artificial Sequence
  HTT spacer sequence ATCN PAM
gaauaacuccucuccagcca

SEQ ID NO: 1893 - RNA, 20 nt, Artificial Sequence
  HTT spacer sequence ATCN PAM
cagcacuuugggaggucaag

SEQ ID NO: 1894 - RNA, 20 nt, Artificial Sequence
  HTT spacer sequence ATCN PAM
accugccuugaccucccaaa

SEQ ID NO: 1895 - RNA, 20 nt, Artificial Sequence
  HTT spacer sequence ATCN PAM
ugaggucaggaguuugagac

SEQ ID NO: 1896 - RNA, 20 nt, Artificial Sequence
  HTT spacer sequence ATCN PAM
uggccaggcuggucucaaac

SEQ ID NO: 1897 - RNA, 20 nt, Artificial Sequence
  HTT spacer sequence ATCN PAM
uaucucuacuaaaaaaaaaa

SEQ ID NO: 1898 - RNA, 20 nt, Artificial Sequence
  HTT spacer sequence ATCN PAM
cuacuaaaaaaaaaauuagc

SEQ ID NO: 1899 - RNA, 20 nt, Artificial Sequence
  HTT spacer sequence ATCN PAM
cagguacucggaaggcugug

SEQ ID NO: 1900 - RNA, 20 nt, Artificial Sequence
  HTT spacer sequence ATCN PAM
ugcuuuauuuuucuuccccu

SEQ ID NO: 1901 - RNA, 20 nt, Artificial Sequence
  HTT spacer sequence ATCN PAM
acuuacgacacccauugcau

SEQ ID NO: 1902 - RNA, 20 nt, Artificial Sequence
  HTT spacer sequence ATCN PAM
ugaaagccccugagccuuug

SEQ ID NO: 1903 - RNA, 20 nt, Artificial Sequence
  HTT spacer sequence ATCN PAM
gugguguuggaggugcuggg

SEQ ID NO: 1904 - RNA, 20 nt, Artificial Sequence
  HTT spacer sequence ATCN PAM
uguaaugggagcugagacuc

SEQ ID NO: 1905 - RNA, 20 nt, Artificial Sequence
  HTT spacer sequence ATCN PAM
ucucucccagcucaguuucu

SEQ ID NO: 1906 - RNA, 20 nt, Artificial Sequence
  HTT spacer sequence ATCN PAM
cucccagcucaguuucucau

SEQ ID NO: 1907 - RNA, 20 nt, Artificial Sequence
  HTT spacer sequence ATCN PAM
acauuucauaaaugagaaac

SEQ ID NO: 1908 - RNA, 20 nt, Artificial Sequence
  HTT spacer sequence ATCN PAM
uauaaaguaagagcuacucu

SEQ ID NO: 1909 - RNA, 20 nt, Artificial Sequence
  HTT spacer sequence ATCN PAM
ucccaacaauccuauaaagu

SEQ ID NO: 1910 - RNA, 20 nt, Artificial Sequence
  HTT spacer sequence ATCN PAM
uccauaauuacuaagaggag

SEQ ID NO: 1911 - RNA, 20 nt, Artificial Sequence
  HTT spacer sequence ATCN PAM
gucuuagucccuuugggcug

SEQ ID NO: 1912 - RNA, 20 nt, Artificial Sequence
  HTT spacer sequence ATCN PAM
cuuagacugaguaauuuauc

SEQ ID NO: 1913 - RNA, 20 nt, Artificial Sequence
  HTT spacer sequence ATCN PAM
acagcagaaguuuauuuucu

SEQ ID NO: 1914 - RNA, 20 nt, Artificial Sequence
  HTT spacer sequence ATCN PAM
aggacuuccagccuccugac

SEQ ID NO: 1915 - RNA, 20 nt, Artificial Sequence
  HTT spacer sequence ATCN PAM
agaugccugcagauuuggug

SEQ ID NO: 1916 - RNA, 20 nt, Artificial Sequence
  HTT spacer sequence ATCN PAM
ugaucuaggacuuccagccu

SEQ ID NO: 1917 - RNA, 20 nt, Artificial Sequence
  HTT spacer sequence ATCN PAM
gcaggcaucuugaucuagga

SEQ ID NO: 1918 - RNA, 20 nt, Artificial Sequence
  HTT spacer sequence ATCN PAM
uugaagcagagagcagcccu

SEQ ID NO: 1919 - RNA, 20 nt, Artificial Sequence
  HTT spacer sequence ATCN PAM
uagcacuuugggaggcugag

SEQ ID NO: 1920 - RNA, 20 nt, Artificial Sequence
  HTT spacer sequence ATCN PAM
ucccaccucagccucccaaa

SEQ ID NO: 1921 - RNA, 20 nt, Artificial Sequence
  HTT spacer sequence ATCN PAM
cuugagccaaggagcuagag

SEQ ID NO: 1922 - RNA, 20 nt, Artificial Sequence
  HTT spacer sequence ATCN PAM
cacuguguuacccaggcugg

SEQ ID NO: 1923 - RNA, 20 nt, Artificial Sequence
  HTT spacer sequence ATCN PAM
uucuuucuuuucuuuucuuu

SEQ ID NO: 1924 - RNA, 20 nt, Artificial Sequence
  HTT spacer sequence ATCN PAM
cauucacgagggcagagccu

SEQ ID NO: 1925 - RNA, 20 nt, Artificial Sequence
  HTT spacer sequence ATCN PAM
ccuccagaaggucccaccuc

SEQ ID NO: 1926 - RNA, 20 nt, Artificial Sequence
  HTT spacer sequence ATCN PAM
ccaaugcaauaguauugaga

SEQ ID NO: 1927 - RNA, 20 nt, Artificial Sequence
  HTT spacer sequence ATCN PAM
guaagcugaaacuuaauccc

SEQ ID NO: 1928 - RNA, 20 nt, Artificial Sequence
  HTT spacer sequence ATCN PAM
cccacaaaucuguaagcuga

SEQ ID NO: 1929 - RNA, 20 nt, Artificial Sequence
  HTT spacer sequence ATCN PAM
uggcccucgaugggagugga

SEQ ID NO: 1930 - RNA, 20 nt, Artificial Sequence
  HTT spacer sequence ATCN PAM
agggccaggaugcucugaau

SEQ ID NO: 1931 - RNA, 20 nt, Artificial Sequence
  HTT spacer sequence ATCN PAM
cagggacuccacagccccau

SEQ ID NO: 1932 - RNA, 20 nt, Artificial Sequence
  HTT spacer sequence ATCN PAM
gaaaauuaaguguaaugcaa

SEQ ID NO: 1933 - RNA, 20 nt, Artificial Sequence
  HTT spacer sequence ATCN PAM
guuuuauuaauuuauuuguu

SEQ ID NO: 1934 - RNA, 20 nt, Artificial Sequence
  HTT spacer sequence ATCN PAM
guuucuugagacuccgucuc

SEQ ID NO: 1935 - RNA, 20 nt, Artificial Sequence
  HTT spacer sequence ATCN PAM
ggcccagguuggaguacagu

SEQ ID NO: 1936 - RNA, 20 nt, Artificial Sequence
  HTT spacer sequence ATCN PAM
gccucccggguucaagggau

SEQ ID NO: 1937 - RNA, 20 nt, Artificial Sequence
  HTT spacer sequence ATCN PAM
cuugaacccgggaggcagau

SEQ ID NO: 1938 - RNA, 20 nt, Artificial Sequence
  HTT spacer sequence ATCN PAM
gccaccacguccggcuaauu

SEQ ID NO: 1939 - RNA, 20 nt, Artificial Sequence
  HTT spacer sequence ATCN PAM
uggccaacauggugaaaccc

SEQ ID NO: 1940 - RNA, 20 nt, Artificial Sequence
  HTT spacer sequence ATCN PAM
agaccauccuggccaacaug

SEQ ID NO: 1941 - RNA, 20 nt, Artificial Sequence
  HTT spacer sequence ATCN PAM
ccugaccucgugauccaccc

SEQ ID NO: 1942 - RNA, 20 nt, Artificial Sequence
  HTT spacer sequence ATCN PAM
cgaggucaggagaucaagac

SEQ ID NO: 1943 - RNA, 20 nt, Artificial Sequence
  HTT spacer sequence ATCN PAM
acccaccucggccucccaaa

SEQ ID NO: 1944 - RNA, 20 nt, Artificial Sequence
  HTT spacer sequence ATCN PAM
cagcauuuugggaggccgag

SEQ ID NO: 1945 - RNA, 20 nt, Artificial Sequence
  HTT spacer sequence ATCN PAM
guuuuaaauuaacaaagcau

SEQ ID NO: 1946 - RNA, 20 nt, Artificial Sequence
  HTT spacer sequence ATCN PAM
cagugggccagagucacaca

SEQ ID NO: 1947 - RNA, 20 nt, Artificial Sequence
  HTT spacer sequence ATCN PAM
aggagagguggaggaucccc

SEQ ID NO: 1948 - RNA, 20 nt, Artificial Sequence
  HTT spacer sequence ATCN PAM
uccaccucuccucgaugaca

SEQ ID NO: 1949 - RNA, 20 nt, Artificial Sequence
  HTT spacer sequence ATCN PAM
ccucaggcuguggcaaaaaa

SEQ ID NO: 1950 - RNA, 20 nt, Artificial Sequence
  HTT spacer sequence ATCN PAM
agugcagguaugggggccag

SEQ ID NO: 1951 - RNA, 20 nt, Artificial Sequence
  HTT spacer sequence ATCN PAM
cccaccgcucucagcuccuu

SEQ ID NO: 1952 - RNA, 20 nt, Artificial Sequence
  HTT spacer sequence ATCN PAM
cuggccaacucaaaguccca

SEQ ID NO: 1953 - RNA, 20 nt, Artificial Sequence
  HTT spacer sequence ATCN PAM
gcauacuuuucuguaaggcc

SEQ ID NO: 1954 - RNA, 20 nt, Artificial Sequence
  HTT spacer sequence ATCN PAM
ggccuuacagaaaaguaugc

SEQ ID NO: 1955 - RNA, 20 nt, Artificial Sequence
  HTT spacer sequence ATCN PAM
cuguaauagaccugcaaagu

SEQ ID NO: 1956 - RNA, 20 nt, Artificial Sequence
  HTT spacer sequence ATCN PAM
acaccacccuuuuccacuau

SEQ ID NO: 1957 - RNA, 20 nt, Artificial Sequence
  HTT spacer sequence ATCN PAM
gaaaaagcagggcugugcuc

SEQ ID NO: 1958 - RNA, 20 nt, Artificial Sequence
  HTT spacer sequence ATCN PAM
aucagaaaaagcagggcugu

SEQ ID NO: 1959 - RNA, 20 nt, Artificial Sequence
  HTT spacer sequence ATCN PAM
caaaggcaaauaagccuucc

SEQ ID NO: 1960 - RNA, 20 nt, Artificial Sequence
  HTT spacer sequence ATCN PAM
ucacaaaggcaaauaagccu

SEQ ID NO: 1961 - RNA, 20 nt, Artificial Sequence
  HTT spacer sequence ATCN PAM
cuuuagaaaguauuccucac

SEQ ID NO: 1962 - RNA, 20 nt, Artificial Sequence
  HTT spacer sequence ATCN PAM
uuucugguaauuuuaagaau

SEQ ID NO: 1963 - RNA, 20 nt, Artificial Sequence
  HTT spacer sequence ATCN PAM
ucuuaauauuuugguauucu

SEQ ID NO: 1964 - RNA, 20 nt, Artificial Sequence
  HTT spacer sequence ATCN PAM
gagguccuuagugguauuuc

SEQ ID NO: 1965 - RNA, 20 nt, Artificial Sequence
  HTT spacer sequence ATCN PAM
ccacauuuuuaugauuaauu

SEQ ID NO: 1966 - RNA, 20 nt, Artificial Sequence
  HTT spacer sequence ATCN PAM
uaaaaauguggggauuuuua

SEQ ID NO: 1967 - RNA, 20 nt, Artificial Sequence
  HTT spacer sequence ATCN PAM
auaaauaaggggucggcuau

SEQ ID NO: 1968 - RNA, 20 nt, Artificial Sequence
  HTT spacer sequence ATCN PAM
agcagaccucaggaacucag

SEQ ID NO: 1969 - RNA, 20 nt, Artificial Sequence
  HTT spacer sequence ATCN PAM
aacaaauaauuuccaagcau

SEQ ID NO: 1970 - RNA, 20 nt, Artificial Sequence
  HTT spacer sequence ATCN PAM
cagcacuuugggaggucgag

SEQ ID NO: 1971 - RNA, 20 nt, Artificial Sequence
  HTT spacer sequence ATCN PAM
acccgccucgaccucccaaa

SEQ ID NO: 1972 - RNA, 20 nt, Artificial Sequence
  HTT spacer sequence ATCN PAM
cgaggucaggagauggagac

SEQ ID NO: 1973 - RNA, 20 nt, Artificial Sequence
  HTT spacer sequence ATCN PAM
ccugaccucgugauccaccc

SEQ ID NO: 1974 - RNA, 20 nt, Artificial Sequence
  HTT spacer sequence ATCN PAM
cggcucacugcaagcucagc

SEQ ID NO: 1975 - RNA, 20 nt, Artificial Sequence
  HTT spacer sequence ATCN PAM
caccacugcacuccagccug

SEQ ID NO: 1976 - RNA, 20 nt, Artificial Sequence
  HTT spacer sequence ATCN PAM
caaaaaaagaaaaaaaaaga

SEQ ID NO: 1977 - RNA, 20 nt, Artificial Sequence
  HTT spacer sequence ATCN PAM
uuucuuuuuuuuucuuuuuu

SEQ ID NO: 1978 - RNA, 20 nt, Artificial Sequence
  HTT spacer sequence ATCN PAM
aacaaaucauuucuuuuuuu

SEQ ID NO: 1979 - RNA, 20 nt, Artificial Sequence
  HTT spacer sequence ATCN PAM
agaggcucaaguggguugca

SEQ ID NO: 1980 - RNA, 20 nt, Artificial Sequence
  HTT spacer sequence ATCN PAM
aagcaagcggcugggcugca

SEQ ID NO: 1981 - RNA, 20 nt, Artificial Sequence
  HTT spacer sequence ATCN PAM
acuucaggaggcuggaggca

SEQ ID NO: 1982 - RNA, 20 nt, Artificial Sequence
  HTT spacer sequence ATCN PAM
ggacagaaagggggcuccag

SEQ ID NO: 1983 - RNA, 20 nt, Artificial Sequence
  HTT spacer sequence ATCN PAM
cuguuccuagggcccugcuc

SEQ ID NO: 1984 - RNA, 20 nt, Artificial Sequence
  HTT spacer sequence ATCN PAM
gcacagcacgguuuuucucu

SEQ ID NO: 1985 - RNA, 20 nt, Artificial Sequence
  HTT spacer sequence ATCN PAM
cuauuuuugaaaaaagaaag

SEQ ID NO: 1986 - RNA, 20 nt, Artificial Sequence
  HTT spacer sequence ATCN PAM
cagcacugugggaggccaag

SEQ ID NO: 1987 - RNA, 20 nt, Artificial Sequence
  HTT spacer sequence ATCN PAM
guuguaauaaaaaacaaaaa

SEQ ID NO: 1988 - RNA, 20 nt, Artificial Sequence
  HTT spacer sequence ATCN PAM
gcagguacaguuagcaugug

SEQ ID NO: 1989 - RNA, 20 nt, Artificial Sequence
  HTT spacer sequence ATCN PAM
cuuggggccaggaguucaaa

SEQ ID NO: 1990 - RNA, 20 nt, Artificial Sequence
  HTT spacer sequence ATCN PAM
uccugccuugaccucccaga

SEQ ID NO: 1991 - RNA, 20 nt, Artificial Sequence
  HTT spacer sequence ATCN PAM
cagcauucugggaggucaag

SEQ ID NO: 1992 - RNA, 20 nt, Artificial Sequence
  HTT spacer sequence ATCN PAM
gcucaugccggaggcacccg

SEQ ID NO: 1993 - RNA, 20 nt, Artificial Sequence
  HTT spacer sequence ATCN PAM
cggcacugcuguccucagag

SEQ ID NO: 1994 - RNA, 20 nt, Artificial Sequence
  HTT spacer sequence ATCN PAM
gcaggucccuccucugggac

SEQ ID NO: 1995 - RNA, 20 nt, Artificial Sequence
  HTT spacer sequence ATCN PAM
cuccgcucagcucccugaau

SEQ ID NO: 1996 - RNA, 20 nt, Artificial Sequence
  HTT spacer sequence ATCN PAM
uccugcagguccacugagug

SEQ ID NO: 1997 - RNA, 20 nt, Artificial Sequence
  HTT spacer sequence ATCN PAM
cuuagugacaauucucgccc

SEQ ID NO: 1998 - RNA, 20 nt, Artificial Sequence
  HTT spacer sequence ATCN PAM
caccgcugguggccucuguc

SEQ ID NO: 1999 - RNA, 20 nt, Artificial Sequence
  HTT spacer sequence ATCN PAM
uccaauacgugcaguccacc

SEQ ID NO: 2000 - RNA, 20 nt, Artificial Sequence
  HTT spacer sequence ATCN PAM
cugaccucuguuugcaaucc

SEQ ID NO: 2001 - RNA, 20 nt, Artificial Sequence
  HTT spacer sequence ATCN PAM
auuuugcacuacggaaagga

SEQ ID NO: 2002 - RNA, 20 nt, Artificial Sequence
  HTT spacer sequence ATCN PAM
cagaauguguccucugaaga

SEQ ID NO: 2003 - RNA, 20 nt, Artificial Sequence
  HTT spacer sequence ATCN PAM
cagaggcugccccuguucuu

SEQ ID NO: 2004 - RNA, 20 nt, Artificial Sequence
  HTT spacer sequence ATCN PAM
aggacguccuuacaguaaac

SEQ ID NO: 2005 - RNA, 20 nt, Artificial Sequence
  HTT spacer sequence ATCN PAM
agcaguucucgguggugaaa

SEQ ID NO: 2006 - RNA, 20 nt, Artificial Sequence
  HTT spacer sequence ATCN PAM
cuuucaccaccgagaacugc

SEQ ID NO: 2007 - RNA, 20 nt, Artificial Sequence
  HTT spacer sequence ATCN PAM
accuggacaccgcagaugaa

SEQ ID NO: 2008 - RNA, 20 nt, Artificial Sequence
  HTT spacer sequence ATCN PAM
gcgguguccagguagauccc

SEQ ID NO: 2009 - RNA, 20 nt, Artificial Sequence
  HTT spacer sequence ATCN PAM
ccuggcagaaugagguacug

SEQ ID NO: 2010 - RNA, 20 nt, Artificial Sequence
  HTT spacer sequence ATCN PAM
cccaaauacacacagacaca

SEQ ID NO: 2011 - RNA, 20 nt, Artificial Sequence
  HTT spacer sequence ATCN PAM
cagcacuuugggaggcugag

SEQ ID NO: 2012 - RNA, 20 nt, Artificial Sequence
  HTT spacer sequence ATCN PAM
gccugccucagccucccaaa

SEQ ID NO: 2013 - RNA, 20 nt, Artificial Sequence
  HTT spacer sequence ATCN PAM
ugaggucaggaguucgagac

SEQ ID NO: 2014 - RNA, 20 nt, Artificial Sequence
  HTT spacer sequence ATCN PAM
cuacuagcugggacuacagg

SEQ ID NO: 2015 - RNA, 20 nt, Artificial Sequence
  HTT spacer sequence ATCN PAM
cuugaaccugggaggcagaa

SEQ ID NO: 2016 - RNA, 20 nt, Artificial Sequence
  HTT spacer sequence ATCN PAM
cagcucacugcaacuucugc

SEQ ID NO: 2017 - RNA, 20 nt, Artificial Sequence
  HTT spacer sequence ATCN PAM
uuuuuuuuuuuuuuuugggu

SEQ ID NO: 2018 - RNA, 20 nt, Artificial Sequence
  HTT spacer sequence ATCN PAM
gcagcuguccagaagcacag

SEQ ID NO: 2019 - RNA, 20 nt, Artificial Sequence
  HTT spacer sequence ATCN PAM
gacccaaaauagcuaccucc

SEQ ID NO: 2020 - RNA, 20 nt, Artificial Sequence
  HTT spacer sequence ATCN PAM
gcaugcacagaauaacagga

SEQ ID NO: 2021 - RNA, 20 nt, Artificial Sequence
  HTT spacer sequence ATCN PAM
ucugcaugcacagaauaaca

SEQ ID NO: 2022 - RNA, 20 nt, Artificial Sequence
  HTT spacer sequence ATCN PAM
aaucuggguguuucaaagac

SEQ ID NO: 2023 - RNA, 20 nt, Artificial Sequence
  HTT spacer sequence ATCN PAM
ggguguuucaaagacaucaa

SEQ ID NO: 2024 - RNA, 20 nt, Artificial Sequence
  HTT spacer sequence ATCN PAM
acaaaagugaaagugaggaa

SEQ ID NO: 2025 - RNA, 20 nt, Artificial Sequence
  HTT spacer sequence ATCN PAM
aauggcaaagcuuccucacu

SEQ ID NO: 2026 - RNA, 20 nt, Artificial Sequence
  HTT spacer sequence ATCN PAM
agacaagaacauacauaccc

SEQ ID NO: 2027 - RNA, 20 nt, Artificial Sequence
  HTT spacer sequence ATCN PAM
caaacagaaaaaguaccagg

SEQ ID NO: 2028 - RNA, 20 nt, Artificial Sequence
  HTT spacer sequence ATCN PAM
cagcaacaaaccucacugcg

SEQ ID NO: 2029 - RNA, 20 nt, Artificial Sequence
  HTT spacer sequence ATCN PAM
gaacagucuucaucccagca

SEQ ID NO: 2030 - RNA, 20 nt, Artificial Sequence
  HTT spacer sequence ATCN PAM
aaaacaggacuaccuuccag

SEQ ID NO: 2031 - RNA, 20 nt, Artificial Sequence
  HTT spacer sequence ATCN PAM
gcauccuguggaaccuucgu

SEQ ID NO: 2032 - RNA, 20 nt, Artificial Sequence
  HTT spacer sequence ATCN PAM
uguggaaccuucgucagaug

SEQ ID NO: 2033 - RNA, 20 nt, Artificial Sequence
  HTT spacer sequence ATCN PAM
gacgaagguuccacaggaug

SEQ ID NO: 2034 - RNA, 20 nt, Artificial Sequence
  HTT spacer sequence ATCN PAM
cucccugcucuggcucuuag

SEQ ID NO: 2035 - RNA, 20 nt, Artificial Sequence
  HTT spacer sequence ATCN PAM
acuuuccccgugcagcgggc

SEQ ID NO: 2036 - RNA, 20 nt, Artificial Sequence
  HTT spacer sequence ATCN PAM
uggcugggugcgguggcuca

SEQ ID NO: 2037 - RNA, 20 nt, Artificial Sequence
  HTT spacer sequence ATCN PAM
cagcacuuugggaggccgag

SEQ ID NO: 2038 - RNA, 20 nt, Artificial Sequence
  HTT spacer sequence ATCN PAM
accugccucggccucccaaa

SEQ ID NO: 2039 - RNA, 20 nt, Artificial Sequence
  HTT spacer sequence ATCN PAM
ccugaggucaggaguuugag

SEQ ID NO: 2040 - RNA, 20 nt, Artificial Sequence
  HTT spacer sequence ATCN PAM
cgugaacccaggagguggag

SEQ ID NO: 2041 - RNA, 20 nt, Artificial Sequence
  HTT spacer sequence ATCN PAM
cggcucacugcacccuccac

SEQ ID NO: 2042 - RNA, 20 nt, Artificial Sequence
  HTT spacer sequence ATCN PAM
ugccacuguacuccagccug

SEQ ID NO: 2043 - RNA, 20 nt, Artificial Sequence
  HTT spacer sequence ATCN PAM
caaaaagaaagaaagaaaaa

SEQ ID NO: 2044 - RNA, 20 nt, Artificial Sequence
  HTT spacer sequence ATCN PAM
uuuggaaagacuuucuguaa

SEQ ID NO: 2045 - RNA, 20 nt, Artificial Sequence
  HTT spacer sequence ATCN PAM
aaggagagacacuuugcaug

SEQ ID NO: 2046 - RNA, 20 nt, Artificial Sequence
  HTT spacer sequence ATCN PAM
uacuuugcacccuguguguu

SEQ ID NO: 2047 - RNA, 20 nt, Artificial Sequence
  HTT spacer sequence ATCN PAM
acccccugggaacacacagg

SEQ ID NO: 2048 - RNA, 20 nt, Artificial Sequence
  HTT spacer sequence ATCN PAM
aucuuucuuucaguaugaaa

SEQ ID NO: 2049 - RNA, 20 nt, Artificial Sequence
  HTT spacer sequence ATCN PAM
uucuuucaguaugaaaaaua

SEQ ID NO: 2050 - RNA, 20 nt, Artificial Sequence
  HTT spacer sequence ATCN PAM
cagcacuuugggaggcugag

SEQ ID NO: 2051 - RNA, 20 nt, Artificial Sequence
  HTT spacer sequence ATCN PAM
acccuccucagccucccaaa

SEQ ID NO: 2052 - RNA, 20 nt, Artificial Sequence
  HTT spacer sequence ATCN PAM
ccugaggucaggaguucaag

SEQ ID NO: 2053 - RNA, 20 nt, Artificial Sequence
  HTT spacer sequence ATCN PAM
cuacuaaaaauauaaaaauu

SEQ ID NO: 2054 - RNA, 20 nt, Artificial Sequence
  HTT spacer sequence ATCN PAM
cagcuaccugggagucugag

SEQ ID NO: 2055 - RNA, 20 nt, Artificial Sequence
  HTT spacer sequence ATCN PAM
cuugaaccugggaggcggag

SEQ ID NO: 2056 - RNA, 20 nt, Artificial Sequence
  HTT spacer sequence ATCN PAM
caaaguggcauuucccaugg

SEQ ID NO: 2057 - RNA, 20 nt, Artificial Sequence
  HTT spacer sequence ATCN PAM
ccaaguguggacacugggac

SEQ ID NO: 2058 - RNA, 20 nt, Artificial Sequence
  HTT spacer sequence ATCN PAM
gauugcacagagugaagccc

SEQ ID NO: 2059 - RNA, 20 nt, Artificial Sequence
  HTT spacer sequence ATCN PAM
gauucucucaacggcagguu

SEQ ID NO: 2060 - RNA, 20 nt, Artificial Sequence
  HTT spacer sequence ATCN PAM
accacaucaugaaguaaaua

SEQ ID NO: 2061 - RNA, 20 nt, Artificial Sequence
  HTT spacer sequence ATCN PAM
ugaaguaaauaaggagaaaa

SEQ ID NO: 2062 - RNA, 20 nt, Artificial Sequence
  HTT spacer sequence ATCN PAM
cagcacuuugggaggcugag

SEQ ID NO: 2063 - RNA, 20 nt, Artificial Sequence
  HTT spacer sequence ATCN PAM
ucccaccucagccucccaaa

SEQ ID NO: 2064 - RNA, 20 nt, Artificial Sequence
  HTT spacer sequence ATCN PAM
cuugagaucaggaguucgag

SEQ ID NO: 2065 - RNA, 20 nt, Artificial Sequence
  HTT spacer sequence ATCN PAM
caagugauccucccaccuca

SEQ ID NO: 2066 - RNA, 20 nt, Artificial Sequence
  HTT spacer sequence ATCN PAM
ggaguucgagagcaaccugg

SEQ ID NO: 2067 - RNA, 20 nt, Artificial Sequence
  HTT spacer sequence ATCN PAM
cuacaaccuccaccuuccag

SEQ ID NO: 2068 - RNA, 20 nt, Artificial Sequence
  HTT spacer sequence ATCN PAM
gagauccugccauugcacuc

SEQ ID NO: 2069 - RNA, 20 nt, Artificial Sequence
  HTT spacer sequence ATCN PAM
cagaucacuacaaccuccac

SEQ ID NO: 2070 - RNA, 20 nt, Artificial Sequence
  HTT spacer sequence ATCN PAM
ugccauugcacuccagccug

SEQ ID NO: 2071 - RNA, 20 nt, Artificial Sequence
  HTT spacer sequence ATCN PAM
gccgugugccugaggccgcc

SEQ ID NO: 2072 - RNA, 20 nt, Artificial Sequence
  HTT spacer sequence ATCN PAM
aaauaaaacaugccuuggga

SEQ ID NO: 2073 - RNA, 20 nt, Artificial Sequence
  HTT spacer sequence ATCN PAM
agcuuuagugaaaagacaac

SEQ ID NO: 2074 - RNA, 20 nt, Artificial Sequence
  HTT spacer sequence ATCN PAM
auucccaagcccccgcuggc

SEQ ID NO: 2075 - RNA, 20 nt, Artificial Sequence
  HTT spacer sequence ATCN PAM
cuggccgaguggugagacca

SEQ ID NO: 2076 - RNA, 20 nt, Artificial Sequence
  HTT spacer sequence ATCN PAM
cccgauggcugucccguugc

SEQ ID NO: 2077 - RNA, 20 nt, Artificial Sequence
  HTT spacer sequence ATCN PAM
ggagaugcaggaaugccaac

SEQ ID NO: 2078 - RNA, 20 nt, Artificial Sequence
  HTT spacer sequence ATCN PAM
cggugaggggcacaaggcaa

SEQ ID NO: 2079 - RNA, 20 nt, Artificial Sequence
  HTT spacer sequence ATCN PAM
aucugcccuugaaaggggcg

SEQ ID NO: 2080 - RNA, 20 nt, Artificial Sequence
  HTT spacer sequence ATCN PAM
gcccuugaaaggggcggcuc

SEQ ID NO: 2081 - RNA, 20 nt, Artificial Sequence
  HTT spacer sequence ATCN PAM
cugacacaguaccggccucu

SEQ ID NO: 2082 - RNA, 20 nt, Artificial Sequence
  HTT spacer sequence ATCN PAM
ucaugcccuggcacacgcac

SEQ ID NO: 2083 - RNA, 20 nt, Artificial Sequence
  HTT spacer sequence ATCN PAM
gggcgcagcuucaaggccgc

SEQ ID NO: 2084 - RNA, 20 nt, Artificial Sequence
  HTT spacer sequence ATCN PAM
uuagagaaggugcggaacuu

SEQ ID NO: 2085 - RNA, 20 nt, Artificial Sequence
  HTT spacer sequence ATCN PAM
ugcgaagcacaguucaggaa

SEQ ID NO: 2086 - RNA, 20 nt, Artificial Sequence
  HTT spacer sequence ATCN PAM
auucuccacugcugucaggg

SEQ ID NO: 2087 - RNA, 20 nt, Artificial Sequence
  HTT spacer sequence ATCN PAM
cggcugcaggcuccaggcag

SEQ ID NO: 2088 - RNA, 20 nt, Artificial Sequence
  HTT spacer sequence ATCN PAM
cugugcugccugcugcguga

SEQ ID NO: 2089 - RNA, 20 nt, Artificial Sequence
  HTT spacer sequence ATCN PAM
gacagcugcgcgcgggagag

SEQ ID NO: 2090 - RNA, 20 nt, Artificial Sequence
  HTT spacer sequence ATCN PAM
ggguguggggaaaaucagcu

SEQ ID NO: 2091 - RNA, 20 nt, Artificial Sequence
  HTT spacer sequence ATCN PAM
gcuuccgcaggugcccaccg

SEQ ID NO: 2092 - RNA, 20 nt, Artificial Sequence
  HTT spacer sequence ATCN PAM
ccgcugguguuuuccuccca

SEQ ID NO: 2093 - RNA, 20 nt, Artificial Sequence
  HTT spacer sequence ATCN PAM
uggagacuuggggucuuuau

SEQ ID NO: 2094 - RNA, 20 nt, Artificial Sequence
  HTT spacer sequence ATCN PAM
gaagaaaagcaaagcuauuu

SEQ ID NO: 2095 - RNA, 20 nt, Artificial Sequence
  HTT spacer sequence ATCN PAM
ucauucugcagcugaggaca

SEQ ID NO: 2096 - RNA, 20 nt, Artificial Sequence
  HTT spacer sequence ATCN PAM
cgggggcaccaacuccugcc

SEQ ID NO: 2097 - RNA, 20 nt, Artificial Sequence
  HTT spacer sequence ATCN PAM
uguagcacaguguugaauac

SEQ ID NO: 2098 - RNA, 20 nt, Artificial Sequence
  HTT spacer sequence ATCN PAM
ugggaaaauaauaccugcuc

SEQ ID NO: 2099 - RNA, 20 nt, Artificial Sequence
  HTT spacer sequence ATCN PAM
ccauuauuccacccccaccc

SEQ ID NO: 2100 - RNA, 20 nt, Artificial Sequence
  HTT spacer sequence ATCN PAM
guguagacaaaguccacagc

SEQ ID NO: 2101 - RNA, 108 nt, Artificial Sequence
  CasX scaffold variant
uacuggcgcuuuuaucucauuacuuugagagccaucaccagcgacuaugucguauggguaaagcgcaggugggacgaccucucggucguccuaucugaagcaucaaag

SEQ ID NO: 2102 - RNA, 99 nt, Artificial Sequence
  CasX scaffold variant
uacuggcgcuuuuaucucauuacuuugagagccaucaccagcgacuaugucguauggguaaagcgcugcucgacgcguccucgagcagaagcaucaaag

SEQ ID NO: 2103 - RNA, 97 nt, Artificial Sequence
  CasX scaffold variant
uacuggcgcuuuuaucucauuacuuugagagccaucaccagcgacuaugucguauggguaaagcgcugcucgcuccguucgagcagaagcaucaaag

SEQ ID NO: 2104 - RNA, 91 nt, Artificial Sequence
  CasX scaffold variant
guacuggcgcuuuuaucucauuacuuugagagccaucaccagcgacuaugucguauggguaaagcgcccucuucggagggaagcaucaaag

SEQ ID NO: 2105 - RNA, 99 nt, Artificial Sequence
  CasX scaffold variant
uacuggcgcuuuuaucucauuacuuugagagccaucaccagcgacuaugucguauggguaaagcgcaggaguuucuauggaaacccugaagcaucaaag

SEQ ID NO: 2106 - RNA, 99 nt, Artificial Sequence
  CasX scaffold variant
guacuggcgccuuuaucucauuacuuugagagccaucaccagcgacuaugucguauggguaaagcgcuuacggacuucgguccguaagaagcaucaaag

SEQ ID NO: 2107 - RNA, 90 nt, Artificial Sequence
  CasX scaffold variant
uacuggcgcuuuuaucucauuacuuugagagccaucaccagcgacuaugucguauggguaaagcgcugcgcuugcgcagaagcaucaaag

SEQ ID NO: 2108 - RNA, 108 nt, Artificial Sequence
  CasX scaffold variant
uacuggcgcuuuuaucugauuacuuugagagccaucaccagcgacuaugucguauggguaaagcgcuuauuuaucggagagaaauccgauaaauaagaagcaucaaag

SEQ ID NO: 2109 - RNA, 108 nt, Artificial Sequence
  CasX scaffold variant
uacuggcgcuuuuaucgcauuacuuugagagccaucaccagcgacuaugucguauggguaaagcgcuuauuuaucggagagaaauccgauaaauaagaagcaucaaag

SEQ ID NO: 2110 - RNA, 110 nt, Artificial Sequence
  CasX scaffold variant
uacuggcgcuuuuaucucauuacuuugagagccaucaccagcgacuaugucguauggguaaagcgcuuauuuaucggagacuucgguccgauaaauaagaagcaucaaag

SEQ ID NO: 2111 - RNA, 97 nt, Artificial Sequence
  CasX scaffold variant
uacuggcgcuuuuaucucauuacuuugagagccaucaccagcgacuaugucguauggguaaagcgcacaugaggauuacccaugugaagcaucaaag

SEQ ID NO: 2112 - RNA, 106 nt, Artificial Sequence
  CasX scaffold variant
gcuggcgcuuuuaucucauuacuuugagagccaucaccagcgacuaugucguauggguaaagcgcuuauuuaucgugagaaauccgauaaauaagaagcaucaaag

SEQ ID NO: 2113 - RNA, 96 nt, Artificial Sequence
  CasX scaffold variant
uacuggcgcuuuuaucucauuacuuugagagccaucaccagcgacuaugucguauggguaaagcgcugcaugucuaagacagcagaagcaucaaag

SEQ ID NO: 2114 - RNA, 90 nt, Artificial Sequence
  CasX scaffold variant
uacuggcgcuuuuaucucauuacuuugagagccaucaccagcgacuaugucguauggguaaagcgcagggcuucggccgaagcaucaaag

SEQ ID NO: 2115 - RNA, 98 nt, Artificial Sequence
  CasX scaffold variant
uacuggcgcuuuuaucucauuacuuugagagccaucaccagcgacuaugucguauggguaaagcgcaauccauugcacuccggauugaagcaucaaag

SEQ ID NO: 2116 - RNA, 108 nt, Artificial Sequence
  CasX scaffold variant
uacuggcgcuuuucucgcauuacuuugagagccaucaccagcgacuaugucguauggguaaagcgcuuauuuaucggagagaaauccgauaaauaagaagcaucaaag

SEQ ID NO: 2117 - RNA, 108 nt, Artificial Sequence
  CasX scaffold variant
uacuggcgcuuuuaucucauuacuuugagagccaucaccagcgacuaugucguauggguaaagcgcuuauuuaucggacuucgguccgauaaauaagaagcaucaaag

SEQ ID NO: 2118 - RNA, 100 nt, Artificial Sequence
  CasX scaffold variant
uacuggcgcuuuuaucucauuacuuugagagccaucaccagcgacuaugucguauggguaaagcgcugcucguuugcggcuacgagcagaagcaucaaag

SEQ ID NO: 2119 - RNA, 100 nt, Artificial Sequence
  CasX scaffold variant
uacuggcgcuuuuaucucauuacuuugagagccaucaccagcgacuaugucguauggguaaagcgcuuauuuaucgagagauaaauaagaagcaucaaag

SEQ ID NO: 2120 - RNA, 107 nt, Artificial Sequence
  CasX scaffold variant
uacggcgcuuuuaucucauuacuuugagagccaucaccagcgacuaugucguauggguaaagcgcuuauuuaucggagagaaauccgauaaauaagaagcaucaaag

SEQ ID NO: 2121 - RNA, 99 nt, Artificial Sequence
  CasX scaffold variant
uacuggcgccuuuuaucucauuacuuugagagccaucaccagcgacuaugucguauggguaaagcgcuuacggacuucgguccguaagaagcaucaaag

SEQ ID NO: 2122 - RNA, 108 nt, Artificial Sequence
  CasX scaffold variant
uacuggcgcuuuuaucucauuacuuugagagccaucaccagcgacuaugucguaucgguaaagcgcuuauuuaucggagagaaauccgauaaauaagaagcaucaaag

SEQ ID NO: 2123 - RNA, 108 nt, Artificial Sequence
  CasX scaffold variant
uacuggcgccuuuaucucauuacuuugagagccaucaccagcgacuaugucguauggguaaagcgcuuauuuaucggacuucgguccgauaaauaagaagcaucaaag

SEQ ID NO: 2124 - RNA, 105 nt, Artificial Sequence
  CasX scaffold variant
uacuggcgcuuuuaucucauuacuuugagagccaucaccagcgacuaugucguauggguaaagcgcuuauuuaucgagaaauccgauaaauaagaagcaucaaag

SEQ ID NO: 2125 - RNA, 103 nt, Artificial Sequence
  CasX scaffold variant
gcgcuuuuaucucauuacuuugagagccaucaccagcgacuaugucguauggguaaagcgcuuauuuaucggagagaaauccgauaaauaagaagcaucaaag

SEQ ID NO: 2126 - RNA, 103 nt, Artificial Sequence
  CasX scaffold variant
uacuggcgcuuuuaucucauuacuuugagagccaucaccagcgacuaugucguauggguaaagcgcuuauuuaucggagagagauaaauaagaagcaucaaag

SEQ ID NO: 2127 - RNA, 108 nt, Artificial Sequence
  CasX scaffold variant
uacuggcgcuuuuaucucauuacuuuggagagccaucaccagcgacuaugucguauggguaaagcgcuuauuuaucggagaguauccgauaaauaagaagcaucaaag

SEQ ID NO: 2128 - RNA, 109 nt, Artificial Sequence
  CasX scaffold variant
uacuggcgcuuuuaucucauuacuuugagagccaucaccagcgacuauguucguauggguaaagcgcuuauuuaucggagagaaauccgauaaauaagaagcaucaaag

SEQ ID NO: 2129 - RNA, 105 nt, Artificial Sequence
  CasX scaffold variant
agcgcuuuuaucucauuacuuugagagccaucaccagcgacuaugucguauggguaaagcgcuuauuuaucggagagaaaugccgauaaauaagaagcaucaaag

SEQ ID NO: 2130 - RNA, 109 nt, Artificial Sequence
  CasX scaffold variant
uacuggcgcuuuuaucucauuacuuugagagccaucaccagcgacuaugucguauggguaaagcgcuuauuuaucggagagaaauccgauaaaauaagaagcaucaaag

SEQ ID NO: 2131 - RNA, 109 nt, Artificial Sequence
  CasX scaffold variant
uacuggcgcuuuuaucucauuacuuugagagccaucaccagcgacuaugucguauggguaaagcgcuuauuguaucggagagaaauccgauaaauaagaagcaucaaag

SEQ ID NO: 2132 - RNA, 102 nt, Artificial Sequence
  CasX scaffold variant
gcgcuuuuaucucauuacuuugagagccaucaccagcgacuaugucguauggguaaagcgcuuauuuaucggacuucgguccgauaaauaagcgcaucaaag

SEQ ID NO: 2133 - RNA, 108 nt, Artificial Sequence
  CasX scaffold variant
uacuggcgcuuuucucucauuacuuugagagccaucaccagcgacuaugucguauggguaaagcgcuuauuuaucggagagaaauccgauaaauaagaagcaucaaag

SEQ ID NO: 2134 - RNA, 106 nt, Artificial Sequence
  CasX scaffold variant
guggcgcuuuuaucucauuacuuugagagccaucaccagcgacuaugucguauggguaaagcgcuuauuuaucggagagaaauccgauaaauaagaagcaucaaag

SEQ ID NO: 2135 - RNA, 110 nt, Artificial Sequence
  CasX scaffold variant
uacuggcgcuuuuaucucauuacuuugagagccaucaccagcgaccuuaugucguauggguaaagcgcuuauuuaucggagagaaauccgauaaauaagaagcaucaaag

SEQ ID NO: 2136 - RNA, 107 nt, Artificial Sequence
  CasX scaffold variant
gauggcgcuuuuaucucauuacuuugagagccaucaccagcgacuaugucguauggguaaagcgcuuauuuaucggacuucgguccgauaaauaagaagcaucaaag

SEQ ID NO: 2137 - RNA, 106 nt, Artificial Sequence
  CasX scaffold variant
uacuggcgcuuuuaucucauuacuuugagagccaucaccagcgacuaugucguauggguaaagcgcuuauuuaucggagagaaauccgauaaaagaagcaucaaag

SEQ ID NO: 2138 - RNA, 109 nt, Artificial Sequence
  CasX scaffold variant
uacuggcgcuuuuaucucauuacuuugagagccaucaccagcgaucuaugucguauggguaaagcgcuuauuuaucggagagaaauccgauaaauaagaagcaucaaag

SEQ ID NO: 2139 - RNA, 106 nt, Artificial Sequence
  CasX scaffold variant
uacuggcgcuuuuaucucauuacuuugagagccaucaccagcgacuaugucguauggguaaaggcuuauuuaucggagagaaauccgauaaaaagaagcaucaaag

SEQ ID NO: 2140 - RNA, 107 nt, Artificial Sequence
  CasX scaffold variant
uacuggcgcuuuuaucucauuacuuugagagccaucaccagcgacuaugucguauggguaaagcgcuuauuuaucggagagaaauccgauaaaaagaagcaucaaag

SEQ ID NO: 2141 - RNA, 107 nt, Artificial Sequence
  CasX scaffold variant
uacuggcgcuuuaucucauuacuuugagagccaucaccagcgacuaugucguauggguaaagcgcuuauuuaucggacuucgguccgauaaauaagaagcaucaaag

SEQ ID NO: 2142 - RNA, 98 nt, Artificial Sequence
  CasX scaffold variant
cggcgcuuuucucgcauuacuuugagagccaucaccagcgacuaugucguauggguaaagcgcuuauuguaucgagagauaaauaagaagcaucaaag

SEQ ID NO: 2143 - RNA, 107 nt, Artificial Sequence
  CasX scaffold variant
cacuggcgcuuuuaucucauuacuuugagagccaucaccagcgacuaugucguauggguaaagcgcuuauuuucggagagaaauccgauaaauaagaagcaucaaag

SEQ ID NO: 2144 - RNA, 106 nt, Artificial Sequence
  CasX scaffold variant
uacuggcgcuuuaucucauuacuuugagagccaucaccagcgacuucggucguauggguaaagcgcuuauguaucggcuucggccgauacauaagaagcaucaaag

SEQ ID NO: 2145 - RNA, 107 nt, Artificial Sequence
  CasX scaffold variant
uacuggcgcuuuuaucucauuacuuugagagccaucaccagcgacuucggucguauggguaaagcgcuuauguaucggcuucggccgauacauaagaagcaucaaag

SEQ ID NO: 2146 - RNA, 109 nt, Artificial Sequence
  CasX scaffold variant
uacuggcgcuuuuaucucauuacuuugagagccaucaccagcgacuaugucguaugggugaaagcgcuuauuuaucggagagaaauccgauaaauaagaagcaucaaag

SEQ ID NO: 2147 - RNA, 64 nt, Artificial Sequence
  CasX scaffold variant
uacuggcgcuuuuaucucauuacuuugagagccaucaccagcgacuucggucguauggguaaag

SEQ ID NO: 2148 - RNA, 62 nt, Artificial Sequence
  CasX scaffold variant
gaugggcuuuuaucucauuacuuugagagccaucaccagcgacuucggucguauggguaaag

SEQ ID NO: 2149 - RNA, 105 nt, Artificial Sequence
  CasX scaffold variant
gaugggcuuuuaucucauuacuuugagagccaucaccagcgacuucggucguauggguaaagcgcuuauuuaucggcuucggccgauaaauaagaagcaucaaag

SEQ ID NO: 2150 - RNA, 156 nt, Artificial Sequence
  CasX scaffold variant
uacuggcgcuuuuaucucauuacuuugagagccaucaccagcgacuaugucguauggguaaagcgcuacacugggaucgcugaauuagagaucggcguccuuucauucuauauacuuuggaguuuuaaaaugucucuaaguacagaagcaucaaag

SEQ ID NO: 2151 - RNA, 103 nt, Artificial Sequence
  CasX scaffold variant
ggcgcuuuuaucucauuacuuugagagccaucaccagcgacuucggucguauggguaaagcgcuuauuuaucggcuucggccgauaaauaagaagcaucaaag

SEQ ID NO: 2152 - RNA, 106 nt, Artificial Sequence
  CasX scaffold variant
gcuggcgcuuuuaucucauuacuuugagagccaucaccagcgacuucggucguauggguaaagcgcuuauuuaucggcuucggccgauaaauaagaagcaucaaag

SEQ ID NO: 2153 - RNA, 109 nt, Artificial Sequence
  CasX scaffold variant
uacuggcgcuuuuaucucauuacuuugagagccaucaccagcgacuucggucguauggguaaagcgcuuauuuaucggagagaaauccgauaaauaagaagcaucaaag

SEQ ID NO: 2154 - RNA, 112 nt, Artificial Sequence
  CasX scaffold variant
uacuggcgcuuuuaucucauuacuuugagagccaugcuccaccagcgacuaugucguauggguaaagcgcuuauuuaucggagagaaauccgauaaauaagaagcaucaaag

SEQ ID NO: 2155 - RNA, 97 nt, Artificial Sequence
  CasX scaffold variant
uacuggcgcuuuuaucucauuacuuugagagccaucaccagcgacuaugucguauggguaaagcgggguuaggguuaggguuagggaagcaucaaag

SEQ ID NO: 2156 - RNA, 96 nt, Artificial Sequence
  CasX scaffold variant
uacuggcgcuuuuaucucauuacuuugagagccaucaccagcgacuaugucguauggguaaagcggagggagggagggagagggaaagcaucaaag

SEQ ID NO: 2157 - RNA, 101 nt, Artificial Sequence
  CasX scaffold variant
uacuggcgcuuuuaucucauuacuuugagagccaucaccagcgacuaugucguauggguaaagcguuggguuaggguuaggguuagggaaaagcaucaaag

SEQ ID NO: 2158 - RNA, 91 nt, Artificial Sequence
  CasX scaffold variant
uacuggcgcuuuuaucucauuacuuugagagccaucaccagcgacuaugucguauggguaaagcgcagggcuucggccggaagcaucaaag

SEQ ID NO: 2159 - RNA, 103 nt, Artificial Sequence
  CasX scaffold variant
uacuggcgcuuuuaucucauuacuuugagagccaucaccagcgacuaugucguauggguaaagcgccugcucaguacgagaggaaccgcaggaagcaucaaag

SEQ ID NO: 2160 - RNA, 90 nt, Artificial Sequence
  CasX scaffold variant
uacuggcgcuuuuaucugauuacuuugagagccaucaccagcgacuaugucguauggguaaagcgcccucuucggagggaagcaucaaag

SEQ ID NO: 2161 - RNA, 98 nt, Artificial Sequence
  CasX scaffold variant
uacuggcgccuuuaucugauuacuuugagagccaucaccagcgacuaugucguauggguaaagcgcuuacggacuucgguccguaagaagcaucaaag

SEQ ID NO: 2162 - RNA, 98 nt, Artificial Sequence
  CasX scaffold variant
uacuggcgcuuuuaucugauuacuuugagagccaucaccagcgacuaugucguauggguaaagcgcggacgaccucucggucguccgaagcaucaaag

SEQ ID NO: 2163 - RNA, 108 nt, Artificial Sequence
  CasX scaffold variant
uacuggcgcuuuuaucugauuacuuugagagccaucaccagcgacuaugucguauggguaaagcgcaggugggacgaccucucggucguccuaucugaagcaucaaag

SEQ ID NO: 2164 - RNA, 99 nt, Artificial Sequence
  CasX scaffold variant
uacuggcgccuuuaucugcauuacuuugagagccaucaccagcgacuaugucguauggguaaagcgcuuacggacuucgguccguaagaagcaucaaag

SEQ ID NO: 2165 - RNA, 97 nt, Artificial Sequence
  CasX scaffold variant
gcuggcgcuuuuaucugauuacuuugagagccaucaccagcgacuaugucguauggguaaagcgcuuacggacuucgguccguaagaagcaucaaag

SEQ ID NO: 2166 - RNA, 108 nt, Artificial Sequence
  CasX scaffold variant
uacuggcgccuuuaucugauuacuuugagagccaucaccagcgacuaugucguauggguaaagcgcaggugggacgaccucucggucguccuaucugaagcaucaaag

SEQ ID NO: 2167 - RNA, 98 nt, Artificial Sequence
  CasX scaffold variant
uacuggcgccuuuaucugauuacuuugagagccaucaccagcgacuaugucguauggguaaagcgcggacgaccucucggucguccgaagcaucaaag

SEQ ID NO: 2168 - RNA, 90 nt, Artificial Sequence
  CasX scaffold variant
uacuggcgccuuuaucucauuacuuugagagccaucaccagcgacuaugucguauggguaaagcgcccucuucggagggaagcaucaaag

SEQ ID NO: 2169 - RNA, 98 nt, Artificial Sequence
  CasX scaffold variant
uacuggcgcuuuuaucucauuacuuugagagccaucaccagcgacuaugucguauggguaaagcgcuuacggacuucgguccguaagaagcaucaaag

SEQ ID NO: 2170 - RNA, 99 nt, Artificial Sequence
  CasX scaffold variant
uacuggcgccuuuaucaucauuacuuugagagccaucaccagcgacuaugucguauggguaaagcgcuuacggacuucgguccguaagaagcaucaaag

SEQ ID NO: 2171 - RNA, 194 nt, Artificial Sequence
  CasX scaffold variant
uacuggcgcuuuuaucucauuacuuugagagccaucaccagcgacuaugucguauggguaaagcgcuuauuuaucggagagaaauccgauaaauaagaagcaucaaagggccggcauggucccagccuccucgcuggcgccggcugggcaacauuccgaggggaccguccccucgguaauggcgaaugggaccc

SEQ ID NO: 2172 - RNA, 108 nt, Artificial Sequence
  CasX scaffold variant
uacuggcgccuuuaucucauuacuuugagagccaucaccagcgacuaugucguauggguaaagcgcaggugggacgaccucucggucguccuaucugaagcaucaaag

SEQ ID NO: 2173 - RNA, 106 nt, Artificial Sequence
  CasX scaffold variant
uacuggcgcuuuuaucucauuacuuugagagccaucaccagcgacuaugucguauggguaaagcgcuuauuuaucggagaaauccgauaaauaagaagcaucaaag

SEQ ID NO: 2174 - RNA, 98 nt, Artificial Sequence
  CasX scaffold variant
uacuggcgccuuuaucucauuacuuugagagccaucaccagcgacuaugucguauggguaaagcgcggacgaccucucggucguccgaagcaucaaag

SEQ ID NO: 2175 - RNA, 92 nt, Artificial Sequence
  CasX scaffold variant
uacuggcgcuuuuaucucauuacuuugagagccaucaccagcgacuaugucguauggguaaagcgccggacuucgguccggaagcaucaaag

SEQ ID NO: 2176 - RNA, 108 nt, Artificial Sequence
  CasX scaffold variant
uacuggcgcuuuuaucggauuacuuugagagccaucaccagcgacuaugucguauggguaaagcgcuuauuuaucggagagaaauccgauaaauaagaagcaucaaag

SEQ ID NO: 2177 - RNA, 98 nt, Artificial Sequence
  CasX scaffold variant
uacuggcgcuuuuaucucauuacuuugagagccaucaccagcgacuaugucguauggguaaagcgcggacgaccucucggucguccgaagcaucaaag

SEQ ID NO: 2178 - RNA, 89 nt, Artificial Sequence
  CasX scaffold variant
gcuggcgcuuuuaucugauuacuuugagagccaucaccagcgacuaugucguauggguaaagcgcccucuucggagggaagcaucaaag

SEQ ID NO: 2179 - RNA, 88 nt, Artificial Sequence
  CasX scaffold variant
gcuggcgccuuuaucugauuacuuugagagccaucaccagcgacuaugucguauggguaaagcucccucuucggagggagcaucaaag

SEQ ID NO: 2180 - RNA, 197 nt, Artificial Sequence
  CasX scaffold variant
uacuggcgcuuuuaucucauuacuuugagagccaucaccagcgacuaugucguauggguaaagcgcuuauuuaucggagagaaauccgauaaauaagaagcaucaaaggggucggcauggcaucuccaccuccucgcgguccgaccugggcauccgaaggaggacgcacguccacucggauggcuaagggagagcca

SEQ ID NO: 2181 - RNA, 88 nt, Artificial Sequence
  CasX scaffold variant
gcuggcgccuuuaucugauuacuuugagagccaucaccagcgacuaugucguauggguaaagcgcccucuucggagggcgcaucaaag

SEQ ID NO: 2182 - RNA, 186 nt, Artificial Sequence
  CasX scaffold variant
uacuggcgcuuuuaucucauuacuuugagagccaucaccagcgacuaugucguauggguaaagcgcuuauuuaucggagagaaauccgauaaauaagaagcaucaaaguuuuggccggcauggucccagccuccucgcuggcgccggcugggcaacaugcuucggcauggcgaaugggaccccggg

SEQ ID NO: 2183 - RNA, 97 nt, Artificial Sequence
  CasX scaffold variant
gauggcgccuuuaucucauuacuuugagagccaucaccagcgacuaugucguauggguaaagcgcuuacggacuucgguccguaagaagcaucaaag

SEQ ID NO: 2184 - RNA, 89 nt, Artificial Sequence
  CasX scaffold variant
gcuggcgcuuuuaucucauuacuuugagagccaucaccagcgacuaugucguauggguaaagcgcccucuucggagggaagcaucaaag

SEQ ID NO: 2185 - RNA, 96 nt, Artificial Sequence
  CasX scaffold variant
gcuggcgccuuuaucugauuacuuugagagccaucaccagcgacuaugucguauggguaaagcucuuacggacuucgguccguaagagcaucaaag

SEQ ID NO: 2186 - RNA, 96 nt, Artificial Sequence
  CasX scaffold variant
gcuggcgccuuuaucugauuacuuugagagccaucaccagcgacuaugucguauggguaaagcucggacgaccucucggucguccgagcaucaaag

SEQ ID NO: 2187 - RNA, 160 nt, Artificial Sequence
  CasX scaffold variant
uacuggcgcuuuuaucucauuacuuugagagccaucaccagcgacuaugucguauggguaaagcgcuuauuuaucggagagaaauccgauaaauaagaagcaucaaagccugucaccggaugugcuuuccggucugaugaguccgugaggacgaaacagg

SEQ ID NO: 2188 - RNA, 97 nt, Artificial Sequence
  CasX scaffold variant
gcuggcgcuuuuaucugauuacuuugagagccaucaccagcgacuaugucguauggguaaagcgcggacgaccucucggucguccgaagcaucaaag

SEQ ID NO: 2189 - RNA, 97 nt, Artificial Sequence
  CasX scaffold variant
gcuggcgccuuuaucugauuacuuugagagccaucaccagcgacuaugucguauggguaaagcgcggacgaccucucggucguccgaagcaucaaag

SEQ ID NO: 2190 - RNA, 106 nt, Artificial Sequence
  CasX scaffold variant
gcuggcgccuuuaucugauuacuuugagagccaucaccagcgacuaugucguauggguaaagcucaggugggacgaccucucggucguccuaucugagcaucaaag

SEQ ID NO: 2191 - RNA, 177 nt, Artificial Sequence
  CasX scaffold variant
uacuggcgcuuuuaucucauuacuuugagagccaucaccagcgacuaugucguauggguaaagcgcuuauuuaucggagagaaauccgauaaauaagaagcaucaaaggauggccggcauggucccagccuccucgcuggcgccggcugggcaacaccuucggguggcgaaugggac

SEQ ID NO: 2192 - RNA, 107 nt, Artificial Sequence
  CasX scaffold variant
gcuggcgcuuuuaucugauuacuuugagagccaucaccagcgacuaugucguauggguaaagcgcaggugggacgaccucucggucguccuaucugaagcaucaaag

SEQ ID NO: 2193 - RNA, 109 nt, Artificial Sequence
  CasX scaffold variant
uacuggcgcuuuuaucucauuacuuugagagccaucaccagcgacuaugucguacuggguaaagcgcuuauuuaucggagagaaauccgauaaauaagaagcaucaaag

SEQ ID NO: 2194 - RNA, 107 nt, Artificial Sequence
  CasX scaffold variant
uacuggcgcuuuuaucucauuacuuugagagccaucaccagcgacuaugucguauggguaaagcgcuuauuuaucgugagaaauccgauaaauaagaagcaucaaag

SEQ ID NO: 2195 - RNA, 109 nt, Artificial Sequence
  CasX scaffold variant
guacuggcgcuuuuaucucauuacuuugagagccaucaccagcgacuaugucguauggguaaagcgcuuauuuaucggagagaaauccgauaaauaagaagcaucaaag

SEQ ID NO: 2196 - RNA, 97 nt, Artificial Sequence
  CasX scaffold variant
gcuggcgcuuuuaucucauuacuuugagagccaucaccagcgacuaugucguauggguaaagcgcggacgaccucucggucguccgaagcaucaaag

SEQ ID NO: 2197 - RNA, 97 nt, Artificial Sequence
  CasX scaffold variant
gcuggcgccuuuaucugauuacuuugagagccaucaccagcgacuaugucguauggguaaagcgcuuacggacuucgguccguaagaagcaucaaag

SEQ ID NO: 2198 - RNA, 107 nt, Artificial Sequence
  CasX scaffold variant
gcuggcgcuuuuaucucauuacuuugagagccaucaccagcgacuaugucguauggguaaagcgcuuauuuaucggagagaaauccgauaaauaagaagcaucaaag

SEQ ID NO: 2199 - RNA, 97 nt, Artificial Sequence
  CasX scaffold variant
gcuggcgccuuuaucucauuacuuugagagccaucaccagcgacuaugucguauggguaaagcgcuuacggacuucgguccguaagaagcaucaaag

SEQ ID NO: 2200 - RNA, 89 nt, Artificial Sequence
  CasX scaffold variant
gcuggcgccuuuaucugauuacuuugagagccaucaccagcgacuaugucguauggguaaagcgcccucuucggagggaagcaucaaag

SEQ ID NO: 2201 - RNA, 107 nt, Artificial Sequence
  CasX scaffold variant
gcuggcgcuuuuaucucauuacuuugagagccaucaccagcgacuaugucguauggguaaagcgcaggugggacgaccucucggucguccuaucugaagcaucaaag

SEQ ID NO: 2202 - RNA, 107 nt, Artificial Sequence
  CasX scaffold variant
gcuggcgccuuuaucucauuacuuugagagccaucaccagcgacuaugucguauggguaaagcgcaggugggacgaccucucggucguccuaucugaagcaucaaag

SEQ ID NO: 2203 - RNA, 107 nt, Artificial Sequence
  CasX scaffold variant
gcuggcgccuuuaucugauuacuuugagagccaucaccagcgacuaugucguauggguaaagcgcaggugggacgaccucucggucguccuaucugaagcaucaaag

SEQ ID NO: 2204 - RNA, 98 nt, Artificial Sequence
  CasX scaffold variant
uacuggcgcuuuuaucugauuacuuugagagccaucaccagcgacuaugucguauggguaaagcgcuuacggacuucgguccguaagaagcaucaaag

SEQ ID NO: 2205 - RNA, 89 nt, Artificial Sequence
  CasX scaffold variant
gcuggcgccuuuaucucauuacuuugagagccaucaccagcgacuaugucguauggguaaagcgcccucuucggagggaagcaucaaag

SEQ ID NO: 2206 - RNA, 97 nt, Artificial Sequence
  CasX scaffold variant
gcuggcgcuuuuaucucauuacuuugagagccaucaccagcgacuaugucguauggguaaagcgcuuacggacuucgguccguaagaagcaucaaag

SEQ ID NO: 2207 - RNA, 97 nt, Artificial Sequence
  CasX scaffold variant
gcuggcgccuuuaucucauuacuuugagagccaucaccagcgacuaugucguauggguaaagcgcggacgaccucucggucguccgaagcaucaaag

SEQ ID NO: 2208 - RNA, 177 nt, Artificial Sequence
  CasX scaffold variant
gauggccggcauggucccagccuccucgcuggcgccggcugggcaacaccuucggguggcgaaugggacuacuggcgcuuuuaucucauuacuuugagagccaucaccagcgacuaugucguauggguaaagcgcuuauuuaucggagagaaauccgauaaauaagaagcaucaaag

SEQ ID NO: 2209 - RNA, 194 nt, Artificial Sequence
  CasX scaffold variant
ggccggcauggucccagccuccucgcuggcgccggcugggcaacauuccgaggggaccguccccucgguaauggcgaaugggacccuacuggcgcuuuuaucucauuacuuugagagccaucaccagcgacuaugucguauggguaaagcgcuuauuuaucggagagaaauccgauaaauaagaagcaucaaag

SEQ ID NO: 2210 - RNA, 96 nt, Artificial Sequence
  CasX scaffold variant
gcuggcgccuuuaucugauuacuuugagagccaucaccagcgacuaugucguauggguaaagcgcuuacggacuucgguccguaagcgcaucaaag

SEQ ID NO: 2211 - RNA, 172 nt, Artificial Sequence
  CasX scaffold variant
cgugguuagggccacguuaaauaguugcuuaagcccuaagcguugaucuucggaucaggugcaauacuggcgcuuuuaucucauuacuuugagagccaucaccagcgacuaugucguauggguaaagcgcuuauuuaucggagagaaauccgauaaauaagaagcaucaaag

SEQ ID NO: 2212 - RNA, 197 nt, Artificial Sequence
  CasX scaffold variant
gggucggcauggcaucuccaccuccucgcgguccgaccugggcauccgaaggaggacgcacguccacucggauggcuaagggagagccauacuggcgcuuuuaucucauuacuuugagagccaucaccagcgacuaugucguauggguaaagcgcuuauuuaucggagagaaauccgauaaauaagaagcaucaaag

SEQ ID NO: 2213 - RNA, 171 nt, Artificial Sequence
  CasX scaffold variant
uacuggcgcuuuuaucucauuacuuugagagccaucaccagcgacuaugucguauggguaaagcgcuuauuuaucggagagaaauccgauaaauaagaagcaucaaagccaguacugaugaguccgugaggacgaaacgaguaagcucgucuacuggcgcuuuuaucucau

SEQ ID NO: 2214 - RNA, 99 nt, Artificial Sequence
  CasX scaffold variant
uacuggcgccuuuaucucauuacuuuagagagccaucaccagcgacuaugucguauggguaaagcgcuuacggacuucgguccguaagaagcaucaaag

SEQ ID NO: 2215 - RNA, 157 nt, Artificial Sequence
  CasX scaffold variant
cgacuacugaugaguccgugaggacgaaacgaguaagcucgucuagucguacuggcgcuuuuaucucauuacuuugagagccaucaccagcgacuaugucguauggguaaagcgcuuauuuaucggagagaaauccgauaaauaagaagcaucaaag

SEQ ID NO: 2216 - RNA, 106 nt, Artificial Sequence
  CasX scaffold variant
gcuggcgccuuuaucugauuacuuugagagccaucaccagcgacuaugucguauggguaaagcgcaggugggacgaccucucggucguccuaucugcgcaucaaag

SEQ ID NO: 2217 - RNA, 97 nt, Artificial Sequence
  CasX scaffold variant
uacuggcgccuuuaucucauuacuuuagagccaucaccagcgacuaugucguauggguaaagcgcuuacggacuucgguccguaagaagcaucaaag

SEQ ID NO: 2218 - RNA, 186 nt, Artificial Sequence
  CasX scaffold variant
uacuggcgcuuuuaucucauuacuuugagagccaucaccagcgacuaugucguauggguaaagcgcuuauuuaucggagagaaauccgauaaauaagaagcaucaaagcauuccucagaaaaugacaaaccuguggggcguaaguagaucuucggaucuaugaucgugcagacguuaaaaucaggu

SEQ ID NO: 2219 - RNA, 171 nt, Artificial Sequence
  CasX scaffold variant
uacuggcgcuuuuaucucauuacuuugagagccaucaccagcgacuaugucguauggguaaagcgcuuauuuaucggagagaaauccgauaaauaagaagcaucaaagcgacuacugaugaguccgugaggacgaaacgaguaagcucgucuagucgcguguagcgaagca

SEQ ID NO: 2220 - RNA, 186 nt, Artificial Sequence
  CasX scaffold variant
cauuccucagaaaaugacaaaccuguggggcguaaguagaucuucggaucuaugaucgugcagacguuaaaaucagguuacuggcgcuuuuaucucauuacuuugagagccaucaccagcgacuaugucguauggguaaagcgcuuauuuaucggagagaaauccgauaaauaagaagcaucaaag

SEQ ID NO: 2221 - RNA, 186 nt, Artificial Sequence
  CasX scaffold variant
uuuuggccggcauggucccagccuccucgcuggcgccggcugggcaacaugcuucggcauggcgaaugggaccccggguacuggcgcuuuuaucucauuacuuugagagccaucaccagcgacuaugucguauggguaaagcgcuuauuuaucggagagaaauccgauaaauaagaagcaucaaag

SEQ ID NO: 2222 - RNA, 171 nt, Artificial Sequence
  CasX scaffold variant
cgacuacugaugaguccgugaggacgaaacgaguaagcucgucuagucgcguguagcgaagcauacuggcgcuuuuaucucauuacuuugagagccaucaccagcgacuaugucguauggguaaagcgcuuauuuaucggagagaaauccgauaaauaagaagcaucaaag

SEQ ID NO: 2223 - RNA, 168 nt, Artificial Sequence
  CasX scaffold variant
uacuggcgcuuuuaucucauuacuuugagagccaucaccagcgacuaugucguauggguaaagcgcuuauuuaucggagagaaauccgauaaauaagaagcaucaaaggggagccccgcugaugaggucggggagaccgaaagggacuucggucccuacggggcuccc

SEQ ID NO: 2224 - RNA, 144 nt, Artificial Sequence
  CasX scaffold variant
ccacccccaccaccacccccacccccaccaccacccuacuggcgcuuuuaucucauuacuuugagagccaucaccagcgacuaugucguauggguaaagcgcuuauuuaucggagagaaauccgauaaauaagaagcaucaaag

SEQ ID NO: 2225 - RNA, 157 nt, Artificial Sequence
  CasX scaffold variant
uacuggcgcuuuuaucucauuacuuugagagccaucaccagcgacuaugucguauggguaaagcgcuuauuuaucggagagaaauccgauaaauaagaagcaucaaagcgacuacugaugaguccgugaggacgaaacgaguaagcucgucuagucg

SEQ ID NO: 2226 - RNA, 172 nt, Artificial Sequence
  CasX scaffold variant
uacuggcgcuuuuaucucauuacuuugagagccaucaccagcgacuaugucguauggguaaagcgcuuauuuaucggagagaaauccgauaaauaagaagcaucaaagcgugguuagggccacguuaaauaguugcuuaagcccuaagcguugaucuucggaucaggugcaa

SEQ ID NO: 2227 - RNA, 184 nt, Artificial Sequence
  CasX scaffold variant
uacuggcgcuuuuaucucauuacuuugagagccaucaccagcgacuaugucguauggguaaagcgcuuauuuaucggagagaaauccgauaaauaagaagcaucaaagggcaauaaagcgguuacaagcccgcaaaaauagcagaguaaugucgcgauagcgcggcauuaaugcagcuuuauug

SEQ ID NO: 2228 - RNA, 122 nt, Artificial Sequence
  CasX scaffold variant
uacuggcgcuuuuaucucauuacuauuaucucauuacuuugagagccaucaccagcgacuaugucguauggguaaagcgcuuauuuaucggagagaaauccgauaaauaagaagcaucaaag

SEQ ID NO: 2229 - RNA, 184 nt, Artificial Sequence
  CasX scaffold variant
ggcaauaaagcgguuacaagcccgcaaaaauagcagaguaaugucgcgauagcgcggcauuaaugcagcuuuauuguacuggcgcuuuuaucucauuacuuugagagccaucaccagcgacuaugucguauggguaaagcgcuuauuuaucggagagaaauccgauaaauaagaagcaucaaag

SEQ ID NO: 2230 - RNA, 185 nt, Artificial Sequence
  CasX scaffold variant
uacuggcgcuuuuaucucauuacuuugagagccaucaccagcgacuaugucguauggguaaagcgcuuauuuaucggagagaaauccgauaaauaagaagcaucaaagacccgcaaggccgacggcauccgccgccgcuggugcaaguccagccgccccuucgggggcgggcgcucauggguaac

SEQ ID NO: 2231 - RNA, 63 nt, Artificial Sequence
  CasX scaffold variant
uacuggcgcuuuuaucucauuacuuugagagccaucaccagcgacuaugucguauggguaaag

SEQ ID NO: 2232 - RNA, 168 nt, Artificial Sequence
  CasX scaffold variant
gggagccccgcugaugaggucggggagaccgaaagggacuucggucccuacggggcucccuacuggcgcuuuuaucucauuacuuugagagccaucaccagcgacuaugucguauggguaaagcgcuuauuuaucggagagaaauccgauaaauaagaagcaucaaag

SEQ ID NO: 2233 - RNA, 171 nt, Artificial Sequence
  CasX scaffold variant
ccaguacugaugaguccgugaggacgaaacgaguaagcucgucuacuggcgcuuuuaucucauuacuggcgcuuuuaucucauuacuuugagagccaucaccagcgacuaugucguauggguaaagcgcuuauuuaucggagagaaauccgauaaauaagaagcaucaaag

SEQ ID NO: 2234 - RNA, 185 nt, Artificial Sequence
  CasX scaffold variant
acccgcaaggccgacggcauccgccgccgcuggugcaaguccagccgccccuucgggggcgggcgcucauggguaacuacuggcgcuuuuaucucauuacuuugagagccaucaccagcgacuaugucguauggguaaagcgcuuauuuaucggagagaaauccgauaaauaagaagcaucaaag

SEQ ID NO: 2235 - RNA, 160 nt, Artificial Sequence
  CasX scaffold variant
ccugucaccggaugugcuuuccggucugaugaguccgugaggacgaaacagguacuggcgcuuuuaucucauuacuuugagagccaucaccagcgacuaugucguauggguaaagcgcuuauuuaucggagagaaauccgauaaauaagaagcaucaaag

SEQ ID NO: 2236 - RNA, 100 nt, Artificial Sequence
  CasX scaffold variant
guacuggcgccuuuaucucauuacuuugagagccaucaccagcgacuaugucguaguggguaaagcgcuuacggacuucgguccguaagaagcaucaaag

SEQ ID NO: 2237 - RNA, 91 nt, Artificial Sequence
  CasX scaffold variant
guacuggcgcuuuuaucugauuacuuugagagccaucaccagcgacuaugucguaguggguaaagcucccucuucggagggagcaucaaag

SEQ ID NO: 2238 - RNA, 89 nt, Artificial Sequence
  CasX scaffold variant
acuggcgcuuuuaucugauuacuuugagagccaucaccagcgacuaugucguaguggguaaagcucccucuucggagggagcaucaaag

SEQ ID NO: 2239 - RNA, 97 nt, Artificial Sequence
  CasX scaffold variant
acuggcgccuuuaucucauuacuuugagagccaucaccagcgacuaugucguauggguaaagcgcuuacggacuucgguccguaagaagcaucaaag

SEQ ID NO: 2240 - RNA, 89 nt, Artificial Sequence
  CasX scaffold variant
gcuggcgcuuuuaucugauuacuuugagagccaucaccagcgacuaugucguaguggguaaagcucccucuucggagggagcaucaaag

SEQ ID NO: 2241 - RNA, 88 nt, Artificial Sequence
  CasX scaffold variant
acuggcgcuuuuaucugauuacuuugagagccaucaccagcgacuaugucguauggguaaagcucccucuucggagggagcaucaaag

SEQ ID NO: 2242 - RNA, 97 nt, Artificial Sequence
  CasX scaffold variant
acuggcgccuuuaucugauuacuuugagagccaucaccagcgacuaugucguauggguaaagcgcuuacggacuucgguccguaagaagcaucaaag

SEQ ID NO: 2243 - RNA, 97 nt, Artificial Sequence
  CasX scaffold variant
acuggcgcuuuuaucugauuacuuugagagccaucaccagcgacuaugucguauggguaaagcgcuuacggacuucgguccguaagaagcaucaaag

SEQ ID NO: 2244 - RNA, 98 nt, Artificial Sequence
  CasX scaffold variant
acuggcgcuuuuaucugauuacuuugagagccaucaccagcgacuaugucguaguggguaaagcgcuuacggacuucgguccguaagaagcaucaaag

SEQ ID NO: 2245 - RNA, 89 nt, Artificial Sequence
  CasX scaffold variant
acuggcgcuuuuaucugauuacuuugagagccaucaccagcgacuaugucguauuggguaaagcucccucuucggagggagcaucaaag

SEQ ID NO: 2246 - RNA, 98 nt, Artificial Sequence
  CasX scaffold variant
acuggcgcuuuuaucugauuacuuugagagccaucaccagcgacuaugucguauuggguaaagcgcuuacggacuucgguccguaagaagcaucaaag

SEQ ID NO: 2247 - RNA, 98 nt, Artificial Sequence
  CasX scaffold variant
acuggcgccuuuaucaucauuacuuugagagccaucaccagcgacuaugucguauggguaaagcgcuuacggacuucgguccguaagaagcaucaaag

SEQ ID NO: 2248 - RNA, 90 nt, Artificial Sequence
  CasX scaffold variant
acuggcgcuuuuaucugauuacuuugagagccaucaccagcgacuaugucguaguggguaaagcgcccucuucggagggaagcaucaaag

SEQ ID NO: 2249 - RNA, 96 nt, Artificial Sequence
  CasX scaffold variant
acuggcgcuuuuaucugauuacuuugagagccaucaccagcgacuaugucguaguggguaaagcucacaugaggaucacccaugugagcaucaaag

SEQ ID NO: 2250 - RNA, 89 nt, Artificial Sequence
  CasX scaffold variant
acuggcacuuuuaccugauuacuuugagagccaacaccagcgacuaugucguaguggguaaagcucccucuucggagggagcaucaaag

SEQ ID NO: 2251 - RNA, 89 nt, Artificial Sequence
  CasX scaffold variant
acuggcacuuuuaucugauuacuuugagagccaucaccagcgacuaugucguaguggguaaagcucccucuucggagggagcaucaaag

SEQ ID NO: 2252 - RNA, 89 nt, Artificial Sequence
  CasX scaffold variant
acuggcccuuuuaucugauuacuuugagagccaucaccagcgacuaugucguaguggguaaagcucccucuucggagggagcaucaaag

SEQ ID NO: 2253 - RNA, 89 nt, Artificial Sequence
  CasX scaffold variant
acuggcgcuuuuaccugauuacuuugagagccaucaccagcgacuaugucguaguggguaaagcucccucuucggagggagcaucaaag

SEQ ID NO: 2254 - RNA, 89 nt, Artificial Sequence
  CasX scaffold variant
acuggcgcuuuuaucugauuacuuugagagccaacaccagcgacuaugucguaguggguaaagcucccucuucggagggagcaucaaag

SEQ ID NO: 2255 - RNA, 97 nt, Artificial Sequence
  CasX scaffold variant
acuggcaccuuuaccugauuacuuugagagccaacaccagcgacuaugucguauggguaaagcgcuuacggacuucgguccguaagaagcaucaaag

SEQ ID NO: 2256 - RNA, 97 nt, Artificial Sequence
  CasX scaffold variant
acuggcaccuuuaucugauuacuuugagagccaucaccagcgacuaugucguauggguaaagcgcuuacggacuucgguccguaagaagcaucaaag

SEQ ID NO: 2257 - RNA, 97 nt, Artificial Sequence
  CasX scaffold variant
acuggccccuuuaucugauuacuuugagagccaucaccagcgacuaugucguauggguaaagcgcuuacggacuucgguccguaagaagcaucaaag

SEQ ID NO: 2258 - RNA, 97 nt, Artificial Sequence
  CasX scaffold variant
acuggcgccuuuaucugauuacuuugagagccaacaccagcgacuaugucguauggguaaagcgcuuacggacuucgguccguaagaagcaucaaag

SEQ ID NO: 2259 - RNA, 89 nt, Artificial Sequence; identical to SEQ ID NO: 2240
  CasX scaffold variant

SEQ ID NO: 2260 - RNA, 90 nt, Artificial Sequence
  CasX scaffold variant
gacuggcgcuuuuaucugauuacuuugagagccaucaccagcgacuaugucguaguggguaaagcucccucuucggagggagcaucaaag

SEQ ID NO: 2261 - RNA, 90 nt, Artificial Sequence
  CasX scaffold variant
acuggcgccuuuaucugauuacuuuggagagccaucaccagcgacuaugucguaguggguaaagcucccucuucggagggagcaucaaag

SEQ ID NO: 2262 - RNA, 89 nt, Artificial Sequence
  CasX scaffold variant
acuggcgcauuuaucugauuacuuugugagccaucaccagcgacuaugucguaguggguaaagcucccucuucggagggagcaucaaag

SEQ ID NO: 2263 - RNA, 89 nt, Artificial Sequence
  CasX scaffold variant
acuggcgccuuuaucugauuacuuugagagccaucaccagcgacuaugucguaguggguaaagcucccucuucggagggagcaucaaag

SEQ ID NO: 2264 - RNA, 90 nt, Artificial Sequence
  CasX scaffold variant
acuggcgcuuuuaucugauuacuuuggagagccaucaccagcgacuaugucguaguggguaaagcucccucuucggagggagcaucaaag

SEQ ID NO: 2265 - RNA, 89 nt, Artificial Sequence
  CasX scaffold variant
acuggcgcauuuaucugauuacuuugagagccaucaccagcgacuaugucguaguggguaaagcucccucuucggagggagcaucaaag

SEQ ID NO: 2266 - RNA, 89 nt, Artificial Sequence
  CasX scaffold variant
acuggcgcuuuuaucugauuacuuugugagccaucaccagcgacuaugucguaguggguaaagcucccucuucggagggagcaucaaag

SEQ ID NO: 2267 - RNA, 90 nt, Artificial Sequence
  CasX scaffold variant
acuggcgcuuuuauucugauuacuuugagagccaucaccagcgacuaugucguaguggguaaagcucccucuucggagggagcaucaaag

SEQ ID NO: 2268 - RNA, 88 nt, Artificial Sequence
  CasX scaffold variant
acggcgcuuuuaucugauuacuuugagagccaucaccagcgacuaugucguaguggguaaagcucccucuucggagggagcaucaaag

SEQ ID NO: 2269 - RNA, 89 nt, Artificial Sequence
  CasX scaffold variant
acuggcgcuuuuauaugauuacuuugagagccaucaccagcgacuaugucguaguggguaaagcucccucuucggagggagcaucaaag

SEQ ID NO: 2270 - RNA, 90 nt, Artificial Sequence
  CasX scaffold variant
acuggcgcuuuuaucuugauuacuuugagagccaucaccagcgacuaugucguaguggguaaagcucccucuucggagggagcaucaaag

SEQ ID NO: 2271 - RNA, 89 nt, Artificial Sequence
  CasX scaffold variant
acuggcgcuuuuaucugauuacuuugagagccagcaccagcgacuaugucguaguggguaaagcucccucuucggagggagcaucaaag

SEQ ID NO: 2272 - RNA, 89 nt, Artificial Sequence
  CasX scaffold variant
acuggcgcuguuaucugauuacuucgagagccaucaccagcgacuaugucguaguggguaaagcucccucuucggagggagcaucgaag

SEQ ID NO: 2273 - RNA, 89 nt, Artificial Sequence
  CasX scaffold variant
acuggcgcucuuaucugauuacuucgagagccaucaccagcgacuaugucguaguggguaaagcucccucuucggagggagcaucgaag

SEQ ID NO: 2274 - RNA, 89 nt, Artificial Sequence
  CasX scaffold variant
acuggcgcuuguaucugauuacucugagagccaucaccagcgacuaugucguaguggguaaagcucccucuucggagggagcaucagag

SEQ ID NO: 2275 - RNA, 89 nt, Artificial Sequence
  CasX scaffold variant
acuggcgcuucuaucugauuacucugagagccaucaccagcgacuaugucguaguggguaaagcucccucuucggagggagcaucagag

SEQ ID NO: 2276 - RNA, 89 nt, Artificial Sequence
  CasX scaffold variant
acuggcgcuuugaucugauuaccuugagagccaucaccagcgacuaugucguaguggguaaagcucccucuucggagggagcaucaagg

SEQ ID NO: 2277 - RNA, 89 nt, Artificial Sequence
  CasX scaffold variant
acuggcgcuuucaucugauuaccuugagagccaucaccagcgacuaugucguaguggguaaagcucccucuucggagggagcaucaagg

SEQ ID NO: 2278 - RNA, 89 nt, Artificial Sequence
  CasX scaffold variant
acuggcgcuguuaucugauuacuuugagagccaucaccagcgacuaugucguaguggguaaagcucccucuucggagggagcaucaaag

SEQ ID NO: 2279 - RNA, 89 nt, Artificial Sequence
  CasX scaffold variant
acuggcgcuuuuaucugauuacuuugagagccaucaccagcgacuaugucguaguggguaaagcucccucuucggagggagcaucgaag

SEQ ID NO: 2280 - RNA, 89 nt, Artificial Sequence
  CasX scaffold variant
acuggcgcuuuuaucugauuacuucgagagccaucaccagcgacuaugucguaguggguaaagcucccucuucggagggagcaucaaag

SEQ ID NO: 2281 - RNA, 98 nt, Artificial Sequence
  CasX scaffold variant
acuggcacuucuaucugauuacucugagagccaucaccagcgacuaugucguauggguaaagccgcuuacggacuucgguccguaagaggcaucagag

SEQ ID NO: 2282 - RNA, 89 nt, Artificial Sequence
  CasX scaffold variant
acuggcacuucuaucugauuacucugagagccaucaccagcgacuaugucguaguggguaaagcucccucuucggagggagcaucagag

SEQ ID NO: 2283 - RNA, 98 nt, Artificial Sequence
  CasX scaffold variant
acuggcaccuuuaucugauuacuuugagagccaucaccagcgacuaugucguauggguaaagccgcuuacggacuucgguccguaagaggcaucaaag

SEQ ID NO: 2284 - RNA, 98 nt, Artificial Sequence
  CasX scaffold variant
acuggcacuuguaucugauuacucugagagccaucaccagcgacuaugucguauggguaaagccgcuuacggacuucgguccguaagaggcaucagag

SEQ ID NO: 2285 - RNA, 89 nt, Artificial Sequence
  CasX scaffold variant
acuggcacuuguaucugauuacucugagagccaucaccagcgacuaugucguaguggguaaagcucccucuucggagggagcaucagag

SEQ ID NO: 2286 - RNA, 20 nt, Artificial Sequence
  HTT spacer sequence ATCN PAM
caguguagacgacucugcug

SEQ ID NO: 2287 - RNA, 20 nt, Artificial Sequence
  HTT spacer sequence ATCN PAM
ugaaugggggcuggguaaaa

SEQ ID NO: 2288 - RNA, 20 nt, Artificial Sequence
  HTT spacer sequence ATCN PAM
uguaacuaagaaugccuaac

SEQ ID NO: 2289 - RNA, 20 nt, Artificial Sequence
  HTT spacer sequence ATCN PAM
cauccuguaacuaagaaugc

SEQ ID NO: 2290 - RNA, 20 nt, Artificial Sequence
  HTT spacer sequence ATCN PAM
gcaagcucuuugggaccugu

SEQ ID NO: 2291 - RNA, 20 nt, Artificial Sequence
  HTT spacer sequence ATCN PAM
cagcacuuugggaggccgag

SEQ ID NO: 2292 - RNA, 20 nt, Artificial Sequence
  HTT spacer sequence ATCN PAM
accugccucggccucccaaa

SEQ ID NO: 2293 - RNA, 20 nt, Artificial Sequence
  HTT spacer sequence ATCN PAM
cuugaggccaggaguuagag

SEQ ID NO: 2294 - RNA, 20 nt, Artificial Sequence
  HTT spacer sequence ATCN PAM
cugcaccuggcuaauuuuug

SEQ ID NO: 2295 - RNA, 20 nt, Artificial Sequence
  HTT spacer sequence ATCN PAM
aucacugcaccuggcuaauu

SEQ ID NO: 2296 - RNA, 20 nt, Artificial Sequence
  HTT spacer sequence ATCN PAM
cuugaacccaggagucagag

SEQ ID NO: 2297 - RNA, 20 nt, Artificial Sequence
  HTT spacer sequence ATCN PAM
ucucaaaaaaaauaauaaaa

SEQ ID NO: 2298 - RNA, 20 nt, Artificial Sequence
  HTT spacer sequence ATCN PAM
ugguuuugguggguuuccca

SEQ ID NO: 2299 - RNA, 20 nt, Artificial Sequence
  HTT spacer sequence ATCN PAM
ccaucuugguuuuggugggu

SEQ ID NO: 2300 - RNA, 20 nt, Artificial Sequence
  HTT spacer sequence ATCN PAM
ucacagcucauuacaugcua

SEQ ID NO: 2301 - RNA, 20 nt, Artificial Sequence
  HTT spacer sequence ATCN PAM
gcgccaugacaguuuucaga

SEQ ID NO: 2302 - RNA, 20 nt, Artificial Sequence
  HTT spacer sequence ATCN PAM
gaaaacugucauggcgcuga

SEQ ID NO: 2303 - RNA, 20 nt, Artificial Sequence
  HTT spacer sequence ATCN PAM
cccaccccuuucccagaaau

SEQ ID NO: 2304 - RNA, 20 nt, Artificial Sequence
  HTT spacer sequence ATCN PAM
caugaauaauccaccccuug

SEQ ID NO: 2305 - RNA, 20 nt, Artificial Sequence
  HTT spacer sequence ATCN PAM
accccuuguuuagcauauaa

SEQ ID NO: 2306 - RNA, 20 nt, Artificial Sequence
  HTT spacer sequence ATCN PAM
agaaauaaccauaaaaaugg

SEQ ID NO: 2307 - RNA, 20 nt, Artificial Sequence
  HTT spacer sequence ATCN PAM
auaaagggaaagcaaguuuc

SEQ ID NO: 2308 - RNA, 20 nt, Artificial Sequence
  HTT spacer sequence ATCN PAM
cgcucaggaaacaauucgag

SEQ ID NO: 2309 - RNA, 20 nt, Artificial Sequence
  HTT spacer sequence ATCN PAM
aaguacccucuuuugggguc

SEQ ID NO: 2310 - RNA, 20 nt, Artificial Sequence
  HTT spacer sequence ATCN PAM
agaccccaaaagaggguacu

SEQ ID NO: 2311 - RNA, 20 nt, Artificial Sequence
  HTT spacer sequence ATCN PAM
ggaccccuguccaguagcac

SEQ ID NO: 2312 - RNA, 20 nt, Artificial Sequence
  HTT spacer sequence ATCN PAM
ugccugcugaggaggaaacu

SEQ ID NO: 2313 - RNA, 20 nt, Artificial Sequence
  HTT spacer sequence ATCN PAM
uucauacccugggcuggugg

SEQ ID NO: 2314 - RNA, 20 nt, Artificial Sequence
  HTT spacer sequence ATCN PAM
uggccuagguuuauuucucu

SEQ ID NO: 2315 - RNA, 20 nt, Artificial Sequence
  HTT spacer sequence ATCN PAM
cauuuuucucuuucuguuua

SEQ ID NO: 2316 - RNA, 20 nt, Artificial Sequence
  HTT spacer sequence ATCN PAM
uuccaguuuuaguguauaug

SEQ ID NO: 2317 - RNA, 20 nt, Artificial Sequence
  HTT spacer sequence ATCN PAM
ucucuguaucauuccaguuu

SEQ ID NO: 2318 - RNA, 20 nt, Artificial Sequence
  HTT spacer sequence ATCN PAM
cgucuuuaauauuagcugcu

SEQ ID NO: 2319 - RNA, 20 nt, Artificial Sequence
  HTT spacer sequence ATCN PAM
guaucaacauuuuguuugcu

SEQ ID NO: 2320 - RNA, 20 nt, Artificial Sequence
  HTT spacer sequence ATCN PAM
acauuuuguuugcuauuuau

SEQ ID NO: 2321 - RNA, 20 nt, Artificial Sequence
  HTT spacer sequence ATCN PAM
cuauauuaauuauauaaaua

SEQ ID NO: 2322 - RNA, 20 nt, Artificial Sequence
  HTT spacer sequence ATCN PAM
cgccaccgcacuccagccug

SEQ ID NO: 2323 - RNA, 20 nt, Artificial Sequence
  HTT spacer sequence ATCN PAM
cggcucacugcaaccugcau

SEQ ID NO: 2324 - RNA, 20 nt, Artificial Sequence
  HTT spacer sequence ATCN PAM
cuugaaugcagguugcagug

SEQ ID NO: 2325 - RNA, 20 nt, Artificial Sequence
  HTT spacer sequence ATCN PAM
gggaagcugaggcaugagaa

SEQ ID NO: 2326 - RNA, 20 nt, Artificial Sequence
  HTT spacer sequence ATCN PAM
cagcuauccgggaagcugag

SEQ ID NO: 2327 - RNA, 20 nt, Artificial Sequence
  HTT spacer sequence ATCN PAM
guacuaaaaaaaaaaaauua

SEQ ID NO: 2328 - RNA, 20 nt, Artificial Sequence
  HTT spacer sequence ATCN PAM
gcccaucucagccucccaaa

SEQ ID NO: 2329 - RNA, 20 nt, Artificial Sequence
  HTT spacer sequence ATCN PAM
cagccucccaaaggauuaca

SEQ ID NO: 2330 - RNA, 20 nt, Artificial Sequence
  HTT spacer sequence ATCN PAM
uuugggaggcugagaugggc

SEQ ID NO: 2331 - RNA, 20 nt, Artificial Sequence
  HTT spacer sequence ATCN PAM
uuuauuacauauuucaguca

SEQ ID NO: 2332 - RNA, 20 nt, Artificial Sequence
  HTT spacer sequence ATCN PAM
augauauugugaaguuauau

SEQ ID NO: 2333 - RNA, 20 nt, Artificial Sequence
  HTT spacer sequence ATCN PAM
uggaugacugaaauauguaa

SEQ ID NO: 2334 - RNA, 20 nt, Artificial Sequence
  HTT spacer sequence ATCN PAM
uuggaaucuucaaagugaug

SEQ ID NO: 2335 - RNA, 20 nt, Artificial Sequence
  HTT spacer sequence ATCN PAM
ucaaagugaugaaugucuuu

SEQ ID NO: 2336 - RNA, 20 nt, Artificial Sequence
  HTT spacer sequence ATCN PAM
cuuugaagauuccaaggauu

SEQ ID NO: 2337 - RNA, 20 nt, Artificial Sequence
  HTT spacer sequence ATCN PAM
ugaagcugucuaggagccac

SEQ ID NO: 2338 - RNA, 20 nt, Artificial Sequence
  HTT spacer sequence ATCN PAM
gccccucucccuucccagag

SEQ ID NO: 2339 - RNA, 20 nt, Artificial Sequence
  HTT spacer sequence ATCN PAM
gcucaaccaucagccccucu

SEQ ID NO: 2340 - RNA, 20 nt, Artificial Sequence
  HTT spacer sequence ATCN PAM
ccaauggcuaaugauuaaau

SEQ ID NO: 2341 - RNA, 20 nt, Artificial Sequence
  HTT spacer sequence ATCN PAM
uuagccauuggcgaucagcu

SEQ ID NO: 2342 - RNA, 20 nt, Artificial Sequence
  HTT spacer sequence ATCN PAM
ugccuaugugaugaagccuc

SEQ ID NO: 2343 - RNA, 20 nt, Artificial Sequence
  HTT spacer sequence ATCN PAM
cauaggcaugauuuaaucau

SEQ ID NO: 2344 - RNA, 20 nt, Artificial Sequence
  HTT spacer sequence ATCN PAM
ucucaucuggcuguucaucu

SEQ ID NO: 2345 - RNA, 20 nt, Artificial Sequence
  HTT spacer sequence ATCN PAM
ggcuguucaucuguauccug

SEQ ID NO: 2346 - RNA, 20 nt, Artificial Sequence
  HTT spacer sequence ATCN PAM
guauccuguaaaauaugccu

SEQ ID NO: 2347 - RNA, 20 nt, Artificial Sequence
  HTT spacer sequence ATCN PAM
uguaaaauaugccuuguaau

SEQ ID NO: 2348 - RNA, 20 nt, Artificial Sequence
  HTT spacer sequence ATCN PAM
gcauacagaacucagagaaa

SEQ ID NO: 2349 - RNA, 20 nt, Artificial Sequence
  HTT spacer sequence ATCN PAM
agcaaauuaauugaacccaa

SEQ ID NO: 2350 - RNA, 20 nt, Artificial Sequence
  HTT spacer sequence ATCN PAM
caggccaaauaaccaggggc

SEQ ID NO: 2351 - RNA, 20 nt, Artificial Sequence
  HTT spacer sequence ATCN PAM
aggacucaguucccacaaga

SEQ ID NO: 2352 - RNA, 20 nt, Artificial Sequence
  HTT spacer sequence ATCN PAM
guguggucaggcgcugucua

SEQ ID NO: 2353 - RNA, 20 nt, Artificial Sequence
  HTT spacer sequence ATCN PAM
accuguagacagcgccugac

SEQ ID NO: 2354 - RNA, 20 nt, Artificial Sequence
  HTT spacer sequence ATCN PAM
guucugcagcggacaccagc

SEQ ID NO: 2355 - RNA, 20 nt, Artificial Sequence
  HTT spacer sequence ATCN PAM
acacagaauacuucucccca

SEQ ID NO: 2356 - RNA, 20 nt, Artificial Sequence
  HTT spacer sequence ATCN PAM
aggggaaaagcgcagugucc

SEQ ID NO: 2357 - RNA, 20 nt, Artificial Sequence
  HTT spacer sequence ATCN PAM
ucaggguggcugaauauaca

SEQ ID NO: 2358 - RNA, 20 nt, Artificial Sequence
  HTT spacer sequence ATCN PAM
gugaggggagcaacacccag

SEQ ID NO: 2359 - RNA, 20 nt, Artificial Sequence
  HTT spacer sequence ATCN PAM
cgcuaaccccaacauuuuuu

SEQ ID NO: 2360 - RNA, 20 nt, Artificial Sequence
  HTT spacer sequence ATCN PAM
gaggaugugguuuuccuccc

SEQ ID NO: 2361 - RNA, 20 nt, Artificial Sequence
  HTT spacer sequence ATCN PAM
uccgaucacgcuaaccccaa

SEQ ID NO: 2362 - RNA, 20 nt, Artificial Sequence
  HTT spacer sequence ATCN PAM
gaggccacggccaggcaaug

SEQ ID NO: 2363 - RNA, 20 nt, Artificial Sequence
  HTT spacer sequence ATCN PAM
ucugaggccacggccaggca

SEQ ID NO: 2364 - RNA, 20 nt, Artificial Sequence
  HTT spacer sequence ATCN PAM
cacucuucuauugccuuuag

SEQ ID NO: 2365 - RNA, 20 nt, Artificial Sequence
  HTT spacer sequence ATCN PAM
uaaaaccccugccaacugag

SEQ ID NO: 2366 - RNA, 20 nt, Artificial Sequence
  HTT spacer sequence ATCN PAM
caucauaauuuuuuuuuuaa

SEQ ID NO: 2367 - RNA, 20 nt, Artificial Sequence
  HTT spacer sequence ATCN PAM
uaauuuuuuuuuuaacaaaa

SEQ ID NO: 2368 - RNA, 20 nt, Artificial Sequence
  HTT spacer sequence ATCN PAM
uucauugcucaauuaaacuc

SEQ ID NO: 2369 - RNA, 20 nt, Artificial Sequence
  HTT spacer sequence ATCN PAM
cagcagauucagagggacuc

SEQ ID NO: 2370 - RNA, 20 nt, Artificial Sequence
  HTT spacer sequence ATCN PAM
gcugugauucugggggcugc

SEQ ID NO: 2371 - RNA, 20 nt, Artificial Sequence
  HTT spacer sequence ATCN PAM
cuggagucccucugaaucug

SEQ ID NO: 2372 - RNA, 20 nt, Artificial Sequence
  HTT spacer sequence ATCN PAM
auagacaaaaaagggaagug

SEQ ID NO: 2373 - RNA, 20 nt, Artificial Sequence
  HTT spacer sequence ATCN PAM
cagcagccguacuucacucg

SEQ ID NO: 2374 - RNA, 20 nt, Artificial Sequence
  HTT spacer sequence ATCN PAM
ucacuugggagucugcaccu

SEQ ID NO: 2375 - RNA, 20 nt, Artificial Sequence
  HTT spacer sequence ATCN PAM
cucaaaauugagaaaaugac

SEQ ID NO: 2376 - RNA, 20 nt, Artificial Sequence
  HTT spacer sequence ATCN PAM
augacuaaaguuuuggucaa

SEQ ID NO: 2377 - RNA, 20 nt, Artificial Sequence
  HTT spacer sequence ATCN PAM
ccaucguaaauguacuuauu

SEQ ID NO: 2378 - RNA, 20 nt, Artificial Sequence
  HTT spacer sequence ATCN PAM
uaaauguacuuauuuggucc

SEQ ID NO: 2379 - RNA, 20 nt, Artificial Sequence
  HTT spacer sequence ATCN PAM
guuaggaucuauguguuucc

SEQ ID NO: 2380 - RNA, 20 nt, Artificial Sequence
  HTT spacer sequence ATCN PAM
uaacagauuccccuauaaac

SEQ ID NO: 2381 - RNA, 20 nt, Artificial Sequence
  HTT spacer sequence ATCN PAM
auguguuuccuuaaagucuu

SEQ ID NO: 2382 - RNA, 20 nt, Artificial Sequence
  HTT spacer sequence ATCN PAM
aacuaagacuuuaaggaaac

SEQ ID NO: 2383 - RNA, 20 nt, Artificial Sequence
  HTT spacer sequence ATCN PAM
cagcacuuugggaggccgag

SEQ ID NO: 2384 - RNA, 20 nt, Artificial Sequence
  HTT spacer sequence ATCN PAM
gcccaccucggccucccaaa

SEQ ID NO: 2385 - RNA, 20 nt, Artificial Sequence
  HTT spacer sequence ATCN PAM
ugaggucaggagaucgagac

SEQ ID NO: 2386 - RNA, 20 nt, Artificial Sequence
  HTT spacer sequence ATCN PAM
ccugaccucaugaucugccc

SEQ ID NO: 2387 - RNA, 20 nt, Artificial Sequence
  HTT spacer sequence ATCN PAM
agaccauccuggcuaacacg

SEQ ID NO: 2388 - RNA, 20 nt, Artificial Sequence
  HTT spacer sequence ATCN PAM
uggcuaacacggugaaaccc

SEQ ID NO: 2389 - RNA, 20 nt, Artificial Sequence
  HTT spacer sequence ATCN PAM
cggcucacugcaagcuccgc

SEQ ID NO: 2390 - RNA, 20 nt, Artificial Sequence
  HTT spacer sequence ATCN PAM
auuucuaguauaacuauucu

SEQ ID NO: 2391 - RNA, 20 nt, Artificial Sequence
  HTT spacer sequence ATCN PAM
auaaucuauuucuaguauaa

SEQ ID NO: 2392 - RNA, 20 nt, Artificial Sequence
  HTT spacer sequence ATCN PAM
uaucuauaaucuauuucuag

SEQ ID NO: 2393 - RNA, 20 nt, Artificial Sequence
  HTT spacer sequence ATCN PAM
aaucauaucuauaaucuauu

SEQ ID NO: 2394 - RNA, 20 nt, Artificial Sequence
  HTT spacer sequence ATCN PAM
aucauuaguuuguggcauua

SEQ ID NO: 2395 - RNA, 20 nt, Artificial Sequence
  HTT spacer sequence ATCN PAM
uuaguuuguggcauuacucu

SEQ ID NO: 2396 - RNA, 20 nt, Artificial Sequence
  HTT spacer sequence ATCN PAM
uuguucuacaauuauaaccu

SEQ ID NO: 2397 - RNA, 20 nt, Artificial Sequence
  HTT spacer sequence ATCN PAM
cuguauggccugguuuuucc

SEQ ID NO: 2398 - RNA, 20 nt, Artificial Sequence
  HTT spacer sequence ATCN PAM
cuuguggaaggccugacauc

SEQ ID NO: 2399 - RNA, 20 nt, Artificial Sequence
  HTT spacer sequence ATCN PAM
gucaggcccgcccacagcca

SEQ ID NO: 2400 - RNA, 20 nt, Artificial Sequence
  HTT spacer sequence ATCN PAM
ggaggccugaccaucucccu

SEQ ID NO: 2401 - RNA, 20 nt, Artificial Sequence
  HTT spacer sequence ATCN PAM
cccugugaugcugugcuuca

SEQ ID NO: 2402 - RNA, 20 nt, Artificial Sequence
  HTT spacer sequence ATCN PAM
cagggagauggucaggccuc

SEQ ID NO: 2403 - RNA, 20 nt, Artificial Sequence
  HTT spacer sequence ATCN PAM
ucuagauagcaguagcagaa

SEQ ID NO: 2404 - RNA, 20 nt, Artificial Sequence
  HTT spacer sequence ATCN PAM
agaagauggagccaggugua

SEQ ID NO: 2405 - RNA, 20 nt, Artificial Sequence
  HTT spacer sequence ATCN PAM
uuggagaugacucacacucc

SEQ ID NO: 2406 - RNA, 20 nt, Artificial Sequence
  HTT spacer sequence ATCN PAM
ccaaugauaggucaggucac

SEQ ID NO: 2407 - RNA, 20 nt, Artificial Sequence
  HTT spacer sequence ATCN PAM
aauaaguaacagggcagcca

SEQ ID NO: 2408 - RNA, 20 nt, Artificial Sequence
  HTT spacer sequence ATCN PAM
cuuugucuuguguccuuauu

SEQ ID NO: 2409 - RNA, 20 nt, Artificial Sequence
  HTT spacer sequence ATCN PAM
cagaaauaaggacacaagac

SEQ ID NO: 2410 - RNA, 20 nt, Artificial Sequence
  HTT spacer sequence ATCN PAM
cucaucuccgcaggugagga

SEQ ID NO: 2411 - RNA, 20 nt, Artificial Sequence
  HTT spacer sequence ATCN PAM
ccgcaggugaggagaaaaac

SEQ ID NO: 2412 - RNA, 20 nt, Artificial Sequence
  HTT spacer sequence ATCN PAM
uuuuggguuucuggucucag

SEQ ID NO: 2413 - RNA, 20 nt, Artificial Sequence
  HTT spacer sequence ATCN PAM
cuagaacaacaaauggucuc

SEQ ID NO: 2414 - RNA, 20 nt, Artificial Sequence
  HTT spacer sequence ATCN PAM
uaauaauagucucccuggug

SEQ ID NO: 2415 - RNA, 20 nt, Artificial Sequence
  HTT spacer sequence ATCN PAM
ucccaguaaucauaauaaua

SEQ ID NO: 2416 - RNA, 20 nt, Artificial Sequence
  HTT spacer sequence ATCN PAM
aauagaucagacaaugagcu

SEQ ID NO: 2417 - RNA, 20 nt, Artificial Sequence
  HTT spacer sequence ATCN PAM
auuugauuuggggugguuug

SEQ ID NO: 2418 - RNA, 20 nt, Artificial Sequence
  HTT spacer sequence ATCN PAM
gacaaugagcuagauaagag

SEQ ID NO: 2419 - RNA, 20 nt, Artificial Sequence
  HTT spacer sequence ATCN PAM
agcucauugucugaucuauu

SEQ ID NO: 2420 - RNA, 20 nt, Artificial Sequence
  HTT spacer sequence ATCN PAM
cccacaacugaaucucuaua

SEQ ID NO: 2421 - RNA, 20 nt, Artificial Sequence
  HTT spacer sequence ATCN PAM
cuauaauaccugauguauuu

SEQ ID NO: 2422 - RNA, 20 nt, Artificial Sequence
  HTT spacer sequence ATCN PAM
gguauuauagagauucaguu

SEQ ID NO: 2423 - RNA, 20 nt, Artificial Sequence
  HTT spacer sequence ATCN PAM
ugagggauacauuucugguu

SEQ ID NO: 2424 - RNA, 20 nt, Artificial Sequence
  HTT spacer sequence ATCN PAM
cucaugauaggcuguauagc

SEQ ID NO: 2425 - RNA, 20 nt, Artificial Sequence
  HTT spacer sequence ATCN PAM
cuuuuccaugguuuagagua

SEQ ID NO: 2426 - RNA, 20 nt, Artificial Sequence
  HTT spacer sequence ATCN PAM
guucacuccucuuaacccac

SEQ ID NO: 2427 - RNA, 20 nt, Artificial Sequence
  HTT spacer sequence ATCN PAM
gucagaaacagaauaucggu

SEQ ID NO: 2428 - RNA, 20 nt, Artificial Sequence
  HTT spacer sequence ATCN PAM
uuuaucuaucaaaguauaaa

SEQ ID NO: 2429 - RNA, 20 nt, Artificial Sequence
  HTT spacer sequence ATCN PAM
aucaaaguauaaaguuaucc

SEQ ID NO: 2430 - RNA, 20 nt, Artificial Sequence
  HTT spacer sequence ATCN PAM
aaguauaaaguuauccgugu

SEQ ID NO: 2431 - RNA, 20 nt, Artificial Sequence
  HTT spacer sequence ATCN PAM
guguauaaggcuggcugcaa

SEQ ID NO: 2432 - RNA, 20 nt, Artificial Sequence
  HTT spacer sequence ATCN PAM
uucacaaaugaaaguauacc

SEQ ID NO: 2433 - RNA, 20 nt, Artificial Sequence
  HTT spacer sequence ATCN PAM
guugugugcacuuauggggu

SEQ ID NO: 2434 - RNA, 20 nt, Artificial Sequence
  HTT spacer sequence ATCN PAM
ucuuuucauuucuauuauuc

SEQ ID NO: 2435 - RNA, 20 nt, Artificial Sequence
  HTT spacer sequence ATCN PAM
guuccuugcuuaugccucua

SEQ ID NO: 2436 - RNA, 20 nt, Artificial Sequence
  HTT spacer sequence ATCN PAM
uugaguaucuguuccuugcu

SEQ ID NO: 2437 - RNA, 20 nt, Artificial Sequence
  HTT spacer sequence ATCN PAM
cagcacuuugggaggccgag

SEQ ID NO: 2438 - RNA, 20 nt, Artificial Sequence
  HTT spacer sequence ATCN PAM
gcccaccucggccucccaaa

SEQ ID NO: 2439 - RNA, 20 nt, Artificial Sequence
  HTT spacer sequence ATCN PAM
ccugagguuagaaguucaaa

SEQ ID NO: 2440 - RNA, 20 nt, Artificial Sequence
  HTT spacer sequence ATCN PAM
cuacuaaaaauacaaaaauu

SEQ ID NO: 2441 - RNA, 20 nt, Artificial Sequence
  HTT spacer sequence ATCN PAM
cuugaacccaggaggcagag

SEQ ID NO: 2442 - RNA, 20 nt, Artificial Sequence
  HTT spacer sequence ATCN PAM
ccaaaaaagaaaaaaaaaag

SEQ ID NO: 2443 - RNA, 20 nt, Artificial Sequence
  HTT spacer sequence ATCN PAM
agacuucuacugucaugaga

SEQ ID NO: 2444 - RNA, 20 nt, Artificial Sequence
  HTT spacer sequence ATCN PAM
acgaucuuagcaaaagccgu

SEQ ID NO: 2445 - RNA, 20 nt, Artificial Sequence
  HTT spacer sequence ATCN PAM
uggaucaagacuucuacugu

SEQ ID NO: 2446 - RNA, 20 nt, Artificial Sequence
  HTT spacer sequence ATCN PAM
uagcaaaagccguucacauc

SEQ ID NO: 2447 - RNA, 20 nt, Artificial Sequence
  HTT spacer sequence ATCN PAM
aggaugccaucuucugggga

SEQ ID NO: 2448 - RNA, 20 nt, Artificial Sequence
  HTT spacer sequence ATCN PAM
uugaugugaacggcuuuugc

SEQ ID NO: 2449 - RNA, 20 nt, Artificial Sequence
  HTT spacer sequence ATCN PAM
ucuggggagagacuuccuug

SEQ ID NO: 2450 - RNA, 20 nt, Artificial Sequence
  HTT spacer sequence ATCN PAM
acacuccuggaacuguacac

SEQ ID NO: 2451 - RNA, 20 nt, Artificial Sequence
  HTT spacer sequence ATCN PAM
cacaacugagaaggguccau

SEQ ID NO: 2452 - RNA, 20 nt, Artificial Sequence
  HTT spacer sequence ATCN PAM
ugaaacuuggguucauaauc

SEQ ID NO: 2453 - RNA, 20 nt, Artificial Sequence
  HTT spacer sequence ATCN PAM
cuaaguuuuguugcagugcg

SEQ ID NO: 2454 - RNA, 20 nt, Artificial Sequence
  HTT spacer sequence ATCN PAM
gcacugcaacaaaacuuagg

SEQ ID NO: 2455 - RNA, 20 nt, Artificial Sequence
  HTT spacer sequence ATCN PAM
gagaaagacuguccuugcca

SEQ ID NO: 2456 - RNA, 20 nt, Artificial Sequence
  HTT spacer sequence ATCN PAM
ucugagaacaucagagaaag

SEQ ID NO: 2457 - RNA, 20 nt, Artificial Sequence
  HTT spacer sequence ATCN PAM
agucuucggguucuagaaug

SEQ ID NO: 2458 - RNA, 20 nt, Artificial Sequence
  HTT spacer sequence ATCN PAM
gcccucuuaacaugcgagag

SEQ ID NO: 2459 - RNA, 20 nt, Artificial Sequence
  HTT spacer sequence ATCN PAM
ucauuuucaaugcauguuuu

SEQ ID NO: 2460 - RNA, 20 nt, Artificial Sequence
  HTT spacer sequence ATCN PAM
cuuuauaaaauauguaaaua

SEQ ID NO: 2461 - RNA, 20 nt, Artificial Sequence
  HTT spacer sequence ATCN PAM
cacacacacacacacacaca

SEQ ID NO: 2462 - RNA, 20 nt, Artificial Sequence
  HTT spacer sequence ATCN PAM
caaaaaaaaaaaaguguaua

SEQ ID NO: 2463 - RNA, 20 nt, Artificial Sequence
  HTT spacer sequence ATCN PAM
cugucacccaggcuggagug

SEQ ID NO: 2464 - RNA, 20 nt, Artificial Sequence
  HTT spacer sequence ATCN PAM
cggcucacuccaaccucugc

SEQ ID NO: 2465 - RNA, 20 nt, Artificial Sequence
  HTT spacer sequence ATCN PAM
aaauuaaauacauuggugug

SEQ ID NO: 2466 - RNA, 20 nt, Artificial Sequence
  HTT spacer sequence ATCN PAM
uuuccaugaugagucacgaa

SEQ ID NO: 2467 - RNA, 20 nt, Artificial Sequence
  HTT spacer sequence ATCN PAM
uggaaaagauaaaguaaucc

SEQ ID NO: 2468 - RNA, 20 nt, Artificial Sequence
  HTT spacer sequence ATCN PAM
caguugcuucuccaaauuag

SEQ ID NO: 2469 - RNA, 20 nt, Artificial Sequence
  HTT spacer sequence ATCN PAM
gugcaaugcaccuaauuugg

SEQ ID NO: 2470 - RNA, 20 nt, Artificial Sequence
  HTT spacer sequence ATCN PAM
guuauccgugcaaugcaccu

SEQ ID NO: 2471 - RNA, 20 nt, Artificial Sequence
  HTT spacer sequence ATCN PAM
cagguaauuugacuuagacc

SEQ ID NO: 2472 - RNA, 20 nt, Artificial Sequence
  HTT spacer sequence ATCN PAM
auggucuaagucaaauuacc

SEQ ID NO: 2473 - RNA, 20 nt, Artificial Sequence
  HTT spacer sequence ATCN PAM
gaacuauuucagugucagcu

SEQ ID NO: 2474 - RNA, 20 nt, Artificial Sequence
  HTT spacer sequence ATCN PAM
gcugacacugaaauaguuca

SEQ ID NO: 2475 - RNA, 20 nt, Artificial Sequence
  HTT spacer sequence ATCN PAM
uaaaucagcugacacugaaa

SEQ ID NO: 2476 - RNA, 20 nt, Artificial Sequence
  HTT spacer sequence ATCN PAM
ggcaaacucuuuucuuggua

SEQ ID NO: 2477 - RNA, 20 nt, Artificial Sequence
  HTT spacer sequence ATCN PAM
uuugaacuggguaagaauuc

SEQ ID NO: 2478 - RNA, 20 nt, Artificial Sequence
  HTT spacer sequence ATCN PAM
uaucauuugaacuggguaag

SEQ ID NO: 2479 - RNA, 20 nt, Artificial Sequence
  HTT spacer sequence ATCN PAM
gucuuggaauacagguuucu

SEQ ID NO: 2480 - RNA, 20 nt, Artificial Sequence
  HTT spacer sequence ATCN PAM
uuuuaugaaucuccuaaaag

SEQ ID NO: 2481 - RNA, 20 nt, Artificial Sequence
  HTT spacer sequence ATCN PAM
ccuaaaagacaccauacuuu

SEQ ID NO: 2482 - RNA, 20 nt, Artificial Sequence
  HTT spacer sequence ATCN PAM
uagaaauaaccaaauuuccu

SEQ ID NO: 2483 - RNA, 20 nt, Artificial Sequence
  HTT spacer sequence ATCN PAM
auauaauuaugguuaaguua

SEQ ID NO: 2484 - RNA, 20 nt, Artificial Sequence
  HTT spacer sequence ATCN PAM
cauuuaauuuuggaacauau

SEQ ID NO: 2485 - RNA, 20 nt, Artificial Sequence
  HTT spacer sequence ATCN PAM
uucacuaaaauguaaccuga

SEQ ID NO: 2486 - RNA, 20 nt, Artificial Sequence
  HTT spacer sequence ATCN PAM
gauuaucccguuuaccucuc

SEQ ID NO: 2487 - RNA, 20 nt, Artificial Sequence
  HTT spacer sequence ATCN PAM
gauauguuaaguuacauggg

SEQ ID NO: 2488 - RNA, 20 nt, Artificial Sequence
  HTT spacer sequence ATCN PAM
cguuuaccucucuuuggaug

SEQ ID NO: 2489 - RNA, 20 nt, Artificial Sequence
  HTT spacer sequence ATCN PAM
aaagagagguaaacgggaua

SEQ ID NO: 2490 - RNA, 20 nt, Artificial Sequence
  HTT spacer sequence ATCN PAM
ccuaaagcauccaaagagag

SEQ ID NO: 2491 - RNA, 20 nt, Artificial Sequence
  HTT spacer sequence ATCN PAM
cuguaacaccccaaaguuag

SEQ ID NO: 2492 - RNA, 20 nt, Artificial Sequence
  HTT spacer sequence ATCN PAM
aauuucagcuucaaaauagu

SEQ ID NO: 2493 - RNA, 20 nt, Artificial Sequence
  HTT spacer sequence ATCN PAM
aauauauuaaagguuuaaaa

SEQ ID NO: 2494 - RNA, 20 nt, Artificial Sequence
  HTT spacer sequence ATCN PAM
aguguuuuaaaccuuuaaua

SEQ ID NO: 2495 - RNA, 20 nt, Artificial Sequence
  HTT spacer sequence ATCN PAM
caccucauggucaaacuggu

SEQ ID NO: 2496 - RNA, 20 nt, Artificial Sequence
  HTT spacer sequence ATCN PAM
cuuacaauuugugugugugu

SEQ ID NO: 2497 - RNA, 20 nt, Artificial Sequence
  HTT spacer sequence ATCN PAM
aaaacacacacacacacaca

SEQ ID NO: 2498 - RNA, 20 nt, Artificial Sequence
  HTT spacer sequence ATCN PAM
ugucacuguacuccagccug

SEQ ID NO: 2499 - RNA, 20 nt, Artificial Sequence
  HTT spacer sequence ATCN PAM
cggcuaccgcaaccucugcc

SEQ ID NO: 2500 - RNA, 20 nt, Artificial Sequence
  HTT spacer sequence ATCN PAM
cagcuacuagagaggcugag

SEQ ID NO: 2501 - RNA, 20 nt, Artificial Sequence
  HTT spacer sequence ATCN PAM
ccugaggucgggaguucgag

SEQ ID NO: 2502 - RNA, 20 nt, Artificial Sequence
  HTT spacer sequence ATCN PAM
accugccuuggccccccaaa

SEQ ID NO: 2503 - RNA, 20 nt, Artificial Sequence
  HTT spacer sequence ATCN PAM
cagcacuuuggggggccaag

SEQ ID NO: 2504 - RNA, 20 nt, Artificial Sequence
  HTT spacer sequence ATCN PAM
aacuggcaaaaggccaggcg

SEQ ID NO: 2505 - RNA, 20 nt, Artificial Sequence
  HTT spacer sequence ATCN PAM
uuuuuuguuucauugaacca

SEQ ID NO: 2506 - RNA, 20 nt, Artificial Sequence
  HTT spacer sequence ATCN PAM
uuuuccuuuaugauguggcu

SEQ ID NO: 2507 - RNA, 20 nt, Artificial Sequence
  HTT spacer sequence ATCN PAM
uaaaggaaaaugaucuuuuu

SEQ ID NO: 2508 - RNA, 20 nt, Artificial Sequence
  HTT spacer sequence ATCN PAM
cugagggccaagccacauca

SEQ ID NO: 2509 - RNA, 20 nt, Artificial Sequence
  HTT spacer sequence ATCN PAM
uaucccugagggccaagcca

SEQ ID NO: 2510 - RNA, 20 nt, Artificial Sequence
  HTT spacer sequence ATCN PAM
agaagccuggcacacagcaa

SEQ ID NO: 2511 - RNA, 20 nt, Artificial Sequence
  HTT spacer sequence ATCN PAM
gacugguaagaaauucuuac

SEQ ID NO: 2512 - RNA, 20 nt, Artificial Sequence
  HTT spacer sequence ATCN PAM
cugcuuaucuccucuguaaa

SEQ ID NO: 2513 - RNA, 20 nt, Artificial Sequence
  HTT spacer sequence ATCN PAM
ccucuguaaaguuuugauua

SEQ ID NO: 2514 - RNA, 20 nt, Artificial Sequence
  HTT spacer sequence ATCN PAM
aaacuuuacagaggagauaa

SEQ ID NO: 2515 - RNA, 20 nt, Artificial Sequence
  HTT spacer sequence ATCN PAM
uuuuuuccauuaaucaaaac

SEQ ID NO: 2516 - RNA, 20 nt, Artificial Sequence
  HTT spacer sequence ATCN PAM
caggcuguagugaaucucgu

SEQ ID NO: 2517 - RNA, 20 nt, Artificial Sequence
  HTT spacer sequence ATCN PAM
cguaggcuuuaugugucuuc

SEQ ID NO: 2518 - RNA, 20 nt, Artificial Sequence
  HTT spacer sequence ATCN PAM
cagaacagcacgggaagaca

SEQ ID NO: 2519 - RNA, 20 nt, Artificial Sequence
  HTT spacer sequence ATCN PAM
uaaggcgccccuuuuuauca

SEQ ID NO: 2520 - RNA, 20 nt, Artificial Sequence
  HTT spacer sequence ATCN PAM
ugagcggcgagcaagcuuau

SEQ ID NO: 2521 - RNA, 20 nt, Artificial Sequence
  HTT spacer sequence ATCN PAM
gcagcaguuacugaccagcu

SEQ ID NO: 2522 - RNA, 20 nt, Artificial Sequence
  HTT spacer sequence ATCN PAM
cugaaacaaacaaaaaaacu

SEQ ID NO: 2523 - RNA, 20 nt, Artificial Sequence
  HTT spacer sequence ATCN PAM
aguuuuuuuguuuguuucag

SEQ ID NO: 2524 - RNA, 20 nt, Artificial Sequence
  HTT spacer sequence ATCN PAM
uguuuuaagucuuugggagu

SEQ ID NO: 2525 - RNA, 20 nt, Artificial Sequence
  HTT spacer sequence ATCN PAM
aucuugaguaguuacgaggc

SEQ ID NO: 2526 - RNA, 20 nt, Artificial Sequence
  HTT spacer sequence ATCN PAM
ugaguaguuacgaggcuuug

SEQ ID NO: 2527 - RNA, 20 nt, Artificial Sequence
  HTT spacer sequence ATCN PAM
ccacugaacuauagcacugg

SEQ ID NO: 2528 - RNA, 20 nt, Artificial Sequence
  HTT spacer sequence ATCN PAM
ggguuugauuccuggcuuag

SEQ ID NO: 2529 - RNA, 20 nt, Artificial Sequence
  HTT spacer sequence ATCN PAM
aacccagaucaccacugaac

SEQ ID NO: 2530 - RNA, 20 nt, Artificial Sequence
  HTT spacer sequence ATCN PAM
auuagaaaguacucauuccc

SEQ ID NO: 2531 - RNA, 20 nt, Artificial Sequence
  HTT spacer sequence ATCN PAM
aaaaauggcaaagguuaccc

SEQ ID NO: 2532 - RNA, 20 nt, Artificial Sequence
  HTT spacer sequence ATCN PAM
ggccaaacagccaauauucc

SEQ ID NO: 2533 - RNA, 20 nt, Artificial Sequence
  HTT spacer sequence ATCN PAM
acuuuuaauuaagcugacuu

SEQ ID NO: 2534 - RNA, 20 nt, Artificial Sequence
  HTT spacer sequence ATCN PAM
acuuccaauuucugggguuu

SEQ ID NO: 2535 - RNA, 20 nt, Artificial Sequence
  HTT spacer sequence ATCN PAM
aucuacuuccaauuucuggg

SEQ ID NO: 2536 - RNA, 20 nt, Artificial Sequence
  HTT spacer sequence ATCN PAM
aaggcucuguucuguuuugc

SEQ ID NO: 2537 - RNA, 20 nt, Artificial Sequence
  HTT spacer sequence ATCN PAM
aaugcaaaacagaacagagc

SEQ ID NO: 2538 - RNA, 20 nt, Artificial Sequence
  HTT spacer sequence ATCN PAM
acuguuuuuuacuugggggu

SEQ ID NO: 2539 - RNA, 20 nt, Artificial Sequence
  HTT spacer sequence ATCN PAM
gaaauuacuucacauagaga

SEQ ID NO: 2540 - RNA, 20 nt, Artificial Sequence
  HTT spacer sequence ATCN PAM
cuaaaguauauuuccugccu

SEQ ID NO: 2541 - RNA, 20 nt, Artificial Sequence
  HTT spacer sequence ATCN PAM
cccccaaaaaagagggaguc

SEQ ID NO: 2542 - RNA, 20 nt, Artificial Sequence
  HTT spacer sequence ATCN PAM
aggaucugguauaaaaacga

SEQ ID NO: 2543 - RNA, 20 nt, Artificial Sequence
  HTT spacer sequence ATCN PAM
uggaucccccccaaaaaaga

SEQ ID NO: 2544 - RNA, 20 nt, Artificial Sequence
  HTT spacer sequence ATCN PAM
gguauaaaaacgagaccuca

SEQ ID NO: 2545 - RNA, 20 nt, Artificial Sequence
  HTT spacer sequence ATCN PAM
uagcacuuugagaggccgag

SEQ ID NO: 2546 - RNA, 20 nt, Artificial Sequence
  HTT spacer sequence ATCN PAM
acccaccucggccucucaaa

SEQ ID NO: 2547 - RNA, 20 nt, Artificial Sequence
  HTT spacer sequence ATCN PAM
cuuuaacccaggaggcggag

SEQ ID NO: 2548 - RNA, 20 nt, Artificial Sequence
  HTT spacer sequence ATCN PAM
caguucacugcaaccuccgc

SEQ ID NO: 2549 - RNA, 20 nt, Artificial Sequence
  HTT spacer sequence ATCN PAM
ccaaaaauuaagggucucuu

SEQ ID NO: 2550 - RNA, 20 nt, Artificial Sequence
  HTT spacer sequence ATCN PAM
guuuugccuuccagcugugc

SEQ ID NO: 2551 - RNA, 20 nt, Artificial Sequence
  HTT spacer sequence ATCN PAM
uaaagccaguaauccaauuu

SEQ ID NO: 2552 - RNA, 20 nt, Artificial Sequence
  HTT spacer sequence ATCN PAM
aauuuagaaacuuagaaagu

SEQ ID NO: 2553 - RNA, 20 nt, Artificial Sequence
  HTT spacer sequence ATCN PAM
uacaacuauuggaucuucuu

SEQ ID NO: 2554 - RNA, 20 nt, Artificial Sequence
  HTT spacer sequence ATCN PAM
aauaguuguaagauuuuuca

SEQ ID NO: 2555 - RNA, 20 nt, Artificial Sequence
  HTT spacer sequence ATCN PAM
ucuucugucugucuguguag

SEQ ID NO: 2556 - RNA, 20 nt, Artificial Sequence
  HTT spacer sequence ATCN PAM
caacacuuugggaggcugag

SEQ ID NO: 2557 - RNA, 20 nt, Artificial Sequence
  HTT spacer sequence ATCN PAM
acccaccucagccucccaaa

SEQ ID NO: 2558 - RNA, 20 nt, Artificial Sequence
  HTT spacer sequence ATCN PAM
ccugaggucaggaguucgag

SEQ ID NO: 2559 - RNA, 20 nt, Artificial Sequence
  HTT spacer sequence ATCN PAM
cagcuacucaggaggcugag

SEQ ID NO: 2560 - RNA, 20 nt, Artificial Sequence
  HTT spacer sequence ATCN PAM
cuugaacucaggagguggag

SEQ ID NO: 2561 - RNA, 20 nt, Artificial Sequence
  HTT spacer sequence ATCN PAM
uggcucagggcaaccuccac

SEQ ID NO: 2562 - RNA, 20 nt, Artificial Sequence
  HTT spacer sequence ATCN PAM
agacuugggugcaguggcac

SEQ ID NO: 2563 - RNA, 20 nt, Artificial Sequence
  HTT spacer sequence ATCN PAM
aauauuuugaaagaaaaaua

SEQ ID NO: 2564 - RNA, 20 nt, Artificial Sequence
  HTT spacer sequence ATCN PAM
uugggaaauaaaaaguuuua

SEQ ID NO: 2565 - RNA, 20 nt, Artificial Sequence
  HTT spacer sequence ATCN PAM
aaccugccuaauuuaggcca

SEQ ID NO: 2566 - RNA, 20 nt, Artificial Sequence
  HTT spacer sequence ATCN PAM
caaaaaaaaaaaaaaaaaag

SEQ ID NO: 2567 - RNA, 20 nt, Artificial Sequence
  HTT spacer sequence ATCN PAM
cgccauuggacuccagccug

SEQ ID NO: 2568 - RNA, 20 nt, Artificial Sequence
  HTT spacer sequence ATCN PAM
aggcucacuacaacgucugc

SEQ ID NO: 2569 - RNA, 20 nt, Artificial Sequence
  HTT spacer sequence ATCN PAM
aagcuacucgggaggcugag

SEQ ID NO: 2570 - RNA, 20 nt, Artificial Sequence
  HTT spacer sequence ATCN PAM
cuacuaaaaauacaaaaauu

SEQ ID NO: 2571 - RNA, 20 nt, Artificial Sequence
  HTT spacer sequence ATCN PAM
ugaggucaggaguucaagac

SEQ ID NO: 2572 - RNA, 20 nt, Artificial Sequence
  HTT spacer sequence ATCN PAM
ccccgccuccgccucccaaa

SEQ ID NO: 2573 - RNA, 20 nt, Artificial Sequence
  HTT spacer sequence ATCN PAM
cagcacuuugggaggcggag

SEQ ID NO: 2574 - RNA, 20 nt, Artificial Sequence
  HTT spacer sequence ATCN PAM
aaugcuccaaaauaauuuga

SEQ ID NO: 2575 - RNA, 20 nt, Artificial Sequence
  HTT spacer sequence ATCN PAM
agaaucuaaugcuccaaaau

SEQ ID NO: 2576 - RNA, 20 nt, Artificial Sequence
  HTT spacer sequence ATCN PAM
ucuuugccuagcugggggca

SEQ ID NO: 2577 - RNA, 20 nt, Artificial Sequence
  HTT spacer sequence ATCN PAM
uuucuuauauaaaauuuauu

SEQ ID NO: 2578 - RNA, 20 nt, Artificial Sequence
  HTT spacer sequence ATCN PAM
cguaugguaaauucuugccc

SEQ ID NO: 2579 - RNA, 20 nt, Artificial Sequence
  HTT spacer sequence ATCN PAM
auggcaugguuggacuuucu

SEQ ID NO: 2580 - RNA, 20 nt, Artificial Sequence
  HTT spacer sequence ATCN PAM
uuuaacaacuuacacaggcc

SEQ ID NO: 2581 - RNA, 20 nt, Artificial Sequence
  HTT spacer sequence ATCN PAM
uuuacuuuuggugcaugaau

SEQ ID NO: 2582 - RNA, 20 nt, Artificial Sequence
  HTT spacer sequence ATCN PAM
uuuaccaaaaacacauuuca

SEQ ID NO: 2583 - RNA, 20 nt, Artificial Sequence
  HTT spacer sequence ATCN PAM
aacuuaaaaacccuuuaacc

SEQ ID NO: 2584 - RNA, 20 nt, Artificial Sequence
  HTT spacer sequence ATCN PAM
uaucuaacuuaaaaacccuu

SEQ ID NO: 2585 - RNA, 20 nt, Artificial Sequence
  HTT spacer sequence ATCN PAM
uguaaaagaaauucugugug

SEQ ID NO: 2586 - RNA, 20 nt, Artificial Sequence
  HTT spacer sequence ATCN PAM
caaaaaaaaaaaauagaaag

SEQ ID NO: 2587 - RNA, 20 nt, Artificial Sequence
  HTT spacer sequence ATCN PAM
cuuaaacccagggggcagag

SEQ ID NO: 2588 - RNA, 20 nt, Artificial Sequence
  HTT spacer sequence ATCN PAM
cagcuacuccagaggcugag

SEQ ID NO: 2589 - RNA, 20 nt, Artificial Sequence
  HTT spacer sequence ATCN PAM
cgaggucaggaguucaagac

SEQ ID NO: 2590 - RNA, 20 nt, Artificial Sequence
  HTT spacer sequence ATCN PAM
gcccgccuccaccucccaaa

SEQ ID NO: 2591 - RNA, 20 nt, Artificial Sequence
  HTT spacer sequence ATCN PAM
uagcacuuugggagguggag

SEQ ID NO: 2592 - RNA, 20 nt, Artificial Sequence
  HTT spacer sequence ATCN PAM
caucacuuugggaggcugag

SEQ ID NO: 2593 - RNA, 20 nt, Artificial Sequence
  HTT spacer sequence ATCN PAM
cuuugggaggcugaggcagg

SEQ ID NO: 2594 - RNA, 20 nt, Artificial Sequence
  HTT spacer sequence ATCN PAM
accugccucagccucccaaa

SEQ ID NO: 2595 - RNA, 20 nt, Artificial Sequence
  HTT spacer sequence ATCN PAM
cgaggucaggagaucgagac

SEQ ID NO: 2596 - RNA, 20 nt, Artificial Sequence
  HTT spacer sequence ATCN PAM
ccugaccucgugaucuaccu

SEQ ID NO: 2597 - RNA, 20 nt, Artificial Sequence
  HTT spacer sequence ATCN PAM
agaccauccgggcguggugg

SEQ ID NO: 2598 - RNA, 20 nt, Artificial Sequence
  HTT spacer sequence ATCN PAM
gggcgugguggcgggcgccu

SEQ ID NO: 2599 - RNA, 20 nt, Artificial Sequence
  HTT spacer sequence ATCN PAM
cagcucacugcaagcucugc

SEQ ID NO: 2600 - RNA, 20 nt, Artificial Sequence
  HTT spacer sequence ATCN PAM
uuaacccauuuuuaacccag

SEQ ID NO: 2601 - RNA, 20 nt, Artificial Sequence
  HTT spacer sequence ATCN PAM
caugcuuuacuuagguaaaa

SEQ ID NO: 2602 - RNA, 20 nt, Artificial Sequence
  HTT spacer sequence ATCN PAM
ccuuuggauugcgauaguaa

SEQ ID NO: 2603 - RNA, 20 nt, Artificial Sequence
  HTT spacer sequence ATCN PAM
aaaggagauaggcugcagca

SEQ ID NO: 2604 - RNA, 20 nt, Artificial Sequence
  HTT spacer sequence ATCN PAM
caauccaaaggagauaggcu

SEQ ID NO: 2605 - RNA, 20 nt, Artificial Sequence
  HTT spacer sequence ATCN PAM
gcuaaccuuuuagcuuaguu

SEQ ID NO: 2606 - RNA, 20 nt, Artificial Sequence
  HTT spacer sequence ATCN PAM
aaucugcuaaccuuuuagcu

SEQ ID NO: 2607 - RNA, 20 nt, Artificial Sequence
  HTT spacer sequence ATCN PAM
uuaguaagauuucaccauuu

SEQ ID NO: 2608 - RNA, 20 nt, Artificial Sequence
  HTT spacer sequence ATCN PAM
uacuaaagaugacuacagug

SEQ ID NO: 2609 - RNA, 20 nt, Artificial Sequence
  HTT spacer sequence ATCN PAM
agggaagcugagcguaaagc

SEQ ID NO: 2610 - RNA, 20 nt, Artificial Sequence
  HTT spacer sequence ATCN PAM
uuggcuaaauuaaucaaggg

SEQ ID NO: 2611 - RNA, 20 nt, Artificial Sequence
  HTT spacer sequence ATCN PAM
ccacgaauuuucaaaagcca

SEQ ID NO: 2612 - RNA, 20 nt, Artificial Sequence
  HTT spacer sequence ATCN PAM
gacugggucugaaagaaacu

SEQ ID NO: 2613 - RNA, 20 nt, Artificial Sequence
  HTT spacer sequence ATCN PAM
aguuagaggccucuuacauc

SEQ ID NO: 2614 - RNA, 20 nt, Artificial Sequence
  HTT spacer sequence ATCN PAM
aggccgguuaauuaccguau

SEQ ID NO: 2615 - RNA, 20 nt, Artificial Sequence
  HTT spacer sequence ATCN PAM
aaucuauuccuggacccauc

SEQ ID NO: 2616 - RNA, 20 nt, Artificial Sequence
  HTT spacer sequence ATCN PAM
auuccuggacccauccauuu

SEQ ID NO: 2617 - RNA, 20 nt, Artificial Sequence
  HTT spacer sequence ATCN PAM
auuuucuuuggcgacuucca

SEQ ID NO: 2618 - RNA, 20 nt, Artificial Sequence
  HTT spacer sequence ATCN PAM
aaacuggguuuggaagucgc

SEQ ID NO: 2619 - RNA, 20 nt, Artificial Sequence
  HTT spacer sequence ATCN PAM
gaaauuugcacaaagaaaac

SEQ ID NO: 2620 - RNA, 20 nt, Artificial Sequence
  HTT spacer sequence ATCN PAM
acaguuuguguuucgagcuc

SEQ ID NO: 2621 - RNA, 20 nt, Artificial Sequence
  HTT spacer sequence ATCN PAM
ccaaaauccaagagaggacu

SEQ ID NO: 2622 - RNA, 20 nt, Artificial Sequence
  HTT spacer sequence ATCN PAM
aagagaggacuuauccauga

SEQ ID NO: 2623 - RNA, 20 nt, Artificial Sequence
  HTT spacer sequence ATCN PAM
augauccccagcugcucuga

SEQ ID NO: 2624 - RNA, 20 nt, Artificial Sequence
  HTT spacer sequence ATCN PAM
uggauaaguccucucuugga

SEQ ID NO: 2625 - RNA, 20 nt, Artificial Sequence
  HTT spacer sequence ATCN PAM
ccagcugcucugagaaauca

SEQ ID NO: 2626 - RNA, 20 nt, Artificial Sequence
  HTT spacer sequence ATCN PAM
auggacacaaguguguccag

SEQ ID NO: 2627 - RNA, 20 nt, Artificial Sequence
  HTT spacer sequence ATCN PAM
aaaguaaagcuucuaaugac

SEQ ID NO: 2628 - RNA, 20 nt, Artificial Sequence
  HTT spacer sequence ATCN PAM
cacuucugacaccauguuaa

SEQ ID NO: 2629 - RNA, 20 nt, Artificial Sequence
  HTT spacer sequence ATCN PAM
uucauugcuuaauuaaacuc

SEQ ID NO: 2630 - RNA, 20 nt, Artificial Sequence
  HTT spacer sequence ATCN PAM
cagcagauucagagagacuc

SEQ ID NO: 2631 - RNA, 20 nt, Artificial Sequence
  HTT spacer sequence ATCN PAM
gcugggauucugaggacugc

SEQ ID NO: 2632 - RNA, 20 nt, Artificial Sequence
  HTT spacer sequence ATCN PAM
cuggagucucucugaaucug

SEQ ID NO: 2633 - RNA, 20 nt, Artificial Sequence
  HTT spacer sequence ATCN PAM
cagcagccauauuucacuca

SEQ ID NO: 2634 - RNA, 20 nt, Artificial Sequence
  HTT spacer sequence ATCN PAM
ugucuaccuauaaguuaggu

SEQ ID NO: 2635 - RNA, 20 nt, Artificial Sequence
  HTT spacer sequence ATCN PAM
acaaagacucaaauacagaa

SEQ ID NO: 2636 - RNA, 20 nt, Artificial Sequence
  HTT spacer sequence ATCN PAM
gguuuuucuuuuggcaaaca

SEQ ID NO: 2637 - RNA, 20 nt, Artificial Sequence
  HTT spacer sequence ATCN PAM
uaaugauuuuuaagcauagg

SEQ ID NO: 2638 - RNA, 20 nt, Artificial Sequence
  HTT spacer sequence ATCN PAM
uuaagaugguaaauuuuaug

SEQ ID NO: 2639 - RNA, 20 nt, Artificial Sequence
  HTT spacer sequence ATCN PAM
aucauucauucaaucaguuu

SEQ ID NO: 2640 - RNA, 20 nt, Artificial Sequence
  HTT spacer sequence ATCN PAM
uucauucaaucaguuugcac

SEQ ID NO: 2641 - RNA, 20 nt, Artificial Sequence
  HTT spacer sequence ATCN PAM
guuugcacaguuaacucuuu

SEQ ID NO: 2642 - RNA, 20 nt, Artificial Sequence
  HTT spacer sequence ATCN PAM
uguaaagcugaagcucuguc

SEQ ID NO: 2643 - RNA, 20 nt, Artificial Sequence
  HTT spacer sequence ATCN PAM
ccugucucaguggaaucaga

SEQ ID NO: 2644 - RNA, 20 nt, Artificial Sequence
  HTT spacer sequence ATCN PAM
gacagcauuugccccuugug

SEQ ID NO: 2645 - RNA, 20 nt, Artificial Sequence
  HTT spacer sequence ATCN PAM
cggcucacugcaaccucugc

SEQ ID NO: 2646 - RNA, 20 nt, Artificial Sequence
  HTT spacer sequence ATCN PAM
uuaguagagacgggguuuca

SEQ ID NO: 2647 - RNA, 20 nt, Artificial Sequence
  HTT spacer sequence ATCN PAM
uggccaacacggugaaaccc

SEQ ID NO: 2648 - RNA, 20 nt, Artificial Sequence
  HTT spacer sequence ATCN PAM
ccugaccucgugaucugccc

SEQ ID NO: 2649 - RNA, 20 nt, Artificial Sequence
  HTT spacer sequence ATCN PAM
cgaggucaggagaugaagac

SEQ ID NO: 2650 - RNA, 20 nt, Artificial Sequence
  HTT spacer sequence ATCN PAM
gcccgccucggccucccaaa

SEQ ID NO: 2651 - RNA, 20 nt, Artificial Sequence
  HTT spacer sequence ATCN PAM
cagcacuuugggaggccgag

SEQ ID NO: 2652 - RNA, 20 nt, Artificial Sequence
  HTT spacer sequence ATCN PAM
auguuguagugugugucaga

SEQ ID NO: 2653 - RNA, 20 nt, Artificial Sequence
  HTT spacer sequence ATCN PAM
aagaacccucucuugggguc

SEQ ID NO: 2654 - RNA, 20 nt, Artificial Sequence
  HTT spacer sequence ATCN PAM
ugcucaagaaagaauucaga

SEQ ID NO: 2655 - RNA, 20 nt, Artificial Sequence
  HTT spacer sequence ATCN PAM
gggcugcucugcccauggag

SEQ ID NO: 2656 - RNA, 20 nt, Artificial Sequence
  HTT spacer sequence ATCN PAM
ccacugcacuccagccuggg

SEQ ID NO: 2657 - RNA, 20 nt, Artificial Sequence
  HTT spacer sequence ATCN PAM
cggcucacugcaagcuccgc

SEQ ID NO: 2658 - RNA, 20 nt, Artificial Sequence
  HTT spacer sequence ATCN PAM
uggcuaacauggugaaaccc

SEQ ID NO: 2659 - RNA, 20 nt, Artificial Sequence
  HTT spacer sequence ATCN PAM
ccugaccuugugauccgccc

SEQ ID NO: 2660 - RNA, 20 nt, Artificial Sequence
  HTT spacer sequence ATCN PAM
caaggucaggagauugagac

SEQ ID NO: 2661 - RNA, 20 nt, Artificial Sequence
  HTT spacer sequence ATCN PAM
gcccgccucagccucccaaa

SEQ ID NO: 2662 - RNA, 20 nt, Artificial Sequence
  HTT spacer sequence ATCN PAM
cagcacuuugggaggcugag

SEQ ID NO: 2663 - RNA, 20 nt, Artificial Sequence
  HTT spacer sequence ATCN PAM
gcagggcgugguggcucacg

SEQ ID NO: 2664 - RNA, 20 nt, Artificial Sequence
  HTT spacer sequence ATCN PAM
agaaauaaucagcagggcgu

SEQ ID NO: 2665 - RNA, 20 nt, Artificial Sequence
  HTT spacer sequence ATCN PAM
accucuuguuuagcauauaa

SEQ ID NO: 2666 - RNA, 20 nt, Artificial Sequence
  HTT spacer sequence ATCN PAM
cagcacuuugggaggccaag

SEQ ID NO: 2667 - RNA, 20 nt, Artificial Sequence
  HTT spacer sequence ATCN PAM
gcccgccuuggccucccaaa

SEQ ID NO: 2668 - RNA, 20 nt, Artificial Sequence
  HTT spacer sequence ATCN PAM
cuacuaaaaauaaaaaauua

SEQ ID NO: 2669 - RNA, 20 nt, Artificial Sequence
  HTT spacer sequence ATCN PAM
cuugaacccgggaagccgag

SEQ ID NO: 2670 - RNA, 20 nt, Artificial Sequence
  HTT spacer sequence ATCN PAM
cggcucaccacaaccucggc

SEQ ID NO: 2671 - RNA, 20 nt, Artificial Sequence
  HTT spacer sequence ATCN PAM
guaaacugucauggggcugg

SEQ ID NO: 2672 - RNA, 20 nt, Artificial Sequence
  HTT spacer sequence ATCN PAM
cugguuguucucacagcuca

SEQ ID NO: 2673 - RNA, 20 nt, Artificial Sequence
  HTT spacer sequence ATCN PAM
cuuucauugccaucuugguu

SEQ ID NO: 2674 - RNA, 20 nt, Artificial Sequence
  HTT spacer sequence ATCN PAM
ugguuuuggugggcuuuggc

SEQ ID NO: 2675 - RNA, 20 nt, Artificial Sequence
  HTT spacer sequence ATCN PAM
guaaggucuuugugaccugu

SEQ ID NO: 2676 - RNA, 20 nt, Artificial Sequence
  HTT spacer sequence ATCN PAM
ugugucagccuccuaccuca

SEQ ID NO: 2677 - RNA, 20 nt, Artificial Sequence
  HTT spacer sequence ATCN PAM
ugugacuaugaaugccuaac

SEQ ID NO: 2678 - RNA, 20 nt, Artificial Sequence
  HTT spacer sequence ATCN PAM
ugaauaggggcgggguaaaa

SEQ ID NO: 2679 - RNA, 20 nt, Artificial Sequence
  HTT spacer sequence ATCN PAM
uuuuacauuucuuuuuuuuu

SEQ ID NO: 2680 - RNA, 20 nt, Artificial Sequence
  HTT spacer sequence ATCN PAM
uaccacagcacuccagccug

SEQ ID NO: 2681 - RNA, 20 nt, Artificial Sequence
  HTT spacer sequence ATCN PAM
cggcucacugcaaucuccac

SEQ ID NO: 2682 - RNA, 20 nt, Artificial Sequence
  HTT spacer sequence ATCN PAM
ccaccuccgagguuccagcg

SEQ ID NO: 2683 - RNA, 20 nt, Artificial Sequence
  HTT spacer sequence ATCN PAM
cuggaaccucggagguggag

SEQ ID NO: 2684 - RNA, 20 nt, Artificial Sequence
  HTT spacer sequence ATCN PAM
uacugggcuaauuuuugugu

SEQ ID NO: 2685 - RNA, 20 nt, Artificial Sequence
  HTT spacer sequence ATCN PAM
cuacuaaaaacacaaaaauu

SEQ ID NO: 2686 - RNA, 20 nt, Artificial Sequence
  HTT spacer sequence ATCN PAM
gccugggcaacauggggaaa

SEQ ID NO: 2687 - RNA, 20 nt, Artificial Sequence
  HTT spacer sequence ATCN PAM
caaacuccugggcuuaagca

SEQ ID NO: 2688 - RNA, 20 nt, Artificial Sequence
  HTT spacer sequence ATCN PAM
caacacuuugggaggccaac

SEQ ID NO: 2689 - RNA, 20 nt, Artificial Sequence
  HTT spacer sequence ATCN PAM
uugcguccuugcagaugaau

SEQ ID NO: 2690 - RNA, 20 nt, Artificial Sequence
  HTT spacer sequence ATCN PAM
gcaaggacgcaaggauggca

SEQ ID NO: 2691 - RNA, 20 nt, Artificial Sequence
  HTT spacer sequence ATCN PAM
uaaccuagcauaguagguag

SEQ ID NO: 2692 - RNA, 20 nt, Artificial Sequence
  HTT spacer sequence ATCN PAM
ggcuguuaacgugccucacu

SEQ ID NO: 2693 - RNA, 20 nt, Artificial Sequence
  HTT spacer sequence ATCN PAM
cuagagucucccugaaucug

SEQ ID NO: 2694 - RNA, 20 nt, Artificial Sequence
  HTT spacer sequence ATCN PAM
gcugugauucugggaccugc

SEQ ID NO: 2695 - RNA, 20 nt, Artificial Sequence
  HTT spacer sequence ATCN PAM
cagcagauucagggagacuc

SEQ ID NO: 2696 - RNA, 20 nt, Artificial Sequence
  HTT spacer sequence ATCN PAM
aggaaaaaaaaaacaauuca

SEQ ID NO: 2697 - RNA, 20 nt, Artificial Sequence
  HTT spacer sequence ATCN PAM
gcuaaacucuguucaauuca

SEQ ID NO: 2698 - RNA, 20 nt, Artificial Sequence
  HTT spacer sequence ATCN PAM
ggccacugcacuccagccug

SEQ ID NO: 2699 - RNA, 20 nt, Artificial Sequence
  HTT spacer sequence ATCN PAM
cggcccacugcaaccuccac

SEQ ID NO: 2700 - RNA, 20 nt, Artificial Sequence
  HTT spacer sequence ATCN PAM
cagcuacucaggaggcugag

SEQ ID NO: 2701 - RNA, 20 nt, Artificial Sequence
  HTT spacer sequence ATCN PAM
cuacuaaaaauacaaaaauu

SEQ ID NO: 2702 - RNA, 20 nt, Artificial Sequence
  HTT spacer sequence ATCN PAM
cagcauuuugggaggccaag

SEQ ID NO: 2703 - RNA, 20 nt, Artificial Sequence
  HTT spacer sequence ATCN PAM
ucuugauauuaauguugcuu

SEQ ID NO: 2704 - RNA, 20 nt, Artificial Sequence
  HTT spacer sequence ATCN PAM
agaagaugaggccaggcgca

SEQ ID NO: 2705 - RNA, 20 nt, Artificial Sequence
  HTT spacer sequence ATCN PAM
uugucccuguguuuuuuguu

SEQ ID NO: 2706 - RNA, 20 nt, Artificial Sequence
  HTT spacer sequence ATCN PAM
cgccacugaacuccagccug

SEQ ID NO: 2707 - RNA, 20 nt, Artificial Sequence
  HTT spacer sequence ATCN PAM
cagcucacugcaaccucugu

SEQ ID NO: 2708 - RNA, 20 nt, Artificial Sequence
  HTT spacer sequence ATCN PAM
cuggaacccaggagacagag

SEQ ID NO: 2709 - RNA, 20 nt, Artificial Sequence
  HTT spacer sequence ATCN PAM
aaagacccaggaacacagcu

SEQ ID NO: 2710 - RNA, 20 nt, Artificial Sequence
  HTT spacer sequence ATCN PAM
cacuuagcauguacgcacag

SEQ ID NO: 2711 - RNA, 20 nt, Artificial Sequence
  HTT spacer sequence ATCN PAM
uuugaaagacauugccaagu

SEQ ID NO: 2712 - RNA, 20 nt, Artificial Sequence
  HTT spacer sequence ATCN PAM
cuuuucugaagagugacuug

SEQ ID NO: 2713 - RNA, 20 nt, Artificial Sequence
  HTT spacer sequence ATCN PAM
cgguuggugucucuucaauc

SEQ ID NO: 2714 - RNA, 20 nt, Artificial Sequence
  HTT spacer sequence ATCN PAM
uuccucacacuuuucuuggg

SEQ ID NO: 2715 - RNA, 20 nt, Artificial Sequence
  HTT spacer sequence ATCN PAM
ugagucuacuacauuuacac

SEQ ID NO: 2716 - RNA, 20 nt, Artificial Sequence
  HTT spacer sequence ATCN PAM
uuagaaacaggaucucauuu

SEQ ID NO: 2717 - RNA, 20 nt, Artificial Sequence
  HTT spacer sequence ATCN PAM
uguuucuaaagaugcuuuaa

SEQ ID NO: 2718 - RNA, 20 nt, Artificial Sequence
  HTT spacer sequence ATCN PAM
cauuuuguugcccaggcuag

SEQ ID NO: 2719 - RNA, 20 nt, Artificial Sequence
  HTT spacer sequence ATCN PAM
ugccaccaaacucuagccug

SEQ ID NO: 2720 - RNA, 20 nt, Artificial Sequence
  HTT spacer sequence ATCN PAM
cuugagcccaggaguaugag

SEQ ID NO: 2721 - RNA, 20 nt, Artificial Sequence
  HTT spacer sequence ATCN PAM
uuccaccucugaaaccccaa

SEQ ID NO: 2722 - RNA, 20 nt, Artificial Sequence
  HTT spacer sequence ATCN PAM
caggugugcacccucaaccu

SEQ ID NO: 2723 - RNA, 20 nt, Artificial Sequence
  HTT spacer sequence ATCN PAM
ucacaggugugcacccucaa

SEQ ID NO: 2724 - RNA, 20 nt, Artificial Sequence
  HTT spacer sequence ATCN PAM
gccuaaauaauuucuuuuua

SEQ ID NO: 2725 - RNA, 20 nt, Artificial Sequence
  HTT spacer sequence ATCN PAM
agcugcagacauacacaagc

SEQ ID NO: 2726 - RNA, 20 nt, Artificial Sequence
  HTT spacer sequence ATCN PAM
gccuggccccagguagccuu

SEQ ID NO: 2727 - RNA, 20 nt, Artificial Sequence
  HTT spacer sequence ATCN PAM
aacauggcggcuccaucuuc

SEQ ID NO: 2728 - RNA, 20 nt, Artificial Sequence
  HTT spacer sequence ATCN PAM
ucccuuuccuugucaaccau

SEQ ID NO: 2729 - RNA, 20 nt, Artificial Sequence
  HTT spacer sequence ATCN PAM
uugggcccuguguaaauuag

SEQ ID NO: 2730 - RNA, 20 nt, Artificial Sequence
  HTT spacer sequence ATCN PAM
auguucuugauuuccuuggc

SEQ ID NO: 2731 - RNA, 20 nt, Artificial Sequence
  HTT spacer sequence ATCN PAM
agaacauagauacacacgga

SEQ ID NO: 2732 - RNA, 20 nt, Artificial Sequence
  HTT spacer sequence ATCN PAM
ugaugacauguucccaagau

SEQ ID NO: 2733 - RNA, 20 nt, Artificial Sequence
  HTT spacer sequence ATCN PAM
ggauuuccugaggcuguguc

SEQ ID NO: 2734 - RNA, 20 nt, Artificial Sequence
  HTT spacer sequence ATCN PAM
ugggaacaugucaucaggau

SEQ ID NO: 2735 - RNA, 20 nt, Artificial Sequence
  HTT spacer sequence ATCN PAM
ccgauaagccuuuccaaagg

SEQ ID NO: 2736 - RNA, 20 nt, Artificial Sequence
  HTT spacer sequence ATCN PAM
gagauucaaaagaaugcaac

SEQ ID NO: 2737 - RNA, 20 nt, Artificial Sequence
  HTT spacer sequence ATCN PAM
gaauaugcgucuauugacug

SEQ ID NO: 2738 - RNA, 20 nt, Artificial Sequence
  HTT spacer sequence ATCN PAM
acccaccuccgccucccaaa

SEQ ID NO: 2739 - RNA, 20 nt, Artificial Sequence
  HTT spacer sequence ATCN PAM
ccugaggucaggaguuugag

SEQ ID NO: 2740 - RNA, 20 nt, Artificial Sequence
  HTT spacer sequence ATCN PAM
cagcuacucgggaggcugag

SEQ ID NO: 2741 - RNA, 20 nt, Artificial Sequence
  HTT spacer sequence ATCN PAM
cagcucacugcaaccucuuc

SEQ ID NO: 2742 - RNA, 20 nt, Artificial Sequence
  HTT spacer sequence ATCN PAM
cagaaaaaaaaaaaaaaggc

SEQ ID NO: 2743 - RNA, 20 nt, Artificial Sequence
  HTT spacer sequence ATCN PAM
cagcacuuugggaagccgag

SEQ ID NO: 2744 - RNA, 20 nt, Artificial Sequence
  HTT spacer sequence ATCN PAM
ccugacuuugugaccugccc

SEQ ID NO: 2745 - RNA, 20 nt, Artificial Sequence
  HTT spacer sequence ATCN PAM
uggcuaacaugaugaaaccc

SEQ ID NO: 2746 - RNA, 20 nt, Artificial Sequence
  HTT spacer sequence ATCN PAM
uguuagccaggauggucuca

SEQ ID NO: 2747 - RNA, 20 nt, Artificial Sequence
  HTT spacer sequence ATCN PAM
cuacuaaaaaauacaaaaaa

SEQ ID NO: 2748 - RNA, 20 nt, Artificial Sequence
  HTT spacer sequence ATCN PAM
cggcucacugcaagcuccgc

SEQ ID NO: 2749 - RNA, 20 nt, Artificial Sequence
  HTT spacer sequence ATCN PAM
caccacugcacuccagcccg

SEQ ID NO: 2750 - RNA, 20 nt, Artificial Sequence
  HTT spacer sequence ATCN PAM
caaauuaaaaaaaaaaaaaa

SEQ ID NO: 2751 - RNA, 20 nt, Artificial Sequence
  HTT spacer sequence ATCN PAM
aucucagugagcagaaggau

SEQ ID NO: 2752 - RNA, 20 nt, Artificial Sequence
  HTT spacer sequence ATCN PAM
cagugagcagaaggaugacu

SEQ ID NO: 2753 - RNA, 20 nt, Artificial Sequence
  HTT spacer sequence ATCN PAM
uucugcucacugagauagau

SEQ ID NO: 2754 - RNA, 20 nt, Artificial Sequence
  HTT spacer sequence ATCN PAM
cugaagcuaaaggggaaguu

SEQ ID NO: 2755 - RNA, 20 nt, Artificial Sequence
  HTT spacer sequence ATCN PAM
cagcauuucgggaggcugag

SEQ ID NO: 2756 - RNA, 20 nt, Artificial Sequence
  HTT spacer sequence ATCN PAM
ccugcacccucccuuccccu

SEQ ID NO: 2757 - RNA, 20 nt, Artificial Sequence
  HTT spacer sequence ATCN PAM
aaguccgggcucacaccaga

SEQ ID NO: 2758 - RNA, 20 nt, Artificial Sequence
  HTT spacer sequence ATCN PAM
caugcugugccuagaaucga

SEQ ID NO: 2759 - RNA, 20 nt, Artificial Sequence
  HTT spacer sequence ATCN PAM
gcgcacaggagaagugaagu

SEQ ID NO: 2760 - RNA, 20 nt, Artificial Sequence
  HTT spacer sequence ATCN PAM
ccacugugcacugcugaggg

SEQ ID NO: 2761 - RNA, 20 nt, Artificial Sequence
  HTT spacer sequence ATCN PAM
uuagaacagacucuugcggu

SEQ ID NO: 2762 - RNA, 20 nt, Artificial Sequence
  HTT spacer sequence ATCN PAM
uccaagugagaagugaaagg

SEQ ID NO: 2763 - RNA, 20 nt, Artificial Sequence
  HTT spacer sequence ATCN PAM
uguguugugugguauguggg

SEQ ID NO: 2764 - RNA, 20 nt, Artificial Sequence
  HTT spacer sequence ATCN PAM
ucuaguaaggaaacaagugg

SEQ ID NO: 2765 - RNA, 20 nt, Artificial Sequence
  HTT spacer sequence ATCN PAM
cuuuaguaaaagguccgguu

SEQ ID NO: 2766 - RNA, 20 nt, Artificial Sequence
  HTT spacer sequence ATCN PAM
uccugauccuccuccccagg

SEQ ID NO: 2767 - RNA, 20 nt, Artificial Sequence
  HTT spacer sequence ATCN PAM
ggaagaucucuuuaguaaaa

SEQ ID NO: 2768 - RNA, 20 nt, Artificial Sequence
  HTT spacer sequence ATCN PAM
uccuccccaggccaggggag

SEQ ID NO: 2769 - RNA, 20 nt, Artificial Sequence
  HTT spacer sequence ATCN PAM
uguaacuagacuaugaaugu

SEQ ID NO: 2770 - RNA, 20 nt, Artificial Sequence
  HTT spacer sequence ATCN PAM
cuguaagggucaguugaagu

SEQ ID NO: 2771 - RNA, 20 nt, Artificial Sequence
  HTT spacer sequence ATCN PAM
cuccccaugaaagaaauaua

SEQ ID NO: 2772 - RNA, 20 nt, Artificial Sequence
  HTT spacer sequence ATCN PAM
auaucccuccccaugaaaga

SEQ ID NO: 2773 - RNA, 20 nt, Artificial Sequence
  HTT spacer sequence ATCN PAM
gggaucagcagagguguuuc

SEQ ID NO: 2774 - RNA, 20 nt, Artificial Sequence
  HTT spacer sequence ATCN PAM
cugauccauaucccucccca

SEQ ID NO: 2775 - RNA, 20 nt, Artificial Sequence
  HTT spacer sequence ATCN PAM
gcagagguguuucagucccg

SEQ ID NO: 2776 - RNA, 20 nt, Artificial Sequence
  HTT spacer sequence ATCN PAM
ugagccacugucuugcugcu

SEQ ID NO: 2777 - RNA, 20 nt, Artificial Sequence
  HTT spacer sequence ATCN PAM
uaagacuaguggaguacacc

SEQ ID NO: 2778 - RNA, 20 nt, Artificial Sequence
  HTT spacer sequence ATCN PAM
cugucguccuacaagaacca

SEQ ID NO: 2779 - RNA, 20 nt, Artificial Sequence
  HTT spacer sequence ATCN PAM
gucaguggcagagccagccu

SEQ ID NO: 2780 - RNA, 20 nt, Artificial Sequence
  HTT spacer sequence ATCN PAM
agaugagacagagcuggugg

SEQ ID NO: 2781 - RNA, 20 nt, Artificial Sequence
  HTT spacer sequence ATCN PAM
agauggggccuucuguccag

SEQ ID NO: 2782 - RNA, 20 nt, Artificial Sequence
  HTT spacer sequence ATCN PAM
gccaggccguuugagcugcc

SEQ ID NO: 2783 - RNA, 20 nt, Artificial Sequence
  HTT spacer sequence ATCN PAM
cucccaggugacucucuucc

SEQ ID NO: 2784 - RNA, 20 nt, Artificial Sequence
  HTT spacer sequence ATCN PAM
ucccaccucagccuccccaa

SEQ ID NO: 2785 - RNA, 20 nt, Artificial Sequence
  HTT spacer sequence ATCN PAM
cagcgcuuggggaggcugag

SEQ ID NO: 2786 - RNA, 20 nt, Artificial Sequence
  HTT spacer sequence ATCN PAM
uuuauuggccagcauggggg

SEQ ID NO: 2787 - RNA, 20 nt, Artificial Sequence
  HTT spacer sequence ATCN PAM
ucuuuuauuggccagcaugg

SEQ ID NO: 2788 - RNA, 20 nt, Artificial Sequence
  HTT spacer sequence ATCN PAM
ccuccauaaaaucaucuuuu

SEQ ID NO: 2789 - RNA, 20 nt, Artificial Sequence
  HTT spacer sequence ATCN PAM
ugagaacuuccugggugagc

SEQ ID NO: 2790 - RNA, 20 nt, Artificial Sequence
  HTT spacer sequence ATCN PAM
uuuguucuaaugaggugacu

SEQ ID NO: 2791 - RNA, 20 nt, Artificial Sequence
  HTT spacer sequence ATCN PAM
aggagccaccaagagucacc

SEQ ID NO: 2792 - RNA, 20 nt, Artificial Sequence
  HTT spacer sequence ATCN PAM
ccagaaagaucaagccagag

SEQ ID NO: 2793 - RNA, 20 nt, Artificial Sequence
  HTT spacer sequence ATCN PAM
uucuggugauucacuccuau

SEQ ID NO: 2794 - RNA, 20 nt, Artificial Sequence
  HTT spacer sequence ATCN PAM
agccagaguuagaagcagaa

SEQ ID NO: 2795 - RNA, 20 nt, Artificial Sequence
  HTT spacer sequence ATCN PAM
caaaaaaaaaaaaaaaaacu

SEQ ID NO: 2796 - RNA, 20 nt, Artificial Sequence
  HTT spacer sequence ATCN PAM
cagcucacuacaagcucugc

SEQ ID NO: 2797 - RNA, 20 nt, Artificial Sequence
  HTT spacer sequence ATCN PAM
cuugaaccugggaggcagag

SEQ ID NO: 2798 - RNA, 20 nt, Artificial Sequence
  HTT spacer sequence ATCN PAM
ggcuaauuuuuguauuuuua

SEQ ID NO: 2799 - RNA, 20 nt, Artificial Sequence
  HTT spacer sequence ATCN PAM
caagguaaggaguuugaggc

SEQ ID NO: 2800 - RNA, 20 nt, Artificial Sequence
  HTT spacer sequence ATCN PAM
gccugccucagccucccaaa

SEQ ID NO: 2801 - RNA, 20 nt, Artificial Sequence
  HTT spacer sequence ATCN PAM
cagcacuuugggaggcugag

SEQ ID NO: 2802 - RNA, 20 nt, Artificial Sequence
  HTT spacer sequence ATCN PAM
acuaacuaaccaaauaaaua

SEQ ID NO: 2803 - RNA, 20 nt, Artificial Sequence
  HTT spacer sequence ATCN PAM
aaccuaauuaagaaacuaaa

SEQ ID NO: 2804 - RNA, 20 nt, Artificial Sequence
  HTT spacer sequence ATCN PAM
uguaaagagagaaagauaau

SEQ ID NO: 2805 - RNA, 20 nt, Artificial Sequence
  HTT spacer sequence ATCN PAM
uucucucuuuacaugauuuu

SEQ ID NO: 2806 - RNA, 20 nt, Artificial Sequence
  HTT spacer sequence ATCN PAM
aaguuuuauguuuauguuca

SEQ ID NO: 2807 - RNA, 20 nt, Artificial Sequence
  HTT spacer sequence ATCN PAM
aaacuaaccacaaguaaaau

SEQ ID NO: 2808 - RNA, 20 nt, Artificial Sequence
  HTT spacer sequence ATCN PAM
uauuuaggcuucuauuuuac

SEQ ID NO: 2809 - RNA, 20 nt, Artificial Sequence
  HTT spacer sequence ATCN PAM
gacaugggaauguuagcaca

SEQ ID NO: 2810 - RNA, 20 nt, Artificial Sequence
  HTT spacer sequence ATCN PAM
auuuauacuugcuuuauaaa

SEQ ID NO: 2811 - RNA, 20 nt, Artificial Sequence
  HTT spacer sequence ATCN PAM
uauaaagaccuuauacaaaa

SEQ ID NO: 2812 - RNA, 20 nt, Artificial Sequence
  HTT spacer sequence ATCN PAM
cuuuuaugaauacaaaaccc

SEQ ID NO: 2813 - RNA, 20 nt, Artificial Sequence
  HTT spacer sequence ATCN PAM
uaacauagugggguuuauuu

SEQ ID NO: 2814 - RNA, 20 nt, Artificial Sequence
  HTT spacer sequence ATCN PAM
augcauuauugaaauaaacc

SEQ ID NO: 2815 - RNA, 20 nt, Artificial Sequence
  HTT spacer sequence ATCN PAM
auuauauuguguuacugaau

SEQ ID NO: 2816 - RNA, 20 nt, Artificial Sequence
  HTT spacer sequence ATCN PAM
ugugaauauacccaaagaaa

SEQ ID NO: 2817 - RNA, 20 nt, Artificial Sequence
  HTT spacer sequence ATCN PAM
auuuuuucuuuggguauauu

SEQ ID NO: 2818 - RNA, 20 nt, Artificial Sequence
  HTT spacer sequence ATCN PAM
augaaaauaaucuauuuuuu

SEQ ID NO: 2819 - RNA, 20 nt, Artificial Sequence
  HTT spacer sequence ATCN PAM
ugcuaaagaaggaguaacua

SEQ ID NO: 2820 - RNA, 20 nt, Artificial Sequence
  HTT spacer sequence ATCN PAM
gcccagaaggcaucauuuua

SEQ ID NO: 2821 - RNA, 20 nt, Artificial Sequence
  HTT spacer sequence ATCN PAM
uuuuacccgauaagggcaca

SEQ ID NO: 2822 - RNA, 20 nt, Artificial Sequence
  HTT spacer sequence ATCN PAM
gguaaaaugaugccuucugg

SEQ ID NO: 2823 - RNA, 20 nt, Artificial Sequence
  HTT spacer sequence ATCN PAM
ucuuauuccuaauuuuaaca

SEQ ID NO: 2824 - RNA, 20 nt, Artificial Sequence
  HTT spacer sequence ATCN PAM
cuugaaccugggaggcgggg

SEQ ID NO: 2825 - RNA, 20 nt, Artificial Sequence
  HTT spacer sequence ATCN PAM
cuacuaaaauacaaaaaaaa

SEQ ID NO: 2826 - RNA, 20 nt, Artificial Sequence
  HTT spacer sequence ATCN PAM
caguacgugagguugggagu

SEQ ID NO: 2827 - RNA, 20 nt, Artificial Sequence
  HTT spacer sequence ATCN PAM
uuaauacugaugcuuauuga

SEQ ID NO: 2828 - RNA, 20 nt, Artificial Sequence
  HTT spacer sequence ATCN PAM
guauuaaggauaauguugaa

SEQ ID NO: 2829 - RNA, 20 nt, Artificial Sequence
  HTT spacer sequence ATCN PAM
agagguaaccccauaguaag

SEQ ID NO: 2830 - RNA, 20 nt, Artificial Sequence
  HTT spacer sequence ATCN PAM
auaauaaguugaaaauauaa

SEQ ID NO: 2831 - RNA, 20 nt, Artificial Sequence
  HTT spacer sequence ATCN PAM
uagcugagcccagccugccu

SEQ ID NO: 2832 - RNA, 20 nt, Artificial Sequence
  HTT spacer sequence ATCN PAM
cacagcagcacagucuacug

SEQ ID NO: 2833 - RNA, 20 nt, Artificial Sequence
  HTT spacer sequence ATCN PAM
gcuguuugcccuugugacug

SEQ ID NO: 2834 - RNA, 20 nt, Artificial Sequence
  HTT spacer sequence ATCN PAM
cuagccuggggaaagaucaa

SEQ ID NO: 2835 - RNA, 20 nt, Artificial Sequence
  HTT spacer sequence ATCN PAM
uuccccaggcuagugaugug

SEQ ID NO: 2836 - RNA, 20 nt, Artificial Sequence
  HTT spacer sequence ATCN PAM
aaguugaaaauuugaagugu

SEQ ID NO: 2837 - RNA, 20 nt, Artificial Sequence
  HTT spacer sequence ATCN PAM
ucaagucaaaaaauuuuagu

SEQ ID NO: 2838 - RNA, 20 nt, Artificial Sequence
  HTT spacer sequence ATCN PAM
agucaaaaaauuuuaguuga

SEQ ID NO: 2839 - RNA, 20 nt, Artificial Sequence
  HTT spacer sequence ATCN PAM
uuauuuucaggaggaacuuc

SEQ ID NO: 2840 - RNA, 20 nt, Artificial Sequence
  HTT spacer sequence ATCN PAM
auguacauggaaguuccucc

SEQ ID NO: 2841 - RNA, 20 nt, Artificial Sequence
  HTT spacer sequence ATCN PAM
uccgucaucaauguacaugg

SEQ ID NO: 2842 - RNA, 20 nt, Artificial Sequence
  HTT spacer sequence ATCN PAM
guuucuaucauccuaaugaa

SEQ ID NO: 2843 - RNA, 20 nt, Artificial Sequence
  HTT spacer sequence ATCN PAM
uccuaaugaacauaaugaau

SEQ ID NO: 2844 - RNA, 20 nt, Artificial Sequence
  HTT spacer sequence ATCN PAM
uaaugaacauaaugaauaaa

SEQ ID NO: 2845 - RNA, 20 nt, Artificial Sequence
  HTT spacer sequence ATCN PAM
agacaaacauaaacauuaac

SEQ ID NO: 2846 - RNA, 20 nt, Artificial Sequence
  HTT spacer sequence ATCN PAM
gcaaauacccgcaaagcaga

SEQ ID NO: 2847 - RNA, 20 nt, Artificial Sequence
  HTT spacer sequence ATCN PAM
ggacaagguaucuggaaggc

SEQ ID NO: 2848 - RNA, 20 nt, Artificial Sequence
  HTT spacer sequence ATCN PAM
ggaaggcugagcuaagccuc

SEQ ID NO: 2849 - RNA, 20 nt, Artificial Sequence
  HTT spacer sequence ATCN PAM
caccauugcacuccagccug

SEQ ID NO: 2850 - RNA, 20 nt, Artificial Sequence
  HTT spacer sequence ATCN PAM
cagcucacugcaaccuccac

SEQ ID NO: 2851 - RNA, 20 nt, Artificial Sequence
  HTT spacer sequence ATCN PAM
cuugaaccagggagguggag

SEQ ID NO: 2852 - RNA, 20 nt, Artificial Sequence
  HTT spacer sequence ATCN PAM
cagcuacucgggaggcugag

SEQ ID NO: 2853 - RNA, 20 nt, Artificial Sequence
  HTT spacer sequence ATCN PAM
gcuggguguaguggcgggag

SEQ ID NO: 2854 - RNA, 20 nt, Artificial Sequence
  HTT spacer sequence ATCN PAM
uggccaacauggugaaaccc

SEQ ID NO: 2855 - RNA, 20 nt, Artificial Sequence
  HTT spacer sequence ATCN PAM
agaccauccuggccaacaug

SEQ ID NO: 2856 - RNA, 20 nt, Artificial Sequence
  HTT spacer sequence ATCN PAM
cuugacgucaugaucugucc

SEQ ID NO: 2857 - RNA, 20 nt, Artificial Sequence
  HTT spacer sequence ATCN PAM
ugacgucaagagaucgagac

SEQ ID NO: 2858 - RNA, 20 nt, Artificial Sequence
  HTT spacer sequence ATCN PAM
guccaccucggccucccaaa

SEQ ID NO: 2859 - RNA, 20 nt, Artificial Sequence
  HTT spacer sequence ATCN PAM
cagcacuuugggaggccgag

SEQ ID NO: 2860 - RNA, 20 nt, Artificial Sequence
  HTT spacer sequence ATCN PAM
agcgcaugccaaguuuaggg

SEQ ID NO: 2861 - RNA, 20 nt, Artificial Sequence
  HTT spacer sequence ATCN PAM
uucuucuuggguggggugga

SEQ ID NO: 2862 - RNA, 20 nt, Artificial Sequence
  HTT spacer sequence ATCN PAM
auauuucagagcugguuuac

SEQ ID NO: 2863 - RNA, 20 nt, Artificial Sequence
  HTT spacer sequence ATCN PAM
cuucauaucaaccacaucca

SEQ ID NO: 2864 - RNA, 20 nt, Artificial Sequence
  HTT spacer sequence ATCN PAM
accacauccaguuccucaaa

SEQ ID NO: 2865 - RNA, 20 nt, Artificial Sequence
  HTT spacer sequence ATCN PAM
aguuccucaaaacuggaacu

SEQ ID NO: 2866 - RNA, 20 nt, Artificial Sequence
  HTT spacer sequence ATCN PAM
aaguuccaguuuugaggaac

SEQ ID NO: 2867 - RNA, 20 nt, Artificial Sequence
  HTT spacer sequence ATCN PAM
uaauccaaguuccaguuuug

SEQ ID NO: 2868 - RNA, 20 nt, Artificial Sequence
  HTT spacer sequence ATCN PAM
ucuccggaagaagauaauac

SEQ ID NO: 2869 - RNA, 20 nt, Artificial Sequence
  HTT spacer sequence ATCN PAM
ucuuccggagaggauuuuug

SEQ ID NO: 2870 - RNA, 20 nt, Artificial Sequence
  HTT spacer sequence ATCN PAM
cguuccugguaauuuguguu

SEQ ID NO: 2871 - RNA, 20 nt, Artificial Sequence
  HTT spacer sequence ATCN PAM
ggccucauaucacguuccug

SEQ ID NO: 2872 - RNA, 20 nt, Artificial Sequence
  HTT spacer sequence ATCN PAM
aucaggccucauaucacguu

SEQ ID NO: 2873 - RNA, 20 nt, Artificial Sequence
  HTT spacer sequence ATCN PAM
aucuagugucuagauaaugg

SEQ ID NO: 2874 - RNA, 20 nt, Artificial Sequence
  HTT spacer sequence ATCN PAM
agugucuagauaauggagau

SEQ ID NO: 2875 - RNA, 20 nt, Artificial Sequence
  HTT spacer sequence ATCN PAM
agacacuagauagauucuag

SEQ ID NO: 2876 - RNA, 20 nt, Artificial Sequence
  HTT spacer sequence ATCN PAM
ccauuaucuagacacuagau

SEQ ID NO: 2877 - RNA, 20 nt, Artificial Sequence
  HTT spacer sequence ATCN PAM
gaaacuauaaaaugugacaa

SEQ ID NO: 2878 - RNA, 20 nt, Artificial Sequence
  HTT spacer sequence ATCN PAM
gacuuacuuccuaguucucu

SEQ ID NO: 2879 - RNA, 20 nt, Artificial Sequence
  HTT spacer sequence ATCN PAM
uuucuucugcauuuuccauu

SEQ ID NO: 2880 - RNA, 20 nt, Artificial Sequence
  HTT spacer sequence ATCN PAM
ucucaccauauccuuucuuc

SEQ ID NO: 2881 - RNA, 20 nt, Artificial Sequence
  HTT spacer sequence ATCN PAM
aauauacauuuauuuggagu

SEQ ID NO: 2882 - RNA, 20 nt, Artificial Sequence
  HTT spacer sequence ATCN PAM
guuucgaagccucucaguca

SEQ ID NO: 2883 - RNA, 20 nt, Artificial Sequence
  HTT spacer sequence ATCN PAM
guucacaaauucaaagccca

SEQ ID NO: 2884 - RNA, 20 nt, Artificial Sequence
  HTT spacer sequence ATCN PAM
auacugugaaagcaagucca

SEQ ID NO: 2885 - RNA, 20 nt, Artificial Sequence
  HTT spacer sequence ATCN PAM
acaauacacaggacaggcau

SEQ ID NO: 2886 - RNA, 20 nt, Artificial Sequence
  HTT spacer sequence ATCN PAM
uaugccuguccuguguauug

SEQ ID NO: 2887 - RNA, 20 nt, Artificial Sequence
  HTT spacer sequence ATCN PAM
gaaggaggcacuucucuccc

SEQ ID NO: 2888 - RNA, 20 nt, Artificial Sequence
  HTT spacer sequence ATCN PAM
ucccagggccagggacagcu

SEQ ID NO: 2889 - RNA, 20 nt, Artificial Sequence
  HTT spacer sequence ATCN PAM
cagggccagggacagcuggu

SEQ ID NO: 2890 - RNA, 20 nt, Artificial Sequence
  HTT spacer sequence ATCN PAM
cucuccuagugaacucccua

SEQ ID NO: 2891 - RNA, 20 nt, Artificial Sequence
  HTT spacer sequence ATCN PAM
ggcuucuugucauucugggu

SEQ ID NO: 2892 - RNA, 20 nt, Artificial Sequence
  HTT spacer sequence ATCN PAM
cauagcaaugggagauuuca

SEQ ID NO: 2893 - RNA, 20 nt, Artificial Sequence
  HTT spacer sequence ATCN PAM
cccauugcuaugcgauuggc

SEQ ID NO: 2894 - RNA, 20 nt, Artificial Sequence
  HTT spacer sequence ATCN PAM
ugaccuuagaaaucuuucac

SEQ ID NO: 2895 - RNA, 20 nt, Artificial Sequence
  HTT spacer sequence ATCN PAM
uucaccgagggggaucugcg

SEQ ID NO: 2896 - RNA, 20 nt, Artificial Sequence
  HTT spacer sequence ATCN PAM
cccucggugaaagauuucua

SEQ ID NO: 2897 - RNA, 20 nt, Artificial Sequence
  HTT spacer sequence ATCN PAM
gcguuccagaacuucuggag

SEQ ID NO: 2898 - RNA, 20 nt, Artificial Sequence
  HTT spacer sequence ATCN PAM
ggccaacaagcagacuuguc

SEQ ID NO: 2899 - RNA, 20 nt, Artificial Sequence
  HTT spacer sequence ATCN PAM
cugcaaaacuacagaaaacc

SEQ ID NO: 2900 - RNA, 20 nt, Artificial Sequence
  HTT spacer sequence ATCN PAM
uaaaagcagccagauuuaaa

SEQ ID NO: 2901 - RNA, 20 nt, Artificial Sequence
  HTT spacer sequence ATCN PAM
ggcugcuuuuaagauuuucu

SEQ ID NO: 2902 - RNA, 20 nt, Artificial Sequence
  HTT spacer sequence ATCN PAM
gcugucaauuucauggcugc

SEQ ID NO: 2903 - RNA, 20 nt, Artificial Sequence
  HTT spacer sequence ATCN PAM
cagcacuuugggaggccgag

SEQ ID NO: 2904 - RNA, 20 nt, Artificial Sequence
  HTT spacer sequence ATCN PAM
acccgccucggccucccaaa

SEQ ID NO: 2905 - RNA, 20 nt, Artificial Sequence
  HTT spacer sequence ATCN PAM
cgaggucaggagaccaagac

SEQ ID NO: 2906 - RNA, 20 nt, Artificial Sequence
  HTT spacer sequence ATCN PAM
uggcuaacauggugaaaccc

SEQ ID NO: 2907 - RNA, 20 nt, Artificial Sequence
  HTT spacer sequence ATCN PAM
cggcucacugcaagcuccgc

SEQ ID NO: 2908 - RNA, 20 nt, Artificial Sequence
  HTT spacer sequence ATCN PAM
ccugaaaggaagcaacugcc

SEQ ID NO: 2909 - RNA, 20 nt, Artificial Sequence
  HTT spacer sequence ATCN PAM
aaggcggcaguugcuuccuu

SEQ ID NO: 2910 - RNA, 20 nt, Artificial Sequence
  HTT spacer sequence ATCN PAM
aaucaaaggcggcaguugcu

SEQ ID NO: 2911 - RNA, 20 nt, Artificial Sequence
  HTT spacer sequence ATCN PAM
gugaagaaggaaggcaaaau

SEQ ID NO: 2912 - RNA, 20 nt, Artificial Sequence
  HTT spacer sequence ATCN PAM
ggaaguguuuuuauuuugcc

SEQ ID NO: 2913 - RNA, 20 nt, Artificial Sequence
  HTT spacer sequence ATCN PAM
uuccaguucaaucaggaagu

SEQ ID NO: 2914 - RNA, 20 nt, Artificial Sequence
  HTT spacer sequence ATCN PAM
uuuagaauuccuuggacagu

SEQ ID NO: 2915 - RNA, 20 nt, Artificial Sequence
  HTT spacer sequence ATCN PAM
uccucuggggucauuuucuu

SEQ ID NO: 2916 - RNA, 20 nt, Artificial Sequence
  HTT spacer sequence ATCN PAM
gagauucaggaaagaaaugg

SEQ ID NO: 2917 - RNA, 20 nt, Artificial Sequence
  HTT spacer sequence ATCN PAM
cugaucuuccucugggguca

SEQ ID NO: 2918 - RNA, 20 nt, Artificial Sequence
  HTT spacer sequence ATCN PAM
cucuccauuucuuuccugaa

SEQ ID NO: 2919 - RNA, 20 nt, Artificial Sequence
  HTT spacer sequence ATCN PAM
uuuguaacauauaugugugu

SEQ ID NO: 2920 - RNA, 20 nt, Artificial Sequence
  HTT spacer sequence ATCN PAM
ugacaaaaaaaaaaaaaaaa

SEQ ID NO: 2921 - RNA, 20 nt, Artificial Sequence
  HTT spacer sequence ATCN PAM
aucuugacaaaaaaaaaaaa

SEQ ID NO: 2922 - RNA, 20 nt, Artificial Sequence
  HTT spacer sequence ATCN PAM
uuugagcccaaggggcagag

SEQ ID NO: 2923 - RNA, 20 nt, Artificial Sequence
  HTT spacer sequence ATCN PAM
cagcuacucaggaggcugag

SEQ ID NO: 2924 - RNA, 20 nt, Artificial Sequence
  HTT spacer sequence ATCN PAM
cuaguaaaaauacaaaaauu

SEQ ID NO: 2925 - RNA, 20 nt, Artificial Sequence
  HTT spacer sequence ATCN PAM
caucucuaguaaaaauacaa

SEQ ID NO: 2926 - RNA, 20 nt, Artificial Sequence
  HTT spacer sequence ATCN PAM
ccugaggucagguguucaag

SEQ ID NO: 2927 - RNA, 20 nt, Artificial Sequence
  HTT spacer sequence ATCN PAM
accugccugggccucccaaa

SEQ ID NO: 2928 - RNA, 20 nt, Artificial Sequence
  HTT spacer sequence ATCN PAM
uagcacuuugggaggcccag

SEQ ID NO: 2929 - RNA, 20 nt, Artificial Sequence
  HTT spacer sequence ATCN PAM
ggccuauguguguguuuaua

SEQ ID NO: 2930 - RNA, 20 nt, Artificial Sequence
  HTT spacer sequence ATCN PAM
agaagagaauagauuuacgu

SEQ ID NO: 2931 - RNA, 20 nt, Artificial Sequence
  HTT spacer sequence ATCN PAM
auucucuucuugauuaugca

SEQ ID NO: 2932 - RNA, 20 nt, Artificial Sequence
  HTT spacer sequence ATCN PAM
aacguaaaucuauucucuuc

SEQ ID NO: 2933 - RNA, 20 nt, Artificial Sequence
  HTT spacer sequence ATCN PAM
aaaucuaacguaaaucuauu

SEQ ID NO: 2934 - RNA, 20 nt, Artificial Sequence
  HTT spacer sequence ATCN PAM
uccagguaucaaaaucuaac

SEQ ID NO: 2935 - RNA, 20 nt, Artificial Sequence
  HTT spacer sequence ATCN PAM
caaaaaaaaaaaaacauaca

SEQ ID NO: 2936 - RNA, 20 nt, Artificial Sequence
  HTT spacer sequence ATCN PAM
caccacaacacuccagccug

SEQ ID NO: 2937 - RNA, 20 nt, Artificial Sequence
  HTT spacer sequence ATCN PAM
uggcucacugcaaccuccuc

SEQ ID NO: 2938 - RNA, 20 nt, Artificial Sequence
  HTT spacer sequence ATCN PAM
ucccaccuaggccuccagag

SEQ ID NO: 2939 - RNA, 20 nt, Artificial Sequence
  HTT spacer sequence ATCN PAM
caccuacucuggaggccuag

SEQ ID NO: 2940 - RNA, 20 nt, Artificial Sequence
  HTT spacer sequence ATCN PAM
caggcaccugccaccacacc

SEQ ID NO: 2941 - RNA, 20 nt, Artificial Sequence
  HTT spacer sequence ATCN PAM
cuacuaaauauuuaaaaaaa

SEQ ID NO: 2942 - RNA, 20 nt, Artificial Sequence
  HTT spacer sequence ATCN PAM
ccugaggucaggaguucaag

SEQ ID NO: 2943 - RNA, 20 nt, Artificial Sequence
  HTT spacer sequence ATCN PAM
gccuaccucugccucucaaa

SEQ ID NO: 2944 - RNA, 20 nt, Artificial Sequence
  HTT spacer sequence ATCN PAM
cagcacuuugagaggcagag

SEQ ID NO: 2945 - RNA, 20 nt, Artificial Sequence
  HTT spacer sequence ATCN PAM
cgcccggccaacagugauca

SEQ ID NO: 2946 - RNA, 20 nt, Artificial Sequence
  HTT spacer sequence ATCN PAM
cuguuggccgggcgcgaugg

SEQ ID NO: 2947 - RNA, 20 nt, Artificial Sequence
  HTT spacer sequence ATCN PAM
cuuucaaacuaacagagguu

SEQ ID NO: 2948 - RNA, 20 nt, Artificial Sequence
  HTT spacer sequence ATCN PAM
gacuuaaccaaaaaccaggu

SEQ ID NO: 2949 - RNA, 20 nt, Artificial Sequence
  HTT spacer sequence ATCN PAM
uaccagcucuguuaccuggu

SEQ ID NO: 2950 - RNA, 20 nt, Artificial Sequence
  HTT spacer sequence ATCN PAM
acgauuacaguuaauauuaa

SEQ ID NO: 2951 - RNA, 20 nt, Artificial Sequence
  HTT spacer sequence ATCN PAM
uugauauacgugaggucagu

SEQ ID NO: 2952 - RNA, 20 nt, Artificial Sequence
  HTT spacer sequence ATCN PAM
guccuguuuccuuagguucu

SEQ ID NO: 2953 - RNA, 20 nt, Artificial Sequence
  HTT spacer sequence ATCN PAM
uaugagacgggaaagguuuc

SEQ ID NO: 2954 - RNA, 20 nt, Artificial Sequence
  HTT spacer sequence ATCN PAM
caccuggucucgggucgggg

SEQ ID NO: 2955 - RNA, 20 nt, Artificial Sequence
  HTT spacer sequence ATCN PAM
cacugggcggggagcuaagc

SEQ ID NO: 2956 - RNA, 20 nt, Artificial Sequence
  HTT spacer sequence ATCN PAM
uccccugaauaguucauguu

SEQ ID NO: 2957 - RNA, 20 nt, Artificial Sequence
  HTT spacer sequence ATCN PAM
uugugcuuuuccauauuuuu

SEQ ID NO: 2958 - RNA, 20 nt, Artificial Sequence
  HTT spacer sequence ATCN PAM
uaaucuuugugcuuuuccau

SEQ ID NO: 2959 - RNA, 20 nt, Artificial Sequence
  HTT spacer sequence ATCN PAM
agccacugcacuccagccug

SEQ ID NO: 2960 - RNA, 20 nt, Artificial Sequence
  HTT spacer sequence ATCN PAM
cagcucacugcaaccuccgc

SEQ ID NO: 2961 - RNA, 20 nt, Artificial Sequence
  HTT spacer sequence ATCN PAM
cuugaacccaggaggcggag

SEQ ID NO: 2962 - RNA, 20 nt, Artificial Sequence
  HTT spacer sequence ATCN PAM
cagcuacucaagaggcugag

SEQ ID NO: 2963 - RNA, 20 nt, Artificial Sequence
  HTT spacer sequence ATCN PAM
uguuggucaggcggacuuga

SEQ ID NO: 2964 - RNA, 20 nt, Artificial Sequence
  HTT spacer sequence ATCN PAM
ccugaggucaggaguucaag

SEQ ID NO: 2965 - RNA, 20 nt, Artificial Sequence
  HTT spacer sequence ATCN PAM
gcccaccucggccucccaaa

SEQ ID NO: 2966 - RNA, 20 nt, Artificial Sequence
  HTT spacer sequence ATCN PAM
cagcacuuugggaggccgag

SEQ ID NO: 2967 - RNA, 20 nt, Artificial Sequence
  HTT spacer sequence ATCN PAM
cucuucuguguauguguacg

SEQ ID NO: 2968 - RNA, 20 nt, Artificial Sequence
  HTT spacer sequence ATCN PAM
ggcucuacaugguguguagu

SEQ ID NO: 2969 - RNA, 20 nt, Artificial Sequence
  HTT spacer sequence ATCN PAM
ggaacaggauucuaaugacu

SEQ ID NO: 2970 - RNA, 20 nt, Artificial Sequence
  HTT spacer sequence ATCN PAM
uguuccagaugagcacuugu

SEQ ID NO: 2971 - RNA, 20 nt, Artificial Sequence
  HTT spacer sequence ATCN PAM
caacauagccacaggcaguc

SEQ ID NO: 2972 - RNA, 20 nt, Artificial Sequence
  HTT spacer sequence ATCN PAM
aucuuuuuuccaucuuuugu

SEQ ID NO: 2973 - RNA, 20 nt, Artificial Sequence
  HTT spacer sequence ATCN PAM
uuuuuccaucuuuuguccua

SEQ ID NO: 2974 - RNA, 20 nt, Artificial Sequence
  HTT spacer sequence ATCN PAM
uuuguccuaaguguugcuau

SEQ ID NO: 2975 - RNA, 20 nt, Artificial Sequence
  HTT spacer sequence ATCN PAM
uugaucacacaugccugacu

SEQ ID NO: 2976 - RNA, 20 nt, Artificial Sequence
  HTT spacer sequence ATCN PAM
augauuuauuauagcaacac

SEQ ID NO: 2977 - RNA, 20 nt, Artificial Sequence
  HTT spacer sequence ATCN PAM
cacaugccugacuguuugca

SEQ ID NO: 2978 - RNA, 20 nt, Artificial Sequence
  HTT spacer sequence ATCN PAM
uaugcaaacagucaggcaug

SEQ ID NO: 2979 - RNA, 20 nt, Artificial Sequence
  HTT spacer sequence ATCN PAM
auacugggcagucuggcaug

SEQ ID NO: 2980 - RNA, 20 nt, Artificial Sequence
  HTT spacer sequence ATCN PAM
uuacucuuuuuagaugaugc

SEQ ID NO: 2981 - RNA, 20 nt, Artificial Sequence
  HTT spacer sequence ATCN PAM
aaaaagaguaaagaucaaua

SEQ ID NO: 2982 - RNA, 20 nt, Artificial Sequence
  HTT spacer sequence ATCN PAM
ucuaaaaagaguaaagauca

SEQ ID NO: 2983 - RNA, 20 nt, Artificial Sequence
  HTT spacer sequence ATCN PAM
aaugugaaagacuuacagaa

SEQ ID NO: 2984 - RNA, 20 nt, Artificial Sequence
  HTT spacer sequence ATCN PAM
ugacaggaaaucuaauguga

SEQ ID NO: 2985 - RNA, 20 nt, Artificial Sequence
  HTT spacer sequence ATCN PAM
uccugacaggaaaucuaaug

SEQ ID NO: 2986 - RNA, 20 nt, Artificial Sequence
  HTT spacer sequence ATCN PAM
gccuagaauugacuaucauc

SEQ ID NO: 2987 - RNA, 20 nt, Artificial Sequence
  HTT spacer sequence ATCN PAM
ucugccuagaauugacuauc

SEQ ID NO: 2988 - RNA, 20 nt, Artificial Sequence
  HTT spacer sequence ATCN PAM
caacugcuucagccauggcu

SEQ ID NO: 2989 - RNA, 20 nt, Artificial Sequence
  HTT spacer sequence ATCN PAM
ggacuuuacauggccacaac

SEQ ID NO: 2990 - RNA, 20 nt, Artificial Sequence
  HTT spacer sequence ATCN PAM
ucgggacuuuacauggccac

SEQ ID NO: 2991 - RNA, 20 nt, Artificial Sequence
  HTT spacer sequence ATCN PAM
auugccucccuggauggguu

SEQ ID NO: 2992 - RNA, 20 nt, Artificial Sequence
  HTT spacer sequence ATCN PAM
agggaggcaauggaucaucg

SEQ ID NO: 2993 - RNA, 20 nt, Artificial Sequence
  HTT spacer sequence ATCN PAM
guaagggagaaauacacuuc

SEQ ID NO: 2994 - RNA, 20 nt, Artificial Sequence
  HTT spacer sequence ATCN PAM
gggcccccuccuuccagcuc

SEQ ID NO: 2995 - RNA, 20 nt, Artificial Sequence
  HTT spacer sequence ATCN PAM
ccccaggauguggcuuuuau

SEQ ID NO: 2996 - RNA, 20 nt, Artificial Sequence
  HTT spacer sequence ATCN PAM
uggggugaugggagcuggaa

SEQ ID NO: 2997 - RNA, 20 nt, Artificial Sequence
  HTT spacer sequence ATCN PAM
gcauaaaagccacauccugg

SEQ ID NO: 2998 - RNA, 20 nt, Artificial Sequence
  HTT spacer sequence ATCN PAM
ucugcauaaaagccacaucc

SEQ ID NO: 2999 - RNA, 20 nt, Artificial Sequence
  HTT spacer sequence ATCN PAM
aaaauggcugcucaaguccc

SEQ ID NO: 3000 - RNA, 20 nt, Artificial Sequence
  HTT spacer sequence ATCN PAM
cauuccagggagcaggaaaa

SEQ ID NO: 3001 - RNA, 20 nt, Artificial Sequence
  HTT spacer sequence ATCN PAM
cauaaaaugaagggaaagac

SEQ ID NO: 3002 - RNA, 20 nt, Artificial Sequence
  HTT spacer sequence ATCN PAM
cccuggcuagcacuuacuua

SEQ ID NO: 3003 - RNA, 20 nt, Artificial Sequence
  HTT spacer sequence ATCN PAM
aagcaguuugccucuuagcu

SEQ ID NO: 3004 - RNA, 20 nt, Artificial Sequence
  HTT spacer sequence ATCN PAM
accugaaugagggacacagu

SEQ ID NO: 3005 - RNA, 20 nt, Artificial Sequence
  HTT spacer sequence ATCN PAM
cauucugagguucuggggcu

SEQ ID NO: 3006 - RNA, 20 nt, Artificial Sequence
  HTT spacer sequence ATCN PAM
cauuuuagccuccuuaccuc

SEQ ID NO: 3007 - RNA, 20 nt, Artificial Sequence
  HTT spacer sequence ATCN PAM
uuagggugggccauaauccg

SEQ ID NO: 3008 - RNA, 20 nt, Artificial Sequence
  HTT spacer sequence ATCN PAM
gacugaugucuuacaagaag

SEQ ID NO: 3009 - RNA, 20 nt, Artificial Sequence
  HTT spacer sequence ATCN PAM
gucggauuauggcccacccu

SEQ ID NO: 3010 - RNA, 20 nt, Artificial Sequence
  HTT spacer sequence ATCN PAM
cuucuuguaagacaucaguc

SEQ ID NO: 3011 - RNA, 20 nt, Artificial Sequence
  HTT spacer sequence ATCN PAM
cggacuucuagccucuagga

SEQ ID NO: 3012 - RNA, 20 nt, Artificial Sequence
  HTT spacer sequence ATCN PAM
ucucaugguccuagaggcua

SEQ ID NO: 3013 - RNA, 20 nt, Artificial Sequence
  HTT spacer sequence ATCN PAM
gcugcuggaacaaaucaccc

SEQ ID NO: 3014 - RNA, 20 nt, Artificial Sequence
  HTT spacer sequence ATCN PAM
ccccagcacuguggcuuggc

SEQ ID NO: 3015 - RNA, 20 nt, Artificial Sequence
  HTT spacer sequence ATCN PAM
ucacacguucugugggucag

SEQ ID NO: 3016 - RNA, 20 nt, Artificial Sequence
  HTT spacer sequence ATCN PAM
cacgugguguuggcaggauc

SEQ ID NO: 3017 - RNA, 20 nt, Artificial Sequence
  HTT spacer sequence ATCN PAM
ugccaacaccacgugagauu

SEQ ID NO: 3018 - RNA, 20 nt, Artificial Sequence
  HTT spacer sequence ATCN PAM
aguuccucauggccugcugg

SEQ ID NO: 3019 - RNA, 20 nt, Artificial Sequence
  HTT spacer sequence ATCN PAM
gagcauccaugccaagaagg

SEQ ID NO: 3020 - RNA, 20 nt, Artificial Sequence
  HTT spacer sequence ATCN PAM
augccaagaaggcaacagag

SEQ ID NO: 3021 - RNA, 20 nt, Artificial Sequence
  HTT spacer sequence ATCN PAM
ccuuugcccauugguuagaa

SEQ ID NO: 3022 - RNA, 20 nt, Artificial Sequence
  HTT spacer sequence ATCN PAM
uaugagucugcccacugagg

SEQ ID NO: 3023 - RNA, 20 nt, Artificial Sequence
  HTT spacer sequence ATCN PAM
ugccauugcacuccagccug

SEQ ID NO: 3024 - RNA, 20 nt, Artificial Sequence
  HTT spacer sequence ATCN PAM
uggcucacugcaaccuccac

SEQ ID NO: 3025 - RNA, 20 nt, Artificial Sequence
  HTT spacer sequence ATCN PAM
ccagaggucaggaguucgag

SEQ ID NO: 3026 - RNA, 20 nt, Artificial Sequence
  HTT spacer sequence ATCN PAM
gccugccuuggccucccaaa

SEQ ID NO: 3027 - RNA, 20 nt, Artificial Sequence
  HTT spacer sequence ATCN PAM
cagcacuuugggaggccaag

SEQ ID NO: 3028 - RNA, 20 nt, Artificial Sequence
  HTT spacer sequence ATCN PAM
cccaagcuggagugcagugg

SEQ ID NO: 3029 - RNA, 20 nt, Artificial Sequence
  HTT spacer sequence ATCN PAM
uagcucacuugcagccucaa

SEQ ID NO: 3030 - RNA, 20 nt, Artificial Sequence
  HTT spacer sequence ATCN PAM
ccugaacccaggaauuugag

SEQ ID NO: 3031 - RNA, 20 nt, Artificial Sequence
  HTT spacer sequence ATCN PAM
ucccacaucagccucccaag

SEQ ID NO: 3032 - RNA, 20 nt, Artificial Sequence
  HTT spacer sequence ATCN PAM
gccucccaagaacugggaac

SEQ ID NO: 3033 - RNA, 20 nt, Artificial Sequence
  HTT spacer sequence ATCN PAM
ccccccggcugggcgguugu

SEQ ID NO: 3034 - RNA, 20 nt, Artificial Sequence
  HTT spacer sequence ATCN PAM
uguggccauagcugcuucuc

SEQ ID NO: 3035 - RNA, 20 nt, Artificial Sequence
  HTT spacer sequence ATCN PAM
cagugccucugugggcagca

SEQ ID NO: 3036 - RNA, 20 nt, Artificial Sequence
  HTT spacer sequence ATCN PAM
gucccagcgcagcgccccgg

SEQ ID NO: 3037 - RNA, 20 nt, Artificial Sequence
  HTT spacer sequence ATCN PAM
cccgccgacgccuggagcgg

SEQ ID NO: 3038 - RNA, 20 nt, Artificial Sequence
  HTT spacer sequence ATCN PAM
uuuccgcaugggccugcgcc

SEQ ID NO: 3039 - RNA, 20 nt, Artificial Sequence
  HTT spacer sequence ATCN PAM
cgcuccgccccucagccgcc

SEQ ID NO: 3040 - RNA, 20 nt, Artificial Sequence
  HTT spacer sequence ATCN PAM
ccccgccccgcccccgucuc

SEQ ID NO: 3041 - RNA, 20 nt, Artificial Sequence
  HTT spacer sequence ATCN PAM
ccacgccccccgcaucgcca

SEQ ID NO: 3042 - RNA, 20 nt, Artificial Sequence
  HTT spacer sequence ATCN PAM
ccacgccucccuuaccaugc

SEQ ID NO: 3043 - RNA, 20 nt, Artificial Sequence
  HTT spacer sequence ATCN PAM
ugcuggccggcguggccccg

SEQ ID NO: 3044 - RNA, 20 nt, Artificial Sequence
  HTT spacer sequence ATCN PAM
uggacccgucccggcagccc

SEQ ID NO: 3045 - RNA, 20 nt, Artificial Sequence
  HTT spacer sequence ATCN PAM
gcuuuuccagggucgccaug

SEQ ID NO: 3046 - RNA, 20 nt, Artificial Sequence
  HTT spacer sequence ATCN PAM
ccgccguagccugggacccg

SEQ ID NO: 3047 - RNA, 20 nt, Artificial Sequence
  HTT spacer sequence ATCN PAM
ugcgaagggcgagagggcug

SEQ ID NO: 3048 - RNA, 20 nt, Artificial Sequence
  HTT spacer sequence ATCN PAM
cggcuccuccaaguucucuu

SEQ ID NO: 3049 - RNA, 20 nt, Artificial Sequence
  HTT spacer sequence ATCN PAM
cuccagcuccaaaccccgcc

SEQ ID NO: 3050 - RNA, 20 nt, Artificial Sequence
  HTT spacer sequence ATCN PAM
acugcccccacaucucucca

SEQ ID NO: 3051 - RNA, 20 nt, Artificial Sequence
  HTT spacer sequence ATCN PAM
cccauuggacgcgcccucac

SEQ ID NO: 3052 - RNA, 20 nt, Artificial Sequence
  HTT spacer sequence ATCN PAM
caggcuguuuuaagugccac

SEQ ID NO: 3053 - RNA, 20 nt, Artificial Sequence
  HTT spacer sequence ATCN PAM
ugaacuaaaugaaauguccu

SEQ ID NO: 3054 - RNA, 20 nt, Artificial Sequence
  HTT spacer sequence ATCN PAM
cggugguaguaacacgauuu

SEQ ID NO: 3055 - RNA, 20 nt, Artificial Sequence
  HTT spacer sequence ATCN PAM
uguuacuaccaccgugauca

SEQ ID NO: 3056 - RNA, 20 nt, Artificial Sequence
  HTT spacer sequence ATCN PAM
cuuagguggugcuuaaaauc

SEQ ID NO: 3057 - RNA, 20 nt, Artificial Sequence
  HTT spacer sequence ATCN PAM
gcucaucuaagccuaaguug

SEQ ID NO: 3058 - RNA, 20 nt, Artificial Sequence
  HTT spacer sequence ATCN PAM
aagccuaaguuggucugcag

SEQ ID NO: 3059 - RNA, 20 nt, Artificial Sequence
  HTT spacer sequence ATCN PAM
ccacguaaguucaccacuuu

SEQ ID NO: 3060 - RNA, 20 nt, Artificial Sequence
  HTT spacer sequence ATCN PAM
uaaauauuaggaagaguuga

SEQ ID NO: 3061 - RNA, 20 nt, Artificial Sequence
  HTT spacer sequence ATCN PAM
acucuuccuaauauuuaaga

SEQ ID NO: 3062 - RNA, 20 nt, Artificial Sequence
  HTT spacer sequence ATCN PAM
gcaacguguugguuuuauuc

SEQ ID NO: 3063 - RNA, 20 nt, Artificial Sequence
  HTT spacer sequence ATCN PAM
cucggcaauuaaccucccca

SEQ ID NO: 3064 - RNA, 20 nt, Artificial Sequence
  HTT spacer sequence ATCN PAM
cagaugugccagugaaaggg

SEQ ID NO: 3065 - RNA, 20 nt, Artificial Sequence
  HTT spacer sequence ATCN PAM
gagaugcccacggagucugc

SEQ ID NO: 3066 - RNA, 20 nt, Artificial Sequence
  HTT spacer sequence ATCN PAM
agcggaaccccaggacuuuc

SEQ ID NO: 3067 - RNA, 20 nt, Artificial Sequence
  HTT spacer sequence ATCN PAM
gaaauagaauacugagaggu

SEQ ID NO: 3068 - RNA, 20 nt, Artificial Sequence
  HTT spacer sequence ATCN PAM
ggaugugucccagauggcau

SEQ ID NO: 3069 - RNA, 20 nt, Artificial Sequence
  HTT spacer sequence ATCN PAM
agaucggaaauagaauacug

SEQ ID NO: 3070 - RNA, 20 nt, Artificial Sequence
  HTT spacer sequence ATCN PAM
gggacacauccagaucggaa

SEQ ID NO: 3071 - RNA, 20 nt, Artificial Sequence
  HTT spacer sequence ATCN PAM
cuguuaagacugauuaauuu

SEQ ID NO: 3072 - RNA, 20 nt, Artificial Sequence
  HTT spacer sequence ATCN PAM
gucuuaacagagauauucuu

SEQ ID NO: 3073 - RNA, 20 nt, Artificial Sequence
  HTT spacer sequence ATCN PAM
uaacagaaacaaagaacaag

SEQ ID NO: 3074 - RNA, 20 nt, Artificial Sequence
  HTT spacer sequence ATCN PAM
uugucucgucuucaaaguuu

SEQ ID NO: 3075 - RNA, 20 nt, Artificial Sequence
  HTT spacer sequence ATCN PAM
uuuucuaauuaaacuuugaa

SEQ ID NO: 3076 - RNA, 20 nt, Artificial Sequence
  HTT spacer sequence ATCN PAM
uuuagaauaauuuauuccua

SEQ ID NO: 3077 - RNA, 20 nt, Artificial Sequence
  HTT spacer sequence ATCN PAM
aaaaaguuuuuccauccuuu

SEQ ID NO: 3078 - RNA, 20 nt, Artificial Sequence
  HTT spacer sequence ATCN PAM
cuucaguaaguaauuucuca

SEQ ID NO: 3079 - RNA, 20 nt, Artificial Sequence
  HTT spacer sequence ATCN PAM
agaaauuuacuguagugcuu

SEQ ID NO: 3080 - RNA, 20 nt, Artificial Sequence
  HTT spacer sequence ATCN PAM
uguguaaacacuaaacaggg

SEQ ID NO: 3081 - RNA, 20 nt, Artificial Sequence
  HTT spacer sequence ATCN PAM
ggagcccuguuuaguguuua

SEQ ID NO: 3082 - RNA, 20 nt, Artificial Sequence
  HTT spacer sequence ATCN PAM
agugucugaagcagcccagc

SEQ ID NO: 3083 - RNA, 20 nt, Artificial Sequence
  HTT spacer sequence ATCN PAM
uucuaaaaauaugccuucuc

SEQ ID NO: 3084 - RNA, 20 nt, Artificial Sequence
  HTT spacer sequence ATCN PAM
gcauaagaaagagaaggcau

SEQ ID NO: 3085 - RNA, 20 nt, Artificial Sequence
  HTT spacer sequence ATCN PAM
ucaaaauauggguaucaaga

SEQ ID NO: 3086 - RNA, 20 nt, Artificial Sequence
  HTT spacer sequence ATCN PAM
agaaauuuccuuugcugccu

SEQ ID NO: 3087 - RNA, 20 nt, Artificial Sequence
  HTT spacer sequence ATCN PAM
ccuuugucaaggcagcaaag

SEQ ID NO: 3088 - RNA, 20 nt, Artificial Sequence
  HTT spacer sequence ATCN PAM
aucuccuuugucaaggcagc

SEQ ID NO: 3089 - RNA, 20 nt, Artificial Sequence
  HTT spacer sequence ATCN PAM
uauauuaccuuaaaguaaug

SEQ ID NO: 3090 - RNA, 20 nt, Artificial Sequence
  HTT spacer sequence ATCN PAM
ggacuggcaagguggcuuac

SEQ ID NO: 3091 - RNA, 20 nt, Artificial Sequence
  HTT spacer sequence ATCN PAM
gagcacuuugggaggccuag

SEQ ID NO: 3092 - RNA, 20 nt, Artificial Sequence
  HTT spacer sequence ATCN PAM
ccugaggucaggaguuugag

SEQ ID NO: 3093 - RNA, 20 nt, Artificial Sequence
  HTT spacer sequence ATCN PAM
aagcuaccugggaggcugag

SEQ ID NO: 3094 - RNA, 20 nt, Artificial Sequence
  HTT spacer sequence ATCN PAM
cuugaacccgggaggcagag

SEQ ID NO: 3095 - RNA, 20 nt, Artificial Sequence
  HTT spacer sequence ATCN PAM
caacucacugcagacucugc

SEQ ID NO: 3096 - RNA, 20 nt, Artificial Sequence
  HTT spacer sequence ATCN PAM
cgccacugcacuccagccug

SEQ ID NO: 3097 - RNA, 20 nt, Artificial Sequence
  HTT spacer sequence ATCN PAM
caaaaaaaauuuuuuuuaau

SEQ ID NO: 3098 - RNA, 20 nt, Artificial Sequence
  HTT spacer sequence ATCN PAM
ugucaauguauuacuuaugc

SEQ ID NO: 3099 - RNA, 20 nt, Artificial Sequence
  HTT spacer sequence ATCN PAM
uccuuccaccccuuuccucu

SEQ ID NO: 3100 - RNA, 20 nt, Artificial Sequence
  HTT spacer sequence ATCN PAM
ugccagauauaaccuguuca

SEQ ID NO: 3101 - RNA, 20 nt, Artificial Sequence
  HTT spacer sequence ATCN PAM
ggcaggauacaugaggaacu

SEQ ID NO: 3102 - RNA, 20 nt, Artificial Sequence
  HTT spacer sequence ATCN PAM
uacaauaugaacagguuaua

SEQ ID NO: 3103 - RNA, 20 nt, Artificial Sequence
  HTT spacer sequence ATCN PAM
aucuuacaauaugaacaggu

SEQ ID NO: 3104 - RNA, 20 nt, Artificial Sequence
  HTT spacer sequence ATCN PAM
auauauuuuuugagauguag

SEQ ID NO: 3105 - RNA, 20 nt, Artificial Sequence
  HTT spacer sequence ATCN PAM
caaaaaauauauagauauau

SEQ ID NO: 3106 - RNA, 20 nt, Artificial Sequence
  HTT spacer sequence ATCN PAM
cugcacuccagccuggguga

SEQ ID NO: 3107 - RNA, 20 nt, Artificial Sequence
  HTT spacer sequence ATCN PAM
cggcucacugcagucucugc

SEQ ID NO: 3108 - RNA, 20 nt, Artificial Sequence
  HTT spacer sequence ATCN PAM
cagcuacucagaaggcugag

SEQ ID NO: 3109 - RNA, 20 nt, Artificial Sequence
  HTT spacer sequence ATCN PAM
cuacuaaaaauacaaaaauu

SEQ ID NO: 3110 - RNA, 20 nt, Artificial Sequence
  HTT spacer sequence ATCN PAM
caaggucaggaguucaagac

SEQ ID NO: 3111 - RNA, 20 nt, Artificial Sequence
  HTT spacer sequence ATCN PAM
guccaccucggccucccaaa

SEQ ID NO: 3112 - RNA, 20 nt, Artificial Sequence
  HTT spacer sequence ATCN PAM
cagcacuuugggaggccgag

SEQ ID NO: 3113 - RNA, 20 nt, Artificial Sequence
  HTT spacer sequence ATCN PAM
acugcauuagguuuauuuau

SEQ ID NO: 3114 - RNA, 20 nt, Artificial Sequence
  HTT spacer sequence ATCN PAM
aaacuuugugagcaguguuu

SEQ ID NO: 3115 - RNA, 20 nt, Artificial Sequence
  HTT spacer sequence ATCN PAM
ucuucucaaaguaagauuga

SEQ ID NO: 3116 - RNA, 20 nt, Artificial Sequence
  HTT spacer sequence ATCN PAM
uacuuugagaagaggauuuu

SEQ ID NO: 3117 - RNA, 20 nt, Artificial Sequence
  HTT spacer sequence ATCN PAM
aucuuacuuugagaagagga

SEQ ID NO: 3118 - RNA, 20 nt, Artificial Sequence
  HTT spacer sequence ATCN PAM
guucuguuuuuauggcucuu

SEQ ID NO: 3119 - RNA, 20 nt, Artificial Sequence
  HTT spacer sequence ATCN PAM
uguaugcugagcagagcaca

SEQ ID NO: 3120 - RNA, 20 nt, Artificial Sequence
  HTT spacer sequence ATCN PAM
agcaugcuugggaggguccu

SEQ ID NO: 3121 - RNA, 20 nt, Artificial Sequence
  HTT spacer sequence ATCN PAM
gaaggagaauaagaaacugc

SEQ ID NO: 3122 - RNA, 20 nt, Artificial Sequence
  HTT spacer sequence ATCN PAM
gguguuucccugacuuuauu

SEQ ID NO: 3123 - RNA, 20 nt, Artificial Sequence
  HTT spacer sequence ATCN PAM
guaaauauuuacuaaacaug

SEQ ID NO: 3124 - RNA, 20 nt, Artificial Sequence
  HTT spacer sequence ATCN PAM
ugcuuacugucuauguccuu

SEQ ID NO: 3125 - RNA, 20 nt, Artificial Sequence
  HTT spacer sequence ATCN PAM
aucuugcuuacugucuaugu

SEQ ID NO: 3126 - RNA, 20 nt, Artificial Sequence
  HTT spacer sequence ATCN PAM
ccuucccugcuuugaaguuc

SEQ ID NO: 3127 - RNA, 20 nt, Artificial Sequence
  HTT spacer sequence ATCN PAM
aguguuaacuuauuuuuauu

SEQ ID NO: 3128 - RNA, 20 nt, Artificial Sequence
  HTT spacer sequence ATCN PAM
gccaggcuggagugcacuag

SEQ ID NO: 3129 - RNA, 20 nt, Artificial Sequence
  HTT spacer sequence ATCN PAM
cacuagugcacuccagccug

SEQ ID NO: 3130 - RNA, 20 nt, Artificial Sequence
  HTT spacer sequence ATCN PAM
uggcucacugcaaccucugc

SEQ ID NO: 3131 - RNA, 20 nt, Artificial Sequence
  HTT spacer sequence ATCN PAM
cuugaacccaagaggcagag

SEQ ID NO: 3132 - RNA, 20 nt, Artificial Sequence
  HTT spacer sequence ATCN PAM
cagcuaaacaggaggcugag

SEQ ID NO: 3133 - RNA, 20 nt, Artificial Sequence
  HTT spacer sequence ATCN PAM
cgccacugcacuccagccug

SEQ ID NO: 3134 - RNA, 20 nt, Artificial Sequence
  HTT spacer sequence ATCN PAM
cagcucacugcaagcuccgc

SEQ ID NO: 3135 - RNA, 20 nt, Artificial Sequence
  HTT spacer sequence ATCN PAM
uggcuaacacggugaaaccc

SEQ ID NO: 3136 - RNA, 20 nt, Artificial Sequence
  HTT spacer sequence ATCN PAM
uccuggcuaacacggugaaa

SEQ ID NO: 3137 - RNA, 20 nt, Artificial Sequence
  HTT spacer sequence ATCN PAM
ugaucuccugaccucgucau

SEQ ID NO: 3138 - RNA, 20 nt, Artificial Sequence
  HTT spacer sequence ATCN PAM
agaucauccuggcuaacacg

SEQ ID NO: 3139 - RNA, 20 nt, Artificial Sequence
  HTT spacer sequence ATCN PAM
ccugaccucgucauccgccg

SEQ ID NO: 3140 - RNA, 20 nt, Artificial Sequence
  HTT spacer sequence ATCN PAM
gccgaccuugugauccgccc

SEQ ID NO: 3141 - RNA, 20 nt, Artificial Sequence
  HTT spacer sequence ATCN PAM
caaggucggcggaugacgag

SEQ ID NO: 3142 - RNA, 20 nt, Artificial Sequence
  HTT spacer sequence ATCN PAM
gcccaccucggccucccaaa

SEQ ID NO: 3143 - RNA, 20 nt, Artificial Sequence
  HTT spacer sequence ATCN PAM
cagcacuuugggaggccgag

SEQ ID NO: 3144 - RNA, 20 nt, Artificial Sequence
  HTT spacer sequence ATCN PAM
cuacuaaaaauacaaaaauu

SEQ ID NO: 3145 - RNA, 20 nt, Artificial Sequence
  HTT spacer sequence ATCN PAM
uggcaaaaccccaucucuac

SEQ ID NO: 3146 - RNA, 20 nt, Artificial Sequence
  HTT spacer sequence ATCN PAM
caugaggccgggaguucgag

SEQ ID NO: 3147 - RNA, 20 nt, Artificial Sequence
  HTT spacer sequence ATCN PAM
gccugccuuggccucccaaa

SEQ ID NO: 3148 - RNA, 20 nt, Artificial Sequence
  HTT spacer sequence ATCN PAM
uagcacuuugggaggccaag

SEQ ID NO: 3149 - RNA, 20 nt, Artificial Sequence
  HTT spacer sequence ATCN PAM
acacuggccagguauggugg

SEQ ID NO: 3150 - RNA, 20 nt, Artificial Sequence
  HTT spacer sequence ATCN PAM
cuaucguagcucacuucagc

SEQ ID NO: 3151 - RNA, 20 nt, Artificial Sequence
  HTT spacer sequence ATCN PAM
uagcucacuucagccuugaa

SEQ ID NO: 3152 - RNA, 20 nt, Artificial Sequence
  HTT spacer sequence ATCN PAM
cuugagcccaggaguucaag

SEQ ID NO: 3153 - RNA, 20 nt, Artificial Sequence
  HTT spacer sequence ATCN PAM
ucccaccucaaccucacaau

SEQ ID NO: 3154 - RNA, 20 nt, Artificial Sequence
  HTT spacer sequence ATCN PAM
caccuggccagaugauggcu

SEQ ID NO: 3155 - RNA, 20 nt, Artificial Sequence
  HTT spacer sequence ATCN PAM
ggccaggugugauggcucac

SEQ ID NO: 3156 - RNA, 20 nt, Artificial Sequence
  HTT spacer sequence ATCN PAM
ucuggccaggugugauggcu

SEQ ID NO: 3157 - RNA, 20 nt, Artificial Sequence
  HTT spacer sequence ATCN PAM
ggaauaccacuacuucauac

SEQ ID NO: 3158 - RNA, 20 nt, Artificial Sequence
  HTT spacer sequence ATCN PAM
uccuguuucaggaauagcaa

SEQ ID NO: 3159 - RNA, 20 nt, Artificial Sequence
  HTT spacer sequence ATCN PAM
uugcuauuccugaaacagga

SEQ ID NO: 3160 - RNA, 20 nt, Artificial Sequence
  HTT spacer sequence ATCN PAM
gaccaauacuacuugccuug

SEQ ID NO: 3161 - RNA, 20 nt, Artificial Sequence
  HTT spacer sequence ATCN PAM
acaaggcaaguaguauuggu

SEQ ID NO: 3162 - RNA, 20 nt, Artificial Sequence
  HTT spacer sequence ATCN PAM
uuauuccaucuacaaggcaa

SEQ ID NO: 3163 - RNA, 20 nt, Artificial Sequence
  HTT spacer sequence ATCN PAM
cacucacauaaaugccaaua

SEQ ID NO: 3164 - RNA, 20 nt, Artificial Sequence
  HTT spacer sequence ATCN PAM
caucucacucacauaaaugc

SEQ ID NO: 3165 - RNA, 20 nt, Artificial Sequence
  HTT spacer sequence ATCN PAM
uccagugacaucccaucuca

SEQ ID NO: 3166 - RNA, 20 nt, Artificial Sequence
  HTT spacer sequence ATCN PAM
ugcuacuccucugcucuaau

SEQ ID NO: 3167 - RNA, 20 nt, Artificial Sequence
  HTT spacer sequence ATCN PAM
gaauuucaaucuuaagugaa

SEQ ID NO: 3168 - RNA, 20 nt, Artificial Sequence
  HTT spacer sequence ATCN PAM
uaagugaacucuggcugaca

SEQ ID NO: 3169 - RNA, 20 nt, Artificial Sequence
  HTT spacer sequence ATCN PAM
gagcacugcaguggcuuccu

SEQ ID NO: 3170 - RNA, 20 nt, Artificial Sequence
  HTT spacer sequence ATCN PAM
agucagucauuccucacacu

SEQ ID NO: 3171 - RNA, 20 nt, Artificial Sequence
  HTT spacer sequence ATCN PAM
gguuuguauucagcugcaag

SEQ ID NO: 3172 - RNA, 20 nt, Artificial Sequence
  HTT spacer sequence ATCN PAM
ugcugcaauagcuuaaacug

SEQ ID NO: 3173 - RNA, 20 nt, Artificial Sequence
  HTT spacer sequence ATCN PAM
gaagacaaaaauaagucugg

SEQ ID NO: 3174 - RNA, 20 nt, Artificial Sequence
  HTT spacer sequence ATCN PAM
uugcacuccagcccggguga

SEQ ID NO: 3175 - RNA, 20 nt, Artificial Sequence
  HTT spacer sequence ATCN PAM
caucauugcacuccagcccg

SEQ ID NO: 3176 - RNA, 20 nt, Artificial Sequence
  HTT spacer sequence ATCN PAM
cagcucacuaaaaccucuac

SEQ ID NO: 3177 - RNA, 20 nt, Artificial Sequence
  HTT spacer sequence ATCN PAM
cuugaacccaggagguagag

SEQ ID NO: 3178 - RNA, 20 nt, Artificial Sequence
  HTT spacer sequence ATCN PAM
caguuacuugggaggcugag

SEQ ID NO: 3179 - RNA, 20 nt, Artificial Sequence
  HTT spacer sequence ATCN PAM
cuacuaaaaacacaaaaauu

SEQ ID NO: 3180 - RNA, 20 nt, Artificial Sequence
  HTT spacer sequence ATCN PAM
ccugaggucagaaguucgag

SEQ ID NO: 3181 - RNA, 20 nt, Artificial Sequence
  HTT spacer sequence ATCN PAM
acucgccucagccugccaaa

SEQ ID NO: 3182 - RNA, 20 nt, Artificial Sequence
  HTT spacer sequence ATCN PAM
cagcacuuuggcaggcugag

SEQ ID NO: 3183 - RNA, 20 nt, Artificial Sequence
  HTT spacer sequence ATCN PAM
agaauauauaaagaacuauu

SEQ ID NO: 3184 - RNA, 20 nt, Artificial Sequence
  HTT spacer sequence ATCN PAM
aguauccagaauauauaaag

SEQ ID NO: 3185 - RNA, 20 nt, Artificial Sequence
  HTT spacer sequence ATCN PAM
gauagaugauuuguaaaaac

SEQ ID NO: 3186 - RNA, 20 nt, Artificial Sequence
  HTT spacer sequence ATCN PAM
gauaagaauccaguauccag

SEQ ID NO: 3187 - RNA, 20 nt, Artificial Sequence
  HTT spacer sequence ATCN PAM
aucugauaagaauccaguau

SEQ ID NO: 3188 - RNA, 20 nt, Artificial Sequence
  HTT spacer sequence ATCN PAM
ucuaucugauaagaauccag

SEQ ID NO: 3189 - RNA, 20 nt, Artificial Sequence
  HTT spacer sequence ATCN PAM
aaaggaagggagaguuuuua

SEQ ID NO: 3190 - RNA, 20 nt, Artificial Sequence
  HTT spacer sequence ATCN PAM
agaaaguaaaaagacaaucc

SEQ ID NO: 3191 - RNA, 20 nt, Artificial Sequence
  HTT spacer sequence ATCN PAM
aaauuaaaaacuuuuacacu

SEQ ID NO: 3192 - RNA, 20 nt, Artificial Sequence
  HTT spacer sequence ATCN PAM
auuuugucuuugguugcugu

SEQ ID NO: 3193 - RNA, 20 nt, Artificial Sequence
  HTT spacer sequence ATCN PAM
aagaaaucauugucuaaucc

SEQ ID NO: 3194 - RNA, 20 nt, Artificial Sequence
  HTT spacer sequence ATCN PAM
uugucuaauccaaagucaaa

SEQ ID NO: 3195 - RNA, 20 nt, Artificial Sequence
  HTT spacer sequence ATCN PAM
aaagucaaaaagguuuacuc

SEQ ID NO: 3196 - RNA, 20 nt, Artificial Sequence
  HTT spacer sequence ATCN PAM
gacuuaaauguaaaacucua

SEQ ID NO: 3197 - RNA, 20 nt, Artificial Sequence
  HTT spacer sequence ATCN PAM
auuuugaguuaauuuuuaua

SEQ ID NO: 3198 - RNA, 20 nt, Artificial Sequence
  HTT spacer sequence ATCN PAM
uaguacccuuguugaaaauu

SEQ ID NO: 3199 - RNA, 20 nt, Artificial Sequence
  HTT spacer sequence ATCN PAM
uccuuaauuguauaaauuua

SEQ ID NO: 3200 - RNA, 20 nt, Artificial Sequence
  HTT spacer sequence ATCN PAM
acauaaagaccaacagguag

SEQ ID NO: 3201 - RNA, 20 nt, Artificial Sequence
  HTT spacer sequence ATCN PAM
ugugccaguaccauacaguc

SEQ ID NO: 3202 - RNA, 20 nt, Artificial Sequence
  HTT spacer sequence ATCN PAM
agacuguaugguacuggcac

SEQ ID NO: 3203 - RNA, 20 nt, Artificial Sequence
  HTT spacer sequence ATCN PAM
ugaaaaggaacaaaguugga

SEQ ID NO: 3204 - RNA, 20 nt, Artificial Sequence
  HTT spacer sequence ATCN PAM
aucuugaaaaggaacaaagu

SEQ ID NO: 3205 - RNA, 20 nt, Artificial Sequence
  HTT spacer sequence ATCN PAM
uacaauucguacggaaaugc

SEQ ID NO: 3206 - RNA, 20 nt, Artificial Sequence
  HTT spacer sequence ATCN PAM
gcuugucaguuucaacaaag

SEQ ID NO: 3207 - RNA, 20 nt, Artificial Sequence
  HTT spacer sequence ATCN PAM
uacuuggcuucuuuguugaa

SEQ ID NO: 3208 - RNA, 20 nt, Artificial Sequence
  HTT spacer sequence ATCN PAM
cucucagaauccuacuuggc

SEQ ID NO: 3209 - RNA, 20 nt, Artificial Sequence
  HTT spacer sequence ATCN PAM
guagaucaacuuggggagua

SEQ ID NO: 3210 - RNA, 20 nt, Artificial Sequence
  HTT spacer sequence ATCN PAM
acagauucaacacaaucccu

SEQ ID NO: 3211 - RNA, 20 nt, Artificial Sequence
  HTT spacer sequence ATCN PAM
acuuggggaguauucgcauc

SEQ ID NO: 3212 - RNA, 20 nt, Artificial Sequence
  HTT spacer sequence ATCN PAM
uaacaauauugucuuccacc

SEQ ID NO: 3213 - RNA, 20 nt, Artificial Sequence
  HTT spacer sequence ATCN PAM
gaccauuuacacaaaguuug

SEQ ID NO: 3214 - RNA, 20 nt, Artificial Sequence
  HTT spacer sequence ATCN PAM
caugacaggugaaaauuaua

SEQ ID NO: 3215 - RNA, 20 nt, Artificial Sequence
  HTT spacer sequence ATCN PAM
aauacuaucucaugacaggu

SEQ ID NO: 3216 - RNA, 20 nt, Artificial Sequence
  HTT spacer sequence ATCN PAM
uauuuuaaccuaggaguggg

SEQ ID NO: 3217 - RNA, 20 nt, Artificial Sequence
  HTT spacer sequence ATCN PAM
cgccacugcacuccagccug

SEQ ID NO: 3218 - RNA, 20 nt, Artificial Sequence
  HTT spacer sequence ATCN PAM
cggcucacugcaaccucugc

SEQ ID NO: 3219 - RNA, 20 nt, Artificial Sequence
  HTT spacer sequence ATCN PAM
cagcuacuagggaggccgug

SEQ ID NO: 3220 - RNA, 20 nt, Artificial Sequence
  HTT spacer sequence ATCN PAM
ccugaggucaggaguucaag

SEQ ID NO: 3221 - RNA, 20 nt, Artificial Sequence
  HTT spacer sequence ATCN PAM
acccgccucagccucccaaa

SEQ ID NO: 3222 - RNA, 20 nt, Artificial Sequence
  HTT spacer sequence ATCN PAM
cagcacuuugggaggcugag

SEQ ID NO: 3223 - RNA, 20 nt, Artificial Sequence
  HTT spacer sequence ATCN PAM
ucaagcagcacagaugaaaa

SEQ ID NO: 3224 - RNA, 20 nt, Artificial Sequence
  HTT spacer sequence ATCN PAM
gugcugcuugaagauauuuu

SEQ ID NO: 3225 - RNA, 20 nt, Artificial Sequence
  HTT spacer sequence ATCN PAM
uugucuaacuuccuaagaac

SEQ ID NO: 3226 - RNA, 20 nt, Artificial Sequence
  HTT spacer sequence ATCN PAM
gggaagaagacacaagaaac

SEQ ID NO: 3227 - RNA, 20 nt, Artificial Sequence
  HTT spacer sequence ATCN PAM
cagucaagcaaacaaaaaau

SEQ ID NO: 3228 - RNA, 20 nt, Artificial Sequence
  HTT spacer sequence ATCN PAM
cauuacauauguauuuuuuu

SEQ ID NO: 3229 - RNA, 20 nt, Artificial Sequence
  HTT spacer sequence ATCN PAM
augacacauuguuaaguaaa

SEQ ID NO: 3230 - RNA, 20 nt, Artificial Sequence
  HTT spacer sequence ATCN PAM
ccaaaaguccucuuuuaaaa

SEQ ID NO: 3231 - RNA, 20 nt, Artificial Sequence
  HTT spacer sequence ATCN PAM
ccaucaccuccauuuccugu

SEQ ID NO: 3232 - RNA, 20 nt, Artificial Sequence
  HTT spacer sequence ATCN PAM
ccuccauuuccuguaaauaa

SEQ ID NO: 3233 - RNA, 20 nt, Artificial Sequence
  HTT spacer sequence ATCN PAM
agugguugacuuauuuacag

SEQ ID NO: 3234 - RNA, 20 nt, Artificial Sequence
  HTT spacer sequence ATCN PAM
auucaaagguaguuuaucaa

SEQ ID NO: 3235 - RNA, 20 nt, Artificial Sequence
  HTT spacer sequence ATCN PAM
acacucaaaacauuuagucu

SEQ ID NO: 3236 - RNA, 20 nt, Artificial Sequence
  HTT spacer sequence ATCN PAM
aauuuaauacaauauuaaac

SEQ ID NO: 3237 - RNA, 20 nt, Artificial Sequence
  HTT spacer sequence ATCN PAM
auuugggggcuagaauguau

SEQ ID NO: 3238 - RNA, 20 nt, Artificial Sequence
  HTT spacer sequence ATCN PAM
ugucucuaacauacauucua

SEQ ID NO: 3239 - RNA, 20 nt, Artificial Sequence
  HTT spacer sequence ATCN PAM
cagugaggucucagggacag

SEQ ID NO: 3240 - RNA, 20 nt, Artificial Sequence
  HTT spacer sequence ATCN PAM
uuugggaucucauaagcaga

SEQ ID NO: 3241 - RNA, 20 nt, Artificial Sequence
  HTT spacer sequence ATCN PAM
caaaugauaccaaacgacug

SEQ ID NO: 3242 - RNA, 20 nt, Artificial Sequence
  HTT spacer sequence ATCN PAM
cauaagcagacucucucugc

SEQ ID NO: 3243 - RNA, 20 nt, Artificial Sequence
  HTT spacer sequence ATCN PAM
gagucuguguuuuaacaggu

SEQ ID NO: 3244 - RNA, 20 nt, Artificial Sequence
  HTT spacer sequence ATCN PAM
gcuguagggccguugagcau

SEQ ID NO: 3245 - RNA, 20 nt, Artificial Sequence
  HTT spacer sequence ATCN PAM
cagcuacagaaaugcucaac

SEQ ID NO: 3246 - RNA, 20 nt, Artificial Sequence
  HTT spacer sequence ATCN PAM
aagcgagucccacuaccaau

SEQ ID NO: 3247 - RNA, 20 nt, Artificial Sequence
  HTT spacer sequence ATCN PAM
gagcagccacuauggagaaa

SEQ ID NO: 3248 - RNA, 20 nt, Artificial Sequence
  HTT spacer sequence ATCN PAM
uuauuucugcccuucaccuu

SEQ ID NO: 3249 - RNA, 20 nt, Artificial Sequence
  HTT spacer sequence ATCN PAM
cucgcagccucauccuuauu

SEQ ID NO: 3250 - RNA, 20 nt, Artificial Sequence
  HTT spacer sequence ATCN PAM
uggugcacaagacgcucguc

SEQ ID NO: 3251 - RNA, 20 nt, Artificial Sequence
  HTT spacer sequence ATCN PAM
uuuaaaaacauaaauuaaac

SEQ ID NO: 3252 - RNA, 20 nt, Artificial Sequence
  HTT spacer sequence ATCN PAM
uuuuggcugggcacaauggu

SEQ ID NO: 3253 - RNA, 20 nt, Artificial Sequence
  HTT spacer sequence ATCN PAM
ucccaccacaccgucucaaa

SEQ ID NO: 3254 - RNA, 20 nt, Artificial Sequence
  HTT spacer sequence ATCN PAM
uccagccuccucagccuccu

SEQ ID NO: 3255 - RNA, 20 nt, Artificial Sequence
  HTT spacer sequence ATCN PAM
uagcucacugcagccucaaa

SEQ ID NO: 3256 - RNA, 20 nt, Artificial Sequence
  HTT spacer sequence ATCN PAM
aaaugcauauauauacauau

SEQ ID NO: 3257 - RNA, 20 nt, Artificial Sequence
  HTT spacer sequence ATCN PAM
uuucaucuaaaugcauauau

SEQ ID NO: 3258 - RNA, 20 nt, Artificial Sequence
  HTT spacer sequence ATCN PAM
cuuugacaauaccacaugcu

SEQ ID NO: 3259 - RNA, 20 nt, Artificial Sequence
  HTT spacer sequence ATCN PAM
ucaccagcaugugguauugu

SEQ ID NO: 3260 - RNA, 20 nt, Artificial Sequence
  HTT spacer sequence ATCN PAM
ugggcauuaauccuagagaa

SEQ ID NO: 3261 - RNA, 20 nt, Artificial Sequence
  HTT spacer sequence ATCN PAM
uagagaaaugaaaccuuaau

SEQ ID NO: 3262 - RNA, 20 nt, Artificial Sequence
  HTT spacer sequence ATCN PAM
aagaacuggaaucagcucag

SEQ ID NO: 3263 - RNA, 20 nt, Artificial Sequence
  HTT spacer sequence ATCN PAM
gcucagauguccuucaacag

SEQ ID NO: 3264 - RNA, 20 nt, Artificial Sequence
  HTT spacer sequence ATCN PAM
gagcugauuccaguucuuag

SEQ ID NO: 3265 - RNA, 20 nt, Artificial Sequence
  HTT spacer sequence ATCN PAM
guagcucauuccuuuuuauu

SEQ ID NO: 3266 - RNA, 20 nt, Artificial Sequence
  HTT spacer sequence ATCN PAM
caaaagguuauacauacugu

SEQ ID NO: 3267 - RNA, 20 nt, Artificial Sequence
  HTT spacer sequence ATCN PAM
uacaguauguauaaccuuuu

SEQ ID NO: 3268 - RNA, 20 nt, Artificial Sequence
  HTT spacer sequence ATCN PAM
cuaaaacugugccauugcaa

SEQ ID NO: 3269 - RNA, 20 nt, Artificial Sequence
  HTT spacer sequence ATCN PAM
auucuccaucccuaaaacug

SEQ ID NO: 3270 - RNA, 20 nt, Artificial Sequence
  HTT spacer sequence ATCN PAM
cuaaccccaggcaaccacua

SEQ ID NO: 3271 - RNA, 20 nt, Artificial Sequence
  HTT spacer sequence ATCN PAM
ugccacugcacuccagccug

SEQ ID NO: 3272 - RNA, 20 nt, Artificial Sequence
  HTT spacer sequence ATCN PAM
uuucucacugcaaccucugc

SEQ ID NO: 3273 - RNA, 20 nt, Artificial Sequence
  HTT spacer sequence ATCN PAM
cuugaacccaggaggcagag

SEQ ID NO: 3274 - RNA, 20 nt, Artificial Sequence
  HTT spacer sequence ATCN PAM
aaauaauccaacacacauga

SEQ ID NO: 3275 - RNA, 20 nt, Artificial Sequence
  HTT spacer sequence ATCN PAM
aacacacaugacauuaaaac

SEQ ID NO: 3276 - RNA, 20 nt, Artificial Sequence
  HTT spacer sequence ATCN PAM
agaucaggucggacguggug

SEQ ID NO: 3277 - RNA, 20 nt, Artificial Sequence
  HTT spacer sequence ATCN PAM
ugauguuuuaaugucaugug

SEQ ID NO: 3278 - RNA, 20 nt, Artificial Sequence
  HTT spacer sequence ATCN PAM
ggucggacgugguggcucau

SEQ ID NO: 3279 - RNA, 20 nt, Artificial Sequence
  HTT spacer sequence ATCN PAM
cagcacuuuugggaggccaa

SEQ ID NO: 3280 - RNA, 20 nt, Artificial Sequence
  HTT spacer sequence ATCN PAM
gcccaccuuggccucccaaa

SEQ ID NO: 3281 - RNA, 20 nt, Artificial Sequence
  HTT spacer sequence ATCN PAM
cuugaggucaggaguucgag

SEQ ID NO: 3282 - RNA, 20 nt, Artificial Sequence
  HTT spacer sequence ATCN PAM
uguuggcccggcuggucucg

SEQ ID NO: 3283 - RNA, 20 nt, Artificial Sequence
  HTT spacer sequence ATCN PAM
ugacuaaaaauacaaaaauu

SEQ ID NO: 3284 - RNA, 20 nt, Artificial Sequence
  HTT spacer sequence ATCN PAM
ccaaaaaaaaaaaaccaaga

SEQ ID NO: 3285 - RNA, 20 nt, Artificial Sequence
  HTT spacer sequence ATCN PAM
ugguuuuuuuuuuuuggaga

SEQ ID NO: 3286 - RNA, 20 nt, Artificial Sequence
  HTT spacer sequence ATCN PAM
auuaaaauacagcauuacug

SEQ ID NO: 3287 - RNA, 20 nt, Artificial Sequence
  HTT spacer sequence ATCN PAM
cagcacuuugggaggccgag

SEQ ID NO: 3288 - RNA, 20 nt, Artificial Sequence
  HTT spacer sequence ATCN PAM
cggccucccaaagugcuggg

SEQ ID NO: 3289 - RNA, 20 nt, Artificial Sequence
  HTT spacer sequence ATCN PAM
gcccaucucggccucccaaa

SEQ ID NO: 3290 - RNA, 20 nt, Artificial Sequence
  HTT spacer sequence ATCN PAM
cgaggucaggagauccagac

SEQ ID NO: 3291 - RNA, 20 nt, Artificial Sequence
  HTT spacer sequence ATCN PAM
ccugaccucgugaucugccc

SEQ ID NO: 3292 - RNA, 20 nt, Artificial Sequence
  HTT spacer sequence ATCN PAM
agaccaucccggcuaacacg

SEQ ID NO: 3293 - RNA, 20 nt, Artificial Sequence
  HTT spacer sequence ATCN PAM
cggcuaacacggugaaaccc

SEQ ID NO: 3294 - RNA, 20 nt, Artificial Sequence
  HTT spacer sequence ATCN PAM
cagcucacugccagcucugc

SEQ ID NO: 3295 - RNA, 20 nt, Artificial Sequence
  HTT spacer sequence ATCN PAM
cgccacugcacuccagccug

SEQ ID NO: 3296 - RNA, 20 nt, Artificial Sequence
  HTT spacer sequence ATCN PAM
gcacgggcacacaagcguaa

SEQ ID NO: 3297 - RNA, 20 nt, Artificial Sequence
  HTT spacer sequence ATCN PAM
agcaaucugcacgggcacac

SEQ ID NO: 3298 - RNA, 20 nt, Artificial Sequence
  HTT spacer sequence ATCN PAM
uccgccagccuccucuaauu

SEQ ID NO: 3299 - RNA, 20 nt, Artificial Sequence
  HTT spacer sequence ATCN PAM
uggugcacugcaaccucugc

SEQ ID NO: 3300 - RNA, 20 nt, Artificial Sequence
  HTT spacer sequence ATCN PAM
cagcuacucgggaggcugcg

SEQ ID NO: 3301 - RNA, 20 nt, Artificial Sequence
  HTT spacer sequence ATCN PAM
gaggucaggaguucgagacc

SEQ ID NO: 3302 - RNA, 20 nt, Artificial Sequence
  HTT spacer sequence ATCN PAM
ucugaggucaggaguucgag

SEQ ID NO: 3303 - RNA, 20 nt, Artificial Sequence
  HTT spacer sequence ATCN PAM
gcugccccagccucccaaag

SEQ ID NO: 3304 - RNA, 20 nt, Artificial Sequence
  HTT spacer sequence ATCN PAM
cagcacuuugggaggcuggg

SEQ ID NO: 3305 - RNA, 20 nt, Artificial Sequence
  HTT spacer sequence ATCN PAM
cuuuugguaaauguagucac

SEQ ID NO: 3306 - RNA, 20 nt, Artificial Sequence
  HTT spacer sequence ATCN PAM
ccauacuuacuuuucaugua

SEQ ID NO: 3307 - RNA, 20 nt, Artificial Sequence
  HTT spacer sequence ATCN PAM
guucaucaucuuaacuaaau

SEQ ID NO: 3308 - RNA, 20 nt, Artificial Sequence
  HTT spacer sequence ATCN PAM
ucuuaacuaaauuccauggg

SEQ ID NO: 3309 - RNA, 20 nt, Artificial Sequence
  HTT spacer sequence ATCN PAM
uaacuaaauuccauggggga

SEQ ID NO: 3310 - RNA, 20 nt, Artificial Sequence
  HTT spacer sequence ATCN PAM
cauuuuguccaauaagcaaa

SEQ ID NO: 3311 - RNA, 20 nt, Artificial Sequence
  HTT spacer sequence ATCN PAM
aacuuaaaaacacugccuug

SEQ ID NO: 3312 - RNA, 20 nt, Artificial Sequence
  HTT spacer sequence ATCN PAM
aaaacauaggaccaacuaaa

SEQ ID NO: 3313 - RNA, 20 nt, Artificial Sequence
  HTT spacer sequence ATCN PAM
ccccucucuacuuuauuuug

SEQ ID NO: 3314 - RNA, 20 nt, Artificial Sequence
  HTT spacer sequence ATCN PAM
aaauaaaguagagaggggug

SEQ ID NO: 3315 - RNA, 20 nt, Artificial Sequence
  HTT spacer sequence ATCN PAM
gaagccauagguuuggaugg

SEQ ID NO: 3316 - RNA, 20 nt, Artificial Sequence
  HTT spacer sequence ATCN PAM
aaaccuauggcuucagaugu

SEQ ID NO: 3317 - RNA, 20 nt, Artificial Sequence
  HTT spacer sequence ATCN PAM
uuagccugaucaucuucgcc

SEQ ID NO: 3318 - RNA, 20 nt, Artificial Sequence
  HTT spacer sequence ATCN PAM
ggcuaaagaugccuccuucc

SEQ ID NO: 3319 - RNA, 20 nt, Artificial Sequence
  HTT spacer sequence ATCN PAM
ucuucgccaggcuguuuauc

SEQ ID NO: 3320 - RNA, 20 nt, Artificial Sequence
  HTT spacer sequence ATCN PAM
ucgccaggcuguuuaucucc

SEQ ID NO: 3321 - RNA, 20 nt, Artificial Sequence
  HTT spacer sequence ATCN PAM
ccuuuugcuuggcugagaag

SEQ ID NO: 3322 - RNA, 20 nt, Artificial Sequence
  HTT spacer sequence ATCN PAM
acauaccacacagaccucag

SEQ ID NO: 3323 - RNA, 20 nt, Artificial Sequence
  HTT spacer sequence ATCN PAM
uuaacugacuacaaucaaca

SEQ ID NO: 3324 - RNA, 20 nt, Artificial Sequence
  HTT spacer sequence ATCN PAM
cuuguaaucuaugccaucau

SEQ ID NO: 3325 - RNA, 20 nt, Artificial Sequence
  HTT spacer sequence ATCN PAM
augccaucaucuucuguacu

SEQ ID NO: 3326 - RNA, 20 nt, Artificial Sequence
  HTT spacer sequence ATCN PAM
ucuucuguacugcugagaaa

SEQ ID NO: 3327 - RNA, 20 nt, Artificial Sequence
  HTT spacer sequence ATCN PAM
ucuguacugcugagaaagaa

SEQ ID NO: 3328 - RNA, 20 nt, Artificial Sequence
  HTT spacer sequence ATCN PAM
aacuauaccacugguuguaa

SEQ ID NO: 3329 - RNA, 20 nt, Artificial Sequence
  HTT spacer sequence ATCN PAM
uacaaccagugguauaguuu

SEQ ID NO: 3330 - RNA, 20 nt, Artificial Sequence
  HTT spacer sequence ATCN PAM
cuaaagccaaacugcaucuu

SEQ ID NO: 3331 - RNA, 20 nt, Artificial Sequence
  HTT spacer sequence ATCN PAM
uguguuaacaucacuaaagc

SEQ ID NO: 3332 - RNA, 20 nt, Artificial Sequence
  HTT spacer sequence ATCN PAM
auuucacguuugaaucaugu

SEQ ID NO: 3333 - RNA, 20 nt, Artificial Sequence
  HTT spacer sequence ATCN PAM
ccucuguauuucaccaauac

SEQ ID NO: 3334 - RNA, 20 nt, Artificial Sequence
  HTT spacer sequence ATCN PAM
gugugaucuugggcauguca

SEQ ID NO: 3335 - RNA, 20 nt, Artificial Sequence
  HTT spacer sequence ATCN PAM
cacagauaugaagucauaca

SEQ ID NO: 3336 - RNA, 20 nt, Artificial Sequence
  HTT spacer sequence ATCN PAM
ugggcaugucaugguuggca

SEQ ID NO: 3337 - RNA, 20 nt, Artificial Sequence
  HTT spacer sequence ATCN PAM
cagugcuuugggaggccaag

SEQ ID NO: 3338 - RNA, 20 nt, Artificial Sequence
  HTT spacer sequence ATCN PAM
uggccucccaaagcacuggg

SEQ ID NO: 3339 - RNA, 20 nt, Artificial Sequence
  HTT spacer sequence ATCN PAM
ucccaucuuggccucccaaa

SEQ ID NO: 3340 - RNA, 20 nt, Artificial Sequence
  HTT spacer sequence ATCN PAM
cuugaggccaggaguuugag

SEQ ID NO: 3341 - RNA, 20 nt, Artificial Sequence
  HTT spacer sequence ATCN PAM
ugaggccccgucucuacaaa

SEQ ID NO: 3342 - RNA, 20 nt, Artificial Sequence
  HTT spacer sequence ATCN PAM
ucccgucucagccuccugag

SEQ ID NO: 3343 - RNA, 20 nt, Artificial Sequence
  HTT spacer sequence ATCN PAM
uuucagccuaggaguuuaag

SEQ ID NO: 3344 - RNA, 20 nt, Artificial Sequence
  HTT spacer sequence ATCN PAM
uggcucacuuuagccuuaaa

SEQ ID NO: 3345 - RNA, 20 nt, Artificial Sequence
  HTT spacer sequence ATCN PAM
uacuccagccugggcagcag

SEQ ID NO: 3346 - RNA, 20 nt, Artificial Sequence
  HTT spacer sequence ATCN PAM
ugcucugcugcccaggcugg

SEQ ID NO: 3347 - RNA, 20 nt, Artificial Sequence
  HTT spacer sequence ATCN PAM
ugacucuaaaaaaaaguaaa

SEQ ID NO: 3348 - RNA, 20 nt, Artificial Sequence
  HTT spacer sequence ATCN PAM
ucuguuuuuucugugagcag

SEQ ID NO: 3349 - RNA, 20 nt, Artificial Sequence
  HTT spacer sequence ATCN PAM
guuuuuucugugagcagcgu

SEQ ID NO: 3350 - RNA, 20 nt, Artificial Sequence
  HTT spacer sequence ATCN PAM
ggacagggaagcacagggca

SEQ ID NO: 3351 - RNA, 20 nt, Artificial Sequence
  HTT spacer sequence ATCN PAM
ccauucugcccgcaacaugg

SEQ ID NO: 3352 - RNA, 20 nt, Artificial Sequence
  HTT spacer sequence ATCN PAM
uugucugacaauaugugaaa

SEQ ID NO: 3353 - RNA, 20 nt, Artificial Sequence
  HTT spacer sequence ATCN PAM
auuuaaaauagcugggacac

SEQ ID NO: 3354 - RNA, 20 nt, Artificial Sequence
  HTT spacer sequence ATCN PAM
auuuaagaugaagaaggacc

SEQ ID NO: 3355 - RNA, 20 nt, Artificial Sequence
  HTT spacer sequence ATCN PAM
uaaauggauuucugaaucca

SEQ ID NO: 3356 - RNA, 20 nt, Artificial Sequence
  HTT spacer sequence ATCN PAM
uuguauauagccagaaauau

SEQ ID NO: 3357 - RNA, 20 nt, Artificial Sequence
  HTT spacer sequence ATCN PAM
agacacugaaaugaauaaug

SEQ ID NO: 3358 - RNA, 20 nt, Artificial Sequence
  HTT spacer sequence ATCN PAM
uuuaugcaaaaauuaaaacc

SEQ ID NO: 3359 - RNA, 20 nt, Artificial Sequence
  HTT spacer sequence ATCN PAM
augguuugauauuuuugcau

SEQ ID NO: 3360 - RNA, 20 nt, Artificial Sequence
  HTT spacer sequence ATCN PAM
aaccauagaugguuuuaaaa

SEQ ID NO: 3361 - RNA, 20 nt, Artificial Sequence
  HTT spacer sequence ATCN PAM
cgaagcacagaggagugggc

SEQ ID NO: 3362 - RNA, 20 nt, Artificial Sequence
  HTT spacer sequence ATCN PAM
ccacuaaucccgaagcacag

SEQ ID NO: 3363 - RNA, 20 nt, Artificial Sequence
  HTT spacer sequence ATCN PAM
uggggcauugacuguagguc

SEQ ID NO: 3364 - RNA, 20 nt, Artificial Sequence
  HTT spacer sequence ATCN PAM
agcaaggaaagcugaccuac

SEQ ID NO: 3365 - RNA, 20 nt, Artificial Sequence
  HTT spacer sequence ATCN PAM
uucucacugggaugaacuag

SEQ ID NO: 3366 - RNA, 20 nt, Artificial Sequence
  HTT spacer sequence ATCN PAM
cagugagaaagaucaagcaa

SEQ ID NO: 3367 - RNA, 20 nt, Artificial Sequence
  HTT spacer sequence ATCN PAM
uucugaccguuguuccuagu

SEQ ID NO: 3368 - RNA, 20 nt, Artificial Sequence
  HTT spacer sequence ATCN PAM
acagcuacuaggaacaacgg

SEQ ID NO: 3369 - RNA, 20 nt, Artificial Sequence
  HTT spacer sequence ATCN PAM
uaggugaauaugucuccuac

SEQ ID NO: 3370 - RNA, 20 nt, Artificial Sequence
  HTT spacer sequence ATCN PAM
gaauucuguuacccacaugg

SEQ ID NO: 3371 - RNA, 20 nt, Artificial Sequence
  HTT spacer sequence ATCN PAM
ugauuuuaguacugacaaaa

SEQ ID NO: 3372 - RNA, 20 nt, Artificial Sequence
  HTT spacer sequence ATCN PAM
agauuauuugucuaaaaauu

SEQ ID NO: 3373 - RNA, 20 nt, Artificial Sequence
  HTT spacer sequence ATCN PAM
ccacacguuuuugucaguac

SEQ ID NO: 3374 - RNA, 20 nt, Artificial Sequence
  HTT spacer sequence ATCN PAM
cgccauugcacuccagccug

SEQ ID NO: 3375 - RNA, 20 nt, Artificial Sequence
  HTT spacer sequence ATCN PAM
cggcucacugcaaccucugc

SEQ ID NO: 3376 - RNA, 20 nt, Artificial Sequence
  HTT spacer sequence ATCN PAM
cuugaacccaggaggcagag

SEQ ID NO: 3377 - RNA, 20 nt, Artificial Sequence
  HTT spacer sequence ATCN PAM
cuacuaaaaauacaaaauua

SEQ ID NO: 3378 - RNA, 20 nt, Artificial Sequence
  HTT spacer sequence ATCN PAM
gccugaccaacaucucuacu

SEQ ID NO: 3379 - RNA, 20 nt, Artificial Sequence
  HTT spacer sequence ATCN PAM
cgaacucccaaccuuaggug

SEQ ID NO: 3380 - RNA, 20 nt, Artificial Sequence
  HTT spacer sequence ATCN PAM
ccuaagguugggaguucgag

SEQ ID NO: 3381 - RNA, 20 nt, Artificial Sequence
  HTT spacer sequence ATCN PAM
gcccgccucagccucccaaa

SEQ ID NO: 3382 - RNA, 20 nt, Artificial Sequence
  HTT spacer sequence ATCN PAM
cagcacuuugggaggcugag

SEQ ID NO: 3383 - RNA, 20 nt, Artificial Sequence
  HTT spacer sequence ATCN PAM
ccgggcgcccuggcucacgc

SEQ ID NO: 3384 - RNA, 20 nt, Artificial Sequence
  HTT spacer sequence ATCN PAM
ugacuccgucucaaaaaaaa

SEQ ID NO: 3385 - RNA, 20 nt, Artificial Sequence
  HTT spacer sequence ATCN PAM
gucacccaggcuggagugca

SEQ ID NO: 3386 - RNA, 20 nt, Artificial Sequence
  HTT spacer sequence ATCN PAM
ugccacugcacuccagccug

SEQ ID NO: 3387 - RNA, 20 nt, Artificial Sequence
  HTT spacer sequence ATCN PAM
uggcuuacugcaagcucugc

SEQ ID NO: 3388 - RNA, 20 nt, Artificial Sequence
  HTT spacer sequence ATCN PAM
cuacuaaaaauacaaaaaau

SEQ ID NO: 3389 - RNA, 20 nt, Artificial Sequence
  HTT spacer sequence ATCN PAM
agaccacggugaaaccccau

SEQ ID NO: 3390 - RNA, 20 nt, Artificial Sequence
  HTT spacer sequence ATCN PAM
ccugaccucaugacccgcuc

SEQ ID NO: 3391 - RNA, 20 nt, Artificial Sequence
  HTT spacer sequence ATCN PAM
cagcacuuugggaggcugag

SEQ ID NO: 3392 - RNA, 20 nt, Artificial Sequence
  HTT spacer sequence ATCN PAM
cugccaucuacuucauaagu

SEQ ID NO: 3393 - RNA, 20 nt, Artificial Sequence
  HTT spacer sequence ATCN PAM
acuucauaaguuuuucuucu

SEQ ID NO: 3394 - RNA, 20 nt, Artificial Sequence
  HTT spacer sequence ATCN PAM
gucuucauuaaacucccuau

SEQ ID NO: 3395 - RNA, 20 nt, Artificial Sequence
  HTT spacer sequence ATCN PAM
uccauucuuuccuguagucc

SEQ ID NO: 3396 - RNA, 20 nt, Artificial Sequence
  HTT spacer sequence ATCN PAM
auucuuuccuguagucccuu

SEQ ID NO: 3397 - RNA, 20 nt, Artificial Sequence
  HTT spacer sequence ATCN PAM
acuuacaugaggucuccaga

SEQ ID NO: 3398 - RNA, 20 nt, Artificial Sequence
  HTT spacer sequence ATCN PAM
uguaggaauccacuuacaug

SEQ ID NO: 3399 - RNA, 20 nt, Artificial Sequence
  HTT spacer sequence ATCN PAM
ccaaaaaaaaaacacaaauc

SEQ ID NO: 3400 - RNA, 20 nt, Artificial Sequence
  HTT spacer sequence ATCN PAM
gcuuauuuuuaaugccucug

SEQ ID NO: 3401 - RNA, 20 nt, Artificial Sequence
  HTT spacer sequence ATCN PAM
cuuugaaaguauauaauaca

SEQ ID NO: 3402 - RNA, 20 nt, Artificial Sequence
  HTT spacer sequence ATCN PAM
uacacaguauuucacaaaca

SEQ ID NO: 3403 - RNA, 20 nt, Artificial Sequence
  HTT spacer sequence ATCN PAM
uagcguuguauucuacaaua

SEQ ID NO: 3404 - RNA, 20 nt, Artificial Sequence
  HTT spacer sequence ATCN PAM
cugcuaccuguguaagcugg

SEQ ID NO: 3405 - RNA, 20 nt, Artificial Sequence
  HTT spacer sequence ATCN PAM
aaagucacccagcuuacaca

SEQ ID NO: 3406 - RNA, 20 nt, Artificial Sequence
  HTT spacer sequence ATCN PAM
cuaguuacacaguucuugug

SEQ ID NO: 3407 - RNA, 20 nt, Artificial Sequence
  HTT spacer sequence ATCN PAM
cacaagaacuguguaacuag

SEQ ID NO: 3408 - RNA, 20 nt, Artificial Sequence
  HTT spacer sequence ATCN PAM
gaugguacaugugaaacacu

SEQ ID NO: 3409 - RNA, 20 nt, Artificial Sequence
  HTT spacer sequence ATCN PAM
gaucccacaagaacugugua

SEQ ID NO: 3410 - RNA, 20 nt, Artificial Sequence
  HTT spacer sequence ATCN PAM
augcaguugcuuuuucacag

SEQ ID NO: 3411 - RNA, 20 nt, Artificial Sequence
  HTT spacer sequence ATCN PAM
cauugcgaugcccaucaucc

SEQ ID NO: 3412 - RNA, 20 nt, Artificial Sequence
  HTT spacer sequence ATCN PAM
caaugggauacgcuucccgc

SEQ ID NO: 3413 - RNA, 20 nt, Artificial Sequence
  HTT spacer sequence ATCN PAM
uccaaagcuauauguuaucu

SEQ ID NO: 3414 - RNA, 20 nt, Artificial Sequence
  HTT spacer sequence ATCN PAM
aaagcuauauguuaucuuua

SEQ ID NO: 3415 - RNA, 20 nt, Artificial Sequence
  HTT spacer sequence ATCN PAM
uuacuuuuuuuuuuuugaga

SEQ ID NO: 3416 - RNA, 20 nt, Artificial Sequence
  HTT spacer sequence ATCN PAM
cagcucacugcaagcuccac

SEQ ID NO: 3417 - RNA, 20 nt, Artificial Sequence
  HTT spacer sequence ATCN PAM
cuacuaaaaauacaaaaauu

SEQ ID NO: 3418 - RNA, 20 nt, Artificial Sequence
  HTT spacer sequence ATCN PAM
uggcuaacacggugaaaccc

SEQ ID NO: 3419 - RNA, 20 nt, Artificial Sequence
  HTT spacer sequence ATCN PAM
agaccauccuggcuaacacg

SEQ ID NO: 3420 - RNA, 20 nt, Artificial Sequence
  HTT spacer sequence ATCN PAM
ccugaccucgugauccgccc

SEQ ID NO: 3421 - RNA, 20 nt, Artificial Sequence
  HTT spacer sequence ATCN PAM
cgaggucaggagaucaagac

SEQ ID NO: 3422 - RNA, 20 nt, Artificial Sequence
  HTT spacer sequence ATCN PAM
gcccgccucggccucccaaa

SEQ ID NO: 3423 - RNA, 20 nt, Artificial Sequence
  HTT spacer sequence ATCN PAM
cagcacuuugggaggccgag

SEQ ID NO: 3424 - RNA, 20 nt, Artificial Sequence
  HTT spacer sequence ATCN PAM
uuacuuuuuuugugaaauga

SEQ ID NO: 3425 - RNA, 20 nt, Artificial Sequence
  HTT spacer sequence ATCN PAM
gaucuccaccauccaggucu

SEQ ID NO: 3426 - RNA, 20 nt, Artificial Sequence
  HTT spacer sequence ATCN PAM
gaugaacaaugaccaaaugu

SEQ ID NO: 3427 - RNA, 20 nt, Artificial Sequence
  HTT spacer sequence ATCN PAM
ccaccauccaggucucagag

SEQ ID NO: 3428 - RNA, 20 nt, Artificial Sequence
  HTT spacer sequence ATCN PAM
aggucucagagaacauaauu

SEQ ID NO: 3429 - RNA, 20 nt, Artificial Sequence
  HTT spacer sequence ATCN PAM
uauuuccugggucaauaagc

SEQ ID NO: 3430 - RNA, 20 nt, Artificial Sequence
  HTT spacer sequence ATCN PAM
cuuucaaucugagugcguca

SEQ ID NO: 3431 - RNA, 20 nt, Artificial Sequence
  HTT spacer sequence ATCN PAM
gagugcgucaggcuuuauuc

SEQ ID NO: 3432 - RNA, 20 nt, Artificial Sequence
  HTT spacer sequence ATCN PAM
aaagacaaaaugacaagaau

SEQ ID NO: 3433 - RNA, 20 nt, Artificial Sequence
  HTT spacer sequence ATCN PAM
uaagauugauuugugguucu

SEQ ID NO: 3434 - RNA, 20 nt, Artificial Sequence
  HTT spacer sequence ATCN PAM
uaagaugucucaacauacuu

SEQ ID NO: 3435 - RNA, 20 nt, Artificial Sequence
  HTT spacer sequence ATCN PAM
aucuuaagaugucucaacau

SEQ ID NO: 3436 - RNA, 20 nt, Artificial Sequence
  HTT spacer sequence ATCN PAM
aaauaauagcuguuaauggu

SEQ ID NO: 3437 - RNA, 20 nt, Artificial Sequence
  HTT spacer sequence ATCN PAM
uaugaaaccaagaauaaccu

SEQ ID NO: 3438 - RNA, 20 nt, Artificial Sequence
  HTT spacer sequence ATCN PAM
cuaaaaaguauagaguguau

SEQ ID NO: 3439 - RNA, 20 nt, Artificial Sequence
  HTT spacer sequence ATCN PAM
ccuucagcuauauacucuga

SEQ ID NO: 3440 - RNA, 20 nt, Artificial Sequence
  HTT spacer sequence ATCN PAM
cuguuuccuguuaacucucc

SEQ ID NO: 3441 - RNA, 20 nt, Artificial Sequence
  HTT spacer sequence ATCN PAM
auacuuaggaaccaguaacu

SEQ ID NO: 3442 - RNA, 20 nt, Artificial Sequence
  HTT spacer sequence ATCN PAM
aaaucaucuggaaaauuugu

SEQ ID NO: 3443 - RNA, 20 nt, Artificial Sequence
  HTT spacer sequence ATCN PAM
ucuggaaaauuuguuaaaaa

SEQ ID NO: 3444 - RNA, 20 nt, Artificial Sequence
  HTT spacer sequence ATCN PAM
ggaaaauuuguuaaaaauac

SEQ ID NO: 3445 - RNA, 20 nt, Artificial Sequence
  HTT spacer sequence ATCN PAM
ucuugggaauacccaggaau

SEQ ID NO: 3446 - RNA, 20 nt, Artificial Sequence
  HTT spacer sequence ATCN PAM
agguacauauuaguaagagg

SEQ ID NO: 3447 - RNA, 20 nt, Artificial Sequence
  HTT spacer sequence ATCN PAM
auagaucucccauauauuag

SEQ ID NO: 3448 - RNA, 20 nt, Artificial Sequence
  HTT spacer sequence ATCN PAM
auggauuuuuguauauuuau

SEQ ID NO: 3449 - RNA, 20 nt, Artificial Sequence
  HTT spacer sequence ATCN PAM
cccauauauuagcauaaauc

SEQ ID NO: 3450 - RNA, 20 nt, Artificial Sequence
  HTT spacer sequence ATCN PAM
gcuagaaaauauaacguuua

SEQ ID NO: 3451 - RNA, 20 nt, Artificial Sequence
  HTT spacer sequence ATCN PAM
uuaaacguuauauuuucuag

SEQ ID NO: 3452 - RNA, 20 nt, Artificial Sequence
  HTT spacer sequence ATCN PAM
aguucacaguagcaccaaua

SEQ ID NO: 3453 - RNA, 20 nt, Artificial Sequence
  HTT spacer sequence ATCN PAM
aacucuaaggaaucgauaaa

SEQ ID NO: 3454 - RNA, 20 nt, Artificial Sequence
  HTT spacer sequence ATCN PAM
auaaauaugcaaaaacuuua

SEQ ID NO: 3455 - RNA, 20 nt, Artificial Sequence
  HTT spacer sequence ATCN PAM
auuccuuagaguucgauaua

SEQ ID NO: 3456 - RNA, 20 nt, Artificial Sequence
  HTT spacer sequence ATCN PAM
uucagaaacauuaacagaag

SEQ ID NO: 3457 - RNA, 20 nt, Artificial Sequence
  HTT spacer sequence ATCN PAM
agaaaguggucaccuauauc

SEQ ID NO: 3458 - RNA, 20 nt, Artificial Sequence
  HTT spacer sequence ATCN PAM
uccuaucuagaaagugguca

SEQ ID NO: 3459 - RNA, 20 nt, Artificial Sequence
  HTT spacer sequence ATCN PAM
ugaucaaaauucuaguagag

SEQ ID NO: 3460 - RNA, 20 nt, Artificial Sequence
  HTT spacer sequence ATCN PAM
agauuauuuuaaauuucugu

SEQ ID NO: 3461 - RNA, 20 nt, Artificial Sequence
  HTT spacer sequence ATCN PAM
aaauucuaguagagguauuu

SEQ ID NO: 3462 - RNA, 20 nt, Artificial Sequence
  HTT spacer sequence ATCN PAM
caaaaucaucaccaggccug

SEQ ID NO: 3463 - RNA, 20 nt, Artificial Sequence
  HTT spacer sequence ATCN PAM
ucaccaggccugguguggug

SEQ ID NO: 3464 - RNA, 20 nt, Artificial Sequence
  HTT spacer sequence ATCN PAM
ccaggccuggugugguggcc

SEQ ID NO: 3465 - RNA, 20 nt, Artificial Sequence
  HTT spacer sequence ATCN PAM
cagcacuuugggaggcugag

SEQ ID NO: 3466 - RNA, 20 nt, Artificial Sequence
  HTT spacer sequence ATCN PAM
gccugccucagccucccaaa

SEQ ID NO: 3467 - RNA, 20 nt, Artificial Sequence
  HTT spacer sequence ATCN PAM
ccugaggucaagaguuugag

SEQ ID NO: 3468 - RNA, 20 nt, Artificial Sequence
  HTT spacer sequence ATCN PAM
aggcucaccgcaaccuguac

SEQ ID NO: 3469 - RNA, 20 nt, Artificial Sequence
  HTT spacer sequence ATCN PAM
caccacugcauuccagccug

SEQ ID NO: 3470 - RNA, 20 nt, Artificial Sequence
  HTT spacer sequence ATCN PAM
acacuaauauggugagacuu

SEQ ID NO: 3471 - RNA, 20 nt, Artificial Sequence
  HTT spacer sequence ATCN PAM
cuauuuuaaugucacauaca

SEQ ID NO: 3472 - RNA, 20 nt, Artificial Sequence
  HTT spacer sequence ATCN PAM
aaucacuauuuuaaugucac

SEQ ID NO: 3473 - RNA, 20 nt, Artificial Sequence
  HTT spacer sequence ATCN PAM
guaugaauuuaugaugggug

SEQ ID NO: 3474 - RNA, 20 nt, Artificial Sequence
  HTT spacer sequence ATCN PAM
uaaauucauacagauacaca

SEQ ID NO: 3475 - RNA, 20 nt, Artificial Sequence
  HTT spacer sequence ATCN PAM
uuucccucauuucccuaaua

SEQ ID NO: 3476 - RNA, 20 nt, Artificial Sequence
  HTT spacer sequence ATCN PAM
cuaccucauauugcaaacaa

SEQ ID NO: 3477 - RNA, 20 nt, Artificial Sequence
  HTT spacer sequence ATCN PAM
gaacuuuauguuuguuugca

SEQ ID NO: 3478 - RNA, 20 nt, Artificial Sequence
  HTT spacer sequence ATCN PAM
uaguuugaggaagguuaaca

SEQ ID NO: 3479 - RNA, 20 nt, Artificial Sequence
  HTT spacer sequence ATCN PAM
accuucaacaaaauugaaag

SEQ ID NO: 3480 - RNA, 20 nt, Artificial Sequence
  HTT spacer sequence ATCN PAM
auaugcugucaauacuuucc

SEQ ID NO: 3481 - RNA, 20 nt, Artificial Sequence
  HTT spacer sequence ATCN PAM
aagguuacuagccuguguaa

SEQ ID NO: 3482 - RNA, 20 nt, Artificial Sequence
  HTT spacer sequence ATCN PAM
uuaagaaaaacacugucgac

SEQ ID NO: 3483 - RNA, 20 nt, Artificial Sequence
  HTT spacer sequence ATCN PAM
gcuugaguuucuauaacaaa

SEQ ID NO: 3484 - RNA, 20 nt, Artificial Sequence
  HTT spacer sequence ATCN PAM
guagacugaaacugaaacaa

SEQ ID NO: 3485 - RNA, 20 nt, Artificial Sequence
  HTT spacer sequence ATCN PAM
gaauauucuuaauguuugcc

SEQ ID NO: 3486 - RNA, 20 nt, Artificial Sequence
  HTT spacer sequence ATCN PAM
ccucugacaaaaaucugaau

SEQ ID NO: 3487 - RNA, 20 nt, Artificial Sequence
  HTT spacer sequence ATCN PAM
aaagcuuuauauuuucccaa

SEQ ID NO: 3488 - RNA, 20 nt, Artificial Sequence
  HTT spacer sequence ATCN PAM
uuacacacuuuccuaggggu

SEQ ID NO: 3489 - RNA, 20 nt, Artificial Sequence
  HTT spacer sequence ATCN PAM
cauuagaaaauuaaaaauaa

SEQ ID NO: 3490 - RNA, 20 nt, Artificial Sequence
  HTT spacer sequence ATCN PAM
ccuuuuagugguaggccauu

SEQ ID NO: 3491 - RNA, 20 nt, Artificial Sequence
  HTT spacer sequence ATCN PAM
uaaauuuucaauccccuuuu

SEQ ID NO: 3492 - RNA, 20 nt, Artificial Sequence
  HTT spacer sequence ATCN PAM
caauaaacacauaaauaaau

SEQ ID NO: 3493 - RNA, 20 nt, Artificial Sequence
  HTT spacer sequence ATCN PAM
caccauugcacucuggccca

SEQ ID NO: 3494 - RNA, 20 nt, Artificial Sequence
  HTT spacer sequence ATCN PAM
cggcucacugcaaccucugc

SEQ ID NO: 3495 - RNA, 20 nt, Artificial Sequence
  HTT spacer sequence ATCN PAM
caugaacccgggaagcagag

SEQ ID NO: 3496 - RNA, 20 nt, Artificial Sequence
  HTT spacer sequence ATCN PAM
cagcuacucaggaggcugag

SEQ ID NO: 3497 - RNA, 20 nt, Artificial Sequence
  HTT spacer sequence ATCN PAM
cuacuaaaaauacaaaaaau

SEQ ID NO: 3498 - RNA, 20 nt, Artificial Sequence
  HTT spacer sequence ATCN PAM
ugaggucaggaguucgagac

SEQ ID NO: 3499 - RNA, 20 nt, Artificial Sequence
  HTT spacer sequence ATCN PAM
gcgccccucggccucccagu

SEQ ID NO: 3500 - RNA, 20 nt, Artificial Sequence
  HTT spacer sequence ATCN PAM
caacacugggaggccgaggg

SEQ ID NO: 3501 - RNA, 20 nt, Artificial Sequence
  HTT spacer sequence ATCN PAM
ggccaggcgcaguggcucac

SEQ ID NO: 3502 - RNA, 20 nt, Artificial Sequence
  HTT spacer sequence ATCN PAM
augaauguuaacuaacauuc

SEQ ID NO: 3503 - RNA, 20 nt, Artificial Sequence
  HTT spacer sequence ATCN PAM
ugucucuaaaaaaaauuuuu

SEQ ID NO: 3504 - RNA, 20 nt, Artificial Sequence
  HTT spacer sequence ATCN PAM
uacucugucacccaggcagg

SEQ ID NO: 3505 - RNA, 20 nt, Artificial Sequence
  HTT spacer sequence ATCN PAM
ugccugggugacagaguaag

SEQ ID NO: 3506 - RNA, 20 nt, Artificial Sequence
  HTT spacer sequence ATCN PAM
uagcccacugcagccugaac

SEQ ID NO: 3507 - RNA, 20 nt, Artificial Sequence
  HTT spacer sequence ATCN PAM
cuuaagcccaggaguucagg

SEQ ID NO: 3508 - RNA, 20 nt, Artificial Sequence
  HTT spacer sequence ATCN PAM
uucugccucagccuuuugag

SEQ ID NO: 3509 - RNA, 20 nt, Artificial Sequence
  HTT spacer sequence ATCN PAM
auaaaacauuuaaaaauuag

SEQ ID NO: 3510 - RNA, 20 nt, Artificial Sequence
  HTT spacer sequence ATCN PAM
caucuauaaaacauuuaaaa

SEQ ID NO: 3511 - RNA, 20 nt, Artificial Sequence
  HTT spacer sequence ATCN PAM
ugcuguauugcccaggcugg

SEQ ID NO: 3512 - RNA, 20 nt, Artificial Sequence
  HTT spacer sequence ATCN PAM
cuugggcccaggaauucuag

SEQ ID NO: 3513 - RNA, 20 nt, Artificial Sequence
  HTT spacer sequence ATCN PAM
ucccaccuuggccucccaaa

SEQ ID NO: 3514 - RNA, 20 nt, Artificial Sequence
  HTT spacer sequence ATCN PAM
cagcgcuuugggaggccaag

SEQ ID NO: 3515 - RNA, 20 nt, Artificial Sequence
  HTT spacer sequence ATCN PAM
auuggucagaagugguggcu

SEQ ID NO: 3516 - RNA, 20 nt, Artificial Sequence
  HTT spacer sequence ATCN PAM
uucauuauuuuuuaacugaa

SEQ ID NO: 3517 - RNA, 20 nt, Artificial Sequence
  HTT spacer sequence ATCN PAM
uagccagaagcaaaaaucuu

SEQ ID NO: 3518 - RNA, 20 nt, Artificial Sequence
  HTT spacer sequence ATCN PAM
ucuugccuugaaauaguuga

SEQ ID NO: 3519 - RNA, 20 nt, Artificial Sequence
  HTT spacer sequence ATCN PAM
ggcaaagaagaauaguuauc

SEQ ID NO: 3520 - RNA, 20 nt, Artificial Sequence
  HTT spacer sequence ATCN PAM
caggaaaaugaauguggaga

SEQ ID NO: 3521 - RNA, 20 nt, Artificial Sequence
  HTT spacer sequence ATCN PAM
cugcacucccagcucugccu

SEQ ID NO: 3522 - RNA, 20 nt, Artificial Sequence
  HTT spacer sequence ATCN PAM
uuucagguggcucuaccucc

SEQ ID NO: 3523 - RNA, 20 nt, Artificial Sequence
  HTT spacer sequence ATCN PAM
caccaguuggaguggaaaac

SEQ ID NO: 3524 - RNA, 20 nt, Artificial Sequence
  HTT spacer sequence ATCN PAM
cuuuuuaauauuagguaggg

SEQ ID NO: 3525 - RNA, 20 nt, Artificial Sequence
  HTT spacer sequence ATCN PAM
uuuggggaaagaggggagca

SEQ ID NO: 3526 - RNA, 20 nt, Artificial Sequence
  HTT spacer sequence ATCN PAM
aguccuaaucccuggagccu

SEQ ID NO: 3527 - RNA, 20 nt, Artificial Sequence
  HTT spacer sequence ATCN PAM
cuggagccuguaaauauuac

SEQ ID NO: 3528 - RNA, 20 nt, Artificial Sequence
  HTT spacer sequence ATCN PAM
uaaaacaauuuuccauauaa

SEQ ID NO: 3529 - RNA, 20 nt, Artificial Sequence
  HTT spacer sequence ATCN PAM
caucauaaaacaauuuucca

SEQ ID NO: 3530 - RNA, 20 nt, Artificial Sequence
  HTT spacer sequence ATCN PAM
ugaauuuaaucacaucauaa

SEQ ID NO: 3531 - RNA, 20 nt, Artificial Sequence
  HTT spacer sequence ATCN PAM
ugagaugagggggcuaucuu

SEQ ID NO: 3532 - RNA, 20 nt, Artificial Sequence
  HTT spacer sequence ATCN PAM
caagauccugaauuuaauca

SEQ ID NO: 3533 - RNA, 20 nt, Artificial Sequence
  HTT spacer sequence ATCN PAM
uggaugaucuggguaggcac

SEQ ID NO: 3534 - RNA, 20 nt, Artificial Sequence
  HTT spacer sequence ATCN PAM
aagauagcccccucaucuca

SEQ ID NO: 3535 - RNA, 20 nt, Artificial Sequence
  HTT spacer sequence ATCN PAM
uccaagauagcccccucauc

SEQ ID NO: 3536 - RNA, 20 nt, Artificial Sequence
  HTT spacer sequence ATCN PAM
ggguaggcacuaaaugcaau

SEQ ID NO: 3537 - RNA, 20 nt, Artificial Sequence
  HTT spacer sequence ATCN PAM
cauauauauaaaaaggaggc

SEQ ID NO: 3538 - RNA, 20 nt, Artificial Sequence
  HTT spacer sequence ATCN PAM
cccucugccuccuuuuuaua

SEQ ID NO: 3539 - RNA, 20 nt, Artificial Sequence
  HTT spacer sequence ATCN PAM
ucacagggccuucucucugu

SEQ ID NO: 3540 - RNA, 20 nt, Artificial Sequence
  HTT spacer sequence ATCN PAM
uucuguuccaucuucacagg

SEQ ID NO: 3541 - RNA, 20 nt, Artificial Sequence
  HTT spacer sequence ATCN PAM
cuccaauuuucaaggccagc

SEQ ID NO: 3542 - RNA, 20 nt, Artificial Sequence
  HTT spacer sequence ATCN PAM
uaaaaaaaaaaaaaaaaaag

SEQ ID NO: 3543 - RNA, 20 nt, Artificial Sequence
  HTT spacer sequence ATCN PAM
uuuaccccuuuaaguugguu

SEQ ID NO: 3544 - RNA, 20 nt, Artificial Sequence
  HTT spacer sequence ATCN PAM
auaaauacuaaaaaaaaaaa

SEQ ID NO: 3545 - RNA, 20 nt, Artificial Sequence
  HTT spacer sequence ATCN PAM
uucuuggguguuucuuggag

SEQ ID NO: 3546 - RNA, 20 nt, Artificial Sequence
  HTT spacer sequence ATCN PAM
cccucuccaagaaacaccca

SEQ ID NO: 3547 - RNA, 20 nt, Artificial Sequence
  HTT spacer sequence ATCN PAM
gcugaccuucccuccacuau

SEQ ID NO: 3548 - RNA, 20 nt, Artificial Sequence
  HTT spacer sequence ATCN PAM
caaguacccagggacacaaa

SEQ ID NO: 3549 - RNA, 20 nt, Artificial Sequence
  HTT spacer sequence ATCN PAM
ccacucccuaaucucaagua

SEQ ID NO: 3550 - RNA, 20 nt, Artificial Sequence
  HTT spacer sequence ATCN PAM
guuuaacaaagcacaucuug

SEQ ID NO: 3551 - RNA, 20 nt, Artificial Sequence
  HTT spacer sequence ATCN PAM
ugcaccgcccuuaauccauu

SEQ ID NO: 3552 - RNA, 20 nt, Artificial Sequence
  HTT spacer sequence ATCN PAM
auuuaacccuuaguggacac

SEQ ID NO: 3553 - RNA, 20 nt, Artificial Sequence
  HTT spacer sequence ATCN PAM
auaaccuuacccccaacccc

SEQ ID NO: 3554 - RNA, 20 nt, Artificial Sequence
  HTT spacer sequence ATCN PAM
caaggcagaagaauuuuucu

SEQ ID NO: 3555 - RNA, 20 nt, Artificial Sequence
  HTT spacer sequence ATCN PAM
gaucucucuuucuuuuccca

SEQ ID NO: 3556 - RNA, 20 nt, Artificial Sequence
  HTT spacer sequence ATCN PAM
gauuguuacugugucugcgu

SEQ ID NO: 3557 - RNA, 20 nt, Artificial Sequence
  HTT spacer sequence ATCN PAM
cucuuucuuuucccacauuu

SEQ ID NO: 3558 - RNA, 20 nt, Artificial Sequence
  HTT spacer sequence ATCN PAM
uggacuguucucaaugagcu

SEQ ID NO: 3559 - RNA, 20 nt, Artificial Sequence
  HTT spacer sequence ATCN PAM
gggagguguacccaauagcu

SEQ ID NO: 3560 - RNA, 20 nt, Artificial Sequence
  HTT spacer sequence ATCN PAM
gggaagugaggagccccucu

SEQ ID NO: 3561 - RNA, 20 nt, Artificial Sequence
  HTT spacer sequence ATCN PAM
cagacggggcggcggggcag

SEQ ID NO: 3562 - RNA, 20 nt, Artificial Sequence
  HTT spacer sequence ATCN PAM
ucugggaaguggggagcacc

SEQ ID NO: 3563 - RNA, 20 nt, Artificial Sequence
  HTT spacer sequence ATCN PAM
cugcccggccgcccaucguc

SEQ ID NO: 3564 - RNA, 20 nt, Artificial Sequence
  HTT spacer sequence ATCN PAM
aggaagugaggagcaucucu

SEQ ID NO: 3565 - RNA, 20 nt, Artificial Sequence
  HTT spacer sequence ATCN PAM
caucuaggaagugaggagca

SEQ ID NO: 3566 - RNA, 20 nt, Artificial Sequence
  HTT spacer sequence ATCN PAM
cagacgaugggcggccaggc

SEQ ID NO: 3567 - RNA, 20 nt, Artificial Sequence
  HTT spacer sequence ATCN PAM
ucugggaugugaggagcccc

SEQ ID NO: 3568 - RNA, 20 nt, Artificial Sequence
  HTT spacer sequence ATCN PAM
uggcacuuugggaggccaag

SEQ ID NO: 3569 - RNA, 20 nt, Artificial Sequence
  HTT spacer sequence ATCN PAM
cgggucacuacaaccuucac

SEQ ID NO: 3570 - RNA, 20 nt, Artificial Sequence
  HTT spacer sequence ATCN PAM
cgccacugcacuccagccug

SEQ ID NO: 3571 - RNA, 20 nt, Artificial Sequence
  HTT spacer sequence ATCN PAM
cggcaccucgggaggccgag

SEQ ID NO: 3572 - RNA, 20 nt, Artificial Sequence
  HTT spacer sequence ATCN PAM
gccagccucggccucccgag

SEQ ID NO: 3573 - RNA, 20 nt, Artificial Sequence
  HTT spacer sequence ATCN PAM
cuugcagucaggagcuggag

SEQ ID NO: 3574 - RNA, 20 nt, Artificial Sequence
  HTT spacer sequence ATCN PAM
caggcacuuggcaggcugag

SEQ ID NO: 3575 - RNA, 20 nt, Artificial Sequence
  HTT spacer sequence ATCN PAM
gguagggagguugcagugag

SEQ ID NO: 3576 - RNA, 20 nt, Artificial Sequence
  HTT spacer sequence ATCN PAM
cuacucacugcaaccucccu

SEQ ID NO: 3577 - RNA, 20 nt, Artificial Sequence
  HTT spacer sequence ATCN PAM
gagggagacugugcgagggc

SEQ ID NO: 3578 - RNA, 20 nt, Artificial Sequence
  HTT spacer sequence ATCN PAM
cuaaacugaaauuaaggaau

SEQ ID NO: 3579 - RNA, 20 nt, Artificial Sequence
  HTT spacer sequence ATCN PAM
accuuauuacaccauuucac

SEQ ID NO: 3580 - RNA, 20 nt, Artificial Sequence
  HTT spacer sequence ATCN PAM
caaucuaccuuauuacacca

SEQ ID NO: 3581 - RNA, 20 nt, Artificial Sequence
  HTT spacer sequence ATCN PAM
ucaucacaaucuaccuuauu

SEQ ID NO: 3582 - RNA, 20 nt, Artificial Sequence
  HTT spacer sequence ATCN PAM
ccuuuuuugguucauuagcu

SEQ ID NO: 3583 - RNA, 20 nt, Artificial Sequence
  HTT spacer sequence ATCN PAM
caaagaagccagaaauaggg

SEQ ID NO: 3584 - RNA, 20 nt, Artificial Sequence
  HTT spacer sequence ATCN PAM
agcucuuucuuuccuuuauu

SEQ ID NO: 3585 - RNA, 20 nt, Artificial Sequence
  HTT spacer sequence ATCN PAM
accaucaagcucuuucuuuc

SEQ ID NO: 3586 - RNA, 20 nt, Artificial Sequence
  HTT spacer sequence ATCN PAM
cugccuuuuacauguaaugu

SEQ ID NO: 3587 - RNA, 20 nt, Artificial Sequence
  HTT spacer sequence ATCN PAM
gaaaaaucgcugccuuuuac

SEQ ID NO: 3588 - RNA, 20 nt, Artificial Sequence
  HTT spacer sequence ATCN PAM
aauucuuguaagcacaguga

SEQ ID NO: 3589 - RNA, 20 nt, Artificial Sequence
  HTT spacer sequence ATCN PAM
gacaaaguggauuucaaagc

SEQ ID NO: 3590 - RNA, 20 nt, Artificial Sequence
  HTT spacer sequence ATCN PAM
acuuugucugauauuaacag

SEQ ID NO: 3591 - RNA, 20 nt, Artificial Sequence
  HTT spacer sequence ATCN PAM
ugggcaagagccuuugcuuu

SEQ ID NO: 3592 - RNA, 20 nt, Artificial Sequence
  HTT spacer sequence ATCN PAM
cauccugggcaagagccuuu

SEQ ID NO: 3593 - RNA, 20 nt, Artificial Sequence
  HTT spacer sequence ATCN PAM
uuaugaaaugaccaucucau

SEQ ID NO: 3594 - RNA, 20 nt, Artificial Sequence
  HTT spacer sequence ATCN PAM
ccuucaucauuaugaaauga

SEQ ID NO: 3595 - RNA, 20 nt, Artificial Sequence
  HTT spacer sequence ATCN PAM
gccuggcauagcaagcugaa

SEQ ID NO: 3596 - RNA, 20 nt, Artificial Sequence
  HTT spacer sequence ATCN PAM
acagugauagagauuucagu

SEQ ID NO: 3597 - RNA, 20 nt, Artificial Sequence
  HTT spacer sequence ATCN PAM
cuguggauuugucuguuucu

SEQ ID NO: 3598 - RNA, 20 nt, Artificial Sequence
  HTT spacer sequence ATCN PAM
cuaucacuguggauuugucu

SEQ ID NO: 3599 - RNA, 20 nt, Artificial Sequence
  HTT spacer sequence ATCN PAM
uugagagcggcuacugaaau

SEQ ID NO: 3600 - RNA, 20 nt, Artificial Sequence
  HTT spacer sequence ATCN PAM
ggaucuagaacacuugacca

SEQ ID NO: 3601 - RNA, 20 nt, Artificial Sequence
  HTT spacer sequence ATCN PAM
agauauuauggcuacguguu

SEQ ID NO: 3602 - RNA, 20 nt, Artificial Sequence
  HTT spacer sequence ATCN PAM
agaacacuugaccaacacug

SEQ ID NO: 3603 - RNA, 20 nt, Artificial Sequence
  HTT spacer sequence ATCN PAM
uggcaaacauucugugagca

SEQ ID NO: 3604 - RNA, 20 nt, Artificial Sequence
  HTT spacer sequence ATCN PAM
gcucuaucuuggcaaacauu

SEQ ID NO: 3605 - RNA, 20 nt, Artificial Sequence
  HTT spacer sequence ATCN PAM
uuaaguuggaauauauuaua

SEQ ID NO: 3606 - RNA, 20 nt, Artificial Sequence
  HTT spacer sequence ATCN PAM
uccuauaauauauuccaacu

SEQ ID NO: 3607 - RNA, 20 nt, Artificial Sequence
  HTT spacer sequence ATCN PAM
gaggcuuuuccagguuaucu

SEQ ID NO: 3608 - RNA, 20 nt, Artificial Sequence
  HTT spacer sequence ATCN PAM
aaaagacuuucaaauuuccc

SEQ ID NO: 3609 - RNA, 20 nt, Artificial Sequence
  HTT spacer sequence ATCN PAM
gucaauccaaaagacuuuca

SEQ ID NO: 3610 - RNA, 20 nt, Artificial Sequence
  HTT spacer sequence ATCN PAM
auuguuuuuauaucagucaa

SEQ ID NO: 3611 - RNA, 20 nt, Artificial Sequence
  HTT spacer sequence ATCN PAM
uucuuuccuaaaacaggcau

SEQ ID NO: 3612 - RNA, 20 nt, Artificial Sequence
  HTT spacer sequence ATCN PAM
augaccucagcuucuaccuu

SEQ ID NO: 3613 - RNA, 20 nt, Artificial Sequence
  HTT spacer sequence ATCN PAM
agaguuaccagaagggccag

SEQ ID NO: 3614 - RNA, 20 nt, Artificial Sequence
  HTT spacer sequence ATCN PAM
accugccucggccucccaaa

SEQ ID NO: 3615 - RNA, 20 nt, Artificial Sequence
  HTT spacer sequence ATCN PAM
acaaaaaacaaaaaaauuag

SEQ ID NO: 3616 - RNA, 20 nt, Artificial Sequence
  HTT spacer sequence ATCN PAM
ucccaccuuagacuccuggu

SEQ ID NO: 3617 - RNA, 20 nt, Artificial Sequence
  HTT spacer sequence ATCN PAM
caguucacugcagccucaac

SEQ ID NO: 3618 - RNA, 20 nt, Artificial Sequence
  HTT spacer sequence ATCN PAM
ugggcaacagaaugagaccc

SEQ ID NO: 3619 - RNA, 20 nt, Artificial Sequence
  HTT spacer sequence ATCN PAM
uaaagauaggagcagaaguc

SEQ ID NO: 3620 - RNA, 20 nt, Artificial Sequence
  HTT spacer sequence ATCN PAM
uuaugauguccauucuucua

SEQ ID NO: 3621 - RNA, 20 nt, Artificial Sequence
  HTT spacer sequence ATCN PAM
auaaaaccaaaagcugguuc

SEQ ID NO: 3622 - RNA, 20 nt, Artificial Sequence
  HTT spacer sequence ATCN PAM
agaacaucaauaaauuggua

SEQ ID NO: 3623 - RNA, 20 nt, Artificial Sequence
  HTT spacer sequence ATCN PAM
auaaauugguaaagcugaua

SEQ ID NO: 3624 - RNA, 20 nt, Artificial Sequence
  HTT spacer sequence ATCN PAM
gcuuuaccaauuuauugaug

SEQ ID NO: 3625 - RNA, 20 nt, Artificial Sequence
  HTT spacer sequence ATCN PAM
ggaaugagggagaugacagu

SEQ ID NO: 3626 - RNA, 20 nt, Artificial Sequence
  HTT spacer sequence ATCN PAM
cccucauuccugauauugcu

SEQ ID NO: 3627 - RNA, 20 nt, Artificial Sequence
  HTT spacer sequence ATCN PAM
auacuacugucaucucccuc

SEQ ID NO: 3628 - RNA, 20 nt, Artificial Sequence
  HTT spacer sequence ATCN PAM
auauaaucuauacuacuguc

SEQ ID NO: 3629 - RNA, 20 nt, Artificial Sequence
  HTT spacer sequence ATCN PAM
cagcaccuugggaggccgag

SEQ ID NO: 3630 - RNA, 20 nt, Artificial Sequence
  HTT spacer sequence ATCN PAM
guccaccucggccucccaag

SEQ ID NO: 3631 - RNA, 20 nt, Artificial Sequence
  HTT spacer sequence ATCN PAM
ccugaggucaggaguuuggg

SEQ ID NO: 3632 - RNA, 20 nt, Artificial Sequence
  HTT spacer sequence ATCN PAM
cagcuacuugggaggcugag

SEQ ID NO: 3633 - RNA, 20 nt, Artificial Sequence
  HTT spacer sequence ATCN PAM
cagcucacugcaaccuccgc

SEQ ID NO: 3634 - RNA, 20 nt, Artificial Sequence
  HTT spacer sequence ATCN PAM
caaaacaaauaaauaaauaa

SEQ ID NO: 3635 - RNA, 20 nt, Artificial Sequence
  HTT spacer sequence ATCN PAM
auaaguugucaaauuuauug

SEQ ID NO: 3636 - RNA, 20 nt, Artificial Sequence
  HTT spacer sequence ATCN PAM
auuucaucuauaaguuguca

SEQ ID NO: 3637 - RNA, 20 nt, Artificial Sequence
  HTT spacer sequence ATCN PAM
ucuugagagagcuuuaauag

SEQ ID NO: 3638 - RNA, 20 nt, Artificial Sequence
  HTT spacer sequence ATCN PAM
auaucuucuugagagagcuu

SEQ ID NO: 3639 - RNA, 20 nt, Artificial Sequence
  HTT spacer sequence ATCN PAM
gcuuaucuauaucuucuuga

SEQ ID NO: 3640 - RNA, 20 nt, Artificial Sequence
  HTT spacer sequence ATCN PAM
auuuuauugaauuuaaaugu

SEQ ID NO: 3641 - RNA, 20 nt, Artificial Sequence
  HTT spacer sequence ATCN PAM
auauuuaguuacuggaaaac

SEQ ID NO: 3642 - RNA, 20 nt, Artificial Sequence
  HTT spacer sequence ATCN PAM
cagguaaagguuuucugaug

SEQ ID NO: 3643 - RNA, 20 nt, Artificial Sequence
  HTT spacer sequence ATCN PAM
gaaaaccuuuaccugugauu

SEQ ID NO: 3644 - RNA, 20 nt, Artificial Sequence
  HTT spacer sequence ATCN PAM
caauucagacacuaaauuuu

SEQ ID NO: 3645 - RNA, 20 nt, Artificial Sequence
  HTT spacer sequence ATCN PAM
uaauuauuucuucacauuaa

SEQ ID NO: 3646 - RNA, 20 nt, Artificial Sequence
  HTT spacer sequence ATCN PAM
ugccuguuuucuuuuuacuu

SEQ ID NO: 3647 - RNA, 20 nt, Artificial Sequence
  HTT spacer sequence ATCN PAM
aaaguaaaaagaaaacaggc

SEQ ID NO: 3648 - RNA, 20 nt, Artificial Sequence
  HTT spacer sequence ATCN PAM
uucaaacacugugcuccaaa

SEQ ID NO: 3649 - RNA, 20 nt, Artificial Sequence
  HTT spacer sequence ATCN PAM
aucauuucaaagaccuuucc

SEQ ID NO: 3650 - RNA, 20 nt, Artificial Sequence
  HTT spacer sequence ATCN PAM
uuucaaagaccuuuccucag

SEQ ID NO: 3651 - RNA, 20 nt, Artificial Sequence
  HTT spacer sequence ATCN PAM
auguggaauacagacagcca

SEQ ID NO: 3652 - RNA, 20 nt, Artificial Sequence
  HTT spacer sequence ATCN PAM
acaaacuuauaaaagcauaa

SEQ ID NO: 3653 - RNA, 20 nt, Artificial Sequence
  HTT spacer sequence ATCN PAM
uuacugauguggacuuuugg

SEQ ID NO: 3654 - RNA, 20 nt, Artificial Sequence
  HTT spacer sequence ATCN PAM
guaaugaucaacaaacuuau

SEQ ID NO: 3655 - RNA, 20 nt, Artificial Sequence
  HTT spacer sequence ATCN PAM
uccaaccauuguuugcaauu

SEQ ID NO: 3656 - RNA, 20 nt, Artificial Sequence
  HTT spacer sequence ATCN PAM
cuagguaaaaauugcaaaca

SEQ ID NO: 3657 - RNA, 20 nt, Artificial Sequence
  HTT spacer sequence ATCN PAM
aacuacucugaaaccaaaug

SEQ ID NO: 3658 - RNA, 20 nt, Artificial Sequence
  HTT spacer sequence ATCN PAM
caaucuaacuacucugaaac

SEQ ID NO: 3659 - RNA, 20 nt, Artificial Sequence
  HTT spacer sequence ATCN PAM
ugaaagagcaaccucauuuu

SEQ ID NO: 3660 - RNA, 20 nt, Artificial Sequence
  HTT spacer sequence ATCN PAM
aaaugagguugcucuuucau

SEQ ID NO: 3661 - RNA, 20 nt, Artificial Sequence
  HTT spacer sequence ATCN PAM
cccguauuacugggauuugc

SEQ ID NO: 3662 - RNA, 20 nt, Artificial Sequence
  HTT spacer sequence ATCN PAM
caguaauacgggggaugugc

SEQ ID NO: 3663 - RNA, 20 nt, Artificial Sequence
  HTT spacer sequence ATCN PAM
caagaauagcaaaucccagu

SEQ ID NO: 3664 - RNA, 20 nt, Artificial Sequence
  HTT spacer sequence ATCN PAM
uuguguuacugguuuggaug

SEQ ID NO: 3665 - RNA, 20 nt, Artificial Sequence
  HTT spacer sequence ATCN PAM
aaaccaguaacacaaggaug

SEQ ID NO: 3666 - RNA, 20 nt, Artificial Sequence
  HTT spacer sequence ATCN PAM
guuuagcucucucuuggcuu

SEQ ID NO: 3667 - RNA, 20 nt, Artificial Sequence
  HTT spacer sequence ATCN PAM
ugcuccaacugucuaaacaa

SEQ ID NO: 3668 - RNA, 20 nt, Artificial Sequence
  HTT spacer sequence ATCN PAM
gaccaugaucaucuggcauc

SEQ ID NO: 3669 - RNA, 20 nt, Artificial Sequence
  HTT spacer sequence ATCN PAM
uggucagauuguguuuuugu

SEQ ID NO: 3670 - RNA, 20 nt, Artificial Sequence
  HTT spacer sequence ATCN PAM
ucuggcaucuuagggugaaa

SEQ ID NO: 3671 - RNA, 20 nt, Artificial Sequence
  HTT spacer sequence ATCN PAM
ggcaucuuagggugaaauau

SEQ ID NO: 3672 - RNA, 20 nt, Artificial Sequence
  HTT spacer sequence ATCN PAM
uagggugaaauaugguuaua

SEQ ID NO: 3673 - RNA, 20 nt, Artificial Sequence
  HTT spacer sequence ATCN PAM
ugcuuucgguaugggccaaa

SEQ ID NO: 3674 - RNA, 20 nt, Artificial Sequence
  HTT spacer sequence ATCN PAM
cuccugccccuuuuuaaucu

SEQ ID NO: 3675 - RNA, 20 nt, Artificial Sequence
  HTT spacer sequence ATCN PAM
guucagcagucuaucucucc

SEQ ID NO: 3676 - RNA, 20 nt, Artificial Sequence
  HTT spacer sequence ATCN PAM
uagacaacccacugcuuucu

SEQ ID NO: 3677 - RNA, 20 nt, Artificial Sequence
  HTT spacer sequence ATCN PAM
gaaguuuuuaaacgaaaauu

SEQ ID NO: 3678 - RNA, 20 nt, Artificial Sequence
  HTT spacer sequence ATCN PAM
cuucuuuuuuaaaaaauaaa

SEQ ID NO: 3679 - RNA, 20 nt, Artificial Sequence
  HTT spacer sequence ATCN PAM
aaaacuauuucaaaauaaag

SEQ ID NO: 3680 - RNA, 20 nt, Artificial Sequence
  HTT spacer sequence ATCN PAM
aauuuuuuucuauaaaucua

SEQ ID NO: 3681 - RNA, 20 nt, Artificial Sequence
  HTT spacer sequence ATCN PAM
aguuaccccaguuauuauca

SEQ ID NO: 3682 - RNA, 20 nt, Artificial Sequence
  HTT spacer sequence ATCN PAM
uccuaauuuagugugagaca

SEQ ID NO: 3683 - RNA, 20 nt, Artificial Sequence
  HTT spacer sequence ATCN PAM
uaauuuagugugagacauuu

SEQ ID NO: 3684 - RNA, 20 nt, Artificial Sequence
  HTT spacer sequence ATCN PAM
auauugauaugcuauuaacu

SEQ ID NO: 3685 - RNA, 20 nt, Artificial Sequence
  HTT spacer sequence ATCN PAM
auauugauucauuaaacaug

SEQ ID NO: 3686 - RNA, 20 nt, Artificial Sequence
  HTT spacer sequence ATCN PAM
gaauaaagucuggacuuaag

SEQ ID NO: 3687 - RNA, 20 nt, Artificial Sequence
  HTT spacer sequence ATCN PAM
gguguccugcauggaauucu

SEQ ID NO: 3688 - RNA, 20 nt, Artificial Sequence
  HTT spacer sequence ATCN PAM
cuauggaacuuuuucugcug

SEQ ID NO: 3689 - RNA, 20 nt, Artificial Sequence
  HTT spacer sequence ATCN PAM
cugcacagcagaaaaaguuc

SEQ ID NO: 3690 - RNA, 20 nt, Artificial Sequence
  HTT spacer sequence ATCN PAM
gacucugcgucaucacugca

SEQ ID NO: 3691 - RNA, 20 nt, Artificial Sequence
  HTT spacer sequence ATCN PAM
ugacaucugacucugcguca

SEQ ID NO: 3692 - RNA, 20 nt, Artificial Sequence
  HTT spacer sequence ATCN PAM
aaguaagaaccguguggaug

SEQ ID NO: 3693 - RNA, 20 nt, Artificial Sequence
  HTT spacer sequence ATCN PAM
acacgguucuuacuuugaua

SEQ ID NO: 3694 - RNA, 20 nt, Artificial Sequence
  HTT spacer sequence ATCN PAM
uccacacgguucuuacuuug

SEQ ID NO: 3695 - RNA, 20 nt, Artificial Sequence
  HTT spacer sequence ATCN PAM
uuguuguaggcugagagaag

SEQ ID NO: 3696 - RNA, 20 nt, Artificial Sequence
  HTT spacer sequence ATCN PAM
cuucuucucucagccuacaa

SEQ ID NO: 3697 - RNA, 20 nt, Artificial Sequence
  HTT spacer sequence ATCN PAM
uugaguguucuucuguuuug

SEQ ID NO: 3698 - RNA, 20 nt, Artificial Sequence
  HTT spacer sequence ATCN PAM
ucagggacucaaaacagaag

SEQ ID NO: 3699 - RNA, 20 nt, Artificial Sequence
  HTT spacer sequence ATCN PAM
gaaaggaaaaaagugcagac

SEQ ID NO: 3700 - RNA, 20 nt, Artificial Sequence
  HTT spacer sequence ATCN PAM
ccaaaccauacaagagcacc

SEQ ID NO: 3701 - RNA, 20 nt, Artificial Sequence
  HTT spacer sequence ATCN PAM
ccaaaccauacaauagagca

SEQ ID NO: 3702 - RNA, 20 nt, Artificial Sequence
  HTT spacer sequence ATCN PAM
gccugcauugcuugccacac

SEQ ID NO: 3703 - RNA, 20 nt, Artificial Sequence
  HTT spacer sequence ATCN PAM
guucccuucauugaccuagg

SEQ ID NO: 3704 - RNA, 20 nt, Artificial Sequence
  HTT spacer sequence ATCN PAM
aguggcuaccaucgguuccc

SEQ ID NO: 3705 - RNA, 20 nt, Artificial Sequence
  HTT spacer sequence ATCN PAM
cauuuuaugguuaagaaaac

SEQ ID NO: 3706 - RNA, 20 nt, Artificial Sequence
  HTT spacer sequence ATCN PAM
auguuuuuguggcaugugua

SEQ ID NO: 3707 - RNA, 20 nt, Artificial Sequence
  HTT spacer sequence ATCN PAM
ucacacauacacagacacac

SEQ ID NO: 3708 - RNA, 20 nt, Artificial Sequence
  HTT spacer sequence ATCN PAM
aguaguggcaauuaguccuc

SEQ ID NO: 3709 - RNA, 20 nt, Artificial Sequence
  HTT spacer sequence ATCN PAM
ucaaagugguaagaaguguu

SEQ ID NO: 3710 - RNA, 20 nt, Artificial Sequence
  HTT spacer sequence ATCN PAM
uuacacucuuacccagcaag

SEQ ID NO: 3711 - RNA, 20 nt, Artificial Sequence
  HTT spacer sequence ATCN PAM
ugcuggguaagaguguaagg

SEQ ID NO: 3712 - RNA, 20 nt, Artificial Sequence
  HTT spacer sequence ATCN PAM
aucuugcuggguaagagugu

SEQ ID NO: 3713 - RNA, 20 nt, Artificial Sequence
  HTT spacer sequence ATCN PAM
caugguuuccaugguauccu

SEQ ID NO: 3714 - RNA, 20 nt, Artificial Sequence
  HTT spacer sequence ATCN PAM
uuuugcccagggaaucuuug

SEQ ID NO: 3715 - RNA, 20 nt, Artificial Sequence
  HTT spacer sequence ATCN PAM
uugcuuuguggcuagcacuu

SEQ ID NO: 3716 - RNA, 20 nt, Artificial Sequence
  HTT spacer sequence ATCN PAM
cgcuuucuguggucaggacg

SEQ ID NO: 3717 - RNA, 20 nt, Artificial Sequence
  HTT spacer sequence ATCN PAM
cauggcuccagagaagccag

SEQ ID NO: 3718 - RNA, 20 nt, Artificial Sequence
  HTT spacer sequence ATCN PAM
cacuuaugcagugacguaua

SEQ ID NO: 3719 - RNA, 20 nt, Artificial Sequence
  HTT spacer sequence ATCN PAM
guuucaccuuguucuccgug

SEQ ID NO: 3720 - RNA, 20 nt, Artificial Sequence
  HTT spacer sequence ATCN PAM
gcaggcacggagaacaaggu

SEQ ID NO: 3721 - RNA, 20 nt, Artificial Sequence
  HTT spacer sequence ATCN PAM
uuggcaccacuugcauggug

SEQ ID NO: 3722 - RNA, 20 nt, Artificial Sequence
  HTT spacer sequence ATCN PAM
uugcuugcuucuuuuauucu

SEQ ID NO: 3723 - RNA, 20 nt, Artificial Sequence
  HTT spacer sequence ATCN PAM
gccacugcacuccagccugg

SEQ ID NO: 3724 - RNA, 20 nt, Artificial Sequence
  HTT spacer sequence ATCN PAM
cggcucauugcagccuugag

SEQ ID NO: 3725 - RNA, 20 nt, Artificial Sequence
  HTT spacer sequence ATCN PAM
uccuggcuuggccccuugag

SEQ ID NO: 3726 - RNA, 20 nt, Artificial Sequence
  HTT spacer sequence ATCN PAM
cuacaaauaauuuuaaaaau

SEQ ID NO: 3727 - RNA, 20 nt, Artificial Sequence
  HTT spacer sequence ATCN PAM
caucucuacaaauaauuuua

SEQ ID NO: 3728 - RNA, 20 nt, Artificial Sequence
  HTT spacer sequence ATCN PAM
cgccagguugcccaggcugg

SEQ ID NO: 3729 - RNA, 20 nt, Artificial Sequence
  HTT spacer sequence ATCN PAM
cuugagcccaggcguucaag

SEQ ID NO: 3730 - RNA, 20 nt, Artificial Sequence
  HTT spacer sequence ATCN PAM
ucccuccuugguuucccaaa

SEQ ID NO: 3731 - RNA, 20 nt, Artificial Sequence
  HTT spacer sequence ATCN PAM
cagcacuuugggaaaccaag

SEQ ID NO: 3732 - RNA, 20 nt, Artificial Sequence
  HTT spacer sequence ATCN PAM
caggugugagccacugugcc

SEQ ID NO: 3733 - RNA, 20 nt, Artificial Sequence
  HTT spacer sequence ATCN PAM
agggccaggcacaguggcuc

SEQ ID NO: 3734 - RNA, 20 nt, Artificial Sequence
  HTT spacer sequence ATCN PAM
agaacugaaacaucaagggc

SEQ ID NO: 3735 - RNA, 20 nt, Artificial Sequence
  HTT spacer sequence ATCN PAM
aauaucaagaacugaaacau

SEQ ID NO: 3736 - RNA, 20 nt, Artificial Sequence
  HTT spacer sequence ATCN PAM
ucagagucagaaaaucuaaa

SEQ ID NO: 3737 - RNA, 20 nt, Artificial Sequence
  HTT spacer sequence ATCN PAM
aaaaagagggcuaucccagg

SEQ ID NO: 3738 - RNA, 20 nt, Artificial Sequence
  HTT spacer sequence ATCN PAM
cagguugccuugguucaugg

SEQ ID NO: 3739 - RNA, 20 nt, Artificial Sequence
  HTT spacer sequence ATCN PAM
gagagcagccaaacccugcu

SEQ ID NO: 3740 - RNA, 20 nt, Artificial Sequence
  HTT spacer sequence ATCN PAM
gaggaagcaggaaucugaga

SEQ ID NO: 3741 - RNA, 20 nt, Artificial Sequence
  HTT spacer sequence ATCN PAM
cgcugccagcccgcugggcc

SEQ ID NO: 3742 - RNA, 20 nt, Artificial Sequence
  HTT spacer sequence ATCN PAM
ggaucuggcuagguuugcuc

SEQ ID NO: 3743 - RNA, 20 nt, Artificial Sequence
  HTT spacer sequence ATCN PAM
ugaucccgcugccagcccgc

SEQ ID NO: 3744 - RNA, 20 nt, Artificial Sequence
  HTT spacer sequence ATCN PAM
ggcuagguuugcucucacug

SEQ ID NO: 3745 - RNA, 20 nt, Artificial Sequence
  HTT spacer sequence ATCN PAM
gacauagccuggcagcaugc

SEQ ID NO: 3746 - RNA, 20 nt, Artificial Sequence
  HTT spacer sequence ATCN PAM
ccaccaccgucaagaggcug

SEQ ID NO: 3747 - RNA, 20 nt, Artificial Sequence
  HTT spacer sequence ATCN PAM
cuucagccucuugacggugg

SEQ ID NO: 3748 - RNA, 20 nt, Artificial Sequence
  HTT spacer sequence ATCN PAM
acucuuucaccuacuggcug

SEQ ID NO: 3749 - RNA, 20 nt, Artificial Sequence
  HTT spacer sequence ATCN PAM
ucaccgccucuugucucaag

SEQ ID NO: 3750 - RNA, 20 nt, Artificial Sequence
  HTT spacer sequence ATCN PAM
ccgccucuugucucaagggg

SEQ ID NO: 3751 - RNA, 20 nt, Artificial Sequence
  HTT spacer sequence ATCN PAM
uaugcugccagagaguggga

SEQ ID NO: 3752 - RNA, 20 nt, Artificial Sequence
  HTT spacer sequence ATCN PAM
aaagucuucaagagccccua

SEQ ID NO: 3753 - RNA, 20 nt, Artificial Sequence
  HTT spacer sequence ATCN PAM
uuuaggaagagugacccggu

SEQ ID NO: 3754 - RNA, 20 nt, Artificial Sequence
  HTT spacer sequence ATCN PAM
uggcucgaggcccugcacuc

SEQ ID NO: 3755 - RNA, 20 nt, Artificial Sequence
  HTT spacer sequence ATCN PAM
cccagcgacuggcguagauu

SEQ ID NO: 3756 - RNA, 20 nt, Artificial Sequence
  HTT spacer sequence ATCN PAM
acgccagucgcugggugaug

SEQ ID NO: 3757 - RNA, 20 nt, Artificial Sequence
  HTT spacer sequence ATCN PAM
agguuugauaaggcuucuag

SEQ ID NO: 3758 - RNA, 20 nt, Artificial Sequence
  HTT spacer sequence ATCN PAM
aaccuugauuuagcuuuaca

SEQ ID NO: 3759 - RNA, 20 nt, Artificial Sequence
  HTT spacer sequence ATCN PAM
uguuguugcaguuuguacug

SEQ ID NO: 3760 - RNA, 20 nt, Artificial Sequence
  HTT spacer sequence ATCN PAM
uaauccuguuguugcaguuu

SEQ ID NO: 3761 - RNA, 20 nt, Artificial Sequence
  HTT spacer sequence ATCN PAM
cagaaacguuuaaauccuaa

SEQ ID NO: 3762 - RNA, 20 nt, Artificial Sequence
  HTT spacer sequence ATCN PAM
cauucugggaaauucugagg

SEQ ID NO: 3763 - RNA, 20 nt, Artificial Sequence
  HTT spacer sequence ATCN PAM
gguuuugauuuucaagcuug

SEQ ID NO: 3764 - RNA, 20 nt, Artificial Sequence
  HTT spacer sequence ATCN PAM
aaaccagaucacauucuggg

SEQ ID NO: 3765 - RNA, 20 nt, Artificial Sequence
  HTT spacer sequence ATCN PAM
caguccacuuacaucaacug

SEQ ID NO: 3766 - RNA, 20 nt, Artificial Sequence
  HTT spacer sequence ATCN PAM
acugcccaugccacgguuaa

SEQ ID NO: 3767 - RNA, 20 nt, Artificial Sequence
  HTT spacer sequence ATCN PAM
cuuuaaccguggcaugggca

SEQ ID NO: 3768 - RNA, 20 nt, Artificial Sequence
  HTT spacer sequence ATCN PAM
ucgacugauguuuggcacag

SEQ ID NO: 3769 - RNA, 20 nt, Artificial Sequence
  HTT spacer sequence ATCN PAM
acugauguuuggcacagcuu

SEQ ID NO: 3770 - RNA, 20 nt, Artificial Sequence
  HTT spacer sequence ATCN PAM
gucgaugaucucuuuaaccg

SEQ ID NO: 3771 - RNA, 20 nt, Artificial Sequence
  HTT spacer sequence ATCN PAM
ccuagcuugagaagcccuuc

SEQ ID NO: 3772 - RNA, 20 nt, Artificial Sequence
  HTT spacer sequence ATCN PAM
uuacuagcuugaaguugacc

SEQ ID NO: 3773 - RNA, 20 nt, Artificial Sequence
  HTT spacer sequence ATCN PAM
ggacguacuuucugguuuag

SEQ ID NO: 3774 - RNA, 20 nt, Artificial Sequence
  HTT spacer sequence ATCN PAM
cucaacccuccuugcucacu

SEQ ID NO: 3775 - RNA, 20 nt, Artificial Sequence
  HTT spacer sequence ATCN PAM
uuuucugcagguguggcccc

SEQ ID NO: 3776 - RNA, 20 nt, Artificial Sequence
  HTT spacer sequence ATCN PAM
gcagggucccgagcacugug

SEQ ID NO: 3777 - RNA, 20 nt, Artificial Sequence
  HTT spacer sequence ATCN PAM
uccaacagaauguucugcua

SEQ ID NO: 3778 - RNA, 20 nt, Artificial Sequence
  HTT spacer sequence ATCN PAM
aacagaauguucugcuagug

SEQ ID NO: 3779 - RNA, 20 nt, Artificial Sequence
  HTT spacer sequence ATCN PAM
ucacuagcagaacauucugu

SEQ ID NO: 3780 - RNA, 20 nt, Artificial Sequence
  HTT spacer sequence ATCN PAM
uuaaucuucacuagcagaac

SEQ ID NO: 3781 - RNA, 20 nt, Artificial Sequence
  HTT spacer sequence ATCN PAM
uaaagccccuggaguaaauc

SEQ ID NO: 3782 - RNA, 20 nt, Artificial Sequence
  HTT spacer sequence ATCN PAM
uauauauauaauuuuuuuuu

SEQ ID NO: 3783 - RNA, 20 nt, Artificial Sequence
  HTT spacer sequence ATCN PAM
caaaaaaaaaaaaaaaaaaa

SEQ ID NO: 3784 - RNA, 20 nt, Artificial Sequence
  HTT spacer sequence ATCN PAM
cgccauugcacuccagccug

SEQ ID NO: 3785 - RNA, 20 nt, Artificial Sequence
  HTT spacer sequence ATCN PAM
uggcucacugcaaccuccgc

SEQ ID NO: 3786 - RNA, 20 nt, Artificial Sequence
  HTT spacer sequence ATCN PAM
cagcuacucgagaggcugag

SEQ ID NO: 3787 - RNA, 20 nt, Artificial Sequence
  HTT spacer sequence ATCN PAM
ccugaggucaggaguucaag

SEQ ID NO: 3788 - RNA, 20 nt, Artificial Sequence
  HTT spacer sequence ATCN PAM
gcccgccuuggccucccaaa

SEQ ID NO: 3789 - RNA, 20 nt, Artificial Sequence
  HTT spacer sequence ATCN PAM
cagcacuuugggaggccaag

SEQ ID NO: 3790 - RNA, 20 nt, Artificial Sequence
  HTT spacer sequence ATCN PAM
uggccaggugggguggcuca

SEQ ID NO: 3791 - RNA, 20 nt, Artificial Sequence
  HTT spacer sequence ATCN PAM
accauuuuaauuuugauguu

SEQ ID NO: 3792 - RNA, 20 nt, Artificial Sequence
  HTT spacer sequence ATCN PAM
aaauuaaaaugguagauggu

SEQ ID NO: 3793 - RNA, 20 nt, Artificial Sequence
  HTT spacer sequence ATCN PAM
aauacuacauaacaucaaaa

SEQ ID NO: 3794 - RNA, 20 nt, Artificial Sequence
  HTT spacer sequence ATCN PAM
ucaaauacuacauaacauca

SEQ ID NO: 3795 - RNA, 20 nt, Artificial Sequence
  HTT spacer sequence ATCN PAM
aguuuauucaguaacuuccu

SEQ ID NO: 3796 - RNA, 20 nt, Artificial Sequence
  HTT spacer sequence ATCN PAM
uaguuuccuuuuagcucguu

SEQ ID NO: 3797 - RNA, 20 nt, Artificial Sequence
  HTT spacer sequence ATCN PAM
cuaguucuaaaacgagcuaa

SEQ ID NO: 3798 - RNA, 20 nt, Artificial Sequence
  HTT spacer sequence ATCN PAM
caucacuaguucuaaaacga

SEQ ID NO: 3799 - RNA, 20 nt, Artificial Sequence
  HTT spacer sequence ATCN PAM
cuugugauuuguuguaggcu

SEQ ID NO: 3800 - RNA, 20 nt, Artificial Sequence
  HTT spacer sequence ATCN PAM
caagagauuuauggaagaca

SEQ ID NO: 3801 - RNA, 20 nt, Artificial Sequence
  HTT spacer sequence ATCN PAM
aagccuacaacaaaucacaa

SEQ ID NO: 3802 - RNA, 20 nt, Artificial Sequence
  HTT spacer sequence ATCN PAM
aucaaagccuacaacaaauc

SEQ ID NO: 3803 - RNA, 20 nt, Artificial Sequence
  HTT spacer sequence ATCN PAM
uccaagguuacagcucgagc

SEQ ID NO: 3804 - RNA, 20 nt, Artificial Sequence
  HTT spacer sequence ATCN PAM
cauguaccccauaaauauau

SEQ ID NO: 3805 - RNA, 20 nt, Artificial Sequence
  HTT spacer sequence ATCN PAM
aaauaucucauguaccccau

SEQ ID NO: 3806 - RNA, 20 nt, Artificial Sequence
  HTT spacer sequence ATCN PAM
caccauggaaaguuggauau

SEQ ID NO: 3807 - RNA, 20 nt, Artificial Sequence
  HTT spacer sequence ATCN PAM
aacuuuccauggugugauua

SEQ ID NO: 3808 - RNA, 20 nt, Artificial Sequence
  HTT spacer sequence ATCN PAM
augcccucaagcauuuaucc

SEQ ID NO: 3809 - RNA, 20 nt, Artificial Sequence
  HTT spacer sequence ATCN PAM
uuuguguuacaaacaaucca

SEQ ID NO: 3810 - RNA, 20 nt, Artificial Sequence
  HTT spacer sequence ATCN PAM
aguuacaugcuuuacuuauu

SEQ ID NO: 3811 - RNA, 20 nt, Artificial Sequence
  HTT spacer sequence ATCN PAM
ccugaggucaggaguuugag

SEQ ID NO: 3812 - RNA, 20 nt, Artificial Sequence
  HTT spacer sequence ATCN PAM
gcccgccucggccucccaaa

SEQ ID NO: 3813 - RNA, 20 nt, Artificial Sequence
  HTT spacer sequence ATCN PAM
caacacuuugggaggccgag

SEQ ID NO: 3814 - RNA, 20 nt, Artificial Sequence
  HTT spacer sequence ATCN PAM
ggcccggcacaguggcucac

SEQ ID NO: 3815 - RNA, 20 nt, Artificial Sequence
  HTT spacer sequence ATCN PAM
cagcauuuugggaggcugag

SEQ ID NO: 3816 - RNA, 20 nt, Artificial Sequence
  HTT spacer sequence ATCN PAM
ccugccucagccucccaaaa

SEQ ID NO: 3817 - RNA, 20 nt, Artificial Sequence
  HTT spacer sequence ATCN PAM
ccugagaucaggaguucgag

SEQ ID NO: 3818 - RNA, 20 nt, Artificial Sequence
  HTT spacer sequence ATCN PAM
caggugaucaccugccucag

SEQ ID NO: 3819 - RNA, 20 nt, Artificial Sequence
  HTT spacer sequence ATCN PAM
ggaguucgagaccagccugg

SEQ ID NO: 3820 - RNA, 20 nt, Artificial Sequence
  HTT spacer sequence ATCN PAM
uggcuacucgggaggcugag

SEQ ID NO: 3821 - RNA, 20 nt, Artificial Sequence
  HTT spacer sequence ATCN PAM
cuugaaccuggggguggagg

SEQ ID NO: 3822 - RNA, 20 nt, Artificial Sequence
  HTT spacer sequence ATCN PAM
cggcucacugcaaccuccac

SEQ ID NO: 3823 - RNA, 20 nt, Artificial Sequence
  HTT spacer sequence ATCN PAM
cgccacugcauuccagccug

SEQ ID NO: 3824 - RNA, 20 nt, Artificial Sequence
  HTT spacer sequence ATCN PAM
accugccucagguucccaaa

SEQ ID NO: 3825 - RNA, 20 nt, Artificial Sequence
  HTT spacer sequence ATCN PAM
cccaaguagcugagacuaua

SEQ ID NO: 3826 - RNA, 20 nt, Artificial Sequence
  HTT spacer sequence ATCN PAM
ucccaccucaaucucccaag

SEQ ID NO: 3827 - RNA, 20 nt, Artificial Sequence
  HTT spacer sequence ATCN PAM
auagguagcugagauugugc

SEQ ID NO: 3828 - RNA, 20 nt, Artificial Sequence
  HTT spacer sequence ATCN PAM
cagcuaccuauagauucaac

SEQ ID NO: 3829 - RNA, 20 nt, Artificial Sequence
  HTT spacer sequence ATCN PAM
acuauauauuauugucuaug

SEQ ID NO: 3830 - RNA, 20 nt, Artificial Sequence
  HTT spacer sequence ATCN PAM
uagacaauaauauauagucg

SEQ ID NO: 3831 - RNA, 20 nt, Artificial Sequence
  HTT spacer sequence ATCN PAM
cucugcugugcugucgaaua

SEQ ID NO: 3832 - RNA, 20 nt, Artificial Sequence
  HTT spacer sequence ATCN PAM
cugagcaaacuucacucugu

SEQ ID NO: 3833 - RNA, 20 nt, Artificial Sequence
  HTT spacer sequence ATCN PAM
cacaccugcugcuuaacaga

SEQ ID NO: 3834 - RNA, 20 nt, Artificial Sequence
  HTT spacer sequence ATCN PAM
uuauucaguaauucacaaug

SEQ ID NO: 3835 - RNA, 20 nt, Artificial Sequence
  HTT spacer sequence ATCN PAM
ucuaccaaacagcauuuccu

SEQ ID NO: 3836 - RNA, 20 nt, Artificial Sequence
  HTT spacer sequence ATCN PAM
aauaaagaguaaccuuuuga

SEQ ID NO: 3837 - RNA, 20 nt, Artificial Sequence
  HTT spacer sequence ATCN PAM
caucuaauaaagaguaaccu

SEQ ID NO: 3838 - RNA, 20 nt, Artificial Sequence
  HTT spacer sequence ATCN PAM
uuauaauugaagcccacuag

SEQ ID NO: 3839 - RNA, 20 nt, Artificial Sequence
  HTT spacer sequence ATCN PAM
gguaacuacuuuaaggucua

SEQ ID NO: 3840 - RNA, 20 nt, Artificial Sequence
  HTT spacer sequence ATCN PAM
agaguguacaacuuaccugc

SEQ ID NO: 3841 - RNA, 20 nt, Artificial Sequence
  HTT spacer sequence ATCN PAM
guagcagcuggcccccgaca

SEQ ID NO: 3842 - RNA, 20 nt, Artificial Sequence
  HTT spacer sequence ATCN PAM
uuuaugucucagcucagaug

SEQ ID NO: 3843 - RNA, 20 nt, Artificial Sequence
  HTT spacer sequence ATCN PAM
gagcugagacauaaaggauc

SEQ ID NO: 3844 - RNA, 20 nt, Artificial Sequence
  HTT spacer sequence ATCN PAM
augucagaaauugucacgua

SEQ ID NO: 3845 - RNA, 20 nt, Artificial Sequence
  HTT spacer sequence ATCN PAM
gugugcuuguuuauuuucua

SEQ ID NO: 3846 - RNA, 20 nt, Artificial Sequence
  HTT spacer sequence ATCN PAM
cacccuuccgcaagagacuu

SEQ ID NO: 3847 - RNA, 20 nt, Artificial Sequence
  HTT spacer sequence ATCN PAM
cauaagucucuugcggaagg

SEQ ID NO: 3848 - RNA, 20 nt, Artificial Sequence
  HTT spacer sequence ATCN PAM
cugcugggcugcaacagagc

SEQ ID NO: 3849 - RNA, 20 nt, Artificial Sequence
  HTT spacer sequence ATCN PAM
uuuaagcaaguacuaugugc

SEQ ID NO: 3850 - RNA, 20 nt, Artificial Sequence
  HTT spacer sequence ATCN PAM
auuugucuguuacaugaguu

SEQ ID NO: 3851 - RNA, 20 nt, Artificial Sequence
  HTT spacer sequence ATCN PAM
uaacggauugagaaacaaaa

SEQ ID NO: 3852 - RNA, 20 nt, Artificial Sequence
  HTT spacer sequence ATCN PAM
guuaagauacaacuguuuug

SEQ ID NO: 3853 - RNA, 20 nt, Artificial Sequence
  HTT spacer sequence ATCN PAM
gcucccuccuucuccuuaac

SEQ ID NO: 3854 - RNA, 20 nt, Artificial Sequence
  HTT spacer sequence ATCN PAM
gcauguauugcugguuaagg

SEQ ID NO: 3855 - RNA, 20 nt, Artificial Sequence
  HTT spacer sequence ATCN PAM
gcaucagcauguauugcugg

SEQ ID NO: 3856 - RNA, 20 nt, Artificial Sequence
  HTT spacer sequence ATCN PAM
cauagacccucagcuccauc

SEQ ID NO: 3857 - RNA, 20 nt, Artificial Sequence
  HTT spacer sequence ATCN PAM
ugagucacugggaauguggu

SEQ ID NO: 3858 - RNA, 20 nt, Artificial Sequence
  HTT spacer sequence ATCN PAM
uauaugggucgggcauagug

SEQ ID NO: 3859 - RNA, 20 nt, Artificial Sequence
  HTT spacer sequence ATCN PAM
aagguaugagccacuaugcc

SEQ ID NO: 3860 - RNA, 20 nt, Artificial Sequence
  HTT spacer sequence ATCN PAM
cagcacuucaggaggccaag

SEQ ID NO: 3861 - RNA, 20 nt, Artificial Sequence
  HTT spacer sequence ATCN PAM
accugccuuggccuccugaa

SEQ ID NO: 3862 - RNA, 20 nt, Artificial Sequence
  HTT spacer sequence ATCN PAM
ucccaccucagccucucgag

SEQ ID NO: 3863 - RNA, 20 nt, Artificial Sequence
  HTT spacer sequence ATCN PAM
cuugagccugggagguggag

SEQ ID NO: 3864 - RNA, 20 nt, Artificial Sequence
  HTT spacer sequence ATCN PAM
uggcucaacacgaccuccac

SEQ ID NO: 3865 - RNA, 20 nt, Artificial Sequence
  HTT spacer sequence ATCN PAM
caccacugcacuccagccug

SEQ ID NO: 3866 - RNA, 20 nt, Artificial Sequence
  HTT spacer sequence ATCN PAM
agaaaagaacuuauauggcu

SEQ ID NO: 3867 - RNA, 20 nt, Artificial Sequence
  HTT spacer sequence ATCN PAM
cuaaggaaauuuccuuuugu

SEQ ID NO: 3868 - RNA, 20 nt, Artificial Sequence
  HTT spacer sequence ATCN PAM
uuuuucuuuuacuaucauuu

SEQ ID NO: 3869 - RNA, 20 nt, Artificial Sequence
  HTT spacer sequence ATCN PAM
uuuaaaaaaauguguuauau

SEQ ID NO: 3870 - RNA, 20 nt, Artificial Sequence
  HTT spacer sequence ATCN PAM
agguucugcacauagcagcc

SEQ ID NO: 3871 - RNA, 20 nt, Artificial Sequence
  HTT spacer sequence ATCN PAM
aaacggcacugggaaauggg

SEQ ID NO: 3872 - RNA, 20 nt, Artificial Sequence
  HTT spacer sequence ATCN PAM
cuaucuaaacggcacuggga

SEQ ID NO: 3873 - RNA, 20 nt, Artificial Sequence
  HTT spacer sequence ATCN PAM
gacuaaugagucaaugcagg

SEQ ID NO: 3874 - RNA, 20 nt, Artificial Sequence
  HTT spacer sequence ATCN PAM
ggaggaagaaaaaccugacu

SEQ ID NO: 3875 - RNA, 20 nt, Artificial Sequence
  HTT spacer sequence ATCN PAM
caggaauucacccaacacac

SEQ ID NO: 3876 - RNA, 20 nt, Artificial Sequence
  HTT spacer sequence ATCN PAM
gugacucacugcucuguguc

SEQ ID NO: 3877 - RNA, 20 nt, Artificial Sequence
  HTT spacer sequence ATCN PAM
uaauacuucuuaaaacacuc

SEQ ID NO: 3878 - RNA, 20 nt, Artificial Sequence
  HTT spacer sequence ATCN PAM
aaaaggcuggguuuaaaaau

SEQ ID NO: 3879 - RNA, 20 nt, Artificial Sequence
  HTT spacer sequence ATCN PAM
ucugugaucauaagagaaau

SEQ ID NO: 3880 - RNA, 20 nt, Artificial Sequence
  HTT spacer sequence ATCN PAM
cagaggaucuaaaaggcugg

SEQ ID NO: 3881 - RNA, 20 nt, Artificial Sequence
  HTT spacer sequence ATCN PAM
uaagagaaaugaaggauguc

SEQ ID NO: 3882 - RNA, 20 nt, Artificial Sequence
  HTT spacer sequence ATCN PAM
uucauuucucuuaugaucac

SEQ ID NO: 3883 - RNA, 20 nt, Artificial Sequence
  HTT spacer sequence ATCN PAM
acauuucauccuccuguucu

SEQ ID NO: 3884 - RNA, 20 nt, Artificial Sequence
  HTT spacer sequence ATCN PAM
uccuguucuuucagcugagu

SEQ ID NO: 3885 - RNA, 20 nt, Artificial Sequence
  HTT spacer sequence ATCN PAM
cauuagggacuguuggaaua

SEQ ID NO: 3886 - RNA, 20 nt, Artificial Sequence
  HTT spacer sequence ATCN PAM
guccaggagaccuuggcugc

SEQ ID NO: 3887 - RNA, 20 nt, Artificial Sequence
  HTT spacer sequence ATCN PAM
uaccuuaauuucauugucau

SEQ ID NO: 3888 - RNA, 20 nt, Artificial Sequence
  HTT spacer sequence ATCN PAM
cucgcauguuugugaccuga

SEQ ID NO: 3889 - RNA, 20 nt, Artificial Sequence
  HTT spacer sequence ATCN PAM
uuuguguuauuuuugaggca

SEQ ID NO: 3890 - RNA, 20 nt, Artificial Sequence
  HTT spacer sequence ATCN PAM
cccaauucaacucuucaccc

SEQ ID NO: 3891 - RNA, 20 nt, Artificial Sequence
  HTT spacer sequence ATCN PAM
agaaaccaucucccaauuca

SEQ ID NO: 3892 - RNA, 20 nt, Artificial Sequence
  HTT spacer sequence ATCN PAM
gcucuggaaaaaugccuuuu

SEQ ID NO: 3893 - RNA, 20 nt, Artificial Sequence
  HTT spacer sequence ATCN PAM
ucccgcagcuagguuaaaga

SEQ ID NO: 3894 - RNA, 20 nt, Artificial Sequence
  HTT spacer sequence ATCN PAM
gagccuguuggcuuccuguu

SEQ ID NO: 3895 - RNA, 20 nt, Artificial Sequence
  HTT spacer sequence ATCN PAM
ucuucaaacccacuuuagug

SEQ ID NO: 3896 - RNA, 20 nt, Artificial Sequence
  HTT spacer sequence ATCN PAM
ucaaacccacuuuaguguuu

SEQ ID NO: 3897 - RNA, 20 nt, Artificial Sequence
  HTT spacer sequence ATCN PAM
guagagcaugugacaggguc

SEQ ID NO: 3898 - RNA, 20 nt, Artificial Sequence
  HTT spacer sequence ATCN PAM
uguaaucuguagagcaugug

SEQ ID NO: 3899 - RNA, 20 nt, Artificial Sequence
  HTT spacer sequence ATCN PAM
ccucccaggagggucacuug

SEQ ID NO: 3900 - RNA, 20 nt, Artificial Sequence
  HTT spacer sequence ATCN PAM
ucaccucccaggagggucac

SEQ ID NO: 3901 - RNA, 20 nt, Artificial Sequence
  HTT spacer sequence ATCN PAM
gauggacuuggauuagaauu

SEQ ID NO: 3902 - RNA, 20 nt, Artificial Sequence
  HTT spacer sequence ATCN PAM
gauuccacucuacccagugu

SEQ ID NO: 3903 - RNA, 20 nt, Artificial Sequence
  HTT spacer sequence ATCN PAM
aaguccaucugauuccacuc

SEQ ID NO: 3904 - RNA, 20 nt, Artificial Sequence
  HTT spacer sequence ATCN PAM
aagcccuucccgugggugac

SEQ ID NO: 3905 - RNA, 20 nt, Artificial Sequence
  HTT spacer sequence ATCN PAM
uucagcuaauaagagcagua

SEQ ID NO: 3906 - RNA, 20 nt, Artificial Sequence
  HTT spacer sequence ATCN PAM
ccuuaguauuaacaagaaaa

SEQ ID NO: 3907 - RNA, 20 nt, Artificial Sequence
  HTT spacer sequence ATCN PAM
cccuucgucauuccaaaacc

SEQ ID NO: 3908 - RNA, 20 nt, Artificial Sequence
  HTT spacer sequence ATCN PAM
ucucccuucgucauuccaaa

SEQ ID NO: 3909 - RNA, 20 nt, Artificial Sequence
  HTT spacer sequence ATCN PAM
aaagaauuuaguguaauauu

SEQ ID NO: 3910 - RNA, 20 nt, Artificial Sequence
  HTT spacer sequence ATCN PAM
cuuuggaaugggaguaggug

SEQ ID NO: 3911 - RNA, 20 nt, Artificial Sequence
  HTT spacer sequence ATCN PAM
guacacuggggucuguugaa

SEQ ID NO: 3912 - RNA, 20 nt, Artificial Sequence
  HTT spacer sequence ATCN PAM
cagaggggacugccuucaac

SEQ ID NO: 3913 - RNA, 20 nt, Artificial Sequence
  HTT spacer sequence ATCN PAM
cuggcugucagagcucagau

SEQ ID NO: 3914 - RNA, 20 nt, Artificial Sequence
  HTT spacer sequence ATCN PAM
gagcucugacagccagagau

SEQ ID NO: 3915 - RNA, 20 nt, Artificial Sequence
  HTT spacer sequence ATCN PAM
ucugagcucugacagccaga

SEQ ID NO: 3916 - RNA, 20 nt, Artificial Sequence
  HTT spacer sequence ATCN PAM
aucaucugagcucugacagc

SEQ ID NO: 3917 - RNA, 20 nt, Artificial Sequence
  HTT spacer sequence ATCN PAM
uuuucaugauuucgaucacc

SEQ ID NO: 3918 - RNA, 20 nt, Artificial Sequence
  HTT spacer sequence ATCN PAM
ugaaaaugaugagaacuaag

SEQ ID NO: 3919 - RNA, 20 nt, Artificial Sequence
  HTT spacer sequence ATCN PAM
aaaucaugaaaaugaugaga

SEQ ID NO: 3920 - RNA, 20 nt, Artificial Sequence
  HTT spacer sequence ATCN PAM
ccauuugaguaugaugaugc

SEQ ID NO: 3921 - RNA, 20 nt, Artificial Sequence
  HTT spacer sequence ATCN PAM
uacucaaauggugaucgaaa

SEQ ID NO: 3922 - RNA, 20 nt, Artificial Sequence
  HTT spacer sequence ATCN PAM
ucauacucaaauggugaucg

SEQ ID NO: 3923 - RNA, 20 nt, Artificial Sequence
  HTT spacer sequence ATCN PAM
guuaauuacuuccuuccuga

SEQ ID NO: 3924 - RNA, 20 nt, Artificial Sequence
  HTT spacer sequence ATCN PAM
auucugcuaccucucugcuc

SEQ ID NO: 3925 - RNA, 20 nt, Artificial Sequence
  HTT spacer sequence ATCN PAM
agagccugguacaguggcuu

SEQ ID NO: 3926 - RNA, 20 nt, Artificial Sequence
  HTT spacer sequence ATCN PAM
uccuaccucagccucccaag

SEQ ID NO: 3927 - RNA, 20 nt, Artificial Sequence
  HTT spacer sequence ATCN PAM
ugcccaggcuggucucaaac

SEQ ID NO: 3928 - RNA, 20 nt, Artificial Sequence
  HTT spacer sequence ATCN PAM
cuaaaaaaacugaaaaaaaa

SEQ ID NO: 3929 - RNA, 20 nt, Artificial Sequence
  HTT spacer sequence ATCN PAM
uguccagcuaauuuuuuuuc

SEQ ID NO: 3930 - RNA, 20 nt, Artificial Sequence
  HTT spacer sequence ATCN PAM
cagcucaguguagccucgaa

SEQ ID NO: 3931 - RNA, 20 nt, Artificial Sequence
  HTT spacer sequence ATCN PAM
uguuuuaccacccaugcugg

SEQ ID NO: 3932 - RNA, 20 nt, Artificial Sequence
  HTT spacer sequence ATCN PAM
augaaauucaguaguaccaa

SEQ ID NO: 3933 - RNA, 20 nt, Artificial Sequence
  HTT spacer sequence ATCN PAM
uguugguacuacugaauuuc

SEQ ID NO: 3934 - RNA, 20 nt, Artificial Sequence
  HTT spacer sequence ATCN PAM
uuguuuauaauccuguuggu

SEQ ID NO: 3935 - RNA, 20 nt, Artificial Sequence
  HTT spacer sequence ATCN PAM
uugugucucacaggcaaaca

SEQ ID NO: 3936 - RNA, 20 nt, Artificial Sequence
  HTT spacer sequence ATCN PAM
caaagaaaaaaaaagaaaga

SEQ ID NO: 3937 - RNA, 20 nt, Artificial Sequence
  HTT spacer sequence ATCN PAM
uggcucaccacaaccucugu

SEQ ID NO: 3938 - RNA, 20 nt, Artificial Sequence
  HTT spacer sequence ATCN PAM
cuugaacccgggagacagag

SEQ ID NO: 3939 - RNA, 20 nt, Artificial Sequence
  HTT spacer sequence ATCN PAM
cagcuacuaggaggcugagg

SEQ ID NO: 3940 - RNA, 20 nt, Artificial Sequence
  HTT spacer sequence ATCN PAM
ccacgcucggcuaauuuugu

SEQ ID NO: 3941 - RNA, 20 nt, Artificial Sequence
  HTT spacer sequence ATCN PAM
cuacuaaaaguacaaaauua

SEQ ID NO: 3942 - RNA, 20 nt, Artificial Sequence
  HTT spacer sequence ATCN PAM
ccugaggucaggaguucgag

SEQ ID NO: 3943 - RNA, 20 nt, Artificial Sequence
  HTT spacer sequence ATCN PAM
ucccaccucagccucccaaa

SEQ ID NO: 3944 - RNA, 20 nt, Artificial Sequence
  HTT spacer sequence ATCN PAM
cagcacuuugggaggcugag

SEQ ID NO: 3945 - RNA, 20 nt, Artificial Sequence
  HTT spacer sequence ATCN PAM
gaauucaguguguacguuau

SEQ ID NO: 3946 - RNA, 20 nt, Artificial Sequence
  HTT spacer sequence ATCN PAM
aagaaauauaauacguaagc

SEQ ID NO: 3947 - RNA, 20 nt, Artificial Sequence
  HTT spacer sequence ATCN PAM
aauaagaaacacaaucaaag

SEQ ID NO: 3948 - RNA, 20 nt, Artificial Sequence
  HTT spacer sequence ATCN PAM
guccuccuccuccuccccag

SEQ ID NO: 3949 - RNA, 20 nt, Artificial Sequence
  HTT spacer sequence ATCN PAM
ccgggugcugagaacccagc

SEQ ID NO: 3950 - RNA, 20 nt, Artificial Sequence
  HTT spacer sequence ATCN PAM
gcugaucaccuacucauagg

SEQ ID NO: 3951 - RNA, 20 nt, Artificial Sequence
  HTT spacer sequence ATCN PAM
gcagauccccgggugcugag

SEQ ID NO: 3952 - RNA, 20 nt, Artificial Sequence
  HTT spacer sequence ATCN PAM
ccuacucauaggccaggccc

SEQ ID NO: 3953 - RNA, 20 nt, Artificial Sequence
  HTT spacer sequence ATCN PAM
aaguucuaggugacccagug

SEQ ID NO: 3954 - RNA, 20 nt, Artificial Sequence
  HTT spacer sequence ATCN PAM
uggaggugggggcuacagug

SEQ ID NO: 3955 - RNA, 20 nt, Artificial Sequence
  HTT spacer sequence ATCN PAM
uuaggaaggcaucuuggagg

SEQ ID NO: 3956 - RNA, 20 nt, Artificial Sequence
  HTT spacer sequence ATCN PAM
uggagguggaggagacagcc

SEQ ID NO: 3957 - RNA, 20 nt, Artificial Sequence
  HTT spacer sequence ATCN PAM
agaagugggcggcugucucc

SEQ ID NO: 3958 - RNA, 20 nt, Artificial Sequence
  HTT spacer sequence ATCN PAM
ccaugucguguucaaucuuc

SEQ ID NO: 3959 - RNA, 20 nt, Artificial Sequence
  HTT spacer sequence ATCN PAM
ucuuccagauccugacuucu

SEQ ID NO: 3960 - RNA, 20 nt, Artificial Sequence
  HTT spacer sequence ATCN PAM
ggaagaagauugaacacgac

SEQ ID NO: 3961 - RNA, 20 nt, Artificial Sequence
  HTT spacer sequence ATCN PAM
ugacuucuagguucagcuuu

SEQ ID NO: 3962 - RNA, 20 nt, Artificial Sequence
  HTT spacer sequence ATCN PAM
aggcacaagccagcaaagag

SEQ ID NO: 3963 - RNA, 20 nt, Artificial Sequence
  HTT spacer sequence ATCN PAM
ucacaucuguuuucuuggag

SEQ ID NO: 3964 - RNA, 20 nt, Artificial Sequence
  HTT spacer sequence ATCN PAM
guuuucuuggaguuaaucgu

SEQ ID NO: 3965 - RNA, 20 nt, Artificial Sequence
  HTT spacer sequence ATCN PAM
uuaccucuauaucgcuugcu

SEQ ID NO: 3966 - RNA, 20 nt, Artificial Sequence
  HTT spacer sequence ATCN PAM
cuugcuuauuauucuuuggc

SEQ ID NO: 3967 - RNA, 20 nt, Artificial Sequence
  HTT spacer sequence ATCN PAM
guuuuuccccagugugguca

SEQ ID NO: 3968 - RNA, 20 nt, Artificial Sequence
  HTT spacer sequence ATCN PAM
aacuugaguuauccagcucu

SEQ ID NO: 3969 - RNA, 20 nt, Artificial Sequence
  HTT spacer sequence ATCN PAM
agcucucugccccagucugg

SEQ ID NO: 3970 - RNA, 20 nt, Artificial Sequence
  HTT spacer sequence ATCN PAM
accugcccagacuggggcag

SEQ ID NO: 3971 - RNA, 20 nt, Artificial Sequence
  HTT spacer sequence ATCN PAM
ucaggucuguaguacacuug

SEQ ID NO: 3972 - RNA, 20 nt, Artificial Sequence
  HTT spacer sequence ATCN PAM
uaggacuucucuuugccauu

SEQ ID NO: 3973 - RNA, 20 nt, Artificial Sequence
  HTT spacer sequence ATCN PAM
aacgggagaacugcaaagga

SEQ ID NO: 3974 - RNA, 20 nt, Artificial Sequence
  HTT spacer sequence ATCN PAM
aggaacugggcauccaacgg

SEQ ID NO: 3975 - RNA, 20 nt, Artificial Sequence
  HTT spacer sequence ATCN PAM
ucuaguagcuuccugagaga

SEQ ID NO: 3976 - RNA, 20 nt, Artificial Sequence
  HTT spacer sequence ATCN PAM
ucucucaggaagcuacuaga

SEQ ID NO: 3977 - RNA, 20 nt, Artificial Sequence
  HTT spacer sequence ATCN PAM
uuuucccucagaaaugcaaa

SEQ ID NO: 3978 - RNA, 20 nt, Artificial Sequence
  HTT spacer sequence ATCN PAM
ccaacgugacccgauuccuu

SEQ ID NO: 3979 - RNA, 20 nt, Artificial Sequence
  HTT spacer sequence ATCN PAM
ggucacguuggagauuuuaa

SEQ ID NO: 3980 - RNA, 20 nt, Artificial Sequence
  HTT spacer sequence ATCN PAM
cuucaguucugggaaaauuu

SEQ ID NO: 3981 - RNA, 20 nt, Artificial Sequence
  HTT spacer sequence ATCN PAM
aacuaaccaauuucaggaga

SEQ ID NO: 3982 - RNA, 20 nt, Artificial Sequence
  HTT spacer sequence ATCN PAM
aggaggaccaacauccaacu

SEQ ID NO: 3983 - RNA, 20 nt, Artificial Sequence
  HTT spacer sequence ATCN PAM
uaccuuuuucuuuucuuuuu

SEQ ID NO: 3984 - RNA, 20 nt, Artificial Sequence
  HTT spacer sequence ATCN PAM
aaaaaguaccagaaaaagaa

SEQ ID NO: 3985 - RNA, 20 nt, Artificial Sequence
  HTT spacer sequence ATCN PAM
aucucaaacucuucuauuca

SEQ ID NO: 3986 - RNA, 20 nt, Artificial Sequence
  HTT spacer sequence ATCN PAM
caaacucuucuauucauugu

SEQ ID NO: 3987 - RNA, 20 nt, Artificial Sequence
  HTT spacer sequence ATCN PAM
agagacaaagaaaagaaaga

SEQ ID NO: 3988 - RNA, 20 nt, Artificial Sequence
  HTT spacer sequence ATCN PAM
caccacugcaccacaaccug

SEQ ID NO: 3989 - RNA, 20 nt, Artificial Sequence
  HTT spacer sequence ATCN PAM
uagcucacugcagccucaaa

SEQ ID NO: 3990 - RNA, 20 nt, Artificial Sequence
  HTT spacer sequence ATCN PAM
caaaaaaaaaaaaaaaaaag

SEQ ID NO: 3991 - RNA, 20 nt, Artificial Sequence
  HTT spacer sequence ATCN PAM
caccaccgcacucuagccug

SEQ ID NO: 3992 - RNA, 20 nt, Artificial Sequence
  HTT spacer sequence ATCN PAM
cagcuacuugagaggcugag

SEQ ID NO: 3993 - RNA, 20 nt, Artificial Sequence
  HTT spacer sequence ATCN PAM
ccugaggucaggcguucgag

SEQ ID NO: 3994 - RNA, 20 nt, Artificial Sequence
  HTT spacer sequence ATCN PAM
gccugccuuggccuccgaaa

SEQ ID NO: 3995 - RNA, 20 nt, Artificial Sequence
  HTT spacer sequence ATCN PAM
cggcacuuucggaggccaag

SEQ ID NO: 3996 - RNA, 20 nt, Artificial Sequence
  HTT spacer sequence ATCN PAM
uuagaucuuuaaauaccagu

SEQ ID NO: 3997 - RNA, 20 nt, Artificial Sequence
  HTT spacer sequence ATCN PAM
aaugaugggcucacgccugu

SEQ ID NO: 3998 - RNA, 20 nt, Artificial Sequence
  HTT spacer sequence ATCN PAM
uuaaauaccaguaucuauaa

SEQ ID NO: 3999 - RNA, 20 nt, Artificial Sequence
  HTT spacer sequence ATCN PAM
auaagucuuuuccucuugag

SEQ ID NO: 4000 - RNA, 20 nt, Artificial Sequence
  HTT spacer sequence ATCN PAM
cuggaaggaaauuacucauu

SEQ ID NO: 4001 - RNA, 20 nt, Artificial Sequence
  HTT spacer sequence ATCN PAM
ugcaaccggggacuggaagg

SEQ ID NO: 4002 - RNA, 20 nt, Artificial Sequence
  HTT spacer sequence ATCN PAM
cacgucuguccucagccuau

SEQ ID NO: 4003 - RNA, 20 nt, Artificial Sequence
  HTT spacer sequence ATCN PAM
caagagguguuuacauaggc

SEQ ID NO: 4004 - RNA, 20 nt, Artificial Sequence
  HTT spacer sequence ATCN PAM
cucucaaucuuugccggagg

SEQ ID NO: 4005 - RNA, 20 nt, Artificial Sequence
  HTT spacer sequence ATCN PAM
uugccggaggugggggaggg

SEQ ID NO: 4006 - RNA, 20 nt, Artificial Sequence
  HTT spacer sequence ATCN PAM
aaggcagcccaggaagcagc

SEQ ID NO: 4007 - RNA, 20 nt, Artificial Sequence
  HTT spacer sequence ATCN PAM
cuccacuuucagauguaugu

SEQ ID NO: 4008 - RNA, 20 nt, Artificial Sequence
  HTT spacer sequence ATCN PAM
gaaaguggagggauggagag

SEQ ID NO: 4009 - RNA, 20 nt, Artificial Sequence
  HTT spacer sequence ATCN PAM
cuccuacccuccccuguccc

SEQ ID NO: 4010 - RNA, 20 nt, Artificial Sequence
  HTT spacer sequence ATCN PAM
gucaguuauguagcucuugu

SEQ ID NO: 4011 - RNA, 20 nt, Artificial Sequence
  HTT spacer sequence ATCN PAM
uguaaagaaguuguauaaag

SEQ ID NO: 4012 - RNA, 20 nt, Artificial Sequence
  HTT spacer sequence ATCN PAM
agcguguuggauuagaaauc

SEQ ID NO: 4013 - RNA, 20 nt, Artificial Sequence
  HTT spacer sequence ATCN PAM
aacacgcuggauugaacuug

SEQ ID NO: 4014 - RNA, 20 nt, Artificial Sequence
  HTT spacer sequence ATCN PAM
cccacccucugguuuauucu

SEQ ID NO: 4015 - RNA, 20 nt, Artificial Sequence
  HTT spacer sequence ATCN PAM
guguuuggcagguaauuuug

SEQ ID NO: 4016 - RNA, 20 nt, Artificial Sequence
  HTT spacer sequence ATCN PAM
uuaguguaucccuuggugaa

SEQ ID NO: 4017 - RNA, 20 nt, Artificial Sequence
  HTT spacer sequence ATCN PAM
cuuggugaauaaccacaaag

SEQ ID NO: 4018 - RNA, 20 nt, Artificial Sequence
  HTT spacer sequence ATCN PAM
auggucuauguacacagaau

SEQ ID NO: 4019 - RNA, 20 nt, Artificial Sequence
  HTT spacer sequence ATCN PAM
uguguauuaguauuccugua

SEQ ID NO: 4020 - RNA, 20 nt, Artificial Sequence
  HTT spacer sequence ATCN PAM
cuacaauggaaugcuaugaa

SEQ ID NO: 4021 - RNA, 20 nt, Artificial Sequence
  HTT spacer sequence ATCN PAM
cuggguuguuucuaguucuu

SEQ ID NO: 4022 - RNA, 20 nt, Artificial Sequence
  HTT spacer sequence ATCN PAM
ugcacagcuagagguggagu

SEQ ID NO: 4023 - RNA, 20 nt, Artificial Sequence
  HTT spacer sequence ATCN PAM
cccaacaacuccaccucuag

SEQ ID NO: 4024 - RNA, 20 nt, Artificial Sequence
  HTT spacer sequence ATCN PAM
cagcugcaguagaaacugcc

SEQ ID NO: 4025 - RNA, 20 nt, Artificial Sequence
  HTT spacer sequence ATCN PAM
ccauacacaguggcaaaagg

SEQ ID NO: 4026 - RNA, 20 nt, Artificial Sequence
  HTT spacer sequence ATCN PAM
gcaauuccaagugcuagcga

SEQ ID NO: 4027 - RNA, 20 nt, Artificial Sequence
  HTT spacer sequence ATCN PAM
ggaaggcuaagaguaaaagc

SEQ ID NO: 4028 - RNA, 20 nt, Artificial Sequence
  HTT spacer sequence ATCN PAM
cauuaugauuuuaauuucca

SEQ ID NO: 4029 - RNA, 20 nt, Artificial Sequence
  HTT spacer sequence ATCN PAM
uaaugugauuccagaaaaca

SEQ ID NO: 4030 - RNA, 20 nt, Artificial Sequence
  HTT spacer sequence ATCN PAM
uuaaacuucagagccaaggg

SEQ ID NO: 4031 - RNA, 20 nt, Artificial Sequence
  HTT spacer sequence ATCN PAM
cuucccuuuugaaguacucu

SEQ ID NO: 4032 - RNA, 20 nt, Artificial Sequence
  HTT spacer sequence ATCN PAM
auucuaaaauacaguaugcc

SEQ ID NO: 4033 - RNA, 20 nt, Artificial Sequence
  HTT spacer sequence ATCN PAM
cuucuccaagccagcuaaca

SEQ ID NO: 4034 - RNA, 20 nt, Artificial Sequence
  HTT spacer sequence ATCN PAM
caagaaucccuucuccaagc

SEQ ID NO: 4035 - RNA, 20 nt, Artificial Sequence
  HTT spacer sequence ATCN PAM
cuacaaucccaagaaucccu

SEQ ID NO: 4036 - RNA, 20 nt, Artificial Sequence
  HTT spacer sequence ATCN PAM
uaauaaugaguagcucucau

SEQ ID NO: 4037 - RNA, 20 nt, Artificial Sequence
  HTT spacer sequence ATCN PAM
uuguaugaguccaaauagac

SEQ ID NO: 4038 - RNA, 20 nt, Artificial Sequence
  HTT spacer sequence ATCN PAM
cggcucacugcagccuccac

SEQ ID NO: 4039 - RNA, 20 nt, Artificial Sequence
  HTT spacer sequence ATCN PAM
cuugaaccugggagguggag

SEQ ID NO: 4040 - RNA, 20 nt, Artificial Sequence
  HTT spacer sequence ATCN PAM
cuugaggucaggaguuugag

SEQ ID NO: 4041 - RNA, 20 nt, Artificial Sequence
  HTT spacer sequence ATCN PAM
gccuucuucagccucccaaa

SEQ ID NO: 4042 - RNA, 20 nt, Artificial Sequence
  HTT spacer sequence ATCN PAM
cagcacuuugggaggcugaa

SEQ ID NO: 4043 - RNA, 20 nt, Artificial Sequence
  HTT spacer sequence ATCN PAM
uaaaaaacuacuuuggccaa

SEQ ID NO: 4044 - RNA, 20 nt, Artificial Sequence
  HTT spacer sequence ATCN PAM
uuucuugcagcuaaaaaagu

SEQ ID NO: 4045 - RNA, 20 nt, Artificial Sequence
  HTT spacer sequence ATCN PAM
cugacaaacuuuuuuagcug

SEQ ID NO: 4046 - RNA, 20 nt, Artificial Sequence
  HTT spacer sequence ATCN PAM
ucucugacaaacuuuuuuag

SEQ ID NO: 4047 - RNA, 20 nt, Artificial Sequence
  HTT spacer sequence ATCN PAM
ugugccuaacaguguccaga

SEQ ID NO: 4048 - RNA, 20 nt, Artificial Sequence
  HTT spacer sequence ATCN PAM
ggggucucacagccuuuaga

SEQ ID NO: 4049 - RNA, 20 nt, Artificial Sequence
  HTT spacer sequence ATCN PAM
cuguucagggcucucagcuc

SEQ ID NO: 4050 - RNA, 20 nt, Artificial Sequence
  HTT spacer sequence ATCN PAM
auagaaacaaugcuaaugac

SEQ ID NO: 4051 - RNA, 20 nt, Artificial Sequence
  HTT spacer sequence ATCN PAM
cuuaugggaaacgaggggau

SEQ ID NO: 4052 - RNA, 20 nt, Artificial Sequence
  HTT spacer sequence ATCN PAM
ccucguuucccauaagggau

SEQ ID NO: 4053 - RNA, 20 nt, Artificial Sequence
  HTT spacer sequence ATCN PAM
gugccuuaaggacaugcucc

SEQ ID NO: 4054 - RNA, 20 nt, Artificial Sequence
  HTT spacer sequence ATCN PAM
cucaugcuauuguuuguggc

SEQ ID NO: 4055 - RNA, 20 nt, Artificial Sequence
  HTT spacer sequence ATCN PAM
cugaagcacuguaacauguu

SEQ ID NO: 4056 - RNA, 20 nt, Artificial Sequence
  HTT spacer sequence ATCN PAM
ggccauaaacuggccccaaa

SEQ ID NO: 4057 - RNA, 20 nt, Artificial Sequence
  HTT spacer sequence ATCN PAM
ccucccagggaauuuacacg

SEQ ID NO: 4058 - RNA, 20 nt, Artificial Sequence
  HTT spacer sequence ATCN PAM
gaugccaguuacuaguuuac

SEQ ID NO: 4059 - RNA, 20 nt, Artificial Sequence
  HTT spacer sequence ATCN PAM
gauuuauaaauaaguuucuc

SEQ ID NO: 4060 - RNA, 20 nt, Artificial Sequence
  HTT spacer sequence ATCN PAM
uuguucagcaugcacugagc

SEQ ID NO: 4061 - RNA, 20 nt, Artificial Sequence
  HTT spacer sequence ATCN PAM
agucauggcucagagcauag

SEQ ID NO: 4062 - RNA, 20 nt, Artificial Sequence
  HTT spacer sequence ATCN PAM
auuucccauuauucaaaacu

SEQ ID NO: 4063 - RNA, 20 nt, Artificial Sequence
  HTT spacer sequence ATCN PAM
uggugacuauguuacuuaag

SEQ ID NO: 4064 - RNA, 20 nt, Artificial Sequence
  HTT spacer sequence ATCN PAM
uaaaauugaaaaggggugac

SEQ ID NO: 4065 - RNA, 20 nt, Artificial Sequence
  HTT spacer sequence ATCN PAM
agauuuaaauggccaucauu

SEQ ID NO: 4066 - RNA, 20 nt, Artificial Sequence
  HTT spacer sequence ATCN PAM
ugauaaaaauauccuaaaau

SEQ ID NO: 4067 - RNA, 20 nt, Artificial Sequence
  HTT spacer sequence ATCN PAM
uuagaguuauagcacuuucu

SEQ ID NO: 4068 - RNA, 20 nt, Artificial Sequence
  HTT spacer sequence ATCN PAM
aaaggagaaagugcuauaac

SEQ ID NO: 4069 - RNA, 20 nt, Artificial Sequence
  HTT spacer sequence ATCN PAM
gcaauuuaacuggacaugac

SEQ ID NO: 4070 - RNA, 20 nt, Artificial Sequence
  HTT spacer sequence ATCN PAM
gaaauaucugcaauuuaacu

SEQ ID NO: 4071 - RNA, 20 nt, Artificial Sequence
  HTT spacer sequence ATCN PAM
aagauguuccaguccugaga

SEQ ID NO: 4072 - RNA, 20 nt, Artificial Sequence
  HTT spacer sequence ATCN PAM
ucgaucggaaauaucugcaa

SEQ ID NO: 4073 - RNA, 20 nt, Artificial Sequence
  HTT spacer sequence ATCN PAM
cuuaggguggggcauuuacu

SEQ ID NO: 4074 - RNA, 20 nt, Artificial Sequence
  HTT spacer sequence ATCN PAM
acaaaugacaaaguuaagga

SEQ ID NO: 4075 - RNA, 20 nt, Artificial Sequence
  HTT spacer sequence ATCN PAM
agaauugaggccuccaccau

SEQ ID NO: 4076 - RNA, 20 nt, Artificial Sequence
  HTT spacer sequence ATCN PAM
auguccucuccgcaauggug

SEQ ID NO: 4077 - RNA, 20 nt, Artificial Sequence
  HTT spacer sequence ATCN PAM
uguauuacauaaaacuuaac

SEQ ID NO: 4078 - RNA, 20 nt, Artificial Sequence
  HTT spacer sequence ATCN PAM
uuuaucuacuuggacuuuug

SEQ ID NO: 4079 - RNA, 20 nt, Artificial Sequence
  HTT spacer sequence ATCN PAM
acuuggacuuuugcuuccgu

SEQ ID NO: 4080 - RNA, 20 nt, Artificial Sequence
  HTT spacer sequence ATCN PAM
agccgcuguccgccgaaugg

SEQ ID NO: 4081 - RNA, 20 nt, Artificial Sequence
  HTT spacer sequence ATCN PAM
gcagugagcaucugccagca

SEQ ID NO: 4082 - RNA, 20 nt, Artificial Sequence
  HTT spacer sequence ATCN PAM
gccagcacucaagaaggaca

SEQ ID NO: 4083 - RNA, 20 nt, Artificial Sequence
  HTT spacer sequence ATCN PAM
ugaguacaugcuggagacuc

SEQ ID NO: 4084 - RNA, 20 nt, Artificial Sequence
  HTT spacer sequence ATCN PAM
gguuuuauuuauuucaaagg

SEQ ID NO: 4085 - RNA, 20 nt, Artificial Sequence
  HTT spacer sequence ATCN PAM
ucugguuuuauuuauuucaa

SEQ ID NO: 4086 - RNA, 20 nt, Artificial Sequence
  HTT spacer sequence ATCN PAM
cucagcuucuagaccaggcu

SEQ ID NO: 4087 - RNA, 20 nt, Artificial Sequence
  HTT spacer sequence ATCN PAM
accagugccaaauagccugg

SEQ ID NO: 4088 - RNA, 20 nt, Artificial Sequence
  HTT spacer sequence ATCN PAM
gcagggucacagagacccau

SEQ ID NO: 4089 - RNA, 20 nt, Artificial Sequence
  HTT spacer sequence ATCN PAM
cacguccacaugcucgcuuc

SEQ ID NO: 4090 - RNA, 20 nt, Artificial Sequence
  HTT spacer sequence ATCN PAM
cuagcucagcaagguccuuu

SEQ ID NO: 4091 - RNA, 20 nt, Artificial Sequence
  HTT spacer sequence ATCN PAM
ugaacgaguacgccaugagg

SEQ ID NO: 4092 - RNA, 20 nt, Artificial Sequence
  HTT spacer sequence ATCN PAM
uguuugugccaucuugaucu

SEQ ID NO: 4093 - RNA, 20 nt, Artificial Sequence
  HTT spacer sequence ATCN PAM
ugaucucucaggaucucuuc

SEQ ID NO: 4094 - RNA, 20 nt, Artificial Sequence
  HTT spacer sequence ATCN PAM
agauggcacaaacaugauca

SEQ ID NO: 4095 - RNA, 20 nt, Artificial Sequence
  HTT spacer sequence ATCN PAM
cucaggaucucuucuuuuuu

SEQ ID NO: 4096 - RNA, 20 nt, Artificial Sequence
  HTT spacer sequence ATCN PAM
ugagagaucaagauggcaca

SEQ ID NO: 4097 - RNA, 20 nt, Artificial Sequence
  HTT spacer sequence ATCN PAM
cuucuuuuuuaacagauuaa

SEQ ID NO: 4098 - RNA, 20 nt, Artificial Sequence
  HTT spacer sequence ATCN PAM
guuaaaaaagaagagauccu

SEQ ID NO: 4099 - RNA, 20 nt, Artificial Sequence
  HTT spacer sequence ATCN PAM
ccaaacagugagucagaugu

SEQ ID NO: 4100 - RNA, 20 nt, Artificial Sequence
  HTT spacer sequence ATCN PAM
gacucacuguuuggagauuc

SEQ ID NO: 4101 - RNA, 20 nt, Artificial Sequence
  HTT spacer sequence ATCN PAM
uaacaucugacucacuguuu

SEQ ID NO: 4102 - RNA, 20 nt, Artificial Sequence
  HTT spacer sequence ATCN PAM
ucgacaggaacgaguaagcc

SEQ ID NO: 4103 - RNA, 20 nt, Artificial Sequence
  HTT spacer sequence ATCN PAM
gcagaguggaguguucaucc

SEQ ID NO: 4104 - RNA, 20 nt, Artificial Sequence
  HTT spacer sequence ATCN PAM
guucuuugaaugucagucau

SEQ ID NO: 4105 - RNA, 20 nt, Artificial Sequence
  HTT spacer sequence ATCN PAM
cccgcauuugacucacggug

SEQ ID NO: 4106 - RNA, 20 nt, Artificial Sequence
  HTT spacer sequence ATCN PAM
ugaccucugguuuuagaaac

SEQ ID NO: 4107 - RNA, 20 nt, Artificial Sequence
  HTT spacer sequence ATCN PAM
acccaguaaauacugauuga

SEQ ID NO: 4108 - RNA, 20 nt, Artificial Sequence
  HTT spacer sequence ATCN PAM
guauuuacuggguggaugaa

SEQ ID NO: 4109 - RNA, 20 nt, Artificial Sequence
  HTT spacer sequence ATCN PAM
cagagccuagcacacagugg

SEQ ID NO: 4110 - RNA, 20 nt, Artificial Sequence
  HTT spacer sequence ATCN PAM
ccuugagugagcauauacca

SEQ ID NO: 4111 - RNA, 20 nt, Artificial Sequence
  HTT spacer sequence ATCN PAM
caguacauuagaauuacugc

SEQ ID NO: 4112 - RNA, 20 nt, Artificial Sequence
  HTT spacer sequence ATCN PAM
aauugcuuaaaaugaggcug

SEQ ID NO: 4113 - RNA, 20 nt, Artificial Sequence
  HTT spacer sequence ATCN PAM
uacaaaacuuagcuaaaugg

SEQ ID NO: 4114 - RNA, 20 nt, Artificial Sequence
  HTT spacer sequence ATCN PAM
uuuuaagccacuuacaauuu

SEQ ID NO: 4115 - RNA, 20 nt, Artificial Sequence
  HTT spacer sequence ATCN PAM
ugaauugaagauaaugcuaa

SEQ ID NO: 4116 - RNA, 20 nt, Artificial Sequence
  HTT spacer sequence ATCN PAM
ucaauucaugauucuauuaa

SEQ ID NO: 4117 - RNA, 20 nt, Artificial Sequence
  HTT spacer sequence ATCN PAM
acacgcagcacuuacauggc

SEQ ID NO: 4118 - RNA, 20 nt, Artificial Sequence
  HTT spacer sequence ATCN PAM
caugagacucugcuuuuauu

SEQ ID NO: 4119 - RNA, 20 nt, Artificial Sequence
  HTT spacer sequence ATCN PAM
uuaccuugccuuguuuuuuu

SEQ ID NO: 4120 - RNA, 20 nt, Artificial Sequence
  HTT spacer sequence ATCN PAM
acucaugaccaguuauauuu

SEQ ID NO: 4121 - RNA, 20 nt, Artificial Sequence
  HTT spacer sequence ATCN PAM
uacuucucccuuuuuuuauu

SEQ ID NO: 4122 - RNA, 20 nt, Artificial Sequence
  HTT spacer sequence ATCN PAM
ucuuauuucaucuauaagua

SEQ ID NO: 4123 - RNA, 20 nt, Artificial Sequence
  HTT spacer sequence ATCN PAM
auaaguauuucaguaucucu

SEQ ID NO: 4124 - RNA, 20 nt, Artificial Sequence
  HTT spacer sequence ATCN PAM
cuauagaugaggacucuucu

SEQ ID NO: 4125 - RNA, 20 nt, Artificial Sequence
  HTT spacer sequence ATCN PAM
auagagauacugaaauacuu

SEQ ID NO: 4126 - RNA, 20 nt, Artificial Sequence
  HTT spacer sequence ATCN PAM
uuuuaaaaauaaaguuuuaa

SEQ ID NO: 4127 - RNA, 20 nt, Artificial Sequence
  HTT spacer sequence ATCN PAM
gaccaucauuuuaaaaauaa

SEQ ID NO: 4128 - RNA, 20 nt, Artificial Sequence
  HTT spacer sequence ATCN PAM
cagaacuuugggaggccaag

SEQ ID NO: 4129 - RNA, 20 nt, Artificial Sequence
  HTT spacer sequence ATCN PAM
gcccagcuuggccucccaaa

SEQ ID NO: 4130 - RNA, 20 nt, Artificial Sequence
  HTT spacer sequence ATCN PAM
cuugaaccugggaguuugag

SEQ ID NO: 4131 - RNA, 20 nt, Artificial Sequence
  HTT spacer sequence ATCN PAM
gccaaguguggugaugcaug

SEQ ID NO: 4132 - RNA, 20 nt, Artificial Sequence
  HTT spacer sequence ATCN PAM
ccacacuuggcugauuuuuu

SEQ ID NO: 4133 - RNA, 20 nt, Artificial Sequence
  HTT spacer sequence ATCN PAM
cagccucccaaguagcuggg

SEQ ID NO: 4134 - RNA, 20 nt, Artificial Sequence
  HTT spacer sequence ATCN PAM
uccaggcucaugugacccuc

SEQ ID NO: 4135 - RNA, 20 nt, Artificial Sequence
  HTT spacer sequence ATCN PAM
aggcugcagugauccaugau

SEQ ID NO: 4136 - RNA, 20 nt, Artificial Sequence
  HTT spacer sequence ATCN PAM
cugcagccuugaucuuccag

SEQ ID NO: 4137 - RNA, 20 nt, Artificial Sequence
  HTT spacer sequence ATCN PAM
augauuguaccacugcacuc

SEQ ID NO: 4138 - RNA, 20 nt, Artificial Sequence
  HTT spacer sequence ATCN PAM
uggaucacugcagccuugau

SEQ ID NO: 4139 - RNA, 20 nt, Artificial Sequence
  HTT spacer sequence ATCN PAM
ugggugauggagcaagauuc

SEQ ID NO: 4140 - RNA, 20 nt, Artificial Sequence
  HTT spacer sequence ATCN PAM
cccaggauggagugcagugg

SEQ ID NO: 4141 - RNA, 20 nt, Artificial Sequence
  HTT spacer sequence ATCN PAM
ugcuccaucacccaggaugg

SEQ ID NO: 4142 - RNA, 20 nt, Artificial Sequence
  HTT spacer sequence ATCN PAM
aauacccaccaacucauuau

SEQ ID NO: 4143 - RNA, 20 nt, Artificial Sequence
  HTT spacer sequence ATCN PAM
auuuuucucucuacucuuuu

SEQ ID NO: 4144 - RNA, 20 nt, Artificial Sequence
  HTT spacer sequence ATCN PAM
gcaucuaaauaaaauugguc

SEQ ID NO: 4145 - RNA, 20 nt, Artificial Sequence
  HTT spacer sequence ATCN PAM
aaauaaaauuggucgauaag

SEQ ID NO: 4146 - RNA, 20 nt, Artificial Sequence
  HTT spacer sequence ATCN PAM
accaauuuuauuuagaugcu

SEQ ID NO: 4147 - RNA, 20 nt, Artificial Sequence
  HTT spacer sequence ATCN PAM
uuaucgaccaauuuuauuua

SEQ ID NO: 4148 - RNA, 20 nt, Artificial Sequence
  HTT spacer sequence ATCN PAM
cuuugaugaacugguucccc

SEQ ID NO: 4149 - RNA, 20 nt, Artificial Sequence
  HTT spacer sequence ATCN PAM
aagagauuuacaauccuuau

SEQ ID NO: 4150 - RNA, 20 nt, Artificial Sequence
  HTT spacer sequence ATCN PAM
caguuuuuuucccuuagagu

SEQ ID NO: 4151 - RNA, 20 nt, Artificial Sequence
  HTT spacer sequence ATCN PAM
gguuucucaauaaaugaacu

SEQ ID NO: 4152 - RNA, 20 nt, Artificial Sequence
  HTT spacer sequence ATCN PAM
gaccacaggaaaacuuagaa

SEQ ID NO: 4153 - RNA, 20 nt, Artificial Sequence
  HTT spacer sequence ATCN PAM
ccacuguguaaauuaacacc

SEQ ID NO: 4154 - RNA, 20 nt, Artificial Sequence
  HTT spacer sequence ATCN PAM
auaauuggaggaaaagccuu

SEQ ID NO: 4155 - RNA, 20 nt, Artificial Sequence
  HTT spacer sequence ATCN PAM
gacaaggcuuuuccuccaau

SEQ ID NO: 4156 - RNA, 20 nt, Artificial Sequence
  HTT spacer sequence ATCN PAM
gaguccaguauuucuuauau

SEQ ID NO: 4157 - RNA, 20 nt, Artificial Sequence
  HTT spacer sequence ATCN PAM
uaaaauauuauauaagaaau

SEQ ID NO: 4158 - RNA, 20 nt, Artificial Sequence
  HTT spacer sequence ATCN PAM
guuaaaaaaaauugagcaua

SEQ ID NO: 4159 - RNA, 20 nt, Artificial Sequence
  HTT spacer sequence ATCN PAM
agcagccuucuuaaaagcau

SEQ ID NO: 4160 - RNA, 20 nt, Artificial Sequence
  HTT spacer sequence ATCN PAM
uaaaaguuuagagaucauug

SEQ ID NO: 4161 - RNA, 20 nt, Artificial Sequence
  HTT spacer sequence ATCN PAM
cuaaacuuuuaugaucaagc

SEQ ID NO: 4162 - RNA, 20 nt, Artificial Sequence
  HTT spacer sequence ATCN PAM
uuggucugaugggaaaagca

SEQ ID NO: 4163 - RNA, 20 nt, Artificial Sequence
  HTT spacer sequence ATCN PAM
gaccaaugaucucuaaacuu

SEQ ID NO: 4164 - RNA, 20 nt, Artificial Sequence
  HTT spacer sequence ATCN PAM
gacccggcacagaguuggga

SEQ ID NO: 4165 - RNA, 20 nt, Artificial Sequence
  HTT spacer sequence ATCN PAM
augagaaagccugcaggccu

SEQ ID NO: 4166 - RNA, 20 nt, Artificial Sequence
  HTT spacer sequence ATCN PAM
guucacaaauguuagaaacc

SEQ ID NO: 4167 - RNA, 20 nt, Artificial Sequence
  HTT spacer sequence ATCN PAM
aaacuguguuaaauugggau

SEQ ID NO: 4168 - RNA, 20 nt, Artificial Sequence
  HTT spacer sequence ATCN PAM
caauuuaacacaguuucgau

SEQ ID NO: 4169 - RNA, 20 nt, Artificial Sequence
  HTT spacer sequence ATCN PAM
uggaaggacagggauagagg

SEQ ID NO: 4170 - RNA, 20 nt, Artificial Sequence
  HTT spacer sequence ATCN PAM
cuguccuuccaggauuacug

SEQ ID NO: 4171 - RNA, 20 nt, Artificial Sequence
  HTT spacer sequence ATCN PAM
auacccuuuuuuccccuuca

SEQ ID NO: 4172 - RNA, 20 nt, Artificial Sequence
  HTT spacer sequence ATCN PAM
gcaauuaagucucacaucca

SEQ ID NO: 4173 - RNA, 20 nt, Artificial Sequence
  HTT spacer sequence ATCN PAM
uuuauuuacuuuggagaaag

SEQ ID NO: 4174 - RNA, 20 nt, Artificial Sequence
  HTT spacer sequence ATCN PAM
agaguuuagaauuugccagu

SEQ ID NO: 4175 - RNA, 20 nt, Artificial Sequence
  HTT spacer sequence ATCN PAM
uaucuagaguuuagaauuug

SEQ ID NO: 4176 - RNA, 20 nt, Artificial Sequence
  HTT spacer sequence ATCN PAM
cuauaacauaucuuacucca

SEQ ID NO: 4177 - RNA, 20 nt, Artificial Sequence
  HTT spacer sequence ATCN PAM
uacuccaucuucuuuugacu

SEQ ID NO: 4178 - RNA, 20 nt, Artificial Sequence
  HTT spacer sequence ATCN PAM
ucuuuugacuaaaaacuguu

SEQ ID NO: 4179 - RNA, 20 nt, Artificial Sequence
  HTT spacer sequence ATCN PAM
uaggccuggccaaacuauua

SEQ ID NO: 4180 - RNA, 20 nt, Artificial Sequence
  HTT spacer sequence ATCN PAM
auauuuugcccacacuugcu

SEQ ID NO: 4181 - RNA, 20 nt, Artificial Sequence
  HTT spacer sequence ATCN PAM
aaaauuaucaauauuuugcc

SEQ ID NO: 4182 - RNA, 20 nt, Artificial Sequence
  HTT spacer sequence ATCN PAM
aagaagcaaacucucucacc

SEQ ID NO: 4183 - RNA, 20 nt, Artificial Sequence
  HTT spacer sequence ATCN PAM
uagaauugcuuuuacugcau

SEQ ID NO: 4184 - RNA, 20 nt, Artificial Sequence
  HTT spacer sequence ATCN PAM
uccuagaauugcuuuuacug

SEQ ID NO: 4185 - RNA, 20 nt, Artificial Sequence
  HTT spacer sequence ATCN PAM
acaaggagggagaaaaaggc

SEQ ID NO: 4186 - RNA, 20 nt, Artificial Sequence
  HTT spacer sequence ATCN PAM
auaggagggucagcaagauu

SEQ ID NO: 4187 - RNA, 20 nt, Artificial Sequence
  HTT spacer sequence ATCN PAM
ugcugacccuccuauggaug

SEQ ID NO: 4188 - RNA, 20 nt, Artificial Sequence
  HTT spacer sequence ATCN PAM
caaauuuccuuuauaaaucu

SEQ ID NO: 4189 - RNA, 20 nt, Artificial Sequence
  HTT spacer sequence ATCN PAM
aaguaugaagcaaaauaagg

SEQ ID NO: 4190 - RNA, 20 nt, Artificial Sequence
  HTT spacer sequence ATCN PAM
auuacuugcuuaaaauuuau

SEQ ID NO: 4191 - RNA, 20 nt, Artificial Sequence
  HTT spacer sequence ATCN PAM
uucuuucuuucugagucuag

SEQ ID NO: 4192 - RNA, 20 nt, Artificial Sequence
  HTT spacer sequence ATCN PAM
cguguucauaaauguuauuc

SEQ ID NO: 4193 - RNA, 20 nt, Artificial Sequence
  HTT spacer sequence ATCN PAM
uacacaucacguguucauaa

SEQ ID NO: 4194 - RNA, 20 nt, Artificial Sequence
  HTT spacer sequence ATCN PAM
ccauaguaugaaagcagugc

SEQ ID NO: 4195 - RNA, 20 nt, Artificial Sequence
  HTT spacer sequence ATCN PAM
gcccccuccuaaauucuguu

SEQ ID NO: 4196 - RNA, 20 nt, Artificial Sequence
  HTT spacer sequence ATCN PAM
gcacccacauuuccuucacc

SEQ ID NO: 4197 - RNA, 20 nt, Artificial Sequence
  HTT spacer sequence ATCN PAM
ccuggcuccucucaauguaa

SEQ ID NO: 4198 - RNA, 20 nt, Artificial Sequence
  HTT spacer sequence ATCN PAM
auuuugaacaaagaaucucc

SEQ ID NO: 4199 - RNA, 20 nt, Artificial Sequence
  HTT spacer sequence ATCN PAM
gcuuauacuuugacuucuua

SEQ ID NO: 4200 - RNA, 20 nt, Artificial Sequence
  HTT spacer sequence ATCN PAM
ggccccuuacacaaaacauu

SEQ ID NO: 4201 - RNA, 20 nt, Artificial Sequence
  HTT spacer sequence ATCN PAM
caagucuguggcagcuacuc

SEQ ID NO: 4202 - RNA, 20 nt, Artificial Sequence
  HTT spacer sequence ATCN PAM
caggucagcaaaccacagug

SEQ ID NO: 4203 - RNA, 20 nt, Artificial Sequence
  HTT spacer sequence ATCN PAM
gaagagcuaaaagugagacu

SEQ ID NO: 4204 - RNA, 20 nt, Artificial Sequence
  HTT spacer sequence ATCN PAM
gacaguguagaagaguauaa

SEQ ID NO: 4205 - RNA, 20 nt, Artificial Sequence
  HTT spacer sequence ATCN PAM
uuaauauuauaaaauacaug

SEQ ID NO: 4206 - RNA, 20 nt, Artificial Sequence
  HTT spacer sequence ATCN PAM
gaaguucaaauuucacuggu

SEQ ID NO: 4207 - RNA, 20 nt, Artificial Sequence
  HTT spacer sequence ATCN PAM
ugugggacauacuuacacua

SEQ ID NO: 4208 - RNA, 20 nt, Artificial Sequence
  HTT spacer sequence ATCN PAM
ggcaacuguaauuaaaggga

SEQ ID NO: 4209 - RNA, 20 nt, Artificial Sequence
  HTT spacer sequence ATCN PAM
cauuauaugaacauaaugaa

SEQ ID NO: 4210 - RNA, 20 nt, Artificial Sequence
  HTT spacer sequence ATCN PAM
gacaggaggcggugcucagg

SEQ ID NO: 4211 - RNA, 20 nt, Artificial Sequence
  HTT spacer sequence ATCN PAM
guggcagcauuagauuccca

SEQ ID NO: 4212 - RNA, 20 nt, Artificial Sequence
  HTT spacer sequence ATCN PAM
aaugcugccacugaucugac

SEQ ID NO: 4213 - RNA, 20 nt, Artificial Sequence
  HTT spacer sequence ATCN PAM
aaugccugaugaucugaggu

SEQ ID NO: 4214 - RNA, 20 nt, Artificial Sequence
  HTT spacer sequence ATCN PAM
ggcauuagauucucauaagg

SEQ ID NO: 4215 - RNA, 20 nt, Artificial Sequence
  HTT spacer sequence ATCN PAM
ucaggcauuagauucucaua

SEQ ID NO: 4216 - RNA, 20 nt, Artificial Sequence
  HTT spacer sequence ATCN PAM
gagguggaacagucucgucu

SEQ ID NO: 4217 - RNA, 20 nt, Artificial Sequence
  HTT spacer sequence ATCN PAM
ccuggcccuguggaaaaauu

SEQ ID NO: 4218 - RNA, 20 nt, Artificial Sequence
  HTT spacer sequence ATCN PAM
cagugcuacccaaccuuucu

SEQ ID NO: 4219 - RNA, 20 nt, Artificial Sequence
  HTT spacer sequence ATCN PAM
aaaaacacuauuaugagugc

SEQ ID NO: 4220 - RNA, 20 nt, Artificial Sequence
  HTT spacer sequence ATCN PAM
cuauuucccaaaacugguga

SEQ ID NO: 4221 - RNA, 20 nt, Artificial Sequence
  HTT spacer sequence ATCN PAM
ucauucucaugcugcuccuc

SEQ ID NO: 4222 - RNA, 20 nt, Artificial Sequence
  HTT spacer sequence ATCN PAM
ugggaauuuagaaaacaaca

SEQ ID NO: 4223 - RNA, 20 nt, Artificial Sequence
  HTT spacer sequence ATCN PAM
uuagcuuccauguuguuuuc

SEQ ID NO: 4224 - RNA, 20 nt, Artificial Sequence
  HTT spacer sequence ATCN PAM
cauugguggaagugauaggg

SEQ ID NO: 4225 - RNA, 20 nt, Artificial Sequence
  HTT spacer sequence ATCN PAM
cuuccaccaaugugaucauu

SEQ ID NO: 4226 - RNA, 20 nt, Artificial Sequence
  HTT spacer sequence ATCN PAM
uaagcuucacuuuuuuguug

SEQ ID NO: 4227 - RNA, 20 nt, Artificial Sequence
  HTT spacer sequence ATCN PAM
uacacagcaccaagaccaca

SEQ ID NO: 4228 - RNA, 20 nt, Artificial Sequence
  HTT spacer sequence ATCN PAM
auagaguguaacuaguauua

SEQ ID NO: 4229 - RNA, 20 nt, Artificial Sequence
  HTT spacer sequence ATCN PAM
uccuugccaaaacuuauaau

SEQ ID NO: 4230 - RNA, 20 nt, Artificial Sequence
  HTT spacer sequence ATCN PAM
uuauuuuauaaauaggggag

SEQ ID NO: 4231 - RNA, 20 nt, Artificial Sequence
  HTT spacer sequence ATCN PAM
uuccaaagugcugaaauuac

SEQ ID NO: 4232 - RNA, 20 nt, Artificial Sequence
  HTT spacer sequence ATCN PAM
cuucagcccaggaguuugag

SEQ ID NO: 4233 - RNA, 20 nt, Artificial Sequence
  HTT spacer sequence ATCN PAM
uaccaccucagccuccaaag

SEQ ID NO: 4234 - RNA, 20 nt, Artificial Sequence
  HTT spacer sequence ATCN PAM
ugauggcagcugcacugagc

SEQ ID NO: 4235 - RNA, 20 nt, Artificial Sequence
  HTT spacer sequence ATCN PAM
agauucacugcagccucaac

SEQ ID NO: 4236 - RNA, 20 nt, Artificial Sequence
  HTT spacer sequence ATCN PAM
ugcucugucaccaggcucag

SEQ ID NO: 4237 - RNA, 20 nt, Artificial Sequence
  HTT spacer sequence ATCN PAM
ggaggaggggcuuuaaaugu

SEQ ID NO: 4238 - RNA, 20 nt, Artificial Sequence
  HTT spacer sequence ATCN PAM
uggaacuauuuucccuacug

SEQ ID NO: 4239 - RNA, 20 nt, Artificial Sequence
  HTT spacer sequence ATCN PAM
ucauguuaauuugccagaaa

SEQ ID NO: 4240 - RNA, 20 nt, Artificial Sequence
  HTT spacer sequence ATCN PAM
ucaagucgucagagggaucu

SEQ ID NO: 4241 - RNA, 20 nt, Artificial Sequence
  HTT spacer sequence ATCN PAM
cucugacgacuugaagaugc

SEQ ID NO: 4242 - RNA, 20 nt, Artificial Sequence
  HTT spacer sequence ATCN PAM
gagaguuccuuccuggccug

SEQ ID NO: 4243 - RNA, 20 nt, Artificial Sequence
  HTT spacer sequence ATCN PAM
gucuguccccagcucugcgu

SEQ ID NO: 4244 - RNA, 20 nt, Artificial Sequence
  HTT spacer sequence ATCN PAM
agcucccaaaggcagcucuc

SEQ ID NO: 4245 - RNA, 20 nt, Artificial Sequence
  HTT spacer sequence ATCN PAM
cagccucuaccacugggucu

SEQ ID NO: 4246 - RNA, 20 nt, Artificial Sequence
  HTT spacer sequence ATCN PAM
auagccugcuaggcaccaga

SEQ ID NO: 4247 - RNA, 20 nt, Artificial Sequence
  HTT spacer sequence ATCN PAM
gacugaagucuuacugcugc

SEQ ID NO: 4248 - RNA, 20 nt, Artificial Sequence
  HTT spacer sequence ATCN PAM
gccuuguuuccuguccuuua

SEQ ID NO: 4249 - RNA, 20 nt, Artificial Sequence
  HTT spacer sequence ATCN PAM
cuaaugaaaaguuauacuug

SEQ ID NO: 4250 - RNA, 20 nt, Artificial Sequence
  HTT spacer sequence ATCN PAM
gagauuucuaauacuuuuaa

SEQ ID NO: 4251 - RNA, 20 nt, Artificial Sequence
  HTT spacer sequence ATCN PAM
cagauuauuuagcugacuaa

SEQ ID NO: 4252 - RNA, 20 nt, Artificial Sequence
  HTT spacer sequence ATCN PAM
uagcuuuuuugauuucuuag

SEQ ID NO: 4253 - RNA, 20 nt, Artificial Sequence
  HTT spacer sequence ATCN PAM
aaaaagcuaagauaaauugc

SEQ ID NO: 4254 - RNA, 20 nt, Artificial Sequence
  HTT spacer sequence ATCN PAM
uuagaacuauauauuugaau

SEQ ID NO: 4255 - RNA, 20 nt, Artificial Sequence
  HTT spacer sequence ATCN PAM
caguucaacauuuuaauuuc

SEQ ID NO: 4256 - RNA, 20 nt, Artificial Sequence
  HTT spacer sequence ATCN PAM
agcuguuugaagauuuucac

SEQ ID NO: 4257 - RNA, 20 nt, Artificial Sequence
  HTT spacer sequence ATCN PAM
ucaaacagcuugauucaacu

SEQ ID NO: 4258 - RNA, 20 nt, Artificial Sequence
  HTT spacer sequence ATCN PAM
agaagaaaugugaaaaucuu

SEQ ID NO: 4259 - RNA, 20 nt, Artificial Sequence
  HTT spacer sequence ATCN PAM
gcuuguuacuuuaucuguca

SEQ ID NO: 4260 - RNA, 20 nt, Artificial Sequence
  HTT spacer sequence ATCN PAM
gucacuuucugugauuugca

SEQ ID NO: 4261 - RNA, 20 nt, Artificial Sequence
  HTT spacer sequence ATCN PAM
cagaaagugacagauaaagu

SEQ ID NO: 4262 - RNA, 20 nt, Artificial Sequence
  HTT spacer sequence ATCN PAM
ccuuuuuguuuucuugaaag

SEQ ID NO: 4263 - RNA, 20 nt, Artificial Sequence
  HTT spacer sequence ATCN PAM
gagucuuguguugaaucuua

SEQ ID NO: 4264 - RNA, 20 nt, Artificial Sequence
  HTT spacer sequence ATCN PAM
uacugauuuucuuguauuuc

SEQ ID NO: 4265 - RNA, 20 nt, Artificial Sequence
  HTT spacer sequence ATCN PAM
guaagauucaacacaagacu

SEQ ID NO: 4266 - RNA, 20 nt, Artificial Sequence
  HTT spacer sequence ATCN PAM
uguauuucuuguaauacugu

SEQ ID NO: 4267 - RNA, 20 nt, Artificial Sequence
  HTT spacer sequence ATCN PAM
cuucucagaugagugauuau

SEQ ID NO: 4268 - RNA, 20 nt, Artificial Sequence
  HTT spacer sequence ATCN PAM
gagaagagauauacacagag

SEQ ID NO: 4269 - RNA, 20 nt, Artificial Sequence
  HTT spacer sequence ATCN PAM
cucaucugagaagagauaua

SEQ ID NO: 4270 - RNA, 20 nt, Artificial Sequence
  HTT spacer sequence ATCN PAM
gauaaccaggccugaauagu

SEQ ID NO: 4271 - RNA, 20 nt, Artificial Sequence
  HTT spacer sequence ATCN PAM
gauuccagcaacauucacac

SEQ ID NO: 4272 - RNA, 20 nt, Artificial Sequence
  HTT spacer sequence ATCN PAM
gaauugcuuugucauaaauu

SEQ ID NO: 4273 - RNA, 20 nt, Artificial Sequence
  HTT spacer sequence ATCN PAM
uaaauuucuaauguucgggg

SEQ ID NO: 4274 - RNA, 20 nt, Artificial Sequence
  HTT spacer sequence ATCN PAM
uagcuuuaugggccauaugg

SEQ ID NO: 4275 - RNA, 20 nt, Artificial Sequence
  HTT spacer sequence ATCN PAM
ucuugccucagcccccugag

SEQ ID NO: 4276 - RNA, 20 nt, Artificial Sequence
  HTT spacer sequence ATCN PAM
uuuuucagccauauuuaacu

SEQ ID NO: 4277 - RNA, 20 nt, Artificial Sequence
  HTT spacer sequence ATCN PAM
gaauguucugauaaaacuua

SEQ ID NO: 4278 - RNA, 20 nt, Artificial Sequence
  HTT spacer sequence ATCN PAM
gaacauucugauauguacaa

SEQ ID NO: 4279 - RNA, 20 nt, Artificial Sequence
  HTT spacer sequence ATCN PAM
caaacacuuuaauaaaaguu

SEQ ID NO: 4280 - RNA, 20 nt, Artificial Sequence
  HTT spacer sequence ATCN PAM
gcuaguuuugguacacauua

SEQ ID NO: 4281 - RNA, 20 nt, Artificial Sequence
  HTT spacer sequence ATCN PAM
uuugcaaugccaguuauuuu

SEQ ID NO: 4282 - RNA, 20 nt, Artificial Sequence
  HTT spacer sequence ATCN PAM
uaaaagacugauccuuuuuu

SEQ ID NO: 4283 - RNA, 20 nt, Artificial Sequence
  HTT spacer sequence ATCN PAM
gucuuuuaagauuucaaaau

SEQ ID NO: 4284 - RNA, 20 nt, Artificial Sequence
  HTT spacer sequence ATCN PAM
uuuuuugugucaugauuuga

SEQ ID NO: 4285 - RNA, 20 nt, Artificial Sequence
  HTT spacer sequence ATCN PAM
ugacacaaaaaaggaucagu

SEQ ID NO: 4286 - RNA, 20 nt, Artificial Sequence
  HTT spacer sequence ATCN PAM
cauuuaauacugcaaauaau

SEQ ID NO: 4287 - RNA, 20 nt, Artificial Sequence
  HTT spacer sequence ATCN PAM
uaacaggaauagcauucuag

SEQ ID NO: 4288 - RNA, 20 nt, Artificial Sequence
  HTT spacer sequence ATCN PAM
auaauauuugcgucaucaua

SEQ ID NO: 4289 - RNA, 20 nt, Artificial Sequence
  HTT spacer sequence ATCN PAM
uaguaugagauacuuaauca

SEQ ID NO: 4290 - RNA, 20 nt, Artificial Sequence
  HTT spacer sequence ATCN PAM
cauacuaugaugacgcaaau

SEQ ID NO: 4291 - RNA, 20 nt, Artificial Sequence
  HTT spacer sequence ATCN PAM
aguuugagauuuuagugaaa

SEQ ID NO: 4292 - RNA, 20 nt, Artificial Sequence
  HTT spacer sequence ATCN PAM
caaacuugauuaaguaucuc

SEQ ID NO: 4293 - RNA, 20 nt, Artificial Sequence
  HTT spacer sequence ATCN PAM
uuuuggcuucuaaacaaugu

SEQ ID NO: 4294 - RNA, 20 nt, Artificial Sequence
  HTT spacer sequence ATCN PAM
cuccuaauucaagaauauag

SEQ ID NO: 4295 - RNA, 20 nt, Artificial Sequence
  HTT spacer sequence ATCN PAM
ucguucucaccgccacugga

SEQ ID NO: 4296 - RNA, 20 nt, Artificial Sequence
  HTT spacer sequence ATCN PAM
gucaucuucguucucaccgc

SEQ ID NO: 4297 - RNA, 20 nt, Artificial Sequence
  HTT spacer sequence ATCN PAM
gagcaaugugaaucagucau

SEQ ID NO: 4298 - RNA, 20 nt, Artificial Sequence
  HTT spacer sequence ATCN PAM
ucuucuggcugggacauggg

SEQ ID NO: 4299 - RNA, 20 nt, Artificial Sequence
  HTT spacer sequence ATCN PAM
caugucccagccagaagagg

SEQ ID NO: 4300 - RNA, 20 nt, Artificial Sequence
  HTT spacer sequence ATCN PAM
ugucucuuuuaagccuuuuu

SEQ ID NO: 4301 - RNA, 20 nt, Artificial Sequence
  HTT spacer sequence ATCN PAM
uuuuuaagugaaaucugccc

SEQ ID NO: 4302 - RNA, 20 nt, Artificial Sequence
  HTT spacer sequence ATCN PAM
gcccaaauuauaagacagau

SEQ ID NO: 4303 - RNA, 20 nt, Artificial Sequence
  HTT spacer sequence ATCN PAM
gucuuauaauuugggcagau

SEQ ID NO: 4304 - RNA, 20 nt, Artificial Sequence
  HTT spacer sequence ATCN PAM
aacacaacucuaccuucauc

SEQ ID NO: 4305 - RNA, 20 nt, Artificial Sequence
  HTT spacer sequence ATCN PAM
uauauccaacacaacucuac

SEQ ID NO: 4306 - RNA, 20 nt, Artificial Sequence
  HTT spacer sequence ATCN PAM
gugguuugcaaauauguucc

SEQ ID NO: 4307 - RNA, 20 nt, Artificial Sequence
  HTT spacer sequence ATCN PAM
uccaaaucagugguuugcaa

SEQ ID NO: 4308 - RNA, 20 nt, Artificial Sequence
  HTT spacer sequence ATCN PAM
cuaucuuccaaaucaguggu

SEQ ID NO: 4309 - RNA, 20 nt, Artificial Sequence
  HTT spacer sequence ATCN PAM
uaacaaaagccaucucuauc

SEQ ID NO: 4310 - RNA, 20 nt, Artificial Sequence
  HTT spacer sequence ATCN PAM
gaauucaccuuuuuggcauu

SEQ ID NO: 4311 - RNA, 20 nt, Artificial Sequence
  HTT spacer sequence ATCN PAM
aauaaaaugccaaaaaggug

SEQ ID NO: 4312 - RNA, 20 nt, Artificial Sequence
  HTT spacer sequence ATCN PAM
acuaaauaauaggaaacuuu

SEQ ID NO: 4313 - RNA, 20 nt, Artificial Sequence
  HTT spacer sequence ATCN PAM
acauggaauuaacacagcaa

SEQ ID NO: 4314 - RNA, 20 nt, Artificial Sequence
  HTT spacer sequence ATCN PAM
cacaucauuguaaguuuaug

SEQ ID NO: 4315 - RNA, 20 nt, Artificial Sequence
  HTT spacer sequence ATCN PAM
uuguaaguuuauggaaguua

SEQ ID NO: 4316 - RNA, 20 nt, Artificial Sequence
  HTT spacer sequence ATCN PAM
uacuucugacuuuuucuuug

SEQ ID NO: 4317 - RNA, 20 nt, Artificial Sequence
  HTT spacer sequence ATCN PAM
aaauaauuauugggaauuuc

SEQ ID NO: 4318 - RNA, 20 nt, Artificial Sequence
  HTT spacer sequence ATCN PAM
caugugagugucauuaaaug

SEQ ID NO: 4319 - RNA, 20 nt, Artificial Sequence
  HTT spacer sequence ATCN PAM
uuguggcuacaucacaugug

SEQ ID NO: 4320 - RNA, 20 nt, Artificial Sequence
  HTT spacer sequence ATCN PAM
uauuaagacuguugguuuca

SEQ ID NO: 4321 - RNA, 20 nt, Artificial Sequence
  HTT spacer sequence ATCN PAM
ucagaauuacauuaaugaga

SEQ ID NO: 4322 - RNA, 20 nt, Artificial Sequence
  HTT spacer sequence ATCN PAM
uuccagaucauauaaugcuu

SEQ ID NO: 4323 - RNA, 20 nt, Artificial Sequence
  HTT spacer sequence ATCN PAM
ggaaggaugaaauaauauuu

SEQ ID NO: 4324 - RNA, 20 nt, Artificial Sequence
  HTT spacer sequence ATCN PAM
uauaaugcuuaaguucugau

SEQ ID NO: 4325 - RNA, 20 nt, Artificial Sequence
  HTT spacer sequence ATCN PAM
gaacuuaagcauuauaugau

SEQ ID NO: 4326 - RNA, 20 nt, Artificial Sequence
  HTT spacer sequence ATCN PAM
uaaagucuagaaaauuaaaa

SEQ ID NO: 4327 - RNA, 20 nt, Artificial Sequence
  HTT spacer sequence ATCN PAM
uuuaauuuucuagacuuuau

SEQ ID NO: 4328 - RNA, 20 nt, Artificial Sequence
  HTT spacer sequence ATCN PAM
aaugcuauuggccuuugaaa

SEQ ID NO: 4329 - RNA, 20 nt, Artificial Sequence
  HTT spacer sequence ATCN PAM
uuacaguuauaacuuaccau

SEQ ID NO: 4330 - RNA, 20 nt, Artificial Sequence
  HTT spacer sequence ATCN PAM
auauuacuacuuaaacuuaa

SEQ ID NO: 4331 - RNA, 20 nt, Artificial Sequence
  HTT spacer sequence ATCN PAM
aaaucaauaaauauuaauua

SEQ ID NO: 4332 - RNA, 20 nt, Artificial Sequence
  HTT spacer sequence ATCN PAM
auaaauauuaauuauuaaaa

SEQ ID NO: 4333 - RNA, 20 nt, Artificial Sequence
  HTT spacer sequence ATCN PAM
uugcuuuuaacuuuuuccau

SEQ ID NO: 4334 - RNA, 20 nt, Artificial Sequence
  HTT spacer sequence ATCN PAM
cuacauucuuuguguuuaau

SEQ ID NO: 4335 - RNA, 20 nt, Artificial Sequence
  HTT spacer sequence ATCN PAM
uauauaaguauuuuuauacc

SEQ ID NO: 4336 - RNA, 20 nt, Artificial Sequence
  HTT spacer sequence ATCN PAM
ucauauauaaguauuuuuau

SEQ ID NO: 4337 - RNA, 20 nt, Artificial Sequence
  HTT spacer sequence ATCN PAM
uccaaggcuucuucuucucc

SEQ ID NO: 4338 - RNA, 20 nt, Artificial Sequence
  HTT spacer sequence ATCN PAM
agaucggaugucagcagcuc

SEQ ID NO: 4339 - RNA, 20 nt, Artificial Sequence
  HTT spacer sequence ATCN PAM
cgauucagagucauccucca

SEQ ID NO: 4340 - RNA, 20 nt, Artificial Sequence
  HTT spacer sequence ATCN PAM
gaugucagcagcucugccuu

SEQ ID NO: 4341 - RNA, 20 nt, Artificial Sequence
  HTT spacer sequence ATCN PAM
gaucucgauucagagucauc

SEQ ID NO: 4342 - RNA, 20 nt, Artificial Sequence
  HTT spacer sequence ATCN PAM
uauauuuguuguuuuccaug

SEQ ID NO: 4343 - RNA, 20 nt, Artificial Sequence
  HTT spacer sequence ATCN PAM
ccuacucacaaagcccuaug

SEQ ID NO: 4344 - RNA, 20 nt, Artificial Sequence
  HTT spacer sequence ATCN PAM
caugaguuggauggguuaug

SEQ ID NO: 4345 - RNA, 20 nt, Artificial Sequence
  HTT spacer sequence ATCN PAM
aacucaugagauguuucgac

SEQ ID NO: 4346 - RNA, 20 nt, Artificial Sequence
  HTT spacer sequence ATCN PAM
cauuucccaacccccagcau

SEQ ID NO: 4347 - RNA, 20 nt, Artificial Sequence
  HTT spacer sequence ATCN PAM
cauaauuuuucaucccauuu

SEQ ID NO: 4348 - RNA, 20 nt, Artificial Sequence
  HTT spacer sequence ATCN PAM
auaggcaauuuuucauccca

SEQ ID NO: 4349 - RNA, 20 nt, Artificial Sequence
  HTT spacer sequence ATCN PAM
gccuuuguuuacagauaguu

SEQ ID NO: 4350 - RNA, 20 nt, Artificial Sequence
  HTT spacer sequence ATCN PAM
guaaacaaaggcagauucuu

SEQ ID NO: 4351 - RNA, 20 nt, Artificial Sequence
  HTT spacer sequence ATCN PAM
uuuuucuuuuuugagauaga

SEQ ID NO: 4352 - RNA, 20 nt, Artificial Sequence
  HTT spacer sequence ATCN PAM
caaaaaagaaaaaagauaac

SEQ ID NO: 4353 - RNA, 20 nt, Artificial Sequence
  HTT spacer sequence ATCN PAM
gcacugggugacagugugag

SEQ ID NO: 4354 - RNA, 20 nt, Artificial Sequence
  HTT spacer sequence ATCN PAM
cuggaacccagaaggcggag

SEQ ID NO: 4355 - RNA, 20 nt, Artificial Sequence
  HTT spacer sequence ATCN PAM
cuugaggucaggaguucaag

SEQ ID NO: 4356 - RNA, 20 nt, Artificial Sequence
  HTT spacer sequence ATCN PAM
gccugccucagccucccaca

SEQ ID NO: 4357 - RNA, 20 nt, Artificial Sequence
  HTT spacer sequence ATCN PAM
cggcacugugggaggcugag

SEQ ID NO: 4358 - RNA, 20 nt, Artificial Sequence
  HTT spacer sequence ATCN PAM
guaacuggccgggcacagug

SEQ ID NO: 4359 - RNA, 20 nt, Artificial Sequence
  HTT spacer sequence ATCN PAM
aaugaaauucucuguguacu

SEQ ID NO: 4360 - RNA, 20 nt, Artificial Sequence
  HTT spacer sequence ATCN PAM
uuuauaaaguacacagagaa

SEQ ID NO: 4361 - RNA, 20 nt, Artificial Sequence
  HTT spacer sequence ATCN PAM
ucaucuuuuauaaaguacac

SEQ ID NO: 4362 - RNA, 20 nt, Artificial Sequence
  HTT spacer sequence ATCN PAM
aguuauuaguaccuucaguu

SEQ ID NO: 4363 - RNA, 20 nt, Artificial Sequence
  HTT spacer sequence ATCN PAM
uaucuaaaagaauauuuuag

SEQ ID NO: 4364 - RNA, 20 nt, Artificial Sequence
  HTT spacer sequence ATCN PAM
aaaagaauauuuuagcuaua

SEQ ID NO: 4365 - RNA, 20 nt, Artificial Sequence
  HTT spacer sequence ATCN PAM
gaauaauucuaguaguaauu

SEQ ID NO: 4366 - RNA, 20 nt, Artificial Sequence
  HTT spacer sequence ATCN PAM
auuuuuauuuuguaaauaaa

SEQ ID NO: 4367 - RNA, 20 nt, Artificial Sequence
  HTT spacer sequence ATCN PAM
aaaaaaaaucuauuuuuauu

SEQ ID NO: 4368 - RNA, 20 nt, Artificial Sequence
  HTT spacer sequence ATCN PAM
cagcaauccggauacuauaa

SEQ ID NO: 4369 - RNA, 20 nt, Artificial Sequence
  HTT spacer sequence ATCN PAM
ggauacuauaaagcucacau

SEQ ID NO: 4370 - RNA, 20 nt, Artificial Sequence
  HTT spacer sequence ATCN PAM
ggauugcugugauguuuuau

SEQ ID NO: 4371 - RNA, 20 nt, Artificial Sequence
  HTT spacer sequence ATCN PAM
uccaggagaauaggacugga

SEQ ID NO: 4372 - RNA, 20 nt, Artificial Sequence
  HTT spacer sequence ATCN PAM
cgacuccaguccuauucucc

SEQ ID NO: 4373 - RNA, 20 nt, Artificial Sequence
  HTT spacer sequence ATCN PAM
ugaauguggcuuggaagaag

SEQ ID NO: 4374 - RNA, 20 nt, Artificial Sequence
  HTT spacer sequence ATCN PAM
cucuggggugggcuugccuu

SEQ ID NO: 4375 - RNA, 20 nt, Artificial Sequence
  HTT spacer sequence ATCN PAM
ccuucugauaagccuuauuu

SEQ ID NO: 4376 - RNA, 20 nt, Artificial Sequence
  HTT spacer sequence ATCN PAM
gaaggugauauucucaaaug

SEQ ID NO: 4377 - RNA, 20 nt, Artificial Sequence
  HTT spacer sequence ATCN PAM
cucacacugccucccacuac

SEQ ID NO: 4378 - RNA, 20 nt, Artificial Sequence
  HTT spacer sequence ATCN PAM
uucaagcaucucucacacug

SEQ ID NO: 4379 - RNA, 20 nt, Artificial Sequence
  HTT spacer sequence ATCN PAM
ucaggaugcugugcagcuga

SEQ ID NO: 4380 - RNA, 20 nt, Artificial Sequence
  HTT spacer sequence ATCN PAM
ugaagaugcugaaaugcagg

SEQ ID NO: 4381 - RNA, 20 nt, Artificial Sequence
  HTT spacer sequence ATCN PAM
aauguuucagcugcacagca

SEQ ID NO: 4382 - RNA, 20 nt, Artificial Sequence
  HTT spacer sequence ATCN PAM
caggcuugcaaaauaacgaa

SEQ ID NO: 4383 - RNA, 20 nt, Artificial Sequence
  HTT spacer sequence ATCN PAM
uucacugaggcugaagacag

SEQ ID NO: 4384 - RNA, 20 nt, Artificial Sequence
  HTT spacer sequence ATCN PAM
cauccuucacugaggcugaa

SEQ ID NO: 4385 - RNA, 20 nt, Artificial Sequence
  HTT spacer sequence ATCN PAM
guggagagcuggcugcuucu

SEQ ID NO: 4386 - RNA, 20 nt, Artificial Sequence
  HTT spacer sequence ATCN PAM
ucacagaacagccacgguca

SEQ ID NO: 4387 - RNA, 20 nt, Artificial Sequence
  HTT spacer sequence ATCN PAM
cagaacagccacggucacag

SEQ ID NO: 4388 - RNA, 20 nt, Artificial Sequence
  HTT spacer sequence ATCN PAM
acugaguccgccugcagugu

SEQ ID NO: 4389 - RNA, 20 nt, Artificial Sequence
  HTT spacer sequence ATCN PAM
ggccagcugugacuugacaa

SEQ ID NO: 4390 - RNA, 20 nt, Artificial Sequence
  HTT spacer sequence ATCN PAM
guggcagagcuugucaaguc

SEQ ID NO: 4391 - RNA, 20 nt, Artificial Sequence
  HTT spacer sequence ATCN PAM
ccaucaguggcagagcuugu

SEQ ID NO: 4392 - RNA, 20 nt, Artificial Sequence
  HTT spacer sequence ATCN PAM
uccucauccccaucaguggc

SEQ ID NO: 4393 - RNA, 20 nt, Artificial Sequence
  HTT spacer sequence ATCN PAM
ugagccacagcuccagccag

SEQ ID NO: 4394 - RNA, 20 nt, Artificial Sequence
  HTT spacer sequence ATCN PAM
gacccugccauggaccugaa

SEQ ID NO: 4395 - RNA, 20 nt, Artificial Sequence
  HTT spacer sequence ATCN PAM
uucagguccauggcaggguc

SEQ ID NO: 4396 - RNA, 20 nt, Artificial Sequence
  HTT spacer sequence ATCN PAM
gcgacagcucccagaccacc

SEQ ID NO: 4397 - RNA, 20 nt, Artificial Sequence
  HTT spacer sequence ATCN PAM
ggcccuucggugguggucug

SEQ ID NO: 4398 - RNA, 20 nt, Artificial Sequence
  HTT spacer sequence ATCN PAM
uuuuuuuuauuuuuuauuug

SEQ ID NO: 4399 - RNA, 20 nt, Artificial Sequence
  HTT spacer sequence ATCN PAM
cagcacuuugggagacugag

SEQ ID NO: 4400 - RNA, 20 nt, Artificial Sequence
  HTT spacer sequence ATCN PAM
gccugccucagucucccaaa

SEQ ID NO: 4401 - RNA, 20 nt, Artificial Sequence
  HTT spacer sequence ATCN PAM
cuugaggucaggaguucgag

SEQ ID NO: 4402 - RNA, 20 nt, Artificial Sequence
  HTT spacer sequence ATCN PAM
cggcucauugcaaccucugc

SEQ ID NO: 4403 - RNA, 20 nt, Artificial Sequence
  HTT spacer sequence ATCN PAM
ugacacugcacuccagcccg

SEQ ID NO: 4404 - RNA, 20 nt, Artificial Sequence
  HTT spacer sequence ATCN PAM
cucgagccugggaggcagaa

SEQ ID NO: 4405 - RNA, 20 nt, Artificial Sequence
  HTT spacer sequence ATCN PAM
caccuacucaggaggcugag

SEQ ID NO: 4406 - RNA, 20 nt, Artificial Sequence
  HTT spacer sequence ATCN PAM
aaggucaggaguuugagacc

SEQ ID NO: 4407 - RNA, 20 nt, Artificial Sequence
  HTT spacer sequence ATCN PAM
ucuaaggucaggaguuugag

SEQ ID NO: 4408 - RNA, 20 nt, Artificial Sequence
  HTT spacer sequence ATCN PAM
acccaccuuggccuccuaaa

SEQ ID NO: 4409 - RNA, 20 nt, Artificial Sequence
  HTT spacer sequence ATCN PAM
caauacuuuaggaggccaag

SEQ ID NO: 4410 - RNA, 20 nt, Artificial Sequence
  HTT spacer sequence ATCN PAM
uuugaguucuucccuggaga

SEQ ID NO: 4411 - RNA, 20 nt, Artificial Sequence
  HTT spacer sequence ATCN PAM
aauaccccuauugacagcgc

SEQ ID NO: 4412 - RNA, 20 nt, Artificial Sequence
  HTT spacer sequence ATCN PAM
aagcugcgcugucaauaggg

SEQ ID NO: 4413 - RNA, 20 nt, Artificial Sequence
  HTT spacer sequence ATCN PAM
uuaauggagagcuugaccuc

SEQ ID NO: 4414 - RNA, 20 nt, Artificial Sequence
  HTT spacer sequence ATCN PAM
gauaccuucacugaaggaaa

SEQ ID NO: 4415 - RNA, 20 nt, Artificial Sequence
  HTT spacer sequence ATCN PAM
gaugaggucaagcucuccau

SEQ ID NO: 4416 - RNA, 20 nt, Artificial Sequence
  HTT spacer sequence ATCN PAM
acuauuccaauuuuuuaccu

SEQ ID NO: 4417 - RNA, 20 nt, Artificial Sequence
  HTT spacer sequence ATCN PAM
uuaaggagccuauuauaaac

SEQ ID NO: 4418 - RNA, 20 nt, Artificial Sequence
  HTT spacer sequence ATCN PAM
guuuauaauaggcuccuuaa

SEQ ID NO: 4419 - RNA, 20 nt, Artificial Sequence
  HTT spacer sequence ATCN PAM
guggucuuaaugaaauguga

SEQ ID NO: 4420 - RNA, 20 nt, Artificial Sequence
  HTT spacer sequence ATCN PAM
cauuucauuaagaccacaga

SEQ ID NO: 4421 - RNA, 20 nt, Artificial Sequence
  HTT spacer sequence ATCN PAM
aaugggaaauguuguaaaag

SEQ ID NO: 4422 - RNA, 20 nt, Artificial Sequence
  HTT spacer sequence ATCN PAM
cuaaguuaguggacaaaaaa

SEQ ID NO: 4423 - RNA, 20 nt, Artificial Sequence
  HTT spacer sequence ATCN PAM
augaggguuuuuuguccacu

SEQ ID NO: 4424 - RNA, 20 nt, Artificial Sequence
  HTT spacer sequence ATCN PAM
uugcuaccacccaucucugu

SEQ ID NO: 4425 - RNA, 20 nt, Artificial Sequence
  HTT spacer sequence ATCN PAM
cuguaaccuuuugaucaugu

SEQ ID NO: 4426 - RNA, 20 nt, Artificial Sequence
  HTT spacer sequence ATCN PAM
aaagguuacagagaugggug

SEQ ID NO: 4427 - RNA, 20 nt, Artificial Sequence
  HTT spacer sequence ATCN PAM
uguaacacugaagcucuguu

SEQ ID NO: 4428 - RNA, 20 nt, Artificial Sequence
  HTT spacer sequence ATCN PAM
ugguugccagggacuuggcg

SEQ ID NO: 4429 - RNA, 20 nt, Artificial Sequence
  HTT spacer sequence ATCN PAM
auacaauggaauaguauuug

SEQ ID NO: 4430 - RNA, 20 nt, Artificial Sequence
  HTT spacer sequence ATCN PAM
ugcuguuaugaacgugggug

SEQ ID NO: 4431 - RNA, 20 nt, Artificial Sequence
  HTT spacer sequence ATCN PAM
guacacccacguucauaaca

SEQ ID NO: 4432 - RNA, 20 nt, Artificial Sequence
  HTT spacer sequence ATCN PAM
uugaguguuuuacuuaauag

SEQ ID NO: 4433 - RNA, 20 nt, Artificial Sequence
  HTT spacer sequence ATCN PAM
ugugauguggaaucaugccc

SEQ ID NO: 4434 - RNA, 20 nt, Artificial Sequence
  HTT spacer sequence ATCN PAM
caagauguuucauguccacu

SEQ ID NO: 4435 - RNA, 20 nt, Artificial Sequence
  HTT spacer sequence ATCN PAM
ugccccaagcugauggcuaa

SEQ ID NO: 4436 - RNA, 20 nt, Artificial Sequence
  HTT spacer sequence ATCN PAM
gcuuggggcaugauuccaca

SEQ ID NO: 4437 - RNA, 20 nt, Artificial Sequence
  HTT spacer sequence ATCN PAM
acuaaauuuaggguauggua

SEQ ID NO: 4438 - RNA, 20 nt, Artificial Sequence
  HTT spacer sequence ATCN PAM
ccuaaauugcaaagacuaaa

SEQ ID NO: 4439 - RNA, 20 nt, Artificial Sequence
  HTT spacer sequence ATCN PAM
cucauucccacuacauuaug

SEQ ID NO: 4440 - RNA, 20 nt, Artificial Sequence
  HTT spacer sequence ATCN PAM
guaagcucuuagcaguuucc

SEQ ID NO: 4441 - RNA, 20 nt, Artificial Sequence
  HTT spacer sequence ATCN PAM
gucauuuauuucaaggcaca

SEQ ID NO: 4442 - RNA, 20 nt, Artificial Sequence
  HTT spacer sequence ATCN PAM
ccaagagacaagcccuccaa

SEQ ID NO: 4443 - RNA, 20 nt, Artificial Sequence
  HTT spacer sequence ATCN PAM
cacuucaaaauucucacagc

SEQ ID NO: 4444 - RNA, 20 nt, Artificial Sequence
  HTT spacer sequence ATCN PAM
gcaggcccaaauacugguug

SEQ ID NO: 4445 - RNA, 20 nt, Artificial Sequence
  HTT spacer sequence ATCN PAM
uggggcuguccaaucugcag

SEQ ID NO: 4446 - RNA, 20 nt, Artificial Sequence
  HTT spacer sequence ATCN PAM
ucauccuggggcuguccaau

SEQ ID NO: 4447 - RNA, 20 nt, Artificial Sequence
  HTT spacer sequence ATCN PAM
ggaagaauaccuguggcuuc

SEQ ID NO: 4448 - RNA, 20 nt, Artificial Sequence
  HTT spacer sequence ATCN PAM
ccuguaguccacauacccau

SEQ ID NO: 4449 - RNA, 20 nt, Artificial Sequence
  HTT spacer sequence ATCN PAM
uaauuauaucuuugcuucca

SEQ ID NO: 4450 - RNA, 20 nt, Artificial Sequence
  HTT spacer sequence ATCN PAM
uugcuuccaagaagaagucc

SEQ ID NO: 4451 - RNA, 20 nt, Artificial Sequence
  HTT spacer sequence ATCN PAM
aaggacuucuucuuggaagc

SEQ ID NO: 4452 - RNA, 20 nt, Artificial Sequence
  HTT spacer sequence ATCN PAM
gcuauucagaacucagaaaa

SEQ ID NO: 4453 - RNA, 20 nt, Artificial Sequence
  HTT spacer sequence ATCN PAM
uacuuuuucuugaucuaaau

SEQ ID NO: 4454 - RNA, 20 nt, Artificial Sequence
  HTT spacer sequence ATCN PAM
agaaaaaguaugauuauucc

SEQ ID NO: 4455 - RNA, 20 nt, Artificial Sequence
  HTT spacer sequence ATCN PAM
aaaucuuauacuuuugaguu

SEQ ID NO: 4456 - RNA, 20 nt, Artificial Sequence
  HTT spacer sequence ATCN PAM
uauacuuuugaguuaucuua

SEQ ID NO: 4457 - RNA, 20 nt, Artificial Sequence
  HTT spacer sequence ATCN PAM
uagcauaaauguauaauugu

SEQ ID NO: 4458 - RNA, 20 nt, Artificial Sequence
  HTT spacer sequence ATCN PAM
ugauuucucuguuuuuaaag

SEQ ID NO: 4459 - RNA, 20 nt, Artificial Sequence
  HTT spacer sequence ATCN PAM
agauuaagugacaaauuucc

SEQ ID NO: 4460 - RNA, 20 nt, Artificial Sequence
  HTT spacer sequence ATCN PAM
acacugcugucagaaggcug

SEQ ID NO: 4461 - RNA, 20 nt, Artificial Sequence
  HTT spacer sequence ATCN PAM
cucaacacaaauuuaucaac

SEQ ID NO: 4462 - RNA, 20 nt, Artificial Sequence
  HTT spacer sequence ATCN PAM
cccgguucaguagcuucauc

SEQ ID NO: 4463 - RNA, 20 nt, Artificial Sequence
  HTT spacer sequence ATCN PAM
agaaaacaaggugagggaca

SEQ ID NO: 4464 - RNA, 20 nt, Artificial Sequence
  HTT spacer sequence ATCN PAM
ucacacaagcucagaaacac

SEQ ID NO: 4465 - RNA, 20 nt, Artificial Sequence
  HTT spacer sequence ATCN PAM
cccuggcuacugucuacuuu

SEQ ID NO: 4466 - RNA, 20 nt, Artificial Sequence
  HTT spacer sequence ATCN PAM
cugggccuuuaaauuucccc

SEQ ID NO: 4467 - RNA, 20 nt, Artificial Sequence
  HTT spacer sequence ATCN PAM
auucuguacugaauguuucc

SEQ ID NO: 4468 - RNA, 20 nt, Artificial Sequence
  HTT spacer sequence ATCN PAM
gacaaggaaacauucaguac

SEQ ID NO: 4469 - RNA, 20 nt, Artificial Sequence
  HTT spacer sequence ATCN PAM
aagaaaucagacaaggaaac

SEQ ID NO: 4470 - RNA, 20 nt, Artificial Sequence
  HTT spacer sequence ATCN PAM
uucauuugaugguugcguau

SEQ ID NO: 4471 - RNA, 20 nt, Artificial Sequence
  HTT spacer sequence ATCN PAM
aaugaaugauccaagaaauc

SEQ ID NO: 4472 - RNA, 20 nt, Artificial Sequence
  HTT spacer sequence ATCN PAM
uuuuacauguaaauguaacu

SEQ ID NO: 4473 - RNA, 20 nt, Artificial Sequence
  HTT spacer sequence ATCN PAM
aucagaauuauagccuuugg

SEQ ID NO: 4474 - RNA, 20 nt, Artificial Sequence
  HTT spacer sequence ATCN PAM
gaauuauagccuuuggcauc

SEQ ID NO: 4475 - RNA, 20 nt, Artificial Sequence
  HTT spacer sequence ATCN PAM
cccuaucuaccaggcccacu

SEQ ID NO: 4476 - RNA, 20 nt, Artificial Sequence
  HTT spacer sequence ATCN PAM
accaggcccacuuccucuua

SEQ ID NO: 4477 - RNA, 20 nt, Artificial Sequence
  HTT spacer sequence ATCN PAM
aagaggaagugggccuggua

SEQ ID NO: 4478 - RNA, 20 nt, Artificial Sequence
  HTT spacer sequence ATCN PAM
ccugccacagcccugugacc

SEQ ID NO: 4479 - RNA, 20 nt, Artificial Sequence
  HTT spacer sequence ATCN PAM
cuuuauccccagcaccuggc

SEQ ID NO: 4480 - RNA, 20 nt, Artificial Sequence
  HTT spacer sequence ATCN PAM
ccagcaccuggcuuaagugc

SEQ ID NO: 4481 - RNA, 20 nt, Artificial Sequence
  HTT spacer sequence ATCN PAM
guugaaugaacuaaugcaug

SEQ ID NO: 4482 - RNA, 20 nt, Artificial Sequence
  HTT spacer sequence ATCN PAM
aaggugacauuggacagucc

SEQ ID NO: 4483 - RNA, 20 nt, Artificial Sequence
  HTT spacer sequence ATCN PAM
guggacuguccaaugucacc

SEQ ID NO: 4484 - RNA, 20 nt, Artificial Sequence
  HTT spacer sequence ATCN PAM
ucaguggacuguccaauguc

SEQ ID NO: 4485 - RNA, 20 nt, Artificial Sequence
  HTT spacer sequence ATCN PAM
gcuucguuuuugcuaacagg

SEQ ID NO: 4486 - RNA, 20 nt, Artificial Sequence
  HTT spacer sequence ATCN PAM
ccuuuuguacucaccauuuu

SEQ ID NO: 4487 - RNA, 20 nt, Artificial Sequence
  HTT spacer sequence ATCN PAM
gaggaugaguuugguuuuca

SEQ ID NO: 4488 - RNA, 20 nt, Artificial Sequence
  HTT spacer sequence ATCN PAM
ucagauucuacuuccucugc

SEQ ID NO: 4489 - RNA, 20 nt, Artificial Sequence
  HTT spacer sequence ATCN PAM
uuuccucccuccccucggcu

SEQ ID NO: 4490 - RNA, 20 nt, Artificial Sequence
  HTT spacer sequence ATCN PAM
guuguuugaggcugaaggug

SEQ ID NO: 4491 - RNA, 20 nt, Artificial Sequence
  HTT spacer sequence ATCN PAM
cccaagccaccuucagccuc

SEQ ID NO: 4492 - RNA, 20 nt, Artificial Sequence
  HTT spacer sequence ATCN PAM
cuguccggaaccagcacugc

SEQ ID NO: 4493 - RNA, 20 nt, Artificial Sequence
  HTT spacer sequence ATCN PAM
uucuucagcaaacucuauaa

SEQ ID NO: 4494 - RNA, 20 nt, Artificial Sequence
  HTT spacer sequence ATCN PAM
uauuuucucagauuuaauca

SEQ ID NO: 4495 - RNA, 20 nt, Artificial Sequence
  HTT spacer sequence ATCN PAM
gagaaaauaagaugugaacu

SEQ ID NO: 4496 - RNA, 20 nt, Artificial Sequence
  HTT spacer sequence ATCN PAM
uuauuguaaaaacuauuuca

SEQ ID NO: 4497 - RNA, 20 nt, Artificial Sequence
  HTT spacer sequence ATCN PAM
caaaugaacucaaaacacuu

SEQ ID NO: 4498 - RNA, 20 nt, Artificial Sequence
  HTT spacer sequence ATCN PAM
aaagggaacccaugaaacaa

SEQ ID NO: 4499 - RNA, 20 nt, Artificial Sequence
  HTT spacer sequence ATCN PAM
gauuuaaaccuaaagcacaa

SEQ ID NO: 4500 - RNA, 20 nt, Artificial Sequence
  HTT spacer sequence ATCN PAM
gauguguauauauguuggcu

SEQ ID NO: 4501 - RNA, 20 nt, Artificial Sequence
  HTT spacer sequence ATCN PAM
cgcccaugcuuacuauggag

SEQ ID NO: 4502 - RNA, 20 nt, Artificial Sequence
  HTT spacer sequence ATCN PAM
uuuuuaaguggaaucuggaa

SEQ ID NO: 4503 - RNA, 20 nt, Artificial Sequence
  HTT spacer sequence ATCN PAM
ggaauuuuaaucagauuuau

SEQ ID NO: 4504 - RNA, 20 nt, Artificial Sequence
  HTT spacer sequence ATCN PAM
gauuuauuaucugacaaccu

SEQ ID NO: 4505 - RNA, 20 nt, Artificial Sequence
  HTT spacer sequence ATCN PAM
gauuaaaauuccagauucca

SEQ ID NO: 4506 - RNA, 20 nt, Artificial Sequence
  HTT spacer sequence ATCN PAM
gacaaccuagaauuauaauc

SEQ ID NO: 4507 - RNA, 20 nt, Artificial Sequence
  HTT spacer sequence ATCN PAM
agaaagucugugguauugag

SEQ ID NO: 4508 - RNA, 20 nt, Artificial Sequence
  HTT spacer sequence ATCN PAM
uauugccaauauguccucaa

SEQ ID NO: 4509 - RNA, 20 nt, Artificial Sequence
  HTT spacer sequence ATCN PAM
cuaauucuuaaauccugaaa

SEQ ID NO: 4510 - RNA, 20 nt, Artificial Sequence
  HTT spacer sequence ATCN PAM
ugaaacuuuuuuuuuuuuaa

SEQ ID NO: 4511 - RNA, 20 nt, Artificial Sequence
  HTT spacer sequence ATCN PAM
cuuaggguuauuauagugaa

SEQ ID NO: 4512 - RNA, 20 nt, Artificial Sequence
  HTT spacer sequence ATCN PAM
aaauucagaaaugacuucac

SEQ ID NO: 4513 - RNA, 20 nt, Artificial Sequence
  HTT spacer sequence ATCN PAM
ucucuucacaccucuuuuuc

SEQ ID NO: 4514 - RNA, 20 nt, Artificial Sequence
  HTT spacer sequence ATCN PAM
acuuucuaacucgaaacaaa

SEQ ID NO: 4515 - RNA, 20 nt, Artificial Sequence
  HTT spacer sequence ATCN PAM
ccacagaggaacaguauguc

SEQ ID NO: 4516 - RNA, 20 nt, Artificial Sequence
  HTT spacer sequence ATCN PAM
ugaacuacaucgaucaugga

SEQ ID NO: 4517 - RNA, 20 nt, Artificial Sequence
  HTT spacer sequence ATCN PAM
aucauggagacccacagguu

SEQ ID NO: 4518 - RNA, 20 nt, Artificial Sequence
  HTT spacer sequence ATCN PAM
auguaguucaagaugucuga

SEQ ID NO: 4519 - RNA, 20 nt, Artificial Sequence
  HTT spacer sequence ATCN PAM
uggagacccacagguucgag

SEQ ID NO: 4520 - RNA, 20 nt, Artificial Sequence
  HTT spacer sequence ATCN PAM
gcuccauccucagcaggucc

SEQ ID NO: 4521 - RNA, 20 nt, Artificial Sequence
  HTT spacer sequence ATCN PAM
ucagcaggucccgcuuccac

SEQ ID NO: 4522 - RNA, 20 nt, Artificial Sequence
  HTT spacer sequence ATCN PAM
cccacguggaagcgggaccu

SEQ ID NO: 4523 - RNA, 20 nt, Artificial Sequence
  HTT spacer sequence ATCN PAM
aaucucccacguggaagcgg

SEQ ID NO: 4524 - RNA, 20 nt, Artificial Sequence
  HTT spacer sequence ATCN PAM
aaacuuaaaccuuaguaagc

SEQ ID NO: 4525 - RNA, 20 nt, Artificial Sequence
  HTT spacer sequence ATCN PAM
ucuaaacuuaaaccuuagua

SEQ ID NO: 4526 - RNA, 20 nt, Artificial Sequence
  HTT spacer sequence ATCN PAM
ucaucuaaacuuaaaccuua

SEQ ID NO: 4527 - RNA, 20 nt, Artificial Sequence
  HTT spacer sequence ATCN PAM
gccaaagaaaauguauuucc

SEQ ID NO: 4528 - RNA, 20 nt, Artificial Sequence
  HTT spacer sequence ATCN PAM
uucaguguuuuccgcagcaa

SEQ ID NO: 4529 - RNA, 20 nt, Artificial Sequence
  HTT spacer sequence ATCN PAM
ucuguggaaccauuucuuca

SEQ ID NO: 4530 - RNA, 20 nt, Artificial Sequence
  HTT spacer sequence ATCN PAM
uugcuacaauuaaaauugga

SEQ ID NO: 4531 - RNA, 20 nt, Artificial Sequence
  HTT spacer sequence ATCN PAM
aucucucagcuuuagaaaga

SEQ ID NO: 4532 - RNA, 20 nt, Artificial Sequence
  HTT spacer sequence ATCN PAM
cucagcuuuagaaagaaaac

SEQ ID NO: 4533 - RNA, 20 nt, Artificial Sequence
  HTT spacer sequence ATCN PAM
uuuaggaagaggucuauuuc

SEQ ID NO: 4534 - RNA, 20 nt, Artificial Sequence
  HTT spacer sequence ATCN PAM
uuaaguguaaagucuguuga

SEQ ID NO: 4535 - RNA, 20 nt, Artificial Sequence
  HTT spacer sequence ATCN PAM
gaccacuuugggaggccaag

SEQ ID NO: 4536 - RNA, 20 nt, Artificial Sequence
  HTT spacer sequence ATCN PAM
uuccaccuuggccucccaaa

SEQ ID NO: 4537 - RNA, 20 nt, Artificial Sequence
  HTT spacer sequence ATCN PAM
ccccuccaccucagcuuccc

SEQ ID NO: 4538 - RNA, 20 nt, Artificial Sequence
  HTT spacer sequence ATCN PAM
cuggggcucaagcaaucccc

SEQ ID NO: 4539 - RNA, 20 nt, Artificial Sequence
  HTT spacer sequence ATCN PAM
aggcugcaguaaggcguggu

SEQ ID NO: 4540 - RNA, 20 nt, Artificial Sequence
  HTT spacer sequence ATCN PAM
guugaauuaaaaaaaaaaaa

SEQ ID NO: 4541 - RNA, 20 nt, Artificial Sequence
  HTT spacer sequence ATCN PAM
cuaaggcucacuuuaacucu

SEQ ID NO: 4542 - RNA, 20 nt, Artificial Sequence
  HTT spacer sequence ATCN PAM
cuuaaagaauugagccuauu

SEQ ID NO: 4543 - RNA, 20 nt, Artificial Sequence
  HTT spacer sequence ATCN PAM
aagcaaaaaaccuacaauug

SEQ ID NO: 4544 - RNA, 20 nt, Artificial Sequence
  HTT spacer sequence ATCN PAM
cacaaauuugacaauuguag

SEQ ID NO: 4545 - RNA, 20 nt, Artificial Sequence
  HTT spacer sequence ATCN PAM
uguggcuagcugggggucuu

SEQ ID NO: 4546 - RNA, 20 nt, Artificial Sequence
  HTT spacer sequence ATCN PAM
caugcauggcugacacaaag

SEQ ID NO: 4547 - RNA, 20 nt, Artificial Sequence
  HTT spacer sequence ATCN PAM
cagacccagggguaggaaca

SEQ ID NO: 4548 - RNA, 20 nt, Artificial Sequence
  HTT spacer sequence ATCN PAM
guuacagaggggccugccgc

SEQ ID NO: 4549 - RNA, 20 nt, Artificial Sequence
  HTT spacer sequence ATCN PAM
auguuugugaaguugcuguu

SEQ ID NO: 4550 - RNA, 20 nt, Artificial Sequence
  HTT spacer sequence ATCN PAM
caguaaauacaagcuuaaaa

SEQ ID NO: 4551 - RNA, 20 nt, Artificial Sequence
  HTT spacer sequence ATCN PAM
auguucuugagagguguggg

SEQ ID NO: 4552 - RNA, 20 nt, Artificial Sequence
  HTT spacer sequence ATCN PAM
ugguugcaguuaaacccaga

SEQ ID NO: 4553 - RNA, 20 nt, Artificial Sequence
  HTT spacer sequence ATCN PAM
gcugcaguccuaacucacug

SEQ ID NO: 4554 - RNA, 20 nt, Artificial Sequence
  HTT spacer sequence ATCN PAM
ucgaugugcugacucugagg

SEQ ID NO: 4555 - RNA, 20 nt, Artificial Sequence
  HTT spacer sequence ATCN PAM
augugcugacucugaggaac

SEQ ID NO: 4556 - RNA, 20 nt, Artificial Sequence
  HTT spacer sequence ATCN PAM
augaucagcugcaguccuaa

SEQ ID NO: 4557 - RNA, 20 nt, Artificial Sequence
  HTT spacer sequence ATCN PAM
cugcaaggguuuccagaagc

SEQ ID NO: 4558 - RNA, 20 nt, Artificial Sequence
  HTT spacer sequence ATCN PAM
auuagauuucaugaacuaag

SEQ ID NO: 4559 - RNA, 20 nt, Artificial Sequence
  HTT spacer sequence ATCN PAM
aauggaugugacucacuuac

SEQ ID NO: 4560 - RNA, 20 nt, Artificial Sequence
  HTT spacer sequence ATCN PAM
cagaacuuucaauugagcuu

SEQ ID NO: 4561 - RNA, 20 nt, Artificial Sequence
  HTT spacer sequence ATCN PAM
cuugaugcaaggaaugaugu

SEQ ID NO: 4562 - RNA, 20 nt, Artificial Sequence
  HTT spacer sequence ATCN PAM
agugaucccagaacuuucaa

SEQ ID NO: 4563 - RNA, 20 nt, Artificial Sequence
  HTT spacer sequence ATCN PAM
uuccuugcaucaagugaucc

SEQ ID NO: 4564 - RNA, 20 nt, Artificial Sequence
  HTT spacer sequence ATCN PAM
aguacccuguccaucagaaa

SEQ ID NO: 4565 - RNA, 20 nt, Artificial Sequence
  HTT spacer sequence ATCN PAM
gaaauccgagugguuuaggu

SEQ ID NO: 4566 - RNA, 20 nt, Artificial Sequence
  HTT spacer sequence ATCN PAM
gagugguuuagguagaugac

SEQ ID NO: 4567 - RNA, 20 nt, Artificial Sequence
  HTT spacer sequence ATCN PAM
accuaaaccacucggauuuc

SEQ ID NO: 4568 - RNA, 20 nt, Artificial Sequence
  HTT spacer sequence ATCN PAM
cugucaucuaccuaaaccac

SEQ ID NO: 4569 - RNA, 20 nt, Artificial Sequence
  HTT spacer sequence ATCN PAM
ugucucuaaauaaauaauaa

SEQ ID NO: 4570 - RNA, 20 nt, Artificial Sequence
  HTT spacer sequence ATCN PAM
ugcucugucgcccaggcuug

SEQ ID NO: 4571 - RNA, 20 nt, Artificial Sequence
  HTT spacer sequence ATCN PAM
uagcucacugaagcuuugaa

SEQ ID NO: 4572 - RNA, 20 nt, Artificial Sequence
  HTT spacer sequence ATCN PAM
ggaggcugaggcaggaggac

SEQ ID NO: 4573 - RNA, 20 nt, Artificial Sequence
  HTT spacer sequence ATCN PAM
agcccaggaguuugagacca

SEQ ID NO: 4574 - RNA, 20 nt, Artificial Sequence
  HTT spacer sequence ATCN PAM
aucaagcccaggaguuugag

SEQ ID NO: 4575 - RNA, 20 nt, Artificial Sequence
  HTT spacer sequence ATCN PAM
uccaucuuggccucccaaag

SEQ ID NO: 4576 - RNA, 20 nt, Artificial Sequence
  HTT spacer sequence ATCN PAM
uggccucccaaagugcuggg

SEQ ID NO: 4577 - RNA, 20 nt, Artificial Sequence
  HTT spacer sequence ATCN PAM
cagcacuuugggaggccaag

SEQ ID NO: 4578 - RNA, 20 nt, Artificial Sequence
  HTT spacer sequence ATCN PAM
acucuucuacuuauauuuua

SEQ ID NO: 4579 - RNA, 20 nt, Artificial Sequence
  HTT spacer sequence ATCN PAM
agaauacuuaaaugacgagg

SEQ ID NO: 4580 - RNA, 20 nt, Artificial Sequence
  HTT spacer sequence ATCN PAM
uugucuuaaacuuuuaaaaa

SEQ ID NO: 4581 - RNA, 20 nt, Artificial Sequence
  HTT spacer sequence ATCN PAM
uggcucacugcaaccacagc

SEQ ID NO: 4582 - RNA, 20 nt, Artificial Sequence
  HTT spacer sequence ATCN PAM
uuagaauguuuauaaaucug

SEQ ID NO: 4583 - RNA, 20 nt, Artificial Sequence
  HTT spacer sequence ATCN PAM
gggcuuguucucggcuccac

SEQ ID NO: 4584 - RNA, 20 nt, Artificial Sequence
  HTT spacer sequence ATCN PAM
guggguggagccgagaacaa

SEQ ID NO: 4585 - RNA, 20 nt, Artificial Sequence
  HTT spacer sequence ATCN PAM
ugcugcccacucaugcacgc

SEQ ID NO: 4586 - RNA, 20 nt, Artificial Sequence
  HTT spacer sequence ATCN PAM
aggugcccuggaaggaccuu

SEQ ID NO: 4587 - RNA, 20 nt, Artificial Sequence
  HTT spacer sequence ATCN PAM
uuuaguuacucaguaaacac

SEQ ID NO: 4588 - RNA, 20 nt, Artificial Sequence
  HTT spacer sequence ATCN PAM
uuauacagggguaagcgguu

SEQ ID NO: 4589 - RNA, 20 nt, Artificial Sequence
  HTT spacer sequence ATCN PAM
cacaaaaauaaaccgcuuac

SEQ ID NO: 4590 - RNA, 20 nt, Artificial Sequence
  HTT spacer sequence ATCN PAM
aaaacaugacgaaugcauuu

SEQ ID NO: 4591 - RNA, 20 nt, Artificial Sequence
  HTT spacer sequence ATCN PAM
ugaaaguuauaaucuuguca

SEQ ID NO: 4592 - RNA, 20 nt, Artificial Sequence
  HTT spacer sequence ATCN PAM
ugucauauggauuuaagucu

SEQ ID NO: 4593 - RNA, 20 nt, Artificial Sequence
  HTT spacer sequence ATCN PAM
auaugacaagauuauaacuu

SEQ ID NO: 4594 - RNA, 20 nt, Artificial Sequence
  HTT spacer sequence ATCN PAM
uaccuaaaauuuagucaaau

SEQ ID NO: 4595 - RNA, 20 nt, Artificial Sequence
  HTT spacer sequence ATCN PAM
uguauuugacuaaauuuuag

SEQ ID NO: 4596 - RNA, 20 nt, Artificial Sequence
  HTT spacer sequence ATCN PAM
uucucucuaaagcuuuuaaa

SEQ ID NO: 4597 - RNA, 20 nt, Artificial Sequence
  HTT spacer sequence ATCN PAM
auuugcuuggagaugaagac

SEQ ID NO: 4598 - RNA, 20 nt, Artificial Sequence
  HTT spacer sequence ATCN PAM
ccaagcaaauggaugacaac

SEQ ID NO: 4599 - RNA, 20 nt, Artificial Sequence
  HTT spacer sequence ATCN PAM
cuaauuagguauuuaccaau

SEQ ID NO: 4600 - RNA, 20 nt, Artificial Sequence
  HTT spacer sequence ATCN PAM
cuuuuccuuuuuugguugaa

SEQ ID NO: 4601 - RNA, 20 nt, Artificial Sequence
  HTT spacer sequence ATCN PAM
uuuaguacuucaaccaaaaa

SEQ ID NO: 4602 - RNA, 20 nt, Artificial Sequence
  HTT spacer sequence ATCN PAM
uuugaauucuucccucucuu

SEQ ID NO: 4603 - RNA, 20 nt, Artificial Sequence
  HTT spacer sequence ATCN PAM
gagcucauuucagccauucu

SEQ ID NO: 4604 - RNA, 20 nt, Artificial Sequence
  HTT spacer sequence ATCN PAM
aaaaaagucuaaaauuauaa

SEQ ID NO: 4605 - RNA, 20 nt, Artificial Sequence
  HTT spacer sequence ATCN PAM
ccuucaauucugcugccacc

SEQ ID NO: 4606 - RNA, 20 nt, Artificial Sequence
  HTT spacer sequence ATCN PAM
cuguuaauauuuugcuauau

SEQ ID NO: 4607 - RNA, 20 nt, Artificial Sequence
  HTT spacer sequence ATCN PAM
ggucaaaauuacaugcaauu

SEQ ID NO: 4608 - RNA, 20 nt, Artificial Sequence
  HTT spacer sequence ATCN PAM
gacaauuuccacuuaauauu

SEQ ID NO: 4609 - RNA, 20 nt, Artificial Sequence
  HTT spacer sequence ATCN PAM
caaccgcauagcaaaacaac

SEQ ID NO: 4610 - RNA, 20 nt, Artificial Sequence
  HTT spacer sequence ATCN PAM
cggcucacugcaaccucugu

SEQ ID NO: 4611 - RNA, 20 nt, Artificial Sequence
  HTT spacer sequence ATCN PAM
cuugaaccagggagacagag

SEQ ID NO: 4612 - RNA, 20 nt, Artificial Sequence
  HTT spacer sequence ATCN PAM
cagcuacucgggaggcugag

SEQ ID NO: 4613 - RNA, 20 nt, Artificial Sequence
  HTT spacer sequence ATCN PAM
ugaaacccugucucuacuaa

SEQ ID NO: 4614 - RNA, 20 nt, Artificial Sequence
  HTT spacer sequence ATCN PAM
cggggucagaaguucgagac

SEQ ID NO: 4615 - RNA, 20 nt, Artificial Sequence
  HTT spacer sequence ATCN PAM
accugcauuggccucccaaa

SEQ ID NO: 4616 - RNA, 20 nt, Artificial Sequence
  HTT spacer sequence ATCN PAM
cagcacuuugggaggccaau

SEQ ID NO: 4617 - RNA, 20 nt, Artificial Sequence
  HTT spacer sequence ATCN PAM
ucuaauagcuuuauggaggu

SEQ ID NO: 4618 - RNA, 20 nt, Artificial Sequence
  HTT spacer sequence ATCN PAM
cauuucugucaccccaaaug

SEQ ID NO: 4619 - RNA, 20 nt, Artificial Sequence
  HTT spacer sequence ATCN PAM
uugugcccauuugcuguaac

SEQ ID NO: 4620 - RNA, 20 nt, Artificial Sequence
  HTT spacer sequence ATCN PAM
auuuucugucccuuaagauu

SEQ ID NO: 4621 - RNA, 20 nt, Artificial Sequence
  HTT spacer sequence ATCN PAM
uaagggacagaaaauagaug

SEQ ID NO: 4622 - RNA, 20 nt, Artificial Sequence
  HTT spacer sequence ATCN PAM
cagcacuuugggaggccgag

SEQ ID NO: 4623 - RNA, 20 nt, Artificial Sequence
  HTT spacer sequence ATCN PAM
accaaccucggccucccaaa

SEQ ID NO: 4624 - RNA, 20 nt, Artificial Sequence
  HTT spacer sequence ATCN PAM
cuugaggucaggaguucgag

SEQ ID NO: 4625 - RNA, 20 nt, Artificial Sequence
  HTT spacer sequence ATCN PAM
gacuaauuuuuguauuuuua

SEQ ID NO: 4626 - RNA, 20 nt, Artificial Sequence
  HTT spacer sequence ATCN PAM
cagcuacucgggaggcugag

SEQ ID NO: 4627 - RNA, 20 nt, Artificial Sequence
  HTT spacer sequence ATCN PAM
cuugaaccugggaggcggag

SEQ ID NO: 4628 - RNA, 20 nt, Artificial Sequence
  HTT spacer sequence ATCN PAM
cugcucacugcaaccuccgc

SEQ ID NO: 4629 - RNA, 20 nt, Artificial Sequence
  HTT spacer sequence ATCN PAM
cgccacugccuuccaaccug

SEQ ID NO: 4630 - RNA, 20 nt, Artificial Sequence
  HTT spacer sequence ATCN PAM
uuguuuguuuugagacaguc

SEQ ID NO: 4631 - RNA, 20 nt, Artificial Sequence
  HTT spacer sequence ATCN PAM
auacuaugaccccaguacua

SEQ ID NO: 4632 - RNA, 20 nt, Artificial Sequence
  HTT spacer sequence ATCN PAM
cacaauuaaguaaaagaagc

SEQ ID NO: 4633 - RNA, 20 nt, Artificial Sequence
  HTT spacer sequence ATCN PAM
guaguuuguucauuuuuauu

SEQ ID NO: 4634 - RNA, 20 nt, Artificial Sequence
  HTT spacer sequence ATCN PAM
auccaucagauggauauuau

SEQ ID NO: 4635 - RNA, 20 nt, Artificial Sequence
  HTT spacer sequence ATCN PAM
aucagauggauauuauagag

SEQ ID NO: 4636 - RNA, 20 nt, Artificial Sequence
  HTT spacer sequence ATCN PAM
gauggauauuauagaguuca

SEQ ID NO: 4637 - RNA, 20 nt, Artificial Sequence
  HTT spacer sequence ATCN PAM
gauggauagauaaaauaugg

SEQ ID NO: 4638 - RNA, 20 nt, Artificial Sequence
  HTT spacer sequence ATCN PAM
aucugauggauagauaaaau

SEQ ID NO: 4639 - RNA, 20 nt, Artificial Sequence
  HTT spacer sequence ATCN PAM
ugcaggcaaauguucacagu

SEQ ID NO: 4640 - RNA, 20 nt, Artificial Sequence
  HTT spacer sequence ATCN PAM
acucaagagaaaugaagaca

SEQ ID NO: 4641 - RNA, 20 nt, Artificial Sequence
  HTT spacer sequence ATCN PAM
ccuagaaguggauuuuuaaa

SEQ ID NO: 4642 - RNA, 20 nt, Artificial Sequence
  HTT spacer sequence ATCN PAM
acuucuaggugaucuacuca

SEQ ID NO: 4643 - RNA, 20 nt, Artificial Sequence
  HTT spacer sequence ATCN PAM
cagacuucaccauguaacca

SEQ ID NO: 4644 - RNA, 20 nt, Artificial Sequence
  HTT spacer sequence ATCN PAM
cauucugguagugggaguau

SEQ ID NO: 4645 - RNA, 20 nt, Artificial Sequence
  HTT spacer sequence ATCN PAM
ggcacaaucacauucuggua

SEQ ID NO: 4646 - RNA, 20 nt, Artificial Sequence
  HTT spacer sequence ATCN PAM
guuuuuugggcagaaguuga

SEQ ID NO: 4647 - RNA, 20 nt, Artificial Sequence
  HTT spacer sequence ATCN PAM
acuucugcccaaaaaacuga

SEQ ID NO: 4648 - RNA, 20 nt, Artificial Sequence
  HTT spacer sequence ATCN PAM
caaaaaaaauaaauaaauaa

SEQ ID NO: 4649 - RNA, 20 nt, Artificial Sequence
  HTT spacer sequence ATCN PAM
uagaaugagacccuaucuca

SEQ ID NO: 4650 - RNA, 20 nt, Artificial Sequence
  HTT spacer sequence ATCN PAM
caccaccacacuccagccug

SEQ ID NO: 4651 - RNA, 20 nt, Artificial Sequence
  HTT spacer sequence ATCN PAM
cggcucacugcagucucugc

SEQ ID NO: 4652 - RNA, 20 nt, Artificial Sequence
  HTT spacer sequence ATCN PAM
cuugaaccugggaggcagag

SEQ ID NO: 4653 - RNA, 20 nt, Artificial Sequence
  HTT spacer sequence ATCN PAM
cuaccaaaaaauacaaaaau

SEQ ID NO: 4654 - RNA, 20 nt, Artificial Sequence
  HTT spacer sequence ATCN PAM
cuugaggucaggagcuugag

SEQ ID NO: 4655 - RNA, 20 nt, Artificial Sequence
  HTT spacer sequence ATCN PAM
accugccuuggccuuccaaa

SEQ ID NO: 4656 - RNA, 20 nt, Artificial Sequence
  HTT spacer sequence ATCN PAM
cagcacuuuggaaggccaag

SEQ ID NO: 4657 - RNA, 20 nt, Artificial Sequence
  HTT spacer sequence ATCN PAM
gccgggugugguagcucacg

SEQ ID NO: 4658 - RNA, 20 nt, Artificial Sequence
  HTT spacer sequence ATCN PAM
uuguaaucaaacuacugaaa

SEQ ID NO: 4659 - RNA, 20 nt, Artificial Sequence
  HTT spacer sequence ATCN PAM
aacuacugaaaagaaaacca

SEQ ID NO: 4660 - RNA, 20 nt, Artificial Sequence
  HTT spacer sequence ATCN PAM
uuguaauuugcauuucuuug

SEQ ID NO: 4661 - RNA, 20 nt, Artificial Sequence
  HTT spacer sequence ATCN PAM
aagaaaugcaaauuacaaug

SEQ ID NO: 4662 - RNA, 20 nt, Artificial Sequence
  HTT spacer sequence ATCN PAM
cugaauaggcaagucauaua

SEQ ID NO: 4663 - RNA, 20 nt, Artificial Sequence
  HTT spacer sequence ATCN PAM
uuugcagaaaaugguaaagc

SEQ ID NO: 4664 - RNA, 20 nt, Artificial Sequence
  HTT spacer sequence ATCN PAM
uggcucauugcaacuauugc

SEQ ID NO: 4665 - RNA, 20 nt, Artificial Sequence
  HTT spacer sequence ATCN PAM
cuugaacccaggaggcaaua

SEQ ID NO: 4666 - RNA, 20 nt, Artificial Sequence
  HTT spacer sequence ATCN PAM
cagcuacuugggaggcugag

SEQ ID NO: 4667 - RNA, 20 nt, Artificial Sequence
  HTT spacer sequence ATCN PAM
uuaguagagaugggguuuug

SEQ ID NO: 4668 - RNA, 20 nt, Artificial Sequence
  HTT spacer sequence ATCN PAM
cuacuaaagauacaaaaauu

SEQ ID NO: 4669 - RNA, 20 nt, Artificial Sequence
  HTT spacer sequence ATCN PAM
gcccggccaacauggcaaaa

SEQ ID NO: 4670 - RNA, 20 nt, Artificial Sequence
  HTT spacer sequence ATCN PAM
ugaacuccuggccucaagcg

SEQ ID NO: 4671 - RNA, 20 nt, Artificial Sequence
  HTT spacer sequence ATCN PAM
cagcacuuugggaggccgag

SEQ ID NO: 4672 - RNA, 20 nt, Artificial Sequence
  HTT spacer sequence ATCN PAM
ugaguagaauuuuuucuaga

SEQ ID NO: 4673 - RNA, 20 nt, Artificial Sequence
  HTT spacer sequence ATCN PAM
agucuccaugaggaaagaga

SEQ ID NO: 4674 - RNA, 20 nt, Artificial Sequence
  HTT spacer sequence ATCN PAM
ucaauuaaagucucuuuccu

SEQ ID NO: 4675 - RNA, 20 nt, Artificial Sequence
  HTT spacer sequence ATCN PAM
uggggcuugcagaccaauau

SEQ ID NO: 4676 - RNA, 20 nt, Artificial Sequence
  HTT spacer sequence ATCN PAM
uauuggucugcaagccccau

SEQ ID NO: 4677 - RNA, 20 nt, Artificial Sequence
  HTT spacer sequence ATCN PAM
acacucaguaauacuuuuag

SEQ ID NO: 4678 - RNA, 20 nt, Artificial Sequence
  HTT spacer sequence ATCN PAM
gccaucaacacucaguaaua

SEQ ID NO: 4679 - RNA, 20 nt, Artificial Sequence
  HTT spacer sequence ATCN PAM
aaacugaauucaaauggaga

SEQ ID NO: 4680 - RNA, 20 nt, Artificial Sequence
  HTT spacer sequence ATCN PAM
cagcuuaagcuuugccaucu

SEQ ID NO: 4681 - RNA, 20 nt, Artificial Sequence
  HTT spacer sequence ATCN PAM
gggaguguuugggacaguuu

SEQ ID NO: 4682 - RNA, 20 nt, Artificial Sequence
  HTT spacer sequence ATCN PAM
acaagugcugaacagugucu

SEQ ID NO: 4683 - RNA, 20 nt, Artificial Sequence
  HTT spacer sequence ATCN PAM
gaagguuuagaaagagaacu

SEQ ID NO: 4684 - RNA, 20 nt, Artificial Sequence
  HTT spacer sequence ATCN PAM
cuuucuauuuacacuauuaa

SEQ ID NO: 4685 - RNA, 20 nt, Artificial Sequence
  HTT spacer sequence ATCN PAM
agcacuauggggggcugagg

SEQ ID NO: 4686 - RNA, 20 nt, Artificial Sequence
  HTT spacer sequence ATCN PAM
acccaccucagccccccaua

SEQ ID NO: 4687 - RNA, 20 nt, Artificial Sequence
  HTT spacer sequence ATCN PAM
cgaggucaggaguucaagag

SEQ ID NO: 4688 - RNA, 20 nt, Artificial Sequence
  HTT spacer sequence ATCN PAM
ccuuggccaggcuguucuug

SEQ ID NO: 4689 - RNA, 20 nt, Artificial Sequence
  HTT spacer sequence ATCN PAM
cagcuacucaggaggcugag

SEQ ID NO: 4690 - RNA, 20 nt, Artificial Sequence
  HTT spacer sequence ATCN PAM
cuugaaccuggacggcagag

SEQ ID NO: 4691 - RNA, 20 nt, Artificial Sequence
  HTT spacer sequence ATCN PAM
uggcucacugcaaccucugc

SEQ ID NO: 4692 - RNA, 20 nt, Artificial Sequence
  HTT spacer sequence ATCN PAM
cagggucacucucaugcacc

SEQ ID NO: 4693 - RNA, 20 nt, Artificial Sequence
  HTT spacer sequence ATCN PAM
gcagggaggaggguggucua

SEQ ID NO: 4694 - RNA, 20 nt, Artificial Sequence
  HTT spacer sequence ATCN PAM
caggugaguuucaucuacuu

SEQ ID NO: 4695 - RNA, 20 nt, Artificial Sequence
  HTT spacer sequence ATCN PAM
acuuucuuaagcaaauuaac

SEQ ID NO: 4696 - RNA, 20 nt, Artificial Sequence
  HTT spacer sequence ATCN PAM
gcuuguccuuggucacauuu

SEQ ID NO: 4697 - RNA, 20 nt, Artificial Sequence
  HTT spacer sequence ATCN PAM
aguaguggccguggcaagag

SEQ ID NO: 4698 - RNA, 20 nt, Artificial Sequence
  HTT spacer sequence ATCN PAM
cuugccacggccacuacugg

SEQ ID NO: 4699 - RNA, 20 nt, Artificial Sequence
  HTT spacer sequence ATCN PAM
aagcaguguuuaccugaaac

SEQ ID NO: 4700 - RNA, 20 nt, Artificial Sequence
  HTT spacer sequence ATCN PAM
cauuucuccgucagcacaau

SEQ ID NO: 4701 - RNA, 20 nt, Artificial Sequence
  HTT spacer sequence ATCN PAM
ucacauugucgggaaaaugc

SEQ ID NO: 4702 - RNA, 20 nt, Artificial Sequence
  HTT spacer sequence ATCN PAM
ggaaagggcauuuucccgac

SEQ ID NO: 4703 - RNA, 20 nt, Artificial Sequence
  HTT spacer sequence ATCN PAM
ugagcugaagcuuuuuucua

SEQ ID NO: 4704 - RNA, 20 nt, Artificial Sequence
  HTT spacer sequence ATCN PAM
aaggacugaccuacacucaa

SEQ ID NO: 4705 - RNA, 20 nt, Artificial Sequence
  HTT spacer sequence ATCN PAM
uaucaaaggacugaccuaca

SEQ ID NO: 4706 - RNA, 20 nt, Artificial Sequence
  HTT spacer sequence ATCN PAM
uuuugaggauugaccacacc

SEQ ID NO: 4707 - RNA, 20 nt, Artificial Sequence
  HTT spacer sequence ATCN PAM
ucaaaaugauaauauccuau

SEQ ID NO: 4708 - RNA, 20 nt, Artificial Sequence
  HTT spacer sequence ATCN PAM
cucagcugugacacuguaaa

SEQ ID NO: 4709 - RNA, 20 nt, Artificial Sequence
  HTT spacer sequence ATCN PAM
cuuaauaguuuauuacauuc

SEQ ID NO: 4710 - RNA, 20 nt, Artificial Sequence
  HTT spacer sequence ATCN PAM
guuaaaacauuuucacuuua

SEQ ID NO: 4711 - RNA, 20 nt, Artificial Sequence
  HTT spacer sequence ATCN PAM
ucuuuaaagguaacacaacu

SEQ ID NO: 4712 - RNA, 20 nt, Artificial Sequence
  HTT spacer sequence ATCN PAM
ugccuguugauuuuuuggug

SEQ ID NO: 4713 - RNA, 20 nt, Artificial Sequence
  HTT spacer sequence ATCN PAM
acaggcaugauagaauacaa

SEQ ID NO: 4714 - RNA, 20 nt, Artificial Sequence
  HTT spacer sequence ATCN PAM
acuaguucagugauuugcga

SEQ ID NO: 4715 - RNA, 20 nt, Artificial Sequence
  HTT spacer sequence ATCN PAM
cugaacuaguggauaacccu

SEQ ID NO: 4716 - RNA, 20 nt, Artificial Sequence
  HTT spacer sequence ATCN PAM
cgcaaaucacugaacuagug

SEQ ID NO: 4717 - RNA, 20 nt, Artificial Sequence
  HTT spacer sequence ATCN PAM
uucacauuuauuguggagcu

SEQ ID NO: 4718 - RNA, 20 nt, Artificial Sequence
  HTT spacer sequence ATCN PAM
ugucaaauggccacauauau

SEQ ID NO: 4719 - RNA, 20 nt, Artificial Sequence
  HTT spacer sequence ATCN PAM
cauucuuaucugcuucuuag

SEQ ID NO: 4720 - RNA, 20 nt, Artificial Sequence
  HTT spacer sequence ATCN PAM
gcuucuuaggugagugggac

SEQ ID NO: 4721 - RNA, 20 nt, Artificial Sequence
  HTT spacer sequence ATCN PAM
ucagaauucuagcuugcaga

SEQ ID NO: 4722 - RNA, 20 nt, Artificial Sequence
  HTT spacer sequence ATCN PAM
ucucugcaagcuagaauucu

SEQ ID NO: 4723 - RNA, 20 nt, Artificial Sequence
  HTT spacer sequence ATCN PAM
cuucugcaaucuucucugca

SEQ ID NO: 4724 - RNA, 20 nt, Artificial Sequence
  HTT spacer sequence ATCN PAM
uauaaagccaauuuuuaaaa

SEQ ID NO: 4725 - RNA, 20 nt, Artificial Sequence
  HTT spacer sequence ATCN PAM
uuuaagcuuagaagucauuu

SEQ ID NO: 4726 - RNA, 20 nt, Artificial Sequence
  HTT spacer sequence ATCN PAM
cuugaugcuuuuuuucugaa

SEQ ID NO: 4727 - RNA, 20 nt, Artificial Sequence
  HTT spacer sequence ATCN PAM
agugaucauuuaagcuuaga

SEQ ID NO: 4728 - RNA, 20 nt, Artificial Sequence
  HTT spacer sequence ATCN PAM
aauaucaaagucauaauucc

SEQ ID NO: 4729 - RNA, 20 nt, Artificial Sequence
  HTT spacer sequence ATCN PAM
aagucauaauuccugaauaa

SEQ ID NO: 4730 - RNA, 20 nt, Artificial Sequence
  HTT spacer sequence ATCN PAM
uaacacuuugggaggcccag

SEQ ID NO: 4731 - RNA, 20 nt, Artificial Sequence
  HTT spacer sequence ATCN PAM
cagcuacucgggaggcugag

SEQ ID NO: 4732 - RNA, 20 nt, Artificial Sequence
  HTT spacer sequence ATCN PAM
cucagccucccgaguagcug

SEQ ID NO: 4733 - RNA, 20 nt, Artificial Sequence
  HTT spacer sequence ATCN PAM
cuugagccccggaggcagag

SEQ ID NO: 4734 - RNA, 20 nt, Artificial Sequence
  HTT spacer sequence ATCN PAM
uggcucacugcaaccucugc

SEQ ID NO: 4735 - RNA, 20 nt, Artificial Sequence
  HTT spacer sequence ATCN PAM
gaggggaaauauuaaggugg

SEQ ID NO: 4736 - RNA, 20 nt, Artificial Sequence
  HTT spacer sequence ATCN PAM
ucuccaagagagaaaaugcc

SEQ ID NO: 4737 - RNA, 20 nt, Artificial Sequence
  HTT spacer sequence ATCN PAM
uaaaggaguauuuguccuga

SEQ ID NO: 4738 - RNA, 20 nt, Artificial Sequence
  HTT spacer sequence ATCN PAM
ucuuucacugcuucuacuua

SEQ ID NO: 4739 - RNA, 20 nt, Artificial Sequence
  HTT spacer sequence ATCN PAM
aauccucuuucacugcuucu

SEQ ID NO: 4740 - RNA, 20 nt, Artificial Sequence
  HTT spacer sequence ATCN PAM
ggaauuugauaagcuuagaa

SEQ ID NO: 4741 - RNA, 20 nt, Artificial Sequence
  HTT spacer sequence ATCN PAM
aauuccugauaaucaaaucc

SEQ ID NO: 4742 - RNA, 20 nt, Artificial Sequence
  HTT spacer sequence ATCN PAM
ucugaaaugacauuaagaag

SEQ ID NO: 4743 - RNA, 20 nt, Artificial Sequence
  HTT spacer sequence ATCN PAM
auuaauaaauauucaucuuc

SEQ ID NO: 4744 - RNA, 20 nt, Artificial Sequence
  HTT spacer sequence ATCN PAM
caguuggcaucuauuaauaa

SEQ ID NO: 4745 - RNA, 20 nt, Artificial Sequence
  HTT spacer sequence ATCN PAM
uuaaaauugauuacuaacua

SEQ ID NO: 4746 - RNA, 20 nt, Artificial Sequence
  HTT spacer sequence ATCN PAM
auuuuaaugauaucucaguu

SEQ ID NO: 4747 - RNA, 20 nt, Artificial Sequence
  HTT spacer sequence ATCN PAM
cgcaagacccaauugaccac

SEQ ID NO: 4748 - RNA, 20 nt, Artificial Sequence
  HTT spacer sequence ATCN PAM
aucacgcaagacccaauuga

SEQ ID NO: 4749 - RNA, 20 nt, Artificial Sequence
  HTT spacer sequence ATCN PAM
uaaucuccuuaguuuuguug

SEQ ID NO: 4750 - RNA, 20 nt, Artificial Sequence
  HTT spacer sequence ATCN PAM
ccuuaguuuuguugaguguc

SEQ ID NO: 4751 - RNA, 20 nt, Artificial Sequence
  HTT spacer sequence ATCN PAM
cucacagugucuuguccacg

SEQ ID NO: 4752 - RNA, 20 nt, Artificial Sequence
  HTT spacer sequence ATCN PAM
gauuggcuuuauucaaacca

SEQ ID NO: 4753 - RNA, 20 nt, Artificial Sequence
  HTT spacer sequence ATCN PAM
gauuuuguaucccucacagu

SEQ ID NO: 4754 - RNA, 20 nt, Artificial Sequence
  HTT spacer sequence ATCN PAM
cccauuauaguuauauacaa

SEQ ID NO: 4755 - RNA, 20 nt, Artificial Sequence
  HTT spacer sequence ATCN PAM
cccacggcacuuuuuugcau

SEQ ID NO: 4756 - RNA, 20 nt, Artificial Sequence
  HTT spacer sequence ATCN PAM
guuuaaguugaaauacaugc

SEQ ID NO: 4757 - RNA, 20 nt, Artificial Sequence
  HTT spacer sequence ATCN PAM
uuauuccauaacaauggcug

SEQ ID NO: 4758 - RNA, 20 nt, Artificial Sequence
  HTT spacer sequence ATCN PAM
aaauuuauuuucagcccguu

SEQ ID NO: 4759 - RNA, 20 nt, Artificial Sequence
  HTT spacer sequence ATCN PAM
uuaaucuuaaacuuuuaaau

SEQ ID NO: 4760 - RNA, 20 nt, Artificial Sequence
  HTT spacer sequence ATCN PAM
uaaacuuuuaaaugccauuu

SEQ ID NO: 4761 - RNA, 20 nt, Artificial Sequence
  HTT spacer sequence ATCN PAM
aauggcauuuaaaaguuuaa

SEQ ID NO: 4762 - RNA, 20 nt, Artificial Sequence
  HTT spacer sequence ATCN PAM
uuaaaaauauauguuuuaau

SEQ ID NO: 4763 - RNA, 20 nt, Artificial Sequence
  HTT spacer sequence ATCN PAM
caucaaccaccagagcacuc

SEQ ID NO: 4764 - RNA, 20 nt, Artificial Sequence
  HTT spacer sequence ATCN PAM
accaccagagcacucacagu

SEQ ID NO: 4765 - RNA, 20 nt, Artificial Sequence
  HTT spacer sequence ATCN PAM
agaaagagacuuacugugag

SEQ ID NO: 4766 - RNA, 20 nt, Artificial Sequence
  HTT spacer sequence ATCN PAM
gucuuacugacauuguaaua

SEQ ID NO: 4767 - RNA, 20 nt, Artificial Sequence
  HTT spacer sequence ATCN PAM
uacggugaggugcuugucuu

SEQ ID NO: 4768 - RNA, 20 nt, Artificial Sequence
  HTT spacer sequence ATCN PAM
augaggcuugcuaagaaauu

SEQ ID NO: 4769 - RNA, 20 nt, Artificial Sequence
  HTT spacer sequence ATCN PAM
cagcuuacuccaggaaugua

SEQ ID NO: 4770 - RNA, 20 nt, Artificial Sequence
  HTT spacer sequence ATCN PAM
gaaaaaacauagucauuuac

SEQ ID NO: 4771 - RNA, 20 nt, Artificial Sequence
  HTT spacer sequence ATCN PAM
cagcacuuugggaggccaag

SEQ ID NO: 4772 - RNA, 20 nt, Artificial Sequence
  HTT spacer sequence ATCN PAM
gacuccugaccucaagugag

SEQ ID NO: 4773 - RNA, 20 nt, Artificial Sequence
  HTT spacer sequence ATCN PAM
cuacuaaaaauacaaaaauu

SEQ ID NO: 4774 - RNA, 20 nt, Artificial Sequence
  HTT spacer sequence ATCN PAM
cagcuacucaggaggcugag

SEQ ID NO: 4775 - RNA, 20 nt, Artificial Sequence
  HTT spacer sequence ATCN PAM
cuugaaccugggagguagag

SEQ ID NO: 4776 - RNA, 20 nt, Artificial Sequence
  HTT spacer sequence ATCN PAM
gaaguuuaaaaugucuagau

SEQ ID NO: 4777 - RNA, 20 nt, Artificial Sequence
  HTT spacer sequence ATCN PAM
agacauuuuaaacuucugau

SEQ ID NO: 4778 - RNA, 20 nt, Artificial Sequence
  HTT spacer sequence ATCN PAM
ugccauugcacuccagccug

SEQ ID NO: 4779 - RNA, 20 nt, Artificial Sequence
  HTT spacer sequence ATCN PAM
cagcucaccacaaccuccac

SEQ ID NO: 4780 - RNA, 20 nt, Artificial Sequence
  HTT spacer sequence ATCN PAM
cagcuacucaggaggcugag

SEQ ID NO: 4781 - RNA, 20 nt, Artificial Sequence
  HTT spacer sequence ATCN PAM
ccugagguugggaguuugag

SEQ ID NO: 4782 - RNA, 20 nt, Artificial Sequence
  HTT spacer sequence ATCN PAM
gcccuccucgaccccccaaa

SEQ ID NO: 4783 - RNA, 20 nt, Artificial Sequence
  HTT spacer sequence ATCN PAM
cagcacuuuggggggucgag

SEQ ID NO: 4784 - RNA, 20 nt, Artificial Sequence
  HTT spacer sequence ATCN PAM
aagaauccaagaauaauuaa

SEQ ID NO: 4785 - RNA, 20 nt, Artificial Sequence
  HTT spacer sequence ATCN PAM
aagaauaauuaaauuaugua

SEQ ID NO: 4786 - RNA, 20 nt, Artificial Sequence
  HTT spacer sequence ATCN PAM
cacuauauacuagcauaugu

SEQ ID NO: 4787 - RNA, 20 nt, Artificial Sequence
  HTT spacer sequence ATCN PAM
ccauauuguuaaaaauucuc

SEQ ID NO: 4788 - RNA, 20 nt, Artificial Sequence
  HTT spacer sequence ATCN PAM
ggauuguaauauugagugaa

SEQ ID NO: 4789 - RNA, 20 nt, Artificial Sequence
  HTT spacer sequence ATCN PAM
agauuauacaucuccauauu

SEQ ID NO: 4790 - RNA, 20 nt, Artificial Sequence
  HTT spacer sequence ATCN PAM
gacuauacccccaccagguu

SEQ ID NO: 4791 - RNA, 20 nt, Artificial Sequence
  HTT spacer sequence ATCN PAM
gccagugugagaaauguaua

SEQ ID NO: 4792 - RNA, 20 nt, Artificial Sequence
  HTT spacer sequence ATCN PAM
ccaagauaaauuuugggauu

SEQ ID NO: 4793 - RNA, 20 nt, Artificial Sequence
  HTT spacer sequence ATCN PAM
uggugauuaucugccagugu

SEQ ID NO: 4794 - RNA, 20 nt, Artificial Sequence
  HTT spacer sequence ATCN PAM
caaaauuuaucuuggugauu

SEQ ID NO: 4795 - RNA, 20 nt, Artificial Sequence
  HTT spacer sequence ATCN PAM
acaaucccaaaauuuaucuu

SEQ ID NO: 4796 - RNA, 20 nt, Artificial Sequence
  HTT spacer sequence ATCN PAM
uccacaaucccaaaauuuau

SEQ ID NO: 4797 - RNA, 20 nt, Artificial Sequence
  HTT spacer sequence ATCN PAM
gaaaaauauaaagaagaaaa

SEQ ID NO: 4798 - RNA, 20 nt, Artificial Sequence
  HTT spacer sequence ATCN PAM
gaaaaaaauaauauacaaaa

SEQ ID NO: 4799 - RNA, 20 nt, Artificial Sequence
  HTT spacer sequence ATCN PAM
caaaaaauaaaaauaaaaag

SEQ ID NO: 4800 - RNA, 20 nt, Artificial Sequence
  HTT spacer sequence ATCN PAM
cacucuguugcccaggcuag

SEQ ID NO: 4801 - RNA, 20 nt, Artificial Sequence
  HTT spacer sequence ATCN PAM
ugccacugugcucuagccug

SEQ ID NO: 4802 - RNA, 20 nt, Artificial Sequence
  HTT spacer sequence ATCN PAM
uggcucacugcagccuccgc

SEQ ID NO: 4803 - RNA, 20 nt, Artificial Sequence
  HTT spacer sequence ATCN PAM
uuugaacccaggaagcggag

SEQ ID NO: 4804 - RNA, 20 nt, Artificial Sequence
  HTT spacer sequence ATCN PAM
cgaggucaggaguucgagac

SEQ ID NO: 4805 - RNA, 20 nt, Artificial Sequence
  HTT spacer sequence ATCN PAM
acccaccucggccucccaaa

SEQ ID NO: 4806 - RNA, 20 nt, Artificial Sequence
  HTT spacer sequence ATCN PAM
cagcacuuugggaggccgag

SEQ ID NO: 4807 - RNA, 20 nt, Artificial Sequence
  HTT spacer sequence ATCN PAM
agggaagaccauacugcaga

SEQ ID NO: 4808 - RNA, 20 nt, Artificial Sequence
  HTT spacer sequence ATCN PAM
uaaacuuugcuuauuuauuu

SEQ ID NO: 4809 - RNA, 20 nt, Artificial Sequence
  HTT spacer sequence ATCN PAM
caagccuacaacagugcccg

SEQ ID NO: 4810 - RNA, 20 nt, Artificial Sequence
  HTT spacer sequence ATCN PAM
uguuuuuccaucccaagccu

SEQ ID NO: 4811 - RNA, 20 nt, Artificial Sequence
  HTT spacer sequence ATCN PAM
ucucccugaccagccugcag

SEQ ID NO: 4812 - RNA, 20 nt, Artificial Sequence
  HTT spacer sequence ATCN PAM
uuaggagcugagcuccagcu

SEQ ID NO: 4813 - RNA, 20 nt, Artificial Sequence
  HTT spacer sequence ATCN PAM
cccacccuuccgccucucaa

SEQ ID NO: 4814 - RNA, 20 nt, Artificial Sequence
  HTT spacer sequence ATCN PAM
uuccagggugugggcagcac

SEQ ID NO: 4815 - RNA, 20 nt, Artificial Sequence
  HTT spacer sequence ATCN PAM
caaugaagagagguuccugu

SEQ ID NO: 4816 - RNA, 20 nt, Artificial Sequence
  HTT spacer sequence ATCN PAM
gaauggcaauuauaucccaa

SEQ ID NO: 4817 - RNA, 20 nt, Artificial Sequence
  HTT spacer sequence ATCN PAM
gucccaccaugguacaacuu

SEQ ID NO: 4818 - RNA, 20 nt, Artificial Sequence
  HTT spacer sequence ATCN PAM
ugugguuaucauacacagau

SEQ ID NO: 4819 - RNA, 20 nt, Artificial Sequence
  HTT spacer sequence ATCN PAM
uacacagaucucaguuuucu

SEQ ID NO: 4820 - RNA, 20 nt, Artificial Sequence
  HTT spacer sequence ATCN PAM
guguaugauaaccacaggau

SEQ ID NO: 4821 - RNA, 20 nt, Artificial Sequence
  HTT spacer sequence ATCN PAM
caguuuucuucucauuguuu

SEQ ID NO: 4822 - RNA, 20 nt, Artificial Sequence
  HTT spacer sequence ATCN PAM
ccuguuacccuuuauaaaaa

SEQ ID NO: 4823 - RNA, 20 nt, Artificial Sequence
  HTT spacer sequence ATCN PAM
cacccaaacaccacaaaggu

SEQ ID NO: 4824 - RNA, 20 nt, Artificial Sequence
  HTT spacer sequence ATCN PAM
aaacugagaagaaagaaaca

SEQ ID NO: 4825 - RNA, 20 nt, Artificial Sequence
  HTT spacer sequence ATCN PAM
uaauaacuauguuuauguca

SEQ ID NO: 4826 - RNA, 20 nt, Artificial Sequence
  HTT spacer sequence ATCN PAM
auuuggcuuuuuggaaaaau

SEQ ID NO: 4827 - RNA, 20 nt, Artificial Sequence
  HTT spacer sequence ATCN PAM
gauggaauacuuguuucugc

SEQ ID NO: 4828 - RNA, 20 nt, Artificial Sequence
  HTT spacer sequence ATCN PAM
gauauuuuuccaaaaagcca

SEQ ID NO: 4829 - RNA, 20 nt, Artificial Sequence
  HTT spacer sequence ATCN PAM
augccuaagaacauuuggca

SEQ ID NO: 4830 - RNA, 20 nt, Artificial Sequence
  HTT spacer sequence ATCN PAM
ccauuucguaugcuagguca

SEQ ID NO: 4831 - RNA, 20 nt, Artificial Sequence
  HTT spacer sequence ATCN PAM
ucaccauuucguaugcuagg

SEQ ID NO: 4832 - RNA, 20 nt, Artificial Sequence
  HTT spacer sequence ATCN PAM
uuuuuaaauaaaagcuguua

SEQ ID NO: 4833 - RNA, 20 nt, Artificial Sequence
  HTT spacer sequence ATCN PAM
acuggaggaaaaucauuuuu

SEQ ID NO: 4834 - RNA, 20 nt, Artificial Sequence
  HTT spacer sequence ATCN PAM
gggaaauaauuucaagucuu

SEQ ID NO: 4835 - RNA, 20 nt, Artificial Sequence
  HTT spacer sequence ATCN PAM
auuacugagaaugauuuugg

SEQ ID NO: 4836 - RNA, 20 nt, Artificial Sequence
  HTT spacer sequence ATCN PAM
uucucaguaauugauacaca

SEQ ID NO: 4837 - RNA, 20 nt, Artificial Sequence
  HTT spacer sequence ATCN PAM
cauuugagaaguaaaccugc

SEQ ID NO: 4838 - RNA, 20 nt, Artificial Sequence
  HTT spacer sequence ATCN PAM
gcagguuuacuucucaaaug

SEQ ID NO: 4839 - RNA, 20 nt, Artificial Sequence
  HTT spacer sequence ATCN PAM
guuggucauuugcugacaca

SEQ ID NO: 4840 - RNA, 20 nt, Artificial Sequence
  HTT spacer sequence ATCN PAM
acuucaagcaaauaucaguu

SEQ ID NO: 4841 - RNA, 20 nt, Artificial Sequence
  HTT spacer sequence ATCN PAM
gcucuagaaugauugcuuuc

SEQ ID NO: 4842 - RNA, 20 nt, Artificial Sequence
  HTT spacer sequence ATCN PAM
uucuagagcagauaauguaa

SEQ ID NO: 4843 - RNA, 20 nt, Artificial Sequence
  HTT spacer sequence ATCN PAM
uaggucuggcacuagacuuc

SEQ ID NO: 4844 - RNA, 20 nt, Artificial Sequence
  HTT spacer sequence ATCN PAM
guucaaguaaacauacaguu

SEQ ID NO: 4845 - RNA, 20 nt, Artificial Sequence
  HTT spacer sequence ATCN PAM
auauuuuaaauuguaaaaag

SEQ ID NO: 4846 - RNA, 20 nt, Artificial Sequence
  HTT spacer sequence ATCN PAM
uuuaaaucuauauuuuaaau

SEQ ID NO: 4847 - RNA, 20 nt, Artificial Sequence
  HTT spacer sequence ATCN PAM
ucguuucugcaucuguucac

SEQ ID NO: 4848 - RNA, 20 nt, Artificial Sequence
  HTT spacer sequence ATCN PAM
guucacaagggguugauauu

SEQ ID NO: 4849 - RNA, 20 nt, Artificial Sequence
  HTT spacer sequence ATCN PAM
accccuugugaacagaugca

SEQ ID NO: 4850 - RNA, 20 nt, Artificial Sequence
  HTT spacer sequence ATCN PAM
auucuauguucucuuaaugc

SEQ ID NO: 4851 - RNA, 20 nt, Artificial Sequence
  HTT spacer sequence ATCN PAM
ccuagaaaagacaguguaag

SEQ ID NO: 4852 - RNA, 20 nt, Artificial Sequence
  HTT spacer sequence ATCN PAM
uguaguaaaaguuauugaaa

SEQ ID NO: 4853 - RNA, 20 nt, Artificial Sequence
  HTT spacer sequence ATCN PAM
uuuaacacgccauaucuugu

SEQ ID NO: 4854 - RNA, 20 nt, Artificial Sequence
  HTT spacer sequence ATCN PAM
ggaaaacuaaccacgucaga

SEQ ID NO: 4855 - RNA, 20 nt, Artificial Sequence
  HTT spacer sequence ATCN PAM
aguacacuauuuuuccauag

SEQ ID NO: 4856 - RNA, 20 nt, Artificial Sequence
  HTT spacer sequence ATCN PAM
ccaguucagcagaaccauug

SEQ ID NO: 4857 - RNA, 20 nt, Artificial Sequence
  HTT spacer sequence ATCN PAM
gaaugaaaguauuggggccu

SEQ ID NO: 4858 - RNA, 20 nt, Artificial Sequence
  HTT spacer sequence ATCN PAM
acuaccugauuucauuucuc

SEQ ID NO: 4859 - RNA, 20 nt, Artificial Sequence
  HTT spacer sequence ATCN PAM
gguaguagaucugaaugaaa

SEQ ID NO: 4860 - RNA, 20 nt, Artificial Sequence
  HTT spacer sequence ATCN PAM
uuugagaaaugaaaucaggu

SEQ ID NO: 4861 - RNA, 20 nt, Artificial Sequence
  HTT spacer sequence ATCN PAM
gagcuccauaaaaaucauuu

SEQ ID NO: 4862 - RNA, 20 nt, Artificial Sequence
  HTT spacer sequence ATCN PAM
uuccuauaaaucagagcucc

SEQ ID NO: 4863 - RNA, 20 nt, Artificial Sequence
  HTT spacer sequence ATCN PAM
acuaacaucuuuccuauaaa

SEQ ID NO: 4864 - RNA, 20 nt, Artificial Sequence
  HTT spacer sequence ATCN PAM
gaggcacucaguggaggcac

SEQ ID NO: 4865 - RNA, 20 nt, Artificial Sequence
  HTT spacer sequence ATCN PAM
caacgguacagcucuuccua

SEQ ID NO: 4866 - RNA, 20 nt, Artificial Sequence
  HTT spacer sequence ATCN PAM
uuguggccaucccaacggua

SEQ ID NO: 4867 - RNA, 20 nt, Artificial Sequence
  HTT spacer sequence ATCN PAM
aaugggaaccaagcugacga

SEQ ID NO: 4868 - RNA, 20 nt, Artificial Sequence
  HTT spacer sequence ATCN PAM
cucagcccaucaagaugcuu

SEQ ID NO: 4869 - RNA, 20 nt, Artificial Sequence
  HTT spacer sequence ATCN PAM
agaugcuuugauuuuggccg

SEQ ID NO: 4870 - RNA, 20 nt, Artificial Sequence
  HTT spacer sequence ATCN PAM
ugaugggcugagagauccaa

SEQ ID NO: 4871 - RNA, 20 nt, Artificial Sequence
  HTT spacer sequence ATCN PAM
aagcaucuugaugggcugag

SEQ ID NO: 4872 - RNA, 20 nt, Artificial Sequence
  HTT spacer sequence ATCN PAM
aaguccuggagucccuguuu

SEQ ID NO: 4873 - RNA, 20 nt, Artificial Sequence
  HTT spacer sequence ATCN PAM
aaauccaaguccuggagucc

SEQ ID NO: 4874 - RNA, 20 nt, Artificial Sequence
  HTT spacer sequence ATCN PAM
cuggcaaugaccuuauagua

SEQ ID NO: 4875 - RNA, 20 nt, Artificial Sequence
  HTT spacer sequence ATCN PAM
gaaauuugacuaaagggaca

SEQ ID NO: 4876 - RNA, 20 nt, Artificial Sequence
  HTT spacer sequence ATCN PAM
cagugcccgagggaguacug

SEQ ID NO: 4877 - RNA, 20 nt, Artificial Sequence
  HTT spacer sequence ATCN PAM
aaaacuaacuugagaaugaa

SEQ ID NO: 4878 - RNA, 20 nt, Artificial Sequence
  HTT spacer sequence ATCN PAM
cccucuaaucuaaaacuaac

SEQ ID NO: 4879 - RNA, 20 nt, Artificial Sequence
  HTT spacer sequence ATCN PAM
cucuccuugggcagauuuau

SEQ ID NO: 4880 - RNA, 20 nt, Artificial Sequence
  HTT spacer sequence ATCN PAM
gcccaaggagagugauuagg

SEQ ID NO: 4881 - RNA, 20 nt, Artificial Sequence
  HTT spacer sequence ATCN PAM
ccaaggugcuacacccucuc

SEQ ID NO: 4882 - RNA, 20 nt, Artificial Sequence
  HTT spacer sequence ATCN PAM
ucgccaaggugcuacacccu

SEQ ID NO: 4883 - RNA, 20 nt, Artificial Sequence
  HTT spacer sequence ATCN PAM
uccauuaucaucgccaaggu

SEQ ID NO: 4884 - RNA, 20 nt, Artificial Sequence
  HTT spacer sequence ATCN PAM
auuucaauggacuccgucuu

SEQ ID NO: 4885 - RNA, 20 nt, Artificial Sequence
  HTT spacer sequence ATCN PAM
ccaugaaagaauuggggccu

SEQ ID NO: 4886 - RNA, 20 nt, Artificial Sequence
  HTT spacer sequence ATCN PAM
uuuagucccuuucacgaaac

SEQ ID NO: 4887 - RNA, 20 nt, Artificial Sequence
  HTT spacer sequence ATCN PAM
uauuaaaauacucaucuuuu

SEQ ID NO: 4888 - RNA, 20 nt, Artificial Sequence
  HTT spacer sequence ATCN PAM
uucauccaacuugaacaugg

SEQ ID NO: 4889 - RNA, 20 nt, Artificial Sequence
  HTT spacer sequence ATCN PAM
aacuugaacaugggcuggag

SEQ ID NO: 4890 - RNA, 20 nt, Artificial Sequence
  HTT spacer sequence ATCN PAM
ccugagucucccuaccuucu

SEQ ID NO: 4891 - RNA, 20 nt, Artificial Sequence
  HTT spacer sequence ATCN PAM
acauuaaucuccugagucuc

SEQ ID NO: 4892 - RNA, 20 nt, Artificial Sequence
  HTT spacer sequence ATCN PAM
ugccuuagcaucaacauuaa

SEQ ID NO: 4893 - RNA, 20 nt, Artificial Sequence
  HTT spacer sequence ATCN PAM
gugucuucccuacaguccca

SEQ ID NO: 4894 - RNA, 20 nt, Artificial Sequence
  HTT spacer sequence ATCN PAM
cagguuucuuugucuucaca

SEQ ID NO: 4895 - RNA, 20 nt, Artificial Sequence
  HTT spacer sequence ATCN PAM
ugggcaggugugugguggug

SEQ ID NO: 4896 - RNA, 20 nt, Artificial Sequence
  HTT spacer sequence ATCN PAM
guguucccaauuuccaugac

SEQ ID NO: 4897 - RNA, 20 nt, Artificial Sequence
  HTT spacer sequence ATCN PAM
guuucaguuugaguuuggcu

SEQ ID NO: 4898 - RNA, 20 nt, Artificial Sequence
  HTT spacer sequence ATCN PAM
guugaauaucaggcacagau

SEQ ID NO: 4899 - RNA, 20 nt, Artificial Sequence
  HTT spacer sequence ATCN PAM
ggcacagaugucuggccaac

SEQ ID NO: 4900 - RNA, 20 nt, Artificial Sequence
  HTT spacer sequence ATCN PAM
gugccugauauucaacugau

SEQ ID NO: 4901 - RNA, 20 nt, Artificial Sequence
  HTT spacer sequence ATCN PAM
cagccagugcucccaaaucu

SEQ ID NO: 4902 - RNA, 20 nt, Artificial Sequence
  HTT spacer sequence ATCN PAM
cugagaaguucaugggccuc

SEQ ID NO: 4903 - RNA, 20 nt, Artificial Sequence
  HTT spacer sequence ATCN PAM
ccuucagcaggugagagaag

SEQ ID NO: 4904 - RNA, 20 nt, Artificial Sequence
  HTT spacer sequence ATCN PAM
aggacgugggcacaaauguu

SEQ ID NO: 4905 - RNA, 20 nt, Artificial Sequence
  HTT spacer sequence ATCN PAM
agcacccaagugggacauua

SEQ ID NO: 4906 - RNA, 20 nt, Artificial Sequence
  HTT spacer sequence ATCN PAM
gucccuucuuuauucucuuu

SEQ ID NO: 4907 - RNA, 20 nt, Artificial Sequence
  HTT spacer sequence ATCN PAM
gagcaauuuuguucauuuaa

SEQ ID NO: 4908 - RNA, 20 nt, Artificial Sequence
  HTT spacer sequence ATCN PAM
aaaugugaccauguggaugg

SEQ ID NO: 4909 - RNA, 20 nt, Artificial Sequence
  HTT spacer sequence ATCN PAM
acauggucacauuuugaugu

SEQ ID NO: 4910 - RNA, 20 nt, Artificial Sequence
  HTT spacer sequence ATCN PAM
acuugccucagucucccaaa

SEQ ID NO: 4911 - RNA, 20 nt, Artificial Sequence
  HTT spacer sequence ATCN PAM
cuugaggccaagaguucgag

SEQ ID NO: 4912 - RNA, 20 nt, Artificial Sequence
  HTT spacer sequence ATCN PAM
cgaaacccccucucuacuaa

SEQ ID NO: 4913 - RNA, 20 nt, Artificial Sequence
  HTT spacer sequence ATCN PAM
aauuuuuuguauuuuuagua

SEQ ID NO: 4914 - RNA, 20 nt, Artificial Sequence
  HTT spacer sequence ATCN PAM
cagcacuuugggaggccgag

SEQ ID NO: 4915 - RNA, 20 nt, Artificial Sequence
  HTT spacer sequence ATCN PAM
gcccaccucggccucccaaa

SEQ ID NO: 4916 - RNA, 20 nt, Artificial Sequence
  HTT spacer sequence ATCN PAM
cgaggucaagagaucaagac

SEQ ID NO: 4917 - RNA, 20 nt, Artificial Sequence
  HTT spacer sequence ATCN PAM
cuugaccucgugauccgccc

SEQ ID NO: 4918 - RNA, 20 nt, Artificial Sequence
  HTT spacer sequence ATCN PAM
agaccauccuggcuaacaca

SEQ ID NO: 4919 - RNA, 20 nt, Artificial Sequence
  HTT spacer sequence ATCN PAM
uggcuaacacagugaaaccc

SEQ ID NO: 4920 - RNA, 20 nt, Artificial Sequence
  HTT spacer sequence ATCN PAM
gagcaugguggcgggcgccu

SEQ ID NO: 4921 - RNA, 20 nt, Artificial Sequence
  HTT spacer sequence ATCN PAM
gggaggcggagcuugcagug

SEQ ID NO: 4922 - RNA, 20 nt, Artificial Sequence
  HTT spacer sequence ATCN PAM
cggcucacugcaagcuccgc

SEQ ID NO: 4923 - RNA, 20 nt, Artificial Sequence
  HTT spacer sequence ATCN PAM
ugccacugcacuccagccug

SEQ ID NO: 4924 - RNA, 20 nt, Artificial Sequence
  HTT spacer sequence ATCN PAM
aauuuuuuuuuugagacgga

SEQ ID NO: 4925 - RNA, 20 nt, Artificial Sequence
  HTT spacer sequence ATCN PAM
cagcuacuugggaggcugag

SEQ ID NO: 4926 - RNA, 20 nt, Artificial Sequence
  HTT spacer sequence ATCN PAM
aggcuuacugcaaacuccgc

SEQ ID NO: 4927 - RNA, 20 nt, Artificial Sequence
  HTT spacer sequence ATCN PAM
ucagucacuguuaucccuaa

SEQ ID NO: 4928 - RNA, 20 nt, Artificial Sequence
  HTT spacer sequence ATCN PAM
gucacuguuaucccuaagag

SEQ ID NO: 4929 - RNA, 20 nt, Artificial Sequence
  HTT spacer sequence ATCN PAM
cuaagagggaaauaccuagc

SEQ ID NO: 4930 - RNA, 20 nt, Artificial Sequence
  HTT spacer sequence ATCN PAM
auucugagcuuucuuggcua

SEQ ID NO: 4931 - RNA, 20 nt, Artificial Sequence
  HTT spacer sequence ATCN PAM
ugguuaauggcuacuguccu

SEQ ID NO: 4932 - RNA, 20 nt, Artificial Sequence
  HTT spacer sequence ATCN PAM
cagggacaguuuugcuuuuc

SEQ ID NO: 4933 - RNA, 20 nt, Artificial Sequence
  HTT spacer sequence ATCN PAM
acuucaaaacaaauguuaac

SEQ ID NO: 4934 - RNA, 20 nt, Artificial Sequence
  HTT spacer sequence ATCN PAM
auuguacaaauaguuaacau

SEQ ID NO: 4935 - RNA, 20 nt, Artificial Sequence
  HTT spacer sequence ATCN PAM
uaaauccauuguacaaauag

SEQ ID NO: 4936 - RNA, 20 nt, Artificial Sequence
  HTT spacer sequence ATCN PAM
caaaaaaaaaaaaaaaaaaa

SEQ ID NO: 4937 - RNA, 20 nt, Artificial Sequence
  HTT spacer sequence ATCN PAM
caccauugcacuccagccca

SEQ ID NO: 4938 - RNA, 20 nt, Artificial Sequence
  HTT spacer sequence ATCN PAM
cagcucacugcaacuucugc

SEQ ID NO: 4939 - RNA, 20 nt, Artificial Sequence
  HTT spacer sequence ATCN PAM
uuugaacccaggaggcagaa

SEQ ID NO: 4940 - RNA, 20 nt, Artificial Sequence
  HTT spacer sequence ATCN PAM
gccucgagaggcugaggcag

SEQ ID NO: 4941 - RNA, 20 nt, Artificial Sequence
  HTT spacer sequence ATCN PAM
cagcuguaaucugccucgag

SEQ ID NO: 4942 - RNA, 20 nt, Artificial Sequence
  HTT spacer sequence ATCN PAM
cuucaggucaggaguuugag

SEQ ID NO: 4943 - RNA, 20 nt, Artificial Sequence
  HTT spacer sequence ATCN PAM
auccgcuucggccucccaaa

SEQ ID NO: 4944 - RNA, 20 nt, Artificial Sequence
  HTT spacer sequence ATCN PAM
gcuucggccucccaaagugu

SEQ ID NO: 4945 - RNA, 20 nt, Artificial Sequence
  HTT spacer sequence ATCN PAM
caacacuuugggaggccgaa

SEQ ID NO: 4946 - RNA, 20 nt, Artificial Sequence
  HTT spacer sequence ATCN PAM
uaggcugggcgugguggcuc

SEQ ID NO: 4947 - RNA, 20 nt, Artificial Sequence
  HTT spacer sequence ATCN PAM
gauuacucucucuuugccuu

SEQ ID NO: 4948 - RNA, 20 nt, Artificial Sequence
  HTT spacer sequence ATCN PAM
gauauaaacaguaagugaac

SEQ ID NO: 4949 - RNA, 20 nt, Artificial Sequence
  HTT spacer sequence ATCN PAM
cccuacuaacuucccauucu

SEQ ID NO: 4950 - RNA, 20 nt, Artificial Sequence
  HTT spacer sequence ATCN PAM
gucuucucccuucucugcaa

SEQ ID NO: 4951 - RNA, 20 nt, Artificial Sequence
  HTT spacer sequence ATCN PAM
cuggagagucccagccucag

SEQ ID NO: 4952 - RNA, 20 nt, Artificial Sequence
  HTT spacer sequence ATCN PAM
uuccuuaaccccugcuggug

SEQ ID NO: 4953 - RNA, 20 nt, Artificial Sequence
  HTT spacer sequence ATCN PAM
gggcgggaaacgcugcuaug

SEQ ID NO: 4954 - RNA, 20 nt, Artificial Sequence
  HTT spacer sequence ATCN PAM
ugucuuuacaucucugggca

SEQ ID NO: 4955 - RNA, 20 nt, Artificial Sequence
  HTT spacer sequence ATCN PAM
cugggcacugcucugguccu

SEQ ID NO: 4956 - RNA, 20 nt, Artificial Sequence
  HTT spacer sequence ATCN PAM
ugcaggcugcuacccccauc

SEQ ID NO: 4957 - RNA, 20 nt, Artificial Sequence
  HTT spacer sequence ATCN PAM
ugaguguccucuucaguugg

SEQ ID NO: 4958 - RNA, 20 nt, Artificial Sequence
  HTT spacer sequence ATCN PAM
ggguucaguucuucagucac

SEQ ID NO: 4959 - RNA, 20 nt, Artificial Sequence
  HTT spacer sequence ATCN PAM
agacacugaagacaggagaa

SEQ ID NO: 4960 - RNA, 20 nt, Artificial Sequence
  HTT spacer sequence ATCN PAM
gcuauauguaagugucacgg

SEQ ID NO: 4961 - RNA, 20 nt, Artificial Sequence
  HTT spacer sequence ATCN PAM
acaaaucagcuauauguaag

SEQ ID NO: 4962 - RNA, 20 nt, Artificial Sequence
  HTT spacer sequence ATCN PAM
caccgugucugacauaucca

SEQ ID NO: 4963 - RNA, 20 nt, Artificial Sequence
  HTT spacer sequence ATCN PAM
gccccugccccauuuacccc

SEQ ID NO: 4964 - RNA, 20 nt, Artificial Sequence
  HTT spacer sequence ATCN PAM
agcuagaaacaggucaccac

SEQ ID NO: 4965 - RNA, 20 nt, Artificial Sequence
  HTT spacer sequence ATCN PAM
caaggucaggagaucgagac

SEQ ID NO: 4966 - RNA, 20 nt, Artificial Sequence
  HTT spacer sequence ATCN PAM
ccugaccuugugaugcacug

SEQ ID NO: 4967 - RNA, 20 nt, Artificial Sequence
  HTT spacer sequence ATCN PAM
agaccauuccggcucacacg

SEQ ID NO: 4968 - RNA, 20 nt, Artificial Sequence
  HTT spacer sequence ATCN PAM
gccucccagguagcugggac

SEQ ID NO: 4969 - RNA, 20 nt, Artificial Sequence
  HTT spacer sequence ATCN PAM
cggcucacugcaagcuccgc

SEQ ID NO: 4970 - RNA, 20 nt, Artificial Sequence
  HTT spacer sequence ATCN PAM
gagcucuaucuccucucagg

SEQ ID NO: 4971 - RNA, 20 nt, Artificial Sequence
  HTT spacer sequence ATCN PAM
ccucucaggccagugguggc

SEQ ID NO: 4972 - RNA, 20 nt, Artificial Sequence
  HTT spacer sequence ATCN PAM
aaugccaccacuggccugag

SEQ ID NO: 4973 - RNA, 20 nt, Artificial Sequence
  HTT spacer sequence ATCN PAM
ucacauggcccacaggaaaa

SEQ ID NO: 4974 - RNA, 20 nt, Artificial Sequence
  HTT spacer sequence ATCN PAM
uucuuuuucucucucucucu

SEQ ID NO: 4975 - RNA, 20 nt, Artificial Sequence
  HTT spacer sequence ATCN PAM
cccuggugcuccuuugugua

SEQ ID NO: 4976 - RNA, 20 nt, Artificial Sequence
  HTT spacer sequence ATCN PAM
uggggguaguuucuaauggu

SEQ ID NO: 4977 - RNA, 20 nt, Artificial Sequence
  HTT spacer sequence ATCN PAM
aaucaccucccaccaggccc

SEQ ID NO: 4978 - RNA, 20 nt, Artificial Sequence
  HTT spacer sequence ATCN PAM
ccucccaccaggccccaccu

SEQ ID NO: 4979 - RNA, 20 nt, Artificial Sequence
  HTT spacer sequence ATCN PAM
ccagugucggagguggggcc

SEQ ID NO: 4980 - RNA, 20 nt, Artificial Sequence
  HTT spacer sequence ATCN PAM
caugcugaauuguaaucucc

SEQ ID NO: 4981 - RNA, 20 nt, Artificial Sequence
  HTT spacer sequence ATCN PAM
gagcaugaacccuauuguga

SEQ ID NO: 4982 - RNA, 20 nt, Artificial Sequence
  HTT spacer sequence ATCN PAM
cucaaaugugcaguucacaa

SEQ ID NO: 4983 - RNA, 20 nt, Artificial Sequence
  HTT spacer sequence ATCN PAM
agguugcaugcuccuuauga

SEQ ID NO: 4984 - RNA, 20 nt, Artificial Sequence
  HTT spacer sequence ATCN PAM
aaugccugaugaugauuuga

SEQ ID NO: 4985 - RNA, 20 nt, Artificial Sequence
  HTT spacer sequence ATCN PAM
ggcauuagauucucauaagg

SEQ ID NO: 4986 - RNA, 20 nt, Artificial Sequence
  HTT spacer sequence ATCN PAM
ucaggcauuagauucucaua

SEQ ID NO: 4987 - RNA, 20 nt, Artificial Sequence
  HTT spacer sequence ATCN PAM
ucaucaggcauuagauucuc

SEQ ID NO: 4988 - RNA, 20 nt, Artificial Sequence
  HTT spacer sequence ATCN PAM
cgaaaccaucccccgccaac

SEQ ID NO: 4989 - RNA, 20 nt, Artificial Sequence
  HTT spacer sequence ATCN PAM
cccgccaacccugguuugug

SEQ ID NO: 4990 - RNA, 20 nt, Artificial Sequence
  HTT spacer sequence ATCN PAM
gucuggaccagaaguggcag

SEQ ID NO: 4991 - RNA, 20 nt, Artificial Sequence
  HTT spacer sequence ATCN PAM
cauuuggauuacugcacuag

SEQ ID NO: 4992 - RNA, 20 nt, Artificial Sequence
  HTT spacer sequence ATCN PAM
aaaugagauaguauaucagu

SEQ ID NO: 4993 - RNA, 20 nt, Artificial Sequence
  HTT spacer sequence ATCN PAM
caaaaaaauuaaauuaaauu

SEQ ID NO: 4994 - RNA, 20 nt, Artificial Sequence
  HTT spacer sequence ATCN PAM
ugacacugcacuccaagcug

SEQ ID NO: 4995 - RNA, 20 nt, Artificial Sequence
  HTT spacer sequence ATCN PAM
uagcucacugcggccucgau

SEQ ID NO: 4996 - RNA, 20 nt, Artificial Sequence
  HTT spacer sequence ATCN PAM
aggccgcagugagcuaugau

SEQ ID NO: 4997 - RNA, 20 nt, Artificial Sequence
  HTT spacer sequence ATCN PAM
cccaggcucaagugauccuu

SEQ ID NO: 4998 - RNA, 20 nt, Artificial Sequence
  HTT spacer sequence ATCN PAM
cuugagccugggagaucgag

SEQ ID NO: 4999 - RNA, 20 nt, Artificial Sequence
  HTT spacer sequence ATCN PAM
uucugccucagccuucucag

SEQ ID NO: 5000 - RNA, 20 nt, Artificial Sequence
  HTT spacer sequence ATCN PAM
aaaaauuagcugggcauggu

SEQ ID NO: 5001 - RNA, 20 nt, Artificial Sequence
  HTT spacer sequence ATCN PAM
cgccaacccacuccagccug

SEQ ID NO: 5002 - RNA, 20 nt, Artificial Sequence
  HTT spacer sequence ATCN PAM
cagcucacugcaacuucugc

SEQ ID NO: 5003 - RNA, 20 nt, Artificial Sequence
  HTT spacer sequence ATCN PAM
cuugaaccugggaggcagaa

SEQ ID NO: 5004 - RNA, 20 nt, Artificial Sequence
  HTT spacer sequence ATCN PAM
caacuacucgggaggcugag

SEQ ID NO: 5005 - RNA, 20 nt, Artificial Sequence
  HTT spacer sequence ATCN PAM
cgaggucacaaguucgagac

SEQ ID NO: 5006 - RNA, 20 nt, Artificial Sequence
  HTT spacer sequence ATCN PAM
cagcacuuugggaggccgag

SEQ ID NO: 5007 - RNA, 20 nt, Artificial Sequence
  HTT spacer sequence ATCN PAM
caagaaugcuguuuccuggc

SEQ ID NO: 5008 - RNA, 20 nt, Artificial Sequence
  HTT spacer sequence ATCN PAM
ccagaaucaguuuuagaacc

SEQ ID NO: 5009 - RNA, 20 nt, Artificial Sequence
  HTT spacer sequence ATCN PAM
guuuuagaacccauaaagga

SEQ ID NO: 5010 - RNA, 20 nt, Artificial Sequence
  HTT spacer sequence ATCN PAM
acaguaauguccagaagacg

SEQ ID NO: 5011 - RNA, 20 nt, Artificial Sequence
  HTT spacer sequence ATCN PAM
cuugaacccgggaggcagaa

SEQ ID NO: 5012 - RNA, 20 nt, Artificial Sequence
  HTT spacer sequence ATCN PAM
cuacuaaaaaaaaaaaaaaa

SEQ ID NO: 5013 - RNA, 20 nt, Artificial Sequence
  HTT spacer sequence ATCN PAM
agaccacccuggcuaacaug

SEQ ID NO: 5014 - RNA, 20 nt, Artificial Sequence
  HTT spacer sequence ATCN PAM
ccugacuucaugauccgccu

SEQ ID NO: 5015 - RNA, 20 nt, Artificial Sequence
  HTT spacer sequence ATCN PAM
ugaagucaggagaucgagac

SEQ ID NO: 5016 - RNA, 20 nt, Artificial Sequence
  HTT spacer sequence ATCN PAM
gccugccucggccucccaaa

SEQ ID NO: 5017 - RNA, 20 nt, Artificial Sequence
  HTT spacer sequence ATCN PAM
cagcacuuugggaggccgag

SEQ ID NO: 5018 - RNA, 20 nt, Artificial Sequence
  HTT spacer sequence ATCN PAM
gggaagaaaugcagacagua

SEQ ID NO: 5019 - RNA, 20 nt, Artificial Sequence
  HTT spacer sequence ATCN PAM
ggugcauggacuggaaggca

SEQ ID NO: 5020 - RNA, 20 nt, Artificial Sequence
  HTT spacer sequence ATCN PAM
uauuaugguuuaaggugacu

SEQ ID NO: 5021 - RNA, 20 nt, Artificial Sequence
  HTT spacer sequence ATCN PAM
uggacuucccaaccuccaga

SEQ ID NO: 5022 - RNA, 20 nt, Artificial Sequence
  HTT spacer sequence ATCN PAM
aggacuuucgccuugcccuc

SEQ ID NO: 5023 - RNA, 20 nt, Artificial Sequence
  HTT spacer sequence ATCN PAM
auauauaagaggccccacag

SEQ ID NO: 5024 - RNA, 20 nt, Artificial Sequence
  HTT spacer sequence ATCN PAM
cauucaugaggggucugccc

SEQ ID NO: 5025 - RNA, 20 nt, Artificial Sequence
  HTT spacer sequence ATCN PAM
cccugguaauuaaguuucag

SEQ ID NO: 5026 - RNA, 20 nt, Artificial Sequence
  HTT spacer sequence ATCN PAM
uagaaaagugcuuguuaugg

SEQ ID NO: 5027 - RNA, 20 nt, Artificial Sequence
  HTT spacer sequence ATCN PAM
gggagugaguaaguagcaga

SEQ ID NO: 5028 - RNA, 20 nt, Artificial Sequence
  HTT spacer sequence ATCN PAM
ugccuucacucugcuccaug

SEQ ID NO: 5029 - RNA, 20 nt, Artificial Sequence
  HTT spacer sequence ATCN PAM
uggagcagagugaaggcaag

SEQ ID NO: 5030 - RNA, 20 nt, Artificial Sequence
  HTT spacer sequence ATCN PAM
agacucccaaugcucuagga

SEQ ID NO: 5031 - RNA, 20 nt, Artificial Sequence
  HTT spacer sequence ATCN PAM
ccaauacacaacacaugaga

SEQ ID NO: 5032 - RNA, 20 nt, Artificial Sequence
  HTT spacer sequence ATCN PAM
ggauuuguugacuucuagcu

SEQ ID NO: 5033 - RNA, 20 nt, Artificial Sequence
  HTT spacer sequence ATCN PAM
agauguauucauaaagccuc

SEQ ID NO: 5034 - RNA, 20 nt, Artificial Sequence
  HTT spacer sequence ATCN PAM
cugagccuguuuccucuuuu

SEQ ID NO: 5035 - RNA, 20 nt, Artificial Sequence
  HTT spacer sequence ATCN PAM
cagccucccaaagugcugga

SEQ ID NO: 5036 - RNA, 20 nt, Artificial Sequence
  HTT spacer sequence ATCN PAM
ucccaucucagccucccaaa

SEQ ID NO: 5037 - RNA, 20 nt, Artificial Sequence
  HTT spacer sequence ATCN PAM
cuggagcuuggaguucgaga

SEQ ID NO: 5038 - RNA, 20 nt, Artificial Sequence
  HTT spacer sequence ATCN PAM
uagugugagauccugucucc

SEQ ID NO: 5039 - RNA, 20 nt, Artificial Sequence
  HTT spacer sequence ATCN PAM
cacacuaugaugcccaggcu

SEQ ID NO: 5040 - RNA, 20 nt, Artificial Sequence
  HTT spacer sequence ATCN PAM
ugucuccucaagaaauuaaa

SEQ ID NO: 5041 - RNA, 20 nt, Artificial Sequence
  HTT spacer sequence ATCN PAM
cccagcuaauuuuuuaauuu

SEQ ID NO: 5042 - RNA, 20 nt, Artificial Sequence
  HTT spacer sequence ATCN PAM
acucuggaggcugagguggg

SEQ ID NO: 5043 - RNA, 20 nt, Artificial Sequence
  HTT spacer sequence ATCN PAM
ucccaccucagccuccagag

SEQ ID NO: 5044 - RNA, 20 nt, Artificial Sequence
  HTT spacer sequence ATCN PAM
uauuucauuguagccucaac

SEQ ID NO: 5045 - RNA, 20 nt, Artificial Sequence
  HTT spacer sequence ATCN PAM
ugggugacgagugagacccu

SEQ ID NO: 5046 - RNA, 20 nt, Artificial Sequence
  HTT spacer sequence ATCN PAM
ucaacucauucucugugcac

SEQ ID NO: 5047 - RNA, 20 nt, Artificial Sequence
  HTT spacer sequence ATCN PAM
uuguguggguaaaaguaaau

SEQ ID NO: 5048 - RNA, 20 nt, Artificial Sequence
  HTT spacer sequence ATCN PAM
ggguccaagaacaaaaugag

SEQ ID NO: 5049 - RNA, 20 nt, Artificial Sequence
  HTT spacer sequence ATCN PAM
cauguuuuuguuuuuuuguu

SEQ ID NO: 5050 - RNA, 20 nt, Artificial Sequence
  HTT spacer sequence ATCN PAM
gacgaaaggggaaggagaaa

SEQ ID NO: 5051 - RNA, 20 nt, Artificial Sequence
  HTT spacer sequence ATCN PAM
guaccguugagucccaagaa

SEQ ID NO: 5052 - RNA, 20 nt, Artificial Sequence
  HTT spacer sequence ATCN PAM
gucauguagaaacauaggau

SEQ ID NO: 5053 - RNA, 20 nt, Artificial Sequence
  HTT spacer sequence ATCN PAM
uauguuucuacaugacagau

SEQ ID NO: 5054 - RNA, 20 nt, Artificial Sequence
  HTT spacer sequence ATCN PAM
guaaagugagagaaaguuuc

SEQ ID NO: 5055 - RNA, 20 nt, Artificial Sequence
  HTT spacer sequence ATCN PAM
ugaaccgcaccuggagaaac

SEQ ID NO: 5056 - RNA, 20 nt, Artificial Sequence
  HTT spacer sequence ATCN PAM
gucauuaguuucuaauaucu

SEQ ID NO: 5057 - RNA, 20 nt, Artificial Sequence
  HTT spacer sequence ATCN PAM
cucuccuaugcuucccuggu

SEQ ID NO: 5058 - RNA, 20 nt, Artificial Sequence
  HTT spacer sequence ATCN PAM
ccugcaaccagggaagcaua

SEQ ID NO: 5059 - RNA, 20 nt, Artificial Sequence
  HTT spacer sequence ATCN PAM
ggaggccucuccagccauca

SEQ ID NO: 5060 - RNA, 20 nt, Artificial Sequence
  HTT spacer sequence ATCN PAM
acaccacuucccuuacugaa

SEQ ID NO: 5061 - RNA, 20 nt, Artificial Sequence
  HTT spacer sequence ATCN PAM
auuccuaagcaucuacacca

SEQ ID NO: 5062 - RNA, 20 nt, Artificial Sequence
  HTT spacer sequence ATCN PAM
guuuuuucacucacuacauc

SEQ ID NO: 5063 - RNA, 20 nt, Artificial Sequence
  HTT spacer sequence ATCN PAM
gaaucaguuuuuucacucac

SEQ ID NO: 5064 - RNA, 20 nt, Artificial Sequence
  HTT spacer sequence ATCN PAM
gaauuuuugacauaucagaa

SEQ ID NO: 5065 - RNA, 20 nt, Artificial Sequence
  HTT spacer sequence ATCN PAM
ccacuuucucucgccuuuag

SEQ ID NO: 5066 - RNA, 20 nt, Artificial Sequence
  HTT spacer sequence ATCN PAM
gaguuggaggagcuuaaacc

SEQ ID NO: 5067 - RNA, 20 nt, Artificial Sequence
  HTT spacer sequence ATCN PAM
uagccccuucuguucugacc

SEQ ID NO: 5068 - RNA, 20 nt, Artificial Sequence
  HTT spacer sequence ATCN PAM
auacugcucucggugggcag

SEQ ID NO: 5069 - RNA, 20 nt, Artificial Sequence
  HTT spacer sequence ATCN PAM
gggacgccuggccaccuguc

SEQ ID NO: 5070 - RNA, 20 nt, Artificial Sequence
  HTT spacer sequence ATCN PAM
cuggccccugggugccaaga

SEQ ID NO: 5071 - RNA, 20 nt, Artificial Sequence
  HTT spacer sequence ATCN PAM
aggcuauuuauuuauuuauu

SEQ ID NO: 5072 - RNA, 20 nt, Artificial Sequence
  HTT spacer sequence ATCN PAM
cggcucagugcaagcucugc

SEQ ID NO: 5073 - RNA, 20 nt, Artificial Sequence
  HTT spacer sequence ATCN PAM
uggccaacaaggugaaaccc

SEQ ID NO: 5074 - RNA, 20 nt, Artificial Sequence
  HTT spacer sequence ATCN PAM
agaccauccuggccaacaag

SEQ ID NO: 5075 - RNA, 20 nt, Artificial Sequence
  HTT spacer sequence ATCN PAM
ccugaccucgugauccgucc

SEQ ID NO: 5076 - RNA, 20 nt, Artificial Sequence
  HTT spacer sequence ATCN PAM
cgaggucaggagaucaagac

SEQ ID NO: 5077 - RNA, 20 nt, Artificial Sequence
  HTT spacer sequence ATCN PAM
guccaccucagccucucaaa

SEQ ID NO: 5078 - RNA, 20 nt, Artificial Sequence
  HTT spacer sequence ATCN PAM
cagcacuuugagaggcugag

SEQ ID NO: 5079 - RNA, 20 nt, Artificial Sequence
  HTT spacer sequence ATCN PAM
guaauauacaacaugauguu

SEQ ID NO: 5080 - RNA, 20 nt, Artificial Sequence
  HTT spacer sequence ATCN PAM
uguuguauauuacagauaua

SEQ ID NO: 5081 - RNA, 20 nt, Artificial Sequence
  HTT spacer sequence ATCN PAM
cagcacuuugggaggcugag

SEQ ID NO: 5082 - RNA, 20 nt, Artificial Sequence
  HTT spacer sequence ATCN PAM
gcccaccucagccucccaaa

SEQ ID NO: 5083 - RNA, 20 nt, Artificial Sequence
  HTT spacer sequence ATCN PAM
cgaggucgggaguucaagac

SEQ ID NO: 5084 - RNA, 20 nt, Artificial Sequence
  HTT spacer sequence ATCN PAM
ugucucuacuaaaaauacca

SEQ ID NO: 5085 - RNA, 20 nt, Artificial Sequence
  HTT spacer sequence ATCN PAM
ggcagguggagguugcagug

SEQ ID NO: 5086 - RNA, 20 nt, Artificial Sequence
  HTT spacer sequence ATCN PAM
cccaggcuagagugcagugg

SEQ ID NO: 5087 - RNA, 20 nt, Artificial Sequence
  HTT spacer sequence ATCN PAM
ccucacguaucauuguuuug

SEQ ID NO: 5088 - RNA, 20 nt, Artificial Sequence
  HTT spacer sequence ATCN PAM
uuguuuuguggugagaacac

SEQ ID NO: 5089 - RNA, 20 nt, Artificial Sequence
  HTT spacer sequence ATCN PAM
acucuuucagugauuuucuu

SEQ ID NO: 5090 - RNA, 20 nt, Artificial Sequence
  HTT spacer sequence ATCN PAM
cugaaagaguagauuuuaag

SEQ ID NO: 5091 - RNA, 20 nt, Artificial Sequence
  HTT spacer sequence ATCN PAM
acuguauagcauggugacug

SEQ ID NO: 5092 - RNA, 20 nt, Artificial Sequence
  HTT spacer sequence ATCN PAM
cuugaacucauuccuccugu

SEQ ID NO: 5093 - RNA, 20 nt, Artificial Sequence
  HTT spacer sequence ATCN PAM
uugaccaacacauucaaggu

SEQ ID NO: 5094 - RNA, 20 nt, Artificial Sequence
  HTT spacer sequence ATCN PAM
caaaaaaaaccuugaaugug

SEQ ID NO: 5095 - RNA, 20 nt, Artificial Sequence
  HTT spacer sequence ATCN PAM
ugccaugguacuccagccug

SEQ ID NO: 5096 - RNA, 20 nt, Artificial Sequence
  HTT spacer sequence ATCN PAM
caucucacugcaaccuccgc

SEQ ID NO: 5097 - RNA, 20 nt, Artificial Sequence
  HTT spacer sequence ATCN PAM
cacugcaaccuccgccuccc

SEQ ID NO: 5098 - RNA, 20 nt, Artificial Sequence
  HTT spacer sequence ATCN PAM
cagcuacucaggaggcugag

SEQ ID NO: 5099 - RNA, 20 nt, Artificial Sequence
  HTT spacer sequence ATCN PAM
cuugaggucaggaguucgag

SEQ ID NO: 5100 - RNA, 20 nt, Artificial Sequence
  HTT spacer sequence ATCN PAM
gccugccuuggccugccaaa

SEQ ID NO: 5101 - RNA, 20 nt, Artificial Sequence
  HTT spacer sequence ATCN PAM
cagcacuuuggcaggccaag

SEQ ID NO: 5102 - RNA, 20 nt, Artificial Sequence
  HTT spacer sequence ATCN PAM
uuuaaaacgcuugaggccgg

SEQ ID NO: 5103 - RNA, 20 nt, Artificial Sequence
  HTT spacer sequence ATCN PAM
uuagaaaagagcaucuuuua

SEQ ID NO: 5104 - RNA, 20 nt, Artificial Sequence
  HTT spacer sequence ATCN PAM
uccuccuguacuacagucaa

SEQ ID NO: 5105 - RNA, 20 nt, Artificial Sequence
  HTT spacer sequence ATCN PAM
guauauuacuaucaucuuuc

SEQ ID NO: 5106 - RNA, 20 nt, Artificial Sequence
  HTT spacer sequence ATCN PAM
ucuuucugaugaauuaaaua

SEQ ID NO: 5107 - RNA, 20 nt, Artificial Sequence
  HTT spacer sequence ATCN PAM
uucugaugaauuaaauaaac

SEQ ID NO: 5108 - RNA, 20 nt, Artificial Sequence
  HTT spacer sequence ATCN PAM
gaaagaugauaguaauauac

SEQ ID NO: 5109 - RNA, 20 nt, Artificial Sequence
  HTT spacer sequence ATCN PAM
guuuaaugauaauguuugug

SEQ ID NO: 5110 - RNA, 20 nt, Artificial Sequence
  HTT spacer sequence ATCN PAM
uuaaaccgauacuaaauauu

SEQ ID NO: 5111 - RNA, 20 nt, Artificial Sequence
  HTT spacer sequence ATCN PAM
ucccuguuugauuacuuggu

SEQ ID NO: 5112 - RNA, 20 nt, Artificial Sequence
  HTT spacer sequence ATCN PAM
cuguuugauuacuuggugug

SEQ ID NO: 5113 - RNA, 20 nt, Artificial Sequence
  HTT spacer sequence ATCN PAM
aacagggaugauguaaaaau

SEQ ID NO: 5114 - RNA, 20 nt, Artificial Sequence
  HTT spacer sequence ATCN PAM
uaggcucagagagguucugg

SEQ ID NO: 5115 - RNA, 20 nt, Artificial Sequence
  HTT spacer sequence ATCN PAM
gcugcuccuaugauucucua

SEQ ID NO: 5116 - RNA, 20 nt, Artificial Sequence
  HTT spacer sequence ATCN PAM
uaggagcagcugauucaagg

SEQ ID NO: 5117 - RNA, 20 nt, Artificial Sequence
  HTT spacer sequence ATCN PAM
guuagagaaucauaggagca

SEQ ID NO: 5118 - RNA, 20 nt, Artificial Sequence
  HTT spacer sequence ATCN PAM
uaacaaaacaacugugcaca

SEQ ID NO: 5119 - RNA, 20 nt, Artificial Sequence
  HTT spacer sequence ATCN PAM
aaaggucagaggaaauacuu

SEQ ID NO: 5120 - RNA, 20 nt, Artificial Sequence
  HTT spacer sequence ATCN PAM
ugauuuccaguaaucucuuu

SEQ ID NO: 5121 - RNA, 20 nt, Artificial Sequence
  HTT spacer sequence ATCN PAM
ugauuuuuuaaaguauucua

SEQ ID NO: 5122 - RNA, 20 nt, Artificial Sequence
  HTT spacer sequence ATCN PAM
cuuuaaaacuuggcaaguua

SEQ ID NO: 5123 - RNA, 20 nt, Artificial Sequence
  HTT spacer sequence ATCN PAM
aaauaacuugccaaguuuua

SEQ ID NO: 5124 - RNA, 20 nt, Artificial Sequence
  HTT spacer sequence ATCN PAM
aaaaguuuaucuuuugugug

SEQ ID NO: 5125 - RNA, 20 nt, Artificial Sequence
  HTT spacer sequence ATCN PAM
uuugugugcauauuuuuaaa

SEQ ID NO: 5126 - RNA, 20 nt, Artificial Sequence
  HTT spacer sequence ATCN PAM
gauaccucagguccuguuac

SEQ ID NO: 5127 - RNA, 20 nt, Artificial Sequence
  HTT spacer sequence ATCN PAM
gauugucuagaagcuuuaaa

SEQ ID NO: 5128 - RNA, 20 nt, Artificial Sequence
  HTT spacer sequence ATCN PAM
ucaucacuggggaguuucua

SEQ ID NO: 5129 - RNA, 20 nt, Artificial Sequence
  HTT spacer sequence ATCN PAM
cuggggaguuucuaucaucu

SEQ ID NO: 5130 - RNA, 20 nt, Artificial Sequence
  HTT spacer sequence ATCN PAM
ucuuccuucauaccucaaac

SEQ ID NO: 5131 - RNA, 20 nt, Artificial Sequence
  HTT spacer sequence ATCN PAM
uccuucauaccucaaacugc

SEQ ID NO: 5132 - RNA, 20 nt, Artificial Sequence
  HTT spacer sequence ATCN PAM
ugcaguuugagguaugaagg

SEQ ID NO: 5133 - RNA, 20 nt, Artificial Sequence
  HTT spacer sequence ATCN PAM
uuuaaaaauauauaugcaca

SEQ ID NO: 5134 - RNA, 20 nt, Artificial Sequence
  HTT spacer sequence ATCN PAM
auuagacguaaguaugugug

SEQ ID NO: 5135 - RNA, 20 nt, Artificial Sequence
  HTT spacer sequence ATCN PAM
acuauccauuagacguaagu

SEQ ID NO: 5136 - RNA, 20 nt, Artificial Sequence
  HTT spacer sequence ATCN PAM
uaagaaaaacaucaacuauc

SEQ ID NO: 5137 - RNA, 20 nt, Artificial Sequence
  HTT spacer sequence ATCN PAM
uacaaaucauaagaaaaaca

SEQ ID NO: 5138 - RNA, 20 nt, Artificial Sequence
  HTT spacer sequence ATCN PAM
caaagggcuuauacauccua

SEQ ID NO: 5139 - RNA, 20 nt, Artificial Sequence
  HTT spacer sequence ATCN PAM
uaaacaaagcugaaagacaa

SEQ ID NO: 5140 - RNA, 20 nt, Artificial Sequence
  HTT spacer sequence ATCN PAM
uacagguguuuuggauuuuc

SEQ ID NO: 5141 - RNA, 20 nt, Artificial Sequence
  HTT spacer sequence ATCN PAM
aaaacaccuguaugauagaa

SEQ ID NO: 5142 - RNA, 20 nt, Artificial Sequence
  HTT spacer sequence ATCN PAM
uagcugugaguacaaacaau

SEQ ID NO: 5143 - RNA, 20 nt, Artificial Sequence
  HTT spacer sequence ATCN PAM
aucuuagcugugaguacaaa

SEQ ID NO: 5144 - RNA, 20 nt, Artificial Sequence
  HTT spacer sequence ATCN PAM
uagcucugucacuguaauca

SEQ ID NO: 5145 - RNA, 20 nt, Artificial Sequence
  HTT spacer sequence ATCN PAM
cuccagacuccaccagggcc

SEQ ID NO: 5146 - RNA, 20 nt, Artificial Sequence
  HTT spacer sequence ATCN PAM
guguacaggcuuccuucccu

SEQ ID NO: 5147 - RNA, 20 nt, Artificial Sequence
  HTT spacer sequence ATCN PAM
gcuagggaaaguuuauguca

SEQ ID NO: 5148 - RNA, 20 nt, Artificial Sequence
  HTT spacer sequence ATCN PAM
ggugaacaguuucuuacgcu

SEQ ID NO: 5149 - RNA, 20 nt, Artificial Sequence
  HTT spacer sequence ATCN PAM
cuagacagaaaggcuggcuc

SEQ ID NO: 5150 - RNA, 20 nt, Artificial Sequence
  HTT spacer sequence ATCN PAM
gcaauuuguuagauaugaag

SEQ ID NO: 5151 - RNA, 20 nt, Artificial Sequence
  HTT spacer sequence ATCN PAM
aacaaauugcagaugaacag

SEQ ID NO: 5152 - RNA, 20 nt, Artificial Sequence
  HTT spacer sequence ATCN PAM
aucuaucugucugcucaucu

SEQ ID NO: 5153 - RNA, 20 nt, Artificial Sequence
  HTT spacer sequence ATCN PAM
aucugucugcucaucuauua

SEQ ID NO: 5154 - RNA, 20 nt, Artificial Sequence
  HTT spacer sequence ATCN PAM
gucugcucaucuauuagaag

SEQ ID NO: 5155 - RNA, 20 nt, Artificial Sequence
  HTT spacer sequence ATCN PAM
auuagaagcauccuuguuuu

SEQ ID NO: 5156 - RNA, 20 nt, Artificial Sequence
  HTT spacer sequence ATCN PAM
uuguuuuuuuuuuuucuuuu

SEQ ID NO: 5157 - RNA, 20 nt, Artificial Sequence
  HTT spacer sequence ATCN PAM
cuugagcccugagacugcag

SEQ ID NO: 5158 - RNA, 20 nt, Artificial Sequence
  HTT spacer sequence ATCN PAM
ucccaccucagcuccugagu

SEQ ID NO: 5159 - RNA, 20 nt, Artificial Sequence
  HTT spacer sequence ATCN PAM
ucccuccuuggccucccaaa

SEQ ID NO: 5160 - RNA, 20 nt, Artificial Sequence
  HTT spacer sequence ATCN PAM
cagcacuuugggaggccaag

SEQ ID NO: 5161 - RNA, 20 nt, Artificial Sequence
  HTT spacer sequence ATCN PAM
ccucauaaauaccauuaagc

SEQ ID NO: 5162 - RNA, 20 nt, Artificial Sequence
  HTT spacer sequence ATCN PAM
guuccccuguuguucuuuag

SEQ ID NO: 5163 - RNA, 20 nt, Artificial Sequence
  HTT spacer sequence ATCN PAM
agaaaauucuaaagaacaac

SEQ ID NO: 5164 - RNA, 20 nt, Artificial Sequence
  HTT spacer sequence ATCN PAM
auaaagaagaauauccagaa

SEQ ID NO: 5165 - RNA, 20 nt, Artificial Sequence
  HTT spacer sequence ATCN PAM
caaaaucaauaaagaagaau

SEQ ID NO: 5166 - RNA, 20 nt, Artificial Sequence
  HTT spacer sequence ATCN PAM
acuucuacuuguagauugau

SEQ ID NO: 5167 - RNA, 20 nt, Artificial Sequence
  HTT spacer sequence ATCN PAM
acaaguagaaguugauucua

SEQ ID NO: 5168 - RNA, 20 nt, Artificial Sequence
  HTT spacer sequence ATCN PAM
aucuacaaguagaaguugau

SEQ ID NO: 5169 - RNA, 20 nt, Artificial Sequence
  HTT spacer sequence ATCN PAM
gagguauaaguucucccuaa

SEQ ID NO: 5170 - RNA, 20 nt, Artificial Sequence
  HTT spacer sequence ATCN PAM
cacauucuggacagggugac

SEQ ID NO: 5171 - RNA, 20 nt, Artificial Sequence
  HTT spacer sequence ATCN PAM
uuuaaauuucaugugcuucu

SEQ ID NO: 5172 - RNA, 20 nt, Artificial Sequence
  HTT spacer sequence ATCN PAM
uuaaguuuuuuuuaaaaucc

SEQ ID NO: 5173 - RNA, 20 nt, Artificial Sequence
  HTT spacer sequence ATCN PAM
agaaaugugcaagagcuaug

SEQ ID NO: 5174 - RNA, 20 nt, Artificial Sequence
  HTT spacer sequence ATCN PAM
ucagguauuccucuguuuuu

SEQ ID NO: 5175 - RNA, 20 nt, Artificial Sequence
  HTT spacer sequence ATCN PAM
uuuaucaaacguauguggcu

SEQ ID NO: 5176 - RNA, 20 nt, Artificial Sequence
  HTT spacer sequence ATCN PAM
aacguauguggcuuauuuuc

SEQ ID NO: 5177 - RNA, 20 nt, Artificial Sequence
  HTT spacer sequence ATCN PAM
uucagaaaauaagccacaua

SEQ ID NO: 5178 - RNA, 20 nt, Artificial Sequence
  HTT spacer sequence ATCN PAM
aacauccuucagaaaauaag

SEQ ID NO: 5179 - RNA, 20 nt, Artificial Sequence
  HTT spacer sequence ATCN PAM
uccaaaauuaucaaacaucc

SEQ ID NO: 5180 - RNA, 20 nt, Artificial Sequence
  HTT spacer sequence ATCN PAM
ucucuacggcauuuuucaac

SEQ ID NO: 5181 - RNA, 20 nt, Artificial Sequence
  HTT spacer sequence ATCN PAM
ucuugaauuucagggcaccu

SEQ ID NO: 5182 - RNA, 20 nt, Artificial Sequence
  HTT spacer sequence ATCN PAM
ugaauuucagggcaccuuuc

SEQ ID NO: 5183 - RNA, 20 nt, Artificial Sequence
  HTT spacer sequence ATCN PAM
guuuauuauuuuccuuccug

SEQ ID NO: 5184 - RNA, 20 nt, Artificial Sequence
  HTT spacer sequence ATCN PAM
uggacuccuguuuccuuugc

SEQ ID NO: 5185 - RNA, 20 nt, Artificial Sequence
  HTT spacer sequence ATCN PAM
ccgcggucagcuccugcugc

SEQ ID NO: 5186 - RNA, 20 nt, Artificial Sequence
  HTT spacer sequence ATCN PAM
agcaagacacgccaggcacu

SEQ ID NO: 5187 - RNA, 20 nt, Artificial Sequence
  HTT spacer sequence ATCN PAM
uugaguauugccucugguuu

SEQ ID NO: 5188 - RNA, 20 nt, Artificial Sequence
  HTT spacer sequence ATCN PAM
gaggagugcaggaagggcca

SEQ ID NO: 5189 - RNA, 20 nt, Artificial Sequence
  HTT spacer sequence ATCN PAM
uaauucucaucucaugaccu

SEQ ID NO: 5190 - RNA, 20 nt, Artificial Sequence
  HTT spacer sequence ATCN PAM
caugaccucuuuucccuucu

SEQ ID NO: 5191 - RNA, 20 nt, Artificial Sequence
  HTT spacer sequence ATCN PAM
gaccucuccuggacaacagg

SEQ ID NO: 5192 - RNA, 20 nt, Artificial Sequence
  HTT spacer sequence ATCN PAM
cacaugacaucaccacauca

SEQ ID NO: 5193 - RNA, 20 nt, Artificial Sequence
  HTT spacer sequence ATCN PAM
ccacaucaccucguuccuug

SEQ ID NO: 5194 - RNA, 20 nt, Artificial Sequence
  HTT spacer sequence ATCN PAM
ccucguuccuuggacccuca

SEQ ID NO: 5195 - RNA, 20 nt, Artificial Sequence
  HTT spacer sequence ATCN PAM
agcagugacaccacugaggg

SEQ ID NO: 5196 - RNA, 20 nt, Artificial Sequence
  HTT spacer sequence ATCN PAM
aaauaccaugacuacgcuag

SEQ ID NO: 5197 - RNA, 20 nt, Artificial Sequence
  HTT spacer sequence ATCN PAM
acucacauuuucaguuucug

SEQ ID NO: 5198 - RNA, 20 nt, Artificial Sequence
  HTT spacer sequence ATCN PAM
aagaacccuugugaaagaga

SEQ ID NO: 5199 - RNA, 20 nt, Artificial Sequence
  HTT spacer sequence ATCN PAM
uuuagaaucuuaacacaucu

SEQ ID NO: 5200 - RNA, 20 nt, Artificial Sequence
  HTT spacer sequence ATCN PAM
uaacacaucuuacaccugau

SEQ ID NO: 5201 - RNA, 20 nt, Artificial Sequence
  HTT spacer sequence ATCN PAM
uacaccugauuuaauauuuu

SEQ ID NO: 5202 - RNA, 20 nt, Artificial Sequence
  HTT spacer sequence ATCN PAM
gguguaagauguguuaagau

SEQ ID NO: 5203 - RNA, 20 nt, Artificial Sequence
  HTT spacer sequence ATCN PAM
aaauugaaccaacccuaugu

SEQ ID NO: 5204 - RNA, 20 nt, Artificial Sequence
  HTT spacer sequence ATCN PAM
cugucaaauucacauagggu

SEQ ID NO: 5205 - RNA, 20 nt, Artificial Sequence
  HTT spacer sequence ATCN PAM
cugggagaaaucacugucaa

SEQ ID NO: 5206 - RNA, 20 nt, Artificial Sequence
  HTT spacer sequence ATCN PAM
uaguguauaaggaauaggac

SEQ ID NO: 5207 - RNA, 20 nt, Artificial Sequence
  HTT spacer sequence ATCN PAM
aaaaauagaaaauacuaagu

SEQ ID NO: 5208 - RNA, 20 nt, Artificial Sequence
  HTT spacer sequence ATCN PAM
gguaugugguauaucaaaaa

SEQ ID NO: 5209 - RNA, 20 nt, Artificial Sequence
  HTT spacer sequence ATCN PAM
guaucugguaugugguauau

SEQ ID NO: 5210 - RNA, 20 nt, Artificial Sequence
  HTT spacer sequence ATCN PAM
uaaucaguaucugguaugug

SEQ ID NO: 5211 - RNA, 20 nt, Artificial Sequence
  HTT spacer sequence ATCN PAM
gaaaggaauuucuuuccaaa

SEQ ID NO: 5212 - RNA, 20 nt, Artificial Sequence
  HTT spacer sequence ATCN PAM
gcugcagccgucgauguuug

SEQ ID NO: 5213 - RNA, 20 nt, Artificial Sequence
  HTT spacer sequence ATCN PAM
acggcugcagcagaugccuc

SEQ ID NO: 5214 - RNA, 20 nt, Artificial Sequence
  HTT spacer sequence ATCN PAM
cauaauguacaaccaaagac

SEQ ID NO: 5215 - RNA, 20 nt, Artificial Sequence
  HTT spacer sequence ATCN PAM
ugacagggccaguaaccgug

SEQ ID NO: 5216 - RNA, 20 nt, Artificial Sequence
  HTT spacer sequence ATCN PAM
agcgugaccuugggaaggug

SEQ ID NO: 5217 - RNA, 20 nt, Artificial Sequence
  HTT spacer sequence ATCN PAM
ucagaacagcacggaaaagu

SEQ ID NO: 5218 - RNA, 20 nt, Artificial Sequence
  HTT spacer sequence ATCN PAM
aaggcugagcggagaaaccc

SEQ ID NO: 5219 - RNA, 20 nt, Artificial Sequence
  HTT spacer sequence ATCN PAM
gagaaagaacauccaaggcu

SEQ ID NO: 5220 - RNA, 20 nt, Artificial Sequence
  HTT spacer sequence ATCN PAM
agugugccagccacaaccca

SEQ ID NO: 5221 - RNA, 20 nt, Artificial Sequence
  HTT spacer sequence ATCN PAM
aggauggagccugguucucc

SEQ ID NO: 5222 - RNA, 20 nt, Artificial Sequence
  HTT spacer sequence ATCN PAM
uagaugaacucagcccagaa

SEQ ID NO: 5223 - RNA, 20 nt, Artificial Sequence
  HTT spacer sequence ATCN PAM
uguauuagcuuagacccagu

SEQ ID NO: 5224 - RNA, 20 nt, Artificial Sequence
  HTT spacer sequence ATCN PAM
guggguuucaaaauguguuu

SEQ ID NO: 5225 - RNA, 20 nt, Artificial Sequence
  HTT spacer sequence ATCN PAM
gugucagagaauaugacugu

SEQ ID NO: 5226 - RNA, 20 nt, Artificial Sequence
  HTT spacer sequence ATCN PAM
cacagaaagucagcggcaga

SEQ ID NO: 5227 - RNA, 20 nt, Artificial Sequence
  HTT spacer sequence ATCN PAM
acgagacuuuuaacucaggc

SEQ ID NO: 5228 - RNA, 20 nt, Artificial Sequence
  HTT spacer sequence ATCN PAM
uggcacguguauaccuaugu

SEQ ID NO: 5229 - RNA, 20 nt, Artificial Sequence
  HTT spacer sequence ATCN PAM
acccaucaccuacauuaggu

SEQ ID NO: 5230 - RNA, 20 nt, Artificial Sequence
  HTT spacer sequence ATCN PAM
ccuacauuagguauuucucc

SEQ ID NO: 5231 - RNA, 20 nt, Artificial Sequence
  HTT spacer sequence ATCN PAM
cucccccaguccccucacuc

SEQ ID NO: 5232 - RNA, 20 nt, Artificial Sequence
  HTT spacer sequence ATCN PAM
cacaccggggcccaugggga

SEQ ID NO: 5233 - RNA, 20 nt, Artificial Sequence
  HTT spacer sequence ATCN PAM
gaaaaccaaacaccgcaugu

SEQ ID NO: 5234 - RNA, 20 nt, Artificial Sequence
  HTT spacer sequence ATCN PAM
ugugauaguuugcugagaau

SEQ ID NO: 5235 - RNA, 20 nt, Artificial Sequence
  HTT spacer sequence ATCN PAM
caagaucagaaaaccaaaca

SEQ ID NO: 5236 - RNA, 20 nt, Artificial Sequence
  HTT spacer sequence ATCN PAM
uucucagcaaacuaucacaa

SEQ ID NO: 5237 - RNA, 20 nt, Artificial Sequence
  HTT spacer sequence ATCN PAM
uccaugugccugcaaaggac

SEQ ID NO: 5238 - RNA, 20 nt, Artificial Sequence
  HTT spacer sequence ATCN PAM
augugccugcaaaggacaug

SEQ ID NO: 5239 - RNA, 20 nt, Artificial Sequence
  HTT spacer sequence ATCN PAM
uuuuuuauggcuguauagua

SEQ ID NO: 5240 - RNA, 20 nt, Artificial Sequence
  HTT spacer sequence ATCN PAM
agucuaucauugauggacau

SEQ ID NO: 5241 - RNA, 20 nt, Artificial Sequence
  HTT spacer sequence ATCN PAM
uugauggacauucggguugg

SEQ ID NO: 5242 - RNA, 20 nt, Artificial Sequence
  HTT spacer sequence ATCN PAM
augauagacuggauuaagaa

SEQ ID NO: 5243 - RNA, 20 nt, Artificial Sequence
  HTT spacer sequence ATCN PAM
uagaaugauuuauaauccuu

SEQ ID NO: 5244 - RNA, 20 nt, Artificial Sequence
  HTT spacer sequence ATCN PAM
uucuacgauaaagacacaug

SEQ ID NO: 5245 - RNA, 20 nt, Artificial Sequence
  HTT spacer sequence ATCN PAM
uuuggguauaugcccaguaa

SEQ ID NO: 5246 - RNA, 20 nt, Artificial Sequence
  HTT spacer sequence ATCN PAM
cauuacugggcauauaccca

SEQ ID NO: 5247 - RNA, 20 nt, Artificial Sequence
  HTT spacer sequence ATCN PAM
ccagacugucuuccacaaua

SEQ ID NO: 5248 - RNA, 20 nt, Artificial Sequence
  HTT spacer sequence ATCN PAM
guuguuucgugacuuuuuaa

SEQ ID NO: 5249 - RNA, 20 nt, Artificial Sequence
  HTT spacer sequence ATCN PAM
uuaaaaagucacgaaacaac

SEQ ID NO: 5250 - RNA, 20 nt, Artificial Sequence
  HTT spacer sequence ATCN PAM
ccauccuaacuggcgugaga

SEQ ID NO: 5251 - RNA, 20 nt, Artificial Sequence
  HTT spacer sequence ATCN PAM
uaacuggcgugagaugguau

SEQ ID NO: 5252 - RNA, 20 nt, Artificial Sequence
  HTT spacer sequence ATCN PAM
cacgccaguuaggauggcga

SEQ ID NO: 5253 - RNA, 20 nt, Artificial Sequence
  HTT spacer sequence ATCN PAM
cauugugauuuugaucugca

SEQ ID NO: 5254 - RNA, 20 nt, Artificial Sequence
  HTT spacer sequence ATCN PAM
caaugagauaccaucucacg

SEQ ID NO: 5255 - RNA, 20 nt, Artificial Sequence
  HTT spacer sequence ATCN PAM
aaaucacaaugagauaccau

SEQ ID NO: 5256 - RNA, 20 nt, Artificial Sequence
  HTT spacer sequence ATCN PAM
gcauuucucuaaugaccagu

SEQ ID NO: 5257 - RNA, 20 nt, Artificial Sequence
  HTT spacer sequence ATCN PAM
ccacuggucauuagagaaau

SEQ ID NO: 5258 - RNA, 20 nt, Artificial Sequence
  HTT spacer sequence ATCN PAM
uuuguccauuuuuugauggg

SEQ ID NO: 5259 - RNA, 20 nt, Artificial Sequence
  HTT spacer sequence ATCN PAM
aaaaauggacaaaggauaug

SEQ ID NO: 5260 - RNA, 20 nt, Artificial Sequence
  HTT spacer sequence ATCN PAM
acaaagaacuuaaacaaauu

SEQ ID NO: 5261 - RNA, 20 nt, Artificial Sequence
  HTT spacer sequence ATCN PAM
agaaucuacaaagaacuuaa

SEQ ID NO: 5262 - RNA, 20 nt, Artificial Sequence
  HTT spacer sequence ATCN PAM
uuugucagauggguagauug

SEQ ID NO: 5263 - RNA, 20 nt, Artificial Sequence
  HTT spacer sequence ATCN PAM
gacaaaagauuaacauccag

SEQ ID NO: 5264 - RNA, 20 nt, Artificial Sequence
  HTT spacer sequence ATCN PAM
acccaucugacaaaagauua

SEQ ID NO: 5265 - RNA, 20 nt, Artificial Sequence
  HTT spacer sequence ATCN PAM
cauucuguagguugccuguu

SEQ ID NO: 5266 - RNA, 20 nt, Artificial Sequence
  HTT spacer sequence ATCN PAM
gagugaacaggcaaccuaca

SEQ ID NO: 5267 - RNA, 20 nt, Artificial Sequence
  HTT spacer sequence ATCN PAM
ucagagugaacaggcaaccu

SEQ ID NO: 5268 - RNA, 20 nt, Artificial Sequence
  HTT spacer sequence ATCN PAM
aauuaaacuaaagagcuucu

SEQ ID NO: 5269 - RNA, 20 nt, Artificial Sequence
  HTT spacer sequence ATCN PAM
cguuugucaauuuuggcuuu

SEQ ID NO: 5270 - RNA, 20 nt, Artificial Sequence
  HTT spacer sequence ATCN PAM
uagaagaaaaccugggccau

SEQ ID NO: 5271 - RNA, 20 nt, Artificial Sequence
  HTT spacer sequence ATCN PAM
aagacuuaaacauaagaccu

SEQ ID NO: 5272 - RNA, 20 nt, Artificial Sequence
  HTT spacer sequence ATCN PAM
aucuugaguugauuuuugug

SEQ ID NO: 5273 - RNA, 20 nt, Artificial Sequence
  HTT spacer sequence ATCN PAM
ugaguugauuuuuguguaag

SEQ ID NO: 5274 - RNA, 20 nt, Artificial Sequence
  HTT spacer sequence ATCN PAM
acucaagauggaucaaagac

SEQ ID NO: 5275 - RNA, 20 nt, Artificial Sequence
  HTT spacer sequence ATCN PAM
uuuccccauugcuuaugugu

SEQ ID NO: 5276 - RNA, 20 nt, Artificial Sequence
  HTT spacer sequence ATCN PAM
uugacaaaccugacacacau

SEQ ID NO: 5277 - RNA, 20 nt, Artificial Sequence
  HTT spacer sequence ATCN PAM
gaugauuguagauguguggu

SEQ ID NO: 5278 - RNA, 20 nt, Artificial Sequence
  HTT spacer sequence ATCN PAM
gaucuuugacaaaccugaca

SEQ ID NO: 5279 - RNA, 20 nt, Artificial Sequence
  HTT spacer sequence ATCN PAM
ucugaucuuugacaaaccug

SEQ ID NO: 5280 - RNA, 20 nt, Artificial Sequence
  HTT spacer sequence ATCN PAM
acaaucaucugaucuuugac

SEQ ID NO: 5281 - RNA, 20 nt, Artificial Sequence
  HTT spacer sequence ATCN PAM
guuuugguaccaguaccaug

SEQ ID NO: 5282 - RNA, 20 nt, Artificial Sequence
  HTT spacer sequence ATCN PAM
cacuaccugacuucaaacua

SEQ ID NO: 5283 - RNA, 20 nt, Artificial Sequence
  HTT spacer sequence ATCN PAM
ugggcuagaagaacaaagcu

SEQ ID NO: 5284 - RNA, 20 nt, Artificial Sequence
  HTT spacer sequence ATCN PAM
cugacuuucuucacagaauu

SEQ ID NO: 5285 - RNA, 20 nt, Artificial Sequence
  HTT spacer sequence ATCN PAM
agcuaucacugacuuucuuc

SEQ ID NO: 5286 - RNA, 20 nt, Artificial Sequence
  HTT spacer sequence ATCN PAM
ccccaucaagcuaucacuga

SEQ ID NO: 5287 - RNA, 20 nt, Artificial Sequence
  HTT spacer sequence ATCN PAM
auaaauuacuuugggcagca

SEQ ID NO: 5288 - RNA, 20 nt, Artificial Sequence
  HTT spacer sequence ATCN PAM
ugaaaauggccuugcugccc

SEQ ID NO: 5289 - RNA, 20 nt, Artificial Sequence
  HTT spacer sequence ATCN PAM
auaucgugaaaauggccuug

SEQ ID NO: 5290 - RNA, 20 nt, Artificial Sequence
  HTT spacer sequence ATCN PAM
augaacauggaauguuuuuc

SEQ ID NO: 5291 - RNA, 20 nt, Artificial Sequence
  HTT spacer sequence ATCN PAM
cuuguaaguugucuuccuag

SEQ ID NO: 5292 - RNA, 20 nt, Artificial Sequence
  HTT spacer sequence ATCN PAM
ugagugaacucccauucaca

SEQ ID NO: 5293 - RNA, 20 nt, Artificial Sequence
  HTT spacer sequence ATCN PAM
caagcauuccuauacaccaa

SEQ ID NO: 5294 - RNA, 20 nt, Artificial Sequence
  HTT spacer sequence ATCN PAM
augugcaaaaaucacaagca

SEQ ID NO: 5295 - RNA, 20 nt, Artificial Sequence
  HTT spacer sequence ATCN PAM
ugagacuuugcugaaguugc

SEQ ID NO: 5296 - RNA, 20 nt, Artificial Sequence
  HTT spacer sequence ATCN PAM
gcuuaaggagauuuugagcu

SEQ ID NO: 5297 - RNA, 20 nt, Artificial Sequence
  HTT spacer sequence ATCN PAM
ccuuaagcugauuagcaacu

SEQ ID NO: 5298 - RNA, 20 nt, Artificial Sequence
  HTT spacer sequence ATCN PAM
ugucaucugcaaacagggac

SEQ ID NO: 5299 - RNA, 20 nt, Artificial Sequence
  HTT spacer sequence ATCN PAM
gcaaacagggacaguuuuac

SEQ ID NO: 5300 - RNA, 20 nt, Artificial Sequence
  HTT spacer sequence ATCN PAM
ggcaagagaaagcaauaaag

SEQ ID NO: 5301 - RNA, 20 nt, Artificial Sequence
  HTT spacer sequence ATCN PAM
uugucuugugccgguuuucg

SEQ ID NO: 5302 - RNA, 20 nt, Artificial Sequence
  HTT spacer sequence ATCN PAM
uacugaaugggcaaaaacug

SEQ ID NO: 5303 - RNA, 20 nt, Artificial Sequence
  HTT spacer sequence ATCN PAM
caacauaguaagagcuauuu

SEQ ID NO: 5304 - RNA, 20 nt, Artificial Sequence
  HTT spacer sequence ATCN PAM
auaccuaguuuauugagagu

SEQ ID NO: 5305 - RNA, 20 nt, Artificial Sequence
  HTT spacer sequence ATCN PAM
auggaacguaucucaacaua

SEQ ID NO: 5306 - RNA, 20 nt, Artificial Sequence
  HTT spacer sequence ATCN PAM
guugagauaaucauaugguu

SEQ ID NO: 5307 - RNA, 20 nt, Artificial Sequence
  HTT spacer sequence ATCN PAM
caacagaugcagaaaaggcc

SEQ ID NO: 5308 - RNA, 20 nt, Artificial Sequence
  HTT spacer sequence ATCN PAM
uaugguuuuuguuguugguu

SEQ ID NO: 5309 - RNA, 20 nt, Artificial Sequence
  HTT spacer sequence ATCN PAM
cauaaacagaaccaacaaca

SEQ ID NO: 5310 - RNA, 20 nt, Artificial Sequence
  HTT spacer sequence ATCN PAM
aucacauaaacagaaccaac

SEQ ID NO: 5311 - RNA, 20 nt, Artificial Sequence
  HTT spacer sequence ATCN PAM
auaaacguaauccaucacau

SEQ ID NO: 5312 - RNA, 20 nt, Artificial Sequence
  HTT spacer sequence ATCN PAM
cuggaaugcaaggcugguuc

SEQ ID NO: 5313 - RNA, 20 nt, Artificial Sequence
  HTT spacer sequence ATCN PAM
agucagcuucaucccuggaa

SEQ ID NO: 5314 - RNA, 20 nt, Artificial Sequence
  HTT spacer sequence ATCN PAM
accacaaucaagucagcuuc

SEQ ID NO: 5315 - RNA, 20 nt, Artificial Sequence
  HTT spacer sequence ATCN PAM
aaaagcuuauccaccacaau

SEQ ID NO: 5316 - RNA, 20 nt, Artificial Sequence
  HTT spacer sequence ATCN PAM
agcagcacaucaaaaagcuu

SEQ ID NO: 5317 - RNA, 20 nt, Artificial Sequence
  HTT spacer sequence ATCN PAM
ucaauaaaauacuggcaaac

SEQ ID NO: 5318 - RNA, 20 nt, Artificial Sequence
  HTT spacer sequence ATCN PAM
auguucaucagggauauugg

SEQ ID NO: 5319 - RNA, 20 nt, Artificial Sequence
  HTT spacer sequence ATCN PAM
augugaaaauccucaauaaa

SEQ ID NO: 5320 - RNA, 20 nt, Artificial Sequence
  HTT spacer sequence ATCN PAM
gggauauuggccuaaaauuc

SEQ ID NO: 5321 - RNA, 20 nt, Artificial Sequence
  HTT spacer sequence ATCN PAM
cugaugaacaucgaugugaa

SEQ ID NO: 5322 - RNA, 20 nt, Artificial Sequence
  HTT spacer sequence ATCN PAM
ggaugaugcuggccucauaa

SEQ ID NO: 5323 - RNA, 20 nt, Artificial Sequence
  HTT spacer sequence ATCN PAM
ugauaccaaagccuggcaga

SEQ ID NO: 5324 - RNA, 20 nt, Artificial Sequence
  HTT spacer sequence ATCN PAM
uccugauaccaaagccuggc

SEQ ID NO: 5325 - RNA, 20 nt, Artificial Sequence
  HTT spacer sequence ATCN PAM
ucccuaacucauuuuaugag

SEQ ID NO: 5326 - RNA, 20 nt, Artificial Sequence
  HTT spacer sequence ATCN PAM
auagaaaaagagagaauccu

SEQ ID NO: 5327 - RNA, 20 nt, Artificial Sequence
  HTT spacer sequence ATCN PAM
ccucuuuguaccucugguag

SEQ ID NO: 5328 - RNA, 20 nt, Artificial Sequence
  HTT spacer sequence ATCN PAM
auccuggacuuuuuuugguu

SEQ ID NO: 5329 - RNA, 20 nt, Artificial Sequence
  HTT spacer sequence ATCN PAM
uggacuuuuuuugguuagua

SEQ ID NO: 5330 - RNA, 20 nt, Artificial Sequence
  HTT spacer sequence ATCN PAM
gucuauucagagauucagcu

SEQ ID NO: 5331 - RNA, 20 nt, Artificial Sequence
  HTT spacer sequence ATCN PAM
cugaauagacugauaacagg

SEQ ID NO: 5332 - RNA, 20 nt, Artificial Sequence
  HTT spacer sequence ATCN PAM
auuucuucuagauuuucuag

SEQ ID NO: 5333 - RNA, 20 nt, Artificial Sequence
  HTT spacer sequence ATCN PAM
agaagaaauggauaaauucc

SEQ ID NO: 5334 - RNA, 20 nt, Artificial Sequence
  HTT spacer sequence ATCN PAM
cuacccaaauaaacuagaaa

SEQ ID NO: 5335 - RNA, 20 nt, Artificial Sequence
  HTT spacer sequence ATCN PAM
gagaauacuauaaacaucuc

SEQ ID NO: 5336 - RNA, 20 nt, Artificial Sequence
  HTT spacer sequence ATCN PAM
cacagaaauacaaacuacca

SEQ ID NO: 5337 - RNA, 20 nt, Artificial Sequence
  HTT spacer sequence ATCN PAM
guggugauauccccuuuauc

SEQ ID NO: 5338 - RNA, 20 nt, Artificial Sequence
  HTT spacer sequence ATCN PAM
ccaccgaucccacagaaaua

SEQ ID NO: 5339 - RNA, 20 nt, Artificial Sequence
  HTT spacer sequence ATCN PAM
ccuuuaucguuuuuauugag

SEQ ID NO: 5340 - RNA, 20 nt, Artificial Sequence
  HTT spacer sequence ATCN PAM
uuuuuauugagucuauuuga

SEQ ID NO: 5341 - RNA, 20 nt, Artificial Sequence
  HTT spacer sequence ATCN PAM
aauagacucaauaaaaacga

SEQ ID NO: 5342 - RNA, 20 nt, Artificial Sequence
  HTT spacer sequence ATCN PAM
auaaaauagguagaccgcua

SEQ ID NO: 5343 - RNA, 20 nt, Artificial Sequence
  HTT spacer sequence ATCN PAM
uuucaaaaaaccagcaccug

SEQ ID NO: 5344 - RNA, 20 nt, Artificial Sequence
  HTT spacer sequence ATCN PAM
aggugcugguuuuuugaaaa

SEQ ID NO: 5345 - RNA, 20 nt, Artificial Sequence
  HTT spacer sequence ATCN PAM
augaauccaggugcugguuu

SEQ ID NO: 5346 - RNA, 20 nt, Artificial Sequence
  HTT spacer sequence ATCN PAM
ccuucaguucugcucugauc

SEQ ID NO: 5347 - RNA, 20 nt, Artificial Sequence
  HTT spacer sequence ATCN PAM
gagcagaacugaaggagaua

SEQ ID NO: 5348 - RNA, 20 nt, Artificial Sequence
  HTT spacer sequence ATCN PAM
uaguuauuuuuugucuucug

SEQ ID NO: 5349 - RNA, 20 nt, Artificial Sequence
  HTT spacer sequence ATCN PAM
caauuaaaagaacuagaaaa

SEQ ID NO: 5350 - RNA, 20 nt, Artificial Sequence
  HTT spacer sequence ATCN PAM
aaaauuaacacccuaacauc

SEQ ID NO: 5351 - RNA, 20 nt, Artificial Sequence
  HTT spacer sequence ATCN PAM
uuucugcuuucucuuguggg

SEQ ID NO: 5352 - RNA, 20 nt, Artificial Sequence
  HTT spacer sequence ATCN PAM
cugggacacauuuaaagcag

SEQ ID NO: 5353 - RNA, 20 nt, Artificial Sequence
  HTT spacer sequence ATCN PAM
cacucaaaaccacacaacua

SEQ ID NO: 5354 - RNA, 20 nt, Artificial Sequence
  HTT spacer sequence ATCN PAM
ugaguucuaauuugauugca

SEQ ID NO: 5355 - RNA, 20 nt, Artificial Sequence
  HTT spacer sequence ATCN PAM
aauuagaacucaggauugag

SEQ ID NO: 5356 - RNA, 20 nt, Artificial Sequence
  HTT spacer sequence ATCN PAM
caacaaacugucugucagac

SEQ ID NO: 5357 - RNA, 20 nt, Artificial Sequence
  HTT spacer sequence ATCN PAM
acagaacauacauucuucuc

SEQ ID NO: 5358 - RNA, 20 nt, Artificial Sequence
  HTT spacer sequence ATCN PAM
acagaacucugcaccccaaa

SEQ ID NO: 5359 - RNA, 20 nt, Artificial Sequence
  HTT spacer sequence ATCN PAM
aggacuugaacucagcacug

SEQ ID NO: 5360 - RNA, 20 nt, Artificial Sequence
  HTT spacer sequence ATCN PAM
uuguuaauuuucuggcucau

SEQ ID NO: 5361 - RNA, 20 nt, Artificial Sequence
  HTT spacer sequence ATCN PAM
augagccagaaaauuaacaa

SEQ ID NO: 5362 - RNA, 20 nt, Artificial Sequence
  HTT spacer sequence ATCN PAM
gccuaauauugacagugggg

SEQ ID NO: 5363 - RNA, 20 nt, Artificial Sequence
  HTT spacer sequence ATCN PAM
gggugcuccuguauuggggg

SEQ ID NO: 5364 - RNA, 20 nt, Artificial Sequence
  HTT spacer sequence ATCN PAM
uaaauauacacgcccccaau

SEQ ID NO: 5365 - RNA, 20 nt, Artificial Sequence
  HTT spacer sequence ATCN PAM
auucaacaagaagagcuaac

SEQ ID NO: 5366 - RNA, 20 nt, Artificial Sequence
  HTT spacer sequence ATCN PAM
cuuuaccauuauguaauggc

SEQ ID NO: 5367 - RNA, 20 nt, Artificial Sequence
  HTT spacer sequence ATCN PAM
acaaaguucaaaggagacaa

SEQ ID NO: 5368 - RNA, 20 nt, Artificial Sequence
  HTT spacer sequence ATCN PAM
gagacuaggauugcaauccc

SEQ ID NO: 5369 - RNA, 20 nt, Artificial Sequence
  HTT spacer sequence ATCN PAM
uagucucugauaaaacagac

SEQ ID NO: 5370 - RNA, 20 nt, Artificial Sequence
  HTT spacer sequence ATCN PAM
cugcuuuuuuuuugcuuucc

SEQ ID NO: 5371 - RNA, 20 nt, Artificial Sequence
  HTT spacer sequence ATCN PAM
aacaagcaaauggaaagcaa

SEQ ID NO: 5372 - RNA, 20 nt, Artificial Sequence
  HTT spacer sequence ATCN PAM
uccuccaucccuuuauuuug

SEQ ID NO: 5373 - RNA, 20 nt, Artificial Sequence
  HTT spacer sequence ATCN PAM
cuuuauuuugagccaaugag

SEQ ID NO: 5374 - RNA, 20 nt, Artificial Sequence
  HTT spacer sequence ATCN PAM
cacaugcaaagacacucauu

SEQ ID NO: 5375 - RNA, 20 nt, Artificial Sequence
  HTT spacer sequence ATCN PAM
aauuugccagucugugucuu

SEQ ID NO: 5376 - RNA, 20 nt, Artificial Sequence
  HTT spacer sequence ATCN PAM
aauucacacauagcaauauu

SEQ ID NO: 5377 - RNA, 20 nt, Artificial Sequence
  HTT spacer sequence ATCN PAM
ugucauuaugauccuaguug

SEQ ID NO: 5378 - RNA, 20 nt, Artificial Sequence
  HTT spacer sequence ATCN PAM
uaaugacaggaucaaauuca

SEQ ID NO: 5379 - RNA, 20 nt, Artificial Sequence
  HTT spacer sequence ATCN PAM
uaguugguuauuuugcccgu

SEQ ID NO: 5380 - RNA, 20 nt, Artificial Sequence
  HTT spacer sequence ATCN PAM
guuaacgggcaaaauaacca

SEQ ID NO: 5381 - RNA, 20 nt, Artificial Sequence
  HTT spacer sequence ATCN PAM
cugcauuugcuugucuguaa

SEQ ID NO: 5382 - RNA, 20 nt, Artificial Sequence
  HTT spacer sequence ATCN PAM
uuuacagacaagcaaaugca

SEQ ID NO: 5383 - RNA, 20 nt, Artificial Sequence
  HTT spacer sequence ATCN PAM
agccaaacuaagcuucauaa

SEQ ID NO: 5384 - RNA, 20 nt, Artificial Sequence
  HTT spacer sequence ATCN PAM
uacaagccagaaaagagugg

SEQ ID NO: 5385 - RNA, 20 nt, Artificial Sequence
  HTT spacer sequence ATCN PAM
cucugcagaaauccuacaag

SEQ ID NO: 5386 - RNA, 20 nt, Artificial Sequence
  HTT spacer sequence ATCN PAM
gcuguuagucugaugggcuu

SEQ ID NO: 5387 - RNA, 20 nt, Artificial Sequence
  HTT spacer sequence ATCN PAM
gacuaacagcagaucucucu

SEQ ID NO: 5388 - RNA, 20 nt, Artificial Sequence
  HTT spacer sequence ATCN PAM
ugguggaucugaugauuaug

SEQ ID NO: 5389 - RNA, 20 nt, Artificial Sequence
  HTT spacer sequence ATCN PAM
accaagauugaaaugaagga

SEQ ID NO: 5390 - RNA, 20 nt, Artificial Sequence
  HTT spacer sequence ATCN PAM
gaugauuaugugucuugggg

SEQ ID NO: 5391 - RNA, 20 nt, Artificial Sequence
  HTT spacer sequence ATCN PAM
gauccaccaagauugaaaug

SEQ ID NO: 5392 - RNA, 20 nt, Artificial Sequence
  HTT spacer sequence ATCN PAM
ucagauccaccaagauugaa

SEQ ID NO: 5393 - RNA, 20 nt, Artificial Sequence
  HTT spacer sequence ATCN PAM
uugugguguucucuguauuu

SEQ ID NO: 5394 - RNA, 20 nt, Artificial Sequence
  HTT spacer sequence ATCN PAM
aggagaacuuccccaaccua

SEQ ID NO: 5395 - RNA, 20 nt, Artificial Sequence
  HTT spacer sequence ATCN PAM
ugaagaguguuuucuaacuu

SEQ ID NO: 5396 - RNA, 20 nt, Artificial Sequence
  HTT spacer sequence ATCN PAM
cuuucagguacaccaaucaa

SEQ ID NO: 5397 - RNA, 20 nt, Artificial Sequence
  HTT spacer sequence ATCN PAM
aacguagauuuggucuuuuc

SEQ ID NO: 5398 - RNA, 20 nt, Artificial Sequence
  HTT spacer sequence ATCN PAM
acguuugauugguguaccug

SEQ ID NO: 5399 - RNA, 20 nt, Artificial Sequence
  HTT spacer sequence ATCN PAM
ugucuucucgcuuuauuuca

SEQ ID NO: 5400 - RNA, 20 nt, Artificial Sequence
  HTT spacer sequence ATCN PAM
aauuaaugaaauaaagcgag

SEQ ID NO: 5401 - RNA, 20 nt, Artificial Sequence
  HTT spacer sequence ATCN PAM
ucaaucacugauauccuuuc

SEQ ID NO: 5402 - RNA, 20 nt, Artificial Sequence
  HTT spacer sequence ATCN PAM
cugauauccuuucuucugcu

SEQ ID NO: 5403 - RNA, 20 nt, Artificial Sequence
  HTT spacer sequence ATCN PAM
gugauugaagaucaaauuaa

SEQ ID NO: 5404 - RNA, 20 nt, Artificial Sequence
  HTT spacer sequence ATCN PAM
uuucuucugcuugauugaau

SEQ ID NO: 5405 - RNA, 20 nt, Artificial Sequence
  HTT spacer sequence ATCN PAM
agcagaagaaaggauaucag

SEQ ID NO: 5406 - RNA, 20 nt, Artificial Sequence
  HTT spacer sequence ATCN PAM
gcugucgaagcuuguguaua

SEQ ID NO: 5407 - RNA, 20 nt, Artificial Sequence
  HTT spacer sequence ATCN PAM
ggucauuuaagcucuucucu

SEQ ID NO: 5408 - RNA, 20 nt, Artificial Sequence
  HTT spacer sequence ATCN PAM
caaggaagcuaaaaaccuug

SEQ ID NO: 5409 - RNA, 20 nt, Artificial Sequence
  HTT spacer sequence ATCN PAM
aacucauucuccauccaguu

SEQ ID NO: 5410 - RNA, 20 nt, Artificial Sequence
  HTT spacer sequence ATCN PAM
aguuuuguucccuugcuggu

SEQ ID NO: 5411 - RNA, 20 nt, Artificial Sequence
  HTT spacer sequence ATCN PAM
caacuccucaccagcaaggg

SEQ ID NO: 5412 - RNA, 20 nt, Artificial Sequence
  HTT spacer sequence ATCN PAM
uuuggaggagaagagguguu

SEQ ID NO: 5413 - RNA, 20 nt, Artificial Sequence
  HTT spacer sequence ATCN PAM
uugugguuuuaucuaccuuu

SEQ ID NO: 5414 - RNA, 20 nt, Artificial Sequence
  HTT spacer sequence ATCN PAM
accuuuggucuuugauguug

SEQ ID NO: 5415 - RNA, 20 nt, Artificial Sequence
  HTT spacer sequence ATCN PAM
aagaccaaagguagauaaaa

SEQ ID NO: 5416 - RNA, 20 nt, Artificial Sequence
  HTT spacer sequence ATCN PAM
guaggucaccaacaucaaag

SEQ ID NO: 5417 - RNA, 20 nt, Artificial Sequence
  HTT spacer sequence ATCN PAM
acaaaaaggacacccacacc

SEQ ID NO: 5418 - RNA, 20 nt, Artificial Sequence
  HTT spacer sequence ATCN PAM
acaucaacaaaaaggacacc

SEQ ID NO: 5419 - RNA, 20 nt, Artificial Sequence
  HTT spacer sequence ATCN PAM
ccagcagaggcugcagaaca

SEQ ID NO: 5420 - RNA, 20 nt, Artificial Sequence
  HTT spacer sequence ATCN PAM
ggcagcaauauuugcuguuc

SEQ ID NO: 5421 - RNA, 20 nt, Artificial Sequence
  HTT spacer sequence ATCN PAM
uuccucuggaaacaucgucc

SEQ ID NO: 5422 - RNA, 20 nt, Artificial Sequence
  HTT spacer sequence ATCN PAM
ucccagagcacgaagguguc

SEQ ID NO: 5423 - RNA, 20 nt, Artificial Sequence
  HTT spacer sequence ATCN PAM
gagcuugaaugccguaccgg

SEQ ID NO: 5424 - RNA, 20 nt, Artificial Sequence
  HTT spacer sequence ATCN PAM
ggagaagcugucugcugccu

SEQ ID NO: 5425 - RNA, 20 nt, Artificial Sequence
  HTT spacer sequence ATCN PAM
gaacaaaaggcagcagacag

SEQ ID NO: 5426 - RNA, 20 nt, Artificial Sequence
  HTT spacer sequence ATCN PAM
agagaggcaguaggccuugc

SEQ ID NO: 5427 - RNA, 20 nt, Artificial Sequence
  HTT spacer sequence ATCN PAM
caggucgauuucagagugcu

SEQ ID NO: 5428 - RNA, 20 nt, Artificial Sequence
  HTT spacer sequence ATCN PAM
accugggaugcaggagcuug

SEQ ID NO: 5429 - RNA, 20 nt, Artificial Sequence
  HTT spacer sequence ATCN PAM
ccuggucugcugguugugaa

SEQ ID NO: 5430 - RNA, 20 nt, Artificial Sequence
  HTT spacer sequence ATCN PAM
cacugggacuugcuggacag

SEQ ID NO: 5431 - RNA, 20 nt, Artificial Sequence
  HTT spacer sequence ATCN PAM
ccugucuucugugucgaucu

SEQ ID NO: 5432 - RNA, 20 nt, Artificial Sequence
  HTT spacer sequence ATCN PAM
acacagaagacaggugauuu

SEQ ID NO: 5433 - RNA, 20 nt, Artificial Sequence
  HTT spacer sequence ATCN PAM
cacugggagcuguagacugg

SEQ ID NO: 5434 - RNA, 20 nt, Artificial Sequence
  HTT spacer sequence ATCN PAM
cuuguuuuuugagguggagu

SEQ ID NO: 5435 - RNA, 20 nt, Artificial Sequence
  HTT spacer sequence ATCN PAM
gcacaaucucggcccacugc

SEQ ID NO: 5436 - RNA, 20 nt, Artificial Sequence
  HTT spacer sequence ATCN PAM
cggcccacugcaaccuuugc

SEQ ID NO: 5437 - RNA, 20 nt, Artificial Sequence
  HTT spacer sequence ATCN PAM
cuugaaaccaggaggcaaag

SEQ ID NO: 5438 - RNA, 20 nt, Artificial Sequence
  HTT spacer sequence ATCN PAM
cagcuacuccggaggcugag

SEQ ID NO: 5439 - RNA, 20 nt, Artificial Sequence
  HTT spacer sequence ATCN PAM
ccacuaaaaauacaaaaaau

SEQ ID NO: 5440 - RNA, 20 nt, Artificial Sequence
  HTT spacer sequence ATCN PAM
caaggucaggaguucgagac

SEQ ID NO: 5441 - RNA, 20 nt, Artificial Sequence
  HTT spacer sequence ATCN PAM
acccaccucagccuccuaga

SEQ ID NO: 5442 - RNA, 20 nt, Artificial Sequence
  HTT spacer sequence ATCN PAM
cagcacucuaggaggcugag

SEQ ID NO: 5443 - RNA, 20 nt, Artificial Sequence
  HTT spacer sequence ATCN PAM
caggugucagccaccacgcc

SEQ ID NO: 5444 - RNA, 20 nt, Artificial Sequence
  HTT spacer sequence ATCN PAM
gaaaauauggcugggcgugg

SEQ ID NO: 5445 - RNA, 20 nt, Artificial Sequence
  HTT spacer sequence ATCN PAM
cccucucuuugcccuaaacc

SEQ ID NO: 5446 - RNA, 20 nt, Artificial Sequence
  HTT spacer sequence ATCN PAM
cacguucaaauuuaaaacau

SEQ ID NO: 5447 - RNA, 20 nt, Artificial Sequence
  HTT spacer sequence ATCN PAM
ucuaacugggauucuuuaaa

SEQ ID NO: 5448 - RNA, 20 nt, Artificial Sequence
  HTT spacer sequence ATCN PAM
aacugggauucuuuaaauag

SEQ ID NO: 5449 - RNA, 20 nt, Artificial Sequence
  HTT spacer sequence ATCN PAM
caguuagaugauuuuuauuu

SEQ ID NO: 5450 - RNA, 20 nt, Artificial Sequence
  HTT spacer sequence ATCN PAM
uacuauuuaaagaaucccag

SEQ ID NO: 5451 - RNA, 20 nt, Artificial Sequence
  HTT spacer sequence ATCN PAM
aaugcugccuuauccaaaua

SEQ ID NO: 5452 - RNA, 20 nt, Artificial Sequence
  HTT spacer sequence ATCN PAM
aaauaauaaaaguaaauuau

SEQ ID NO: 5453 - RNA, 20 nt, Artificial Sequence
  HTT spacer sequence ATCN PAM
ucauuaaauugugacuuauu

SEQ ID NO: 5454 - RNA, 20 nt, Artificial Sequence
  HTT spacer sequence ATCN PAM
aucuucauuaaauugugacu

SEQ ID NO: 5455 - RNA, 20 nt, Artificial Sequence
  HTT spacer sequence ATCN PAM
acuaacaucaaucuucauua

SEQ ID NO: 5456 - RNA, 20 nt, Artificial Sequence
  HTT spacer sequence ATCN PAM
uuauauucuugaaaucagcc

SEQ ID NO: 5457 - RNA, 20 nt, Artificial Sequence
  HTT spacer sequence ATCN PAM
gccauaugguugugugugua

SEQ ID NO: 5458 - RNA, 20 nt, Artificial Sequence
  HTT spacer sequence ATCN PAM
uuauguaccuuuaaaaauau

SEQ ID NO: 5459 - RNA, 20 nt, Artificial Sequence
  HTT spacer sequence ATCN PAM
cugaaaauuuuuacauuugg

SEQ ID NO: 5460 - RNA, 20 nt, Artificial Sequence
  HTT spacer sequence ATCN PAM
aguuauucuuaugccaaaug

SEQ ID NO: 5461 - RNA, 20 nt, Artificial Sequence
  HTT spacer sequence ATCN PAM
uauucucuggccugugucuu

SEQ ID NO: 5462 - RNA, 20 nt, Artificial Sequence
  HTT spacer sequence ATCN PAM
accuuuaacuguaaagacac

SEQ ID NO: 5463 - RNA, 20 nt, Artificial Sequence
  HTT spacer sequence ATCN PAM
uuuuugcuguuucaagacag

SEQ ID NO: 5464 - RNA, 20 nt, Artificial Sequence
  HTT spacer sequence ATCN PAM
uuuuguuuguacuuuggaag

SEQ ID NO: 5465 - RNA, 20 nt, Artificial Sequence
  HTT spacer sequence ATCN PAM
guggucuuuuagagggggau

SEQ ID NO: 5466 - RNA, 20 nt, Artificial Sequence
  HTT spacer sequence ATCN PAM
cccucuaaaagaccacggau

SEQ ID NO: 5467 - RNA, 20 nt, Artificial Sequence
  HTT spacer sequence ATCN PAM
cccucacugacucacagcau

SEQ ID NO: 5468 - RNA, 20 nt, Artificial Sequence
  HTT spacer sequence ATCN PAM
gaaaccuugccaugcuguga

SEQ ID NO: 5469 - RNA, 20 nt, Artificial Sequence
  HTT spacer sequence ATCN PAM
cuuucugccacacagcaguu

SEQ ID NO: 5470 - RNA, 20 nt, Artificial Sequence
  HTT spacer sequence ATCN PAM
uuccagcugccucagaacug

SEQ ID NO: 5471 - RNA, 20 nt, Artificial Sequence
  HTT spacer sequence ATCN PAM
agaugcuuagauugucaggc

SEQ ID NO: 5472 - RNA, 20 nt, Artificial Sequence
  HTT spacer sequence ATCN PAM
ggauaucuuuccagcugccu

SEQ ID NO: 5473 - RNA, 20 nt, Artificial Sequence
  HTT spacer sequence ATCN PAM
aagcaucuggauaucuuucc

SEQ ID NO: 5474 - RNA, 20 nt, Artificial Sequence
  HTT spacer sequence ATCN PAM
caagccuggccugacaaucu

SEQ ID NO: 5475 - RNA, 20 nt, Artificial Sequence
  HTT spacer sequence ATCN PAM
gugaccuugcuuaggugaag

SEQ ID NO: 5476 - RNA, 20 nt, Artificial Sequence
  HTT spacer sequence ATCN PAM
gagccccugcaccaacaugc

SEQ ID NO: 5477 - RNA, 20 nt, Artificial Sequence
  HTT spacer sequence ATCN PAM
agcucaccucuccagcuaca

SEQ ID NO: 5478 - RNA, 20 nt, Artificial Sequence
  HTT spacer sequence ATCN PAM
uggaacuagguaaacucaca

SEQ ID NO: 5479 - RNA, 20 nt, Artificial Sequence
  HTT spacer sequence ATCN PAM
uuuucuuuuucuaaauagca

SEQ ID NO: 5480 - RNA, 20 nt, Artificial Sequence
  HTT spacer sequence ATCN PAM
uuauuuauuccauacucauu

SEQ ID NO: 5481 - RNA, 20 nt, Artificial Sequence
  HTT spacer sequence ATCN PAM
aaugcauaauacauuucaau

SEQ ID NO: 5482 - RNA, 20 nt, Artificial Sequence
  HTT spacer sequence ATCN PAM
ucuauaauauaaugcaaaag

SEQ ID NO: 5483 - RNA, 20 nt, Artificial Sequence
  HTT spacer sequence ATCN PAM
gcaaaccgggaaacugucuc

SEQ ID NO: 5484 - RNA, 20 nt, Artificial Sequence
  HTT spacer sequence ATCN PAM
ucccaccucagccccgagua

SEQ ID NO: 5485 - RNA, 20 nt, Artificial Sequence
  HTT spacer sequence ATCN PAM
uggcucuuugcagccucaac

SEQ ID NO: 5486 - RNA, 20 nt, Artificial Sequence
  HTT spacer sequence ATCN PAM
ugccauugcacuccagcaug

SEQ ID NO: 5487 - RNA, 20 nt, Artificial Sequence
  HTT spacer sequence ATCN PAM
cccaaaacagacaguauaaa

SEQ ID NO: 5488 - RNA, 20 nt, Artificial Sequence
  HTT spacer sequence ATCN PAM
aaucacccaaaacagacagu

SEQ ID NO: 5489 - RNA, 20 nt, Artificial Sequence
  HTT spacer sequence ATCN PAM
uuaucaaaucacccaaaaca

SEQ ID NO: 5490 - RNA, 20 nt, Artificial Sequence
  HTT spacer sequence ATCN PAM
gggcauaucauuaucaaauc

SEQ ID NO: 5491 - RNA, 20 nt, Artificial Sequence
  HTT spacer sequence ATCN PAM
uguguuucuugugccugggu

SEQ ID NO: 5492 - RNA, 20 nt, Artificial Sequence
  HTT spacer sequence ATCN PAM
uggcucacugcaagcucugc

SEQ ID NO: 5493 - RNA, 20 nt, Artificial Sequence
  HTT spacer sequence ATCN PAM
uggcuaacacagugaaaccu

SEQ ID NO: 5494 - RNA, 20 nt, Artificial Sequence
  HTT spacer sequence ATCN PAM
ccugaccucgugaucugccc

SEQ ID NO: 5495 - RNA, 20 nt, Artificial Sequence
  HTT spacer sequence ATCN PAM
cgaggucaggagauugagac

SEQ ID NO: 5496 - RNA, 20 nt, Artificial Sequence
  HTT spacer sequence ATCN PAM
gcccgccugggccucccaaa

SEQ ID NO: 5497 - RNA, 20 nt, Artificial Sequence
  HTT spacer sequence ATCN PAM
cagcacuuugggaggcccag

SEQ ID NO: 5498 - RNA, 20 nt, Artificial Sequence
  HTT spacer sequence ATCN PAM
uugaagaaauaauggccuag

SEQ ID NO: 5499 - RNA, 20 nt, Artificial Sequence
  HTT spacer sequence ATCN PAM
cagccccuuuaagagaggga

SEQ ID NO: 5500 - RNA, 20 nt, Artificial Sequence
  HTT spacer sequence ATCN PAM
uucaggaaaucacagccccu

SEQ ID NO: 5501 - RNA, 20 nt, Artificial Sequence
  HTT spacer sequence ATCN PAM
guaagcuaugggacaacacu

SEQ ID NO: 5502 - RNA, 20 nt, Artificial Sequence
  HTT spacer sequence ATCN PAM
aacacugaaaagagcaucag

SEQ ID NO: 5503 - RNA, 20 nt, Artificial Sequence
  HTT spacer sequence ATCN PAM
gagaacuugaaaacacaaua

SEQ ID NO: 5504 - RNA, 20 nt, Artificial Sequence
  HTT spacer sequence ATCN PAM
uuucuucuacagugucuacu

SEQ ID NO: 5505 - RNA, 20 nt, Artificial Sequence
  HTT spacer sequence ATCN PAM
guuaaucuguuguuaauccu

SEQ ID NO: 5506 - RNA, 20 nt, Artificial Sequence
  HTT spacer sequence ATCN PAM
guuguuaauccuguccagcg

SEQ ID NO: 5507 - RNA, 20 nt, Artificial Sequence
  HTT spacer sequence ATCN PAM
uguccagcguauuuuuuuuu

SEQ ID NO: 5508 - RNA, 20 nt, Artificial Sequence
  HTT spacer sequence ATCN PAM
caccacuaaacuccagccug

SEQ ID NO: 5509 - RNA, 20 nt, Artificial Sequence
  HTT spacer sequence ATCN PAM
gcucacugcaaccuccaccu

SEQ ID NO: 5510 - RNA, 20 nt, Artificial Sequence
  HTT spacer sequence ATCN PAM
cuaauaaaaauacacaaauu

SEQ ID NO: 5511 - RNA, 20 nt, Artificial Sequence
  HTT spacer sequence ATCN PAM
ccugaggucaggaguucaag

SEQ ID NO: 5512 - RNA, 20 nt, Artificial Sequence
  HTT spacer sequence ATCN PAM
gccucggucucccaaagugu

SEQ ID NO: 5513 - RNA, 20 nt, Artificial Sequence
  HTT spacer sequence ATCN PAM
caacacuuugggagaccgag

SEQ ID NO: 5514 - RNA, 20 nt, Artificial Sequence
  HTT spacer sequence ATCN PAM
cuaauuuuguuuuuaucucu

SEQ ID NO: 5515 - RNA, 20 nt, Artificial Sequence
  HTT spacer sequence ATCN PAM
cuagaaguuugauuuagguc

SEQ ID NO: 5516 - RNA, 20 nt, Artificial Sequence
  HTT spacer sequence ATCN PAM
aacuucuagagauaaaaaca

SEQ ID NO: 5517 - RNA, 20 nt, Artificial Sequence
  HTT spacer sequence ATCN PAM
uucucugcuaguucuaagau

SEQ ID NO: 5518 - RNA, 20 nt, Artificial Sequence
  HTT spacer sequence ATCN PAM
uagaacuagcagagaaggau

SEQ ID NO: 5519 - RNA, 20 nt, Artificial Sequence
  HTT spacer sequence ATCN PAM
ucuaauaacuucccaguucu

SEQ ID NO: 5520 - RNA, 20 nt, Artificial Sequence
  HTT spacer sequence ATCN PAM
accaaugagaaacaccaaga

SEQ ID NO: 5521 - RNA, 20 nt, Artificial Sequence
  HTT spacer sequence ATCN PAM
aucaaccaaugagaaacacc

SEQ ID NO: 5522 - RNA, 20 nt, Artificial Sequence
  HTT spacer sequence ATCN PAM
aauaaaaaauuggcagccau

SEQ ID NO: 5523 - RNA, 20 nt, Artificial Sequence
  HTT spacer sequence ATCN PAM
aacaaaguaaaauucacaag

SEQ ID NO: 5524 - RNA, 20 nt, Artificial Sequence
  HTT spacer sequence ATCN PAM
augggaacacaaaaauauau

SEQ ID NO: 5525 - RNA, 20 nt, Artificial Sequence
  HTT spacer sequence ATCN PAM
ucuugagcuuuguucugagg

SEQ ID NO: 5526 - RNA, 20 nt, Artificial Sequence
  HTT spacer sequence ATCN PAM
auauguaacucaacuaaccu

SEQ ID NO: 5527 - RNA, 20 nt, Artificial Sequence
  HTT spacer sequence ATCN PAM
gacaaauuauaaagcaagac

SEQ ID NO: 5528 - RNA, 20 nt, Artificial Sequence
  HTT spacer sequence ATCN PAM
ugaguacucuaccuaaugaa

SEQ ID NO: 5529 - RNA, 20 nt, Artificial Sequence
  HTT spacer sequence ATCN PAM
uuuccaaugcuucuuucccu

SEQ ID NO: 5530 - RNA, 20 nt, Artificial Sequence
  HTT spacer sequence ATCN PAM
cugcugaguacucgagaggg

SEQ ID NO: 5531 - RNA, 20 nt, Artificial Sequence
  HTT spacer sequence ATCN PAM
ggggaaggucccucucgagu

SEQ ID NO: 5532 - RNA, 20 nt, Artificial Sequence
  HTT spacer sequence ATCN PAM
ccagagcucucucugucuug

SEQ ID NO: 5533 - RNA, 20 nt, Artificial Sequence
  HTT spacer sequence ATCN PAM
aaggagaccaagacagccac

SEQ ID NO: 5534 - RNA, 20 nt, Artificial Sequence
  HTT spacer sequence ATCN PAM
cugggagacgagagacuaag

SEQ ID NO: 5535 - RNA, 20 nt, Artificial Sequence
  HTT spacer sequence ATCN PAM
cuguccuucauugcucaugu

SEQ ID NO: 5536 - RNA, 20 nt, Artificial Sequence
  HTT spacer sequence ATCN PAM
aauguaauagagugagacuu

SEQ ID NO: 5537 - RNA, 20 nt, Artificial Sequence
  HTT spacer sequence ATCN PAM
agcauuccauacacauuugu

SEQ ID NO: 5538 - RNA, 20 nt, Artificial Sequence
  HTT spacer sequence ATCN PAM
cuacuugucuaacaaaggac

SEQ ID NO: 5539 - RNA, 20 nt, Artificial Sequence
  HTT spacer sequence ATCN PAM
gcugggagcuaguaaaaaca

SEQ ID NO: 5540 - RNA, 20 nt, Artificial Sequence
  HTT spacer sequence ATCN PAM
gaauuuuaaaaauguguggc

SEQ ID NO: 5541 - RNA, 20 nt, Artificial Sequence
  HTT spacer sequence ATCN PAM
auugcuuauuaguagaggau

SEQ ID NO: 5542 - RNA, 20 nt, Artificial Sequence
  HTT spacer sequence ATCN PAM
ucuacuaauaagcaauagau

SEQ ID NO: 5543 - RNA, 20 nt, Artificial Sequence
  HTT spacer sequence ATCN PAM
gcugcuaaaagccaacacca

SEQ ID NO: 5544 - RNA, 20 nt, Artificial Sequence
  HTT spacer sequence ATCN PAM
cgaacugguuuccaucagcu

SEQ ID NO: 5545 - RNA, 20 nt, Artificial Sequence
  HTT spacer sequence ATCN PAM
aggcauucagaaugguggcg

SEQ ID NO: 5546 - RNA, 20 nt, Artificial Sequence
  HTT spacer sequence ATCN PAM
ucuucuuucuugauucuuuu

SEQ ID NO: 5547 - RNA, 20 nt, Artificial Sequence
  HTT spacer sequence ATCN PAM
agaaagaagaagaugcuaac

SEQ ID NO: 5548 - RNA, 20 nt, Artificial Sequence
  HTT spacer sequence ATCN PAM
caaaaaaaaaaaaaaaagaa

SEQ ID NO: 5549 - RNA, 20 nt, Artificial Sequence
  HTT spacer sequence ATCN PAM
cggcucacuguaaccucugc

SEQ ID NO: 5550 - RNA, 20 nt, Artificial Sequence
  HTT spacer sequence ATCN PAM
cuugaaccagggaggcagag

SEQ ID NO: 5551 - RNA, 20 nt, Artificial Sequence
  HTT spacer sequence ATCN PAM
cagcuacuugagaggcugag

SEQ ID NO: 5552 - RNA, 20 nt, Artificial Sequence
  HTT spacer sequence ATCN PAM
cuaccaaaaauacaaaauua

SEQ ID NO: 5553 - RNA, 20 nt, Artificial Sequence
  HTT spacer sequence ATCN PAM
cuugaggucaggaguucaag

SEQ ID NO: 5554 - RNA, 20 nt, Artificial Sequence
  HTT spacer sequence ATCN PAM
aggcaggugcaucacuugag

SEQ ID NO: 5555 - RNA, 20 nt, Artificial Sequence
  HTT spacer sequence ATCN PAM
cccaaaaugcugggauuaca

SEQ ID NO: 5556 - RNA, 20 nt, Artificial Sequence
  HTT spacer sequence ATCN PAM
cagcauuuugggagaucgag

SEQ ID NO: 5557 - RNA, 20 nt, Artificial Sequence
  HTT spacer sequence ATCN PAM
agaaggggcugggaguggug

SEQ ID NO: 5558 - RNA, 20 nt, Artificial Sequence
  HTT spacer sequence ATCN PAM
cguuauagauguugauaaaa

SEQ ID NO: 5559 - RNA, 20 nt, Artificial Sequence
  HTT spacer sequence ATCN PAM
auaacgagauguacagcacc

SEQ ID NO: 5560 - RNA, 20 nt, Artificial Sequence
  HTT spacer sequence ATCN PAM
acaucuauaacgagauguac

SEQ ID NO: 5561 - RNA, 20 nt, Artificial Sequence
  HTT spacer sequence ATCN PAM
gcaaaaaugaccaaauaacu

SEQ ID NO: 5562 - RNA, 20 nt, Artificial Sequence
  HTT spacer sequence ATCN PAM
guccuagaauugucuuaaaa

SEQ ID NO: 5563 - RNA, 20 nt, Artificial Sequence
  HTT spacer sequence ATCN PAM
cacauugcuguaucauaguu

SEQ ID NO: 5564 - RNA, 20 nt, Artificial Sequence
  HTT spacer sequence ATCN PAM
uaguuguguucacugaacau

SEQ ID NO: 5565 - RNA, 20 nt, Artificial Sequence
  HTT spacer sequence ATCN PAM
guagagccccugaauauguu

SEQ ID NO: 5566 - RNA, 20 nt, Artificial Sequence
  HTT spacer sequence ATCN PAM
aguccuguucgcagggcagg

SEQ ID NO: 5567 - RNA, 20 nt, Artificial Sequence
  HTT spacer sequence ATCN PAM
aguaccuguugucuauuagg

SEQ ID NO: 5568 - RNA, 20 nt, Artificial Sequence
  HTT spacer sequence ATCN PAM
guucauucacucauuaauuc

SEQ ID NO: 5569 - RNA, 20 nt, Artificial Sequence
  HTT spacer sequence ATCN PAM
aaguuauauacauuacaacc

SEQ ID NO: 5570 - RNA, 20 nt, Artificial Sequence
  HTT spacer sequence ATCN PAM
gaggaaaguuuucaauuucu

SEQ ID NO: 5571 - RNA, 20 nt, Artificial Sequence
  HTT spacer sequence ATCN PAM
uguaccuucaauuucugucu

SEQ ID NO: 5572 - RNA, 20 nt, Artificial Sequence
  HTT spacer sequence ATCN PAM
uagacagaaauugaagguac

SEQ ID NO: 5573 - RNA, 20 nt, Artificial Sequence
  HTT spacer sequence ATCN PAM
cugagucgcuuaaugucuca

SEQ ID NO: 5574 - RNA, 20 nt, Artificial Sequence
  HTT spacer sequence ATCN PAM
cuucaacacacuguagaaag

SEQ ID NO: 5575 - RNA, 20 nt, Artificial Sequence
  HTT spacer sequence ATCN PAM
uaggauaccugaaauccugc

SEQ ID NO: 5576 - RNA, 20 nt, Artificial Sequence
  HTT spacer sequence ATCN PAM
uaggaucucuucaacacacu

SEQ ID NO: 5577 - RNA, 20 nt, Artificial Sequence
  HTT spacer sequence ATCN PAM
ugcuuuagucgagaaccaau

SEQ ID NO: 5578 - RNA, 20 nt, Artificial Sequence
  HTT spacer sequence ATCN PAM
uugguucucgacuaaagcag

SEQ ID NO: 5579 - RNA, 20 nt, Artificial Sequence
  HTT spacer sequence ATCN PAM
gcugggaggauugugggguc

SEQ ID NO: 5580 - RNA, 20 nt, Artificial Sequence
  HTT spacer sequence ATCN PAM
ucccagcugauuaugccaac

SEQ ID NO: 5581 - RNA, 20 nt, Artificial Sequence
  HTT spacer sequence ATCN PAM
uggacugagccaaaaagugc

SEQ ID NO: 5582 - RNA, 20 nt, Artificial Sequence
  HTT spacer sequence ATCN PAM
uucccuucacuccccaggag

SEQ ID NO: 5583 - RNA, 20 nt, Artificial Sequence
  HTT spacer sequence ATCN PAM
cauuuagaauugcaaggaaa

SEQ ID NO: 5584 - RNA, 20 nt, Artificial Sequence
  HTT spacer sequence ATCN PAM
caugagguauuaauagugau

SEQ ID NO: 5585 - RNA, 20 nt, Artificial Sequence
  HTT spacer sequence ATCN PAM
cuauuaauaccucaugagau

SEQ ID NO: 5586 - RNA, 20 nt, Artificial Sequence
  HTT spacer sequence ATCN PAM
aguuauuuacagauggauuu

SEQ ID NO: 5587 - RNA, 20 nt, Artificial Sequence
  HTT spacer sequence ATCN PAM
guaaauaacuggauauguua

SEQ ID NO: 5588 - RNA, 20 nt, Artificial Sequence
  HTT spacer sequence ATCN PAM
aucuguaaauaacuggauau

SEQ ID NO: 5589 - RNA, 20 nt, Artificial Sequence
  HTT spacer sequence ATCN PAM
aauccaucuguaaauaacug

SEQ ID NO: 5590 - RNA, 20 nt, Artificial Sequence
  HTT spacer sequence ATCN PAM
cccacacaaauaucaaaucc

SEQ ID NO: 5591 - RNA, 20 nt, Artificial Sequence
  HTT spacer sequence ATCN PAM
acaauguggcgugaacaaca

SEQ ID NO: 5592 - RNA, 20 nt, Artificial Sequence
  HTT spacer sequence ATCN PAM
aacugggaggccaaguuugu

SEQ ID NO: 5593 - RNA, 20 nt, Artificial Sequence
  HTT spacer sequence ATCN PAM
uccaaccccagcaagucaca

SEQ ID NO: 5594 - RNA, 20 nt, Artificial Sequence
  HTT spacer sequence ATCN PAM
ucuaauagucugcuguauuc

SEQ ID NO: 5595 - RNA, 20 nt, Artificial Sequence
  HTT spacer sequence ATCN PAM
ccuagaguucucugaauaca

SEQ ID NO: 5596 - RNA, 20 nt, Artificial Sequence
  HTT spacer sequence ATCN PAM
accauauauaucuccuagag

SEQ ID NO: 5597 - RNA, 20 nt, Artificial Sequence
  HTT spacer sequence ATCN PAM
uugcaucaaccauauauauc

SEQ ID NO: 5598 - RNA, 20 nt, Artificial Sequence
  HTT spacer sequence ATCN PAM
ucuuugcaucaaccauauau

SEQ ID NO: 5599 - RNA, 20 nt, Artificial Sequence
  HTT spacer sequence ATCN PAM
cacucacuggccacacacuu

SEQ ID NO: 5600 - RNA, 20 nt, Artificial Sequence
  HTT spacer sequence ATCN PAM
cagagguggggguagaggag

SEQ ID NO: 5601 - RNA, 20 nt, Artificial Sequence
  HTT spacer sequence ATCN PAM
uuguuacaggccugaaaagu

SEQ ID NO: 5602 - RNA, 20 nt, Artificial Sequence
  HTT spacer sequence ATCN PAM
uggauauauuaccuuguguu

SEQ ID NO: 5603 - RNA, 20 nt, Artificial Sequence
  HTT spacer sequence ATCN PAM
aagaugcuucuauggccuuc

SEQ ID NO: 5604 - RNA, 20 nt, Artificial Sequence
  HTT spacer sequence ATCN PAM
cagcucacugcaagcucugc

SEQ ID NO: 5605 - RNA, 20 nt, Artificial Sequence
  HTT spacer sequence ATCN PAM
uggguucaugccauucuccu

SEQ ID NO: 5606 - RNA, 20 nt, Artificial Sequence
  HTT spacer sequence ATCN PAM
cgccuggcuaacuuuuuuuu

SEQ ID NO: 5607 - RNA, 20 nt, Artificial Sequence
  HTT spacer sequence ATCN PAM
uggcuaacauggugaaaccc

SEQ ID NO: 5608 - RNA, 20 nt, Artificial Sequence
  HTT spacer sequence ATCN PAM
agaccauccuggcuaacaug

SEQ ID NO: 5609 - RNA, 20 nt, Artificial Sequence
  HTT spacer sequence ATCN PAM
ccugaccucgugaucugccc

SEQ ID NO: 5610 - RNA, 20 nt, Artificial Sequence
  HTT spacer sequence ATCN PAM
cgaggucaggagaucgagac

SEQ ID NO: 5611 - RNA, 20 nt, Artificial Sequence
  HTT spacer sequence ATCN PAM
gcccgucccggccucccaaa

SEQ ID NO: 5612 - RNA, 20 nt, Artificial Sequence
  HTT spacer sequence ATCN PAM
cagcacuuugggaggccggg

SEQ ID NO: 5613 - RNA, 20 nt, Artificial Sequence
  HTT spacer sequence ATCN PAM
guauaguagcaauaauagaa

SEQ ID NO: 5614 - RNA, 20 nt, Artificial Sequence
  HTT spacer sequence ATCN PAM
cuuguuuuuccuuuuauaaa

SEQ ID NO: 5615 - RNA, 20 nt, Artificial Sequence
  HTT spacer sequence ATCN PAM
cuaaauuuauaaaaggaaaa

SEQ ID NO: 5616 - RNA, 20 nt, Artificial Sequence
  HTT spacer sequence ATCN PAM
cuaacauacagccuggaaca

SEQ ID NO: 5617 - RNA, 20 nt, Artificial Sequence
  HTT spacer sequence ATCN PAM
cuucuaagaaacauauauga

SEQ ID NO: 5618 - RNA, 20 nt, Artificial Sequence
  HTT spacer sequence ATCN PAM
uugauguaaauauuuuaaag

SEQ ID NO: 5619 - RNA, 20 nt, Artificial Sequence
  HTT spacer sequence ATCN PAM
augauaucccuucuaagaaa

SEQ ID NO: 5620 - RNA, 20 nt, Artificial Sequence
  HTT spacer sequence ATCN PAM
uguaauuucuucuaaauuac

SEQ ID NO: 5621 - RNA, 20 nt, Artificial Sequence
  HTT spacer sequence ATCN PAM
guaauuuagaagaaauuaca

SEQ ID NO: 5622 - RNA, 20 nt, Artificial Sequence
  HTT spacer sequence ATCN PAM
uuuaaaugaccuucaccuuu

SEQ ID NO: 5623 - RNA, 20 nt, Artificial Sequence
  HTT spacer sequence ATCN PAM
cacuuaagacugggcugagu

SEQ ID NO: 5624 - RNA, 20 nt, Artificial Sequence
  HTT spacer sequence ATCN PAM
agucuccucacucgcagaag

SEQ ID NO: 5625 - RNA, 20 nt, Artificial Sequence
  HTT spacer sequence ATCN PAM
gaagagggcgaugcugccac

SEQ ID NO: 5626 - RNA, 20 nt, Artificial Sequence
  HTT spacer sequence ATCN PAM
cccucuucagauaaugacac

SEQ ID NO: 5627 - RNA, 20 nt, Artificial Sequence
  HTT spacer sequence ATCN PAM
gacacguucugaucguguga

SEQ ID NO: 5628 - RNA, 20 nt, Artificial Sequence
  HTT spacer sequence ATCN PAM
gaacgugucagauugagaaa

SEQ ID NO: 5629 - RNA, 20 nt, Artificial Sequence
  HTT spacer sequence ATCN PAM
ugugaaugugaaauugguuu

SEQ ID NO: 5630 - RNA, 20 nt, Artificial Sequence
  HTT spacer sequence ATCN PAM
gagugcagaggagauuauuu

SEQ ID NO: 5631 - RNA, 20 nt, Artificial Sequence
  HTT spacer sequence ATCN PAM
ccucugcacucagauauacu

SEQ ID NO: 5632 - RNA, 20 nt, Artificial Sequence
  HTT spacer sequence ATCN PAM
uuaaauaaucuccucugcac

SEQ ID NO: 5633 - RNA, 20 nt, Artificial Sequence
  HTT spacer sequence ATCN PAM
gccaaaugggaauaaaaggg

SEQ ID NO: 5634 - RNA, 20 nt, Artificial Sequence
  HTT spacer sequence ATCN PAM
aaccaucugccaaaugggaa

SEQ ID NO: 5635 - RNA, 20 nt, Artificial Sequence
  HTT spacer sequence ATCN PAM
gcacgguucuuugugacacu

SEQ ID NO: 5636 - RNA, 20 nt, Artificial Sequence
  HTT spacer sequence ATCN PAM
auaaguaagccuucaacuaa

SEQ ID NO: 5637 - RNA, 20 nt, Artificial Sequence
  HTT spacer sequence ATCN PAM
cauucguuuguuugaaccuc

SEQ ID NO: 5638 - RNA, 20 nt, Artificial Sequence
  HTT spacer sequence ATCN PAM
aaaaccugcuucuguaacug

SEQ ID NO: 5639 - RNA, 20 nt, Artificial Sequence
  HTT spacer sequence ATCN PAM
agaagacaguaauuaacccg

SEQ ID NO: 5640 - RNA, 20 nt, Artificial Sequence
  HTT spacer sequence ATCN PAM
gaauccagaagacaguaauu

SEQ ID NO: 5641 - RNA, 20 nt, Artificial Sequence
  HTT spacer sequence ATCN PAM
gguuugucacuuuuaucuuu

SEQ ID NO: 5642 - RNA, 20 nt, Artificial Sequence
  HTT spacer sequence ATCN PAM
uucauccaucauaccuguuc

SEQ ID NO: 5643 - RNA, 20 nt, Artificial Sequence
  HTT spacer sequence ATCN PAM
aucauaccuguuccuaauuu

SEQ ID NO: 5644 - RNA, 20 nt, Artificial Sequence
  HTT spacer sequence ATCN PAM
uaccuguuccuaauuuagua

SEQ ID NO: 5645 - RNA, 20 nt, Artificial Sequence
  HTT spacer sequence ATCN PAM
acuuuaaagaaauguggucu

SEQ ID NO: 5646 - RNA, 20 nt, Artificial Sequence
  HTT spacer sequence ATCN PAM
guugcugcugcuuaucuuuu

SEQ ID NO: 5647 - RNA, 20 nt, Artificial Sequence
  HTT spacer sequence ATCN PAM
uuuucaugcaccuagcuggu

SEQ ID NO: 5648 - RNA, 20 nt, Artificial Sequence
  HTT spacer sequence ATCN PAM
uugccccagcucccuggacu

SEQ ID NO: 5649 - RNA, 20 nt, Artificial Sequence
  HTT spacer sequence ATCN PAM
cuaacagccaaccccagguu

SEQ ID NO: 5650 - RNA, 20 nt, Artificial Sequence
  HTT spacer sequence ATCN PAM
acuugccuccccuccaaaau

SEQ ID NO: 5651 - RNA, 20 nt, Artificial Sequence
  HTT spacer sequence ATCN PAM
cacaauuuaaauucaaacuu

SEQ ID NO: 5652 - RNA, 20 nt, Artificial Sequence
  HTT spacer sequence ATCN PAM
uaauuguaucucacaauuua

SEQ ID NO: 5653 - RNA, 20 nt, Artificial Sequence
  HTT spacer sequence ATCN PAM
agaguuaguuuaaacagauu

SEQ ID NO: 5654 - RNA, 20 nt, Artificial Sequence
  HTT spacer sequence ATCN PAM
guuuaaacuaacucuagauu

SEQ ID NO: 5655 - RNA, 20 nt, Artificial Sequence
  HTT spacer sequence ATCN PAM
auuauuaccauaauugauca

SEQ ID NO: 5656 - RNA, 20 nt, Artificial Sequence
  HTT spacer sequence ATCN PAM
auuaugguaauaauugauaa

SEQ ID NO: 5657 - RNA, 20 nt, Artificial Sequence
  HTT spacer sequence ATCN PAM
ucugcaguuucaagcuaucu

SEQ ID NO: 5658 - RNA, 20 nt, Artificial Sequence
  HTT spacer sequence ATCN PAM
gcaguuucaagcuaucuaac

SEQ ID NO: 5659 - RNA, 20 nt, Artificial Sequence
  HTT spacer sequence ATCN PAM
aacagguucacuuaccucuu

SEQ ID NO: 5660 - RNA, 20 nt, Artificial Sequence
  HTT spacer sequence ATCN PAM
ggugcccacagcaacuauag

SEQ ID NO: 5661 - RNA, 20 nt, Artificial Sequence
  HTT spacer sequence ATCN PAM
ugaagggacaggacuagcca

SEQ ID NO: 5662 - RNA, 20 nt, Artificial Sequence
  HTT spacer sequence ATCN PAM
ugaggaaaaugugcaucaug

SEQ ID NO: 5663 - RNA, 20 nt, Artificial Sequence
  HTT spacer sequence ATCN PAM
cugcagaugaaacugccuuu

SEQ ID NO: 5664 - RNA, 20 nt, Artificial Sequence
  HTT spacer sequence ATCN PAM
gcagugauuuaacugggacg

SEQ ID NO: 5665 - RNA, 20 nt, Artificial Sequence
  HTT spacer sequence ATCN PAM
ucaaaauuuaacugucauuu

SEQ ID NO: 5666 - RNA, 20 nt, Artificial Sequence
  HTT spacer sequence ATCN PAM
cggcucaaaaaugacaguua

SEQ ID NO: 5667 - RNA, 20 nt, Artificial Sequence
  HTT spacer sequence ATCN PAM
ugggcuacuuucuuaugugg

SEQ ID NO: 5668 - RNA, 20 nt, Artificial Sequence
  HTT spacer sequence ATCN PAM
guuaauccugucagcacugu

SEQ ID NO: 5669 - RNA, 20 nt, Artificial Sequence
  HTT spacer sequence ATCN PAM
ugucagcacuguuacucacc

SEQ ID NO: 5670 - RNA, 20 nt, Artificial Sequence
  HTT spacer sequence ATCN PAM
guguugaccgagugcccuca

SEQ ID NO: 5671 - RNA, 20 nt, Artificial Sequence
  HTT spacer sequence ATCN PAM
gcuuguuuuuuuuguuguug

SEQ ID NO: 5672 - RNA, 20 nt, Artificial Sequence
  HTT spacer sequence ATCN PAM
caaaaaaaaaacaaaaaaaa

SEQ ID NO: 5673 - RNA, 20 nt, Artificial Sequence
  HTT spacer sequence ATCN PAM
caccccugcacuccagccug

SEQ ID NO: 5674 - RNA, 20 nt, Artificial Sequence
  HTT spacer sequence ATCN PAM
cggcucacugccagcuccgc

SEQ ID NO: 5675 - RNA, 20 nt, Artificial Sequence
  HTT spacer sequence ATCN PAM
uggcuaacacagugaaaccu

SEQ ID NO: 5676 - RNA, 20 nt, Artificial Sequence
  HTT spacer sequence ATCN PAM
ccugaccucgugaucugccc

SEQ ID NO: 5677 - RNA, 20 nt, Artificial Sequence
  HTT spacer sequence ATCN PAM
cgaggucaggagauggagac

SEQ ID NO: 5678 - RNA, 20 nt, Artificial Sequence
  HTT spacer sequence ATCN PAM
gcccgccucggccucccaaa

SEQ ID NO: 5679 - RNA, 20 nt, Artificial Sequence
  HTT spacer sequence ATCN PAM
cagcacuuugggaggccgag

SEQ ID NO: 5680 - RNA, 20 nt, Artificial Sequence
  HTT spacer sequence ATCN PAM
aggggugggcuuugcguugg

SEQ ID NO: 5681 - RNA, 20 nt, Artificial Sequence
  HTT spacer sequence ATCN PAM
ggccaacgcaaagcccaccc

SEQ ID NO: 5682 - RNA, 20 nt, Artificial Sequence
  HTT spacer sequence ATCN PAM
uucuuucacaaaaccugucc

SEQ ID NO: 5683 - RNA, 20 nt, Artificial Sequence
  HTT spacer sequence ATCN PAM
gucuaaaugggccauugcuc

SEQ ID NO: 5684 - RNA, 20 nt, Artificial Sequence
  HTT spacer sequence ATCN PAM
gggcucuggcuucccuuggg

SEQ ID NO: 5685 - RNA, 20 nt, Artificial Sequence
  HTT spacer sequence ATCN PAM
gaacaaacaugaaaccagag

SEQ ID NO: 5686 - RNA, 20 nt, Artificial Sequence
  HTT spacer sequence ATCN PAM
accgguccccuuucucccag

SEQ ID NO: 5687 - RNA, 20 nt, Artificial Sequence
  HTT spacer sequence ATCN PAM
uaagaacugggagaaagggg

SEQ ID NO: 5688 - RNA, 20 nt, Artificial Sequence
  HTT spacer sequence ATCN PAM
gcauagaguucaaugguuug

SEQ ID NO: 5689 - RNA, 20 nt, Artificial Sequence
  HTT spacer sequence ATCN PAM
uuaucagcauagaguucaau

SEQ ID NO: 5690 - RNA, 20 nt, Artificial Sequence
  HTT spacer sequence ATCN PAM
auggaagcuccccgucaggu

SEQ ID NO: 5691 - RNA, 20 nt, Artificial Sequence
  HTT spacer sequence ATCN PAM
gagaggcgacacguaagggc

SEQ ID NO: 5692 - RNA, 20 nt, Artificial Sequence
  HTT spacer sequence ATCN PAM
uauuacuaaaccaguuucag

SEQ ID NO: 5693 - RNA, 20 nt, Artificial Sequence
  HTT spacer sequence ATCN PAM
gugccacccuaucugccauu

SEQ ID NO: 5694 - RNA, 20 nt, Artificial Sequence
  HTT spacer sequence ATCN PAM
gccauuaacgugaacagaug

SEQ ID NO: 5695 - RNA, 20 nt, Artificial Sequence
  HTT spacer sequence ATCN PAM
guucacguuaauggcagaua

SEQ ID NO: 5696 - RNA, 20 nt, Artificial Sequence
  HTT spacer sequence ATCN PAM
gacaauacccaaaauuacac

SEQ ID NO: 5697 - RNA, 20 nt, Artificial Sequence
  HTT spacer sequence ATCN PAM
cauuggaaaaacaaauaaua

SEQ ID NO: 5698 - RNA, 20 nt, Artificial Sequence
  HTT spacer sequence ATCN PAM
ccucaacaacuuuacuauac

SEQ ID NO: 5699 - RNA, 20 nt, Artificial Sequence
  HTT spacer sequence ATCN PAM
aggaauccccucaacaacuu

SEQ ID NO: 5700 - RNA, 20 nt, Artificial Sequence
  HTT spacer sequence ATCN PAM
aggcugauuucagaauagag

SEQ ID NO: 5701 - RNA, 20 nt, Artificial Sequence
  HTT spacer sequence ATCN PAM
gccuagauaauugcagaaca

SEQ ID NO: 5702 - RNA, 20 nt, Artificial Sequence
  HTT spacer sequence ATCN PAM
gcugucaagaauuuuauuua

SEQ ID NO: 5703 - RNA, 20 nt, Artificial Sequence
  HTT spacer sequence ATCN PAM
gcauaaauuuuaaauaaaau

SEQ ID NO: 5704 - RNA, 20 nt, Artificial Sequence
  HTT spacer sequence ATCN PAM
uauuauugaugugaaauuuu

SEQ ID NO: 5705 - RNA, 20 nt, Artificial Sequence
  HTT spacer sequence ATCN PAM
auaauaggauuaaaauguaa

SEQ ID NO: 5706 - RNA, 20 nt, Artificial Sequence
  HTT spacer sequence ATCN PAM
aaaauaauaaaaugcuauua

SEQ ID NO: 5707 - RNA, 20 nt, Artificial Sequence
  HTT spacer sequence ATCN PAM
gacuaacauacugugcauuu

SEQ ID NO: 5708 - RNA, 20 nt, Artificial Sequence
  HTT spacer sequence ATCN PAM
caagacuuguuuggaaguag

SEQ ID NO: 5709 - RNA, 20 nt, Artificial Sequence
  HTT spacer sequence ATCN PAM
gaaaauuccauauguuguca

SEQ ID NO: 5710 - RNA, 20 nt, Artificial Sequence
  HTT spacer sequence ATCN PAM
gucaacacaauuaaaugcuu

SEQ ID NO: 5711 - RNA, 20 nt, Artificial Sequence
  HTT spacer sequence ATCN PAM
ugugguggagcacuaguuuu

SEQ ID NO: 5712 - RNA, 20 nt, Artificial Sequence
  HTT spacer sequence ATCN PAM
ucuuagagaaagcaguuuua

SEQ ID NO: 5713 - RNA, 20 nt, Artificial Sequence
  HTT spacer sequence ATCN PAM
agcaagaaaaagcugcagag

SEQ ID NO: 5714 - RNA, 20 nt, Artificial Sequence
  HTT spacer sequence ATCN PAM
gggaacacuuuccuucugca

SEQ ID NO: 5715 - RNA, 20 nt, Artificial Sequence
  HTT spacer sequence ATCN PAM
uccuagcucuccucugccuc

SEQ ID NO: 5716 - RNA, 20 nt, Artificial Sequence
  HTT spacer sequence ATCN PAM
uagcugcugugccccugugc

SEQ ID NO: 5717 - RNA, 20 nt, Artificial Sequence
  HTT spacer sequence ATCN PAM
gugcccucgcgcagagcagg

SEQ ID NO: 5718 - RNA, 20 nt, Artificial Sequence
  HTT spacer sequence ATCN PAM
caucugugcccucgcgcaga

SEQ ID NO: 5719 - RNA, 20 nt, Artificial Sequence
  HTT spacer sequence ATCN PAM
acucuaaccccaccccugcc

SEQ ID NO: 5720 - RNA, 20 nt, Artificial Sequence
  HTT spacer sequence ATCN PAM
cggacaccuguuagcuugau

SEQ ID NO: 5721 - RNA, 20 nt, Artificial Sequence
  HTT spacer sequence ATCN PAM
agcuaacagguguccgugau

SEQ ID NO: 5722 - RNA, 20 nt, Artificial Sequence
  HTT spacer sequence ATCN PAM
ugaauuauuuuauguugcuu

SEQ ID NO: 5723 - RNA, 20 nt, Artificial Sequence
  HTT spacer sequence ATCN PAM
auauaagcaacauaaaauaa

SEQ ID NO: 5724 - RNA, 20 nt, Artificial Sequence
  HTT spacer sequence ATCN PAM
uaauuuuaaaagaaaggucu

SEQ ID NO: 5725 - RNA, 20 nt, Artificial Sequence
  HTT spacer sequence ATCN PAM
auuuagaccuuucuuuuaaa

SEQ ID NO: 5726 - RNA, 20 nt, Artificial Sequence
  HTT spacer sequence ATCN PAM
gaggcaaucauuccaaacau

SEQ ID NO: 5727 - RNA, 20 nt, Artificial Sequence
  HTT spacer sequence ATCN PAM
uuccaaacaucuuuuucuuc

SEQ ID NO: 5728 - RNA, 20 nt, Artificial Sequence
  HTT spacer sequence ATCN PAM
uuuucuucuugguauuacua

SEQ ID NO: 5729 - RNA, 20 nt, Artificial Sequence
  HTT spacer sequence ATCN PAM
uaugaacgcuaucauucaaa

SEQ ID NO: 5730 - RNA, 20 nt, Artificial Sequence
  HTT spacer sequence ATCN PAM
uucaaaacagaucauuggaa

SEQ ID NO: 5731 - RNA, 20 nt, Artificial Sequence
  HTT spacer sequence ATCN PAM
guuuugaaugauagcguuca

SEQ ID NO: 5732 - RNA, 20 nt, Artificial Sequence
  HTT spacer sequence ATCN PAM
uuggaauuccuaaaaucauu

SEQ ID NO: 5733 - RNA, 20 nt, Artificial Sequence
  HTT spacer sequence ATCN PAM
uucagcucugugauggcauc

SEQ ID NO: 5734 - RNA, 20 nt, Artificial Sequence
  HTT spacer sequence ATCN PAM
cagagcugaaugauuuuagg

SEQ ID NO: 5735 - RNA, 20 nt, Artificial Sequence
  HTT spacer sequence ATCN PAM
uggccaguggaaggaaggcu

SEQ ID NO: 5736 - RNA, 20 nt, Artificial Sequence
  HTT spacer sequence ATCN PAM
cgacaccgaagacgacagug

SEQ ID NO: 5737 - RNA, 20 nt, Artificial Sequence
  HTT spacer sequence ATCN PAM
ucucagggaaaaaaauucaa

SEQ ID NO: 5738 - RNA, 20 nt, Artificial Sequence
  HTT spacer sequence ATCN PAM
uacuguuucuugaauuuuuu

SEQ ID NO: 5739 - RNA, 20 nt, Artificial Sequence
  HTT spacer sequence ATCN PAM
guaccuuagguuaucuuacu

SEQ ID NO: 5740 - RNA, 20 nt, Artificial Sequence
  HTT spacer sequence ATCN PAM
aucuguaccuuagguuaucu

SEQ ID NO: 5741 - RNA, 20 nt, Artificial Sequence
  HTT spacer sequence ATCN PAM
agugaagaacuuuuagcguu

SEQ ID NO: 5742 - RNA, 20 nt, Artificial Sequence
  HTT spacer sequence ATCN PAM
uagccaaaaggccaagaagc

SEQ ID NO: 5743 - RNA, 20 nt, Artificial Sequence
  HTT spacer sequence ATCN PAM
cuucuuggccuuuuggcuaa

SEQ ID NO: 5744 - RNA, 20 nt, Artificial Sequence
  HTT spacer sequence ATCN PAM
aacuugccgugaauuaaauu

SEQ ID NO: 5745 - RNA, 20 nt, Artificial Sequence
  HTT spacer sequence ATCN PAM
aaauuuaauucacggcaagu

SEQ ID NO: 5746 - RNA, 20 nt, Artificial Sequence
  HTT spacer sequence ATCN PAM
cucauccagugguauuggag

SEQ ID NO: 5747 - RNA, 20 nt, Artificial Sequence
  HTT spacer sequence ATCN PAM
agugguauuggagauauagu

SEQ ID NO: 5748 - RNA, 20 nt, Artificial Sequence
  HTT spacer sequence ATCN PAM
ccaauaccacuggaugagag

SEQ ID NO: 5749 - RNA, 20 nt, Artificial Sequence
  HTT spacer sequence ATCN PAM
ggcaaaacagaaagcccuga

SEQ ID NO: 5750 - RNA, 20 nt, Artificial Sequence
  HTT spacer sequence ATCN PAM
ucaggcaaaacagaaagccc

SEQ ID NO: 5751 - RNA, 20 nt, Artificial Sequence
  HTT spacer sequence ATCN PAM
ccuggguuccuuauuuaagc

SEQ ID NO: 5752 - RNA, 20 nt, Artificial Sequence
  HTT spacer sequence ATCN PAM
uucuuugagcuuuuugaacu

SEQ ID NO: 5753 - RNA, 20 nt, Artificial Sequence
  HTT spacer sequence ATCN PAM
guucaaaaagcucaaagaaa

SEQ ID NO: 5754 - RNA, 20 nt, Artificial Sequence
  HTT spacer sequence ATCN PAM
uccagcauugcccuauugac

SEQ ID NO: 5755 - RNA, 20 nt, Artificial Sequence
  HTT spacer sequence ATCN PAM
guaggcuuuugaacuuugac

SEQ ID NO: 5756 - RNA, 20 nt, Artificial Sequence
  HTT spacer sequence ATCN PAM
uaagacccuugcaaacuccc

SEQ ID NO: 5757 - RNA, 20 nt, Artificial Sequence
  HTT spacer sequence ATCN PAM
gggaguuugcaagggucuua

SEQ ID NO: 5758 - RNA, 20 nt, Artificial Sequence
  HTT spacer sequence ATCN PAM
accgggcuguguugcgaggc

SEQ ID NO: 5759 - RNA, 20 nt, Artificial Sequence
  HTT spacer sequence ATCN PAM
gaagcccuugugaggccgug

SEQ ID NO: 5760 - RNA, 20 nt, Artificial Sequence
  HTT spacer sequence ATCN PAM
auacuuuggcugugugaauc

SEQ ID NO: 5761 - RNA, 20 nt, Artificial Sequence
  HTT spacer sequence ATCN PAM
guaggcaaccacacccagua

SEQ ID NO: 5762 - RNA, 20 nt, Artificial Sequence
  HTT spacer sequence ATCN PAM
gugagagggucagagaguau

SEQ ID NO: 5763 - RNA, 20 nt, Artificial Sequence
  HTT spacer sequence ATCN PAM
aucuaaugacagagugaguu

SEQ ID NO: 5764 - RNA, 20 nt, Artificial Sequence
  HTT spacer sequence ATCN PAM
aaugacagagugaguuuacu

SEQ ID NO: 5765 - RNA, 20 nt, Artificial Sequence
  HTT spacer sequence ATCN PAM
aguggcuuugacuaaaugua

SEQ ID NO: 5766 - RNA, 20 nt, Artificial Sequence
  HTT spacer sequence ATCN PAM
gaaaagacaauaaagacuuc

SEQ ID NO: 5767 - RNA, 20 nt, Artificial Sequence
  HTT spacer sequence ATCN PAM
aguagauuauucuugagacc

SEQ ID NO: 5768 - RNA, 20 nt, Artificial Sequence
  HTT spacer sequence ATCN PAM
acuugauucaucugaaaaga

SEQ ID NO: 5769 - RNA, 20 nt, Artificial Sequence
  HTT spacer sequence ATCN PAM
uuuucaaauugacuuuugaa

SEQ ID NO: 5770 - RNA, 20 nt, Artificial Sequence
  HTT spacer sequence ATCN PAM
caaaaugaucaguguucaga

SEQ ID NO: 5771 - RNA, 20 nt, Artificial Sequence
  HTT spacer sequence ATCN PAM
uuuugugaugacuucuaaaa

SEQ ID NO: 5772 - RNA, 20 nt, Artificial Sequence
  HTT spacer sequence ATCN PAM
guguucagaggaagagcuuu

SEQ ID NO: 5773 - RNA, 20 nt, Artificial Sequence
  HTT spacer sequence ATCN PAM
uuauaccauguggaagguca

SEQ ID NO: 5774 - RNA, 20 nt, Artificial Sequence
  HTT spacer sequence ATCN PAM
aucauuauaccauguggaag

SEQ ID NO: 5775 - RNA, 20 nt, Artificial Sequence
  HTT spacer sequence ATCN PAM
cuuaccauaaaccaaguaug

SEQ ID NO: 5776 - RNA, 20 nt, Artificial Sequence
  HTT spacer sequence ATCN PAM
acaaaaugcuuucaagaaau

SEQ ID NO: 5777 - RNA, 20 nt, Artificial Sequence
  HTT spacer sequence ATCN PAM
ggcauuucauggaaauuaca

SEQ ID NO: 5778 - RNA, 20 nt, Artificial Sequence
  HTT spacer sequence ATCN PAM
gcuuuauuuguuccucuuaa

SEQ ID NO: 5779 - RNA, 20 nt, Artificial Sequence
  HTT spacer sequence ATCN PAM
aguaccaucagguaagagga

SEQ ID NO: 5780 - RNA, 20 nt, Artificial Sequence
  HTT spacer sequence ATCN PAM
gguaagaggaauguauguug

SEQ ID NO: 5781 - RNA, 20 nt, Artificial Sequence
  HTT spacer sequence ATCN PAM
acgacaguuccaacauacau

SEQ ID NO: 5782 - RNA, 20 nt, Artificial Sequence
  HTT spacer sequence ATCN PAM
gcacgggucaauaaaguauc

SEQ ID NO: 5783 - RNA, 20 nt, Artificial Sequence
  HTT spacer sequence ATCN PAM
acccaggccccagaaagccc

SEQ ID NO: 5784 - RNA, 20 nt, Artificial Sequence
  HTT spacer sequence ATCN PAM
cccugcaccggcaucuaccc

SEQ ID NO: 5785 - RNA, 20 nt, Artificial Sequence
  HTT spacer sequence ATCN PAM
uuuuuuuuuuuuugagaugg

SEQ ID NO: 5786 - RNA, 20 nt, Artificial Sequence
  HTT spacer sequence ATCN PAM
caaaaaaaaaaaaaggauac

SEQ ID NO: 5787 - RNA, 20 nt, Artificial Sequence
  HTT spacer sequence ATCN PAM
ugccaccacacuccagccug

SEQ ID NO: 5788 - RNA, 20 nt, Artificial Sequence
  HTT spacer sequence ATCN PAM
uggcucauugcaagcuccac

SEQ ID NO: 5789 - RNA, 20 nt, Artificial Sequence
  HTT spacer sequence ATCN PAM
cagcuacucgggagguggag

SEQ ID NO: 5790 - RNA, 20 nt, Artificial Sequence
  HTT spacer sequence ATCN PAM
cuacuaaaaauacaaaaaaa

SEQ ID NO: 5791 - RNA, 20 nt, Artificial Sequence
  HTT spacer sequence ATCN PAM
uggugaaaccccaucucuac

SEQ ID NO: 5792 - RNA, 20 nt, Artificial Sequence
  HTT spacer sequence ATCN PAM
cuugaggucaggaguucgaa

SEQ ID NO: 5793 - RNA, 20 nt, Artificial Sequence
  HTT spacer sequence ATCN PAM
uccugccuuggccucccaaa

SEQ ID NO: 5794 - RNA, 20 nt, Artificial Sequence
  HTT spacer sequence ATCN PAM
uagcacuuugggaggccaag

SEQ ID NO: 5795 - RNA, 20 nt, Artificial Sequence
  HTT spacer sequence ATCN PAM
uuaaagugggcacagccaca

SEQ ID NO: 5796 - RNA, 20 nt, Artificial Sequence
  HTT spacer sequence ATCN PAM
cgugacucucagaccaggag

SEQ ID NO: 5797 - RNA, 20 nt, Artificial Sequence
  HTT spacer sequence ATCN PAM
uucaagauagugaggcccuc

SEQ ID NO: 5798 - RNA, 20 nt, Artificial Sequence
  HTT spacer sequence ATCN PAM
ugaacgaucucgugacucuc

SEQ ID NO: 5799 - RNA, 20 nt, Artificial Sequence
  HTT spacer sequence ATCN PAM
auugacaguguuggucaaga

SEQ ID NO: 5800 - RNA, 20 nt, Artificial Sequence
  HTT spacer sequence ATCN PAM
ugaccaacacugucaauuga

SEQ ID NO: 5801 - RNA, 20 nt, Artificial Sequence
  HTT spacer sequence ATCN PAM
uuuuaagguuucuaccaucu

SEQ ID NO: 5802 - RNA, 20 nt, Artificial Sequence
  HTT spacer sequence ATCN PAM
caacucugaaauaaaaacuu

SEQ ID NO: 5803 - RNA, 20 nt, Artificial Sequence
  HTT spacer sequence ATCN PAM
gcucaaagaaaaagaccuua

SEQ ID NO: 5804 - RNA, 20 nt, Artificial Sequence
  HTT spacer sequence ATCN PAM
cucuuuuuaaaugacuucuc

SEQ ID NO: 5805 - RNA, 20 nt, Artificial Sequence
  HTT spacer sequence ATCN PAM
ucauaaagccauagcuuuuc

SEQ ID NO: 5806 - RNA, 20 nt, Artificial Sequence
  HTT spacer sequence ATCN PAM
cauaauugcaaugcaaaagu

SEQ ID NO: 5807 - RNA, 20 nt, Artificial Sequence
  HTT spacer sequence ATCN PAM
uaaagaggucugaaaaugag

SEQ ID NO: 5808 - RNA, 20 nt, Artificial Sequence
  HTT spacer sequence ATCN PAM
gccacauguucagugagcuc

SEQ ID NO: 5809 - RNA, 20 nt, Artificial Sequence
  HTT spacer sequence ATCN PAM
agagcucacugaacaugugg

SEQ ID NO: 5810 - RNA, 20 nt, Artificial Sequence
  HTT spacer sequence ATCN PAM
uuucuaaacagacauaucca

SEQ ID NO: 5811 - RNA, 20 nt, Artificial Sequence
  HTT spacer sequence ATCN PAM
cuaauaaacuugugcucaac

SEQ ID NO: 5812 - RNA, 20 nt, Artificial Sequence
  HTT spacer sequence ATCN PAM
acugaagagcaccugcuucc

SEQ ID NO: 5813 - RNA, 20 nt, Artificial Sequence
  HTT spacer sequence ATCN PAM
uuggcaaacuucaaacacag

SEQ ID NO: 5814 - RNA, 20 nt, Artificial Sequence
  HTT spacer sequence ATCN PAM
aauguauauuaaucuuuggc

SEQ ID NO: 5815 - RNA, 20 nt, Artificial Sequence
  HTT spacer sequence ATCN PAM
gagaaaaggcacaacaugaa

SEQ ID NO: 5816 - RNA, 20 nt, Artificial Sequence
  HTT spacer sequence ATCN PAM
uuguuauuuguauagaauuu

SEQ ID NO: 5817 - RNA, 20 nt, Artificial Sequence
  HTT spacer sequence ATCN PAM
uccugagcaaagugugcacc

SEQ ID NO: 5818 - RNA, 20 nt, Artificial Sequence
  HTT spacer sequence ATCN PAM
gaacgaaacacaaguuccuc

SEQ ID NO: 5819 - RNA, 20 nt, Artificial Sequence
  HTT spacer sequence ATCN PAM
cagcgaggacagggggacac

SEQ ID NO: 5820 - RNA, 20 nt, Artificial Sequence
  HTT spacer sequence ATCN PAM
caucuguuuggauccuagag

SEQ ID NO: 5821 - RNA, 20 nt, Artificial Sequence
  HTT spacer sequence ATCN PAM
guuuggauccuagagucuuc

SEQ ID NO: 5822 - RNA, 20 nt, Artificial Sequence
  HTT spacer sequence ATCN PAM
aaacagaugugaucccagcg

SEQ ID NO: 5823 - RNA, 20 nt, Artificial Sequence
  HTT spacer sequence ATCN PAM
uagagucuuccagcugaacu

SEQ ID NO: 5824 - RNA, 20 nt, Artificial Sequence
  HTT spacer sequence ATCN PAM
ccaacaccuauaagagcgug

SEQ ID NO: 5825 - RNA, 20 nt, Artificial Sequence
  HTT spacer sequence ATCN PAM
gucgagacagucgcuuccac

SEQ ID NO: 5826 - RNA, 20 nt, Artificial Sequence
  HTT spacer sequence ATCN PAM
uccucccaauguuagccaaa

SEQ ID NO: 5827 - RNA, 20 nt, Artificial Sequence
  HTT spacer sequence ATCN PAM
ucccaauguuagccaaacag

SEQ ID NO: 5828 - RNA, 20 nt, Artificial Sequence
  HTT spacer sequence ATCN PAM
cuaugcaacaacaagccaag

SEQ ID NO: 5829 - RNA, 20 nt, Artificial Sequence
  HTT spacer sequence ATCN PAM
gcucuuccuucaguccuaau

SEQ ID NO: 5830 - RNA, 20 nt, Artificial Sequence
  HTT spacer sequence ATCN PAM
gugccuugauagcaguucuc

SEQ ID NO: 5831 - RNA, 20 nt, Artificial Sequence
  HTT spacer sequence ATCN PAM
aggcacagauuaggacugaa

SEQ ID NO: 5832 - RNA, 20 nt, Artificial Sequence
  HTT spacer sequence ATCN PAM
cagguugguauugcccaccu

SEQ ID NO: 5833 - RNA, 20 nt, Artificial Sequence
  HTT spacer sequence ATCN PAM
ccccuguaaaguaggugggc

SEQ ID NO: 5834 - RNA, 20 nt, Artificial Sequence
  HTT spacer sequence ATCN PAM
cacagcuccgagagguuaug

SEQ ID NO: 5835 - RNA, 20 nt, Artificial Sequence
  HTT spacer sequence ATCN PAM
ccuccauaaccucucggagc

SEQ ID NO: 5836 - RNA, 20 nt, Artificial Sequence
  HTT spacer sequence ATCN PAM
ggcagcacacagcuuuagag

SEQ ID NO: 5837 - RNA, 20 nt, Artificial Sequence
  HTT spacer sequence ATCN PAM
aaccaccaaauaaaacacug

SEQ ID NO: 5838 - RNA, 20 nt, Artificial Sequence
  HTT spacer sequence ATCN PAM
cacugcaacaaccucugccu

SEQ ID NO: 5839 - RNA, 20 nt, Artificial Sequence
  HTT spacer sequence ATCN PAM
cuacuaaaaauacaaaaaac

SEQ ID NO: 5840 - RNA, 20 nt, Artificial Sequence
  HTT spacer sequence ATCN PAM
cuugcgcccaggaguuuaaa

SEQ ID NO: 5841 - RNA, 20 nt, Artificial Sequence
  HTT spacer sequence ATCN PAM
accaaccuuggccugccaaa

SEQ ID NO: 5842 - RNA, 20 nt, Artificial Sequence
  HTT spacer sequence ATCN PAM
cuaaucagaauuucuaugau

SEQ ID NO: 5843 - RNA, 20 nt, Artificial Sequence
  HTT spacer sequence ATCN PAM
gaauuucuaugaucaaauga

SEQ ID NO: 5844 - RNA, 20 nt, Artificial Sequence
  HTT spacer sequence ATCN PAM
uagaaauucugauuagugau

SEQ ID NO: 5845 - RNA, 20 nt, Artificial Sequence
  HTT spacer sequence ATCN PAM
aaugacaugaaucauuguuu

SEQ ID NO: 5846 - RNA, 20 nt, Artificial Sequence
  HTT spacer sequence ATCN PAM
uuguuuccacaacugcagug

SEQ ID NO: 5847 - RNA, 20 nt, Artificial Sequence
  HTT spacer sequence ATCN PAM
caugagcugccuggcacagc

SEQ ID NO: 5848 - RNA, 20 nt, Artificial Sequence
  HTT spacer sequence ATCN PAM
ugauuauacacaauaaacaa

SEQ ID NO: 5849 - RNA, 20 nt, Artificial Sequence
  HTT spacer sequence ATCN PAM
agaugaacaaacauguauuu

SEQ ID NO: 5850 - RNA, 20 nt, Artificial Sequence
  HTT spacer sequence ATCN PAM
aaugccaaaaaccacggacu

SEQ ID NO: 5851 - RNA, 20 nt, Artificial Sequence
  HTT spacer sequence ATCN PAM
caugccucuaaguuuaaauc

SEQ ID NO: 5852 - RNA, 20 nt, Artificial Sequence
  HTT spacer sequence ATCN PAM
auaucacaugccucuaaguu

SEQ ID NO: 5853 - RNA, 20 nt, Artificial Sequence
  HTT spacer sequence ATCN PAM
gaaugggggugcagucauga

SEQ ID NO: 5854 - RNA, 20 nt, Artificial Sequence
  HTT spacer sequence ATCN PAM
ugagaccaguuagacaacag

SEQ ID NO: 5855 - RNA, 20 nt, Artificial Sequence
  HTT spacer sequence ATCN PAM
cuguccuguugucuaacugg

SEQ ID NO: 5856 - RNA, 20 nt, Artificial Sequence
  HTT spacer sequence ATCN PAM
uggcuucuggugagauugac

SEQ ID NO: 5857 - RNA, 20 nt, Artificial Sequence
  HTT spacer sequence ATCN PAM
caccagaagccaagaucccu

SEQ ID NO: 5858 - RNA, 20 nt, Artificial Sequence
  HTT spacer sequence ATCN PAM
guaggcagggagacccugac

SEQ ID NO: 5859 - RNA, 20 nt, Artificial Sequence
  HTT spacer sequence ATCN PAM
cauucuuuucugugcguaau

SEQ ID NO: 5860 - RNA, 20 nt, Artificial Sequence
  HTT spacer sequence ATCN PAM
gaguagaguggagaucgaag

SEQ ID NO: 5861 - RNA, 20 nt, Artificial Sequence
  HTT spacer sequence ATCN PAM
ccacucuacucagauuacgc

SEQ ID NO: 5862 - RNA, 20 nt, Artificial Sequence
  HTT spacer sequence ATCN PAM
aaggccugaauacauaguaa

SEQ ID NO: 5863 - RNA, 20 nt, Artificial Sequence
  HTT spacer sequence ATCN PAM
gccgcaauggaaauugugug

SEQ ID NO: 5864 - RNA, 20 nt, Artificial Sequence
  HTT spacer sequence ATCN PAM
cacaauuuccauugcggcag

SEQ ID NO: 5865 - RNA, 20 nt, Artificial Sequence
  HTT spacer sequence ATCN PAM
agcacuacuucugaaugcaa

SEQ ID NO: 5866 - RNA, 20 nt, Artificial Sequence
  HTT spacer sequence ATCN PAM
uguuacuggcagugcauaca

SEQ ID NO: 5867 - RNA, 20 nt, Artificial Sequence
  HTT spacer sequence ATCN PAM
gugaucaaagcagauuaaag

SEQ ID NO: 5868 - RNA, 20 nt, Artificial Sequence
  HTT spacer sequence ATCN PAM
cugauguaugcacugccagu

SEQ ID NO: 5869 - RNA, 20 nt, Artificial Sequence
  HTT spacer sequence ATCN PAM
aagcagauuaaagaaagacc

SEQ ID NO: 5870 - RNA, 20 nt, Artificial Sequence
  HTT spacer sequence ATCN PAM
gcuuugaucacugauguaug

SEQ ID NO: 5871 - RNA, 20 nt, Artificial Sequence
  HTT spacer sequence ATCN PAM
ucacuccaagaaggcagggg

SEQ ID NO: 5872 - RNA, 20 nt, Artificial Sequence
  HTT spacer sequence ATCN PAM
caacaaaaucuucacuccaa

SEQ ID NO: 5873 - RNA, 20 nt, Artificial Sequence
  HTT spacer sequence ATCN PAM
gccgccaugguauagacuuc

SEQ ID NO: 5874 - RNA, 20 nt, Artificial Sequence
  HTT spacer sequence ATCN PAM
ggaacaccguacagaagaau

SEQ ID NO: 5875 - RNA, 20 nt, Artificial Sequence
  HTT spacer sequence ATCN PAM
aggagggaagagaguuaggu

SEQ ID NO: 5876 - RNA, 20 nt, Artificial Sequence
  HTT spacer sequence ATCN PAM
ccagcugaacaaugccacuc

SEQ ID NO: 5877 - RNA, 20 nt, Artificial Sequence
  HTT spacer sequence ATCN PAM
ccaaagcuucuucucaucac

SEQ ID NO: 5878 - RNA, 20 nt, Artificial Sequence
  HTT spacer sequence ATCN PAM
ggugacauuugagugaauuu

SEQ ID NO: 5879 - RNA, 20 nt, Artificial Sequence
  HTT spacer sequence ATCN PAM
uuccuuucugcaaauucacu

SEQ ID NO: 5880 - RNA, 20 nt, Artificial Sequence
  HTT spacer sequence ATCN PAM
ccuaggcuuguaucuuuccu

SEQ ID NO: 5881 - RNA, 20 nt, Artificial Sequence
  HTT spacer sequence ATCN PAM
gcgcaaacccucucaaggcu

SEQ ID NO: 5882 - RNA, 20 nt, Artificial Sequence
  HTT spacer sequence ATCN PAM
ugcuaaaaccuacaccacau

SEQ ID NO: 5883 - RNA, 20 nt, Artificial Sequence
  HTT spacer sequence ATCN PAM
uucuuauuccugaguugaga

SEQ ID NO: 5884 - RNA, 20 nt, Artificial Sequence
  HTT spacer sequence ATCN PAM
cuuggcagcaugaaagcaaa

SEQ ID NO: 5885 - RNA, 20 nt, Artificial Sequence
  HTT spacer sequence ATCN PAM
aagccaccagcaaaccuugc

SEQ ID NO: 5886 - RNA, 20 nt, Artificial Sequence
  HTT spacer sequence ATCN PAM
cccccaaagcccugcucucu

SEQ ID NO: 5887 - RNA, 20 nt, Artificial Sequence
  HTT spacer sequence ATCN PAM
agacaggcucugaccuccug

SEQ ID NO: 5888 - RNA, 20 nt, Artificial Sequence
  HTT spacer sequence ATCN PAM
gguguaugagccuggaguug

SEQ ID NO: 5889 - RNA, 20 nt, Artificial Sequence
  HTT spacer sequence ATCN PAM
gagauguccacucacagugg

SEQ ID NO: 5890 - RNA, 20 nt, Artificial Sequence
  HTT spacer sequence ATCN PAM
cagaugcugacccccugccc

SEQ ID NO: 5891 - RNA, 20 nt, Artificial Sequence
  HTT spacer sequence ATCN PAM
uggcuuuaggaaccccacac

SEQ ID NO: 5892 - RNA, 20 nt, Artificial Sequence
  HTT spacer sequence ATCN PAM
gcugucagcaccuugggaac

SEQ ID NO: 5893 - RNA, 20 nt, Artificial Sequence
  HTT spacer sequence ATCN PAM
gugcccucggugcugccaaa

SEQ ID NO: 5894 - RNA, 20 nt, Artificial Sequence
  HTT spacer sequence ATCN PAM
ucccuguugcuucugcccuc

SEQ ID NO: 5895 - RNA, 20 nt, Artificial Sequence
  HTT spacer sequence ATCN PAM
guucaugacacaggagacac

SEQ ID NO: 5896 - RNA, 20 nt, Artificial Sequence
  HTT spacer sequence ATCN PAM
ccguugugguguucacagac

SEQ ID NO: 5897 - RNA, 20 nt, Artificial Sequence
  HTT spacer sequence ATCN PAM
uaacccaugucugugaacac

SEQ ID NO: 5898 - RNA, 20 nt, Artificial Sequence
  HTT spacer sequence ATCN PAM
augcagccaauccuaaccca

SEQ ID NO: 5899 - RNA, 20 nt, Artificial Sequence
  HTT spacer sequence ATCN PAM
uggacccucgccugugcuca

SEQ ID NO: 5900 - RNA, 20 nt, Artificial Sequence
  HTT spacer sequence ATCN PAM
uggagcucaagucaguuguu

SEQ ID NO: 5901 - RNA, 20 nt, Artificial Sequence
  HTT spacer sequence ATCN PAM
uacaacaagggaacaacuga

SEQ ID NO: 5902 - RNA, 20 nt, Artificial Sequence
  HTT spacer sequence ATCN PAM
gugccuugaaaaacaccaca

SEQ ID NO: 5903 - RNA, 20 nt, Artificial Sequence
  HTT spacer sequence ATCN PAM
guuugcagaguuguuuacua

SEQ ID NO: 5904 - RNA, 20 nt, Artificial Sequence
  HTT spacer sequence ATCN PAM
auaaguaaugguugaacaca

SEQ ID NO: 5905 - RNA, 20 nt, Artificial Sequence
  HTT spacer sequence ATCN PAM
ugcaaaauagcccaagcuaa

SEQ ID NO: 5906 - RNA, 20 nt, Artificial Sequence
  HTT spacer sequence ATCN PAM
cagcacuuugggaggccaag

SEQ ID NO: 5907 - RNA, 20 nt, Artificial Sequence
  HTT spacer sequence ATCN PAM
gccugccuuggccucccaaa

SEQ ID NO: 5908 - RNA, 20 nt, Artificial Sequence
  HTT spacer sequence ATCN PAM
ucccaccucagccuccugag

SEQ ID NO: 5909 - RNA, 20 nt, Artificial Sequence
  HTT spacer sequence ATCN PAM
cuugagcccauucgugcgcc

SEQ ID NO: 5910 - RNA, 20 nt, Artificial Sequence
  HTT spacer sequence ATCN PAM
uaaacgucucugcucuucuc

SEQ ID NO: 5911 - RNA, 20 nt, Artificial Sequence
  HTT spacer sequence ATCN PAM
uugcccccucacccacagag

SEQ ID NO: 5912 - RNA, 20 nt, Artificial Sequence
  HTT spacer sequence ATCN PAM
gccccauguuccuauagcca

SEQ ID NO: 5913 - RNA, 20 nt, Artificial Sequence
  HTT spacer sequence ATCN PAM
cuuucuuaaucugccccaug

SEQ ID NO: 5914 - RNA, 20 nt, Artificial Sequence
  HTT spacer sequence ATCN PAM
cucccacaacaguuguaaca

SEQ ID NO: 5915 - RNA, 20 nt, Artificial Sequence
  HTT spacer sequence ATCN PAM
cauguauguguauacaaagg

SEQ ID NO: 5916 - RNA, 20 nt, Artificial Sequence
  HTT spacer sequence ATCN PAM
uuaccaacauuuuggggacc

SEQ ID NO: 5917 - RNA, 20 nt, Artificial Sequence
  HTT spacer sequence ATCN PAM
acuagcacugcagcacccug

SEQ ID NO: 5918 - RNA, 20 nt, Artificial Sequence
  HTT spacer sequence ATCN PAM
aaaugacaagauuucuguua

SEQ ID NO: 5919 - RNA, 20 nt, Artificial Sequence
  HTT spacer sequence ATCN PAM
ugucauuuagauuuuuauua

SEQ ID NO: 5920 - RNA, 20 nt, Artificial Sequence
  HTT spacer sequence ATCN PAM
ucaccuucccucauuuaaaa

SEQ ID NO: 5921 - RNA, 20 nt, Artificial Sequence
  HTT spacer sequence ATCN PAM
caucgucaccuucccucauu

SEQ ID NO: 5922 - RNA, 20 nt, Artificial Sequence
  HTT spacer sequence ATCN PAM
ucucaucgucaccuucccuc

SEQ ID NO: 5923 - RNA, 20 nt, Artificial Sequence
  HTT spacer sequence ATCN PAM
uaaucaucucaucgucaccu

SEQ ID NO: 5924 - RNA, 20 nt, Artificial Sequence
  HTT spacer sequence ATCN PAM
ucauaaucaucucaucguca

SEQ ID NO: 5925 - RNA, 20 nt, Artificial Sequence
  HTT spacer sequence ATCN PAM
guggaauuagacaccacaaa

SEQ ID NO: 5926 - RNA, 20 nt, Artificial Sequence
  HTT spacer sequence ATCN PAM
caaauaauguauuuaacacu

SEQ ID NO: 5927 - RNA, 20 nt, Artificial Sequence
  HTT spacer sequence ATCN PAM
gcugagccaggcgagagacu

SEQ ID NO: 5928 - RNA, 20 nt, Artificial Sequence
  HTT spacer sequence ATCN PAM
ggacggcuuguucaggcucu

SEQ ID NO: 5929 - RNA, 20 nt, Artificial Sequence
  HTT spacer sequence ATCN PAM
gagccugaacaagccgucca

SEQ ID NO: 5930 - RNA, 20 nt, Artificial Sequence
  HTT spacer sequence ATCN PAM
ugacacuguacuccagccug

SEQ ID NO: 5931 - RNA, 20 nt, Artificial Sequence
  HTT spacer sequence ATCN PAM
cggcucacugcaagcucugc

SEQ ID NO: 5932 - RNA, 20 nt, Artificial Sequence
  HTT spacer sequence ATCN PAM
cuacuaaaaauacaaaaaaa

SEQ ID NO: 5933 - RNA, 20 nt, Artificial Sequence
  HTT spacer sequence ATCN PAM
uggcuaacacggugaaaccc

SEQ ID NO: 5934 - RNA, 20 nt, Artificial Sequence
  HTT spacer sequence ATCN PAM
agaccauccuggcuaacacg

SEQ ID NO: 5935 - RNA, 20 nt, Artificial Sequence
  HTT spacer sequence ATCN PAM
ccugaccucgugacccgccc

SEQ ID NO: 5936 - RNA, 20 nt, Artificial Sequence
  HTT spacer sequence ATCN PAM
cagccucccaaagugcuggg

SEQ ID NO: 5937 - RNA, 20 nt, Artificial Sequence
  HTT spacer sequence ATCN PAM
cagcacuuugggaggcugag

SEQ ID NO: 5938 - RNA, 20 nt, Artificial Sequence
  HTT spacer sequence ATCN PAM
ccaaaaaaaauaaaaaggcc

SEQ ID NO: 5939 - RNA, 20 nt, Artificial Sequence
  HTT spacer sequence ATCN PAM
uggcuaacacagugaaaccc

SEQ ID NO: 5940 - RNA, 20 nt, Artificial Sequence
  HTT spacer sequence ATCN PAM
cgaccauccuggcuaacaca

SEQ ID NO: 5941 - RNA, 20 nt, Artificial Sequence
  HTT spacer sequence ATCN PAM
ccugaccuugugauccgccc

SEQ ID NO: 5942 - RNA, 20 nt, Artificial Sequence
  HTT spacer sequence ATCN PAM
caaggucaggagaucgcgac

SEQ ID NO: 5943 - RNA, 20 nt, Artificial Sequence
  HTT spacer sequence ATCN PAM
gcccgccucggccucccaaa

SEQ ID NO: 5944 - RNA, 20 nt, Artificial Sequence
  HTT spacer sequence ATCN PAM
caacacuuugggaggccgag

SEQ ID NO: 5945 - RNA, 20 nt, Artificial Sequence
  HTT spacer sequence ATCN PAM
cugagucccaaagugugcuc

SEQ ID NO: 5946 - RNA, 20 nt, Artificial Sequence
  HTT spacer sequence ATCN PAM
uaccaauaaaccucucuauc

SEQ ID NO: 5947 - RNA, 20 nt, Artificial Sequence
  HTT spacer sequence ATCN PAM
uccuuuuuucuucagcugug

SEQ ID NO: 5948 - RNA, 20 nt, Artificial Sequence
  HTT spacer sequence ATCN PAM
acaguugaacagugcucacg

SEQ ID NO: 5949 - RNA, 20 nt, Artificial Sequence
  HTT spacer sequence ATCN PAM
ggaauucuggccauuuugag

SEQ ID NO: 5950 - RNA, 20 nt, Artificial Sequence
  HTT spacer sequence ATCN PAM
gaacccucaaaauggccaga

SEQ ID NO: 5951 - RNA, 20 nt, Artificial Sequence
  HTT spacer sequence ATCN PAM
ucaguugacugggaaaucag

SEQ ID NO: 5952 - RNA, 20 nt, Artificial Sequence
  HTT spacer sequence ATCN PAM
ccuguacaguaauuaauagg

SEQ ID NO: 5953 - RNA, 20 nt, Artificial Sequence
  HTT spacer sequence ATCN PAM
cuuaaccuauuaauuacugu

SEQ ID NO: 5954 - RNA, 20 nt, Artificial Sequence
  HTT spacer sequence ATCN PAM
gagccuauaacuaacccaug

SEQ ID NO: 5955 - RNA, 20 nt, Artificial Sequence
  HTT spacer sequence ATCN PAM
cgugacuucccaaaaggcau

SEQ ID NO: 5956 - RNA, 20 nt, Artificial Sequence
  HTT spacer sequence ATCN PAM
guguaauuuucuaauccguc

SEQ ID NO: 5957 - RNA, 20 nt, Artificial Sequence
  HTT spacer sequence ATCN PAM
guccugcauuaucuauggcu

SEQ ID NO: 5958 - RNA, 20 nt, Artificial Sequence
  HTT spacer sequence ATCN PAM
auggcucuugguucauaccu

SEQ ID NO: 5959 - RNA, 20 nt, Artificial Sequence
  HTT spacer sequence ATCN PAM
cuacugaggacaagagacag

SEQ ID NO: 5960 - RNA, 20 nt, Artificial Sequence
  HTT spacer sequence ATCN PAM
gagacucacuuuuacuggcu

SEQ ID NO: 5961 - RNA, 20 nt, Artificial Sequence
  HTT spacer sequence ATCN PAM
aauccugucuucccucauaa

SEQ ID NO: 5962 - RNA, 20 nt, Artificial Sequence
  HTT spacer sequence ATCN PAM
ugucuucccucauaaauugu

SEQ ID NO: 5963 - RNA, 20 nt, Artificial Sequence
  HTT spacer sequence ATCN PAM
cuguccuuggggagcuucca

SEQ ID NO: 5964 - RNA, 20 nt, Artificial Sequence
  HTT spacer sequence ATCN PAM
aggcagcaagcacuuacgag

SEQ ID NO: 5965 - RNA, 20 nt, Artificial Sequence
  HTT spacer sequence ATCN PAM
agcaaagguggagagggacc

SEQ ID NO: 5966 - RNA, 20 nt, Artificial Sequence
  HTT spacer sequence ATCN PAM
guggagaugcccuguguugu

SEQ ID NO: 5967 - RNA, 20 nt, Artificial Sequence
  HTT spacer sequence ATCN PAM
ccacugaugacaaaccaagu

SEQ ID NO: 5968 - RNA, 20 nt, Artificial Sequence
  HTT spacer sequence ATCN PAM
ccuucgacaacacagggcau

SEQ ID NO: 5969 - RNA, 20 nt, Artificial Sequence
  HTT spacer sequence ATCN PAM
auuuuagccagcugcuucaa

SEQ ID NO: 5970 - RNA, 20 nt, Artificial Sequence
  HTT spacer sequence ATCN PAM
ucaauuuuagccagcugcuu

SEQ ID NO: 5971 - RNA, 20 nt, Artificial Sequence
  HTT spacer sequence ATCN PAM
gucacaggaauuuaauguau

SEQ ID NO: 5972 - RNA, 20 nt, Artificial Sequence
  HTT spacer sequence ATCN PAM
ucugucacaggaauuuaaug

SEQ ID NO: 5973 - RNA, 20 nt, Artificial Sequence
  HTT spacer sequence ATCN PAM
gcuuguauuuguguaauggu

SEQ ID NO: 5974 - RNA, 20 nt, Artificial Sequence
  HTT spacer sequence ATCN PAM
ucagugaggaaggugauaca

SEQ ID NO: 5975 - RNA, 20 nt, Artificial Sequence
  HTT spacer sequence ATCN PAM
ccuuccucacugaggaugaa

SEQ ID NO: 5976 - RNA, 20 nt, Artificial Sequence
  HTT spacer sequence ATCN PAM
uuucauguauacuuggcgua

SEQ ID NO: 5977 - RNA, 20 nt, Artificial Sequence
  HTT spacer sequence ATCN PAM
uuuuuguuucuuggaagguu

SEQ ID NO: 5978 - RNA, 20 nt, Artificial Sequence
  HTT spacer sequence ATCN PAM
gacacauuagcagugugccu

SEQ ID NO: 5979 - RNA, 20 nt, Artificial Sequence
  HTT spacer sequence ATCN PAM
acaucuucaagucugguagg

SEQ ID NO: 5980 - RNA, 20 nt, Artificial Sequence
  HTT spacer sequence ATCN PAM
ucaagucugguaggugaauc

SEQ ID NO: 5981 - RNA, 20 nt, Artificial Sequence
  HTT spacer sequence ATCN PAM
cauuagucuuccuggagugu

SEQ ID NO: 5982 - RNA, 20 nt, Artificial Sequence
  HTT spacer sequence ATCN PAM
gguguacucuuacagcaaca

SEQ ID NO: 5983 - RNA, 20 nt, Artificial Sequence
  HTT spacer sequence ATCN PAM
uuucaccacccugcuuucca

SEQ ID NO: 5984 - RNA, 20 nt, Artificial Sequence
  HTT spacer sequence ATCN PAM
ugaauaaugcugcuaugaau

SEQ ID NO: 5985 - RNA, 20 nt, Artificial Sequence
  HTT spacer sequence ATCN PAM
agggacacuucaguugguuc

SEQ ID NO: 5986 - RNA, 20 nt, Artificial Sequence
  HTT spacer sequence ATCN PAM
aucgagggacacuucaguug

SEQ ID NO: 5987 - RNA, 20 nt, Artificial Sequence
  HTT spacer sequence ATCN PAM
auucauccaucgagggacac

SEQ ID NO: 5988 - RNA, 20 nt, Artificial Sequence
  HTT spacer sequence ATCN PAM
gguguauauuuacaguggaa

SEQ ID NO: 5989 - RNA, 20 nt, Artificial Sequence
  HTT spacer sequence ATCN PAM
cauaguauuuguccuuuugu

SEQ ID NO: 5990 - RNA, 20 nt, Artificial Sequence
  HTT spacer sequence ATCN PAM
augaauuaacuacuccaggu

SEQ ID NO: 5991 - RNA, 20 nt, Artificial Sequence
  HTT spacer sequence ATCN PAM
uguaaaaauaacuccccucc

SEQ ID NO: 5992 - RNA, 20 nt, Artificial Sequence
  HTT spacer sequence ATCN PAM
ccaccauucauuucuagaau

SEQ ID NO: 5993 - RNA, 20 nt, Artificial Sequence
  HTT spacer sequence ATCN PAM
aagcacuuugagaggccaag

SEQ ID NO: 5994 - RNA, 20 nt, Artificial Sequence
  HTT spacer sequence ATCN PAM
uccugccuuggccucucaaa

SEQ ID NO: 5995 - RNA, 20 nt, Artificial Sequence
  HTT spacer sequence ATCN PAM
guacaaacaaacuagccggg

SEQ ID NO: 5996 - RNA, 20 nt, Artificial Sequence
  HTT spacer sequence ATCN PAM
ccggcuaguuuguuuguaca

SEQ ID NO: 5997 - RNA, 20 nt, Artificial Sequence
  HTT spacer sequence ATCN PAM
uccagccucagucuccugag

SEQ ID NO: 5998 - RNA, 20 nt, Artificial Sequence
  HTT spacer sequence ATCN PAM
cuugagcccaggagguuaag

SEQ ID NO: 5999 - RNA, 20 nt, Artificial Sequence
  HTT spacer sequence ATCN PAM
cacuagagacuuaaccuccu

SEQ ID NO: 6000 - RNA, 20 nt, Artificial Sequence
  HTT spacer sequence ATCN PAM
uaaccauuuuuggcucuugu

SEQ ID NO: 6001 - RNA, 20 nt, Artificial Sequence
  HTT spacer sequence ATCN PAM
caguggcuuaugccuguaau

SEQ ID NO: 6002 - RNA, 20 nt, Artificial Sequence
  HTT spacer sequence ATCN PAM
caacacuuugggaggucaag

SEQ ID NO: 6003 - RNA, 20 nt, Artificial Sequence
  HTT spacer sequence ATCN PAM
uuuuaccuugaccucccaaa

SEQ ID NO: 6004 - RNA, 20 nt, Artificial Sequence
  HTT spacer sequence ATCN PAM
cuugaagccaggagcuuggg

SEQ ID NO: 6005 - RNA, 20 nt, Artificial Sequence
  HTT spacer sequence ATCN PAM
agaccccuaucucuacaaag

SEQ ID NO: 6006 - RNA, 20 nt, Artificial Sequence
  HTT spacer sequence ATCN PAM
cuacaaagaaaaucaaaaac

SEQ ID NO: 6007 - RNA, 20 nt, Artificial Sequence
  HTT spacer sequence ATCN PAM
aaaacuagcuagauauggug

SEQ ID NO: 6008 - RNA, 20 nt, Artificial Sequence
  HTT spacer sequence ATCN PAM
agcuaguuuuugauuuucuu

SEQ ID NO: 6009 - RNA, 20 nt, Artificial Sequence
  HTT spacer sequence ATCN PAM
ucccaccucagccucccaag

SEQ ID NO: 6010 - RNA, 20 nt, Artificial Sequence
  HTT spacer sequence ATCN PAM
cuugagcucaggaguucgag

SEQ ID NO: 6011 - RNA, 20 nt, Artificial Sequence
  HTT spacer sequence ATCN PAM
uucuguagcccaggcuggag

SEQ ID NO: 6012 - RNA, 20 nt, Artificial Sequence
  HTT spacer sequence ATCN PAM
aaaaaaaaaaaaaaguaaac

SEQ ID NO: 6013 - RNA, 20 nt, Artificial Sequence
  HTT spacer sequence ATCN PAM
uggccuccaaauuuaacaca

SEQ ID NO: 6014 - RNA, 20 nt, Artificial Sequence
  HTT spacer sequence ATCN PAM
uuuguaaaaguaacaaaaac

SEQ ID NO: 6015 - RNA, 20 nt, Artificial Sequence
  HTT spacer sequence ATCN PAM
aggacggugaagguugggca

SEQ ID NO: 6016 - RNA, 20 nt, Artificial Sequence
  HTT spacer sequence ATCN PAM
cagcacuuugggaggcugag

SEQ ID NO: 6017 - RNA, 20 nt, Artificial Sequence
  HTT spacer sequence ATCN PAM
ccccgccucagccucccaaa

SEQ ID NO: 6018 - RNA, 20 nt, Artificial Sequence
  HTT spacer sequence ATCN PAM
cuugagcuugagaccagccu

SEQ ID NO: 6019 - RNA, 20 nt, Artificial Sequence
  HTT spacer sequence ATCN PAM
ccacaaaaauaaaaaaauaa

SEQ ID NO: 6020 - RNA, 20 nt, Artificial Sequence
  HTT spacer sequence ATCN PAM
uggcucacuacagcuugacc

SEQ ID NO: 6021 - RNA, 20 nt, Artificial Sequence
  HTT spacer sequence ATCN PAM
ugccacugcacuccagccug

SEQ ID NO: 6022 - RNA, 20 nt, Artificial Sequence
  HTT spacer sequence ATCN PAM
cgcccaggcuggagugcagu

SEQ ID NO: 6023 - RNA, 20 nt, Artificial Sequence
  HTT spacer sequence ATCN PAM
agaccaugucucuagagaaa

SEQ ID NO: 6024 - RNA, 20 nt, Artificial Sequence
  HTT spacer sequence ATCN PAM
uaugacuuucuuggguucac

SEQ ID NO: 6025 - RNA, 20 nt, Artificial Sequence
  HTT spacer sequence ATCN PAM
uucuucuuggaaaacacacu

SEQ ID NO: 6026 - RNA, 20 nt, Artificial Sequence
  HTT spacer sequence ATCN PAM
uuuguaaugagaaugcuuug

SEQ ID NO: 6027 - RNA, 20 nt, Artificial Sequence
  HTT spacer sequence ATCN PAM
ccuagaacuaggcuucuagc

SEQ ID NO: 6028 - RNA, 20 nt, Artificial Sequence
  HTT spacer sequence ATCN PAM
agccacauuuugguuugccu

SEQ ID NO: 6029 - RNA, 20 nt, Artificial Sequence
  HTT spacer sequence ATCN PAM
acugcugaacaaucaagcca

SEQ ID NO: 6030 - RNA, 20 nt, Artificial Sequence
  HTT spacer sequence ATCN PAM
guuggaagcccuugauauua

SEQ ID NO: 6031 - RNA, 20 nt, Artificial Sequence
  HTT spacer sequence ATCN PAM
agggcuuccaacagaucaac

SEQ ID NO: 6032 - RNA, 20 nt, Artificial Sequence
  HTT spacer sequence ATCN PAM
ugacuccuaagccgcuuaaa

SEQ ID NO: 6033 - RNA, 20 nt, Artificial Sequence
  HTT spacer sequence ATCN PAM
aagaccuauagaaagagaug

SEQ ID NO: 6034 - RNA, 20 nt, Artificial Sequence
  HTT spacer sequence ATCN PAM
cuuucuauaggucuuugauc

SEQ ID NO: 6035 - RNA, 20 nt, Artificial Sequence
  HTT spacer sequence ATCN PAM
uucuaggauccuuggcucuc

SEQ ID NO: 6036 - RNA, 20 nt, Artificial Sequence
  HTT spacer sequence ATCN PAM
uagaaggauggcaucucuuu

SEQ ID NO: 6037 - RNA, 20 nt, Artificial Sequence
  HTT spacer sequence ATCN PAM
uuggcucucuugggaacuag

SEQ ID NO: 6038 - RNA, 20 nt, Artificial Sequence
  HTT spacer sequence ATCN PAM
aguucccaagagagccaagg

SEQ ID NO: 6039 - RNA, 20 nt, Artificial Sequence
  HTT spacer sequence ATCN PAM
gaaucuaguucccaagagag

SEQ ID NO: 6040 - RNA, 20 nt, Artificial Sequence
  HTT spacer sequence ATCN PAM
uggagugcaauggugccauc

SEQ ID NO: 6041 - RNA, 20 nt, Artificial Sequence
  HTT spacer sequence ATCN PAM
cggcucaccgcaaccucugc

SEQ ID NO: 6042 - RNA, 20 nt, Artificial Sequence
  HTT spacer sequence ATCN PAM
cagcuacucgggaggcugag

SEQ ID NO: 6043 - RNA, 20 nt, Artificial Sequence
  HTT spacer sequence ATCN PAM
ccugaggucaggaguucgag

SEQ ID NO: 6044 - RNA, 20 nt, Artificial Sequence
  HTT spacer sequence ATCN PAM
acccgccucggccucccaaa

SEQ ID NO: 6045 - RNA, 20 nt, Artificial Sequence
  HTT spacer sequence ATCN PAM
cagcacuuugggaggccgag

SEQ ID NO: 6046 - RNA, 20 nt, Artificial Sequence
  HTT spacer sequence ATCN PAM
auguaugacugaaacacuga

SEQ ID NO: 6047 - RNA, 20 nt, Artificial Sequence
  HTT spacer sequence ATCN PAM
gaaccgaagacauuuucauu

SEQ ID NO: 6048 - RNA, 20 nt, Artificial Sequence
  HTT spacer sequence ATCN PAM
acuugccaaauuaacuuggu

SEQ ID NO: 6049 - RNA, 20 nt, Artificial Sequence
  HTT spacer sequence ATCN PAM
cuaccaucuacuugccaaau

SEQ ID NO: 6050 - RNA, 20 nt, Artificial Sequence
  HTT spacer sequence ATCN PAM
ucaccuagcauuguugggau

SEQ ID NO: 6051 - RNA, 20 nt, Artificial Sequence
  HTT spacer sequence ATCN PAM
caacaaugcuaggugaagau

SEQ ID NO: 6052 - RNA, 20 nt, Artificial Sequence
  HTT spacer sequence ATCN PAM
ucugaaguugacagaccaaa

SEQ ID NO: 6053 - RNA, 20 nt, Artificial Sequence
  HTT spacer sequence ATCN PAM
gaaguugacagaccaaaaua

SEQ ID NO: 6054 - RNA, 20 nt, Artificial Sequence
  HTT spacer sequence ATCN PAM
gaauuacauguuuaguucua

SEQ ID NO: 6055 - RNA, 20 nt, Artificial Sequence
  HTT spacer sequence ATCN PAM
caucuuuauuacgguagagu

SEQ ID NO: 6056 - RNA, 20 nt, Artificial Sequence
  HTT spacer sequence ATCN PAM
uuauuacgguagaguuaaug

SEQ ID NO: 6057 - RNA, 20 nt, Artificial Sequence
  HTT spacer sequence ATCN PAM
cccauuaacucuaccguaau

SEQ ID NO: 6058 - RNA, 20 nt, Artificial Sequence
  HTT spacer sequence ATCN PAM
ugacaaauuaugauguggug

SEQ ID NO: 6059 - RNA, 20 nt, Artificial Sequence
  HTT spacer sequence ATCN PAM
uaauuugucaugauuuauag

SEQ ID NO: 6060 - RNA, 20 nt, Artificial Sequence
  HTT spacer sequence ATCN PAM
ccacaucauaauuugucaug

SEQ ID NO: 6061 - RNA, 20 nt, Artificial Sequence
  HTT spacer sequence ATCN PAM
cugcaacugaaagacuguug

SEQ ID NO: 6062 - RNA, 20 nt, Artificial Sequence
  HTT spacer sequence ATCN PAM
aguguuguaauucugugguc

SEQ ID NO: 6063 - RNA, 20 nt, Artificial Sequence
  HTT spacer sequence ATCN PAM
cagcucugcuuucuucuuuu

SEQ ID NO: 6064 - RNA, 20 nt, Artificial Sequence
  HTT spacer sequence ATCN PAM
uuaaaauaaaauuuaaaaau

SEQ ID NO: 6065 - RNA, 20 nt, Artificial Sequence
  HTT spacer sequence ATCN PAM
aggcauguugguacaugccu

SEQ ID NO: 6066 - RNA, 20 nt, Artificial Sequence
  HTT spacer sequence ATCN PAM
ccugaagcuaagaguuaaag

SEQ ID NO: 6067 - RNA, 20 nt, Artificial Sequence
  HTT spacer sequence ATCN PAM
uccugccucugccucccaaa

SEQ ID NO: 6068 - RNA, 20 nt, Artificial Sequence
  HTT spacer sequence ATCN PAM
cugcuuccuguguuaguuuu

SEQ ID NO: 6069 - RNA, 20 nt, Artificial Sequence
  HTT spacer sequence ATCN PAM
ucggucaugugaaaacagcc

SEQ ID NO: 6070 - RNA, 20 nt, Artificial Sequence
  HTT spacer sequence ATCN PAM
cauaggccuacuugaggggc

SEQ ID NO: 6071 - RNA, 20 nt, Artificial Sequence
  HTT spacer sequence ATCN PAM
auggaaugcuguccagucuc

SEQ ID NO: 6072 - RNA, 20 nt, Artificial Sequence
  HTT spacer sequence ATCN PAM
guuacugcaugugcuccucu

SEQ ID NO: 6073 - RNA, 20 nt, Artificial Sequence
  HTT spacer sequence ATCN PAM
cuugcagcagaccaucaguu

SEQ ID NO: 6074 - RNA, 20 nt, Artificial Sequence
  HTT spacer sequence ATCN PAM
uuucuguuuucaguucuggu

SEQ ID NO: 6075 - RNA, 20 nt, Artificial Sequence
  HTT spacer sequence ATCN PAM
cuuuuuaaggcaacuacuug

SEQ ID NO: 6076 - RNA, 20 nt, Artificial Sequence
  HTT spacer sequence ATCN PAM
caaaagcacccugcucccau

SEQ ID NO: 6077 - RNA, 20 nt, Artificial Sequence
  HTT spacer sequence ATCN PAM
aagcuccuuucucuuacugg

SEQ ID NO: 6078 - RNA, 20 nt, Artificial Sequence
  HTT spacer sequence ATCN PAM
aguaagagaaaggagcuuug

SEQ ID NO: 6079 - RNA, 20 nt, Artificial Sequence
  HTT spacer sequence ATCN PAM
uagaguaaaagauagcauuu

SEQ ID NO: 6080 - RNA, 20 nt, Artificial Sequence
  HTT spacer sequence ATCN PAM
uuuacucuaagauauguaug

SEQ ID NO: 6081 - RNA, 20 nt, Artificial Sequence
  HTT spacer sequence ATCN PAM
ucaaauggaccaaggcugaa

SEQ ID NO: 6082 - RNA, 20 nt, Artificial Sequence
  HTT spacer sequence ATCN PAM
uggcucuugccugcacggaa

SEQ ID NO: 6083 - RNA, 20 nt, Artificial Sequence
  HTT spacer sequence ATCN PAM
caagucuugauauuuccuau

SEQ ID NO: 6084 - RNA, 20 nt, Artificial Sequence
  HTT spacer sequence ATCN PAM
agacuugugauacugacgca

SEQ ID NO: 6085 - RNA, 20 nt, Artificial Sequence
  HTT spacer sequence ATCN PAM
ugccucugccugcccaccca

SEQ ID NO: 6086 - RNA, 20 nt, Artificial Sequence
  HTT spacer sequence ATCN PAM
ugccugccugccuguacucu

SEQ ID NO: 6087 - RNA, 20 nt, Artificial Sequence
  HTT spacer sequence ATCN PAM
uggagaaaggggccucuuca

SEQ ID NO: 6088 - RNA, 20 nt, Artificial Sequence
  HTT spacer sequence ATCN PAM
uuaaaaagaaacaagaaaau

SEQ ID NO: 6089 - RNA, 20 nt, Artificial Sequence
  HTT spacer sequence ATCN PAM
ucggauuaugcuucacugac

SEQ ID NO: 6090 - RNA, 20 nt, Artificial Sequence
  HTT spacer sequence ATCN PAM
gaagaucuuuaaaaagaaac

SEQ ID NO: 6091 - RNA, 20 nt, Artificial Sequence
  HTT spacer sequence ATCN PAM
uucauuaacaagccauauuu

SEQ ID NO: 6092 - RNA, 20 nt, Artificial Sequence
  HTT spacer sequence ATCN PAM
aaaccaacugguggcaaaau

SEQ ID NO: 6093 - RNA, 20 nt, Artificial Sequence
  HTT spacer sequence ATCN PAM
aauccaaaccaacugguggc

SEQ ID NO: 6094 - RNA, 20 nt, Artificial Sequence
  HTT spacer sequence ATCN PAM
cacaaaggcaagacuagucc

SEQ ID NO: 6095 - RNA, 20 nt, Artificial Sequence
  HTT spacer sequence ATCN PAM
cucggacauguagaaggaca

SEQ ID NO: 6096 - RNA, 20 nt, Artificial Sequence
  HTT spacer sequence ATCN PAM
cugugcagcucaaauguggu

SEQ ID NO: 6097 - RNA, 20 nt, Artificial Sequence
  HTT spacer sequence ATCN PAM
gcgcaauaagacagugacca

SEQ ID NO: 6098 - RNA, 20 nt, Artificial Sequence
  HTT spacer sequence ATCN PAM
cacaauugaggcaaaauauu

SEQ ID NO: 6099 - RNA, 20 nt, Artificial Sequence
  HTT spacer sequence ATCN PAM
ugucucugcuggaaguccua

SEQ ID NO: 6100 - RNA, 20 nt, Artificial Sequence
  HTT spacer sequence ATCN PAM
gaccagccacauuucaggua

SEQ ID NO: 6101 - RNA, 20 nt, Artificial Sequence
  HTT spacer sequence ATCN PAM
aaucagaccagccacauuuc

SEQ ID NO: 6102 - RNA, 20 nt, Artificial Sequence
  HTT spacer sequence ATCN PAM
acacagagcuguuuaaauuu

SEQ ID NO: 6103 - RNA, 20 nt, Artificial Sequence
  HTT spacer sequence ATCN PAM
uuugaccuuauuuaaucugc

SEQ ID NO: 6104 - RNA, 20 nt, Artificial Sequence
  HTT spacer sequence ATCN PAM
gcccaacauuugcaaguaag

SEQ ID NO: 6105 - RNA, 20 nt, Artificial Sequence
  HTT spacer sequence ATCN PAM
aauacaguaauucugccacc

SEQ ID NO: 6106 - RNA, 20 nt, Artificial Sequence
  HTT spacer sequence ATCN PAM
ugaaaccaaucaaauacagu

SEQ ID NO: 6107 - RNA, 20 nt, Artificial Sequence
  HTT spacer sequence ATCN PAM
cguguuuuuauauaaguaag

SEQ ID NO: 6108 - RNA, 20 nt, Artificial Sequence
  HTT spacer sequence ATCN PAM
caaagugguuugccuauuuc

SEQ ID NO: 6109 - RNA, 20 nt, Artificial Sequence
  HTT spacer sequence ATCN PAM
aggauaagcagaauagccaa

SEQ ID NO: 6110 - RNA, 20 nt, Artificial Sequence
  HTT spacer sequence ATCN PAM
uagauggaaugugaaauagg

SEQ ID NO: 6111 - RNA, 20 nt, Artificial Sequence
  HTT spacer sequence ATCN PAM
uucuuggcuauucugcuuau

SEQ ID NO: 6112 - RNA, 20 nt, Artificial Sequence
  HTT spacer sequence ATCN PAM
cucucuuuugguccaagaua

SEQ ID NO: 6113 - RNA, 20 nt, Artificial Sequence
  HTT spacer sequence ATCN PAM
uggaccaaaagagagggaug

SEQ ID NO: 6114 - RNA, 20 nt, Artificial Sequence
  HTT spacer sequence ATCN PAM
guuucuaaaccagucuaucu

SEQ ID NO: 6115 - RNA, 20 nt, Artificial Sequence
  HTT spacer sequence ATCN PAM
ucuguuucuaaaccagucua

SEQ ID NO: 6116 - RNA, 20 nt, Artificial Sequence
  HTT spacer sequence ATCN PAM
gcuuuguuuguuguccaugu

SEQ ID NO: 6117 - RNA, 20 nt, Artificial Sequence
  HTT spacer sequence ATCN PAM
cggugagcaaagcuggaagg

SEQ ID NO: 6118 - RNA, 20 nt, Artificial Sequence
  HTT spacer sequence ATCN PAM
ugugcucuucccugccugcc

SEQ ID NO: 6119 - RNA, 20 nt, Artificial Sequence
  HTT spacer sequence ATCN PAM
agacuauacccagucagggu

SEQ ID NO: 6120 - RNA, 20 nt, Artificial Sequence
  HTT spacer sequence ATCN PAM
ccaccacccacgaccaggac

SEQ ID NO: 6121 - RNA, 20 nt, Artificial Sequence
  HTT spacer sequence ATCN PAM
ccucugccacagaggaaggg

SEQ ID NO: 6122 - RNA, 20 nt, Artificial Sequence
  HTT spacer sequence ATCN PAM
augucaacuuuauuacuaua

SEQ ID NO: 6123 - RNA, 20 nt, Artificial Sequence
  HTT spacer sequence ATCN PAM
caguuaauucuuagaacugc

SEQ ID NO: 6124 - RNA, 20 nt, Artificial Sequence
  HTT spacer sequence ATCN PAM
uuuagaacuuaagcacaaag

SEQ ID NO: 6125 - RNA, 20 nt, Artificial Sequence
  HTT spacer sequence ATCN PAM
ugugccaaaaccaagaauga

SEQ ID NO: 6126 - RNA, 20 nt, Artificial Sequence
  HTT spacer sequence ATCN PAM
aucuuucucucaucaggcca

SEQ ID NO: 6127 - RNA, 20 nt, Artificial Sequence
  HTT spacer sequence ATCN PAM
augggcaagaaagaaugcuu

SEQ ID NO: 6128 - RNA, 20 nt, Artificial Sequence
  HTT spacer sequence ATCN PAM
uucucucaucaggccacuuc

SEQ ID NO: 6129 - RNA, 20 nt, Artificial Sequence
  HTT spacer sequence ATCN PAM
ggccacuucuuggguugaua

SEQ ID NO: 6130 - RNA, 20 nt, Artificial Sequence
  HTT spacer sequence ATCN PAM
acccaagaaguggccugaug

SEQ ID NO: 6131 - RNA, 20 nt, Artificial Sequence
  HTT spacer sequence ATCN PAM
cuucuccacgccacacagug

SEQ ID NO: 6132 - RNA, 20 nt, Artificial Sequence
  HTT spacer sequence ATCN PAM
agagcuccuagggcagaaac

SEQ ID NO: 6133 - RNA, 20 nt, Artificial Sequence
  HTT spacer sequence ATCN PAM
caauuccaccaucgagagcu

SEQ ID NO: 6134 - RNA, 20 nt, Artificial Sequence
  HTT spacer sequence ATCN PAM
caucccaauuccaccaucga

SEQ ID NO: 6135 - RNA, 20 nt, Artificial Sequence
  HTT spacer sequence ATCN PAM
cacauccugccuguuuugaa

SEQ ID NO: 6136 - RNA, 20 nt, Artificial Sequence
  HTT spacer sequence ATCN PAM
ugccuguuuugaaaacagca

SEQ ID NO: 6137 - RNA, 20 nt, Artificial Sequence
  HTT spacer sequence ATCN PAM
gccuuccugcccgccuccuu

SEQ ID NO: 6138 - RNA, 20 nt, Artificial Sequence
  HTT spacer sequence ATCN PAM
uggucuccgggcacuugguc

SEQ ID NO: 6139 - RNA, 20 nt, Artificial Sequence
  HTT spacer sequence ATCN PAM
caaggguggcacaggggagc

SEQ ID NO: 6140 - RNA, 20 nt, Artificial Sequence
  HTT spacer sequence ATCN PAM
acaggcucugccuucuuucu

SEQ ID NO: 6141 - RNA, 20 nt, Artificial Sequence
  HTT spacer sequence ATCN PAM
cuacucgggacccuaggaag

SEQ ID NO: 6142 - RNA, 20 nt, Artificial Sequence
  HTT spacer sequence ATCN PAM
ucucaucucagccacguucu

SEQ ID NO: 6143 - RNA, 20 nt, Artificial Sequence
  HTT spacer sequence ATCN PAM
cagccacguucucagugcca

SEQ ID NO: 6144 - RNA, 20 nt, Artificial Sequence
  HTT spacer sequence ATCN PAM
gugaaccaagaacacccuca

SEQ ID NO: 6145 - RNA, 20 nt, Artificial Sequence
  HTT spacer sequence ATCN PAM
ucugugucugguuggggaca

SEQ ID NO: 6146 - RNA, 20 nt, Artificial Sequence
  HTT spacer sequence ATCN PAM
aaggccacaaagccuucuuu

SEQ ID NO: 6147 - RNA, 20 nt, Artificial Sequence
  HTT spacer sequence ATCN PAM
gagaccacagugcugcugcu

SEQ ID NO: 6148 - RNA, 20 nt, Artificial Sequence
  HTT spacer sequence ATCN PAM
ucacagaaaacacaucagag

SEQ ID NO: 6149 - RNA, 20 nt, Artificial Sequence
  HTT spacer sequence ATCN PAM
ccuguuuuuauccucacaga

SEQ ID NO: 6150 - RNA, 20 nt, Artificial Sequence
  HTT spacer sequence ATCN PAM
uggaaucaccuguuuuuauc

SEQ ID NO: 6151 - RNA, 20 nt, Artificial Sequence
  HTT spacer sequence ATCN PAM
cauggugacacccgccuggu

SEQ ID NO: 6152 - RNA, 20 nt, Artificial Sequence
  HTT spacer sequence ATCN PAM
gaauagcaaaagcuuuagaa

SEQ ID NO: 6153 - RNA, 20 nt, Artificial Sequence
  HTT spacer sequence ATCN PAM
cucucucugcggagagcaag

SEQ ID NO: 6154 - RNA, 20 nt, Artificial Sequence
  HTT spacer sequence ATCN PAM
uucucaugagccucugucca

SEQ ID NO: 6155 - RNA, 20 nt, Artificial Sequence
  HTT spacer sequence ATCN PAM
cagcggaacaggggaccuuc

SEQ ID NO: 6156 - RNA, 20 nt, Artificial Sequence
  HTT spacer sequence ATCN PAM
uguccccaaguucauccuca

SEQ ID NO: 6157 - RNA, 20 nt, Artificial Sequence
  HTT spacer sequence ATCN PAM
ucauccuccugccggcuucc

SEQ ID NO: 6158 - RNA, 20 nt, Artificial Sequence
  HTT spacer sequence ATCN PAM
uccugccggcuuccuggccc

SEQ ID NO: 6159 - RNA, 20 nt, Artificial Sequence
  HTT spacer sequence ATCN PAM
uucuggauucucuggaauug

SEQ ID NO: 6160 - RNA, 20 nt, Artificial Sequence
  HTT spacer sequence ATCN PAM
agaaggauguggcgucagga

SEQ ID NO: 6161 - RNA, 20 nt, Artificial Sequence
  HTT spacer sequence ATCN PAM
aaggcaaaauucaauuccag

SEQ ID NO: 6162 - RNA, 20 nt, Artificial Sequence
  HTT spacer sequence ATCN PAM
auugcaggccagguguggug

SEQ ID NO: 6163 - RNA, 20 nt, Artificial Sequence
  HTT spacer sequence ATCN PAM
ugugcacuuugggaagccaa

SEQ ID NO: 6164 - RNA, 20 nt, Artificial Sequence
  HTT spacer sequence ATCN PAM
gcccaccuuggcuucccaaa

SEQ ID NO: 6165 - RNA, 20 nt, Artificial Sequence
  HTT spacer sequence ATCN PAM
caaacuccugggcucaagca

SEQ ID NO: 6166 - RNA, 20 nt, Artificial Sequence
  HTT spacer sequence ATCN PAM
uguuucuauagaaaauacaa

SEQ ID NO: 6167 - RNA, 20 nt, Artificial Sequence
  HTT spacer sequence ATCN PAM
uccugucucagguuccugag

SEQ ID NO: 6168 - RNA, 20 nt, Artificial Sequence
  HTT spacer sequence ATCN PAM
auugagccccggaggccaaa

SEQ ID NO: 6169 - RNA, 20 nt, Artificial Sequence
  HTT spacer sequence ATCN PAM
cagcccacuguagcuuuggc

SEQ ID NO: 6170 - RNA, 20 nt, Artificial Sequence
  HTT spacer sequence ATCN PAM
ugccacuguacuccagucug

SEQ ID NO: 6171 - RNA, 20 nt, Artificial Sequence
  HTT spacer sequence ATCN PAM
auugcauacuucaccguagc

SEQ ID NO: 6172 - RNA, 20 nt, Artificial Sequence
  HTT spacer sequence ATCN PAM
uaggcccuccagcuugauuc

SEQ ID NO: 6173 - RNA, 20 nt, Artificial Sequence
  HTT spacer sequence ATCN PAM
agcuggagggccuaggauga

SEQ ID NO: 6174 - RNA, 20 nt, Artificial Sequence
  HTT spacer sequence ATCN PAM
auuaaguggcuagacagaga

SEQ ID NO: 6175 - RNA, 20 nt, Artificial Sequence
  HTT spacer sequence ATCN PAM
ccuuugugaccuuggcuguu

SEQ ID NO: 6176 - RNA, 20 nt, Artificial Sequence
  HTT spacer sequence ATCN PAM
agcuucucgacacgggacuu

SEQ ID NO: 6177 - RNA, 20 nt, Artificial Sequence
  HTT spacer sequence ATCN PAM
aauuaacaagaagaggcccu

SEQ ID NO: 6178 - RNA, 20 nt, Artificial Sequence
  HTT spacer sequence ATCN PAM
uuagggauguucagaauccc

SEQ ID NO: 6179 - RNA, 20 nt, Artificial Sequence
  HTT spacer sequence ATCN PAM
cuaaugaucuaauuaacaag

SEQ ID NO: 6180 - RNA, 20 nt, Artificial Sequence
  HTT spacer sequence ATCN PAM
cagcaucauaguauguuccu

SEQ ID NO: 6181 - RNA, 20 nt, Artificial Sequence
  HTT spacer sequence ATCN PAM
uaguauguuccuccucccgc

SEQ ID NO: 6182 - RNA, 20 nt, Artificial Sequence
  HTT spacer sequence ATCN PAM
acuaggagguggcccucaga

SEQ ID NO: 6183 - RNA, 20 nt, Artificial Sequence
  HTT spacer sequence ATCN PAM
uccaccugaacuucccuaau

SEQ ID NO: 6184 - RNA, 20 nt, Artificial Sequence
  HTT spacer sequence ATCN PAM
guucgcagggcuguaauaag

SEQ ID NO: 6185 - RNA, 20 nt, Artificial Sequence
  HTT spacer sequence ATCN PAM
uacaccuaaggaagcugagg

SEQ ID NO: 6186 - RNA, 20 nt, Artificial Sequence
  HTT spacer sequence ATCN PAM
aaggucacccagguaguaga

SEQ ID NO: 6187 - RNA, 20 nt, Artificial Sequence
  HTT spacer sequence ATCN PAM
uggcucuacugucuacuacc

SEQ ID NO: 6188 - RNA, 20 nt, Artificial Sequence
  HTT spacer sequence ATCN PAM
gaaccaggcagucugauuca

SEQ ID NO: 6189 - RNA, 20 nt, Artificial Sequence
  HTT spacer sequence ATCN PAM
gacugccugguucagaucgu

SEQ ID NO: 6190 - RNA, 20 nt, Artificial Sequence
  HTT spacer sequence ATCN PAM
aagcuguguucuagguggcu

SEQ ID NO: 6191 - RNA, 20 nt, Artificial Sequence
  HTT spacer sequence ATCN PAM
cgggucugucccugcacgug

SEQ ID NO: 6192 - RNA, 20 nt, Artificial Sequence
  HTT spacer sequence ATCN PAM
uccuugaaggcagugcaugc

SEQ ID NO: 6193 - RNA, 20 nt, Artificial Sequence
  HTT spacer sequence ATCN PAM
uucuguggggcccucuguuc

SEQ ID NO: 6194 - RNA, 20 nt, Artificial Sequence
  HTT spacer sequence ATCN PAM
caggaaaccuggaggagcca

SEQ ID NO: 6195 - RNA, 20 nt, Artificial Sequence
  HTT spacer sequence ATCN PAM
ccaaagugaaaggguccuaa

SEQ ID NO: 6196 - RNA, 20 nt, Artificial Sequence
  HTT spacer sequence ATCN PAM
acacauccccaaagugaaag

SEQ ID NO: 6197 - RNA, 20 nt, Artificial Sequence
  HTT spacer sequence ATCN PAM
caaaaaaaaaaaaaaaaaaa

SEQ ID NO: 6198 - RNA, 20 nt, Artificial Sequence
  HTT spacer sequence ATCN PAM
ugccacugcacucuagccug

SEQ ID NO: 6199 - RNA, 20 nt, Artificial Sequence
  HTT spacer sequence ATCN PAM
uggccacugcugccccugcc

SEQ ID NO: 6200 - RNA, 20 nt, Artificial Sequence
  HTT spacer sequence ATCN PAM
cagguauuugggaggcggga

SEQ ID NO: 6201 - RNA, 20 nt, Artificial Sequence
  HTT spacer sequence ATCN PAM
cuugaggucaggaguucgag

SEQ ID NO: 6202 - RNA, 20 nt, Artificial Sequence
  HTT spacer sequence ATCN PAM
gcccaccuuggccucccaaa

SEQ ID NO: 6203 - RNA, 20 nt, Artificial Sequence
  HTT spacer sequence ATCN PAM
cagcacuuugggaggccaag

SEQ ID NO: 6204 - RNA, 20 nt, Artificial Sequence
  HTT spacer sequence ATCN PAM
gaaauaaaauuuugauccca

SEQ ID NO: 6205 - RNA, 20 nt, Artificial Sequence
  HTT spacer sequence ATCN PAM
aaauuuuauuucugauuuaa

SEQ ID NO: 6206 - RNA, 20 nt, Artificial Sequence
  HTT spacer sequence ATCN PAM
caacagugaugccaggcagc

SEQ ID NO: 6207 - RNA, 20 nt, Artificial Sequence
  HTT spacer sequence ATCN PAM
cuguugggaucaaaauuuua

SEQ ID NO: 6208 - RNA, 20 nt, Artificial Sequence
  HTT spacer sequence ATCN PAM
gggcugccuggcaucacugu

SEQ ID NO: 6209 - RNA, 20 nt, Artificial Sequence
  HTT spacer sequence ATCN PAM
gggggagaggguggccuugg

SEQ ID NO: 6210 - RNA, 20 nt, Artificial Sequence
  HTT spacer sequence ATCN PAM
aaaggagaggauagaaugaa

SEQ ID NO: 6211 - RNA, 20 nt, Artificial Sequence
  HTT spacer sequence ATCN PAM
ucuccuuuggauaaacaagg

SEQ ID NO: 6212 - RNA, 20 nt, Artificial Sequence
  HTT spacer sequence ATCN PAM
ugacuucauucuauccucuc

SEQ ID NO: 6213 - RNA, 20 nt, Artificial Sequence
  HTT spacer sequence ATCN PAM
uucucagggcuccaggaauc

SEQ ID NO: 6214 - RNA, 20 nt, Artificial Sequence
  HTT spacer sequence ATCN PAM
agcugaguguguugcugagg

SEQ ID NO: 6215 - RNA, 20 nt, Artificial Sequence
  HTT spacer sequence ATCN PAM
ugggccuaggcaggccaagc

SEQ ID NO: 6216 - RNA, 20 nt, Artificial Sequence
  HTT spacer sequence ATCN PAM
cugcacucgggccacagcgg

SEQ ID NO: 6217 - RNA, 20 nt, Artificial Sequence
  HTT spacer sequence ATCN PAM
cacuuauuuaauggacuggu

SEQ ID NO: 6218 - RNA, 20 nt, Artificial Sequence
  HTT spacer sequence ATCN PAM
cagcacuuugggaggcugag

SEQ ID NO: 6219 - RNA, 20 nt, Artificial Sequence
  HTT spacer sequence ATCN PAM
acccgccucagccucccaaa

SEQ ID NO: 6220 - RNA, 20 nt, Artificial Sequence
  HTT spacer sequence ATCN PAM
cgagcucaggaguucaagac

SEQ ID NO: 6221 - RNA, 20 nt, Artificial Sequence
  HTT spacer sequence ATCN PAM
uagcuacuugggaggcugag

SEQ ID NO: 6222 - RNA, 20 nt, Artificial Sequence
  HTT spacer sequence ATCN PAM
uggcucacugcaaacuccac

SEQ ID NO: 6223 - RNA, 20 nt, Artificial Sequence
  HTT spacer sequence ATCN PAM
caaaaaaaaaaaaaaaagua

SEQ ID NO: 6224 - RNA, 20 nt, Artificial Sequence
  HTT spacer sequence ATCN PAM
uacuuuuuuuuuuuuuuuug

SEQ ID NO: 6225 - RNA, 20 nt, Artificial Sequence
  HTT spacer sequence ATCN PAM
guuucugcuuagaaaaauca

SEQ ID NO: 6226 - RNA, 20 nt, Artificial Sequence
  HTT spacer sequence ATCN PAM
gaauuuucuaaaugccaggu

SEQ ID NO: 6227 - RNA, 20 nt, Artificial Sequence
  HTT spacer sequence ATCN PAM
ucgcguagccauguggcacu

SEQ ID NO: 6228 - RNA, 20 nt, Artificial Sequence
  HTT spacer sequence ATCN PAM
cgguccagugccacauggcu

SEQ ID NO: 6229 - RNA, 20 nt, Artificial Sequence
  HTT spacer sequence ATCN PAM
cagcagcugccacuaggcug

SEQ ID NO: 6230 - RNA, 20 nt, Artificial Sequence
  HTT spacer sequence ATCN PAM
cugcggaacagccuaguggc

SEQ ID NO: 6231 - RNA, 20 nt, Artificial Sequence
  HTT spacer sequence ATCN PAM
uggaacgagcccgcaaguuc

SEQ ID NO: 6232 - RNA, 20 nt, Artificial Sequence
  HTT spacer sequence ATCN PAM
ccacccacccggcccuggug

SEQ ID NO: 6233 - RNA, 20 nt, Artificial Sequence
  HTT spacer sequence ATCN PAM
gacaccagagcagcaccagg

SEQ ID NO: 6234 - RNA, 20 nt, Artificial Sequence
  HTT spacer sequence ATCN PAM
cauuuagaaagcaacugcua

SEQ ID NO: 6235 - RNA, 20 nt, Artificial Sequence
  HTT spacer sequence ATCN PAM
ugugggauaugcuugucaug

SEQ ID NO: 6236 - RNA, 20 nt, Artificial Sequence
  HTT spacer sequence ATCN PAM
cacaagaugcaaugguguca

SEQ ID NO: 6237 - RNA, 20 nt, Artificial Sequence
  HTT spacer sequence ATCN PAM
uuagauaaugaaguaacagu

SEQ ID NO: 6238 - RNA, 20 nt, Artificial Sequence
  HTT spacer sequence ATCN PAM
aaggauaaccagaaccacau

SEQ ID NO: 6239 - RNA, 20 nt, Artificial Sequence
  HTT spacer sequence ATCN PAM
ucagcacaguauuucuggaa

SEQ ID NO: 6240 - RNA, 20 nt, Artificial Sequence
  HTT spacer sequence ATCN PAM
ugagccuuccagaaauacug

SEQ ID NO: 6241 - RNA, 20 nt, Artificial Sequence
  HTT spacer sequence ATCN PAM
cacgcuggggaaaagaaguu

SEQ ID NO: 6242 - RNA, 20 nt, Artificial Sequence
  HTT spacer sequence ATCN PAM
auacugagcagagaggcacg

SEQ ID NO: 6243 - RNA, 20 nt, Artificial Sequence
  HTT spacer sequence ATCN PAM
acucugugccguauguagug

SEQ ID NO: 6244 - RNA, 20 nt, Artificial Sequence
  HTT spacer sequence ATCN PAM
accaagcauuucaaaugucg

SEQ ID NO: 6245 - RNA, 20 nt, Artificial Sequence
  HTT spacer sequence ATCN PAM
uaacaggccuaagacaucca

SEQ ID NO: 6246 - RNA, 20 nt, Artificial Sequence
  HTT spacer sequence ATCN PAM
gcugcggauucagcagauca

SEQ ID NO: 6247 - RNA, 20 nt, Artificial Sequence
  HTT spacer sequence ATCN PAM
gcagcugauuucuaugcacg

SEQ ID NO: 6248 - RNA, 20 nt, Artificial Sequence
  HTT spacer sequence ATCN PAM
gcugaauccgcagcugauuu

SEQ ID NO: 6249 - RNA, 20 nt, Artificial Sequence
  HTT spacer sequence ATCN PAM
cuccuuuucugacagauggg

SEQ ID NO: 6250 - RNA, 20 nt, Artificial Sequence
  HTT spacer sequence ATCN PAM
gucagaaaaggagugaucug

SEQ ID NO: 6251 - RNA, 20 nt, Artificial Sequence
  HTT spacer sequence ATCN PAM
gaguaagcaggcccaucugu

SEQ ID NO: 6252 - RNA, 20 nt, Artificial Sequence
  HTT spacer sequence ATCN PAM
gaaagcucugaaucugggaa

SEQ ID NO: 6253 - RNA, 20 nt, Artificial Sequence
  HTT spacer sequence ATCN PAM
gggaauuguguccccugaau

SEQ ID NO: 6254 - RNA, 20 nt, Artificial Sequence
  HTT spacer sequence ATCN PAM
aagcauuucuguuacuccaa

SEQ ID NO: 6255 - RNA, 20 nt, Artificial Sequence
  HTT spacer sequence ATCN PAM
ucuaagcauuucuguuacuc

SEQ ID NO: 6256 - RNA, 20 nt, Artificial Sequence
  HTT spacer sequence ATCN PAM
gagggggucacgaaacaguc

SEQ ID NO: 6257 - RNA, 20 nt, Artificial Sequence
  HTT spacer sequence ATCN PAM
aguuuuccuuuauaaccuuc

SEQ ID NO: 6258 - RNA, 20 nt, Artificial Sequence
  HTT spacer sequence ATCN PAM
ugaaauaacauuaauagauu

SEQ ID NO: 6259 - RNA, 20 nt, Artificial Sequence
  HTT spacer sequence ATCN PAM
auuaauguuauuucaggaua

SEQ ID NO: 6260 - RNA, 20 nt, Artificial Sequence
  HTT spacer sequence ATCN PAM
cagcaccuugggaagccaag

SEQ ID NO: 6261 - RNA, 20 nt, Artificial Sequence
  HTT spacer sequence ATCN PAM
gcccgccuuggcuucccaag

SEQ ID NO: 6262 - RNA, 20 nt, Artificial Sequence
  HTT spacer sequence ATCN PAM
ccugaggccaggacuucgag

SEQ ID NO: 6263 - RNA, 20 nt, Artificial Sequence
  HTT spacer sequence ATCN PAM
uguuggccaggcuggucucg

SEQ ID NO: 6264 - RNA, 20 nt, Artificial Sequence
  HTT spacer sequence ATCN PAM
cuugaaccuaggaggaaaag

SEQ ID NO: 6265 - RNA, 20 nt, Artificial Sequence
  HTT spacer sequence ATCN PAM
cagcucacugcaaccuuuuc

SEQ ID NO: 6266 - RNA, 20 nt, Artificial Sequence
  HTT spacer sequence ATCN PAM
cgccacugcacucuagccug

SEQ ID NO: 6267 - RNA, 20 nt, Artificial Sequence
  HTT spacer sequence ATCN PAM
caaaaaaaaaaaaaaaaaaa

SEQ ID NO: 6268 - RNA, 20 nt, Artificial Sequence
  HTT spacer sequence ATCN PAM
auuaauuuuuuuuuuuuuuu

SEQ ID NO: 6269 - RNA, 20 nt, Artificial Sequence
  HTT spacer sequence ATCN PAM
auggauuuuuaaccuaauaa

SEQ ID NO: 6270 - RNA, 20 nt, Artificial Sequence
  HTT spacer sequence ATCN PAM
auugauccauuaauuuuuuu

SEQ ID NO: 6271 - RNA, 20 nt, Artificial Sequence
  HTT spacer sequence ATCN PAM
uucuuuaaugguaauguaaa

SEQ ID NO: 6272 - RNA, 20 nt, Artificial Sequence
  HTT spacer sequence ATCN PAM
uaauuuuaccuuuacauuac

SEQ ID NO: 6273 - RNA, 20 nt, Artificial Sequence
  HTT spacer sequence ATCN PAM
ccauaaguguccaagaugcc

SEQ ID NO: 6274 - RNA, 20 nt, Artificial Sequence
  HTT spacer sequence ATCN PAM
uggacacuuauggggauuua

SEQ ID NO: 6275 - RNA, 20 nt, Artificial Sequence
  HTT spacer sequence ATCN PAM
cccaccacccacagcuggaa

SEQ ID NO: 6276 - RNA, 20 nt, Artificial Sequence
  HTT spacer sequence ATCN PAM
uuuuauuuccaugagaugag

SEQ ID NO: 6277 - RNA, 20 nt, Artificial Sequence
  HTT spacer sequence ATCN PAM
cauggaaauaaaaagauacu

SEQ ID NO: 6278 - RNA, 20 nt, Artificial Sequence
  HTT spacer sequence ATCN PAM
aguugcagaaauuccugcug

SEQ ID NO: 6279 - RNA, 20 nt, Artificial Sequence
  HTT spacer sequence ATCN PAM
ccucucaggcuggcucccag

SEQ ID NO: 6280 - RNA, 20 nt, Artificial Sequence
  HTT spacer sequence ATCN PAM
gggagccagccugagaggag

SEQ ID NO: 6281 - RNA, 20 nt, Artificial Sequence
  HTT spacer sequence ATCN PAM
uaaacccacagugacagagu

SEQ ID NO: 6282 - RNA, 20 nt, Artificial Sequence
  HTT spacer sequence ATCN PAM
gucuuaccucuuggugaacu

SEQ ID NO: 6283 - RNA, 20 nt, Artificial Sequence
  HTT spacer sequence ATCN PAM
uguguaccacaacacaccca

SEQ ID NO: 6284 - RNA, 20 nt, Artificial Sequence
  HTT spacer sequence ATCN PAM
uguucugagucacccuagau

SEQ ID NO: 6285 - RNA, 20 nt, Artificial Sequence
  HTT spacer sequence ATCN PAM
agggugacucagaacaagau

SEQ ID NO: 6286 - RNA, 20 nt, Artificial Sequence
  HTT spacer sequence ATCN PAM
caggccauacaccgcccggu

SEQ ID NO: 6287 - RNA, 20 nt, Artificial Sequence
  HTT spacer sequence ATCN PAM
acuguagucaguaacagccc

SEQ ID NO: 6288 - RNA, 20 nt, Artificial Sequence
  HTT spacer sequence ATCN PAM
agauauagaggagugcuguc

SEQ ID NO: 6289 - RNA, 20 nt, Artificial Sequence
  HTT spacer sequence ATCN PAM
ugaugugguugggggagggg

SEQ ID NO: 6290 - RNA, 20 nt, Artificial Sequence
  HTT spacer sequence ATCN PAM
ugccccuccccaggucuaac

SEQ ID NO: 6291 - RNA, 20 nt, Artificial Sequence
  HTT spacer sequence ATCN PAM
gugcucugucccucuguuca

SEQ ID NO: 6292 - RNA, 20 nt, Artificial Sequence
  HTT spacer sequence ATCN PAM
auaggcuaggugugguggcu

SEQ ID NO: 6293 - RNA, 20 nt, Artificial Sequence
  HTT spacer sequence ATCN PAM
caguauuuugagaggcugaa

SEQ ID NO: 6294 - RNA, 20 nt, Artificial Sequence
  HTT spacer sequence ATCN PAM
ucccacuucagccucucaaa

SEQ ID NO: 6295 - RNA, 20 nt, Artificial Sequence
  HTT spacer sequence ATCN PAM
ccagaaaaaaaaaauuuaaa

SEQ ID NO: 6296 - RNA, 20 nt, Artificial Sequence
  HTT spacer sequence ATCN PAM
cgucccuguaguucagcugc

SEQ ID NO: 6297 - RNA, 20 nt, Artificial Sequence
  HTT spacer sequence ATCN PAM
uccugccucagccucccaag

SEQ ID NO: 6298 - RNA, 20 nt, Artificial Sequence
  HTT spacer sequence ATCN PAM
cuugagcucaggaguuagag

SEQ ID NO: 6299 - RNA, 20 nt, Artificial Sequence
  HTT spacer sequence ATCN PAM
uagcucacuguaaccucuaa

SEQ ID NO: 6300 - RNA, 20 nt, Artificial Sequence
  HTT spacer sequence ATCN PAM
ugccacugugcuccagccua

SEQ ID NO: 6301 - RNA, 20 nt, Artificial Sequence
  HTT spacer sequence ATCN PAM
guagaauuuugguuuuuacc

SEQ ID NO: 6302 - RNA, 20 nt, Artificial Sequence
  HTT spacer sequence ATCN PAM
ugagggauuacaggaaaagu

SEQ ID NO: 6303 - RNA, 20 nt, Artificial Sequence
  HTT spacer sequence ATCN PAM
cucaggauuuagaagagaac

SEQ ID NO: 6304 - RNA, 20 nt, Artificial Sequence
  HTT spacer sequence ATCN PAM
agcuaagaauauucugaaau

SEQ ID NO: 6305 - RNA, 20 nt, Artificial Sequence
  HTT spacer sequence ATCN PAM
uguuuaaaaacacuucuucc

SEQ ID NO: 6306 - RNA, 20 nt, Artificial Sequence
  HTT spacer sequence ATCN PAM
acauguuuagaguggugaug

SEQ ID NO: 6307 - RNA, 20 nt, Artificial Sequence
  HTT spacer sequence ATCN PAM
ccacucuaaacauguugaug

SEQ ID NO: 6308 - RNA, 20 nt, Artificial Sequence
  HTT spacer sequence ATCN PAM
gccgugaaaguugccaacug

SEQ ID NO: 6309 - RNA, 20 nt, Artificial Sequence
  HTT spacer sequence ATCN PAM
aacauagccagugugaguuc

SEQ ID NO: 6310 - RNA, 20 nt, Artificial Sequence
  HTT spacer sequence ATCN PAM
gcaccuuuauuucagaacuc

SEQ ID NO: 6311 - RNA, 20 nt, Artificial Sequence
  HTT spacer sequence ATCN PAM
accauaaagcugcacauuca

SEQ ID NO: 6312 - RNA, 20 nt, Artificial Sequence
  HTT spacer sequence ATCN PAM
auuccuaagcuacaauaaac

SEQ ID NO: 6313 - RNA, 20 nt, Artificial Sequence
  HTT spacer sequence ATCN PAM
gaauguuguauguguaauau

SEQ ID NO: 6314 - RNA, 20 nt, Artificial Sequence
  HTT spacer sequence ATCN PAM
ucuucaguauuuugcaaaua

SEQ ID NO: 6315 - RNA, 20 nt, Artificial Sequence
  HTT spacer sequence ATCN PAM
ucaguauuuugcaaauaagc

SEQ ID NO: 6316 - RNA, 20 nt, Artificial Sequence
  HTT spacer sequence ATCN PAM
agaaacauugucaaugcauc

SEQ ID NO: 6317 - RNA, 20 nt, Artificial Sequence
  HTT spacer sequence ATCN PAM
guugcuccuucuagaagaca

SEQ ID NO: 6318 - RNA, 20 nt, Artificial Sequence
  HTT spacer sequence ATCN PAM
ggggacuaaguaacuuugug

SEQ ID NO: 6319 - RNA, 20 nt, Artificial Sequence
  HTT spacer sequence ATCN PAM
uccucuucuccagacaucug

SEQ ID NO: 6320 - RNA, 20 nt, Artificial Sequence
  HTT spacer sequence ATCN PAM
cagaagagaaugagagcccc

SEQ ID NO: 6321 - RNA, 20 nt, Artificial Sequence
  HTT spacer sequence ATCN PAM
uguguagaugacacuugcau

SEQ ID NO: 6322 - RNA, 20 nt, Artificial Sequence
  HTT spacer sequence ATCN PAM
acacaggauguucuccuggu

SEQ ID NO: 6323 - RNA, 20 nt, Artificial Sequence
  HTT spacer sequence ATCN PAM
aaacuaaaucuagaaugaau

SEQ ID NO: 6324 - RNA, 20 nt, Artificial Sequence
  HTT spacer sequence ATCN PAM
agaaugaauguuuacuucug

SEQ ID NO: 6325 - RNA, 20 nt, Artificial Sequence
  HTT spacer sequence ATCN PAM
agugacuggaaggccaggcc

SEQ ID NO: 6326 - RNA, 20 nt, Artificial Sequence
  HTT spacer sequence ATCN PAM
aaugcccggcuauuggcuca

SEQ ID NO: 6327 - RNA, 20 nt, Artificial Sequence
  HTT spacer sequence ATCN PAM
uguaggcgugagccaauagc

SEQ ID NO: 6328 - RNA, 20 nt, Artificial Sequence
  HTT spacer sequence ATCN PAM
uuaguuauuauuauuccauu

SEQ ID NO: 6329 - RNA, 20 nt, Artificial Sequence
  HTT spacer sequence ATCN PAM
gaaccccacuacagucaaug

SEQ ID NO: 6330 - RNA, 20 nt, Artificial Sequence
  HTT spacer sequence ATCN PAM
uccuaccucagccucucgag

SEQ ID NO: 6331 - RNA, 20 nt, Artificial Sequence
  HTT spacer sequence ATCN PAM
cuugagcccaggaguuugag

SEQ ID NO: 6332 - RNA, 20 nt, Artificial Sequence
  HTT spacer sequence ATCN PAM
cuaaaaaaauaaaaaauaaa

SEQ ID NO: 6333 - RNA, 20 nt, Artificial Sequence
  HTT spacer sequence ATCN PAM
aagugugguggcucgugccu

SEQ ID NO: 6334 - RNA, 20 nt, Artificial Sequence
  HTT spacer sequence ATCN PAM
cagcucuuugagaagcugag

SEQ ID NO: 6335 - RNA, 20 nt, Artificial Sequence
  HTT spacer sequence ATCN PAM
uccgcccucagcuucucaaa

SEQ ID NO: 6336 - RNA, 20 nt, Artificial Sequence
  HTT spacer sequence ATCN PAM
ucccuucucagucucucagg

SEQ ID NO: 6337 - RNA, 20 nt, Artificial Sequence
  HTT spacer sequence ATCN PAM
aacaccuuuucuacaaauua

SEQ ID NO: 6338 - RNA, 20 nt, Artificial Sequence
  HTT spacer sequence ATCN PAM
uaaaaugugacaaagaacau

SEQ ID NO: 6339 - RNA, 20 nt, Artificial Sequence
  HTT spacer sequence ATCN PAM
aucauaaaaugugacaaaga

SEQ ID NO: 6340 - RNA, 20 nt, Artificial Sequence
  HTT spacer sequence ATCN PAM
cauauuuaccauggagaauu

SEQ ID NO: 6341 - RNA, 20 nt, Artificial Sequence
  HTT spacer sequence ATCN PAM
uacuacucagagauaacuug

SEQ ID NO: 6342 - RNA, 20 nt, Artificial Sequence
  HTT spacer sequence ATCN PAM
cugaguaguaugauuacagg

SEQ ID NO: 6343 - RNA, 20 nt, Artificial Sequence
  HTT spacer sequence ATCN PAM
aacagcaaguuaucucugag

SEQ ID NO: 6344 - RNA, 20 nt, Artificial Sequence
  HTT spacer sequence ATCN PAM
agaccaaaaucuaacagcaa

SEQ ID NO: 6345 - RNA, 20 nt, Artificial Sequence
  HTT spacer sequence ATCN PAM
uauagauacuacugucacau

SEQ ID NO: 6346 - RNA, 20 nt, Artificial Sequence
  HTT spacer sequence ATCN PAM
auaagauaccauguuuguga

SEQ ID NO: 6347 - RNA, 20 nt, Artificial Sequence
  HTT spacer sequence ATCN PAM
gaaaaggaagccgacucucc

SEQ ID NO: 6348 - RNA, 20 nt, Artificial Sequence
  HTT spacer sequence ATCN PAM
uagagacuuuuucuggugau

SEQ ID NO: 6349 - RNA, 20 nt, Artificial Sequence
  HTT spacer sequence ATCN PAM
ccagaaaaagucucuaggau

SEQ ID NO: 6350 - RNA, 20 nt, Artificial Sequence
  HTT spacer sequence ATCN PAM
uuaaaaguagaacaaaauag

SEQ ID NO: 6351 - RNA, 20 nt, Artificial Sequence
  HTT spacer sequence ATCN PAM
uuuuucuuauauuucuguga

SEQ ID NO: 6352 - RNA, 20 nt, Artificial Sequence
  HTT spacer sequence ATCN PAM
aacuuuauuaacuuauaaaa

SEQ ID NO: 6353 - RNA, 20 nt, Artificial Sequence
  HTT spacer sequence ATCN PAM
ucccaaauccaaaaaucuga

SEQ ID NO: 6354 - RNA, 20 nt, Artificial Sequence
  HTT spacer sequence ATCN PAM
caaauccaaaaaucugaaau

SEQ ID NO: 6355 - RNA, 20 nt, Artificial Sequence
  HTT spacer sequence ATCN PAM
aaaaaucugaaauccaaaau

SEQ ID NO: 6356 - RNA, 20 nt, Artificial Sequence
  HTT spacer sequence ATCN PAM
gaaauccaaaaugcuccaaa

SEQ ID NO: 6357 - RNA, 20 nt, Artificial Sequence
  HTT spacer sequence ATCN PAM
aaaaugcuccaaauucugaa

SEQ ID NO: 6358 - RNA, 20 nt, Artificial Sequence
  HTT spacer sequence ATCN PAM
gaaaccuuccaaugaacauu

SEQ ID NO: 6359 - RNA, 20 nt, Artificial Sequence
  HTT spacer sequence ATCN PAM
gaaaaucugaaaccuuccaa

SEQ ID NO: 6360 - RNA, 20 nt, Artificial Sequence
  HTT spacer sequence ATCN PAM
uaaauucagaauacuucuga

SEQ ID NO: 6361 - RNA, 20 nt, Artificial Sequence
  HTT spacer sequence ATCN PAM
gaaguauucugaauuuagga

SEQ ID NO: 6362 - RNA, 20 nt, Artificial Sequence
  HTT spacer sequence ATCN PAM
caaacauuucagauaagggu

SEQ ID NO: 6363 - RNA, 20 nt, Artificial Sequence
  HTT spacer sequence ATCN PAM
gaaauguuugggaucagaag

SEQ ID NO: 6364 - RNA, 20 nt, Artificial Sequence
  HTT spacer sequence ATCN PAM
gacaguacagguugaauaac

SEQ ID NO: 6365 - RNA, 20 nt, Artificial Sequence
  HTT spacer sequence ATCN PAM
ucugacaguacagguugaau

SEQ ID NO: 6366 - RNA, 20 nt, Artificial Sequence
  HTT spacer sequence ATCN PAM
caaaugaaaaauauuaaucg

SEQ ID NO: 6367 - RNA, 20 nt, Artificial Sequence
  HTT spacer sequence ATCN PAM
uuaaccaaauaucaaggaau

SEQ ID NO: 6368 - RNA, 20 nt, Artificial Sequence
  HTT spacer sequence ATCN PAM
aggaauugaucacauuuuac

SEQ ID NO: 6369 - RNA, 20 nt, Artificial Sequence
  HTT spacer sequence ATCN PAM
auuccuugauauuugguuaa

SEQ ID NO: 6370 - RNA, 20 nt, Artificial Sequence
  HTT spacer sequence ATCN PAM
cauuuuacaguuucugccua

SEQ ID NO: 6371 - RNA, 20 nt, Artificial Sequence
  HTT spacer sequence ATCN PAM
uaggcagaaacuguaaaaug

SEQ ID NO: 6372 - RNA, 20 nt, Artificial Sequence
  HTT spacer sequence ATCN PAM
agaugaaaaggcucugcaug

SEQ ID NO: 6373 - RNA, 20 nt, Artificial Sequence
  HTT spacer sequence ATCN PAM
ugauucauaauccuaggcag

SEQ ID NO: 6374 - RNA, 20 nt, Artificial Sequence
  HTT spacer sequence ATCN PAM
uaaauaucuacacuuaagau

SEQ ID NO: 6375 - RNA, 20 nt, Artificial Sequence
  HTT spacer sequence ATCN PAM
acacuuaagauuuauuugau

SEQ ID NO: 6376 - RNA, 20 nt, Artificial Sequence
  HTT spacer sequence ATCN PAM
uaaguguagauauuuaagau

SEQ ID NO: 6377 - RNA, 20 nt, Artificial Sequence
  HTT spacer sequence ATCN PAM
aauaaaucuuaaguguagau

SEQ ID NO: 6378 - RNA, 20 nt, Artificial Sequence
  HTT spacer sequence ATCN PAM
cacauaucaaauaaaucuua

SEQ ID NO: 6379 - RNA, 20 nt, Artificial Sequence
  HTT spacer sequence ATCN PAM
auucauauuuuggauucaac

SEQ ID NO: 6380 - RNA, 20 nt, Artificial Sequence
  HTT spacer sequence ATCN PAM
aaaauaugaauggaucccac

SEQ ID NO: 6381 - RNA, 20 nt, Artificial Sequence
  HTT spacer sequence ATCN PAM
cugccacaguuuugacagaa

SEQ ID NO: 6382 - RNA, 20 nt, Artificial Sequence
  HTT spacer sequence ATCN PAM
ccuaucacugccacaguuuu

SEQ ID NO: 6383 - RNA, 20 nt, Artificial Sequence
  HTT spacer sequence ATCN PAM
caaaauuggaaaaagaguaa

SEQ ID NO: 6384 - RNA, 20 nt, Artificial Sequence
  HTT spacer sequence ATCN PAM
acagcacugccugcccucuc

SEQ ID NO: 6385 - RNA, 20 nt, Artificial Sequence
  HTT spacer sequence ATCN PAM
cagcgcaacgcugccccugc

SEQ ID NO: 6386 - RNA, 20 nt, Artificial Sequence
  HTT spacer sequence ATCN PAM
gcagguagcaggggcagcgu

SEQ ID NO: 6387 - RNA, 20 nt, Artificial Sequence
  HTT spacer sequence ATCN PAM
cgcugaggccugccuuuguc

SEQ ID NO: 6388 - RNA, 20 nt, Artificial Sequence
  HTT spacer sequence ATCN PAM
aguuuccuaccuccucaauu

SEQ ID NO: 6389 - RNA, 20 nt, Artificial Sequence
  HTT spacer sequence ATCN PAM
caaauauaaaccucacuaaa

SEQ ID NO: 6390 - RNA, 20 nt, Artificial Sequence
  HTT spacer sequence ATCN PAM
cucaucauauuuuuccuuag

SEQ ID NO: 6391 - RNA, 20 nt, Artificial Sequence
  HTT spacer sequence ATCN PAM
uauuuuuccuuagugucaga

SEQ ID NO: 6392 - RNA, 20 nt, Artificial Sequence
  HTT spacer sequence ATCN PAM
cauucaagaucugaucagcc

SEQ ID NO: 6393 - RNA, 20 nt, Artificial Sequence
  HTT spacer sequence ATCN PAM
ugaaugugauuuacaaugag

SEQ ID NO: 6394 - RNA, 20 nt, Artificial Sequence
  HTT spacer sequence ATCN PAM
gaucagccuuucccacgagc

SEQ ID NO: 6395 - RNA, 20 nt, Artificial Sequence
  HTT spacer sequence ATCN PAM
gaucuugaaugugauuuaca

SEQ ID NO: 6396 - RNA, 20 nt, Artificial Sequence
  HTT spacer sequence ATCN PAM
gccuuucccacgagccucca

SEQ ID NO: 6397 - RNA, 20 nt, Artificial Sequence
  HTT spacer sequence ATCN PAM
gugccguucaucggaacucu

SEQ ID NO: 6398 - RNA, 20 nt, Artificial Sequence
  HTT spacer sequence ATCN PAM
gaacucugcugccagcggcc

SEQ ID NO: 6399 - RNA, 20 nt, Artificial Sequence
  HTT spacer sequence ATCN PAM
aggcaauucagucucguugu

SEQ ID NO: 6400 - RNA, 20 nt, Artificial Sequence
  HTT spacer sequence ATCN PAM
ugccgacuauugccaguugc

SEQ ID NO: 6401 - RNA, 20 nt, Artificial Sequence
  HTT spacer sequence ATCN PAM
gaaauuaaaguuaaaaauuu

SEQ ID NO: 6402 - RNA, 20 nt, Artificial Sequence
  HTT spacer sequence ATCN PAM
uuuguucuuuuccuucuugc

SEQ ID NO: 6403 - RNA, 20 nt, Artificial Sequence
  HTT spacer sequence ATCN PAM
ccuccaagcacugaagaguu

SEQ ID NO: 6404 - RNA, 20 nt, Artificial Sequence
  HTT spacer sequence ATCN PAM
aucucagccagucgggagcu

SEQ ID NO: 6405 - RNA, 20 nt, Artificial Sequence
  HTT spacer sequence ATCN PAM
cagccagucgggagcugugc

SEQ ID NO: 6406 - RNA, 20 nt, Artificial Sequence
  HTT spacer sequence ATCN PAM
uugcuugucgccggguagaa

SEQ ID NO: 6407 - RNA, 20 nt, Artificial Sequence
  HTT spacer sequence ATCN PAM
ggguuucucuucccaauacc

SEQ ID NO: 6408 - RNA, 20 nt, Artificial Sequence
  HTT spacer sequence ATCN PAM
auaucaggguuucucuuccc

SEQ ID NO: 6409 - RNA, 20 nt, Artificial Sequence
  HTT spacer sequence ATCN PAM
gugaccaugucaagaccaua

SEQ ID NO: 6410 - RNA, 20 nt, Artificial Sequence
  HTT spacer sequence ATCN PAM
gcaaacuugccguuacucgu

SEQ ID NO: 6411 - RNA, 20 nt, Artificial Sequence
  HTT spacer sequence ATCN PAM
gacacacgaguaacggcaag

SEQ ID NO: 6412 - RNA, 20 nt, Artificial Sequence
  HTT spacer sequence ATCN PAM
gacuguuucuuguauuuuuu

SEQ ID NO: 6413 - RNA, 20 nt, Artificial Sequence
  HTT spacer sequence ATCN PAM
uaguaagggcagacuagaaa

SEQ ID NO: 6414 - RNA, 20 nt, Artificial Sequence
  HTT spacer sequence ATCN PAM
guucauccuuuuuaaaugag

SEQ ID NO: 6415 - RNA, 20 nt, Artificial Sequence
  HTT spacer sequence ATCN PAM
uuuuuaaaugagcaugaggu

SEQ ID NO: 6416 - RNA, 20 nt, Artificial Sequence
  HTT spacer sequence ATCN PAM
aggaauaccuucagagcagc

SEQ ID NO: 6417 - RNA, 20 nt, Artificial Sequence
  HTT spacer sequence ATCN PAM
uggguuguccuaacacaagg

SEQ ID NO: 6418 - RNA, 20 nt, Artificial Sequence
  HTT spacer sequence ATCN PAM
uuuauauccuggguuguccu

SEQ ID NO: 6419 - RNA, 20 nt, Artificial Sequence
  HTT spacer sequence ATCN PAM
auauccuuuauauccugggu

SEQ ID NO: 6420 - RNA, 20 nt, Artificial Sequence
  HTT spacer sequence ATCN PAM
augugccuuauagguggguu

SEQ ID NO: 6421 - RNA, 20 nt, Artificial Sequence
  HTT spacer sequence ATCN PAM
auuucuuguccugugaauuu

SEQ ID NO: 6422 - RNA, 20 nt, Artificial Sequence
  HTT spacer sequence ATCN PAM
gguuguuuuaaaaguaggaa

SEQ ID NO: 6423 - RNA, 20 nt, Artificial Sequence
  HTT spacer sequence ATCN PAM
cacuuucuaaagaguaaagg

SEQ ID NO: 6424 - RNA, 20 nt, Artificial Sequence
  HTT spacer sequence ATCN PAM
uuuacucuuuagaaagugag

SEQ ID NO: 6425 - RNA, 20 nt, Artificial Sequence
  HTT spacer sequence ATCN PAM
ugccggucauccuuuacucu

SEQ ID NO: 6426 - RNA, 20 nt, Artificial Sequence
  HTT spacer sequence ATCN PAM
cgucugugacgugaguggag

SEQ ID NO: 6427 - RNA, 20 nt, Artificial Sequence
  HTT spacer sequence ATCN PAM
caggacagugaauacaggca

SEQ ID NO: 6428 - RNA, 20 nt, Artificial Sequence
  HTT spacer sequence ATCN PAM
gguuuaucuuagcaaaauca

SEQ ID NO: 6429 - RNA, 20 nt, Artificial Sequence
  HTT spacer sequence ATCN PAM
uagcaaaaucaaagcauguc

SEQ ID NO: 6430 - RNA, 20 nt, Artificial Sequence
  HTT spacer sequence ATCN PAM
aagcaugucaucuaauugcu

SEQ ID NO: 6431 - RNA, 20 nt, Artificial Sequence
  HTT spacer sequence ATCN PAM
aauugcuaaacaagaguugg

SEQ ID NO: 6432 - RNA, 20 nt, Artificial Sequence
  HTT spacer sequence ATCN PAM
gagagacauuacucaauccu

SEQ ID NO: 6433 - RNA, 20 nt, Artificial Sequence
  HTT spacer sequence ATCN PAM
uuggcaugcaggacuuacau

SEQ ID NO: 6434 - RNA, 20 nt, Artificial Sequence
  HTT spacer sequence ATCN PAM
gcauccuguugccauuuuau

SEQ ID NO: 6435 - RNA, 20 nt, Artificial Sequence
  HTT spacer sequence ATCN PAM
uguugccauuuuaugucuuc

SEQ ID NO: 6436 - RNA, 20 nt, Artificial Sequence
  HTT spacer sequence ATCN PAM
uuuaguuguguuugcaaagu

SEQ ID NO: 6437 - RNA, 20 nt, Artificial Sequence
  HTT spacer sequence ATCN PAM
cuacaucuccuaugugagug

SEQ ID NO: 6438 - RNA, 20 nt, Artificial Sequence
  HTT spacer sequence ATCN PAM
ccuaugugaguguauuucca

SEQ ID NO: 6439 - RNA, 20 nt, Artificial Sequence
  HTT spacer sequence ATCN PAM
cugccccccaccccgccccg

SEQ ID NO: 6440 - RNA, 20 nt, Artificial Sequence
  HTT spacer sequence ATCN PAM
ugcuguguacuuugagcuga

SEQ ID NO: 6441 - RNA, 20 nt, Artificial Sequence
  HTT spacer sequence ATCN PAM
acaagguacucuaaagacug

SEQ ID NO: 6442 - RNA, 20 nt, Artificial Sequence
  HTT spacer sequence ATCN PAM
cauuuaaaaacaccaucaac

SEQ ID NO: 6443 - RNA, 20 nt, Artificial Sequence
  HTT spacer sequence ATCN PAM
caaacuguccaccuaauugu

SEQ ID NO: 6444 - RNA, 20 nt, Artificial Sequence
  HTT spacer sequence ATCN PAM
ucccaaacuguccaccuaau

SEQ ID NO: 6445 - RNA, 20 nt, Artificial Sequence
  HTT spacer sequence ATCN PAM
gcuaugagagugacaacuuc

SEQ ID NO: 6446 - RNA, 20 nt, Artificial Sequence
  HTT spacer sequence ATCN PAM
cccgccaucugcuaugagag

SEQ ID NO: 6447 - RNA, 20 nt, Artificial Sequence
  HTT spacer sequence ATCN PAM
ggacugaagacuaagucuag

SEQ ID NO: 6448 - RNA, 20 nt, Artificial Sequence
  HTT spacer sequence ATCN PAM
cccucaucuggacugaagac

SEQ ID NO: 6449 - RNA, 20 nt, Artificial Sequence
  HTT spacer sequence ATCN PAM
uuuaaucucccucaucugga

SEQ ID NO: 6450 - RNA, 20 nt, Artificial Sequence
  HTT spacer sequence ATCN PAM
ugugccagaugaggugauuu

SEQ ID NO: 6451 - RNA, 20 nt, Artificial Sequence
  HTT spacer sequence ATCN PAM
ggcacaagauauuuauaauc

SEQ ID NO: 6452 - RNA, 20 nt, Artificial Sequence
  HTT spacer sequence ATCN PAM
ccucaucuggcacaagauau

SEQ ID NO: 6453 - RNA, 20 nt, Artificial Sequence
  HTT spacer sequence ATCN PAM
guugucuuacugggauauuu

SEQ ID NO: 6454 - RNA, 20 nt, Artificial Sequence
  HTT spacer sequence ATCN PAM
caguaagacaacugauagga

SEQ ID NO: 6455 - RNA, 20 nt, Artificial Sequence
  HTT spacer sequence ATCN PAM
aauaucccaguaagacaacu

SEQ ID NO: 6456 - RNA, 20 nt, Artificial Sequence
  HTT spacer sequence ATCN PAM
aagacucaaaugcacaaauu

SEQ ID NO: 6457 - RNA, 20 nt, Artificial Sequence
  HTT spacer sequence ATCN PAM
ucuaagacucaaaugcacaa

SEQ ID NO: 6458 - RNA, 20 nt, Artificial Sequence
  HTT spacer sequence ATCN PAM
guuuuacauuuauuaagaaa

SEQ ID NO: 6459 - RNA, 20 nt, Artificial Sequence
  HTT spacer sequence ATCN PAM
caguuuguacuccauuaaua

SEQ ID NO: 6460 - RNA, 20 nt, Artificial Sequence
  HTT spacer sequence ATCN PAM
ugaccuguuugaguauugau

SEQ ID NO: 6461 - RNA, 20 nt, Artificial Sequence
  HTT spacer sequence ATCN PAM
auacucaaacaggucaugau

SEQ ID NO: 6462 - RNA, 20 nt, Artificial Sequence
  HTT spacer sequence ATCN PAM
ucucaucaauacucaaacag

SEQ ID NO: 6463 - RNA, 20 nt, Artificial Sequence
  HTT spacer sequence ATCN PAM
ccuuagaguguauauuucua

SEQ ID NO: 6464 - RNA, 20 nt, Artificial Sequence
  HTT spacer sequence ATCN PAM
uagugugcagaguuuagacu

SEQ ID NO: 6465 - RNA, 20 nt, Artificial Sequence
  HTT spacer sequence ATCN PAM
ccguccagcgggugggaaga

SEQ ID NO: 6466 - RNA, 20 nt, Artificial Sequence
  HTT spacer sequence ATCN PAM
gccacaggugacagaggcac

SEQ ID NO: 6467 - RNA, 20 nt, Artificial Sequence
  HTT spacer sequence ATCN PAM
aggucugagggagccaagca

SEQ ID NO: 6468 - RNA, 20 nt, Artificial Sequence
  HTT spacer sequence ATCN PAM
gcacugcuuggcucccucag

SEQ ID NO: 6469 - RNA, 20 nt, Artificial Sequence
  HTT spacer sequence ATCN PAM
aggaauagucggccguggcc

SEQ ID NO: 6470 - RNA, 20 nt, Artificial Sequence
  HTT spacer sequence ATCN PAM
ccucauaccuucuggccacc

SEQ ID NO: 6471 - RNA, 20 nt, Artificial Sequence
  HTT spacer sequence ATCN PAM
aaauucauauucauaagcug

SEQ ID NO: 6472 - RNA, 20 nt, Artificial Sequence
  HTT spacer sequence ATCN PAM
cuccccagcaaccagggcag

SEQ ID NO: 6473 - RNA, 20 nt, Artificial Sequence
  HTT spacer sequence ATCN PAM
ucuccuggguugucugcuuu

SEQ ID NO: 6474 - RNA, 20 nt, Artificial Sequence
  HTT spacer sequence ATCN PAM
cuggagcuacaggccuaggc

SEQ ID NO: 6475 - RNA, 20 nt, Artificial Sequence
  HTT spacer sequence ATCN PAM
uguuccccuuauccauuuuu

SEQ ID NO: 6476 - RNA, 20 nt, Artificial Sequence
  HTT spacer sequence ATCN PAM
auuuuuuucuucccaggacu

SEQ ID NO: 6477 - RNA, 20 nt, Artificial Sequence
  HTT spacer sequence ATCN PAM
ugucaaaucccaguguugga

SEQ ID NO: 6478 - RNA, 20 nt, Artificial Sequence
  HTT spacer sequence ATCN PAM
caguguuggaccaggucaga

SEQ ID NO: 6479 - RNA, 20 nt, Artificial Sequence
  HTT spacer sequence ATCN PAM
gaccugguccaacacuggga

SEQ ID NO: 6480 - RNA, 20 nt, Artificial Sequence
  HTT spacer sequence ATCN PAM
gauuccugcugaagauauga

SEQ ID NO: 6481 - RNA, 20 nt, Artificial Sequence
  HTT spacer sequence ATCN PAM
gauucaccagcucugcaccu

SEQ ID NO: 6482 - RNA, 20 nt, Artificial Sequence
  HTT spacer sequence ATCN PAM
ucagcaggaauccgauucac

SEQ ID NO: 6483 - RNA, 20 nt, Artificial Sequence
  HTT spacer sequence ATCN PAM
ugaaggcauucauaucuuca

SEQ ID NO: 6484 - RNA, 20 nt, Artificial Sequence
  HTT spacer sequence ATCN PAM
ucagcuuuucuugugacuuc

SEQ ID NO: 6485 - RNA, 20 nt, Artificial Sequence
  HTT spacer sequence ATCN PAM
cacuuggaagucacaagaaa

SEQ ID NO: 6486 - RNA, 20 nt, Artificial Sequence
  HTT spacer sequence ATCN PAM
ucaugugacccacuuguuga

SEQ ID NO: 6487 - RNA, 20 nt, Artificial Sequence
  HTT spacer sequence ATCN PAM
ugugacccacuuguugacaa

SEQ ID NO: 6488 - RNA, 20 nt, Artificial Sequence
  HTT spacer sequence ATCN PAM
cgucccugcccagacuggag

SEQ ID NO: 6489 - RNA, 20 nt, Artificial Sequence
  HTT spacer sequence ATCN PAM
gaaauggaguccuccccacu

SEQ ID NO: 6490 - RNA, 20 nt, Artificial Sequence
  HTT spacer sequence ATCN PAM
gcauaacccccaugucccga

SEQ ID NO: 6491 - RNA, 20 nt, Artificial Sequence
  HTT spacer sequence ATCN PAM
agacagaaaagcacauuguu

SEQ ID NO: 6492 - RNA, 20 nt, Artificial Sequence
  HTT spacer sequence ATCN PAM
acggagguguuguuuugaaa

SEQ ID NO: 6493 - RNA, 20 nt, Artificial Sequence
  HTT spacer sequence ATCN PAM
agcuggccccaaggcugggu

SEQ ID NO: 6494 - RNA, 20 nt, Artificial Sequence
  HTT spacer sequence ATCN PAM
caaaccauacacccagccuu

SEQ ID NO: 6495 - RNA, 20 nt, Artificial Sequence
  HTT spacer sequence ATCN PAM
ggccuccacuggaggaacaa

SEQ ID NO: 6496 - RNA, 20 nt, Artificial Sequence
  HTT spacer sequence ATCN PAM
uguguuuguuccuccagugg

SEQ ID NO: 6497 - RNA, 20 nt, Artificial Sequence
  HTT spacer sequence ATCN PAM
ucuaagcuccauggccaaga

SEQ ID NO: 6498 - RNA, 20 nt, Artificial Sequence
  HTT spacer sequence ATCN PAM
aagcuccauggccaagacag

SEQ ID NO: 6499 - RNA, 20 nt, Artificial Sequence
  HTT spacer sequence ATCN PAM
acuuccaagacacuagaaac

SEQ ID NO: 6500 - RNA, 20 nt, Artificial Sequence
  HTT spacer sequence ATCN PAM
uuagucguaaaagagacccu

SEQ ID NO: 6501 - RNA, 20 nt, Artificial Sequence
  HTT spacer sequence ATCN PAM
aagggucucuuuuacgacua

SEQ ID NO: 6502 - RNA, 20 nt, Artificial Sequence
  HTT spacer sequence ATCN PAM
cgcugcauccaagggucucu

SEQ ID NO: 6503 - RNA, 20 nt, Artificial Sequence
  HTT spacer sequence ATCN PAM
aacagaggugugaguagagg

SEQ ID NO: 6504 - RNA, 20 nt, Artificial Sequence
  HTT spacer sequence ATCN PAM
gggguuggggggugaagaac

SEQ ID NO: 6505 - RNA, 20 nt, Artificial Sequence
  HTT spacer sequence ATCN PAM
acgcagggcuaaagcaccag

SEQ ID NO: 6506 - RNA, 20 nt, Artificial Sequence
  HTT spacer sequence ATCN PAM
gaacacacuguuguguugcc

SEQ ID NO: 6507 - RNA, 20 nt, Artificial Sequence
  HTT spacer sequence ATCN PAM
auuuacuaaaauuguuuauc

SEQ ID NO: 6508 - RNA, 20 nt, Artificial Sequence
  HTT spacer sequence ATCN PAM
uuuuuuuuuuuuuugagaca

SEQ ID NO: 6509 - RNA, 20 nt, Artificial Sequence
  HTT spacer sequence ATCN PAM
uggcucacugcaaccuccgc

SEQ ID NO: 6510 - RNA, 20 nt, Artificial Sequence
  HTT spacer sequence ATCN PAM
uaugaacccaggaggcggag

SEQ ID NO: 6511 - RNA, 20 nt, Artificial Sequence
  HTT spacer sequence ATCN PAM
cgucucuacuaaaaauacaa

SEQ ID NO: 6512 - RNA, 20 nt, Artificial Sequence
  HTT spacer sequence ATCN PAM
ccugaggucaggaguuugag

SEQ ID NO: 6513 - RNA, 20 nt, Artificial Sequence
  HTT spacer sequence ATCN PAM
gcccaccucggccucccaaa

SEQ ID NO: 6514 - RNA, 20 nt, Artificial Sequence
  HTT spacer sequence ATCN PAM
cagcacuuugggaggccgag

SEQ ID NO: 6515 - RNA, 20 nt, Artificial Sequence
  HTT spacer sequence ATCN PAM
uaagauucaugcagugaaag

SEQ ID NO: 6516 - RNA, 20 nt, Artificial Sequence
  HTT spacer sequence ATCN PAM
uaagauaaacaauuuuaggc

SEQ ID NO: 6517 - RNA, 20 nt, Artificial Sequence
  HTT spacer sequence ATCN PAM
cucaguaaguuagcuuucac

SEQ ID NO: 6518 - RNA, 20 nt, Artificial Sequence
  HTT spacer sequence ATCN PAM
cuaagcaaauuuaucacuca

SEQ ID NO: 6519 - RNA, 20 nt, Artificial Sequence
  HTT spacer sequence ATCN PAM
guuuauuagguuuuccaaau

SEQ ID NO: 6520 - RNA, 20 nt, Artificial Sequence
  HTT spacer sequence ATCN PAM
ugaaugccaaaaguugaagc

SEQ ID NO: 6521 - RNA, 20 nt, Artificial Sequence
  HTT spacer sequence ATCN PAM
uaguuuaauacucagaaaag

SEQ ID NO: 6522 - RNA, 20 nt, Artificial Sequence
  HTT spacer sequence ATCN PAM
aucuuaguuuaauacucaga

SEQ ID NO: 6523 - RNA, 20 nt, Artificial Sequence
  HTT spacer sequence ATCN PAM
uucagguaaaacaucuaucu

SEQ ID NO: 6524 - RNA, 20 nt, Artificial Sequence
  HTT spacer sequence ATCN PAM
gccaccaaucuuuaaauggc

SEQ ID NO: 6525 - RNA, 20 nt, Artificial Sequence
  HTT spacer sequence ATCN PAM
uuaaauggcuaaacaaaagg

SEQ ID NO: 6526 - RNA, 20 nt, Artificial Sequence
  HTT spacer sequence ATCN PAM
aaauugacauaagaaauacc

SEQ ID NO: 6527 - RNA, 20 nt, Artificial Sequence
  HTT spacer sequence ATCN PAM
uuuucaaacuuuaggguggu

SEQ ID NO: 6528 - RNA, 20 nt, Artificial Sequence
  HTT spacer sequence ATCN PAM
cugaggucuuggaugacacu

SEQ ID NO: 6529 - RNA, 20 nt, Artificial Sequence
  HTT spacer sequence ATCN PAM
aagaccucagugauacacca

SEQ ID NO: 6530 - RNA, 20 nt, Artificial Sequence
  HTT spacer sequence ATCN PAM
aagcuaaagugucauccaag

SEQ ID NO: 6531 - RNA, 20 nt, Artificial Sequence
  HTT spacer sequence ATCN PAM
aagagcauaaaaaauuaaaa

SEQ ID NO: 6532 - RNA, 20 nt, Artificial Sequence
  HTT spacer sequence ATCN PAM
guucucucuuaguauuuuaa

SEQ ID NO: 6533 - RNA, 20 nt, Artificial Sequence
  HTT spacer sequence ATCN PAM
aaaauauuuuuaagaaaauu

SEQ ID NO: 6534 - RNA, 20 nt, Artificial Sequence
  HTT spacer sequence ATCN PAM
gguaagaaaaacacaacaga

SEQ ID NO: 6535 - RNA, 20 nt, Artificial Sequence
  HTT spacer sequence ATCN PAM
guuguuauuguuuguuaacc

SEQ ID NO: 6536 - RNA, 20 nt, Artificial Sequence
  HTT spacer sequence ATCN PAM
gagcauuaaagguuaacaaa

SEQ ID NO: 6537 - RNA, 20 nt, Artificial Sequence
  HTT spacer sequence ATCN PAM
cuaggcuuaagcauggagcu

SEQ ID NO: 6538 - RNA, 20 nt, Artificial Sequence
  HTT spacer sequence ATCN PAM
ugucuuccagcccgagcugc

SEQ ID NO: 6539 - RNA, 20 nt, Artificial Sequence
  HTT spacer sequence ATCN PAM
uucaacuugcuccaguaggc

SEQ ID NO: 6540 - RNA, 20 nt, Artificial Sequence
  HTT spacer sequence ATCN PAM
guuugguaauuaaaauuaaa

SEQ ID NO: 6541 - RNA, 20 nt, Artificial Sequence
  HTT spacer sequence ATCN PAM
uauuuuuaaaaagcauucca

SEQ ID NO: 6542 - RNA, 20 nt, Artificial Sequence
  HTT spacer sequence ATCN PAM
acugccuuuauuguacauuu

SEQ ID NO: 6543 - RNA, 20 nt, Artificial Sequence
  HTT spacer sequence ATCN PAM
aauacauugaaagcguuuac

SEQ ID NO: 6544 - RNA, 20 nt, Artificial Sequence
  HTT spacer sequence ATCN PAM
ccccugaggucuggcccagc

SEQ ID NO: 6545 - RNA, 20 nt, Artificial Sequence
  HTT spacer sequence ATCN PAM
guccacaggacugcacgugg

SEQ ID NO: 6546 - RNA, 20 nt, Artificial Sequence
  HTT spacer sequence ATCN PAM
acacauccguccacaggacu

SEQ ID NO: 6547 - RNA, 20 nt, Artificial Sequence
  HTT spacer sequence ATCN PAM
gauucucagagaauugcuug

SEQ ID NO: 6548 - RNA, 20 nt, Artificial Sequence
  HTT spacer sequence ATCN PAM
gaugaaagcucaagacauug

SEQ ID NO: 6549 - RNA, 20 nt, Artificial Sequence
  HTT spacer sequence ATCN PAM
acuucgaaaggcagucaagc

SEQ ID NO: 6550 - RNA, 20 nt, Artificial Sequence
  HTT spacer sequence ATCN PAM
gugcucacguuugcacccac

SEQ ID NO: 6551 - RNA, 20 nt, Artificial Sequence
  HTT spacer sequence ATCN PAM
ccugaaacagaaggaccucg

SEQ ID NO: 6552 - RNA, 20 nt, Artificial Sequence
  HTT spacer sequence ATCN PAM
gucccugcccacucuggccc

SEQ ID NO: 6553 - RNA, 20 nt, Artificial Sequence
  HTT spacer sequence ATCN PAM
ugcuuuucaaauaaaacugc

SEQ ID NO: 6554 - RNA, 20 nt, Artificial Sequence
  HTT spacer sequence ATCN PAM
cugaccaguccagucacuuu

SEQ ID NO: 6555 - RNA, 20 nt, Artificial Sequence
  HTT spacer sequence ATCN PAM
cagccuggcaguaagucuug

SEQ ID NO: 6556 - RNA, 20 nt, Artificial Sequence
  HTT spacer sequence ATCN PAM
uucacccucaccucgccacu

SEQ ID NO: 6557 - RNA, 20 nt, Artificial Sequence
  HTT spacer sequence ATCN PAM
gcaccuaccauguuaggugg

SEQ ID NO: 6558 - RNA, 20 nt, Artificial Sequence
  HTT spacer sequence ATCN PAM
accuaacaugguaggugcag

SEQ ID NO: 6559 - RNA, 20 nt, Artificial Sequence
  HTT spacer sequence ATCN PAM
uaauuuuagagacaugaaaa

SEQ ID NO: 6560 - RNA, 20 nt, Artificial Sequence
  HTT spacer sequence ATCN PAM
ucuggaaguacuuuaugucu

SEQ ID NO: 6561 - RNA, 20 nt, Artificial Sequence
  HTT spacer sequence ATCN PAM
ggaaguacuuuaugucuuaa

SEQ ID NO: 6562 - RNA, 20 nt, Artificial Sequence
  HTT spacer sequence ATCN PAM
agaacguguacacauucugg

SEQ ID NO: 6563 - RNA, 20 nt, Artificial Sequence
  HTT spacer sequence ATCN PAM
uuaaagggccaucgcugugc

SEQ ID NO: 6564 - RNA, 20 nt, Artificial Sequence
  HTT spacer sequence ATCN PAM
cugugcugccugcccucagc

SEQ ID NO: 6565 - RNA, 20 nt, Artificial Sequence
  HTT spacer sequence ATCN PAM
gugccauuacucacaaaaug

SEQ ID NO: 6566 - RNA, 20 nt, Artificial Sequence
  HTT spacer sequence ATCN PAM
uuuugugaguaauggcacug

SEQ ID NO: 6567 - RNA, 20 nt, Artificial Sequence
  HTT spacer sequence ATCN PAM
caaaccauaugacuccacgu

SEQ ID NO: 6568 - RNA, 20 nt, Artificial Sequence
  HTT spacer sequence ATCN PAM
cuguccuucagguuucagcu

SEQ ID NO: 6569 - RNA, 20 nt, Artificial Sequence
  HTT spacer sequence ATCN PAM
cacgcugacuuucccacuuc

SEQ ID NO: 6570 - RNA, 20 nt, Artificial Sequence
  HTT spacer sequence ATCN PAM
cagcacagggugauugcugc

SEQ ID NO: 6571 - RNA, 20 nt, Artificial Sequence
  HTT spacer sequence ATCN PAM
cccugugcugugaucacacg

SEQ ID NO: 6572 - RNA, 20 nt, Artificial Sequence
  HTT spacer sequence ATCN PAM
gcagcaaucacccugugcug

SEQ ID NO: 6573 - RNA, 20 nt, Artificial Sequence
  HTT spacer sequence ATCN PAM
ugcauacagcaggcacauaa

SEQ ID NO: 6574 - RNA, 20 nt, Artificial Sequence
  HTT spacer sequence ATCN PAM
uauuugacucucacaacccc

SEQ ID NO: 6575 - RNA, 20 nt, Artificial Sequence
  HTT spacer sequence ATCN PAM
cacaggggguugugagaguc

SEQ ID NO: 6576 - RNA, 20 nt, Artificial Sequence
  HTT spacer sequence ATCN PAM
cuagaacccacgcucucaaa

SEQ ID NO: 6577 - RNA, 20 nt, Artificial Sequence
  HTT spacer sequence ATCN PAM
cuccugggcuacguggccac

SEQ ID NO: 6578 - RNA, 20 nt, Artificial Sequence
  HTT spacer sequence ATCN PAM
caguuguggaaccguccaaa

SEQ ID NO: 6579 - RNA, 20 nt, Artificial Sequence
  HTT spacer sequence ATCN PAM
aaugccaggacagggccuaa

SEQ ID NO: 6580 - RNA, 20 nt, Artificial Sequence
  HTT spacer sequence ATCN PAM
augagcagaucccgcugagu

SEQ ID NO: 6581 - RNA, 20 nt, Artificial Sequence
  HTT spacer sequence ATCN PAM
gcucauggaucaaaugccag

SEQ ID NO: 6582 - RNA, 20 nt, Artificial Sequence
  HTT spacer sequence ATCN PAM
cgcugagucuggaucuccag

SEQ ID NO: 6583 - RNA, 20 nt, Artificial Sequence
  HTT spacer sequence ATCN PAM
agacucagcgggaucugcuc

SEQ ID NO: 6584 - RNA, 20 nt, Artificial Sequence
  HTT spacer sequence ATCN PAM
ccaggcagggcuggacugcu

SEQ ID NO: 6585 - RNA, 20 nt, Artificial Sequence
  HTT spacer sequence ATCN PAM
acugugugcacuucauccug

SEQ ID NO: 6586 - RNA, 20 nt, Artificial Sequence
  HTT spacer sequence ATCN PAM
uggaggccggugaguccccg

SEQ ID NO: 6587 - RNA, 20 nt, Artificial Sequence
  HTT spacer sequence ATCN PAM
uaguuccugucugcuucacc

SEQ ID NO: 6588 - RNA, 20 nt, Artificial Sequence
  HTT spacer sequence ATCN PAM
ccaauuccuagcuuaguacc

SEQ ID NO: 6589 - RNA, 20 nt, Artificial Sequence
  HTT spacer sequence ATCN PAM
accucuccauccccaauucc

SEQ ID NO: 6590 - RNA, 20 nt, Artificial Sequence
  HTT spacer sequence ATCN PAM
ggaagggcugggccccaucu

SEQ ID NO: 6591 - RNA, 20 nt, Artificial Sequence
  HTT spacer sequence ATCN PAM
cuuacucuccaauauauugg

SEQ ID NO: 6592 - RNA, 20 nt, Artificial Sequence
  HTT spacer sequence ATCN PAM
aaauaaaaugacuaaaaaag

SEQ ID NO: 6593 - RNA, 20 nt, Artificial Sequence
  HTT spacer sequence ATCN PAM
aaaauaccucuaaacuuuau

SEQ ID NO: 6594 - RNA, 20 nt, Artificial Sequence
  HTT spacer sequence ATCN PAM
cagagacauaaaguuuagag

SEQ ID NO: 6595 - RNA, 20 nt, Artificial Sequence
  HTT spacer sequence ATCN PAM
uuggucuuagcuguuuuaug

SEQ ID NO: 6596 - RNA, 20 nt, Artificial Sequence
  HTT spacer sequence ATCN PAM
uauaagacuaaauacauaaa

SEQ ID NO: 6597 - RNA, 20 nt, Artificial Sequence
  HTT spacer sequence ATCN PAM
uaagauuaauaacauuacau

SEQ ID NO: 6598 - RNA, 20 nt, Artificial Sequence
  HTT spacer sequence ATCN PAM
uaugaucauauaagacuaaa

SEQ ID NO: 6599 - RNA, 20 nt, Artificial Sequence
  HTT spacer sequence ATCN PAM
ucugaauguaauguuauuaa

SEQ ID NO: 6600 - RNA, 20 nt, Artificial Sequence
  HTT spacer sequence ATCN PAM
ucaacaagggucauuagcca

SEQ ID NO: 6601 - RNA, 20 nt, Artificial Sequence
  HTT spacer sequence ATCN PAM
cucuauaacauuuaauuuaa

SEQ ID NO: 6602 - RNA, 20 nt, Artificial Sequence
  HTT spacer sequence ATCN PAM
gugcauuuguagccaacuug

SEQ ID NO: 6603 - RNA, 20 nt, Artificial Sequence
  HTT spacer sequence ATCN PAM
uuguuuucaaguuggcuaca

SEQ ID NO: 6604 - RNA, 20 nt, Artificial Sequence
  HTT spacer sequence ATCN PAM
agggauuacuacuuaaaagc

SEQ ID NO: 6605 - RNA, 20 nt, Artificial Sequence
  HTT spacer sequence ATCN PAM
cuggaucuuuguuuucaagu

SEQ ID NO: 6606 - RNA, 20 nt, Artificial Sequence
  HTT spacer sequence ATCN PAM
cuauaaccuccaagaagucu

SEQ ID NO: 6607 - RNA, 20 nt, Artificial Sequence
  HTT spacer sequence ATCN PAM
ucacuauaaccuccaagaag

SEQ ID NO: 6608 - RNA, 20 nt, Artificial Sequence
  HTT spacer sequence ATCN PAM
aaaucaucacuauaaccucc

SEQ ID NO: 6609 - RNA, 20 nt, Artificial Sequence
  HTT spacer sequence ATCN PAM
ugagccgucucauaauaacc

SEQ ID NO: 6610 - RNA, 20 nt, Artificial Sequence
  HTT spacer sequence ATCN PAM
cucacccugagguuauuaug

SEQ ID NO: 6611 - RNA, 20 nt, Artificial Sequence
  HTT spacer sequence ATCN PAM
gaaugaaaucugaaguucaa

SEQ ID NO: 6612 - RNA, 20 nt, Artificial Sequence
  HTT spacer sequence ATCN PAM
gaaguucaaaucuucagaca

SEQ ID NO: 6613 - RNA, 20 nt, Artificial Sequence
  HTT spacer sequence ATCN PAM
ucagacauauaccacuaacc

SEQ ID NO: 6614 - RNA, 20 nt, Artificial Sequence
  HTT spacer sequence ATCN PAM
cuugguuagugguauauguc

SEQ ID NO: 6615 - RNA, 20 nt, Artificial Sequence
  HTT spacer sequence ATCN PAM
aggcuagucugucuaucccu

SEQ ID NO: 6616 - RNA, 20 nt, Artificial Sequence
  HTT spacer sequence ATCN PAM
cuuucaacuuuugugaggcu

SEQ ID NO: 6617 - RNA, 20 nt, Artificial Sequence
  HTT spacer sequence ATCN PAM
gugcuuuuuauucaacauuu

SEQ ID NO: 6618 - RNA, 20 nt, Artificial Sequence
  HTT spacer sequence ATCN PAM
gcgaggaggaggaggaagua

SEQ ID NO: 6619 - RNA, 20 nt, Artificial Sequence
  HTT spacer sequence ATCN PAM
acuuccuccuccuccucgcu

SEQ ID NO: 6620 - RNA, 20 nt, Artificial Sequence
  HTT spacer sequence ATCN PAM
aaacacacagaguaagucuc

SEQ ID NO: 6621 - RNA, 20 nt, Artificial Sequence
  HTT spacer sequence ATCN PAM
uucacagagacgugcaccgc

SEQ ID NO: 6622 - RNA, 20 nt, Artificial Sequence
  HTT spacer sequence ATCN PAM
guacacaugcggcugucucu

SEQ ID NO: 6623 - RNA, 20 nt, Artificial Sequence
  HTT spacer sequence ATCN PAM
cagcuggucuguagggucag

SEQ ID NO: 6624 - RNA, 20 nt, Artificial Sequence
  HTT spacer sequence ATCN PAM
cagaauaacugcagagugug

SEQ ID NO: 6625 - RNA, 20 nt, Artificial Sequence
  HTT spacer sequence ATCN PAM
uugagggcagggaacagguu

SEQ ID NO: 6626 - RNA, 20 nt, Artificial Sequence
  HTT spacer sequence ATCN PAM
cucaacaaaagguuguugcu

SEQ ID NO: 6627 - RNA, 20 nt, Artificial Sequence
  HTT spacer sequence ATCN PAM
guuuugguggauauuuaaaa

SEQ ID NO: 6628 - RNA, 20 nt, Artificial Sequence
  HTT spacer sequence ATCN PAM
accaaaacagauggcugaac

SEQ ID NO: 6629 - RNA, 20 nt, Artificial Sequence
  HTT spacer sequence ATCN PAM
aaaucccagugauuuaagcc

SEQ ID NO: 6630 - RNA, 20 nt, Artificial Sequence
  HTT spacer sequence ATCN PAM
cagugauuuaagccaguuau

SEQ ID NO: 6631 - RNA, 20 nt, Artificial Sequence
  HTT spacer sequence ATCN PAM
cugggauuuggauuuuuuuu

SEQ ID NO: 6632 - RNA, 20 nt, Artificial Sequence
  HTT spacer sequence ATCN PAM
uccucccaacaggcacugcc

SEQ ID NO: 6633 - RNA, 20 nt, Artificial Sequence
  HTT spacer sequence ATCN PAM
ggcaucuuuuccaugcucug

SEQ ID NO: 6634 - RNA, 20 nt, Artificial Sequence
  HTT spacer sequence ATCN PAM
uuuccaugcucuguggcuca

SEQ ID NO: 6635 - RNA, 20 nt, Artificial Sequence
  HTT spacer sequence ATCN PAM
ugagugcaccagugcuuuug

SEQ ID NO: 6636 - RNA, 20 nt, Artificial Sequence
  HTT spacer sequence ATCN PAM
ugguuguggauggaguuuuc

SEQ ID NO: 6637 - RNA, 20 nt, Artificial Sequence
  HTT spacer sequence ATCN PAM
acaaccaggauugcacaaaa

SEQ ID NO: 6638 - RNA, 20 nt, Artificial Sequence
  HTT spacer sequence ATCN PAM
caaaccucuguggguccuuc

SEQ ID NO: 6639 - RNA, 20 nt, Artificial Sequence
  HTT spacer sequence ATCN PAM
caaacugaagccugaaggac

SEQ ID NO: 6640 - RNA, 20 nt, Artificial Sequence
  HTT spacer sequence ATCN PAM
ugaaaucacaaacugaagcc

SEQ ID NO: 6641 - RNA, 20 nt, Artificial Sequence
  HTT spacer sequence ATCN PAM
uccagccgaguggcaccuca

SEQ ID NO: 6642 - RNA, 20 nt, Artificial Sequence
  HTT spacer sequence ATCN PAM
acagccugaggugccacucg

SEQ ID NO: 6643 - RNA, 20 nt, Artificial Sequence
  HTT spacer sequence ATCN PAM
ugugcuucuguggugaggau

SEQ ID NO: 6644 - RNA, 20 nt, Artificial Sequence
  HTT spacer sequence ATCN PAM
ucaccacagaagcacaggau

SEQ ID NO: 6645 - RNA, 20 nt, Artificial Sequence
  HTT spacer sequence ATCN PAM
acacgguuggcacuauucuu

SEQ ID NO: 6646 - RNA, 20 nt, Artificial Sequence
  HTT spacer sequence ATCN PAM
aucaguuaaucccuccaugu

SEQ ID NO: 6647 - RNA, 20 nt, Artificial Sequence
  HTT spacer sequence ATCN PAM
guuaaucccuccauguaaag

SEQ ID NO: 6648 - RNA, 20 nt, Artificial Sequence
  HTT spacer sequence ATCN PAM
cuccauguaaagcaccugga

SEQ ID NO: 6649 - RNA, 20 nt, Artificial Sequence
  HTT spacer sequence ATCN PAM
guuccaggugcuuuacaugg

SEQ ID NO: 6650 - RNA, 20 nt, Artificial Sequence
  HTT spacer sequence ATCN PAM
ugauuuuuaguuagauuucc

SEQ ID NO: 6651 - RNA, 20 nt, Artificial Sequence
  HTT spacer sequence ATCN PAM
ugauagcauuuguugaguau

SEQ ID NO: 6652 - RNA, 20 nt, Artificial Sequence
  HTT spacer sequence ATCN PAM
aacuaaaaaucaugauagca

SEQ ID NO: 6653 - RNA, 20 nt, Artificial Sequence
  HTT spacer sequence ATCN PAM
uggcgguuugaguuagagca

SEQ ID NO: 6654 - RNA, 20 nt, Artificial Sequence
  HTT spacer sequence ATCN PAM
ucacccaaacagaacccacu

SEQ ID NO: 6655 - RNA, 20 nt, Artificial Sequence
  HTT spacer sequence ATCN PAM
ucuucacccaaacagaaccc

SEQ ID NO: 6656 - RNA, 20 nt, Artificial Sequence
  HTT spacer sequence ATCN PAM
ccucgauaggacguuacuuc

SEQ ID NO: 6657 - RNA, 20 nt, Artificial Sequence
  HTT spacer sequence ATCN PAM
aggugauuaaaaaaacaaag

SEQ ID NO: 6658 - RNA, 20 nt, Artificial Sequence
  HTT spacer sequence ATCN PAM
aauaaauauuaauaggccgg

SEQ ID NO: 6659 - RNA, 20 nt, Artificial Sequence
  HTT spacer sequence ATCN PAM
cagcacuuugggaggccgag

SEQ ID NO: 6660 - RNA, 20 nt, Artificial Sequence
  HTT spacer sequence ATCN PAM
gcccgccucggccucccaaa

SEQ ID NO: 6661 - RNA, 20 nt, Artificial Sequence
  HTT spacer sequence ATCN PAM
cgaggucaggagaucgagac

SEQ ID NO: 6662 - RNA, 20 nt, Artificial Sequence
  HTT spacer sequence ATCN PAM
ccugaccucgugauccgccc

SEQ ID NO: 6663 - RNA, 20 nt, Artificial Sequence
  HTT spacer sequence ATCN PAM
agaccaucccagcuaaaacg

SEQ ID NO: 6664 - RNA, 20 nt, Artificial Sequence
  HTT spacer sequence ATCN PAM
cagcuaaaacggugaaaccc

SEQ ID NO: 6665 - RNA, 20 nt, Artificial Sequence
  HTT spacer sequence ATCN PAM
cggcucacugcaagcuccgc

SEQ ID NO: 6666 - RNA, 20 nt, Artificial Sequence
  HTT spacer sequence ATCN PAM
cgccacugcacuccagccug

SEQ ID NO: 6667 - RNA, 20 nt, Artificial Sequence
  HTT spacer sequence ATCN PAM
uaggaaguugcccaaacugu

SEQ ID NO: 6668 - RNA, 20 nt, Artificial Sequence
  HTT spacer sequence ATCN PAM
cguggccuguggguaauagc

SEQ ID NO: 6669 - RNA, 20 nt, Artificial Sequence
  HTT spacer sequence ATCN PAM
uauuuuaguagguaugauau

SEQ ID NO: 6670 - RNA, 20 nt, Artificial Sequence
  HTT spacer sequence ATCN PAM
uaccuacuaaaauaugauuu

SEQ ID NO: 6671 - RNA, 20 nt, Artificial Sequence
  HTT spacer sequence ATCN PAM
acagaauggugucuugaguc

SEQ ID NO: 6672 - RNA, 20 nt, Artificial Sequence
  HTT spacer sequence ATCN PAM
ucccaagggugugaaguguc

SEQ ID NO: 6673 - RNA, 20 nt, Artificial Sequence
  HTT spacer sequence ATCN PAM
uugcuucacuggcuuuccua

SEQ ID NO: 6674 - RNA, 20 nt, Artificial Sequence
  HTT spacer sequence ATCN PAM
aagggccauguugucauccu

SEQ ID NO: 6675 - RNA, 20 nt, Artificial Sequence
  HTT spacer sequence ATCN PAM
uguggcuccucagccucaga

SEQ ID NO: 6676 - RNA, 20 nt, Artificial Sequence
  HTT spacer sequence ATCN PAM
cagagagugggccagagggc

SEQ ID NO: 6677 - RNA, 20 nt, Artificial Sequence
  HTT spacer sequence ATCN PAM
cagcagaaaauggggagaau

SEQ ID NO: 6678 - RNA, 20 nt, Artificial Sequence
  HTT spacer sequence ATCN PAM
gccuauaccauacaauucuc

SEQ ID NO: 6679 - RNA, 20 nt, Artificial Sequence
  HTT spacer sequence ATCN PAM
gcaggccuucaguggccaac

SEQ ID NO: 6680 - RNA, 20 nt, Artificial Sequence
  HTT spacer sequence ATCN PAM
acuuagacucugaguuggcc

SEQ ID NO: 6681 - RNA, 20 nt, Artificial Sequence
  HTT spacer sequence ATCN PAM
uauaugcccaguguagaaag

SEQ ID NO: 6682 - RNA, 20 nt, Artificial Sequence
  HTT spacer sequence ATCN PAM
aaacaagcaacgguuaagag

SEQ ID NO: 6683 - RNA, 20 nt, Artificial Sequence
  HTT spacer sequence ATCN PAM
uaaguauaucacugcagccu

SEQ ID NO: 6684 - RNA, 20 nt, Artificial Sequence
  HTT spacer sequence ATCN PAM
cugcagccugugagauggug

SEQ ID NO: 6685 - RNA, 20 nt, Artificial Sequence
  HTT spacer sequence ATCN PAM
cacaggcugcagugauauac

SEQ ID NO: 6686 - RNA, 20 nt, Artificial Sequence
  HTT spacer sequence ATCN PAM
ucaucagccuggcccgccug

SEQ ID NO: 6687 - RNA, 20 nt, Artificial Sequence
  HTT spacer sequence ATCN PAM
ucagccuggcccgccugccc

SEQ ID NO: 6688 - RNA, 20 nt, Artificial Sequence
  HTT spacer sequence ATCN PAM
gccuggcccgccugccccuu

SEQ ID NO: 6689 - RNA, 20 nt, Artificial Sequence
  HTT spacer sequence ATCN PAM
ccgcagcccagaggcugccu

SEQ ID NO: 6690 - RNA, 20 nt, Artificial Sequence
  HTT spacer sequence ATCN PAM
cuaagagauuaguguuagac

SEQ ID NO: 6691 - RNA, 20 nt, Artificial Sequence
  HTT spacer sequence ATCN PAM
cuuagggauguagggccuca

SEQ ID NO: 6692 - RNA, 20 nt, Artificial Sequence
  HTT spacer sequence ATCN PAM
ggucuaacacuaaucucuua

SEQ ID NO: 6693 - RNA, 20 nt, Artificial Sequence
  HTT spacer sequence ATCN PAM
cacucacucgagggggugug

SEQ ID NO: 6694 - RNA, 20 nt, Artificial Sequence
  HTT spacer sequence ATCN PAM
ccaaaggaaaaucucacuca

SEQ ID NO: 6695 - RNA, 20 nt, Artificial Sequence
  HTT spacer sequence ATCN PAM
cagcacuuugggaagccaag

SEQ ID NO: 6696 - RNA, 20 nt, Artificial Sequence
  HTT spacer sequence ATCN PAM
gcccaccuuggcuucccaaa

SEQ ID NO: 6697 - RNA, 20 nt, Artificial Sequence
  HTT spacer sequence ATCN PAM
cuugaggucaggauuucgag

SEQ ID NO: 6698 - RNA, 20 nt, Artificial Sequence
  HTT spacer sequence ATCN PAM
ugaccucaagugauccgccc

SEQ ID NO: 6699 - RNA, 20 nt, Artificial Sequence
  HTT spacer sequence ATCN PAM
cuacuaaaaauauaaaaauu

SEQ ID NO: 6700 - RNA, 20 nt, Artificial Sequence
  HTT spacer sequence ATCN PAM
cagcuacucaggagacugag

SEQ ID NO: 6701 - RNA, 20 nt, Artificial Sequence
  HTT spacer sequence ATCN PAM
cuugaacccaggaggcgaag

SEQ ID NO: 6702 - RNA, 20 nt, Artificial Sequence
  HTT spacer sequence ATCN PAM
cggcuuacugcaaccuucgc

SEQ ID NO: 6703 - RNA, 20 nt, Artificial Sequence
  HTT spacer sequence ATCN PAM
cgccacugcacucuagccug

SEQ ID NO: 6704 - RNA, 20 nt, Artificial Sequence
  HTT spacer sequence ATCN PAM
auaacaccuaccuuuuuuuu

SEQ ID NO: 6705 - RNA, 20 nt, Artificial Sequence
  HTT spacer sequence ATCN PAM
gaacccuuguuucagauaac

SEQ ID NO: 6706 - RNA, 20 nt, Artificial Sequence
  HTT spacer sequence ATCN PAM
gaaacaaggguucugaucaa

SEQ ID NO: 6707 - RNA, 20 nt, Artificial Sequence
  HTT spacer sequence ATCN PAM
acccucacucuccucaagcu

SEQ ID NO: 6708 - RNA, 20 nt, Artificial Sequence
  HTT spacer sequence ATCN PAM
ucucccaccagcccgcugaa

SEQ ID NO: 6709 - RNA, 20 nt, Artificial Sequence
  HTT spacer sequence ATCN PAM
cccaccagcccgcugaaaua

SEQ ID NO: 6710 - RNA, 20 nt, Artificial Sequence
  HTT spacer sequence ATCN PAM
uauuucagcgggcugguggg

SEQ ID NO: 6711 - RNA, 20 nt, Artificial Sequence
  HTT spacer sequence ATCN PAM
ucuuauuucagcgggcuggu

SEQ ID NO: 6712 - RNA, 20 nt, Artificial Sequence
  HTT spacer sequence ATCN PAM
ucaggcaggaaagaaaggcc

SEQ ID NO: 6713 - RNA, 20 nt, Artificial Sequence
  HTT spacer sequence ATCN PAM
aacaauacugcguccuugga

SEQ ID NO: 6714 - RNA, 20 nt, Artificial Sequence
  HTT spacer sequence ATCN PAM
ugagagauaaggauucugcc

SEQ ID NO: 6715 - RNA, 20 nt, Artificial Sequence
  HTT spacer sequence ATCN PAM
cucaggaucaaacaauacug

SEQ ID NO: 6716 - RNA, 20 nt, Artificial Sequence
  HTT spacer sequence ATCN PAM
uuaucucucaggaucaaaca

SEQ ID NO: 6717 - RNA, 20 nt, Artificial Sequence
  HTT spacer sequence ATCN PAM
ggaauaccuucauucccugc

SEQ ID NO: 6718 - RNA, 20 nt, Artificial Sequence
  HTT spacer sequence ATCN PAM
gguuaugagacaguaacugc

SEQ ID NO: 6719 - RNA, 20 nt, Artificial Sequence
  HTT spacer sequence ATCN PAM
ucaggugugcucuggacggc

SEQ ID NO: 6720 - RNA, 20 nt, Artificial Sequence
  HTT spacer sequence ATCN PAM
ggaaggcagcuguaacaggc

SEQ ID NO: 6721 - RNA, 20 nt, Artificial Sequence
  HTT spacer sequence ATCN PAM
guuaugcuccccuaugcucc

SEQ ID NO: 6722 - RNA, 20 nt, Artificial Sequence
  HTT spacer sequence ATCN PAM
cuuaccucaccacaggaaag

SEQ ID NO: 6723 - RNA, 20 nt, Artificial Sequence
  HTT spacer sequence ATCN PAM
uagagcccccucugccuuug

SEQ ID NO: 6724 - RNA, 20 nt, Artificial Sequence
  HTT spacer sequence ATCN PAM
gcacaaaggcagagggggcu

SEQ ID NO: 6725 - RNA, 20 nt, Artificial Sequence
  HTT spacer sequence ATCN PAM
ugggguuccguuggguccuu

SEQ ID NO: 6726 - RNA, 20 nt, Artificial Sequence
  HTT spacer sequence ATCN PAM
gcucacggucuggccagcuc

SEQ ID NO: 6727 - RNA, 20 nt, Artificial Sequence
  HTT spacer sequence ATCN PAM
ugccacuugaacagcaucaa

SEQ ID NO: 6728 - RNA, 20 nt, Artificial Sequence
  HTT spacer sequence ATCN PAM
agccugccucuggauucuuc

SEQ ID NO: 6729 - RNA, 20 nt, Artificial Sequence
  HTT spacer sequence ATCN PAM
agaggcaggcuugaugcugu

SEQ ID NO: 6730 - RNA, 20 nt, Artificial Sequence
  HTT spacer sequence ATCN PAM
gagcugaaccucauugaacg

SEQ ID NO: 6731 - RNA, 20 nt, Artificial Sequence
  HTT spacer sequence ATCN PAM
ugaggcugcuggcacacccc

SEQ ID NO: 6732 - RNA, 20 nt, Artificial Sequence
  HTT spacer sequence ATCN PAM
gcucugcccucccacuuccu

SEQ ID NO: 6733 - RNA, 20 nt, Artificial Sequence
  HTT spacer sequence ATCN PAM
aguggcccucccaaaucugc

SEQ ID NO: 6734 - RNA, 20 nt, Artificial Sequence
  HTT spacer sequence ATCN PAM
gaguugagucaggacagaca

SEQ ID NO: 6735 - RNA, 20 nt, Artificial Sequence
  HTT spacer sequence ATCN PAM
uccgaguugagucaggacag

SEQ ID NO: 6736 - RNA, 20 nt, Artificial Sequence
  HTT spacer sequence ATCN PAM
ucucagguguggaagcuugg

SEQ ID NO: 6737 - RNA, 20 nt, Artificial Sequence
  HTT spacer sequence ATCN PAM
aagcuuccacaccugagaag

SEQ ID NO: 6738 - RNA, 20 nt, Artificial Sequence
  HTT spacer sequence ATCN PAM
ccucccgguuugggugacca

SEQ ID NO: 6739 - RNA, 20 nt, Artificial Sequence
  HTT spacer sequence ATCN PAM
cagggaaugcugugccaaaa

SEQ ID NO: 6740 - RNA, 20 nt, Artificial Sequence
  HTT spacer sequence ATCN PAM
ccguggaguuccuccaggaa

SEQ ID NO: 6741 - RNA, 20 nt, Artificial Sequence
  HTT spacer sequence ATCN PAM
accgcaucaacacacuaggu

SEQ ID NO: 6742 - RNA, 20 nt, Artificial Sequence
  HTT spacer sequence ATCN PAM
acacacuagguacucuuggg

SEQ ID NO: 6743 - RNA, 20 nt, Artificial Sequence
  HTT spacer sequence ATCN PAM
accgggaggaaauccagagc

SEQ ID NO: 6744 - RNA, 20 nt, Artificial Sequence
  HTT spacer sequence ATCN PAM
agagcccccaguacugggau

SEQ ID NO: 6745 - RNA, 20 nt, Artificial Sequence
  HTT spacer sequence ATCN PAM
caguacugggggcucuggau

SEQ ID NO: 6746 - RNA, 20 nt, Artificial Sequence
  HTT spacer sequence ATCN PAM
ucucauuugacuccagaaaa

SEQ ID NO: 6747 - RNA, 20 nt, Artificial Sequence
  HTT spacer sequence ATCN PAM
uuucuggagucaaaugagaa

SEQ ID NO: 6748 - RNA, 20 nt, Artificial Sequence
  HTT spacer sequence ATCN PAM
ugcuuaaaucuuuucuggag

SEQ ID NO: 6749 - RNA, 20 nt, Artificial Sequence
  HTT spacer sequence ATCN PAM
auuuucucaguauaaaagga

SEQ ID NO: 6750 - RNA, 20 nt, Artificial Sequence
  HTT spacer sequence ATCN PAM
caguuccuguguuuuguggc

SEQ ID NO: 6751 - RNA, 20 nt, Artificial Sequence
  HTT spacer sequence ATCN PAM
cagcuuuguguauuccgggc

SEQ ID NO: 6752 - RNA, 20 nt, Artificial Sequence
  HTT spacer sequence ATCN PAM
aaggcagaauuuggucucac

SEQ ID NO: 6753 - RNA, 20 nt, Artificial Sequence
  HTT spacer sequence ATCN PAM
gacuggugaacacaagaaaa

SEQ ID NO: 6754 - RNA, 20 nt, Artificial Sequence
  HTT spacer sequence ATCN PAM
uguugugucucaguggucca

SEQ ID NO: 6755 - RNA, 20 nt, Artificial Sequence
  HTT spacer sequence ATCN PAM
gcucccgucugcuuguuccc

SEQ ID NO: 6756 - RNA, 20 nt, Artificial Sequence
  HTT spacer sequence ATCN PAM
gcaacaauucuaugaaauag

SEQ ID NO: 6757 - RNA, 20 nt, Artificial Sequence
  HTT spacer sequence ATCN PAM
aauaggggcaaaagugguga

SEQ ID NO: 6758 - RNA, 20 nt, Artificial Sequence
  HTT spacer sequence ATCN PAM
caccucuugccaucaaauag

SEQ ID NO: 6759 - RNA, 20 nt, Artificial Sequence
  HTT spacer sequence ATCN PAM
uguggugggacuguaaucag

SEQ ID NO: 6760 - RNA, 20 nt, Artificial Sequence
  HTT spacer sequence ATCN PAM
gucaguucucagugacugug

SEQ ID NO: 6761 - RNA, 20 nt, Artificial Sequence
  HTT spacer sequence ATCN PAM
gcagaagcccgagggacugg

SEQ ID NO: 6762 - RNA, 20 nt, Artificial Sequence
  HTT spacer sequence ATCN PAM
aaacaagccucaaaucugca

SEQ ID NO: 6763 - RNA, 20 nt, Artificial Sequence
  HTT spacer sequence ATCN PAM
cagaagguuguggcaggaga

SEQ ID NO: 6764 - RNA, 20 nt, Artificial Sequence
  HTT spacer sequence ATCN PAM
ucacagccaggaagaggagg

SEQ ID NO: 6765 - RNA, 20 nt, Artificial Sequence
  HTT spacer sequence ATCN PAM
guaucaguggccuccugcuc

SEQ ID NO: 6766 - RNA, 20 nt, Artificial Sequence
  HTT spacer sequence ATCN PAM
guggccuccugcucucuccc

SEQ ID NO: 6767 - RNA, 20 nt, Artificial Sequence
  HTT spacer sequence ATCN PAM
gacgugcgugacccaagacu

SEQ ID NO: 6768 - RNA, 20 nt, Artificial Sequence
  HTT spacer sequence ATCN PAM
gugucugaaucaguccugca

SEQ ID NO: 6769 - RNA, 20 nt, Artificial Sequence
  HTT spacer sequence ATCN PAM
guccugcacgcucuccuucu

SEQ ID NO: 6770 - RNA, 20 nt, Artificial Sequence
  HTT spacer sequence ATCN PAM
cggggaccccgauguccauu

SEQ ID NO: 6771 - RNA, 20 nt, Artificial Sequence
  HTT spacer sequence ATCN PAM
ggguccccgugauaaacggg

SEQ ID NO: 6772 - RNA, 20 nt, Artificial Sequence
  HTT spacer sequence ATCN PAM
cgucucucuggccuuaccac

SEQ ID NO: 6773 - RNA, 20 nt, Artificial Sequence
  HTT spacer sequence ATCN PAM
ugauggggacaugaagcaca

SEQ ID NO: 6774 - RNA, 20 nt, Artificial Sequence
  HTT spacer sequence ATCN PAM
ugaugucugaggcagccacg

SEQ ID NO: 6775 - RNA, 20 nt, Artificial Sequence
  HTT spacer sequence ATCN PAM
aacgaacaguuguuucugac

SEQ ID NO: 6776 - RNA, 20 nt, Artificial Sequence
  HTT spacer sequence ATCN PAM
auagggauggagggucuguc

SEQ ID NO: 6777 - RNA, 20 nt, Artificial Sequence
  HTT spacer sequence ATCN PAM
cuauugaugagcugcauucg

SEQ ID NO: 6778 - RNA, 20 nt, Artificial Sequence
  HTT spacer sequence ATCN PAM
gacagacccuccaucccuau

SEQ ID NO: 6779 - RNA, 20 nt, Artificial Sequence
  HTT spacer sequence ATCN PAM
ccguuccuaccuugauacac

SEQ ID NO: 6780 - RNA, 20 nt, Artificial Sequence
  HTT spacer sequence ATCN PAM
agguaggaacggggauucag

SEQ ID NO: 6781 - RNA, 20 nt, Artificial Sequence
  HTT spacer sequence ATCN PAM
auucuucuagacaggucaga

SEQ ID NO: 6782 - RNA, 20 nt, Artificial Sequence
  HTT spacer sequence ATCN PAM
guaguaugugaauucuaccu

SEQ ID NO: 6783 - RNA, 20 nt, Artificial Sequence
  HTT spacer sequence ATCN PAM
acagaguugugcagccagcu

SEQ ID NO: 6784 - RNA, 20 nt, Artificial Sequence
  HTT spacer sequence ATCN PAM
ucccuggaguccagcccuga

SEQ ID NO: 6785 - RNA, 20 nt, Artificial Sequence
  HTT spacer sequence ATCN PAM
gcugcacuguccgagacaca

SEQ ID NO: 6786 - RNA, 20 nt, Artificial Sequence
  HTT spacer sequence ATCN PAM
uugaggaaaccgaaguauag

SEQ ID NO: 6787 - RNA, 20 nt, Artificial Sequence
  HTT spacer sequence ATCN PAM
ccuccauuucaucauugagg

SEQ ID NO: 6788 - RNA, 20 nt, Artificial Sequence
  HTT spacer sequence ATCN PAM
uagaacugugugagguuuaa

SEQ ID NO: 6789 - RNA, 20 nt, Artificial Sequence
  HTT spacer sequence ATCN PAM
cgaggggcugcgucaccagg

SEQ ID NO: 6790 - RNA, 20 nt, Artificial Sequence
  HTT spacer sequence ATCN PAM
gucaagacaccauucagcua

SEQ ID NO: 6791 - RNA, 20 nt, Artificial Sequence
  HTT spacer sequence ATCN PAM
cagcccccagaccucagcag

SEQ ID NO: 6792 - RNA, 20 nt, Artificial Sequence
  HTT spacer sequence ATCN PAM
uuaacauggaaugcaccgua

SEQ ID NO: 6793 - RNA, 20 nt, Artificial Sequence
  HTT spacer sequence ATCN PAM
auacgauugugcccuuucug

SEQ ID NO: 6794 - RNA, 20 nt, Artificial Sequence
  HTT spacer sequence ATCN PAM
uauugauccuuaacauggaa

SEQ ID NO: 6795 - RNA, 20 nt, Artificial Sequence
  HTT spacer sequence ATCN PAM
uuuaguuuaucaauauucag

SEQ ID NO: 6796 - RNA, 20 nt, Artificial Sequence
  HTT spacer sequence ATCN PAM
auauucagaggaguguaggu

SEQ ID NO: 6797 - RNA, 20 nt, Artificial Sequence
  HTT spacer sequence ATCN PAM
cugcaagacauuagaaaaau

SEQ ID NO: 6798 - RNA, 20 nt, Artificial Sequence
  HTT spacer sequence ATCN PAM
ggcuucuugaaguguucacg

SEQ ID NO: 6799 - RNA, 20 nt, Artificial Sequence
  HTT spacer sequence ATCN PAM
uguuagcguaauguacguga

SEQ ID NO: 6800 - RNA, 20 nt, Artificial Sequence
  HTT spacer sequence ATCN PAM
agggccugcauuccacaacu

SEQ ID NO: 6801 - RNA, 20 nt, Artificial Sequence
  HTT spacer sequence ATCN PAM
gaaucaagggccugcauucc

SEQ ID NO: 6802 - RNA, 20 nt, Artificial Sequence
  HTT spacer sequence ATCN PAM
agauugucuuuaaauucaug

SEQ ID NO: 6803 - RNA, 20 nt, Artificial Sequence
  HTT spacer sequence ATCN PAM
ugaugacuugugacauaugu

SEQ ID NO: 6804 - RNA, 20 nt, Artificial Sequence
  HTT spacer sequence ATCN PAM
uugaauucccucauacauuu

SEQ ID NO: 6805 - RNA, 20 nt, Artificial Sequence
  HTT spacer sequence ATCN PAM
aggacuccuuugggcacaaa

SEQ ID NO: 6806 - RNA, 20 nt, Artificial Sequence
  HTT spacer sequence ATCN PAM
gauuguuucagggcccgugu

SEQ ID NO: 6807 - RNA, 20 nt, Artificial Sequence
  HTT spacer sequence ATCN PAM
gaugggcaaaagcccauuuu

SEQ ID NO: 6808 - RNA, 20 nt, Artificial Sequence
  HTT spacer sequence ATCN PAM
uuugguagcacuuaaggcuc

SEQ ID NO: 6809 - RNA, 20 nt, Artificial Sequence
  HTT spacer sequence ATCN PAM
ggguccucucugugucuucc

SEQ ID NO: 6810 - RNA, 20 nt, Artificial Sequence
  HTT spacer sequence ATCN PAM
acguccuggccgugcaggcc

SEQ ID NO: 6811 - RNA, 20 nt, Artificial Sequence
  HTT spacer sequence ATCN PAM
ccucacuggugcucagugca

SEQ ID NO: 6812 - RNA, 20 nt, Artificial Sequence
  HTT spacer sequence ATCN PAM
ccugcacaggccacacggac

SEQ ID NO: 6813 - RNA, 20 nt, Artificial Sequence
  HTT spacer sequence ATCN PAM
uacaagugaaaaacaccaga

SEQ ID NO: 6814 - RNA, 20 nt, Artificial Sequence
  HTT spacer sequence ATCN PAM
gagggauuguggagcaagag

SEQ ID NO: 6815 - RNA, 20 nt, Artificial Sequence
  HTT spacer sequence ATCN PAM
cucugauaaugcucagcuuc

SEQ ID NO: 6816 - RNA, 20 nt, Artificial Sequence
  HTT spacer sequence ATCN PAM
cuugcuccacaaucccucug

SEQ ID NO: 6817 - RNA, 20 nt, Artificial Sequence
  HTT spacer sequence ATCN PAM
uuuauaucaggcaugggauc

SEQ ID NO: 6818 - RNA, 20 nt, Artificial Sequence
  HTT spacer sequence ATCN PAM
ggcaugggauccugucccuu

SEQ ID NO: 6819 - RNA, 20 nt, Artificial Sequence
  HTT spacer sequence ATCN PAM
caugccugauauaaaugaug

SEQ ID NO: 6820 - RNA, 20 nt, Artificial Sequence
  HTT spacer sequence ATCN PAM
ugucccuucucugucuccgg

SEQ ID NO: 6821 - RNA, 20 nt, Artificial Sequence
  HTT spacer sequence ATCN PAM
cugguguggugagcaugcca

SEQ ID NO: 6822 - RNA, 20 nt, Artificial Sequence
  HTT spacer sequence ATCN PAM
ggaaaugaaugagaagcauu

SEQ ID NO: 6823 - RNA, 20 nt, Artificial Sequence
  HTT spacer sequence ATCN PAM
ugcuggucuuacagcccgug

SEQ ID NO: 6824 - RNA, 20 nt, Artificial Sequence
  HTT spacer sequence ATCN PAM
acacaagcugaaucuccagc

SEQ ID NO: 6825 - RNA, 20 nt, Artificial Sequence
  HTT spacer sequence ATCN PAM
ccagcuuuuccuaagaaacc

SEQ ID NO: 6826 - RNA, 20 nt, Artificial Sequence
  HTT spacer sequence ATCN PAM
caggcaucggagcuugucac

SEQ ID NO: 6827 - RNA, 20 nt, Artificial Sequence
  HTT spacer sequence ATCN PAM
gagcuugucaccugguuuaa

SEQ ID NO: 6828 - RNA, 20 nt, Artificial Sequence
  HTT spacer sequence ATCN PAM
ccacacaacucucuucuuuu

SEQ ID NO: 6829 - RNA, 20 nt, Artificial Sequence
  HTT spacer sequence ATCN PAM
caaauccccacacaacucuc

SEQ ID NO: 6830 - RNA, 20 nt, Artificial Sequence
  HTT spacer sequence ATCN PAM
cagagcucuacgcuaaaaua

SEQ ID NO: 6831 - RNA, 20 nt, Artificial Sequence
  HTT spacer sequence ATCN PAM
auggcccuccaagugcucag

SEQ ID NO: 6832 - RNA, 20 nt, Artificial Sequence
  HTT spacer sequence ATCN PAM
agccuucaaggagcucauaa

SEQ ID NO: 6833 - RNA, 20 nt, Artificial Sequence
  HTT spacer sequence ATCN PAM
acuugccuccuccaaagggg

SEQ ID NO: 6834 - RNA, 20 nt, Artificial Sequence
  HTT spacer sequence ATCN PAM
ggggucuggcagaggguuag

SEQ ID NO: 6835 - RNA, 20 nt, Artificial Sequence
  HTT spacer sequence ATCN PAM
ccccaauucccgggcaccag

SEQ ID NO: 6836 - RNA, 20 nt, Artificial Sequence
  HTT spacer sequence ATCN PAM
ugcucccgcuccugccggcu

SEQ ID NO: 6837 - RNA, 20 nt, Artificial Sequence
  HTT spacer sequence ATCN PAM
ggucagccugggcaccgagg

SEQ ID NO: 6838 - RNA, 20 nt, Artificial Sequence
  HTT spacer sequence ATCN PAM
gggucccccagagagcuugc

SEQ ID NO: 6839 - RNA, 20 nt, Artificial Sequence
  HTT spacer sequence ATCN PAM
ccaagacccacagggcucug

SEQ ID NO: 6840 - RNA, 20 nt, Artificial Sequence
  HTT spacer sequence ATCN PAM
gcacaggggggcagggccgc

SEQ ID NO: 6841 - RNA, 20 nt, Artificial Sequence
  HTT spacer sequence ATCN PAM
agacucagggugcugguguu

SEQ ID NO: 6842 - RNA, 20 nt, Artificial Sequence
  HTT spacer sequence ATCN PAM
gccacgagaagcugcugcua

SEQ ID NO: 6843 - RNA, 20 nt, Artificial Sequence
  HTT spacer sequence ATCN PAM
guagcagcagcuucucgugg

SEQ ID NO: 6844 - RNA, 20 nt, Artificial Sequence
  HTT spacer sequence ATCN PAM
accccgagcgggagcugggg

SEQ ID NO: 6845 - RNA, 20 nt, Artificial Sequence
  HTT spacer sequence ATCN PAM
guuuuauuccuaggucccgc

SEQ ID NO: 6846 - RNA, 20 nt, Artificial Sequence
  HTT spacer sequence ATCN PAM
cuacaugugaggucucuuaa

SEQ ID NO: 6847 - RNA, 20 nt, Artificial Sequence
  HTT spacer sequence ATCN PAM
cuaucgcuacaugugagguc

SEQ ID NO: 6848 - RNA, 20 nt, Artificial Sequence
  HTT spacer sequence ATCN PAM
gaggaggaaacagaagcaca

SEQ ID NO: 6849 - RNA, 20 nt, Artificial Sequence
  HTT spacer sequence ATCN PAM
cuucacuuaucugaggagga

SEQ ID NO: 6850 - RNA, 20 nt, Artificial Sequence
  HTT spacer sequence ATCN PAM
auaacauuuuaggaggcuga

SEQ ID NO: 6851 - RNA, 20 nt, Artificial Sequence
  HTT spacer sequence ATCN PAM
uggcucacugcagccucaac

SEQ ID NO: 6852 - RNA, 20 nt, Artificial Sequence
  HTT spacer sequence ATCN PAM
uaugcaaauggcccuacguu

SEQ ID NO: 6853 - RNA, 20 nt, Artificial Sequence
  HTT spacer sequence ATCN PAM
ggaacccggugagcgaaaga

SEQ ID NO: 6854 - RNA, 20 nt, Artificial Sequence
  HTT spacer sequence ATCN PAM
caggguuucugcugugaagg

SEQ ID NO: 6855 - RNA, 20 nt, Artificial Sequence
  HTT spacer sequence ATCN PAM
gucaaaggugaaaggacaga

SEQ ID NO: 6856 - RNA, 20 nt, Artificial Sequence
  HTT spacer sequence ATCN PAM
ugggguggaaacaucuguca

SEQ ID NO: 6857 - RNA, 20 nt, Artificial Sequence
  HTT spacer sequence ATCN PAM
uauuggucauuuucacuuau

SEQ ID NO: 6858 - RNA, 20 nt, Artificial Sequence
  HTT spacer sequence ATCN PAM
ccccaaccccgcugcauuug

SEQ ID NO: 6859 - RNA, 20 nt, Artificial Sequence
  HTT spacer sequence ATCN PAM
uucaauguuugcguuguguc

SEQ ID NO: 6860 - RNA, 20 nt, Artificial Sequence
  HTT spacer sequence ATCN PAM
caugacaguugguuugcgga

SEQ ID NO: 6861 - RNA, 20 nt, Artificial Sequence
  HTT spacer sequence ATCN PAM
uacuggggcugaaguacggu

SEQ ID NO: 6862 - RNA, 20 nt, Artificial Sequence
  HTT spacer sequence ATCN PAM
cagacagggcagggguggca

SEQ ID NO: 6863 - RNA, 20 nt, Artificial Sequence
  HTT spacer sequence ATCN PAM
aggggcuaaacaucccagac

SEQ ID NO: 6864 - RNA, 20 nt, Artificial Sequence
  HTT spacer sequence ATCN PAM
cuggcacuagccccaacuca

SEQ ID NO: 6865 - RNA, 20 nt, Artificial Sequence
  HTT spacer sequence ATCN PAM
ucacuggcacuagccccaac

SEQ ID NO: 6866 - RNA, 20 nt, Artificial Sequence
  HTT spacer sequence ATCN PAM
cgcagccaccacgcagucag

SEQ ID NO: 6867 - RNA, 20 nt, Artificial Sequence
  HTT spacer sequence ATCN PAM
agagcgcgggucacaaaggc

SEQ ID NO: 6868 - RNA, 20 nt, Artificial Sequence
  HTT spacer sequence ATCN PAM
cacguauugguuccguguuu

SEQ ID NO: 6869 - RNA, 20 nt, Artificial Sequence
  HTT spacer sequence ATCN PAM
gaauggaguccccaaaacac

SEQ ID NO: 6870 - RNA, 20 nt, Artificial Sequence
  HTT spacer sequence ATCN PAM
cuucguagagccucuuucug

SEQ ID NO: 6871 - RNA, 20 nt, Artificial Sequence
  HTT spacer sequence ATCN PAM
ggggccagucaaccccagga

SEQ ID NO: 6872 - RNA, 20 nt, Artificial Sequence
  HTT spacer sequence ATCN PAM
caccccugagggaggaggaa

SEQ ID NO: 6873 - RNA, 20 nt, Artificial Sequence
  HTT spacer sequence ATCN PAM
gucauuugauuuguuugagg

SEQ ID NO: 6874 - RNA, 20 nt, Artificial Sequence
  HTT spacer sequence ATCN PAM
aaugacugauaagaaauuuc

SEQ ID NO: 6875 - RNA, 20 nt, Artificial Sequence
  HTT spacer sequence ATCN PAM
cauguacuuggaaaauaccc

SEQ ID NO: 6876 - RNA, 20 nt, Artificial Sequence
  HTT spacer sequence ATCN PAM
cgcauauuccacaggaaaca

SEQ ID NO: 6877 - RNA, 20 nt, Artificial Sequence
  HTT spacer sequence ATCN PAM
acuccuguucgcaguuuuug

SEQ ID NO: 6878 - RNA, 20 nt, Artificial Sequence
  HTT spacer sequence ATCN PAM
agcggcuguacaacucaagc

SEQ ID NO: 6879 - RNA, 20 nt, Artificial Sequence
  HTT spacer sequence ATCN PAM
ugccguccagcucagccagg

SEQ ID NO: 6880 - RNA, 20 nt, Artificial Sequence
  HTT spacer sequence ATCN PAM
ugaucagugagguggucaga

SEQ ID NO: 6881 - RNA, 20 nt, Artificial Sequence
  HTT spacer sequence ATCN PAM
ggauggccgggguccuccug

SEQ ID NO: 6882 - RNA, 20 nt, Artificial Sequence
  HTT spacer sequence ATCN PAM
gugagguggucagauccgua

SEQ ID NO: 6883 - RNA, 20 nt, Artificial Sequence
  HTT spacer sequence ATCN PAM
gaccaccucacugaucagga

SEQ ID NO: 6884 - RNA, 20 nt, Artificial Sequence
  HTT spacer sequence ATCN PAM
guaagugagccuucccauuc

SEQ ID NO: 6885 - RNA, 20 nt, Artificial Sequence
  HTT spacer sequence ATCN PAM
agaacgcuacuacuggcaag

SEQ ID NO: 6886 - RNA, 20 nt, Artificial Sequence
  HTT spacer sequence ATCN PAM
aggcaacgcauccagaacgc

SEQ ID NO: 6887 - RNA, 20 nt, Artificial Sequence
  HTT spacer sequence ATCN PAM
cgcuguuagaauccaggcaa

SEQ ID NO: 6888 - RNA, 20 nt, Artificial Sequence
  HTT spacer sequence ATCN PAM
ccagcuucuaguggucucag

SEQ ID NO: 6889 - RNA, 20 nt, Artificial Sequence
  HTT spacer sequence ATCN PAM
gcucaaacugguugcgcucg

SEQ ID NO: 6890 - RNA, 20 nt, Artificial Sequence
  HTT spacer sequence ATCN PAM
cgucuucugaagggugcacc

SEQ ID NO: 6891 - RNA, 20 nt, Artificial Sequence
  HTT spacer sequence ATCN PAM
ucgcucaguaccuggugccu

SEQ ID NO: 6892 - RNA, 20 nt, Artificial Sequence
  HTT spacer sequence ATCN PAM
caaggacggcagcugccuug

SEQ ID NO: 6893 - RNA, 20 nt, Artificial Sequence
  HTT spacer sequence ATCN PAM
gccuugggaccugguguugg

SEQ ID NO: 6894 - RNA, 20 nt, Artificial Sequence
  HTT spacer sequence ATCN PAM
gagaagcacugcagcucacg

SEQ ID NO: 6895 - RNA, 20 nt, Artificial Sequence
  HTT spacer sequence ATCN PAM
cagugaccugugaauggcac

SEQ ID NO: 6896 - RNA, 20 nt, Artificial Sequence
  HTT spacer sequence ATCN PAM
cugggcuuaugacaucauug

SEQ ID NO: 6897 - RNA, 20 nt, Artificial Sequence
  HTT spacer sequence ATCN PAM
uuguaguagcccauccccac

SEQ ID NO: 6898 - RNA, 20 nt, Artificial Sequence
  HTT spacer sequence ATCN PAM
ccacagaaccacggugugug

SEQ ID NO: 6899 - RNA, 20 nt, Artificial Sequence
  HTT spacer sequence ATCN PAM
uagaugguggaaaugcuacu

SEQ ID NO: 6900 - RNA, 20 nt, Artificial Sequence
  HTT spacer sequence ATCN PAM
acgaugccucagcgccacca

SEQ ID NO: 6901 - RNA, 20 nt, Artificial Sequence
  HTT spacer sequence ATCN PAM
gggugcuauagucucuuuuu

SEQ ID NO: 6902 - RNA, 20 nt, Artificial Sequence
  HTT spacer sequence ATCN PAM
gcuggcaccuugaccaugaa

SEQ ID NO: 6903 - RNA, 20 nt, Artificial Sequence
  HTT spacer sequence ATCN PAM
cacaccaaaucugcuggcac

SEQ ID NO: 6904 - RNA, 20 nt, Artificial Sequence
  HTT spacer sequence ATCN PAM
augaagcagagagcagcccu

SEQ ID NO: 6905 - RNA, 20 nt, Artificial Sequence
  HTT spacer sequence ATCN PAM
ucuggcuggguccucacggu

SEQ ID NO: 6906 - RNA, 20 nt, Artificial Sequence
  HTT spacer sequence ATCN PAM
acaagggcucucccaucaug

SEQ ID NO: 6907 - RNA, 20 nt, Artificial Sequence
  HTT spacer sequence ATCN PAM
ugaccucaucaccucccaag

SEQ ID NO: 6908 - RNA, 20 nt, Artificial Sequence
  HTT spacer sequence ATCN PAM
ccucccaaggccccaccuuc

SEQ ID NO: 6909 - RNA, 20 nt, Artificial Sequence
  HTT spacer sequence ATCN PAM
cuccugaaacuccuacacug

SEQ ID NO: 6910 - RNA, 20 nt, Artificial Sequence
  HTT spacer sequence ATCN PAM
cagcggucaaguguucaucc

SEQ ID NO: 6911 - RNA, 20 nt, Artificial Sequence
  HTT spacer sequence ATCN PAM
ucuugaguuccuccuuauuc

SEQ ID NO: 6912 - RNA, 20 nt, Artificial Sequence
  HTT spacer sequence ATCN PAM
ggauucagccagugcagcau

SEQ ID NO: 6913 - RNA, 20 nt, Artificial Sequence
  HTT spacer sequence ATCN PAM
ugauaaaccagaagcagaau

SEQ ID NO: 6914 - RNA, 20 nt, Artificial Sequence
  HTT spacer sequence ATCN PAM
ccacaugguauuugccaagu

SEQ ID NO: 6915 - RNA, 20 nt, Artificial Sequence
  HTT spacer sequence ATCN PAM
aucaccugcacacgugaaau

SEQ ID NO: 6916 - RNA, 20 nt, Artificial Sequence
  HTT spacer sequence ATCN PAM
ccugcacacgugaaaucauu

SEQ ID NO: 6917 - RNA, 20 nt, Artificial Sequence
  HTT spacer sequence ATCN PAM
uugcccgugggucccgacau

SEQ ID NO: 6918 - RNA, 20 nt, Artificial Sequence
  HTT spacer sequence ATCN PAM
ggcgaagcauauucaaggau

SEQ ID NO: 6919 - RNA, 20 nt, Artificial Sequence
  HTT spacer sequence ATCN PAM
uugaauaugcuucgccagau

SEQ ID NO: 6920 - RNA, 20 nt, Artificial Sequence
  HTT spacer sequence ATCN PAM
auuuuaugauagcaauggaa

SEQ ID NO: 6921 - RNA, 20 nt, Artificial Sequence
  HTT spacer sequence ATCN PAM
uaaaauggauuacuagguaa

SEQ ID NO: 6922 - RNA, 20 nt, Artificial Sequence
  HTT spacer sequence ATCN PAM
gggccugccuagcccgugcu

SEQ ID NO: 6923 - RNA, 20 nt, Artificial Sequence
  HTT spacer sequence ATCN PAM
uucaccgucaugacagcauu

SEQ ID NO: 6924 - RNA, 20 nt, Artificial Sequence
  HTT spacer sequence ATCN PAM
cuccagccgcuaacauuugc

SEQ ID NO: 6925 - RNA, 20 nt, Artificial Sequence
  HTT spacer sequence ATCN PAM
ucccuuguggguguccuuca

SEQ ID NO: 6926 - RNA, 20 nt, Artificial Sequence
  HTT spacer sequence ATCN PAM
cucuucacggcgaacacccu

SEQ ID NO: 6927 - RNA, 20 nt, Artificial Sequence
  HTT spacer sequence ATCN PAM
ugugggcaacacccagaggg

SEQ ID NO: 6928 - RNA, 20 nt, Artificial Sequence
  HTT spacer sequence ATCN PAM
gggccugagcacaaaaccac

SEQ ID NO: 6929 - RNA, 20 nt, Artificial Sequence
  HTT spacer sequence ATCN PAM
cccuaggcaaguguugugcc

SEQ ID NO: 6930 - RNA, 20 nt, Artificial Sequence
  HTT spacer sequence ATCN PAM
guaaucaaaugagaaauaau

SEQ ID NO: 6931 - RNA, 20 nt, Artificial Sequence
  HTT spacer sequence ATCN PAM
aaugagaaauaaucauuuug

SEQ ID NO: 6932 - RNA, 20 nt, Artificial Sequence
  HTT spacer sequence ATCN PAM
uuuugaaaagcagauccuaa

SEQ ID NO: 6933 - RNA, 20 nt, Artificial Sequence
  HTT spacer sequence ATCN PAM
gcuuuucaaaaugauuauuu

SEQ ID NO: 6934 - RNA, 20 nt, Artificial Sequence
  HTT spacer sequence ATCN PAM
uaaggcaggauggucaugga

SEQ ID NO: 6935 - RNA, 20 nt, Artificial Sequence
  HTT spacer sequence ATCN PAM
ugccuuaggaucugcuuuuc

SEQ ID NO: 6936 - RNA, 20 nt, Artificial Sequence
  HTT spacer sequence ATCN PAM
uccagaaagcaugagugcac

SEQ ID NO: 6937 - RNA, 20 nt, Artificial Sequence
  HTT spacer sequence ATCN PAM
ucugugaagguuuucagcgc

SEQ ID NO: 6938 - RNA, 20 nt, Artificial Sequence
  HTT spacer sequence ATCN PAM
agagcaugucguuuugaggu

SEQ ID NO: 6939 - RNA, 20 nt, Artificial Sequence
  HTT spacer sequence ATCN PAM
gugccacccgagagcagguc

SEQ ID NO: 6940 - RNA, 20 nt, Artificial Sequence
  HTT spacer sequence ATCN PAM
ggaccugcucucggguggca

SEQ ID NO: 6941 - RNA, 20 nt, Artificial Sequence
  HTT spacer sequence ATCN PAM
ccucacacgcacaacgccac

SEQ ID NO: 6942 - RNA, 20 nt, Artificial Sequence
  HTT spacer sequence ATCN PAM
caggaacaaggaccaaaaga

SEQ ID NO: 6943 - RNA, 20 nt, Artificial Sequence
  HTT spacer sequence ATCN PAM
uuccacaaaaacaagaggcc

SEQ ID NO: 6944 - RNA, 20 nt, Artificial Sequence
  HTT spacer sequence ATCN PAM
agcgcuccaugggaauucug

SEQ ID NO: 6945 - RNA, 20 nt, Artificial Sequence
  HTT spacer sequence ATCN PAM
gcucuuuaacagugaggaga

SEQ ID NO: 6946 - RNA, 20 nt, Artificial Sequence
  HTT spacer sequence ATCN PAM
accuaaacacuuagcccacg

SEQ ID NO: 6947 - RNA, 20 nt, Artificial Sequence
  HTT spacer sequence ATCN PAM
aaaaccuagcaggguuaaau

SEQ ID NO: 6948 - RNA, 20 nt, Artificial Sequence
  HTT spacer sequence ATCN PAM
gggauccccaagacuacccc

SEQ ID NO: 6949 - RNA, 20 nt, Artificial Sequence
  HTT spacer sequence ATCN PAM
cugauagugguuucugucaa

SEQ ID NO: 6950 - RNA, 20 nt, Artificial Sequence
  HTT spacer sequence ATCN PAM
ccaagacuaccccaggcuuu

SEQ ID NO: 6951 - RNA, 20 nt, Artificial Sequence
  HTT spacer sequence ATCN PAM
uagcugagagucuuucuaga

SEQ ID NO: 6952 - RNA, 20 nt, Artificial Sequence
  HTT spacer sequence ATCN PAM
gcaaagaaaauuagcaaggg

SEQ ID NO: 6953 - RNA, 20 nt, Artificial Sequence
  HTT spacer sequence ATCN PAM
ccccaugggccucugcccuu

SEQ ID NO: 6954 - RNA, 20 nt, Artificial Sequence
  HTT spacer sequence ATCN PAM
ucucccagcggggucgugca

SEQ ID NO: 6955 - RNA, 20 nt, Artificial Sequence
  HTT spacer sequence ATCN PAM
ucacugaggaggggcucccu

SEQ ID NO: 6956 - RNA, 20 nt, Artificial Sequence
  HTT spacer sequence ATCN PAM
ugagaggccugugugcaagg

SEQ ID NO: 6957 - RNA, 20 nt, Artificial Sequence
  HTT spacer sequence ATCN PAM
cggucaucagcgacuaucuc

SEQ ID NO: 6958 - RNA, 20 nt, Artificial Sequence
  HTT spacer sequence ATCN PAM
gcgacuaucuccucuccaac

SEQ ID NO: 6959 - RNA, 20 nt, Artificial Sequence
  HTT spacer sequence ATCN PAM
ccucuccaaccugaaaggga

SEQ ID NO: 6960 - RNA, 20 nt, Artificial Sequence
  HTT spacer sequence ATCN PAM
cuuucagguuggagaggaga

SEQ ID NO: 6961 - RNA, 20 nt, Artificial Sequence
  HTT spacer sequence ATCN PAM
cccagugagugggagccugg

SEQ ID NO: 6962 - RNA, 20 nt, Artificial Sequence
  HTT spacer sequence ATCN PAM
cccucuccaagugcccaggc

SEQ ID NO: 6963 - RNA, 20 nt, Artificial Sequence
  HTT spacer sequence ATCN PAM
ggccaggagccugggcacuu

SEQ ID NO: 6964 - RNA, 20 nt, Artificial Sequence
  HTT spacer sequence ATCN PAM
gugggaacccaggugggugc

SEQ ID NO: 6965 - RNA, 20 nt, Artificial Sequence
  HTT spacer sequence ATCN PAM
gcucucauucucugcuccca

SEQ ID NO: 6966 - RNA, 20 nt, Artificial Sequence
  HTT spacer sequence ATCN PAM
caguggaaacaagagggagg

SEQ ID NO: 6967 - RNA, 20 nt, Artificial Sequence
  HTT spacer sequence ATCN PAM
uaaagcugcuggacggcagg

SEQ ID NO: 6968 - RNA, 20 nt, Artificial Sequence
  HTT spacer sequence ATCN PAM
cugugaagagcuugacuugc

SEQ ID NO: 6969 - RNA, 20 nt, Artificial Sequence
  HTT spacer sequence ATCN PAM
cugcuaaagccucugcgacu

SEQ ID NO: 6970 - RNA, 20 nt, Artificial Sequence
  HTT spacer sequence ATCN PAM
gccacccacaugggggaguu

SEQ ID NO: 6971 - RNA, 20 nt, Artificial Sequence
  HTT spacer sequence ATCN PAM
uugcuccuaauucuugcccu

SEQ ID NO: 6972 - RNA, 20 nt, Artificial Sequence
  HTT spacer sequence ATCN PAM
cuggccauuccucccagacc

SEQ ID NO: 6973 - RNA, 20 nt, Artificial Sequence
  HTT spacer sequence ATCN PAM
ccuuugacaagugggcagga

SEQ ID NO: 6974 - RNA, 20 nt, Artificial Sequence
  HTT spacer sequence ATCN PAM
ugccagacggccaccggcau

SEQ ID NO: 6975 - RNA, 20 nt, Artificial Sequence
  HTT spacer sequence ATCN PAM
ggggccauugcccucaucca

SEQ ID NO: 6976 - RNA, 20 nt, Artificial Sequence
  HTT spacer sequence ATCN PAM
aggccagagugucacaagcc

SEQ ID NO: 6977 - RNA, 20 nt, Artificial Sequence
  HTT spacer sequence ATCN PAM
uugcugggcagugggugcug

SEQ ID NO: 6978 - RNA, 20 nt, Artificial Sequence
  HTT spacer sequence ATCN PAM
cuggagccuggcauagggcc

SEQ ID NO: 6979 - RNA, 20 nt, Artificial Sequence
  HTT spacer sequence ATCN PAM
ggcacauauguuggugcagu

SEQ ID NO: 6980 - RNA, 20 nt, Artificial Sequence
  HTT spacer sequence ATCN PAM
cgucacugcaccaacauaug

SEQ ID NO: 6981 - RNA, 20 nt, Artificial Sequence
  HTT spacer sequence ATCN PAM
caaacgcaacuccuggacca

SEQ ID NO: 6982 - RNA, 20 nt, Artificial Sequence
  HTT spacer sequence ATCN PAM
agguagaaauggugcguggg

SEQ ID NO: 6983 - RNA, 20 nt, Artificial Sequence
  HTT spacer sequence ATCN PAM
gucaccacguggucccaccu

SEQ ID NO: 6984 - RNA, 20 nt, Artificial Sequence
  HTT spacer sequence ATCN PAM
cugggcacguuuuugugggu

SEQ ID NO: 6985 - RNA, 20 nt, Artificial Sequence
  HTT spacer sequence ATCN PAM
uauuggcuccucuguucaca

SEQ ID NO: 6986 - RNA, 20 nt, Artificial Sequence
  HTT spacer sequence ATCN PAM
cccgacagcgccggccuucc

SEQ ID NO: 6987 - RNA, 20 nt, Artificial Sequence
  HTT spacer sequence ATCN PAM
cagaaggcagcacgucauga

SEQ ID NO: 6988 - RNA, 20 nt, Artificial Sequence
  HTT spacer sequence ATCN PAM
ugacgugcugccuucuguga

SEQ ID NO: 6989 - RNA, 20 nt, Artificial Sequence
  HTT spacer sequence ATCN PAM
agggccucguugagggacag

SEQ ID NO: 6990 - RNA, 20 nt, Artificial Sequence
  HTT spacer sequence ATCN PAM
aacguggagagggcuucaca

SEQ ID NO: 6991 - RNA, 20 nt, Artificial Sequence
  HTT spacer sequence ATCN PAM
aggcucagccacccccaucc

SEQ ID NO: 6992 - RNA, 20 nt, Artificial Sequence
  HTT spacer sequence ATCN PAM
ucuggacguagggccggaau

SEQ ID NO: 6993 - RNA, 20 nt, Artificial Sequence
  HTT spacer sequence ATCN PAM
auaauacaggugagugggcc

SEQ ID NO: 6994 - RNA, 20 nt, Artificial Sequence
  HTT spacer sequence ATCN PAM
ugcaaggaaaagagaaggga

SEQ ID NO: 6995 - RNA, 20 nt, Artificial Sequence
  HTT spacer sequence ATCN PAM
uaccagugggccaguuuuga

SEQ ID NO: 6996 - RNA, 20 nt, Artificial Sequence
  HTT spacer sequence ATCN PAM
cugcacagucucagguguuc

SEQ ID NO: 6997 - RNA, 20 nt, Artificial Sequence
  HTT spacer sequence ATCN PAM
gcacagggagaaaggccucu

SEQ ID NO: 6998 - RNA, 20 nt, Artificial Sequence
  HTT spacer sequence ATCN PAM
ccccacacaucugcacaggg

SEQ ID NO: 6999 - RNA, 20 nt, Artificial Sequence
  HTT spacer sequence ATCN PAM
uuuaccacugugcccucaga

SEQ ID NO: 7000 - RNA, 20 nt, Artificial Sequence
  HTT spacer sequence ATCN PAM
aggcgggagagcugcucaga

SEQ ID NO: 7001 - RNA, 20 nt, Artificial Sequence
  HTT spacer sequence ATCN PAM
cuggucaagcugagugugga

SEQ ID NO: 7002 - RNA, 20 nt, Artificial Sequence
  HTT spacer sequence ATCN PAM
ggcccagagccgccauggcc

SEQ ID NO: 7003 - RNA, 20 nt, Artificial Sequence
  HTT spacer sequence ATCN PAM
gagggcaccuagucgagguc

SEQ ID NO: 7004 - RNA, 20 nt, Artificial Sequence
  HTT spacer sequence ATCN PAM
ccuugcaagaaaggcucugg

SEQ ID NO: 7005 - RNA, 20 nt, Artificial Sequence
  HTT spacer sequence ATCN PAM
cauguggcugagcugggcug

SEQ ID NO: 7006 - RNA, 20 nt, Artificial Sequence
  HTT spacer sequence ATCN PAM
gccccuugcuugcccaggac

SEQ ID NO: 7007 - RNA, 20 nt, Artificial Sequence
  HTT spacer sequence ATCN PAM
ccugcuuucagaucuccagg

SEQ ID NO: 7008 - RNA, 20 nt, Artificial Sequence
  HTT spacer sequence ATCN PAM
gaaagcaggugauaucagcc

SEQ ID NO: 7009 - RNA, 20 nt, Artificial Sequence
  HTT spacer sequence ATCN PAM
ccagggacucacuggacccc

SEQ ID NO: 7010 - RNA, 20 nt, Artificial Sequence
  HTT spacer sequence ATCN PAM
ugcagcccccgacagcgagu

SEQ ID NO: 7011 - RNA, 20 nt, Artificial Sequence
  HTT spacer sequence ATCN PAM
cugacucgcugucgggggcu

SEQ ID NO: 7012 - RNA, 20 nt, Artificial Sequence
  HTT spacer sequence ATCN PAM
guucuuuuugauagguaaga

SEQ ID NO: 7013 - RNA, 20 nt, Artificial Sequence
  HTT spacer sequence ATCN PAM
aaaagaacagauacccgcuc

SEQ ID NO: 7014 - RNA, 20 nt, Artificial Sequence
  HTT spacer sequence ATCN PAM
cucagccguuagcuucccua

SEQ ID NO: 7015 - RNA, 20 nt, Artificial Sequence
  HTT spacer sequence ATCN PAM
gcagacacacacaaaagcac

SEQ ID NO: 7016 - RNA, 20 nt, Artificial Sequence
  HTT spacer sequence ATCN PAM
ccuggcgcuguugcuggagu

SEQ ID NO: 7017 - RNA, 20 nt, Artificial Sequence
  HTT spacer sequence ATCN PAM
cuggcaggacuccagcaaca

SEQ ID NO: 7018 - RNA, 20 nt, Artificial Sequence
  HTT spacer sequence ATCN PAM
cuccugagggcucagggaca

SEQ ID NO: 7019 - RNA, 20 nt, Artificial Sequence
  HTT spacer sequence ATCN PAM
ugagaggggagcccacgggg

SEQ ID NO: 7020 - RNA, 20 nt, Artificial Sequence
  HTT spacer sequence ATCN PAM
uccugccgcugcuccucacc

SEQ ID NO: 7021 - RNA, 20 nt, Artificial Sequence
  HTT spacer sequence ATCN PAM
uugagacccguguggucagu

SEQ ID NO: 7022 - RNA, 20 nt, Artificial Sequence
  HTT spacer sequence ATCN PAM
ggggcccuuguccuugagaa

SEQ ID NO: 7023 - RNA, 20 nt, Artificial Sequence
  HTT spacer sequence ATCN PAM
accaugucgccaggacugag

SEQ ID NO: 7024 - RNA, 20 nt, Artificial Sequence
  HTT spacer sequence ATCN PAM
ggagccuuguugcacugccu

SEQ ID NO: 7025 - RNA, 20 nt, Artificial Sequence
  HTT spacer sequence ATCN PAM
ggguggccaguggggagcca

SEQ ID NO: 7026 - RNA, 20 nt, Artificial Sequence
  HTT spacer sequence ATCN PAM
ggucaaacaguggagcaagg

SEQ ID NO: 7027 - RNA, 20 nt, Artificial Sequence
  HTT spacer sequence ATCN PAM
acaugaaaacagaccagcac

SEQ ID NO: 7028 - RNA, 20 nt, Artificial Sequence
  HTT spacer sequence ATCN PAM
caaaaagaaaagaaaaaaaa

SEQ ID NO: 7029 - RNA, 20 nt, Artificial Sequence
  HTT spacer sequence ATCN PAM
caccauugcacuccagccug

SEQ ID NO: 7030 - RNA, 20 nt, Artificial Sequence
  HTT spacer sequence ATCN PAM
cggcucacugcaaccuccgc

SEQ ID NO: 7031 - RNA, 20 nt, Artificial Sequence
  HTT spacer sequence ATCN PAM
cuugaacccgggaggcggag

SEQ ID NO: 7032 - RNA, 20 nt, Artificial Sequence
  HTT spacer sequence ATCN PAM
cagcuacuagggaggcugag

SEQ ID NO: 7033 - RNA, 20 nt, Artificial Sequence
  HTT spacer sequence ATCN PAM
cuugaguucaggaguucgag

SEQ ID NO: 7034 - RNA, 20 nt, Artificial Sequence
  HTT spacer sequence ATCN PAM
acccuccuuggccucccaaa

SEQ ID NO: 7035 - RNA, 20 nt, Artificial Sequence
  HTT spacer sequence ATCN PAM
cagcacuuugggaggccaag

SEQ ID NO: 7036 - RNA, 20 nt, Artificial Sequence
  HTT spacer sequence ATCN PAM
acaugggggccgggcgcagu

SEQ ID NO: 7037 - RNA, 20 nt, Artificial Sequence
  HTT spacer sequence ATCN PAM
uucuucaguccccauaugcu

SEQ ID NO: 7038 - RNA, 20 nt, Artificial Sequence
  HTT spacer sequence ATCN PAM
guggucagcugcgaggugcc

SEQ ID NO: 7039 - RNA, 20 nt, Artificial Sequence
  HTT spacer sequence ATCN PAM
gugcacacaugccagccgug

SEQ ID NO: 7040 - RNA, 20 nt, Artificial Sequence
  HTT spacer sequence ATCN PAM
cguucccgucucaucagugc

SEQ ID NO: 7041 - RNA, 20 nt, Artificial Sequence
  HTT spacer sequence ATCN PAM
cuuucagugcugaaaagcaa

SEQ ID NO: 7042 - RNA, 20 nt, Artificial Sequence
  HTT spacer sequence ATCN PAM
ugaaacacgcccccugagca

SEQ ID NO: 7043 - RNA, 20 nt, Artificial Sequence
  HTT spacer sequence ATCN PAM
gguuagggaagaagcagcga

SEQ ID NO: 7044 - RNA, 20 nt, Artificial Sequence
  HTT spacer sequence ATCN PAM
gugcucucgcugcuucuucc

SEQ ID NO: 7045 - RNA, 20 nt, Artificial Sequence
  HTT spacer sequence ATCN PAM
cuauguguucuaacgcuucg

SEQ ID NO: 7046 - RNA, 20 nt, Artificial Sequence
  HTT spacer sequence ATCN PAM
uaacaaaagaacccguuccc

SEQ ID NO: 7047 - RNA, 20 nt, Artificial Sequence
  HTT spacer sequence ATCN PAM
cuuuuguaacauccuucccg

SEQ ID NO: 7048 - RNA, 20 nt, Artificial Sequence
  HTT spacer sequence ATCN PAM
uucccgcugcgccguuucug

SEQ ID NO: 7049 - RNA, 20 nt, Artificial Sequence
  HTT spacer sequence ATCN PAM
gggcugggagggacccucgg

SEQ ID NO: 7050 - RNA, 20 nt, Artificial Sequence
  HTT spacer sequence ATCN PAM
gcauuuuccccaguauuaga

SEQ ID NO: 7051 - RNA, 20 nt, Artificial Sequence
  HTT spacer sequence ATCN PAM
ugggaggagggacgcagguc

SEQ ID NO: 7052 - RNA, 20 nt, Artificial Sequence
  HTT spacer sequence ATCN PAM
ggaaaggcuuuccuugugaa

SEQ ID NO: 7053 - RNA, 20 nt, Artificial Sequence
  HTT spacer sequence ATCN PAM
uggccaccacucuggcuuca

SEQ ID NO: 7054 - RNA, 20 nt, Artificial Sequence
  HTT spacer sequence ATCN PAM
ugccccaguuucuagacgac

SEQ ID NO: 7055 - RNA, 20 nt, Artificial Sequence
  HTT spacer sequence ATCN PAM
ugaacaaagucaucggagag

SEQ ID NO: 7056 - RNA, 20 nt, Artificial Sequence
  HTT spacer sequence ATCN PAM
gagaguuucuguccaaccag

SEQ ID NO: 7057 - RNA, 20 nt, Artificial Sequence
  HTT spacer sequence ATCN PAM
cacaugcaaccucaccuuau

SEQ ID NO: 7058 - RNA, 20 nt, Artificial Sequence
  HTT spacer sequence ATCN PAM
ccaucccacaugcaaccuca

SEQ ID NO: 7059 - RNA, 20 nt, Artificial Sequence
  HTT spacer sequence ATCN PAM
gcugggaagucggaggcaac

SEQ ID NO: 7060 - RNA, 20 nt, Artificial Sequence
  HTT spacer sequence ATCN PAM
ccgcgacccacgggcuggug

SEQ ID NO: 7061 - RNA, 20 nt, Artificial Sequence
  HTT spacer sequence ATCN PAM
ucucugggucccuggugcug

SEQ ID NO: 7062 - RNA, 20 nt, Artificial Sequence
  HTT spacer sequence ATCN PAM
ugaaacaugagccucggugu

SEQ ID NO: 7063 - RNA, 20 nt, Artificial Sequence
  HTT spacer sequence ATCN PAM
gugggguuuuugcaaagguu

SEQ ID NO: 7064 - RNA, 20 nt, Artificial Sequence
  HTT spacer sequence ATCN PAM
aggcacaaugaccaaagcua

SEQ ID NO: 7065 - RNA, 20 nt, Artificial Sequence
  HTT spacer sequence ATCN PAM
cccucucggggaaaggcuua

SEQ ID NO: 7066 - RNA, 20 nt, Artificial Sequence
  HTT spacer sequence ATCN PAM
uuacuuaagccuuuccccga

SEQ ID NO: 7067 - RNA, 20 nt, Artificial Sequence
  HTT spacer sequence ATCN PAM
aguucccacccccagaugcu

SEQ ID NO: 7068 - RNA, 20 nt, Artificial Sequence
  HTT spacer sequence ATCN PAM
gggggugggaacuggaucuu

SEQ ID NO: 7069 - RNA, 20 nt, Artificial Sequence
  HTT spacer sequence ATCN PAM
agccagccaaggguugcagg

SEQ ID NO: 7070 - RNA, 20 nt, Artificial Sequence
  HTT spacer sequence ATCN PAM
gcgccuccaccuccauuccu

SEQ ID NO: 7071 - RNA, 20 nt, Artificial Sequence
  HTT spacer sequence ATCN PAM
agguggcccuuccggggcuc

SEQ ID NO: 7072 - RNA, 20 nt, Artificial Sequence
  HTT spacer sequence ATCN PAM
gcaggaugggcaagcuggag

SEQ ID NO: 7073 - RNA, 20 nt, Artificial Sequence
  HTT spacer sequence ATCN PAM
ugcugaugacaugugggagg

SEQ ID NO: 7074 - RNA, 20 nt, Artificial Sequence
  HTT spacer sequence ATCN PAM
ggugucuguagaagucugug

SEQ ID NO: 7075 - RNA, 20 nt, Artificial Sequence
  HTT spacer sequence ATCN PAM
ccggcugcugacuuguuuac

SEQ ID NO: 7076 - RNA, 20 nt, Artificial Sequence
  HTT spacer sequence ATCN PAM
ggagaaaggaccuggucacc

SEQ ID NO: 7077 - RNA, 20 nt, Artificial Sequence
  HTT spacer sequence ATCN PAM
gggccagaaguccucccucc

SEQ ID NO: 7078 - RNA, 20 nt, Artificial Sequence
  HTT spacer sequence ATCN PAM
agacacggggcguggcaugc

SEQ ID NO: 7079 - RNA, 20 nt, Artificial Sequence
  HTT spacer sequence ATCN PAM
gugcauccagacacggggcg

SEQ ID NO: 7080 - RNA, 20 nt, Artificial Sequence
  HTT spacer sequence ATCN PAM
ugagaagaaaagagagaagg

SEQ ID NO: 7081 - RNA, 20 nt, Artificial Sequence
  HTT spacer sequence ATCN PAM
guaaagagauuaauuuuaac

SEQ ID NO: 7082 - RNA, 20 nt, Artificial Sequence
  HTT spacer sequence ATCN PAM
cuuuacugauauaauuaaau

SEQ ID NO: 7083 - RNA, 20 nt, Artificial Sequence
  HTT spacer sequence ATCN PAM
caaggccugugcugcaugcg

SEQ ID NO: 7084 - RNA, 20 nt, Artificial Sequence
  HTT spacer sequence ATCN PAM
cagucaccuugugaaugcau

SEQ ID NO: 7085 - RNA, 20 nt, Artificial Sequence
  HTT spacer sequence ATCN PAM
uaggggugcgcucaccugca

SEQ ID NO: 7086 - RNA, 20 nt, Artificial Sequence
  HTT spacer sequence ATCN PAM
auggagcagcaggucccaac

SEQ ID NO: 7087 - RNA, 20 nt, Artificial Sequence
  HTT spacer sequence ATCN PAM
cuucugcccccguuccagcu

SEQ ID NO: 7088 - RNA, 20 nt, Artificial Sequence
  HTT spacer sequence ATCN PAM
ugcacggugaccccuuuuag

SEQ ID NO: 7089 - RNA, 20 nt, Artificial Sequence
  HTT spacer sequence ATCN PAM
gcacucuccugacuaaaagg

SEQ ID NO: 7090 - RNA, 20 nt, Artificial Sequence
  HTT spacer sequence ATCN PAM
gugcucaucggagacugccc

SEQ ID NO: 7091 - RNA, 20 nt, Artificial Sequence
  HTT spacer sequence ATCN PAM
gagacugccccacggcccug

SEQ ID NO: 7092 - RNA, 20 nt, Artificial Sequence
  HTT spacer sequence ATCN PAM
ccaggccaggucccuggacc

SEQ ID NO: 7093 - RNA, 20 nt, Artificial Sequence
  HTT spacer sequence ATCN PAM
acuuccauuuuaaugacuug

SEQ ID NO: 7094 - RNA, 20 nt, Artificial Sequence
  HTT spacer sequence ATCN PAM
agaauccacuuccauuuuaa

SEQ ID NO: 7095 - RNA, 20 nt, Artificial Sequence
  HTT spacer sequence ATCN PAM
gcagcagcccggccauccag

SEQ ID NO: 7096 - RNA, 20 nt, Artificial Sequence
  HTT spacer sequence ATCN PAM
agcuccuacaucagcagcag

SEQ ID NO: 7097 - RNA, 20 nt, Artificial Sequence
  HTT spacer sequence ATCN PAM
acgggcaugaccaaaccaag

SEQ ID NO: 7098 - RNA, 20 nt, Artificial Sequence
  HTT spacer sequence ATCN PAM
cagcugcuccccagcugcca

SEQ ID NO: 7099 - RNA, 20 nt, Artificial Sequence
  HTT spacer sequence ATCN PAM
gaccccuuucuaccgcuccu

SEQ ID NO: 7100 - RNA, 20 nt, Artificial Sequence
  HTT spacer sequence ATCN PAM
ccauuccguauugguugggg

SEQ ID NO: 7101 - RNA, 20 nt, Artificial Sequence
  HTT spacer sequence ATCN PAM
uagcuuuuuccuggaaagcc

SEQ ID NO: 7102 - RNA, 20 nt, Artificial Sequence
  HTT spacer sequence ATCN PAM
caggccagauguuguuccug

SEQ ID NO: 7103 - RNA, 20 nt, Artificial Sequence
  HTT spacer sequence ATCN PAM
ggccugugauacugcugucu

SEQ ID NO: 7104 - RNA, 20 nt, Artificial Sequence
  HTT spacer sequence ATCN PAM
agccaggaacaacaucuggc

SEQ ID NO: 7105 - RNA, 20 nt, Artificial Sequence
  HTT spacer sequence ATCN PAM
cugggcucaacauagaguuu

SEQ ID NO: 7106 - RNA, 20 nt, Artificial Sequence
  HTT spacer sequence ATCN PAM
cgucguaaacaagaggaaga

SEQ ID NO: 7107 - RNA, 20 nt, Artificial Sequence
  HTT spacer sequence ATCN PAM
aaaccaguccuuagcaaggg

SEQ ID NO: 7108 - RNA, 20 nt, Artificial Sequence
  HTT spacer sequence ATCN PAM
ccggagcacacaggcagguc

SEQ ID NO: 7109 - RNA, 20 nt, Artificial Sequence
  HTT spacer sequence ATCN PAM
augcaugugcauauagacac

SEQ ID NO: 7110 - RNA, 20 nt, Artificial Sequence
  HTT spacer sequence ATCN PAM
auaauuuuacacacacaccu

SEQ ID NO: 7111 - RNA, 20 nt, Artificial Sequence
  HTT spacer sequence ATCN PAM
ccgucuugagaggugugugu

SEQ ID NO: 7112 - RNA, 20 nt, Artificial Sequence
  HTT spacer sequence ATCN PAM
aggcgugggacguggucagg

SEQ ID NO: 7113 - RNA, 20 nt, Artificial Sequence
  HTT spacer sequence ATCN PAM
uagugggcaaugaaugagcc

SEQ ID NO: 7114 - RNA, 20 nt, Artificial Sequence
  HTT spacer sequence ATCN PAM
cacuggcgaagauggucucc

SEQ ID NO: 7115 - RNA, 20 nt, Artificial Sequence
  HTT spacer sequence ATCN PAM
ucgccagugggauccuagug

SEQ ID NO: 7116 - RNA, 20 nt, Artificial Sequence
  HTT spacer sequence ATCN PAM
gcucucugcagaagggagga

SEQ ID NO: 7117 - RNA, 20 nt, Artificial Sequence
  HTT spacer sequence ATCN PAM
uguuccuaaaaaucuguggc

SEQ ID NO: 7118 - RNA, 20 nt, Artificial Sequence
  HTT spacer sequence ATCN PAM
guggcaagcacccaucguau

SEQ ID NO: 7119 - RNA, 20 nt, Artificial Sequence
  HTT spacer sequence ATCN PAM
uauuauccaaauuuuguugc

SEQ ID NO: 7120 - RNA, 20 nt, Artificial Sequence
  HTT spacer sequence ATCN PAM
aaauuuuguugcaaauguga

SEQ ID NO: 7121 - RNA, 20 nt, Artificial Sequence
  HTT spacer sequence ATCN PAM
cauuugcaacaaaauuugga

SEQ ID NO: 7122 - RNA, 20 nt, Artificial Sequence
  HTT spacer sequence ATCN PAM
ccccacagcccacccccaaa

SEQ ID NO: 7123 - RNA, 20 nt, Artificial Sequence
  HTT spacer sequence ATCN PAM
ggaaagauuuuaaugaaacc

SEQ ID NO: 7124 - RNA, 20 nt, Artificial Sequence
  HTT spacer sequence ATCN PAM
uucccgauauuaccagcagg

SEQ ID NO: 7125 - RNA, 20 nt, Artificial Sequence
  HTT spacer sequence ATCN PAM
ccuacauagacucagcuggg

SEQ ID NO: 7126 - RNA, 20 nt, Artificial Sequence
  HTT spacer sequence ATCN PAM
gagaaggcccugugcccuaa

SEQ ID NO: 7127 - RNA, 20 nt, Artificial Sequence
  HTT spacer sequence ATCN PAM
ucauggagggggucauuuca

SEQ ID NO: 7128 - RNA, 20 nt, Artificial Sequence
  HTT spacer sequence ATCN PAM
cagcuccaagaggaggagcu

SEQ ID NO: 7129 - RNA, 20 nt, Artificial Sequence
  HTT spacer sequence ATCN PAM
gucccgagcuccacgugggg

SEQ ID NO: 7130 - RNA, 20 nt, Artificial Sequence
  HTT spacer sequence ATCN PAM
uucccagcagacauccucau

SEQ ID NO: 7131 - RNA, 20 nt, Artificial Sequence
  HTT spacer sequence ATCN PAM
ucaucgggcuuugucccucc

SEQ ID NO: 7132 - RNA, 20 nt, Artificial Sequence
  HTT spacer sequence ATCN PAM
ggcuuugucccucccccgcu

SEQ ID NO: 7133 - RNA, 20 nt, Artificial Sequence
  HTT spacer sequence ATCN PAM
uccuucuucucacuccuaca

SEQ ID NO: 7134 - RNA, 20 nt, Artificial Sequence
  HTT spacer sequence ATCN PAM
ugagagcugcugagggaccu

SEQ ID NO: 7135 - RNA, 20 nt, Artificial Sequence
  HTT spacer sequence ATCN PAM
ugagcucuccaaggucccuc

SEQ ID NO: 7136 - RNA, 20 nt, Artificial Sequence
  HTT spacer sequence ATCN PAM
gggugguaacugccagccuu

SEQ ID NO: 7137 - RNA, 20 nt, Artificial Sequence
  HTT spacer sequence ATCN PAM
uccaaggcuggcaguuacca

SEQ ID NO: 7138 - RNA, 20 nt, Artificial Sequence
  HTT spacer sequence ATCN PAM
uggccaacguggaccugccu

SEQ ID NO: 7139 - RNA, 20 nt, Artificial Sequence
  HTT spacer sequence ATCN PAM
cagcccugcuggcuccaggg

SEQ ID NO: 7140 - RNA, 20 nt, Artificial Sequence
  HTT spacer sequence ATCN PAM
cucgucaguccuucccuuug

SEQ ID NO: 7141 - RNA, 20 nt, Artificial Sequence
  HTT spacer sequence ATCN PAM
aaauuaaaggaaaaaaaugg

SEQ ID NO: 7142 - RNA, 20 nt, Artificial Sequence
  HTT spacer sequence ATCN PAM
guuguugcugugugaggcuu

SEQ ID NO: 7143 - RNA, 20 nt, Artificial Sequence
  HTT spacer sequence ATCN PAM
ggcauuauggaggguccccc

SEQ ID NO: 7144 - RNA, 20 nt, Artificial Sequence
  HTT spacer sequence ATCN PAM
cuggcuacagaaaacacggg

SEQ ID NO: 7145 - RNA, 20 nt, Artificial Sequence
  HTT spacer sequence ATCN PAM
gcagggcaggaagaccaccu

SEQ ID NO: 7146 - RNA, 20 nt, Artificial Sequence
  HTT spacer sequence ATCN PAM
uaagcuuauaugacauacac

SEQ ID NO: 7147 - RNA, 20 nt, Artificial Sequence
  HTT spacer sequence ATCN PAM
ggcccagcacagagacuaga

SEQ ID NO: 7148 - RNA, 20 nt, Artificial Sequence
  HTT spacer sequence ATCN PAM
caccucugguguggccgggg

SEQ ID NO: 7149 - RNA, 20 nt, Artificial Sequence
  HTT spacer sequence ATCN PAM
ccgcugggcugagcagaggc

SEQ ID NO: 7150 - RNA, 20 nt, Artificial Sequence
  HTT spacer sequence ATCN PAM
ccaaggcuuccgagaggcuc

SEQ ID NO: 7151 - RNA, 20 nt, Artificial Sequence
  HTT spacer sequence ATCN PAM
ugggaugcagaugucuuacc

SEQ ID NO: 7152 - RNA, 20 nt, Artificial Sequence
  HTT spacer sequence ATCN PAM
caagaugacuacaccaccaa

SEQ ID NO: 7153 - RNA, 20 nt, Artificial Sequence
  HTT spacer sequence ATCN PAM
gcaucccaagaugacuacac

SEQ ID NO: 7154 - RNA, 20 nt, Artificial Sequence
  HTT spacer sequence ATCN PAM
cugcucagagaaagggggcc

SEQ ID NO: 7155 - RNA, 20 nt, Artificial Sequence
  HTT spacer sequence ATCN PAM
cuaucccugcucagagaaag

SEQ ID NO: 7156 - RNA, 20 nt, Artificial Sequence
  HTT spacer sequence ATCN PAM
gucugccggagggauguggu

SEQ ID NO: 7157 - RNA, 20 nt, Artificial Sequence
  HTT spacer sequence ATCN PAM
cuccggcagacugaucccua

SEQ ID NO: 7158 - RNA, 20 nt, Artificial Sequence
  HTT spacer sequence ATCN PAM
gucuccucauaggugacacc

SEQ ID NO: 7159 - RNA, 20 nt, Artificial Sequence
  HTT spacer sequence ATCN PAM
gagagcacacccuguccccu

SEQ ID NO: 7160 - RNA, 20 nt, Artificial Sequence
  HTT spacer sequence ATCN PAM
aauaccaccgaaggcacagg

SEQ ID NO: 7161 - RNA, 20 nt, Artificial Sequence
  HTT spacer sequence ATCN PAM
caacaaagccaguagcagcc

SEQ ID NO: 7162 - RNA, 20 nt, Artificial Sequence
  HTT spacer sequence ATCN PAM
ggaagucgcuuccccugcgu

SEQ ID NO: 7163 - RNA, 20 nt, Artificial Sequence
  HTT spacer sequence ATCN PAM
gacuuacagugcuccacgca

SEQ ID NO: 7164 - RNA, 20 nt, Artificial Sequence
  HTT spacer sequence ATCN PAM
uguagaggcaaggccccccu

SEQ ID NO: 7165 - RNA, 20 nt, Artificial Sequence
  HTT spacer sequence ATCN PAM
uccgcgagcccacgagucug

SEQ ID NO: 7166 - RNA, 20 nt, Artificial Sequence
  HTT spacer sequence ATCN PAM
ccaggaccucuuuugggaaa

SEQ ID NO: 7167 - RNA, 20 nt, Artificial Sequence
  HTT spacer sequence ATCN PAM
cuugcgggucccccaggcuc

SEQ ID NO: 7168 - RNA, 20 nt, Artificial Sequence
  HTT spacer sequence ATCN PAM
ucugggggggcccgccagug

SEQ ID NO: 7169 - RNA, 20 nt, Artificial Sequence
  HTT spacer sequence ATCN PAM
cuggaggcagagggcugaag

SEQ ID NO: 7170 - RNA, 20 nt, Artificial Sequence
  HTT spacer sequence ATCN PAM
accucaggaccagccugucc

SEQ ID NO: 7171 - RNA, 20 nt, Artificial Sequence
  HTT spacer sequence ATCN PAM
uggccccuguacccucugga

SEQ ID NO: 7172 - RNA, 20 nt, Artificial Sequence
  HTT spacer sequence ATCN PAM
uuccccuccuggccccaauu

SEQ ID NO: 7173 - RNA, 20 nt, Artificial Sequence
  HTT spacer sequence ATCN PAM
cggggggccccugggcaggc

SEQ ID NO: 7174 - RNA, 20 nt, Artificial Sequence
  HTT spacer sequence ATCN PAM
ccacccaucugcacaggcug

SEQ ID NO: 7175 - RNA, 20 nt, Artificial Sequence
  HTT spacer sequence ATCN PAM
gcacaggcugugcucaccac

SEQ ID NO: 7176 - RNA, 20 nt, Artificial Sequence
  HTT spacer sequence ATCN PAM
acccagaaaugcugagcagg

SEQ ID NO: 7177 - RNA, 20 nt, Artificial Sequence
  HTT spacer sequence ATCN PAM
ugcucagcauuucugggugg

SEQ ID NO: 7178 - RNA, 20 nt, Artificial Sequence
  HTT spacer sequence ATCN PAM
cuucuaaauaaugaggcugg

SEQ ID NO: 7179 - RNA, 20 nt, Artificial Sequence
  HTT spacer sequence ATCN PAM
guccccugcuggggaggggc

SEQ ID NO: 7180 - RNA, 20 nt, Artificial Sequence
  HTT spacer sequence ATCN PAM
gcugccugccugguucuugu

SEQ ID NO: 7181 - RNA, 20 nt, Artificial Sequence
  HTT spacer sequence ATCN PAM
uccaggcagcauucccaggg

SEQ ID NO: 7182 - RNA, 20 nt, Artificial Sequence
  HTT spacer sequence ATCN PAM
accuuggagcugcuggggac

SEQ ID NO: 7183 - RNA, 20 nt, Artificial Sequence
  HTT spacer sequence ATCN PAM
cccagcauggugcuggcuaa

SEQ ID NO: 7184 - RNA, 20 nt, Artificial Sequence
  HTT spacer sequence ATCN PAM
gacuauaucacccagcaugg

SEQ ID NO: 7185 - RNA, 20 nt, Artificial Sequence
  HTT spacer sequence ATCN PAM
uguuaccccuguuguggagg

SEQ ID NO: 7186 - RNA, 20 nt, Artificial Sequence
  HTT spacer sequence ATCN PAM
cccggcacaagggguaagca

SEQ ID NO: 7187 - RNA, 20 nt, Artificial Sequence
  HTT spacer sequence ATCN PAM
cuuggcaucucccggcacaa

SEQ ID NO: 7188 - RNA, 20 nt, Artificial Sequence
  HTT spacer sequence ATCN PAM
gcaggcacuccacagagcuc

SEQ ID NO: 7189 - RNA, 20 nt, Artificial Sequence
  HTT spacer sequence ATCN PAM
ccacucgacuaaggucagcc

SEQ ID NO: 7190 - RNA, 20 nt, Artificial Sequence
  HTT spacer sequence ATCN PAM
cuacugccuggcacuggggc

SEQ ID NO: 7191 - RNA, 20 nt, Artificial Sequence
  HTT spacer sequence ATCN PAM
ucccuacugccuggcacugg

SEQ ID NO: 7192 - RNA, 20 nt, Artificial Sequence
  HTT spacer sequence ATCN PAM
gggccucaggagacaucauc

SEQ ID NO: 7193 - RNA, 20 nt, Artificial Sequence
  HTT spacer sequence ATCN PAM
gccccaugagacuaguccag

SEQ ID NO: 7194 - RNA, 20 nt, Artificial Sequence
  HTT spacer sequence ATCN PAM
cuggggcccuccccauacac

SEQ ID NO: 7195 - RNA, 20 nt, Artificial Sequence
  HTT spacer sequence ATCN PAM
ugacugcgggcaagagggag

SEQ ID NO: 7196 - RNA, 20 nt, Artificial Sequence
  HTT spacer sequence ATCN PAM
cggccucugcccgcugcccc

SEQ ID NO: 7197 - RNA, 20 nt, Artificial Sequence
  HTT spacer sequence ATCN PAM
gcacccgaaacguaacacau

SEQ ID NO: 7198 - RNA, 20 nt, Artificial Sequence
  HTT spacer sequence ATCN PAM
ggggcucucggcaggcugug

SEQ ID NO: 7199 - RNA, 20 nt, Artificial Sequence
  HTT spacer sequence ATCN PAM
cagucccucagccccacagg

SEQ ID NO: 7200 - RNA, 20 nt, Artificial Sequence
  HTT spacer sequence ATCN PAM
ggcugcccaucagcucccug

SEQ ID NO: 7201 - RNA, 20 nt, Artificial Sequence
  HTT spacer sequence ATCN PAM
gcucccugcguacccagacu

SEQ ID NO: 7202 - RNA, 20 nt, Artificial Sequence
  HTT spacer sequence ATCN PAM
gcccagcaagccagggggag

SEQ ID NO: 7203 - RNA, 20 nt, Artificial Sequence
  HTT spacer sequence ATCN PAM
cugcuguccucaccggccgg

SEQ ID NO: 7204 - RNA, 20 nt, Artificial Sequence
  HTT spacer sequence ATCN PAM
gcccccaguucagugccgcc

SEQ ID NO: 7205 - RNA, 20 nt, Artificial Sequence
  HTT spacer sequence ATCN PAM
gccugggcggcggugagagg

SEQ ID NO: 7206 - RNA, 20 nt, Artificial Sequence
  HTT spacer sequence ATCN PAM
auauugcggcgagcgggcca

SEQ ID NO: 7207 - RNA, 20 nt, Artificial Sequence
  HTT spacer sequence ATCN PAM
gggcugcacugacgggccau

SEQ ID NO: 7208 - RNA, 20 nt, Artificial Sequence
  HTT spacer sequence ATCN PAM
aaaugacguuucccguuuaa

SEQ ID NO: 7209 - RNA, 20 nt, Artificial Sequence
  HTT spacer sequence ATCN PAM
gacaggcaggaauuuaguua

SEQ ID NO: 7210 - RNA, 20 nt, Artificial Sequence
  HTT spacer sequence ATCN PAM
cggcguccguccaguugcgg

SEQ ID NO: 7211 - RNA, 20 nt, Artificial Sequence
  HTT spacer sequence ATCN PAM
ucucguacaccuuggcguug

SEQ ID NO: 7212 - RNA, 20 nt, Artificial Sequence
  HTT spacer sequence ATCN PAM
cgaagagcuugcuggccauc

SEQ ID NO: 7213 - RNA, 20 nt, Artificial Sequence
  HTT spacer sequence ATCN PAM
ccucgcccagccugcgcucg

SEQ ID NO: 7214 - RNA, 20 nt, Artificial Sequence
  HTT spacer sequence ATCN PAM
agaucaagaucaccaacaug

SEQ ID NO: 7215 - RNA, 20 nt, Artificial Sequence
  HTT spacer sequence ATCN PAM
ugaucuccucgcccagccug

SEQ ID NO: 7216 - RNA, 20 nt, Artificial Sequence
  HTT spacer sequence ATCN PAM
agaucaccaacaugaccuuc

SEQ ID NO: 7217 - RNA, 20 nt, Artificial Sequence
  HTT spacer sequence ATCN PAM
ugaucuugaucuccucgccc

SEQ ID NO: 7218 - RNA, 20 nt, Artificial Sequence
  HTT spacer sequence ATCN PAM
ccaacaugaccuuccaguac

SEQ ID NO: 7219 - RNA, 20 nt, Artificial Sequence
  HTT spacer sequence ATCN PAM
ucccgacucagagcuccaag

SEQ ID NO: 7220 - RNA, 20 nt, Artificial Sequence
  HTT spacer sequence ATCN PAM
uggccucugcccagcaccag

SEQ ID NO: 7221 - RNA, 20 nt, Artificial Sequence
  HTT spacer sequence ATCN PAM
acugagccucugccaugagc

SEQ ID NO: 7222 - RNA, 20 nt, Artificial Sequence
  HTT spacer sequence ATCN PAM
ccaggugaggugcaggacca

SEQ ID NO: 7223 - RNA, 20 nt, Artificial Sequence
  HTT spacer sequence ATCN PAM
cccuggcugggugguccccu

SEQ ID NO: 7224 - RNA, 20 nt, Artificial Sequence
  HTT spacer sequence ATCN PAM
uaaagugcguggguccccag

SEQ ID NO: 7225 - RNA, 20 nt, Artificial Sequence
  HTT spacer sequence ATCN PAM
ccccacaccugugaccuuca

SEQ ID NO: 7226 - RNA, 20 nt, Artificial Sequence
  HTT spacer sequence ATCN PAM
uggaagcugacaggcucucc

SEQ ID NO: 7227 - RNA, 20 nt, Artificial Sequence
  HTT spacer sequence ATCN PAM
acgcaacugaaagcggagac

SEQ ID NO: 7228 - RNA, 20 nt, Artificial Sequence
  HTT spacer sequence ATCN PAM
aaucaacgcaacugaaagcg

SEQ ID NO: 7229 - RNA, 20 nt, Artificial Sequence
  HTT spacer sequence ATCN PAM
gucaugcucagcacccuagg

SEQ ID NO: 7230 - RNA, 20 nt, Artificial Sequence
  HTT spacer sequence ATCN PAM
ucagagguucgguggacaca

SEQ ID NO: 7231 - RNA, 20 nt, Artificial Sequence
  HTT spacer sequence ATCN PAM
cucagccuccaggaauggag

SEQ ID NO: 7232 - RNA, 20 nt, Artificial Sequence
  HTT spacer sequence ATCN PAM
gccaugacgugcagugcacc

SEQ ID NO: 7233 - RNA, 20 nt, Artificial Sequence
  HTT spacer sequence ATCN PAM
agucacccagccacagcuuc

SEQ ID NO: 7234 - RNA, 20 nt, Artificial Sequence
  HTT spacer sequence ATCN PAM
uuguccuuuuucuuuauacc

SEQ ID NO: 7235 - RNA, 20 nt, Artificial Sequence
  HTT spacer sequence ATCN PAM
cuaaccucugccccaggcuu

SEQ ID NO: 7236 - RNA, 20 nt, Artificial Sequence
  HTT spacer sequence ATCN PAM
ccugcucaccaucuggcugu

SEQ ID NO: 7237 - RNA, 20 nt, Artificial Sequence
  HTT spacer sequence ATCN PAM
ggcugugccuguuugcuggg

SEQ ID NO: 7238 - RNA, 20 nt, Artificial Sequence
  HTT spacer sequence ATCN PAM
agcuuauuguuuccaacggc

SEQ ID NO: 7239 - RNA, 20 nt, Artificial Sequence
  HTT spacer sequence ATCN PAM
cugccucacuggacccagua

SEQ ID NO: 7240 - RNA, 20 nt, Artificial Sequence
  HTT spacer sequence ATCN PAM
ggcagugugggaaggggccc

SEQ ID NO: 7241 - RNA, 20 nt, Artificial Sequence
  HTT spacer sequence ATCN PAM
ggcccaccccagggccucug

SEQ ID NO: 7242 - RNA, 20 nt, Artificial Sequence
  HTT spacer sequence ATCN PAM
agcgcuacaaccugcaaccu

SEQ ID NO: 7243 - RNA, 20 nt, Artificial Sequence
  HTT spacer sequence ATCN PAM
aggcuccugcccagacugua

SEQ ID NO: 7244 - RNA, 20 nt, Artificial Sequence
  HTT spacer sequence ATCN PAM
gcccuguagcugggggaggg

SEQ ID NO: 7245 - RNA, 20 nt, Artificial Sequence
  HTT spacer sequence ATCN PAM
aaguaagccccucccccagc

SEQ ID NO: 7246 - RNA, 20 nt, Artificial Sequence
  HTT spacer sequence ATCN PAM
ucacuaugucauugauauaa

SEQ ID NO: 7247 - RNA, 20 nt, Artificial Sequence
  HTT spacer sequence ATCN PAM
cuaugucauugauauaaaaa

SEQ ID NO: 7248 - RNA, 20 nt, Artificial Sequence
  HTT spacer sequence ATCN PAM
augacauagugaugaucaaa

SEQ ID NO: 7249 - RNA, 20 nt, Artificial Sequence
  HTT spacer sequence ATCN PAM
ccacacuuugcugugugacu

SEQ ID NO: 7250 - RNA, 20 nt, Artificial Sequence
  HTT spacer sequence ATCN PAM
caucuccacacuuugcugug

SEQ ID NO: 7251 - RNA, 20 nt, Artificial Sequence
  HTT spacer sequence ATCN PAM
cuauauuuauauaucuuaua

SEQ ID NO: 7252 - RNA, 20 nt, Artificial Sequence
  HTT spacer sequence ATCN PAM
uauaauaccuuauuauuaca

SEQ ID NO: 7253 - RNA, 20 nt, Artificial Sequence
  HTT spacer sequence ATCN PAM
gugcaugcugggaccuuggg

SEQ ID NO: 7254 - RNA, 20 nt, Artificial Sequence
  HTT spacer sequence ATCN PAM
gagcccguguagguccugaa

SEQ ID NO: 7255 - RNA, 20 nt, Artificial Sequence
  HTT spacer sequence ATCN PAM
ugacccuggagccuggccga

SEQ ID NO: 7256 - RNA, 20 nt, Artificial Sequence
  HTT spacer sequence ATCN PAM
gccaggcuccagggucaaga

SEQ ID NO: 7257 - RNA, 20 nt, Artificial Sequence
  HTT spacer sequence ATCN PAM
gucaugcauuuuaauuuccu

SEQ ID NO: 7258 - RNA, 20 nt, Artificial Sequence
  HTT spacer sequence ATCN PAM
auggcuagguaauagggcca

SEQ ID NO: 7259 - RNA, 20 nt, Artificial Sequence
  HTT spacer sequence ATCN PAM
caucaauggcuagguaauag

SEQ ID NO: 7260 - RNA, 20 nt, Artificial Sequence
  HTT spacer sequence ATCN PAM
caggacucggggaccuuggc

SEQ ID NO: 7261 - RNA, 20 nt, Artificial Sequence
  HTT spacer sequence ATCN PAM
ucgaagcggccuucguagga

SEQ ID NO: 7262 - RNA, 20 nt, Artificial Sequence
  HTT spacer sequence ATCN PAM
uccucgaagcggccuucgua

SEQ ID NO: 7263 - RNA, 20 nt, Artificial Sequence
  HTT spacer sequence ATCN PAM
cuccgacagcuccuccagcu

SEQ ID NO: 7264 - RNA, 20 nt, Artificial Sequence
  HTT spacer sequence ATCN PAM
cagcccccaccauuuagaga

SEQ ID NO: 7265 - RNA, 20 nt, Artificial Sequence
  HTT spacer sequence ATCN PAM
cuuuugagcugcacggaaag

SEQ ID NO: 7266 - RNA, 20 nt, Artificial Sequence
  HTT spacer sequence ATCN PAM
guaccuuucucagagggugg

SEQ ID NO: 7267 - RNA, 20 nt, Artificial Sequence
  HTT spacer sequence ATCN PAM
caggagagaagacgcagcau

SEQ ID NO: 7268 - RNA, 20 nt, Artificial Sequence
  HTT spacer sequence ATCN PAM
cguguugccgugggcaugac

SEQ ID NO: 7269 - RNA, 20 nt, Artificial Sequence
  HTT spacer sequence ATCN PAM
aucccacaccucagacccgu

SEQ ID NO: 7270 - RNA, 20 nt, Artificial Sequence
  HTT spacer sequence ATCN PAM
cacaccucagacccgucccg

SEQ ID NO: 7271 - RNA, 20 nt, Artificial Sequence
  HTT spacer sequence ATCN PAM
ugcaggcacagucacguggc

SEQ ID NO: 7272 - RNA, 20 nt, Artificial Sequence
  HTT spacer sequence ATCN PAM
uccuguucuugccuccaaau

SEQ ID NO: 7273 - RNA, 20 nt, Artificial Sequence
  HTT spacer sequence ATCN PAM
acaaucuuccuguucuugcc

SEQ ID NO: 7274 - RNA, 20 nt, Artificial Sequence
  HTT spacer sequence ATCN PAM
uuaguagagaaggcgucucc

SEQ ID NO: 7275 - RNA, 20 nt, Artificial Sequence
  HTT spacer sequence ATCN PAM
ugagucaagcagcggccccc

SEQ ID NO: 7276 - RNA, 20 nt, Artificial Sequence
  HTT spacer sequence ATCN PAM
caggccuccugcugguuccu

SEQ ID NO: 7277 - RNA, 20 nt, Artificial Sequence
  HTT spacer sequence ATCN PAM
gggagggcagcccccacgcc

SEQ ID NO: 7278 - RNA, 20 nt, Artificial Sequence
  HTT spacer sequence ATCN PAM
ggcccaaagcgcggaucuca

SEQ ID NO: 7279 - RNA, 20 nt, Artificial Sequence
  HTT spacer sequence ATCN PAM
gcgcuuugggccugaucagg

SEQ ID NO: 7280 - RNA, 20 nt, Artificial Sequence
  HTT spacer sequence ATCN PAM
cacgccccugagguuggcug

SEQ ID NO: 7281 - RNA, 20 nt, Artificial Sequence
  HTT spacer sequence ATCN PAM
cuggcccacacucugcucug

SEQ ID NO: 7282 - RNA, 20 nt, Artificial Sequence
  HTT spacer sequence ATCN PAM
cccggcggccuagaaauggg

SEQ ID NO: 7283 - RNA, 20 nt, Artificial Sequence
  HTT spacer sequence ATCN PAM
caggcccuuccuucugggac

SEQ ID NO: 7284 - RNA, 20 nt, Artificial Sequence
  HTT spacer sequence ATCN PAM
gccuaaggccggguggggcu

SEQ ID NO: 7285 - RNA, 20 nt, Artificial Sequence
  HTT spacer sequence ATCN PAM
cucccuggggguggucucuc

SEQ ID NO: 7286 - RNA, 20 nt, Artificial Sequence
  HTT spacer sequence ATCN PAM
ugccagggagcacccuucac

SEQ ID NO: 7287 - RNA, 20 nt, Artificial Sequence
  HTT spacer sequence ATCN PAM
cacccuuuccagaccgaagg

SEQ ID NO: 7288 - RNA, 20 nt, Artificial Sequence
  HTT spacer sequence ATCN PAM
acaccccuucggucuggaaa

SEQ ID NO: 7289 - RNA, 20 nt, Artificial Sequence
  HTT spacer sequence ATCN PAM
gcuagucgcaaaggacggca

SEQ ID NO: 7290 - RNA, 20 nt, Artificial Sequence
  HTT spacer sequence ATCN PAM
cgccacugcucucugcacaa

SEQ ID NO: 7291 - RNA, 20 nt, Artificial Sequence
  HTT spacer sequence ATCN PAM
uggcucacugcaaccuccgc

SEQ ID NO: 7292 - RNA, 20 nt, Artificial Sequence
  HTT spacer sequence ATCN PAM
cuugaacccacgaggcggag

SEQ ID NO: 7293 - RNA, 20 nt, Artificial Sequence
  HTT spacer sequence ATCN PAM
cagcuacucgggaggcugag

SEQ ID NO: 7294 - RNA, 20 nt, Artificial Sequence
  HTT spacer sequence ATCN PAM
cuacuaaaaauacaaaaauu

SEQ ID NO: 7295 - RNA, 20 nt, Artificial Sequence
  HTT spacer sequence ATCN PAM
ccugaggucaggaguucaag

SEQ ID NO: 7296 - RNA, 20 nt, Artificial Sequence
  HTT spacer sequence ATCN PAM
accugccucugccucccaaa

SEQ ID NO: 7297 - RNA, 20 nt, Artificial Sequence
  HTT spacer sequence ATCN PAM
cagcacuuugggaggcagag

SEQ ID NO: 7298 - RNA, 20 nt, Artificial Sequence
  HTT spacer sequence ATCN PAM
uacugggcaaauggggaaac

SEQ ID NO: 7299 - RNA, 20 nt, Artificial Sequence
  HTT spacer sequence ATCN PAM
ugcaggugcagagccugcag

SEQ ID NO: 7300 - RNA, 20 nt, Artificial Sequence
  HTT spacer sequence ATCN PAM
ugcgcuccugcagcugcagg

SEQ ID NO: 7301 - RNA, 20 nt, Artificial Sequence
  HTT spacer sequence ATCN PAM
ucuccagcagacucaucaug

SEQ ID NO: 7302 - RNA, 20 nt, Artificial Sequence
  HTT spacer sequence ATCN PAM
ucaccaaguccagcgucuag

SEQ ID NO: 7303 - RNA, 20 nt, Artificial Sequence
  HTT spacer sequence ATCN PAM
ccaaguccagcgucuaggcc

SEQ ID NO: 7304 - RNA, 20 nt, Artificial Sequence
  HTT spacer sequence ATCN PAM
ugccagaggccagguggaag

SEQ ID NO: 7305 - RNA, 20 nt, Artificial Sequence
  HTT spacer sequence ATCN PAM
augauacuugacguggcuuu

SEQ ID NO: 7306 - RNA, 20 nt, Artificial Sequence
  HTT spacer sequence ATCN PAM
uugauaguaacgacacugga

SEQ ID NO: 7307 - RNA, 20 nt, Artificial Sequence
  HTT spacer sequence ATCN PAM
aagccacgucaaguaucauu

SEQ ID NO: 7308 - RNA, 20 nt, Artificial Sequence
  HTT spacer sequence ATCN PAM
ucaccaagccagcaacagca

SEQ ID NO: 7309 - RNA, 20 nt, Artificial Sequence
  HTT spacer sequence ATCN PAM
gggcauccucaccaagccag

SEQ ID NO: 7310 - RNA, 20 nt, Artificial Sequence
  HTT spacer sequence ATCN PAM
aucagggcauccucaccaag

SEQ ID NO: 7311 - RNA, 20 nt, Artificial Sequence
  HTT spacer sequence ATCN PAM
aucaaucagggcauccucac

SEQ ID NO: 7312 - RNA, 20 nt, Artificial Sequence
  HTT spacer sequence ATCN PAM
cgaaaaugaaagcagaugga

SEQ ID NO: 7313 - RNA, 20 nt, Artificial Sequence
  HTT spacer sequence ATCN PAM
gcuuucauuuucgggaucca

SEQ ID NO: 7314 - RNA, 20 nt, Artificial Sequence
  HTT spacer sequence ATCN PAM
ggcgucagaggccauuuaag

SEQ ID NO: 7315 - RNA, 20 nt, Artificial Sequence
  HTT spacer sequence ATCN PAM
gguguuuccacugccuccuu

SEQ ID NO: 7316 - RNA, 20 nt, Artificial Sequence
  HTT spacer sequence ATCN PAM
ccagcacccagaacacucaa

SEQ ID NO: 7317 - RNA, 20 nt, Artificial Sequence
  HTT spacer sequence ATCN PAM
ugguggaugacacaaaggcc

SEQ ID NO: 7318 - RNA, 20 nt, Artificial Sequence
  HTT spacer sequence ATCN PAM
accaugauaucuccagcacc

SEQ ID NO: 7319 - RNA, 20 nt, Artificial Sequence
  HTT spacer sequence ATCN PAM
caaccugcaaccauuucucu

SEQ ID NO: 7320 - RNA, 20 nt, Artificial Sequence
  HTT spacer sequence ATCN PAM
gugggggacagagggguggu

SEQ ID NO: 7321 - RNA, 20 nt, Artificial Sequence
  HTT spacer sequence ATCN PAM
cccucuggcugccaagcgag

SEQ ID NO: 7322 - RNA, 20 nt, Artificial Sequence
  HTT spacer sequence ATCN PAM
ugccaggcagugcugcaguc

SEQ ID NO: 7323 - RNA, 20 nt, Artificial Sequence
  HTT spacer sequence ATCN PAM
ugcgacaagcagcagcagcu

SEQ ID NO: 7324 - RNA, 20 nt, Artificial Sequence
  HTT spacer sequence ATCN PAM
uacccucuagggggucuuga

SEQ ID NO: 7325 - RNA, 20 nt, Artificial Sequence
  HTT spacer sequence ATCN PAM
ugcuugcccagcuccccuuu

SEQ ID NO: 7326 - RNA, 20 nt, Artificial Sequence
  HTT spacer sequence ATCN PAM
ccccagagccugugugccga

SEQ ID NO: 7327 - RNA, 20 nt, Artificial Sequence
  HTT spacer sequence ATCN PAM
cacagcaacaugggccgagu

SEQ ID NO: 7328 - RNA, 20 nt, Artificial Sequence
  HTT spacer sequence ATCN PAM
ggcagcuggaaacuggcacc

SEQ ID NO: 7329 - RNA, 20 nt, Artificial Sequence
  HTT spacer sequence ATCN PAM
cuucucaaccacagggucag

SEQ ID NO: 7330 - RNA, 20 nt, Artificial Sequence
  HTT spacer sequence ATCN PAM
ucuguccuccuggggccacc

SEQ ID NO: 7331 - RNA, 20 nt, Artificial Sequence
  HTT spacer sequence ATCN PAM
gaugcgggccugaguuuugg

SEQ ID NO: 7332 - RNA, 20 nt, Artificial Sequence
  HTT spacer sequence ATCN PAM
gaugugcccgcauccucugu

SEQ ID NO: 7333 - RNA, 20 nt, Artificial Sequence
  HTT spacer sequence ATCN PAM
uuugcuuaacaaacacacug

SEQ ID NO: 7334 - RNA, 20 nt, Artificial Sequence
  HTT spacer sequence ATCN PAM
aggguggcacagguguccag

SEQ ID NO: 7335 - RNA, 20 nt, Artificial Sequence
  HTT spacer sequence ATCN PAM
guuaugucuugugggagcgu

SEQ ID NO: 7336 - RNA, 20 nt, Artificial Sequence
  HTT spacer sequence ATCN PAM
uuuagaaccuccaucuguua

SEQ ID NO: 7337 - RNA, 20 nt, Artificial Sequence
  HTT spacer sequence ATCN PAM
gggacagcacaccgcgaguc

SEQ ID NO: 7338 - RNA, 20 nt, Artificial Sequence
  HTT spacer sequence ATCN PAM
gagucagugauucaugcccu

SEQ ID NO: 7339 - RNA, 20 nt, Artificial Sequence
  HTT spacer sequence ATCN PAM
cugacucugauuagagaggg

SEQ ID NO: 7340 - RNA, 20 nt, Artificial Sequence
  HTT spacer sequence ATCN PAM
ccuuagagaaggggcaggcg

SEQ ID NO: 7341 - RNA, 20 nt, Artificial Sequence
  HTT spacer sequence ATCN PAM
ccucaugucagcagaacuca

SEQ ID NO: 7342 - RNA, 20 nt, Artificial Sequence
  HTT spacer sequence ATCN PAM
ugggguuggugccuuucauc

SEQ ID NO: 7343 - RNA, 20 nt, Artificial Sequence
  HTT spacer sequence ATCN PAM
gcagcauguccuuaacaacu

SEQ ID NO: 7344 - RNA, 20 nt, Artificial Sequence
  HTT spacer sequence ATCN PAM
gaaaguuguuaaggacaugc

SEQ ID NO: 7345 - RNA, 20 nt, Artificial Sequence
  HTT spacer sequence ATCN PAM
uuuuuuuucuccuuaaugga

SEQ ID NO: 7346 - RNA, 20 nt, Artificial Sequence
  HTT spacer sequence ATCN PAM
cagccauugcuaaaauauuu

SEQ ID NO: 7347 - RNA, 20 nt, Artificial Sequence
  HTT spacer sequence ATCN PAM
aauauuuuagcaauggcuga

SEQ ID NO: 7348 - RNA, 20 nt, Artificial Sequence
  HTT spacer sequence ATCN PAM
uaucaaauauuuuagcaaug

SEQ ID NO: 7349 - RNA, 20 nt, Artificial Sequence
  HTT spacer sequence ATCN PAM
ggagccaggcagaugugcuu

SEQ ID NO: 7350 - RNA, 20 nt, Artificial Sequence
  HTT spacer sequence ATCN PAM
gccuggcuccugauucuagu

SEQ ID NO: 7351 - RNA, 20 nt, Artificial Sequence
  HTT spacer sequence ATCN PAM
uaaugcauuagcuaaaaacg

SEQ ID NO: 7352 - RNA, 20 nt, Artificial Sequence
  HTT spacer sequence ATCN PAM
cagcacuuugggaggcugag

SEQ ID NO: 7353 - RNA, 20 nt, Artificial Sequence
  HTT spacer sequence ATCN PAM
ucccgccucagccucccaaa

SEQ ID NO: 7354 - RNA, 20 nt, Artificial Sequence
  HTT spacer sequence ATCN PAM
ucugaggucaggaguucaag

SEQ ID NO: 7355 - RNA, 20 nt, Artificial Sequence
  HTT spacer sequence ATCN PAM
cagcuacuugggaggcugag

SEQ ID NO: 7356 - RNA, 20 nt, Artificial Sequence
  HTT spacer sequence ATCN PAM
cuugaacccgggaggcggag

SEQ ID NO: 7357 - RNA, 20 nt, Artificial Sequence
  HTT spacer sequence ATCN PAM
cagcucacugcaaccuccgc

SEQ ID NO: 7358 - RNA, 20 nt, Artificial Sequence
  HTT spacer sequence ATCN PAM
uuuuuuaauuuuuuuuuuuu

SEQ ID NO: 7359 - RNA, 20 nt, Artificial Sequence
  HTT spacer sequence ATCN PAM
ugcuuauuuuauuuaucuuu

SEQ ID NO: 7360 - RNA, 20 nt, Artificial Sequence
  HTT spacer sequence ATCN PAM
gaaaacaaagguaacucuac

SEQ ID NO: 7361 - RNA, 20 nt, Artificial Sequence
  HTT spacer sequence ATCN PAM
ucauuuucaacaaguuuaag

SEQ ID NO: 7362 - RNA, 20 nt, Artificial Sequence
  HTT spacer sequence ATCN PAM
cauucagaguuggaaugaau

SEQ ID NO: 7363 - RNA, 20 nt, Artificial Sequence
  HTT spacer sequence ATCN PAM
aaauaauaccugagcgcugg

SEQ ID NO: 7364 - RNA, 20 nt, Artificial Sequence
  HTT spacer sequence ATCN PAM
uuuuauuaaugucauuccaa

SEQ ID NO: 7365 - RNA, 20 nt, Artificial Sequence
  HTT spacer sequence ATCN PAM
cuucuugguuuugacaugga

SEQ ID NO: 7366 - RNA, 20 nt, Artificial Sequence
  HTT spacer sequence ATCN PAM
cguccaugucaaaaccaaga

SEQ ID NO: 7367 - RNA, 20 nt, Artificial Sequence
  HTT spacer sequence ATCN PAM
ucgcguccaugucaaaacca

SEQ ID NO: 7368 - RNA, 20 nt, Artificial Sequence
  HTT spacer sequence ATCN PAM
cagucugcgguuccaacucc

SEQ ID NO: 7369 - RNA, 20 nt, Artificial Sequence
  HTT spacer sequence ATCN PAM
uguggcugcuggaggccagg

SEQ ID NO: 7370 - RNA, 20 nt, Artificial Sequence
  HTT spacer sequence ATCN PAM
caccagcaacgcaggagucu

SEQ ID NO: 7371 - RNA, 20 nt, Artificial Sequence
  HTT spacer sequence ATCN PAM
uuaaaagugggccaggugcg

SEQ ID NO: 7372 - RNA, 20 nt, Artificial Sequence
  HTT spacer sequence ATCN PAM
cagcacuuugggaggccaag

SEQ ID NO: 7373 - RNA, 20 nt, Artificial Sequence
  HTT spacer sequence ATCN PAM
gccugucuuggccucccaaa

SEQ ID NO: 7374 - RNA, 20 nt, Artificial Sequence
  HTT spacer sequence ATCN PAM
cgaggucaggacauugagau

SEQ ID NO: 7375 - RNA, 20 nt, Artificial Sequence
  HTT spacer sequence ATCN PAM
caauguccugaccucgugau

SEQ ID NO: 7376 - RNA, 20 nt, Artificial Sequence
  HTT spacer sequence ATCN PAM
uccuggcuaacacggugaaa

SEQ ID NO: 7377 - RNA, 20 nt, Artificial Sequence
  HTT spacer sequence ATCN PAM
uggcuaacacggugaaaccc

SEQ ID NO: 7378 - RNA, 20 nt, Artificial Sequence
  HTT spacer sequence ATCN PAM
cagcucacugcaagcuccac

SEQ ID NO: 7379 - RNA, 20 nt, Artificial Sequence
  HTT spacer sequence ATCN PAM
cuccacugcacuccagccug

SEQ ID NO: 7380 - RNA, 20 nt, Artificial Sequence
  HTT spacer sequence ATCN PAM
uauuagaaauuaaaccugag

SEQ ID NO: 7381 - RNA, 20 nt, Artificial Sequence
  HTT spacer sequence ATCN PAM
cuggcuuaagagaagcccac

SEQ ID NO: 7382 - RNA, 20 nt, Artificial Sequence
  HTT spacer sequence ATCN PAM
ggguaagaaugagcuucucc

SEQ ID NO: 7383 - RNA, 20 nt, Artificial Sequence
  HTT spacer sequence ATCN PAM
guauauucuuccgugauccu

SEQ ID NO: 7384 - RNA, 20 nt, Artificial Sequence
  HTT spacer sequence ATCN PAM
cggaagaauauaccgauuau

SEQ ID NO: 7385 - RNA, 20 nt, Artificial Sequence
  HTT spacer sequence ATCN PAM
uauuccaacacuggacaggu

SEQ ID NO: 7386 - RNA, 20 nt, Artificial Sequence
  HTT spacer sequence ATCN PAM
cgccacugcacuccagccug

SEQ ID NO: 7387 - RNA, 20 nt, Artificial Sequence
  HTT spacer sequence ATCN PAM
cuacuaaaaauacaaaaaau

SEQ ID NO: 7388 - RNA, 20 nt, Artificial Sequence
  HTT spacer sequence ATCN PAM
uggcuaacacagugaaaccc

SEQ ID NO: 7389 - RNA, 20 nt, Artificial Sequence
  HTT spacer sequence ATCN PAM
ccugacaucgugauccaccc

SEQ ID NO: 7390 - RNA, 20 nt, Artificial Sequence
  HTT spacer sequence ATCN PAM
ugauccacccgccucggccu

SEQ ID NO: 7391 - RNA, 20 nt, Artificial Sequence
  HTT spacer sequence ATCN PAM
cgaugucaggagauugagac

SEQ ID NO: 7392 - RNA, 20 nt, Artificial Sequence
  HTT spacer sequence ATCN PAM
acccgccucggccucccaaa

SEQ ID NO: 7393 - RNA, 20 nt, Artificial Sequence
  HTT spacer sequence ATCN PAM
gauacccuaucaaugaacuu

SEQ ID NO: 7394 - RNA, 20 nt, Artificial Sequence
  HTT spacer sequence ATCN PAM
gauuccacacacaaccggcc

SEQ ID NO: 7395 - RNA, 20 nt, Artificial Sequence
  HTT spacer sequence ATCN PAM
augaacuucuacuucauuuc

SEQ ID NO: 7396 - RNA, 20 nt, Artificial Sequence
  HTT spacer sequence ATCN PAM
auugguccgucuugugcuuc

SEQ ID NO: 7397 - RNA, 20 nt, Artificial Sequence
  HTT spacer sequence ATCN PAM
ugccuuugugaccucacacg

SEQ ID NO: 7398 - RNA, 20 nt, Artificial Sequence
  HTT spacer sequence ATCN PAM
gcauaacuuagugaaccaaa

SEQ ID NO: 7399 - RNA, 20 nt, Artificial Sequence
  HTT spacer sequence ATCN PAM
guauuuuaaaaucacuuuug

SEQ ID NO: 7400 - RNA, 20 nt, Artificial Sequence
  HTT spacer sequence ATCN PAM
cuuuuggcgauaucaccaau

SEQ ID NO: 7401 - RNA, 20 nt, Artificial Sequence
  HTT spacer sequence ATCN PAM
ccaaaagugauuuuaaaaua

SEQ ID NO: 7402 - RNA, 20 nt, Artificial Sequence
  HTT spacer sequence ATCN PAM
ccaaucuuagaaaagucuuu

SEQ ID NO: 7403 - RNA, 20 nt, Artificial Sequence
  HTT spacer sequence ATCN PAM
uagaaaagucuuucaguugg

SEQ ID NO: 7404 - RNA, 20 nt, Artificial Sequence
  HTT spacer sequence ATCN PAM
gaauucugaaagacaccacc

SEQ ID NO: 7405 - RNA, 20 nt, Artificial Sequence
  HTT spacer sequence ATCN PAM
uugguaacaaaugcugucag

SEQ ID NO: 7406 - RNA, 20 nt, Artificial Sequence
  HTT spacer sequence ATCN PAM
uuuuuuugaguaaaaagugu

SEQ ID NO: 7407 - RNA, 20 nt, Artificial Sequence
  HTT spacer sequence ATCN PAM
ggaacacacguauggagcac

SEQ ID NO: 7408 - RNA, 20 nt, Artificial Sequence
  HTT spacer sequence ATCN PAM
agacggcagcucagcccauu

SEQ ID NO: 7409 - RNA, 20 nt, Artificial Sequence
  HTT spacer sequence ATCN PAM
uuucaacguccugcccgagc

SEQ ID NO: 7410 - RNA, 20 nt, Artificial Sequence
  HTT spacer sequence ATCN PAM
cggacauuuggaagugaccg

SEQ ID NO: 7411 - RNA, 20 nt, Artificial Sequence
  HTT spacer sequence ATCN PAM
gugcgcaugucagcuccgug

SEQ ID NO: 7412 - RNA, 20 nt, Artificial Sequence
  HTT spacer sequence ATCN PAM
cggggucuucacggggucuu

SEQ ID NO: 7413 - RNA, 20 nt, Artificial Sequence
  HTT spacer sequence ATCN PAM
ucagacuaugaugaaagcag

SEQ ID NO: 7414 - RNA, 20 nt, Artificial Sequence
  HTT spacer sequence ATCN PAM
gacuaugaugaaagcagcug

SEQ ID NO: 7415 - RNA, 20 nt, Artificial Sequence
  HTT spacer sequence ATCN PAM
uagucugaugaucacggggu

SEQ ID NO: 7416 - RNA, 20 nt, Artificial Sequence
  HTT spacer sequence ATCN PAM
ccagugagccagcucugggu

SEQ ID NO: 7417 - RNA, 20 nt, Artificial Sequence
  HTT spacer sequence ATCN PAM
cagacagcgugugggaaccg

SEQ ID NO: 7418 - RNA, 20 nt, Artificial Sequence
  HTT spacer sequence ATCN PAM
ccagugccuacaagacagca

SEQ ID NO: 7419 - RNA, 20 nt, Artificial Sequence
  HTT spacer sequence ATCN PAM
gcuuuccaccugacccuauc

SEQ ID NO: 7420 - RNA, 20 nt, Artificial Sequence
  HTT spacer sequence ATCN PAM
uugucuuuacaggguuucga

SEQ ID NO: 7421 - RNA, 20 nt, Artificial Sequence
  HTT spacer sequence ATCN PAM
cccuacagccuuauuucccu

SEQ ID NO: 7422 - RNA, 20 nt, Artificial Sequence
  HTT spacer sequence ATCN PAM
gcucacaugacauuuuuuga

SEQ ID NO: 7423 - RNA, 20 nt, Artificial Sequence
  HTT spacer sequence ATCN PAM
uggccuaggggaggauagaa

SEQ ID NO: 7424 - RNA, 20 nt, Artificial Sequence
  HTT spacer sequence ATCN PAM
uccccuaggccaggaugccu

SEQ ID NO: 7425 - RNA, 20 nt, Artificial Sequence
  HTT spacer sequence ATCN PAM
ccaggacucagaacaugcga

SEQ ID NO: 7426 - RNA, 20 nt, Artificial Sequence
  HTT spacer sequence ATCN PAM
cagcuggguccggagggaga

SEQ ID NO: 7427 - RNA, 20 nt, Artificial Sequence
  HTT spacer sequence ATCN PAM
uacaguagaaaaagccaguu

SEQ ID NO: 7428 - RNA, 20 nt, Artificial Sequence
  HTT spacer sequence ATCN PAM
gugagggacaugaccagcca

SEQ ID NO: 7429 - RNA, 20 nt, Artificial Sequence
  HTT spacer sequence ATCN PAM
guggcuugugcagggaccac

SEQ ID NO: 7430 - RNA, 20 nt, Artificial Sequence
  HTT spacer sequence ATCN PAM
ccgccuugcugggcacuagc

SEQ ID NO: 7431 - RNA, 20 nt, Artificial Sequence
  HTT spacer sequence ATCN PAM
gcucuccugcucugcaccac

SEQ ID NO: 7432 - RNA, 20 nt, Artificial Sequence
  HTT spacer sequence ATCN PAM
aaaugaggcccaaguguggc

SEQ ID NO: 7433 - RNA, 20 nt, Artificial Sequence
  HTT spacer sequence ATCN PAM
gggaaaacauccaaaugagg

SEQ ID NO: 7434 - RNA, 20 nt, Artificial Sequence
  HTT spacer sequence ATCN PAM
uuuuuccagguagcccacag

SEQ ID NO: 7435 - RNA, 20 nt, Artificial Sequence
  HTT spacer sequence ATCN PAM
ccucugcccagcacgcccgg

SEQ ID NO: 7436 - RNA, 20 nt, Artificial Sequence
  HTT spacer sequence ATCN PAM
gacucaggcugagaggugca

SEQ ID NO: 7437 - RNA, 20 nt, Artificial Sequence
  HTT spacer sequence ATCN PAM
cacagagacugugugagcug

SEQ ID NO: 7438 - RNA, 20 nt, Artificial Sequence
  HTT spacer sequence ATCN PAM
ggcaggcuggcaugagcuga

SEQ ID NO: 7439 - RNA, 20 nt, Artificial Sequence
  HTT spacer sequence ATCN PAM
gccgcuaagaaccagcgcug

SEQ ID NO: 7440 - RNA, 20 nt, Artificial Sequence
  HTT spacer sequence ATCN PAM
gauuccaguguguggaggca

SEQ ID NO: 7441 - RNA, 20 nt, Artificial Sequence
  HTT spacer sequence ATCN PAM
gauucucccguucaagagga

SEQ ID NO: 7442 - RNA, 20 nt, Artificial Sequence
  HTT spacer sequence ATCN PAM
cgugggucccuuacugaugg

SEQ ID NO: 7443 - RNA, 20 nt, Artificial Sequence
  HTT spacer sequence ATCN PAM
guaagggacccacgagauga

SEQ ID NO: 7444 - RNA, 20 nt, Artificial Sequence
  HTT spacer sequence ATCN PAM
gcugcaccacgguuuauugc

SEQ ID NO: 7445 - RNA, 20 nt, Artificial Sequence
  HTT spacer sequence ATCN PAM
uucaaaacucacuaguguac

SEQ ID NO: 7446 - RNA, 20 nt, Artificial Sequence
  HTT spacer sequence ATCN PAM
caacccgaccucacguguaa

SEQ ID NO: 7447 - RNA, 20 nt, Artificial Sequence
  HTT spacer sequence ATCN PAM
guguggaaaaaaguaaaucu

SEQ ID NO: 7448 - RNA, 20 nt, Artificial Sequence
  HTT spacer sequence ATCN PAM
cguuguuacagcaccguuug

SEQ ID NO: 7449 - RNA, 20 nt, Artificial Sequence
  HTT spacer sequence ATCN PAM
ucaagaaagaguccaaagcc

SEQ ID NO: 7450 - RNA, 20 nt, Artificial Sequence
  HTT spacer sequence ATCN PAM
aucuucaagaaagaguccaa

SEQ ID NO: 7451 - RNA, 20 nt, Artificial Sequence
  HTT spacer sequence ATCN PAM
acaggccauccaucuucaag

SEQ ID NO: 7452 - RNA, 20 nt, Artificial Sequence
  HTT spacer sequence ATCN PAM
aagccuuaauaccaaaaccc

SEQ ID NO: 7453 - RNA, 20 nt, Artificial Sequence
  HTT spacer sequence ATCN PAM
gguuuugguauuaaggcuuu

SEQ ID NO: 7454 - RNA, 20 nt, Artificial Sequence
  HTT spacer sequence ATCN PAM
ggccuguuuuguacuucuaa

SEQ ID NO: 7455 - RNA, 20 nt, Artificial Sequence
  HTT spacer sequence ATCN PAM
gccaggacccacacuuccaa

SEQ ID NO: 7456 - RNA, 20 nt, Artificial Sequence
  HTT spacer sequence ATCN PAM
ccaccugugugcuucuagag

SEQ ID NO: 7457 - RNA, 20 nt, Artificial Sequence
  HTT spacer sequence ATCN PAM
gucugcucuagaagcacaca

SEQ ID NO: 7458 - RNA, 20 nt, Artificial Sequence
  HTT spacer sequence ATCN PAM
ccgcugccucaccucugacc

SEQ ID NO: 7459 - RNA, 20 nt, Artificial Sequence
  HTT spacer sequence ATCN PAM
guggccucugccaaccaugg

SEQ ID NO: 7460 - RNA, 20 nt, Artificial Sequence
  HTT spacer sequence ATCN PAM
cugucuugcuucuccugacc

SEQ ID NO: 7461 - RNA, 20 nt, Artificial Sequence
  HTT spacer sequence ATCN PAM
cgcaggugccgguuugucgg

SEQ ID NO: 7462 - RNA, 20 nt, Artificial Sequence
  HTT spacer sequence ATCN PAM
cugcagcuggcugccccggc

SEQ ID NO: 7463 - RNA, 20 nt, Artificial Sequence
  HTT spacer sequence ATCN PAM
agcaaucuuaucuaggagcc

SEQ ID NO: 7464 - RNA, 20 nt, Artificial Sequence
  HTT spacer sequence ATCN PAM
uaucuaggagccugcagggu

SEQ ID NO: 7465 - RNA, 20 nt, Artificial Sequence
  HTT spacer sequence ATCN PAM
aggagccugcagggucccau

SEQ ID NO: 7466 - RNA, 20 nt, Artificial Sequence
  HTT spacer sequence ATCN PAM
cacuugucucaugggacccu

SEQ ID NO: 7467 - RNA, 20 nt, Artificial Sequence
  HTT spacer sequence ATCN PAM
ggcaaacugccuuaaagggg

SEQ ID NO: 7468 - RNA, 20 nt, Artificial Sequence
  HTT spacer sequence ATCN PAM
gccuucuagggcccugaggc

SEQ ID NO: 7469 - RNA, 20 nt, Artificial Sequence
  HTT spacer sequence ATCN PAM
gccuuccagccugcagcagg

SEQ ID NO: 7470 - RNA, 20 nt, Artificial Sequence
  HTT spacer sequence ATCN PAM
ccuucuuggggaacuuugcu

SEQ ID NO: 7471 - RNA, 20 nt, Artificial Sequence
  HTT spacer sequence ATCN PAM
caccggcuuucauagcaccc

SEQ ID NO: 7472 - RNA, 20 nt, Artificial Sequence
  HTT spacer sequence ATCN PAM
ggggccccguggagccuggu

SEQ ID NO: 7473 - RNA, 20 nt, Artificial Sequence
  HTT spacer sequence ATCN PAM
ggggacuguccagucaccgg

SEQ ID NO: 7474 - RNA, 20 nt, Artificial Sequence
  HTT spacer sequence ATCN PAM
gaccccauccugccuucaag

SEQ ID NO: 7475 - RNA, 20 nt, Artificial Sequence
  HTT spacer sequence ATCN PAM
ugccuucaagccagcguaga

SEQ ID NO: 7476 - RNA, 20 nt, Artificial Sequence
  HTT spacer sequence ATCN PAM
acgcuggcuugaaggcagga

SEQ ID NO: 7477 - RNA, 20 nt, Artificial Sequence
  HTT spacer sequence ATCN PAM
ggucuggguacacugggccu

SEQ ID NO: 7478 - RNA, 20 nt, Artificial Sequence
  HTT spacer sequence ATCN PAM
uccccuccuugagggccaac

SEQ ID NO: 7479 - RNA, 20 nt, Artificial Sequence
  HTT spacer sequence ATCN PAM
acaaccaaugccaggcuccc

SEQ ID NO: 7480 - RNA, 20 nt, Artificial Sequence
  HTT spacer sequence ATCN PAM
uggcagcacgggugaguaag

SEQ ID NO: 7481 - RNA, 20 nt, Artificial Sequence
  HTT spacer sequence ATCN PAM
ucagcucagggcgggugggg

SEQ ID NO: 7482 - RNA, 20 nt, Artificial Sequence
  HTT spacer sequence ATCN PAM
aaauuccgagcgugaauggg

SEQ ID NO: 7483 - RNA, 20 nt, Artificial Sequence
  HTT spacer sequence ATCN PAM
ugugcaauuaucauuaaauu

SEQ ID NO: 7484 - RNA, 20 nt, Artificial Sequence
  HTT spacer sequence ATCN PAM
uuaaauuacagggacaauuu

SEQ ID NO: 7485 - RNA, 20 nt, Artificial Sequence
  HTT spacer sequence ATCN PAM
ugaaauuaaaauugucccug

SEQ ID NO: 7486 - RNA, 20 nt, Artificial Sequence
  HTT spacer sequence ATCN PAM
acugccgcucagccuucgaa

SEQ ID NO: 7487 - RNA, 20 nt, Artificial Sequence
  HTT spacer sequence ATCN PAM
ccuuauugauuucuaucccc

SEQ ID NO: 7488 - RNA, 20 nt, Artificial Sequence
  HTT spacer sequence ATCN PAM
auaaggugauuuaaaauuua

SEQ ID NO: 7489 - RNA, 20 nt, Artificial Sequence
  HTT spacer sequence ATCN PAM
ccaaaaaagccugcugaaau

SEQ ID NO: 7490 - RNA, 20 nt, Artificial Sequence
  HTT spacer sequence ATCN PAM
caauacaaauuucagcaggc

SEQ ID NO: 7491 - RNA, 20 nt, Artificial Sequence
  HTT spacer sequence ATCN PAM
cuaugucuuuuauuucucuu

SEQ ID NO: 7492 - RNA, 20 nt, Artificial Sequence
  HTT spacer sequence ATCN PAM
agagaaaaagaaauuacagc

SEQ ID NO: 7493 - RNA, 20 nt, Artificial Sequence
  HTT spacer sequence ATCN PAM
aaaccugacaaggacaucaa

SEQ ID NO: 7494 - RNA, 20 nt, Artificial Sequence
  HTT spacer sequence ATCN PAM
gaguuacauggguuucauac

SEQ ID NO: 7495 - RNA, 20 nt, Artificial Sequence
  HTT spacer sequence ATCN PAM
uucucuuuuuucugaaaaaa

SEQ ID NO: 7496 - RNA, 20 nt, Artificial Sequence
  HTT spacer sequence ATCN PAM
uuacacaauuuuuuucagaa

SEQ ID NO: 7497 - RNA, 20 nt, Artificial Sequence
  HTT spacer sequence ATCN PAM
cugaaacagaaaacagccaa

SEQ ID NO: 7498 - RNA, 20 nt, Artificial Sequence
  HTT spacer sequence ATCN PAM
gagcuuccacauuaagaagc

SEQ ID NO: 7499 - RNA, 20 nt, Artificial Sequence
  HTT spacer sequence ATCN PAM
uuuauuucaaacuaguuuuu

SEQ ID NO: 7500 - RNA, 20 nt, Artificial Sequence
  HTT spacer sequence ATCN PAM
aaauuuguaguauauaacua

SEQ ID NO: 7501 - RNA, 20 nt, Artificial Sequence
  HTT spacer sequence ATCN PAM
caaagaaaacuagaaaauua

SEQ ID NO: 7502 - RNA, 20 nt, Artificial Sequence
  HTT spacer sequence ATCN PAM
uguuugaccugaguuauuua

SEQ ID NO: 7503 - RNA, 20 nt, Artificial Sequence
  HTT spacer sequence ATCN PAM
cauuaaaugcuaaaggacug

SEQ ID NO: 7504 - RNA, 20 nt, Artificial Sequence
  HTT spacer sequence ATCN PAM
acuauagaauaaauacucuu

SEQ ID NO: 7505 - RNA, 20 nt, Artificial Sequence
  HTT spacer sequence ATCN PAM
aaccuaauuaacacauauag

SEQ ID NO: 7506 - RNA, 20 nt, Artificial Sequence
  HTT spacer sequence ATCN PAM
uuuauguucuuuuuuuuuuu

SEQ ID NO: 7507 - RNA, 20 nt, Artificial Sequence
  HTT spacer sequence ATCN PAM
guaagaacauaaggccgggu

SEQ ID NO: 7508 - RNA, 20 nt, Artificial Sequence
  HTT spacer sequence ATCN PAM
gaaauaagaccauaccauau

SEQ ID NO: 7509 - RNA, 20 nt, Artificial Sequence
  HTT spacer sequence ATCN PAM
acuuugaaaucauauuauac

SEQ ID NO: 7510 - RNA, 20 nt, Artificial Sequence
  HTT spacer sequence ATCN PAM
uauuauacuauuugauauau

SEQ ID NO: 7511 - RNA, 20 nt, Artificial Sequence
  HTT spacer sequence ATCN PAM
aauaguauaauaugauuuca

SEQ ID NO: 7512 - RNA, 20 nt, Artificial Sequence
  HTT spacer sequence ATCN PAM
accagcaauggauuccugca

SEQ ID NO: 7513 - RNA, 20 nt, Artificial Sequence
  HTT spacer sequence ATCN PAM
auugcugguagaugcacacu

SEQ ID NO: 7514 - RNA, 20 nt, Artificial Sequence
  HTT spacer sequence ATCN PAM
gaaaacaccuuuauuuugcu

SEQ ID NO: 7515 - RNA, 20 nt, Artificial Sequence
  HTT spacer sequence ATCN PAM
uuaaaaaaugaaagcaaaau

SEQ ID NO: 7516 - RNA, 20 nt, Artificial Sequence
  HTT spacer sequence ATCN PAM
ccaaagcucaauaaauccca

SEQ ID NO: 7517 - RNA, 20 nt, Artificial Sequence
  HTT spacer sequence ATCN PAM
augagugauuuuuuuaaauu

SEQ ID NO: 7518 - RNA, 20 nt, Artificial Sequence
  HTT spacer sequence ATCN PAM
cucauagauccccaaagcuc

SEQ ID NO: 7519 - RNA, 20 nt, Artificial Sequence
  HTT spacer sequence ATCN PAM
aaagaaacuguggccaaaau

SEQ ID NO: 7520 - RNA, 20 nt, Artificial Sequence
  HTT spacer sequence ATCN PAM
gaaauaaaacauguauuggu

SEQ ID NO: 7521 - RNA, 20 nt, Artificial Sequence
  HTT spacer sequence ATCN PAM
ugguaucugaaauaaaacau

SEQ ID NO: 7522 - RNA, 20 nt, Artificial Sequence
  HTT spacer sequence ATCN PAM
caaauagaaauaugaagaaa

SEQ ID NO: 7523 - RNA, 20 nt, Artificial Sequence
  HTT spacer sequence ATCN PAM
uguagugacugcucugcuca

SEQ ID NO: 7524 - RNA, 20 nt, Artificial Sequence
  HTT spacer sequence ATCN PAM
uuuaaaaauaaaaaaaacua

SEQ ID NO: 7525 - RNA, 20 nt, Artificial Sequence
  HTT spacer sequence ATCN PAM
cagccuccacagccuccccu

SEQ ID NO: 7526 - RNA, 20 nt, Artificial Sequence
  HTT spacer sequence ATCN PAM
caauggguaagggaagagga

SEQ ID NO: 7527 - RNA, 20 nt, Artificial Sequence
  HTT spacer sequence ATCN PAM
ucaggguauuccaaagcaca

SEQ ID NO: 7528 - RNA, 20 nt, Artificial Sequence
  HTT spacer sequence ATCN PAM
aacauaauccucaggguauu

SEQ ID NO: 7529 - RNA, 20 nt, Artificial Sequence
  HTT spacer sequence ATCN PAM
ucccaaagaugggacaucuu

SEQ ID NO: 7530 - RNA, 20 nt, Artificial Sequence
  HTT spacer sequence ATCN PAM
uugggaagaugcagaaacua

SEQ ID NO: 7531 - RNA, 20 nt, Artificial Sequence
  HTT spacer sequence ATCN PAM
ugacucaauguguaucauau

SEQ ID NO: 7532 - RNA, 20 nt, Artificial Sequence
  HTT spacer sequence ATCN PAM
uauuugaccuuauaaucacc

SEQ ID NO: 7533 - RNA, 20 nt, Artificial Sequence
  HTT spacer sequence ATCN PAM
cccucagaaccacaaaagaa

SEQ ID NO: 7534 - RNA, 20 nt, Artificial Sequence
  HTT spacer sequence ATCN PAM
aauugcuuuaacagcauuua

SEQ ID NO: 7535 - RNA, 20 nt, Artificial Sequence
  HTT spacer sequence ATCN PAM
ugaauacuguauaaauucaa

SEQ ID NO: 7536 - RNA, 20 nt, Artificial Sequence
  HTT spacer sequence ATCN PAM
aaugacuagaacagagcaug

SEQ ID NO: 7537 - RNA, 20 nt, Artificial Sequence
  HTT spacer sequence ATCN PAM
aaacauuuuaaacauaaaau

SEQ ID NO: 7538 - RNA, 20 nt, Artificial Sequence
  HTT spacer sequence ATCN PAM
aaagaaaucagaacaaagaa

SEQ ID NO: 7539 - RNA, 20 nt, Artificial Sequence
  HTT spacer sequence ATCN PAM
gaacaaagaaaugaaaacau

SEQ ID NO: 7540 - RNA, 20 nt, Artificial Sequence
  HTT spacer sequence ATCN PAM
uuaaagauuauuuacaugug

SEQ ID NO: 7541 - RNA, 20 nt, Artificial Sequence
  HTT spacer sequence ATCN PAM
guauagaaucauuaaagauu

SEQ ID NO: 7542 - RNA, 20 nt, Artificial Sequence
  HTT spacer sequence ATCN PAM
aaaauggcagaaaauaaucu

SEQ ID NO: 7543 - RNA, 20 nt, Artificial Sequence
  HTT spacer sequence ATCN PAM
caauugaagagagaugugaa

SEQ ID NO: 7544 - RNA, 20 nt, Artificial Sequence
  HTT spacer sequence ATCN PAM
cucuucaauugagauuauuc

SEQ ID NO: 7545 - RNA, 20 nt, Artificial Sequence
  HTT spacer sequence ATCN PAM
cucaguuuauucacaucucu

SEQ ID NO: 7546 - RNA, 20 nt, Artificial Sequence
  HTT spacer sequence ATCN PAM
cagcacuggcaaauuugaaa

SEQ ID NO: 7547 - RNA, 20 nt, Artificial Sequence
  HTT spacer sequence ATCN PAM
agguguugcuuuaagagaug

SEQ ID NO: 7548 - RNA, 20 nt, Artificial Sequence
  HTT spacer sequence ATCN PAM
cuuaaagcaacaccuagauu

SEQ ID NO: 7549 - RNA, 20 nt, Artificial Sequence
  HTT spacer sequence ATCN PAM
ugcuauacaucacagugauu

SEQ ID NO: 7550 - RNA, 20 nt, Artificial Sequence
  HTT spacer sequence ATCN PAM
cagugauuuuugugaugaaa

SEQ ID NO: 7551 - RNA, 20 nt, Artificial Sequence
  HTT spacer sequence ATCN PAM
cugugauguauagcaagauu

SEQ ID NO: 7552 - RNA, 20 nt, Artificial Sequence
  HTT spacer sequence ATCN PAM
caaaaaucacugugauguau

SEQ ID NO: 7553 - RNA, 20 nt, Artificial Sequence
  HTT spacer sequence ATCN PAM
acccaccugggccucccaaa

SEQ ID NO: 7554 - RNA, 20 nt, Artificial Sequence
  HTT spacer sequence ATCN PAM
cuugaggguaggaguuccaa

SEQ ID NO: 7555 - RNA, 20 nt, Artificial Sequence
  HTT spacer sequence ATCN PAM
ugggggagacagaguuuggg

SEQ ID NO: 7556 - RNA, 20 nt, Artificial Sequence
  HTT spacer sequence ATCN PAM
caaacucugucucccccacg

SEQ ID NO: 7557 - RNA, 20 nt, Artificial Sequence
  HTT spacer sequence ATCN PAM
acacuucucagauaaagaua

SEQ ID NO: 7558 - RNA, 20 nt, Artificial Sequence
  HTT spacer sequence ATCN PAM
gagaaguguugauuuucuuc

SEQ ID NO: 7559 - RNA, 20 nt, Artificial Sequence
  HTT spacer sequence ATCN PAM
uuaucugagaaguguugauu

SEQ ID NO: 7560 - RNA, 20 nt, Artificial Sequence
  HTT spacer sequence ATCN PAM
acuucuaagccuaugcagug

SEQ ID NO: 7561 - RNA, 20 nt, Artificial Sequence
  HTT spacer sequence ATCN PAM
aauccacuucuaagccuaug

SEQ ID NO: 7562 - RNA, 20 nt, Artificial Sequence
  HTT spacer sequence ATCN PAM
gugaauuugaagauacagca

SEQ ID NO: 7563 - RNA, 20 nt, Artificial Sequence
  HTT spacer sequence ATCN PAM
ucaaauucacugauuuucuu

SEQ ID NO: 7564 - RNA, 20 nt, Artificial Sequence
  HTT spacer sequence ATCN PAM
ggauaaaaaugauugcagca

SEQ ID NO: 7565 - RNA, 20 nt, Artificial Sequence
  HTT spacer sequence ATCN PAM
agaugcuucagacugggcca

SEQ ID NO: 7566 - RNA, 20 nt, Artificial Sequence
  HTT spacer sequence ATCN PAM
uuuuuauccagaugcuucag

SEQ ID NO: 7567 - RNA, 20 nt, Artificial Sequence
  HTT spacer sequence ATCN PAM
uguggcagacugcaugugga

SEQ ID NO: 7568 - RNA, 20 nt, Artificial Sequence
  HTT spacer sequence ATCN PAM
gucaccuuuauuucuucaac

SEQ ID NO: 7569 - RNA, 20 nt, Artificial Sequence
  HTT spacer sequence ATCN PAM
aagaaauccaacaaacccca

SEQ ID NO: 7570 - RNA, 20 nt, Artificial Sequence
  HTT spacer sequence ATCN PAM
aacaaaccccacacaggauu

SEQ ID NO: 7571 - RNA, 20 nt, Artificial Sequence
  HTT spacer sequence ATCN PAM
ugugugggguuuguuggauu

SEQ ID NO: 7572 - RNA, 20 nt, Artificial Sequence
  HTT spacer sequence ATCN PAM
cacccagaaacaucauagcc

SEQ ID NO: 7573 - RNA, 20 nt, Artificial Sequence
  HTT spacer sequence ATCN PAM
ugaaaauagccagaaacaau

SEQ ID NO: 7574 - RNA, 20 nt, Artificial Sequence
  HTT spacer sequence ATCN PAM
uuguucuuuucauguaaggu

SEQ ID NO: 7575 - RNA, 20 nt, Artificial Sequence
  HTT spacer sequence ATCN PAM
gaaauaauaguggucagagg

SEQ ID NO: 7576 - RNA, 20 nt, Artificial Sequence
  HTT spacer sequence ATCN PAM
cacuggccaaagccaaccag

SEQ ID NO: 7577 - RNA, 20 nt, Artificial Sequence
  HTT spacer sequence ATCN PAM
cugcugguguaucccacugg

SEQ ID NO: 7578 - RNA, 20 nt, Artificial Sequence
  HTT spacer sequence ATCN PAM
gacuccagagagagcacagc

SEQ ID NO: 7579 - RNA, 20 nt, Artificial Sequence
  HTT spacer sequence ATCN PAM
gcugggcuggcugaagccca

SEQ ID NO: 7580 - RNA, 20 nt, Artificial Sequence
  HTT spacer sequence ATCN PAM
ugcuggcgcuucccauuggc

SEQ ID NO: 7581 - RNA, 20 nt, Artificial Sequence
  HTT spacer sequence ATCN PAM
gugugugcuggcugcucagc

SEQ ID NO: 7582 - RNA, 20 nt, Artificial Sequence
  HTT spacer sequence ATCN PAM
ggcggggcgcauggcucaug

SEQ ID NO: 7583 - RNA, 20 nt, Artificial Sequence
  HTT spacer sequence ATCN PAM
caacacucaggaggcugagg

SEQ ID NO: 7584 - RNA, 20 nt, Artificial Sequence
  HTT spacer sequence ATCN PAM
uccuaccucagccuccugag

SEQ ID NO: 7585 - RNA, 20 nt, Artificial Sequence
  HTT spacer sequence ATCN PAM
cagcucacugcagccucaac

SEQ ID NO: 7586 - RNA, 20 nt, Artificial Sequence
  HTT spacer sequence ATCN PAM
cacugcuacacucuagccug

SEQ ID NO: 7587 - RNA, 20 nt, Artificial Sequence
  HTT spacer sequence ATCN PAM
caaaaaaaaaaaaaaaaaaa

SEQ ID NO: 7588 - RNA, 20 nt, Artificial Sequence
  HTT spacer sequence ATCN PAM
gcucacugauggugaauucc

SEQ ID NO: 7589 - RNA, 20 nt, Artificial Sequence
  HTT spacer sequence ATCN PAM
gugagcagaugaaauaaauu

SEQ ID NO: 7590 - RNA, 20 nt, Artificial Sequence
  HTT spacer sequence ATCN PAM
cauaguauauuuauauauuu

SEQ ID NO: 7591 - RNA, 20 nt, Artificial Sequence
  HTT spacer sequence ATCN PAM
gaugcuuugauauauguuua

SEQ ID NO: 7592 - RNA, 20 nt, Artificial Sequence
  HTT spacer sequence ATCN PAM
gauuguacaauuuuucauuu

SEQ ID NO: 7593 - RNA, 20 nt, Artificial Sequence
  HTT spacer sequence ATCN PAM
aagcaucagauuguacaauu

SEQ ID NO: 7594 - RNA, 20 nt, Artificial Sequence
  HTT spacer sequence ATCN PAM
uccagagcagcgccaagcca

SEQ ID NO: 7595 - RNA, 20 nt, Artificial Sequence
  HTT spacer sequence ATCN PAM
gcgcauaggcaggagccaag

SEQ ID NO: 7596 - RNA, 20 nt, Artificial Sequence
  HTT spacer sequence ATCN PAM
caaaaaaaaaaaaaaaagag

SEQ ID NO: 7597 - RNA, 20 nt, Artificial Sequence
  HTT spacer sequence ATCN PAM
cggcucacagcaaccuccgc

SEQ ID NO: 7598 - RNA, 20 nt, Artificial Sequence
  HTT spacer sequence ATCN PAM
aguguagacagagaggggac

SEQ ID NO: 7599 - RNA, 20 nt, Artificial Sequence
  HTT spacer sequence ATCN PAM
cuuuuucaggggaagaaacu

SEQ ID NO: 7600 - RNA, 20 nt, Artificial Sequence
  HTT spacer sequence ATCN PAM
uggccagugcuuuuggggac

SEQ ID NO: 7601 - RNA, 20 nt, Artificial Sequence
  HTT spacer sequence ATCN PAM
caaguccccaaaagcacugg

SEQ ID NO: 7602 - RNA, 20 nt, Artificial Sequence
  HTT spacer sequence ATCN PAM
ucucaaguccccaaaagcac

SEQ ID NO: 7603 - RNA, 20 nt, Artificial Sequence
  HTT spacer sequence ATCN PAM
ggugcccgggcccugcgugg

SEQ ID NO: 7604 - RNA, 20 nt, Artificial Sequence
  HTT spacer sequence ATCN PAM
uugcaguuaccagggcuaga

SEQ ID NO: 7605 - RNA, 20 nt, Artificial Sequence
  HTT spacer sequence ATCN PAM
gcaucauugcaguuaccagg

SEQ ID NO: 7606 - RNA, 20 nt, Artificial Sequence
  HTT spacer sequence ATCN PAM
agggucaagggcuggcuccc

SEQ ID NO: 7607 - RNA, 20 nt, Artificial Sequence
  HTT spacer sequence ATCN PAM
uaaacagggcagaaagggag

SEQ ID NO: 7608 - RNA, 20 nt, Artificial Sequence
  HTT spacer sequence ATCN PAM
uaaagcccagaccauuuuac

SEQ ID NO: 7609 - RNA, 20 nt, Artificial Sequence
  HTT spacer sequence ATCN PAM
cauagguauuuuuuuugguc

SEQ ID NO: 7610 - RNA, 20 nt, Artificial Sequence
  HTT spacer sequence ATCN PAM
aggaccaaaaaaaauaccua

SEQ ID NO: 7611 - RNA, 20 nt, Artificial Sequence
  HTT spacer sequence ATCN PAM
uuauuuuacucuccaauuac

SEQ ID NO: 7612 - RNA, 20 nt, Artificial Sequence
  HTT spacer sequence ATCN PAM
uugucuaaaauuuuauaccc

SEQ ID NO: 7613 - RNA, 20 nt, Artificial Sequence
  HTT spacer sequence ATCN PAM
aguuccaaccagacacaaga

SEQ ID NO: 7614 - RNA, 20 nt, Artificial Sequence
  HTT spacer sequence ATCN PAM
ucccacgcugcuaaaucaag

SEQ ID NO: 7615 - RNA, 20 nt, Artificial Sequence
  HTT spacer sequence ATCN PAM
cagcuucuggggauugggcc

SEQ ID NO: 7616 - RNA, 20 nt, Artificial Sequence
  HTT spacer sequence ATCN PAM
ccagaagcugugauugugac

SEQ ID NO: 7617 - RNA, 20 nt, Artificial Sequence
  HTT spacer sequence ATCN PAM
uuggggcugccguuugcccc

SEQ ID NO: 7618 - RNA, 20 nt, Artificial Sequence
  HTT spacer sequence ATCN PAM
gugcagagugagacuauaaa

SEQ ID NO: 7619 - RNA, 20 nt, Artificial Sequence
  HTT spacer sequence ATCN PAM
aguagagauaaaaagggaaa

SEQ ID NO: 7620 - RNA, 20 nt, Artificial Sequence
  HTT spacer sequence ATCN PAM
cuacuugauauuuacuucug

SEQ ID NO: 7621 - RNA, 20 nt, Artificial Sequence
  HTT spacer sequence ATCN PAM
cugcccaagcaccuguccca

SEQ ID NO: 7622 - RNA, 20 nt, Artificial Sequence
  HTT spacer sequence ATCN PAM
cuguuagaagaccucacauc

SEQ ID NO: 7623 - RNA, 20 nt, Artificial Sequence
  HTT spacer sequence ATCN PAM
cugcuggcuguuggccagag

SEQ ID NO: 7624 - RNA, 20 nt, Artificial Sequence
  HTT spacer sequence ATCN PAM
auuccuugucacgugggcgg

SEQ ID NO: 7625 - RNA, 20 nt, Artificial Sequence
  HTT spacer sequence ATCN PAM
accgucacucccugacccca

SEQ ID NO: 7626 - RNA, 20 nt, Artificial Sequence
  HTT spacer sequence ATCN PAM
auuaauaguaaagcuagcag

SEQ ID NO: 7627 - RNA, 20 nt, Artificial Sequence
  HTT spacer sequence ATCN PAM
cauaaguucagcuuauaguu

SEQ ID NO: 7628 - RNA, 20 nt, Artificial Sequence
  HTT spacer sequence ATCN PAM
gagcaauuuaaauugccaga

SEQ ID NO: 7629 - RNA, 20 nt, Artificial Sequence
  HTT spacer sequence ATCN PAM
aauauaaaaccaguuugcau

SEQ ID NO: 7630 - RNA, 20 nt, Artificial Sequence
  HTT spacer sequence ATCN PAM
cuuacuguauugcuuuuuaa

SEQ ID NO: 7631 - RNA, 20 nt, Artificial Sequence
  HTT spacer sequence ATCN PAM
cuuuaaaaagcaauacagua

SEQ ID NO: 7632 - RNA, 20 nt, Artificial Sequence
  HTT spacer sequence ATCN PAM
uuaaagagucuugcagaaga

SEQ ID NO: 7633 - RNA, 20 nt, Artificial Sequence
  HTT spacer sequence ATCN PAM
uucuccaccacucacuggua

SEQ ID NO: 7634 - RNA, 20 nt, Artificial Sequence
  HTT spacer sequence ATCN PAM
agcauuccuugaaauauggc

SEQ ID NO: 7635 - RNA, 20 nt, Artificial Sequence
  HTT spacer sequence ATCN PAM
gaauguuuagagcuggggag

SEQ ID NO: 7636 - RNA, 20 nt, Artificial Sequence
  HTT spacer sequence ATCN PAM
guagccggcccucccccggg

SEQ ID NO: 7637 - RNA, 20 nt, Artificial Sequence
  HTT spacer sequence ATCN PAM
gcagggcucccucucaugac

SEQ ID NO: 7638 - RNA, 20 nt, Artificial Sequence
  HTT spacer sequence ATCN PAM
ggucuccagcucggaggccc

SEQ ID NO: 7639 - RNA, 20 nt, Artificial Sequence
  HTT spacer sequence ATCN PAM
acgugaaaaaagcaucucau

SEQ ID NO: 7640 - RNA, 20 nt, Artificial Sequence
  HTT spacer sequence ATCN PAM
caugaagauguagugaaauu

SEQ ID NO: 7641 - RNA, 20 nt, Artificial Sequence
  HTT spacer sequence ATCN PAM
ucaugagaugcuuuuuucac

SEQ ID NO: 7642 - RNA, 20 nt, Artificial Sequence
  HTT spacer sequence ATCN PAM
ccaugugaaggacaccagag

SEQ ID NO: 7643 - RNA, 20 nt, Artificial Sequence
  HTT spacer sequence ATCN PAM
uguuccagugaugaagaagg

SEQ ID NO: 7644 - RNA, 20 nt, Artificial Sequence
  HTT spacer sequence ATCN PAM
cuggaacaggauucgaagcg

SEQ ID NO: 7645 - RNA, 20 nt, Artificial Sequence
  HTT spacer sequence ATCN PAM
agcuugggcuucagccagcc

SEQ ID NO: 7646 - RNA, 20 nt, Artificial Sequence
  HTT spacer sequence ATCN PAM
uauugaaaauuccaccagac

SEQ ID NO: 7647 - RNA, 20 nt, Artificial Sequence
  HTT spacer sequence ATCN PAM
uuguuucaauuucaagggcu

SEQ ID NO: 7648 - RNA, 20 nt, Artificial Sequence
  HTT spacer sequence ATCN PAM
cuuucagagucggccgcaac

SEQ ID NO: 7649 - RNA, 20 nt, Artificial Sequence
  HTT spacer sequence ATCN PAM
aguugcggccgacucugaaa

SEQ ID NO: 7650 - RNA, 20 nt, Artificial Sequence
  HTT spacer sequence ATCN PAM
aaucgaguugcggccgacuc

SEQ ID NO: 7651 - RNA, 20 nt, Artificial Sequence
  HTT spacer sequence ATCN PAM
aaaucccaacaugcuuucua

SEQ ID NO: 7652 - RNA, 20 nt, Artificial Sequence
  HTT spacer sequence ATCN PAM
caacaugcuuucuaaggagg

SEQ ID NO: 7653 - RNA, 20 nt, Artificial Sequence
  HTT spacer sequence ATCN PAM
aaaguuauucaugaugauuc

SEQ ID NO: 7654 - RNA, 20 nt, Artificial Sequence
  HTT spacer sequence ATCN PAM
ugaauaacuuuugauauuuc

SEQ ID NO: 7655 - RNA, 20 nt, Artificial Sequence
  HTT spacer sequence ATCN PAM
ucaugaauaacuuuugauau

SEQ ID NO: 7656 - RNA, 20 nt, Artificial Sequence
  HTT spacer sequence ATCN PAM
ucaugacuuucuaguccaau

SEQ ID NO: 7657 - RNA, 20 nt, Artificial Sequence
  HTT spacer sequence ATCN PAM
aaugcaaaaucgucaugacu

SEQ ID NO: 7658 - RNA, 20 nt, Artificial Sequence
  HTT spacer sequence ATCN PAM
ccacguuuaaaauacuugca

SEQ ID NO: 7659 - RNA, 20 nt, Artificial Sequence
  HTT spacer sequence ATCN PAM
ucgccacguuuaaaauacuu

SEQ ID NO: 7660 - RNA, 20 nt, Artificial Sequence
  HTT spacer sequence ATCN PAM
ugggcuacuuaggcuccauu

SEQ ID NO: 7661 - RNA, 20 nt, Artificial Sequence
  HTT spacer sequence ATCN PAM
gcggcugcaugcggcgccug

SEQ ID NO: 7662 - RNA, 20 nt, Artificial Sequence
  HTT spacer sequence ATCN PAM
acucgcuggugaccaugaag

SEQ ID NO: 7663 - RNA, 20 nt, Artificial Sequence
  HTT spacer sequence ATCN PAM
ucauggucaccagcgagugg

SEQ ID NO: 7664 - RNA, 20 nt, Artificial Sequence
  HTT spacer sequence ATCN PAM
ugcacgacugugugcagcug

SEQ ID NO: 7665 - RNA, 20 nt, Artificial Sequence
  HTT spacer sequence ATCN PAM
ccggucguccgggcacacgg

SEQ ID NO: 7666 - RNA, 20 nt, Artificial Sequence
  HTT spacer sequence ATCN PAM
caagauccaccaaggcauug

SEQ ID NO: 7667 - RNA, 20 nt, Artificial Sequence
  HTT spacer sequence ATCN PAM
ugugauuaaacaagucuggg

SEQ ID NO: 7668 - RNA, 20 nt, Artificial Sequence
  HTT spacer sequence ATCN PAM
accaaggcauugcucggcgg

SEQ ID NO: 7669 - RNA, 20 nt, Artificial Sequence
  HTT spacer sequence ATCN PAM
cuguccuguaccgagacaug

SEQ ID NO: 7670 - RNA, 20 nt, Artificial Sequence
  HTT spacer sequence ATCN PAM
gcucacccaugucucgguac

SEQ ID NO: 7671 - RNA, 20 nt, Artificial Sequence
  HTT spacer sequence ATCN PAM
gcguccccguccagaaaggc

SEQ ID NO: 7672 - RNA, 20 nt, Artificial Sequence
  HTT spacer sequence ATCN PAM
gacugacagguucugggacc

SEQ ID NO: 7673 - RNA, 20 nt, Artificial Sequence
  HTT spacer sequence ATCN PAM
guguaagaguccuggucgcu

SEQ ID NO: 7674 - RNA, 20 nt, Artificial Sequence
  HTT spacer sequence ATCN PAM
guggaaucuguguaagaguc

SEQ ID NO: 7675 - RNA, 20 nt, Artificial Sequence
  HTT spacer sequence ATCN PAM
acugcggcacacugcccccu

SEQ ID NO: 7676 - RNA, 20 nt, Artificial Sequence
  HTT spacer sequence ATCN PAM
ugcucauaggagggggcagu

SEQ ID NO: 7677 - RNA, 20 nt, Artificial Sequence
  HTT spacer sequence ATCN PAM
ccgcagaccgcuacagggug

SEQ ID NO: 7678 - RNA, 20 nt, Artificial Sequence
  HTT spacer sequence ATCN PAM
aaauguucgaaagacuaagg

SEQ ID NO: 7679 - RNA, 20 nt, Artificial Sequence
  HTT spacer sequence ATCN PAM
uccuuagucuuucgaacauu

SEQ ID NO: 7680 - RNA, 20 nt, Artificial Sequence
  HTT spacer sequence ATCN PAM
uaaacagccggaguaguuuc

SEQ ID NO: 7681 - RNA, 20 nt, Artificial Sequence
  HTT spacer sequence ATCN PAM
ugagaccauccuaagaagac

SEQ ID NO: 7682 - RNA, 20 nt, Artificial Sequence
  HTT spacer sequence ATCN PAM
uaagaagacccucuaaggcu

SEQ ID NO: 7683 - RNA, 20 nt, Artificial Sequence
  HTT spacer sequence ATCN PAM
gacucaccuaacuacacagg

SEQ ID NO: 7684 - RNA, 20 nt, Artificial Sequence
  HTT spacer sequence ATCN PAM
cauagccuccccaguuagag

SEQ ID NO: 7685 - RNA, 20 nt, Artificial Sequence
  HTT spacer sequence ATCN PAM
uguggccgccucaugacccc

SEQ ID NO: 7686 - RNA, 20 nt, Artificial Sequence
  HTT spacer sequence ATCN PAM
uugucagcuucucccuccuc

SEQ ID NO: 7687 - RNA, 20 nt, Artificial Sequence
  HTT spacer sequence ATCN PAM
auuguauggaaauuuuaaga

SEQ ID NO: 7688 - RNA, 20 nt, Artificial Sequence
  HTT spacer sequence ATCN PAM
caaauaacauauuuucauuu

SEQ ID NO: 7689 - RNA, 20 nt, Artificial Sequence
  HTT spacer sequence ATCN PAM
uuuacauaucacaaauaaca

SEQ ID NO: 7690 - RNA, 20 nt, Artificial Sequence
  HTT spacer sequence ATCN PAM
auccuuuacauaucacaaau

SEQ ID NO: 7691 - RNA, 20 nt, Artificial Sequence
  HTT spacer sequence ATCN PAM
guccccaguugauggcaacc

SEQ ID NO: 7692 - RNA, 20 nt, Artificial Sequence
  HTT spacer sequence ATCN PAM
acuggggacugauucaguaa

SEQ ID NO: 7693 - RNA, 20 nt, Artificial Sequence
  HTT spacer sequence ATCN PAM
aggaaccuacccaaaagaaa

SEQ ID NO: 7694 - RNA, 20 nt, Artificial Sequence
  HTT spacer sequence ATCN PAM
aaauaacacaaauucuccuu

SEQ ID NO: 7695 - RNA, 20 nt, Artificial Sequence
  HTT spacer sequence ATCN PAM
guggcucacguugccaagcu

SEQ ID NO: 7696 - RNA, 20 nt, Artificial Sequence
  HTT spacer sequence ATCN PAM
cugggaaagcuagcucuggg

SEQ ID NO: 7697 - RNA, 20 nt, Artificial Sequence
  HTT spacer sequence ATCN PAM
gccaucgcugggaaagcuag

SEQ ID NO: 7698 - RNA, 20 nt, Artificial Sequence
  HTT spacer sequence ATCN PAM
ugucauaucuguugucgugg

SEQ ID NO: 7699 - RNA, 20 nt, Artificial Sequence
  HTT spacer sequence ATCN PAM
guugucgugggucuugauag

SEQ ID NO: 7700 - RNA, 20 nt, Artificial Sequence
  HTT spacer sequence ATCN PAM
agacccacgacaacagauau

SEQ ID NO: 7701 - RNA, 20 nt, Artificial Sequence
  HTT spacer sequence ATCN PAM
caggacgcaggcaggcagga

SEQ ID NO: 7702 - RNA, 20 nt, Artificial Sequence
  HTT spacer sequence ATCN PAM
cacgugacguggcucccacu

SEQ ID NO: 7703 - RNA, 20 nt, Artificial Sequence
  HTT spacer sequence ATCN PAM
ccacccgcugagccuucucg

SEQ ID NO: 7704 - RNA, 20 nt, Artificial Sequence
  HTT spacer sequence ATCN PAM
accccugcuggaaggacaag

SEQ ID NO: 7705 - RNA, 20 nt, Artificial Sequence
  HTT spacer sequence ATCN PAM
cuuaguggggauguccccug

SEQ ID NO: 7706 - RNA, 20 nt, Artificial Sequence
  HTT spacer sequence ATCN PAM
ccacuaagagauggaccacu

SEQ ID NO: 7707 - RNA, 20 nt, Artificial Sequence
  HTT spacer sequence ATCN PAM
caggaggugcuuucagccau

SEQ ID NO: 7708 - RNA, 20 nt, Artificial Sequence
  HTT spacer sequence ATCN PAM
uccaugaauggcugaaagca

SEQ ID NO: 7709 - RNA, 20 nt, Artificial Sequence
  HTT spacer sequence ATCN PAM
ggcugcaguggcaaagggcc

SEQ ID NO: 7710 - RNA, 20 nt, Artificial Sequence
  HTT spacer sequence ATCN PAM
ucuuggccaucugcugcugc

SEQ ID NO: 7711 - RNA, 20 nt, Artificial Sequence
  HTT spacer sequence ATCN PAM
gcugcugcaugguggcaggg

SEQ ID NO: 7712 - RNA, 20 nt, Artificial Sequence
  HTT spacer sequence ATCN PAM
uagguagcuggagaagaggc

SEQ ID NO: 7713 - RNA, 20 nt, Artificial Sequence
  HTT spacer sequence ATCN PAM
guguuuuauuuauuugccaa

SEQ ID NO: 7714 - RNA, 20 nt, Artificial Sequence
  HTT spacer sequence ATCN PAM
gccaaaggggaaaaauugaa

SEQ ID NO: 7715 - RNA, 20 nt, Artificial Sequence
  HTT spacer sequence ATCN PAM
ccuuucagaaaacuccuccc

SEQ ID NO: 7716 - RNA, 20 nt, Artificial Sequence
  HTT spacer sequence ATCN PAM
uuuacccuccaagcaugcau

SEQ ID NO: 7717 - RNA, 20 nt, Artificial Sequence
  HTT spacer sequence ATCN PAM
uauccuuuacccuccaagca

SEQ ID NO: 7718 - RNA, 20 nt, Artificial Sequence
  HTT spacer sequence ATCN PAM
aaauaaaacuuaagccgcau

SEQ ID NO: 7719 - RNA, 20 nt, Artificial Sequence
  HTT spacer sequence ATCN PAM
aacaaaucaaaauaaaacuu

SEQ ID NO: 7720 - RNA, 20 nt, Artificial Sequence
  HTT spacer sequence ATCN PAM
auuaguaaauuugguuacuu

SEQ ID NO: 7721 - RNA, 20 nt, Artificial Sequence
  HTT spacer sequence ATCN PAM
aaaagauaauacgcuaugau

SEQ ID NO: 7722 - RNA, 20 nt, Artificial Sequence
  HTT spacer sequence ATCN PAM
uuuugaugugcugcuugagu

SEQ ID NO: 7723 - RNA, 20 nt, Artificial Sequence
  HTT spacer sequence ATCN PAM
uagcguauuaucuuuuugau

SEQ ID NO: 7724 - RNA, 20 nt, Artificial Sequence
  HTT spacer sequence ATCN PAM
cuggcacauaacacaucaua

SEQ ID NO: 7725 - RNA, 20 nt, Artificial Sequence
  HTT spacer sequence ATCN PAM
uugcaucccuggcacauaac

SEQ ID NO: 7726 - RNA, 20 nt, Artificial Sequence
  HTT spacer sequence ATCN PAM
auaaaugugauauaucccau

SEQ ID NO: 7727 - RNA, 20 nt, Artificial Sequence
  HTT spacer sequence ATCN PAM
cauuuauugauuugcauaug

SEQ ID NO: 7728 - RNA, 20 nt, Artificial Sequence
  HTT spacer sequence ATCN PAM
cuccuauucaacauaguacu

SEQ ID NO: 7729 - RNA, 20 nt, Artificial Sequence
  HTT spacer sequence ATCN PAM
ugguuugcugaugacauaau

SEQ ID NO: 7730 - RNA, 20 nt, Artificial Sequence
  HTT spacer sequence ATCN PAM
uaggucacuguaaccucaaa

SEQ ID NO: 7731 - RNA, 20 nt, Artificial Sequence
  HTT spacer sequence ATCN PAM
cuugaguccaagaguuugag

SEQ ID NO: 7732 - RNA, 20 nt, Artificial Sequence
  HTT spacer sequence ATCN PAM
ucccgccucagccucccaag

SEQ ID NO: 7733 - RNA, 20 nt, Artificial Sequence
  HTT spacer sequence ATCN PAM
guaguauuucuuuauaccaa

SEQ ID NO: 7734 - RNA, 20 nt, Artificial Sequence
  HTT spacer sequence ATCN PAM
uuauugguauaaagaaauac

SEQ ID NO: 7735 - RNA, 20 nt, Artificial Sequence
  HTT spacer sequence ATCN PAM
agcugagaaagaaaucaagg

SEQ ID NO: 7736 - RNA, 20 nt, Artificial Sequence
  HTT spacer sequence ATCN PAM
aggaagcaaucccauuuaca

SEQ ID NO: 7737 - RNA, 20 nt, Artificial Sequence
  HTT spacer sequence ATCN PAM
cauuuacaauaacuacaaaa

SEQ ID NO: 7738 - RNA, 20 nt, Artificial Sequence
  HTT spacer sequence ATCN PAM
acauauucaauguaaucccu

SEQ ID NO: 7739 - RNA, 20 nt, Artificial Sequence
  HTT spacer sequence ATCN PAM
cuaccaaaauaccuacguaa

SEQ ID NO: 7740 - RNA, 20 nt, Artificial Sequence
  HTT spacer sequence ATCN PAM
uaaaauuuauauggaaccaa

SEQ ID NO: 7741 - RNA, 20 nt, Artificial Sequence
  HTT spacer sequence ATCN PAM
ccagcuuuguucuuuuugcu

SEQ ID NO: 7742 - RNA, 20 nt, Artificial Sequence
  HTT spacer sequence ATCN PAM
cagauggccacucugcucac

SEQ ID NO: 7743 - RNA, 20 nt, Artificial Sequence
  HTT spacer sequence ATCN PAM
guuaccuggccugacuuuuc

SEQ ID NO: 7744 - RNA, 20 nt, Artificial Sequence
  HTT spacer sequence ATCN PAM
agacuggacaugguuaguag

SEQ ID NO: 7745 - RNA, 20 nt, Artificial Sequence
  HTT spacer sequence ATCN PAM
aaaaaaauauuaagugccuu

SEQ ID NO: 7746 - RNA, 20 nt, Artificial Sequence
  HTT spacer sequence ATCN PAM
augugcugaaccugaaacuc

SEQ ID NO: 7747 - RNA, 20 nt, Artificial Sequence
  HTT spacer sequence ATCN PAM
auuuugaaacuuccucucau

SEQ ID NO: 7748 - RNA, 20 nt, Artificial Sequence
  HTT spacer sequence ATCN PAM
acacuuuuuuuuuuuuuaca

SEQ ID NO: 7749 - RNA, 20 nt, Artificial Sequence
  HTT spacer sequence ATCN PAM
cggcacuuugggaggccaag

SEQ ID NO: 7750 - RNA, 20 nt, Artificial Sequence
  HTT spacer sequence ATCN PAM
guuuugaccucaaguaguaa

SEQ ID NO: 7751 - RNA, 20 nt, Artificial Sequence
  HTT spacer sequence ATCN PAM
caaugaaugcaaaauaacaa

SEQ ID NO: 7752 - RNA, 20 nt, Artificial Sequence
  HTT spacer sequence ATCN PAM
uguuucugccuuuugaugcu

SEQ ID NO: 7753 - RNA, 20 nt, Artificial Sequence
  HTT spacer sequence ATCN PAM
aaaggcagaaacaugaucuc

SEQ ID NO: 7754 - RNA, 20 nt, Artificial Sequence
  HTT spacer sequence ATCN PAM
uuguaauuugccauguuagc

SEQ ID NO: 7755 - RNA, 20 nt, Artificial Sequence
  HTT spacer sequence ATCN PAM
aucauuguaauuugccaugu

SEQ ID NO: 7756 - RNA, 20 nt, Artificial Sequence
  HTT spacer sequence ATCN PAM
caggaaugcaaguauggucu

SEQ ID NO: 7757 - RNA, 20 nt, Artificial Sequence
  HTT spacer sequence ATCN PAM
guguauaaaaaaugaucaua

SEQ ID NO: 7758 - RNA, 20 nt, Artificial Sequence
  HTT spacer sequence ATCN PAM
cguacuuucccuucucauua

SEQ ID NO: 7759 - RNA, 20 nt, Artificial Sequence
  HTT spacer sequence ATCN PAM
uauauuuuauuuuuauccuc

SEQ ID NO: 7760 - RNA, 20 nt, Artificial Sequence
  HTT spacer sequence ATCN PAM
ucccuccagaggauuucaau

SEQ ID NO: 7761 - RNA, 20 nt, Artificial Sequence
  HTT spacer sequence ATCN PAM
ucuggagggaggauaaaaau

SEQ ID NO: 7762 - RNA, 20 nt, Artificial Sequence
  HTT spacer sequence ATCN PAM
cuaauuuuaaaauuuuuaaa

SEQ ID NO: 7763 - RNA, 20 nt, Artificial Sequence
  HTT spacer sequence ATCN PAM
ggugaaagcagccuuuucug

SEQ ID NO: 7764 - RNA, 20 nt, Artificial Sequence
  HTT spacer sequence ATCN PAM
gccacuuauaguaacaauuc

SEQ ID NO: 7765 - RNA, 20 nt, Artificial Sequence
  HTT spacer sequence ATCN PAM
ucuucuugagcugucagaac

SEQ ID NO: 7766 - RNA, 20 nt, Artificial Sequence
  HTT spacer sequence ATCN PAM
ggcagaugcgggucacugau

SEQ ID NO: 7767 - RNA, 20 nt, Artificial Sequence
  HTT spacer sequence ATCN PAM
gugacccgcaucugccugau

SEQ ID NO: 7768 - RNA, 20 nt, Artificial Sequence
  HTT spacer sequence ATCN PAM
cagagccaagacucaaugug

SEQ ID NO: 7769 - RNA, 20 nt, Artificial Sequence
  HTT spacer sequence ATCN PAM
acuuuuucuagguucucccu

SEQ ID NO: 7770 - RNA, 20 nt, Artificial Sequence
  HTT spacer sequence ATCN PAM
aaacaaaacaaaacauaagg

SEQ ID NO: 7771 - RNA, 20 nt, Artificial Sequence
  HTT spacer sequence ATCN PAM
uaggcccuaagauauuuugg

SEQ ID NO: 7772 - RNA, 20 nt, Artificial Sequence
  HTT spacer sequence ATCN PAM
uagggccuaugaugucccaa

SEQ ID NO: 7773 - RNA, 20 nt, Artificial Sequence
  HTT spacer sequence ATCN PAM
cuacuuaaaugucuuuucau

SEQ ID NO: 7774 - RNA, 20 nt, Artificial Sequence
  HTT spacer sequence ATCN PAM
acaaaauuccauuucaaaca

SEQ ID NO: 7775 - RNA, 20 nt, Artificial Sequence
  HTT spacer sequence ATCN PAM
guuacaaaacucugugcggc

SEQ ID NO: 7776 - RNA, 20 nt, Artificial Sequence
  HTT spacer sequence ATCN PAM
caggaaggcugggcgcagug

SEQ ID NO: 7777 - RNA, 20 nt, Artificial Sequence
  HTT spacer sequence ATCN PAM
aaauaauaucacaggaaggc

SEQ ID NO: 7778 - RNA, 20 nt, Artificial Sequence
  HTT spacer sequence ATCN PAM
ugucgcaaucuaaauaauau

SEQ ID NO: 7779 - RNA, 20 nt, Artificial Sequence
  HTT spacer sequence ATCN PAM
acaaucaugucgcaaucuaa

SEQ ID NO: 7780 - RNA, 20 nt, Artificial Sequence
  HTT spacer sequence ATCN PAM
uccacaaucaugucgcaauc

SEQ ID NO: 7781 - RNA, 20 nt, Artificial Sequence
  HTT spacer sequence ATCN PAM
gugacguggcugccccagag

SEQ ID NO: 7782 - RNA, 20 nt, Artificial Sequence
  HTT spacer sequence ATCN PAM
gaggcucuggggcagccacg

SEQ ID NO: 7783 - RNA, 20 nt, Artificial Sequence
  HTT spacer sequence ATCN PAM
cuucacuguccucucauugg

SEQ ID NO: 7784 - RNA, 20 nt, Artificial Sequence
  HTT spacer sequence ATCN PAM
aucucuucacuguccucuca

SEQ ID NO: 7785 - RNA, 20 nt, Artificial Sequence
  HTT spacer sequence ATCN PAM
uccucccccgcagagucugu

SEQ ID NO: 7786 - RNA, 20 nt, Artificial Sequence
  HTT spacer sequence ATCN PAM
gggguccacugccagcccug

SEQ ID NO: 7787 - RNA, 20 nt, Artificial Sequence
  HTT spacer sequence ATCN PAM
ugucugaccaccccaaccuc

SEQ ID NO: 7788 - RNA, 20 nt, Artificial Sequence
  HTT spacer sequence ATCN PAM
cggcagcaccuucucguucg

SEQ ID NO: 7789 - RNA, 20 nt, Artificial Sequence
  HTT spacer sequence ATCN PAM
aggcaggaaccccuuccugc

SEQ ID NO: 7790 - RNA, 20 nt, Artificial Sequence
  HTT spacer sequence ATCN PAM
cugggcaggcacucugcugc

SEQ ID NO: 7791 - RNA, 20 nt, Artificial Sequence
  HTT spacer sequence ATCN PAM
gaucaaacacggguuugucc

SEQ ID NO: 7792 - RNA, 20 nt, Artificial Sequence
  HTT spacer sequence ATCN PAM
gaucccugggcaggcacucu

SEQ ID NO: 7793 - RNA, 20 nt, Artificial Sequence
  HTT spacer sequence ATCN PAM
aacacggguuuguccagccu

SEQ ID NO: 7794 - RNA, 20 nt, Artificial Sequence
  HTT spacer sequence ATCN PAM
guguccccuggugagccagc

SEQ ID NO: 7795 - RNA, 20 nt, Artificial Sequence
  HTT spacer sequence ATCN PAM
gaagaggcuggcucaccagg

SEQ ID NO: 7796 - RNA, 20 nt, Artificial Sequence
  HTT spacer sequence ATCN PAM
gggcgaccuggcacugcacu

SEQ ID NO: 7797 - RNA, 20 nt, Artificial Sequence
  HTT spacer sequence ATCN PAM
gggcucccguuggggccgcc

SEQ ID NO: 7798 - RNA, 20 nt, Artificial Sequence
  HTT spacer sequence ATCN PAM
ggugcccgcccacccaagca

SEQ ID NO: 7799 - RNA, 20 nt, Artificial Sequence
  HTT spacer sequence ATCN PAM
ggggcuuggcucugggcuug

SEQ ID NO: 7800 - RNA, 20 nt, Artificial Sequence
  HTT spacer sequence ATCN PAM
cugcccucccacaggagugg

SEQ ID NO: 7801 - RNA, 20 nt, Artificial Sequence
  HTT spacer sequence ATCN PAM
ugcccuguaagugacacaca

SEQ ID NO: 7802 - RNA, 20 nt, Artificial Sequence
  HTT spacer sequence ATCN PAM
caacaugucugacauuacag

SEQ ID NO: 7803 - RNA, 20 nt, Artificial Sequence
  HTT spacer sequence ATCN PAM
guucuuuucacaugaaaagg

SEQ ID NO: 7804 - RNA, 20 nt, Artificial Sequence
  HTT spacer sequence ATCN PAM
uuuucaugugaaaagaacag

SEQ ID NO: 7805 - RNA, 20 nt, Artificial Sequence
  HTT spacer sequence ATCN PAM
gaggaacacaaggggcagac

SEQ ID NO: 7806 - RNA, 20 nt, Artificial Sequence
  HTT spacer sequence ATCN PAM
gacacaguugcagacugaaa

SEQ ID NO: 7807 - RNA, 20 nt, Artificial Sequence
  HTT spacer sequence ATCN PAM
gaaauugugacuuaccgcca

SEQ ID NO: 7808 - RNA, 20 nt, Artificial Sequence
  HTT spacer sequence ATCN PAM
aauggcaaauacacuuucac

SEQ ID NO: 7809 - RNA, 20 nt, Artificial Sequence
  HTT spacer sequence ATCN PAM
cacugguguucagggccaug

SEQ ID NO: 7810 - RNA, 20 nt, Artificial Sequence
  HTT spacer sequence ATCN PAM
uaacuugcugguuuaaaagc

SEQ ID NO: 7811 - RNA, 20 nt, Artificial Sequence
  HTT spacer sequence ATCN PAM
cacacucucaauucgucuau

SEQ ID NO: 7812 - RNA, 20 nt, Artificial Sequence
  HTT spacer sequence ATCN PAM
aaaacuuacuuucuguguuu

SEQ ID NO: 7813 - RNA, 20 nt, Artificial Sequence
  HTT spacer sequence ATCN PAM
cugugcacaaaauucuuuaa

SEQ ID NO: 7814 - RNA, 20 nt, Artificial Sequence
  HTT spacer sequence ATCN PAM
guccaugaaaagaaucccug

SEQ ID NO: 7815 - RNA, 20 nt, Artificial Sequence
  HTT spacer sequence ATCN PAM
ucagugaaauaagacauucc

SEQ ID NO: 7816 - RNA, 20 nt, Artificial Sequence
  HTT spacer sequence ATCN PAM
gagaaaucuucagugaaaua

SEQ ID NO: 7817 - RNA, 20 nt, Artificial Sequence
  HTT spacer sequence ATCN PAM
uuaucauuuugguucaauga

SEQ ID NO: 7818 - RNA, 20 nt, Artificial Sequence
  HTT spacer sequence ATCN PAM
uuuugguucaaugauuuaaa

SEQ ID NO: 7819 - RNA, 20 nt, Artificial Sequence
  HTT spacer sequence ATCN PAM
uugaaccaaaaugauaagga

SEQ ID NO: 7820 - RNA, 20 nt, Artificial Sequence
  HTT spacer sequence ATCN PAM
ucaccucacgcuuuuguccc

SEQ ID NO: 7821 - RNA, 20 nt, Artificial Sequence
  HTT spacer sequence ATCN PAM
cugugggccagggaugggcu

SEQ ID NO: 7822 - RNA, 20 nt, Artificial Sequence
  HTT spacer sequence ATCN PAM
cuggcccacagcgaugccag

SEQ ID NO: 7823 - RNA, 20 nt, Artificial Sequence
  HTT spacer sequence ATCN PAM
uggguuacacacgcacuggc

SEQ ID NO: 7824 - RNA, 20 nt, Artificial Sequence
  HTT spacer sequence ATCN PAM
cucuggucucggcuucaggu

SEQ ID NO: 7825 - RNA, 20 nt, Artificial Sequence
  HTT spacer sequence ATCN PAM
cgacacucgugugguggaga

SEQ ID NO: 7826 - RNA, 20 nt, Artificial Sequence
  HTT spacer sequence ATCN PAM
ccaccacacgagugucggga

SEQ ID NO: 7827 - RNA, 20 nt, Artificial Sequence
  HTT spacer sequence ATCN PAM
ugucauuuaaucagucuuaa

SEQ ID NO: 7828 - RNA, 20 nt, Artificial Sequence
  HTT spacer sequence ATCN PAM
gucuuaagguggagggagga

SEQ ID NO: 7829 - RNA, 20 nt, Artificial Sequence
  HTT spacer sequence ATCN PAM
ucccuccaccuuaagacuga

SEQ ID NO: 7830 - RNA, 20 nt, Artificial Sequence
  HTT spacer sequence ATCN PAM
aggauaaagugaccgguguu

SEQ ID NO: 7831 - RNA, 20 nt, Artificial Sequence
  HTT spacer sequence ATCN PAM
uggauuugguuccggguccu

SEQ ID NO: 7832 - RNA, 20 nt, Artificial Sequence
  HTT spacer sequence ATCN PAM
uucaaaacaccggucacuuu

SEQ ID NO: 7833 - RNA, 20 nt, Artificial Sequence
  HTT spacer sequence ATCN PAM
guucaugcuuucucuuucug

SEQ ID NO: 7834 - RNA, 20 nt, Artificial Sequence
  HTT spacer sequence ATCN PAM
uucauguauaaauugccugc

SEQ ID NO: 7835 - RNA, 20 nt, Artificial Sequence
  HTT spacer sequence ATCN PAM
uuuggaggcaaauaaaacuu

SEQ ID NO: 7836 - RNA, 20 nt, Artificial Sequence
  HTT spacer sequence ATCN PAM
auugcugacagaagcaaucu

SEQ ID NO: 7837 - RNA, 20 nt, Artificial Sequence
  HTT spacer sequence ATCN PAM
uggccacgcagagauccccu

SEQ ID NO: 7838 - RNA, 20 nt, Artificial Sequence
  HTT spacer sequence ATCN PAM
cugcguggccaggauacacu

SEQ ID NO: 7839 - RNA, 20 nt, Artificial Sequence
  HTT spacer sequence ATCN PAM
ccuggugcuagggcuuucca

SEQ ID NO: 7840 - RNA, 20 nt, Artificial Sequence
  HTT spacer sequence ATCN PAM
gcacacccugaauuucagga

SEQ ID NO: 7841 - RNA, 20 nt, Artificial Sequence
  HTT spacer sequence ATCN PAM
agcccgcccacugcgguucc

SEQ ID NO: 7842 - RNA, 20 nt, Artificial Sequence
  HTT spacer sequence ATCN PAM
ucaguuucuuugcuuauaag

SEQ ID NO: 7843 - RNA, 20 nt, Artificial Sequence
  HTT spacer sequence ATCN PAM
uguuuaaugugcacaugagc

SEQ ID NO: 7844 - RNA, 20 nt, Artificial Sequence
  HTT spacer sequence ATCN PAM
agagcucaugugcacauuaa

SEQ ID NO: 7845 - RNA, 20 nt, Artificial Sequence
  HTT spacer sequence ATCN PAM
gugucacauucugccguugu

SEQ ID NO: 7846 - RNA, 20 nt, Artificial Sequence
  HTT spacer sequence ATCN PAM
aacaacggcagaaugugaca

SEQ ID NO: 7847 - RNA, 20 nt, Artificial Sequence
  HTT spacer sequence ATCN PAM
ccccacucugccucggugcc

SEQ ID NO: 7848 - RNA, 20 nt, Artificial Sequence
  HTT spacer sequence ATCN PAM
agcagcucacaguagucugc

SEQ ID NO: 7849 - RNA, 20 nt, Artificial Sequence
  HTT spacer sequence ATCN PAM
caccugcagacuacugugag

SEQ ID NO: 7850 - RNA, 20 nt, Artificial Sequence
  HTT spacer sequence ATCN PAM
cuguguggaaacacagccag

SEQ ID NO: 7851 - RNA, 20 nt, Artificial Sequence
  HTT spacer sequence ATCN PAM
uuuuauaggcuguggucagu

SEQ ID NO: 7852 - RNA, 20 nt, Artificial Sequence
  HTT spacer sequence ATCN PAM
gcucagcugggcugucucug

SEQ ID NO: 7853 - RNA, 20 nt, Artificial Sequence
  HTT spacer sequence ATCN PAM
ugucuaguuuuggugauuaa

SEQ ID NO: 7854 - RNA, 20 nt, Artificial Sequence
  HTT spacer sequence ATCN PAM
ccaaaacuagacaggaugac

SEQ ID NO: 7855 - RNA, 20 nt, Artificial Sequence
  HTT spacer sequence ATCN PAM
auuaaucaccaaaacuagac

SEQ ID NO: 7856 - RNA, 20 nt, Artificial Sequence
  HTT spacer sequence ATCN PAM
cucacuuagaaauauuuugu

SEQ ID NO: 7857 - RNA, 20 nt, Artificial Sequence
  HTT spacer sequence ATCN PAM
ugcuuuuauagcuuaggcuc

SEQ ID NO: 7858 - RNA, 20 nt, Artificial Sequence
  HTT spacer sequence ATCN PAM
uugucaaguuggaguguguu

SEQ ID NO: 7859 - RNA, 20 nt, Artificial Sequence
  HTT spacer sequence ATCN PAM
gccccuuucuucugaaaaag

SEQ ID NO: 7860 - RNA, 20 nt, Artificial Sequence
  HTT spacer sequence ATCN PAM
gcucccugcccccacccaca

SEQ ID NO: 7861 - RNA, 20 nt, Artificial Sequence
  HTT spacer sequence ATCN PAM
cccuccagcucgaccucaca

SEQ ID NO: 7862 - RNA, 20 nt, Artificial Sequence
  HTT spacer sequence ATCN PAM
uccuuuucucauuucuucac

SEQ ID NO: 7863 - RNA, 20 nt, Artificial Sequence
  HTT spacer sequence ATCN PAM
ccucacccacugcagccucc

SEQ ID NO: 7864 - RNA, 20 nt, Artificial Sequence
  HTT spacer sequence ATCN PAM
accuguggaggcugcagugg

SEQ ID NO: 7865 - RNA, 20 nt, Artificial Sequence
  HTT spacer sequence ATCN PAM
gggagcucccagagcgccca

SEQ ID NO: 7866 - RNA, 20 nt, Artificial Sequence
  HTT spacer sequence ATCN PAM
ccauguccuccucaugccuu

SEQ ID NO: 7867 - RNA, 20 nt, Artificial Sequence
  HTT spacer sequence ATCN PAM
ucccgcucccuucuccugaa

SEQ ID NO: 7868 - RNA, 20 nt, Artificial Sequence
  HTT spacer sequence ATCN PAM
cugcugcugcugugggggca

SEQ ID NO: 7869 - RNA, 20 nt, Artificial Sequence
  HTT spacer sequence ATCN PAM
gcccagccccugcacuggac

SEQ ID NO: 7870 - RNA, 20 nt, Artificial Sequence
  HTT spacer sequence ATCN PAM
ugcgucccacccuggucucc

SEQ ID NO: 7871 - RNA, 20 nt, Artificial Sequence
  HTT spacer sequence ATCN PAM
ugagcgauggccacugucaa

SEQ ID NO: 7872 - RNA, 20 nt, Artificial Sequence
  HTT spacer sequence ATCN PAM
cucaggaugggggcaggugg

SEQ ID NO: 7873 - RNA, 20 nt, Artificial Sequence
  HTT spacer sequence ATCN PAM
uuuuaauuauucaucugugu

SEQ ID NO: 7874 - RNA, 20 nt, Artificial Sequence
  HTT spacer sequence ATCN PAM
guguuggugcuuuugucccc

SEQ ID NO: 7875 - RNA, 20 nt, Artificial Sequence
  HTT spacer sequence ATCN PAM
uucacucaacagacagcucu

SEQ ID NO: 7876 - RNA, 20 nt, Artificial Sequence
  HTT spacer sequence ATCN PAM
gguguucagcagacaucagc

SEQ ID NO: 7877 - RNA, 20 nt, Artificial Sequence
  HTT spacer sequence ATCN PAM
gccagagcgucagggcgagg

SEQ ID NO: 7878 - RNA, 20 nt, Artificial Sequence
  HTT spacer sequence ATCN PAM
cugaaagccacuguccccgc

SEQ ID NO: 7879 - RNA, 20 nt, Artificial Sequence
  HTT spacer sequence ATCN PAM
uccgccauggccaggucuga

SEQ ID NO: 7880 - RNA, 20 nt, Artificial Sequence
  HTT spacer sequence ATCN PAM
gccugucagcuguggagcug

SEQ ID NO: 7881 - RNA, 20 nt, Artificial Sequence
  HTT spacer sequence ATCN PAM
cuuggggcaagucacuuucu

SEQ ID NO: 7882 - RNA, 20 nt, Artificial Sequence
  HTT spacer sequence ATCN PAM
cgccgguccuuguuagcgaa

SEQ ID NO: 7883 - RNA, 20 nt, Artificial Sequence
  HTT spacer sequence ATCN PAM
ggcagccguuugugacagcu

SEQ ID NO: 7884 - RNA, 20 nt, Artificial Sequence
  HTT spacer sequence ATCN PAM
ggcaauuacgguaacccucc

SEQ ID NO: 7885 - RNA, 20 nt, Artificial Sequence
  HTT spacer sequence ATCN PAM
caugcuacuuuuggugcaca

SEQ ID NO: 7886 - RNA, 20 nt, Artificial Sequence
  HTT spacer sequence ATCN PAM
acauggguaaguacuccgag

SEQ ID NO: 7887 - RNA, 20 nt, Artificial Sequence
  HTT spacer sequence ATCN PAM
cuugguuucugaaaaaggug

SEQ ID NO: 7888 - RNA, 20 nt, Artificial Sequence
  HTT spacer sequence ATCN PAM
agcugaaaaaaaaaaauagu

SEQ ID NO: 7889 - RNA, 20 nt, Artificial Sequence
  HTT spacer sequence ATCN PAM
uacuauuuuuuuuuuucagc

SEQ ID NO: 7890 - RNA, 20 nt, Artificial Sequence
  HTT spacer sequence ATCN PAM
aacagacacauagagagcuu

SEQ ID NO: 7891 - RNA, 20 nt, Artificial Sequence
  HTT spacer sequence ATCN PAM
acuucuauucaaauacacug

SEQ ID NO: 7892 - RNA, 20 nt, Artificial Sequence
  HTT spacer sequence ATCN PAM
uaaaaugauaacaaaaaaga

SEQ ID NO: 7893 - RNA, 20 nt, Artificial Sequence
  HTT spacer sequence ATCN PAM
uuuuaugaucgacuucuauu

SEQ ID NO: 7894 - RNA, 20 nt, Artificial Sequence
  HTT spacer sequence ATCN PAM
augggucaaggaagaaauua

SEQ ID NO: 7895 - RNA, 20 nt, Artificial Sequence
  HTT spacer sequence ATCN PAM
uacaguuuagaaccauuuau

SEQ ID NO: 7896 - RNA, 20 nt, Artificial Sequence
  HTT spacer sequence ATCN PAM
ucaccaguagaauauaauca

SEQ ID NO: 7897 - RNA, 20 nt, Artificial Sequence
  HTT spacer sequence ATCN PAM
ccaguagaauauaaucaaag

SEQ ID NO: 7898 - RNA, 20 nt, Artificial Sequence
  HTT spacer sequence ATCN PAM
aagugauuuucagugaaaaa

SEQ ID NO: 7899 - RNA, 20 nt, Artificial Sequence
  HTT spacer sequence ATCN PAM
cuuugauuauauucuacugg

SEQ ID NO: 7900 - RNA, 20 nt, Artificial Sequence
  HTT spacer sequence ATCN PAM
ucauuuccuuaauuugcauu

SEQ ID NO: 7901 - RNA, 20 nt, Artificial Sequence
  HTT spacer sequence ATCN PAM
aaauagaaaaaaccaaacag

SEQ ID NO: 7902 - RNA, 20 nt, Artificial Sequence
  HTT spacer sequence ATCN PAM
agaaaaagagggaggccagg

SEQ ID NO: 7903 - RNA, 20 nt, Artificial Sequence
  HTT spacer sequence ATCN PAM
cagcacuuugggaggcugau

SEQ ID NO: 7904 - RNA, 20 nt, Artificial Sequence
  HTT spacer sequence ATCN PAM
gccucccaaagugcugagau

SEQ ID NO: 7905 - RNA, 20 nt, Artificial Sequence
  HTT spacer sequence ATCN PAM
uccugcaucagccucccaaa

SEQ ID NO: 7906 - RNA, 20 nt, Artificial Sequence
  HTT spacer sequence ATCN PAM
cuugggcccaggaauuugag

SEQ ID NO: 7907 - RNA, 20 nt, Artificial Sequence
  HTT spacer sequence ATCN PAM
cuacaaaaaaagaaaaagag

SEQ ID NO: 7908 - RNA, 20 nt, Artificial Sequence
  HTT spacer sequence ATCN PAM
uuguccucuuccucuuuuuc

SEQ ID NO: 7909 - RNA, 20 nt, Artificial Sequence
  HTT spacer sequence ATCN PAM
agaaugaaagacagguccua

SEQ ID NO: 7910 - RNA, 20 nt, Artificial Sequence
  HTT spacer sequence ATCN PAM
aauguacaguauaaaguugu

SEQ ID NO: 7911 - RNA, 20 nt, Artificial Sequence
  HTT spacer sequence ATCN PAM
uuaggaaaauauaaaugauc

SEQ ID NO: 7912 - RNA, 20 nt, Artificial Sequence
  HTT spacer sequence ATCN PAM
uuuauauuuuccuaaagauu

SEQ ID NO: 7913 - RNA, 20 nt, Artificial Sequence
  HTT spacer sequence ATCN PAM
aaguuggccuaagaagaagu

SEQ ID NO: 7914 - RNA, 20 nt, Artificial Sequence
  HTT spacer sequence ATCN PAM
guuucuacuucuucuuaggc

SEQ ID NO: 7915 - RNA, 20 nt, Artificial Sequence
  HTT spacer sequence ATCN PAM
aaucaguuucuacuucuucu

SEQ ID NO: 7916 - RNA, 20 nt, Artificial Sequence
  HTT spacer sequence ATCN PAM
acauaggcaaaaaugauuug

SEQ ID NO: 7917 - RNA, 20 nt, Artificial Sequence
  HTT spacer sequence ATCN PAM
uuuuugccuauguugauuua

SEQ ID NO: 7918 - RNA, 20 nt, Artificial Sequence
  HTT spacer sequence ATCN PAM
uugacuuccaaaucauuuuu

SEQ ID NO: 7919 - RNA, 20 nt, Artificial Sequence
  HTT spacer sequence ATCN PAM
aaacccccauaggcaccaug

SEQ ID NO: 7920 - RNA, 20 nt, Artificial Sequence
  HTT spacer sequence ATCN PAM
guauauugguuugggcaugg

SEQ ID NO: 7921 - RNA, 20 nt, Artificial Sequence
  HTT spacer sequence ATCN PAM
gucagcuuaggcuaaguaau

SEQ ID NO: 7922 - RNA, 20 nt, Artificial Sequence
  HTT spacer sequence ATCN PAM
ugguggguuuaacaaagcag

SEQ ID NO: 7923 - RNA, 20 nt, Artificial Sequence
  HTT spacer sequence ATCN PAM
gcuuuguuaaacccaccagg

SEQ ID NO: 7924 - RNA, 20 nt, Artificial Sequence
  HTT spacer sequence ATCN PAM
ggucauggcucucagccaua

SEQ ID NO: 7925 - RNA, 20 nt, Artificial Sequence
  HTT spacer sequence ATCN PAM
cagcuuuauaggaaaguuaa

SEQ ID NO: 7926 - RNA, 20 nt, Artificial Sequence
  HTT spacer sequence ATCN PAM
gacucagagcuccgcuccuu

SEQ ID NO: 7927 - RNA, 20 nt, Artificial Sequence
  HTT spacer sequence ATCN PAM
aaacagugugacucuggaac

SEQ ID NO: 7928 - RNA, 20 nt, Artificial Sequence
  HTT spacer sequence ATCN PAM
ucagccugguguuaccuagu

SEQ ID NO: 7929 - RNA, 20 nt, Artificial Sequence
  HTT spacer sequence ATCN PAM
accuccuagaauacagcuug

SEQ ID NO: 7930 - RNA, 20 nt, Artificial Sequence
  HTT spacer sequence ATCN PAM
cgucagcaccugugaaucgu

SEQ ID NO: 7931 - RNA, 20 nt, Artificial Sequence
  HTT spacer sequence ATCN PAM
ugagaaggaggcgguggccu

SEQ ID NO: 7932 - RNA, 20 nt, Artificial Sequence
  HTT spacer sequence ATCN PAM
ggucaccaugcuggucccau

SEQ ID NO: 7933 - RNA, 20 nt, Artificial Sequence
  HTT spacer sequence ATCN PAM
aacuuaaaaagucauuuguc

SEQ ID NO: 7934 - RNA, 20 nt, Artificial Sequence
  HTT spacer sequence ATCN PAM
aacaaucaaacuuaaaaagu

SEQ ID NO: 7935 - RNA, 20 nt, Artificial Sequence
  HTT spacer sequence ATCN PAM
gaaguuauauaaaagguaca

SEQ ID NO: 7936 - RNA, 20 nt, Artificial Sequence
  HTT spacer sequence ATCN PAM
aacauauuauauuuauuauu

SEQ ID NO: 7937 - RNA, 20 nt, Artificial Sequence
  HTT spacer sequence ATCN PAM
cagucccagcaaauaccauu

SEQ ID NO: 7938 - RNA, 20 nt, Artificial Sequence
  HTT spacer sequence ATCN PAM
accaucugccccugaugugu

SEQ ID NO: 7939 - RNA, 20 nt, Artificial Sequence
  HTT spacer sequence ATCN PAM
gccccugauguguagaguag

SEQ ID NO: 7940 - RNA, 20 nt, Artificial Sequence
  HTT spacer sequence ATCN PAM
ggggcagaugguggaugcuc

SEQ ID NO: 7941 - RNA, 20 nt, Artificial Sequence
  HTT spacer sequence ATCN PAM
uuuaugcuuuuacacacuca

SEQ ID NO: 7942 - RNA, 20 nt, Artificial Sequence
  HTT spacer sequence ATCN PAM
cuggacucuuucaguggaag

SEQ ID NO: 7943 - RNA, 20 nt, Artificial Sequence
  HTT spacer sequence ATCN PAM
aaaugaaguaagucaguuuc

SEQ ID NO: 7944 - RNA, 20 nt, Artificial Sequence
  HTT spacer sequence ATCN PAM
acccuaacugacuucauuua

SEQ ID NO: 7945 - RNA, 20 nt, Artificial Sequence
  HTT spacer sequence ATCN PAM
uugaaaaauguucugugucu

SEQ ID NO: 7946 - RNA, 20 nt, Artificial Sequence
  HTT spacer sequence ATCN PAM
ugagggcucccuguggucag

SEQ ID NO: 7947 - RNA, 20 nt, Artificial Sequence
  HTT spacer sequence ATCN PAM
gaccacagggagcccucagg

SEQ ID NO: 7948 - RNA, 20 nt, Artificial Sequence
  HTT spacer sequence ATCN PAM
uaaaaauucagagugacaag

SEQ ID NO: 7949 - RNA, 20 nt, Artificial Sequence
  HTT spacer sequence ATCN PAM
ccuaacacuucccacacuga

SEQ ID NO: 7950 - RNA, 20 nt, Artificial Sequence
  HTT spacer sequence ATCN PAM
cacguuucuaguacugacuc

SEQ ID NO: 7951 - RNA, 20 nt, Artificial Sequence
  HTT spacer sequence ATCN PAM
gaauucugggucuuuccugg

SEQ ID NO: 7952 - RNA, 20 nt, Artificial Sequence
  HTT spacer sequence ATCN PAM
cgagggguccgugagaccug

SEQ ID NO: 7953 - RNA, 20 nt, Artificial Sequence
  HTT spacer sequence ATCN PAM
ccagcagcacuuucugggcu

SEQ ID NO: 7954 - RNA, 20 nt, Artificial Sequence
  HTT spacer sequence ATCN PAM
gugacuaugcugggcccaga

SEQ ID NO: 7955 - RNA, 20 nt, Artificial Sequence
  HTT spacer sequence ATCN PAM
guaaaaugggcugauugacu

SEQ ID NO: 7956 - RNA, 20 nt, Artificial Sequence
  HTT spacer sequence ATCN PAM
gcccauuuuacagaugaagc

SEQ ID NO: 7957 - RNA, 20 nt, Artificial Sequence
  HTT spacer sequence ATCN PAM
cagucaaucagcccauuuua

SEQ ID NO: 7958 - RNA, 20 nt, Artificial Sequence
  HTT spacer sequence ATCN PAM
auagcauguaaacacuuuuc

SEQ ID NO: 7959 - RNA, 20 nt, Artificial Sequence
  HTT spacer sequence ATCN PAM
aucucagucaaucagcccau

SEQ ID NO: 7960 - RNA, 20 nt, Artificial Sequence
  HTT spacer sequence ATCN PAM
ggaauagcaccuccucagaa

SEQ ID NO: 7961 - RNA, 20 nt, Artificial Sequence
  HTT spacer sequence ATCN PAM
cuguuuucuaacccucagca

SEQ ID NO: 7962 - RNA, 20 nt, Artificial Sequence
  HTT spacer sequence ATCN PAM
caacaaaagccugccacaac

SEQ ID NO: 7963 - RNA, 20 nt, Artificial Sequence
  HTT spacer sequence ATCN PAM
ggcauccuaugggcaggcca

SEQ ID NO: 7964 - RNA, 20 nt, Artificial Sequence
  HTT spacer sequence ATCN PAM
uaugggcaggccagaagugu

SEQ ID NO: 7965 - RNA, 20 nt, Artificial Sequence
  HTT spacer sequence ATCN PAM
gguaaggcuguaugagugag

SEQ ID NO: 7966 - RNA, 20 nt, Artificial Sequence
  HTT spacer sequence ATCN PAM
acauuucccaguaccaccac

SEQ ID NO: 7967 - RNA, 20 nt, Artificial Sequence
  HTT spacer sequence ATCN PAM
ccaaguggccuggugugugg

SEQ ID NO: 7968 - RNA, 20 nt, Artificial Sequence
  HTT spacer sequence ATCN PAM
uccccuuggaaucaccuugg

SEQ ID NO: 7969 - RNA, 20 nt, Artificial Sequence
  HTT spacer sequence ATCN PAM
ccuuggaaucaccuuggaaa

SEQ ID NO: 7970 - RNA, 20 nt, Artificial Sequence
  HTT spacer sequence ATCN PAM
ccuuggaaaacccuggauca

SEQ ID NO: 7971 - RNA, 20 nt, Artificial Sequence
  HTT spacer sequence ATCN PAM
aggguuuuccaaggugauuc

SEQ ID NO: 7972 - RNA, 20 nt, Artificial Sequence
  HTT spacer sequence ATCN PAM
uuuugaaagaugcucaugga

SEQ ID NO: 7973 - RNA, 20 nt, Artificial Sequence
  HTT spacer sequence ATCN PAM
uucaaaaugauccaggguuu

SEQ ID NO: 7974 - RNA, 20 nt, Artificial Sequence
  HTT spacer sequence ATCN PAM
cauuggggcucaucacagua

SEQ ID NO: 7975 - RNA, 20 nt, Artificial Sequence
  HTT spacer sequence ATCN PAM
caguaucaagguagaagagg

SEQ ID NO: 7976 - RNA, 20 nt, Artificial Sequence
  HTT spacer sequence ATCN PAM
agguagaagaggaagcugag

SEQ ID NO: 7977 - RNA, 20 nt, Artificial Sequence
  HTT spacer sequence ATCN PAM
uacuggucucagcuuccucu

SEQ ID NO: 7978 - RNA, 20 nt, Artificial Sequence
  HTT spacer sequence ATCN PAM
caugguggcugaagguggug

SEQ ID NO: 7979 - RNA, 20 nt, Artificial Sequence
  HTT spacer sequence ATCN PAM
cugccagaccccauggucgu

SEQ ID NO: 7980 - RNA, 20 nt, Artificial Sequence
  HTT spacer sequence ATCN PAM
ugaaagaggaggacaccaca

SEQ ID NO: 7981 - RNA, 20 nt, Artificial Sequence
  HTT spacer sequence ATCN PAM
ggucuccaagaaccaagggg

SEQ ID NO: 7982 - RNA, 20 nt, Artificial Sequence
  HTT spacer sequence ATCN PAM
accccuuccuacucaguggc

SEQ ID NO: 7983 - RNA, 20 nt, Artificial Sequence
  HTT spacer sequence ATCN PAM
uguguguuccaggcugugug

SEQ ID NO: 7984 - RNA, 20 nt, Artificial Sequence
  HTT spacer sequence ATCN PAM
cuacagggagaggcagggcc

SEQ ID NO: 7985 - RNA, 20 nt, Artificial Sequence
  HTT spacer sequence ATCN PAM
gcugcccugggcgccuggca

SEQ ID NO: 7986 - RNA, 20 nt, Artificial Sequence
  HTT spacer sequence ATCN PAM
caggcccccaaggggcuggc

SEQ ID NO: 7987 - RNA, 20 nt, Artificial Sequence
  HTT spacer sequence ATCN PAM
cccacccacccccgcaguca

SEQ ID NO: 7988 - RNA, 20 nt, Artificial Sequence
  HTT spacer sequence ATCN PAM
ccgaagcaccaaagccaacc

SEQ ID NO: 7989 - RNA, 20 nt, Artificial Sequence
  HTT spacer sequence ATCN PAM
aagagacaggucuccggugg

SEQ ID NO: 7990 - RNA, 20 nt, Artificial Sequence
  HTT spacer sequence ATCN PAM
caggggcaguggggaggggc

SEQ ID NO: 7991 - RNA, 20 nt, Artificial Sequence
  HTT spacer sequence ATCN PAM
ggagcccugggcgccccucc

SEQ ID NO: 7992 - RNA, 20 nt, Artificial Sequence
  HTT spacer sequence ATCN PAM
gcugaccucagagcagggcu

SEQ ID NO: 7993 - RNA, 20 nt, Artificial Sequence
  HTT spacer sequence ATCN PAM
gggcagcgugaggccucaca

SEQ ID NO: 7994 - RNA, 20 nt, Artificial Sequence
  HTT spacer sequence ATCN PAM
agacccuaggcugggcucug

SEQ ID NO: 7995 - RNA, 20 nt, Artificial Sequence
  HTT spacer sequence ATCN PAM
cauccagacccuaggcuggg

SEQ ID NO: 7996 - RNA, 20 nt, Artificial Sequence
  HTT spacer sequence ATCN PAM
ucacggggcugacgguucuc

SEQ ID NO: 7997 - RNA, 20 nt, Artificial Sequence
  HTT spacer sequence ATCN PAM
ucuagggugccaucgccccu

SEQ ID NO: 7998 - RNA, 20 nt, Artificial Sequence
  HTT spacer sequence ATCN PAM
ccccuccccacugcuguucc

SEQ ID NO: 7999 - RNA, 20 nt, Artificial Sequence
  HTT spacer sequence ATCN PAM
gcuggguguccccaacccca

SEQ ID NO: 8000 - RNA, 20 nt, Artificial Sequence
  HTT spacer sequence ATCN PAM
gagagacggccuccaccacc

SEQ ID NO: 8001 - RNA, 20 nt, Artificial Sequence
  HTT spacer sequence ATCN PAM
agguucuucugcagagaggc

SEQ ID NO: 8002 - RNA, 20 nt, Artificial Sequence
  HTT spacer sequence ATCN PAM
aaugcccaggccagagcuug

SEQ ID NO: 8003 - RNA, 20 nt, Artificial Sequence
  HTT spacer sequence ATCN PAM
gagccggcuggccuaaccag

SEQ ID NO: 8004 - RNA, 20 nt, Artificial Sequence
  HTT spacer sequence ATCN PAM
caggcaagagcaggcccugg

SEQ ID NO: 8005 - RNA, 20 nt, Artificial Sequence
  HTT spacer sequence ATCN PAM
ccaggcuucccccacacuga

SEQ ID NO: 8006 - RNA, 20 nt, Artificial Sequence
  HTT spacer sequence ATCN PAM
uaggccugggcugccugugg

SEQ ID NO: 8007 - RNA, 20 nt, Artificial Sequence
  HTT spacer sequence ATCN PAM
gccccuaccccaggggucac

SEQ ID NO: 8008 - RNA, 20 nt, Artificial Sequence
  HTT spacer sequence ATCN PAM
ggcuucccagacuggcaucu

SEQ ID NO: 8009 - RNA, 20 nt, Artificial Sequence
  HTT spacer sequence ATCN PAM
gccccgcucugggcacugcu

SEQ ID NO: 8010 - RNA, 20 nt, Artificial Sequence
  HTT spacer sequence ATCN PAM
gggcucagacgcucagacca

SEQ ID NO: 8011 - RNA, 20 nt, Artificial Sequence
  HTT spacer sequence ATCN PAM
ucugucaugguuccgcgccg

SEQ ID NO: 8012 - RNA, 20 nt, Artificial Sequence
  HTT spacer sequence ATCN PAM
ccgccgcugucaccccgccg

SEQ ID NO: 8013 - RNA, 20 nt, Artificial Sequence
  HTT spacer sequence ATCN PAM
cacccagacccgggccuggc

SEQ ID NO: 8014 - RNA, 20 nt, Artificial Sequence
  HTT spacer sequence ATCN PAM
cugccccacacccucccugg

SEQ ID NO: 8015 - RNA, 20 nt, Artificial Sequence
  HTT spacer sequence ATCN PAM
cuccugcguccccucugcag

SEQ ID NO: 8016 - RNA, 20 nt, Artificial Sequence
  HTT spacer sequence ATCN PAM
cuuccuauaccagguccccu

SEQ ID NO: 8017 - RNA, 20 nt, Artificial Sequence
  HTT spacer sequence ATCN PAM
gccccagccuggcagggccu

SEQ ID NO: 8018 - RNA, 20 nt, Artificial Sequence
  HTT spacer sequence ATCN PAM
ccugccccaccacggccccg

SEQ ID NO: 8019 - RNA, 20 nt, Artificial Sequence
  HTT spacer sequence ATCN PAM
accaagcaucaccugcccca

SEQ ID NO: 8020 - RNA, 20 nt, Artificial Sequence
  HTT spacer sequence ATCN PAM
caggaaggcacccgggacag

SEQ ID NO: 8021 - RNA, 20 nt, Artificial Sequence
  HTT spacer sequence ATCN PAM
cuccaacagggacaaagacu

SEQ ID NO: 8022 - RNA, 20 nt, Artificial Sequence
  HTT spacer sequence ATCN PAM
gacagucccaggaggcaggg

SEQ ID NO: 8023 - RNA, 20 nt, Artificial Sequence
  HTT spacer sequence ATCN PAM
gugagucuguaggugaacau

SEQ ID NO: 8024 - RNA, 20 nt, Artificial Sequence
  HTT spacer sequence ATCN PAM
cguauccugcgcaguugaga

SEQ ID NO: 8025 - RNA, 20 nt, Artificial Sequence
  HTT spacer sequence ATCN PAM
ugcgcaguugagaucugcag

SEQ ID NO: 8026 - RNA, 20 nt, Artificial Sequence
  HTT spacer sequence ATCN PAM
caacugcgcaggauacggga

SEQ ID NO: 8027 - RNA, 20 nt, Artificial Sequence
  HTT spacer sequence ATCN PAM
gcagccuucuggggcuggcg

SEQ ID NO: 8028 - RNA, 20 nt, Artificial Sequence
  HTT spacer sequence ATCN PAM
ccucccacgccagccccaga

SEQ ID NO: 8029 - RNA, 20 nt, Artificial Sequence
  HTT spacer sequence ATCN PAM
acccagagggggcauggcac

SEQ ID NO: 8030 - RNA, 20 nt, Artificial Sequence
  HTT spacer sequence ATCN PAM
gaccgaccucugggcaaccc

SEQ ID NO: 8031 - RNA, 20 nt, Artificial Sequence
  HTT spacer sequence ATCN PAM
ccucaucugaccgaccucug

SEQ ID NO: 8032 - RNA, 20 nt, Artificial Sequence
  HTT spacer sequence ATCN PAM
gggccucugagcggagagga

SEQ ID NO: 8033 - RNA, 20 nt, Artificial Sequence
  HTT spacer sequence ATCN PAM
agggaggcuuaugaggggcc

SEQ ID NO: 8034 - RNA, 20 nt, Artificial Sequence
  HTT spacer sequence ATCN PAM
acaagggagguggucuccag

SEQ ID NO: 8035 - RNA, 20 nt, Artificial Sequence
  HTT spacer sequence ATCN PAM
ccacugguaacaaaaagaac

SEQ ID NO: 8036 - RNA, 20 nt, Artificial Sequence
  HTT spacer sequence ATCN PAM
gggcccuucccagaaggaaa

SEQ ID NO: 8037 - RNA, 20 nt, Artificial Sequence
  HTT spacer sequence ATCN PAM
ugagcacgucuuucuguuau

SEQ ID NO: 8038 - RNA, 20 nt, Artificial Sequence
  HTT spacer sequence ATCN PAM
aagggcugcucagccacagc

SEQ ID NO: 8039 - RNA, 20 nt, Artificial Sequence
  HTT spacer sequence ATCN PAM
uguggagaguguggccccag

SEQ ID NO: 8040 - RNA, 20 nt, Artificial Sequence
  HTT spacer sequence ATCN PAM
agcucagaaaagccaccggg

SEQ ID NO: 8041 - RNA, 20 nt, Artificial Sequence
  HTT spacer sequence ATCN PAM
cucggguuucugaguuucag

SEQ ID NO: 8042 - RNA, 20 nt, Artificial Sequence
  HTT spacer sequence ATCN PAM
ggcccaagacauggacugcu

SEQ ID NO: 8043 - RNA, 20 nt, Artificial Sequence
  HTT spacer sequence ATCN PAM
gcccgggggcaggcgcggaa

SEQ ID NO: 8044 - RNA, 20 nt, Artificial Sequence
  HTT spacer sequence ATCN PAM
uugcucucggugggacugag

SEQ ID NO: 8045 - RNA, 20 nt, Artificial Sequence
  HTT spacer sequence ATCN PAM
accaccaggaggcucugcuc

SEQ ID NO: 8046 - RNA, 20 nt, Artificial Sequence
  HTT spacer sequence ATCN PAM
cagcuccgggcugaagaccg

SEQ ID NO: 8047 - RNA, 20 nt, Artificial Sequence
  HTT spacer sequence ATCN PAM
ucuccccauagaaacaucaa

SEQ ID NO: 8048 - RNA, 20 nt, Artificial Sequence
  HTT spacer sequence ATCN PAM
agaacagggcgaccuucccu

SEQ ID NO: 8049 - RNA, 20 nt, Artificial Sequence
  HTT spacer sequence ATCN PAM
gagagcugggguucagcucu

SEQ ID NO: 8050 - RNA, 20 nt, Artificial Sequence
  HTT spacer sequence ATCN PAM
ggagccucguccugggcugc

SEQ ID NO: 8051 - RNA, 20 nt, Artificial Sequence
  HTT spacer sequence ATCN PAM
ccaagggcagcccaggacga

SEQ ID NO: 8052 - RNA, 20 nt, Artificial Sequence
  HTT spacer sequence CTCN PAM
aaaacugaaauccaaagaaa

SEQ ID NO: 8053 - RNA, 20 nt, Artificial Sequence
  HTT spacer sequence CTCN PAM
ccaggaagccgguguaaaau

SEQ ID NO: 8054 - RNA, 20 nt, Artificial Sequence
  HTT spacer sequence CTCN PAM
cccaccagaaaggugguauu

SEQ ID NO: 8055 - RNA, 20 nt, Artificial Sequence
  HTT spacer sequence CTCN PAM
cccccaccagaaagguggua

SEQ ID NO: 8056 - RNA, 20 nt, Artificial Sequence
  HTT spacer sequence CTCN PAM
agcugugcugcgcuuggcuc

SEQ ID NO: 8057 - RNA, 20 nt, Artificial Sequence
  HTT spacer sequence CTCN PAM
gccacggguggguuuugcuc

SEQ ID NO: 8058 - RNA, 20 nt, Artificial Sequence
  HTT spacer sequence CTCN PAM
aagucucugccacggguggg

SEQ ID NO: 8059 - RNA, 20 nt, Artificial Sequence
  HTT spacer sequence CTCN PAM
cuaagucucugccacgggug

SEQ ID NO: 8060 - RNA, 20 nt, Artificial Sequence
  HTT spacer sequence CTCN PAM
auggacaaggaacauggguc

SEQ ID NO: 8061 - RNA, 20 nt, Artificial Sequence
  HTT spacer sequence CTCN PAM
cuccagcaggaaaacaauga

SEQ ID NO: 8062 - RNA, 20 nt, Artificial Sequence
  HTT spacer sequence CTCN PAM
agcaggaaaacaaugagaaa

SEQ ID NO: 8063 - RNA, 20 nt, Artificial Sequence
  HTT spacer sequence CTCN PAM
uuguuuuccugcuggaggga

SEQ ID NO: 8064 - RNA, 20 nt, Artificial Sequence
  HTT spacer sequence CTCN PAM
uccauuucucauuguuuucc

SEQ ID NO: 8065 - RNA, 20 nt, Artificial Sequence
  HTT spacer sequence CTCN PAM
uucaaacacuugacuugccc

SEQ ID NO: 8066 - RNA, 20 nt, Artificial Sequence
  HTT spacer sequence CTCN PAM
uguaaaauccgaugacaguc

SEQ ID NO: 8067 - RNA, 20 nt, Artificial Sequence
  HTT spacer sequence CTCN PAM
uuuccugcaggaaggcacug

SEQ ID NO: 8068 - RNA, 20 nt, Artificial Sequence
  HTT spacer sequence CTCN PAM
ggggucccgcggacaggagu

SEQ ID NO: 8069 - RNA, 20 nt, Artificial Sequence
  HTT spacer sequence CTCN PAM
uguccgcgggaccccagagc

SEQ ID NO: 8070 - RNA, 20 nt, Artificial Sequence
  HTT spacer sequence CTCN PAM
uggcuguagagguucgagca

SEQ ID NO: 8071 - RNA, 20 nt, Artificial Sequence
  HTT spacer sequence CTCN PAM
acagccaggaggaagcaggg

SEQ ID NO: 8072 - RNA, 20 nt, Artificial Sequence
  HTT spacer sequence CTCN PAM
aaccucuacagccaggagga

SEQ ID NO: 8073 - RNA, 20 nt, Artificial Sequence
  HTT spacer sequence CTCN PAM
agacaagucaccuugcucga

SEQ ID NO: 8074 - RNA, 20 nt, Artificial Sequence
  HTT spacer sequence CTCN PAM
caccucagugccuuaacgga

SEQ ID NO: 8075 - RNA, 20 nt, Artificial Sequence
  HTT spacer sequence CTCN PAM
gugccuuaacggauagaagc

SEQ ID NO: 8076 - RNA, 20 nt, Artificial Sequence
  HTT spacer sequence CTCN PAM
uccccucacaucacagugca

SEQ ID NO: 8077 - RNA, 20 nt, Artificial Sequence
  HTT spacer sequence CTCN PAM
caucacagugcagcacaagu

SEQ ID NO: 8078 - RNA, 20 nt, Artificial Sequence
  HTT spacer sequence CTCN PAM
gguggcagcggggaaggggc

SEQ ID NO: 8079 - RNA, 20 nt, Artificial Sequence
  HTT spacer sequence CTCN PAM
agggcucggguggcagcggg

SEQ ID NO: 8080 - RNA, 20 nt, Artificial Sequence
  HTT spacer sequence CTCN PAM
ccuagguccugggcauccag

SEQ ID NO: 8081 - RNA, 20 nt, Artificial Sequence
  HTT spacer sequence CTCN PAM
uagguccugggcauccagac

SEQ ID NO: 8082 - RNA, 20 nt, Artificial Sequence
  HTT spacer sequence CTCN PAM
cauggccugugccccccauu

SEQ ID NO: 8083 - RNA, 20 nt, Artificial Sequence
  HTT spacer sequence CTCN PAM
ugcuguccucccauggccug

SEQ ID NO: 8084 - RNA, 20 nt, Artificial Sequence
  HTT spacer sequence CTCN PAM
caugcuguccucccauggcc

SEQ ID NO: 8085 - RNA, 20 nt, Artificial Sequence
  HTT spacer sequence CTCN PAM
augguugucaggaccagggc

SEQ ID NO: 8086 - RNA, 20 nt, Artificial Sequence
  HTT spacer sequence CTCN PAM
ucuaugguugucaggaccag

SEQ ID NO: 8087 - RNA, 20 nt, Artificial Sequence
  HTT spacer sequence CTCN PAM
cguggugagugagcacaugg

SEQ ID NO: 8088 - RNA, 20 nt, Artificial Sequence
  HTT spacer sequence CTCN PAM
ccacgugagcaccugccucc

SEQ ID NO: 8089 - RNA, 20 nt, Artificial Sequence
  HTT spacer sequence CTCN PAM
cucaccacgugagcaccugc

SEQ ID NO: 8090 - RNA, 20 nt, Artificial Sequence
  HTT spacer sequence CTCN PAM
ccccuggggcgcaggcaggg

SEQ ID NO: 8091 - RNA, 20 nt, Artificial Sequence
  HTT spacer sequence CTCN PAM
gggggaccuguaaccagauc

SEQ ID NO: 8092 - RNA, 20 nt, Artificial Sequence
  HTT spacer sequence CTCN PAM
ggcauccccguggaucuggu

SEQ ID NO: 8093 - RNA, 20 nt, Artificial Sequence
  HTT spacer sequence CTCN PAM
gugggggccugccaccccug

SEQ ID NO: 8094 - RNA, 20 nt, Artificial Sequence
  HTT spacer sequence CTCN PAM
cagaauggccuggcuggagg

SEQ ID NO: 8095 - RNA, 20 nt, Artificial Sequence
  HTT spacer sequence CTCN PAM
gaauggccuggcuggaggaa

SEQ ID NO: 8096 - RNA, 20 nt, Artificial Sequence
  HTT spacer sequence CTCN PAM
agccaggccauucugagagu

SEQ ID NO: 8097 - RNA, 20 nt, Artificial Sequence
  HTT spacer sequence CTCN PAM
gagacuccaagaaacacuga

SEQ ID NO: 8098 - RNA, 20 nt, Artificial Sequence
  HTT spacer sequence CTCN PAM
gaggccaucacagcuuccag

SEQ ID NO: 8099 - RNA, 20 nt, Artificial Sequence
  HTT spacer sequence CTCN PAM
aagaaacacugacaugaaac

SEQ ID NO: 8100 - RNA, 20 nt, Artificial Sequence
  HTT spacer sequence CTCN PAM
accaaugaccccagucaaua

SEQ ID NO: 8101 - RNA, 20 nt, Artificial Sequence
  HTT spacer sequence CTCN PAM
caguaacagcucaaccaaug

SEQ ID NO: 8102 - RNA, 20 nt, Artificial Sequence
  HTT spacer sequence CTCN PAM
guccaagacucacaguaaca

SEQ ID NO: 8103 - RNA, 20 nt, Artificial Sequence
  HTT spacer sequence CTCN PAM
ucacaugcucccaacaauuc

SEQ ID NO: 8104 - RNA, 20 nt, Artificial Sequence
  HTT spacer sequence CTCN PAM
caugcucccaacaauuccag

SEQ ID NO: 8105 - RNA, 20 nt, Artificial Sequence
  HTT spacer sequence CTCN PAM
caacaauuccagaaggcagg

SEQ ID NO: 8106 - RNA, 20 nt, Artificial Sequence
  HTT spacer sequence CTCN PAM
gcauccccaccugacacuag

SEQ ID NO: 8107 - RNA, 20 nt, Artificial Sequence
  HTT spacer sequence CTCN PAM
guuucccuagugucaggugg

SEQ ID NO: 8108 - RNA, 20 nt, Artificial Sequence
  HTT spacer sequence CTCN PAM
cacaccugugccucaguuuc

SEQ ID NO: 8109 - RNA, 20 nt, Artificial Sequence
  HTT spacer sequence CTCN PAM
ucccucccacaccugugccu

SEQ ID NO: 8110 - RNA, 20 nt, Artificial Sequence
  HTT spacer sequence CTCN PAM
agggccuggcugggaauucu

SEQ ID NO: 8111 - RNA, 20 nt, Artificial Sequence
  HTT spacer sequence CTCN PAM
aaugcuauuuagacacauga

SEQ ID NO: 8112 - RNA, 20 nt, Artificial Sequence
  HTT spacer sequence CTCN PAM
gcauuuauuuuucuucaaau

SEQ ID NO: 8113 - RNA, 20 nt, Artificial Sequence
  HTT spacer sequence CTCN PAM
ccauuauucaccuuugcacc

SEQ ID NO: 8114 - RNA, 20 nt, Artificial Sequence
  HTT spacer sequence CTCN PAM
aacaaaaccacacccuggcu

SEQ ID NO: 8115 - RNA, 20 nt, Artificial Sequence
  HTT spacer sequence CTCN PAM
cagaugugcaccuucacaca

SEQ ID NO: 8116 - RNA, 20 nt, Artificial Sequence
  HTT spacer sequence CTCN PAM
gaugugcaccuucacacauu

SEQ ID NO: 8117 - RNA, 20 nt, Artificial Sequence
  HTT spacer sequence CTCN PAM
aaaugugugaaggugcacau

SEQ ID NO: 8118 - RNA, 20 nt, Artificial Sequence
  HTT spacer sequence CTCN PAM
ccucuuaaggucgaacaaaa

SEQ ID NO: 8119 - RNA, 20 nt, Artificial Sequence
  HTT spacer sequence CTCN PAM
ucuuaaggucgaacaaaaug

SEQ ID NO: 8120 - RNA, 20 nt, Artificial Sequence
  HTT spacer sequence CTCN PAM
uaaggucgaacaaaaugacc

SEQ ID NO: 8121 - RNA, 20 nt, Artificial Sequence
  HTT spacer sequence CTCN PAM
gccuguggggcaggacacug

SEQ ID NO: 8122 - RNA, 20 nt, Artificial Sequence
  HTT spacer sequence CTCN PAM
guguccugccccacaggcug

SEQ ID NO: 8123 - RNA, 20 nt, Artificial Sequence
  HTT spacer sequence CTCN PAM
cccgucugcccugccugcug

SEQ ID NO: 8124 - RNA, 20 nt, Artificial Sequence
  HTT spacer sequence CTCN PAM
gcaggcagggcagacggggg

SEQ ID NO: 8125 - RNA, 20 nt, Artificial Sequence
  HTT spacer sequence CTCN PAM
cgacucucugccucugacuc

SEQ ID NO: 8126 - RNA, 20 nt, Artificial Sequence
  HTT spacer sequence CTCN PAM
acucucugccucugacucgc

SEQ ID NO: 8127 - RNA, 20 nt, Artificial Sequence
  HTT spacer sequence CTCN PAM
cugccucugacucgcccauu

SEQ ID NO: 8128 - RNA, 20 nt, Artificial Sequence
  HTT spacer sequence CTCN PAM
gccucugacucgcccauuua

SEQ ID NO: 8129 - RNA, 20 nt, Artificial Sequence
  HTT spacer sequence CTCN PAM
gacucgcccauuuaacagaa

SEQ ID NO: 8130 - RNA, 20 nt, Artificial Sequence
  HTT spacer sequence CTCN PAM
cccauuuaacagaaaccaua

SEQ ID NO: 8131 - RNA, 20 nt, Artificial Sequence
  HTT spacer sequence CTCN PAM
uucccuggcagggcagggcu

SEQ ID NO: 8132 - RNA, 20 nt, Artificial Sequence
  HTT spacer sequence CTCN PAM
ccuucccuggcagggcaggg

SEQ ID NO: 8133 - RNA, 20 nt, Artificial Sequence
  HTT spacer sequence CTCN PAM
gggcucuccuucccuggcag

SEQ ID NO: 8134 - RNA, 20 nt, Artificial Sequence
  HTT spacer sequence CTCN PAM
gucaucacucagggcucucc

SEQ ID NO: 8135 - RNA, 20 nt, Artificial Sequence
  HTT spacer sequence CTCN PAM
cugcgccgacucugucauca

SEQ ID NO: 8136 - RNA, 20 nt, Artificial Sequence
  HTT spacer sequence CTCN PAM
cccucugucugcagcccagg

SEQ ID NO: 8137 - RNA, 20 nt, Artificial Sequence
  HTT spacer sequence CTCN PAM
gucugcagcccaggcucuua

SEQ ID NO: 8138 - RNA, 20 nt, Artificial Sequence
  HTT spacer sequence CTCN PAM
uaauugcccugcaaaugccg

SEQ ID NO: 8139 - RNA, 20 nt, Artificial Sequence
  HTT spacer sequence CTCN PAM
caugccuugccuugugccag

SEQ ID NO: 8140 - RNA, 20 nt, Artificial Sequence
  HTT spacer sequence CTCN PAM
cccaaccacaaacagaaacc

SEQ ID NO: 8141 - RNA, 20 nt, Artificial Sequence
  HTT spacer sequence CTCN PAM
gcaaagcgcaggaaaugaga

SEQ ID NO: 8142 - RNA, 20 nt, Artificial Sequence
  HTT spacer sequence CTCN PAM
uuuccugcgcuuugcugagg

SEQ ID NO: 8143 - RNA, 20 nt, Artificial Sequence
  HTT spacer sequence CTCN PAM
cgucucauuuccugcgcuuu

SEQ ID NO: 8144 - RNA, 20 nt, Artificial Sequence
  HTT spacer sequence CTCN PAM
gcgggcagcucacgucucau

SEQ ID NO: 8145 - RNA, 20 nt, Artificial Sequence
  HTT spacer sequence CTCN PAM
cagcgggcagcucacgucuc

SEQ ID NO: 8146 - RNA, 20 nt, Artificial Sequence
  HTT spacer sequence CTCN PAM
uaggaagugacucucagcgg

SEQ ID NO: 8147 - RNA, 20 nt, Artificial Sequence
  HTT spacer sequence CTCN PAM
cuggccucuuaggaagugac

SEQ ID NO: 8148 - RNA, 20 nt, Artificial Sequence
  HTT spacer sequence CTCN PAM
agagcacaugggcucucagg

SEQ ID NO: 8149 - RNA, 20 nt, Artificial Sequence
  HTT spacer sequence CTCN PAM
ugagguggcuuuguagaacc

SEQ ID NO: 8150 - RNA, 20 nt, Artificial Sequence
  HTT spacer sequence CTCN PAM
caggcguccgcacugcacuc

SEQ ID NO: 8151 - RNA, 20 nt, Artificial Sequence
  HTT spacer sequence CTCN PAM
ggcguccgcacugcacuccc

SEQ ID NO: 8152 - RNA, 20 nt, Artificial Sequence
  HTT spacer sequence CTCN PAM
cgcugaccacagccugagug

SEQ ID NO: 8153 - RNA, 20 nt, Artificial Sequence
  HTT spacer sequence CTCN PAM
ggcuguggucagcgggagug

SEQ ID NO: 8154 - RNA, 20 nt, Artificial Sequence
  HTT spacer sequence CTCN PAM
cagaaagccuuccuuuuucc

SEQ ID NO: 8155 - RNA, 20 nt, Artificial Sequence
  HTT spacer sequence CTCN PAM
gcauccaggucaugccaccc

SEQ ID NO: 8156 - RNA, 20 nt, Artificial Sequence
  HTT spacer sequence CTCN PAM
cccggcggcucugcauccag

SEQ ID NO: 8157 - RNA, 20 nt, Artificial Sequence
  HTT spacer sequence CTCN PAM
ggggcucccccggcggcucu

SEQ ID NO: 8158 - RNA, 20 nt, Artificial Sequence
  HTT spacer sequence CTCN PAM
gaauucagaaggcucugggg

SEQ ID NO: 8159 - RNA, 20 nt, Artificial Sequence
  HTT spacer sequence CTCN PAM
gcugugugugguucucugaa

SEQ ID NO: 8160 - RNA, 20 nt, Artificial Sequence
  HTT spacer sequence CTCN PAM
cagcugugugugguucucug

SEQ ID NO: 8161 - RNA, 20 nt, Artificial Sequence
  HTT spacer sequence CTCN PAM
cucagcugugugugguucuc

SEQ ID NO: 8162 - RNA, 20 nt, Artificial Sequence
  HTT spacer sequence CTCN PAM
gacucagcacugccaagcgu

SEQ ID NO: 8163 - RNA, 20 nt, Artificial Sequence
  HTT spacer sequence CTCN PAM
gcacugccaagcguccuccc

SEQ ID NO: 8164 - RNA, 20 nt, Artificial Sequence
  HTT spacer sequence CTCN PAM
caggacuuccugagcccccu

SEQ ID NO: 8165 - RNA, 20 nt, Artificial Sequence
  HTT spacer sequence CTCN PAM
ggaaguccugggaggacgcu

SEQ ID NO: 8166 - RNA, 20 nt, Artificial Sequence
  HTT spacer sequence CTCN PAM
gugccaggcgcccgccagga

SEQ ID NO: 8167 - RNA, 20 nt, Artificial Sequence
  HTT spacer sequence CTCN PAM
uggcgggcgccuggcacgga

SEQ ID NO: 8168 - RNA, 20 nt, Artificial Sequence
  HTT spacer sequence CTCN PAM
ccuggcgggcgccuggcacg

SEQ ID NO: 8169 - RNA, 20 nt, Artificial Sequence
  HTT spacer sequence CTCN PAM
cucuccuggcgggcgccugg

SEQ ID NO: 8170 - RNA, 20 nt, Artificial Sequence
  HTT spacer sequence CTCN PAM
gccugugcagcauccggaac

SEQ ID NO: 8171 - RNA, 20 nt, Artificial Sequence
  HTT spacer sequence CTCN PAM
ccucagagagaaacgugcca

SEQ ID NO: 8172 - RNA, 20 nt, Artificial Sequence
  HTT spacer sequence CTCN PAM
gagagaaacgugccaggcca

SEQ ID NO: 8173 - RNA, 20 nt, Artificial Sequence
  HTT spacer sequence CTCN PAM
gaggugagcugcuggaaagc

SEQ ID NO: 8174 - RNA, 20 nt, Artificial Sequence
  HTT spacer sequence CTCN PAM
cugaggugagcugcuggaaa

SEQ ID NO: 8175 - RNA, 20 nt, Artificial Sequence
  HTT spacer sequence CTCN PAM
aagugcccagcuguggcagg

SEQ ID NO: 8176 - RNA, 20 nt, Artificial Sequence
  HTT spacer sequence CTCN PAM
aaucccaagucccuggaaca

SEQ ID NO: 8177 - RNA, 20 nt, Artificial Sequence
  HTT spacer sequence CTCN PAM
cauaggccccacucgugcca

SEQ ID NO: 8178 - RNA, 20 nt, Artificial Sequence
  HTT spacer sequence CTCN PAM
uaggccccacucgugccagg

SEQ ID NO: 8179 - RNA, 20 nt, Artificial Sequence
  HTT spacer sequence CTCN PAM
ugccaggccccaguguccac

SEQ ID NO: 8180 - RNA, 20 nt, Artificial Sequence
  HTT spacer sequence CTCN PAM
cacagccuuccaagccccag

SEQ ID NO: 8181 - RNA, 20 nt, Artificial Sequence
  HTT spacer sequence CTCN PAM
gucaucgccccucacccuca

SEQ ID NO: 8182 - RNA, 20 nt, Artificial Sequence
  HTT spacer sequence CTCN PAM
cccucagccaccagugggga

SEQ ID NO: 8183 - RNA, 20 nt, Artificial Sequence
  HTT spacer sequence CTCN PAM
gccaccaguggggagcccca

SEQ ID NO: 8184 - RNA, 20 nt, Artificial Sequence
  HTT spacer sequence CTCN PAM
ccacugguggcugaggguga

SEQ ID NO: 8185 - RNA, 20 nt, Artificial Sequence
  HTT spacer sequence CTCN PAM
uuuuggggcuccccacuggu

SEQ ID NO: 8186 - RNA, 20 nt, Artificial Sequence
  HTT spacer sequence CTCN PAM
ucucugcacuucgggaccaa

SEQ ID NO: 8187 - RNA, 20 nt, Artificial Sequence
  HTT spacer sequence CTCN PAM
gcacuucgggaccaaacaga

SEQ ID NO: 8188 - RNA, 20 nt, Artificial Sequence
  HTT spacer sequence CTCN PAM
ggggcccgcccccaucugcc

SEQ ID NO: 8189 - RNA, 20 nt, Artificial Sequence
  HTT spacer sequence CTCN PAM
caaccagguggccaagguac

SEQ ID NO: 8190 - RNA, 20 nt, Artificial Sequence
  HTT spacer sequence CTCN PAM
accagguggccaagguacag

SEQ ID NO: 8191 - RNA, 20 nt, Artificial Sequence
  HTT spacer sequence CTCN PAM
guaccuuggccaccugguug

SEQ ID NO: 8192 - RNA, 20 nt, Artificial Sequence
  HTT spacer sequence CTCN PAM
cuucaagggcccaugaccaa

SEQ ID NO: 8193 - RNA, 20 nt, Artificial Sequence
  HTT spacer sequence CTCN PAM
ucaagggcccaugaccaagu

SEQ ID NO: 8194 - RNA, 20 nt, Artificial Sequence
  HTT spacer sequence CTCN PAM
ggugacugaggcuggguuaa

SEQ ID NO: 8195 - RNA, 20 nt, Artificial Sequence
  HTT spacer sequence CTCN PAM
gucaccugaggguuuucggg

SEQ ID NO: 8196 - RNA, 20 nt, Artificial Sequence
  HTT spacer sequence CTCN PAM
uguuaacccagccucaguca

SEQ ID NO: 8197 - RNA, 20 nt, Artificial Sequence
  HTT spacer sequence CTCN PAM
guacugcucaguccuggcag

SEQ ID NO: 8198 - RNA, 20 nt, Artificial Sequence
  HTT spacer sequence CTCN PAM
guccuggcagguucccacaa

SEQ ID NO: 8199 - RNA, 20 nt, Artificial Sequence
  HTT spacer sequence CTCN PAM
ggcuucucuuggcaaaggcc

SEQ ID NO: 8200 - RNA, 20 nt, Artificial Sequence
  HTT spacer sequence CTCN PAM
uggcaaaggccaugucaucg

SEQ ID NO: 8201 - RNA, 20 nt, Artificial Sequence
  HTT spacer sequence CTCN PAM
guaaggcagauuuauaagga

SEQ ID NO: 8202 - RNA, 20 nt, Artificial Sequence
  HTT spacer sequence CTCN PAM
uacaaagcggggggacaaga

SEQ ID NO: 8203 - RNA, 20 nt, Artificial Sequence
  HTT spacer sequence CTCN PAM
gaaaacggucugggggugca

SEQ ID NO: 8204 - RNA, 20 nt, Artificial Sequence
  HTT spacer sequence CTCN PAM
cuugucugcacccccagacc

SEQ ID NO: 8205 - RNA, 20 nt, Artificial Sequence
  HTT spacer sequence CTCN PAM
ucucggagugcaagguugag

SEQ ID NO: 8206 - RNA, 20 nt, Artificial Sequence
  HTT spacer sequence CTCN PAM
gagugcaagguugagcaugg

SEQ ID NO: 8207 - RNA, 20 nt, Artificial Sequence
  HTT spacer sequence CTCN PAM
gagaagagcucgcuugucug

SEQ ID NO: 8208 - RNA, 20 nt, Artificial Sequence
  HTT spacer sequence CTCN PAM
accuugcacuccgagaagag

SEQ ID NO: 8209 - RNA, 20 nt, Artificial Sequence
  HTT spacer sequence CTCN PAM
guggguuaugcuggcugggu

SEQ ID NO: 8210 - RNA, 20 nt, Artificial Sequence
  HTT spacer sequence CTCN PAM
ucaaagauggaaaacacaaa

SEQ ID NO: 8211 - RNA, 20 nt, Artificial Sequence
  HTT spacer sequence CTCN PAM
aagauggaaaacacaaauuc

SEQ ID NO: 8212 - RNA, 20 nt, Artificial Sequence
  HTT spacer sequence CTCN PAM
ggaugaauuuguguuuucca

SEQ ID NO: 8213 - RNA, 20 nt, Artificial Sequence
  HTT spacer sequence CTCN PAM
uuggugauggccaggaaauc

SEQ ID NO: 8214 - RNA, 20 nt, Artificial Sequence
  HTT spacer sequence CTCN PAM
cccagguccagguaaguguc

SEQ ID NO: 8215 - RNA, 20 nt, Artificial Sequence
  HTT spacer sequence CTCN PAM
cagguccagguaagugucca

SEQ ID NO: 8216 - RNA, 20 nt, Artificial Sequence
  HTT spacer sequence CTCN PAM
cccccaugccgggaauucuc

SEQ ID NO: 8217 - RNA, 20 nt, Artificial Sequence
  HTT spacer sequence CTCN PAM
cccaugccgggaauucucac

SEQ ID NO: 8218 - RNA, 20 nt, Artificial Sequence
  HTT spacer sequence CTCN PAM
ccuccuagugaccaggaacu

SEQ ID NO: 8219 - RNA, 20 nt, Artificial Sequence
  HTT spacer sequence CTCN PAM
uagugaccaggaacuuccag

SEQ ID NO: 8220 - RNA, 20 nt, Artificial Sequence
  HTT spacer sequence CTCN PAM
gugcuguguuucuugcuugg

SEQ ID NO: 8221 - RNA, 20 nt, Artificial Sequence
  HTT spacer sequence CTCN PAM
cuugaaaagacuuuaaagaa

SEQ ID NO: 8222 - RNA, 20 nt, Artificial Sequence
  HTT spacer sequence CTCN PAM
ugaaaagacuuuaaagaaag

SEQ ID NO: 8223 - RNA, 20 nt, Artificial Sequence
  HTT spacer sequence CTCN PAM
uccugggaguguucaaaguc

SEQ ID NO: 8224 - RNA, 20 nt, Artificial Sequence
  HTT spacer sequence CTCN PAM
caggaagagacggugcagga

SEQ ID NO: 8225 - RNA, 20 nt, Artificial Sequence
  HTT spacer sequence CTCN PAM
ggaggcuaaggcaggagaau

SEQ ID NO: 8226 - RNA, 20 nt, Artificial Sequence
  HTT spacer sequence CTCN PAM
cgaguagcugggauuacagg

SEQ ID NO: 8227 - RNA, 20 nt, Artificial Sequence
  HTT spacer sequence CTCN PAM
ugccuuagccucccgaguag

SEQ ID NO: 8228 - RNA, 20 nt, Artificial Sequence
  HTT spacer sequence CTCN PAM
uggguucaaguaauucuccu

SEQ ID NO: 8229 - RNA, 20 nt, Artificial Sequence
  HTT spacer sequence CTCN PAM
gccuccuggguucaaguaau

SEQ ID NO: 8230 - RNA, 20 nt, Artificial Sequence
  HTT spacer sequence CTCN PAM
cugcaaccuccgccuccugg

SEQ ID NO: 8231 - RNA, 20 nt, Artificial Sequence
  HTT spacer sequence CTCN PAM
agccugggcgacagagcaag

SEQ ID NO: 8232 - RNA, 20 nt, Artificial Sequence
  HTT spacer sequence CTCN PAM
gucgcccaggcuugagugca

SEQ ID NO: 8233 - RNA, 20 nt, Artificial Sequence
  HTT spacer sequence CTCN PAM
gucucaaaaaaaaaaaaaaa

SEQ ID NO: 8234 - RNA, 20 nt, Artificial Sequence
  HTT spacer sequence CTCN PAM
aaaaaaaaaaaaaagaaaag

SEQ ID NO: 8235 - RNA, 20 nt, Artificial Sequence
  HTT spacer sequence CTCN PAM
cucuguugcccaggcuagag

SEQ ID NO: 8236 - RNA, 20 nt, Artificial Sequence
  HTT spacer sequence CTCN PAM
guugcccaggcuagagagca

SEQ ID NO: 8237 - RNA, 20 nt, Artificial Sequence
  HTT spacer sequence CTCN PAM
agccugggcaacagagugag

SEQ ID NO: 8238 - RNA, 20 nt, Artificial Sequence
  HTT spacer sequence CTCN PAM
cuagccugggcaacagagug

SEQ ID NO: 8239 - RNA, 20 nt, Artificial Sequence
  HTT spacer sequence CTCN PAM
aaccccugagcuuaagugau

SEQ ID NO: 8240 - RNA, 20 nt, Artificial Sequence
  HTT spacer sequence CTCN PAM
gggguuggaggcugcaguaa

SEQ ID NO: 8241 - RNA, 20 nt, Artificial Sequence
  HTT spacer sequence CTCN PAM
cacauuauccuccugaguag

SEQ ID NO: 8242 - RNA, 20 nt, Artificial Sequence
  HTT spacer sequence CTCN PAM
ugaguagcugagacuacagg

SEQ ID NO: 8243 - RNA, 20 nt, Artificial Sequence
  HTT spacer sequence CTCN PAM
ggaggauaaugugggagaau

SEQ ID NO: 8244 - RNA, 20 nt, Artificial Sequence
  HTT spacer sequence CTCN PAM
gcuacucaggaggauaaugu

SEQ ID NO: 8245 - RNA, 20 nt, Artificial Sequence
  HTT spacer sequence CTCN PAM
acaaaaauauuaaaaaauca

SEQ ID NO: 8246 - RNA, 20 nt, Artificial Sequence
  HTT spacer sequence CTCN PAM
cugugaugcccaggcugguc

SEQ ID NO: 8247 - RNA, 20 nt, Artificial Sequence
  HTT spacer sequence CTCN PAM
ugggcucaagcagucaccca

SEQ ID NO: 8248 - RNA, 20 nt, Artificial Sequence
  HTT spacer sequence CTCN PAM
agcagucacccaccucagcc

SEQ ID NO: 8249 - RNA, 20 nt, Artificial Sequence
  HTT spacer sequence CTCN PAM
gccucccaaagcacuaggau

SEQ ID NO: 8250 - RNA, 20 nt, Artificial Sequence
  HTT spacer sequence CTCN PAM
caaagcacuaggauuacagg

SEQ ID NO: 8251 - RNA, 20 nt, Artificial Sequence
  HTT spacer sequence CTCN PAM
caccuguaauccuagugcuu

SEQ ID NO: 8252 - RNA, 20 nt, Artificial Sequence
  HTT spacer sequence CTCN PAM
ugcuaaaagggcuuccucuc

SEQ ID NO: 8253 - RNA, 20 nt, Artificial Sequence
  HTT spacer sequence CTCN PAM
cugaacuucccuaccuuucu

SEQ ID NO: 8254 - RNA, 20 nt, Artificial Sequence
  HTT spacer sequence CTCN PAM
gaacuucccuaccuuucuuc

SEQ ID NO: 8255 - RNA, 20 nt, Artificial Sequence
  HTT spacer sequence CTCN PAM
auguuggcaguccuacuccc

SEQ ID NO: 8256 - RNA, 20 nt, Artificial Sequence
  HTT spacer sequence CTCN PAM
caauuaaccuggggcugucu

SEQ ID NO: 8257 - RNA, 20 nt, Artificial Sequence
  HTT spacer sequence CTCN PAM
caaugacugcagaucuuaua

SEQ ID NO: 8258 - RNA, 20 nt, Artificial Sequence
  HTT spacer sequence CTCN PAM
acaccaauauuccugguccc

SEQ ID NO: 8259 - RNA, 20 nt, Artificial Sequence
  HTT spacer sequence CTCN PAM
cucaacaccaauauuccugg

SEQ ID NO: 8260 - RNA, 20 nt, Artificial Sequence
  HTT spacer sequence CTCN PAM
ggccacccauccacuuucca

SEQ ID NO: 8261 - RNA, 20 nt, Artificial Sequence
  HTT spacer sequence CTCN PAM
cucuggccacccauccacuu

SEQ ID NO: 8262 - RNA, 20 nt, Artificial Sequence
  HTT spacer sequence CTCN PAM
cccucuggccacccauccac

SEQ ID NO: 8263 - RNA, 20 nt, Artificial Sequence
  HTT spacer sequence CTCN PAM
cuuuuaccuaucagcucucc

SEQ ID NO: 8264 - RNA, 20 nt, Artificial Sequence
  HTT spacer sequence CTCN PAM
uggcuugggaagcaggaguc

SEQ ID NO: 8265 - RNA, 20 nt, Artificial Sequence
  HTT spacer sequence CTCN PAM
ugcuucccaagccaggagcg

SEQ ID NO: 8266 - RNA, 20 nt, Artificial Sequence
  HTT spacer sequence CTCN PAM
cagaucuacuggucaguuug

SEQ ID NO: 8267 - RNA, 20 nt, Artificial Sequence
  HTT spacer sequence CTCN PAM
gaucuacuggucaguuugau

SEQ ID NO: 8268 - RNA, 20 nt, Artificial Sequence
  HTT spacer sequence CTCN PAM
cacuguccucaguguuguca

SEQ ID NO: 8269 - RNA, 20 nt, Artificial Sequence
  HTT spacer sequence CTCN PAM
guguugucagccacaaaaua

SEQ ID NO: 8270 - RNA, 20 nt, Artificial Sequence
  HTT spacer sequence CTCN PAM
ugcuaaucauucucuacuua

SEQ ID NO: 8271 - RNA, 20 nt, Artificial Sequence
  HTT spacer sequence CTCN PAM
acuuauuuuugauuuuaaua

SEQ ID NO: 8272 - RNA, 20 nt, Artificial Sequence
  HTT spacer sequence CTCN PAM
guguaaauucauaaacuggc

SEQ ID NO: 8273 - RNA, 20 nt, Artificial Sequence
  HTT spacer sequence CTCN PAM
aguauaugucucaguguaaa

SEQ ID NO: 8274 - RNA, 20 nt, Artificial Sequence
  HTT spacer sequence CTCN PAM
gagcagaucuguuugggagg

SEQ ID NO: 8275 - RNA, 20 nt, Artificial Sequence
  HTT spacer sequence CTCN PAM
gaggcagaauuccaaacuca

SEQ ID NO: 8276 - RNA, 20 nt, Artificial Sequence
  HTT spacer sequence CTCN PAM
caaacagaucugcucagagg

SEQ ID NO: 8277 - RNA, 20 nt, Artificial Sequence
  HTT spacer sequence CTCN PAM
aaugcuagucacugaggaua

SEQ ID NO: 8278 - RNA, 20 nt, Artificial Sequence
  HTT spacer sequence CTCN PAM
gugacuagcauuagaggccu

SEQ ID NO: 8279 - RNA, 20 nt, Artificial Sequence
  HTT spacer sequence CTCN PAM
ugcaggugcagccuaggguc

SEQ ID NO: 8280 - RNA, 20 nt, Artificial Sequence
  HTT spacer sequence CTCN PAM
ccugcaggugcagccuaggg

SEQ ID NO: 8281 - RNA, 20 nt, Artificial Sequence
  HTT spacer sequence CTCN PAM
aacuauucgacagguccugg

SEQ ID NO: 8282 - RNA, 20 nt, Artificial Sequence
  HTT spacer sequence CTCN PAM
aguagcucuguaccuguaau

SEQ ID NO: 8283 - RNA, 20 nt, Artificial Sequence
  HTT spacer sequence CTCN PAM
guaccuguaauauaggaauc

SEQ ID NO: 8284 - RNA, 20 nt, Artificial Sequence
  HTT spacer sequence CTCN PAM
ggauccugguauccagggau

SEQ ID NO: 8285 - RNA, 20 nt, Artificial Sequence
  HTT spacer sequence CTCN PAM
aaacuuugugccuguggucc

SEQ ID NO: 8286 - RNA, 20 nt, Artificial Sequence
  HTT spacer sequence CTCN PAM
gccuucccaguagcugggac

SEQ ID NO: 8287 - RNA, 20 nt, Artificial Sequence
  HTT spacer sequence CTCN PAM
uugcucagccuucccaguag

SEQ ID NO: 8288 - RNA, 20 nt, Artificial Sequence
  HTT spacer sequence CTCN PAM
ggaguucaaggcaagccugg

SEQ ID NO: 8289 - RNA, 20 nt, Artificial Sequence
  HTT spacer sequence CTCN PAM
ugaguucaagugauccuccu

SEQ ID NO: 8290 - RNA, 20 nt, Artificial Sequence
  HTT spacer sequence CTCN PAM
cuauguugcccaggcuugcc

SEQ ID NO: 8291 - RNA, 20 nt, Artificial Sequence
  HTT spacer sequence CTCN PAM
cugcaucuuaccgcauuuuu

SEQ ID NO: 8292 - RNA, 20 nt, Artificial Sequence
  HTT spacer sequence CTCN PAM
cacugcaucuuaccgcauuu

SEQ ID NO: 8293 - RNA, 20 nt, Artificial Sequence
  HTT spacer sequence CTCN PAM
uuugauuaguuucccucaaa

SEQ ID NO: 8294 - RNA, 20 nt, Artificial Sequence
  HTT spacer sequence CTCN PAM
aaaugaacuuucauuuuugg

SEQ ID NO: 8295 - RNA, 20 nt, Artificial Sequence
  HTT spacer sequence CTCN PAM
ggacacagcagugaugccuu

SEQ ID NO: 8296 - RNA, 20 nt, Artificial Sequence
  HTT spacer sequence CTCN PAM
caccucgggacacagcagug

SEQ ID NO: 8297 - RNA, 20 nt, Artificial Sequence
  HTT spacer sequence CTCN PAM
uuagaaaagucuggcauuua

SEQ ID NO: 8298 - RNA, 20 nt, Artificial Sequence
  HTT spacer sequence CTCN PAM
gggugugguggugggcgccu

SEQ ID NO: 8299 - RNA, 20 nt, Artificial Sequence
  HTT spacer sequence CTCN PAM
acuaaaaauacaaaaaauuc

SEQ ID NO: 8300 - RNA, 20 nt, Artificial Sequence
  HTT spacer sequence CTCN PAM
aucuccugaccuugugaucc

SEQ ID NO: 8301 - RNA, 20 nt, Artificial Sequence
  HTT spacer sequence CTCN PAM
ugaccuugugauccaccugc

SEQ ID NO: 8302 - RNA, 20 nt, Artificial Sequence
  HTT spacer sequence CTCN PAM
gccucccaaagugcugggau

SEQ ID NO: 8303 - RNA, 20 nt, Artificial Sequence
  HTT spacer sequence CTCN PAM
caaagugcugggauuacaag

SEQ ID NO: 8304 - RNA, 20 nt, Artificial Sequence
  HTT spacer sequence CTCN PAM
cgcuuguaaucccagcacuu

SEQ ID NO: 8305 - RNA, 20 nt, Artificial Sequence
  HTT spacer sequence CTCN PAM
cacgcuuguaaucccagcac

SEQ ID NO: 8306 - RNA, 20 nt, Artificial Sequence
  HTT spacer sequence CTCN PAM
aaaaaaaaaaaacagugucu

SEQ ID NO: 8307 - RNA, 20 nt, Artificial Sequence
  HTT spacer sequence CTCN PAM
agccugggcaacaaaagcaa

SEQ ID NO: 8308 - RNA, 20 nt, Artificial Sequence
  HTT spacer sequence CTCN PAM
gcucccugaaccuccagguu

SEQ ID NO: 8309 - RNA, 20 nt, Artificial Sequence
  HTT spacer sequence CTCN PAM
cugaaccuccagguucaggc

SEQ ID NO: 8310 - RNA, 20 nt, Artificial Sequence
  HTT spacer sequence CTCN PAM
agguucaggcgauuccccug

SEQ ID NO: 8311 - RNA, 20 nt, Artificial Sequence
  HTT spacer sequence CTCN PAM
gccucccgaguagcugggau

SEQ ID NO: 8312 - RNA, 20 nt, Artificial Sequence
  HTT spacer sequence CTCN PAM
cgaguagcugggauuacagg

SEQ ID NO: 8313 - RNA, 20 nt, Artificial Sequence
  HTT spacer sequence CTCN PAM
ggaggcugagacaggggaau

SEQ ID NO: 8314 - RNA, 20 nt, Artificial Sequence
  HTT spacer sequence CTCN PAM
acuaaacauacaaaauuauc

SEQ ID NO: 8315 - RNA, 20 nt, Artificial Sequence
  HTT spacer sequence CTCN PAM
ggugauccguccgccuuggc

SEQ ID NO: 8316 - RNA, 20 nt, Artificial Sequence
  HTT spacer sequence CTCN PAM
caaagugcugggauuacagg

SEQ ID NO: 8317 - RNA, 20 nt, Artificial Sequence
  HTT spacer sequence CTCN PAM
ugccuguaaucccagcacuu

SEQ ID NO: 8318 - RNA, 20 nt, Artificial Sequence
  HTT spacer sequence CTCN PAM
cuggccgggcacaguggcuc

SEQ ID NO: 8319 - RNA, 20 nt, Artificial Sequence
  HTT spacer sequence CTCN PAM
caagcagcuaggacuacagg

SEQ ID NO: 8320 - RNA, 20 nt, Artificial Sequence
  HTT spacer sequence CTCN PAM
gccucccaagcagcuaggac

SEQ ID NO: 8321 - RNA, 20 nt, Artificial Sequence
  HTT spacer sequence CTCN PAM
cagguucaagcaauuauccc

SEQ ID NO: 8322 - RNA, 20 nt, Artificial Sequence
  HTT spacer sequence CTCN PAM
accucccagguucaagcaau

SEQ ID NO: 8323 - RNA, 20 nt, Artificial Sequence
  HTT spacer sequence CTCN PAM
cugcaaccuccaccucccag

SEQ ID NO: 8324 - RNA, 20 nt, Artificial Sequence
  HTT spacer sequence CTCN PAM
gccacccaggcuggugugca

SEQ ID NO: 8325 - RNA, 20 nt, Artificial Sequence
  HTT spacer sequence CTCN PAM
cucugccacccaggcuggug

SEQ ID NO: 8326 - RNA, 20 nt, Artificial Sequence
  HTT spacer sequence CTCN PAM
aaaaauaaauaauuuuuaaa

SEQ ID NO: 8327 - RNA, 20 nt, Artificial Sequence
  HTT spacer sequence CTCN PAM
ugccuguaaucucagcacuu

SEQ ID NO: 8328 - RNA, 20 nt, Artificial Sequence
  HTT spacer sequence CTCN PAM
gcacuuugggaggccgaagc

SEQ ID NO: 8329 - RNA, 20 nt, Artificial Sequence
  HTT spacer sequence CTCN PAM
caaagugcugagauuacagg

SEQ ID NO: 8330 - RNA, 20 nt, Artificial Sequence
  HTT spacer sequence CTCN PAM
agugauccaccagcuucggc

SEQ ID NO: 8331 - RNA, 20 nt, Artificial Sequence
  HTT spacer sequence CTCN PAM
caaccucaagugauccacca

SEQ ID NO: 8332 - RNA, 20 nt, Artificial Sequence
  HTT spacer sequence CTCN PAM
auguugaucaggcuugucau

SEQ ID NO: 8333 - RNA, 20 nt, Artificial Sequence
  HTT spacer sequence CTCN PAM
acuaaaaagacaaaauuagc

SEQ ID NO: 8334 - RNA, 20 nt, Artificial Sequence
  HTT spacer sequence CTCN PAM
gauuccccaguagcuaggau

SEQ ID NO: 8335 - RNA, 20 nt, Artificial Sequence
  HTT spacer sequence CTCN PAM
ugccucagauuccccaguag

SEQ ID NO: 8336 - RNA, 20 nt, Artificial Sequence
  HTT spacer sequence CTCN PAM
uggguucaagugauucuccu

SEQ ID NO: 8337 - RNA, 20 nt, Artificial Sequence
  HTT spacer sequence CTCN PAM
cuccuggguucaagugauuc

SEQ ID NO: 8338 - RNA, 20 nt, Artificial Sequence
  HTT spacer sequence CTCN PAM
cccuccuggguucaagugau

SEQ ID NO: 8339 - RNA, 20 nt, Artificial Sequence
  HTT spacer sequence CTCN PAM
ggucacugcaaccucucccu

SEQ ID NO: 8340 - RNA, 20 nt, Artificial Sequence
  HTT spacer sequence CTCN PAM
agccugggcaacaagagcaa

SEQ ID NO: 8341 - RNA, 20 nt, Artificial Sequence
  HTT spacer sequence CTCN PAM
uguugcccaggcuggagugc

SEQ ID NO: 8342 - RNA, 20 nt, Artificial Sequence
  HTT spacer sequence CTCN PAM
gucucaaaaaaaaaaauaua

SEQ ID NO: 8343 - RNA, 20 nt, Artificial Sequence
  HTT spacer sequence CTCN PAM
aaaaaaaaaauauauauaua

SEQ ID NO: 8344 - RNA, 20 nt, Artificial Sequence
  HTT spacer sequence CTCN PAM
ugaccuuggguaaagggaaa

SEQ ID NO: 8345 - RNA, 20 nt, Artificial Sequence
  HTT spacer sequence CTCN PAM
caccauacacaaaaaucaau

SEQ ID NO: 8346 - RNA, 20 nt, Artificial Sequence
  HTT spacer sequence CTCN PAM
aggauagaaaaguagacgaa

SEQ ID NO: 8347 - RNA, 20 nt, Artificial Sequence
  HTT spacer sequence CTCN PAM
cugaauuauuauagcauuug

SEQ ID NO: 8348 - RNA, 20 nt, Artificial Sequence
  HTT spacer sequence CTCN PAM
gaauuauuauagcauuuguu

SEQ ID NO: 8349 - RNA, 20 nt, Artificial Sequence
  HTT spacer sequence CTCN PAM
acaacaacaaaugcuauaau

SEQ ID NO: 8350 - RNA, 20 nt, Artificial Sequence
  HTT spacer sequence CTCN PAM
guugcccaggcuggaaugca

SEQ ID NO: 8351 - RNA, 20 nt, Artificial Sequence
  HTT spacer sequence CTCN PAM
ugccacugcauuccagccug

SEQ ID NO: 8352 - RNA, 20 nt, Artificial Sequence
  HTT spacer sequence CTCN PAM
uuguagccucaaccuccugg

SEQ ID NO: 8353 - RNA, 20 nt, Artificial Sequence
  HTT spacer sequence CTCN PAM
accuccugggcucaagcaau

SEQ ID NO: 8354 - RNA, 20 nt, Artificial Sequence
  HTT spacer sequence CTCN PAM
ugggcucaagcaaucuuccc

SEQ ID NO: 8355 - RNA, 20 nt, Artificial Sequence
  HTT spacer sequence CTCN PAM
agcaaucuucccaccucagc

SEQ ID NO: 8356 - RNA, 20 nt, Artificial Sequence
  HTT spacer sequence CTCN PAM
gccuccugaguggcugggac

SEQ ID NO: 8357 - RNA, 20 nt, Artificial Sequence
  HTT spacer sequence CTCN PAM
ugaguggcugggacuacagg

SEQ ID NO: 8358 - RNA, 20 nt, Artificial Sequence
  HTT spacer sequence CTCN PAM
ggaggcugaggugggaagau

SEQ ID NO: 8359 - RNA, 20 nt, Artificial Sequence
  HTT spacer sequence CTCN PAM
acaaaaaauuuaaaaauaag

SEQ ID NO: 8360 - RNA, 20 nt, Artificial Sequence
  HTT spacer sequence CTCN PAM
cucuguugcucaggcggucu

SEQ ID NO: 8361 - RNA, 20 nt, Artificial Sequence
  HTT spacer sequence CTCN PAM
guugcucaggcggucuugaa

SEQ ID NO: 8362 - RNA, 20 nt, Artificial Sequence
  HTT spacer sequence CTCN PAM
ggcggucuugaacuccuggg

SEQ ID NO: 8363 - RNA, 20 nt, Artificial Sequence
  HTT spacer sequence CTCN PAM
ugggcucaagcaacccuuuc

SEQ ID NO: 8364 - RNA, 20 nt, Artificial Sequence
  HTT spacer sequence CTCN PAM
agcaacccuuucacccaagc

SEQ ID NO: 8365 - RNA, 20 nt, Artificial Sequence
  HTT spacer sequence CTCN PAM
caaagugcugggauuacagg

SEQ ID NO: 8366 - RNA, 20 nt, Artificial Sequence
  HTT spacer sequence CTCN PAM
uguaaucccagcacuuuggg

SEQ ID NO: 8367 - RNA, 20 nt, Artificial Sequence
  HTT spacer sequence CTCN PAM
gccuaguauagcuuuuuaau

SEQ ID NO: 8368 - RNA, 20 nt, Artificial Sequence
  HTT spacer sequence CTCN PAM
gguauuccuuauagcaacac

SEQ ID NO: 8369 - RNA, 20 nt, Artificial Sequence
  HTT spacer sequence CTCN PAM
ugguucugcaagcuguguaa

SEQ ID NO: 8370 - RNA, 20 nt, Artificial Sequence
  HTT spacer sequence CTCN PAM
ccagaugcaaaugcugugca

SEQ ID NO: 8371 - RNA, 20 nt, Artificial Sequence
  HTT spacer sequence CTCN PAM
caccagaugcaaaugcugug

SEQ ID NO: 8372 - RNA, 20 nt, Artificial Sequence
  HTT spacer sequence CTCN PAM
gguuuuuuccacuuacggca

SEQ ID NO: 8373 - RNA, 20 nt, Artificial Sequence
  HTT spacer sequence CTCN PAM
ucaccuugugccguaagugg

SEQ ID NO: 8374 - RNA, 20 nt, Artificial Sequence
  HTT spacer sequence CTCN PAM
ucaugucaucuggacacacu

SEQ ID NO: 8375 - RNA, 20 nt, Artificial Sequence
  HTT spacer sequence CTCN PAM
caucaugucaucuggacaca

SEQ ID NO: 8376 - RNA, 20 nt, Artificial Sequence
  HTT spacer sequence CTCN PAM
ugcuuuuucucucaucaugu

SEQ ID NO: 8377 - RNA, 20 nt, Artificial Sequence
  HTT spacer sequence CTCN PAM
cuugcuuuuucucucaucau

SEQ ID NO: 8378 - RNA, 20 nt, Artificial Sequence
  HTT spacer sequence CTCN PAM
uuucccaucucucuugcuuu

SEQ ID NO: 8379 - RNA, 20 nt, Artificial Sequence
  HTT spacer sequence CTCN PAM
cagggaacuaauggaaugag

SEQ ID NO: 8380 - RNA, 20 nt, Artificial Sequence
  HTT spacer sequence CTCN PAM
gggaacuaauggaaugagaa

SEQ ID NO: 8381 - RNA, 20 nt, Artificial Sequence
  HTT spacer sequence CTCN PAM
uuccauuaguucccugagag

SEQ ID NO: 8382 - RNA, 20 nt, Artificial Sequence
  HTT spacer sequence CTCN PAM
cucagugcuggaaagacagc

SEQ ID NO: 8383 - RNA, 20 nt, Artificial Sequence
  HTT spacer sequence CTCN PAM
gugcuggaaagacagcacca

SEQ ID NO: 8384 - RNA, 20 nt, Artificial Sequence
  HTT spacer sequence CTCN PAM
ugaauggcuuggugcugucu

SEQ ID NO: 8385 - RNA, 20 nt, Artificial Sequence
  HTT spacer sequence CTCN PAM
ugacccaugcacuucccauu

SEQ ID NO: 8386 - RNA, 20 nt, Artificial Sequence
  HTT spacer sequence CTCN PAM
agcacugggugugguggcac

SEQ ID NO: 8387 - RNA, 20 nt, Artificial Sequence
  HTT spacer sequence CTCN PAM
gcugcucaggagucugaggu

SEQ ID NO: 8388 - RNA, 20 nt, Artificial Sequence
  HTT spacer sequence CTCN PAM
ggagucugaggugaaaggau

SEQ ID NO: 8389 - RNA, 20 nt, Artificial Sequence
  HTT spacer sequence CTCN PAM
ugagcagcugagaccacagg

SEQ ID NO: 8390 - RNA, 20 nt, Artificial Sequence
  HTT spacer sequence CTCN PAM
gacuccugagcagcugagac

SEQ ID NO: 8391 - RNA, 20 nt, Artificial Sequence
  HTT spacer sequence CTCN PAM
agcgauccuuucaccucaga

SEQ ID NO: 8392 - RNA, 20 nt, Artificial Sequence
  HTT spacer sequence CTCN PAM
aacuucugggcucaagcgau

SEQ ID NO: 8393 - RNA, 20 nt, Artificial Sequence
  HTT spacer sequence CTCN PAM
ucucugcuaaaaauacaaaa

SEQ ID NO: 8394 - RNA, 20 nt, Artificial Sequence
  HTT spacer sequence CTCN PAM
gcuaaaaauacaaaaauuag

SEQ ID NO: 8395 - RNA, 20 nt, Artificial Sequence
  HTT spacer sequence CTCN PAM
gucugccaaguagcuggaac

SEQ ID NO: 8396 - RNA, 20 nt, Artificial Sequence
  HTT spacer sequence CTCN PAM
ugccucagucugccaaguag

SEQ ID NO: 8397 - RNA, 20 nt, Artificial Sequence
  HTT spacer sequence CTCN PAM
accacccgggcuaucaagug

SEQ ID NO: 8398 - RNA, 20 nt, Artificial Sequence
  HTT spacer sequence CTCN PAM
cugcaaccuccaccacccgg

SEQ ID NO: 8399 - RNA, 20 nt, Artificial Sequence
  HTT spacer sequence CTCN PAM
guugccuaggcuggacugca

SEQ ID NO: 8400 - RNA, 20 nt, Artificial Sequence
  HTT spacer sequence CTCN PAM
aaauauguaaauaaaagaaa

SEQ ID NO: 8401 - RNA, 20 nt, Artificial Sequence
  HTT spacer sequence CTCN PAM
uucuuuucaaaauuuuuuuc

SEQ ID NO: 8402 - RNA, 20 nt, Artificial Sequence
  HTT spacer sequence CTCN PAM
gaaggaauucacugaaaagg

SEQ ID NO: 8403 - RNA, 20 nt, Artificial Sequence
  HTT spacer sequence CTCN PAM
cugccuaucuuuuccuuccu

SEQ ID NO: 8404 - RNA, 20 nt, Artificial Sequence
  HTT spacer sequence CTCN PAM
cacugccuaucuuuuccuuc

SEQ ID NO: 8405 - RNA, 20 nt, Artificial Sequence
  HTT spacer sequence CTCN PAM
guagcacuucugccccagcu

SEQ ID NO: 8406 - RNA, 20 nt, Artificial Sequence
  HTT spacer sequence CTCN PAM
caguagcacuucugccccag

SEQ ID NO: 8407 - RNA, 20 nt, Artificial Sequence
  HTT spacer sequence CTCN PAM
ucucaguagcacuucugccc

SEQ ID NO: 8408 - RNA, 20 nt, Artificial Sequence
  HTT spacer sequence CTCN PAM
gaagaaacacaacgaucucc

SEQ ID NO: 8409 - RNA, 20 nt, Artificial Sequence
  HTT spacer sequence CTCN PAM
cacucugaagaaacacaacg

SEQ ID NO: 8410 - RNA, 20 nt, Artificial Sequence
  HTT spacer sequence CTCN PAM
uucuuuccugcaucacuucc

SEQ ID NO: 8411 - RNA, 20 nt, Artificial Sequence
  HTT spacer sequence CTCN PAM
uaucaucacuuucucuuucu

SEQ ID NO: 8412 - RNA, 20 nt, Artificial Sequence
  HTT spacer sequence CTCN PAM
ucucauaucaucacuuucuc

SEQ ID NO: 8413 - RNA, 20 nt, Artificial Sequence
  HTT spacer sequence CTCN PAM
aguggcgacagggugggguc

SEQ ID NO: 8414 - RNA, 20 nt, Artificial Sequence
  HTT spacer sequence CTCN PAM
ucacaaccagaccccacccu

SEQ ID NO: 8415 - RNA, 20 nt, Artificial Sequence
  HTT spacer sequence CTCN PAM
aacuagcucuucacaaccag

SEQ ID NO: 8416 - RNA, 20 nt, Artificial Sequence
  HTT spacer sequence CTCN PAM
aauguccuccaacuagcucu

SEQ ID NO: 8417 - RNA, 20 nt, Artificial Sequence
  HTT spacer sequence CTCN PAM
ccaauguccuccaacuagcu

SEQ ID NO: 8418 - RNA, 20 nt, Artificial Sequence
  HTT spacer sequence CTCN PAM
ucuccaauguccuccaacua

SEQ ID NO: 8419 - RNA, 20 nt, Artificial Sequence
  HTT spacer sequence CTCN PAM
cacacauccgcagaccugcg

SEQ ID NO: 8420 - RNA, 20 nt, Artificial Sequence
  HTT spacer sequence CTCN PAM
caccacccucagcagucugu

SEQ ID NO: 8421 - RNA, 20 nt, Artificial Sequence
  HTT spacer sequence CTCN PAM
gcagucugugaauacccauc

SEQ ID NO: 8422 - RNA, 20 nt, Artificial Sequence
  HTT spacer sequence CTCN PAM
ucagcacagaguccaugucc

SEQ ID NO: 8423 - RNA, 20 nt, Artificial Sequence
  HTT spacer sequence CTCN PAM
gcacagaguccaugucccug

SEQ ID NO: 8424 - RNA, 20 nt, Artificial Sequence
  HTT spacer sequence CTCN PAM
gugcugaggaguauaaagga

SEQ ID NO: 8425 - RNA, 20 nt, Artificial Sequence
  HTT spacer sequence CTCN PAM
ugggcacccugcuccgcauu

SEQ ID NO: 8426 - RNA, 20 nt, Artificial Sequence
  HTT spacer sequence CTCN PAM
gcauugacggagcucgagau

SEQ ID NO: 8427 - RNA, 20 nt, Artificial Sequence
  HTT spacer sequence CTCN PAM
gucaaugcggagcagggugc

SEQ ID NO: 8428 - RNA, 20 nt, Artificial Sequence
  HTT spacer sequence CTCN PAM
agauccccacaucuacucca

SEQ ID NO: 8429 - RNA, 20 nt, Artificial Sequence
  HTT spacer sequence CTCN PAM
agcuccgucaaugcggagca

SEQ ID NO: 8430 - RNA, 20 nt, Artificial Sequence
  HTT spacer sequence CTCN PAM
acugcuccccuuccucucaa

SEQ ID NO: 8431 - RNA, 20 nt, Artificial Sequence
  HTT spacer sequence CTCN PAM
ccuuccucucaacuuccauc

SEQ ID NO: 8432 - RNA, 20 nt, Artificial Sequence
  HTT spacer sequence CTCN PAM
caacuuccaucauuaggcuc

SEQ ID NO: 8433 - RNA, 20 nt, Artificial Sequence
  HTT spacer sequence CTCN PAM
acuuccaucauuaggcucag

SEQ ID NO: 8434 - RNA, 20 nt, Artificial Sequence
  HTT spacer sequence CTCN PAM
gggaccuuggcccuuucccu

SEQ ID NO: 8435 - RNA, 20 nt, Artificial Sequence
  HTT spacer sequence CTCN PAM
uuaccuuaagucgucuccuc

SEQ ID NO: 8436 - RNA, 20 nt, Artificial Sequence
  HTT spacer sequence CTCN PAM
ucaucuuuugacuuacaugg

SEQ ID NO: 8437 - RNA, 20 nt, Artificial Sequence
  HTT spacer sequence CTCN PAM
ucuuuugacuuacauggacc

SEQ ID NO: 8438 - RNA, 20 nt, Artificial Sequence
  HTT spacer sequence CTCN PAM
uucccauaauacaauguuga

SEQ ID NO: 8439 - RNA, 20 nt, Artificial Sequence
  HTT spacer sequence CTCN PAM
ccuucccauaauacaauguu

SEQ ID NO: 8440 - RNA, 20 nt, Artificial Sequence
  HTT spacer sequence CTCN PAM
gguuuggcuguccuuggguc

SEQ ID NO: 8441 - RNA, 20 nt, Artificial Sequence
  HTT spacer sequence CTCN PAM
cugcugccaggggagcacag

SEQ ID NO: 8442 - RNA, 20 nt, Artificial Sequence
  HTT spacer sequence CTCN PAM
ccuggcagcagggaggcauc

SEQ ID NO: 8443 - RNA, 20 nt, Artificial Sequence
  HTT spacer sequence CTCN PAM
uccaucaccaucaccugugc

SEQ ID NO: 8444 - RNA, 20 nt, Artificial Sequence
  HTT spacer sequence CTCN PAM
ccaucagcagaggugugggu

SEQ ID NO: 8445 - RNA, 20 nt, Artificial Sequence
  HTT spacer sequence CTCN PAM
gcugauggggagguccccau

SEQ ID NO: 8446 - RNA, 20 nt, Artificial Sequence
  HTT spacer sequence CTCN PAM
aaauuaagugaccugaagca

SEQ ID NO: 8447 - RNA, 20 nt, Artificial Sequence
  HTT spacer sequence CTCN PAM
gaauaaaagccacuuucagc

SEQ ID NO: 8448 - RNA, 20 nt, Artificial Sequence
  HTT spacer sequence CTCN PAM
guucuauuuaaguaguuuua

SEQ ID NO: 8449 - RNA, 20 nt, Artificial Sequence
  HTT spacer sequence CTCN PAM
cuggucauuucuggguauug

SEQ ID NO: 8450 - RNA, 20 nt, Artificial Sequence
  HTT spacer sequence CTCN PAM
ggucauuucuggguauugcu

SEQ ID NO: 8451 - RNA, 20 nt, Artificial Sequence
  HTT spacer sequence CTCN PAM
gaagguccugaaaaaucaca

SEQ ID NO: 8452 - RNA, 20 nt, Artificial Sequence
  HTT spacer sequence CTCN PAM
cacugcaguuuguaacccuu

SEQ ID NO: 8453 - RNA, 20 nt, Artificial Sequence
  HTT spacer sequence CTCN PAM
auacagcaaaagggcaaaac

SEQ ID NO: 8454 - RNA, 20 nt, Artificial Sequence
  HTT spacer sequence CTCN PAM
acauucaggcuccauacagc

SEQ ID NO: 8455 - RNA, 20 nt, Artificial Sequence
  HTT spacer sequence CTCN PAM
gucaugggacagcacaaaua

SEQ ID NO: 8456 - RNA, 20 nt, Artificial Sequence
  HTT spacer sequence CTCN PAM
gaacaugucuggaugccagg

SEQ ID NO: 8457 - RNA, 20 nt, Artificial Sequence
  HTT spacer sequence CTCN PAM
gauauuuguuuucuucugga

SEQ ID NO: 8458 - RNA, 20 nt, Artificial Sequence
  HTT spacer sequence CTCN PAM
auguaauguuacuaaugugg

SEQ ID NO: 8459 - RNA, 20 nt, Artificial Sequence
  HTT spacer sequence CTCN PAM
ugaauugcccuauuaaaugg

SEQ ID NO: 8460 - RNA, 20 nt, Artificial Sequence
  HTT spacer sequence CTCN PAM
guuuauucuaauauguaaac

SEQ ID NO: 8461 - RNA, 20 nt, Artificial Sequence
  HTT spacer sequence CTCN PAM
gaaggauuuacuuuuaauuu

SEQ ID NO: 8462 - RNA, 20 nt, Artificial Sequence
  HTT spacer sequence CTCN PAM
auaaaauucaacagugacug

SEQ ID NO: 8463 - RNA, 20 nt, Artificial Sequence
  HTT spacer sequence CTCN PAM
guaagauuacagaaauuauu

SEQ ID NO: 8464 - RNA, 20 nt, Artificial Sequence
  HTT spacer sequence CTCN PAM
gugauaaauaauuucuguaa

SEQ ID NO: 8465 - RNA, 20 nt, Artificial Sequence
  HTT spacer sequence CTCN PAM
ugauaugauuguuaccaauc

SEQ ID NO: 8466 - RNA, 20 nt, Artificial Sequence
  HTT spacer sequence CTCN PAM
uuguaaccacugagaaggag

SEQ ID NO: 8467 - RNA, 20 nt, Artificial Sequence
  HTT spacer sequence CTCN PAM
gugguuacaaagagauuggu

SEQ ID NO: 8468 - RNA, 20 nt, Artificial Sequence
  HTT spacer sequence CTCN PAM
uucucagugguuacaaagag

SEQ ID NO: 8469 - RNA, 20 nt, Artificial Sequence
  HTT spacer sequence CTCN PAM
ccaggcaaugccuuuugcuc

SEQ ID NO: 8470 - RNA, 20 nt, Artificial Sequence
  HTT spacer sequence CTCN PAM
aggcaaugccuuuugcucag

SEQ ID NO: 8471 - RNA, 20 nt, Artificial Sequence
  HTT spacer sequence CTCN PAM
gagaaccugcauaugcuuug

SEQ ID NO: 8472 - RNA, 20 nt, Artificial Sequence
  HTT spacer sequence CTCN PAM
gagcaaaaggcauugccugg

SEQ ID NO: 8473 - RNA, 20 nt, Artificial Sequence
  HTT spacer sequence CTCN PAM
gcuuucccaaagcauaugca

SEQ ID NO: 8474 - RNA, 20 nt, Artificial Sequence
  HTT spacer sequence CTCN PAM
aguccagggaacacuguuau

SEQ ID NO: 8475 - RNA, 20 nt, Artificial Sequence
  HTT spacer sequence CTCN PAM
caaagugcugggauuacagg

SEQ ID NO: 8476 - RNA, 20 nt, Artificial Sequence
  HTT spacer sequence CTCN PAM
gccucccaaagugcugggau

SEQ ID NO: 8477 - RNA, 20 nt, Artificial Sequence
  HTT spacer sequence CTCN PAM
ugaucugccuaccucggccu

SEQ ID NO: 8478 - RNA, 20 nt, Artificial Sequence
  HTT spacer sequence CTCN PAM
aauuccugaccucgugaucu

SEQ ID NO: 8479 - RNA, 20 nt, Artificial Sequence
  HTT spacer sequence CTCN PAM
acuaaaaauacaaaaacuag

SEQ ID NO: 8480 - RNA, 20 nt, Artificial Sequence
  HTT spacer sequence CTCN PAM
ggaggcugaggcaggagaau

SEQ ID NO: 8481 - RNA, 20 nt, Artificial Sequence
  HTT spacer sequence CTCN PAM
ugaguagcugggauuacaug

SEQ ID NO: 8482 - RNA, 20 nt, Artificial Sequence
  HTT spacer sequence CTCN PAM
gccuccugaguagcugggau

SEQ ID NO: 8483 - RNA, 20 nt, Artificial Sequence
  HTT spacer sequence CTCN PAM
ugccucagccuccugaguag

SEQ ID NO: 8484 - RNA, 20 nt, Artificial Sequence
  HTT spacer sequence CTCN PAM
uggauucaagcaauucuccu

SEQ ID NO: 8485 - RNA, 20 nt, Artificial Sequence
  HTT spacer sequence CTCN PAM
gccuccuggauucaagcaau

SEQ ID NO: 8486 - RNA, 20 nt, Artificial Sequence
  HTT spacer sequence CTCN PAM
uugcaaccuccgccuccugg

SEQ ID NO: 8487 - RNA, 20 nt, Artificial Sequence
  HTT spacer sequence CTCN PAM
gcucauugcaaccuccgccu

SEQ ID NO: 8488 - RNA, 20 nt, Artificial Sequence
  HTT spacer sequence CTCN PAM
agccugggcaacagagcgag

SEQ ID NO: 8489 - RNA, 20 nt, Artificial Sequence
  HTT spacer sequence CTCN PAM
guugcccaggcuggagugca

SEQ ID NO: 8490 - RNA, 20 nt, Artificial Sequence
  HTT spacer sequence CTCN PAM
cucuguugcccaggcuggag

SEQ ID NO: 8491 - RNA, 20 nt, Artificial Sequence
  HTT spacer sequence CTCN PAM
gucucaaaaaaaaaaaaaaa

SEQ ID NO: 8492 - RNA, 20 nt, Artificial Sequence
  HTT spacer sequence CTCN PAM
aaaaaaaaaaaaaagaaaga

SEQ ID NO: 8493 - RNA, 20 nt, Artificial Sequence
  HTT spacer sequence CTCN PAM
cgccuguaaucccagcacuu

SEQ ID NO: 8494 - RNA, 20 nt, Artificial Sequence
  HTT spacer sequence CTCN PAM
caaagugcugggauuacagg

SEQ ID NO: 8495 - RNA, 20 nt, Artificial Sequence
  HTT spacer sequence CTCN PAM
gccucccaaagugcugggau

SEQ ID NO: 8496 - RNA, 20 nt, Artificial Sequence
  HTT spacer sequence CTCN PAM
ugaucugcccgccucggccu

SEQ ID NO: 8497 - RNA, 20 nt, Artificial Sequence
  HTT spacer sequence CTCN PAM
ugaccucgugaucugcccgc

SEQ ID NO: 8498 - RNA, 20 nt, Artificial Sequence
  HTT spacer sequence CTCN PAM
aucuccugaccucgugaucu

SEQ ID NO: 8499 - RNA, 20 nt, Artificial Sequence
  HTT spacer sequence CTCN PAM
acuaacaacgccugucuggg

SEQ ID NO: 8500 - RNA, 20 nt, Artificial Sequence
  HTT spacer sequence CTCN PAM
ugccuguagucccagcuacu

SEQ ID NO: 8501 - RNA, 20 nt, Artificial Sequence
  HTT spacer sequence CTCN PAM
caaguagcugggacuacagg

SEQ ID NO: 8502 - RNA, 20 nt, Artificial Sequence
  HTT spacer sequence CTCN PAM
gccucccaaguagcugggac

SEQ ID NO: 8503 - RNA, 20 nt, Artificial Sequence
  HTT spacer sequence CTCN PAM
ugccucagccucccaaguag

SEQ ID NO: 8504 - RNA, 20 nt, Artificial Sequence
  HTT spacer sequence CTCN PAM
ggaggcagagguugcaguga

SEQ ID NO: 8505 - RNA, 20 nt, Artificial Sequence
  HTT spacer sequence CTCN PAM
cgaguucaaaugauccuccu

SEQ ID NO: 8506 - RNA, 20 nt, Artificial Sequence
  HTT spacer sequence CTCN PAM
gccucccgaguucaaaugau

SEQ ID NO: 8507 - RNA, 20 nt, Artificial Sequence
  HTT spacer sequence CTCN PAM
cugcaaccucugccucccga

SEQ ID NO: 8508 - RNA, 20 nt, Artificial Sequence
  HTT spacer sequence CTCN PAM
gucaccaggcuggaaugcag

SEQ ID NO: 8509 - RNA, 20 nt, Artificial Sequence
  HTT spacer sequence CTCN PAM
cucugucaccaggcuggaau

SEQ ID NO: 8510 - RNA, 20 nt, Artificial Sequence
  HTT spacer sequence CTCN PAM
aucucaaaaaaaaaaaacaa

SEQ ID NO: 8511 - RNA, 20 nt, Artificial Sequence
  HTT spacer sequence CTCN PAM
aaaaaaaaaaacaaaaaaaa

SEQ ID NO: 8512 - RNA, 20 nt, Artificial Sequence
  HTT spacer sequence CTCN PAM
aucacaauuuucuguuuuuu

SEQ ID NO: 8513 - RNA, 20 nt, Artificial Sequence
  HTT spacer sequence CTCN PAM
acauuaugaauguccauaau

SEQ ID NO: 8514 - RNA, 20 nt, Artificial Sequence
  HTT spacer sequence CTCN PAM
caccuguaaucccagcauug

SEQ ID NO: 8515 - RNA, 20 nt, Artificial Sequence
  HTT spacer sequence CTCN PAM
caaugcugggauuacaggug

SEQ ID NO: 8516 - RNA, 20 nt, Artificial Sequence
  HTT spacer sequence CTCN PAM
cacaaugcugggauuacagg

SEQ ID NO: 8517 - RNA, 20 nt, Artificial Sequence
  HTT spacer sequence CTCN PAM
gccucucacaaugcugggau

SEQ ID NO: 8518 - RNA, 20 nt, Artificial Sequence
  HTT spacer sequence CTCN PAM
ugauccacccgccucggccu

SEQ ID NO: 8519 - RNA, 20 nt, Artificial Sequence
  HTT spacer sequence CTCN PAM
ugaccucgugauccacccgc

SEQ ID NO: 8520 - RNA, 20 nt, Artificial Sequence
  HTT spacer sequence CTCN PAM
aucuccugaccucgugaucc

SEQ ID NO: 8521 - RNA, 20 nt, Artificial Sequence
  HTT spacer sequence CTCN PAM
acuaaaaauacaaaaaauua

SEQ ID NO: 8522 - RNA, 20 nt, Artificial Sequence
  HTT spacer sequence CTCN PAM
gccuaccaaguagcugggau

SEQ ID NO: 8523 - RNA, 20 nt, Artificial Sequence
  HTT spacer sequence CTCN PAM
ugccucagccuaccaaguag

SEQ ID NO: 8524 - RNA, 20 nt, Artificial Sequence
  HTT spacer sequence CTCN PAM
cagguucaagugauucuccu

SEQ ID NO: 8525 - RNA, 20 nt, Artificial Sequence
  HTT spacer sequence CTCN PAM
accucccagguucaagugau

SEQ ID NO: 8526 - RNA, 20 nt, Artificial Sequence
  HTT spacer sequence CTCN PAM
gugcaaccuccaccucccag

SEQ ID NO: 8527 - RNA, 20 nt, Artificial Sequence
  HTT spacer sequence CTCN PAM
gcucagugcaaccuccaccu

SEQ ID NO: 8528 - RNA, 20 nt, Artificial Sequence
  HTT spacer sequence CTCN PAM
gugacccaggcuggggugua

SEQ ID NO: 8529 - RNA, 20 nt, Artificial Sequence
  HTT spacer sequence CTCN PAM
cucucaaaaaaaaaaaaaga

SEQ ID NO: 8530 - RNA, 20 nt, Artificial Sequence
  HTT spacer sequence CTCN PAM
caaaaaaaaaaaaagagugu

SEQ ID NO: 8531 - RNA, 20 nt, Artificial Sequence
  HTT spacer sequence CTCN PAM
aaaaaaaaaaaagaguguag

SEQ ID NO: 8532 - RNA, 20 nt, Artificial Sequence
  HTT spacer sequence CTCN PAM
uuuuuuuuuuuugagaggga

SEQ ID NO: 8533 - RNA, 20 nt, Artificial Sequence
  HTT spacer sequence CTCN PAM
uguacaacuucuacacucuu

SEQ ID NO: 8534 - RNA, 20 nt, Artificial Sequence
  HTT spacer sequence CTCN PAM
aucaauacgugucacacgca

SEQ ID NO: 8535 - RNA, 20 nt, Artificial Sequence
  HTT spacer sequence CTCN PAM
cuaccccucaaucaauacgu

SEQ ID NO: 8536 - RNA, 20 nt, Artificial Sequence
  HTT spacer sequence CTCN PAM
caguugucuuguaaaggaaa

SEQ ID NO: 8537 - RNA, 20 nt, Artificial Sequence
  HTT spacer sequence CTCN PAM
ccgccuuuccuuuacaagac

SEQ ID NO: 8538 - RNA, 20 nt, Artificial Sequence
  HTT spacer sequence CTCN PAM
uccugccuucauacuugcug

SEQ ID NO: 8539 - RNA, 20 nt, Artificial Sequence
  HTT spacer sequence CTCN PAM
cgccccaaccaacuaugugg

SEQ ID NO: 8540 - RNA, 20 nt, Artificial Sequence
  HTT spacer sequence CTCN PAM
uuacaguuccacacucccgc

SEQ ID NO: 8541 - RNA, 20 nt, Artificial Sequence
  HTT spacer sequence CTCN PAM
gccuuaaacccuucgauugu

SEQ ID NO: 8542 - RNA, 20 nt, Artificial Sequence
  HTT spacer sequence CTCN PAM
cacuguaccuaugaccagaa

SEQ ID NO: 8543 - RNA, 20 nt, Artificial Sequence
  HTT spacer sequence CTCN PAM
ugucaaaacccccucacacu

SEQ ID NO: 8544 - RNA, 20 nt, Artificial Sequence
  HTT spacer sequence CTCN PAM
aucuccugucaaaacccccu

SEQ ID NO: 8545 - RNA, 20 nt, Artificial Sequence
  HTT spacer sequence CTCN PAM
ccacaugcccuccaucuccu

SEQ ID NO: 8546 - RNA, 20 nt, Artificial Sequence
  HTT spacer sequence CTCN PAM
ugccgaccggccuucagggc

SEQ ID NO: 8547 - RNA, 20 nt, Artificial Sequence
  HTT spacer sequence CTCN PAM
ugcauuagccuucauagggc

SEQ ID NO: 8548 - RNA, 20 nt, Artificial Sequence
  HTT spacer sequence CTCN PAM
gguaacagcagcacaaccca

SEQ ID NO: 8549 - RNA, 20 nt, Artificial Sequence
  HTT spacer sequence CTCN PAM
cggguaacagcagcacaacc

SEQ ID NO: 8550 - RNA, 20 nt, Artificial Sequence
  HTT spacer sequence CTCN PAM
cacccccaugcacacaggcc

SEQ ID NO: 8551 - RNA, 20 nt, Artificial Sequence
  HTT spacer sequence CTCN PAM
gcuguuaguaguguucccaa

SEQ ID NO: 8552 - RNA, 20 nt, Artificial Sequence
  HTT spacer sequence CTCN PAM
uaugcaaaaauuucuggguu

SEQ ID NO: 8553 - RNA, 20 nt, Artificial Sequence
  HTT spacer sequence CTCN PAM
aaaaaaaaaauuauauauau

SEQ ID NO: 8554 - RNA, 20 nt, Artificial Sequence
  HTT spacer sequence CTCN PAM
aucucaaaaaaaaaaauuau

SEQ ID NO: 8555 - RNA, 20 nt, Artificial Sequence
  HTT spacer sequence CTCN PAM
guuugcccaggcuggaaugc

SEQ ID NO: 8556 - RNA, 20 nt, Artificial Sequence
  HTT spacer sequence CTCN PAM
gccucauggguucaagugau

SEQ ID NO: 8557 - RNA, 20 nt, Artificial Sequence
  HTT spacer sequence CTCN PAM
uggguucaagugauucuccu

SEQ ID NO: 8558 - RNA, 20 nt, Artificial Sequence
  HTT spacer sequence CTCN PAM
ugccucagcuugaguagcug

SEQ ID NO: 8559 - RNA, 20 nt, Artificial Sequence
  HTT spacer sequence CTCN PAM
gcuugaguagcugggauuac

SEQ ID NO: 8560 - RNA, 20 nt, Artificial Sequence
  HTT spacer sequence CTCN PAM
agcugaggcaggagaaucac

SEQ ID NO: 8561 - RNA, 20 nt, Artificial Sequence
  HTT spacer sequence CTCN PAM
ugaccucuugaucugccugc

SEQ ID NO: 8562 - RNA, 20 nt, Artificial Sequence
  HTT spacer sequence CTCN PAM
ugaucugccugccucggccu

SEQ ID NO: 8563 - RNA, 20 nt, Artificial Sequence
  HTT spacer sequence CTCN PAM
gccucacagaguguugggau

SEQ ID NO: 8564 - RNA, 20 nt, Artificial Sequence
  HTT spacer sequence CTCN PAM
cagaguguugggauuacagg

SEQ ID NO: 8565 - RNA, 20 nt, Artificial Sequence
  HTT spacer sequence CTCN PAM
gugaggccgaggcaggcaga

SEQ ID NO: 8566 - RNA, 20 nt, Artificial Sequence
  HTT spacer sequence CTCN PAM
caccuguaaucccaacacuc

SEQ ID NO: 8567 - RNA, 20 nt, Artificial Sequence
  HTT spacer sequence CTCN PAM
ugcuuggaagcagaaaucua

SEQ ID NO: 8568 - RNA, 20 nt, Artificial Sequence
  HTT spacer sequence CTCN PAM
aacagugaaacaaaggacca

SEQ ID NO: 8569 - RNA, 20 nt, Artificial Sequence
  HTT spacer sequence CTCN PAM
gggaucacuguccugccugc

SEQ ID NO: 8570 - RNA, 20 nt, Artificial Sequence
  HTT spacer sequence CTCN PAM
cagggaucacuguccugccu

SEQ ID NO: 8571 - RNA, 20 nt, Artificial Sequence
  HTT spacer sequence CTCN PAM
agccuugcccaggcuuccug

SEQ ID NO: 8572 - RNA, 20 nt, Artificial Sequence
  HTT spacer sequence CTCN PAM
aggcaggaagccugggcaag

SEQ ID NO: 8573 - RNA, 20 nt, Artificial Sequence
  HTT spacer sequence CTCN PAM
ccaggcaggaagccugggca

SEQ ID NO: 8574 - RNA, 20 nt, Artificial Sequence
  HTT spacer sequence CTCN PAM
cuccaggcaggaagccuggg

SEQ ID NO: 8575 - RNA, 20 nt, Artificial Sequence
  HTT spacer sequence CTCN PAM
aaguccuagccuucagacuc

SEQ ID NO: 8576 - RNA, 20 nt, Artificial Sequence
  HTT spacer sequence CTCN PAM
ccaaguccuagccuucagac

SEQ ID NO: 8577 - RNA, 20 nt, Artificial Sequence
  HTT spacer sequence CTCN PAM
gucuggguagcucuccaagu

SEQ ID NO: 8578 - RNA, 20 nt, Artificial Sequence
  HTT spacer sequence CTCN PAM
gacucggucuggguagcucu

SEQ ID NO: 8579 - RNA, 20 nt, Artificial Sequence
  HTT spacer sequence CTCN PAM
uugauugaggaggcugaguu

SEQ ID NO: 8580 - RNA, 20 nt, Artificial Sequence
  HTT spacer sequence CTCN PAM
aucaaggagauccucagacu

SEQ ID NO: 8581 - RNA, 20 nt, Artificial Sequence
  HTT spacer sequence CTCN PAM
ucaaucaaggagauccucag

SEQ ID NO: 8582 - RNA, 20 nt, Artificial Sequence
  HTT spacer sequence CTCN PAM
gccuccucaaucaaggagau

SEQ ID NO: 8583 - RNA, 20 nt, Artificial Sequence
  HTT spacer sequence CTCN PAM
acucagccuccucaaucaag

SEQ ID NO: 8584 - RNA, 20 nt, Artificial Sequence
  HTT spacer sequence CTCN PAM
ccaaagucucaacucagccu

SEQ ID NO: 8585 - RNA, 20 nt, Artificial Sequence
  HTT spacer sequence CTCN PAM
gcccugcaaauuuacuuugg

SEQ ID NO: 8586 - RNA, 20 nt, Artificial Sequence
  HTT spacer sequence CTCN PAM
gguacucugcccugcaaauu

SEQ ID NO: 8587 - RNA, 20 nt, Artificial Sequence
  HTT spacer sequence CTCN PAM
cugguacucugcccugcaaa

SEQ ID NO: 8588 - RNA, 20 nt, Artificial Sequence
  HTT spacer sequence CTCN PAM
ucucugguacucugcccugc

SEQ ID NO: 8589 - RNA, 20 nt, Artificial Sequence
  HTT spacer sequence CTCN PAM
ccucucugguacucugcccu

SEQ ID NO: 8590 - RNA, 20 nt, Artificial Sequence
  HTT spacer sequence CTCN PAM
cuccucucugguacucugcc

SEQ ID NO: 8591 - RNA, 20 nt, Artificial Sequence
  HTT spacer sequence CTCN PAM
uugcagcucucuccucucug

SEQ ID NO: 8592 - RNA, 20 nt, Artificial Sequence
  HTT spacer sequence CTCN PAM
uccuuccccucuuugcagcu

SEQ ID NO: 8593 - RNA, 20 nt, Artificial Sequence
  HTT spacer sequence CTCN PAM
gcauaggguucuccccaagc

SEQ ID NO: 8594 - RNA, 20 nt, Artificial Sequence
  HTT spacer sequence CTCN PAM
ccaagcccagcugagggcgc

SEQ ID NO: 8595 - RNA, 20 nt, Artificial Sequence
  HTT spacer sequence CTCN PAM
gcugggcuuggggagaaccc

SEQ ID NO: 8596 - RNA, 20 nt, Artificial Sequence
  HTT spacer sequence CTCN PAM
cugcgccugggcuagcaccc

SEQ ID NO: 8597 - RNA, 20 nt, Artificial Sequence
  HTT spacer sequence CTCN PAM
gcgccugggcuagcacccug

SEQ ID NO: 8598 - RNA, 20 nt, Artificial Sequence
  HTT spacer sequence CTCN PAM
cuuccagggugcuagcccag

SEQ ID NO: 8599 - RNA, 20 nt, Artificial Sequence
  HTT spacer sequence CTCN PAM
ucacuuccagggugcuagcc

SEQ ID NO: 8600 - RNA, 20 nt, Artificial Sequence
  HTT spacer sequence CTCN PAM
cacagggccaggagcagugu

SEQ ID NO: 8601 - RNA, 20 nt, Artificial Sequence
  HTT spacer sequence CTCN PAM
uggcccugugugagcugcaa

SEQ ID NO: 8602 - RNA, 20 nt, Artificial Sequence
  HTT spacer sequence CTCN PAM
uaagcugccacccagggucc

SEQ ID NO: 8603 - RNA, 20 nt, Artificial Sequence
  HTT spacer sequence CTCN PAM
guuguggguaagaggaaagg

SEQ ID NO: 8604 - RNA, 20 nt, Artificial Sequence
  HTT spacer sequence CTCN PAM
uacccacaacugaggcaaua

SEQ ID NO: 8605 - RNA, 20 nt, Artificial Sequence
  HTT spacer sequence CTCN PAM
guaaggcagcaucagaacgc

SEQ ID NO: 8606 - RNA, 20 nt, Artificial Sequence
  HTT spacer sequence CTCN PAM
ucccaaacaacccuccuaug

SEQ ID NO: 8607 - RNA, 20 nt, Artificial Sequence
  HTT spacer sequence CTCN PAM
uauggcccaugacgaagcuc

SEQ ID NO: 8608 - RNA, 20 nt, Artificial Sequence
  HTT spacer sequence CTCN PAM
gauacugaaggaaugaaaaa

SEQ ID NO: 8609 - RNA, 20 nt, Artificial Sequence
  HTT spacer sequence CTCN PAM
ucuccuccucucacaccuca

SEQ ID NO: 8610 - RNA, 20 nt, Artificial Sequence
  HTT spacer sequence CTCN PAM
uccucucacaccucacagcu

SEQ ID NO: 8611 - RNA, 20 nt, Artificial Sequence
  HTT spacer sequence CTCN PAM
ucucacaccucacagcuggc

SEQ ID NO: 8612 - RNA, 20 nt, Artificial Sequence
  HTT spacer sequence CTCN PAM
cacaccucacagcuggcucc

SEQ ID NO: 8613 - RNA, 20 nt, Artificial Sequence
  HTT spacer sequence CTCN PAM
caccucacagcuggcuccuu

SEQ ID NO: 8614 - RNA, 20 nt, Artificial Sequence
  HTT spacer sequence CTCN PAM
cagcuggcuccuucacagcc

SEQ ID NO: 8615 - RNA, 20 nt, Artificial Sequence
  HTT spacer sequence CTCN PAM
uucacagccuuauccacuuc

SEQ ID NO: 8616 - RNA, 20 nt, Artificial Sequence
  HTT spacer sequence CTCN PAM
ugaacugcagauagucguuu

SEQ ID NO: 8617 - RNA, 20 nt, Artificial Sequence
  HTT spacer sequence CTCN PAM
cucugcacgcagccucagag

SEQ ID NO: 8618 - RNA, 20 nt, Artificial Sequence
  HTT spacer sequence CTCN PAM
cugcacgcagccucagaguc

SEQ ID NO: 8619 - RNA, 20 nt, Artificial Sequence
  HTT spacer sequence CTCN PAM
gcacgcagccucagagucac

SEQ ID NO: 8620 - RNA, 20 nt, Artificial Sequence
  HTT spacer sequence CTCN PAM
gagucacuccuugacuucag

SEQ ID NO: 8621 - RNA, 20 nt, Artificial Sequence
  HTT spacer sequence CTCN PAM
gaggcugcgugcagagagag

SEQ ID NO: 8622 - RNA, 20 nt, Artificial Sequence
  HTT spacer sequence CTCN PAM
uugacuucaguggcccucag

SEQ ID NO: 8623 - RNA, 20 nt, Artificial Sequence
  HTT spacer sequence CTCN PAM
gcucucccccaucucuccuu

SEQ ID NO: 8624 - RNA, 20 nt, Artificial Sequence
  HTT spacer sequence CTCN PAM
cccccaucucuccuucugcu

SEQ ID NO: 8625 - RNA, 20 nt, Artificial Sequence
  HTT spacer sequence CTCN PAM
cccaucucuccuucugcucu

SEQ ID NO: 8626 - RNA, 20 nt, Artificial Sequence
  HTT spacer sequence CTCN PAM
ccuucugcucuugucagccc

SEQ ID NO: 8627 - RNA, 20 nt, Artificial Sequence
  HTT spacer sequence CTCN PAM
uucugcucuugucagcccca

SEQ ID NO: 8628 - RNA, 20 nt, Artificial Sequence
  HTT spacer sequence CTCN PAM
ugucagccccaugccagcca

SEQ ID NO: 8629 - RNA, 20 nt, Artificial Sequence
  HTT spacer sequence CTCN PAM
ccacaagguacagccauguc

SEQ ID NO: 8630 - RNA, 20 nt, Artificial Sequence
  HTT spacer sequence CTCN PAM
ucaaggaggcccucacuguc

SEQ ID NO: 8631 - RNA, 20 nt, Artificial Sequence
  HTT spacer sequence CTCN PAM
aggaggcccucacuguccac

SEQ ID NO: 8632 - RNA, 20 nt, Artificial Sequence
  HTT spacer sequence CTCN PAM
uugaggagacccccgaagcc

SEQ ID NO: 8633 - RNA, 20 nt, Artificial Sequence
  HTT spacer sequence CTCN PAM
cuguccaccggguuaaaggg

SEQ ID NO: 8634 - RNA, 20 nt, Artificial Sequence
  HTT spacer sequence CTCN PAM
uuaucacuauuuaauuaguu

SEQ ID NO: 8635 - RNA, 20 nt, Artificial Sequence
  HTT spacer sequence CTCN PAM
gugccuggaccagucccuga

SEQ ID NO: 8636 - RNA, 20 nt, Artificial Sequence
  HTT spacer sequence CTCN PAM
gggacugguccaggcacuga

SEQ ID NO: 8637 - RNA, 20 nt, Artificial Sequence
  HTT spacer sequence CTCN PAM
guaaauccuggaugacuggu

SEQ ID NO: 8638 - RNA, 20 nt, Artificial Sequence
  HTT spacer sequence CTCN PAM
uguacauucaccagucaucc

SEQ ID NO: 8639 - RNA, 20 nt, Artificial Sequence
  HTT spacer sequence CTCN PAM
gcuccuguacauucaccagu

SEQ ID NO: 8640 - RNA, 20 nt, Artificial Sequence
  HTT spacer sequence CTCN PAM
cuggucauuucuggcucuua

SEQ ID NO: 8641 - RNA, 20 nt, Artificial Sequence
  HTT spacer sequence CTCN PAM
ggucauuucuggcucuuaac

SEQ ID NO: 8642 - RNA, 20 nt, Artificial Sequence
  HTT spacer sequence CTCN PAM
uaacauuaugauuuuaggcu

SEQ ID NO: 8643 - RNA, 20 nt, Artificial Sequence
  HTT spacer sequence CTCN PAM
acaggcccaaagguccccaa

SEQ ID NO: 8644 - RNA, 20 nt, Artificial Sequence
  HTT spacer sequence CTCN PAM
uucuguaauuaaaagggcaa

SEQ ID NO: 8645 - RNA, 20 nt, Artificial Sequence
  HTT spacer sequence CTCN PAM
caucacuggcagaacagcca

SEQ ID NO: 8646 - RNA, 20 nt, Artificial Sequence
  HTT spacer sequence CTCN PAM
ggucuuagaaaacagcuccc

SEQ ID NO: 8647 - RNA, 20 nt, Artificial Sequence
  HTT spacer sequence CTCN PAM
uuuccucaggucuuagaaaa

SEQ ID NO: 8648 - RNA, 20 nt, Artificial Sequence
  HTT spacer sequence CTCN PAM
ugguacucggugguuugagu

SEQ ID NO: 8649 - RNA, 20 nt, Artificial Sequence
  HTT spacer sequence CTCN PAM
gugguuugaguagucuggcg

SEQ ID NO: 8650 - RNA, 20 nt, Artificial Sequence
  HTT spacer sequence CTCN PAM
aaccaccgaguaccaugaga

SEQ ID NO: 8651 - RNA, 20 nt, Artificial Sequence
  HTT spacer sequence CTCN PAM
aggacacuguggggagguag

SEQ ID NO: 8652 - RNA, 20 nt, Artificial Sequence
  HTT spacer sequence CTCN PAM
ccacaguguccuagagaacg

SEQ ID NO: 8653 - RNA, 20 nt, Artificial Sequence
  HTT spacer sequence CTCN PAM
ggauggcugcugagcugggu

SEQ ID NO: 8654 - RNA, 20 nt, Artificial Sequence
  HTT spacer sequence CTCN PAM
gcagccauccugagcugaau

SEQ ID NO: 8655 - RNA, 20 nt, Artificial Sequence
  HTT spacer sequence CTCN PAM
caacccuguggauguaacag

SEQ ID NO: 8656 - RNA, 20 nt, Artificial Sequence
  HTT spacer sequence CTCN PAM
uguuacauccacaggguugu

SEQ ID NO: 8657 - RNA, 20 nt, Artificial Sequence
  HTT spacer sequence CTCN PAM
cauguuuccaugaaccagug

SEQ ID NO: 8658 - RNA, 20 nt, Artificial Sequence
  HTT spacer sequence CTCN PAM
aaagauguucauauauauuc

SEQ ID NO: 8659 - RNA, 20 nt, Artificial Sequence
  HTT spacer sequence CTCN PAM
auucuuaagacuuccugcug

SEQ ID NO: 8660 - RNA, 20 nt, Artificial Sequence
  HTT spacer sequence CTCN PAM
uuuggaccccaggcuccauu

SEQ ID NO: 8661 - RNA, 20 nt, Artificial Sequence
  HTT spacer sequence CTCN PAM
cauuuggaccccaggcucca

SEQ ID NO: 8662 - RNA, 20 nt, Artificial Sequence
  HTT spacer sequence CTCN PAM
guggcuguucaggggccaau

SEQ ID NO: 8663 - RNA, 20 nt, Artificial Sequence
  HTT spacer sequence CTCN PAM
ccaucccaccaccgguauuc

SEQ ID NO: 8664 - RNA, 20 nt, Artificial Sequence
  HTT spacer sequence CTCN PAM
aggcugugggaagagcuaca

SEQ ID NO: 8665 - RNA, 20 nt, Artificial Sequence
  HTT spacer sequence CTCN PAM
agcugucuccccaucccacc

SEQ ID NO: 8666 - RNA, 20 nt, Artificial Sequence
  HTT spacer sequence CTCN PAM
ucccacagccucgagcuguc

SEQ ID NO: 8667 - RNA, 20 nt, Artificial Sequence
  HTT spacer sequence CTCN PAM
aaggccggcuagaccuguag

SEQ ID NO: 8668 - RNA, 20 nt, Artificial Sequence
  HTT spacer sequence CTCN PAM
acccagaagcuucuccaagg

SEQ ID NO: 8669 - RNA, 20 nt, Artificial Sequence
  HTT spacer sequence CTCN PAM
aucuccacccagaagcuucu

SEQ ID NO: 8670 - RNA, 20 nt, Artificial Sequence
  HTT spacer sequence CTCN PAM
cuucccaccuggcaugucuu

SEQ ID NO: 8671 - RNA, 20 nt, Artificial Sequence
  HTT spacer sequence CTCN PAM
ucccaccuggcaugucuugc

SEQ ID NO: 8672 - RNA, 20 nt, Artificial Sequence
  HTT spacer sequence CTCN PAM
ugccguguaggguguccuug

SEQ ID NO: 8673 - RNA, 20 nt, Artificial Sequence
  HTT spacer sequence CTCN PAM
ccugccguguaggguguccu

SEQ ID NO: 8674 - RNA, 20 nt, Artificial Sequence
  HTT spacer sequence CTCN PAM
caccuccaccccacugugug

SEQ ID NO: 8675 - RNA, 20 nt, Artificial Sequence
  HTT spacer sequence CTCN PAM
ccuccaccccacugugugcc

SEQ ID NO: 8676 - RNA, 20 nt, Artificial Sequence
  HTT spacer sequence CTCN PAM
accccacugugugcccuuuu

SEQ ID NO: 8677 - RNA, 20 nt, Artificial Sequence
  HTT spacer sequence CTCN PAM
ggaaggccaggcgaggcuuc

SEQ ID NO: 8678 - RNA, 20 nt, Artificial Sequence
  HTT spacer sequence CTCN PAM
ccuggccuuccagaggcagc

SEQ ID NO: 8679 - RNA, 20 nt, Artificial Sequence
  HTT spacer sequence CTCN PAM
cugggagugccucccuccag

SEQ ID NO: 8680 - RNA, 20 nt, Artificial Sequence
  HTT spacer sequence CTCN PAM
cagggagcagggcaaaggga

SEQ ID NO: 8681 - RNA, 20 nt, Artificial Sequence
  HTT spacer sequence CTCN PAM
cuccagccucuccucagggu

SEQ ID NO: 8682 - RNA, 20 nt, Artificial Sequence
  HTT spacer sequence CTCN PAM
agccucuccucaggguucga

SEQ ID NO: 8683 - RNA, 20 nt, Artificial Sequence
  HTT spacer sequence CTCN PAM
ccucaggguucgaaggggcu

SEQ ID NO: 8684 - RNA, 20 nt, Artificial Sequence
  HTT spacer sequence CTCN PAM
ucaggguucgaaggggcuuc

SEQ ID NO: 8685 - RNA, 20 nt, Artificial Sequence
  HTT spacer sequence CTCN PAM
ggguucgaaggggcuuccuc

SEQ ID NO: 8686 - RNA, 20 nt, Artificial Sequence
  HTT spacer sequence CTCN PAM
uaaggugcagaggcagcccu

SEQ ID NO: 8687 - RNA, 20 nt, Artificial Sequence
  HTT spacer sequence CTCN PAM
gcaccuuaggaggaagcccc

SEQ ID NO: 8688 - RNA, 20 nt, Artificial Sequence
  HTT spacer sequence CTCN PAM
cccgacacacacacacuugc

SEQ ID NO: 8689 - RNA, 20 nt, Artificial Sequence
  HTT spacer sequence CTCN PAM
cacaacuggaaaugggguua

SEQ ID NO: 8690 - RNA, 20 nt, Artificial Sequence
  HTT spacer sequence CTCN PAM
guuucuuucuuuuucuuuuc

SEQ ID NO: 8691 - RNA, 20 nt, Artificial Sequence
  HTT spacer sequence CTCN PAM
aaaaaaaaaaaaaaaaaaaa

SEQ ID NO: 8692 - RNA, 20 nt, Artificial Sequence
  HTT spacer sequence CTCN PAM
auugcccaggcuggaaugca

SEQ ID NO: 8693 - RNA, 20 nt, Artificial Sequence
  HTT spacer sequence CTCN PAM
cugcaaccuccaccuuccag

SEQ ID NO: 8694 - RNA, 20 nt, Artificial Sequence
  HTT spacer sequence CTCN PAM
accuuccagguucaaacgau

SEQ ID NO: 8695 - RNA, 20 nt, Artificial Sequence
  HTT spacer sequence CTCN PAM
ugcgucagccuccugaguag

SEQ ID NO: 8696 - RNA, 20 nt, Artificial Sequence
  HTT spacer sequence CTCN PAM
ugaguagcugggauuacagg

SEQ ID NO: 8697 - RNA, 20 nt, Artificial Sequence
  HTT spacer sequence CTCN PAM
ggaggcugacgcaggagaau

SEQ ID NO: 8698 - RNA, 20 nt, Artificial Sequence
  HTT spacer sequence CTCN PAM
cacccaggcuagagugcagu

SEQ ID NO: 8699 - RNA, 20 nt, Artificial Sequence
  HTT spacer sequence CTCN PAM
cccaggcuagagugcagugg

SEQ ID NO: 8700 - RNA, 20 nt, Artificial Sequence
  HTT spacer sequence CTCN PAM
agccugggugagagggcaag

SEQ ID NO: 8701 - RNA, 20 nt, Artificial Sequence
  HTT spacer sequence CTCN PAM
cuacagccucgacuugcugg

SEQ ID NO: 8702 - RNA, 20 nt, Artificial Sequence
  HTT spacer sequence CTCN PAM
acuugcuggguuuuagcaau

SEQ ID NO: 8703 - RNA, 20 nt, Artificial Sequence
  HTT spacer sequence CTCN PAM
caccucagccucccuaguag

SEQ ID NO: 8704 - RNA, 20 nt, Artificial Sequence
  HTT spacer sequence CTCN PAM
ccucagccucccuaguagcu

SEQ ID NO: 8705 - RNA, 20 nt, Artificial Sequence
  HTT spacer sequence CTCN PAM
gccucccuaguagcugggac

SEQ ID NO: 8706 - RNA, 20 nt, Artificial Sequence
  HTT spacer sequence CTCN PAM
cuaguagcugggacuacagg

SEQ ID NO: 8707 - RNA, 20 nt, Artificial Sequence
  HTT spacer sequence CTCN PAM
gcaaaaaauccaacuauuag

SEQ ID NO: 8708 - RNA, 20 nt, Artificial Sequence
  HTT spacer sequence CTCN PAM
guaacauagcaagacuucgc

SEQ ID NO: 8709 - RNA, 20 nt, Artificial Sequence
  HTT spacer sequence CTCN PAM
aaccucugagcucaaaugau

SEQ ID NO: 8710 - RNA, 20 nt, Artificial Sequence
  HTT spacer sequence CTCN PAM
gagcucaaaugaucaucuca

SEQ ID NO: 8711 - RNA, 20 nt, Artificial Sequence
  HTT spacer sequence CTCN PAM
gagguuugagaccagccuca

SEQ ID NO: 8712 - RNA, 20 nt, Artificial Sequence
  HTT spacer sequence CTCN PAM
aaugaucaucucaccucugc

SEQ ID NO: 8713 - RNA, 20 nt, Artificial Sequence
  HTT spacer sequence CTCN PAM
ccucugccuccccaggugcu

SEQ ID NO: 8714 - RNA, 20 nt, Artificial Sequence
  HTT spacer sequence CTCN PAM
gccuccccaggugcugggau

SEQ ID NO: 8715 - RNA, 20 nt, Artificial Sequence
  HTT spacer sequence CTCN PAM
ccaggugcugggaucacagg

SEQ ID NO: 8716 - RNA, 20 nt, Artificial Sequence
  HTT spacer sequence CTCN PAM
aucagaaaaaaaauaaaauu

SEQ ID NO: 8717 - RNA, 20 nt, Artificial Sequence
  HTT spacer sequence CTCN PAM
aaagauaaccacccacucua

SEQ ID NO: 8718 - RNA, 20 nt, Artificial Sequence
  HTT spacer sequence CTCN PAM
caaaagauaaccacccacuc

SEQ ID NO: 8719 - RNA, 20 nt, Artificial Sequence
  HTT spacer sequence CTCN PAM
uaccucuaaggccucuuccc

SEQ ID NO: 8720 - RNA, 20 nt, Artificial Sequence
  HTT spacer sequence CTCN PAM
aaggccucuuccccuugccc

SEQ ID NO: 8721 - RNA, 20 nt, Artificial Sequence
  HTT spacer sequence CTCN PAM
uccccuugccccacauugua

SEQ ID NO: 8722 - RNA, 20 nt, Artificial Sequence
  HTT spacer sequence CTCN PAM
uaucaccugauguaaauaaa

SEQ ID NO: 8723 - RNA, 20 nt, Artificial Sequence
  HTT spacer sequence CTCN PAM
ucucuuaucaccugauguaa

SEQ ID NO: 8724 - RNA, 20 nt, Artificial Sequence
  HTT spacer sequence CTCN PAM
gcaucauuacugcugggccu

SEQ ID NO: 8725 - RNA, 20 nt, Artificial Sequence
  HTT spacer sequence CTCN PAM
cuguuuaucuugaaucugga

SEQ ID NO: 8726 - RNA, 20 nt, Artificial Sequence
  HTT spacer sequence CTCN PAM
aagaugguuugcaucugcag

SEQ ID NO: 8727 - RNA, 20 nt, Artificial Sequence
  HTT spacer sequence CTCN PAM
gauucaagauggcaauucug

SEQ ID NO: 8728 - RNA, 20 nt, Artificial Sequence
  HTT spacer sequence CTCN PAM
agaauaguaguuucagacuu

SEQ ID NO: 8729 - RNA, 20 nt, Artificial Sequence
  HTT spacer sequence CTCN PAM
auuuucagacuguuuaccag

SEQ ID NO: 8730 - RNA, 20 nt, Artificial Sequence
  HTT spacer sequence CTCN PAM
cagugacaccccagugccca

SEQ ID NO: 8731 - RNA, 20 nt, Artificial Sequence
  HTT spacer sequence CTCN PAM
ugcgugucccucccagugac

SEQ ID NO: 8732 - RNA, 20 nt, Artificial Sequence
  HTT spacer sequence CTCN PAM
cucacgggcgagaacuaagc

SEQ ID NO: 8733 - RNA, 20 nt, Artificial Sequence
  HTT spacer sequence CTCN PAM
cgggcgagaacuaagcaccu

SEQ ID NO: 8734 - RNA, 20 nt, Artificial Sequence
  HTT spacer sequence CTCN PAM
cccgugagugagguagcgug

SEQ ID NO: 8735 - RNA, 20 nt, Artificial Sequence
  HTT spacer sequence CTCN PAM
ucccggggccgcggaggcca

SEQ ID NO: 8736 - RNA, 20 nt, Artificial Sequence
  HTT spacer sequence CTCN PAM
gcggccccgggacgaggccc

SEQ ID NO: 8737 - RNA, 20 nt, Artificial Sequence
  HTT spacer sequence CTCN PAM
gggugggcggggaacugcac

SEQ ID NO: 8738 - RNA, 20 nt, Artificial Sequence
  HTT spacer sequence CTCN PAM
gaccuccaggauugcgggac

SEQ ID NO: 8739 - RNA, 20 nt, Artificial Sequence
  HTT spacer sequence CTCN PAM
aggauugcgggacccgccgg

SEQ ID NO: 8740 - RNA, 20 nt, Artificial Sequence
  HTT spacer sequence CTCN PAM
ccggcgggucccgcaauccu

SEQ ID NO: 8741 - RNA, 20 nt, Artificial Sequence
  HTT spacer sequence CTCN PAM
uggccccgccccggccccgc

SEQ ID NO: 8742 - RNA, 20 nt, Artificial Sequence
  HTT spacer sequence CTCN PAM
uccuggccccgccccggccc

SEQ ID NO: 8743 - RNA, 20 nt, Artificial Sequence
  HTT spacer sequence CTCN PAM
gucccgcccgcgcccgccca

SEQ ID NO: 8744 - RNA, 20 nt, Artificial Sequence
  HTT spacer sequence CTCN PAM
cgcccgcgggacccgccgcc

SEQ ID NO: 8745 - RNA, 20 nt, Artificial Sequence
  HTT spacer sequence CTCN PAM
gccgccaggcgcucccgccc

SEQ ID NO: 8746 - RNA, 20 nt, Artificial Sequence
  HTT spacer sequence CTCN PAM
acccagggcccgcgggccag

SEQ ID NO: 8747 - RNA, 20 nt, Artificial Sequence
  HTT spacer sequence CTCN PAM
uggcccgcgggcccuggguc

SEQ ID NO: 8748 - RNA, 20 nt, Artificial Sequence
  HTT spacer sequence CTCN PAM
ccuggcccgcgggcccuggg

SEQ ID NO: 8749 - RNA, 20 nt, Artificial Sequence
  HTT spacer sequence CTCN PAM
gcggguaagccucggcggcg

SEQ ID NO: 8750 - RNA, 20 nt, Artificial Sequence
  HTT spacer sequence CTCN PAM
gcggcgggucucggcggguc

SEQ ID NO: 8751 - RNA, 20 nt, Artificial Sequence
  HTT spacer sequence CTCN PAM
gcgggucucgggggucucgc

SEQ ID NO: 8752 - RNA, 20 nt, Artificial Sequence
  HTT spacer sequence CTCN PAM
ggggucucgcgggggggcgg

SEQ ID NO: 8753 - RNA, 20 nt, Artificial Sequence
  HTT spacer sequence CTCN PAM
cgggggggcggucuccgcgu

SEQ ID NO: 8754 - RNA, 20 nt, Artificial Sequence
  HTT spacer sequence CTCN PAM
gcgucuggaaggggcucggc

SEQ ID NO: 8755 - RNA, 20 nt, Artificial Sequence
  HTT spacer sequence CTCN PAM
gcgggccuuggcggucuggg

SEQ ID NO: 8756 - RNA, 20 nt, Artificial Sequence
  HTT spacer sequence CTCN PAM
cggcgggucucgggggucuc

SEQ ID NO: 8757 - RNA, 20 nt, Artificial Sequence
  HTT spacer sequence CTCN PAM
gcgggucucgggggucucgg

SEQ ID NO: 8758 - RNA, 20 nt, Artificial Sequence
  HTT spacer sequence CTCN PAM
ggggucucgggggagucucg

SEQ ID NO: 8759 - RNA, 20 nt, Artificial Sequence
  HTT spacer sequence CTCN PAM
ggggagucucggggucccga

SEQ ID NO: 8760 - RNA, 20 nt, Artificial Sequence
  HTT spacer sequence CTCN PAM
cccgagacccccgagacccg

SEQ ID NO: 8761 - RNA, 20 nt, Artificial Sequence
  HTT spacer sequence CTCN PAM
gggucccgacaggucucggc

SEQ ID NO: 8762 - RNA, 20 nt, Artificial Sequence
  HTT spacer sequence CTCN PAM
gcgggucucgggggucucgg

SEQ ID NO: 8763 - RNA, 20 nt, Artificial Sequence
  HTT spacer sequence CTCN PAM
ggggucucgggggagucucc

SEQ ID NO: 8764 - RNA, 20 nt, Artificial Sequence
  HTT spacer sequence CTCN PAM
ggggagucuccggggagucu

SEQ ID NO: 8765 - RNA, 20 nt, Artificial Sequence
  HTT spacer sequence CTCN PAM
cccgagacccccgagacccg

SEQ ID NO: 8766 - RNA, 20 nt, Artificial Sequence
  HTT spacer sequence CTCN PAM
ggggagucucaggggucccg

SEQ ID NO: 8767 - RNA, 20 nt, Artificial Sequence
  HTT spacer sequence CTCN PAM
ccggagacucccccgagacc

SEQ ID NO: 8768 - RNA, 20 nt, Artificial Sequence
  HTT spacer sequence CTCN PAM
ggggucccggcaggucuugg

SEQ ID NO: 8769 - RNA, 20 nt, Artificial Sequence
  HTT spacer sequence CTCN PAM
ggggagucucagggucccgg

SEQ ID NO: 8770 - RNA, 20 nt, Artificial Sequence
  HTT spacer sequence CTCN PAM
cccgagaccugccaagaccu

SEQ ID NO: 8771 - RNA, 20 nt, Artificial Sequence
  HTT spacer sequence CTCN PAM
gggucccggcagguaugggc

SEQ ID NO: 8772 - RNA, 20 nt, Artificial Sequence
  HTT spacer sequence CTCN PAM
ggugcgcagcagccuccccc

SEQ ID NO: 8773 - RNA, 20 nt, Artificial Sequence
  HTT spacer sequence CTCN PAM
cccgggccccggggccuccg

SEQ ID NO: 8774 - RNA, 20 nt, Artificial Sequence
  HTT spacer sequence CTCN PAM
guguccuugccaaaggacgc

SEQ ID NO: 8775 - RNA, 20 nt, Artificial Sequence
  HTT spacer sequence CTCN PAM
ggcacugcccgccgugccca

SEQ ID NO: 8776 - RNA, 20 nt, Artificial Sequence
  HTT spacer sequence CTCN PAM
cucgggcacugcccgccgug

SEQ ID NO: 8777 - RNA, 20 nt, Artificial Sequence
  HTT spacer sequence CTCN PAM
ggggugggaggcggugcgac

SEQ ID NO: 8778 - RNA, 20 nt, Artificial Sequence
  HTT spacer sequence CTCN PAM
caccccugagcccccggcaa

SEQ ID NO: 8779 - RNA, 20 nt, Artificial Sequence
  HTT spacer sequence CTCN PAM
cgccccucuggccccgcggc

SEQ ID NO: 8780 - RNA, 20 nt, Artificial Sequence
  HTT spacer sequence CTCN PAM
ggccccgcggcggggccccu

SEQ ID NO: 8781 - RNA, 20 nt, Artificial Sequence
  HTT spacer sequence CTCN PAM
ccacaagacucaaaggcugc

SEQ ID NO: 8782 - RNA, 20 nt, Artificial Sequence
  HTT spacer sequence CTCN PAM
aaggcugcggcgggcacucg

SEQ ID NO: 8783 - RNA, 20 nt, Artificial Sequence
  HTT spacer sequence CTCN PAM
cucuccgcccuucccggaau

SEQ ID NO: 8784 - RNA, 20 nt, Artificial Sequence
  HTT spacer sequence CTCN PAM
ccgcccuucccggaauccaa

SEQ ID NO: 8785 - RNA, 20 nt, Artificial Sequence
  HTT spacer sequence CTCN PAM
gcccuucccggaauccaaac

SEQ ID NO: 8786 - RNA, 20 nt, Artificial Sequence
  HTT spacer sequence CTCN PAM
gcagcggccgcgcuucacgg

SEQ ID NO: 8787 - RNA, 20 nt, Artificial Sequence
  HTT spacer sequence CTCN PAM
gugaagcgcggccgcugcag

SEQ ID NO: 8788 - RNA, 20 nt, Artificial Sequence
  HTT spacer sequence CTCN PAM
cacuucagugugaaucagcg

SEQ ID NO: 8789 - RNA, 20 nt, Artificial Sequence
  HTT spacer sequence CTCN PAM
gacgcccggcuaucagucac

SEQ ID NO: 8790 - RNA, 20 nt, Artificial Sequence
  HTT spacer sequence CTCN PAM
caugggcaacagggaaucuc

SEQ ID NO: 8791 - RNA, 20 nt, Artificial Sequence
  HTT spacer sequence CTCN PAM
ugggcaacagggaaucucag

SEQ ID NO: 8792 - RNA, 20 nt, Artificial Sequence
  HTT spacer sequence CTCN PAM
gggguggcagagggacugga

SEQ ID NO: 8793 - RNA, 20 nt, Artificial Sequence
  HTT spacer sequence CTCN PAM
gccaccccugagauucccug

SEQ ID NO: 8794 - RNA, 20 nt, Artificial Sequence
  HTT spacer sequence CTCN PAM
agucccucugccaccccuga

SEQ ID NO: 8795 - RNA, 20 nt, Artificial Sequence
  HTT spacer sequence CTCN PAM
uccagucccucugccacccc

SEQ ID NO: 8796 - RNA, 20 nt, Artificial Sequence
  HTT spacer sequence CTCN PAM
cugcagcccagcacuuuccc

SEQ ID NO: 8797 - RNA, 20 nt, Artificial Sequence
  HTT spacer sequence CTCN PAM
gggccucggcucccuggggg

SEQ ID NO: 8798 - RNA, 20 nt, Artificial Sequence
  HTT spacer sequence CTCN PAM
gcucccuggggguauugagg

SEQ ID NO: 8799 - RNA, 20 nt, Artificial Sequence
  HTT spacer sequence CTCN PAM
cuggggguauugagggccug

SEQ ID NO: 8800 - RNA, 20 nt, Artificial Sequence
  HTT spacer sequence CTCN PAM
auacccccagggagccgagg

SEQ ID NO: 8801 - RNA, 20 nt, Artificial Sequence
  HTT spacer sequence CTCN PAM
ggcccucaauacccccaggg

SEQ ID NO: 8802 - RNA, 20 nt, Artificial Sequence
  HTT spacer sequence CTCN PAM
ccacagcagggcucaggccc

SEQ ID NO: 8803 - RNA, 20 nt, Artificial Sequence
  HTT spacer sequence CTCN PAM
uuuccgugagcaccuccuau

SEQ ID NO: 8804 - RNA, 20 nt, Artificial Sequence
  HTT spacer sequence CTCN PAM
cggaaaggagcaccagcaga

SEQ ID NO: 8805 - RNA, 20 nt, Artificial Sequence
  HTT spacer sequence CTCN PAM
uauccccucucugugccuca

SEQ ID NO: 8806 - RNA, 20 nt, Artificial Sequence
  HTT spacer sequence CTCN PAM
cugugccucaguuugcucau

SEQ ID NO: 8807 - RNA, 20 nt, Artificial Sequence
  HTT spacer sequence CTCN PAM
gugccucaguuugcucaucu

SEQ ID NO: 8808 - RNA, 20 nt, Artificial Sequence
  HTT spacer sequence CTCN PAM
guuugcucaucuguugacac

SEQ ID NO: 8809 - RNA, 20 nt, Artificial Sequence
  HTT spacer sequence CTCN PAM
ucuguugacacuggggacag

SEQ ID NO: 8810 - RNA, 20 nt, Artificial Sequence
  HTT spacer sequence CTCN PAM
uggucuaguggccacacuua

SEQ ID NO: 8811 - RNA, 20 nt, Artificial Sequence
  HTT spacer sequence CTCN PAM
gugugggcugcuggggugga

SEQ ID NO: 8812 - RNA, 20 nt, Artificial Sequence
  HTT spacer sequence CTCN PAM
uccuugccgaagcaagccuc

SEQ ID NO: 8813 - RNA, 20 nt, Artificial Sequence
  HTT spacer sequence CTCN PAM
uugccgaagcaagccucugg

SEQ ID NO: 8814 - RNA, 20 nt, Artificial Sequence
  HTT spacer sequence CTCN PAM
ggguucaggucagcccugca

SEQ ID NO: 8815 - RNA, 20 nt, Artificial Sequence
  HTT spacer sequence CTCN PAM
augagccuggacaagcuccu

SEQ ID NO: 8816 - RNA, 20 nt, Artificial Sequence
  HTT spacer sequence CTCN PAM
uggaguuggugcagggcuga

SEQ ID NO: 8817 - RNA, 20 nt, Artificial Sequence
  HTT spacer sequence CTCN PAM
ugcccucacuggcucaggcc

SEQ ID NO: 8818 - RNA, 20 nt, Artificial Sequence
  HTT spacer sequence CTCN PAM
cuggcucaggcccuguggga

SEQ ID NO: 8819 - RNA, 20 nt, Artificial Sequence
  HTT spacer sequence CTCN PAM
ggcccugugggaccagagga

SEQ ID NO: 8820 - RNA, 20 nt, Artificial Sequence
  HTT spacer sequence CTCN PAM
ggucccacagggccugagcc

SEQ ID NO: 8821 - RNA, 20 nt, Artificial Sequence
  HTT spacer sequence CTCN PAM
ucuggucccacagggccuga

SEQ ID NO: 8822 - RNA, 20 nt, Artificial Sequence
  HTT spacer sequence CTCN PAM
acccccuccugguucuuccc

SEQ ID NO: 8823 - RNA, 20 nt, Artificial Sequence
  HTT spacer sequence CTCN PAM
ugguucuucccacucugucc

SEQ ID NO: 8824 - RNA, 20 nt, Artificial Sequence
  HTT spacer sequence CTCN PAM
guccacugucuccucuacgu

SEQ ID NO: 8825 - RNA, 20 nt, Artificial Sequence
  HTT spacer sequence CTCN PAM
ucuacguagacaccgucgaa

SEQ ID NO: 8826 - RNA, 20 nt, Artificial Sequence
  HTT spacer sequence CTCN PAM
acguagacaccgucgaaggg

SEQ ID NO: 8827 - RNA, 20 nt, Artificial Sequence
  HTT spacer sequence CTCN PAM
uggagcccaaccucagggcc

SEQ ID NO: 8828 - RNA, 20 nt, Artificial Sequence
  HTT spacer sequence CTCN PAM
aagagggcccuucgacggug

SEQ ID NO: 8829 - RNA, 20 nt, Artificial Sequence
  HTT spacer sequence CTCN PAM
gggccccacuccaggcacuc

SEQ ID NO: 8830 - RNA, 20 nt, Artificial Sequence
  HTT spacer sequence CTCN PAM
aggcacuccacuccuggcag

SEQ ID NO: 8831 - RNA, 20 nt, Artificial Sequence
  HTT spacer sequence CTCN PAM
acuccuggcaggacaggagg

SEQ ID NO: 8832 - RNA, 20 nt, Artificial Sequence
  HTT spacer sequence CTCN PAM
uggcaggacaggaggccugg

SEQ ID NO: 8833 - RNA, 20 nt, Artificial Sequence
  HTT spacer sequence CTCN PAM
uguccugccaggaguggagu

SEQ ID NO: 8834 - RNA, 20 nt, Artificial Sequence
  HTT spacer sequence CTCN PAM
ucccaggccuccuguccugc

SEQ ID NO: 8835 - RNA, 20 nt, Artificial Sequence
  HTT spacer sequence CTCN PAM
cuugcagcccucgucccagg

SEQ ID NO: 8836 - RNA, 20 nt, Artificial Sequence
  HTT spacer sequence CTCN PAM
cucccuugcagcccucgucc

SEQ ID NO: 8837 - RNA, 20 nt, Artificial Sequence
  HTT spacer sequence CTCN PAM
cccugccacccgccaggcuc

SEQ ID NO: 8838 - RNA, 20 nt, Artificial Sequence
  HTT spacer sequence CTCN PAM
cugccacccgccaggcuccc

SEQ ID NO: 8839 - RNA, 20 nt, Artificial Sequence
  HTT spacer sequence CTCN PAM
cuuugccuggcucugugccc

SEQ ID NO: 8840 - RNA, 20 nt, Artificial Sequence
  HTT spacer sequence CTCN PAM
gugcccugcguuaggcacac

SEQ ID NO: 8841 - RNA, 20 nt, Artificial Sequence
  HTT spacer sequence CTCN PAM
agggugugccuaacgcaggg

SEQ ID NO: 8842 - RNA, 20 nt, Artificial Sequence
  HTT spacer sequence CTCN PAM
ccagauggcccuggcuggca

SEQ ID NO: 8843 - RNA, 20 nt, Artificial Sequence
  HTT spacer sequence CTCN PAM
caccagauggcccuggcugg

SEQ ID NO: 8844 - RNA, 20 nt, Artificial Sequence
  HTT spacer sequence CTCN PAM
cugaaaggccagguccccug

SEQ ID NO: 8845 - RNA, 20 nt, Artificial Sequence
  HTT spacer sequence CTCN PAM
aggaucaugggggagcccac

SEQ ID NO: 8846 - RNA, 20 nt, Artificial Sequence
  HTT spacer sequence CTCN PAM
cccaugauccuggaggccug

SEQ ID NO: 8847 - RNA, 20 nt, Artificial Sequence
  HTT spacer sequence CTCN PAM
uuggugggcucccccaugau

SEQ ID NO: 8848 - RNA, 20 nt, Artificial Sequence
  HTT spacer sequence CTCN PAM
ucaggccagccuccuuggug

SEQ ID NO: 8849 - RNA, 20 nt, Artificial Sequence
  HTT spacer sequence CTCN PAM
gucugccucuucaggccagc

SEQ ID NO: 8850 - RNA, 20 nt, Artificial Sequence
  HTT spacer sequence CTCN PAM
cucugucugccucuucaggc

SEQ ID NO: 8851 - RNA, 20 nt, Artificial Sequence
  HTT spacer sequence CTCN PAM
gggccugccuuggcccuuuc

SEQ ID NO: 8852 - RNA, 20 nt, Artificial Sequence
  HTT spacer sequence CTCN PAM
guccaugugggcagaaaggg

SEQ ID NO: 8853 - RNA, 20 nt, Artificial Sequence
  HTT spacer sequence CTCN PAM
gcacccugcuuccucugucc

SEQ ID NO: 8854 - RNA, 20 nt, Artificial Sequence
  HTT spacer sequence CTCN PAM
agcugacucagcacccugcu

SEQ ID NO: 8855 - RNA, 20 nt, Artificial Sequence
  HTT spacer sequence CTCN PAM
ccaccccccagggaugcacg

SEQ ID NO: 8856 - RNA, 20 nt, Artificial Sequence
  HTT spacer sequence CTCN PAM
gggccccuggacuucccguc

SEQ ID NO: 8857 - RNA, 20 nt, Artificial Sequence
  HTT spacer sequence CTCN PAM
cugggccccuggacuucccg

SEQ ID NO: 8858 - RNA, 20 nt, Artificial Sequence
  HTT spacer sequence CTCN PAM
ucucucugggccccuggacu

SEQ ID NO: 8859 - RNA, 20 nt, Artificial Sequence
  HTT spacer sequence CTCN PAM
ggaaccaaggcuggccaucu

SEQ ID NO: 8860 - RNA, 20 nt, Artificial Sequence
  HTT spacer sequence CTCN PAM
cugccccucaggaaccaagg

SEQ ID NO: 8861 - RNA, 20 nt, Artificial Sequence
  HTT spacer sequence CTCN PAM
gccaggaucuugggugugaa

SEQ ID NO: 8862 - RNA, 20 nt, Artificial Sequence
  HTT spacer sequence CTCN PAM
gaugccaccaguuuccagcu

SEQ ID NO: 8863 - RNA, 20 nt, Artificial Sequence
  HTT spacer sequence CTCN PAM
uggccaugaucacacagcug

SEQ ID NO: 8864 - RNA, 20 nt, Artificial Sequence
  HTT spacer sequence CTCN PAM
guuuucucauccaugaccug

SEQ ID NO: 8865 - RNA, 20 nt, Artificial Sequence
  HTT spacer sequence CTCN PAM
uccaugaccugagggcugug

SEQ ID NO: 8866 - RNA, 20 nt, Artificial Sequence
  HTT spacer sequence CTCN PAM
ggucauggaugagaaaacgg

SEQ ID NO: 8867 - RNA, 20 nt, Artificial Sequence
  HTT spacer sequence CTCN PAM
uagccacccaccagguacaa

SEQ ID NO: 8868 - RNA, 20 nt, Artificial Sequence
  HTT spacer sequence CTCN PAM
gcgacccacugucacugaau

SEQ ID NO: 8869 - RNA, 20 nt, Artificial Sequence
  HTT spacer sequence CTCN PAM
cccugguccucagggccgcu

SEQ ID NO: 8870 - RNA, 20 nt, Artificial Sequence
  HTT spacer sequence CTCN PAM
cugguccucagggccgcugu

SEQ ID NO: 8871 - RNA, 20 nt, Artificial Sequence
  HTT spacer sequence CTCN PAM
gggccgcuguauguccuguu

SEQ ID NO: 8872 - RNA, 20 nt, Artificial Sequence
  HTT spacer sequence CTCN PAM
aggccagucccugcccccac

SEQ ID NO: 8873 - RNA, 20 nt, Artificial Sequence
  HTT spacer sequence CTCN PAM
ccaggccagucccugccccc

SEQ ID NO: 8874 - RNA, 20 nt, Artificial Sequence
  HTT spacer sequence CTCN PAM
cagguuccugcccacauugg

SEQ ID NO: 8875 - RNA, 20 nt, Artificial Sequence
  HTT spacer sequence CTCN PAM
ggccuuaguccaaugugggc

SEQ ID NO: 8876 - RNA, 20 nt, Artificial Sequence
  HTT spacer sequence CTCN PAM
ugauggacucaggccuuagu

SEQ ID NO: 8877 - RNA, 20 nt, Artificial Sequence
  HTT spacer sequence CTCN PAM
aaagcucccuuguggggaca

SEQ ID NO: 8878 - RNA, 20 nt, Artificial Sequence
  HTT spacer sequence CTCN PAM
cuuguggggacaccccaggu

SEQ ID NO: 8879 - RNA, 20 nt, Artificial Sequence
  HTT spacer sequence CTCN PAM
gcccuccucacucucugucc

SEQ ID NO: 8880 - RNA, 20 nt, Artificial Sequence
  HTT spacer sequence CTCN PAM
ucacucucuguccucucuug

SEQ ID NO: 8881 - RNA, 20 nt, Artificial Sequence
  HTT spacer sequence CTCN PAM
cucucuguccucucuugacc

SEQ ID NO: 8882 - RNA, 20 nt, Artificial Sequence
  HTT spacer sequence CTCN PAM
cuguccucucuugaccucau

SEQ ID NO: 8883 - RNA, 20 nt, Artificial Sequence
  HTT spacer sequence CTCN PAM
guccucucuugaccucauga

SEQ ID NO: 8884 - RNA, 20 nt, Artificial Sequence
  HTT spacer sequence CTCN PAM
cuugaccucaugaucugccc

SEQ ID NO: 8885 - RNA, 20 nt, Artificial Sequence
  HTT spacer sequence CTCN PAM
ugaccucaugaucugcccac

SEQ ID NO: 8886 - RNA, 20 nt, Artificial Sequence
  HTT spacer sequence CTCN PAM
ugaucugcccaccucccaaa

SEQ ID NO: 8887 - RNA, 20 nt, Artificial Sequence
  HTT spacer sequence CTCN PAM
caaagugcugggauuacagg

SEQ ID NO: 8888 - RNA, 20 nt, Artificial Sequence
  HTT spacer sequence CTCN PAM
cgccuguaaucccagcacuu

SEQ ID NO: 8889 - RNA, 20 nt, Artificial Sequence
  HTT spacer sequence CTCN PAM
gccaggcgugggggcucacg

SEQ ID NO: 8890 - RNA, 20 nt, Artificial Sequence
  HTT spacer sequence CTCN PAM
cccacccaggcugcacagug

SEQ ID NO: 8891 - RNA, 20 nt, Artificial Sequence
  HTT spacer sequence CTCN PAM
ucacccacccaggcugcaca

SEQ ID NO: 8892 - RNA, 20 nt, Artificial Sequence
  HTT spacer sequence CTCN PAM
ccuuguggcaaauuccccgu

SEQ ID NO: 8893 - RNA, 20 nt, Artificial Sequence
  HTT spacer sequence CTCN PAM
caccuuguggcaaauucccc

SEQ ID NO: 8894 - RNA, 20 nt, Artificial Sequence
  HTT spacer sequence CTCN PAM
acugcgucugggguaggaca

SEQ ID NO: 8895 - RNA, 20 nt, Artificial Sequence
  HTT spacer sequence CTCN PAM
caccccucgggccaaugaau

SEQ ID NO: 8896 - RNA, 20 nt, Artificial Sequence
  HTT spacer sequence CTCN PAM
ggccaaugaauacagggugg

SEQ ID NO: 8897 - RNA, 20 nt, Artificial Sequence
  HTT spacer sequence CTCN PAM
ugacggcccacccuguauuc

SEQ ID NO: 8898 - RNA, 20 nt, Artificial Sequence
  HTT spacer sequence CTCN PAM
uccugacggcccacccugua

SEQ ID NO: 8899 - RNA, 20 nt, Artificial Sequence
  HTT spacer sequence CTCN PAM
gaucccuccuccugacggcc

SEQ ID NO: 8900 - RNA, 20 nt, Artificial Sequence
  HTT spacer sequence CTCN PAM
cuaccgcccgccuuuggcuu

SEQ ID NO: 8901 - RNA, 20 nt, Artificial Sequence
  HTT spacer sequence CTCN PAM
cacccucccuaccgcccgcc

SEQ ID NO: 8902 - RNA, 20 nt, Artificial Sequence
  HTT spacer sequence CTCN PAM
cgucaaacuggucucccacc

SEQ ID NO: 8903 - RNA, 20 nt, Artificial Sequence
  HTT spacer sequence CTCN PAM
ccacaccuggcaugcaaagg

SEQ ID NO: 8904 - RNA, 20 nt, Artificial Sequence
  HTT spacer sequence CTCN PAM
auacccucaccacaccuggc

SEQ ID NO: 8905 - RNA, 20 nt, Artificial Sequence
  HTT spacer sequence CTCN PAM
caggccccuccauacccuca

SEQ ID NO: 8906 - RNA, 20 nt, Artificial Sequence
  HTT spacer sequence CTCN PAM
uugccucccaggccccucca

SEQ ID NO: 8907 - RNA, 20 nt, Artificial Sequence
  HTT spacer sequence CTCN PAM
aggauaggcggcuccucccc

SEQ ID NO: 8908 - RNA, 20 nt, Artificial Sequence
  HTT spacer sequence CTCN PAM
uccccagaaggccucugcau

SEQ ID NO: 8909 - RNA, 20 nt, Artificial Sequence
  HTT spacer sequence CTCN PAM
ccagaaggccucugcauucu

SEQ ID NO: 8910 - RNA, 20 nt, Artificial Sequence
  HTT spacer sequence CTCN PAM
gcauucuucugguggcccug

SEQ ID NO: 8911 - RNA, 20 nt, Artificial Sequence
  HTT spacer sequence CTCN PAM
guguccagacagggccacca

SEQ ID NO: 8912 - RNA, 20 nt, Artificial Sequence
  HTT spacer sequence CTCN PAM
agccccucgguguccagaca

SEQ ID NO: 8913 - RNA, 20 nt, Artificial Sequence
  HTT spacer sequence CTCN PAM
gggacuuaggcagcccacac

SEQ ID NO: 8914 - RNA, 20 nt, Artificial Sequence
  HTT spacer sequence CTCN PAM
cuaccacccccucugggacu

SEQ ID NO: 8915 - RNA, 20 nt, Artificial Sequence
  HTT spacer sequence CTCN PAM
cuggcuggcccccuucccug

SEQ ID NO: 8916 - RNA, 20 nt, Artificial Sequence
  HTT spacer sequence CTCN PAM
ucaccaccccuuggccugug

SEQ ID NO: 8917 - RNA, 20 nt, Artificial Sequence
  HTT spacer sequence CTCN PAM
ccaccccuuggccugugcac

SEQ ID NO: 8918 - RNA, 20 nt, Artificial Sequence
  HTT spacer sequence CTCN PAM
cgugcacaggccaaggggug

SEQ ID NO: 8919 - RNA, 20 nt, Artificial Sequence
  HTT spacer sequence CTCN PAM
uggcaccauccugucuaccc

SEQ ID NO: 8920 - RNA, 20 nt, Artificial Sequence
  HTT spacer sequence CTCN PAM
gccacgggccaggagaccug

SEQ ID NO: 8921 - RNA, 20 nt, Artificial Sequence
  HTT spacer sequence CTCN PAM
uggcccguggcugagggcca

SEQ ID NO: 8922 - RNA, 20 nt, Artificial Sequence
  HTT spacer sequence CTCN PAM
ggucuccuggcccguggcug

SEQ ID NO: 8923 - RNA, 20 nt, Artificial Sequence
  HTT spacer sequence CTCN PAM
guuuccugaucugcaaaacg

SEQ ID NO: 8924 - RNA, 20 nt, Artificial Sequence
  HTT spacer sequence CTCN PAM
ggaccacgcugcuggauuug

SEQ ID NO: 8925 - RNA, 20 nt, Artificial Sequence
  HTT spacer sequence CTCN PAM
uccuucaagggugacgcgag

SEQ ID NO: 8926 - RNA, 20 nt, Artificial Sequence
  HTT spacer sequence CTCN PAM
cgucacccuugaaggaugag

SEQ ID NO: 8927 - RNA, 20 nt, Artificial Sequence
  HTT spacer sequence CTCN PAM
cgcgucacccuugaaggaug

SEQ ID NO: 8928 - RNA, 20 nt, Artificial Sequence
  HTT spacer sequence CTCN PAM
acccgccccgaaccugggca

SEQ ID NO: 8929 - RNA, 20 nt, Artificial Sequence
  HTT spacer sequence CTCN PAM
ugucugacccaggucuccac

SEQ ID NO: 8930 - RNA, 20 nt, Artificial Sequence
  HTT spacer sequence CTCN PAM
aacuccugucugacccaggu

SEQ ID NO: 8931 - RNA, 20 nt, Artificial Sequence
  HTT spacer sequence CTCN PAM
caggaggggagaaaggugcc

SEQ ID NO: 8932 - RNA, 20 nt, Artificial Sequence
  HTT spacer sequence CTCN PAM
ugggagccugcaccaccucg

SEQ ID NO: 8933 - RNA, 20 nt, Artificial Sequence
  HTT spacer sequence CTCN PAM
ccuccugggagccugcacca

SEQ ID NO: 8934 - RNA, 20 nt, Artificial Sequence
  HTT spacer sequence CTCN PAM
cccaaccuucucucuucucc

SEQ ID NO: 8935 - RNA, 20 nt, Artificial Sequence
  HTT spacer sequence CTCN PAM
cuucuccccaggcucuguaa

SEQ ID NO: 8936 - RNA, 20 nt, Artificial Sequence
  HTT spacer sequence CTCN PAM
ucuccccaggcucuguaacu

SEQ ID NO: 8937 - RNA, 20 nt, Artificial Sequence
  HTT spacer sequence CTCN PAM
ccaggcucuguaacuuccaa

SEQ ID NO: 8938 - RNA, 20 nt, Artificial Sequence
  HTT spacer sequence CTCN PAM
guaacuuccaaggccaugag

SEQ ID NO: 8939 - RNA, 20 nt, Artificial Sequence
  HTT spacer sequence CTCN PAM
uggccuuggaaguuacagag

SEQ ID NO: 8940 - RNA, 20 nt, Artificial Sequence
  HTT spacer sequence CTCN PAM
cauggccuuggaaguuacag

SEQ ID NO: 8941 - RNA, 20 nt, Artificial Sequence
  HTT spacer sequence CTCN PAM
gggcguuggggccagcaguu

SEQ ID NO: 8942 - RNA, 20 nt, Artificial Sequence
  HTT spacer sequence CTCN PAM
gggaagaaugugggcucggc

SEQ ID NO: 8943 - RNA, 20 nt, Artificial Sequence
  HTT spacer sequence CTCN PAM
gccaccuggagcaguugccu

SEQ ID NO: 8944 - RNA, 20 nt, Artificial Sequence
  HTT spacer sequence CTCN PAM
agguggccgagcccacauuc

SEQ ID NO: 8945 - RNA, 20 nt, Artificial Sequence
  HTT spacer sequence CTCN PAM
ccaggcaacugcuccaggug

SEQ ID NO: 8946 - RNA, 20 nt, Artificial Sequence
  HTT spacer sequence CTCN PAM
gaucuccccaggcaacugcu

SEQ ID NO: 8947 - RNA, 20 nt, Artificial Sequence
  HTT spacer sequence CTCN PAM
ucugaucuccccaggcaacu

SEQ ID NO: 8948 - RNA, 20 nt, Artificial Sequence
  HTT spacer sequence CTCN PAM
gggcuccucugaucucccca

SEQ ID NO: 8949 - RNA, 20 nt, Artificial Sequence
  HTT spacer sequence CTCN PAM
gccaaccccucagggcuccu

SEQ ID NO: 8950 - RNA, 20 nt, Artificial Sequence
  HTT spacer sequence CTCN PAM
ugguauccauacccccaucc

SEQ ID NO: 8951 - RNA, 20 nt, Artificial Sequence
  HTT spacer sequence CTCN PAM
gcuacagggauggggguaug

SEQ ID NO: 8952 - RNA, 20 nt, Artificial Sequence
  HTT spacer sequence CTCN PAM
gcuuccuugugaaucagaug

SEQ ID NO: 8953 - RNA, 20 nt, Artificial Sequence
  HTT spacer sequence CTCN PAM
ugcugagccugcuccaggca

SEQ ID NO: 8954 - RNA, 20 nt, Artificial Sequence
  HTT spacer sequence CTCN PAM
gcaggagcgcaguaaacauc

SEQ ID NO: 8955 - RNA, 20 nt, Artificial Sequence
  HTT spacer sequence CTCN PAM
aggcagcuggguggggcgua

SEQ ID NO: 8956 - RNA, 20 nt, Artificial Sequence
  HTT spacer sequence CTCN PAM
agccugcagagggaggccag

SEQ ID NO: 8957 - RNA, 20 nt, Artificial Sequence
  HTT spacer sequence CTCN PAM
gcaggcuugagcagacaggc

SEQ ID NO: 8958 - RNA, 20 nt, Artificial Sequence
  HTT spacer sequence CTCN PAM
cucugcaggcuugagcagac

SEQ ID NO: 8959 - RNA, 20 nt, Artificial Sequence
  HTT spacer sequence CTCN PAM
ccaccccagggucagccagg

SEQ ID NO: 8960 - RNA, 20 nt, Artificial Sequence
  HTT spacer sequence CTCN PAM
agaaggcagugugcgugcca

SEQ ID NO: 8961 - RNA, 20 nt, Artificial Sequence
  HTT spacer sequence CTCN PAM
gccccgugugccauggcacg

SEQ ID NO: 8962 - RNA, 20 nt, Artificial Sequence
  HTT spacer sequence CTCN PAM
cggccucagccccgugugcc

SEQ ID NO: 8963 - RNA, 20 nt, Artificial Sequence
  HTT spacer sequence CTCN PAM
gccccugccucgcggccuca

SEQ ID NO: 8964 - RNA, 20 nt, Artificial Sequence
  HTT spacer sequence CTCN PAM
gugccgcuucccucggcccc

SEQ ID NO: 8965 - RNA, 20 nt, Artificial Sequence
  HTT spacer sequence CTCN PAM
caggcaccagaggggagcug

SEQ ID NO: 8966 - RNA, 20 nt, Artificial Sequence
  HTT spacer sequence CTCN PAM
ggcaccagaggggagcugag

SEQ ID NO: 8967 - RNA, 20 nt, Artificial Sequence
  HTT spacer sequence CTCN PAM
ggugccugagagaagcucug

SEQ ID NO: 8968 - RNA, 20 nt, Artificial Sequence
  HTT spacer sequence CTCN PAM
ccucuggugccugagagaag

SEQ ID NO: 8969 - RNA, 20 nt, Artificial Sequence
  HTT spacer sequence CTCN PAM
gcuccccucuggugccugag

SEQ ID NO: 8970 - RNA, 20 nt, Artificial Sequence
  HTT spacer sequence CTCN PAM
gagcaggcuucgucugaggg

SEQ ID NO: 8971 - RNA, 20 nt, Artificial Sequence
  HTT spacer sequence CTCN PAM
gagcccagaacucagcuccc

SEQ ID NO: 8972 - RNA, 20 nt, Artificial Sequence
  HTT spacer sequence CTCN PAM
gacgaagccugcucugagcc

SEQ ID NO: 8973 - RNA, 20 nt, Artificial Sequence
  HTT spacer sequence CTCN PAM
uugugaaauggggugaaagu

SEQ ID NO: 8974 - RNA, 20 nt, Artificial Sequence
  HTT spacer sequence CTCN PAM
ugggaggccagauccccagg

SEQ ID NO: 8975 - RNA, 20 nt, Artificial Sequence
  HTT spacer sequence CTCN PAM
caugaguuagaccuacuuuc

SEQ ID NO: 8976 - RNA, 20 nt, Artificial Sequence
  HTT spacer sequence CTCN PAM
ggccuggggaucuggccucc

SEQ ID NO: 8977 - RNA, 20 nt, Artificial Sequence
  HTT spacer sequence CTCN PAM
cugcccuugacacuguguga

SEQ ID NO: 8978 - RNA, 20 nt, Artificial Sequence
  HTT spacer sequence CTCN PAM
guuugggggaguuccuucag

SEQ ID NO: 8979 - RNA, 20 nt, Artificial Sequence
  HTT spacer sequence CTCN PAM
cccaaacggagcugcccauu

SEQ ID NO: 8980 - RNA, 20 nt, Artificial Sequence
  HTT spacer sequence CTCN PAM
auccagggguguuguaaucu

SEQ ID NO: 8981 - RNA, 20 nt, Artificial Sequence
  HTT spacer sequence CTCN PAM
ucuguggcauuugagggucc

SEQ ID NO: 8982 - RNA, 20 nt, Artificial Sequence
  HTT spacer sequence CTCN PAM
aaugccacagaagagcauca

SEQ ID NO: 8983 - RNA, 20 nt, Artificial Sequence
  HTT spacer sequence CTCN PAM
ggacaguggacagggcugca

SEQ ID NO: 8984 - RNA, 20 nt, Artificial Sequence
  HTT spacer sequence CTCN PAM
cagaaugaccccugaucccu

SEQ ID NO: 8985 - RNA, 20 nt, Artificial Sequence
  HTT spacer sequence CTCN PAM
gccuugggagucuggggcag

SEQ ID NO: 8986 - RNA, 20 nt, Artificial Sequence
  HTT spacer sequence CTCN PAM
caaggcugagaaaaagccaa

SEQ ID NO: 8987 - RNA, 20 nt, Artificial Sequence
  HTT spacer sequence CTCN PAM
ggggcagugguggaccuccu

SEQ ID NO: 8988 - RNA, 20 nt, Artificial Sequence
  HTT spacer sequence CTCN PAM
uucagaaggcugcugcccag

SEQ ID NO: 8989 - RNA, 20 nt, Artificial Sequence
  HTT spacer sequence CTCN PAM
ugcaacacugggugccugug

SEQ ID NO: 8990 - RNA, 20 nt, Artificial Sequence
  HTT spacer sequence CTCN PAM
ugcagugcaugccuagccca

SEQ ID NO: 8991 - RNA, 20 nt, Artificial Sequence
  HTT spacer sequence CTCN PAM
gaccuguggccugucugcuc

SEQ ID NO: 8992 - RNA, 20 nt, Artificial Sequence
  HTT spacer sequence CTCN PAM
ccugccuggcccaccuugcc

SEQ ID NO: 8993 - RNA, 20 nt, Artificial Sequence
  HTT spacer sequence CTCN PAM
cucccuuagaagcaauuuca

SEQ ID NO: 8994 - RNA, 20 nt, Artificial Sequence
  HTT spacer sequence CTCN PAM
cccuuagaagcaauuucagc

SEQ ID NO: 8995 - RNA, 20 nt, Artificial Sequence
  HTT spacer sequence CTCN PAM
cuuagaagcaauuucagcug

SEQ ID NO: 8996 - RNA, 20 nt, Artificial Sequence
  HTT spacer sequence CTCN PAM
ggguacccucccuggccacc

SEQ ID NO: 8997 - RNA, 20 nt, Artificial Sequence
  HTT spacer sequence CTCN PAM
cuggccacccccaacuccac

SEQ ID NO: 8998 - RNA, 20 nt, Artificial Sequence
  HTT spacer sequence CTCN PAM
acccugagcugggugccuuc

SEQ ID NO: 8999 - RNA, 20 nt, Artificial Sequence
  HTT spacer sequence CTCN PAM
ggguggaguuggggguggcc

SEQ ID NO: 9000 - RNA, 20 nt, Artificial Sequence
  HTT spacer sequence CTCN PAM
ggaaggcacccagcucaggg

SEQ ID NO: 9001 - RNA, 20 nt, Artificial Sequence
  HTT spacer sequence CTCN PAM
ugcuugggaacucaggaagg

SEQ ID NO: 9002 - RNA, 20 nt, Artificial Sequence
  HTT spacer sequence CTCN PAM
ggaaggucagggucgcgucu

SEQ ID NO: 9003 - RNA, 20 nt, Artificial Sequence
  HTT spacer sequence CTCN PAM
gacgcgacccugaccuuccu

SEQ ID NO: 9004 - RNA, 20 nt, Artificial Sequence
  HTT spacer sequence CTCN PAM
cagacgcgacccugaccuuc

SEQ ID NO: 9005 - RNA, 20 nt, Artificial Sequence
  HTT spacer sequence CTCN PAM
gggacaggcccacgugggca

SEQ ID NO: 9006 - RNA, 20 nt, Artificial Sequence
  HTT spacer sequence CTCN PAM
cccuuccucugggacaggcc

SEQ ID NO: 9007 - RNA, 20 nt, Artificial Sequence
  HTT spacer sequence CTCN PAM
ccucacccuuccucugggac

SEQ ID NO: 9008 - RNA, 20 nt, Artificial Sequence
  HTT spacer sequence CTCN PAM
cccagccucccacuccuggg

SEQ ID NO: 9009 - RNA, 20 nt, Artificial Sequence
  HTT spacer sequence CTCN PAM
cagccucccacuccugggca

SEQ ID NO: 9010 - RNA, 20 nt, Artificial Sequence
  HTT spacer sequence CTCN PAM
cacuccugggcagggaagug

SEQ ID NO: 9011 - RNA, 20 nt, Artificial Sequence
  HTT spacer sequence CTCN PAM
ugggcagggaaguggcgcgg

SEQ ID NO: 9012 - RNA, 20 nt, Artificial Sequence
  HTT spacer sequence CTCN PAM
uugaagguggcuugucacuc

SEQ ID NO: 9013 - RNA, 20 nt, Artificial Sequence
  HTT spacer sequence CTCN PAM
ccccaccuguguuuaacucu

SEQ ID NO: 9014 - RNA, 20 nt, Artificial Sequence
  HTT spacer sequence CTCN PAM
acugagcaucagagccuaau

SEQ ID NO: 9015 - RNA, 20 nt, Artificial Sequence
  HTT spacer sequence CTCN PAM
guagaguuaaacacaggugg

SEQ ID NO: 9016 - RNA, 20 nt, Artificial Sequence
  HTT spacer sequence CTCN PAM
gaugcucaguagaguuaaac

SEQ ID NO: 9017 - RNA, 20 nt, Artificial Sequence
  HTT spacer sequence CTCN PAM
accaacugggcggcagcugc

SEQ ID NO: 9018 - RNA, 20 nt, Artificial Sequence
  HTT spacer sequence CTCN PAM
cacgaaacucuucagguuuc

SEQ ID NO: 9019 - RNA, 20 nt, Artificial Sequence
  HTT spacer sequence CTCN PAM
ucagguuuccaucacagccu

SEQ ID NO: 9020 - RNA, 20 nt, Artificial Sequence
  HTT spacer sequence CTCN PAM
ucccuucccccugcgggcug

SEQ ID NO: 9021 - RNA, 20 nt, Artificial Sequence
  HTT spacer sequence CTCN PAM
cuucccccugcgggcugcgc

SEQ ID NO: 9022 - RNA, 20 nt, Artificial Sequence
  HTT spacer sequence CTCN PAM
guggcccuggcagcgguaga

SEQ ID NO: 9023 - RNA, 20 nt, Artificial Sequence
  HTT spacer sequence CTCN PAM
cuaucuaccgcugccagggc

SEQ ID NO: 9024 - RNA, 20 nt, Artificial Sequence
  HTT spacer sequence CTCN PAM
ccaggcuuugguccucccua

SEQ ID NO: 9025 - RNA, 20 nt, Artificial Sequence
  HTT spacer sequence CTCN PAM
uccucaccaggcuuuggucc

SEQ ID NO: 9026 - RNA, 20 nt, Artificial Sequence
  HTT spacer sequence CTCN PAM
gcggcucuuccucaccaggc

SEQ ID NO: 9027 - RNA, 20 nt, Artificial Sequence
  HTT spacer sequence CTCN PAM
gcucggcggcucuuccucac

SEQ ID NO: 9028 - RNA, 20 nt, Artificial Sequence
  HTT spacer sequence CTCN PAM
cccugaacgaaagugcuuuc

SEQ ID NO: 9029 - RNA, 20 nt, Artificial Sequence
  HTT spacer sequence CTCN PAM
cugaacgaaagugcuuucuu

SEQ ID NO: 9030 - RNA, 20 nt, Artificial Sequence
  HTT spacer sequence CTCN PAM
guagcugcucuuccuaaacg

SEQ ID NO: 9031 - RNA, 20 nt, Artificial Sequence
  HTT spacer sequence CTCN PAM
uccuaaacguguguuggcuu

SEQ ID NO: 9032 - RNA, 20 nt, Artificial Sequence
  HTT spacer sequence CTCN PAM
agccaacacacguuuaggaa

SEQ ID NO: 9033 - RNA, 20 nt, Artificial Sequence
  HTT spacer sequence CTCN PAM
aaucucaagccaacacacgu

SEQ ID NO: 9034 - RNA, 20 nt, Artificial Sequence
  HTT spacer sequence CTCN PAM
uugggacccaaagcccuggu

SEQ ID NO: 9035 - RNA, 20 nt, Artificial Sequence
  HTT spacer sequence CTCN PAM
ggugccagcucuuugggacc

SEQ ID NO: 9036 - RNA, 20 nt, Artificial Sequence
  HTT spacer sequence CTCN PAM
ccauuaggagggcaaugggg

SEQ ID NO: 9037 - RNA, 20 nt, Artificial Sequence
  HTT spacer sequence CTCN PAM
uaauggugagaaauccggcc

SEQ ID NO: 9038 - RNA, 20 nt, Artificial Sequence
  HTT spacer sequence CTCN PAM
caggccagcuuuucuggauc

SEQ ID NO: 9039 - RNA, 20 nt, Artificial Sequence
  HTT spacer sequence CTCN PAM
gggcucccaggccagcuuuu

SEQ ID NO: 9040 - RNA, 20 nt, Artificial Sequence
  HTT spacer sequence CTCN PAM
augcagggcuguguaccccc

SEQ ID NO: 9041 - RNA, 20 nt, Artificial Sequence
  HTT spacer sequence CTCN PAM
gagccagaggaggcaggcca

SEQ ID NO: 9042 - RNA, 20 nt, Artificial Sequence
  HTT spacer sequence CTCN PAM
gagccuggucuccaugcagg

SEQ ID NO: 9043 - RNA, 20 nt, Artificial Sequence
  HTT spacer sequence CTCN PAM
ggcucugagccuggucucca

SEQ ID NO: 9044 - RNA, 20 nt, Artificial Sequence
  HTT spacer sequence CTCN PAM
ucuggcucugagccuggucu

SEQ ID NO: 9045 - RNA, 20 nt, Artificial Sequence
  HTT spacer sequence CTCN PAM
gcacucaucuccucucucgg

SEQ ID NO: 9046 - RNA, 20 nt, Artificial Sequence
  HTT spacer sequence CTCN PAM
ucuccucucucggaaacgcc

SEQ ID NO: 9047 - RNA, 20 nt, Artificial Sequence
  HTT spacer sequence CTCN PAM
ucucucggaaacgccccucc

SEQ ID NO: 9048 - RNA, 20 nt, Artificial Sequence
  HTT spacer sequence CTCN PAM
cucggaaacgccccucccug

SEQ ID NO: 9049 - RNA, 20 nt, Artificial Sequence
  HTT spacer sequence CTCN PAM
cggaaacgccccucccugac

SEQ ID NO: 9050 - RNA, 20 nt, Artificial Sequence
  HTT spacer sequence CTCN PAM
gaaacgccccucccugaccc

SEQ ID NO: 9051 - RNA, 20 nt, Artificial Sequence
  HTT spacer sequence CTCN PAM
cugaccccagcugcuuccuc

SEQ ID NO: 9052 - RNA, 20 nt, Artificial Sequence
  HTT spacer sequence CTCN PAM
ccuccuacucgaggccagaa

SEQ ID NO: 9053 - RNA, 20 nt, Artificial Sequence
  HTT spacer sequence CTCN PAM
uccuacucgaggccagaaag

SEQ ID NO: 9054 - RNA, 20 nt, Artificial Sequence
  HTT spacer sequence CTCN PAM
uacucgaggccagaaaggga

SEQ ID NO: 9055 - RNA, 20 nt, Artificial Sequence
  HTT spacer sequence CTCN PAM
aggccagaaagggaagcccc

SEQ ID NO: 9056 - RNA, 20 nt, Artificial Sequence
  HTT spacer sequence CTCN PAM
aguaggaggagaggaagcag

SEQ ID NO: 9057 - RNA, 20 nt, Artificial Sequence
  HTT spacer sequence CTCN PAM
ccccacuggaaaggggcuuc

SEQ ID NO: 9058 - RNA, 20 nt, Artificial Sequence
  HTT spacer sequence CTCN PAM
ggcagcgccagccacucacc

SEQ ID NO: 9059 - RNA, 20 nt, Artificial Sequence
  HTT spacer sequence CTCN PAM
gcugaccacugaucugccug

SEQ ID NO: 9060 - RNA, 20 nt, Artificial Sequence
  HTT spacer sequence CTCN PAM
cucugcugaccacugaucug

SEQ ID NO: 9061 - RNA, 20 nt, Artificial Sequence
  HTT spacer sequence CTCN PAM
gcccuggucaaacucacucu

SEQ ID NO: 9062 - RNA, 20 nt, Artificial Sequence
  HTT spacer sequence CTCN PAM
ggggaugcacccccgucauc

SEQ ID NO: 9063 - RNA, 20 nt, Artificial Sequence
  HTT spacer sequence CTCN PAM
uguggccucaggcguuccca

SEQ ID NO: 9064 - RNA, 20 nt, Artificial Sequence
  HTT spacer sequence CTCN PAM
ggcguucccaggcugagacc

SEQ ID NO: 9065 - RNA, 20 nt, Artificial Sequence
  HTT spacer sequence CTCN PAM
gccugggaacgccugaggcc

SEQ ID NO: 9066 - RNA, 20 nt, Artificial Sequence
  HTT spacer sequence CTCN PAM
aggaacacaggugcugggug

SEQ ID NO: 9067 - RNA, 20 nt, Artificial Sequence
  HTT spacer sequence CTCN PAM
gguggcuccaccaggccagg

SEQ ID NO: 9068 - RNA, 20 nt, Artificial Sequence
  HTT spacer sequence CTCN PAM
accaggccaggccgugugac

SEQ ID NO: 9069 - RNA, 20 nt, Artificial Sequence
  HTT spacer sequence CTCN PAM
gccuucucugggcagggcag

SEQ ID NO: 9070 - RNA, 20 nt, Artificial Sequence
  HTT spacer sequence CTCN PAM
gggcagggcagggacaggaa

SEQ ID NO: 9071 - RNA, 20 nt, Artificial Sequence
  HTT spacer sequence CTCN PAM
ugggaugcgugagggugagg

SEQ ID NO: 9072 - RNA, 20 nt, Artificial Sequence
  HTT spacer sequence CTCN PAM
cgcaucccaugaggcugcac

SEQ ID NO: 9073 - RNA, 20 nt, Artificial Sequence
  HTT spacer sequence CTCN PAM
cccucacgcaucccaugagg

SEQ ID NO: 9074 - RNA, 20 nt, Artificial Sequence
  HTT spacer sequence CTCN PAM
cacacaccccgccccagcag

SEQ ID NO: 9075 - RNA, 20 nt, Artificial Sequence
  HTT spacer sequence CTCN PAM
uggggggccacucccacaca

SEQ ID NO: 9076 - RNA, 20 nt, Artificial Sequence
  HTT spacer sequence CTCN PAM
aaagccggcgucaggucauc

SEQ ID NO: 9077 - RNA, 20 nt, Artificial Sequence
  HTT spacer sequence CTCN PAM
augaccugacgccggcuuug

SEQ ID NO: 9078 - RNA, 20 nt, Artificial Sequence
  HTT spacer sequence CTCN PAM
gggcugauuaggacuaaugg

SEQ ID NO: 9079 - RNA, 20 nt, Artificial Sequence
  HTT spacer sequence CTCN PAM
ggggugcagccucagccucc

SEQ ID NO: 9080 - RNA, 20 nt, Artificial Sequence
  HTT spacer sequence CTCN PAM
gccuccacccgccacccgua

SEQ ID NO: 9081 - RNA, 20 nt, Artificial Sequence
  HTT spacer sequence CTCN PAM
acccgccacccguacccgcc

SEQ ID NO: 9082 - RNA, 20 nt, Artificial Sequence
  HTT spacer sequence CTCN PAM
ggacuucguuccugcuguac

SEQ ID NO: 9083 - RNA, 20 nt, Artificial Sequence
  HTT spacer sequence CTCN PAM
uuccuccccaccggaggagc

SEQ ID NO: 9084 - RNA, 20 nt, Artificial Sequence
  HTT spacer sequence CTCN PAM
ccaccggaggagcugcuccc

SEQ ID NO: 9085 - RNA, 20 nt, Artificial Sequence
  HTT spacer sequence CTCN PAM
gguggggaggaaggagccac

SEQ ID NO: 9086 - RNA, 20 nt, Artificial Sequence
  HTT spacer sequence CTCN PAM
uccgguggggaggaaggagc

SEQ ID NO: 9087 - RNA, 20 nt, Artificial Sequence
  HTT spacer sequence CTCN PAM
caggcgggacccugggggug

SEQ ID NO: 9088 - RNA, 20 nt, Artificial Sequence
  HTT spacer sequence CTCN PAM
gaaaugccuuccccucggga

SEQ ID NO: 9089 - RNA, 20 nt, Artificial Sequence
  HTT spacer sequence CTCN PAM
ggacccucaccgcgacugga

SEQ ID NO: 9090 - RNA, 20 nt, Artificial Sequence
  HTT spacer sequence CTCN PAM
ccgcgacuggacuucgcuca

SEQ ID NO: 9091 - RNA, 20 nt, Artificial Sequence
  HTT spacer sequence CTCN PAM
gcuucagacccugggcugca

SEQ ID NO: 9092 - RNA, 20 nt, Artificial Sequence
  HTT spacer sequence CTCN PAM
uuaggcagcugcagcccagg

SEQ ID NO: 9093 - RNA, 20 nt, Artificial Sequence
  HTT spacer sequence CTCN PAM
acuuuacacacccagggccc

SEQ ID NO: 9094 - RNA, 20 nt, Artificial Sequence
  HTT spacer sequence CTCN PAM
cuccacuuuacacacccagg

SEQ ID NO: 9095 - RNA, 20 nt, Artificial Sequence
  HTT spacer sequence CTCN PAM
gagcccugagccauccuggg

SEQ ID NO: 9096 - RNA, 20 nt, Artificial Sequence
  HTT spacer sequence CTCN PAM
gagguggccacugccccucc

SEQ ID NO: 9097 - RNA, 20 nt, Artificial Sequence
  HTT spacer sequence CTCN PAM
gggcucagagguggccacug

SEQ ID NO: 9098 - RNA, 20 nt, Artificial Sequence
  HTT spacer sequence CTCN PAM
cugagaucaaccuucccauu

SEQ ID NO: 9099 - RNA, 20 nt, Artificial Sequence
  HTT spacer sequence CTCN PAM
gagaucaaccuucccauuuu

SEQ ID NO: 9100 - RNA, 20 nt, Artificial Sequence
  HTT spacer sequence CTCN PAM
gagagccccugccccaagua

SEQ ID NO: 9101 - RNA, 20 nt, Artificial Sequence
  HTT spacer sequence CTCN PAM
agaaaaugggaagguugauc

SEQ ID NO: 9102 - RNA, 20 nt, Artificial Sequence
  HTT spacer sequence CTCN PAM
uggucacauccucaagaaaa

SEQ ID NO: 9103 - RNA, 20 nt, Artificial Sequence
  HTT spacer sequence CTCN PAM
ggggcaggaaguugcugggg

SEQ ID NO: 9104 - RNA, 20 nt, Artificial Sequence
  HTT spacer sequence CTCN PAM
aucuucuuccuuccccagca

SEQ ID NO: 9105 - RNA, 20 nt, Artificial Sequence
  HTT spacer sequence CTCN PAM
gcagaggaucuagcgggccu

SEQ ID NO: 9106 - RNA, 20 nt, Artificial Sequence
  HTT spacer sequence CTCN PAM
gcagagguggggguuggggg

SEQ ID NO: 9107 - RNA, 20 nt, Artificial Sequence
  HTT spacer sequence CTCN PAM
ggacaccagcccuggaauag

SEQ ID NO: 9108 - RNA, 20 nt, Artificial Sequence
  HTT spacer sequence CTCN PAM
aagaccuacccagagccacc

SEQ ID NO: 9109 - RNA, 20 nt, Artificial Sequence
  HTT spacer sequence CTCN PAM
ggguaggucuucgagggggc

SEQ ID NO: 9110 - RNA, 20 nt, Artificial Sequence
  HTT spacer sequence CTCN PAM
cggauccccccgggggggcc

SEQ ID NO: 9111 - RNA, 20 nt, Artificial Sequence
  HTT spacer sequence CTCN PAM
uugagggggagcaggaggag

SEQ ID NO: 9112 - RNA, 20 nt, Artificial Sequence
  HTT spacer sequence CTCN PAM
aggaggcccccccgggggga

SEQ ID NO: 9113 - RNA, 20 nt, Artificial Sequence
  HTT spacer sequence CTCN PAM
cccucaaggaggcccccccg

SEQ ID NO: 9114 - RNA, 20 nt, Artificial Sequence
  HTT spacer sequence CTCN PAM
ugcucccccucaaggaggcc

SEQ ID NO: 9115 - RNA, 20 nt, Artificial Sequence
  HTT spacer sequence CTCN PAM
uccugcucccccucaaggag

SEQ ID NO: 9116 - RNA, 20 nt, Artificial Sequence
  HTT spacer sequence CTCN PAM
gccuggccccuccuccugcu

SEQ ID NO: 9117 - RNA, 20 nt, Artificial Sequence
  HTT spacer sequence CTCN PAM
ggcugugugaaagacacccu

SEQ ID NO: 9118 - RNA, 20 nt, Artificial Sequence
  HTT spacer sequence CTCN PAM
cuuuucaaaaccaggguguc

SEQ ID NO: 9119 - RNA, 20 nt, Artificial Sequence
  HTT spacer sequence CTCN PAM
cccuuuucaaaaccagggug

SEQ ID NO: 9120 - RNA, 20 nt, Artificial Sequence
  HTT spacer sequence CTCN PAM
agccccucucccuuuucaaa

SEQ ID NO: 9121 - RNA, 20 nt, Artificial Sequence
  HTT spacer sequence CTCN PAM
cuagccccucucccuuuuca

SEQ ID NO: 9122 - RNA, 20 nt, Artificial Sequence
  HTT spacer sequence CTCN PAM
ggccccaccucucuagcccc

SEQ ID NO: 9123 - RNA, 20 nt, Artificial Sequence
  HTT spacer sequence CTCN PAM
ggggucuggagaccacugcc

SEQ ID NO: 9124 - RNA, 20 nt, Artificial Sequence
  HTT spacer sequence CTCN PAM
agaccccagaguaagcuuga

SEQ ID NO: 9125 - RNA, 20 nt, Artificial Sequence
  HTT spacer sequence CTCN PAM
aagcaguggccacaagaaga

SEQ ID NO: 9126 - RNA, 20 nt, Artificial Sequence
  HTT spacer sequence CTCN PAM
uggucuucuuguggccacug

SEQ ID NO: 9127 - RNA, 20 nt, Artificial Sequence
  HTT spacer sequence CTCN PAM
ucauggucuucuuguggcca

SEQ ID NO: 9128 - RNA, 20 nt, Artificial Sequence
  HTT spacer sequence CTCN PAM
ggcggggucuggggaaaggg

SEQ ID NO: 9129 - RNA, 20 nt, Artificial Sequence
  HTT spacer sequence CTCN PAM
acgaacccacuucugucugu

SEQ ID NO: 9130 - RNA, 20 nt, Artificial Sequence
  HTT spacer sequence CTCN PAM
cacccagccuucugcagccu

SEQ ID NO: 9131 - RNA, 20 nt, Artificial Sequence
  HTT spacer sequence CTCN PAM
acucccacccagccuucugc

SEQ ID NO: 9132 - RNA, 20 nt, Artificial Sequence
  HTT spacer sequence CTCN PAM
uccacucccacccagccuuc

SEQ ID NO: 9133 - RNA, 20 nt, Artificial Sequence
  HTT spacer sequence CTCN PAM
ccuuucauccccuguagccc

SEQ ID NO: 9134 - RNA, 20 nt, Artificial Sequence
  HTT spacer sequence CTCN PAM
cuccccuuucauccccugua

SEQ ID NO: 9135 - RNA, 20 nt, Artificial Sequence
  HTT spacer sequence CTCN PAM
gcagucugcugcucccuccc

SEQ ID NO: 9136 - RNA, 20 nt, Artificial Sequence
  HTT spacer sequence CTCN PAM
gucucccuccuccuuggcug

SEQ ID NO: 9137 - RNA, 20 nt, Artificial Sequence
  HTT spacer sequence CTCN PAM
cuccuccuuggcuggcuuuu

SEQ ID NO: 9138 - RNA, 20 nt, Artificial Sequence
  HTT spacer sequence CTCN PAM
uccuuggcuggcuuuucugg

SEQ ID NO: 9139 - RNA, 20 nt, Artificial Sequence
  HTT spacer sequence CTCN PAM
uuggcuggcuuuucuggcag

SEQ ID NO: 9140 - RNA, 20 nt, Artificial Sequence
  HTT spacer sequence CTCN PAM
ggaccaugccacugucugcc

SEQ ID NO: 9141 - RNA, 20 nt, Artificial Sequence
  HTT spacer sequence CTCN PAM
cuggggagggaaagggcauc

SEQ ID NO: 9142 - RNA, 20 nt, Artificial Sequence
  HTT spacer sequence CTCN PAM
ccagggaggcagcucuggac

SEQ ID NO: 9143 - RNA, 20 nt, Artificial Sequence
  HTT spacer sequence CTCN PAM
ugaggcuguguccccagagu

SEQ ID NO: 9144 - RNA, 20 nt, Artificial Sequence
  HTT spacer sequence CTCN PAM
ggagugacuuggggaugccc

SEQ ID NO: 9145 - RNA, 20 nt, Artificial Sequence
  HTT spacer sequence CTCN PAM
ggggacacagccucaggagu

SEQ ID NO: 9146 - RNA, 20 nt, Artificial Sequence
  HTT spacer sequence CTCN PAM
cugucugaugcagccugccc

SEQ ID NO: 9147 - RNA, 20 nt, Artificial Sequence
  HTT spacer sequence CTCN PAM
ggcaggggcaggcugcauca

SEQ ID NO: 9148 - RNA, 20 nt, Artificial Sequence
  HTT spacer sequence CTCN PAM
ggcagcucaggcaggggcag

SEQ ID NO: 9149 - RNA, 20 nt, Artificial Sequence
  HTT spacer sequence CTCN PAM
uggcugggaagcagccacgg

SEQ ID NO: 9150 - RNA, 20 nt, Artificial Sequence
  HTT spacer sequence CTCN PAM
uccuggcugggaagcagcca

SEQ ID NO: 9151 - RNA, 20 nt, Artificial Sequence
  HTT spacer sequence CTCN PAM
agagucuuacugccacccga

SEQ ID NO: 9152 - RNA, 20 nt, Artificial Sequence
  HTT spacer sequence CTCN PAM
ggagucagcagggccuguaa

SEQ ID NO: 9153 - RNA, 20 nt, Artificial Sequence
  HTT spacer sequence CTCN PAM
gguggcaguaagacucugga

SEQ ID NO: 9154 - RNA, 20 nt, Artificial Sequence
  HTT spacer sequence CTCN PAM
acguacugcucggguggcag

SEQ ID NO: 9155 - RNA, 20 nt, Artificial Sequence
  HTT spacer sequence CTCN PAM
ggggaggcugucucgggcuc

SEQ ID NO: 9156 - RNA, 20 nt, Artificial Sequence
  HTT spacer sequence CTCN PAM
ccagagcccccaggugaagu

SEQ ID NO: 9157 - RNA, 20 nt, Artificial Sequence
  HTT spacer sequence CTCN PAM
ggcucccgugccaggggugg

SEQ ID NO: 9158 - RNA, 20 nt, Artificial Sequence
  HTT spacer sequence CTCN PAM
cgugccaggggugggugcag

SEQ ID NO: 9159 - RNA, 20 nt, Artificial Sequence
  HTT spacer sequence CTCN PAM
cugcacccaccccuggcacg

SEQ ID NO: 9160 - RNA, 20 nt, Artificial Sequence
  HTT spacer sequence CTCN PAM
ugccugcccagccucccugc

SEQ ID NO: 9161 - RNA, 20 nt, Artificial Sequence
  HTT spacer sequence CTCN PAM
ccugccugcccagccucccu

SEQ ID NO: 9162 - RNA, 20 nt, Artificial Sequence
  HTT spacer sequence CTCN PAM
ggccucggcucccacggguc

SEQ ID NO: 9163 - RNA, 20 nt, Artificial Sequence
  HTT spacer sequence CTCN PAM
gcucccacgggucuggggcu

SEQ ID NO: 9164 - RNA, 20 nt, Artificial Sequence
  HTT spacer sequence CTCN PAM
cacgggucuggggcuguggu

SEQ ID NO: 9165 - RNA, 20 nt, Artificial Sequence
  HTT spacer sequence CTCN PAM
aguuaggguccccaaccacc

SEQ ID NO: 9166 - RNA, 20 nt, Artificial Sequence
  HTT spacer sequence CTCN PAM
gaggaaggaccuggccugga

SEQ ID NO: 9167 - RNA, 20 nt, Artificial Sequence
  HTT spacer sequence CTCN PAM
gaggggugaauggcucuagu

SEQ ID NO: 9168 - RNA, 20 nt, Artificial Sequence
  HTT spacer sequence CTCN PAM
aggccagguccuuccucaga

SEQ ID NO: 9169 - RNA, 20 nt, Artificial Sequence
  HTT spacer sequence CTCN PAM
cuggggauggcgcuccaggc

SEQ ID NO: 9170 - RNA, 20 nt, Artificial Sequence
  HTT spacer sequence CTCN PAM
cgccuggccuucugcccccg

SEQ ID NO: 9171 - RNA, 20 nt, Artificial Sequence
  HTT spacer sequence CTCN PAM
agccguuccccaccugcaaa

SEQ ID NO: 9172 - RNA, 20 nt, Artificial Sequence
  HTT spacer sequence CTCN PAM
uggaacagccugagaggugu

SEQ ID NO: 9173 - RNA, 20 nt, Artificial Sequence
  HTT spacer sequence CTCN PAM
ggcuguuccacgaguuccuc

SEQ ID NO: 9174 - RNA, 20 nt, Artificial Sequence
  HTT spacer sequence CTCN PAM
caggcuguuccacgaguucc

SEQ ID NO: 9175 - RNA, 20 nt, Artificial Sequence
  HTT spacer sequence CTCN PAM
ccggacaccucucaggcugu

SEQ ID NO: 9176 - RNA, 20 nt, Artificial Sequence
  HTT spacer sequence CTCN PAM
aggccacccaugcccuaccu

SEQ ID NO: 9177 - RNA, 20 nt, Artificial Sequence
  HTT spacer sequence CTCN PAM
gggcucaaggccacccaugc

SEQ ID NO: 9178 - RNA, 20 nt, Artificial Sequence
  HTT spacer sequence CTCN PAM
gccucagggcucaaggccac

SEQ ID NO: 9179 - RNA, 20 nt, Artificial Sequence
  HTT spacer sequence CTCN PAM
gcucagccucagggcucaag

SEQ ID NO: 9180 - RNA, 20 nt, Artificial Sequence
  HTT spacer sequence CTCN PAM
aagacagcuccgcucagccu

SEQ ID NO: 9181 - RNA, 20 nt, Artificial Sequence
  HTT spacer sequence CTCN PAM
caaagacagcuccgcucagc

SEQ ID NO: 9182 - RNA, 20 nt, Artificial Sequence
  HTT spacer sequence CTCN PAM
gcugaggcugcagcagaaag

SEQ ID NO: 9183 - RNA, 20 nt, Artificial Sequence
  HTT spacer sequence CTCN PAM
gcagagguggcucucaaaga

SEQ ID NO: 9184 - RNA, 20 nt, Artificial Sequence
  HTT spacer sequence CTCN PAM
gagggaggaaggagcugggc

SEQ ID NO: 9185 - RNA, 20 nt, Artificial Sequence
  HTT spacer sequence CTCN PAM
gagccagccugucacagccu

SEQ ID NO: 9186 - RNA, 20 nt, Artificial Sequence
  HTT spacer sequence CTCN PAM
cucggagccagccugucaca

SEQ ID NO: 9187 - RNA, 20 nt, Artificial Sequence
  HTT spacer sequence CTCN PAM
uuccucccucggagccagcc

SEQ ID NO: 9188 - RNA, 20 nt, Artificial Sequence
  HTT spacer sequence CTCN PAM
gcccccaaccaugcaacugu

SEQ ID NO: 9189 - RNA, 20 nt, Artificial Sequence
  HTT spacer sequence CTCN PAM
ccgcccccaaccaugcaacu

SEQ ID NO: 9190 - RNA, 20 nt, Artificial Sequence
  HTT spacer sequence CTCN PAM
ucuccgcccccaaccaugca

SEQ ID NO: 9191 - RNA, 20 nt, Artificial Sequence
  HTT spacer sequence CTCN PAM
uccucuccgcccccaaccau

SEQ ID NO: 9192 - RNA, 20 nt, Artificial Sequence
  HTT spacer sequence CTCN PAM
accccugccugucuugaccg

SEQ ID NO: 9193 - RNA, 20 nt, Artificial Sequence
  HTT spacer sequence CTCN PAM
gcggucaagacaggcagggg

SEQ ID NO: 9194 - RNA, 20 nt, Artificial Sequence
  HTT spacer sequence CTCN PAM
gcaccccugcagucugggcc

SEQ ID NO: 9195 - RNA, 20 nt, Artificial Sequence
  HTT spacer sequence CTCN PAM
cugcaccccugcagucuggg

SEQ ID NO: 9196 - RNA, 20 nt, Artificial Sequence
  HTT spacer sequence CTCN PAM
gccgcagccucucugcaccc

SEQ ID NO: 9197 - RNA, 20 nt, Artificial Sequence
  HTT spacer sequence CTCN PAM
uuucccggcaggccgggccc

SEQ ID NO: 9198 - RNA, 20 nt, Artificial Sequence
  HTT spacer sequence CTCN PAM
cugggccucucugaacagug

SEQ ID NO: 9199 - RNA, 20 nt, Artificial Sequence
  HTT spacer sequence CTCN PAM
cugaacaguggagcguugug

SEQ ID NO: 9200 - RNA, 20 nt, Artificial Sequence
  HTT spacer sequence CTCN PAM
gaacaguggagcguugugag

SEQ ID NO: 9201 - RNA, 20 nt, Artificial Sequence
  HTT spacer sequence CTCN PAM
acuguucagagaggcccagu

SEQ ID NO: 9202 - RNA, 20 nt, Artificial Sequence
  HTT spacer sequence CTCN PAM
caacgcuccacuguucagag

SEQ ID NO: 9203 - RNA, 20 nt, Artificial Sequence
  HTT spacer sequence CTCN PAM
gggccacgcugagggugagg

SEQ ID NO: 9204 - RNA, 20 nt, Artificial Sequence
  HTT spacer sequence CTCN PAM
gcguggcccagagggggccu

SEQ ID NO: 9205 - RNA, 20 nt, Artificial Sequence
  HTT spacer sequence CTCN PAM
cccucagcguggcccagagg

SEQ ID NO: 9206 - RNA, 20 nt, Artificial Sequence
  HTT spacer sequence CTCN PAM
uguccucacccucagcgugg

SEQ ID NO: 9207 - RNA, 20 nt, Artificial Sequence
  HTT spacer sequence CTCN PAM
ugcccgcuggcuccuguccu

SEQ ID NO: 9208 - RNA, 20 nt, Artificial Sequence
  HTT spacer sequence CTCN PAM
gggcccgggcaggggacagg

SEQ ID NO: 9209 - RNA, 20 nt, Artificial Sequence
  HTT spacer sequence CTCN PAM
gggguucccaggcugaggag

SEQ ID NO: 9210 - RNA, 20 nt, Artificial Sequence
  HTT spacer sequence CTCN PAM
gccugggaaccccagagccu

SEQ ID NO: 9211 - RNA, 20 nt, Artificial Sequence
  HTT spacer sequence CTCN PAM
ucagccugggaaccccagag

SEQ ID NO: 9212 - RNA, 20 nt, Artificial Sequence
  HTT spacer sequence CTCN PAM
cgguuccccaacccgggguc

SEQ ID NO: 9213 - RNA, 20 nt, Artificial Sequence
  HTT spacer sequence CTCN PAM
guuccccaacccggggucug

SEQ ID NO: 9214 - RNA, 20 nt, Artificial Sequence
  HTT spacer sequence CTCN PAM
uucuuccuucuuuuugccuc

SEQ ID NO: 9215 - RNA, 20 nt, Artificial Sequence
  HTT spacer sequence CTCN PAM
cugucagcaccucuuccugu

SEQ ID NO: 9216 - RNA, 20 nt, Artificial Sequence
  HTT spacer sequence CTCN PAM
gucagcaccucuuccuguug

SEQ ID NO: 9217 - RNA, 20 nt, Artificial Sequence
  HTT spacer sequence CTCN PAM
uccuguugccucccucuugc

SEQ ID NO: 9218 - RNA, 20 nt, Artificial Sequence
  HTT spacer sequence CTCN PAM
cucuugcuccugggccugcc

SEQ ID NO: 9219 - RNA, 20 nt, Artificial Sequence
  HTT spacer sequence CTCN PAM
ugcuccugggccugccugca

SEQ ID NO: 9220 - RNA, 20 nt, Artificial Sequence
  HTT spacer sequence CTCN PAM
ugggccugccugcaucuccc

SEQ ID NO: 9221 - RNA, 20 nt, Artificial Sequence
  HTT spacer sequence CTCN PAM
cuuccccuguccggccagag

SEQ ID NO: 9222 - RNA, 20 nt, Artificial Sequence
  HTT spacer sequence CTCN PAM
ggccggacaggggaagggag

SEQ ID NO: 9223 - RNA, 20 nt, Artificial Sequence
  HTT spacer sequence CTCN PAM
caggccggggucucuggccg

SEQ ID NO: 9224 - RNA, 20 nt, Artificial Sequence
  HTT spacer sequence CTCN PAM
cccaccccgaugccugcugc

SEQ ID NO: 9225 - RNA, 20 nt, Artificial Sequence
  HTT spacer sequence CTCN PAM
caccccgaugccugcugcag

SEQ ID NO: 9226 - RNA, 20 nt, Artificial Sequence
  HTT spacer sequence CTCN PAM
gcuggggcugcagcaggcau

SEQ ID NO: 9227 - RNA, 20 nt, Artificial Sequence
  HTT spacer sequence CTCN PAM
aggcgacaggccagccccuc

SEQ ID NO: 9228 - RNA, 20 nt, Artificial Sequence
  HTT spacer sequence CTCN PAM
caggccagcacaggugggcu

SEQ ID NO: 9229 - RNA, 20 nt, Artificial Sequence
  HTT spacer sequence CTCN PAM
uggggccacucacaggccag

SEQ ID NO: 9230 - RNA, 20 nt, Artificial Sequence
  HTT spacer sequence CTCN PAM
ugaggccaaccuaaaauuua

SEQ ID NO: 9231 - RNA, 20 nt, Artificial Sequence
  HTT spacer sequence CTCN PAM
ggagguuuccugucuaggcu

SEQ ID NO: 9232 - RNA, 20 nt, Artificial Sequence
  HTT spacer sequence CTCN PAM
ggguuuauuauucuauuccc

SEQ ID NO: 9233 - RNA, 20 nt, Artificial Sequence
  HTT spacer sequence CTCN PAM
cuggguuuauuauucuauuc

SEQ ID NO: 9234 - RNA, 20 nt, Artificial Sequence
  HTT spacer sequence CTCN PAM
ugccuguaaucccagcacuu

SEQ ID NO: 9235 - RNA, 20 nt, Artificial Sequence
  HTT spacer sequence CTCN PAM
caaagugcugggauuacagg

SEQ ID NO: 9236 - RNA, 20 nt, Artificial Sequence
  HTT spacer sequence CTCN PAM
acuaauccacccgccuuggc

SEQ ID NO: 9237 - RNA, 20 nt, Artificial Sequence
  HTT spacer sequence CTCN PAM
ugaccucaacuaauccaccc

SEQ ID NO: 9238 - RNA, 20 nt, Artificial Sequence
  HTT spacer sequence CTCN PAM
acuaaaaauacaaaaauaag

SEQ ID NO: 9239 - RNA, 20 nt, Artificial Sequence
  HTT spacer sequence CTCN PAM
ggaggcugagacgugagaau

SEQ ID NO: 9240 - RNA, 20 nt, Artificial Sequence
  HTT spacer sequence CTCN PAM
cgaguagcugggauuacaag

SEQ ID NO: 9241 - RNA, 20 nt, Artificial Sequence
  HTT spacer sequence CTCN PAM
gccucccgaguagcugggau

SEQ ID NO: 9242 - RNA, 20 nt, Artificial Sequence
  HTT spacer sequence CTCN PAM
cgucucagccucccgaguag

SEQ ID NO: 9243 - RNA, 20 nt, Artificial Sequence
  HTT spacer sequence CTCN PAM
caguuucaagcaauucucac

SEQ ID NO: 9244 - RNA, 20 nt, Artificial Sequence
  HTT spacer sequence CTCN PAM
gccucccaguuucaagcaau

SEQ ID NO: 9245 - RNA, 20 nt, Artificial Sequence
  HTT spacer sequence CTCN PAM
aaccucugccucccaguuuc

SEQ ID NO: 9246 - RNA, 20 nt, Artificial Sequence
  HTT spacer sequence CTCN PAM
cuccaaccucugccucccag

SEQ ID NO: 9247 - RNA, 20 nt, Artificial Sequence
  HTT spacer sequence CTCN PAM
agccugggugacagagagac

SEQ ID NO: 9248 - RNA, 20 nt, Artificial Sequence
  HTT spacer sequence CTCN PAM
gucacccaggcuggagugca

SEQ ID NO: 9249 - RNA, 20 nt, Artificial Sequence
  HTT spacer sequence CTCN PAM
cugucacccaggcuggagug

SEQ ID NO: 9250 - RNA, 20 nt, Artificial Sequence
  HTT spacer sequence CTCN PAM
aaaaaaaaggggccgggcgc

SEQ ID NO: 9251 - RNA, 20 nt, Artificial Sequence
  HTT spacer sequence CTCN PAM
cacuuguaaucccagcacuu

SEQ ID NO: 9252 - RNA, 20 nt, Artificial Sequence
  HTT spacer sequence CTCN PAM
caaagugcugggauuacaag

SEQ ID NO: 9253 - RNA, 20 nt, Artificial Sequence
  HTT spacer sequence CTCN PAM
gccucccaaagugcugggau

SEQ ID NO: 9254 - RNA, 20 nt, Artificial Sequence
  HTT spacer sequence CTCN PAM
ggugaucugccggccucggc

SEQ ID NO: 9255 - RNA, 20 nt, Artificial Sequence
  HTT spacer sequence CTCN PAM
ugaccucaggugaucugccg

SEQ ID NO: 9256 - RNA, 20 nt, Artificial Sequence
  HTT spacer sequence CTCN PAM
acuaaaaauacaaauuagcu

SEQ ID NO: 9257 - RNA, 20 nt, Artificial Sequence
  HTT spacer sequence CTCN PAM
uauagcugggauuacagguc

SEQ ID NO: 9258 - RNA, 20 nt, Artificial Sequence
  HTT spacer sequence CTCN PAM
gccuccuauagcugggauua

SEQ ID NO: 9259 - RNA, 20 nt, Artificial Sequence
  HTT spacer sequence CTCN PAM
ugccucagccuccuauagcu

SEQ ID NO: 9260 - RNA, 20 nt, Artificial Sequence
  HTT spacer sequence CTCN PAM
uugguucaagcacuucuccu

SEQ ID NO: 9261 - RNA, 20 nt, Artificial Sequence
  HTT spacer sequence CTCN PAM
gucuccuugguucaagcacu

SEQ ID NO: 9262 - RNA, 20 nt, Artificial Sequence
  HTT spacer sequence CTCN PAM
uugcaaccucugucuccuug

SEQ ID NO: 9263 - RNA, 20 nt, Artificial Sequence
  HTT spacer sequence CTCN PAM
cuuuggugcccaggcuagaa

SEQ ID NO: 9264 - RNA, 20 nt, Artificial Sequence
  HTT spacer sequence CTCN PAM
gucucaaaaaaauauaugug

SEQ ID NO: 9265 - RNA, 20 nt, Artificial Sequence
  HTT spacer sequence CTCN PAM
aaaaaauauaugugugugug

SEQ ID NO: 9266 - RNA, 20 nt, Artificial Sequence
  HTT spacer sequence CTCN PAM
agugcugaaaugaguggaca

SEQ ID NO: 9267 - RNA, 20 nt, Artificial Sequence
  HTT spacer sequence CTCN PAM
uuucagcacuugaggguuag

SEQ ID NO: 9268 - RNA, 20 nt, Artificial Sequence
  HTT spacer sequence CTCN PAM
guccacucauuucagcacuu

SEQ ID NO: 9269 - RNA, 20 nt, Artificial Sequence
  HTT spacer sequence CTCN PAM
gccuuggugggucccagccu

SEQ ID NO: 9270 - RNA, 20 nt, Artificial Sequence
  HTT spacer sequence CTCN PAM
cuuacccaggaacccuguca

SEQ ID NO: 9271 - RNA, 20 nt, Artificial Sequence
  HTT spacer sequence CTCN PAM
guggugcacagaggagccau

SEQ ID NO: 9272 - RNA, 20 nt, Artificial Sequence
  HTT spacer sequence CTCN PAM
gugcaccacugaggguccuu

SEQ ID NO: 9273 - RNA, 20 nt, Artificial Sequence
  HTT spacer sequence CTCN PAM
ucugugcaccacugaggguc

SEQ ID NO: 9274 - RNA, 20 nt, Artificial Sequence
  HTT spacer sequence CTCN PAM
ugggucagggcaaaggacgc

SEQ ID NO: 9275 - RNA, 20 nt, Artificial Sequence
  HTT spacer sequence CTCN PAM
gcccaggcacuuuacggcgu

SEQ ID NO: 9276 - RNA, 20 nt, Artificial Sequence
  HTT spacer sequence CTCN PAM
ggcucagcccaggcacuuua

SEQ ID NO: 9277 - RNA, 20 nt, Artificial Sequence
  HTT spacer sequence CTCN PAM
ugcacacaccucgggcucag

SEQ ID NO: 9278 - RNA, 20 nt, Artificial Sequence
  HTT spacer sequence CTCN PAM
cuuggaccgcacaaaaccau

SEQ ID NO: 9279 - RNA, 20 nt, Artificial Sequence
  HTT spacer sequence CTCN PAM
ucaccgugguacuuuucgua

SEQ ID NO: 9280 - RNA, 20 nt, Artificial Sequence
  HTT spacer sequence CTCN PAM
caggccacuuacugcuauac

SEQ ID NO: 9281 - RNA, 20 nt, Artificial Sequence
  HTT spacer sequence CTCN PAM
ggccacuuacugcuauacgg

SEQ ID NO: 9282 - RNA, 20 nt, Artificial Sequence
  HTT spacer sequence CTCN PAM
ugaccucugccguuggcucu

SEQ ID NO: 9283 - RNA, 20 nt, Artificial Sequence
  HTT spacer sequence CTCN PAM
gccguuggcucuggguggga

SEQ ID NO: 9284 - RNA, 20 nt, Artificial Sequence
  HTT spacer sequence CTCN PAM
gggugggagcaguggggcug

SEQ ID NO: 9285 - RNA, 20 nt, Artificial Sequence
  HTT spacer sequence CTCN PAM
cacccagagccaacggcaga

SEQ ID NO: 9286 - RNA, 20 nt, Artificial Sequence
  HTT spacer sequence CTCN PAM
gacuggcgccccuacugcau

SEQ ID NO: 9287 - RNA, 20 nt, Artificial Sequence
  HTT spacer sequence CTCN PAM
ugcugggguggcaugcagua

SEQ ID NO: 9288 - RNA, 20 nt, Artificial Sequence
  HTT spacer sequence CTCN PAM
gcaucuccacucuguucccu

SEQ ID NO: 9289 - RNA, 20 nt, Artificial Sequence
  HTT spacer sequence CTCN PAM
acucuguucccuuguuaucu

SEQ ID NO: 9290 - RNA, 20 nt, Artificial Sequence
  HTT spacer sequence CTCN PAM
guucccuuguuaucucgccc

SEQ ID NO: 9291 - RNA, 20 nt, Artificial Sequence
  HTT spacer sequence CTCN PAM
cccuggugcugggauccggg

SEQ ID NO: 9292 - RNA, 20 nt, Artificial Sequence
  HTT spacer sequence CTCN PAM
gccauaggcacuuggcccag

SEQ ID NO: 9293 - RNA, 20 nt, Artificial Sequence
  HTT spacer sequence CTCN PAM
caagcacucugccauaggca

SEQ ID NO: 9294 - RNA, 20 nt, Artificial Sequence
  HTT spacer sequence CTCN PAM
gaguccuguugcuaauaagc

SEQ ID NO: 9295 - RNA, 20 nt, Artificial Sequence
  HTT spacer sequence CTCN PAM
gaggaccaaaccagacagcu

SEQ ID NO: 9296 - RNA, 20 nt, Artificial Sequence
  HTT spacer sequence CTCN PAM
acgcuuauuagcaacaggac

SEQ ID NO: 9297 - RNA, 20 nt, Artificial Sequence
  HTT spacer sequence CTCN PAM
cccuccacgcuuauuagcaa

SEQ ID NO: 9298 - RNA, 20 nt, Artificial Sequence
  HTT spacer sequence CTCN PAM
guccucccccuccacgcuua

SEQ ID NO: 9299 - RNA, 20 nt, Artificial Sequence
  HTT spacer sequence CTCN PAM
gggagugaagugacuugccc

SEQ ID NO: 9300 - RNA, 20 nt, Artificial Sequence
  HTT spacer sequence CTCN PAM
cugagccuugcuccguccuc

SEQ ID NO: 9301 - RNA, 20 nt, Artificial Sequence
  HTT spacer sequence CTCN PAM
agcuuaagggaccaaggcug

SEQ ID NO: 9302 - RNA, 20 nt, Artificial Sequence
  HTT spacer sequence CTCN PAM
agucccagccuuggucccuu

SEQ ID NO: 9303 - RNA, 20 nt, Artificial Sequence
  HTT spacer sequence CTCN PAM
ugggcaccauucacgccugg

SEQ ID NO: 9304 - RNA, 20 nt, Artificial Sequence
  HTT spacer sequence CTCN PAM
ucccagggaaggucugagau

SEQ ID NO: 9305 - RNA, 20 nt, Artificial Sequence
  HTT spacer sequence CTCN PAM
gaccuucccugggaugagcu

SEQ ID NO: 9306 - RNA, 20 nt, Artificial Sequence
  HTT spacer sequence CTCN PAM
ccugggcauguggccuggac

SEQ ID NO: 9307 - RNA, 20 nt, Artificial Sequence
  HTT spacer sequence CTCN PAM
gucucucaugucagaaggug

SEQ ID NO: 9308 - RNA, 20 nt, Artificial Sequence
  HTT spacer sequence CTCN PAM
caugucagaaggugggugcc

SEQ ID NO: 9309 - RNA, 20 nt, Artificial Sequence
  HTT spacer sequence CTCN PAM
ugucagaaggugggugccuu

SEQ ID NO: 9310 - RNA, 20 nt, Artificial Sequence
  HTT spacer sequence CTCN PAM
uaccugcaaccccagggccu

SEQ ID NO: 9311 - RNA, 20 nt, Artificial Sequence
  HTT spacer sequence CTCN PAM
gucugacucuauguaauccc

SEQ ID NO: 9312 - RNA, 20 nt, Artificial Sequence
  HTT spacer sequence CTCN PAM
auguaaucccaugcuuggcu

SEQ ID NO: 9313 - RNA, 20 nt, Artificial Sequence
  HTT spacer sequence CTCN PAM
uguggaagauugcucccagg

SEQ ID NO: 9314 - RNA, 20 nt, Artificial Sequence
  HTT spacer sequence CTCN PAM
caggacgcuggcggaugugu

SEQ ID NO: 9315 - RNA, 20 nt, Artificial Sequence
  HTT spacer sequence CTCN PAM
cauccuugugacaucuguuc

SEQ ID NO: 9316 - RNA, 20 nt, Artificial Sequence
  HTT spacer sequence CTCN PAM
gacucacauccuugugacau

SEQ ID NO: 9317 - RNA, 20 nt, Artificial Sequence
  HTT spacer sequence CTCN PAM
cuaacagauugggagcccag

SEQ ID NO: 9318 - RNA, 20 nt, Artificial Sequence
  HTT spacer sequence CTCN PAM
caaucuguuagggaggcagc

SEQ ID NO: 9319 - RNA, 20 nt, Artificial Sequence
  HTT spacer sequence CTCN PAM
gucugggcucccaaucuguu

SEQ ID NO: 9320 - RNA, 20 nt, Artificial Sequence
  HTT spacer sequence CTCN PAM
ggcacagcaccuacaggcaa

SEQ ID NO: 9321 - RNA, 20 nt, Artificial Sequence
  HTT spacer sequence CTCN PAM
ccugugcccgauaccaugag

SEQ ID NO: 9322 - RNA, 20 nt, Artificial Sequence
  HTT spacer sequence CTCN PAM
ugguaucgggcacaggggag

SEQ ID NO: 9323 - RNA, 20 nt, Artificial Sequence
  HTT spacer sequence CTCN PAM
gccugaagucucaugguauc

SEQ ID NO: 9324 - RNA, 20 nt, Artificial Sequence
  HTT spacer sequence CTCN PAM
acucggccugaagucucaug

SEQ ID NO: 9325 - RNA, 20 nt, Artificial Sequence
  HTT spacer sequence CTCN PAM
ugcacagugucacuccacuc

SEQ ID NO: 9326 - RNA, 20 nt, Artificial Sequence
  HTT spacer sequence CTCN PAM
cuugcacagugucacuccac

SEQ ID NO: 9327 - RNA, 20 nt, Artificial Sequence
  HTT spacer sequence CTCN PAM
ccaugacuccagccgagccc

SEQ ID NO: 9328 - RNA, 20 nt, Artificial Sequence
  HTT spacer sequence CTCN PAM
agccgagcccacugaauagg

SEQ ID NO: 9329 - RNA, 20 nt, Artificial Sequence
  HTT spacer sequence CTCN PAM
gcuggagucauggugaggcu

SEQ ID NO: 9330 - RNA, 20 nt, Artificial Sequence
  HTT spacer sequence CTCN PAM
guuuccugcucucgguuucc

SEQ ID NO: 9331 - RNA, 20 nt, Artificial Sequence
  HTT spacer sequence CTCN PAM
cgguuuccucagcugccugg

SEQ ID NO: 9332 - RNA, 20 nt, Artificial Sequence
  HTT spacer sequence CTCN PAM
guuuccucagcugccuggug

SEQ ID NO: 9333 - RNA, 20 nt, Artificial Sequence
  HTT spacer sequence CTCN PAM
gcugccugguggguuccacu

SEQ ID NO: 9334 - RNA, 20 nt, Artificial Sequence
  HTT spacer sequence CTCN PAM
cugggggucuccuucugucc

SEQ ID NO: 9335 - RNA, 20 nt, Artificial Sequence
  HTT spacer sequence CTCN PAM
gggggucuccuucugucccg

SEQ ID NO: 9336 - RNA, 20 nt, Artificial Sequence
  HTT spacer sequence CTCN PAM
uucugucccggcaccgccug

SEQ ID NO: 9337 - RNA, 20 nt, Artificial Sequence
  HTT spacer sequence CTCN PAM
uguuccucauccgagucucu

SEQ ID NO: 9338 - RNA, 20 nt, Artificial Sequence
  HTT spacer sequence CTCN PAM
uccgagucucugcggaugcg

SEQ ID NO: 9339 - RNA, 20 nt, Artificial Sequence
  HTT spacer sequence CTCN PAM
gaugaggaacaggagcaggc

SEQ ID NO: 9340 - RNA, 20 nt, Artificial Sequence
  HTT spacer sequence CTCN PAM
gcggaugcguggaccccgcc

SEQ ID NO: 9341 - RNA, 20 nt, Artificial Sequence
  HTT spacer sequence CTCN PAM
gugcagccucagcacuaagu

SEQ ID NO: 9342 - RNA, 20 nt, Artificial Sequence
  HTT spacer sequence CTCN PAM
gcacuaaguccuggguccag

SEQ ID NO: 9343 - RNA, 20 nt, Artificial Sequence
  HTT spacer sequence CTCN PAM
gggacugccccaguuacucc

SEQ ID NO: 9344 - RNA, 20 nt, Artificial Sequence
  HTT spacer sequence CTCN PAM
uggggaaacugaggacugga

SEQ ID NO: 9345 - RNA, 20 nt, Artificial Sequence
  HTT spacer sequence CTCN PAM
guuuccccaggaguaacugg

SEQ ID NO: 9346 - RNA, 20 nt, Artificial Sequence
  HTT spacer sequence CTCN PAM
aguccucaguuuccccagga

SEQ ID NO: 9347 - RNA, 20 nt, Artificial Sequence
  HTT spacer sequence CTCN PAM
gcuucuuugcccgaguuuuc

SEQ ID NO: 9348 - RNA, 20 nt, Artificial Sequence
  HTT spacer sequence CTCN PAM
ggcaaagaagcagagcucca

SEQ ID NO: 9349 - RNA, 20 nt, Artificial Sequence
  HTT spacer sequence CTCN PAM
agggugagcaccagaccacu

SEQ ID NO: 9350 - RNA, 20 nt, Artificial Sequence
  HTT spacer sequence CTCN PAM
cccuagagaaaacucgggca

SEQ ID NO: 9351 - RNA, 20 nt, Artificial Sequence
  HTT spacer sequence CTCN PAM
uucuucaagggaaccagcag

SEQ ID NO: 9352 - RNA, 20 nt, Artificial Sequence
  HTT spacer sequence CTCN PAM
augcugcugguucccuugaa

SEQ ID NO: 9353 - RNA, 20 nt, Artificial Sequence
  HTT spacer sequence CTCN PAM
caggccacagcccccuuuug

SEQ ID NO: 9354 - RNA, 20 nt, Artificial Sequence
  HTT spacer sequence CTCN PAM
cccaggccacagcccccuuu

SEQ ID NO: 9355 - RNA, 20 nt, Artificial Sequence
  HTT spacer sequence CTCN PAM
ccaggggcucuugggaucag

SEQ ID NO: 9356 - RNA, 20 nt, Artificial Sequence
  HTT spacer sequence CTCN PAM
ugggaucaguuuaaaacaga

SEQ ID NO: 9357 - RNA, 20 nt, Artificial Sequence
  HTT spacer sequence CTCN PAM
uaacuccucaagggugggcu

SEQ ID NO: 9358 - RNA, 20 nt, Artificial Sequence
  HTT spacer sequence CTCN PAM
ucaagggugggcuggagccc

SEQ ID NO: 9359 - RNA, 20 nt, Artificial Sequence
  HTT spacer sequence CTCN PAM
agggugggcuggagccccug

SEQ ID NO: 9360 - RNA, 20 nt, Artificial Sequence
  HTT spacer sequence CTCN PAM
agcccacccuugaggaguua

SEQ ID NO: 9361 - RNA, 20 nt, Artificial Sequence
  HTT spacer sequence CTCN PAM
gcaggacaggaaggccuggg

SEQ ID NO: 9362 - RNA, 20 nt, Artificial Sequence
  HTT spacer sequence CTCN PAM
cuguaccccacauggcgugg

SEQ ID NO: 9363 - RNA, 20 nt, Artificial Sequence
  HTT spacer sequence CTCN PAM
uacccagagcccugcccccu

SEQ ID NO: 9364 - RNA, 20 nt, Artificial Sequence
  HTT spacer sequence CTCN PAM
ggguaggaggccaggggaca

SEQ ID NO: 9365 - RNA, 20 nt, Artificial Sequence
  HTT spacer sequence CTCN PAM
acagaggccagggcccaccc

SEQ ID NO: 9366 - RNA, 20 nt, Artificial Sequence
  HTT spacer sequence CTCN PAM
guggagggggcagggcucug

SEQ ID NO: 9367 - RNA, 20 nt, Artificial Sequence
  HTT spacer sequence CTCN PAM
gaaggaagcccaccaaccuu

SEQ ID NO: 9368 - RNA, 20 nt, Artificial Sequence
  HTT spacer sequence CTCN PAM
cagaaggaagcccaccaacc

SEQ ID NO: 9369 - RNA, 20 nt, Artificial Sequence
  HTT spacer sequence CTCN PAM
ucuccuucuuacccacccca

SEQ ID NO: 9370 - RNA, 20 nt, Artificial Sequence
  HTT spacer sequence CTCN PAM
ccuucuuacccaccccagag

SEQ ID NO: 9371 - RNA, 20 nt, Artificial Sequence
  HTT spacer sequence CTCN PAM
uucuuacccaccccagagcc

SEQ ID NO: 9372 - RNA, 20 nt, Artificial Sequence
  HTT spacer sequence CTCN PAM
gggguggguaagaaggagag

SEQ ID NO: 9373 - RNA, 20 nt, Artificial Sequence
  HTT spacer sequence CTCN PAM
gcaggaaaugccugguaggg

SEQ ID NO: 9374 - RNA, 20 nt, Artificial Sequence
  HTT spacer sequence CTCN PAM
gguuguguuguagggguggg

SEQ ID NO: 9375 - RNA, 20 nt, Artificial Sequence
  HTT spacer sequence CTCN PAM
gggugacacuagccacgcug

SEQ ID NO: 9376 - RNA, 20 nt, Artificial Sequence
  HTT spacer sequence CTCN PAM
cucagccucgagguccuaau

SEQ ID NO: 9377 - RNA, 20 nt, Artificial Sequence
  HTT spacer sequence CTCN PAM
gccucgagguccuaaucggg

SEQ ID NO: 9378 - RNA, 20 nt, Artificial Sequence
  HTT spacer sequence CTCN PAM
agguccuaaucgggagaaca

SEQ ID NO: 9379 - RNA, 20 nt, Artificial Sequence
  HTT spacer sequence CTCN PAM
aggcugagugagcugcaacg

SEQ ID NO: 9380 - RNA, 20 nt, Artificial Sequence
  HTT spacer sequence CTCN PAM
cgauuaggaccucgaggcug

SEQ ID NO: 9381 - RNA, 20 nt, Artificial Sequence
  HTT spacer sequence CTCN PAM
uuuuguucucccgauuagga

SEQ ID NO: 9382 - RNA, 20 nt, Artificial Sequence
  HTT spacer sequence CTCN PAM
aucgccaacugcucguuuug

SEQ ID NO: 9383 - RNA, 20 nt, Artificial Sequence
  HTT spacer sequence CTCN PAM
gugcccgcuccaucgccaac

SEQ ID NO: 9384 - RNA, 20 nt, Artificial Sequence
  HTT spacer sequence CTCN PAM
gaacacaguggacauuuccu

SEQ ID NO: 9385 - RNA, 20 nt, Artificial Sequence
  HTT spacer sequence CTCN PAM
cugccccucccuugguccag

SEQ ID NO: 9386 - RNA, 20 nt, Artificial Sequence
  HTT spacer sequence CTCN PAM
cuugguccagcagccuagcc

SEQ ID NO: 9387 - RNA, 20 nt, Artificial Sequence
  HTT spacer sequence CTCN PAM
uaucacaagaggugacugug

SEQ ID NO: 9388 - RNA, 20 nt, Artificial Sequence
  HTT spacer sequence CTCN PAM
ugugauaggagggcuaggcu

SEQ ID NO: 9389 - RNA, 20 nt, Artificial Sequence
  HTT spacer sequence CTCN PAM
ugggaugcgugggacgccug

SEQ ID NO: 9390 - RNA, 20 nt, Artificial Sequence
  HTT spacer sequence CTCN PAM
cgccaaccagacccuccugg

SEQ ID NO: 9391 - RNA, 20 nt, Artificial Sequence
  HTT spacer sequence CTCN PAM
gcuucugcuuccucuagaug

SEQ ID NO: 9392 - RNA, 20 nt, Artificial Sequence
  HTT spacer sequence CTCN PAM
agaugaggaaggugcccggc

SEQ ID NO: 9393 - RNA, 20 nt, Artificial Sequence
  HTT spacer sequence CTCN PAM
ucuagaggaagcagaagcag

SEQ ID NO: 9394 - RNA, 20 nt, Artificial Sequence
  HTT spacer sequence CTCN PAM
gggcccagggggugugcuua

SEQ ID NO: 9395 - RNA, 20 nt, Artificial Sequence
  HTT spacer sequence CTCN PAM
gugacugcugcugcccuugc

SEQ ID NO: 9396 - RNA, 20 nt, Artificial Sequence
  HTT spacer sequence CTCN PAM
ucgauaggcaagggcagcag

SEQ ID NO: 9397 - RNA, 20 nt, Artificial Sequence
  HTT spacer sequence CTCN PAM
cggccccagcauccucaucg

SEQ ID NO: 9398 - RNA, 20 nt, Artificial Sequence
  HTT spacer sequence CTCN PAM
agggugaccucccggcccca

SEQ ID NO: 9399 - RNA, 20 nt, Artificial Sequence
  HTT spacer sequence CTCN PAM
gcacccaccaagcgcagccu

SEQ ID NO: 9400 - RNA, 20 nt, Artificial Sequence
  HTT spacer sequence CTCN PAM
aggggcucugcacccaccaa

SEQ ID NO: 9401 - RNA, 20 nt, Artificial Sequence
  HTT spacer sequence CTCN PAM
ugcagccaggggucccccga

SEQ ID NO: 9402 - RNA, 20 nt, Artificial Sequence
  HTT spacer sequence CTCN PAM
ggggaccccuggcugcagga

SEQ ID NO: 9403 - RNA, 20 nt, Artificial Sequence
  HTT spacer sequence CTCN PAM
ugugcugaauuacaccaucu

SEQ ID NO: 9404 - RNA, 20 nt, Artificial Sequence
  HTT spacer sequence CTCN PAM
ugggcucaugugcugaauua

SEQ ID NO: 9405 - RNA, 20 nt, Artificial Sequence
  HTT spacer sequence CTCN PAM
guggggccuagcucaugggc

SEQ ID NO: 9406 - RNA, 20 nt, Artificial Sequence
  HTT spacer sequence CTCN PAM
ccguggggccuagcucaugg

SEQ ID NO: 9407 - RNA, 20 nt, Artificial Sequence
  HTT spacer sequence CTCN PAM
uccacaccccagcuggcugg

SEQ ID NO: 9408 - RNA, 20 nt, Artificial Sequence
  HTT spacer sequence CTCN PAM
ugcagcaugaacagaccucg

SEQ ID NO: 9409 - RNA, 20 nt, Artificial Sequence
  HTT spacer sequence CTCN PAM
gcauguccgucccccauguc

SEQ ID NO: 9410 - RNA, 20 nt, Artificial Sequence
  HTT spacer sequence CTCN PAM
ccccacagaacuggugucag

SEQ ID NO: 9411 - RNA, 20 nt, Artificial Sequence
  HTT spacer sequence CTCN PAM
ccacagaacuggugucaggg

SEQ ID NO: 9412 - RNA, 20 nt, Artificial Sequence
  HTT spacer sequence CTCN PAM
ccugacaccaguucuguggg

SEQ ID NO: 9413 - RNA, 20 nt, Artificial Sequence
  HTT spacer sequence CTCN PAM
cugaggagugggggcccugc

SEQ ID NO: 9414 - RNA, 20 nt, Artificial Sequence
  HTT spacer sequence CTCN PAM
gaggagugggggcccugccg

SEQ ID NO: 9415 - RNA, 20 nt, Artificial Sequence
  HTT spacer sequence CTCN PAM
gagaggcagcccccacccgg

SEQ ID NO: 9416 - RNA, 20 nt, Artificial Sequence
  HTT spacer sequence CTCN PAM
ucagagaggcagcccccacc

SEQ ID NO: 9417 - RNA, 20 nt, Artificial Sequence
  HTT spacer sequence CTCN PAM
guccacggcagggcccccac

SEQ ID NO: 9418 - RNA, 20 nt, Artificial Sequence
  HTT spacer sequence CTCN PAM
cacacaggcucaguccacgg

SEQ ID NO: 9419 - RNA, 20 nt, Artificial Sequence
  HTT spacer sequence CTCN PAM
ccugggcuggaccccaaucc

SEQ ID NO: 9420 - RNA, 20 nt, Artificial Sequence
  HTT spacer sequence CTCN PAM
ucuagaccacacuccccugg

SEQ ID NO: 9421 - RNA, 20 nt, Artificial Sequence
  HTT spacer sequence CTCN PAM
gccccgcccuugccccuugg

SEQ ID NO: 9422 - RNA, 20 nt, Artificial Sequence
  HTT spacer sequence CTCN PAM
ucugccccgcccuugccccu

SEQ ID NO: 9423 - RNA, 20 nt, Artificial Sequence
  HTT spacer sequence CTCN PAM
accuccucugccccgcccuu

SEQ ID NO: 9424 - RNA, 20 nt, Artificial Sequence
  HTT spacer sequence CTCN PAM
ccaccuccucugccccgccc

SEQ ID NO: 9425 - RNA, 20 nt, Artificial Sequence
  HTT spacer sequence CTCN PAM
accuggaacgccacccucuc

SEQ ID NO: 9426 - RNA, 20 nt, Artificial Sequence
  HTT spacer sequence CTCN PAM
gcaccuuggcagcagcagug

SEQ ID NO: 9427 - RNA, 20 nt, Artificial Sequence
  HTT spacer sequence CTCN PAM
cugcaccuuggcagcagcag

SEQ ID NO: 9428 - RNA, 20 nt, Artificial Sequence
  HTT spacer sequence CTCN PAM
gucugugccaagggccgcgg

SEQ ID NO: 9429 - RNA, 20 nt, Artificial Sequence
  HTT spacer sequence CTCN PAM
ccgcggcccuuggcacagac

SEQ ID NO: 9430 - RNA, 20 nt, Artificial Sequence
  HTT spacer sequence CTCN PAM
agaacaggcgucuccccgcg

SEQ ID NO: 9431 - RNA, 20 nt, Artificial Sequence
  HTT spacer sequence CTCN PAM
gcguccggccgugcuuuucc

SEQ ID NO: 9432 - RNA, 20 nt, Artificial Sequence
  HTT spacer sequence CTCN PAM
cuucccuugacacuagagca

SEQ ID NO: 9433 - RNA, 20 nt, Artificial Sequence
  HTT spacer sequence CTCN PAM
agugucaagggaagggagga

SEQ ID NO: 9434 - RNA, 20 nt, Artificial Sequence
  HTT spacer sequence CTCN PAM
agugaggaaacugaggcuca

SEQ ID NO: 9435 - RNA, 20 nt, Artificial Sequence
  HTT spacer sequence CTCN PAM
cuugagcagugggggugggg

SEQ ID NO: 9436 - RNA, 20 nt, Artificial Sequence
  HTT spacer sequence CTCN PAM
guuuccucacuugagcagug

SEQ ID NO: 9437 - RNA, 20 nt, Artificial Sequence
  HTT spacer sequence CTCN PAM
gagugggccacaggccagga

SEQ ID NO: 9438 - RNA, 20 nt, Artificial Sequence
  HTT spacer sequence CTCN PAM
gagccucaguuuccucacuu

SEQ ID NO: 9439 - RNA, 20 nt, Artificial Sequence
  HTT spacer sequence CTCN PAM
uggccuguggcccacucuga

SEQ ID NO: 9440 - RNA, 20 nt, Artificial Sequence
  HTT spacer sequence CTCN PAM
uccuggccuguggcccacuc

SEQ ID NO: 9441 - RNA, 20 nt, Artificial Sequence
  HTT spacer sequence CTCN PAM
auccccuccuccuggccugu

SEQ ID NO: 9442 - RNA, 20 nt, Artificial Sequence
  HTT spacer sequence CTCN PAM
auucugccugccaaggucac

SEQ ID NO: 9443 - RNA, 20 nt, Artificial Sequence
  HTT spacer sequence CTCN PAM
augcaugugaccuuggcagg

SEQ ID NO: 9444 - RNA, 20 nt, Artificial Sequence
  HTT spacer sequence CTCN PAM
cuggugggagccacugggug

SEQ ID NO: 9445 - RNA, 20 nt, Artificial Sequence
  HTT spacer sequence CTCN PAM
ggugggagccacuggguggg

SEQ ID NO: 9446 - RNA, 20 nt, Artificial Sequence
  HTT spacer sequence CTCN PAM
caccagagagggccgcucua

SEQ ID NO: 9447 - RNA, 20 nt, Artificial Sequence
  HTT spacer sequence CTCN PAM
cgggacccugcggggcuggg

SEQ ID NO: 9448 - RNA, 20 nt, Artificial Sequence
  HTT spacer sequence CTCN PAM
ggacccugcggggcuggggc

SEQ ID NO: 9449 - RNA, 20 nt, Artificial Sequence
  HTT spacer sequence CTCN PAM
ccgcagccagccugggcacc

SEQ ID NO: 9450 - RNA, 20 nt, Artificial Sequence
  HTT spacer sequence CTCN PAM
uggccugaaggguuucacug

SEQ ID NO: 9451 - RNA, 20 nt, Artificial Sequence
  HTT spacer sequence CTCN PAM
ccuggccugaaggguuucac

SEQ ID NO: 9452 - RNA, 20 nt, Artificial Sequence
  HTT spacer sequence CTCN PAM
ccucuccuggccugaagggu

SEQ ID NO: 9453 - RNA, 20 nt, Artificial Sequence
  HTT spacer sequence CTCN PAM
ccacccugccucgccucucc

SEQ ID NO: 9454 - RNA, 20 nt, Artificial Sequence
  HTT spacer sequence CTCN PAM
uccccacccugccucgccuc

SEQ ID NO: 9455 - RNA, 20 nt, Artificial Sequence
  HTT spacer sequence CTCN PAM
cacccaaggcuggggcccac

SEQ ID NO: 9456 - RNA, 20 nt, Artificial Sequence
  HTT spacer sequence CTCN PAM
ggagaauuuuuucucaagug

SEQ ID NO: 9457 - RNA, 20 nt, Artificial Sequence
  HTT spacer sequence CTCN PAM
agaguccugauguguggggu

SEQ ID NO: 9458 - RNA, 20 nt, Artificial Sequence
  HTT spacer sequence CTCN PAM
agugauuaaaagguagaaac

SEQ ID NO: 9459 - RNA, 20 nt, Artificial Sequence
  HTT spacer sequence CTCN PAM
ucaguguuugugaagaacug

SEQ ID NO: 9460 - RNA, 20 nt, Artificial Sequence
  HTT spacer sequence CTCN PAM
ggauucacacuucaguucuu

SEQ ID NO: 9461 - RNA, 20 nt, Artificial Sequence
  HTT spacer sequence CTCN PAM
gcugcuugugguuugagacu

SEQ ID NO: 9462 - RNA, 20 nt, Artificial Sequence
  HTT spacer sequence CTCN PAM
aaccacaagcagcagaggcg

SEQ ID NO: 9463 - RNA, 20 nt, Artificial Sequence
  HTT spacer sequence CTCN PAM
agucucaaaccacaagcagc

SEQ ID NO: 9464 - RNA, 20 nt, Artificial Sequence
  HTT spacer sequence CTCN PAM
ccagucucaaaccacaagca

SEQ ID NO: 9465 - RNA, 20 nt, Artificial Sequence
  HTT spacer sequence CTCN PAM
aggcgagcagcagugccagc

SEQ ID NO: 9466 - RNA, 20 nt, Artificial Sequence
  HTT spacer sequence CTCN PAM
ccuggagccacucuccaguc

SEQ ID NO: 9467 - RNA, 20 nt, Artificial Sequence
  HTT spacer sequence CTCN PAM
ccuugccucacuucacuguc

SEQ ID NO: 9468 - RNA, 20 nt, Artificial Sequence
  HTT spacer sequence CTCN PAM
cuucacugucuccagcccca

SEQ ID NO: 9469 - RNA, 20 nt, Artificial Sequence
  HTT spacer sequence CTCN PAM
agccccaccucaccgucucc

SEQ ID NO: 9470 - RNA, 20 nt, Artificial Sequence
  HTT spacer sequence CTCN PAM
ccgucuccagccccaccuca

SEQ ID NO: 9471 - RNA, 20 nt, Artificial Sequence
  HTT spacer sequence CTCN PAM
agccccaccucacccucacc

SEQ ID NO: 9472 - RNA, 20 nt, Artificial Sequence
  HTT spacer sequence CTCN PAM
cccucaccacccucggccug

SEQ ID NO: 9473 - RNA, 20 nt, Artificial Sequence
  HTT spacer sequence CTCN PAM
ccacccucggccuggaagcc

SEQ ID NO: 9474 - RNA, 20 nt, Artificial Sequence
  HTT spacer sequence CTCN PAM
gccuggaagcccgcccuggc

SEQ ID NO: 9475 - RNA, 20 nt, Artificial Sequence
  HTT spacer sequence CTCN PAM
ucccuccagccaguguacgg

SEQ ID NO: 9476 - RNA, 20 nt, Artificial Sequence
  HTT spacer sequence CTCN PAM
cuccagccaguguacggccc

SEQ ID NO: 9477 - RNA, 20 nt, Artificial Sequence
  HTT spacer sequence CTCN PAM
agccaguguacggccccugc

SEQ ID NO: 9478 - RNA, 20 nt, Artificial Sequence
  HTT spacer sequence CTCN PAM
ggccuggccaggcaggggcc

SEQ ID NO: 9479 - RNA, 20 nt, Artificial Sequence
  HTT spacer sequence CTCN PAM
gccuagggcaacccucuucc

SEQ ID NO: 9480 - RNA, 20 nt, Artificial Sequence
  HTT spacer sequence CTCN PAM
uccagguguggaggcccccg

SEQ ID NO: 9481 - RNA, 20 nt, Artificial Sequence
  HTT spacer sequence CTCN PAM
acaccuggaagaggguugcc

SEQ ID NO: 9482 - RNA, 20 nt, Artificial Sequence
  HTT spacer sequence CTCN PAM
caugcccaucucaagaaccu

SEQ ID NO: 9483 - RNA, 20 nt, Artificial Sequence
  HTT spacer sequence CTCN PAM
agaaccuuuccuggggacag

SEQ ID NO: 9484 - RNA, 20 nt, Artificial Sequence
  HTT spacer sequence CTCN PAM
guccccaggaaagguucuug

SEQ ID NO: 9485 - RNA, 20 nt, Artificial Sequence
  HTT spacer sequence CTCN PAM
ggccuggugucucugucccc

SEQ ID NO: 9486 - RNA, 20 nt, Artificial Sequence
  HTT spacer sequence CTCN PAM
caggccuggugucucugucc

SEQ ID NO: 9487 - RNA, 20 nt, Artificial Sequence
  HTT spacer sequence CTCN PAM
cucaggccuggugucucugu

SEQ ID NO: 9488 - RNA, 20 nt, Artificial Sequence
  HTT spacer sequence CTCN PAM
ggaugccccacugggccuuc

SEQ ID NO: 9489 - RNA, 20 nt, Artificial Sequence
  HTT spacer sequence CTCN PAM
caucuccggaugccccacug

SEQ ID NO: 9490 - RNA, 20 nt, Artificial Sequence
  HTT spacer sequence CTCN PAM
gaggacagagcuugagggcc

SEQ ID NO: 9491 - RNA, 20 nt, Artificial Sequence
  HTT spacer sequence CTCN PAM
gagggaagcugcaauguucu

SEQ ID NO: 9492 - RNA, 20 nt, Artificial Sequence
  HTT spacer sequence CTCN PAM
guccucagagggaagcugca

SEQ ID NO: 9493 - RNA, 20 nt, Artificial Sequence
  HTT spacer sequence CTCN PAM
agcucuguccucagagggaa

SEQ ID NO: 9494 - RNA, 20 nt, Artificial Sequence
  HTT spacer sequence CTCN PAM
cugaagcccaggugccaugc

SEQ ID NO: 9495 - RNA, 20 nt, Artificial Sequence
  HTT spacer sequence CTCN PAM
gaagcccaggugccaugcag

SEQ ID NO: 9496 - RNA, 20 nt, Artificial Sequence
  HTT spacer sequence CTCN PAM
gccuccacccugcaccgcuc

SEQ ID NO: 9497 - RNA, 20 nt, Artificial Sequence
  HTT spacer sequence CTCN PAM
acccugcaccgcucugugaa

SEQ ID NO: 9498 - RNA, 20 nt, Artificial Sequence
  HTT spacer sequence CTCN PAM
gugaagccccuggggccucu

SEQ ID NO: 9499 - RNA, 20 nt, Artificial Sequence
  HTT spacer sequence CTCN PAM
gagccccgaacacacugcgu

SEQ ID NO: 9500 - RNA, 20 nt, Artificial Sequence
  HTT spacer sequence CTCN PAM
gaggccccaggggcuucaca

SEQ ID NO: 9501 - RNA, 20 nt, Artificial Sequence
  HTT spacer sequence CTCN PAM
agugcaccagccuuucucug

SEQ ID NO: 9502 - RNA, 20 nt, Artificial Sequence
  HTT spacer sequence CTCN PAM
guuuugcagcgagcagccuc

SEQ ID NO: 9503 - RNA, 20 nt, Artificial Sequence
  HTT spacer sequence CTCN PAM
cugcaaaacagagaaaggcu

SEQ ID NO: 9504 - RNA, 20 nt, Artificial Sequence
  HTT spacer sequence CTCN PAM
cgugcgugcccagggcuggc

SEQ ID NO: 9505 - RNA, 20 nt, Artificial Sequence
  HTT spacer sequence CTCN PAM
cugggcagagguccaggggu

SEQ ID NO: 9506 - RNA, 20 nt, Artificial Sequence
  HTT spacer sequence CTCN PAM
gcccagugagacaagccgcc

SEQ ID NO: 9507 - RNA, 20 nt, Artificial Sequence
  HTT spacer sequence CTCN PAM
gcugcggccgugcugcacuc

SEQ ID NO: 9508 - RNA, 20 nt, Artificial Sequence
  HTT spacer sequence CTCN PAM
aguucuuugaaaaccucucu

SEQ ID NO: 9509 - RNA, 20 nt, Artificial Sequence
  HTT spacer sequence CTCN PAM
cucauugagaguccaauuag

SEQ ID NO: 9510 - RNA, 20 nt, Artificial Sequence
  HTT spacer sequence CTCN PAM
cauugagaguccaauuagcg

SEQ ID NO: 9511 - RNA, 20 nt, Artificial Sequence
  HTT spacer sequence CTCN PAM
uugagaguccaauuagcgcu

SEQ ID NO: 9512 - RNA, 20 nt, Artificial Sequence
  HTT spacer sequence CTCN PAM
augagagagguuuucaaaga

SEQ ID NO: 9513 - RNA, 20 nt, Artificial Sequence
  HTT spacer sequence CTCN PAM
caaugagagagguuuucaaa

SEQ ID NO: 9514 - RNA, 20 nt, Artificial Sequence
  HTT spacer sequence CTCN PAM
gagcucugaaggauguacug

SEQ ID NO: 9515 - RNA, 20 nt, Artificial Sequence
  HTT spacer sequence CTCN PAM
gagugaaaaaauugugacuu

SEQ ID NO: 9516 - RNA, 20 nt, Artificial Sequence
  HTT spacer sequence CTCN PAM
gaaggauguacugguuacaa

SEQ ID NO: 9517 - RNA, 20 nt, Artificial Sequence
  HTT spacer sequence CTCN PAM
cuggggucuggccucaugua

SEQ ID NO: 9518 - RNA, 20 nt, Artificial Sequence
  HTT spacer sequence CTCN PAM
uguauggacaugacagugaa

SEQ ID NO: 9519 - RNA, 20 nt, Artificial Sequence
  HTT spacer sequence CTCN PAM
ucuguuugucugucuguccu

SEQ ID NO: 9520 - RNA, 20 nt, Artificial Sequence
  HTT spacer sequence CTCN PAM
uggguccugccaugggccug

SEQ ID NO: 9521 - RNA, 20 nt, Artificial Sequence
  HTT spacer sequence CTCN PAM
aaggcccagaugggcaccag

SEQ ID NO: 9522 - RNA, 20 nt, Artificial Sequence
  HTT spacer sequence CTCN PAM
ccacggguccaagucccacu

SEQ ID NO: 9523 - RNA, 20 nt, Artificial Sequence
  HTT spacer sequence CTCN PAM
aagucaauggcacaguucug

SEQ ID NO: 9524 - RNA, 20 nt, Artificial Sequence
  HTT spacer sequence CTCN PAM
gaaaucuccaagucaauggc

SEQ ID NO: 9525 - RNA, 20 nt, Artificial Sequence
  HTT spacer sequence CTCN PAM
ucucugaaaucuccaaguca

SEQ ID NO: 9526 - RNA, 20 nt, Artificial Sequence
  HTT spacer sequence CTCN PAM
aaggaugagggagcguuugg

SEQ ID NO: 9527 - RNA, 20 nt, Artificial Sequence
  HTT spacer sequence CTCN PAM
uccuuugaggauggaaccau

SEQ ID NO: 9528 - RNA, 20 nt, Artificial Sequence
  HTT spacer sequence CTCN PAM
cucauccuuugaggauggaa

SEQ ID NO: 9529 - RNA, 20 nt, Artificial Sequence
  HTT spacer sequence CTCN PAM
acauggaaaccaaacgcucc

SEQ ID NO: 9530 - RNA, 20 nt, Artificial Sequence
  HTT spacer sequence CTCN PAM
cugcugcgccguggugaaug

SEQ ID NO: 9531 - RNA, 20 nt, Artificial Sequence
  HTT spacer sequence CTCN PAM
ggccacauucaccacggcgc

SEQ ID NO: 9532 - RNA, 20 nt, Artificial Sequence
  HTT spacer sequence CTCN PAM
cguucaccccuuuggccugc

SEQ ID NO: 9533 - RNA, 20 nt, Artificial Sequence
  HTT spacer sequence CTCN PAM
uggccucgcguucaccccuu

SEQ ID NO: 9534 - RNA, 20 nt, Artificial Sequence
  HTT spacer sequence CTCN PAM
ccugccaugccugacccaca

SEQ ID NO: 9535 - RNA, 20 nt, Artificial Sequence
  HTT spacer sequence CTCN PAM
ugcacacaggguccaccagc

SEQ ID NO: 9536 - RNA, 20 nt, Artificial Sequence
  HTT spacer sequence CTCN PAM
cacccuccugcacacagggu

SEQ ID NO: 9537 - RNA, 20 nt, Artificial Sequence
  HTT spacer sequence CTCN PAM
accucccacccuccugcaca

SEQ ID NO: 9538 - RNA, 20 nt, Artificial Sequence
  HTT spacer sequence CTCN PAM
ccaccucccacccuccugca

SEQ ID NO: 9539 - RNA, 20 nt, Artificial Sequence
  HTT spacer sequence CTCN PAM
ugaaggcugggcucuccacc

SEQ ID NO: 9540 - RNA, 20 nt, Artificial Sequence
  HTT spacer sequence CTCN PAM
gcaggugcccacagccuccu

SEQ ID NO: 9541 - RNA, 20 nt, Artificial Sequence
  HTT spacer sequence CTCN PAM
gcagugcccgcccagguugg

SEQ ID NO: 9542 - RNA, 20 nt, Artificial Sequence
  HTT spacer sequence CTCN PAM
acaaggcugugaccaaccug

SEQ ID NO: 9543 - RNA, 20 nt, Artificial Sequence
  HTT spacer sequence CTCN PAM
cccugacaggcacgcccaca

SEQ ID NO: 9544 - RNA, 20 nt, Artificial Sequence
  HTT spacer sequence CTCN PAM
cugacaggcacgcccacacu

SEQ ID NO: 9545 - RNA, 20 nt, Artificial Sequence
  HTT spacer sequence CTCN PAM
ugcugaaaagagaccuccua

SEQ ID NO: 9546 - RNA, 20 nt, Artificial Sequence
  HTT spacer sequence CTCN PAM
uuucagcacgagacaaacau

SEQ ID NO: 9547 - RNA, 20 nt, Artificial Sequence
  HTT spacer sequence CTCN PAM
uaauguucaugucuugauaa

SEQ ID NO: 9548 - RNA, 20 nt, Artificial Sequence
  HTT spacer sequence CTCN PAM
uggugucccucuccacggga

SEQ ID NO: 9549 - RNA, 20 nt, Artificial Sequence
  HTT spacer sequence CTCN PAM
ccacgggaacucaggguguc

SEQ ID NO: 9550 - RNA, 20 nt, Artificial Sequence
  HTT spacer sequence CTCN PAM
acgggaacucagggugucca

SEQ ID NO: 9551 - RNA, 20 nt, Artificial Sequence
  HTT spacer sequence CTCN PAM
ggguguccagggaacugcug

SEQ ID NO: 9552 - RNA, 20 nt, Artificial Sequence
  HTT spacer sequence CTCN PAM
cugucacugugugcucaugu

SEQ ID NO: 9553 - RNA, 20 nt, Artificial Sequence
  HTT spacer sequence CTCN PAM
uguuugauggggagggcucu

SEQ ID NO: 9554 - RNA, 20 nt, Artificial Sequence
  HTT spacer sequence CTCN PAM
ccaucaaacaugagcacaca

SEQ ID NO: 9555 - RNA, 20 nt, Artificial Sequence
  HTT spacer sequence CTCN PAM
gugcuggggacauccugcca

SEQ ID NO: 9556 - RNA, 20 nt, Artificial Sequence
  HTT spacer sequence CTCN PAM
aaggcuggggucagcccugg

SEQ ID NO: 9557 - RNA, 20 nt, Artificial Sequence
  HTT spacer sequence CTCN PAM
uccaaggcuggggucagccc

SEQ ID NO: 9558 - RNA, 20 nt, Artificial Sequence
  HTT spacer sequence CTCN PAM
ggcaggcuccuccaaggcug

SEQ ID NO: 9559 - RNA, 20 nt, Artificial Sequence
  HTT spacer sequence CTCN PAM
cucaggcaggcuccuccaag

SEQ ID NO: 9560 - RNA, 20 nt, Artificial Sequence
  HTT spacer sequence CTCN PAM
gcacaguggcagccugggga

SEQ ID NO: 9561 - RNA, 20 nt, Artificial Sequence
  HTT spacer sequence CTCN PAM
guuucccccucugcacagug

SEQ ID NO: 9562 - RNA, 20 nt, Artificial Sequence
  HTT spacer sequence CTCN PAM
aagagccuuggacccuuccg

SEQ ID NO: 9563 - RNA, 20 nt, Artificial Sequence
  HTT spacer sequence CTCN PAM
uugagacccucaguuucccc

SEQ ID NO: 9564 - RNA, 20 nt, Artificial Sequence
  HTT spacer sequence CTCN PAM
acugaccggaaggguccaag

SEQ ID NO: 9565 - RNA, 20 nt, Artificial Sequence
  HTT spacer sequence CTCN PAM
agcugccuuuccuggugugg

SEQ ID NO: 9566 - RNA, 20 nt, Artificial Sequence
  HTT spacer sequence CTCN PAM
aaggcugucagggcuucugu

SEQ ID NO: 9567 - RNA, 20 nt, Artificial Sequence
  HTT spacer sequence CTCN PAM
gagucacugaaggaguaagu

SEQ ID NO: 9568 - RNA, 20 nt, Artificial Sequence
  HTT spacer sequence CTCN PAM
gagcugcagcacuccaaggc

SEQ ID NO: 9569 - RNA, 20 nt, Artificial Sequence
  HTT spacer sequence CTCN PAM
uucagugacuccgagcugca

SEQ ID NO: 9570 - RNA, 20 nt, Artificial Sequence
  HTT spacer sequence CTCN PAM
agacuuacuuacuccuucag

SEQ ID NO: 9571 - RNA, 20 nt, Artificial Sequence
  HTT spacer sequence CTCN PAM
uccagacuuacuuacuccuu

SEQ ID NO: 9572 - RNA, 20 nt, Artificial Sequence
  HTT spacer sequence CTCN PAM
ggcagcuccuccagacuuac

SEQ ID NO: 9573 - RNA, 20 nt, Artificial Sequence
  HTT spacer sequence CTCN PAM
cuggacuggcgggggguggg

SEQ ID NO: 9574 - RNA, 20 nt, Artificial Sequence
  HTT spacer sequence CTCN PAM
cacucugccuggugcccaca

SEQ ID NO: 9575 - RNA, 20 nt, Artificial Sequence
  HTT spacer sequence CTCN PAM
gccuggugcccacagccugg

SEQ ID NO: 9576 - RNA, 20 nt, Artificial Sequence
  HTT spacer sequence CTCN PAM
gcuacucagccuugagcguc

SEQ ID NO: 9577 - RNA, 20 nt, Artificial Sequence
  HTT spacer sequence CTCN PAM
gccuugagcgucugugccgg

SEQ ID NO: 9578 - RNA, 20 nt, Artificial Sequence
  HTT spacer sequence CTCN PAM
aggcugaguagcugagccac

SEQ ID NO: 9579 - RNA, 20 nt, Artificial Sequence
  HTT spacer sequence CTCN PAM
gcuucugcaggaggaagaag

SEQ ID NO: 9580 - RNA, 20 nt, Artificial Sequence
  HTT spacer sequence CTCN PAM
ugcagaagcugaguuacccg

SEQ ID NO: 9581 - RNA, 20 nt, Artificial Sequence
  HTT spacer sequence CTCN PAM
ccuucuuccuccugcagaag

SEQ ID NO: 9582 - RNA, 20 nt, Artificial Sequence
  HTT spacer sequence CTCN PAM
uuuugcuccccuucuuccuc

SEQ ID NO: 9583 - RNA, 20 nt, Artificial Sequence
  HTT spacer sequence CTCN PAM
gcaguguacuggcuggccgg

SEQ ID NO: 9584 - RNA, 20 nt, Artificial Sequence
  HTT spacer sequence CTCN PAM
ccgcaguguacuggcuggcc

SEQ ID NO: 9585 - RNA, 20 nt, Artificial Sequence
  HTT spacer sequence CTCN PAM
gggacugggugacgccaccg

SEQ ID NO: 9586 - RNA, 20 nt, Artificial Sequence
  HTT spacer sequence CTCN PAM
caagugccagcccccucggg

SEQ ID NO: 9587 - RNA, 20 nt, Artificial Sequence
  HTT spacer sequence CTCN PAM
ccucccaagugccagccccc

SEQ ID NO: 9588 - RNA, 20 nt, Artificial Sequence
  HTT spacer sequence CTCN PAM
ccugaagcggccaccagggg

SEQ ID NO: 9589 - RNA, 20 nt, Artificial Sequence
  HTT spacer sequence CTCN PAM
ggccagggccgcggggcccc

SEQ ID NO: 9590 - RNA, 20 nt, Artificial Sequence
  HTT spacer sequence CTCN PAM
ccagggcagaagggcacggu

SEQ ID NO: 9591 - RNA, 20 nt, Artificial Sequence
  HTT spacer sequence CTCN PAM
ucccacaggcucaccagggc

SEQ ID NO: 9592 - RNA, 20 nt, Artificial Sequence
  HTT spacer sequence CTCN PAM
cgcucagguggcuucggccg

SEQ ID NO: 9593 - RNA, 20 nt, Artificial Sequence
  HTT spacer sequence CTCN PAM
gguggcuucggccgagggaa

SEQ ID NO: 9594 - RNA, 20 nt, Artificial Sequence
  HTT spacer sequence CTCN PAM
gccgaagccaccugagcggg

SEQ ID NO: 9595 - RNA, 20 nt, Artificial Sequence
  HTT spacer sequence CTCN PAM
ccauagccagcgaccacgga

SEQ ID NO: 9596 - RNA, 20 nt, Artificial Sequence
  HTT spacer sequence CTCN PAM
guggucgcuggcuaugguga

SEQ ID NO: 9597 - RNA, 20 nt, Artificial Sequence
  HTT spacer sequence CTCN PAM
caccagccgccgccguugug

SEQ ID NO: 9598 - RNA, 20 nt, Artificial Sequence
  HTT spacer sequence CTCN PAM
augucucccaccagccgccg

SEQ ID NO: 9599 - RNA, 20 nt, Artificial Sequence
  HTT spacer sequence CTCN PAM
ucgaugucucccaccagccg

SEQ ID NO: 9600 - RNA, 20 nt, Artificial Sequence
  HTT spacer sequence CTCN PAM
ccugggcugacgggcaccuc

SEQ ID NO: 9601 - RNA, 20 nt, Artificial Sequence
  HTT spacer sequence CTCN PAM
ccaaaggaguagagcagcag

SEQ ID NO: 9602 - RNA, 20 nt, Artificial Sequence
  HTT spacer sequence CTCN PAM
uuuggugaguggcccugccc

SEQ ID NO: 9603 - RNA, 20 nt, Artificial Sequence
  HTT spacer sequence CTCN PAM
acuccuuuggugaguggccc

SEQ ID NO: 9604 - RNA, 20 nt, Artificial Sequence
  HTT spacer sequence CTCN PAM
gcccgugcugggccuggggc

SEQ ID NO: 9605 - RNA, 20 nt, Artificial Sequence
  HTT spacer sequence CTCN PAM
ucggcuggggacguucucug

SEQ ID NO: 9606 - RNA, 20 nt, Artificial Sequence
  HTT spacer sequence CTCN PAM
ucaucggcuggggacguucu

SEQ ID NO: 9607 - RNA, 20 nt, Artificial Sequence
  HTT spacer sequence CTCN PAM
ugcugcuggugcccgccuuc

SEQ ID NO: 9608 - RNA, 20 nt, Artificial Sequence
  HTT spacer sequence CTCN PAM
gcacagcccgugcccugcag

SEQ ID NO: 9609 - RNA, 20 nt, Artificial Sequence
  HTT spacer sequence CTCN PAM
ggggacugccugccacccgc

SEQ ID NO: 9610 - RNA, 20 nt, Artificial Sequence
  HTT spacer sequence CTCN PAM
aaagcggguggcaggcaguc

SEQ ID NO: 9611 - RNA, 20 nt, Artificial Sequence
  HTT spacer sequence CTCN PAM
cuccaaagcggguggcaggc

SEQ ID NO: 9612 - RNA, 20 nt, Artificial Sequence
  HTT spacer sequence CTCN PAM
ccauggccaccauccagggu

SEQ ID NO: 9613 - RNA, 20 nt, Artificial Sequence
  HTT spacer sequence CTCN PAM
ucggccucaccauggccacc

SEQ ID NO: 9614 - RNA, 20 nt, Artificial Sequence
  HTT spacer sequence CTCN PAM
cagccuacagcaggggaaga

SEQ ID NO: 9615 - RNA, 20 nt, Artificial Sequence
  HTT spacer sequence CTCN PAM
cccuggcccugcccugggug

SEQ ID NO: 9616 - RNA, 20 nt, Artificial Sequence
  HTT spacer sequence CTCN PAM
cgcccuggcccugcccuggg

SEQ ID NO: 9617 - RNA, 20 nt, Artificial Sequence
  HTT spacer sequence CTCN PAM
cugaaauaacgccccugcuu

SEQ ID NO: 9618 - RNA, 20 nt, Artificial Sequence
  HTT spacer sequence CTCN PAM
cacaccagcgcuuccaguuc

SEQ ID NO: 9619 - RNA, 20 nt, Artificial Sequence
  HTT spacer sequence CTCN PAM
gcguguacuccaggcccgag

SEQ ID NO: 9620 - RNA, 20 nt, Artificial Sequence
  HTT spacer sequence CTCN PAM
aggcccgagaacaggaagag

SEQ ID NO: 9621 - RNA, 20 nt, Artificial Sequence
  HTT spacer sequence CTCN PAM
ggccuggaguacacgcugag

SEQ ID NO: 9622 - RNA, 20 nt, Artificial Sequence
  HTT spacer sequence CTCN PAM
uccuguucucgggccuggag

SEQ ID NO: 9623 - RNA, 20 nt, Artificial Sequence
  HTT spacer sequence CTCN PAM
accucuuccuguucucgggc

SEQ ID NO: 9624 - RNA, 20 nt, Artificial Sequence
  HTT spacer sequence CTCN PAM
gcagccugcgccgccugggc

SEQ ID NO: 9625 - RNA, 20 nt, Artificial Sequence
  HTT spacer sequence CTCN PAM
ccagggcucagcagccugcg

SEQ ID NO: 9626 - RNA, 20 nt, Artificial Sequence
  HTT spacer sequence CTCN PAM
ccccagggcucagcagccug

SEQ ID NO: 9627 - RNA, 20 nt, Artificial Sequence
  HTT spacer sequence CTCN PAM
gcacgcgccaccucucccca

SEQ ID NO: 9628 - RNA, 20 nt, Artificial Sequence
  HTT spacer sequence CTCN PAM
ccugggcuuccccgggcggc

SEQ ID NO: 9629 - RNA, 20 nt, Artificial Sequence
  HTT spacer sequence CTCN PAM
ccccugggcuuccccgggcg

SEQ ID NO: 9630 - RNA, 20 nt, Artificial Sequence
  HTT spacer sequence CTCN PAM
acgcuuggguuggucgaguc

SEQ ID NO: 9631 - RNA, 20 nt, Artificial Sequence
  HTT spacer sequence CTCN PAM
accaacccaagcguggagcc

SEQ ID NO: 9632 - RNA, 20 nt, Artificial Sequence
  HTT spacer sequence CTCN PAM
agaggguggguccuggccac

SEQ ID NO: 9633 - RNA, 20 nt, Artificial Sequence
  HTT spacer sequence CTCN PAM
ggagacaguaaggacucgac

SEQ ID NO: 9634 - RNA, 20 nt, Artificial Sequence
  HTT spacer sequence CTCN PAM
uggccaggacccacccucug

SEQ ID NO: 9635 - RNA, 20 nt, Artificial Sequence
  HTT spacer sequence CTCN PAM
gcugucgcucguggccagga

SEQ ID NO: 9636 - RNA, 20 nt, Artificial Sequence
  HTT spacer sequence CTCN PAM
gcccccuggcccugcugcgc

SEQ ID NO: 9637 - RNA, 20 nt, Artificial Sequence
  HTT spacer sequence CTCN PAM
aucgcccugggguuccguga

SEQ ID NO: 9638 - RNA, 20 nt, Artificial Sequence
  HTT spacer sequence CTCN PAM
aaugccauccccacaggcgc

SEQ ID NO: 9639 - RNA, 20 nt, Artificial Sequence
  HTT spacer sequence CTCN PAM
ccaaugccauccccacaggc

SEQ ID NO: 9640 - RNA, 20 nt, Artificial Sequence
  HTT spacer sequence CTCN PAM
ugcaggcucuccaaugccau

SEQ ID NO: 9641 - RNA, 20 nt, Artificial Sequence
  HTT spacer sequence CTCN PAM
agggucccaacaccaagaga

SEQ ID NO: 9642 - RNA, 20 nt, Artificial Sequence
  HTT spacer sequence CTCN PAM
ugguguugggacccuugagg

SEQ ID NO: 9643 - RNA, 20 nt, Artificial Sequence
  HTT spacer sequence CTCN PAM
cuugguguugggacccuuga

SEQ ID NO: 9644 - RNA, 20 nt, Artificial Sequence
  HTT spacer sequence CTCN PAM
cuggcaucuggggcuggcac

SEQ ID NO: 9645 - RNA, 20 nt, Artificial Sequence
  HTT spacer sequence CTCN PAM
agccccuaggccuguggguc

SEQ ID NO: 9646 - RNA, 20 nt, Artificial Sequence
  HTT spacer sequence CTCN PAM
aggggcagcgucucuggcag

SEQ ID NO: 9647 - RNA, 20 nt, Artificial Sequence
  HTT spacer sequence CTCN PAM
ggcaggaagcagaagaugaa

SEQ ID NO: 9648 - RNA, 20 nt, Artificial Sequence
  HTT spacer sequence CTCN PAM
gaccugcuguucaucuucug

SEQ ID NO: 9649 - RNA, 20 nt, Artificial Sequence
  HTT spacer sequence CTCN PAM
ucgcagccuccgaccugcug

SEQ ID NO: 9650 - RNA, 20 nt, Artificial Sequence
  HTT spacer sequence CTCN PAM
cugccccuggaaauggcacc

SEQ ID NO: 9651 - RNA, 20 nt, Artificial Sequence
  HTT spacer sequence CTCN PAM
gagcauagggcccaggguga

SEQ ID NO: 9652 - RNA, 20 nt, Artificial Sequence
  HTT spacer sequence CTCN PAM
gagccucccugccccuggaa

SEQ ID NO: 9653 - RNA, 20 nt, Artificial Sequence
  HTT spacer sequence CTCN PAM
cugggcuucacccugggccc

SEQ ID NO: 9654 - RNA, 20 nt, Artificial Sequence
  HTT spacer sequence CTCN PAM
gguggucuuuucccuaggcg

SEQ ID NO: 9655 - RNA, 20 nt, Artificial Sequence
  HTT spacer sequence CTCN PAM
cugugcagcucggguggucu

SEQ ID NO: 9656 - RNA, 20 nt, Artificial Sequence
  HTT spacer sequence CTCN PAM
ggcccgcagucaaggcaugg

SEQ ID NO: 9657 - RNA, 20 nt, Artificial Sequence
  HTT spacer sequence CTCN PAM
ccucuggcccgcagucaagg

SEQ ID NO: 9658 - RNA, 20 nt, Artificial Sequence
  HTT spacer sequence CTCN PAM
acggccaucguugcugaccu

SEQ ID NO: 9659 - RNA, 20 nt, Artificial Sequence
  HTT spacer sequence CTCN PAM
ccacggccaucguugcugac

SEQ ID NO: 9660 - RNA, 20 nt, Artificial Sequence
  HTT spacer sequence CTCN PAM
aggcugauugggggcaucag

SEQ ID NO: 9661 - RNA, 20 nt, Artificial Sequence
  HTT spacer sequence CTCN PAM
gagagguggcccagacugca

SEQ ID NO: 9662 - RNA, 20 nt, Artificial Sequence
  HTT spacer sequence CTCN PAM
gagcuuugcggccuuccugg

SEQ ID NO: 9663 - RNA, 20 nt, Artificial Sequence
  HTT spacer sequence CTCN PAM
cggagcuuugcggccuuccu

SEQ ID NO: 9664 - RNA, 20 nt, Artificial Sequence
  HTT spacer sequence CTCN PAM
uaugcagucugggccaccuc

SEQ ID NO: 9665 - RNA, 20 nt, Artificial Sequence
  HTT spacer sequence CTCN PAM
uggccccugccccugggcag

SEQ ID NO: 9666 - RNA, 20 nt, Artificial Sequence
  HTT spacer sequence CTCN PAM
uggccuuaagcgaccgcccc

SEQ ID NO: 9667 - RNA, 20 nt, Artificial Sequence
  HTT spacer sequence CTCN PAM
gaguagggcuuggcaaccca

SEQ ID NO: 9668 - RNA, 20 nt, Artificial Sequence
  HTT spacer sequence CTCN PAM
gagccacuccuggccuuaag

SEQ ID NO: 9669 - RNA, 20 nt, Artificial Sequence
  HTT spacer sequence CTCN PAM
acccugcccuauuucgaagc

SEQ ID NO: 9670 - RNA, 20 nt, Artificial Sequence
  HTT spacer sequence CTCN PAM
gaugcuucgaaauagggcag

SEQ ID NO: 9671 - RNA, 20 nt, Artificial Sequence
  HTT spacer sequence CTCN PAM
gugccuuccuaggggccagg

SEQ ID NO: 9672 - RNA, 20 nt, Artificial Sequence
  HTT spacer sequence CTCN PAM
uggccccuaggaaggcacug

SEQ ID NO: 9673 - RNA, 20 nt, Artificial Sequence
  HTT spacer sequence CTCN PAM
uugaaagccuggcucuggaa

SEQ ID NO: 9674 - RNA, 20 nt, Artificial Sequence
  HTT spacer sequence CTCN PAM
ggaacaggagccacuggucc

SEQ ID NO: 9675 - RNA, 20 nt, Artificial Sequence
  HTT spacer sequence CTCN PAM
uguuccagagccaggcuuuc

SEQ ID NO: 9676 - RNA, 20 nt, Artificial Sequence
  HTT spacer sequence CTCN PAM
ggggaccaguggcuccuguu

SEQ ID NO: 9677 - RNA, 20 nt, Artificial Sequence
  HTT spacer sequence CTCN PAM
aggaugcgaugagggccaac

SEQ ID NO: 9678 - RNA, 20 nt, Artificial Sequence
  HTT spacer sequence CTCN PAM
ucgcauccuggaggggguuc

SEQ ID NO: 9679 - RNA, 20 nt, Artificial Sequence
  HTT spacer sequence CTCN PAM
uggccacugguuggcccuca

SEQ ID NO: 9680 - RNA, 20 nt, Artificial Sequence
  HTT spacer sequence CTCN PAM
cucuccccaccuaaccccau

SEQ ID NO: 9681 - RNA, 20 nt, Artificial Sequence
  HTT spacer sequence CTCN PAM
ccccaccuaaccccaugggg

SEQ ID NO: 9682 - RNA, 20 nt, Artificial Sequence
  HTT spacer sequence CTCN PAM
ccaccuaaccccauggggcu

SEQ ID NO: 9683 - RNA, 20 nt, Artificial Sequence
  HTT spacer sequence CTCN PAM
cacccagccaguagccccau

SEQ ID NO: 9684 - RNA, 20 nt, Artificial Sequence
  HTT spacer sequence CTCN PAM
ucccacccagccaguagccc

SEQ ID NO: 9685 - RNA, 20 nt, Artificial Sequence
  HTT spacer sequence CTCN PAM
ccaagcagucagagguggcc

SEQ ID NO: 9686 - RNA, 20 nt, Artificial Sequence
  HTT spacer sequence CTCN PAM
gacugcuuggggaggcgccc

SEQ ID NO: 9687 - RNA, 20 nt, Artificial Sequence
  HTT spacer sequence CTCN PAM
cuggggccaccucugacugc

SEQ ID NO: 9688 - RNA, 20 nt, Artificial Sequence
  HTT spacer sequence CTCN PAM
guccugcaguuucugugugc

SEQ ID NO: 9689 - RNA, 20 nt, Artificial Sequence
  HTT spacer sequence CTCN PAM
gcauucucuguccugcaguu

SEQ ID NO: 9690 - RNA, 20 nt, Artificial Sequence
  HTT spacer sequence CTCN PAM
uuggcucggcauucucuguc

SEQ ID NO: 9691 - RNA, 20 nt, Artificial Sequence
  HTT spacer sequence CTCN PAM
ggucucauuggcucggcauu

SEQ ID NO: 9692 - RNA, 20 nt, Artificial Sequence
  HTT spacer sequence CTCN PAM
caggucucauuggcucggca

SEQ ID NO: 9693 - RNA, 20 nt, Artificial Sequence
  HTT spacer sequence CTCN PAM
uggugccaggcagccccaug

SEQ ID NO: 9694 - RNA, 20 nt, Artificial Sequence
  HTT spacer sequence CTCN PAM
aggccaauguccagccccgu

SEQ ID NO: 9695 - RNA, 20 nt, Artificial Sequence
  HTT spacer sequence CTCN PAM
ggacggggcuggacauuggc

SEQ ID NO: 9696 - RNA, 20 nt, Artificial Sequence
  HTT spacer sequence CTCN PAM
caggccauggcccuugagcc

SEQ ID NO: 9697 - RNA, 20 nt, Artificial Sequence
  HTT spacer sequence CTCN PAM
agggccauggccugugagug

SEQ ID NO: 9698 - RNA, 20 nt, Artificial Sequence
  HTT spacer sequence CTCN PAM
gcucaagggccauggccugu

SEQ ID NO: 9699 - RNA, 20 nt, Artificial Sequence
  HTT spacer sequence CTCN PAM
auuggggcccccucggcuca

SEQ ID NO: 9700 - RNA, 20 nt, Artificial Sequence
  HTT spacer sequence CTCN PAM
ccauuggggcccccucggcu

SEQ ID NO: 9701 - RNA, 20 nt, Artificial Sequence
  HTT spacer sequence CTCN PAM
ucucuccauuggggcccccu

SEQ ID NO: 9702 - RNA, 20 nt, Artificial Sequence
  HTT spacer sequence CTCN PAM
gcgugucacguucagauccu

SEQ ID NO: 9703 - RNA, 20 nt, Artificial Sequence
  HTT spacer sequence CTCN PAM
cugggcuggcaugucuggug

SEQ ID NO: 9704 - RNA, 20 nt, Artificial Sequence
  HTT spacer sequence CTCN PAM
guccuugccuucccacuccc

SEQ ID NO: 9705 - RNA, 20 nt, Artificial Sequence
  HTT spacer sequence CTCN PAM
ccaauucucgguccuugccu

SEQ ID NO: 9706 - RNA, 20 nt, Artificial Sequence
  HTT spacer sequence CTCN PAM
acgguccuauguuuggugga

SEQ ID NO: 9707 - RNA, 20 nt, Artificial Sequence
  HTT spacer sequence CTCN PAM
cuacgguccuauguuuggug

SEQ ID NO: 9708 - RNA, 20 nt, Artificial Sequence
  HTT spacer sequence CTCN PAM
gugcccuuggcgggcucucu

SEQ ID NO: 9709 - RNA, 20 nt, Artificial Sequence
  HTT spacer sequence CTCN PAM
gaacaggacacuguuguacc

SEQ ID NO: 9710 - RNA, 20 nt, Artificial Sequence
  HTT spacer sequence CTCN PAM
ucuccacuggcaucccgaug

SEQ ID NO: 9711 - RNA, 20 nt, Artificial Sequence
  HTT spacer sequence CTCN PAM
acuggcaucccgauggcggu

SEQ ID NO: 9712 - RNA, 20 nt, Artificial Sequence
  HTT spacer sequence CTCN PAM
uggcagggcgggguggacug

SEQ ID NO: 9713 - RNA, 20 nt, Artificial Sequence
  HTT spacer sequence CTCN PAM
auggcuccuggcagggcggg

SEQ ID NO: 9714 - RNA, 20 nt, Artificial Sequence
  HTT spacer sequence CTCN PAM
uccccuaggacccccucuau

SEQ ID NO: 9715 - RNA, 20 nt, Artificial Sequence
  HTT spacer sequence CTCN PAM
ccagcccuuaucgugauucc

SEQ ID NO: 9716 - RNA, 20 nt, Artificial Sequence
  HTT spacer sequence CTCN PAM
cgugggcacggccguggcuc

SEQ ID NO: 9717 - RNA, 20 nt, Artificial Sequence
  HTT spacer sequence CTCN PAM
ccaacagcccgggcagcagg

SEQ ID NO: 9718 - RNA, 20 nt, Artificial Sequence
  HTT spacer sequence CTCN PAM
aacagcccgggcagcagggg

SEQ ID NO: 9719 - RNA, 20 nt, Artificial Sequence
  HTT spacer sequence CTCN PAM
uggccuucacgcugcugcug

SEQ ID NO: 9720 - RNA, 20 nt, Artificial Sequence
  HTT spacer sequence CTCN PAM
ugcuggaccuccuggccuuc

SEQ ID NO: 9721 - RNA, 20 nt, Artificial Sequence
  HTT spacer sequence CTCN PAM
gccuccugcuggaccuccug

SEQ ID NO: 9722 - RNA, 20 nt, Artificial Sequence
  HTT spacer sequence CTCN PAM
ggcggcugcugguggauggg

SEQ ID NO: 9723 - RNA, 20 nt, Artificial Sequence
  HTT spacer sequence CTCN PAM
acccccuccccaucccaugg

SEQ ID NO: 9724 - RNA, 20 nt, Artificial Sequence
  HTT spacer sequence CTCN PAM
ccaucccauggugggcugcu

SEQ ID NO: 9725 - RNA, 20 nt, Artificial Sequence
  HTT spacer sequence CTCN PAM
gaccuggccuggguggggug

SEQ ID NO: 9726 - RNA, 20 nt, Artificial Sequence
  HTT spacer sequence CTCN PAM
gcuuccccgcuaacccgacc

SEQ ID NO: 9727 - RNA, 20 nt, Artificial Sequence
  HTT spacer sequence CTCN PAM
ggggccuggcauacccccac

SEQ ID NO: 9728 - RNA, 20 nt, Artificial Sequence
  HTT spacer sequence CTCN PAM
ccggcugucggguguggggg

SEQ ID NO: 9729 - RNA, 20 nt, Artificial Sequence
  HTT spacer sequence CTCN PAM
ggccuacggacgcaggggcc

SEQ ID NO: 9730 - RNA, 20 nt, Artificial Sequence
  HTT spacer sequence CTCN PAM
ggaccguugccuuugcggcu

SEQ ID NO: 9731 - RNA, 20 nt, Artificial Sequence
  HTT spacer sequence CTCN PAM
caggaccguugccuuugcgg

SEQ ID NO: 9732 - RNA, 20 nt, Artificial Sequence
  HTT spacer sequence CTCN PAM
cccuggucucucaggaccgu

SEQ ID NO: 9733 - RNA, 20 nt, Artificial Sequence
  HTT spacer sequence CTCN PAM
cacgcccucguaacagcgag

SEQ ID NO: 9734 - RNA, 20 nt, Artificial Sequence
  HTT spacer sequence CTCN PAM
uaacagcgagagaaaacuug

SEQ ID NO: 9735 - RNA, 20 nt, Artificial Sequence
  HTT spacer sequence CTCN PAM
cuguuacgagggcgugggag

SEQ ID NO: 9736 - RNA, 20 nt, Artificial Sequence
  HTT spacer sequence CTCN PAM
cgcuguuacgagggcguggg

SEQ ID NO: 9737 - RNA, 20 nt, Artificial Sequence
  HTT spacer sequence CTCN PAM
gucucccuggcgggggccau

SEQ ID NO: 9738 - RNA, 20 nt, Artificial Sequence
  HTT spacer sequence CTCN PAM
cuggcgggggccauggggug

SEQ ID NO: 9739 - RNA, 20 nt, Artificial Sequence
  HTT spacer sequence CTCN PAM
ugcguccggugugcacccca

SEQ ID NO: 9740 - RNA, 20 nt, Artificial Sequence
  HTT spacer sequence CTCN PAM
cacuccgccaucccgcgugc

SEQ ID NO: 9741 - RNA, 20 nt, Artificial Sequence
  HTT spacer sequence CTCN PAM
gccaucccgcgugcgucccg

SEQ ID NO: 9742 - RNA, 20 nt, Artificial Sequence
  HTT spacer sequence CTCN PAM
aacccccacgccgcgcgccu

SEQ ID NO: 9743 - RNA, 20 nt, Artificial Sequence
  HTT spacer sequence CTCN PAM
caccgcccccaccccgcgcg

SEQ ID NO: 9744 - RNA, 20 nt, Artificial Sequence
  HTT spacer sequence CTCN PAM
ccuacccugcgcaccucuca

SEQ ID NO: 9745 - RNA, 20 nt, Artificial Sequence
  HTT spacer sequence CTCN PAM
cacccgccccacccccgcgu

SEQ ID NO: 9746 - RNA, 20 nt, Artificial Sequence
  HTT spacer sequence CTCN PAM
cccgccccacccccgcguac

SEQ ID NO: 9747 - RNA, 20 nt, Artificial Sequence
  HTT spacer sequence CTCN PAM
ucccccaccccgcgcguccc

SEQ ID NO: 9748 - RNA, 20 nt, Artificial Sequence
  HTT spacer sequence CTCN PAM
cccaccccgcgcguccccug

SEQ ID NO: 9749 - RNA, 20 nt, Artificial Sequence
  HTT spacer sequence CTCN PAM
gguugggggugggacagggg

SEQ ID NO: 9750 - RNA, 20 nt, Artificial Sequence
  HTT spacer sequence CTCN PAM
ggacggacggucgcacagac

SEQ ID NO: 9751 - RNA, 20 nt, Artificial Sequence
  HTT spacer sequence CTCN PAM
gcacguucucuuccggccgg

SEQ ID NO: 9752 - RNA, 20 nt, Artificial Sequence
  HTT spacer sequence CTCN PAM
uccggccggagucaguggcg

SEQ ID NO: 9753 - RNA, 20 nt, Artificial Sequence
  HTT spacer sequence CTCN PAM
ggccggaagagaacgugcag

SEQ ID NO: 9754 - RNA, 20 nt, Artificial Sequence
  HTT spacer sequence CTCN PAM
ccgguccugcgggucgcugc

SEQ ID NO: 9755 - RNA, 20 nt, Artificial Sequence
  HTT spacer sequence CTCN PAM
gggugcugcuaacccacagc

SEQ ID NO: 9756 - RNA, 20 nt, Artificial Sequence
  HTT spacer sequence CTCN PAM
gcucagggugcugcuaaccc

SEQ ID NO: 9757 - RNA, 20 nt, Artificial Sequence
  HTT spacer sequence CTCN PAM
uccgcuccgcucagggugcu

SEQ ID NO: 9758 - RNA, 20 nt, Artificial Sequence
  HTT spacer sequence CTCN PAM
ggguuacgcggcggcgggca

SEQ ID NO: 9759 - RNA, 20 nt, Artificial Sequence
  HTT spacer sequence CTCN PAM
gccucgggguuacgcggcgg

SEQ ID NO: 9760 - RNA, 20 nt, Artificial Sequence
  HTT spacer sequence CTCN PAM
uggccuggccuccuugggcc

SEQ ID NO: 9761 - RNA, 20 nt, Artificial Sequence
  HTT spacer sequence CTCN PAM
uugggcccacgacgccugcc

SEQ ID NO: 9762 - RNA, 20 nt, Artificial Sequence
  HTT spacer sequence CTCN PAM
gcggggcaggcgucgugggc

SEQ ID NO: 9763 - RNA, 20 nt, Artificial Sequence
  HTT spacer sequence CTCN PAM
ggcccauggguccgcuccgc

SEQ ID NO: 9764 - RNA, 20 nt, Artificial Sequence
  HTT spacer sequence CTCN PAM
ggcgagcgcuggcgcagccu

SEQ ID NO: 9765 - RNA, 20 nt, Artificial Sequence
  HTT spacer sequence CTCN PAM
ccugaggccccgcacacaaa

SEQ ID NO: 9766 - RNA, 20 nt, Artificial Sequence
  HTT spacer sequence CTCN PAM
ccguggaaggaccgcgggcu

SEQ ID NO: 9767 - RNA, 20 nt, Artificial Sequence
  HTT spacer sequence CTCN PAM
ugccacacacacagcggugg

SEQ ID NO: 9768 - RNA, 20 nt, Artificial Sequence
  HTT spacer sequence CTCN PAM
ggcugcgugagcugaccccg

SEQ ID NO: 9769 - RNA, 20 nt, Artificial Sequence
  HTT spacer sequence CTCN PAM
cgcagcccgagcagaauggc

SEQ ID NO: 9770 - RNA, 20 nt, Artificial Sequence
  HTT spacer sequence CTCN PAM
cugugcaccuacuuuugcug

SEQ ID NO: 9771 - RNA, 20 nt, Artificial Sequence
  HTT spacer sequence CTCN PAM
gugcaccuacuuuugcugcg

SEQ ID NO: 9772 - RNA, 20 nt, Artificial Sequence
  HTT spacer sequence CTCN PAM
gcaccaaacgcagcaaaagu

SEQ ID NO: 9773 - RNA, 20 nt, Artificial Sequence
  HTT spacer sequence CTCN PAM
gccgccuguccugggacuuc

SEQ ID NO: 9774 - RNA, 20 nt, Artificial Sequence
  HTT spacer sequence CTCN PAM
gcccacccaauucacaccau

SEQ ID NO: 9775 - RNA, 20 nt, Artificial Sequence
  HTT spacer sequence CTCN PAM
cugggucacccgaaggagga

SEQ ID NO: 9776 - RNA, 20 nt, Artificial Sequence
  HTT spacer sequence CTCN PAM
uucgggugacccagggagcg

SEQ ID NO: 9777 - RNA, 20 nt, Artificial Sequence
  HTT spacer sequence CTCN PAM
uccuucgggugacccaggga

SEQ ID NO: 9778 - RNA, 20 nt, Artificial Sequence
  HTT spacer sequence CTCN PAM
uuccgggcgcagaagcaccc

SEQ ID NO: 9779 - RNA, 20 nt, Artificial Sequence
  HTT spacer sequence CTCN PAM
agcgugggucgggugcuucu

SEQ ID NO: 9780 - RNA, 20 nt, Artificial Sequence
  HTT spacer sequence CTCN PAM
gggcaggagaagcuuugggc

SEQ ID NO: 9781 - RNA, 20 nt, Artificial Sequence
  HTT spacer sequence CTCN PAM
ugcccagagggaccguuucc

SEQ ID NO: 9782 - RNA, 20 nt, Artificial Sequence
  HTT spacer sequence CTCN PAM
agccaggcccaaagcuucuc

SEQ ID NO: 9783 - RNA, 20 nt, Artificial Sequence
  HTT spacer sequence CTCN PAM
cggaaccacgccaacgccug

SEQ ID NO: 9784 - RNA, 20 nt, Artificial Sequence
  HTT spacer sequence CTCN PAM
caccuccccucccaccuucu

SEQ ID NO: 9785 - RNA, 20 nt, Artificial Sequence
  HTT spacer sequence CTCN PAM
ccucccaccuucuaaaaugc

SEQ ID NO: 9786 - RNA, 20 nt, Artificial Sequence
  HTT spacer sequence CTCN PAM
caccuucuaaaaugcuugcg

SEQ ID NO: 9787 - RNA, 20 nt, Artificial Sequence
  HTT spacer sequence CTCN PAM
cguggccgacccuaaccaga

SEQ ID NO: 9788 - RNA, 20 nt, Artificial Sequence
  HTT spacer sequence CTCN PAM
auagagaacuuccaauugug

SEQ ID NO: 9789 - RNA, 20 nt, Artificial Sequence
  HTT spacer sequence CTCN PAM
auggaguaaaggcgguaugu

SEQ ID NO: 9790 - RNA, 20 nt, Artificial Sequence
  HTT spacer sequence CTCN PAM
uccuaauagaugcaguuuuc

SEQ ID NO: 9791 - RNA, 20 nt, Artificial Sequence
  HTT spacer sequence CTCN PAM
gggaaaaaagcuaauaacag

SEQ ID NO: 9792 - RNA, 20 nt, Artificial Sequence
  HTT spacer sequence CTCN PAM
augaaacugccauugcaaaa

SEQ ID NO: 9793 - RNA, 20 nt, Artificial Sequence
  HTT spacer sequence CTCN PAM
cugucggcaaauuuugcaau

SEQ ID NO: 9794 - RNA, 20 nt, Artificial Sequence
  HTT spacer sequence CTCN PAM
auuuugcuucuaaccuccau

SEQ ID NO: 9795 - RNA, 20 nt, Artificial Sequence
  HTT spacer sequence CTCN PAM
augcccuccuuguuuacugc

SEQ ID NO: 9796 - RNA, 20 nt, Artificial Sequence
  HTT spacer sequence CTCN PAM
uuguuuacugcugcacgcag

SEQ ID NO: 9797 - RNA, 20 nt, Artificial Sequence
  HTT spacer sequence CTCN PAM
cacaguucaaccugcgugca

SEQ ID NO: 9798 - RNA, 20 nt, Artificial Sequence
  HTT spacer sequence CTCN PAM
ucaaccguaguuucuaaucu

SEQ ID NO: 9799 - RNA, 20 nt, Artificial Sequence
  HTT spacer sequence CTCN PAM
cgcugcgugacucuucaacc

SEQ ID NO: 9800 - RNA, 20 nt, Artificial Sequence
  HTT spacer sequence CTCN PAM
ccaaacugcuccuggcgaua

SEQ ID NO: 9801 - RNA, 20 nt, Artificial Sequence
  HTT spacer sequence CTCN PAM
uggcgauaacaucaccaucg

SEQ ID NO: 9802 - RNA, 20 nt, Artificial Sequence
  HTT spacer sequence CTCN PAM
ucugauguuguggcacccag

SEQ ID NO: 9803 - RNA, 20 nt, Artificial Sequence
  HTT spacer sequence CTCN PAM
gugcgaaaacagcuucgacu

SEQ ID NO: 9804 - RNA, 20 nt, Artificial Sequence
  HTT spacer sequence CTCN PAM
cugugauuucaucucugacc

SEQ ID NO: 9805 - RNA, 20 nt, Artificial Sequence
  HTT spacer sequence CTCN PAM
gaccugaccaauggguacuu

SEQ ID NO: 9806 - RNA, 20 nt, Artificial Sequence
  HTT spacer sequence CTCN PAM
cuggcugccccccacccacc

SEQ ID NO: 9807 - RNA, 20 nt, Artificial Sequence
  HTT spacer sequence CTCN PAM
aaaccccagaugcucaggga

SEQ ID NO: 9808 - RNA, 20 nt, Artificial Sequence
  HTT spacer sequence CTCN PAM
gggagaccgaguaauaauaa

SEQ ID NO: 9809 - RNA, 20 nt, Artificial Sequence
  HTT spacer sequence CTCN PAM
cugagcaucugggguuugga

SEQ ID NO: 9810 - RNA, 20 nt, Artificial Sequence
  HTT spacer sequence CTCN PAM
gucucccugagcaucugggg

SEQ ID NO: 9811 - RNA, 20 nt, Artificial Sequence
  HTT spacer sequence CTCN PAM
agucucccacacagcuagcu

SEQ ID NO: 9812 - RNA, 20 nt, Artificial Sequence
  HTT spacer sequence CTCN PAM
cacacagcuagcucugcgug

SEQ ID NO: 9813 - RNA, 20 nt, Artificial Sequence
  HTT spacer sequence CTCN PAM
gcgugaauuaccuuuucucu

SEQ ID NO: 9814 - RNA, 20 nt, Artificial Sequence
  HTT spacer sequence CTCN PAM
guugcaaaugcccuuucuug

SEQ ID NO: 9815 - RNA, 20 nt, Artificial Sequence
  HTT spacer sequence CTCN PAM
ucaaugacaugacacgcagc

SEQ ID NO: 9816 - RNA, 20 nt, Artificial Sequence
  HTT spacer sequence CTCN PAM
agcugcgugucaugucauug

SEQ ID NO: 9817 - RNA, 20 nt, Artificial Sequence
  HTT spacer sequence CTCN PAM
uacacucuagcugcguguca

SEQ ID NO: 9818 - RNA, 20 nt, Artificial Sequence
  HTT spacer sequence CTCN PAM
auggacagccaggugccugg

SEQ ID NO: 9819 - RNA, 20 nt, Artificial Sequence
  HTT spacer sequence CTCN PAM
uuuccucuuugcuuggccaa

SEQ ID NO: 9820 - RNA, 20 nt, Artificial Sequence
  HTT spacer sequence CTCN PAM
uugcuuggccaaagaggguu

SEQ ID NO: 9821 - RNA, 20 nt, Artificial Sequence
  HTT spacer sequence CTCN PAM
uuggccaagcaaagaggaaa

SEQ ID NO: 9822 - RNA, 20 nt, Artificial Sequence
  HTT spacer sequence CTCN PAM
ggacccuggcccaacccucu

SEQ ID NO: 9823 - RNA, 20 nt, Artificial Sequence
  HTT spacer sequence CTCN PAM
gccacacggcuacugccacu

SEQ ID NO: 9824 - RNA, 20 nt, Artificial Sequence
  HTT spacer sequence CTCN PAM
ucuagauuuguggauccgug

SEQ ID NO: 9825 - RNA, 20 nt, Artificial Sequence
  HTT spacer sequence CTCN PAM
gagccaucuggggaggcugg

SEQ ID NO: 9826 - RNA, 20 nt, Artificial Sequence
  HTT spacer sequence CTCN PAM
gagacaggucuggcaggugc

SEQ ID NO: 9827 - RNA, 20 nt, Artificial Sequence
  HTT spacer sequence CTCN PAM
ccagauggcucagagacagg

SEQ ID NO: 9828 - RNA, 20 nt, Artificial Sequence
  HTT spacer sequence CTCN PAM
ggcccugacgggggaaaucu

SEQ ID NO: 9829 - RNA, 20 nt, Artificial Sequence
  HTT spacer sequence CTCN PAM
ucuccaagcugcuggcuuca

SEQ ID NO: 9830 - RNA, 20 nt, Artificial Sequence
  HTT spacer sequence CTCN PAM
aagcugcuggcuucagccca

SEQ ID NO: 9831 - RNA, 20 nt, Artificial Sequence
  HTT spacer sequence CTCN PAM
gucuugcgcuuuccagagag

SEQ ID NO: 9832 - RNA, 20 nt, Artificial Sequence
  HTT spacer sequence CTCN PAM
ggaaagcgcaagacagagac

SEQ ID NO: 9833 - RNA, 20 nt, Artificial Sequence
  HTT spacer sequence CTCN PAM
cuggaaagcgcaagacagag

SEQ ID NO: 9834 - RNA, 20 nt, Artificial Sequence
  HTT spacer sequence CTCN PAM
cucuggaaagcgcaagacag

SEQ ID NO: 9835 - RNA, 20 nt, Artificial Sequence
  HTT spacer sequence CTCN PAM
uuuugagcuccaggccuacc

SEQ ID NO: 9836 - RNA, 20 nt, Artificial Sequence
  HTT spacer sequence CTCN PAM
aaaugagucagucucucucu

SEQ ID NO: 9837 - RNA, 20 nt, Artificial Sequence
  HTT spacer sequence CTCN PAM
aggccuaccaggcagcccaa

SEQ ID NO: 9838 - RNA, 20 nt, Artificial Sequence
  HTT spacer sequence CTCN PAM
cacacugaggauggcucaug

SEQ ID NO: 9839 - RNA, 20 nt, Artificial Sequence
  HTT spacer sequence CTCN PAM
cacugaggauggcucaugcu

SEQ ID NO: 9840 - RNA, 20 nt, Artificial Sequence
  HTT spacer sequence CTCN PAM
gugugagaggcaguuacugc

SEQ ID NO: 9841 - RNA, 20 nt, Artificial Sequence
  HTT spacer sequence CTCN PAM
ugcucugguccagccauggc

SEQ ID NO: 9842 - RNA, 20 nt, Artificial Sequence
  HTT spacer sequence CTCN PAM
gguccagccauggcuugaac

SEQ ID NO: 9843 - RNA, 20 nt, Artificial Sequence
  HTT spacer sequence CTCN PAM
caacaagaacaaagccagac

SEQ ID NO: 9844 - RNA, 20 nt, Artificial Sequence
  HTT spacer sequence CTCN PAM
uucucccuagcaucuucuuc

SEQ ID NO: 9845 - RNA, 20 nt, Artificial Sequence
  HTT spacer sequence CTCN PAM
cuagcaucuucuuccuugcu

SEQ ID NO: 9846 - RNA, 20 nt, Artificial Sequence
  HTT spacer sequence CTCN PAM
aagaucccacaccccguuag

SEQ ID NO: 9847 - RNA, 20 nt, Artificial Sequence
  HTT spacer sequence CTCN PAM
ccuccccagucguagucugg

SEQ ID NO: 9848 - RNA, 20 nt, Artificial Sequence
  HTT spacer sequence CTCN PAM
ccagucguagucugguuaau

SEQ ID NO: 9849 - RNA, 20 nt, Artificial Sequence
  HTT spacer sequence CTCN PAM
ccacggucaccguggcuaga

SEQ ID NO: 9850 - RNA, 20 nt, Artificial Sequence
  HTT spacer sequence CTCN PAM
gcgaugcuucaggcacguac

SEQ ID NO: 9851 - RNA, 20 nt, Artificial Sequence
  HTT spacer sequence CTCN PAM
ugaggugugaacuugacccc

SEQ ID NO: 9852 - RNA, 20 nt, Artificial Sequence
  HTT spacer sequence CTCN PAM
ugagaucacagugaccagcc

SEQ ID NO: 9853 - RNA, 20 nt, Artificial Sequence
  HTT spacer sequence CTCN PAM
gucauccccuggggaaugcc

SEQ ID NO: 9854 - RNA, 20 nt, Artificial Sequence
  HTT spacer sequence CTCN PAM
gccugcaagaccgcauaccg

SEQ ID NO: 9855 - RNA, 20 nt, Artificial Sequence
  HTT spacer sequence CTCN PAM
cucagcaagguggcaggucc

SEQ ID NO: 9856 - RNA, 20 nt, Artificial Sequence
  HTT spacer sequence CTCN PAM
gcaagguggcaggucccaac

SEQ ID NO: 9857 - RNA, 20 nt, Artificial Sequence
  HTT spacer sequence CTCN PAM
uggugcaaggcuuguuggga

SEQ ID NO: 9858 - RNA, 20 nt, Artificial Sequence
  HTT spacer sequence CTCN PAM
cuggccagcuugugaaguuc

SEQ ID NO: 9859 - RNA, 20 nt, Artificial Sequence
  HTT spacer sequence CTCN PAM
uuacuucuuacagcucacag

SEQ ID NO: 9860 - RNA, 20 nt, Artificial Sequence
  HTT spacer sequence CTCN PAM
cagucccucccggguccagc

SEQ ID NO: 9861 - RNA, 20 nt, Artificial Sequence
  HTT spacer sequence CTCN PAM
cggguccagcacaccugagg

SEQ ID NO: 9862 - RNA, 20 nt, Artificial Sequence
  HTT spacer sequence CTCN PAM
ggugugcuggacccgggagg

SEQ ID NO: 9863 - RNA, 20 nt, Artificial Sequence
  HTT spacer sequence CTCN PAM
cucuugauuagugcagggga

SEQ ID NO: 9864 - RNA, 20 nt, Artificial Sequence
  HTT spacer sequence CTCN PAM
ugauuagugcaggggaaaag

SEQ ID NO: 9865 - RNA, 20 nt, Artificial Sequence
  HTT spacer sequence CTCN PAM
ucccaccuccgagagugcag

SEQ ID NO: 9866 - RNA, 20 nt, Artificial Sequence
  HTT spacer sequence CTCN PAM
caccuccgagagugcagugu

SEQ ID NO: 9867 - RNA, 20 nt, Artificial Sequence
  HTT spacer sequence CTCN PAM
gagagugcaguguccugaau

SEQ ID NO: 9868 - RNA, 20 nt, Artificial Sequence
  HTT spacer sequence CTCN PAM
gaggugggaggagacugggu

SEQ ID NO: 9869 - RNA, 20 nt, Artificial Sequence
  HTT spacer sequence CTCN PAM
cggaggugggaggagacugg

SEQ ID NO: 9870 - RNA, 20 nt, Artificial Sequence
  HTT spacer sequence CTCN PAM
auucaggacacugcacucuc

SEQ ID NO: 9871 - RNA, 20 nt, Artificial Sequence
  HTT spacer sequence CTCN PAM
gcuggaacagccacaguugg

SEQ ID NO: 9872 - RNA, 20 nt, Artificial Sequence
  HTT spacer sequence CTCN PAM
gauuucuaaaauaucugcaa

SEQ ID NO: 9873 - RNA, 20 nt, Artificial Sequence
  HTT spacer sequence CTCN PAM
uggggacuggggauucuggc

SEQ ID NO: 9874 - RNA, 20 nt, Artificial Sequence
  HTT spacer sequence CTCN PAM
gggaucgggaauggucugug

SEQ ID NO: 9875 - RNA, 20 nt, Artificial Sequence
  HTT spacer sequence CTCN PAM
ccccacccgcugccugcggu

SEQ ID NO: 9876 - RNA, 20 nt, Artificial Sequence
  HTT spacer sequence CTCN PAM
agcuccccccacccgcugcc

SEQ ID NO: 9877 - RNA, 20 nt, Artificial Sequence
  HTT spacer sequence CTCN PAM
aaaaaaaauuacuuuuuugg

SEQ ID NO: 9878 - RNA, 20 nt, Artificial Sequence
  HTT spacer sequence CTCN PAM
caccuauaauuggggggcca

SEQ ID NO: 9879 - RNA, 20 nt, Artificial Sequence
  HTT spacer sequence CTCN PAM
gguaauccaccugccuuggc

SEQ ID NO: 9880 - RNA, 20 nt, Artificial Sequence
  HTT spacer sequence CTCN PAM
ugcuuccuuaacaguggcuu

SEQ ID NO: 9881 - RNA, 20 nt, Artificial Sequence
  HTT spacer sequence CTCN PAM
cagccagagccugcuuggga

SEQ ID NO: 9882 - RNA, 20 nt, Artificial Sequence
  HTT spacer sequence CTCN PAM
gccagagccugcuugggagu

SEQ ID NO: 9883 - RNA, 20 nt, Artificial Sequence
  HTT spacer sequence CTCN PAM
ggcugagagguggggacaga

SEQ ID NO: 9884 - RNA, 20 nt, Artificial Sequence
  HTT spacer sequence CTCN PAM
caagcaggcucuggcugaga

SEQ ID NO: 9885 - RNA, 20 nt, Artificial Sequence
  HTT spacer sequence CTCN PAM
guagucaucugcucaacugc

SEQ ID NO: 9886 - RNA, 20 nt, Artificial Sequence
  HTT spacer sequence CTCN PAM
acugcagaacuggcagacgc

SEQ ID NO: 9887 - RNA, 20 nt, Artificial Sequence
  HTT spacer sequence CTCN PAM
cacugagcccacagcccugg

SEQ ID NO: 9888 - RNA, 20 nt, Artificial Sequence
  HTT spacer sequence CTCN PAM
gugggagcugacggggggcg

SEQ ID NO: 9889 - RNA, 20 nt, Artificial Sequence
  HTT spacer sequence CTCN PAM
cagggagaugcugccagcac

SEQ ID NO: 9890 - RNA, 20 nt, Artificial Sequence
  HTT spacer sequence CTCN PAM
cugggaggccagggcugugg

SEQ ID NO: 9891 - RNA, 20 nt, Artificial Sequence
  HTT spacer sequence CTCN PAM
ucucacaggucagcggccgg

SEQ ID NO: 9892 - RNA, 20 nt, Artificial Sequence
  HTT spacer sequence CTCN PAM
caggucagcggccggcagag

SEQ ID NO: 9893 - RNA, 20 nt, Artificial Sequence
  HTT spacer sequence CTCN PAM
gccggccgcugaccugugag

SEQ ID NO: 9894 - RNA, 20 nt, Artificial Sequence
  HTT spacer sequence CTCN PAM
gacacagcuccugaaaaaca

SEQ ID NO: 9895 - RNA, 20 nt, Artificial Sequence
  HTT spacer sequence CTCN PAM
ugaaaaacacgaaauccccg

SEQ ID NO: 9896 - RNA, 20 nt, Artificial Sequence
  HTT spacer sequence CTCN PAM
gcgaugacucaccugcugcg

SEQ ID NO: 9897 - RNA, 20 nt, Artificial Sequence
  HTT spacer sequence CTCN PAM
ccugcugcgugcccugagcu

SEQ ID NO: 9898 - RNA, 20 nt, Artificial Sequence
  HTT spacer sequence CTCN PAM
gggcacgcagcaggugaguc

SEQ ID NO: 9899 - RNA, 20 nt, Artificial Sequence
  HTT spacer sequence CTCN PAM
acgcacggguucuguggugu

SEQ ID NO: 9900 - RNA, 20 nt, Artificial Sequence
  HTT spacer sequence CTCN PAM
cgcugccuugacaccacaga

SEQ ID NO: 9901 - RNA, 20 nt, Artificial Sequence
  HTT spacer sequence CTCN PAM
cagcacuguccucacgcugc

SEQ ID NO: 9902 - RNA, 20 nt, Artificial Sequence
  HTT spacer sequence CTCN PAM
cugcagcaggauggugcccu

SEQ ID NO: 9903 - RNA, 20 nt, Artificial Sequence
  HTT spacer sequence CTCN PAM
aguccuggcacagccggaac

SEQ ID NO: 9904 - RNA, 20 nt, Artificial Sequence
  HTT spacer sequence CTCN PAM
ucaagaagacaguggcuuua

SEQ ID NO: 9905 - RNA, 20 nt, Artificial Sequence
  HTT spacer sequence CTCN PAM
cucuucaagaagacaguggc

SEQ ID NO: 9906 - RNA, 20 nt, Artificial Sequence
  HTT spacer sequence CTCN PAM
ggggccagcccacggcccuc

SEQ ID NO: 9907 - RNA, 20 nt, Artificial Sequence
  HTT spacer sequence CTCN PAM
caggggccagcccacggccc

SEQ ID NO: 9908 - RNA, 20 nt, Artificial Sequence
  HTT spacer sequence CTCN PAM
cugaaaggaggggacuuggg

SEQ ID NO: 9909 - RNA, 20 nt, Artificial Sequence
  HTT spacer sequence CTCN PAM
gaaaggaggggacuugggga

SEQ ID NO: 9910 - RNA, 20 nt, Artificial Sequence
  HTT spacer sequence CTCN PAM
uuucagagagugcucucagg

SEQ ID NO: 9911 - RNA, 20 nt, Artificial Sequence
  HTT spacer sequence CTCN PAM
ccaaguccccuccuuucaga

SEQ ID NO: 9912 - RNA, 20 nt, Artificial Sequence
  HTT spacer sequence CTCN PAM
aacuccccaaguccccuccu

SEQ ID NO: 9913 - RNA, 20 nt, Artificial Sequence
  HTT spacer sequence CTCN PAM
ucacagccagaaacgucaac

SEQ ID NO: 9914 - RNA, 20 nt, Artificial Sequence
  HTT spacer sequence CTCN PAM
cagccagaaacgucaacaga

SEQ ID NO: 9915 - RNA, 20 nt, Artificial Sequence
  HTT spacer sequence CTCN PAM
uucccagacaaacuuggcac

SEQ ID NO: 9916 - RNA, 20 nt, Artificial Sequence
  HTT spacer sequence CTCN PAM
cggccuuucgugccaaguuu

SEQ ID NO: 9917 - RNA, 20 nt, Artificial Sequence
  HTT spacer sequence CTCN PAM
gccugggcucagacaugucc

SEQ ID NO: 9918 - RNA, 20 nt, Artificial Sequence
  HTT spacer sequence CTCN PAM
ccuggagcuccugcgggugg

SEQ ID NO: 9919 - RNA, 20 nt, Artificial Sequence
  HTT spacer sequence CTCN PAM
aggugaggcuucccggccac

SEQ ID NO: 9920 - RNA, 20 nt, Artificial Sequence
  HTT spacer sequence CTCN PAM
ugcggguggcugcaguccgc

SEQ ID NO: 9921 - RNA, 20 nt, Artificial Sequence
  HTT spacer sequence CTCN PAM
cggaucaccuggcggacugc

SEQ ID NO: 9922 - RNA, 20 nt, Artificial Sequence
  HTT spacer sequence CTCN PAM
ucacggaucaccuggcggac

SEQ ID NO: 9923 - RNA, 20 nt, Artificial Sequence
  HTT spacer sequence CTCN PAM
aagcccuccucacggaucac

SEQ ID NO: 9924 - RNA, 20 nt, Artificial Sequence
  HTT spacer sequence CTCN PAM
ccaagcccuccucacggauc

SEQ ID NO: 9925 - RNA, 20 nt, Artificial Sequence
  HTT spacer sequence CTCN PAM
uguacgggucccugccaucc

SEQ ID NO: 9926 - RNA, 20 nt, Artificial Sequence
  HTT spacer sequence CTCN PAM
cagacuguccugccuggcug

SEQ ID NO: 9927 - RNA, 20 nt, Artificial Sequence
  HTT spacer sequence CTCN PAM
ugcccucacagacuguccug

SEQ ID NO: 9928 - RNA, 20 nt, Artificial Sequence
  HTT spacer sequence CTCN PAM
ugccuccugcccucacagac

SEQ ID NO: 9929 - RNA, 20 nt, Artificial Sequence
  HTT spacer sequence CTCN PAM
ucuugccuccugcccucaca

SEQ ID NO: 9930 - RNA, 20 nt, Artificial Sequence
  HTT spacer sequence CTCN PAM
cauaccggaugugauuggcc

SEQ ID NO: 9931 - RNA, 20 nt, Artificial Sequence
  HTT spacer sequence CTCN PAM
gucgaaguuggggcccucag

SEQ ID NO: 9932 - RNA, 20 nt, Artificial Sequence
  HTT spacer sequence CTCN PAM
gucuacucgcccagcggagg

SEQ ID NO: 9933 - RNA, 20 nt, Artificial Sequence
  HTT spacer sequence CTCN PAM
cccagcggagggagaggcug

SEQ ID NO: 9934 - RNA, 20 nt, Artificial Sequence
  HTT spacer sequence CTCN PAM
gcugggcgaguagacugagg

SEQ ID NO: 9935 - RNA, 20 nt, Artificial Sequence
  HTT spacer sequence CTCN PAM
cuccgcugggcgaguagacu

SEQ ID NO: 9936 - RNA, 20 nt, Artificial Sequence
  HTT spacer sequence CTCN PAM
cccuccgcugggcgaguaga

SEQ ID NO: 9937 - RNA, 20 nt, Artificial Sequence
  HTT spacer sequence CTCN PAM
gcugccacguggccacaucc

SEQ ID NO: 9938 - RNA, 20 nt, Artificial Sequence
  HTT spacer sequence CTCN PAM
cuagcagacaccacgagcag

SEQ ID NO: 9939 - RNA, 20 nt, Artificial Sequence
  HTT spacer sequence CTCN PAM
agcagacaccacgagcaguu

SEQ ID NO: 9940 - RNA, 20 nt, Artificial Sequence
  HTT spacer sequence CTCN PAM
uggugucugcuagagaggau

SEQ ID NO: 9941 - RNA, 20 nt, Artificial Sequence
  HTT spacer sequence CTCN PAM
gaacugcucguggugucugc

SEQ ID NO: 9942 - RNA, 20 nt, Artificial Sequence
  HTT spacer sequence CTCN PAM
gaaagggugcaccagagugg

SEQ ID NO: 9943 - RNA, 20 nt, Artificial Sequence
  HTT spacer sequence CTCN PAM
ggugcacccuuucagagcgc

SEQ ID NO: 9944 - RNA, 20 nt, Artificial Sequence
  HTT spacer sequence CTCN PAM
guccugucgcacuuggaauu

SEQ ID NO: 9945 - RNA, 20 nt, Artificial Sequence
  HTT spacer sequence CTCN PAM
cucaaaucaacucaccuugg

SEQ ID NO: 9946 - RNA, 20 nt, Artificial Sequence
  HTT spacer sequence CTCN PAM
aaucaacucaccuuggcuug

SEQ ID NO: 9947 - RNA, 20 nt, Artificial Sequence
  HTT spacer sequence CTCN PAM
ccuuggcuugcuuuguuugg

SEQ ID NO: 9948 - RNA, 20 nt, Artificial Sequence
  HTT spacer sequence CTCN PAM
aaacaaagcaagccaaggug

SEQ ID NO: 9949 - RNA, 20 nt, Artificial Sequence
  HTT spacer sequence CTCN PAM
gguauaaaccucugggacaa

SEQ ID NO: 9950 - RNA, 20 nt, Artificial Sequence
  HTT spacer sequence CTCN PAM
gggacaaagccacauacucc

SEQ ID NO: 9951 - RNA, 20 nt, Artificial Sequence
  HTT spacer sequence CTCN PAM
aggaacaggcagcacacgaa

SEQ ID NO: 9952 - RNA, 20 nt, Artificial Sequence
  HTT spacer sequence CTCN PAM
aggacguggugaagggccug

SEQ ID NO: 9953 - RNA, 20 nt, Artificial Sequence
  HTT spacer sequence CTCN PAM
acaugcggcaggggucggcc

SEQ ID NO: 9954 - RNA, 20 nt, Artificial Sequence
  HTT spacer sequence CTCN PAM
ccacaugcggcaggggucgg

SEQ ID NO: 9955 - RNA, 20 nt, Artificial Sequence
  HTT spacer sequence CTCN PAM
ccaaggugcguucucuccac

SEQ ID NO: 9956 - RNA, 20 nt, Artificial Sequence
  HTT spacer sequence CTCN PAM
gucagcugcucaccaaggug

SEQ ID NO: 9957 - RNA, 20 nt, Artificial Sequence
  HTT spacer sequence CTCN PAM
ugugccucagucagcugcuc

SEQ ID NO: 9958 - RNA, 20 nt, Artificial Sequence
  HTT spacer sequence CTCN PAM
uuuauuugaaaaucacuggg

SEQ ID NO: 9959 - RNA, 20 nt, Artificial Sequence
  HTT spacer sequence CTCN PAM
gcuuaccacauccaacccug

SEQ ID NO: 9960 - RNA, 20 nt, Artificial Sequence
  HTT spacer sequence CTCN PAM
aucauuucuuccaucucaug

SEQ ID NO: 9961 - RNA, 20 nt, Artificial Sequence
  HTT spacer sequence CTCN PAM
ugcaucgcaucucggagaac

SEQ ID NO: 9962 - RNA, 20 nt, Artificial Sequence
  HTT spacer sequence CTCN PAM
gagaacaaauuugauagcgu

SEQ ID NO: 9963 - RNA, 20 nt, Artificial Sequence
  HTT spacer sequence CTCN PAM
gagaugcgaugcaugagaug

SEQ ID NO: 9964 - RNA, 20 nt, Artificial Sequence
  HTT spacer sequence CTCN PAM
ugacuuuacauuucugcuua

SEQ ID NO: 9965 - RNA, 20 nt, Artificial Sequence
  HTT spacer sequence CTCN PAM
ccugacuuuacauuucugcu

SEQ ID NO: 9966 - RNA, 20 nt, Artificial Sequence
  HTT spacer sequence CTCN PAM
cagucauugauaaguugguu

SEQ ID NO: 9967 - RNA, 20 nt, Artificial Sequence
  HTT spacer sequence CTCN PAM
gugcucagcaccaagaacaa

SEQ ID NO: 9968 - RNA, 20 nt, Artificial Sequence
  HTT spacer sequence CTCN PAM
cagcgcuccacacacacuca

SEQ ID NO: 9969 - RNA, 20 nt, Artificial Sequence
  HTT spacer sequence CTCN PAM
acacacacucaauccacgua

SEQ ID NO: 9970 - RNA, 20 nt, Artificial Sequence
  HTT spacer sequence CTCN PAM
auccacguacuucuaauuuu

SEQ ID NO: 9971 - RNA, 20 nt, Artificial Sequence
  HTT spacer sequence CTCN PAM
cagaaggaaacaaagcaaaa

SEQ ID NO: 9972 - RNA, 20 nt, Artificial Sequence
  HTT spacer sequence CTCN PAM
ggugguugcacuucugaauu

SEQ ID NO: 9973 - RNA, 20 nt, Artificial Sequence
  HTT spacer sequence CTCN PAM
ccaccaccaaaagcugcucu

SEQ ID NO: 9974 - RNA, 20 nt, Artificial Sequence
  HTT spacer sequence CTCN PAM
accaccaaaagcugcucuuc

SEQ ID NO: 9975 - RNA, 20 nt, Artificial Sequence
  HTT spacer sequence CTCN PAM
uccaucgaucuuccuaacaa

SEQ ID NO: 9976 - RNA, 20 nt, Artificial Sequence
  HTT spacer sequence CTCN PAM
guuguuaggaagaucgaugg

SEQ ID NO: 9977 - RNA, 20 nt, Artificial Sequence
  HTT spacer sequence CTCN PAM
guuccucauaggauucaggg

SEQ ID NO: 9978 - RNA, 20 nt, Artificial Sequence
  HTT spacer sequence CTCN PAM
uaggauucaggggcuaucaa

SEQ ID NO: 9979 - RNA, 20 nt, Artificial Sequence
  HTT spacer sequence CTCN PAM
aaaauaaauauauauacaua

SEQ ID NO: 9980 - RNA, 20 nt, Artificial Sequence
  HTT spacer sequence CTCN PAM
aucucaaaaauaaauauaua

SEQ ID NO: 9981 - RNA, 20 nt, Artificial Sequence
  HTT spacer sequence CTCN PAM
cucuguugcccaggcuggag

SEQ ID NO: 9982 - RNA, 20 nt, Artificial Sequence
  HTT spacer sequence CTCN PAM
guugcccaggcuggagugca

SEQ ID NO: 9983 - RNA, 20 nt, Artificial Sequence
  HTT spacer sequence CTCN PAM
agccugggcaacagagcgag

SEQ ID NO: 9984 - RNA, 20 nt, Artificial Sequence
  HTT spacer sequence CTCN PAM
gcucacugaaacuuccgccu

SEQ ID NO: 9985 - RNA, 20 nt, Artificial Sequence
  HTT spacer sequence CTCN PAM
cugaaacuuccgccuccugg

SEQ ID NO: 9986 - RNA, 20 nt, Artificial Sequence
  HTT spacer sequence CTCN PAM
uggguucaagagauucuccu

SEQ ID NO: 9987 - RNA, 20 nt, Artificial Sequence
  HTT spacer sequence CTCN PAM
ugaacccaggaggcggaagu

SEQ ID NO: 9988 - RNA, 20 nt, Artificial Sequence
  HTT spacer sequence CTCN PAM
ugccccagccugcugaguag

SEQ ID NO: 9989 - RNA, 20 nt, Artificial Sequence
  HTT spacer sequence CTCN PAM
gguucugggauaaccuuuau

SEQ ID NO: 9990 - RNA, 20 nt, Artificial Sequence
  HTT spacer sequence CTCN PAM
ucucugguagcuuuuccagc

SEQ ID NO: 9991 - RNA, 20 nt, Artificial Sequence
  HTT spacer sequence CTCN PAM
gguagcuuuuccagcucuuu

SEQ ID NO: 9992 - RNA, 20 nt, Artificial Sequence
  HTT spacer sequence CTCN PAM
uuccuugccgcuuaucaacc

SEQ ID NO: 9993 - RNA, 20 nt, Artificial Sequence
  HTT spacer sequence CTCN PAM
gcucuuuugcuggcuucucg

SEQ ID NO: 9994 - RNA, 20 nt, Artificial Sequence
  HTT spacer sequence CTCN PAM
uuugcuggcuucucguuuuc

SEQ ID NO: 9995 - RNA, 20 nt, Artificial Sequence
  HTT spacer sequence CTCN PAM
uuuucuuccucacucuccac

SEQ ID NO: 9996 - RNA, 20 nt, Artificial Sequence
  HTT spacer sequence CTCN PAM
cucuccacguuggauuccag

SEQ ID NO: 9997 - RNA, 20 nt, Artificial Sequence
  HTT spacer sequence CTCN PAM
ccacguuggauuccaggucc

SEQ ID NO: 9998 - RNA, 20 nt, Artificial Sequence
  HTT spacer sequence CTCN PAM
acguuggauuccagguccaa

SEQ ID NO: 9999 - RNA, 20 nt, Artificial Sequence
  HTT spacer sequence CTCN PAM
ccucuguguccuccccgccu

SEQ ID NO: 10000 - RNA, 20 nt, Artificial Sequence
  HTT spacer sequence CTCN PAM
ucuguguccuccccgccuga

SEQ ID NO: 10001 - RNA, 20 nt, Artificial Sequence
  HTT spacer sequence CTCN PAM
guguccuccccgccugaacu

SEQ ID NO: 10002 - RNA, 20 nt, Artificial Sequence
  HTT spacer sequence CTCN PAM
ccgccugaacugucaccuuc

SEQ ID NO: 10003 - RNA, 20 nt, Artificial Sequence
  HTT spacer sequence CTCN PAM
uugcucucagggucacuggc

SEQ ID NO: 10004 - RNA, 20 nt, Artificial Sequence
  HTT spacer sequence CTCN PAM
cagggucacuggcuuccuug

SEQ ID NO: 10005 - RNA, 20 nt, Artificial Sequence
  HTT spacer sequence CTCN PAM
gggucacuggcuuccuugcu

SEQ ID NO: 10006 - RNA, 20 nt, Artificial Sequence
  HTT spacer sequence CTCN PAM
uccuggacaucuuccucgac

SEQ ID NO: 10007 - RNA, 20 nt, Artificial Sequence
  HTT spacer sequence CTCN PAM
acauucaucuuuccauccua

SEQ ID NO: 10008 - RNA, 20 nt, Artificial Sequence
  HTT spacer sequence CTCN PAM
ugguaggauggaaagaugaa

SEQ ID NO: 10009 - RNA, 20 nt, Artificial Sequence
  HTT spacer sequence CTCN PAM
ugcccugugguuuccacgcu

SEQ ID NO: 10010 - RNA, 20 nt, Artificial Sequence
  HTT spacer sequence CTCN PAM
uuuuuuaauuuaaaaacauu

SEQ ID NO: 10011 - RNA, 20 nt, Artificial Sequence
  HTT spacer sequence CTCN PAM
cuuuuuuuaauuuaaaaaca

SEQ ID NO: 10012 - RNA, 20 nt, Artificial Sequence
  HTT spacer sequence CTCN PAM
cucuuuuuuuaauuuaaaaa

SEQ ID NO: 10013 - RNA, 20 nt, Artificial Sequence
  HTT spacer sequence CTCN PAM
uucucucucuuuuuuuaauu

SEQ ID NO: 10014 - RNA, 20 nt, Artificial Sequence
  HTT spacer sequence CTCN PAM
uccuuuccaagcauucuucg

SEQ ID NO: 10015 - RNA, 20 nt, Artificial Sequence
  HTT spacer sequence CTCN PAM
cagccugagcaggaaggaau

SEQ ID NO: 10016 - RNA, 20 nt, Artificial Sequence
  HTT spacer sequence CTCN PAM
gccugagcaggaaggaauga

SEQ ID NO: 10017 - RNA, 20 nt, Artificial Sequence
  HTT spacer sequence CTCN PAM
ggcugagagacuucgaagaa

SEQ ID NO: 10018 - RNA, 20 nt, Artificial Sequence
  HTT spacer sequence CTCN PAM
uuccuuccugcucaggcuga

SEQ ID NO: 10019 - RNA, 20 nt, Artificial Sequence
  HTT spacer sequence CTCN PAM
aagacaucucauuccuuccu

SEQ ID NO: 10020 - RNA, 20 nt, Artificial Sequence
  HTT spacer sequence CTCN PAM
uccaacauauggugaggggg

SEQ ID NO: 10021 - RNA, 20 nt, Artificial Sequence
  HTT spacer sequence CTCN PAM
ugaggugcugccacccuacc

SEQ ID NO: 10022 - RNA, 20 nt, Artificial Sequence
  HTT spacer sequence CTCN PAM
ggagcagggcugugcugcug

SEQ ID NO: 10023 - RNA, 20 nt, Artificial Sequence
  HTT spacer sequence CTCN PAM
agcuuccugaggugcuccug

SEQ ID NO: 10024 - RNA, 20 nt, Artificial Sequence
  HTT spacer sequence CTCN PAM
ggaagcuggagguagggugg

SEQ ID NO: 10025 - RNA, 20 nt, Artificial Sequence
  HTT spacer sequence CTCN PAM
ugcucuuccuuugccaauuc

SEQ ID NO: 10026 - RNA, 20 nt, Artificial Sequence
  HTT spacer sequence CTCN PAM
uccuuugccaauucugccuc

SEQ ID NO: 10027 - RNA, 20 nt, Artificial Sequence
  HTT spacer sequence CTCN PAM
gucuucauccuguuagaggg

SEQ ID NO: 10028 - RNA, 20 nt, Artificial Sequence
  HTT spacer sequence CTCN PAM
aacaggaugaagacggaggc

SEQ ID NO: 10029 - RNA, 20 nt, Artificial Sequence
  HTT spacer sequence CTCN PAM
cgaaccaucaugucauaugc

SEQ ID NO: 10030 - RNA, 20 nt, Artificial Sequence
  HTT spacer sequence CTCN PAM
gugagugaagaguuuguuuc

SEQ ID NO: 10031 - RNA, 20 nt, Artificial Sequence
  HTT spacer sequence CTCN PAM
cugagcuugggugaccgacu

SEQ ID NO: 10032 - RNA, 20 nt, Artificial Sequence
  HTT spacer sequence CTCN PAM
ucacucacugagcuugggug

SEQ ID NO: 10033 - RNA, 20 nt, Artificial Sequence
  HTT spacer sequence CTCN PAM
caccuuggguuuuuccuuuu

SEQ ID NO: 10034 - RNA, 20 nt, Artificial Sequence
  HTT spacer sequence CTCN PAM
guucucugacuugggaguuu

SEQ ID NO: 10035 - RNA, 20 nt, Artificial Sequence
  HTT spacer sequence CTCN PAM
gacuugggaguuuuguggga

SEQ ID NO: 10036 - RNA, 20 nt, Artificial Sequence
  HTT spacer sequence CTCN PAM
caagucagagaacagagaca

SEQ ID NO: 10037 - RNA, 20 nt, Artificial Sequence
  HTT spacer sequence CTCN PAM
ugucccacaaaacucccaag

SEQ ID NO: 10038 - RNA, 20 nt, Artificial Sequence
  HTT spacer sequence CTCN PAM
ccugucccacaaaacuccca

SEQ ID NO: 10039 - RNA, 20 nt, Artificial Sequence
  HTT spacer sequence CTCN PAM
gugagcucgagggcaucuuc

SEQ ID NO: 10040 - RNA, 20 nt, Artificial Sequence
  HTT spacer sequence CTCN PAM
cggagaagcuagaccaagac

SEQ ID NO: 10041 - RNA, 20 nt, Artificial Sequence
  HTT spacer sequence CTCN PAM
agggcaucuucucguugagc

SEQ ID NO: 10042 - RNA, 20 nt, Artificial Sequence
  HTT spacer sequence CTCN PAM
agcucacggagaagcuagac

SEQ ID NO: 10043 - RNA, 20 nt, Artificial Sequence
  HTT spacer sequence CTCN PAM
uugagcuugucucucccucu

SEQ ID NO: 10044 - RNA, 20 nt, Artificial Sequence
  HTT spacer sequence CTCN PAM
acgagaagaugcccucgagc

SEQ ID NO: 10045 - RNA, 20 nt, Artificial Sequence
  HTT spacer sequence CTCN PAM
cccucuggggaaaaaauaac

SEQ ID NO: 10046 - RNA, 20 nt, Artificial Sequence
  HTT spacer sequence CTCN PAM
cucuggggaaaaaauaacag

SEQ ID NO: 10047 - RNA, 20 nt, Artificial Sequence
  HTT spacer sequence CTCN PAM
ggggaaaaaauaacagacac

SEQ ID NO: 10048 - RNA, 20 nt, Artificial Sequence
  HTT spacer sequence CTCN PAM
caauaaaugcuuuuacugaa

SEQ ID NO: 10049 - RNA, 20 nt, Artificial Sequence
  HTT spacer sequence CTCN PAM
uauaaaauauuaaacacagc

SEQ ID NO: 10050 - RNA, 20 nt, Artificial Sequence
  HTT spacer sequence CTCN PAM
acgguaagacaggcucacca

SEQ ID NO: 10051 - RNA, 20 nt, Artificial Sequence
  HTT spacer sequence CTCN PAM
cuaacccaccuucucuuguu

SEQ ID NO: 10052 - RNA, 20 nt, Artificial Sequence
  HTT spacer sequence CTCN PAM
uguuuugacuuggcaaugag

SEQ ID NO: 10053 - RNA, 20 nt, Artificial Sequence
  HTT spacer sequence CTCN PAM
uugccaagucaaaacaagag

SEQ ID NO: 10054 - RNA, 20 nt, Artificial Sequence
  HTT spacer sequence CTCN PAM
ucaaucagcucuuuccggga

SEQ ID NO: 10055 - RNA, 20 nt, Artificial Sequence
  HTT spacer sequence CTCN PAM
uuccgggacuucgguuucuc

SEQ ID NO: 10056 - RNA, 20 nt, Artificial Sequence
  HTT spacer sequence CTCN PAM
cgcuccucgccuuccuguug

SEQ ID NO: 10057 - RNA, 20 nt, Artificial Sequence
  HTT spacer sequence CTCN PAM
ucgccuuccuguugagucuu

SEQ ID NO: 10058 - RNA, 20 nt, Artificial Sequence
  HTT spacer sequence CTCN PAM
ccuuccuguugagucuucuu

SEQ ID NO: 10059 - RNA, 20 nt, Artificial Sequence
  HTT spacer sequence CTCN PAM
acaggaaggcgaggagcggg

SEQ ID NO: 10060 - RNA, 20 nt, Artificial Sequence
  HTT spacer sequence CTCN PAM
uucacaagaagacucaacag

SEQ ID NO: 10061 - RNA, 20 nt, Artificial Sequence
  HTT spacer sequence CTCN PAM
uccaaagugggcagcaguca

SEQ ID NO: 10062 - RNA, 20 nt, Artificial Sequence
  HTT spacer sequence CTCN PAM
aaagugggcagcagucagcu

SEQ ID NO: 10063 - RNA, 20 nt, Artificial Sequence
  HTT spacer sequence CTCN PAM
gcugggggcaaaaggcagaa

SEQ ID NO: 10064 - RNA, 20 nt, Artificial Sequence
  HTT spacer sequence CTCN PAM
aggcccugcccagggaggug

SEQ ID NO: 10065 - RNA, 20 nt, Artificial Sequence
  HTT spacer sequence CTCN PAM
agucaccuguaccacggcgc

SEQ ID NO: 10066 - RNA, 20 nt, Artificial Sequence
  HTT spacer sequence CTCN PAM
agucaccugcacgccacggc

SEQ ID NO: 10067 - RNA, 20 nt, Artificial Sequence
  HTT spacer sequence CTCN PAM
agucaccuccacgccacggc

SEQ ID NO: 10068 - RNA, 20 nt, Artificial Sequence
  HTT spacer sequence CTCN PAM
aagcuuugucuugucagugu

SEQ ID NO: 10069 - RNA, 20 nt, Artificial Sequence
  HTT spacer sequence CTCN PAM
caaagcuuugucuugucagu

SEQ ID NO: 10070 - RNA, 20 nt, Artificial Sequence
  HTT spacer sequence CTCN PAM
gacucuggcaucgggcaaaa

SEQ ID NO: 10071 - RNA, 20 nt, Artificial Sequence
  HTT spacer sequence CTCN PAM
ggcaucgggcaaaacaccuu

SEQ ID NO: 10072 - RNA, 20 nt, Artificial Sequence
  HTT spacer sequence CTCN PAM
gagcucauggguagaacgag

SEQ ID NO: 10073 - RNA, 20 nt, Artificial Sequence
  HTT spacer sequence CTCN PAM
gagaaauaagguguuuugcc

SEQ ID NO: 10074 - RNA, 20 nt, Artificial Sequence
  HTT spacer sequence CTCN PAM
uggguagaacgagcuauuuu

SEQ ID NO: 10075 - RNA, 20 nt, Artificial Sequence
  HTT spacer sequence CTCN PAM
uucuacccaugagcucagag

SEQ ID NO: 10076 - RNA, 20 nt, Artificial Sequence
  HTT spacer sequence CTCN PAM
aaauagcucguucuacccau

SEQ ID NO: 10077 - RNA, 20 nt, Artificial Sequence
  HTT spacer sequence CTCN PAM
acgcccacaggcccgugcac

SEQ ID NO: 10078 - RNA, 20 nt, Artificial Sequence
  HTT spacer sequence CTCN PAM
ccagacaacguuccucgauc

SEQ ID NO: 10079 - RNA, 20 nt, Artificial Sequence
  HTT spacer sequence CTCN PAM
auccucagcaucgcugucac

SEQ ID NO: 10080 - RNA, 20 nt, Artificial Sequence
  HTT spacer sequence CTCN PAM
gcaucgcugucacuguccac

SEQ ID NO: 10081 - RNA, 20 nt, Artificial Sequence
  HTT spacer sequence CTCN PAM
augucugccaaagacuggcc

SEQ ID NO: 10082 - RNA, 20 nt, Artificial Sequence
  HTT spacer sequence CTCN PAM
uuauggccagucuuuggcag

SEQ ID NO: 10083 - RNA, 20 nt, Artificial Sequence
  HTT spacer sequence CTCN PAM
ugaugucgcugacagaagag

SEQ ID NO: 10084 - RNA, 20 nt, Artificial Sequence
  HTT spacer sequence CTCN PAM
ucugucagcgacaucaugag

SEQ ID NO: 10085 - RNA, 20 nt, Artificial Sequence
  HTT spacer sequence CTCN PAM
uccaguuucuuuccauaccu

SEQ ID NO: 10086 - RNA, 20 nt, Artificial Sequence
  HTT spacer sequence CTCN PAM
aguuucuuuccauaccugcu

SEQ ID NO: 10087 - RNA, 20 nt, Artificial Sequence
  HTT spacer sequence CTCN PAM
ggaacagcagguauggaaag

SEQ ID NO: 10088 - RNA, 20 nt, Artificial Sequence
  HTT spacer sequence CTCN PAM
ucaucaucuucuccucgggg

SEQ ID NO: 10089 - RNA, 20 nt, Artificial Sequence
  HTT spacer sequence CTCN PAM
ucggggcucauguugcuguu

SEQ ID NO: 10090 - RNA, 20 nt, Artificial Sequence
  HTT spacer sequence CTCN PAM
gggcucauguugcuguugua

SEQ ID NO: 10091 - RNA, 20 nt, Artificial Sequence
  HTT spacer sequence CTCN PAM
uguugcuguuguauucuccg

SEQ ID NO: 10092 - RNA, 20 nt, Artificial Sequence
  HTT spacer sequence CTCN PAM
gaagcguuuaucucugaaua

SEQ ID NO: 10093 - RNA, 20 nt, Artificial Sequence
  HTT spacer sequence CTCN PAM
gaauacauuggauuuauccc

SEQ ID NO: 10094 - RNA, 20 nt, Artificial Sequence
  HTT spacer sequence CTCN PAM
uuuaguaaagucuguguacg

SEQ ID NO: 10095 - RNA, 20 nt, Artificial Sequence
  HTT spacer sequence CTCN PAM
caaaaaauucuugugauuuc

SEQ ID NO: 10096 - RNA, 20 nt, Artificial Sequence
  HTT spacer sequence CTCN PAM
aggacagccaacuuugaaua

SEQ ID NO: 10097 - RNA, 20 nt, Artificial Sequence
  HTT spacer sequence CTCN PAM
cagcuuucuuuagggaauuc

SEQ ID NO: 10098 - RNA, 20 nt, Artificial Sequence
  HTT spacer sequence CTCN PAM
cacagcuuucuuuagggaau

SEQ ID NO: 10099 - RNA, 20 nt, Artificial Sequence
  HTT spacer sequence CTCN PAM
guccucucacagcuuucuuu

SEQ ID NO: 10100 - RNA, 20 nt, Artificial Sequence
  HTT spacer sequence CTCN PAM
cccaucucuguccucucaca

SEQ ID NO: 10101 - RNA, 20 nt, Artificial Sequence
  HTT spacer sequence CTCN PAM
gcggauaaagaauggugaag

SEQ ID NO: 10102 - RNA, 20 nt, Artificial Sequence
  HTT spacer sequence CTCN PAM
cuauuuaaaucacaaggucu

SEQ ID NO: 10103 - RNA, 20 nt, Artificial Sequence
  HTT spacer sequence CTCN PAM
caucugauugccagcuagac

SEQ ID NO: 10104 - RNA, 20 nt, Artificial Sequence
  HTT spacer sequence CTCN PAM
augaacucuguacggacaga

SEQ ID NO: 10105 - RNA, 20 nt, Artificial Sequence
  HTT spacer sequence CTCN PAM
guacggacagaggcugcuug

SEQ ID NO: 10106 - RNA, 20 nt, Artificial Sequence
  HTT spacer sequence CTCN PAM
cucccucugcagggacagac

SEQ ID NO: 10107 - RNA, 20 nt, Artificial Sequence
  HTT spacer sequence CTCN PAM
gccucuaaaaauauuaguuc

SEQ ID NO: 10108 - RNA, 20 nt, Artificial Sequence
  HTT spacer sequence CTCN PAM
aaaaauauuaguucucauua

SEQ ID NO: 10109 - RNA, 20 nt, Artificial Sequence
  HTT spacer sequence CTCN PAM
uuaucuggaauaugauucua

SEQ ID NO: 10110 - RNA, 20 nt, Artificial Sequence
  HTT spacer sequence CTCN PAM
uauuacguauuuauagccua

SEQ ID NO: 10111 - RNA, 20 nt, Artificial Sequence
  HTT spacer sequence CTCN PAM
uucuuucuuaaacuauauag

SEQ ID NO: 10112 - RNA, 20 nt, Artificial Sequence
  HTT spacer sequence CTCN PAM
ccgugcgccccccgcuuacc

SEQ ID NO: 10113 - RNA, 20 nt, Artificial Sequence
  HTT spacer sequence CTCN PAM
ggaagguaagcggggggcgc

SEQ ID NO: 10114 - RNA, 20 nt, Artificial Sequence
  HTT spacer sequence CTCN PAM
cgcacgggcccucaggaagg

SEQ ID NO: 10115 - RNA, 20 nt, Artificial Sequence
  HTT spacer sequence CTCN PAM
aacggauuggaguuggccuu

SEQ ID NO: 10116 - RNA, 20 nt, Artificial Sequence
  HTT spacer sequence CTCN PAM
aauccguucgaggugaaagu

SEQ ID NO: 10117 - RNA, 20 nt, Artificial Sequence
  HTT spacer sequence CTCN PAM
cgcucccgccggcgccccgg

SEQ ID NO: 10118 - RNA, 20 nt, Artificial Sequence
  HTT spacer sequence CTCN PAM
cgccggcgccccggaggccu

SEQ ID NO: 10119 - RNA, 20 nt, Artificial Sequence
  HTT spacer sequence CTCN PAM
ggggcgccggcgggagcgcg

SEQ ID NO: 10120 - RNA, 20 nt, Artificial Sequence
  HTT spacer sequence CTCN PAM
ggcccuugggcgcagcgggg

SEQ ID NO: 10121 - RNA, 20 nt, Artificial Sequence
  HTT spacer sequence CTCN PAM
ucucgcgagaacagcgcagc

SEQ ID NO: 10122 - RNA, 20 nt, Artificial Sequence
  HTT spacer sequence CTCN PAM
cgagaacagcgcagcaccuc

SEQ ID NO: 10123 - RNA, 20 nt, Artificial Sequence
  HTT spacer sequence CTCN PAM
cgagacgaggaagcgguucc

SEQ ID NO: 10124 - RNA, 20 nt, Artificial Sequence
  HTT spacer sequence CTCN PAM
gacucgcgagaaguaaacac

SEQ ID NO: 10125 - RNA, 20 nt, Artificial Sequence
  HTT spacer sequence CTCN PAM
cgagaaguaaacaccgcgcc

SEQ ID NO: 10126 - RNA, 20 nt, Artificial Sequence
  HTT spacer sequence CTCN PAM
cgagucggaggugcugcgcu

SEQ ID NO: 10127 - RNA, 20 nt, Artificial Sequence
  HTT spacer sequence CTCN PAM
ccgauaggcucagcgacuac

SEQ ID NO: 10128 - RNA, 20 nt, Artificial Sequence
  HTT spacer sequence CTCN PAM
gcgacuacaacucccagcag

SEQ ID NO: 10129 - RNA, 20 nt, Artificial Sequence
  HTT spacer sequence CTCN PAM
cagcaggccacgcgccgcgg

SEQ ID NO: 10130 - RNA, 20 nt, Artificial Sequence
  HTT spacer sequence CTCN PAM
uggcgcagggccuucuggga

SEQ ID NO: 10131 - RNA, 20 nt, Artificial Sequence
  HTT spacer sequence CTCN PAM
cagaaggcccugcgccaaga

SEQ ID NO: 10132 - RNA, 20 nt, Artificial Sequence
  HTT spacer sequence CTCN PAM
ccgccgcggccggggcacua

SEQ ID NO: 10133 - RNA, 20 nt, Artificial Sequence
  HTT spacer sequence CTCN PAM
cucuucagcuaagccguuag

SEQ ID NO: 10134 - RNA, 20 nt, Artificial Sequence
  HTT spacer sequence CTCN PAM
ucagcuaagccguuagcgcc

SEQ ID NO: 10135 - RNA, 20 nt, Artificial Sequence
  HTT spacer sequence CTCN PAM
gcgcuaacggcuuagcugaa

SEQ ID NO: 10136 - RNA, 20 nt, Artificial Sequence
  HTT spacer sequence CTCN PAM
cgggcgggcucggcgcuaac

SEQ ID NO: 10137 - RNA, 20 nt, Artificial Sequence
  HTT spacer sequence CTCN PAM
gucuccucggucucgcagaa

SEQ ID NO: 10138 - RNA, 20 nt, Artificial Sequence
  HTT spacer sequence CTCN PAM
ucggucucgcagaauccgcc

SEQ ID NO: 10139 - RNA, 20 nt, Artificial Sequence
  HTT spacer sequence CTCN PAM
gucucgcagaauccgccggc

SEQ ID NO: 10140 - RNA, 20 nt, Artificial Sequence
  HTT spacer sequence CTCN PAM
cagaauccgccggcggcggc

SEQ ID NO: 10141 - RNA, 20 nt, Artificial Sequence
  HTT spacer sequence CTCN PAM
auguccuggcgccgccgccg

SEQ ID NO: 10142 - RNA, 20 nt, Artificial Sequence
  HTT spacer sequence CTCN PAM
agaacaucguggccaacucg

SEQ ID NO: 10143 - RNA, 20 nt, Artificial Sequence
  HTT spacer sequence CTCN PAM
agcuccauguccuggcgccg

SEQ ID NO: 10144 - RNA, 20 nt, Artificial Sequence
  HTT spacer sequence CTCN PAM
cugcugcugaaagcgcguca

SEQ ID NO: 10145 - RNA, 20 nt, Artificial Sequence
  HTT spacer sequence CTCN PAM
ggggggggggucgggggcgc

SEQ ID NO: 10146 - RNA, 20 nt, Artificial Sequence
  HTT spacer sequence CTCN PAM
gucucggaccucaugucucc

SEQ ID NO: 10147 - RNA, 20 nt, Artificial Sequence
  HTT spacer sequence CTCN PAM
gaccucaugucucccuugcc

SEQ ID NO: 10148 - RNA, 20 nt, Artificial Sequence
  HTT spacer sequence CTCN PAM
ugucucccuugccugcgucu

SEQ ID NO: 10149 - RNA, 20 nt, Artificial Sequence
  HTT spacer sequence CTCN PAM
cuugccugcgucucaagaga

SEQ ID NO: 10150 - RNA, 20 nt, Artificial Sequence
  HTT spacer sequence CTCN PAM
agagagcuggcgacagagcc

SEQ ID NO: 10151 - RNA, 20 nt, Artificial Sequence
  HTT spacer sequence CTCN PAM
ugagacgcaggcaagggaga

SEQ ID NO: 10152 - RNA, 20 nt, Artificial Sequence
  HTT spacer sequence CTCN PAM
cuugagacgcaggcaaggga

SEQ ID NO: 10153 - RNA, 20 nt, Artificial Sequence
  HTT spacer sequence CTCN PAM
gucgccagcucucuugagac

SEQ ID NO: 10154 - RNA, 20 nt, Artificial Sequence
  HTT spacer sequence CTCN PAM
gaccucaagucccugugcua

SEQ ID NO: 10155 - RNA, 20 nt, Artificial Sequence
  HTT spacer sequence CTCN PAM
agucccugugcuagccacgg

SEQ ID NO: 10156 - RNA, 20 nt, Artificial Sequence
  HTT spacer sequence CTCN PAM
aaccauuaaucaagcuauac

SEQ ID NO: 10157 - RNA, 20 nt, Artificial Sequence
  HTT spacer sequence CTCN PAM
gcauguauccauguauaucu

SEQ ID NO: 10158 - RNA, 20 nt, Artificial Sequence
  HTT spacer sequence CTCN PAM
acaaaaaccacaaaauuauc

SEQ ID NO: 10159 - RNA, 20 nt, Artificial Sequence
  HTT spacer sequence CTCN PAM
cuauguugcccaggcuaguc

SEQ ID NO: 10160 - RNA, 20 nt, Artificial Sequence
  HTT spacer sequence CTCN PAM
agugauccuacccucccacu

SEQ ID NO: 10161 - RNA, 20 nt, Artificial Sequence
  HTT spacer sequence CTCN PAM
cacuucagccucccaaagug

SEQ ID NO: 10162 - RNA, 20 nt, Artificial Sequence
  HTT spacer sequence CTCN PAM
caaagugcugggauuacagg

SEQ ID NO: 10163 - RNA, 20 nt, Artificial Sequence
  HTT spacer sequence CTCN PAM
gccaacaaaagguuacccca

SEQ ID NO: 10164 - RNA, 20 nt, Artificial Sequence
  HTT spacer sequence CTCN PAM
caccuguaaucccagcacuu

SEQ ID NO: 10165 - RNA, 20 nt, Artificial Sequence
  HTT spacer sequence CTCN PAM
agaacauucuuuuggccagg

SEQ ID NO: 10166 - RNA, 20 nt, Artificial Sequence
  HTT spacer sequence CTCN PAM
ucaaaaaacucuagaauuag

SEQ ID NO: 10167 - RNA, 20 nt, Artificial Sequence
  HTT spacer sequence CTCN PAM
aaaaacucuagaauuagggc

SEQ ID NO: 10168 - RNA, 20 nt, Artificial Sequence
  HTT spacer sequence CTCN PAM
agaauuagggcuuucuuaag

SEQ ID NO: 10169 - RNA, 20 nt, Artificial Sequence
  HTT spacer sequence CTCN PAM
aguaaauaugugguuaauug

SEQ ID NO: 10170 - RNA, 20 nt, Artificial Sequence
  HTT spacer sequence CTCN PAM
uauuacauuuuugugcuuug

SEQ ID NO: 10171 - RNA, 20 nt, Artificial Sequence
  HTT spacer sequence CTCN PAM
aacaaaauaaucuguaggau

SEQ ID NO: 10172 - RNA, 20 nt, Artificial Sequence
  HTT spacer sequence CTCN PAM
auaaauacccuaucuccaaa

SEQ ID NO: 10173 - RNA, 20 nt, Artificial Sequence
  HTT spacer sequence CTCN PAM
aaauaagaucacugucugag

SEQ ID NO: 10174 - RNA, 20 nt, Artificial Sequence
  HTT spacer sequence CTCN PAM
gacagugaucuuauuuggag

SEQ ID NO: 10175 - RNA, 20 nt, Artificial Sequence
  HTT spacer sequence CTCN PAM
aaagcccaugaucuuaacug

SEQ ID NO: 10176 - RNA, 20 nt, Artificial Sequence
  HTT spacer sequence CTCN PAM
gugcccucuuuauacuaucu

SEQ ID NO: 10177 - RNA, 20 nt, Artificial Sequence
  HTT spacer sequence CTCN PAM
uuauacuaucucaacgacgg

SEQ ID NO: 10178 - RNA, 20 nt, Artificial Sequence
  HTT spacer sequence CTCN PAM
acgacggugucaguuacuuc

SEQ ID NO: 10179 - RNA, 20 nt, Artificial Sequence
  HTT spacer sequence CTCN PAM
aaaacgguuuauugugugcc

SEQ ID NO: 10180 - RNA, 20 nt, Artificial Sequence
  HTT spacer sequence CTCN PAM
agggauacagggaugaauaa

SEQ ID NO: 10181 - RNA, 20 nt, Artificial Sequence
  HTT spacer sequence CTCN PAM
uucugagaagcugacaguca

SEQ ID NO: 10182 - RNA, 20 nt, Artificial Sequence
  HTT spacer sequence CTCN PAM
gaaggagauauucaucuguu

SEQ ID NO: 10183 - RNA, 20 nt, Artificial Sequence
  HTT spacer sequence CTCN PAM
gugucugcuugcuucagccc

SEQ ID NO: 10184 - RNA, 20 nt, Artificial Sequence
  HTT spacer sequence CTCN PAM
ucuguuuagcucauugaaac

SEQ ID NO: 10185 - RNA, 20 nt, Artificial Sequence
  HTT spacer sequence CTCN PAM
guuuagcucauugaaacacu

SEQ ID NO: 10186 - RNA, 20 nt, Artificial Sequence
  HTT spacer sequence CTCN PAM
uugaaacacucauuguuuuc

SEQ ID NO: 10187 - RNA, 20 nt, Artificial Sequence
  HTT spacer sequence CTCN PAM
uuguuuucuuucucuuucuc

SEQ ID NO: 10188 - RNA, 20 nt, Artificial Sequence
  HTT spacer sequence CTCN PAM
uucucucuuucuuucucucu

SEQ ID NO: 10189 - RNA, 20 nt, Artificial Sequence
  HTT spacer sequence CTCN PAM
cuuucuuucucucucuuucc

SEQ ID NO: 10190 - RNA, 20 nt, Artificial Sequence
  HTT spacer sequence CTCN PAM
uucuuucucucucuuucccu

SEQ ID NO: 10191 - RNA, 20 nt, Artificial Sequence
  HTT spacer sequence CTCN PAM
auuuuagcuguaaaaaagaa

SEQ ID NO: 10192 - RNA, 20 nt, Artificial Sequence
  HTT spacer sequence CTCN PAM
auauggaucuuuaggauaga

SEQ ID NO: 10193 - RNA, 20 nt, Artificial Sequence
  HTT spacer sequence CTCN PAM
ccauggcugugcaucccaaa

SEQ ID NO: 10194 - RNA, 20 nt, Artificial Sequence
  HTT spacer sequence CTCN PAM
uccuuuccccuuuucgggug

SEQ ID NO: 10195 - RNA, 20 nt, Artificial Sequence
  HTT spacer sequence CTCN PAM
cugucugccaaauaaaagcu

SEQ ID NO: 10196 - RNA, 20 nt, Artificial Sequence
  HTT spacer sequence CTCN PAM
cccugucugccaaauaaaag

SEQ ID NO: 10197 - RNA, 20 nt, Artificial Sequence
  HTT spacer sequence CTCN PAM
gcagcugggaccacaagcau

SEQ ID NO: 10198 - RNA, 20 nt, Artificial Sequence
  HTT spacer sequence CTCN PAM
ucagcagcugggaccacaag

SEQ ID NO: 10199 - RNA, 20 nt, Artificial Sequence
  HTT spacer sequence CTCN PAM
gccuccucagcagcugggac

SEQ ID NO: 10200 - RNA, 20 nt, Artificial Sequence
  HTT spacer sequence CTCN PAM
ugaguccaggaagucaaggc

SEQ ID NO: 10201 - RNA, 20 nt, Artificial Sequence
  HTT spacer sequence CTCN PAM
agagauccagcuaccucagc

SEQ ID NO: 10202 - RNA, 20 nt, Artificial Sequence
  HTT spacer sequence CTCN PAM
cugcagccuugacuuccugg

SEQ ID NO: 10203 - RNA, 20 nt, Artificial Sequence
  HTT spacer sequence CTCN PAM
gucacccaggcuagaaugca

SEQ ID NO: 10204 - RNA, 20 nt, Artificial Sequence
  HTT spacer sequence CTCN PAM
aaaaagaaaaaaaauggucc

SEQ ID NO: 10205 - RNA, 20 nt, Artificial Sequence
  HTT spacer sequence CTCN PAM
acaacaagccuacuagaugc

SEQ ID NO: 10206 - RNA, 20 nt, Artificial Sequence
  HTT spacer sequence CTCN PAM
gcaucuaguaggcuuguugu

SEQ ID NO: 10207 - RNA, 20 nt, Artificial Sequence
  HTT spacer sequence CTCN PAM
augugcaaauaccccagaac

SEQ ID NO: 10208 - RNA, 20 nt, Artificial Sequence
  HTT spacer sequence CTCN PAM
ucuaggugcuguucuggggu

SEQ ID NO: 10209 - RNA, 20 nt, Artificial Sequence
  HTT spacer sequence CTCN PAM
uuccacccacuuggccuggc

SEQ ID NO: 10210 - RNA, 20 nt, Artificial Sequence
  HTT spacer sequence CTCN PAM
gcaccuggcuugcccuuggc

SEQ ID NO: 10211 - RNA, 20 nt, Artificial Sequence
  HTT spacer sequence CTCN PAM
ugcaacccuugcugcucugc

SEQ ID NO: 10212 - RNA, 20 nt, Artificial Sequence
  HTT spacer sequence CTCN PAM
uuugcucaugcaacccuugc

SEQ ID NO: 10213 - RNA, 20 nt, Artificial Sequence
  HTT spacer sequence CTCN PAM
uucuuccuggacaugggaca

SEQ ID NO: 10214 - RNA, 20 nt, Artificial Sequence
  HTT spacer sequence CTCN PAM
aguugucuguguaccucauu

SEQ ID NO: 10215 - RNA, 20 nt, Artificial Sequence
  HTT spacer sequence CTCN PAM
ucuugcuuacccuccaguug

SEQ ID NO: 10216 - RNA, 20 nt, Artificial Sequence
  HTT spacer sequence CTCN PAM
auaaagcaccucuucuugcu

SEQ ID NO: 10217 - RNA, 20 nt, Artificial Sequence
  HTT spacer sequence CTCN PAM
caggagacccaaaaugggua

SEQ ID NO: 10218 - RNA, 20 nt, Artificial Sequence
  HTT spacer sequence CTCN PAM
ggagacccaaaauggguagc

SEQ ID NO: 10219 - RNA, 20 nt, Artificial Sequence
  HTT spacer sequence CTCN PAM
ugagagcuguacugucacuc

SEQ ID NO: 10220 - RNA, 20 nt, Artificial Sequence
  HTT spacer sequence CTCN PAM
uuucugcaggcagaucaucc

SEQ ID NO: 10221 - RNA, 20 nt, Artificial Sequence
  HTT spacer sequence CTCN PAM
ccuucaagccagggauagac

SEQ ID NO: 10222 - RNA, 20 nt, Artificial Sequence
  HTT spacer sequence CTCN PAM
uggguagaaaggggcagggu

SEQ ID NO: 10223 - RNA, 20 nt, Artificial Sequence
  HTT spacer sequence CTCN PAM
ugcccuuguucauggugccc

SEQ ID NO: 10224 - RNA, 20 nt, Artificial Sequence
  HTT spacer sequence CTCN PAM
gugcaggccagggcacacaa

SEQ ID NO: 10225 - RNA, 20 nt, Artificial Sequence
  HTT spacer sequence CTCN PAM
gccacgccuuggccucccug

SEQ ID NO: 10226 - RNA, 20 nt, Artificial Sequence
  HTT spacer sequence CTCN PAM
cugccaugcucauugguguc

SEQ ID NO: 10227 - RNA, 20 nt, Artificial Sequence
  HTT spacer sequence CTCN PAM
uugguguccaaagucuggag

SEQ ID NO: 10228 - RNA, 20 nt, Artificial Sequence
  HTT spacer sequence CTCN PAM
agacuuuggacaccaaugag

SEQ ID NO: 10229 - RNA, 20 nt, Artificial Sequence
  HTT spacer sequence CTCN PAM
uggucuuauucauauuucac

SEQ ID NO: 10230 - RNA, 20 nt, Artificial Sequence
  HTT spacer sequence CTCN PAM
gcucaaugauucagcagcuu

SEQ ID NO: 10231 - RNA, 20 nt, Artificial Sequence
  HTT spacer sequence CTCN PAM
augauucagcagcuugggca

SEQ ID NO: 10232 - RNA, 20 nt, Artificial Sequence
  HTT spacer sequence CTCN PAM
gggcacuuguagaucaugcu

SEQ ID NO: 10233 - RNA, 20 nt, Artificial Sequence
  HTT spacer sequence CTCN PAM
agauuccacaaguggaaaac

SEQ ID NO: 10234 - RNA, 20 nt, Artificial Sequence
  HTT spacer sequence CTCN PAM
gcucuguacuccuuuaagag

SEQ ID NO: 10235 - RNA, 20 nt, Artificial Sequence
  HTT spacer sequence CTCN PAM
uaaucuucccccucaaaucc

SEQ ID NO: 10236 - RNA, 20 nt, Artificial Sequence
  HTT spacer sequence CTCN PAM
ggacaucuugugguguggga

SEQ ID NO: 10237 - RNA, 20 nt, Artificial Sequence
  HTT spacer sequence CTCN PAM
cgucccacaccacaagaugu

SEQ ID NO: 10238 - RNA, 20 nt, Artificial Sequence
  HTT spacer sequence CTCN PAM
ggacucacgucccacaccac

SEQ ID NO: 10239 - RNA, 20 nt, Artificial Sequence
  HTT spacer sequence CTCN PAM
ugaucucaguugaaauauug

SEQ ID NO: 10240 - RNA, 20 nt, Artificial Sequence
  HTT spacer sequence CTCN PAM
guuuccaaaucuguaaacaa

SEQ ID NO: 10241 - RNA, 20 nt, Artificial Sequence
  HTT spacer sequence CTCN PAM
ccauggcuucuaaauggcag

SEQ ID NO: 10242 - RNA, 20 nt, Artificial Sequence
  HTT spacer sequence CTCN PAM
gccauuuagaagccauggug

SEQ ID NO: 10243 - RNA, 20 nt, Artificial Sequence
  HTT spacer sequence CTCN PAM
aacagaaauguuaagauaua

SEQ ID NO: 10244 - RNA, 20 nt, Artificial Sequence
  HTT spacer sequence CTCN PAM
caaauucaggaggauauggc

SEQ ID NO: 10245 - RNA, 20 nt, Artificial Sequence
  HTT spacer sequence CTCN PAM
ugaauuugggagaaaaaagg

SEQ ID NO: 10246 - RNA, 20 nt, Artificial Sequence
  HTT spacer sequence CTCN PAM
uuccauuuuuuacuacgacc

SEQ ID NO: 10247 - RNA, 20 nt, Artificial Sequence
  HTT spacer sequence CTCN PAM
ugucagccagugcagugagc

SEQ ID NO: 10248 - RNA, 20 nt, Artificial Sequence
  HTT spacer sequence CTCN PAM
cugcacuggcugacaggagg

SEQ ID NO: 10249 - RNA, 20 nt, Artificial Sequence
  HTT spacer sequence CTCN PAM
ccaauggaaugucuaagcuc

SEQ ID NO: 10250 - RNA, 20 nt, Artificial Sequence
  HTT spacer sequence CTCN PAM
caggaaaaaaaauccuuuag

SEQ ID NO: 10251 - RNA, 20 nt, Artificial Sequence
  HTT spacer sequence CTCN PAM
ggaaaaaaaauccuuuagau

SEQ ID NO: 10252 - RNA, 20 nt, Artificial Sequence
  HTT spacer sequence CTCN PAM
auaaaaaauauauauuuuua

SEQ ID NO: 10253 - RNA, 20 nt, Artificial Sequence
  HTT spacer sequence CTCN PAM
ccauguugcccaggcugguc

SEQ ID NO: 10254 - RNA, 20 nt, Artificial Sequence
  HTT spacer sequence CTCN PAM
ccccaugaccgagccaauua

SEQ ID NO: 10255 - RNA, 20 nt, Artificial Sequence
  HTT spacer sequence CTCN PAM
ccaugaccgagccaauuauu

SEQ ID NO: 10256 - RNA, 20 nt, Artificial Sequence
  HTT spacer sequence CTCN PAM
gucauggggagaggaauuuu

SEQ ID NO: 10257 - RNA, 20 nt, Artificial Sequence
  HTT spacer sequence CTCN PAM
aaaaguuuacaaaugaccca

SEQ ID NO: 10258 - RNA, 20 nt, Artificial Sequence
  HTT spacer sequence CTCN PAM
acaacaaaaagacaauccaa

SEQ ID NO: 10259 - RNA, 20 nt, Artificial Sequence
  HTT spacer sequence CTCN PAM
ugcuuaucuguuaagcaucu

SEQ ID NO: 10260 - RNA, 20 nt, Artificial Sequence
  HTT spacer sequence CTCN PAM
cggguucaggcgauucuccu

SEQ ID NO: 10261 - RNA, 20 nt, Artificial Sequence
  HTT spacer sequence CTCN PAM
gccucccggguucaggcgau

SEQ ID NO: 10262 - RNA, 20 nt, Artificial Sequence
  HTT spacer sequence CTCN PAM
auacaguaaaagucaagaac

SEQ ID NO: 10263 - RNA, 20 nt, Artificial Sequence
  HTT spacer sequence CTCN PAM
cucgauacaguaaaagucaa

SEQ ID NO: 10264 - RNA, 20 nt, Artificial Sequence
  HTT spacer sequence CTCN PAM
ucaggcaguucugugauacc

SEQ ID NO: 10265 - RNA, 20 nt, Artificial Sequence
  HTT spacer sequence CTCN PAM
aaagaggcacauugaauucu

SEQ ID NO: 10266 - RNA, 20 nt, Artificial Sequence
  HTT spacer sequence CTCN PAM
uuagaguggguuugguauca

SEQ ID NO: 10267 - RNA, 20 nt, Artificial Sequence
  HTT spacer sequence CTCN PAM
ccacugcauccaagaauuca

SEQ ID NO: 10268 - RNA, 20 nt, Artificial Sequence
  HTT spacer sequence CTCN PAM
auauugagcaaccacccaau

SEQ ID NO: 10269 - RNA, 20 nt, Artificial Sequence
  HTT spacer sequence CTCN PAM
auauggagauaaacugcuca

SEQ ID NO: 10270 - RNA, 20 nt, Artificial Sequence
  HTT spacer sequence CTCN PAM
ugcuguaaucccagcauuuu

SEQ ID NO: 10271 - RNA, 20 nt, Artificial Sequence
  HTT spacer sequence CTCN PAM
gccuuccaaaaugcugggau

SEQ ID NO: 10272 - RNA, 20 nt, Artificial Sequence
  HTT spacer sequence CTCN PAM
ugauccgcccgccucagccu

SEQ ID NO: 10273 - RNA, 20 nt, Artificial Sequence
  HTT spacer sequence CTCN PAM
ugaccucaugauccgcccgc

SEQ ID NO: 10274 - RNA, 20 nt, Artificial Sequence
  HTT spacer sequence CTCN PAM
aucuccugaccucaugaucc

SEQ ID NO: 10275 - RNA, 20 nt, Artificial Sequence
  HTT spacer sequence CTCN PAM
acuaaaauacaaaaaguuag

SEQ ID NO: 10276 - RNA, 20 nt, Artificial Sequence
  HTT spacer sequence CTCN PAM
caaguagcugggacuacagg

SEQ ID NO: 10277 - RNA, 20 nt, Artificial Sequence
  HTT spacer sequence CTCN PAM
gccucccaaguagcugggac

SEQ ID NO: 10278 - RNA, 20 nt, Artificial Sequence
  HTT spacer sequence CTCN PAM
ugguucaagugauuccccug

SEQ ID NO: 10279 - RNA, 20 nt, Artificial Sequence
  HTT spacer sequence CTCN PAM
gccuccugguucaagugauu

SEQ ID NO: 10280 - RNA, 20 nt, Artificial Sequence
  HTT spacer sequence CTCN PAM
uuaaaugaauuaguggcauc

SEQ ID NO: 10281 - RNA, 20 nt, Artificial Sequence
  HTT spacer sequence CTCN PAM
gguugaauccugacugauac

SEQ ID NO: 10282 - RNA, 20 nt, Artificial Sequence
  HTT spacer sequence CTCN PAM
ggcagaauuucuuccuccag

SEQ ID NO: 10283 - RNA, 20 nt, Artificial Sequence
  HTT spacer sequence CTCN PAM
aggaagacucaucucuguuc

SEQ ID NO: 10284 - RNA, 20 nt, Artificial Sequence
  HTT spacer sequence CTCN PAM
ucucuguucuuaacaccuuc

SEQ ID NO: 10285 - RNA, 20 nt, Artificial Sequence
  HTT spacer sequence CTCN PAM
guucuuaacaccuuccaacu

SEQ ID NO: 10286 - RNA, 20 nt, Artificial Sequence
  HTT spacer sequence CTCN PAM
uaaaaaaaaaaaaaaaaguu

SEQ ID NO: 10287 - RNA, 20 nt, Artificial Sequence
  HTT spacer sequence CTCN PAM
cuauguugcucaggcuggcc

SEQ ID NO: 10288 - RNA, 20 nt, Artificial Sequence
  HTT spacer sequence CTCN PAM
ggcuggccucgaacucuuga

SEQ ID NO: 10289 - RNA, 20 nt, Artificial Sequence
  HTT spacer sequence CTCN PAM
aacucuugagcucaagugau

SEQ ID NO: 10290 - RNA, 20 nt, Artificial Sequence
  HTT spacer sequence CTCN PAM
ccaaucaggcagaauaugaa

SEQ ID NO: 10291 - RNA, 20 nt, Artificial Sequence
  HTT spacer sequence CTCN PAM
aaucaggcagaauaugaagu

SEQ ID NO: 10292 - RNA, 20 nt, Artificial Sequence
  HTT spacer sequence CTCN PAM
ucaucggcaacuucauauuc

SEQ ID NO: 10293 - RNA, 20 nt, Artificial Sequence
  HTT spacer sequence CTCN PAM
cgaagugcugggauuacagg

SEQ ID NO: 10294 - RNA, 20 nt, Artificial Sequence
  HTT spacer sequence CTCN PAM
gccucccgaagugcugggau

SEQ ID NO: 10295 - RNA, 20 nt, Artificial Sequence
  HTT spacer sequence CTCN PAM
uuccucagccucccgaagug

SEQ ID NO: 10296 - RNA, 20 nt, Artificial Sequence
  HTT spacer sequence CTCN PAM
uuagcccaggaguucgagau

SEQ ID NO: 10297 - RNA, 20 nt, Artificial Sequence
  HTT spacer sequence CTCN PAM
ugggcuaaagagauccuccu

SEQ ID NO: 10298 - RNA, 20 nt, Artificial Sequence
  HTT spacer sequence CTCN PAM
aacuccugggcuaaagagau

SEQ ID NO: 10299 - RNA, 20 nt, Artificial Sequence
  HTT spacer sequence CTCN PAM
cuauguuggccaugcugauc

SEQ ID NO: 10300 - RNA, 20 nt, Artificial Sequence
  HTT spacer sequence CTCN PAM
acaaaaaaauaaacaaaaaa

SEQ ID NO: 10301 - RNA, 20 nt, Artificial Sequence
  HTT spacer sequence CTCN PAM
uuugcauuuuguuugauguc

SEQ ID NO: 10302 - RNA, 20 nt, Artificial Sequence
  HTT spacer sequence CTCN PAM
ugacaucaaacaaaaugcaa

SEQ ID NO: 10303 - RNA, 20 nt, Artificial Sequence
  HTT spacer sequence CTCN PAM
uagaaaauugauucagugua

SEQ ID NO: 10304 - RNA, 20 nt, Artificial Sequence
  HTT spacer sequence CTCN PAM
auauucugaaacuuuaaaua

SEQ ID NO: 10305 - RNA, 20 nt, Artificial Sequence
  HTT spacer sequence CTCN PAM
aacucuauauucugaaacuu

SEQ ID NO: 10306 - RNA, 20 nt, Artificial Sequence
  HTT spacer sequence CTCN PAM
cuuggacuaaaaauaacauu

SEQ ID NO: 10307 - RNA, 20 nt, Artificial Sequence
  HTT spacer sequence CTCN PAM
uggacuaaaaauaacauuuu

SEQ ID NO: 10308 - RNA, 20 nt, Artificial Sequence
  HTT spacer sequence CTCN PAM
gcuucuucauuuuaggucaa

SEQ ID NO: 10309 - RNA, 20 nt, Artificial Sequence
  HTT spacer sequence CTCN PAM
uuaaauuacauuuugugucu

SEQ ID NO: 10310 - RNA, 20 nt, Artificial Sequence
  HTT spacer sequence CTCN PAM
cgccuguaaucccggcacuu

SEQ ID NO: 10311 - RNA, 20 nt, Artificial Sequence
  HTT spacer sequence CTCN PAM
caggguucucaaauauuaaa

SEQ ID NO: 10312 - RNA, 20 nt, Artificial Sequence
  HTT spacer sequence CTCN PAM
ggguucucaaauauuaaaau

SEQ ID NO: 10313 - RNA, 20 nt, Artificial Sequence
  HTT spacer sequence CTCN PAM
aauauuaaaauucagccaaa

SEQ ID NO: 10314 - RNA, 20 nt, Artificial Sequence
  HTT spacer sequence CTCN PAM
uguucguggaucagaagacu

SEQ ID NO: 10315 - RNA, 20 nt, Artificial Sequence
  HTT spacer sequence CTCN PAM
ccaaauugaucuauagauuc

SEQ ID NO: 10316 - RNA, 20 nt, Artificial Sequence
  HTT spacer sequence CTCN PAM
ucaauuucaaaacuuaguac

SEQ ID NO: 10317 - RNA, 20 nt, Artificial Sequence
  HTT spacer sequence CTCN PAM
auuucaaaacuuaguacaaa

SEQ ID NO: 10318 - RNA, 20 nt, Artificial Sequence
  HTT spacer sequence CTCN PAM
auuuuucugaaacuaaauag

SEQ ID NO: 10319 - RNA, 20 nt, Artificial Sequence
  HTT spacer sequence CTCN PAM
ugaccucaacugauccacau

SEQ ID NO: 10320 - RNA, 20 nt, Artificial Sequence
  HTT spacer sequence CTCN PAM
acugauccacauaacucugc

SEQ ID NO: 10321 - RNA, 20 nt, Artificial Sequence
  HTT spacer sequence CTCN PAM
gccucccaaagugcugggau

SEQ ID NO: 10322 - RNA, 20 nt, Artificial Sequence
  HTT spacer sequence CTCN PAM
aacagguaucugcacaccca

SEQ ID NO: 10323 - RNA, 20 nt, Artificial Sequence
  HTT spacer sequence CTCN PAM
acuaaaaauacaaaacuauu

SEQ ID NO: 10324 - RNA, 20 nt, Artificial Sequence
  HTT spacer sequence CTCN PAM
gucucuacuaaaaauacaaa

SEQ ID NO: 10325 - RNA, 20 nt, Artificial Sequence
  HTT spacer sequence CTCN PAM
aacuccugacuucaggugau

SEQ ID NO: 10326 - RNA, 20 nt, Artificial Sequence
  HTT spacer sequence CTCN PAM
ugacuucaggugauccaccc

SEQ ID NO: 10327 - RNA, 20 nt, Artificial Sequence
  HTT spacer sequence CTCN PAM
gccucccaaagugcugggau

SEQ ID NO: 10328 - RNA, 20 nt, Artificial Sequence
  HTT spacer sequence CTCN PAM
agauguugugacagaaugua

SEQ ID NO: 10329 - RNA, 20 nt, Artificial Sequence
  HTT spacer sequence CTCN PAM
uucagucccaaucuacauuc

SEQ ID NO: 10330 - RNA, 20 nt, Artificial Sequence
  HTT spacer sequence CTCN PAM
uccuucagucccaaucuaca

SEQ ID NO: 10331 - RNA, 20 nt, Artificial Sequence
  HTT spacer sequence CTCN PAM
aaggcuuuuuuggaaggguu

SEQ ID NO: 10332 - RNA, 20 nt, Artificial Sequence
  HTT spacer sequence CTCN PAM
gcaugaaccacuuaccuagu

SEQ ID NO: 10333 - RNA, 20 nt, Artificial Sequence
  HTT spacer sequence CTCN PAM
ugucacagcggaggaaacgg

SEQ ID NO: 10334 - RNA, 20 nt, Artificial Sequence
  HTT spacer sequence CTCN PAM
gcugugacaugagugacugu

SEQ ID NO: 10335 - RNA, 20 nt, Artificial Sequence
  HTT spacer sequence CTCN PAM
guuuccuccgcugugacaug

SEQ ID NO: 10336 - RNA, 20 nt, Artificial Sequence
  HTT spacer sequence CTCN PAM
cugggccuccguuuccuccg

SEQ ID NO: 10337 - RNA, 20 nt, Artificial Sequence
  HTT spacer sequence CTCN PAM
uggcucccugggccuccguu

SEQ ID NO: 10338 - RNA, 20 nt, Artificial Sequence
  HTT spacer sequence CTCN PAM
agagaaagccagauagagag

SEQ ID NO: 10339 - RNA, 20 nt, Artificial Sequence
  HTT spacer sequence CTCN PAM
gcacacugaggagcugggug

SEQ ID NO: 10340 - RNA, 20 nt, Artificial Sequence
  HTT spacer sequence CTCN PAM
gugugcagagaagccacacc

SEQ ID NO: 10341 - RNA, 20 nt, Artificial Sequence
  HTT spacer sequence CTCN PAM
ucagugugcagagaagccac

SEQ ID NO: 10342 - RNA, 20 nt, Artificial Sequence
  HTT spacer sequence CTCN PAM
cuaaaggaauaagcaucuaa

SEQ ID NO: 10343 - RNA, 20 nt, Artificial Sequence
  HTT spacer sequence CTCN PAM
ggcugggugccauggcucau

SEQ ID NO: 10344 - RNA, 20 nt, Artificial Sequence
  HTT spacer sequence CTCN PAM
cugauacugguccugggaua

SEQ ID NO: 10345 - RNA, 20 nt, Artificial Sequence
  HTT spacer sequence CTCN PAM
gauacugguccugggauauu

SEQ ID NO: 10346 - RNA, 20 nt, Artificial Sequence
  HTT spacer sequence CTCN PAM
guggcaucccagaugaagac

SEQ ID NO: 10347 - RNA, 20 nt, Artificial Sequence
  HTT spacer sequence CTCN PAM
guuuuacagaaggagaaacu

SEQ ID NO: 10348 - RNA, 20 nt, Artificial Sequence
  HTT spacer sequence CTCN PAM
uucuguaaaacagagauaau

SEQ ID NO: 10349 - RNA, 20 nt, Artificial Sequence
  HTT spacer sequence CTCN PAM
guuucuccuucuguaaaaca

SEQ ID NO: 10350 - RNA, 20 nt, Artificial Sequence
  HTT spacer sequence CTCN PAM
auagccucaguuucuccuuc

SEQ ID NO: 10351 - RNA, 20 nt, Artificial Sequence
  HTT spacer sequence CTCN PAM
ggucccucagccagugagug

SEQ ID NO: 10352 - RNA, 20 nt, Artificial Sequence
  HTT spacer sequence CTCN PAM
gccagugaguggcugaagcc

SEQ ID NO: 10353 - RNA, 20 nt, Artificial Sequence
  HTT spacer sequence CTCN PAM
cuggcugagggaccugagcc

SEQ ID NO: 10354 - RNA, 20 nt, Artificial Sequence
  HTT spacer sequence CTCN PAM
cucccaagaagggaaugcau

SEQ ID NO: 10355 - RNA, 20 nt, Artificial Sequence
  HTT spacer sequence CTCN PAM
caagaagggaaugcauccuu

SEQ ID NO: 10356 - RNA, 20 nt, Artificial Sequence
  HTT spacer sequence CTCN PAM
agaaaaagauuuuuuaaaau

SEQ ID NO: 10357 - RNA, 20 nt, Artificial Sequence
  HTT spacer sequence CTCN PAM
uagguaguuaugggcaacuc

SEQ ID NO: 10358 - RNA, 20 nt, Artificial Sequence
  HTT spacer sequence CTCN PAM
uauuuuucucaguuuuuaca

SEQ ID NO: 10359 - RNA, 20 nt, Artificial Sequence
  HTT spacer sequence CTCN PAM
guuuuuacaauggaaauggc

SEQ ID NO: 10360 - RNA, 20 nt, Artificial Sequence
  HTT spacer sequence CTCN PAM
auuggcuuuuaucaaguuua

SEQ ID NO: 10361 - RNA, 20 nt, Artificial Sequence
  HTT spacer sequence CTCN PAM
ggaggcugaggcugaaggau

SEQ ID NO: 10362 - RNA, 20 nt, Artificial Sequence
  HTT spacer sequence CTCN PAM
ugaguagcugggacuacagg

SEQ ID NO: 10363 - RNA, 20 nt, Artificial Sequence
  HTT spacer sequence CTCN PAM
gccuccugaguagcugggac

SEQ ID NO: 10364 - RNA, 20 nt, Artificial Sequence
  HTT spacer sequence CTCN PAM
guucucucuuuuuaaaaugg

SEQ ID NO: 10365 - RNA, 20 nt, Artificial Sequence
  HTT spacer sequence CTCN PAM
cuuuuuaaaauggcagguau

SEQ ID NO: 10366 - RNA, 20 nt, Artificial Sequence
  HTT spacer sequence CTCN PAM
uuuuaaaauggcagguaucc

SEQ ID NO: 10367 - RNA, 20 nt, Artificial Sequence
  HTT spacer sequence CTCN PAM
aaaacagcauguauaagcaa

SEQ ID NO: 10368 - RNA, 20 nt, Artificial Sequence
  HTT spacer sequence CTCN PAM
aagauguuuauacccagcgc

SEQ ID NO: 10369 - RNA, 20 nt, Artificial Sequence
  HTT spacer sequence CTCN PAM
cgaguagcugggauuacagg

SEQ ID NO: 10370 - RNA, 20 nt, Artificial Sequence
  HTT spacer sequence CTCN PAM
gccucccgaguagcugggau

SEQ ID NO: 10371 - RNA, 20 nt, Artificial Sequence
  HTT spacer sequence CTCN PAM
auccaggaggcggagguugc

SEQ ID NO: 10372 - RNA, 20 nt, Artificial Sequence
  HTT spacer sequence CTCN PAM
uggauugaggcaauuuuccu

SEQ ID NO: 10373 - RNA, 20 nt, Artificial Sequence
  HTT spacer sequence CTCN PAM
gccuccuggauugaggcaau

SEQ ID NO: 10374 - RNA, 20 nt, Artificial Sequence
  HTT spacer sequence CTCN PAM
cugcaaccuccgccuccugg

SEQ ID NO: 10375 - RNA, 20 nt, Artificial Sequence
  HTT spacer sequence CTCN PAM
agcccuggcgacagagugag

SEQ ID NO: 10376 - RNA, 20 nt, Artificial Sequence
  HTT spacer sequence CTCN PAM
gucgccagggcuggagugca

SEQ ID NO: 10377 - RNA, 20 nt, Artificial Sequence
  HTT spacer sequence CTCN PAM
cucugucgccagggcuggag

SEQ ID NO: 10378 - RNA, 20 nt, Artificial Sequence
  HTT spacer sequence CTCN PAM
aucucaaaaaaaaaaaaaaa

SEQ ID NO: 10379 - RNA, 20 nt, Artificial Sequence
  HTT spacer sequence CTCN PAM
aaaaaaaaaaaaaaaaaaaa

SEQ ID NO: 10380 - RNA, 20 nt, Artificial Sequence
  HTT spacer sequence CTCN PAM
uagagcaagucaagagcuau

SEQ ID NO: 10381 - RNA, 20 nt, Artificial Sequence
  HTT spacer sequence CTCN PAM
aagagcaauuaauucaucuu

SEQ ID NO: 10382 - RNA, 20 nt, Artificial Sequence
  HTT spacer sequence CTCN PAM
ugacuugcucuaagagcaau

SEQ ID NO: 10383 - RNA, 20 nt, Artificial Sequence
  HTT spacer sequence CTCN PAM
agcaggauagcucuugacuu

SEQ ID NO: 10384 - RNA, 20 nt, Artificial Sequence
  HTT spacer sequence CTCN PAM
cucuagcaggauagcucuug

SEQ ID NO: 10385 - RNA, 20 nt, Artificial Sequence
  HTT spacer sequence CTCN PAM
gggacuguggcucccucuag

SEQ ID NO: 10386 - RNA, 20 nt, Artificial Sequence
  HTT spacer sequence CTCN PAM
aaggggaugcccgggacaaa

SEQ ID NO: 10387 - RNA, 20 nt, Artificial Sequence
  HTT spacer sequence CTCN PAM
uuuauugaaccauucugcuc

SEQ ID NO: 10388 - RNA, 20 nt, Artificial Sequence
  HTT spacer sequence CTCN PAM
gcgcuugucuucgccucauu

SEQ ID NO: 10389 - RNA, 20 nt, Artificial Sequence
  HTT spacer sequence CTCN PAM
cauugcauuguucuuuuaaa

SEQ ID NO: 10390 - RNA, 20 nt, Artificial Sequence
  HTT spacer sequence CTCN PAM
uugauuaggcaacccguaac

SEQ ID NO: 10391 - RNA, 20 nt, Artificial Sequence
  HTT spacer sequence CTCN PAM
guaaugucuaaauguguucu

SEQ ID NO: 10392 - RNA, 20 nt, Artificial Sequence
  HTT spacer sequence CTCN PAM
aaauccgccuuuuccuagaa

SEQ ID NO: 10393 - RNA, 20 nt, Artificial Sequence
  HTT spacer sequence CTCN PAM
ccaaauccgccuuuuccuag

SEQ ID NO: 10394 - RNA, 20 nt, Artificial Sequence
  HTT spacer sequence CTCN PAM
ccucuccaaauccgccuuuu

SEQ ID NO: 10395 - RNA, 20 nt, Artificial Sequence
  HTT spacer sequence CTCN PAM
cguuacucaccucuccaaau

SEQ ID NO: 10396 - RNA, 20 nt, Artificial Sequence
  HTT spacer sequence CTCN PAM
ccacccagcuagcagcgcug

SEQ ID NO: 10397 - RNA, 20 nt, Artificial Sequence
  HTT spacer sequence CTCN PAM
ggaccuugcuccccacccag

SEQ ID NO: 10398 - RNA, 20 nt, Artificial Sequence
  HTT spacer sequence CTCN PAM
cccaguacacuguugccuua

SEQ ID NO: 10399 - RNA, 20 nt, Artificial Sequence
  HTT spacer sequence CTCN PAM
caguacacuguugccuuagu

SEQ ID NO: 10400 - RNA, 20 nt, Artificial Sequence
  HTT spacer sequence CTCN PAM
caguuggcaaagauuauucc

SEQ ID NO: 10401 - RNA, 20 nt, Artificial Sequence
  HTT spacer sequence CTCN PAM
aaauuccauguggauucuca

SEQ ID NO: 10402 - RNA, 20 nt, Artificial Sequence
  HTT spacer sequence CTCN PAM
uggugacuucaccuuuuacc

SEQ ID NO: 10403 - RNA, 20 nt, Artificial Sequence
  HTT spacer sequence CTCN PAM
uaguucugaagaagcugguu

SEQ ID NO: 10404 - RNA, 20 nt, Artificial Sequence
  HTT spacer sequence CTCN PAM
gucacuuugcccagauggaa

SEQ ID NO: 10405 - RNA, 20 nt, Artificial Sequence
  HTT spacer sequence CTCN PAM
guacuaugugaauuugggac

SEQ ID NO: 10406 - RNA, 20 nt, Artificial Sequence
  HTT spacer sequence CTCN PAM
guuuggacacguauguaccu

SEQ ID NO: 10407 - RNA, 20 nt, Artificial Sequence
  HTT spacer sequence CTCN PAM
uaccuacaucaaaagguguu

SEQ ID NO: 10408 - RNA, 20 nt, Artificial Sequence
  HTT spacer sequence CTCN PAM
cagacucacgagggguguuu

SEQ ID NO: 10409 - RNA, 20 nt, Artificial Sequence
  HTT spacer sequence CTCN PAM
cgagggguguuuuuuuuguu

SEQ ID NO: 10410 - RNA, 20 nt, Artificial Sequence
  HTT spacer sequence CTCN PAM
ugagucugugagucauuucc

SEQ ID NO: 10411 - RNA, 20 nt, Artificial Sequence
  HTT spacer sequence CTCN PAM
aaacaaaacaaaacaaaaca

SEQ ID NO: 10412 - RNA, 20 nt, Artificial Sequence
  HTT spacer sequence CTCN PAM
aucucaaaacaaaacaaaac

SEQ ID NO: 10413 - RNA, 20 nt, Artificial Sequence
  HTT spacer sequence CTCN PAM
uguugccuagacuggagugc

SEQ ID NO: 10414 - RNA, 20 nt, Artificial Sequence
  HTT spacer sequence CTCN PAM
agucuaggcaacaagagcga

SEQ ID NO: 10415 - RNA, 20 nt, Artificial Sequence
  HTT spacer sequence CTCN PAM
gcucaccacaaccuccgccu

SEQ ID NO: 10416 - RNA, 20 nt, Artificial Sequence
  HTT spacer sequence CTCN PAM
ccacaaccuccgccuccuga

SEQ ID NO: 10417 - RNA, 20 nt, Artificial Sequence
  HTT spacer sequence CTCN PAM
gccuccugaguucaagcgau

SEQ ID NO: 10418 - RNA, 20 nt, Artificial Sequence
  HTT spacer sequence CTCN PAM
ugaguucaagcgauucuccu

SEQ ID NO: 10419 - RNA, 20 nt, Artificial Sequence
  HTT spacer sequence CTCN PAM
ggaggcggagguugugguga

SEQ ID NO: 10420 - RNA, 20 nt, Artificial Sequence
  HTT spacer sequence CTCN PAM
ugccucagccucccgaguag

SEQ ID NO: 10421 - RNA, 20 nt, Artificial Sequence
  HTT spacer sequence CTCN PAM
gccucccgaguagcugguau

SEQ ID NO: 10422 - RNA, 20 nt, Artificial Sequence
  HTT spacer sequence CTCN PAM
cgaguagcugguauuacagg

SEQ ID NO: 10423 - RNA, 20 nt, Artificial Sequence
  HTT spacer sequence CTCN PAM
ggaggcugaggcaggagaau

SEQ ID NO: 10424 - RNA, 20 nt, Artificial Sequence
  HTT spacer sequence CTCN PAM
acuaaaaauacgaaaauuag

SEQ ID NO: 10425 - RNA, 20 nt, Artificial Sequence
  HTT spacer sequence CTCN PAM
cuacuaaaaauacgaaaauu

SEQ ID NO: 10426 - RNA, 20 nt, Artificial Sequence
  HTT spacer sequence CTCN PAM
auguuggucaggguggucuu

SEQ ID NO: 10427 - RNA, 20 nt, Artificial Sequence
  HTT spacer sequence CTCN PAM
cgaccucgggugauccgccc

SEQ ID NO: 10428 - RNA, 20 nt, Artificial Sequence
  HTT spacer sequence CTCN PAM
ggugauccgcccuccucagc

SEQ ID NO: 10429 - RNA, 20 nt, Artificial Sequence
  HTT spacer sequence CTCN PAM
ucagccucccaaagugcugg

SEQ ID NO: 10430 - RNA, 20 nt, Artificial Sequence
  HTT spacer sequence CTCN PAM
gccucccaaagugcugggau

SEQ ID NO: 10431 - RNA, 20 nt, Artificial Sequence
  HTT spacer sequence CTCN PAM
caaagugcugggauuacagg

SEQ ID NO: 10432 - RNA, 20 nt, Artificial Sequence
  HTT spacer sequence CTCN PAM
cgccuguaaucccagcacuu

SEQ ID NO: 10433 - RNA, 20 nt, Artificial Sequence
  HTT spacer sequence CTCN PAM
uagauggagaccacuguagu

SEQ ID NO: 10434 - RNA, 20 nt, Artificial Sequence
  HTT spacer sequence CTCN PAM
aucuaggagacccaucauau

SEQ ID NO: 10435 - RNA, 20 nt, Artificial Sequence
  HTT spacer sequence CTCN PAM
auccaccaacuacagugguc

SEQ ID NO: 10436 - RNA, 20 nt, Artificial Sequence
  HTT spacer sequence CTCN PAM
uuaaauccccagaccagaac

SEQ ID NO: 10437 - RNA, 20 nt, Artificial Sequence
  HTT spacer sequence CTCN PAM
agguaacuaguaagguaauu

SEQ ID NO: 10438 - RNA, 20 nt, Artificial Sequence
  HTT spacer sequence CTCN PAM
auaugaucacuccagguaac

SEQ ID NO: 10439 - RNA, 20 nt, Artificial Sequence
  HTT spacer sequence CTCN PAM
uagggacuuaaaaguucuug

SEQ ID NO: 10440 - RNA, 20 nt, Artificial Sequence
  HTT spacer sequence CTCN PAM
ggagcagguuacacugcccg

SEQ ID NO: 10441 - RNA, 20 nt, Artificial Sequence
  HTT spacer sequence CTCN PAM
ugaguuaaacauacaguauu

SEQ ID NO: 10442 - RNA, 20 nt, Artificial Sequence
  HTT spacer sequence CTCN PAM
gauauuacugcucccauauu

SEQ ID NO: 10443 - RNA, 20 nt, Artificial Sequence
  HTT spacer sequence CTCN PAM
cauauuacaauucaaaggaa

SEQ ID NO: 10444 - RNA, 20 nt, Artificial Sequence
  HTT spacer sequence CTCN PAM
uaggucagcuuucuaauuaa

SEQ ID NO: 10445 - RNA, 20 nt, Artificial Sequence
  HTT spacer sequence CTCN PAM
ugaaguaacaacuacguugg

SEQ ID NO: 10446 - RNA, 20 nt, Artificial Sequence
  HTT spacer sequence CTCN PAM
gguacaguuccagagaccau

SEQ ID NO: 10447 - RNA, 20 nt, Artificial Sequence
  HTT spacer sequence CTCN PAM
ggaacuguaccagagggaca

SEQ ID NO: 10448 - RNA, 20 nt, Artificial Sequence
  HTT spacer sequence CTCN PAM
aaucccuccaugauagauau

SEQ ID NO: 10449 - RNA, 20 nt, Artificial Sequence
  HTT spacer sequence CTCN PAM
augauagauauuucuguaag

SEQ ID NO: 10450 - RNA, 20 nt, Artificial Sequence
  HTT spacer sequence CTCN PAM
guuugaauauguccuagaac

SEQ ID NO: 10451 - RNA, 20 nt, Artificial Sequence
  HTT spacer sequence CTCN PAM
ugcuaaucugccuuuaauga

SEQ ID NO: 10452 - RNA, 20 nt, Artificial Sequence
  HTT spacer sequence CTCN PAM
gauuuugugaaagaacagag

SEQ ID NO: 10453 - RNA, 20 nt, Artificial Sequence
  HTT spacer sequence CTCN PAM
guucuuucacaaaaucugag

SEQ ID NO: 10454 - RNA, 20 nt, Artificial Sequence
  HTT spacer sequence CTCN PAM
cgccuguaauccuagcacuu

SEQ ID NO: 10455 - RNA, 20 nt, Artificial Sequence
  HTT spacer sequence CTCN PAM
cgaagugcuaggauuacagg

SEQ ID NO: 10456 - RNA, 20 nt, Artificial Sequence
  HTT spacer sequence CTCN PAM
agcgaucugccuaccuuggc

SEQ ID NO: 10457 - RNA, 20 nt, Artificial Sequence
  HTT spacer sequence CTCN PAM
auuuaaauauuuaauauaaa

SEQ ID NO: 10458 - RNA, 20 nt, Artificial Sequence
  HTT spacer sequence CTCN PAM
guauaauuaugauuguauag

SEQ ID NO: 10459 - RNA, 20 nt, Artificial Sequence
  HTT spacer sequence CTCN PAM
ggagguguuguacucucagu

SEQ ID NO: 10460 - RNA, 20 nt, Artificial Sequence
  HTT spacer sequence CTCN PAM
agagcaagucugugggaaac

SEQ ID NO: 10461 - RNA, 20 nt, Artificial Sequence
  HTT spacer sequence CTCN PAM
cagucaaggcccagaggcag

SEQ ID NO: 10462 - RNA, 20 nt, Artificial Sequence
  HTT spacer sequence CTCN PAM
gucaaggcccagaggcagug

SEQ ID NO: 10463 - RNA, 20 nt, Artificial Sequence
  HTT spacer sequence CTCN PAM
gggccuugacugagaguaca

SEQ ID NO: 10464 - RNA, 20 nt, Artificial Sequence
  HTT spacer sequence CTCN PAM
cugccucugggccuugacug

SEQ ID NO: 10465 - RNA, 20 nt, Artificial Sequence
  HTT spacer sequence CTCN PAM
ccccuacucugaaugccugu

SEQ ID NO: 10466 - RNA, 20 nt, Artificial Sequence
  HTT spacer sequence CTCN PAM
gaaugccugucagaaggagc

SEQ ID NO: 10467 - RNA, 20 nt, Artificial Sequence
  HTT spacer sequence CTCN PAM
uucugacaggcauucagagu

SEQ ID NO: 10468 - RNA, 20 nt, Artificial Sequence
  HTT spacer sequence CTCN PAM
ugcggggacagccucggugc

SEQ ID NO: 10469 - RNA, 20 nt, Artificial Sequence
  HTT spacer sequence CTCN PAM
gugcccuuuaauccagauuc

SEQ ID NO: 10470 - RNA, 20 nt, Artificial Sequence
  HTT spacer sequence CTCN PAM
agugggcuugagagagcaaa

SEQ ID NO: 10471 - RNA, 20 nt, Artificial Sequence
  HTT spacer sequence CTCN PAM
agcccacuggaggaagugcu

SEQ ID NO: 10472 - RNA, 20 nt, Artificial Sequence
  HTT spacer sequence CTCN PAM
caagcccacuggaggaagug

SEQ ID NO: 10473 - RNA, 20 nt, Artificial Sequence
  HTT spacer sequence CTCN PAM
cucaagcccacuggaggaag

SEQ ID NO: 10474 - RNA, 20 nt, Artificial Sequence
  HTT spacer sequence CTCN PAM
gaaaugaauuuguagggucc

SEQ ID NO: 10475 - RNA, 20 nt, Artificial Sequence
  HTT spacer sequence CTCN PAM
ggacccuacaaauucauuuc

SEQ ID NO: 10476 - RNA, 20 nt, Artificial Sequence
  HTT spacer sequence CTCN PAM
cucaggacccuacaaauuca

SEQ ID NO: 10477 - RNA, 20 nt, Artificial Sequence
  HTT spacer sequence CTCN PAM
auuccuuuaccauugugcuc

SEQ ID NO: 10478 - RNA, 20 nt, Artificial Sequence
  HTT spacer sequence CTCN PAM
gcugucaugguuuuaggcca

SEQ ID NO: 10479 - RNA, 20 nt, Artificial Sequence
  HTT spacer sequence CTCN PAM
uuccacuacagucuguggcc

SEQ ID NO: 10480 - RNA, 20 nt, Artificial Sequence
  HTT spacer sequence CTCN PAM
ggucugcccacgucugaagu

SEQ ID NO: 10481 - RNA, 20 nt, Artificial Sequence
  HTT spacer sequence CTCN PAM
ucucuagcagggaaauaauc

SEQ ID NO: 10482 - RNA, 20 nt, Artificial Sequence
  HTT spacer sequence CTCN PAM
agcagggaaauaaucggccc

SEQ ID NO: 10483 - RNA, 20 nt, Artificial Sequence
  HTT spacer sequence CTCN PAM
cagcagccuggcgggcaggg

SEQ ID NO: 10484 - RNA, 20 nt, Artificial Sequence
  HTT spacer sequence CTCN PAM
cuggcucacagcagccuggc

SEQ ID NO: 10485 - RNA, 20 nt, Artificial Sequence
  HTT spacer sequence CTCN PAM
cagcacagugccuggcacuc

SEQ ID NO: 10486 - RNA, 20 nt, Artificial Sequence
  HTT spacer sequence CTCN PAM
gcacagugccuggcacucuu

SEQ ID NO: 10487 - RNA, 20 nt, Artificial Sequence
  HTT spacer sequence CTCN PAM
ugucugcuuuccauucccuu

SEQ ID NO: 10488 - RNA, 20 nt, Artificial Sequence
  HTT spacer sequence CTCN PAM
cccguaauuccaagauaaug

SEQ ID NO: 10489 - RNA, 20 nt, Artificial Sequence
  HTT spacer sequence CTCN PAM
gccagugagggucucaucaa

SEQ ID NO: 10490 - RNA, 20 nt, Artificial Sequence
  HTT spacer sequence CTCN PAM
cuggcagagaccagcagcag

SEQ ID NO: 10491 - RNA, 20 nt, Artificial Sequence
  HTT spacer sequence CTCN PAM
ucaagcaaagagcuuccuuu

SEQ ID NO: 10492 - RNA, 20 nt, Artificial Sequence
  HTT spacer sequence CTCN PAM
uugcuugaugagacccucac

SEQ ID NO: 10493 - RNA, 20 nt, Artificial Sequence
  HTT spacer sequence CTCN PAM
uuuauuuugcuguuuaaacu

SEQ ID NO: 10494 - RNA, 20 nt, Artificial Sequence
  HTT spacer sequence CTCN PAM
cacuugacaggcgcaaaccu

SEQ ID NO: 10495 - RNA, 20 nt, Artificial Sequence
  HTT spacer sequence CTCN PAM
ucuuuauucuuuuuuuuugu

SEQ ID NO: 10496 - RNA, 20 nt, Artificial Sequence
  HTT spacer sequence CTCN PAM
aaaugagaaaagaauucugg

SEQ ID NO: 10497 - RNA, 20 nt, Artificial Sequence
  HTT spacer sequence CTCN PAM
uuuagagccauagcuucacc

SEQ ID NO: 10498 - RNA, 20 nt, Artificial Sequence
  HTT spacer sequence CTCN PAM
agaauucuuuucucauuuag

SEQ ID NO: 10499 - RNA, 20 nt, Artificial Sequence
  HTT spacer sequence CTCN PAM
ucuuagucuucacugugcau

SEQ ID NO: 10500 - RNA, 20 nt, Artificial Sequence
  HTT spacer sequence CTCN PAM
uagucuucacugugcauugu

SEQ ID NO: 10501 - RNA, 20 nt, Artificial Sequence
  HTT spacer sequence CTCN PAM
gcucacgcucacugaagccg

SEQ ID NO: 10502 - RNA, 20 nt, Artificial Sequence
  HTT spacer sequence CTCN PAM
cgcucacugaagccguggaa

SEQ ID NO: 10503 - RNA, 20 nt, Artificial Sequence
  HTT spacer sequence CTCN PAM
cugaagccguggaagucauu

SEQ ID NO: 10504 - RNA, 20 nt, Artificial Sequence
  HTT spacer sequence CTCN PAM
gaaaacaagaaaugacuucc

SEQ ID NO: 10505 - RNA, 20 nt, Artificial Sequence
  HTT spacer sequence CTCN PAM
uuuuaguaacaguuuuguuu

SEQ ID NO: 10506 - RNA, 20 nt, Artificial Sequence
  HTT spacer sequence CTCN PAM
cuucuuucuuauucaaaccu

SEQ ID NO: 10507 - RNA, 20 nt, Artificial Sequence
  HTT spacer sequence CTCN PAM
ucuuucuuauucaaaccuua

SEQ ID NO: 10508 - RNA, 20 nt, Artificial Sequence
  HTT spacer sequence CTCN PAM
uucuauguuuucuaagguuu

SEQ ID NO: 10509 - RNA, 20 nt, Artificial Sequence
  HTT spacer sequence CTCN PAM
cauucugucacucuucacac

SEQ ID NO: 10510 - RNA, 20 nt, Artificial Sequence
  HTT spacer sequence CTCN PAM
ucacaccugccagcuugcag

SEQ ID NO: 10511 - RNA, 20 nt, Artificial Sequence
  HTT spacer sequence CTCN PAM
gcaagcuggcaggugugaag

SEQ ID NO: 10512 - RNA, 20 nt, Artificial Sequence
  HTT spacer sequence CTCN PAM
agguccauuaguuacccgug

SEQ ID NO: 10513 - RNA, 20 nt, Artificial Sequence
  HTT spacer sequence CTCN PAM
ggcuggcugugauaagggaa

SEQ ID NO: 10514 - RNA, 20 nt, Artificial Sequence
  HTT spacer sequence CTCN PAM
guuugcucucagccuccagu

SEQ ID NO: 10515 - RNA, 20 nt, Artificial Sequence
  HTT spacer sequence CTCN PAM
cagccuccagucaauuucuc

SEQ ID NO: 10516 - RNA, 20 nt, Artificial Sequence
  HTT spacer sequence CTCN PAM
gccuccagucaauuucucug

SEQ ID NO: 10517 - RNA, 20 nt, Artificial Sequence
  HTT spacer sequence CTCN PAM
agucaauuucucuggccccu

SEQ ID NO: 10518 - RNA, 20 nt, Artificial Sequence
  HTT spacer sequence CTCN PAM
ggccccugggacacugugac

SEQ ID NO: 10519 - RNA, 20 nt, Artificial Sequence
  HTT spacer sequence CTCN PAM
agcacagccaagucacagug

SEQ ID NO: 10520 - RNA, 20 nt, Artificial Sequence
  HTT spacer sequence CTCN PAM
cucucucucucuuuuuuuuu

SEQ ID NO: 10521 - RNA, 20 nt, Artificial Sequence
  HTT spacer sequence CTCN PAM
cucucucucuuuuuuuuuuu

SEQ ID NO: 10522 - RNA, 20 nt, Artificial Sequence
  HTT spacer sequence CTCN PAM
cucucucuuuuuuuuuuuuu

SEQ ID NO: 10523 - RNA, 20 nt, Artificial Sequence
  HTT spacer sequence CTCN PAM
cucucuuuuuuuuuuuuuuu

SEQ ID NO: 10524 - RNA, 20 nt, Artificial Sequence
  HTT spacer sequence CTCN PAM
cucuuuuuuuuuuuuuuuuu

SEQ ID NO: 10525 - RNA, 20 nt, Artificial Sequence
  HTT spacer sequence CTCN PAM
cuuuuuuuuuuuuuuuuuug

SEQ ID NO: 10526 - RNA, 20 nt, Artificial Sequence
  HTT spacer sequence CTCN PAM
uuuuuuuuuuuuuuuuugac

SEQ ID NO: 10527 - RNA, 20 nt, Artificial Sequence
  HTT spacer sequence CTCN PAM
guuguccaggcuggagcgca

SEQ ID NO: 10528 - RNA, 20 nt, Artificial Sequence
  HTT spacer sequence CTCN PAM
agccuggacaacagagcgaa

SEQ ID NO: 10529 - RNA, 20 nt, Artificial Sequence
  HTT spacer sequence CTCN PAM
accuuccaggcccaagugau

SEQ ID NO: 10530 - RNA, 20 nt, Artificial Sequence
  HTT spacer sequence CTCN PAM
aacacuacaaaucauuuuau

SEQ ID NO: 10531 - RNA, 20 nt, Artificial Sequence
  HTT spacer sequence CTCN PAM
aagccauuuauuucuuagcc

SEQ ID NO: 10532 - RNA, 20 nt, Artificial Sequence
  HTT spacer sequence CTCN PAM
gggcuaagaaauaaauggcu

SEQ ID NO: 10533 - RNA, 20 nt, Artificial Sequence
  HTT spacer sequence CTCN PAM
gucacccaggcuggaguaca

SEQ ID NO: 10534 - RNA, 20 nt, Artificial Sequence
  HTT spacer sequence CTCN PAM
cucugucacccaggcuggag

SEQ ID NO: 10535 - RNA, 20 nt, Artificial Sequence
  HTT spacer sequence CTCN PAM
aucuccaaaaaaaaaaaaaa

SEQ ID NO: 10536 - RNA, 20 nt, Artificial Sequence
  HTT spacer sequence CTCN PAM
aaaaaaaaaaaaaaaaaaau

SEQ ID NO: 10537 - RNA, 20 nt, Artificial Sequence
  HTT spacer sequence CTCN PAM
gaaggcuguggugggaggau

SEQ ID NO: 10538 - RNA, 20 nt, Artificial Sequence
  HTT spacer sequence CTCN PAM
caccacagccuucugaguag

SEQ ID NO: 10539 - RNA, 20 nt, Artificial Sequence
  HTT spacer sequence CTCN PAM
cugcagcccugaccaccugg

SEQ ID NO: 10540 - RNA, 20 nt, Artificial Sequence
  HTT spacer sequence CTCN PAM
agccugggugacagagugag

SEQ ID NO: 10541 - RNA, 20 nt, Artificial Sequence
  HTT spacer sequence CTCN PAM
gucacccaggcuggagugca

SEQ ID NO: 10542 - RNA, 20 nt, Artificial Sequence
  HTT spacer sequence CTCN PAM
cucugucacccaggcuggag

SEQ ID NO: 10543 - RNA, 20 nt, Artificial Sequence
  HTT spacer sequence CTCN PAM
aaaacaaagcaaaacaaaaa

SEQ ID NO: 10544 - RNA, 20 nt, Artificial Sequence
  HTT spacer sequence CTCN PAM
cccaaggaaccuagagacau

SEQ ID NO: 10545 - RNA, 20 nt, Artificial Sequence
  HTT spacer sequence CTCN PAM
caaggaaccuagagacauuu

SEQ ID NO: 10546 - RNA, 20 nt, Artificial Sequence
  HTT spacer sequence CTCN PAM
agguuccuugggagaggcca

SEQ ID NO: 10547 - RNA, 20 nt, Artificial Sequence
  HTT spacer sequence CTCN PAM
ugugaauauucauucaacau

SEQ ID NO: 10548 - RNA, 20 nt, Artificial Sequence
  HTT spacer sequence CTCN PAM
ucuugugaauauucauucaa

SEQ ID NO: 10549 - RNA, 20 nt, Artificial Sequence
  HTT spacer sequence CTCN PAM
ccucuugugaauauucauuc

SEQ ID NO: 10550 - RNA, 20 nt, Artificial Sequence
  HTT spacer sequence CTCN PAM
cuggcccuugaauuaguaag

SEQ ID NO: 10551 - RNA, 20 nt, Artificial Sequence
  HTT spacer sequence CTCN PAM
gcaccucuguuacuguuuua

SEQ ID NO: 10552 - RNA, 20 nt, Artificial Sequence
  HTT spacer sequence CTCN PAM
guuacuguuuuaauacauca

SEQ ID NO: 10553 - RNA, 20 nt, Artificial Sequence
  HTT spacer sequence CTCN PAM
ggaggcugaggcaggagaau

SEQ ID NO: 10554 - RNA, 20 nt, Artificial Sequence
  HTT spacer sequence CTCN PAM
cgaguagcugggauuauagg

SEQ ID NO: 10555 - RNA, 20 nt, Artificial Sequence
  HTT spacer sequence CTCN PAM
gccucccgaguagcugggau

SEQ ID NO: 10556 - RNA, 20 nt, Artificial Sequence
  HTT spacer sequence CTCN PAM
ugccucagccucccgaguag

SEQ ID NO: 10557 - RNA, 20 nt, Artificial Sequence
  HTT spacer sequence CTCN PAM
cagguuucaagcgauucucc

SEQ ID NO: 10558 - RNA, 20 nt, Artificial Sequence
  HTT spacer sequence CTCN PAM
gucucccagguuucaagcga

SEQ ID NO: 10559 - RNA, 20 nt, Artificial Sequence
  HTT spacer sequence CTCN PAM
cugcaaccucugucucccag

SEQ ID NO: 10560 - RNA, 20 nt, Artificial Sequence
  HTT spacer sequence CTCN PAM
gcucacugcaaccucugucu

SEQ ID NO: 10561 - RNA, 20 nt, Artificial Sequence
  HTT spacer sequence CTCN PAM
agccugggcgacagagcaag

SEQ ID NO: 10562 - RNA, 20 nt, Artificial Sequence
  HTT spacer sequence CTCN PAM
ccauuaugaauggaggggau

SEQ ID NO: 10563 - RNA, 20 nt, Artificial Sequence
  HTT spacer sequence CTCN PAM
auucauaauggugagcacca

SEQ ID NO: 10564 - RNA, 20 nt, Artificial Sequence
  HTT spacer sequence CTCN PAM
ucaaagccgggauugcccag

SEQ ID NO: 10565 - RNA, 20 nt, Artificial Sequence
  HTT spacer sequence CTCN PAM
gcucaucaaagccgggauug

SEQ ID NO: 10566 - RNA, 20 nt, Artificial Sequence
  HTT spacer sequence CTCN PAM
cugcucaucaaagccgggau

SEQ ID NO: 10567 - RNA, 20 nt, Artificial Sequence
  HTT spacer sequence CTCN PAM
gcagcauagaaaacggcucu

SEQ ID NO: 10568 - RNA, 20 nt, Artificial Sequence
  HTT spacer sequence CTCN PAM
guaaaucuuccaagccgcaa

SEQ ID NO: 10569 - RNA, 20 nt, Artificial Sequence
  HTT spacer sequence CTCN PAM
auuagguagcaccguucuua

SEQ ID NO: 10570 - RNA, 20 nt, Artificial Sequence
  HTT spacer sequence CTCN PAM
aagacuugcaggcuccauua

SEQ ID NO: 10571 - RNA, 20 nt, Artificial Sequence
  HTT spacer sequence CTCN PAM
cagcccuaggcuucccuggu

SEQ ID NO: 10572 - RNA, 20 nt, Artificial Sequence
  HTT spacer sequence CTCN PAM
ugcccauccuggaagcagcc

SEQ ID NO: 10573 - RNA, 20 nt, Artificial Sequence
  HTT spacer sequence CTCN PAM
cagcuauucuccugcccauc

SEQ ID NO: 10574 - RNA, 20 nt, Artificial Sequence
  HTT spacer sequence CTCN PAM
auggugauucuuaggguugg

SEQ ID NO: 10575 - RNA, 20 nt, Artificial Sequence
  HTT spacer sequence CTCN PAM
gacuggccauauuuccaaua

SEQ ID NO: 10576 - RNA, 20 nt, Artificial Sequence
  HTT spacer sequence CTCN PAM
agucccugauauaaaauggu

SEQ ID NO: 10577 - RNA, 20 nt, Artificial Sequence
  HTT spacer sequence CTCN PAM
cuugucaccuuguaagccug

SEQ ID NO: 10578 - RNA, 20 nt, Artificial Sequence
  HTT spacer sequence CTCN PAM
uggccuuugugaugcagcuc

SEQ ID NO: 10579 - RNA, 20 nt, Artificial Sequence
  HTT spacer sequence CTCN PAM
ccacagagcccuccagccuu

SEQ ID NO: 10580 - RNA, 20 nt, Artificial Sequence
  HTT spacer sequence CTCN PAM
guggggagcugcaucacaaa

SEQ ID NO: 10581 - RNA, 20 nt, Artificial Sequence
  HTT spacer sequence CTCN PAM
agccuuggguccugcugcuc

SEQ ID NO: 10582 - RNA, 20 nt, Artificial Sequence
  HTT spacer sequence CTCN PAM
cacacccccugcccucauca

SEQ ID NO: 10583 - RNA, 20 nt, Artificial Sequence
  HTT spacer sequence CTCN PAM
ucaugcgaggguuuuagcug

SEQ ID NO: 10584 - RNA, 20 nt, Artificial Sequence
  HTT spacer sequence CTCN PAM
caugaugagggcagggggug

SEQ ID NO: 10585 - RNA, 20 nt, Artificial Sequence
  HTT spacer sequence CTCN PAM
gguguccucacuucauugua

SEQ ID NO: 10586 - RNA, 20 nt, Artificial Sequence
  HTT spacer sequence CTCN PAM
cuucauuguaccuuugcaca

SEQ ID NO: 10587 - RNA, 20 nt, Artificial Sequence
  HTT spacer sequence CTCN PAM
ccacccagccccucuuccug

SEQ ID NO: 10588 - RNA, 20 nt, Artificial Sequence
  HTT spacer sequence CTCN PAM
acccagccccucuuccuguc

SEQ ID NO: 10589 - RNA, 20 nt, Artificial Sequence
  HTT spacer sequence CTCN PAM
uccugucauucugagagacu

SEQ ID NO: 10590 - RNA, 20 nt, Artificial Sequence
  HTT spacer sequence CTCN PAM
gaaugacaggaagaggggcu

SEQ ID NO: 10591 - RNA, 20 nt, Artificial Sequence
  HTT spacer sequence CTCN PAM
cagaaugacaggaagagggg

SEQ ID NO: 10592 - RNA, 20 nt, Artificial Sequence
  HTT spacer sequence CTCN PAM
ugcucauccgcccagaguug

SEQ ID NO: 10593 - RNA, 20 nt, Artificial Sequence
  HTT spacer sequence CTCN PAM
uccgcccagaguuggcccac

SEQ ID NO: 10594 - RNA, 20 nt, Artificial Sequence
  HTT spacer sequence CTCN PAM
gggcggaugagcaggagucu

SEQ ID NO: 10595 - RNA, 20 nt, Artificial Sequence
  HTT spacer sequence CTCN PAM
ugcugugugggccaacucug

SEQ ID NO: 10596 - RNA, 20 nt, Artificial Sequence
  HTT spacer sequence CTCN PAM
cacccucgugcugugugggc

SEQ ID NO: 10597 - RNA, 20 nt, Artificial Sequence
  HTT spacer sequence CTCN PAM
ugcucacacccucgugcugu

SEQ ID NO: 10598 - RNA, 20 nt, Artificial Sequence
  HTT spacer sequence CTCN PAM
cccacauccuccaacugcuc

SEQ ID NO: 10599 - RNA, 20 nt, Artificial Sequence
  HTT spacer sequence CTCN PAM
aacugcuccccguguugucu

SEQ ID NO: 10600 - RNA, 20 nt, Artificial Sequence
  HTT spacer sequence CTCN PAM
ccguguugucugcucagaug

SEQ ID NO: 10601 - RNA, 20 nt, Artificial Sequence
  HTT spacer sequence CTCN PAM
gauggucacgucagacgaug

SEQ ID NO: 10602 - RNA, 20 nt, Artificial Sequence
  HTT spacer sequence CTCN PAM
ucgucugacgugaccaucug

SEQ ID NO: 10603 - RNA, 20 nt, Artificial Sequence
  HTT spacer sequence CTCN PAM
caagaagcucaucgucugac

SEQ ID NO: 10604 - RNA, 20 nt, Artificial Sequence
  HTT spacer sequence CTCN PAM
uuucuuccuauucugaugga

SEQ ID NO: 10605 - RNA, 20 nt, Artificial Sequence
  HTT spacer sequence CTCN PAM
uuaucuuauauaucccacag

SEQ ID NO: 10606 - RNA, 20 nt, Artificial Sequence
  HTT spacer sequence CTCN PAM
uaaggaccagagaccaggcu

SEQ ID NO: 10607 - RNA, 20 nt, Artificial Sequence
  HTT spacer sequence CTCN PAM
gguccuuaagagauauuuau

SEQ ID NO: 10608 - RNA, 20 nt, Artificial Sequence
  HTT spacer sequence CTCN PAM
gcaccuugagcauugagcaa

SEQ ID NO: 10609 - RNA, 20 nt, Artificial Sequence
  HTT spacer sequence CTCN PAM
aggugcggaggugucagccc

SEQ ID NO: 10610 - RNA, 20 nt, Artificial Sequence
  HTT spacer sequence CTCN PAM
augcucaaggugcggaggug

SEQ ID NO: 10611 - RNA, 20 nt, Artificial Sequence
  HTT spacer sequence CTCN PAM
uagccagggcagcaauccac

SEQ ID NO: 10612 - RNA, 20 nt, Artificial Sequence
  HTT spacer sequence CTCN PAM
agacacagagguggucgccu

SEQ ID NO: 10613 - RNA, 20 nt, Artificial Sequence
  HTT spacer sequence CTCN PAM
gugucuagaggacucauagc

SEQ ID NO: 10614 - RNA, 20 nt, Artificial Sequence
  HTT spacer sequence CTCN PAM
ggcgaccaccucugugucua

SEQ ID NO: 10615 - RNA, 20 nt, Artificial Sequence
  HTT spacer sequence CTCN PAM
acucaggcgaccaccucugu

SEQ ID NO: 10616 - RNA, 20 nt, Artificial Sequence
  HTT spacer sequence CTCN PAM
aagcaauggcaacaaggcuu

SEQ ID NO: 10617 - RNA, 20 nt, Artificial Sequence
  HTT spacer sequence CTCN PAM
uaccucuaagcaauggcaac

SEQ ID NO: 10618 - RNA, 20 nt, Artificial Sequence
  HTT spacer sequence CTCN PAM
uauggguguguuccaugguc

SEQ ID NO: 10619 - RNA, 20 nt, Artificial Sequence
  HTT spacer sequence CTCN PAM
uggaguaaaucacacuucac

SEQ ID NO: 10620 - RNA, 20 nt, Artificial Sequence
  HTT spacer sequence CTCN PAM
aggaguaacaaaagaaucaa

SEQ ID NO: 10621 - RNA, 20 nt, Artificial Sequence
  HTT spacer sequence CTCN PAM
gccguagucaccugugaagu

SEQ ID NO: 10622 - RNA, 20 nt, Artificial Sequence
  HTT spacer sequence CTCN PAM
agaugagcuggauuuucuca

SEQ ID NO: 10623 - RNA, 20 nt, Artificial Sequence
  HTT spacer sequence CTCN PAM
ucuugagacugaaaccaaac

SEQ ID NO: 10624 - RNA, 20 nt, Artificial Sequence
  HTT spacer sequence CTCN PAM
ugugagcuuuggcucauccu

SEQ ID NO: 10625 - RNA, 20 nt, Artificial Sequence
  HTT spacer sequence CTCN PAM
caugagaaaauccagcucau

SEQ ID NO: 10626 - RNA, 20 nt, Artificial Sequence
  HTT spacer sequence CTCN PAM
uccucuaaccuccgguaccc

SEQ ID NO: 10627 - RNA, 20 nt, Artificial Sequence
  HTT spacer sequence CTCN PAM
aaccuccgguacccacuugc

SEQ ID NO: 10628 - RNA, 20 nt, Artificial Sequence
  HTT spacer sequence CTCN PAM
gguacccacuugccucaccc

SEQ ID NO: 10629 - RNA, 20 nt, Artificial Sequence
  HTT spacer sequence CTCN PAM
cccgccugcacucagugggg

SEQ ID NO: 10630 - RNA, 20 nt, Artificial Sequence
  HTT spacer sequence CTCN PAM
gugggggcugcaccaugucu

SEQ ID NO: 10631 - RNA, 20 nt, Artificial Sequence
  HTT spacer sequence CTCN PAM
ccaucaguagguaucacuaa

SEQ ID NO: 10632 - RNA, 20 nt, Artificial Sequence
  HTT spacer sequence CTCN PAM
gcccccugaguagcugggac

SEQ ID NO: 10633 - RNA, 20 nt, Artificial Sequence
  HTT spacer sequence CTCN PAM
gggggcugaggugggaaugu

SEQ ID NO: 10634 - RNA, 20 nt, Artificial Sequence
  HTT spacer sequence CTCN PAM
agcugggugcaguggugugu

SEQ ID NO: 10635 - RNA, 20 nt, Artificial Sequence
  HTT spacer sequence CTCN PAM
uaccauuaacauauuuuuaa

SEQ ID NO: 10636 - RNA, 20 nt, Artificial Sequence
  HTT spacer sequence CTCN PAM
caugugacgacaguguaaaa

SEQ ID NO: 10637 - RNA, 20 nt, Artificial Sequence
  HTT spacer sequence CTCN PAM
gcaaacaacucacaugugac

SEQ ID NO: 10638 - RNA, 20 nt, Artificial Sequence
  HTT spacer sequence CTCN PAM
ugaagggcaguuucguguuu

SEQ ID NO: 10639 - RNA, 20 nt, Artificial Sequence
  HTT spacer sequence CTCN PAM
cgcugguuguuccuacuggg

SEQ ID NO: 10640 - RNA, 20 nt, Artificial Sequence
  HTT spacer sequence CTCN PAM
ggaaucacagugccaacuuc

SEQ ID NO: 10641 - RNA, 20 nt, Artificial Sequence
  HTT spacer sequence CTCN PAM
acaagaaacaacaacaaaag

SEQ ID NO: 10642 - RNA, 20 nt, Artificial Sequence
  HTT spacer sequence CTCN PAM
ggcuucaagucucuacaaga

SEQ ID NO: 10643 - RNA, 20 nt, Artificial Sequence
  HTT spacer sequence CTCN PAM
uugaugaucgugguaagugg

SEQ ID NO: 10644 - RNA, 20 nt, Artificial Sequence
  HTT spacer sequence CTCN PAM
aacaaagucuacccauuaga

SEQ ID NO: 10645 - RNA, 20 nt, Artificial Sequence
  HTT spacer sequence CTCN PAM
uaaucauuaaguccacuuuc

SEQ ID NO: 10646 - RNA, 20 nt, Artificial Sequence
  HTT spacer sequence CTCN PAM
ccuaaucauuaaguccacuu

SEQ ID NO: 10647 - RNA, 20 nt, Artificial Sequence
  HTT spacer sequence CTCN PAM
gugguauguguucauuuuaa

SEQ ID NO: 10648 - RNA, 20 nt, Artificial Sequence
  HTT spacer sequence CTCN PAM
gcuucuugccuaaacacagg

SEQ ID NO: 10649 - RNA, 20 nt, Artificial Sequence
  HTT spacer sequence CTCN PAM
aucauuaauugaaaauuaug

SEQ ID NO: 10650 - RNA, 20 nt, Artificial Sequence
  HTT spacer sequence CTCN PAM
agccugggcgacacagcaag

SEQ ID NO: 10651 - RNA, 20 nt, Artificial Sequence
  HTT spacer sequence CTCN PAM
cugcagccuugaacuacugg

SEQ ID NO: 10652 - RNA, 20 nt, Artificial Sequence
  HTT spacer sequence CTCN PAM
aaugacccucccaucucagc

SEQ ID NO: 10653 - RNA, 20 nt, Artificial Sequence
  HTT spacer sequence CTCN PAM
caucucagcuuucugcauag

SEQ ID NO: 10654 - RNA, 20 nt, Artificial Sequence
  HTT spacer sequence CTCN PAM
gcuuucugcauagcugggac

SEQ ID NO: 10655 - RNA, 20 nt, Artificial Sequence
  HTT spacer sequence CTCN PAM
acaaaaaaaauuuaaaaauu

SEQ ID NO: 10656 - RNA, 20 nt, Artificial Sequence
  HTT spacer sequence CTCN PAM
aacuacugcccucaagcagu

SEQ ID NO: 10657 - RNA, 20 nt, Artificial Sequence
  HTT spacer sequence CTCN PAM
agcaguccuccugccuuccc

SEQ ID NO: 10658 - RNA, 20 nt, Artificial Sequence
  HTT spacer sequence CTCN PAM
ugccuucccucccaaagcac

SEQ ID NO: 10659 - RNA, 20 nt, Artificial Sequence
  HTT spacer sequence CTCN PAM
caaagcacuaggguuacagg

SEQ ID NO: 10660 - RNA, 20 nt, Artificial Sequence
  HTT spacer sequence CTCN PAM
cucuuguuucuugcuguuga

SEQ ID NO: 10661 - RNA, 20 nt, Artificial Sequence
  HTT spacer sequence CTCN PAM
uguuucuugcuguugaccca

SEQ ID NO: 10662 - RNA, 20 nt, Artificial Sequence
  HTT spacer sequence CTCN PAM
ugcuuuauucuuuuuuauuu

SEQ ID NO: 10663 - RNA, 20 nt, Artificial Sequence
  HTT spacer sequence CTCN PAM
aaacuuugucauguugcccc

SEQ ID NO: 10664 - RNA, 20 nt, Artificial Sequence
  HTT spacer sequence CTCN PAM
ugucacauagcaugugucac

SEQ ID NO: 10665 - RNA, 20 nt, Artificial Sequence
  HTT spacer sequence CTCN PAM
gugacacaugcuaugugaca

SEQ ID NO: 10666 - RNA, 20 nt, Artificial Sequence
  HTT spacer sequence CTCN PAM
aagcagccaucugcacccug

SEQ ID NO: 10667 - RNA, 20 nt, Artificial Sequence
  HTT spacer sequence CTCN PAM
cuguccacuauuacaggguc

SEQ ID NO: 10668 - RNA, 20 nt, Artificial Sequence
  HTT spacer sequence CTCN PAM
uugucugcagcaugggugca

SEQ ID NO: 10669 - RNA, 20 nt, Artificial Sequence
  HTT spacer sequence CTCN PAM
accuugguuccucuaaggga

SEQ ID NO: 10670 - RNA, 20 nt, Artificial Sequence
  HTT spacer sequence CTCN PAM
aagggagagucauacccaga

SEQ ID NO: 10671 - RNA, 20 nt, Artificial Sequence
  HTT spacer sequence CTCN PAM
cuuagaggaaccaaggugga

SEQ ID NO: 10672 - RNA, 20 nt, Artificial Sequence
  HTT spacer sequence CTCN PAM
cccuuagaggaaccaaggug

SEQ ID NO: 10673 - RNA, 20 nt, Artificial Sequence
  HTT spacer sequence CTCN PAM
ccagcagugcaaccauccuu

SEQ ID NO: 10674 - RNA, 20 nt, Artificial Sequence
  HTT spacer sequence CTCN PAM
cacauagcucacaagcagug

SEQ ID NO: 10675 - RNA, 20 nt, Artificial Sequence
  HTT spacer sequence CTCN PAM
caagcagugcugggagagag

SEQ ID NO: 10676 - RNA, 20 nt, Artificial Sequence
  HTT spacer sequence CTCN PAM
cagcacugcuugugagcuau

SEQ ID NO: 10677 - RNA, 20 nt, Artificial Sequence
  HTT spacer sequence CTCN PAM
cccagcacugcuugugagcu

SEQ ID NO: 10678 - RNA, 20 nt, Artificial Sequence
  HTT spacer sequence CTCN PAM
cucccagcacugcuugugag

SEQ ID NO: 10679 - RNA, 20 nt, Artificial Sequence
  HTT spacer sequence CTCN PAM
cuugaaagaagcucucuccc

SEQ ID NO: 10680 - RNA, 20 nt, Artificial Sequence
  HTT spacer sequence CTCN PAM
acuagacuguaagacccuuc

SEQ ID NO: 10681 - RNA, 20 nt, Artificial Sequence
  HTT spacer sequence CTCN PAM
ugccgagaagaggacaggcg

SEQ ID NO: 10682 - RNA, 20 nt, Artificial Sequence
  HTT spacer sequence CTCN PAM
gcaggagccacugaccuugc

SEQ ID NO: 10683 - RNA, 20 nt, Artificial Sequence
  HTT spacer sequence CTCN PAM
ucucggcaggagccacugac

SEQ ID NO: 10684 - RNA, 20 nt, Artificial Sequence
  HTT spacer sequence CTCN PAM
gccuuagacgccuguccucu

SEQ ID NO: 10685 - RNA, 20 nt, Artificial Sequence
  HTT spacer sequence CTCN PAM
aucuccgccuuagacgccug

SEQ ID NO: 10686 - RNA, 20 nt, Artificial Sequence
  HTT spacer sequence CTCN PAM
uuuuaugccucugccagaug

SEQ ID NO: 10687 - RNA, 20 nt, Artificial Sequence
  HTT spacer sequence CTCN PAM
gccagaugcuuucaugcuua

SEQ ID NO: 10688 - RNA, 20 nt, Artificial Sequence
  HTT spacer sequence CTCN PAM
cagggcagggugucauacau

SEQ ID NO: 10689 - RNA, 20 nt, Artificial Sequence
  HTT spacer sequence CTCN PAM
uuccucacagggcagggugu

SEQ ID NO: 10690 - RNA, 20 nt, Artificial Sequence
  HTT spacer sequence CTCN PAM
uuuaauggaaggcgauacca

SEQ ID NO: 10691 - RNA, 20 nt, Artificial Sequence
  HTT spacer sequence CTCN PAM
ugacuuagccugugguucau

SEQ ID NO: 10692 - RNA, 20 nt, Artificial Sequence
  HTT spacer sequence CTCN PAM
ccagagguggcuuugggugg

SEQ ID NO: 10693 - RNA, 20 nt, Artificial Sequence
  HTT spacer sequence CTCN PAM
ggugagcagcacagcaccag

SEQ ID NO: 10694 - RNA, 20 nt, Artificial Sequence
  HTT spacer sequence CTCN PAM
ccacccaaagccaccucugg

SEQ ID NO: 10695 - RNA, 20 nt, Artificial Sequence
  HTT spacer sequence CTCN PAM
cuuacugaguuguuaaaagg

SEQ ID NO: 10696 - RNA, 20 nt, Artificial Sequence
  HTT spacer sequence CTCN PAM
guaagugagcagcuucgcuu

SEQ ID NO: 10697 - RNA, 20 nt, Artificial Sequence
  HTT spacer sequence CTCN PAM
guaugcaaaguggagcaauc

SEQ ID NO: 10698 - RNA, 20 nt, Artificial Sequence
  HTT spacer sequence CTCN PAM
acuuugcauacagagcacgu

SEQ ID NO: 10699 - RNA, 20 nt, Artificial Sequence
  HTT spacer sequence CTCN PAM
aagcuaugugguugaucgga

SEQ ID NO: 10700 - RNA, 20 nt, Artificial Sequence
  HTT spacer sequence CTCN PAM
gcaccguacccuguuccgau

SEQ ID NO: 10701 - RNA, 20 nt, Artificial Sequence
  HTT spacer sequence CTCN PAM
cuuuuguguaaacaaagcag

SEQ ID NO: 10702 - RNA, 20 nt, Artificial Sequence
  HTT spacer sequence CTCN PAM
uaaacauaaagaaacauaaa

SEQ ID NO: 10703 - RNA, 20 nt, Artificial Sequence
  HTT spacer sequence CTCN PAM
ugauugucccuuuauguuuc

SEQ ID NO: 10704 - RNA, 20 nt, Artificial Sequence
  HTT spacer sequence CTCN PAM
ccugccuuguuaucacuucu

SEQ ID NO: 10705 - RNA, 20 nt, Artificial Sequence
  HTT spacer sequence CTCN PAM
uaaaaacacagaaaaagguu

SEQ ID NO: 10706 - RNA, 20 nt, Artificial Sequence
  HTT spacer sequence CTCN PAM
cuucuuuagaacuuuacccc

SEQ ID NO: 10707 - RNA, 20 nt, Artificial Sequence
  HTT spacer sequence CTCN PAM
ucuuuagaacuuuaccccac

SEQ ID NO: 10708 - RNA, 20 nt, Artificial Sequence
  HTT spacer sequence CTCN PAM
aacaugugggguaaaguucu

SEQ ID NO: 10709 - RNA, 20 nt, Artificial Sequence
  HTT spacer sequence CTCN PAM
gcucaaacaugugggguaaa

SEQ ID NO: 10710 - RNA, 20 nt, Artificial Sequence
  HTT spacer sequence CTCN PAM
ugccuggcuaacuuagcaag

SEQ ID NO: 10711 - RNA, 20 nt, Artificial Sequence
  HTT spacer sequence CTCN PAM
gcccagguuccccuccugcg

SEQ ID NO: 10712 - RNA, 20 nt, Artificial Sequence
  HTT spacer sequence CTCN PAM
ugcgccacgaucugaaaggc

SEQ ID NO: 10713 - RNA, 20 nt, Artificial Sequence
  HTT spacer sequence CTCN PAM
cgggugggaugccaggaugg

SEQ ID NO: 10714 - RNA, 20 nt, Artificial Sequence
  HTT spacer sequence CTCN PAM
ucucuuggggaccacagucc

SEQ ID NO: 10715 - RNA, 20 nt, Artificial Sequence
  HTT spacer sequence CTCN PAM
uggggaccacaguccucuga

SEQ ID NO: 10716 - RNA, 20 nt, Artificial Sequence
  HTT spacer sequence CTCN PAM
gaugccgaugaccacaguuu

SEQ ID NO: 10717 - RNA, 20 nt, Artificial Sequence
  HTT spacer sequence CTCN PAM
cuaugcuacccaggcugggu

SEQ ID NO: 10718 - RNA, 20 nt, Artificial Sequence
  HTT spacer sequence CTCN PAM
augcuacccaggcugggugc

SEQ ID NO: 10719 - RNA, 20 nt, Artificial Sequence
  HTT spacer sequence CTCN PAM
caggugcgauuguggcacaa

SEQ ID NO: 10720 - RNA, 20 nt, Artificial Sequence
  HTT spacer sequence CTCN PAM
ugggccuaagcgacccuccu

SEQ ID NO: 10721 - RNA, 20 nt, Artificial Sequence
  HTT spacer sequence CTCN PAM
ugccucagccucccacguag

SEQ ID NO: 10722 - RNA, 20 nt, Artificial Sequence
  HTT spacer sequence CTCN PAM
gccucccacguagcuggagu

SEQ ID NO: 10723 - RNA, 20 nt, Artificial Sequence
  HTT spacer sequence CTCN PAM
cacguagcuggaguuucagg

SEQ ID NO: 10724 - RNA, 20 nt, Artificial Sequence
  HTT spacer sequence CTCN PAM
agcuacgugggaggcugagg

SEQ ID NO: 10725 - RNA, 20 nt, Artificial Sequence
  HTT spacer sequence CTCN PAM
cugcaguuuugaccuccagg

SEQ ID NO: 10726 - RNA, 20 nt, Artificial Sequence
  HTT spacer sequence CTCN PAM
agggcuguagcgauccgccu

SEQ ID NO: 10727 - RNA, 20 nt, Artificial Sequence
  HTT spacer sequence CTCN PAM
gccuccugaguagcugggaa

SEQ ID NO: 10728 - RNA, 20 nt, Artificial Sequence
  HTT spacer sequence CTCN PAM
ugaguagcugggaauacagg

SEQ ID NO: 10729 - RNA, 20 nt, Artificial Sequence
  HTT spacer sequence CTCN PAM
ggaggcugaggcaaggcgga

SEQ ID NO: 10730 - RNA, 20 nt, Artificial Sequence
  HTT spacer sequence CTCN PAM
ugccuguauucccagcuacu

SEQ ID NO: 10731 - RNA, 20 nt, Artificial Sequence
  HTT spacer sequence CTCN PAM
caaaguacuaggauuauagg

SEQ ID NO: 10732 - RNA, 20 nt, Artificial Sequence
  HTT spacer sequence CTCN PAM
gccucccaaaguacuaggau

SEQ ID NO: 10733 - RNA, 20 nt, Artificial Sequence
  HTT spacer sequence CTCN PAM
agugauccaccugccucagc

SEQ ID NO: 10734 - RNA, 20 nt, Artificial Sequence
  HTT spacer sequence CTCN PAM
ugaccucaagugauccaccu

SEQ ID NO: 10735 - RNA, 20 nt, Artificial Sequence
  HTT spacer sequence CTCN PAM
aacucuugaccucaagugau

SEQ ID NO: 10736 - RNA, 20 nt, Artificial Sequence
  HTT spacer sequence CTCN PAM
acuaaaaauacaaaaauuag

SEQ ID NO: 10737 - RNA, 20 nt, Artificial Sequence
  HTT spacer sequence CTCN PAM
aaucccagcuacucaggagg

SEQ ID NO: 10738 - RNA, 20 nt, Artificial Sequence
  HTT spacer sequence CTCN PAM
ggaggccgaggcaggagaau

SEQ ID NO: 10739 - RNA, 20 nt, Artificial Sequence
  HTT spacer sequence CTCN PAM
ugaguagcugggauuagagg

SEQ ID NO: 10740 - RNA, 20 nt, Artificial Sequence
  HTT spacer sequence CTCN PAM
gccuccugaguagcugggau

SEQ ID NO: 10741 - RNA, 20 nt, Artificial Sequence
  HTT spacer sequence CTCN PAM
ugccucggccuccugaguag

SEQ ID NO: 10742 - RNA, 20 nt, Artificial Sequence
  HTT spacer sequence CTCN PAM
gccgcccggguucaagcgau

SEQ ID NO: 10743 - RNA, 20 nt, Artificial Sequence
  HTT spacer sequence CTCN PAM
cugcaaccucugccgcccgg

SEQ ID NO: 10744 - RNA, 20 nt, Artificial Sequence
  HTT spacer sequence CTCN PAM
gcucacugcaaccucugccg

SEQ ID NO: 10745 - RNA, 20 nt, Artificial Sequence
  HTT spacer sequence CTCN PAM
agccugggcgacagagugag

SEQ ID NO: 10746 - RNA, 20 nt, Artificial Sequence
  HTT spacer sequence CTCN PAM
gucgcccaggcuggagugua

SEQ ID NO: 10747 - RNA, 20 nt, Artificial Sequence
  HTT spacer sequence CTCN PAM
cucugucgcccaggcuggag

SEQ ID NO: 10748 - RNA, 20 nt, Artificial Sequence
  HTT spacer sequence CTCN PAM
gucucaaaaaacaaacaaac

SEQ ID NO: 10749 - RNA, 20 nt, Artificial Sequence
  HTT spacer sequence CTCN PAM
aaaaacaaacaaacaaacaa

SEQ ID NO: 10750 - RNA, 20 nt, Artificial Sequence
  HTT spacer sequence CTCN PAM
aauuaauuuaaagucacuca

SEQ ID NO: 10751 - RNA, 20 nt, Artificial Sequence
  HTT spacer sequence CTCN PAM
gaggccgggcacaguggcuc

SEQ ID NO: 10752 - RNA, 20 nt, Artificial Sequence
  HTT spacer sequence CTCN PAM
gagugacuuuaaauuaauuu

SEQ ID NO: 10753 - RNA, 20 nt, Artificial Sequence
  HTT spacer sequence CTCN PAM
ugccuguaaucccaauauuu

SEQ ID NO: 10754 - RNA, 20 nt, Artificial Sequence
  HTT spacer sequence CTCN PAM
caaaauauugggauuacagg

SEQ ID NO: 10755 - RNA, 20 nt, Artificial Sequence
  HTT spacer sequence CTCN PAM
ugacuucaggugauccaccu

SEQ ID NO: 10756 - RNA, 20 nt, Artificial Sequence
  HTT spacer sequence CTCN PAM
acuaaaaauacaaaaauuag

SEQ ID NO: 10757 - RNA, 20 nt, Artificial Sequence
  HTT spacer sequence CTCN PAM
aguagcugggacuacaggca

SEQ ID NO: 10758 - RNA, 20 nt, Artificial Sequence
  HTT spacer sequence CTCN PAM
gccccucaaguagcugggac

SEQ ID NO: 10759 - RNA, 20 nt, Artificial Sequence
  HTT spacer sequence CTCN PAM
cagguucaagcgauucuucu

SEQ ID NO: 10760 - RNA, 20 nt, Artificial Sequence
  HTT spacer sequence CTCN PAM
gccucccagguucaagcgau

SEQ ID NO: 10761 - RNA, 20 nt, Artificial Sequence
  HTT spacer sequence CTCN PAM
cugcaaccuccgccucccag

SEQ ID NO: 10762 - RNA, 20 nt, Artificial Sequence
  HTT spacer sequence CTCN PAM
agccuaggugacagagugag

SEQ ID NO: 10763 - RNA, 20 nt, Artificial Sequence
  HTT spacer sequence CTCN PAM
gucaccuaggcuggagugca

SEQ ID NO: 10764 - RNA, 20 nt, Artificial Sequence
  HTT spacer sequence CTCN PAM
cucugucaccuaggcuggag

SEQ ID NO: 10765 - RNA, 20 nt, Artificial Sequence
  HTT spacer sequence CTCN PAM
gucucaaaaaaaaaaaaaaa

SEQ ID NO: 10766 - RNA, 20 nt, Artificial Sequence
  HTT spacer sequence CTCN PAM
aaaaaaaaaaaaaaaaaagu

SEQ ID NO: 10767 - RNA, 20 nt, Artificial Sequence
  HTT spacer sequence CTCN PAM
guaucauucccuucugugcg

SEQ ID NO: 10768 - RNA, 20 nt, Artificial Sequence
  HTT spacer sequence CTCN PAM
aaaaaaaaaaaaaaaaaaau

SEQ ID NO: 10769 - RNA, 20 nt, Artificial Sequence
  HTT spacer sequence CTCN PAM
gucucaaaaaaaaaaaaaaa

SEQ ID NO: 10770 - RNA, 20 nt, Artificial Sequence
  HTT spacer sequence CTCN PAM
gucgcccaggcuggugugca

SEQ ID NO: 10771 - RNA, 20 nt, Artificial Sequence
  HTT spacer sequence CTCN PAM
gcucacuguaagcuccgccu

SEQ ID NO: 10772 - RNA, 20 nt, Artificial Sequence
  HTT spacer sequence CTCN PAM
cuguaagcuccgccucccag

SEQ ID NO: 10773 - RNA, 20 nt, Artificial Sequence
  HTT spacer sequence CTCN PAM
gccucccagguucaugccau

SEQ ID NO: 10774 - RNA, 20 nt, Artificial Sequence
  HTT spacer sequence CTCN PAM
cagguucaugccauucuccu

SEQ ID NO: 10775 - RNA, 20 nt, Artificial Sequence
  HTT spacer sequence CTCN PAM
ugccucagccucccaagcag

SEQ ID NO: 10776 - RNA, 20 nt, Artificial Sequence
  HTT spacer sequence CTCN PAM
gccucccaagcagcugggac

SEQ ID NO: 10777 - RNA, 20 nt, Artificial Sequence
  HTT spacer sequence CTCN PAM
caagcagcugggacuacagg

SEQ ID NO: 10778 - RNA, 20 nt, Artificial Sequence
  HTT spacer sequence CTCN PAM
acuaaaaaaaauauaaaaaa

SEQ ID NO: 10779 - RNA, 20 nt, Artificial Sequence
  HTT spacer sequence CTCN PAM
aucuccugaccuugugaucc

SEQ ID NO: 10780 - RNA, 20 nt, Artificial Sequence
  HTT spacer sequence CTCN PAM
ugaccuugugauccgcccgc

SEQ ID NO: 10781 - RNA, 20 nt, Artificial Sequence
  HTT spacer sequence CTCN PAM
gccucccaaagugcugggau

SEQ ID NO: 10782 - RNA, 20 nt, Artificial Sequence
  HTT spacer sequence CTCN PAM
caaagugcugggauuacagg

SEQ ID NO: 10783 - RNA, 20 nt, Artificial Sequence
  HTT spacer sequence CTCN PAM
agccuguaaucccagcacuu

SEQ ID NO: 10784 - RNA, 20 nt, Artificial Sequence
  HTT spacer sequence CTCN PAM
auuuugcgguguuaucuuug

SEQ ID NO: 10785 - RNA, 20 nt, Artificial Sequence
  HTT spacer sequence CTCN PAM
uauuucauuccuucauuuac

SEQ ID NO: 10786 - RNA, 20 nt, Artificial Sequence
  HTT spacer sequence CTCN PAM
uuucuuaaauaaaguaguag

SEQ ID NO: 10787 - RNA, 20 nt, Artificial Sequence
  HTT spacer sequence CTCN PAM
acguggcuauuucacugaau

SEQ ID NO: 10788 - RNA, 20 nt, Artificial Sequence
  HTT spacer sequence CTCN PAM
accguauauucagugaaaua

SEQ ID NO: 10789 - RNA, 20 nt, Artificial Sequence
  HTT spacer sequence CTCN PAM
gcaacacucauggacggcuu

SEQ ID NO: 10790 - RNA, 20 nt, Artificial Sequence
  HTT spacer sequence CTCN PAM
uggacggcuuccguccgucu

SEQ ID NO: 10791 - RNA, 20 nt, Artificial Sequence
  HTT spacer sequence CTCN PAM
ugcaggcgaaccugaccugu

SEQ ID NO: 10792 - RNA, 20 nt, Artificial Sequence
  HTT spacer sequence CTCN PAM
cugguaagcgugucaucucc

SEQ ID NO: 10793 - RNA, 20 nt, Artificial Sequence
  HTT spacer sequence CTCN PAM
accggugcuguuuccguugg

SEQ ID NO: 10794 - RNA, 20 nt, Artificial Sequence
  HTT spacer sequence CTCN PAM
aucgcggcaccaacggaaac

SEQ ID NO: 10795 - RNA, 20 nt, Artificial Sequence
  HTT spacer sequence CTCN PAM
ccaucgcggcaccaacggaa

SEQ ID NO: 10796 - RNA, 20 nt, Artificial Sequence
  HTT spacer sequence CTCN PAM
aucaaggauacauucaacga

SEQ ID NO: 10797 - RNA, 20 nt, Artificial Sequence
  HTT spacer sequence CTCN PAM
aggguguuucccgucugcau

SEQ ID NO: 10798 - RNA, 20 nt, Artificial Sequence
  HTT spacer sequence CTCN PAM
ugcacugcuggugggaaugc

SEQ ID NO: 10799 - RNA, 20 nt, Artificial Sequence
  HTT spacer sequence CTCN PAM
cgugcacugcuggugggaau

SEQ ID NO: 10800 - RNA, 20 nt, Artificial Sequence
  HTT spacer sequence CTCN PAM
ccagcagaccgaguucucga

SEQ ID NO: 10801 - RNA, 20 nt, Artificial Sequence
  HTT spacer sequence CTCN PAM
gucugcuggcgaggcugugg

SEQ ID NO: 10802 - RNA, 20 nt, Artificial Sequence
  HTT spacer sequence CTCN PAM
aacuuuggaguuuuugucag

SEQ ID NO: 10803 - RNA, 20 nt, Artificial Sequence
  HTT spacer sequence CTCN PAM
aaaguucgagaacucggucu

SEQ ID NO: 10804 - RNA, 20 nt, Artificial Sequence
  HTT spacer sequence CTCN PAM
guuuaaaaauccauuuuuau

SEQ ID NO: 10805 - RNA, 20 nt, Artificial Sequence
  HTT spacer sequence CTCN PAM
acuuaaaugaaaaauacacg

SEQ ID NO: 10806 - RNA, 20 nt, Artificial Sequence
  HTT spacer sequence CTCN PAM
cgccuguaaucccagcacuu

SEQ ID NO: 10807 - RNA, 20 nt, Artificial Sequence
  HTT spacer sequence CTCN PAM
caaagugcugggauuacagg

SEQ ID NO: 10808 - RNA, 20 nt, Artificial Sequence
  HTT spacer sequence CTCN PAM
cacccuggccucccaaagug

SEQ ID NO: 10809 - RNA, 20 nt, Artificial Sequence
  HTT spacer sequence CTCN PAM
agcgauccucccacccuggc

SEQ ID NO: 10810 - RNA, 20 nt, Artificial Sequence
  HTT spacer sequence CTCN PAM
ugggcucaagcgauccuccc

SEQ ID NO: 10811 - RNA, 20 nt, Artificial Sequence
  HTT spacer sequence CTCN PAM
acaaaagaaaagaaaagaaa

SEQ ID NO: 10812 - RNA, 20 nt, Artificial Sequence
  HTT spacer sequence CTCN PAM
ccuuguacagaugcauucuu

SEQ ID NO: 10813 - RNA, 20 nt, Artificial Sequence
  HTT spacer sequence CTCN PAM
guuuccuccccuuguacaga

SEQ ID NO: 10814 - RNA, 20 nt, Artificial Sequence
  HTT spacer sequence CTCN PAM
gccauguacuaucaugucuc

SEQ ID NO: 10815 - RNA, 20 nt, Artificial Sequence
  HTT spacer sequence CTCN PAM
gacccacgccaucgggcugg

SEQ ID NO: 10816 - RNA, 20 nt, Artificial Sequence
  HTT spacer sequence CTCN PAM
ucaccccugugcucucccgc

SEQ ID NO: 10817 - RNA, 20 nt, Artificial Sequence
  HTT spacer sequence CTCN PAM
ccccugugcucucccgccuc

SEQ ID NO: 10818 - RNA, 20 nt, Artificial Sequence
  HTT spacer sequence CTCN PAM
cccgccucccagggugggcg

SEQ ID NO: 10819 - RNA, 20 nt, Artificial Sequence
  HTT spacer sequence CTCN PAM
cgccucccagggugggcgcg

SEQ ID NO: 10820 - RNA, 20 nt, Artificial Sequence
  HTT spacer sequence CTCN PAM
cagggugggcgcgcagcaag

SEQ ID NO: 10821 - RNA, 20 nt, Artificial Sequence
  HTT spacer sequence CTCN PAM
gaugcaugcacgugauacac

SEQ ID NO: 10822 - RNA, 20 nt, Artificial Sequence
  HTT spacer sequence CTCN PAM
gacucagaugcaugcacgug

SEQ ID NO: 10823 - RNA, 20 nt, Artificial Sequence
  HTT spacer sequence CTCN PAM
cuaaagcaucaugcagacug

SEQ ID NO: 10824 - RNA, 20 nt, Artificial Sequence
  HTT spacer sequence CTCN PAM
aaagcaucaugcagacuguu

SEQ ID NO: 10825 - RNA, 20 nt, Artificial Sequence
  HTT spacer sequence CTCN PAM
aaggcacuguagucauuuua

SEQ ID NO: 10826 - RNA, 20 nt, Artificial Sequence
  HTT spacer sequence CTCN PAM
auaaauauuuauuggugaaa

SEQ ID NO: 10827 - RNA, 20 nt, Artificial Sequence
  HTT spacer sequence CTCN PAM
gcuucuaauaucauacccug

SEQ ID NO: 10828 - RNA, 20 nt, Artificial Sequence
  HTT spacer sequence CTCN PAM
acagaauguuuucgauaauu

SEQ ID NO: 10829 - RNA, 20 nt, Artificial Sequence
  HTT spacer sequence CTCN PAM
aaaaaauuauaaagaaaaua

SEQ ID NO: 10830 - RNA, 20 nt, Artificial Sequence
  HTT spacer sequence CTCN PAM
cucuugcccugcaguggugu

SEQ ID NO: 10831 - RNA, 20 nt, Artificial Sequence
  HTT spacer sequence CTCN PAM
ugcccugcaguggugugauc

SEQ ID NO: 10832 - RNA, 20 nt, Artificial Sequence
  HTT spacer sequence CTCN PAM
accuucugggcuuaagcgau

SEQ ID NO: 10833 - RNA, 20 nt, Artificial Sequence
  HTT spacer sequence CTCN PAM
ugccucagccuccagaguag

SEQ ID NO: 10834 - RNA, 20 nt, Artificial Sequence
  HTT spacer sequence CTCN PAM
gccuccagaguagcugggac

SEQ ID NO: 10835 - RNA, 20 nt, Artificial Sequence
  HTT spacer sequence CTCN PAM
agaguagcugggaccauagc

SEQ ID NO: 10836 - RNA, 20 nt, Artificial Sequence
  HTT spacer sequence CTCN PAM
ggaggcugaggcaggaggau

SEQ ID NO: 10837 - RNA, 20 nt, Artificial Sequence
  HTT spacer sequence CTCN PAM
auaaaaaaagauuuuuaaaa

SEQ ID NO: 10838 - RNA, 20 nt, Artificial Sequence
  HTT spacer sequence CTCN PAM
aaauguggaacucaaguaau

SEQ ID NO: 10839 - RNA, 20 nt, Artificial Sequence
  HTT spacer sequence CTCN PAM
aguaauccuccgaccuuggc

SEQ ID NO: 10840 - RNA, 20 nt, Artificial Sequence
  HTT spacer sequence CTCN PAM
gaccuuggccucccaaagug

SEQ ID NO: 10841 - RNA, 20 nt, Artificial Sequence
  HTT spacer sequence CTCN PAM
caaagugcuggaauuacagg

SEQ ID NO: 10842 - RNA, 20 nt, Artificial Sequence
  HTT spacer sequence CTCN PAM
auuaccauuuguucucaaga

SEQ ID NO: 10843 - RNA, 20 nt, Artificial Sequence
  HTT spacer sequence CTCN PAM
agagaauaacuccauaucau

SEQ ID NO: 10844 - RNA, 20 nt, Artificial Sequence
  HTT spacer sequence CTCN PAM
ugagaacaaaugguaauaga

SEQ ID NO: 10845 - RNA, 20 nt, Artificial Sequence
  HTT spacer sequence CTCN PAM
auaucauucauguguagcug

SEQ ID NO: 10846 - RNA, 20 nt, Artificial Sequence
  HTT spacer sequence CTCN PAM
gacagaaaguauuuauuuac

SEQ ID NO: 10847 - RNA, 20 nt, Artificial Sequence
  HTT spacer sequence CTCN PAM
ggaacaguaaacguaaaaug

SEQ ID NO: 10848 - RNA, 20 nt, Artificial Sequence
  HTT spacer sequence CTCN PAM
aaaaccauggcuggaaauaa

SEQ ID NO: 10849 - RNA, 20 nt, Artificial Sequence
  HTT spacer sequence CTCN PAM
guuuggccacagagauccca

SEQ ID NO: 10850 - RNA, 20 nt, Artificial Sequence
  HTT spacer sequence CTCN PAM
guggccaaaccgaggucuga

SEQ ID NO: 10851 - RNA, 20 nt, Artificial Sequence
  HTT spacer sequence CTCN PAM
guccuucugggaucucugug

SEQ ID NO: 10852 - RNA, 20 nt, Artificial Sequence
  HTT spacer sequence CTCN PAM
aacccucuguccuucuggga

SEQ ID NO: 10853 - RNA, 20 nt, Artificial Sequence
  HTT spacer sequence CTCN PAM
uccucgaacccucuguccuu

SEQ ID NO: 10854 - RNA, 20 nt, Artificial Sequence
  HTT spacer sequence CTCN PAM
cgaacccauguagccgacug

SEQ ID NO: 10855 - RNA, 20 nt, Artificial Sequence
  HTT spacer sequence CTCN PAM
cacgaacccauguagccgac

SEQ ID NO: 10856 - RNA, 20 nt, Artificial Sequence
  HTT spacer sequence CTCN PAM
ggcacccggauagaaaggac

SEQ ID NO: 10857 - RNA, 20 nt, Artificial Sequence
  HTT spacer sequence CTCN PAM
gaacacagagaaauccaccc

SEQ ID NO: 10858 - RNA, 20 nt, Artificial Sequence
  HTT spacer sequence CTCN PAM
guguucugaggcacucaggc

SEQ ID NO: 10859 - RNA, 20 nt, Artificial Sequence
  HTT spacer sequence CTCN PAM
guuuggacacacuaguagau

SEQ ID NO: 10860 - RNA, 20 nt, Artificial Sequence
  HTT spacer sequence CTCN PAM
aaccugucagaguguugagg

SEQ ID NO: 10861 - RNA, 20 nt, Artificial Sequence
  HTT spacer sequence CTCN PAM
gacagguuagagauucaaaa

SEQ ID NO: 10862 - RNA, 20 nt, Artificial Sequence
  HTT spacer sequence CTCN PAM
acacucugacagguuagaga

SEQ ID NO: 10863 - RNA, 20 nt, Artificial Sequence
  HTT spacer sequence CTCN PAM
gcuucuuacagaugaggggu

SEQ ID NO: 10864 - RNA, 20 nt, Artificial Sequence
  HTT spacer sequence CTCN PAM
ucuguaagaagcugagggca

SEQ ID NO: 10865 - RNA, 20 nt, Artificial Sequence
  HTT spacer sequence CTCN PAM
ccccucaucuguaagaagcu

SEQ ID NO: 10866 - RNA, 20 nt, Artificial Sequence
  HTT spacer sequence CTCN PAM
ggccucaccccucaucugua

SEQ ID NO: 10867 - RNA, 20 nt, Artificial Sequence
  HTT spacer sequence CTCN PAM
caggccucaccccucaucug

SEQ ID NO: 10868 - RNA, 20 nt, Artificial Sequence
  HTT spacer sequence CTCN PAM
caaccucucaggccucaccc

SEQ ID NO: 10869 - RNA, 20 nt, Artificial Sequence
  HTT spacer sequence CTCN PAM
ggacucacaaccucucaggc

SEQ ID NO: 10870 - RNA, 20 nt, Artificial Sequence
  HTT spacer sequence CTCN PAM
gcgaagugagggcagaaucg

SEQ ID NO: 10871 - RNA, 20 nt, Artificial Sequence
  HTT spacer sequence CTCN PAM
cuucgcugagugaccucagg

SEQ ID NO: 10872 - RNA, 20 nt, Artificial Sequence
  HTT spacer sequence CTCN PAM
ucacucuaccaguguccucc

SEQ ID NO: 10873 - RNA, 20 nt, Artificial Sequence
  HTT spacer sequence CTCN PAM
cucuaccaguguccuccccu

SEQ ID NO: 10874 - RNA, 20 nt, Artificial Sequence
  HTT spacer sequence CTCN PAM
accaguguccuccccugugc

SEQ ID NO: 10875 - RNA, 20 nt, Artificial Sequence
  HTT spacer sequence CTCN PAM
ccugugcaccacggccucuc

SEQ ID NO: 10876 - RNA, 20 nt, Artificial Sequence
  HTT spacer sequence CTCN PAM
cggagccucaggaaaucacc

SEQ ID NO: 10877 - RNA, 20 nt, Artificial Sequence
  HTT spacer sequence CTCN PAM
gagccucaggaaaucacccc

SEQ ID NO: 10878 - RNA, 20 nt, Artificial Sequence
  HTT spacer sequence CTCN PAM
gagaggccguggugcacagg

SEQ ID NO: 10879 - RNA, 20 nt, Artificial Sequence
  HTT spacer sequence CTCN PAM
ggaaaucaccccacucuggu

SEQ ID NO: 10880 - RNA, 20 nt, Artificial Sequence
  HTT spacer sequence CTCN PAM
gguuauuccaaagauccggg

SEQ ID NO: 10881 - RNA, 20 nt, Artificial Sequence
  HTT spacer sequence CTCN PAM
gagagccucgcagaguccug

SEQ ID NO: 10882 - RNA, 20 nt, Artificial Sequence
  HTT spacer sequence CTCN PAM
gaggccaccccuggggguug

SEQ ID NO: 10883 - RNA, 20 nt, Artificial Sequence
  HTT spacer sequence CTCN PAM
cagaggccaccccugggggu

SEQ ID NO: 10884 - RNA, 20 nt, Artificial Sequence
  HTT spacer sequence CTCN PAM
cagaguccugcaggaagacc

SEQ ID NO: 10885 - RNA, 20 nt, Artificial Sequence
  HTT spacer sequence CTCN PAM
gcgaggcucucagaggccac

SEQ ID NO: 10886 - RNA, 20 nt, Artificial Sequence
  HTT spacer sequence CTCN PAM
ugcgucuugugggguuuuuc

SEQ ID NO: 10887 - RNA, 20 nt, Artificial Sequence
  HTT spacer sequence CTCN PAM
gugugucuggagggagcccc

SEQ ID NO: 10888 - RNA, 20 nt, Artificial Sequence
  HTT spacer sequence CTCN PAM
agacacacagagccaugccc

SEQ ID NO: 10889 - RNA, 20 nt, Artificial Sequence
  HTT spacer sequence CTCN PAM
cuccagacacacagagccau

SEQ ID NO: 10890 - RNA, 20 nt, Artificial Sequence
  HTT spacer sequence CTCN PAM
ugaaggggcucccuccagac

SEQ ID NO: 10891 - RNA, 20 nt, Artificial Sequence
  HTT spacer sequence CTCN PAM
accuccugaaggggcucccu

SEQ ID NO: 10892 - RNA, 20 nt, Artificial Sequence
  HTT spacer sequence CTCN PAM
guggcaauucagcucaucuu

SEQ ID NO: 10893 - RNA, 20 nt, Artificial Sequence
  HTT spacer sequence CTCN PAM
ucuuggaugaaucauacaaa

SEQ ID NO: 10894 - RNA, 20 nt, Artificial Sequence
  HTT spacer sequence CTCN PAM
gugaaaauacuaaaauccgu

SEQ ID NO: 10895 - RNA, 20 nt, Artificial Sequence
  HTT spacer sequence CTCN PAM
aaaaaaaaaaaaaguuguga

SEQ ID NO: 10896 - RNA, 20 nt, Artificial Sequence
  HTT spacer sequence CTCN PAM
gucucaaaaaaaaaaaaaag

SEQ ID NO: 10897 - RNA, 20 nt, Artificial Sequence
  HTT spacer sequence CTCN PAM
cucagucgcccaggcuagaa

SEQ ID NO: 10898 - RNA, 20 nt, Artificial Sequence
  HTT spacer sequence CTCN PAM
gucgcccaggcuagaaugca

SEQ ID NO: 10899 - RNA, 20 nt, Artificial Sequence
  HTT spacer sequence CTCN PAM
cugcaacguccaccucccag

SEQ ID NO: 10900 - RNA, 20 nt, Artificial Sequence
  HTT spacer sequence CTCN PAM
caggcacaagcgauucuccu

SEQ ID NO: 10901 - RNA, 20 nt, Artificial Sequence
  HTT spacer sequence CTCN PAM
ugccucagcuuccugaguau

SEQ ID NO: 10902 - RNA, 20 nt, Artificial Sequence
  HTT spacer sequence CTCN PAM
gcuuccugaguaucuggaac

SEQ ID NO: 10903 - RNA, 20 nt, Artificial Sequence
  HTT spacer sequence CTCN PAM
ggaagcugaggcaggagaau

SEQ ID NO: 10904 - RNA, 20 nt, Artificial Sequence
  HTT spacer sequence CTCN PAM
acuaaaaauacaaaaauuag

SEQ ID NO: 10905 - RNA, 20 nt, Artificial Sequence
  HTT spacer sequence CTCN PAM
aacuccugaucucaggugau

SEQ ID NO: 10906 - RNA, 20 nt, Artificial Sequence
  HTT spacer sequence CTCN PAM
ugaucucaggugaucugccu

SEQ ID NO: 10907 - RNA, 20 nt, Artificial Sequence
  HTT spacer sequence CTCN PAM
ggugaucugccugccuucgc

SEQ ID NO: 10908 - RNA, 20 nt, Artificial Sequence
  HTT spacer sequence CTCN PAM
caaaaugcugggauuauagg

SEQ ID NO: 10909 - RNA, 20 nt, Artificial Sequence
  HTT spacer sequence CTCN PAM
caccuauaaucccagcauuu

SEQ ID NO: 10910 - RNA, 20 nt, Artificial Sequence
  HTT spacer sequence CTCN PAM
cagccuuaacauaauguuuu

SEQ ID NO: 10911 - RNA, 20 nt, Artificial Sequence
  HTT spacer sequence CTCN PAM
auucaaaaaauacaaagaga

SEQ ID NO: 10912 - RNA, 20 nt, Artificial Sequence
  HTT spacer sequence CTCN PAM
uuguauuuuuugaauggaga

SEQ ID NO: 10913 - RNA, 20 nt, Artificial Sequence
  HTT spacer sequence CTCN PAM
cauuugacuuucucuuugua

SEQ ID NO: 10914 - RNA, 20 nt, Artificial Sequence
  HTT spacer sequence CTCN PAM
ucccauuugacuuucucuuu

SEQ ID NO: 10915 - RNA, 20 nt, Artificial Sequence
  HTT spacer sequence CTCN PAM
guaucauucuugauucuuug

SEQ ID NO: 10916 - RNA, 20 nt, Artificial Sequence
  HTT spacer sequence CTCN PAM
ucgguaucauucuugauucu

SEQ ID NO: 10917 - RNA, 20 nt, Artificial Sequence
  HTT spacer sequence CTCN PAM
gaauacuccucgguaucauu

SEQ ID NO: 10918 - RNA, 20 nt, Artificial Sequence
  HTT spacer sequence CTCN PAM
gaaaacuucucagaauacuc

SEQ ID NO: 10919 - RNA, 20 nt, Artificial Sequence
  HTT spacer sequence CTCN PAM
guagaggcugggaaauggca

SEQ ID NO: 10920 - RNA, 20 nt, Artificial Sequence
  HTT spacer sequence CTCN PAM
acagagccugacuuaccauc

SEQ ID NO: 10921 - RNA, 20 nt, Artificial Sequence
  HTT spacer sequence CTCN PAM
cucauucuaguuguuuucac

SEQ ID NO: 10922 - RNA, 20 nt, Artificial Sequence
  HTT spacer sequence CTCN PAM
uucuaguuguuuucacuggc

SEQ ID NO: 10923 - RNA, 20 nt, Artificial Sequence
  HTT spacer sequence CTCN PAM
caggcccugccccugccccu

SEQ ID NO: 10924 - RNA, 20 nt, Artificial Sequence
  HTT spacer sequence CTCN PAM
cuacugggcugcaggggcag

SEQ ID NO: 10925 - RNA, 20 nt, Artificial Sequence
  HTT spacer sequence CTCN PAM
ugaacacgcguguccucccu

SEQ ID NO: 10926 - RNA, 20 nt, Artificial Sequence
  HTT spacer sequence CTCN PAM
gguccaccugugucuuggcc

SEQ ID NO: 10927 - RNA, 20 nt, Artificial Sequence
  HTT spacer sequence CTCN PAM
cugcugggccaagacacagg

SEQ ID NO: 10928 - RNA, 20 nt, Artificial Sequence
  HTT spacer sequence CTCN PAM
ugaacacacguguccucccu

SEQ ID NO: 10929 - RNA, 20 nt, Artificial Sequence
  HTT spacer sequence CTCN PAM
gguccaccugucuccuggcc

SEQ ID NO: 10930 - RNA, 20 nt, Artificial Sequence
  HTT spacer sequence CTCN PAM
uggcccagcagggaggacac

SEQ ID NO: 10931 - RNA, 20 nt, Artificial Sequence
  HTT spacer sequence CTCN PAM
cugcugggccaggagacagg

SEQ ID NO: 10932 - RNA, 20 nt, Artificial Sequence
  HTT spacer sequence CTCN PAM
ugaacacgcguguccucccu

SEQ ID NO: 10933 - RNA, 20 nt, Artificial Sequence
  HTT spacer sequence CTCN PAM
gguccaccugccuccuggcc

SEQ ID NO: 10934 - RNA, 20 nt, Artificial Sequence
  HTT spacer sequence CTCN PAM
uggcccagcagggaggacac

SEQ ID NO: 10935 - RNA, 20 nt, Artificial Sequence
  HTT spacer sequence CTCN PAM
cugcugggccaggaggcagg

SEQ ID NO: 10936 - RNA, 20 nt, Artificial Sequence
  HTT spacer sequence CTCN PAM
ggaggcucacgucaaccugu

SEQ ID NO: 10937 - RNA, 20 nt, Artificial Sequence
  HTT spacer sequence CTCN PAM
ugagcacauguguccucccu

SEQ ID NO: 10938 - RNA, 20 nt, Artificial Sequence
  HTT spacer sequence CTCN PAM
cgucaaccugucucuuggcc

SEQ ID NO: 10939 - RNA, 20 nt, Artificial Sequence
  HTT spacer sequence CTCN PAM
uggcccagcagggaggacac

SEQ ID NO: 10940 - RNA, 20 nt, Artificial Sequence
  HTT spacer sequence CTCN PAM
cugcugggccaagagacagg

SEQ ID NO: 10941 - RNA, 20 nt, Artificial Sequence
  HTT spacer sequence CTCN PAM
cgucuaccugccuccuuccc

SEQ ID NO: 10942 - RNA, 20 nt, Artificial Sequence
  HTT spacer sequence CTCN PAM
uuccccaugcuccugccacu

SEQ ID NO: 10943 - RNA, 20 nt, Artificial Sequence
  HTT spacer sequence CTCN PAM
ugccacugggauuucaucag

SEQ ID NO: 10944 - RNA, 20 nt, Artificial Sequence
  HTT spacer sequence CTCN PAM
uuuugucugaugaaauccca

SEQ ID NO: 10945 - RNA, 20 nt, Artificial Sequence
  HTT spacer sequence CTCN PAM
cuggcucuuuuugucugaug

SEQ ID NO: 10946 - RNA, 20 nt, Artificial Sequence
  HTT spacer sequence CTCN PAM
aaucaaaacccaauuaaguc

SEQ ID NO: 10947 - RNA, 20 nt, Artificial Sequence
  HTT spacer sequence CTCN PAM
aauaaugcuacugaaaggga

SEQ ID NO: 10948 - RNA, 20 nt, Artificial Sequence
  HTT spacer sequence CTCN PAM
ucccuuucaguagcauuauu

SEQ ID NO: 10949 - RNA, 20 nt, Artificial Sequence
  HTT spacer sequence CTCN PAM
aaauacaugaaagauugguu

SEQ ID NO: 10950 - RNA, 20 nt, Artificial Sequence
  HTT spacer sequence CTCN PAM
gggacuacaaucccuggcag

SEQ ID NO: 10951 - RNA, 20 nt, Artificial Sequence
  HTT spacer sequence CTCN PAM
gaccugagggccuucugugu

SEQ ID NO: 10952 - RNA, 20 nt, Artificial Sequence
  HTT spacer sequence CTCN PAM
ggucagagugucucugggac

SEQ ID NO: 10953 - RNA, 20 nt, Artificial Sequence
  HTT spacer sequence CTCN PAM
gggccuggugcuggacagac

SEQ ID NO: 10954 - RNA, 20 nt, Artificial Sequence
  HTT spacer sequence CTCN PAM
gaggcugacgguggcacccg

SEQ ID NO: 10955 - RNA, 20 nt, Artificial Sequence
  HTT spacer sequence CTCN PAM
gaggcccuuagcacaguuaa

SEQ ID NO: 10956 - RNA, 20 nt, Artificial Sequence
  HTT spacer sequence CTCN PAM
cgggugccaccgucagccuc

SEQ ID NO: 10957 - RNA, 20 nt, Artificial Sequence
  HTT spacer sequence CTCN PAM
uugcugugacucgcgggugc

SEQ ID NO: 10958 - RNA, 20 nt, Artificial Sequence
  HTT spacer sequence CTCN PAM
ucuccuugcugugacucgcg

SEQ ID NO: 10959 - RNA, 20 nt, Artificial Sequence
  HTT spacer sequence CTCN PAM
accgcuuggggcucaucucc

SEQ ID NO: 10960 - RNA, 20 nt, Artificial Sequence
  HTT spacer sequence CTCN PAM
uucugggaccagggaccagg

SEQ ID NO: 10961 - RNA, 20 nt, Artificial Sequence
  HTT spacer sequence CTCN PAM
gggacuggacuguguuacca

SEQ ID NO: 10962 - RNA, 20 nt, Artificial Sequence
  HTT spacer sequence CTCN PAM
cugcccagacacucaaucag

SEQ ID NO: 10963 - RNA, 20 nt, Artificial Sequence
  HTT spacer sequence CTCN PAM
aucagugagggaaacucucu

SEQ ID NO: 10964 - RNA, 20 nt, Artificial Sequence
  HTT spacer sequence CTCN PAM
cugauugagugucugggcag

SEQ ID NO: 10965 - RNA, 20 nt, Artificial Sequence
  HTT spacer sequence CTCN PAM
cuuuguuacuuacuuuaaac

SEQ ID NO: 10966 - RNA, 20 nt, Artificial Sequence
  HTT spacer sequence CTCN PAM
uuguuacuuacuuuaaacca

SEQ ID NO: 10967 - RNA, 20 nt, Artificial Sequence
  HTT spacer sequence CTCN PAM
auaaauccuuguugaaugaa

SEQ ID NO: 10968 - RNA, 20 nt, Artificial Sequence
  HTT spacer sequence CTCN PAM
cuggcagggcggggacuucu

SEQ ID NO: 10969 - RNA, 20 nt, Artificial Sequence
  HTT spacer sequence CTCN PAM
ccacagcccacacgucuaug

SEQ ID NO: 10970 - RNA, 20 nt, Artificial Sequence
  HTT spacer sequence CTCN PAM
ggaggacggggaacugccug

SEQ ID NO: 10971 - RNA, 20 nt, Artificial Sequence
  HTT spacer sequence CTCN PAM
agagugcggguccuccccac

SEQ ID NO: 10972 - RNA, 20 nt, Artificial Sequence
  HTT spacer sequence CTCN PAM
aggcaguuccccguccucca

SEQ ID NO: 10973 - RNA, 20 nt, Artificial Sequence
  HTT spacer sequence CTCN PAM
agggggugagagggggucgg

SEQ ID NO: 10974 - RNA, 20 nt, Artificial Sequence
  HTT spacer sequence CTCN PAM
cccccuagagccugccgccc

SEQ ID NO: 10975 - RNA, 20 nt, Artificial Sequence
  HTT spacer sequence CTCN PAM
cacccccuagagccugccgc

SEQ ID NO: 10976 - RNA, 20 nt, Artificial Sequence
  HTT spacer sequence CTCN PAM
gcccagcaggccgacccccu

SEQ ID NO: 10977 - RNA, 20 nt, Artificial Sequence
  HTT spacer sequence CTCN PAM
gucugcucugcccagcaggc

SEQ ID NO: 10978 - RNA, 20 nt, Artificial Sequence
  HTT spacer sequence CTCN PAM
ugccagcagccugccacugu

SEQ ID NO: 10979 - RNA, 20 nt, Artificial Sequence
  HTT spacer sequence CTCN PAM
ugcucuugccagcagccugc

SEQ ID NO: 10980 - RNA, 20 nt, Artificial Sequence
  HTT spacer sequence CTCN PAM
aacccccuccugcucuugcc

SEQ ID NO: 10981 - RNA, 20 nt, Artificial Sequence
  HTT spacer sequence CTCN PAM
gucccgucccccucuaaccc

SEQ ID NO: 10982 - RNA, 20 nt, Artificial Sequence
  HTT spacer sequence CTCN PAM
cugucccgucccccucuaac

SEQ ID NO: 10983 - RNA, 20 nt, Artificial Sequence
  HTT spacer sequence CTCN PAM
aggcuugacaaugaugacaa

SEQ ID NO: 10984 - RNA, 20 nt, Artificial Sequence
  HTT spacer sequence CTCN PAM
gauggccaugaagccaucgc

SEQ ID NO: 10985 - RNA, 20 nt, Artificial Sequence
  HTT spacer sequence CTCN PAM
gugaagagugaugugaugag

SEQ ID NO: 10986 - RNA, 20 nt, Artificial Sequence
  HTT spacer sequence CTCN PAM
ucacagagcccugcgauggc

SEQ ID NO: 10987 - RNA, 20 nt, Artificial Sequence
  HTT spacer sequence CTCN PAM
ucacaucacucuucacagag

SEQ ID NO: 10988 - RNA, 20 nt, Artificial Sequence
  HTT spacer sequence CTCN PAM
caguggccggcaagcccagu

SEQ ID NO: 10989 - RNA, 20 nt, Artificial Sequence
  HTT spacer sequence CTCN PAM
cccaguggccggcaagccca

SEQ ID NO: 10990 - RNA, 20 nt, Artificial Sequence
  HTT spacer sequence CTCN PAM
cuguccauucauucucuccc

SEQ ID NO: 10991 - RNA, 20 nt, Artificial Sequence
  HTT spacer sequence CTCN PAM
ucccuguccauucauucucu

SEQ ID NO: 10992 - RNA, 20 nt, Artificial Sequence
  HTT spacer sequence CTCN PAM
ccugaaucgcugcaaagccc

SEQ ID NO: 10993 - RNA, 20 nt, Artificial Sequence
  HTT spacer sequence CTCN PAM
caccugaaucgcugcaaagc

SEQ ID NO: 10994 - RNA, 20 nt, Artificial Sequence
  HTT spacer sequence CTCN PAM
gugauggcagagcaggugug

SEQ ID NO: 10995 - RNA, 20 nt, Artificial Sequence
  HTT spacer sequence CTCN PAM
gccaucaccgaggucugcgu

SEQ ID NO: 10996 - RNA, 20 nt, Artificial Sequence
  HTT spacer sequence CTCN PAM
caccugcucugccaucaccg

SEQ ID NO: 10997 - RNA, 20 nt, Artificial Sequence
  HTT spacer sequence CTCN PAM
accaccugccuucaggaucc

SEQ ID NO: 10998 - RNA, 20 nt, Artificial Sequence
  HTT spacer sequence CTCN PAM
aagaugggcuggagggaagg

SEQ ID NO: 10999 - RNA, 20 nt, Artificial Sequence
  HTT spacer sequence CTCN PAM
agcccaucuuggagucagcc

SEQ ID NO: 11000 - RNA, 20 nt, Artificial Sequence
  HTT spacer sequence CTCN PAM
cuggagccaaguccuugcag

SEQ ID NO: 11001 - RNA, 20 nt, Artificial Sequence
  HTT spacer sequence CTCN PAM
agcgagugcccccuucccuc

SEQ ID NO: 11002 - RNA, 20 nt, Artificial Sequence
  HTT spacer sequence CTCN PAM
ccacugcaaggacuuggcuc

SEQ ID NO: 11003 - RNA, 20 nt, Artificial Sequence
  HTT spacer sequence CTCN PAM
ccgugcgcuggcugcugucc

SEQ ID NO: 11004 - RNA, 20 nt, Artificial Sequence
  HTT spacer sequence CTCN PAM
agugaccggagaggaggcag

SEQ ID NO: 11005 - RNA, 20 nt, Artificial Sequence
  HTT spacer sequence CTCN PAM
ggucacuggaggaacugccc

SEQ ID NO: 11006 - RNA, 20 nt, Artificial Sequence
  HTT spacer sequence CTCN PAM
ccggucacuggaggaacugc

SEQ ID NO: 11007 - RNA, 20 nt, Artificial Sequence
  HTT spacer sequence CTCN PAM
ucuccggucacuggaggaac

SEQ ID NO: 11008 - RNA, 20 nt, Artificial Sequence
  HTT spacer sequence CTCN PAM
gccuccucuccggucacugg

SEQ ID NO: 11009 - RNA, 20 nt, Artificial Sequence
  HTT spacer sequence CTCN PAM
ccagcugugcugcacuggcc

SEQ ID NO: 11010 - RNA, 20 nt, Artificial Sequence
  HTT spacer sequence CTCN PAM
cgucuccccagcugugcugc

SEQ ID NO: 11011 - RNA, 20 nt, Artificial Sequence
  HTT spacer sequence CTCN PAM
uauggagcuucuuuuucuca

SEQ ID NO: 11012 - RNA, 20 nt, Artificial Sequence
  HTT spacer sequence CTCN PAM
auaagagaccguucacagcc

SEQ ID NO: 11013 - RNA, 20 nt, Artificial Sequence
  HTT spacer sequence CTCN PAM
gauggucagccccuaguggg

SEQ ID NO: 11014 - RNA, 20 nt, Artificial Sequence
  HTT spacer sequence CTCN PAM
ccacuaggggcugaccaucu

SEQ ID NO: 11015 - RNA, 20 nt, Artificial Sequence
  HTT spacer sequence CTCN PAM
caccuuugcuccccacuagg

SEQ ID NO: 11016 - RNA, 20 nt, Artificial Sequence
  HTT spacer sequence CTCN PAM
caccugccucccaccuuugc

SEQ ID NO: 11017 - RNA, 20 nt, Artificial Sequence
  HTT spacer sequence CTCN PAM
ccuuuccucacaccugccuc

SEQ ID NO: 11018 - RNA, 20 nt, Artificial Sequence
  HTT spacer sequence CTCN PAM
acagcaucaagagcccaugc

SEQ ID NO: 11019 - RNA, 20 nt, Artificial Sequence
  HTT spacer sequence CTCN PAM
ugaugcuguugaggaaaccc

SEQ ID NO: 11020 - RNA, 20 nt, Artificial Sequence
  HTT spacer sequence CTCN PAM
cuucagguccgcaugggcuc

SEQ ID NO: 11021 - RNA, 20 nt, Artificial Sequence
  HTT spacer sequence CTCN PAM
ccucccuucagguccgcaug

SEQ ID NO: 11022 - RNA, 20 nt, Artificial Sequence
  HTT spacer sequence CTCN PAM
gagccagcagggagcugcac

SEQ ID NO: 11023 - RNA, 20 nt, Artificial Sequence
  HTT spacer sequence CTCN PAM
gagccugcaccguccaggug

SEQ ID NO: 11024 - RNA, 20 nt, Artificial Sequence
  HTT spacer sequence CTCN PAM
cugcuggcucugagccugca

SEQ ID NO: 11025 - RNA, 20 nt, Artificial Sequence
  HTT spacer sequence CTCN PAM
cccagcucugguuuguccag

SEQ ID NO: 11026 - RNA, 20 nt, Artificial Sequence
  HTT spacer sequence CTCN PAM
gguuuguccagcagcuagag

SEQ ID NO: 11027 - RNA, 20 nt, Artificial Sequence
  HTT spacer sequence CTCN PAM
agcugcuggacaaaccagag

SEQ ID NO: 11028 - RNA, 20 nt, Artificial Sequence
  HTT spacer sequence CTCN PAM
cuagcugcuggacaaaccag

SEQ ID NO: 11029 - RNA, 20 nt, Artificial Sequence
  HTT spacer sequence CTCN PAM
cucuagcugcuggacaaacc

SEQ ID NO: 11030 - RNA, 20 nt, Artificial Sequence
  HTT spacer sequence CTCN PAM
ccggccucucucuagcugcu

SEQ ID NO: 11031 - RNA, 20 nt, Artificial Sequence
  HTT spacer sequence CTCN PAM
cuggcaugcagcccagcucc

SEQ ID NO: 11032 - RNA, 20 nt, Artificial Sequence
  HTT spacer sequence CTCN PAM
agucacucccuggcaugcag

SEQ ID NO: 11033 - RNA, 20 nt, Artificial Sequence
  HTT spacer sequence CTCN PAM
acgcuggcuccaguggacga

SEQ ID NO: 11034 - RNA, 20 nt, Artificial Sequence
  HTT spacer sequence CTCN PAM
aguggacgaggaaauggaca

SEQ ID NO: 11035 - RNA, 20 nt, Artificial Sequence
  HTT spacer sequence CTCN PAM
uccacuggagccagcgucga

SEQ ID NO: 11036 - RNA, 20 nt, Artificial Sequence
  HTT spacer sequence CTCN PAM
caacuuggaccaugcuuugc

SEQ ID NO: 11037 - RNA, 20 nt, Artificial Sequence
  HTT spacer sequence CTCN PAM
aggccagaguuagaaagaug

SEQ ID NO: 11038 - RNA, 20 nt, Artificial Sequence
  HTT spacer sequence CTCN PAM
ggccuggagguguauggacu

SEQ ID NO: 11039 - RNA, 20 nt, Artificial Sequence
  HTT spacer sequence CTCN PAM
ucuuucuaacucuggccugg

SEQ ID NO: 11040 - RNA, 20 nt, Artificial Sequence
  HTT spacer sequence CTCN PAM
caucuuucuaacucuggccu

SEQ ID NO: 11041 - RNA, 20 nt, Artificial Sequence
  HTT spacer sequence CTCN PAM
gagaggaagcugcuuggagu

SEQ ID NO: 11042 - RNA, 20 nt, Artificial Sequence
  HTT spacer sequence CTCN PAM
gagcgucccucucaucuuuc

SEQ ID NO: 11043 - RNA, 20 nt, Artificial Sequence
  HTT spacer sequence CTCN PAM
cugagcgucccucucaucuu

SEQ ID NO: 11044 - RNA, 20 nt, Artificial Sequence
  HTT spacer sequence CTCN PAM
aagcagcuuccucucugagc

SEQ ID NO: 11045 - RNA, 20 nt, Artificial Sequence
  HTT spacer sequence CTCN PAM
acuccaagcagcuuccucuc

SEQ ID NO: 11046 - RNA, 20 nt, Artificial Sequence
  HTT spacer sequence CTCN PAM
gucagcuccacuccaagcag

SEQ ID NO: 11047 - RNA, 20 nt, Artificial Sequence
  HTT spacer sequence CTCN PAM
uggccagcaagcacucuguc

SEQ ID NO: 11048 - RNA, 20 nt, Artificial Sequence
  HTT spacer sequence CTCN PAM
cuggucacaccccagacucu

SEQ ID NO: 11049 - RNA, 20 nt, Artificial Sequence
  HTT spacer sequence CTCN PAM
cccuggucacaccccagacu

SEQ ID NO: 11050 - RNA, 20 nt, Artificial Sequence
  HTT spacer sequence CTCN PAM
cucccuggucacaccccaga

SEQ ID NO: 11051 - RNA, 20 nt, Artificial Sequence
  HTT spacer sequence CTCN PAM
auccccccagugacccccag

SEQ ID NO: 11052 - RNA, 20 nt, Artificial Sequence
  HTT spacer sequence CTCN PAM
agugacuucauccuccaucc

SEQ ID NO: 11053 - RNA, 20 nt, Artificial Sequence
  HTT spacer sequence CTCN PAM
ucuccagugacuucauccuc

SEQ ID NO: 11054 - RNA, 20 nt, Artificial Sequence
  HTT spacer sequence CTCN PAM
agccacugccagcccauguc

SEQ ID NO: 11055 - RNA, 20 nt, Artificial Sequence
  HTT spacer sequence CTCN PAM
ccagccacugccagcccaug

SEQ ID NO: 11056 - RNA, 20 nt, Artificial Sequence
  HTT spacer sequence CTCN PAM
ucuccagccacugccagccc

SEQ ID NO: 11057 - RNA, 20 nt, Artificial Sequence
  HTT spacer sequence CTCN PAM
uccuggagccaggggucagc

SEQ ID NO: 11058 - RNA, 20 nt, Artificial Sequence
  HTT spacer sequence CTCN PAM
aggacgagccuguagcaccc

SEQ ID NO: 11059 - RNA, 20 nt, Artificial Sequence
  HTT spacer sequence CTCN PAM
aggcugaccccuggcuccag

SEQ ID NO: 11060 - RNA, 20 nt, Artificial Sequence
  HTT spacer sequence CTCN PAM
cggcuaccucacucugcuua

SEQ ID NO: 11061 - RNA, 20 nt, Artificial Sequence
  HTT spacer sequence CTCN PAM
cucugcuuagagcugacugu

SEQ ID NO: 11062 - RNA, 20 nt, Artificial Sequence
  HTT spacer sequence CTCN PAM
gcuuagagcugacuguuaaa

SEQ ID NO: 11063 - RNA, 20 nt, Artificial Sequence
  HTT spacer sequence CTCN PAM
aagcagagugagguagccgg

SEQ ID NO: 11064 - RNA, 20 nt, Artificial Sequence
  HTT spacer sequence CTCN PAM
auuauuuaacagucagcucu

SEQ ID NO: 11065 - RNA, 20 nt, Artificial Sequence
  HTT spacer sequence CTCN PAM
cacaggacacugacagggcu

SEQ ID NO: 11066 - RNA, 20 nt, Artificial Sequence
  HTT spacer sequence CTCN PAM
auuucugguacauauuuaua

SEQ ID NO: 11067 - RNA, 20 nt, Artificial Sequence
  HTT spacer sequence CTCN PAM
uaggggcagacuccauuucu

SEQ ID NO: 11068 - RNA, 20 nt, Artificial Sequence
  HTT spacer sequence CTCN PAM
caguuuaauguuaggccuaa

SEQ ID NO: 11069 - RNA, 20 nt, Artificial Sequence
  HTT spacer sequence CTCN PAM
ugcuauaaucccagcacuuu

SEQ ID NO: 11070 - RNA, 20 nt, Artificial Sequence
  HTT spacer sequence CTCN PAM
caaagugcugggauuauagc

SEQ ID NO: 11071 - RNA, 20 nt, Artificial Sequence
  HTT spacer sequence CTCN PAM
ugauccaccugccuugaccu

SEQ ID NO: 11072 - RNA, 20 nt, Artificial Sequence
  HTT spacer sequence CTCN PAM
ugaccucaugauccaccugc

SEQ ID NO: 11073 - RNA, 20 nt, Artificial Sequence
  HTT spacer sequence CTCN PAM
aacuccugaccucaugaucc

SEQ ID NO: 11074 - RNA, 20 nt, Artificial Sequence
  HTT spacer sequence CTCN PAM
acuaaaaaaaaaauuagcca

SEQ ID NO: 11075 - RNA, 20 nt, Artificial Sequence
  HTT spacer sequence CTCN PAM
gaaggcugugccacugcacu

SEQ ID NO: 11076 - RNA, 20 nt, Artificial Sequence
  HTT spacer sequence CTCN PAM
agccuggcgacagagcauga

SEQ ID NO: 11077 - RNA, 20 nt, Artificial Sequence
  HTT spacer sequence CTCN PAM
gucgccaggcuggagugcag

SEQ ID NO: 11078 - RNA, 20 nt, Artificial Sequence
  HTT spacer sequence CTCN PAM
gucucaaaaaagaaaaaaga

SEQ ID NO: 11079 - RNA, 20 nt, Artificial Sequence
  HTT spacer sequence CTCN PAM
aaaaagaaaaaagaaaagaa

SEQ ID NO: 11080 - RNA, 20 nt, Artificial Sequence
  HTT spacer sequence CTCN PAM
gggaggggaagaaaaauaaa

SEQ ID NO: 11081 - RNA, 20 nt, Artificial Sequence
  HTT spacer sequence CTCN PAM
ccgagccuagcagaacaagu

SEQ ID NO: 11082 - RNA, 20 nt, Artificial Sequence
  HTT spacer sequence CTCN PAM
ggggcuuucaagaugaaauc

SEQ ID NO: 11083 - RNA, 20 nt, Artificial Sequence
  HTT spacer sequence CTCN PAM
aacaccacggauuucaucuu

SEQ ID NO: 11084 - RNA, 20 nt, Artificial Sequence
  HTT spacer sequence CTCN PAM
uuucccagcaccuccaacac

SEQ ID NO: 11085 - RNA, 20 nt, Artificial Sequence
  HTT spacer sequence CTCN PAM
gacaccuccuuucccagcac

SEQ ID NO: 11086 - RNA, 20 nt, Artificial Sequence
  HTT spacer sequence CTCN PAM
cucagacaccuccuuuccca

SEQ ID NO: 11087 - RNA, 20 nt, Artificial Sequence
  HTT spacer sequence CTCN PAM
gugugagaagcucuagcuuu

SEQ ID NO: 11088 - RNA, 20 nt, Artificial Sequence
  HTT spacer sequence CTCN PAM
cacagagcccucacucagac

SEQ ID NO: 11089 - RNA, 20 nt, Artificial Sequence
  HTT spacer sequence CTCN PAM
agcuuugaaguuagggccag

SEQ ID NO: 11090 - RNA, 20 nt, Artificial Sequence
  HTT spacer sequence CTCN PAM
ccuggcccuaacuucaaagc

SEQ ID NO: 11091 - RNA, 20 nt, Artificial Sequence
  HTT spacer sequence CTCN PAM
gcucccauuacaggaucauc

SEQ ID NO: 11092 - RNA, 20 nt, Artificial Sequence
  HTT spacer sequence CTCN PAM
cauuacaggaucaucucucc

SEQ ID NO: 11093 - RNA, 20 nt, Artificial Sequence
  HTT spacer sequence CTCN PAM
cccagcucaguuucucauuu

SEQ ID NO: 11094 - RNA, 20 nt, Artificial Sequence
  HTT spacer sequence CTCN PAM
cagcucaguuucucauuuau

SEQ ID NO: 11095 - RNA, 20 nt, Artificial Sequence
  HTT spacer sequence CTCN PAM
guuucucauuuaugaaaugu

SEQ ID NO: 11096 - RNA, 20 nt, Artificial Sequence
  HTT spacer sequence CTCN PAM
uuuaugaaauguagaugaga

SEQ ID NO: 11097 - RNA, 20 nt, Artificial Sequence
  HTT spacer sequence CTCN PAM
ucuacauuucauaaaugaga

SEQ ID NO: 11098 - RNA, 20 nt, Artificial Sequence
  HTT spacer sequence CTCN PAM
caucuacauuucauaaauga

SEQ ID NO: 11099 - RNA, 20 nt, Artificial Sequence
  HTT spacer sequence CTCN PAM
uacuuuauaggauuguuggg

SEQ ID NO: 11100 - RNA, 20 nt, Artificial Sequence
  HTT spacer sequence CTCN PAM
caacaauccuauaaaguaag

SEQ ID NO: 11101 - RNA, 20 nt, Artificial Sequence
  HTT spacer sequence CTCN PAM
auaauuacuaagaggagaaa

SEQ ID NO: 11102 - RNA, 20 nt, Artificial Sequence
  HTT spacer sequence CTCN PAM
uaguaauuauggaggauuau

SEQ ID NO: 11103 - RNA, 20 nt, Artificial Sequence
  HTT spacer sequence CTCN PAM
ucuuaguaauuauggaggau

SEQ ID NO: 11104 - RNA, 20 nt, Artificial Sequence
  HTT spacer sequence CTCN PAM
gguccagcugccagcaguug

SEQ ID NO: 11105 - RNA, 20 nt, Artificial Sequence
  HTT spacer sequence CTCN PAM
ccucugcucugugcugccug

SEQ ID NO: 11106 - RNA, 20 nt, Artificial Sequence
  HTT spacer sequence CTCN PAM
ucugcucugugcugccuggu

SEQ ID NO: 11107 - RNA, 20 nt, Artificial Sequence
  HTT spacer sequence CTCN PAM
gcucugugcugccuggucag

SEQ ID NO: 11108 - RNA, 20 nt, Artificial Sequence
  HTT spacer sequence CTCN PAM
gugcugccuggucaggccau

SEQ ID NO: 11109 - RNA, 20 nt, Artificial Sequence
  HTT spacer sequence CTCN PAM
gucuaagggauucugucaua

SEQ ID NO: 11110 - RNA, 20 nt, Artificial Sequence
  HTT spacer sequence CTCN PAM
gucaggaggcuggaaguccu

SEQ ID NO: 11111 - RNA, 20 nt, Artificial Sequence
  HTT spacer sequence CTCN PAM
ugacugagaaaauaaacuuc

SEQ ID NO: 11112 - RNA, 20 nt, Artificial Sequence
  HTT spacer sequence CTCN PAM
ccaacaccaaaucugcaggc

SEQ ID NO: 11113 - RNA, 20 nt, Artificial Sequence
  HTT spacer sequence CTCN PAM
cugcuucaaagauggagccu

SEQ ID NO: 11114 - RNA, 20 nt, Artificial Sequence
  HTT spacer sequence CTCN PAM
gcuucaaagauggagccuug

SEQ ID NO: 11115 - RNA, 20 nt, Artificial Sequence
  HTT spacer sequence CTCN PAM
aucuuugaagcagagagcag

SEQ ID NO: 11116 - RNA, 20 nt, Artificial Sequence
  HTT spacer sequence CTCN PAM
agccaaggcuccaucuuuga

SEQ ID NO: 11117 - RNA, 20 nt, Artificial Sequence
  HTT spacer sequence CTCN PAM
uaccuauaaucuuagcacuu

SEQ ID NO: 11118 - RNA, 20 nt, Artificial Sequence
  HTT spacer sequence CTCN PAM
caaagugcuaagauuauagg

SEQ ID NO: 11119 - RNA, 20 nt, Artificial Sequence
  HTT spacer sequence CTCN PAM
gccucccaaagugcuaagau

SEQ ID NO: 11120 - RNA, 20 nt, Artificial Sequence
  HTT spacer sequence CTCN PAM
caccucagccucccaaagug

SEQ ID NO: 11121 - RNA, 20 nt, Artificial Sequence
  HTT spacer sequence CTCN PAM
agugauccucccaccucagc

SEQ ID NO: 11122 - RNA, 20 nt, Artificial Sequence
  HTT spacer sequence CTCN PAM
uuggcucaagugauccuccc

SEQ ID NO: 11123 - RNA, 20 nt, Artificial Sequence
  HTT spacer sequence CTCN PAM
agcuccuuggcucaagugau

SEQ ID NO: 11124 - RNA, 20 nt, Artificial Sequence
  HTT spacer sequence CTCN PAM
cuguguuacccaggcugguc

SEQ ID NO: 11125 - RNA, 20 nt, Artificial Sequence
  HTT spacer sequence CTCN PAM
aucuuucuuucuuuucuuuu

SEQ ID NO: 11126 - RNA, 20 nt, Artificial Sequence
  HTT spacer sequence CTCN PAM
cugcacccucacagggcaga

SEQ ID NO: 11127 - RNA, 20 nt, Artificial Sequence
  HTT spacer sequence CTCN PAM
cagggcagaggacaaaccag

SEQ ID NO: 11128 - RNA, 20 nt, Artificial Sequence
  HTT spacer sequence CTCN PAM
gcccugugagggugcaguga

SEQ ID NO: 11129 - RNA, 20 nt, Artificial Sequence
  HTT spacer sequence CTCN PAM
cuggggccccuuuucuaaug

SEQ ID NO: 11130 - RNA, 20 nt, Artificial Sequence
  HTT spacer sequence CTCN PAM
ugaaugggauuccugccauu

SEQ ID NO: 11131 - RNA, 20 nt, Artificial Sequence
  HTT spacer sequence CTCN PAM
gcccucgugaaugggauucc

SEQ ID NO: 11132 - RNA, 20 nt, Artificial Sequence
  HTT spacer sequence CTCN PAM
ucaccuccagaaggucccac

SEQ ID NO: 11133 - RNA, 20 nt, Artificial Sequence
  HTT spacer sequence CTCN PAM
agaaggucccaccucucaau

SEQ ID NO: 11134 - RNA, 20 nt, Artificial Sequence
  HTT spacer sequence CTCN PAM
caauacuauugcauugggga

SEQ ID NO: 11135 - RNA, 20 nt, Artificial Sequence
  HTT spacer sequence CTCN PAM
auacuauugcauuggggauu

SEQ ID NO: 11136 - RNA, 20 nt, Artificial Sequence
  HTT spacer sequence CTCN PAM
gaauguguguaucccccaca

SEQ ID NO: 11137 - RNA, 20 nt, Artificial Sequence
  HTT spacer sequence CTCN PAM
augggaguggaguaugcugg

SEQ ID NO: 11138 - RNA, 20 nt, Artificial Sequence
  HTT spacer sequence CTCN PAM
caucgagggccaggaugcuc

SEQ ID NO: 11139 - RNA, 20 nt, Artificial Sequence
  HTT spacer sequence CTCN PAM
acucccaucgagggccagga

SEQ ID NO: 11140 - RNA, 20 nt, Artificial Sequence
  HTT spacer sequence CTCN PAM
accauggggcuguggagucc

SEQ ID NO: 11141 - RNA, 20 nt, Artificial Sequence
  HTT spacer sequence CTCN PAM
acagccccaugguugagcuu

SEQ ID NO: 11142 - RNA, 20 nt, Artificial Sequence
  HTT spacer sequence CTCN PAM
gggacuccacagccccaugg

SEQ ID NO: 11143 - RNA, 20 nt, Artificial Sequence
  HTT spacer sequence CTCN PAM
aagaaacaacaacaaauaaa

SEQ ID NO: 11144 - RNA, 20 nt, Artificial Sequence
  HTT spacer sequence CTCN PAM
gucucaaagaaacaacaaca

SEQ ID NO: 11145 - RNA, 20 nt, Artificial Sequence
  HTT spacer sequence CTCN PAM
agaaacagaucuggcccagg

SEQ ID NO: 11146 - RNA, 20 nt, Artificial Sequence
  HTT spacer sequence CTCN PAM
aaccugggccagaucuguuu

SEQ ID NO: 11147 - RNA, 20 nt, Artificial Sequence
  HTT spacer sequence CTCN PAM
gcucacugcagcaucugccu

SEQ ID NO: 11148 - RNA, 20 nt, Artificial Sequence
  HTT spacer sequence CTCN PAM
cugcagcaucugccucccgg

SEQ ID NO: 11149 - RNA, 20 nt, Artificial Sequence
  HTT spacer sequence CTCN PAM
cggguucaagggauucuccu

SEQ ID NO: 11150 - RNA, 20 nt, Artificial Sequence
  HTT spacer sequence CTCN PAM
ugccucaggcuccugaguag

SEQ ID NO: 11151 - RNA, 20 nt, Artificial Sequence
  HTT spacer sequence CTCN PAM
ggcuccugaguagcugggac

SEQ ID NO: 11152 - RNA, 20 nt, Artificial Sequence
  HTT spacer sequence CTCN PAM
ugaguagcugggacuacagg

SEQ ID NO: 11153 - RNA, 20 nt, Artificial Sequence
  HTT spacer sequence CTCN PAM
ggagccugaggcaggagaau

SEQ ID NO: 11154 - RNA, 20 nt, Artificial Sequence
  HTT spacer sequence CTCN PAM
acuaaaaauacaaaaauuag

SEQ ID NO: 11155 - RNA, 20 nt, Artificial Sequence
  HTT spacer sequence CTCN PAM
ugaccucgugauccacccac

SEQ ID NO: 11156 - RNA, 20 nt, Artificial Sequence
  HTT spacer sequence CTCN PAM
ugauccacccaccucggccu

SEQ ID NO: 11157 - RNA, 20 nt, Artificial Sequence
  HTT spacer sequence CTCN PAM
gccucccaaaaugcugggau

SEQ ID NO: 11158 - RNA, 20 nt, Artificial Sequence
  HTT spacer sequence CTCN PAM
caaaaugcugggauuacggg

SEQ ID NO: 11159 - RNA, 20 nt, Artificial Sequence
  HTT spacer sequence CTCN PAM
ugcccguaaucccagcauuu

SEQ ID NO: 11160 - RNA, 20 nt, Artificial Sequence
  HTT spacer sequence CTCN PAM
augcguuuauucuuugcaug

SEQ ID NO: 11161 - RNA, 20 nt, Artificial Sequence
  HTT spacer sequence CTCN PAM
guaacaguugcucaaugcgu

SEQ ID NO: 11162 - RNA, 20 nt, Artificial Sequence
  HTT spacer sequence CTCN PAM
ggcuaggugcugggguauca

SEQ ID NO: 11163 - RNA, 20 nt, Artificial Sequence
  HTT spacer sequence CTCN PAM
ggcccacugugauaccccag

SEQ ID NO: 11164 - RNA, 20 nt, Artificial Sequence
  HTT spacer sequence CTCN PAM
aagcuuccugaagcuaaggc

SEQ ID NO: 11165 - RNA, 20 nt, Artificial Sequence
  HTT spacer sequence CTCN PAM
uucucagcaagaaauacuug

SEQ ID NO: 11166 - RNA, 20 nt, Artificial Sequence
  HTT spacer sequence CTCN PAM
gcaagaaauacuugucaucg

SEQ ID NO: 11167 - RNA, 20 nt, Artificial Sequence
  HTT spacer sequence CTCN PAM
augacaaguauuucuugcug

SEQ ID NO: 11168 - RNA, 20 nt, Artificial Sequence
  HTT spacer sequence CTCN PAM
ucgaugacaaguauuucuug

SEQ ID NO: 11169 - RNA, 20 nt, Artificial Sequence
  HTT spacer sequence CTCN PAM
ccucgaugacaaguauuucu

SEQ ID NO: 11170 - RNA, 20 nt, Artificial Sequence
  HTT spacer sequence CTCN PAM
accucuccucgaugacaagu

SEQ ID NO: 11171 - RNA, 20 nt, Artificial Sequence
  HTT spacer sequence CTCN PAM
ggcuguggcaaaaaaauuug

SEQ ID NO: 11172 - RNA, 20 nt, Artificial Sequence
  HTT spacer sequence CTCN PAM
ccaaauuuuuuugccacagc

SEQ ID NO: 11173 - RNA, 20 nt, Artificial Sequence
  HTT spacer sequence CTCN PAM
ugcuaaauucuucagguuuu

SEQ ID NO: 11174 - RNA, 20 nt, Artificial Sequence
  HTT spacer sequence CTCN PAM
ucggcuugcugacuccugcu

SEQ ID NO: 11175 - RNA, 20 nt, Artificial Sequence
  HTT spacer sequence CTCN PAM
agggcugugucuacaaagcu

SEQ ID NO: 11176 - RNA, 20 nt, Artificial Sequence
  HTT spacer sequence CTCN PAM
uugcugggcugugccugcuc

SEQ ID NO: 11177 - RNA, 20 nt, Artificial Sequence
  HTT spacer sequence CTCN PAM
gcuccuugcugggcugugcc

SEQ ID NO: 11178 - RNA, 20 nt, Artificial Sequence
  HTT spacer sequence CTCN PAM
cagcuccuugcugggcugug

SEQ ID NO: 11179 - RNA, 20 nt, Artificial Sequence
  HTT spacer sequence CTCN PAM
caccgcucucagcuccuugc

SEQ ID NO: 11180 - RNA, 20 nt, Artificial Sequence
  HTT spacer sequence CTCN PAM
aagucccaaagaccagaaag

SEQ ID NO: 11181 - RNA, 20 nt, Artificial Sequence
  HTT spacer sequence CTCN PAM
gccgcuauaguggaaaaggg

SEQ ID NO: 11182 - RNA, 20 nt, Artificial Sequence
  HTT spacer sequence CTCN PAM
aaagcaacacaugaaagacc

SEQ ID NO: 11183 - RNA, 20 nt, Artificial Sequence
  HTT spacer sequence CTCN PAM
ucaaucagaaaaagcagggc

SEQ ID NO: 11184 - RNA, 20 nt, Artificial Sequence
  HTT spacer sequence CTCN PAM
gcaauucucaucaaucagaa

SEQ ID NO: 11185 - RNA, 20 nt, Artificial Sequence
  HTT spacer sequence CTCN PAM
cauacauauuuaccaucauc

SEQ ID NO: 11186 - RNA, 20 nt, Artificial Sequence
  HTT spacer sequence CTCN PAM
uuagaaaguauuccucacau

SEQ ID NO: 11187 - RNA, 20 nt, Artificial Sequence
  HTT spacer sequence CTCN PAM
aaauaucuucuuaauauuuu

SEQ ID NO: 11188 - RNA, 20 nt, Artificial Sequence
  HTT spacer sequence CTCN PAM
uucucaaaauaucuucuuaa

SEQ ID NO: 11189 - RNA, 20 nt, Artificial Sequence
  HTT spacer sequence CTCN PAM
ucugagguccuuagugguau

SEQ ID NO: 11190 - RNA, 20 nt, Artificial Sequence
  HTT spacer sequence CTCN PAM
gaugaggcaaccacuuagca

SEQ ID NO: 11191 - RNA, 20 nt, Artificial Sequence
  HTT spacer sequence CTCN PAM
uuaaaaauccccacauuuuu

SEQ ID NO: 11192 - RNA, 20 nt, Artificial Sequence
  HTT spacer sequence CTCN PAM
aaggcgaaaccuucgccccc

SEQ ID NO: 11193 - RNA, 20 nt, Artificial Sequence
  HTT spacer sequence CTCN PAM
uuugugaagugucauauaau

SEQ ID NO: 11194 - RNA, 20 nt, Artificial Sequence
  HTT spacer sequence CTCN PAM
uuaaauuauaugacacuuca

SEQ ID NO: 11195 - RNA, 20 nt, Artificial Sequence
  HTT spacer sequence CTCN PAM
gacuuuacucauuaaauuau

SEQ ID NO: 11196 - RNA, 20 nt, Artificial Sequence
  HTT spacer sequence CTCN PAM
ggaacucagacuuuacucau

SEQ ID NO: 11197 - RNA, 20 nt, Artificial Sequence
  HTT spacer sequence CTCN PAM
cgacuguaaucccagcacuu

SEQ ID NO: 11198 - RNA, 20 nt, Artificial Sequence
  HTT spacer sequence CTCN PAM
caaagugcugggauuacagu

SEQ ID NO: 11199 - RNA, 20 nt, Artificial Sequence
  HTT spacer sequence CTCN PAM
accucccaaagugcugggau

SEQ ID NO: 11200 - RNA, 20 nt, Artificial Sequence
  HTT spacer sequence CTCN PAM
ugauccacccgccucgaccu

SEQ ID NO: 11201 - RNA, 20 nt, Artificial Sequence
  HTT spacer sequence CTCN PAM
ugaccucgugauccacccgc

SEQ ID NO: 11202 - RNA, 20 nt, Artificial Sequence
  HTT spacer sequence CTCN PAM
aucuccugaccucgugaucc

SEQ ID NO: 11203 - RNA, 20 nt, Artificial Sequence
  HTT spacer sequence CTCN PAM
acuaaaaauacaaaaaauua

SEQ ID NO: 11204 - RNA, 20 nt, Artificial Sequence
  HTT spacer sequence CTCN PAM
ggaggcugaggcaggagaau

SEQ ID NO: 11205 - RNA, 20 nt, Artificial Sequence
  HTT spacer sequence CTCN PAM
cgaguagcugggacuauggg

SEQ ID NO: 11206 - RNA, 20 nt, Artificial Sequence
  HTT spacer sequence CTCN PAM
gccucccgaguagcugggac

SEQ ID NO: 11207 - RNA, 20 nt, Artificial Sequence
  HTT spacer sequence CTCN PAM
ugccucagccucccgaguag

SEQ ID NO: 11208 - RNA, 20 nt, Artificial Sequence
  HTT spacer sequence CTCN PAM
cggguucacgccauucuccu

SEQ ID NO: 11209 - RNA, 20 nt, Artificial Sequence
  HTT spacer sequence CTCN PAM
gccucccggguucacgccau

SEQ ID NO: 11210 - RNA, 20 nt, Artificial Sequence
  HTT spacer sequence CTCN PAM
cugcaagcucagccucccgg

SEQ ID NO: 11211 - RNA, 20 nt, Artificial Sequence
  HTT spacer sequence CTCN PAM
gcucacugcaagcucagccu

SEQ ID NO: 11212 - RNA, 20 nt, Artificial Sequence
  HTT spacer sequence CTCN PAM
agccugggugacagaacgag

SEQ ID NO: 11213 - RNA, 20 nt, Artificial Sequence
  HTT spacer sequence CTCN PAM
uucugucacccaggcuggag

SEQ ID NO: 11214 - RNA, 20 nt, Artificial Sequence
  HTT spacer sequence CTCN PAM
aucucaaaaaaagaaaaaaa

SEQ ID NO: 11215 - RNA, 20 nt, Artificial Sequence
  HTT spacer sequence CTCN PAM
aaaaaagaaaaaaaaagaaa

SEQ ID NO: 11216 - RNA, 20 nt, Artificial Sequence
  HTT spacer sequence CTCN PAM
gcccucccgaguccuuuggu

SEQ ID NO: 11217 - RNA, 20 nt, Artificial Sequence
  HTT spacer sequence CTCN PAM
cgaguccuuugguuauuauu

SEQ ID NO: 11218 - RNA, 20 nt, Artificial Sequence
  HTT spacer sequence CTCN PAM
ggagggcagagcaggugcau

SEQ ID NO: 11219 - RNA, 20 nt, Artificial Sequence
  HTT spacer sequence CTCN PAM
ccugcauaauaauaaccaaa

SEQ ID NO: 11220 - RNA, 20 nt, Artificial Sequence
  HTT spacer sequence CTCN PAM
aaacuccccugcauaauaau

SEQ ID NO: 11221 - RNA, 20 nt, Artificial Sequence
  HTT spacer sequence CTCN PAM
ggauaaaaaugaaaacucaa

SEQ ID NO: 11222 - RNA, 20 nt, Artificial Sequence
  HTT spacer sequence CTCN PAM
aguggguugcauuucugccu

SEQ ID NO: 11223 - RNA, 20 nt, Artificial Sequence
  HTT spacer sequence CTCN PAM
ugcaguuacucaccaagaau

SEQ ID NO: 11224 - RNA, 20 nt, Artificial Sequence
  HTT spacer sequence CTCN PAM
ccaagaauccaagcaagcgg

SEQ ID NO: 11225 - RNA, 20 nt, Artificial Sequence
  HTT spacer sequence CTCN PAM
ccccugcagcccagccgcuu

SEQ ID NO: 11226 - RNA, 20 nt, Artificial Sequence
  HTT spacer sequence CTCN PAM
cucgccccugcagcccagcc

SEQ ID NO: 11227 - RNA, 20 nt, Artificial Sequence
  HTT spacer sequence CTCN PAM
ugaaguugauguccuugaac

SEQ ID NO: 11228 - RNA, 20 nt, Artificial Sequence
  HTT spacer sequence CTCN PAM
agccuccugaaguugauguc

SEQ ID NO: 11229 - RNA, 20 nt, Artificial Sequence
  HTT spacer sequence CTCN PAM
agcauguuugccuccagccu

SEQ ID NO: 11230 - RNA, 20 nt, Artificial Sequence
  HTT spacer sequence CTCN PAM
uccuggcaaugcacuuacau

SEQ ID NO: 11231 - RNA, 20 nt, Artificial Sequence
  HTT spacer sequence CTCN PAM
uucuuuuuucaaaaauagag

SEQ ID NO: 11232 - RNA, 20 nt, Artificial Sequence
  HTT spacer sequence CTCN PAM
auuuuugaaaaaagaaagag

SEQ ID NO: 11233 - RNA, 20 nt, Artificial Sequence
  HTT spacer sequence CTCN PAM
cuguguugcccaggcugguc

SEQ ID NO: 11234 - RNA, 20 nt, Artificial Sequence
  HTT spacer sequence CTCN PAM
uggccucaagugguccucca

SEQ ID NO: 11235 - RNA, 20 nt, Artificial Sequence
  HTT spacer sequence CTCN PAM
agugguccuccaccuuggcc

SEQ ID NO: 11236 - RNA, 20 nt, Artificial Sequence
  HTT spacer sequence CTCN PAM
accuuggccucccacagugc

SEQ ID NO: 11237 - RNA, 20 nt, Artificial Sequence
  HTT spacer sequence CTCN PAM
cacagugcugggauuauagg

SEQ ID NO: 11238 - RNA, 20 nt, Artificial Sequence
  HTT spacer sequence CTCN PAM
cgccuauaaucccagcacug

SEQ ID NO: 11239 - RNA, 20 nt, Artificial Sequence
  HTT spacer sequence CTCN PAM
uggugccuguccuaccuggu

SEQ ID NO: 11240 - RNA, 20 nt, Artificial Sequence
  HTT spacer sequence CTCN PAM
cccgucaccccagugugcuu

SEQ ID NO: 11241 - RNA, 20 nt, Artificial Sequence
  HTT spacer sequence CTCN PAM
cugggccccucacagaccuc

SEQ ID NO: 11242 - RNA, 20 nt, Artificial Sequence
  HTT spacer sequence CTCN PAM
cagaccucagcggugcucua

SEQ ID NO: 11243 - RNA, 20 nt, Artificial Sequence
  HTT spacer sequence CTCN PAM
gcggugcucuagcucccugc

SEQ ID NO: 11244 - RNA, 20 nt, Artificial Sequence
  HTT spacer sequence CTCN PAM
agcucccugccucgugucac

SEQ ID NO: 11245 - RNA, 20 nt, Artificial Sequence
  HTT spacer sequence CTCN PAM
cugccucgugucacugucag

SEQ ID NO: 11246 - RNA, 20 nt, Artificial Sequence
  HTT spacer sequence CTCN PAM
ugucacugucagccucacug

SEQ ID NO: 11247 - RNA, 20 nt, Artificial Sequence
  HTT spacer sequence CTCN PAM
cugcugggggagccccccag

SEQ ID NO: 11248 - RNA, 20 nt, Artificial Sequence
  HTT spacer sequence CTCN PAM
cccagcagugaggcugacag

SEQ ID NO: 11249 - RNA, 20 nt, Artificial Sequence
  HTT spacer sequence CTCN PAM
gcuaccuggggggcuccccc

SEQ ID NO: 11250 - RNA, 20 nt, Artificial Sequence
  HTT spacer sequence CTCN PAM
uuuucacuucuuuucuagag

SEQ ID NO: 11251 - RNA, 20 nt, Artificial Sequence
  HTT spacer sequence CTCN PAM
agaaaagaagugaaaaugag

SEQ ID NO: 11252 - RNA, 20 nt, Artificial Sequence
  HTT spacer sequence CTCN PAM
cuauguugcccaggcuacuu

SEQ ID NO: 11253 - RNA, 20 nt, Artificial Sequence
  HTT spacer sequence CTCN PAM
uggccccaagugauccuccu

SEQ ID NO: 11254 - RNA, 20 nt, Artificial Sequence
  HTT spacer sequence CTCN PAM
ugccuugaccucccagaaug

SEQ ID NO: 11255 - RNA, 20 nt, Artificial Sequence
  HTT spacer sequence CTCN PAM
cagaaugcugggauuacagg

SEQ ID NO: 11256 - RNA, 20 nt, Artificial Sequence
  HTT spacer sequence CTCN PAM
ugccuguaaucccagcauuc

SEQ ID NO: 11257 - RNA, 20 nt, Artificial Sequence
  HTT spacer sequence CTCN PAM
gggcuggcuuucucucucau

SEQ ID NO: 11258 - RNA, 20 nt, Artificial Sequence
  HTT spacer sequence CTCN PAM
cucauucuuguguuucccac

SEQ ID NO: 11259 - RNA, 20 nt, Artificial Sequence
  HTT spacer sequence CTCN PAM
cauucuuguguuucccacag

SEQ ID NO: 11260 - RNA, 20 nt, Artificial Sequence
  HTT spacer sequence CTCN PAM
uucuuguguuucccacagcc

SEQ ID NO: 11261 - RNA, 20 nt, Artificial Sequence
  HTT spacer sequence CTCN PAM
cggcugugggaaacacaaga

SEQ ID NO: 11262 - RNA, 20 nt, Artificial Sequence
  HTT spacer sequence CTCN PAM
gcuucucaugagguccuggg

SEQ ID NO: 11263 - RNA, 20 nt, Artificial Sequence
  HTT spacer sequence CTCN PAM
ugagguccugggacuguggc

SEQ ID NO: 11264 - RNA, 20 nt, Artificial Sequence
  HTT spacer sequence CTCN PAM
ugagaagcagaguggggaca

SEQ ID NO: 11265 - RNA, 20 nt, Artificial Sequence
  HTT spacer sequence CTCN PAM
guacggggccaggccacagu

SEQ ID NO: 11266 - RNA, 20 nt, Artificial Sequence
  HTT spacer sequence CTCN PAM
uugugagugugcuguuggga

SEQ ID NO: 11267 - RNA, 20 nt, Artificial Sequence
  HTT spacer sequence CTCN PAM
caaggaggcacagugaccac

SEQ ID NO: 11268 - RNA, 20 nt, Artificial Sequence
  HTT spacer sequence CTCN PAM
ggacuguccccgaggggcgg

SEQ ID NO: 11269 - RNA, 20 nt, Artificial Sequence
  HTT spacer sequence CTCN PAM
gggacaguccagaggaaggu

SEQ ID NO: 11270 - RNA, 20 nt, Artificial Sequence
  HTT spacer sequence CTCN PAM
ccaccuugaggguaugaaug

SEQ ID NO: 11271 - RNA, 20 nt, Artificial Sequence
  HTT spacer sequence CTCN PAM
agguggggaggcggaagugg

SEQ ID NO: 11272 - RNA, 20 nt, Artificial Sequence
  HTT spacer sequence CTCN PAM
uucauacccucaaggugggg

SEQ ID NO: 11273 - RNA, 20 nt, Artificial Sequence
  HTT spacer sequence CTCN PAM
ucacucauucauacccucaa

SEQ ID NO: 11274 - RNA, 20 nt, Artificial Sequence
  HTT spacer sequence CTCN PAM
aacagcugugcugaccgugg

SEQ ID NO: 11275 - RNA, 20 nt, Artificial Sequence
  HTT spacer sequence CTCN PAM
aaaggccacggucagcacag

SEQ ID NO: 11276 - RNA, 20 nt, Artificial Sequence
  HTT spacer sequence CTCN PAM
cuguagugcacaaguccugg

SEQ ID NO: 11277 - RNA, 20 nt, Artificial Sequence
  HTT spacer sequence CTCN PAM
ggacugcgggugccuccggc

SEQ ID NO: 11278 - RNA, 20 nt, Artificial Sequence
  HTT spacer sequence CTCN PAM
ggcaugagcagaugaggguc

SEQ ID NO: 11279 - RNA, 20 nt, Artificial Sequence
  HTT spacer sequence CTCN PAM
ugccggaggcacccgcaguc

SEQ ID NO: 11280 - RNA, 20 nt, Artificial Sequence
  HTT spacer sequence CTCN PAM
ucugcucaugccggaggcac

SEQ ID NO: 11281 - RNA, 20 nt, Artificial Sequence
  HTT spacer sequence CTCN PAM
accugccgccaguacaguuc

SEQ ID NO: 11282 - RNA, 20 nt, Artificial Sequence
  HTT spacer sequence CTCN PAM
cuccugccugccugacccuc

SEQ ID NO: 11283 - RNA, 20 nt, Artificial Sequence
  HTT spacer sequence CTCN PAM
ugccugccugacccucugcc

SEQ ID NO: 11284 - RNA, 20 nt, Artificial Sequence
  HTT spacer sequence CTCN PAM
gccucugaggacagcagugc

SEQ ID NO: 11285 - RNA, 20 nt, Artificial Sequence
  HTT spacer sequence CTCN PAM
gaggacagcagugccgggau

SEQ ID NO: 11286 - RNA, 20 nt, Artificial Sequence
  HTT spacer sequence CTCN PAM
gaggcagagggucaggcagg

SEQ ID NO: 11287 - RNA, 20 nt, Artificial Sequence
  HTT spacer sequence CTCN PAM
uaucccggcacugcuguccu

SEQ ID NO: 11288 - RNA, 20 nt, Artificial Sequence
  HTT spacer sequence CTCN PAM
gggacaggaacccaggucug

SEQ ID NO: 11289 - RNA, 20 nt, Artificial Sequence
  HTT spacer sequence CTCN PAM
ucugggacaggaacccaggu

SEQ ID NO: 11290 - RNA, 20 nt, Artificial Sequence
  HTT spacer sequence CTCN PAM
cugaaucagcaggucccucc

SEQ ID NO: 11291 - RNA, 20 nt, Artificial Sequence
  HTT spacer sequence CTCN PAM
gcucccugaaucagcagguc

SEQ ID NO: 11292 - RNA, 20 nt, Artificial Sequence
  HTT spacer sequence CTCN PAM
gcucagcucccugaaucagc

SEQ ID NO: 11293 - RNA, 20 nt, Artificial Sequence
  HTT spacer sequence CTCN PAM
ucccuccgcucagcucccug

SEQ ID NO: 11294 - RNA, 20 nt, Artificial Sequence
  HTT spacer sequence CTCN PAM
aaggcugcaagggaccucau

SEQ ID NO: 11295 - RNA, 20 nt, Artificial Sequence
  HTT spacer sequence CTCN PAM
guggaccugcaggaggaugg

SEQ ID NO: 11296 - RNA, 20 nt, Artificial Sequence
  HTT spacer sequence CTCN PAM
ugcagguccacugagugguc

SEQ ID NO: 11297 - RNA, 20 nt, Artificial Sequence
  HTT spacer sequence CTCN PAM
cacuucccauccuccugcag

SEQ ID NO: 11298 - RNA, 20 nt, Artificial Sequence
  HTT spacer sequence CTCN PAM
gguuuucuccgggugcuuug

SEQ ID NO: 11299 - RNA, 20 nt, Artificial Sequence
  HTT spacer sequence CTCN PAM
gggugcuuugccaggagugc

SEQ ID NO: 11300 - RNA, 20 nt, Artificial Sequence
  HTT spacer sequence CTCN PAM
uggcaaagcacccggagaaa

SEQ ID NO: 11301 - RNA, 20 nt, Artificial Sequence
  HTT spacer sequence CTCN PAM
aauucuuggugcacuccugg

SEQ ID NO: 11302 - RNA, 20 nt, Artificial Sequence
  HTT spacer sequence CTCN PAM
ccccugccuccaauucuugg

SEQ ID NO: 11303 - RNA, 20 nt, Artificial Sequence
  HTT spacer sequence CTCN PAM
gucccuguucacacuucucc

SEQ ID NO: 11304 - RNA, 20 nt, Artificial Sequence
  HTT spacer sequence CTCN PAM
gguucugugcugcaucuucc

SEQ ID NO: 11305 - RNA, 20 nt, Artificial Sequence
  HTT spacer sequence CTCN PAM
guuugcaauccauuuugcac

SEQ ID NO: 11306 - RNA, 20 nt, Artificial Sequence
  HTT spacer sequence CTCN PAM
uuuccguagugcaaaaugga

SEQ ID NO: 11307 - RNA, 20 nt, Artificial Sequence
  HTT spacer sequence CTCN PAM
ggaggggugugugugugugu

SEQ ID NO: 11308 - RNA, 20 nt, Artificial Sequence
  HTT spacer sequence CTCN PAM
ugaggccaugcccuucuccu

SEQ ID NO: 11309 - RNA, 20 nt, Artificial Sequence
  HTT spacer sequence CTCN PAM
cacacacacacacacacaua

SEQ ID NO: 11310 - RNA, 20 nt, Artificial Sequence
  HTT spacer sequence CTCN PAM
uucucacacacacacacaca

SEQ ID NO: 11311 - RNA, 20 nt, Artificial Sequence
  HTT spacer sequence CTCN PAM
cucuuucucacacacacaca

SEQ ID NO: 11312 - RNA, 20 nt, Artificial Sequence
  HTT spacer sequence CTCN PAM
cccucuuucucacacacaca

SEQ ID NO: 11313 - RNA, 20 nt, Artificial Sequence
  HTT spacer sequence CTCN PAM
cucccucuuucucacacaca

SEQ ID NO: 11314 - RNA, 20 nt, Artificial Sequence
  HTT spacer sequence CTCN PAM
ucagaggacacauucuguga

SEQ ID NO: 11315 - RNA, 20 nt, Artificial Sequence
  HTT spacer sequence CTCN PAM
gaagaggugguucgccagcu

SEQ ID NO: 11316 - RNA, 20 nt, Artificial Sequence
  HTT spacer sequence CTCN PAM
agugagaggggccuggcaaa

SEQ ID NO: 11317 - RNA, 20 nt, Artificial Sequence
  HTT spacer sequence CTCN PAM
cuugaggcauuuucuaaauc

SEQ ID NO: 11318 - RNA, 20 nt, Artificial Sequence
  HTT spacer sequence CTCN PAM
cacuugaggcauuuucuaaa

SEQ ID NO: 11319 - RNA, 20 nt, Artificial Sequence
  HTT spacer sequence CTCN PAM
auucuuuugccaggccccuc

SEQ ID NO: 11320 - RNA, 20 nt, Artificial Sequence
  HTT spacer sequence CTCN PAM
cugucuccauucuuuugcca

SEQ ID NO: 11321 - RNA, 20 nt, Artificial Sequence
  HTT spacer sequence CTCN PAM
cccugucuccauucuuuugc

SEQ ID NO: 11322 - RNA, 20 nt, Artificial Sequence
  HTT spacer sequence CTCN PAM
guucccaagaaugaaacgcc

SEQ ID NO: 11323 - RNA, 20 nt, Artificial Sequence
  HTT spacer sequence CTCN PAM
cucaguucccaagaaugaaa

SEQ ID NO: 11324 - RNA, 20 nt, Artificial Sequence
  HTT spacer sequence CTCN PAM
gcucccucaguucccaagaa

SEQ ID NO: 11325 - RNA, 20 nt, Artificial Sequence
  HTT spacer sequence CTCN PAM
gaggcugccccuguucuugc

SEQ ID NO: 11326 - RNA, 20 nt, Artificial Sequence
  HTT spacer sequence CTCN PAM
gagaugacuacagcaauucu

SEQ ID NO: 11327 - RNA, 20 nt, Artificial Sequence
  HTT spacer sequence CTCN PAM
ugccguuuacuguaaggacg

SEQ ID NO: 11328 - RNA, 20 nt, Artificial Sequence
  HTT spacer sequence CTCN PAM
auauccaggacguccuuaca

SEQ ID NO: 11329 - RNA, 20 nt, Artificial Sequence
  HTT spacer sequence CTCN PAM
guggugaaagggaucuaccu

SEQ ID NO: 11330 - RNA, 20 nt, Artificial Sequence
  HTT spacer sequence CTCN PAM
guuugcuaccgggugugucu

SEQ ID NO: 11331 - RNA, 20 nt, Artificial Sequence
  HTT spacer sequence CTCN PAM
auccccuggcagaaugaggu

SEQ ID NO: 11332 - RNA, 20 nt, Artificial Sequence
  HTT spacer sequence CTCN PAM
uucugccaggggauggagac

SEQ ID NO: 11333 - RNA, 20 nt, Artificial Sequence
  HTT spacer sequence CTCN PAM
caaauacacacagacacaca

SEQ ID NO: 11334 - RNA, 20 nt, Artificial Sequence
  HTT spacer sequence CTCN PAM
cgccuguaaucccagcacuu

SEQ ID NO: 11335 - RNA, 20 nt, Artificial Sequence
  HTT spacer sequence CTCN PAM
caaagugcugggauuacagg

SEQ ID NO: 11336 - RNA, 20 nt, Artificial Sequence
  HTT spacer sequence CTCN PAM
gccucccaaagugcugggau

SEQ ID NO: 11337 - RNA, 20 nt, Artificial Sequence
  HTT spacer sequence CTCN PAM
ugaucugccugccucagccu

SEQ ID NO: 11338 - RNA, 20 nt, Artificial Sequence
  HTT spacer sequence CTCN PAM
ugaccucaugaucugccugc

SEQ ID NO: 11339 - RNA, 20 nt, Artificial Sequence
  HTT spacer sequence CTCN PAM
aacuccugaccucaugaucu

SEQ ID NO: 11340 - RNA, 20 nt, Artificial Sequence
  HTT spacer sequence CTCN PAM
acuaaaaguacaaaaauuag

SEQ ID NO: 11341 - RNA, 20 nt, Artificial Sequence
  HTT spacer sequence CTCN PAM
gcaucccuacuagcugggac

SEQ ID NO: 11342 - RNA, 20 nt, Artificial Sequence
  HTT spacer sequence CTCN PAM
ugccucagcaucccuacuag

SEQ ID NO: 11343 - RNA, 20 nt, Artificial Sequence
  HTT spacer sequence CTCN PAM
cagguucaagcgauucuccu

SEQ ID NO: 11344 - RNA, 20 nt, Artificial Sequence
  HTT spacer sequence CTCN PAM
cugcaacuucugccucccag

SEQ ID NO: 11345 - RNA, 20 nt, Artificial Sequence
  HTT spacer sequence CTCN PAM
gcucacugcaacuucugccu

SEQ ID NO: 11346 - RNA, 20 nt, Artificial Sequence
  HTT spacer sequence CTCN PAM
accuugggcgacagaacgag

SEQ ID NO: 11347 - RNA, 20 nt, Artificial Sequence
  HTT spacer sequence CTCN PAM
uucugucgcccaagguggag

SEQ ID NO: 11348 - RNA, 20 nt, Artificial Sequence
  HTT spacer sequence CTCN PAM
cccaaaaaaaaaaaaaaaaa

SEQ ID NO: 11349 - RNA, 20 nt, Artificial Sequence
  HTT spacer sequence CTCN PAM
uguccacuuccugucauugg

SEQ ID NO: 11350 - RNA, 20 nt, Artificial Sequence
  HTT spacer sequence CTCN PAM
caucagacccaaaauagcua

SEQ ID NO: 11351 - RNA, 20 nt, Artificial Sequence
  HTT spacer sequence CTCN PAM
ggguggcaggcaagcuccca

SEQ ID NO: 11352 - RNA, 20 nt, Artificial Sequence
  HTT spacer sequence CTCN PAM
cuaagcagggcuggcuggca

SEQ ID NO: 11353 - RNA, 20 nt, Artificial Sequence
  HTT spacer sequence CTCN PAM
caaagcagggaacuaccaug

SEQ ID NO: 11354 - RNA, 20 nt, Artificial Sequence
  HTT spacer sequence CTCN PAM
gagacaaggggagaggagac

SEQ ID NO: 11355 - RNA, 20 nt, Artificial Sequence
  HTT spacer sequence CTCN PAM
gaguguacucccaaagcagg

SEQ ID NO: 11356 - RNA, 20 nt, Artificial Sequence
  HTT spacer sequence CTCN PAM
ccuugucucugaguguacuc

SEQ ID NO: 11357 - RNA, 20 nt, Artificial Sequence
  HTT spacer sequence CTCN PAM
ccccuugucucugaguguac

SEQ ID NO: 11358 - RNA, 20 nt, Artificial Sequence
  HTT spacer sequence CTCN PAM
ucuccccuugucucugagug

SEQ ID NO: 11359 - RNA, 20 nt, Artificial Sequence
  HTT spacer sequence CTCN PAM
ucuuggaauaaguaaugugg

SEQ ID NO: 11360 - RNA, 20 nt, Artificial Sequence
  HTT spacer sequence CTCN PAM
uucccugcuuccugaccucu

SEQ ID NO: 11361 - RNA, 20 nt, Artificial Sequence
  HTT spacer sequence CTCN PAM
ugcacccacuguggggcccc

SEQ ID NO: 11362 - RNA, 20 nt, Artificial Sequence
  HTT spacer sequence CTCN PAM
gaggugccccgcacggggcu

SEQ ID NO: 11363 - RNA, 20 nt, Artificial Sequence
  HTT spacer sequence CTCN PAM
gagcuccugcacccacugug

SEQ ID NO: 11364 - RNA, 20 nt, Artificial Sequence
  HTT spacer sequence CTCN PAM
ugcccagccccgugcggggc

SEQ ID NO: 11365 - RNA, 20 nt, Artificial Sequence
  HTT spacer sequence CTCN PAM
cagugccagcagcuccugcc

SEQ ID NO: 11366 - RNA, 20 nt, Artificial Sequence
  HTT spacer sequence CTCN PAM
gcggcuucucuguccuguua

SEQ ID NO: 11367 - RNA, 20 nt, Artificial Sequence
  HTT spacer sequence CTCN PAM
guccuguuauucugugcaug

SEQ ID NO: 11368 - RNA, 20 nt, Artificial Sequence
  HTT spacer sequence CTCN PAM
cuuucacuuuuguugauguc

SEQ ID NO: 11369 - RNA, 20 nt, Artificial Sequence
  HTT spacer sequence CTCN PAM
guuuggucuggaaaccgggg

SEQ ID NO: 11370 - RNA, 20 nt, Artificial Sequence
  HTT spacer sequence CTCN PAM
ucagaagagggguaaaaaga

SEQ ID NO: 11371 - RNA, 20 nt, Artificial Sequence
  HTT spacer sequence CTCN PAM
ucugaagagucuauagaaga

SEQ ID NO: 11372 - RNA, 20 nt, Artificial Sequence
  HTT spacer sequence CTCN PAM
uacaggcaguuuuauacagu

SEQ ID NO: 11373 - RNA, 20 nt, Artificial Sequence
  HTT spacer sequence CTCN PAM
gacuguauaaaacugccugu

SEQ ID NO: 11374 - RNA, 20 nt, Artificial Sequence
  HTT spacer sequence CTCN PAM
cagacuguauaaaacugccu

SEQ ID NO: 11375 - RNA, 20 nt, Artificial Sequence
  HTT spacer sequence CTCN PAM
accuagcaccauguggcucu

SEQ ID NO: 11376 - RNA, 20 nt, Artificial Sequence
  HTT spacer sequence CTCN PAM
uuguucuggcuggccuccac

SEQ ID NO: 11377 - RNA, 20 nt, Artificial Sequence
  HTT spacer sequence CTCN PAM
cagugagguuuguugcuggg

SEQ ID NO: 11378 - RNA, 20 nt, Artificial Sequence
  HTT spacer sequence CTCN PAM
cugcgaggguguucucauug

SEQ ID NO: 11379 - RNA, 20 nt, Artificial Sequence
  HTT spacer sequence CTCN PAM
gaaaucggcauccuguggaa

SEQ ID NO: 11380 - RNA, 20 nt, Artificial Sequence
  HTT spacer sequence CTCN PAM
cagugcaucucucccugcuc

SEQ ID NO: 11381 - RNA, 20 nt, Artificial Sequence
  HTT spacer sequence CTCN PAM
cccugcucuggcucuuagac

SEQ ID NO: 11382 - RNA, 20 nt, Artificial Sequence
  HTT spacer sequence CTCN PAM
cugcucuggcucuuagacuc

SEQ ID NO: 11383 - RNA, 20 nt, Artificial Sequence
  HTT spacer sequence CTCN PAM
ggcucuuagacucaccuccu

SEQ ID NO: 11384 - RNA, 20 nt, Artificial Sequence
  HTT spacer sequence CTCN PAM
uagacucaccuccuucgccc

SEQ ID NO: 11385 - RNA, 20 nt, Artificial Sequence
  HTT spacer sequence CTCN PAM
ccuccuucgcccgcugcacg

SEQ ID NO: 11386 - RNA, 20 nt, Artificial Sequence
  HTT spacer sequence CTCN PAM
uucgcccgcugcacggggaa

SEQ ID NO: 11387 - RNA, 20 nt, Artificial Sequence
  HTT spacer sequence CTCN PAM
cgccuguaaucccagcacuu

SEQ ID NO: 11388 - RNA, 20 nt, Artificial Sequence
  HTT spacer sequence CTCN PAM
caaagugcugggauuacagg

SEQ ID NO: 11389 - RNA, 20 nt, Artificial Sequence
  HTT spacer sequence CTCN PAM
gccucccaaagugcugggau

SEQ ID NO: 11390 - RNA, 20 nt, Artificial Sequence
  HTT spacer sequence CTCN PAM
ggugauccaccugccucggc

SEQ ID NO: 11391 - RNA, 20 nt, Artificial Sequence
  HTT spacer sequence CTCN PAM
ugaccucaggugauccaccu

SEQ ID NO: 11392 - RNA, 20 nt, Artificial Sequence
  HTT spacer sequence CTCN PAM
aacuccugaccucaggugau

SEQ ID NO: 11393 - RNA, 20 nt, Artificial Sequence
  HTT spacer sequence CTCN PAM
caaguagcugggacuacagg

SEQ ID NO: 11394 - RNA, 20 nt, Artificial Sequence
  HTT spacer sequence CTCN PAM
gccucccaaguagcugggac

SEQ ID NO: 11395 - RNA, 20 nt, Artificial Sequence
  HTT spacer sequence CTCN PAM
ugccucagccucccaaguag

SEQ ID NO: 11396 - RNA, 20 nt, Artificial Sequence
  HTT spacer sequence CTCN PAM
uggguucacgcgauucuccu

SEQ ID NO: 11397 - RNA, 20 nt, Artificial Sequence
  HTT spacer sequence CTCN PAM
accuccuggguucacgcgau

SEQ ID NO: 11398 - RNA, 20 nt, Artificial Sequence
  HTT spacer sequence CTCN PAM
cugcacccuccaccuccugg

SEQ ID NO: 11399 - RNA, 20 nt, Artificial Sequence
  HTT spacer sequence CTCN PAM
gcucacugcacccuccaccu

SEQ ID NO: 11400 - RNA, 20 nt, Artificial Sequence
  HTT spacer sequence CTCN PAM
agccugggcaacagcgcaag

SEQ ID NO: 11401 - RNA, 20 nt, Artificial Sequence
  HTT spacer sequence CTCN PAM
aucucaaaaagaaagaaaga

SEQ ID NO: 11402 - RNA, 20 nt, Artificial Sequence
  HTT spacer sequence CTCN PAM
aaaagaaagaaagaaaaaug

SEQ ID NO: 11403 - RNA, 20 nt, Artificial Sequence
  HTT spacer sequence CTCN PAM
ccuuggauucgugggccauc

SEQ ID NO: 11404 - RNA, 20 nt, Artificial Sequence
  HTT spacer sequence CTCN PAM
uuggauucgugggccauccu

SEQ ID NO: 11405 - RNA, 20 nt, Artificial Sequence
  HTT spacer sequence CTCN PAM
gaaucaacccccugggaaca

SEQ ID NO: 11406 - RNA, 20 nt, Artificial Sequence
  HTT spacer sequence CTCN PAM
cgccuguaaucccagcacuu

SEQ ID NO: 11407 - RNA, 20 nt, Artificial Sequence
  HTT spacer sequence CTCN PAM
caaagugcugggauuacagg

SEQ ID NO: 11408 - RNA, 20 nt, Artificial Sequence
  HTT spacer sequence CTCN PAM
gccucccaaagugcugggau

SEQ ID NO: 11409 - RNA, 20 nt, Artificial Sequence
  HTT spacer sequence CTCN PAM
ucagccucccaaagugcugg

SEQ ID NO: 11410 - RNA, 20 nt, Artificial Sequence
  HTT spacer sequence CTCN PAM
ggugauccacccuccucagc

SEQ ID NO: 11411 - RNA, 20 nt, Artificial Sequence
  HTT spacer sequence CTCN PAM
ugaccucaggugauccaccc

SEQ ID NO: 11412 - RNA, 20 nt, Artificial Sequence
  HTT spacer sequence CTCN PAM
acuaaaaauauaaaaauuag

SEQ ID NO: 11413 - RNA, 20 nt, Artificial Sequence
  HTT spacer sequence CTCN PAM
cagguagcugggauuacagg

SEQ ID NO: 11414 - RNA, 20 nt, Artificial Sequence
  HTT spacer sequence CTCN PAM
gacucccagguagcugggau

SEQ ID NO: 11415 - RNA, 20 nt, Artificial Sequence
  HTT spacer sequence CTCN PAM
ugccucagacucccagguag

SEQ ID NO: 11416 - RNA, 20 nt, Artificial Sequence
  HTT spacer sequence CTCN PAM
cagguucaagcgauucuccu

SEQ ID NO: 11417 - RNA, 20 nt, Artificial Sequence
  HTT spacer sequence CTCN PAM
gccucccagguucaagcgau

SEQ ID NO: 11418 - RNA, 20 nt, Artificial Sequence
  HTT spacer sequence CTCN PAM
cuguaaccuccgccucccag

SEQ ID NO: 11419 - RNA, 20 nt, Artificial Sequence
  HTT spacer sequence CTCN PAM
gcucccuguaaccuccgccu

SEQ ID NO: 11420 - RNA, 20 nt, Artificial Sequence
  HTT spacer sequence CTCN PAM
agccugggugacaagaguga

SEQ ID NO: 11421 - RNA, 20 nt, Artificial Sequence
  HTT spacer sequence CTCN PAM
ugucacccaggcuggagcgc

SEQ ID NO: 11422 - RNA, 20 nt, Artificial Sequence
  HTT spacer sequence CTCN PAM
gucuuaaaaaaaaaaaaaaa

SEQ ID NO: 11423 - RNA, 20 nt, Artificial Sequence
  HTT spacer sequence CTCN PAM
aaguggcauuucccauggcu

SEQ ID NO: 11424 - RNA, 20 nt, Artificial Sequence
  HTT spacer sequence CTCN PAM
gagaacuaaggguuaggugu

SEQ ID NO: 11425 - RNA, 20 nt, Artificial Sequence
  HTT spacer sequence CTCN PAM
gaggaaagacagccauggga

SEQ ID NO: 11426 - RNA, 20 nt, Artificial Sequence
  HTT spacer sequence CTCN PAM
cccugacccucaguguguag

SEQ ID NO: 11427 - RNA, 20 nt, Artificial Sequence
  HTT spacer sequence CTCN PAM
cugacccucaguguguagcc

SEQ ID NO: 11428 - RNA, 20 nt, Artificial Sequence
  HTT spacer sequence CTCN PAM
guguguagccagcccugcau

SEQ ID NO: 11429 - RNA, 20 nt, Artificial Sequence
  HTT spacer sequence CTCN PAM
ucccugggccccggucccag

SEQ ID NO: 11430 - RNA, 20 nt, Artificial Sequence
  HTT spacer sequence CTCN PAM
cugggccccggucccagugu

SEQ ID NO: 11431 - RNA, 20 nt, Artificial Sequence
  HTT spacer sequence CTCN PAM
aaguguggacacugggaccg

SEQ ID NO: 11432 - RNA, 20 nt, Artificial Sequence
  HTT spacer sequence CTCN PAM
acggcagguuuuccccaaaa

SEQ ID NO: 11433 - RNA, 20 nt, Artificial Sequence
  HTT spacer sequence CTCN PAM
caacggcagguuuuccccaa

SEQ ID NO: 11434 - RNA, 20 nt, Artificial Sequence
  HTT spacer sequence CTCN PAM
gugcaaucagauucucucaa

SEQ ID NO: 11435 - RNA, 20 nt, Artificial Sequence
  HTT spacer sequence CTCN PAM
ccacacugcuucuuaggcag

SEQ ID NO: 11436 - RNA, 20 nt, Artificial Sequence
  HTT spacer sequence CTCN PAM
ggcugccuaagaagcagugu

SEQ ID NO: 11437 - RNA, 20 nt, Artificial Sequence
  HTT spacer sequence CTCN PAM
gccaugguacaugcagaacu

SEQ ID NO: 11438 - RNA, 20 nt, Artificial Sequence
  HTT spacer sequence CTCN PAM
cauacauaggaaaugcagca

SEQ ID NO: 11439 - RNA, 20 nt, Artificial Sequence
  HTT spacer sequence CTCN PAM
uuauuuacuucaugaugugg

SEQ ID NO: 11440 - RNA, 20 nt, Artificial Sequence
  HTT spacer sequence CTCN PAM
caccuguaaucucagcacuu

SEQ ID NO: 11441 - RNA, 20 nt, Artificial Sequence
  HTT spacer sequence CTCN PAM
gcacuuugggaggcugaggu

SEQ ID NO: 11442 - RNA, 20 nt, Artificial Sequence
  HTT spacer sequence CTCN PAM
caaagugcugagauuacagg

SEQ ID NO: 11443 - RNA, 20 nt, Artificial Sequence
  HTT spacer sequence CTCN PAM
gccucccaaagugcugagau

SEQ ID NO: 11444 - RNA, 20 nt, Artificial Sequence
  HTT spacer sequence CTCN PAM
caccucagccucccaaagug

SEQ ID NO: 11445 - RNA, 20 nt, Artificial Sequence
  HTT spacer sequence CTCN PAM
agugauccucccaccucagc

SEQ ID NO: 11446 - RNA, 20 nt, Artificial Sequence
  HTT spacer sequence CTCN PAM
ugaucucaagugauccuccc

SEQ ID NO: 11447 - RNA, 20 nt, Artificial Sequence
  HTT spacer sequence CTCN PAM
aacuccugaucucaagugau

SEQ ID NO: 11448 - RNA, 20 nt, Artificial Sequence
  HTT spacer sequence CTCN PAM
cgaacuccugaucucaagug

SEQ ID NO: 11449 - RNA, 20 nt, Artificial Sequence
  HTT spacer sequence CTCN PAM
gcuaaaaauacaaaacuuag

SEQ ID NO: 11450 - RNA, 20 nt, Artificial Sequence
  HTT spacer sequence CTCN PAM
ggaggcugaggaaggagaau

SEQ ID NO: 11451 - RNA, 20 nt, Artificial Sequence
  HTT spacer sequence CTCN PAM
ugaguagcuaggaccacagc

SEQ ID NO: 11452 - RNA, 20 nt, Artificial Sequence
  HTT spacer sequence CTCN PAM
gccuccugaguagcuaggac

SEQ ID NO: 11453 - RNA, 20 nt, Artificial Sequence
  HTT spacer sequence CTCN PAM
uuccucagccuccugaguag

SEQ ID NO: 11454 - RNA, 20 nt, Artificial Sequence
  HTT spacer sequence CTCN PAM
accuuccagguucaagcaau

SEQ ID NO: 11455 - RNA, 20 nt, Artificial Sequence
  HTT spacer sequence CTCN PAM
gaucacuacaaccuccaccu

SEQ ID NO: 11456 - RNA, 20 nt, Artificial Sequence
  HTT spacer sequence CTCN PAM
agccugggcgacagagugag

SEQ ID NO: 11457 - RNA, 20 nt, Artificial Sequence
  HTT spacer sequence CTCN PAM
gucgcccaggcuggagugca

SEQ ID NO: 11458 - RNA, 20 nt, Artificial Sequence
  HTT spacer sequence CTCN PAM
cucugucgcccaggcuggag

SEQ ID NO: 11459 - RNA, 20 nt, Artificial Sequence
  HTT spacer sequence CTCN PAM
aaaaauaaauaaauaaauaa

SEQ ID NO: 11460 - RNA, 20 nt, Artificial Sequence
  HTT spacer sequence CTCN PAM
ggcacacggcugaugcgaag

SEQ ID NO: 11461 - RNA, 20 nt, Artificial Sequence
  HTT spacer sequence CTCN PAM
cuggggaccauggucaggca

SEQ ID NO: 11462 - RNA, 20 nt, Artificial Sequence
  HTT spacer sequence CTCN PAM
gcauugcuuggguuccacuu

SEQ ID NO: 11463 - RNA, 20 nt, Artificial Sequence
  HTT spacer sequence CTCN PAM
gugguccgcaccggggugcu

SEQ ID NO: 11464 - RNA, 20 nt, Artificial Sequence
  HTT spacer sequence CTCN PAM
uuccuggcgccagggucugc

SEQ ID NO: 11465 - RNA, 20 nt, Artificial Sequence
  HTT spacer sequence CTCN PAM
ucccaccuggaauuguaaua

SEQ ID NO: 11466 - RNA, 20 nt, Artificial Sequence
  HTT spacer sequence CTCN PAM
caaggcauguuuuauuuaga

SEQ ID NO: 11467 - RNA, 20 nt, Artificial Sequence
  HTT spacer sequence CTCN PAM
gguauuagugcagaaagguc

SEQ ID NO: 11468 - RNA, 20 nt, Artificial Sequence
  HTT spacer sequence CTCN PAM
uggggcuuuuucuucaaucc

SEQ ID NO: 11469 - RNA, 20 nt, Artificial Sequence
  HTT spacer sequence CTCN PAM
gggguacucuuggggcuuuu

SEQ ID NO: 11470 - RNA, 20 nt, Artificial Sequence
  HTT spacer sequence CTCN PAM
cacccuagcaugcaaggcgc

SEQ ID NO: 11471 - RNA, 20 nt, Artificial Sequence
  HTT spacer sequence CTCN PAM
cugggugcagggaaagcucc

SEQ ID NO: 11472 - RNA, 20 nt, Artificial Sequence
  HTT spacer sequence CTCN PAM
cccugggugcagggaaagcu

SEQ ID NO: 11473 - RNA, 20 nt, Artificial Sequence
  HTT spacer sequence CTCN PAM
cgccacccccagacuugguc

SEQ ID NO: 11474 - RNA, 20 nt, Artificial Sequence
  HTT spacer sequence CTCN PAM
ccacucggccagagaugugg

SEQ ID NO: 11475 - RNA, 20 nt, Artificial Sequence
  HTT spacer sequence CTCN PAM
gccagagaugugguggucca

SEQ ID NO: 11476 - RNA, 20 nt, Artificial Sequence
  HTT spacer sequence CTCN PAM
ggccgaguggugagaccaag

SEQ ID NO: 11477 - RNA, 20 nt, Artificial Sequence
  HTT spacer sequence CTCN PAM
uccuggaccaccacaucucu

SEQ ID NO: 11478 - RNA, 20 nt, Artificial Sequence
  HTT spacer sequence CTCN PAM
cuuccuggaccaccacaucu

SEQ ID NO: 11479 - RNA, 20 nt, Artificial Sequence
  HTT spacer sequence CTCN PAM
cuuuccccagggcccgggug

SEQ ID NO: 11480 - RNA, 20 nt, Artificial Sequence
  HTT spacer sequence CTCN PAM
gacugucugacacccgggcc

SEQ ID NO: 11481 - RNA, 20 nt, Artificial Sequence
  HTT spacer sequence CTCN PAM
cgauggcugucccguugccu

SEQ ID NO: 11482 - RNA, 20 nt, Artificial Sequence
  HTT spacer sequence CTCN PAM
ccgagauuccuucgguuugu

SEQ ID NO: 11483 - RNA, 20 nt, Artificial Sequence
  HTT spacer sequence CTCN PAM
gugaggggcacaaggcaacg

SEQ ID NO: 11484 - RNA, 20 nt, Artificial Sequence
  HTT spacer sequence CTCN PAM
gagcauaucuaucugcccuu

SEQ ID NO: 11485 - RNA, 20 nt, Artificial Sequence
  HTT spacer sequence CTCN PAM
gagaaaaugaaaacuggcca

SEQ ID NO: 11486 - RNA, 20 nt, Artificial Sequence
  HTT spacer sequence CTCN PAM
ccaugacccugcagucaggg

SEQ ID NO: 11487 - RNA, 20 nt, Artificial Sequence
  HTT spacer sequence CTCN PAM
agcaggugcgcccggcaugc

SEQ ID NO: 11488 - RNA, 20 nt, Artificial Sequence
  HTT spacer sequence CTCN PAM
cacggugcaggcugucaccg

SEQ ID NO: 11489 - RNA, 20 nt, Artificial Sequence
  HTT spacer sequence CTCN PAM
ggggcccugacguggacucc

SEQ ID NO: 11490 - RNA, 20 nt, Artificial Sequence
  HTT spacer sequence CTCN PAM
cgggggcccugacguggacu

SEQ ID NO: 11491 - RNA, 20 nt, Artificial Sequence
  HTT spacer sequence CTCN PAM
ucccugacacaguaccggcc

SEQ ID NO: 11492 - RNA, 20 nt, Artificial Sequence
  HTT spacer sequence CTCN PAM
ucaucccugacacaguaccg

SEQ ID NO: 11493 - RNA, 20 nt, Artificial Sequence
  HTT spacer sequence CTCN PAM
ugggcuuuaguggcgcuuag

SEQ ID NO: 11494 - RNA, 20 nt, Artificial Sequence
  HTT spacer sequence CTCN PAM
uaagcgccacuaaagcccag

SEQ ID NO: 11495 - RNA, 20 nt, Artificial Sequence
  HTT spacer sequence CTCN PAM
caggcuccuaagcgccacua

SEQ ID NO: 11496 - RNA, 20 nt, Artificial Sequence
  HTT spacer sequence CTCN PAM
acgggaagcucccaggcucc

SEQ ID NO: 11497 - RNA, 20 nt, Artificial Sequence
  HTT spacer sequence CTCN PAM
gcuugugcaguuucagcgcc

SEQ ID NO: 11498 - RNA, 20 nt, Artificial Sequence
  HTT spacer sequence CTCN PAM
cagcuugugcaguuucagcg

SEQ ID NO: 11499 - RNA, 20 nt, Artificial Sequence
  HTT spacer sequence CTCN PAM
cagcagugcguggugccucu

SEQ ID NO: 11500 - RNA, 20 nt, Artificial Sequence
  HTT spacer sequence CTCN PAM
ucagcuggggugcucacccg

SEQ ID NO: 11501 - RNA, 20 nt, Artificial Sequence
  HTT spacer sequence CTCN PAM
cccgcggggagacguggcuu

SEQ ID NO: 11502 - RNA, 20 nt, Artificial Sequence
  HTT spacer sequence CTCN PAM
ccgcgggugagcaccccagc

SEQ ID NO: 11503 - RNA, 20 nt, Artificial Sequence
  HTT spacer sequence CTCN PAM
gcgggcuucagugccggucc

SEQ ID NO: 11504 - RNA, 20 nt, Artificial Sequence
  HTT spacer sequence CTCN PAM
aacgucgcccccugggaaau

SEQ ID NO: 11505 - RNA, 20 nt, Artificial Sequence
  HTT spacer sequence CTCN PAM
ccgcccagcuccaacgucgc

SEQ ID NO: 11506 - RNA, 20 nt, Artificial Sequence
  HTT spacer sequence CTCN PAM
uguucgcuccccgcccagcu

SEQ ID NO: 11507 - RNA, 20 nt, Artificial Sequence
  HTT spacer sequence CTCN PAM
cugucccuccuguucgcucc

SEQ ID NO: 11508 - RNA, 20 nt, Artificial Sequence
  HTT spacer sequence CTCN PAM
gcccucccugucccuccugu

SEQ ID NO: 11509 - RNA, 20 nt, Artificial Sequence
  HTT spacer sequence CTCN PAM
ggggccucagcccucccugu

SEQ ID NO: 11510 - RNA, 20 nt, Artificial Sequence
  HTT spacer sequence CTCN PAM
gcagggucagcucuggggcc

SEQ ID NO: 11511 - RNA, 20 nt, Artificial Sequence
  HTT spacer sequence CTCN PAM
cuggcggccuugaagcugcg

SEQ ID NO: 11512 - RNA, 20 nt, Artificial Sequence
  HTT spacer sequence CTCN PAM
aaggaucugggcgcagcuuc

SEQ ID NO: 11513 - RNA, 20 nt, Artificial Sequence
  HTT spacer sequence CTCN PAM
ccaugucaagugcugcccug

SEQ ID NO: 11514 - RNA, 20 nt, Artificial Sequence
  HTT spacer sequence CTCN PAM
cugaaccagcccucaccaug

SEQ ID NO: 11515 - RNA, 20 nt, Artificial Sequence
  HTT spacer sequence CTCN PAM
ucccugaaccagcccucacc

SEQ ID NO: 11516 - RNA, 20 nt, Artificial Sequence
  HTT spacer sequence CTCN PAM
gccccauccauucuccacug

SEQ ID NO: 11517 - RNA, 20 nt, Artificial Sequence
  HTT spacer sequence CTCN PAM
acugcugucagggcugccug

SEQ ID NO: 11518 - RNA, 20 nt, Artificial Sequence
  HTT spacer sequence CTCN PAM
aggcagcccugacagcagug

SEQ ID NO: 11519 - RNA, 20 nt, Artificial Sequence
  HTT spacer sequence CTCN PAM
gugcugccugcugcgugaga

SEQ ID NO: 11520 - RNA, 20 nt, Artificial Sequence
  HTT spacer sequence CTCN PAM
cgcagcaggcagcacagaga

SEQ ID NO: 11521 - RNA, 20 nt, Artificial Sequence
  HTT spacer sequence CTCN PAM
gugacuuugaaccagacagu

SEQ ID NO: 11522 - RNA, 20 nt, Artificial Sequence
  HTT spacer sequence CTCN PAM
cgcgcgcagcuguccgaugu

SEQ ID NO: 11523 - RNA, 20 nt, Artificial Sequence
  HTT spacer sequence CTCN PAM
cccgcgcgcagcuguccgau

SEQ ID NO: 11524 - RNA, 20 nt, Artificial Sequence
  HTT spacer sequence CTCN PAM
ggcacugugguuccucuccc

SEQ ID NO: 11525 - RNA, 20 nt, Artificial Sequence
  HTT spacer sequence CTCN PAM
cugggccgcuuucacaagag

SEQ ID NO: 11526 - RNA, 20 nt, Artificial Sequence
  HTT spacer sequence CTCN PAM
ugugaaagcggcccagggag

SEQ ID NO: 11527 - RNA, 20 nt, Artificial Sequence
  HTT spacer sequence CTCN PAM
ugcugcucuugugaaagcgg

SEQ ID NO: 11528 - RNA, 20 nt, Artificial Sequence
  HTT spacer sequence CTCN PAM
agcaggggcacuggggcccg

SEQ ID NO: 11529 - RNA, 20 nt, Artificial Sequence
  HTT spacer sequence CTCN PAM
caggacgggccccagugccc

SEQ ID NO: 11530 - RNA, 20 nt, Artificial Sequence
  HTT spacer sequence CTCN PAM
uggugacauccccgcuggug

SEQ ID NO: 11531 - RNA, 20 nt, Artificial Sequence
  HTT spacer sequence CTCN PAM
caaccucauggugacauccc

SEQ ID NO: 11532 - RNA, 20 nt, Artificial Sequence
  HTT spacer sequence CTCN PAM
uacaaagaaggcucccaacc

SEQ ID NO: 11533 - RNA, 20 nt, Artificial Sequence
  HTT spacer sequence CTCN PAM
aagauaacguccccuucccc

SEQ ID NO: 11534 - RNA, 20 nt, Artificial Sequence
  HTT spacer sequence CTCN PAM
aucagaagaaaagcaaagcu

SEQ ID NO: 11535 - RNA, 20 nt, Artificial Sequence
  HTT spacer sequence CTCN PAM
uuaaagaguaaggcuuuuug

SEQ ID NO: 11536 - RNA, 20 nt, Artificial Sequence
  HTT spacer sequence CTCN PAM
uuaaugaguuuugccucaau

SEQ ID NO: 11537 - RNA, 20 nt, Artificial Sequence
  HTT spacer sequence CTCN PAM
ggaccccucuccucugugcc

SEQ ID NO: 11538 - RNA, 20 nt, Artificial Sequence
  HTT spacer sequence CTCN PAM
ccucugugccucacuguccu

SEQ ID NO: 11539 - RNA, 20 nt, Artificial Sequence
  HTT spacer sequence CTCN PAM
ucugugccucacuguccuca

SEQ ID NO: 11540 - RNA, 20 nt, Artificial Sequence
  HTT spacer sequence CTCN PAM
gugccucacuguccucagcu

SEQ ID NO: 11541 - RNA, 20 nt, Artificial Sequence
  HTT spacer sequence CTCN PAM
cuguccucagcugcagaaug

SEQ ID NO: 11542 - RNA, 20 nt, Artificial Sequence
  HTT spacer sequence CTCN PAM
gcugcagaaugaagauggca

SEQ ID NO: 11543 - RNA, 20 nt, Artificial Sequence
  HTT spacer sequence CTCN PAM
ugccaucuucauucugcagc

SEQ ID NO: 11544 - RNA, 20 nt, Artificial Sequence
  HTT spacer sequence CTCN PAM
gcaucccgggggcaccaacu

SEQ ID NO: 11545 - RNA, 20 nt, Artificial Sequence
  HTT spacer sequence CTCN PAM
cagcaucccgggggcaccaa

SEQ ID NO: 11546 - RNA, 20 nt, Artificial Sequence
  HTT spacer sequence CTCN PAM
gaaaccugcucucagcaucc

SEQ ID NO: 11547 - RNA, 20 nt, Artificial Sequence
  HTT spacer sequence CTCN PAM
uugcagaaaauacaggaaaa

SEQ ID NO: 11548 - RNA, 20 nt, Artificial Sequence
  HTT spacer sequence CTCN PAM
gacucuuuccaggaguucuu

SEQ ID NO: 11549 - RNA, 20 nt, Artificial Sequence
  HTT spacer sequence CTCN PAM
uuccaggaguucuuccauca

SEQ ID NO: 11550 - RNA, 20 nt, Artificial Sequence
  HTT spacer sequence CTCN PAM
uggaaagagucagaguggaa

SEQ ID NO: 11551 - RNA, 20 nt, Artificial Sequence
  HTT spacer sequence CTCN PAM
gcugggggcuggggaccugg

SEQ ID NO: 11552 - RNA, 20 nt, Artificial Sequence
  HTT spacer sequence CTCN PAM
gcccagccagguccccagcc

SEQ ID NO: 11553 - RNA, 20 nt, Artificial Sequence
  HTT spacer sequence CTCN PAM
guaaaggccugccucgcgca

SEQ ID NO: 11554 - RNA, 20 nt, Artificial Sequence
  HTT spacer sequence CTCN PAM
cgcagguguugaaguuuagg

SEQ ID NO: 11555 - RNA, 20 nt, Artificial Sequence
  HTT spacer sequence CTCN PAM
gacaggcaggugucccuaaa

SEQ ID NO: 11556 - RNA, 20 nt, Artificial Sequence
  HTT spacer sequence CTCN PAM
uguucaaaugccucugacag

SEQ ID NO: 11557 - RNA, 20 nt, Artificial Sequence
  HTT spacer sequence CTCN PAM
aucuugaaugggggcugggu

SEQ ID NO: 11558 - RNA, 20 nt, Artificial Sequence
  HTT spacer sequence CTCN PAM
uuuuacccagcccccauuca

SEQ ID NO: 11559 - RNA, 20 nt, Artificial Sequence
  HTT spacer sequence CTCN PAM
ggcucauuuuacccagcccc

SEQ ID NO: 11560 - RNA, 20 nt, Artificial Sequence
  HTT spacer sequence CTCN PAM
ugggaaugcggcccagcagg

SEQ ID NO: 11561 - RNA, 20 nt, Artificial Sequence
  HTT spacer sequence CTCN PAM
uccuguaacuaagaaugccu

SEQ ID NO: 11562 - RNA, 20 nt, Artificial Sequence
  HTT spacer sequence CTCN PAM
uaucucauccuguaacuaag

SEQ ID NO: 11563 - RNA, 20 nt, Artificial Sequence
  HTT spacer sequence CTCN PAM
uugggaccuguauuuugugc

SEQ ID NO: 11564 - RNA, 20 nt, Artificial Sequence
  HTT spacer sequence CTCN PAM
ggcuucuuuaaaacagucug

SEQ ID NO: 11565 - RNA, 20 nt, Artificial Sequence
  HTT spacer sequence CTCN PAM
ugccuguaaucccagcacuu

SEQ ID NO: 11566 - RNA, 20 nt, Artificial Sequence
  HTT spacer sequence CTCN PAM
caaagugcugggauuacagg

SEQ ID NO: 11567 - RNA, 20 nt, Artificial Sequence
  HTT spacer sequence CTCN PAM
gccucccaaagugcugggau

SEQ ID NO: 11568 - RNA, 20 nt, Artificial Sequence
  HTT spacer sequence CTCN PAM
agugauccaccugccucggc

SEQ ID NO: 11569 - RNA, 20 nt, Artificial Sequence
  HTT spacer sequence CTCN PAM
uggccucaagugauccaccu

SEQ ID NO: 11570 - RNA, 20 nt, Artificial Sequence
  HTT spacer sequence CTCN PAM
aacuccuggccucaagugau

SEQ ID NO: 11571 - RNA, 20 nt, Artificial Sequence
  HTT spacer sequence CTCN PAM
aauacaaaaauuagccaggu

SEQ ID NO: 11572 - RNA, 20 nt, Artificial Sequence
  HTT spacer sequence CTCN PAM
ggaggcugaggcaggagaau

SEQ ID NO: 11573 - RNA, 20 nt, Artificial Sequence
  HTT spacer sequence CTCN PAM
cgaguagcugggaccacagg

SEQ ID NO: 11574 - RNA, 20 nt, Artificial Sequence
  HTT spacer sequence CTCN PAM
gccucccgaguagcugggac

SEQ ID NO: 11575 - RNA, 20 nt, Artificial Sequence
  HTT spacer sequence CTCN PAM
ugccucagccucccgaguag

SEQ ID NO: 11576 - RNA, 20 nt, Artificial Sequence
  HTT spacer sequence CTCN PAM
ugaacccaggagucagaggc

SEQ ID NO: 11577 - RNA, 20 nt, Artificial Sequence
  HTT spacer sequence CTCN PAM
uggguucaagagauucuccu

SEQ ID NO: 11578 - RNA, 20 nt, Artificial Sequence
  HTT spacer sequence CTCN PAM
gacuccuggguucaagagau

SEQ ID NO: 11579 - RNA, 20 nt, Artificial Sequence
  HTT spacer sequence CTCN PAM
cugcagccucugacuccugg

SEQ ID NO: 11580 - RNA, 20 nt, Artificial Sequence
  HTT spacer sequence CTCN PAM
gcucacugcagccucugacu

SEQ ID NO: 11581 - RNA, 20 nt, Artificial Sequence
  HTT spacer sequence CTCN PAM
guugcccaggucucggcuca

SEQ ID NO: 11582 - RNA, 20 nt, Artificial Sequence
  HTT spacer sequence CTCN PAM
aaaaaaauaauaaaauaaag

SEQ ID NO: 11583 - RNA, 20 nt, Artificial Sequence
  HTT spacer sequence CTCN PAM
ucgccaucuugguuuuggug

SEQ ID NO: 11584 - RNA, 20 nt, Artificial Sequence
  HTT spacer sequence CTCN PAM
caucgccaucuugguuuugg

SEQ ID NO: 11585 - RNA, 20 nt, Artificial Sequence
  HTT spacer sequence CTCN PAM
ggucauccucacagcucauu

SEQ ID NO: 11586 - RNA, 20 nt, Artificial Sequence
  HTT spacer sequence CTCN PAM
cagcucauuacaugcuaauu

SEQ ID NO: 11587 - RNA, 20 nt, Artificial Sequence
  HTT spacer sequence CTCN PAM
uuacaugcuaauuauaaugc

SEQ ID NO: 11588 - RNA, 20 nt, Artificial Sequence
  HTT spacer sequence CTCN PAM
caucagcgccaugacaguuu

SEQ ID NO: 11589 - RNA, 20 nt, Artificial Sequence
  HTT spacer sequence CTCN PAM
uuuuagaacauacaggguag

SEQ ID NO: 11590 - RNA, 20 nt, Artificial Sequence
  HTT spacer sequence CTCN PAM
ucuuuuuagaacauacaggg

SEQ ID NO: 11591 - RNA, 20 nt, Artificial Sequence
  HTT spacer sequence CTCN PAM
caguucugggaaucgcccac

SEQ ID NO: 11592 - RNA, 20 nt, Artificial Sequence
  HTT spacer sequence CTCN PAM
guucugggaaucgcccaccc

SEQ ID NO: 11593 - RNA, 20 nt, Artificial Sequence
  HTT spacer sequence CTCN PAM
ugaauaauccaccccuuguu

SEQ ID NO: 11594 - RNA, 20 nt, Artificial Sequence
  HTT spacer sequence CTCN PAM
aggcugcucugccuacggag

SEQ ID NO: 11595 - RNA, 20 nt, Artificial Sequence
  HTT spacer sequence CTCN PAM
gccuacggaguagccauucu

SEQ ID NO: 11596 - RNA, 20 nt, Artificial Sequence
  HTT spacer sequence CTCN PAM
guaggcagagcagccuagag

SEQ ID NO: 11597 - RNA, 20 nt, Artificial Sequence
  HTT spacer sequence CTCN PAM
aauuguuuccugagcgagau

SEQ ID NO: 11598 - RNA, 20 nt, Artificial Sequence
  HTT spacer sequence CTCN PAM
ggaaacaauucgaggcuaau

SEQ ID NO: 11599 - RNA, 20 nt, Artificial Sequence
  HTT spacer sequence CTCN PAM
cucaggaaacaauucgaggc

SEQ ID NO: 11600 - RNA, 20 nt, Artificial Sequence
  HTT spacer sequence CTCN PAM
uuuggggucuggaucgggac

SEQ ID NO: 11601 - RNA, 20 nt, Artificial Sequence
  HTT spacer sequence CTCN PAM
cuccaucuugccugcugagg

SEQ ID NO: 11602 - RNA, 20 nt, Artificial Sequence
  HTT spacer sequence CTCN PAM
aucuugccugcugaggagga

SEQ ID NO: 11603 - RNA, 20 nt, Artificial Sequence
  HTT spacer sequence CTCN PAM
gcaggcaagauggagggagu

SEQ ID NO: 11604 - RNA, 20 nt, Artificial Sequence
  HTT spacer sequence CTCN PAM
ucagcaggcaagauggaggg

SEQ ID NO: 11605 - RNA, 20 nt, Artificial Sequence
  HTT spacer sequence CTCN PAM
ggcccugggcccugcaaccc

SEQ ID NO: 11606 - RNA, 20 nt, Artificial Sequence
  HTT spacer sequence CTCN PAM
gacuagcuuaagcaaaaaaa

SEQ ID NO: 11607 - RNA, 20 nt, Artificial Sequence
  HTT spacer sequence CTCN PAM
gucaaagcuuucacuugggc

SEQ ID NO: 11608 - RNA, 20 nt, Artificial Sequence
  HTT spacer sequence CTCN PAM
cagucaaagcuuucacuugg

SEQ ID NO: 11609 - RNA, 20 nt, Artificial Sequence
  HTT spacer sequence CTCN PAM
uuuuucucuuucuguuuaua

SEQ ID NO: 11610 - RNA, 20 nt, Artificial Sequence
  HTT spacer sequence CTCN PAM
uucuguuuauaagcaagcau

SEQ ID NO: 11611 - RNA, 20 nt, Artificial Sequence
  HTT spacer sequence CTCN PAM
ucaauacauacaugcuugcu

SEQ ID NO: 11612 - RNA, 20 nt, Artificial Sequence
  HTT spacer sequence CTCN PAM
cuguggcagcauauacacua

SEQ ID NO: 11613 - RNA, 20 nt, Artificial Sequence
  HTT spacer sequence CTCN PAM
guaucauuccaguuuuagug

SEQ ID NO: 11614 - RNA, 20 nt, Artificial Sequence
  HTT spacer sequence CTCN PAM
ucuuuaauauuagcugcugu

SEQ ID NO: 11615 - RNA, 20 nt, Artificial Sequence
  HTT spacer sequence CTCN PAM
aaaaaaacauuaaaaauuua

SEQ ID NO: 11616 - RNA, 20 nt, Artificial Sequence
  HTT spacer sequence CTCN PAM
caaaaaaaacauuaaaaauu

SEQ ID NO: 11617 - RNA, 20 nt, Artificial Sequence
  HTT spacer sequence CTCN PAM
cucuguugcccaggcuggag

SEQ ID NO: 11618 - RNA, 20 nt, Artificial Sequence
  HTT spacer sequence CTCN PAM
guugcccaggcuggagugcg

SEQ ID NO: 11619 - RNA, 20 nt, Artificial Sequence
  HTT spacer sequence CTCN PAM
agccugggcaacagagcgag

SEQ ID NO: 11620 - RNA, 20 nt, Artificial Sequence
  HTT spacer sequence CTCN PAM
gcucacugcaaccugcauuc

SEQ ID NO: 11621 - RNA, 20 nt, Artificial Sequence
  HTT spacer sequence CTCN PAM
cugcaaccugcauucaagug

SEQ ID NO: 11622 - RNA, 20 nt, Artificial Sequence
  HTT spacer sequence CTCN PAM
ugccucagcuucccggauag

SEQ ID NO: 11623 - RNA, 20 nt, Artificial Sequence
  HTT spacer sequence CTCN PAM
gcuucccggauagcugggau

SEQ ID NO: 11624 - RNA, 20 nt, Artificial Sequence
  HTT spacer sequence CTCN PAM
aaccccuggccuuaaguaau

SEQ ID NO: 11625 - RNA, 20 nt, Artificial Sequence
  HTT spacer sequence CTCN PAM
gccucccaaaggauuacagg

SEQ ID NO: 11626 - RNA, 20 nt, Artificial Sequence
  HTT spacer sequence CTCN PAM
caaaggauuacaggugugag

SEQ ID NO: 11627 - RNA, 20 nt, Artificial Sequence
  HTT spacer sequence CTCN PAM
caccuguaauccuuugggag

SEQ ID NO: 11628 - RNA, 20 nt, Artificial Sequence
  HTT spacer sequence CTCN PAM
uggcauauauuuccccaaau

SEQ ID NO: 11629 - RNA, 20 nt, Artificial Sequence
  HTT spacer sequence CTCN PAM
uuaacauacaaaaaagacau

SEQ ID NO: 11630 - RNA, 20 nt, Artificial Sequence
  HTT spacer sequence CTCN PAM
uagacagcuucaagauagga

SEQ ID NO: 11631 - RNA, 20 nt, Artificial Sequence
  HTT spacer sequence CTCN PAM
uaucuugaagcugucuagga

SEQ ID NO: 11632 - RNA, 20 nt, Artificial Sequence
  HTT spacer sequence CTCN PAM
gcccuacucuugcccucugg

SEQ ID NO: 11633 - RNA, 20 nt, Artificial Sequence
  HTT spacer sequence CTCN PAM
ugcccucugggaagggagag

SEQ ID NO: 11634 - RNA, 20 nt, Artificial Sequence
  HTT spacer sequence CTCN PAM
gggaagggagaggggcugau

SEQ ID NO: 11635 - RNA, 20 nt, Artificial Sequence
  HTT spacer sequence CTCN PAM
cuucccagagggcaagagua

SEQ ID NO: 11636 - RNA, 20 nt, Artificial Sequence
  HTT spacer sequence CTCN PAM
cccuucccagagggcaagag

SEQ ID NO: 11637 - RNA, 20 nt, Artificial Sequence
  HTT spacer sequence CTCN PAM
accaucagccccucucccuu

SEQ ID NO: 11638 - RNA, 20 nt, Artificial Sequence
  HTT spacer sequence CTCN PAM
auaaaaacccaagaggacag

SEQ ID NO: 11639 - RNA, 20 nt, Artificial Sequence
  HTT spacer sequence CTCN PAM
uggguuuuuauggaggcuuc

SEQ ID NO: 11640 - RNA, 20 nt, Artificial Sequence
  HTT spacer sequence CTCN PAM
gaacccuguccucuuggguu

SEQ ID NO: 11641 - RNA, 20 nt, Artificial Sequence
  HTT spacer sequence CTCN PAM
cugaacccuguccucuuggg

SEQ ID NO: 11642 - RNA, 20 nt, Artificial Sequence
  HTT spacer sequence CTCN PAM
acguuacccggaagcucucu

SEQ ID NO: 11643 - RNA, 20 nt, Artificial Sequence
  HTT spacer sequence CTCN PAM
agaaaccuccacguuacccg

SEQ ID NO: 11644 - RNA, 20 nt, Artificial Sequence
  HTT spacer sequence CTCN PAM
cuucuacggggacagaagcu

SEQ ID NO: 11645 - RNA, 20 nt, Artificial Sequence
  HTT spacer sequence CTCN PAM
ugugcuugggacccuuccag

SEQ ID NO: 11646 - RNA, 20 nt, Artificial Sequence
  HTT spacer sequence CTCN PAM
cuaugcaucuucucaucugg

SEQ ID NO: 11647 - RNA, 20 nt, Artificial Sequence
  HTT spacer sequence CTCN PAM
ucuggcuguucaucuguauc

SEQ ID NO: 11648 - RNA, 20 nt, Artificial Sequence
  HTT spacer sequence CTCN PAM
gaguucuguaugcugaucua

SEQ ID NO: 11649 - RNA, 20 nt, Artificial Sequence
  HTT spacer sequence CTCN PAM
gagaaacacauuuccugguu

SEQ ID NO: 11650 - RNA, 20 nt, Artificial Sequence
  HTT spacer sequence CTCN PAM
uuggguucaauuaauuugcu

SEQ ID NO: 11651 - RNA, 20 nt, Artificial Sequence
  HTT spacer sequence CTCN PAM
guucccacaagacugaaccc

SEQ ID NO: 11652 - RNA, 20 nt, Artificial Sequence
  HTT spacer sequence CTCN PAM
aucuguguggucaggcgcug

SEQ ID NO: 11653 - RNA, 20 nt, Artificial Sequence
  HTT spacer sequence CTCN PAM
uucaagucugacggcaucua

SEQ ID NO: 11654 - RNA, 20 nt, Artificial Sequence
  HTT spacer sequence CTCN PAM
cauucaagucugacggcauc

SEQ ID NO: 11655 - RNA, 20 nt, Artificial Sequence
  HTT spacer sequence CTCN PAM
ccacccacaagcaagcaauc

SEQ ID NO: 11656 - RNA, 20 nt, Artificial Sequence
  HTT spacer sequence CTCN PAM
agaaucaacacagaauacuu

SEQ ID NO: 11657 - RNA, 20 nt, Artificial Sequence
  HTT spacer sequence CTCN PAM
cucaagaaucaacacagaau

SEQ ID NO: 11658 - RNA, 20 nt, Artificial Sequence
  HTT spacer sequence CTCN PAM
cacucaagaaucaacacaga

SEQ ID NO: 11659 - RNA, 20 nt, Artificial Sequence
  HTT spacer sequence CTCN PAM
ggguggcugaauauacauau

SEQ ID NO: 11660 - RNA, 20 nt, Artificial Sequence
  HTT spacer sequence CTCN PAM
uacagcguauuccauaugua

SEQ ID NO: 11661 - RNA, 20 nt, Artificial Sequence
  HTT spacer sequence CTCN PAM
uccuacagcguauuccauau

SEQ ID NO: 11662 - RNA, 20 nt, Artificial Sequence
  HTT spacer sequence CTCN PAM
cagauauucauaacuccucc

SEQ ID NO: 11663 - RNA, 20 nt, Artificial Sequence
  HTT spacer sequence CTCN PAM
ccucacagauauucauaacu

SEQ ID NO: 11664 - RNA, 20 nt, Artificial Sequence
  HTT spacer sequence CTCN PAM
ucaugggucacguguucaaa

SEQ ID NO: 11665 - RNA, 20 nt, Artificial Sequence
  HTT spacer sequence CTCN PAM
gaucacgcuaaccccaacau

SEQ ID NO: 11666 - RNA, 20 nt, Artificial Sequence
  HTT spacer sequence CTCN PAM
cucugacgucaaaaggugaa

SEQ ID NO: 11667 - RNA, 20 nt, Artificial Sequence
  HTT spacer sequence CTCN PAM
gacgucaaaaggugaagcag

SEQ ID NO: 11668 - RNA, 20 nt, Artificial Sequence
  HTT spacer sequence CTCN PAM
gcuucaccuuuugacgucag

SEQ ID NO: 11669 - RNA, 20 nt, Artificial Sequence
  HTT spacer sequence CTCN PAM
uguccucugcuucaccuuuu

SEQ ID NO: 11670 - RNA, 20 nt, Artificial Sequence
  HTT spacer sequence CTCN PAM
cugcaccgccucuggagacg

SEQ ID NO: 11671 - RNA, 20 nt, Artificial Sequence
  HTT spacer sequence CTCN PAM
ggagacggccacggccacug

SEQ ID NO: 11672 - RNA, 20 nt, Artificial Sequence
  HTT spacer sequence CTCN PAM
agaggcggugcagugagggu

SEQ ID NO: 11673 - RNA, 20 nt, Artificial Sequence
  HTT spacer sequence CTCN PAM
guggucucuuaccaggaagg

SEQ ID NO: 11674 - RNA, 20 nt, Artificial Sequence
  HTT spacer sequence CTCN PAM
uaccaggaagggaagcauug

SEQ ID NO: 11675 - RNA, 20 nt, Artificial Sequence
  HTT spacer sequence CTCN PAM
gaugauuggcuaaaggcaau

SEQ ID NO: 11676 - RNA, 20 nt, Artificial Sequence
  HTT spacer sequence CTCN PAM
ucuauugccuuuagccaauc

SEQ ID NO: 11677 - RNA, 20 nt, Artificial Sequence
  HTT spacer sequence CTCN PAM
cucuucuauugccuuuagcc

SEQ ID NO: 11678 - RNA, 20 nt, Artificial Sequence
  HTT spacer sequence CTCN PAM
agaaaaaaagaacagacauc

SEQ ID NO: 11679 - RNA, 20 nt, Artificial Sequence
  HTT spacer sequence CTCN PAM
gugugccccuuccuuaauac

SEQ ID NO: 11680 - RNA, 20 nt, Artificial Sequence
  HTT spacer sequence CTCN PAM
ccucagugugccccuuccuu

SEQ ID NO: 11681 - RNA, 20 nt, Artificial Sequence
  HTT spacer sequence CTCN PAM
guuuuuaagguuucucugag

SEQ ID NO: 11682 - RNA, 20 nt, Artificial Sequence
  HTT spacer sequence CTCN PAM
gaggucuccucgaccaagaa

SEQ ID NO: 11683 - RNA, 20 nt, Artificial Sequence
  HTT spacer sequence CTCN PAM
gagaaaccuuaaaaacugag

SEQ ID NO: 11684 - RNA, 20 nt, Artificial Sequence
  HTT spacer sequence CTCN PAM
ucgaccaagaagcgguccgc

SEQ ID NO: 11685 - RNA, 20 nt, Artificial Sequence
  HTT spacer sequence CTCN PAM
accaagaagcgguccgcuca

SEQ ID NO: 11686 - RNA, 20 nt, Artificial Sequence
  HTT spacer sequence CTCN PAM
guuggcagggguuuuaggau

SEQ ID NO: 11687 - RNA, 20 nt, Artificial Sequence
  HTT spacer sequence CTCN PAM
agggagcaguaaacaucaca

SEQ ID NO: 11688 - RNA, 20 nt, Artificial Sequence
  HTT spacer sequence CTCN PAM
cuugagguacauaagaaaau

SEQ ID NO: 11689 - RNA, 20 nt, Artificial Sequence
  HTT spacer sequence CTCN PAM
aaacaguguuugaacauuuu

SEQ ID NO: 11690 - RNA, 20 nt, Artificial Sequence
  HTT spacer sequence CTCN PAM
guuaaaugaaaaacuucagc

SEQ ID NO: 11691 - RNA, 20 nt, Artificial Sequence
  HTT spacer sequence CTCN PAM
uuuaaauuuaauuuggcuga

SEQ ID NO: 11692 - RNA, 20 nt, Artificial Sequence
  HTT spacer sequence CTCN PAM
auuaaacucauuuaaauuua

SEQ ID NO: 11693 - RNA, 20 nt, Artificial Sequence
  HTT spacer sequence CTCN PAM
gaaucugcugugauucuggg

SEQ ID NO: 11694 - RNA, 20 nt, Artificial Sequence
  HTT spacer sequence CTCN PAM
agggauaccucguggucaga

SEQ ID NO: 11695 - RNA, 20 nt, Artificial Sequence
  HTT spacer sequence CTCN PAM
uggucagaacaaaucuauag

SEQ ID NO: 11696 - RNA, 20 nt, Artificial Sequence
  HTT spacer sequence CTCN PAM
aauuucuauaugucacuucc

SEQ ID NO: 11697 - RNA, 20 nt, Artificial Sequence
  HTT spacer sequence CTCN PAM
ccuccaauuucuauauguca

SEQ ID NO: 11698 - RNA, 20 nt, Artificial Sequence
  HTT spacer sequence CTCN PAM
gcauuugccuuauuuggaca

SEQ ID NO: 11699 - RNA, 20 nt, Artificial Sequence
  HTT spacer sequence CTCN PAM
cagcaguguacgagugaagu

SEQ ID NO: 11700 - RNA, 20 nt, Artificial Sequence
  HTT spacer sequence CTCN PAM
gcaguguacgagugaaguac

SEQ ID NO: 11701 - RNA, 20 nt, Artificial Sequence
  HTT spacer sequence CTCN PAM
uacacugcugagaguucaaa

SEQ ID NO: 11702 - RNA, 20 nt, Artificial Sequence
  HTT spacer sequence CTCN PAM
gguacugccacaggugcaga

SEQ ID NO: 11703 - RNA, 20 nt, Artificial Sequence
  HTT spacer sequence CTCN PAM
caagugaggaugucaggguu

SEQ ID NO: 11704 - RNA, 20 nt, Artificial Sequence
  HTT spacer sequence CTCN PAM
cuugggagucugcaccugug

SEQ ID NO: 11705 - RNA, 20 nt, Artificial Sequence
  HTT spacer sequence CTCN PAM
aauagagaaguauggagucc

SEQ ID NO: 11706 - RNA, 20 nt, Artificial Sequence
  HTT spacer sequence CTCN PAM
auuugaguccuuguggacga

SEQ ID NO: 11707 - RNA, 20 nt, Artificial Sequence
  HTT spacer sequence CTCN PAM
auacuucucuauuugagucc

SEQ ID NO: 11708 - RNA, 20 nt, Artificial Sequence
  HTT spacer sequence CTCN PAM
ggccauauuuaguuugcuuu

SEQ ID NO: 11709 - RNA, 20 nt, Artificial Sequence
  HTT spacer sequence CTCN PAM
auuuugagagauugaccaaa

SEQ ID NO: 11710 - RNA, 20 nt, Artificial Sequence
  HTT spacer sequence CTCN PAM
aaauugagaaaaugaccaaa

SEQ ID NO: 11711 - RNA, 20 nt, Artificial Sequence
  HTT spacer sequence CTCN PAM
caaaauugagaaaaugacca

SEQ ID NO: 11712 - RNA, 20 nt, Artificial Sequence
  HTT spacer sequence CTCN PAM
gagaaacaguagaacaguga

SEQ ID NO: 11713 - RNA, 20 nt, Artificial Sequence
  HTT spacer sequence CTCN PAM
gaggguuucaggaccaaaua

SEQ ID NO: 11714 - RNA, 20 nt, Artificial Sequence
  HTT spacer sequence CTCN PAM
cuguucuacuguuucucaga

SEQ ID NO: 11715 - RNA, 20 nt, Artificial Sequence
  HTT spacer sequence CTCN PAM
guccuuguuccuaccuuugc

SEQ ID NO: 11716 - RNA, 20 nt, Artificial Sequence
  HTT spacer sequence CTCN PAM
uuaugcuggaacguccuguu

SEQ ID NO: 11717 - RNA, 20 nt, Artificial Sequence
  HTT spacer sequence CTCN PAM
ugcuaaaugugacauaauca

SEQ ID NO: 11718 - RNA, 20 nt, Artificial Sequence
  HTT spacer sequence CTCN PAM
auuuuuguuuggcuuagucu

SEQ ID NO: 11719 - RNA, 20 nt, Artificial Sequence
  HTT spacer sequence CTCN PAM
ugcacuaugucccaacagac

SEQ ID NO: 11720 - RNA, 20 nt, Artificial Sequence
  HTT spacer sequence CTCN PAM
guccaaaacaauggccuccc

SEQ ID NO: 11721 - RNA, 20 nt, Artificial Sequence
  HTT spacer sequence CTCN PAM
cauaauuuuauuuuaauaaa

SEQ ID NO: 11722 - RNA, 20 nt, Artificial Sequence
  HTT spacer sequence CTCN PAM
cuuaggugagugugggcggc

SEQ ID NO: 11723 - RNA, 20 nt, Artificial Sequence
  HTT spacer sequence CTCN PAM
ccuaagugagaaccuggaca

SEQ ID NO: 11724 - RNA, 20 nt, Artificial Sequence
  HTT spacer sequence CTCN PAM
gggucuugccuuggcagcug

SEQ ID NO: 11725 - RNA, 20 nt, Artificial Sequence
  HTT spacer sequence CTCN PAM
caaagugcugggauuauagg

SEQ ID NO: 11726 - RNA, 20 nt, Artificial Sequence
  HTT spacer sequence CTCN PAM
gccucccaaagugcugggau

SEQ ID NO: 11727 - RNA, 20 nt, Artificial Sequence
  HTT spacer sequence CTCN PAM
ugaucugcccaccucggccu

SEQ ID NO: 11728 - RNA, 20 nt, Artificial Sequence
  HTT spacer sequence CTCN PAM
ugaccucaugaucugcccac

SEQ ID NO: 11729 - RNA, 20 nt, Artificial Sequence
  HTT spacer sequence CTCN PAM
aucuccugaccucaugaucu

SEQ ID NO: 11730 - RNA, 20 nt, Artificial Sequence
  HTT spacer sequence CTCN PAM
acuaaaaauacaaaaaauua

SEQ ID NO: 11731 - RNA, 20 nt, Artificial Sequence
  HTT spacer sequence CTCN PAM
ggaggcugaggcaggagaau

SEQ ID NO: 11732 - RNA, 20 nt, Artificial Sequence
  HTT spacer sequence CTCN PAM
cgaguagcugggacuacagg

SEQ ID NO: 11733 - RNA, 20 nt, Artificial Sequence
  HTT spacer sequence CTCN PAM
gccucccgaguagcugggac

SEQ ID NO: 11734 - RNA, 20 nt, Artificial Sequence
  HTT spacer sequence CTCN PAM
ugccucagccucccgaguag

SEQ ID NO: 11735 - RNA, 20 nt, Artificial Sequence
  HTT spacer sequence CTCN PAM
cggguucaugccauucuccu

SEQ ID NO: 11736 - RNA, 20 nt, Artificial Sequence
  HTT spacer sequence CTCN PAM
gccucccggguucaugccau

SEQ ID NO: 11737 - RNA, 20 nt, Artificial Sequence
  HTT spacer sequence CTCN PAM
cugcaagcuccgccucccgg

SEQ ID NO: 11738 - RNA, 20 nt, Artificial Sequence
  HTT spacer sequence CTCN PAM
gcucacugcaagcuccgccu

SEQ ID NO: 11739 - RNA, 20 nt, Artificial Sequence
  HTT spacer sequence CTCN PAM
agccugggugacagagcgag

SEQ ID NO: 11740 - RNA, 20 nt, Artificial Sequence
  HTT spacer sequence CTCN PAM
gucacccaggcuggagggca

SEQ ID NO: 11741 - RNA, 20 nt, Artificial Sequence
  HTT spacer sequence CTCN PAM
cucugucacccaggcuggag

SEQ ID NO: 11742 - RNA, 20 nt, Artificial Sequence
  HTT spacer sequence CTCN PAM
gucucaaaaaacaaaaacaa

SEQ ID NO: 11743 - RNA, 20 nt, Artificial Sequence
  HTT spacer sequence CTCN PAM
aaaaacaaaaacaaaaacaa

SEQ ID NO: 11744 - RNA, 20 nt, Artificial Sequence
  HTT spacer sequence CTCN PAM
auuccaauauuauaauaauc

SEQ ID NO: 11745 - RNA, 20 nt, Artificial Sequence
  HTT spacer sequence CTCN PAM
guauggccugguuuuuccua

SEQ ID NO: 11746 - RNA, 20 nt, Artificial Sequence
  HTT spacer sequence CTCN PAM
uaucucuguauggccugguu

SEQ ID NO: 11747 - RNA, 20 nt, Artificial Sequence
  HTT spacer sequence CTCN PAM
cccugucccuucagcuccua

SEQ ID NO: 11748 - RNA, 20 nt, Artificial Sequence
  HTT spacer sequence CTCN PAM
ucuucuggucacuucucacc

SEQ ID NO: 11749 - RNA, 20 nt, Artificial Sequence
  HTT spacer sequence CTCN PAM
cacucgucuucuggucacuu

SEQ ID NO: 11750 - RNA, 20 nt, Artificial Sequence
  HTT spacer sequence CTCN PAM
gucacgcucagacagggcca

SEQ ID NO: 11751 - RNA, 20 nt, Artificial Sequence
  HTT spacer sequence CTCN PAM
gacagggccacuagagggcu

SEQ ID NO: 11752 - RNA, 20 nt, Artificial Sequence
  HTT spacer sequence CTCN PAM
aguggcccugucugagcgug

SEQ ID NO: 11753 - RNA, 20 nt, Artificial Sequence
  HTT spacer sequence CTCN PAM
cuggucuagugguaaugaca

SEQ ID NO: 11754 - RNA, 20 nt, Artificial Sequence
  HTT spacer sequence CTCN PAM
cuucccuggucggcuaagua

SEQ ID NO: 11755 - RNA, 20 nt, Artificial Sequence
  HTT spacer sequence CTCN PAM
cuuuggccaggggagagggg

SEQ ID NO: 11756 - RNA, 20 nt, Artificial Sequence
  HTT spacer sequence CTCN PAM
ccuggccaaagggagacucc

SEQ ID NO: 11757 - RNA, 20 nt, Artificial Sequence
  HTT spacer sequence CTCN PAM
ccccuggccaaagggagacu

SEQ ID NO: 11758 - RNA, 20 nt, Artificial Sequence
  HTT spacer sequence CTCN PAM
gccccucuccccuggccaaa

SEQ ID NO: 11759 - RNA, 20 nt, Artificial Sequence
  HTT spacer sequence CTCN PAM
aaccccuccgccccucuccc

SEQ ID NO: 11760 - RNA, 20 nt, Artificial Sequence
  HTT spacer sequence CTCN PAM
gcuccaccaucucuugugga

SEQ ID NO: 11761 - RNA, 20 nt, Artificial Sequence
  HTT spacer sequence CTCN PAM
accaucucuuguggaaggcc

SEQ ID NO: 11762 - RNA, 20 nt, Artificial Sequence
  HTT spacer sequence CTCN PAM
uguggaaggccugacaucag

SEQ ID NO: 11763 - RNA, 20 nt, Artificial Sequence
  HTT spacer sequence CTCN PAM
ggauggcugugggcgggccu

SEQ ID NO: 11764 - RNA, 20 nt, Artificial Sequence
  HTT spacer sequence CTCN PAM
cugugaugcugugcuucagc

SEQ ID NO: 11765 - RNA, 20 nt, Artificial Sequence
  HTT spacer sequence CTCN PAM
uguuucacuuucauguuccg

SEQ ID NO: 11766 - RNA, 20 nt, Artificial Sequence
  HTT spacer sequence CTCN PAM
guacaccuggcuccaucuuc

SEQ ID NO: 11767 - RNA, 20 nt, Artificial Sequence
  HTT spacer sequence CTCN PAM
aucuucuagauagcaguagc

SEQ ID NO: 11768 - RNA, 20 nt, Artificial Sequence
  HTT spacer sequence CTCN PAM
ucucucucuccgccucggcu

SEQ ID NO: 11769 - RNA, 20 nt, Artificial Sequence
  HTT spacer sequence CTCN PAM
cucucuccgccucggcuacc

SEQ ID NO: 11770 - RNA, 20 nt, Artificial Sequence
  HTT spacer sequence CTCN PAM
cucuccgccucggcuaccaa

SEQ ID NO: 11771 - RNA, 20 nt, Artificial Sequence
  HTT spacer sequence CTCN PAM
cuccgccucggcuaccaaac

SEQ ID NO: 11772 - RNA, 20 nt, Artificial Sequence
  HTT spacer sequence CTCN PAM
ccgccucggcuaccaaacag

SEQ ID NO: 11773 - RNA, 20 nt, Artificial Sequence
  HTT spacer sequence CTCN PAM
gccucggcuaccaaacaggg

SEQ ID NO: 11774 - RNA, 20 nt, Artificial Sequence
  HTT spacer sequence CTCN PAM
gcuaccaaacagggaagggc

SEQ ID NO: 11775 - RNA, 20 nt, Artificial Sequence
  HTT spacer sequence CTCN PAM
aaugauaggucaggucacgc

SEQ ID NO: 11776 - RNA, 20 nt, Artificial Sequence
  HTT spacer sequence CTCN PAM
cacuccuuacccugcccccu

SEQ ID NO: 11777 - RNA, 20 nt, Artificial Sequence
  HTT spacer sequence CTCN PAM
uuacccugcccccuugucuu

SEQ ID NO: 11778 - RNA, 20 nt, Artificial Sequence
  HTT spacer sequence CTCN PAM
gugucuaggugguagugguc

SEQ ID NO: 11779 - RNA, 20 nt, Artificial Sequence
  HTT spacer sequence CTCN PAM
uugucuuguguccuuauuuc

SEQ ID NO: 11780 - RNA, 20 nt, Artificial Sequence
  HTT spacer sequence CTCN PAM
caucuccgcaggugaggaga

SEQ ID NO: 11781 - RNA, 20 nt, Artificial Sequence
  HTT spacer sequence CTCN PAM
ucuccgcaggugaggagaaa

SEQ ID NO: 11782 - RNA, 20 nt, Artificial Sequence
  HTT spacer sequence CTCN PAM
gcaggugaggagaaaaaccc

SEQ ID NO: 11783 - RNA, 20 nt, Artificial Sequence
  HTT spacer sequence CTCN PAM
ccugcggagaugagagauca

SEQ ID NO: 11784 - RNA, 20 nt, Artificial Sequence
  HTT spacer sequence CTCN PAM
ucaccugcggagaugagaga

SEQ ID NO: 11785 - RNA, 20 nt, Artificial Sequence
  HTT spacer sequence CTCN PAM
ccuguaggguccagcccuac

SEQ ID NO: 11786 - RNA, 20 nt, Artificial Sequence
  HTT spacer sequence CTCN PAM
cgccuguaggguccagcccu

SEQ ID NO: 11787 - RNA, 20 nt, Artificial Sequence
  HTT spacer sequence CTCN PAM
caguuaccaucguuuugggu

SEQ ID NO: 11788 - RNA, 20 nt, Artificial Sequence
  HTT spacer sequence CTCN PAM
guuaccaucguuuuggguuu

SEQ ID NO: 11789 - RNA, 20 nt, Artificial Sequence
  HTT spacer sequence CTCN PAM
gcacgucauucauagguuac

SEQ ID NO: 11790 - RNA, 20 nt, Artificial Sequence
  HTT spacer sequence CTCN PAM
uggucacacauuucuuucag

SEQ ID NO: 11791 - RNA, 20 nt, Artificial Sequence
  HTT spacer sequence CTCN PAM
ucaacuggaauggcagaagc

SEQ ID NO: 11792 - RNA, 20 nt, Artificial Sequence
  HTT spacer sequence CTCN PAM
cuucaacuggaauggcagaa

SEQ ID NO: 11793 - RNA, 20 nt, Artificial Sequence
  HTT spacer sequence CTCN PAM
agaacaacaaauggucucuc

SEQ ID NO: 11794 - RNA, 20 nt, Artificial Sequence
  HTT spacer sequence CTCN PAM
aagguuuuaaaugucugcau

SEQ ID NO: 11795 - RNA, 20 nt, Artificial Sequence
  HTT spacer sequence CTCN PAM
caaagguuuuaaaugucugc

SEQ ID NO: 11796 - RNA, 20 nt, Artificial Sequence
  HTT spacer sequence CTCN PAM
cuggugcgcugcauucucuc

SEQ ID NO: 11797 - RNA, 20 nt, Artificial Sequence
  HTT spacer sequence CTCN PAM
caguaaucauaauaauaguc

SEQ ID NO: 11798 - RNA, 20 nt, Artificial Sequence
  HTT spacer sequence CTCN PAM
ugguauuauccucccaguaa

SEQ ID NO: 11799 - RNA, 20 nt, Artificial Sequence
  HTT spacer sequence CTCN PAM
uuacccagggucccuauaca

SEQ ID NO: 11800 - RNA, 20 nt, Artificial Sequence
  HTT spacer sequence CTCN PAM
uugucugaucuauuugauuu

SEQ ID NO: 11801 - RNA, 20 nt, Artificial Sequence
  HTT spacer sequence CTCN PAM
uaucuagcucauugucugau

SEQ ID NO: 11802 - RNA, 20 nt, Artificial Sequence
  HTT spacer sequence CTCN PAM
cucaacuaaguggccuuuuc

SEQ ID NO: 11803 - RNA, 20 nt, Artificial Sequence
  HTT spacer sequence CTCN PAM
acuaaguggccuuuucauua

SEQ ID NO: 11804 - RNA, 20 nt, Artificial Sequence
  HTT spacer sequence CTCN PAM
cacaacugaaucucuauaau

SEQ ID NO: 11805 - RNA, 20 nt, Artificial Sequence
  HTT spacer sequence CTCN PAM
auaauaccugauguauuucu

SEQ ID NO: 11806 - RNA, 20 nt, Artificial Sequence
  HTT spacer sequence CTCN PAM
cuaggccacaggugccagca

SEQ ID NO: 11807 - RNA, 20 nt, Artificial Sequence
  HTT spacer sequence CTCN PAM
acuguaaaggcuauaguuac

SEQ ID NO: 11808 - RNA, 20 nt, Artificial Sequence
  HTT spacer sequence CTCN PAM
ugauaggcuguauagcagac

SEQ ID NO: 11809 - RNA, 20 nt, Artificial Sequence
  HTT spacer sequence CTCN PAM
uuuacucuaaaccauggaaa

SEQ ID NO: 11810 - RNA, 20 nt, Artificial Sequence
  HTT spacer sequence CTCN PAM
aaaccauggaaaagugaugc

SEQ ID NO: 11811 - RNA, 20 nt, Artificial Sequence
  HTT spacer sequence CTCN PAM
uccagaagggcaucacuuuu

SEQ ID NO: 11812 - RNA, 20 nt, Artificial Sequence
  HTT spacer sequence CTCN PAM
uggcaaugcccucuuuaacc

SEQ ID NO: 11813 - RNA, 20 nt, Artificial Sequence
  HTT spacer sequence CTCN PAM
uuaacccauaguguggguua

SEQ ID NO: 11814 - RNA, 20 nt, Artificial Sequence
  HTT spacer sequence CTCN PAM
uaacccacacuauggguuaa

SEQ ID NO: 11815 - RNA, 20 nt, Artificial Sequence
  HTT spacer sequence CTCN PAM
ucuuaacccacacuaugggu

SEQ ID NO: 11816 - RNA, 20 nt, Artificial Sequence
  HTT spacer sequence CTCN PAM
uuaaaguuucucaccuacac

SEQ ID NO: 11817 - RNA, 20 nt, Artificial Sequence
  HTT spacer sequence CTCN PAM
ccuacacuggaccuucaucu

SEQ ID NO: 11818 - RNA, 20 nt, Artificial Sequence
  HTT spacer sequence CTCN PAM
augaauaauagaaaugaaaa

SEQ ID NO: 11819 - RNA, 20 nt, Artificial Sequence
  HTT spacer sequence CTCN PAM
aagauaagagucucauggcc

SEQ ID NO: 11820 - RNA, 20 nt, Artificial Sequence
  HTT spacer sequence CTCN PAM
uaucuuugaguaucuguucc

SEQ ID NO: 11821 - RNA, 20 nt, Artificial Sequence
  HTT spacer sequence CTCN PAM
uggccaggcgugguggugca

SEQ ID NO: 11822 - RNA, 20 nt, Artificial Sequence
  HTT spacer sequence CTCN PAM
caaagugcugggauuacagg

SEQ ID NO: 11823 - RNA, 20 nt, Artificial Sequence
  HTT spacer sequence CTCN PAM
gccucccaaagugcugggau

SEQ ID NO: 11824 - RNA, 20 nt, Artificial Sequence
  HTT spacer sequence CTCN PAM
ggugauccgcccaccucggc

SEQ ID NO: 11825 - RNA, 20 nt, Artificial Sequence
  HTT spacer sequence CTCN PAM
acuaaaaauacaaaaauuag

SEQ ID NO: 11826 - RNA, 20 nt, Artificial Sequence
  HTT spacer sequence CTCN PAM
gaaggcugagguaugagaau

SEQ ID NO: 11827 - RNA, 20 nt, Artificial Sequence
  HTT spacer sequence CTCN PAM
gccuuccgaguagcugguau

SEQ ID NO: 11828 - RNA, 20 nt, Artificial Sequence
  HTT spacer sequence CTCN PAM
uaccucagccuuccgaguag

SEQ ID NO: 11829 - RNA, 20 nt, Artificial Sequence
  HTT spacer sequence CTCN PAM
uggguucaagcgauucucau

SEQ ID NO: 11830 - RNA, 20 nt, Artificial Sequence
  HTT spacer sequence CTCN PAM
gccuccuggguucaagcgau

SEQ ID NO: 11831 - RNA, 20 nt, Artificial Sequence
  HTT spacer sequence CTCN PAM
cugcaaccucugccuccugg

SEQ ID NO: 11832 - RNA, 20 nt, Artificial Sequence
  HTT spacer sequence CTCN PAM
gcucacugcaaccucugccu

SEQ ID NO: 11833 - RNA, 20 nt, Artificial Sequence
  HTT spacer sequence CTCN PAM
agccugggugacagagcaag

SEQ ID NO: 11834 - RNA, 20 nt, Artificial Sequence
  HTT spacer sequence CTCN PAM
gucacccaggcuggagugcg

SEQ ID NO: 11835 - RNA, 20 nt, Artificial Sequence
  HTT spacer sequence CTCN PAM
aucuccaaaaaagaaaaaaa

SEQ ID NO: 11836 - RNA, 20 nt, Artificial Sequence
  HTT spacer sequence CTCN PAM
aaaaaagaaaaaaaaaagag

SEQ ID NO: 11837 - RNA, 20 nt, Artificial Sequence
  HTT spacer sequence CTCN PAM
uuuuuuuuucuuuuuuggag

SEQ ID NO: 11838 - RNA, 20 nt, Artificial Sequence
  HTT spacer sequence CTCN PAM
cuuuuuuuuuucuuuuuugg

SEQ ID NO: 11839 - RNA, 20 nt, Artificial Sequence
  HTT spacer sequence CTCN PAM
ugacaguagaagucuugauc

SEQ ID NO: 11840 - RNA, 20 nt, Artificial Sequence
  HTT spacer sequence CTCN PAM
ccagaagauggcauccuuga

SEQ ID NO: 11841 - RNA, 20 nt, Artificial Sequence
  HTT spacer sequence CTCN PAM
ccccagaagauggcauccuu

SEQ ID NO: 11842 - RNA, 20 nt, Artificial Sequence
  HTT spacer sequence CTCN PAM
uggaacuguacacccauugg

SEQ ID NO: 11843 - RNA, 20 nt, Artificial Sequence
  HTT spacer sequence CTCN PAM
guugugagauuaugaaccca

SEQ ID NO: 11844 - RNA, 20 nt, Artificial Sequence
  HTT spacer sequence CTCN PAM
caacugagaaggguccaucc

SEQ ID NO: 11845 - RNA, 20 nt, Artificial Sequence
  HTT spacer sequence CTCN PAM
gauguucucagaagauccag

SEQ ID NO: 11846 - RNA, 20 nt, Artificial Sequence
  HTT spacer sequence CTCN PAM
gaagauccagucuucggguu

SEQ ID NO: 11847 - RNA, 20 nt, Artificial Sequence
  HTT spacer sequence CTCN PAM
gugaaccauagaaaaauaua

SEQ ID NO: 11848 - RNA, 20 nt, Artificial Sequence
  HTT spacer sequence CTCN PAM
uaacaugcgagagcuuuuau

SEQ ID NO: 11849 - RNA, 20 nt, Artificial Sequence
  HTT spacer sequence CTCN PAM
cauguuaagagggcugaugu

SEQ ID NO: 11850 - RNA, 20 nt, Artificial Sequence
  HTT spacer sequence CTCN PAM
cgcauguuaagagggcugau

SEQ ID NO: 11851 - RNA, 20 nt, Artificial Sequence
  HTT spacer sequence CTCN PAM
aaaaaaaaaaaguguauaug

SEQ ID NO: 11852 - RNA, 20 nt, Artificial Sequence
  HTT spacer sequence CTCN PAM
gucacccaggcuggagugca

SEQ ID NO: 11853 - RNA, 20 nt, Artificial Sequence
  HTT spacer sequence CTCN PAM
agccugggugacagagauuc

SEQ ID NO: 11854 - RNA, 20 nt, Artificial Sequence
  HTT spacer sequence CTCN PAM
gcucacuccaaccucugccu

SEQ ID NO: 11855 - RNA, 20 nt, Artificial Sequence
  HTT spacer sequence CTCN PAM
cuccaaccucugccucccac

SEQ ID NO: 11856 - RNA, 20 nt, Artificial Sequence
  HTT spacer sequence CTCN PAM
aaccucugccucccacacac

SEQ ID NO: 11857 - RNA, 20 nt, Artificial Sequence
  HTT spacer sequence CTCN PAM
gccucccacacaccaaugua

SEQ ID NO: 11858 - RNA, 20 nt, Artificial Sequence
  HTT spacer sequence CTCN PAM
cacacaccaauguauuuaau

SEQ ID NO: 11859 - RNA, 20 nt, Artificial Sequence
  HTT spacer sequence CTCN PAM
ucauggaaaagauaaaguaa

SEQ ID NO: 11860 - RNA, 20 nt, Artificial Sequence
  HTT spacer sequence CTCN PAM
ggaaggacaagguggccguc

SEQ ID NO: 11861 - RNA, 20 nt, Artificial Sequence
  HTT spacer sequence CTCN PAM
gugaguccauacuuaauuaa

SEQ ID NO: 11862 - RNA, 20 nt, Artificial Sequence
  HTT spacer sequence CTCN PAM
cggagaaccaggacggccac

SEQ ID NO: 11863 - RNA, 20 nt, Artificial Sequence
  HTT spacer sequence CTCN PAM
ugaaucccaguugcuucucc

SEQ ID NO: 11864 - RNA, 20 nt, Artificial Sequence
  HTT spacer sequence CTCN PAM
aaauuaggugcauugcacgg

SEQ ID NO: 11865 - RNA, 20 nt, Artificial Sequence
  HTT spacer sequence CTCN PAM
uuucuugguauucaauuaau

SEQ ID NO: 11866 - RNA, 20 nt, Artificial Sequence
  HTT spacer sequence CTCN PAM
uaaaagacaccauacuuuug

SEQ ID NO: 11867 - RNA, 20 nt, Artificial Sequence
  HTT spacer sequence CTCN PAM
ggcauauuagaauuuuagaa

SEQ ID NO: 11868 - RNA, 20 nt, Artificial Sequence
  HTT spacer sequence CTCN PAM
ucagguuacauuuuagugaa

SEQ ID NO: 11869 - RNA, 20 nt, Artificial Sequence
  HTT spacer sequence CTCN PAM
ucuucagguuacauuuuagu

SEQ ID NO: 11870 - RNA, 20 nt, Artificial Sequence
  HTT spacer sequence CTCN PAM
cuuuggaugcuuuaggggau

SEQ ID NO: 11871 - RNA, 20 nt, Artificial Sequence
  HTT spacer sequence CTCN PAM
uuggaugcuuuaggggaucu

SEQ ID NO: 11872 - RNA, 20 nt, Artificial Sequence
  HTT spacer sequence CTCN PAM
guaacaccccaaaguuagag

SEQ ID NO: 11873 - RNA, 20 nt, Artificial Sequence
  HTT spacer sequence CTCN PAM
aacuuugggguguuacagag

SEQ ID NO: 11874 - RNA, 20 nt, Artificial Sequence
  HTT spacer sequence CTCN PAM
uggucaaacugguuaagcau

SEQ ID NO: 11875 - RNA, 20 nt, Artificial Sequence
  HTT spacer sequence CTCN PAM
ccucauggucaaacugguua

SEQ ID NO: 11876 - RNA, 20 nt, Artificial Sequence
  HTT spacer sequence CTCN PAM
aucuaaaacacacacacaca

SEQ ID NO: 11877 - RNA, 20 nt, Artificial Sequence
  HTT spacer sequence CTCN PAM
agccugggcaacaagaauga

SEQ ID NO: 11878 - RNA, 20 nt, Artificial Sequence
  HTT spacer sequence CTCN PAM
gcuaccgcaaccucugccuc

SEQ ID NO: 11879 - RNA, 20 nt, Artificial Sequence
  HTT spacer sequence CTCN PAM
gccucccagguucaaguaau

SEQ ID NO: 11880 - RNA, 20 nt, Artificial Sequence
  HTT spacer sequence CTCN PAM
cagguucaaguaauucuccu

SEQ ID NO: 11881 - RNA, 20 nt, Artificial Sequence
  HTT spacer sequence CTCN PAM
ugccucagccucucuaguag

SEQ ID NO: 11882 - RNA, 20 nt, Artificial Sequence
  HTT spacer sequence CTCN PAM
gccucucuaguagcugggau

SEQ ID NO: 11883 - RNA, 20 nt, Artificial Sequence
  HTT spacer sequence CTCN PAM
cuaguagcugggauuacagg

SEQ ID NO: 11884 - RNA, 20 nt, Artificial Sequence
  HTT spacer sequence CTCN PAM
aguagcugggauuacaggca

SEQ ID NO: 11885 - RNA, 20 nt, Artificial Sequence
  HTT spacer sequence CTCN PAM
acuaaaaauacaaaauuagc

SEQ ID NO: 11886 - RNA, 20 nt, Artificial Sequence
  HTT spacer sequence CTCN PAM
acguuggucaggcuggucuc

SEQ ID NO: 11887 - RNA, 20 nt, Artificial Sequence
  HTT spacer sequence CTCN PAM
aacucccgaccucaggugau

SEQ ID NO: 11888 - RNA, 20 nt, Artificial Sequence
  HTT spacer sequence CTCN PAM
cgaccucaggugauccaccu

SEQ ID NO: 11889 - RNA, 20 nt, Artificial Sequence
  HTT spacer sequence CTCN PAM
ggugauccaccugccuuggc

SEQ ID NO: 11890 - RNA, 20 nt, Artificial Sequence
  HTT spacer sequence CTCN PAM
caccuauaaucccagcacuu

SEQ ID NO: 11891 - RNA, 20 nt, Artificial Sequence
  HTT spacer sequence CTCN PAM
aauuuaaaaguugagaggcu

SEQ ID NO: 11892 - RNA, 20 nt, Artificial Sequence
  HTT spacer sequence CTCN PAM
acuuuuaaauuugagcagca

SEQ ID NO: 11893 - RNA, 20 nt, Artificial Sequence
  HTT spacer sequence CTCN PAM
caacuuuuaaauuugagcag

SEQ ID NO: 11894 - RNA, 20 nt, Artificial Sequence
  HTT spacer sequence CTCN PAM
gggauaugauguggagagcu

SEQ ID NO: 11895 - RNA, 20 nt, Artificial Sequence
  HTT spacer sequence CTCN PAM
acaucauaucccugagggcc

SEQ ID NO: 11896 - RNA, 20 nt, Artificial Sequence
  HTT spacer sequence CTCN PAM
ccacaucauaucccugaggg

SEQ ID NO: 11897 - RNA, 20 nt, Artificial Sequence
  HTT spacer sequence CTCN PAM
gggaaagggaauccagaagc

SEQ ID NO: 11898 - RNA, 20 nt, Artificial Sequence
  HTT spacer sequence CTCN PAM
cucucucuguguguucaaac

SEQ ID NO: 11899 - RNA, 20 nt, Artificial Sequence
  HTT spacer sequence CTCN PAM
cucucuguguguucaaacug

SEQ ID NO: 11900 - RNA, 20 nt, Artificial Sequence
  HTT spacer sequence CTCN PAM
cucuguguguucaaacuggu

SEQ ID NO: 11901 - RNA, 20 nt, Artificial Sequence
  HTT spacer sequence CTCN PAM
cuguguguucaaacugguug

SEQ ID NO: 11902 - RNA, 20 nt, Artificial Sequence
  HTT spacer sequence CTCN PAM
guguguucaaacugguugaa

SEQ ID NO: 11903 - RNA, 20 nt, Artificial Sequence
  HTT spacer sequence CTCN PAM
ucuguaaaguuuugauuaau

SEQ ID NO: 11904 - RNA, 20 nt, Artificial Sequence
  HTT spacer sequence CTCN PAM
guaaaguuuugauuaaugga

SEQ ID NO: 11905 - RNA, 20 nt, Artificial Sequence
  HTT spacer sequence CTCN PAM
caaauccuuuuuuccauuaa

SEQ ID NO: 11906 - RNA, 20 nt, Artificial Sequence
  HTT spacer sequence CTCN PAM
ggcuguagugaaucucguag

SEQ ID NO: 11907 - RNA, 20 nt, Artificial Sequence
  HTT spacer sequence CTCN PAM
uaggcuuuaugugucuuccc

SEQ ID NO: 11908 - RNA, 20 nt, Artificial Sequence
  HTT spacer sequence CTCN PAM
ccgcucaagauggcccaaca

SEQ ID NO: 11909 - RNA, 20 nt, Artificial Sequence
  HTT spacer sequence CTCN PAM
agauggcccaacaagcuggu

SEQ ID NO: 11910 - RNA, 20 nt, Artificial Sequence
  HTT spacer sequence CTCN PAM
ucuaguuuuuuuguuuguuu

SEQ ID NO: 11911 - RNA, 20 nt, Artificial Sequence
  HTT spacer sequence CTCN PAM
aucuuguuuuaagucuuugg

SEQ ID NO: 11912 - RNA, 20 nt, Artificial Sequence
  HTT spacer sequence CTCN PAM
caaagacuuaaaacaagaug

SEQ ID NO: 11913 - RNA, 20 nt, Artificial Sequence
  HTT spacer sequence CTCN PAM
accuuccaaguggaacagga

SEQ ID NO: 11914 - RNA, 20 nt, Artificial Sequence
  HTT spacer sequence CTCN PAM
acaaucuaucuugaguaguu

SEQ ID NO: 11915 - RNA, 20 nt, Artificial Sequence
  HTT spacer sequence CTCN PAM
agauagauuguagagcuaac

SEQ ID NO: 11916 - RNA, 20 nt, Artificial Sequence
  HTT spacer sequence CTCN PAM
uaacuacucaagauagauug

SEQ ID NO: 11917 - RNA, 20 nt, Artificial Sequence
  HTT spacer sequence CTCN PAM
agacucuuucugggaagggc

SEQ ID NO: 11918 - RNA, 20 nt, Artificial Sequence
  HTT spacer sequence CTCN PAM
uucugggaagggcaauggag

SEQ ID NO: 11919 - RNA, 20 nt, Artificial Sequence
  HTT spacer sequence CTCN PAM
auugcccuucccagaaagag

SEQ ID NO: 11920 - RNA, 20 nt, Artificial Sequence
  HTT spacer sequence CTCN PAM
uucccuaagccaggaaucaa

SEQ ID NO: 11921 - RNA, 20 nt, Artificial Sequence
  HTT spacer sequence CTCN PAM
cccuccacaaacugucuuga

SEQ ID NO: 11922 - RNA, 20 nt, Artificial Sequence
  HTT spacer sequence CTCN PAM
acaaacugucuugaauugcc

SEQ ID NO: 11923 - RNA, 20 nt, Artificial Sequence
  HTT spacer sequence CTCN PAM
gagcaccugggagguuacuu

SEQ ID NO: 11924 - RNA, 20 nt, Artificial Sequence
  HTT spacer sequence CTCN PAM
gagaaaggcaauucaagaca

SEQ ID NO: 11925 - RNA, 20 nt, Artificial Sequence
  HTT spacer sequence CTCN PAM
caggugcucugagaaaggca

SEQ ID NO: 11926 - RNA, 20 nt, Artificial Sequence
  HTT spacer sequence CTCN PAM
uuaauaaaaguucuuuuaaa

SEQ ID NO: 11927 - RNA, 20 nt, Artificial Sequence
  HTT spacer sequence CTCN PAM
aacagccugggacuccuugg

SEQ ID NO: 11928 - RNA, 20 nt, Artificial Sequence
  HTT spacer sequence CTCN PAM
uugggaaaacaggaggugcc

SEQ ID NO: 11929 - RNA, 20 nt, Artificial Sequence
  HTT spacer sequence CTCN PAM
uguuuucccaaggaguccca

SEQ ID NO: 11930 - RNA, 20 nt, Artificial Sequence
  HTT spacer sequence CTCN PAM
ggcaccuccuguuuucccaa

SEQ ID NO: 11931 - RNA, 20 nt, Artificial Sequence
  HTT spacer sequence CTCN PAM
guuuuacucaugaaacccca

SEQ ID NO: 11932 - RNA, 20 nt, Artificial Sequence
  HTT spacer sequence CTCN PAM
ugaaaccccagaaauuggaa

SEQ ID NO: 11933 - RNA, 20 nt, Artificial Sequence
  HTT spacer sequence CTCN PAM
guucuguuuugcauuggauu

SEQ ID NO: 11934 - RNA, 20 nt, Artificial Sequence
  HTT spacer sequence CTCN PAM
augugaaguaauuucugaua

SEQ ID NO: 11935 - RNA, 20 nt, Artificial Sequence
  HTT spacer sequence CTCN PAM
cucuuuuuugggggggaucc

SEQ ID NO: 11936 - RNA, 20 nt, Artificial Sequence
  HTT spacer sequence CTCN PAM
uuuuugggggggauccagga

SEQ ID NO: 11937 - RNA, 20 nt, Artificial Sequence
  HTT spacer sequence CTCN PAM
uuuuuauaccagauccugga

SEQ ID NO: 11938 - RNA, 20 nt, Artificial Sequence
  HTT spacer sequence CTCN PAM
ggcugggcaugguggcucac

SEQ ID NO: 11939 - RNA, 20 nt, Artificial Sequence
  HTT spacer sequence CTCN PAM
cgccuguaauccuagcacuu

SEQ ID NO: 11940 - RNA, 20 nt, Artificial Sequence
  HTT spacer sequence CTCN PAM
aagugcuaggauuacaggcg

SEQ ID NO: 11941 - RNA, 20 nt, Artificial Sequence
  HTT spacer sequence CTCN PAM
caaagugcuaggauuacagg

SEQ ID NO: 11942 - RNA, 20 nt, Artificial Sequence
  HTT spacer sequence CTCN PAM
gccucucaaagugcuaggau

SEQ ID NO: 11943 - RNA, 20 nt, Artificial Sequence
  HTT spacer sequence CTCN PAM
ggcaauccacccaccucggc

SEQ ID NO: 11944 - RNA, 20 nt, Artificial Sequence
  HTT spacer sequence CTCN PAM
ggaguucgagaccagccugg

SEQ ID NO: 11945 - RNA, 20 nt, Artificial Sequence
  HTT spacer sequence CTCN PAM
ugagcucaggcaauccaccc

SEQ ID NO: 11946 - RNA, 20 nt, Artificial Sequence
  HTT spacer sequence CTCN PAM
aacuccugagcucaggcaau

SEQ ID NO: 11947 - RNA, 20 nt, Artificial Sequence
  HTT spacer sequence CTCN PAM
acuaaaauaaaaauaaaaaa

SEQ ID NO: 11948 - RNA, 20 nt, Artificial Sequence
  HTT spacer sequence CTCN PAM
caaauagcugggacuauagg

SEQ ID NO: 11949 - RNA, 20 nt, Artificial Sequence
  HTT spacer sequence CTCN PAM
gccucccaaauagcugggac

SEQ ID NO: 11950 - RNA, 20 nt, Artificial Sequence
  HTT spacer sequence CTCN PAM
uggguuaaagcgauucuucu

SEQ ID NO: 11951 - RNA, 20 nt, Artificial Sequence
  HTT spacer sequence CTCN PAM
gccuccuggguuaaagcgau

SEQ ID NO: 11952 - RNA, 20 nt, Artificial Sequence
  HTT spacer sequence CTCN PAM
guucacugcaaccuccgccu

SEQ ID NO: 11953 - RNA, 20 nt, Artificial Sequence
  HTT spacer sequence CTCN PAM
agccuggugacagagcaaga

SEQ ID NO: 11954 - RNA, 20 nt, Artificial Sequence
  HTT spacer sequence CTCN PAM
gucaccaggcuggagugcag

SEQ ID NO: 11955 - RNA, 20 nt, Artificial Sequence
  HTT spacer sequence CTCN PAM
gucucaaaaaaaaaaaagag

SEQ ID NO: 11956 - RNA, 20 nt, Artificial Sequence
  HTT spacer sequence CTCN PAM
aaaaaaaaaaagagacccuu

SEQ ID NO: 11957 - RNA, 20 nt, Artificial Sequence
  HTT spacer sequence CTCN PAM
uuuuuuuuuuugagacggag

SEQ ID NO: 11958 - RNA, 20 nt, Artificial Sequence
  HTT spacer sequence CTCN PAM
aaaaauuaagggucucuuuu

SEQ ID NO: 11959 - RNA, 20 nt, Artificial Sequence
  HTT spacer sequence CTCN PAM
auccuaaagccaguaaucca

SEQ ID NO: 11960 - RNA, 20 nt, Artificial Sequence
  HTT spacer sequence CTCN PAM
uuuauauaaacauuaaacac

SEQ ID NO: 11961 - RNA, 20 nt, Artificial Sequence
  HTT spacer sequence CTCN PAM
aauugccaggcacauuggcu

SEQ ID NO: 11962 - RNA, 20 nt, Artificial Sequence
  HTT spacer sequence CTCN PAM
cgccuauaaucccaacacuu

SEQ ID NO: 11963 - RNA, 20 nt, Artificial Sequence
  HTT spacer sequence CTCN PAM
caaaguguugggauuauagg

SEQ ID NO: 11964 - RNA, 20 nt, Artificial Sequence
  HTT spacer sequence CTCN PAM
gccucccaaaguguugggau

SEQ ID NO: 11965 - RNA, 20 nt, Artificial Sequence
  HTT spacer sequence CTCN PAM
ggcgauccacccaccucagc

SEQ ID NO: 11966 - RNA, 20 nt, Artificial Sequence
  HTT spacer sequence CTCN PAM
ugaccucaggcgauccaccc

SEQ ID NO: 11967 - RNA, 20 nt, Artificial Sequence
  HTT spacer sequence CTCN PAM
aacuccugaccucaggcgau

SEQ ID NO: 11968 - RNA, 20 nt, Artificial Sequence
  HTT spacer sequence CTCN PAM
acuaaaaauacaaaaauuag

SEQ ID NO: 11969 - RNA, 20 nt, Artificial Sequence
  HTT spacer sequence CTCN PAM
ggaggcugaggcaggagaau

SEQ ID NO: 11970 - RNA, 20 nt, Artificial Sequence
  HTT spacer sequence CTCN PAM
ugaguagcugggauuaccag

SEQ ID NO: 11971 - RNA, 20 nt, Artificial Sequence
  HTT spacer sequence CTCN PAM
gccuccugaguagcugggau

SEQ ID NO: 11972 - RNA, 20 nt, Artificial Sequence
  HTT spacer sequence CTCN PAM
ugccucagccuccugaguag

SEQ ID NO: 11973 - RNA, 20 nt, Artificial Sequence
  HTT spacer sequence CTCN PAM
ggagguggagguugcccuga

SEQ ID NO: 11974 - RNA, 20 nt, Artificial Sequence
  HTT spacer sequence CTCN PAM
ugaguucaagugauucuccu

SEQ ID NO: 11975 - RNA, 20 nt, Artificial Sequence
  HTT spacer sequence CTCN PAM
accuccugaguucaagugau

SEQ ID NO: 11976 - RNA, 20 nt, Artificial Sequence
  HTT spacer sequence CTCN PAM
gggcaaccuccaccuccuga

SEQ ID NO: 11977 - RNA, 20 nt, Artificial Sequence
  HTT spacer sequence CTCN PAM
gucauccagacuugggugca

SEQ ID NO: 11978 - RNA, 20 nt, Artificial Sequence
  HTT spacer sequence CTCN PAM
cucugucauccagacuuggg

SEQ ID NO: 11979 - RNA, 20 nt, Artificial Sequence
  HTT spacer sequence CTCN PAM
gucucaaaauaaaaauaaaa

SEQ ID NO: 11980 - RNA, 20 nt, Artificial Sequence
  HTT spacer sequence CTCN PAM
aaauaaaaauaaaaauaaaa

SEQ ID NO: 11981 - RNA, 20 nt, Artificial Sequence
  HTT spacer sequence CTCN PAM
uuuauuuauuuuuauuuuua

SEQ ID NO: 11982 - RNA, 20 nt, Artificial Sequence
  HTT spacer sequence CTCN PAM
aauuaauuggcuuuaagaaa

SEQ ID NO: 11983 - RNA, 20 nt, Artificial Sequence
  HTT spacer sequence CTCN PAM
uuuuucuuaaagccaauuaa

SEQ ID NO: 11984 - RNA, 20 nt, Artificial Sequence
  HTT spacer sequence CTCN PAM
aaugccuuuuagugcaugua

SEQ ID NO: 11985 - RNA, 20 nt, Artificial Sequence
  HTT spacer sequence CTCN PAM
aaaaaaaaaaaaaaaaagaa

SEQ ID NO: 11986 - RNA, 20 nt, Artificial Sequence
  HTT spacer sequence CTCN PAM
aucucaaaaaaaaaaaaaaa

SEQ ID NO: 11987 - RNA, 20 nt, Artificial Sequence
  HTT spacer sequence CTCN PAM
uguugcccaggcuggagucc

SEQ ID NO: 11988 - RNA, 20 nt, Artificial Sequence
  HTT spacer sequence CTCN PAM
agccugggcaacaagaguga

SEQ ID NO: 11989 - RNA, 20 nt, Artificial Sequence
  HTT spacer sequence CTCN PAM
cuacaacgucugccucucgg

SEQ ID NO: 11990 - RNA, 20 nt, Artificial Sequence
  HTT spacer sequence CTCN PAM
cgggguucaagcaauucucc

SEQ ID NO: 11991 - RNA, 20 nt, Artificial Sequence
  HTT spacer sequence CTCN PAM
ggguucaagcaauucuccug

SEQ ID NO: 11992 - RNA, 20 nt, Artificial Sequence
  HTT spacer sequence CTCN PAM
ugccucagccucccgaguag

SEQ ID NO: 11993 - RNA, 20 nt, Artificial Sequence
  HTT spacer sequence CTCN PAM
gccucccgaguagcuuggau

SEQ ID NO: 11994 - RNA, 20 nt, Artificial Sequence
  HTT spacer sequence CTCN PAM
cgaguagcuuggauuauagg

SEQ ID NO: 11995 - RNA, 20 nt, Artificial Sequence
  HTT spacer sequence CTCN PAM
ggaggcugaggcaggagaau

SEQ ID NO: 11996 - RNA, 20 nt, Artificial Sequence
  HTT spacer sequence CTCN PAM
acuaaaaauacaaaaauuag

SEQ ID NO: 11997 - RNA, 20 nt, Artificial Sequence
  HTT spacer sequence CTCN PAM
ucucuacuaaaaauacaaaa

SEQ ID NO: 11998 - RNA, 20 nt, Artificial Sequence
  HTT spacer sequence CTCN PAM
ugaccucaugauccccccgc

SEQ ID NO: 11999 - RNA, 20 nt, Artificial Sequence
  HTT spacer sequence CTCN PAM
ugauccccccgccuccgccu

SEQ ID NO: 12000 - RNA, 20 nt, Artificial Sequence
  HTT spacer sequence CTCN PAM
gccucccaaagugcugggau

SEQ ID NO: 12001 - RNA, 20 nt, Artificial Sequence
  HTT spacer sequence CTCN PAM
caaagugcugggauuacagg

SEQ ID NO: 12002 - RNA, 20 nt, Artificial Sequence
  HTT spacer sequence CTCN PAM
caccuguaaucccagcacuu

SEQ ID NO: 12003 - RNA, 20 nt, Artificial Sequence
  HTT spacer sequence CTCN PAM
aaaauaauuugaacaauuua

SEQ ID NO: 12004 - RNA, 20 nt, Artificial Sequence
  HTT spacer sequence CTCN PAM
uaugguaaauucuugcccua

SEQ ID NO: 12005 - RNA, 20 nt, Artificial Sequence
  HTT spacer sequence CTCN PAM
uuuuaaacaaccaguuauuu

SEQ ID NO: 12006 - RNA, 20 nt, Artificial Sequence
  HTT spacer sequence CTCN PAM
uuuuaaacaccccucuuuuu

SEQ ID NO: 12007 - RNA, 20 nt, Artificial Sequence
  HTT spacer sequence CTCN PAM
ucuuuuuaaacaccccucuu

SEQ ID NO: 12008 - RNA, 20 nt, Artificial Sequence
  HTT spacer sequence CTCN PAM
cuuguccuaaacacuccucu

SEQ ID NO: 12009 - RNA, 20 nt, Artificial Sequence
  HTT spacer sequence CTCN PAM
uagcaucuuuuacuuuuggu

SEQ ID NO: 12010 - RNA, 20 nt, Artificial Sequence
  HTT spacer sequence CTCN PAM
cacaccuugcauguaaaacu

SEQ ID NO: 12011 - RNA, 20 nt, Artificial Sequence
  HTT spacer sequence CTCN PAM
ucacacaccuugcauguaaa

SEQ ID NO: 12012 - RNA, 20 nt, Artificial Sequence
  HTT spacer sequence CTCN PAM
ccucacacaccuugcaugua

SEQ ID NO: 12013 - RNA, 20 nt, Artificial Sequence
  HTT spacer sequence CTCN PAM
aaacuaggcaaaaauuuaca

SEQ ID NO: 12014 - RNA, 20 nt, Artificial Sequence
  HTT spacer sequence CTCN PAM
aacuuuuagcuuuaucuuau

SEQ ID NO: 12015 - RNA, 20 nt, Artificial Sequence
  HTT spacer sequence CTCN PAM
uuuaaauuuagucaauaugu

SEQ ID NO: 12016 - RNA, 20 nt, Artificial Sequence
  HTT spacer sequence CTCN PAM
aaaaaaaaaaauagaaagaa

SEQ ID NO: 12017 - RNA, 20 nt, Artificial Sequence
  HTT spacer sequence CTCN PAM
aucucaaaaaaaaaaaauag

SEQ ID NO: 12018 - RNA, 20 nt, Artificial Sequence
  HTT spacer sequence CTCN PAM
cucugucacccaggcuggag

SEQ ID NO: 12019 - RNA, 20 nt, Artificial Sequence
  HTT spacer sequence CTCN PAM
gucacccaggcuggagugca

SEQ ID NO: 12020 - RNA, 20 nt, Artificial Sequence
  HTT spacer sequence CTCN PAM
agccugggugacagagcgag

SEQ ID NO: 12021 - RNA, 20 nt, Artificial Sequence
  HTT spacer sequence CTCN PAM
uggcucacugcaaccucugc

SEQ ID NO: 12022 - RNA, 20 nt, Artificial Sequence
  HTT spacer sequence CTCN PAM
cugcaaccucugcccccugg

SEQ ID NO: 12023 - RNA, 20 nt, Artificial Sequence
  HTT spacer sequence CTCN PAM
gcccccuggguuuaagcgau

SEQ ID NO: 12024 - RNA, 20 nt, Artificial Sequence
  HTT spacer sequence CTCN PAM
ugccucagccucuggaguag

SEQ ID NO: 12025 - RNA, 20 nt, Artificial Sequence
  HTT spacer sequence CTCN PAM
gccucuggaguagcugugau

SEQ ID NO: 12026 - RNA, 20 nt, Artificial Sequence
  HTT spacer sequence CTCN PAM
ggaguagcugugauuauagg

SEQ ID NO: 12027 - RNA, 20 nt, Artificial Sequence
  HTT spacer sequence CTCN PAM
agaggcugaggcaggagaau

SEQ ID NO: 12028 - RNA, 20 nt, Artificial Sequence
  HTT spacer sequence CTCN PAM
acuaaaaauacaaacauuag

SEQ ID NO: 12029 - RNA, 20 nt, Artificial Sequence
  HTT spacer sequence CTCN PAM
ugaccucgugaucugcccgc

SEQ ID NO: 12030 - RNA, 20 nt, Artificial Sequence
  HTT spacer sequence CTCN PAM
ugaucugcccgccuccaccu

SEQ ID NO: 12031 - RNA, 20 nt, Artificial Sequence
  HTT spacer sequence CTCN PAM
accucccaaagugcuaggau

SEQ ID NO: 12032 - RNA, 20 nt, Artificial Sequence
  HTT spacer sequence CTCN PAM
caaagugcuaggauuacagg

SEQ ID NO: 12033 - RNA, 20 nt, Artificial Sequence
  HTT spacer sequence CTCN PAM
ugccuguaauccuagcacuu

SEQ ID NO: 12034 - RNA, 20 nt, Artificial Sequence
  HTT spacer sequence CTCN PAM
uucacaaaaauuguaagggc

SEQ ID NO: 12035 - RNA, 20 nt, Artificial Sequence
  HTT spacer sequence CTCN PAM
caccuguaaucccaucacuu

SEQ ID NO: 12036 - RNA, 20 nt, Artificial Sequence
  HTT spacer sequence CTCN PAM
caaagugaugggauuacagg

SEQ ID NO: 12037 - RNA, 20 nt, Artificial Sequence
  HTT spacer sequence CTCN PAM
gccucccaaagugaugggau

SEQ ID NO: 12038 - RNA, 20 nt, Artificial Sequence
  HTT spacer sequence CTCN PAM
ugaucuaccugccucagccu

SEQ ID NO: 12039 - RNA, 20 nt, Artificial Sequence
  HTT spacer sequence CTCN PAM
ugaccucgugaucuaccugc

SEQ ID NO: 12040 - RNA, 20 nt, Artificial Sequence
  HTT spacer sequence CTCN PAM
aucuccugaccucgugaucu

SEQ ID NO: 12041 - RNA, 20 nt, Artificial Sequence
  HTT spacer sequence CTCN PAM
ggaggcugaggcaguagaau

SEQ ID NO: 12042 - RNA, 20 nt, Artificial Sequence
  HTT spacer sequence CTCN PAM
ugaguagcugggacuacagg

SEQ ID NO: 12043 - RNA, 20 nt, Artificial Sequence
  HTT spacer sequence CTCN PAM
gccuccugaguagcugggac

SEQ ID NO: 12044 - RNA, 20 nt, Artificial Sequence
  HTT spacer sequence CTCN PAM
uggguucaugccauucuacu

SEQ ID NO: 12045 - RNA, 20 nt, Artificial Sequence
  HTT spacer sequence CTCN PAM
gccuccuggguucaugccau

SEQ ID NO: 12046 - RNA, 20 nt, Artificial Sequence
  HTT spacer sequence CTCN PAM
cugcaagcucugccuccugg

SEQ ID NO: 12047 - RNA, 20 nt, Artificial Sequence
  HTT spacer sequence CTCN PAM
agccugggcaacacagcgag

SEQ ID NO: 12048 - RNA, 20 nt, Artificial Sequence
  HTT spacer sequence CTCN PAM
cuguguugcccaggcuggag

SEQ ID NO: 12049 - RNA, 20 nt, Artificial Sequence
  HTT spacer sequence CTCN PAM
gucuaaaaaaaaaaaaaguc

SEQ ID NO: 12050 - RNA, 20 nt, Artificial Sequence
  HTT spacer sequence CTCN PAM
aacuagcccuggguugggcc

SEQ ID NO: 12051 - RNA, 20 nt, Artificial Sequence
  HTT spacer sequence CTCN PAM
ggguuaaaaauggguuaaag

SEQ ID NO: 12052 - RNA, 20 nt, Artificial Sequence
  HTT spacer sequence CTCN PAM
guaaagucccucuggguuaa

SEQ ID NO: 12053 - RNA, 20 nt, Artificial Sequence
  HTT spacer sequence CTCN PAM
ccucaguaaagucccucugg

SEQ ID NO: 12054 - RNA, 20 nt, Artificial Sequence
  HTT spacer sequence CTCN PAM
aacccaaucccaugcuuuac

SEQ ID NO: 12055 - RNA, 20 nt, Artificial Sequence
  HTT spacer sequence CTCN PAM
uuuggauugcgauaguaacu

SEQ ID NO: 12056 - RNA, 20 nt, Artificial Sequence
  HTT spacer sequence CTCN PAM
caaaaaucaaaucugcuaac

SEQ ID NO: 12057 - RNA, 20 nt, Artificial Sequence
  HTT spacer sequence CTCN PAM
gcuucccuugauuaauuuag

SEQ ID NO: 12058 - RNA, 20 nt, Artificial Sequence
  HTT spacer sequence CTCN PAM
uacaucugacugggucugaa

SEQ ID NO: 12059 - RNA, 20 nt, Artificial Sequence
  HTT spacer sequence CTCN PAM
aacuggauccaggccgguua

SEQ ID NO: 12060 - RNA, 20 nt, Artificial Sequence
  HTT spacer sequence CTCN PAM
gagagcucgaaacacaaacu

SEQ ID NO: 12061 - RNA, 20 nt, Artificial Sequence
  HTT spacer sequence CTCN PAM
gaguuuucuuugugcaaauu

SEQ ID NO: 12062 - RNA, 20 nt, Artificial Sequence
  HTT spacer sequence CTCN PAM
cugaguuuucuuugugcaaa

SEQ ID NO: 12063 - RNA, 20 nt, Artificial Sequence
  HTT spacer sequence CTCN PAM
aaacacaaacuguggaucuc

SEQ ID NO: 12064 - RNA, 20 nt, Artificial Sequence
  HTT spacer sequence CTCN PAM
aaaauccaagagaggacuua

SEQ ID NO: 12065 - RNA, 20 nt, Artificial Sequence
  HTT spacer sequence CTCN PAM
uggauuuuggagauccacag

SEQ ID NO: 12066 - RNA, 20 nt, Artificial Sequence
  HTT spacer sequence CTCN PAM
cuuggauuuuggagauccac

SEQ ID NO: 12067 - RNA, 20 nt, Artificial Sequence
  HTT spacer sequence CTCN PAM
gagaaaucaauggacacaag

SEQ ID NO: 12068 - RNA, 20 nt, Artificial Sequence
  HTT spacer sequence CTCN PAM
gagcagcuggggaucaugga

SEQ ID NO: 12069 - RNA, 20 nt, Artificial Sequence
  HTT spacer sequence CTCN PAM
gugccccaggggucauuaga

SEQ ID NO: 12070 - RNA, 20 nt, Artificial Sequence
  HTT spacer sequence CTCN PAM
uuuaaauuuaauucggcuga

SEQ ID NO: 12071 - RNA, 20 nt, Artificial Sequence
  HTT spacer sequence CTCN PAM
gaaucccagcagauucagag

SEQ ID NO: 12072 - RNA, 20 nt, Artificial Sequence
  HTT spacer sequence CTCN PAM
gaaucugcugggauucugag

SEQ ID NO: 12073 - RNA, 20 nt, Artificial Sequence
  HTT spacer sequence CTCN PAM
cugaaucugcugggauucug

SEQ ID NO: 12074 - RNA, 20 nt, Artificial Sequence
  HTT spacer sequence CTCN PAM
agggaugcuucauggucaga

SEQ ID NO: 12075 - RNA, 20 nt, Artificial Sequence
  HTT spacer sequence CTCN PAM
aauuucuguacgucacuucc

SEQ ID NO: 12076 - RNA, 20 nt, Artificial Sequence
  HTT spacer sequence CTCN PAM
ccuccaauuucuguacguca

SEQ ID NO: 12077 - RNA, 20 nt, Artificial Sequence
  HTT spacer sequence CTCN PAM
gcauuugccucauuugaacu

SEQ ID NO: 12078 - RNA, 20 nt, Artificial Sequence
  HTT spacer sequence CTCN PAM
uuugaacucucagcagugua

SEQ ID NO: 12079 - RNA, 20 nt, Artificial Sequence
  HTT spacer sequence CTCN PAM
cagcaguguaugagugaaau

SEQ ID NO: 12080 - RNA, 20 nt, Artificial Sequence
  HTT spacer sequence CTCN PAM
gcaguguaugagugaaauau

SEQ ID NO: 12081 - RNA, 20 nt, Artificial Sequence
  HTT spacer sequence CTCN PAM
uacacugcugagaguucaaa

SEQ ID NO: 12082 - RNA, 20 nt, Artificial Sequence
  HTT spacer sequence CTCN PAM
gcuacuguuacaggugcgua

SEQ ID NO: 12083 - RNA, 20 nt, Artificial Sequence
  HTT spacer sequence CTCN PAM
aauacagaaguacagagucc

SEQ ID NO: 12084 - RNA, 20 nt, Artificial Sequence
  HTT spacer sequence CTCN PAM
guacuucuguauuugagucu

SEQ ID NO: 12085 - RNA, 20 nt, Artificial Sequence
  HTT spacer sequence CTCN PAM
ggccauauuuaguuugcuuu

SEQ ID NO: 12086 - RNA, 20 nt, Artificial Sequence
  HTT spacer sequence CTCN PAM
uugcaucuuguaaagcugaa

SEQ ID NO: 12087 - RNA, 20 nt, Artificial Sequence
  HTT spacer sequence CTCN PAM
guccccaugaaacacuaauu

SEQ ID NO: 12088 - RNA, 20 nt, Artificial Sequence
  HTT spacer sequence CTCN PAM
guuuuuaugaauuugacuac

SEQ ID NO: 12089 - RNA, 20 nt, Artificial Sequence
  HTT spacer sequence CTCN PAM
acaucuccugucucagugga

SEQ ID NO: 12090 - RNA, 20 nt, Artificial Sequence
  HTT spacer sequence CTCN PAM
ugucucaguggaaucagaca

SEQ ID NO: 12091 - RNA, 20 nt, Artificial Sequence
  HTT spacer sequence CTCN PAM
guggaaucagacagcauuug

SEQ ID NO: 12092 - RNA, 20 nt, Artificial Sequence
  HTT spacer sequence CTCN PAM
aaaaaaaaagaaaaagaaaa

SEQ ID NO: 12093 - RNA, 20 nt, Artificial Sequence
  HTT spacer sequence CTCN PAM
gccucaaaaaaaaaagaaaa

SEQ ID NO: 12094 - RNA, 20 nt, Artificial Sequence
  HTT spacer sequence CTCN PAM
cucugucgcccaggcuggag

SEQ ID NO: 12095 - RNA, 20 nt, Artificial Sequence
  HTT spacer sequence CTCN PAM
gucgcccaggcuggagugca

SEQ ID NO: 12096 - RNA, 20 nt, Artificial Sequence
  HTT spacer sequence CTCN PAM
agccugggcgacagagcgag

SEQ ID NO: 12097 - RNA, 20 nt, Artificial Sequence
  HTT spacer sequence CTCN PAM
gcucacugcaaccucugccu

SEQ ID NO: 12098 - RNA, 20 nt, Artificial Sequence
  HTT spacer sequence CTCN PAM
cugcaaccucugccucccgg

SEQ ID NO: 12099 - RNA, 20 nt, Artificial Sequence
  HTT spacer sequence CTCN PAM
gccucccggguucaagcaau

SEQ ID NO: 12100 - RNA, 20 nt, Artificial Sequence
  HTT spacer sequence CTCN PAM
cggguucaagcaauacuccu

SEQ ID NO: 12101 - RNA, 20 nt, Artificial Sequence
  HTT spacer sequence CTCN PAM
ugucucagccucccgaguag

SEQ ID NO: 12102 - RNA, 20 nt, Artificial Sequence
  HTT spacer sequence CTCN PAM
gccucccgaguagcugggac

SEQ ID NO: 12103 - RNA, 20 nt, Artificial Sequence
  HTT spacer sequence CTCN PAM
cgaguagcugggacuacagg

SEQ ID NO: 12104 - RNA, 20 nt, Artificial Sequence
  HTT spacer sequence CTCN PAM
ggaggcugagacaggaguau

SEQ ID NO: 12105 - RNA, 20 nt, Artificial Sequence
  HTT spacer sequence CTCN PAM
acuaaagauacaaaaaauua

SEQ ID NO: 12106 - RNA, 20 nt, Artificial Sequence
  HTT spacer sequence CTCN PAM
ugaccucgugaucugcccgc

SEQ ID NO: 12107 - RNA, 20 nt, Artificial Sequence
  HTT spacer sequence CTCN PAM
ugaucugcccgccucggccu

SEQ ID NO: 12108 - RNA, 20 nt, Artificial Sequence
  HTT spacer sequence CTCN PAM
gccucccaaagugcugggau

SEQ ID NO: 12109 - RNA, 20 nt, Artificial Sequence
  HTT spacer sequence CTCN PAM
caaagugcugggauuacagg

SEQ ID NO: 12110 - RNA, 20 nt, Artificial Sequence
  HTT spacer sequence CTCN PAM
cgccuguaaucccagcacuu

SEQ ID NO: 12111 - RNA, 20 nt, Artificial Sequence
  HTT spacer sequence CTCN PAM
agguucauccauguuguagu

SEQ ID NO: 12112 - RNA, 20 nt, Artificial Sequence
  HTT spacer sequence CTCN PAM
uauuuaaggccaaaacuauu

SEQ ID NO: 12113 - RNA, 20 nt, Artificial Sequence
  HTT spacer sequence CTCN PAM
uggggucagcauugggaccc

SEQ ID NO: 12114 - RNA, 20 nt, Artificial Sequence
  HTT spacer sequence CTCN PAM
cuuggggucagcauugggac

SEQ ID NO: 12115 - RNA, 20 nt, Artificial Sequence
  HTT spacer sequence CTCN PAM
agaaagaauucagacgaguc

SEQ ID NO: 12116 - RNA, 20 nt, Artificial Sequence
  HTT spacer sequence CTCN PAM
ucugaauucuuucuugagca

SEQ ID NO: 12117 - RNA, 20 nt, Artificial Sequence
  HTT spacer sequence CTCN PAM
auuccuuggcuuucuuagua

SEQ ID NO: 12118 - RNA, 20 nt, Artificial Sequence
  HTT spacer sequence CTCN PAM
augggcagagcagccccgau

SEQ ID NO: 12119 - RNA, 20 nt, Artificial Sequence
  HTT spacer sequence CTCN PAM
gcccauggaguagccauucu

SEQ ID NO: 12120 - RNA, 20 nt, Artificial Sequence
  HTT spacer sequence CTCN PAM
aaaauaaauaaauaaauaaa

SEQ ID NO: 12121 - RNA, 20 nt, Artificial Sequence
  HTT spacer sequence CTCN PAM
gucucaaaaauaaauaaaua

SEQ ID NO: 12122 - RNA, 20 nt, Artificial Sequence
  HTT spacer sequence CTCN PAM
cuuuguugcccaggcuggag

SEQ ID NO: 12123 - RNA, 20 nt, Artificial Sequence
  HTT spacer sequence CTCN PAM
agccugggcaacaaagggag

SEQ ID NO: 12124 - RNA, 20 nt, Artificial Sequence
  HTT spacer sequence CTCN PAM
gcucacugcaagcuccgccu

SEQ ID NO: 12125 - RNA, 20 nt, Artificial Sequence
  HTT spacer sequence CTCN PAM
cugcaagcuccgccucccgg

SEQ ID NO: 12126 - RNA, 20 nt, Artificial Sequence
  HTT spacer sequence CTCN PAM
gccucccggguucaugccau

SEQ ID NO: 12127 - RNA, 20 nt, Artificial Sequence
  HTT spacer sequence CTCN PAM
cggguucaugccauucuucu

SEQ ID NO: 12128 - RNA, 20 nt, Artificial Sequence
  HTT spacer sequence CTCN PAM
gccuccugaguagcugggac

SEQ ID NO: 12129 - RNA, 20 nt, Artificial Sequence
  HTT spacer sequence CTCN PAM
ugaguagcugggacuauagg

SEQ ID NO: 12130 - RNA, 20 nt, Artificial Sequence
  HTT spacer sequence CTCN PAM
ggaggcugaggcagaagaau

SEQ ID NO: 12131 - RNA, 20 nt, Artificial Sequence
  HTT spacer sequence CTCN PAM
acuaaaaauacaaaaaauua

SEQ ID NO: 12132 - RNA, 20 nt, Artificial Sequence
  HTT spacer sequence CTCN PAM
aucuccugaccuugugaucc

SEQ ID NO: 12133 - RNA, 20 nt, Artificial Sequence
  HTT spacer sequence CTCN PAM
ugaccuugugauccgcccgc

SEQ ID NO: 12134 - RNA, 20 nt, Artificial Sequence
  HTT spacer sequence CTCN PAM
gccucccaaagugcugggau

SEQ ID NO: 12135 - RNA, 20 nt, Artificial Sequence
  HTT spacer sequence CTCN PAM
caaagugcugggauuacagg

SEQ ID NO: 12136 - RNA, 20 nt, Artificial Sequence
  HTT spacer sequence CTCN PAM
cgccuguaaucccagcacuu

SEQ ID NO: 12137 - RNA, 20 nt, Artificial Sequence
  HTT spacer sequence CTCN PAM
uguuuagcauauaaucaaga

SEQ ID NO: 12138 - RNA, 20 nt, Artificial Sequence
  HTT spacer sequence CTCN PAM
ugaauaauccaccucuuguu

SEQ ID NO: 12139 - RNA, 20 nt, Artificial Sequence
  HTT spacer sequence CTCN PAM
guucugggaauugcccaccc

SEQ ID NO: 12140 - RNA, 20 nt, Artificial Sequence
  HTT spacer sequence CTCN PAM
ccuuuuuagaacauauaggg

SEQ ID NO: 12141 - RNA, 20 nt, Artificial Sequence
  HTT spacer sequence CTCN PAM
cgccuguaaucccagcacuu

SEQ ID NO: 12142 - RNA, 20 nt, Artificial Sequence
  HTT spacer sequence CTCN PAM
caaagugcugggauuacagg

SEQ ID NO: 12143 - RNA, 20 nt, Artificial Sequence
  HTT spacer sequence CTCN PAM
ggucaucugcccgccuuggc

SEQ ID NO: 12144 - RNA, 20 nt, Artificial Sequence
  HTT spacer sequence CTCN PAM
ugaccucaggucaucugccc

SEQ ID NO: 12145 - RNA, 20 nt, Artificial Sequence
  HTT spacer sequence CTCN PAM
aacuccugaccucaggucau

SEQ ID NO: 12146 - RNA, 20 nt, Artificial Sequence
  HTT spacer sequence CTCN PAM
auguuggucaagcuggucuc

SEQ ID NO: 12147 - RNA, 20 nt, Artificial Sequence
  HTT spacer sequence CTCN PAM
acuaaaaauaaaaaauuagc

SEQ ID NO: 12148 - RNA, 20 nt, Artificial Sequence
  HTT spacer sequence CTCN PAM
cagcuacucgggaggcugag

SEQ ID NO: 12149 - RNA, 20 nt, Artificial Sequence
  HTT spacer sequence CTCN PAM
ggaggcugaggcaggagaau

SEQ ID NO: 12150 - RNA, 20 nt, Artificial Sequence
  HTT spacer sequence CTCN PAM
cgaguagcugggaguacagg

SEQ ID NO: 12151 - RNA, 20 nt, Artificial Sequence
  HTT spacer sequence CTCN PAM
gccucccgaguagcugggag

SEQ ID NO: 12152 - RNA, 20 nt, Artificial Sequence
  HTT spacer sequence CTCN PAM
ugccucagccucccgaguag

SEQ ID NO: 12153 - RNA, 20 nt, Artificial Sequence
  HTT spacer sequence CTCN PAM
gcuucccggguucaagcgau

SEQ ID NO: 12154 - RNA, 20 nt, Artificial Sequence
  HTT spacer sequence CTCN PAM
ccacaaccucggcuucccgg

SEQ ID NO: 12155 - RNA, 20 nt, Artificial Sequence
  HTT spacer sequence CTCN PAM
gcucaccacaaccucggcuu

SEQ ID NO: 12156 - RNA, 20 nt, Artificial Sequence
  HTT spacer sequence CTCN PAM
agccugcacaacaagaauga

SEQ ID NO: 12157 - RNA, 20 nt, Artificial Sequence
  HTT spacer sequence CTCN PAM
gucucaaaagaaaaaaaaaa

SEQ ID NO: 12158 - RNA, 20 nt, Artificial Sequence
  HTT spacer sequence CTCN PAM
aaagaaaaaaaaaaaauaga

SEQ ID NO: 12159 - RNA, 20 nt, Artificial Sequence
  HTT spacer sequence CTCN PAM
caccagccccaugacaguuu

SEQ ID NO: 12160 - RNA, 20 nt, Artificial Sequence
  HTT spacer sequence CTCN PAM
uuauaagcuaauuauaaugc

SEQ ID NO: 12161 - RNA, 20 nt, Artificial Sequence
  HTT spacer sequence CTCN PAM
cagcucauuauaagcuaauu

SEQ ID NO: 12162 - RNA, 20 nt, Artificial Sequence
  HTT spacer sequence CTCN PAM
gguuguucucacagcucauu

SEQ ID NO: 12163 - RNA, 20 nt, Artificial Sequence
  HTT spacer sequence CTCN PAM
uaccucauccugugacuaug

SEQ ID NO: 12164 - RNA, 20 nt, Artificial Sequence
  HTT spacer sequence CTCN PAM
uccugugacuaugaaugccu

SEQ ID NO: 12165 - RNA, 20 nt, Artificial Sequence
  HTT spacer sequence CTCN PAM
ugggaacgcggcccagcagg

SEQ ID NO: 12166 - RNA, 20 nt, Artificial Sequence
  HTT spacer sequence CTCN PAM
uuuuaccccgccccuauuca

SEQ ID NO: 12167 - RNA, 20 nt, Artificial Sequence
  HTT spacer sequence CTCN PAM
gacauauuagcugcaucauu

SEQ ID NO: 12168 - RNA, 20 nt, Artificial Sequence
  HTT spacer sequence CTCN PAM
gucacccaggcuggagugcu

SEQ ID NO: 12169 - RNA, 20 nt, Artificial Sequence
  HTT spacer sequence CTCN PAM
agccugggugacagagcaag

SEQ ID NO: 12170 - RNA, 20 nt, Artificial Sequence
  HTT spacer sequence CTCN PAM
gcucacugcaaucuccaccu

SEQ ID NO: 12171 - RNA, 20 nt, Artificial Sequence
  HTT spacer sequence CTCN PAM
cugcaaucuccaccuccgag

SEQ ID NO: 12172 - RNA, 20 nt, Artificial Sequence
  HTT spacer sequence CTCN PAM
accuccgagguuccagcgau

SEQ ID NO: 12173 - RNA, 20 nt, Artificial Sequence
  HTT spacer sequence CTCN PAM
gagguuccagcgauucucuu

SEQ ID NO: 12174 - RNA, 20 nt, Artificial Sequence
  HTT spacer sequence CTCN PAM
gagguggagauugcagugag

SEQ ID NO: 12175 - RNA, 20 nt, Artificial Sequence
  HTT spacer sequence CTCN PAM
ugccucagccucccgaguag

SEQ ID NO: 12176 - RNA, 20 nt, Artificial Sequence
  HTT spacer sequence CTCN PAM
gccucccgaguagcugggac

SEQ ID NO: 12177 - RNA, 20 nt, Artificial Sequence
  HTT spacer sequence CTCN PAM
cgaguagcugggacuacagg

SEQ ID NO: 12178 - RNA, 20 nt, Artificial Sequence
  HTT spacer sequence CTCN PAM
ggaggcugaggcaagagaau

SEQ ID NO: 12179 - RNA, 20 nt, Artificial Sequence
  HTT spacer sequence CTCN PAM
acuaaaaacacaaaaauuag

SEQ ID NO: 12180 - RNA, 20 nt, Artificial Sequence
  HTT spacer sequence CTCN PAM
aacuccugggcuuaagcaau

SEQ ID NO: 12181 - RNA, 20 nt, Artificial Sequence
  HTT spacer sequence CTCN PAM
ugggcuuaagcaauacagcc

SEQ ID NO: 12182 - RNA, 20 nt, Artificial Sequence
  HTT spacer sequence CTCN PAM
caaaguguugggauuacaag

SEQ ID NO: 12183 - RNA, 20 nt, Artificial Sequence
  HTT spacer sequence CTCN PAM
ugcuuguaaucccaacacuu

SEQ ID NO: 12184 - RNA, 20 nt, Artificial Sequence
  HTT spacer sequence CTCN PAM
uuuuacauuuccacuuguua

SEQ ID NO: 12185 - RNA, 20 nt, Artificial Sequence
  HTT spacer sequence CTCN PAM
ggccaguuuucaguuuaaca

SEQ ID NO: 12186 - RNA, 20 nt, Artificial Sequence
  HTT spacer sequence CTCN PAM
gccaguuccugcagccagac

SEQ ID NO: 12187 - RNA, 20 nt, Artificial Sequence
  HTT spacer sequence CTCN PAM
caggccgcaaacuguucaaa

SEQ ID NO: 12188 - RNA, 20 nt, Artificial Sequence
  HTT spacer sequence CTCN PAM
gaacacaguuugaacaguuu

SEQ ID NO: 12189 - RNA, 20 nt, Artificial Sequence
  HTT spacer sequence CTCN PAM
cuucugcuuucuguggccac

SEQ ID NO: 12190 - RNA, 20 nt, Artificial Sequence
  HTT spacer sequence CTCN PAM
agggaugcuguguggucaaa

SEQ ID NO: 12191 - RNA, 20 nt, Artificial Sequence
  HTT spacer sequence CTCN PAM
cugaaucugcugugauucug

SEQ ID NO: 12192 - RNA, 20 nt, Artificial Sequence
  HTT spacer sequence CTCN PAM
guucaauucaauuuguugga

SEQ ID NO: 12193 - RNA, 20 nt, Artificial Sequence
  HTT spacer sequence CTCN PAM
acuuccucauaaauaaguca

SEQ ID NO: 12194 - RNA, 20 nt, Artificial Sequence
  HTT spacer sequence CTCN PAM
uaaauaagucauuuuaaaug

SEQ ID NO: 12195 - RNA, 20 nt, Artificial Sequence
  HTT spacer sequence CTCN PAM
auguccaaaaauagaaaauu

SEQ ID NO: 12196 - RNA, 20 nt, Artificial Sequence
  HTT spacer sequence CTCN PAM
aaaaaagaaaaaaaaaauga

SEQ ID NO: 12197 - RNA, 20 nt, Artificial Sequence
  HTT spacer sequence CTCN PAM
gucucaaaaaaagaaaaaaa

SEQ ID NO: 12198 - RNA, 20 nt, Artificial Sequence
  HTT spacer sequence CTCN PAM
cuccgucacccaggcuggag

SEQ ID NO: 12199 - RNA, 20 nt, Artificial Sequence
  HTT spacer sequence CTCN PAM
gucacccaggcuggagugca

SEQ ID NO: 12200 - RNA, 20 nt, Artificial Sequence
  HTT spacer sequence CTCN PAM
agccugggugacggagcgag

SEQ ID NO: 12201 - RNA, 20 nt, Artificial Sequence
  HTT spacer sequence CTCN PAM
accucccuccucagccuccu

SEQ ID NO: 12202 - RNA, 20 nt, Artificial Sequence
  HTT spacer sequence CTCN PAM
cuccucagccuccugaguag

SEQ ID NO: 12203 - RNA, 20 nt, Artificial Sequence
  HTT spacer sequence CTCN PAM
ucagccuccugaguagcugg

SEQ ID NO: 12204 - RNA, 20 nt, Artificial Sequence
  HTT spacer sequence CTCN PAM
gccuccugaguagcugggau

SEQ ID NO: 12205 - RNA, 20 nt, Artificial Sequence
  HTT spacer sequence CTCN PAM
ugaguagcugggauuacagg

SEQ ID NO: 12206 - RNA, 20 nt, Artificial Sequence
  HTT spacer sequence CTCN PAM
ggaggcugaggagggaggug

SEQ ID NO: 12207 - RNA, 20 nt, Artificial Sequence
  HTT spacer sequence CTCN PAM
acuaaaaauacaaaaauuag

SEQ ID NO: 12208 - RNA, 20 nt, Artificial Sequence
  HTT spacer sequence CTCN PAM
aacuccugaccucagguggu

SEQ ID NO: 12209 - RNA, 20 nt, Artificial Sequence
  HTT spacer sequence CTCN PAM
ugaccucaggugguccaccu

SEQ ID NO: 12210 - RNA, 20 nt, Artificial Sequence
  HTT spacer sequence CTCN PAM
ggugguccaccugccuuggc

SEQ ID NO: 12211 - RNA, 20 nt, Artificial Sequence
  HTT spacer sequence CTCN PAM
caaaaugcugggauuacagg

SEQ ID NO: 12212 - RNA, 20 nt, Artificial Sequence
  HTT spacer sequence CTCN PAM
ggccuguaaucccagcauuu

SEQ ID NO: 12213 - RNA, 20 nt, Artificial Sequence
  HTT spacer sequence CTCN PAM
ucuucuugauauuaauguug

SEQ ID NO: 12214 - RNA, 20 nt, Artificial Sequence
  HTT spacer sequence CTCN PAM
aaaaaaaaaacaaaaaacac

SEQ ID NO: 12215 - RNA, 20 nt, Artificial Sequence
  HTT spacer sequence CTCN PAM
gucucaaaaaaaaaaacaaa

SEQ ID NO: 12216 - RNA, 20 nt, Artificial Sequence
  HTT spacer sequence CTCN PAM
uucauucugucacccaggcu

SEQ ID NO: 12217 - RNA, 20 nt, Artificial Sequence
  HTT spacer sequence CTCN PAM
agccugggugacagaaugaa

SEQ ID NO: 12218 - RNA, 20 nt, Artificial Sequence
  HTT spacer sequence CTCN PAM
gcucacugcaaccucugucu

SEQ ID NO: 12219 - RNA, 20 nt, Artificial Sequence
  HTT spacer sequence CTCN PAM
cugcaaccucugucuccugg

SEQ ID NO: 12220 - RNA, 20 nt, Artificial Sequence
  HTT spacer sequence CTCN PAM
gucuccuggguuccagugau

SEQ ID NO: 12221 - RNA, 20 nt, Artificial Sequence
  HTT spacer sequence CTCN PAM
uggguuccagugauucuccu

SEQ ID NO: 12222 - RNA, 20 nt, Artificial Sequence
  HTT spacer sequence CTCN PAM
ugcgucggucuccugaguag

SEQ ID NO: 12223 - RNA, 20 nt, Artificial Sequence
  HTT spacer sequence CTCN PAM
ugaguagcuguguuccuggg

SEQ ID NO: 12224 - RNA, 20 nt, Artificial Sequence
  HTT spacer sequence CTCN PAM
ggagaccgacgcaggagaau

SEQ ID NO: 12225 - RNA, 20 nt, Artificial Sequence
  HTT spacer sequence CTCN PAM
ucagaaaagugauaggaggu

SEQ ID NO: 12226 - RNA, 20 nt, Artificial Sequence
  HTT spacer sequence CTCN PAM
uaucacuuuucugaagagug

SEQ ID NO: 12227 - RNA, 20 nt, Artificial Sequence
  HTT spacer sequence CTCN PAM
uuucuacauuuccuuacuaa

SEQ ID NO: 12228 - RNA, 20 nt, Artificial Sequence
  HTT spacer sequence CTCN PAM
guuggugucucuucaaucuu

SEQ ID NO: 12229 - RNA, 20 nt, Artificial Sequence
  HTT spacer sequence CTCN PAM
ucaaucuuuccucacacuuu

SEQ ID NO: 12230 - RNA, 20 nt, Artificial Sequence
  HTT spacer sequence CTCN PAM
cacuuuucuuggguuuuucc

SEQ ID NO: 12231 - RNA, 20 nt, Artificial Sequence
  HTT spacer sequence CTCN PAM
ugauucaggaaaaacccaag

SEQ ID NO: 12232 - RNA, 20 nt, Artificial Sequence
  HTT spacer sequence CTCN PAM
uuuuguugcccaggcuagag

SEQ ID NO: 12233 - RNA, 20 nt, Artificial Sequence
  HTT spacer sequence CTCN PAM
agccugggcaacaaaaugag

SEQ ID NO: 12234 - RNA, 20 nt, Artificial Sequence
  HTT spacer sequence CTCN PAM
ucauacuccugggcucaagu

SEQ ID NO: 12235 - RNA, 20 nt, Artificial Sequence
  HTT spacer sequence CTCN PAM
uacuccugggcucaagugau

SEQ ID NO: 12236 - RNA, 20 nt, Artificial Sequence
  HTT spacer sequence CTCN PAM
ugggcucaagugauccuucc

SEQ ID NO: 12237 - RNA, 20 nt, Artificial Sequence
  HTT spacer sequence CTCN PAM
agugauccuuccaccucuga

SEQ ID NO: 12238 - RNA, 20 nt, Artificial Sequence
  HTT spacer sequence CTCN PAM
gaaaccccaaaauuugagaa

SEQ ID NO: 12239 - RNA, 20 nt, Artificial Sequence
  HTT spacer sequence CTCN PAM
aauuuugggguuucagaggu

SEQ ID NO: 12240 - RNA, 20 nt, Artificial Sequence
  HTT spacer sequence CTCN PAM
uuuaauuuagaaaguuuauu

SEQ ID NO: 12241 - RNA, 20 nt, Artificial Sequence
  HTT spacer sequence CTCN PAM
accuuggcaaaauaaacuuu

SEQ ID NO: 12242 - RNA, 20 nt, Artificial Sequence
  HTT spacer sequence CTCN PAM
uauaucaucacaggugugca

SEQ ID NO: 12243 - RNA, 20 nt, Artificial Sequence
  HTT spacer sequence CTCN PAM
guaucugccuaaauaauuuc

SEQ ID NO: 12244 - RNA, 20 nt, Artificial Sequence
  HTT spacer sequence CTCN PAM
guaagguuuucuuuucaaug

SEQ ID NO: 12245 - RNA, 20 nt, Artificial Sequence
  HTT spacer sequence CTCN PAM
uuguuagaaaagaaaaugcu

SEQ ID NO: 12246 - RNA, 20 nt, Artificial Sequence
  HTT spacer sequence CTCN PAM
auuuuacaggcugcucuuug

SEQ ID NO: 12247 - RNA, 20 nt, Artificial Sequence
  HTT spacer sequence CTCN PAM
aucuucccuuuccuugucaa

SEQ ID NO: 12248 - RNA, 20 nt, Artificial Sequence
  HTT spacer sequence CTCN PAM
uuacugugcacaugguugac

SEQ ID NO: 12249 - RNA, 20 nt, Artificial Sequence
  HTT spacer sequence CTCN PAM
ggggacacuauguugccugc

SEQ ID NO: 12250 - RNA, 20 nt, Artificial Sequence
  HTT spacer sequence CTCN PAM
acucgggggacacuauguug

SEQ ID NO: 12251 - RNA, 20 nt, Artificial Sequence
  HTT spacer sequence CTCN PAM
ccuuuuauuaugcaaauugg

SEQ ID NO: 12252 - RNA, 20 nt, Artificial Sequence
  HTT spacer sequence CTCN PAM
ucaagccugucuauaaaacc

SEQ ID NO: 12253 - RNA, 20 nt, Artificial Sequence
  HTT spacer sequence CTCN PAM
agccugucuauaaaacccug

SEQ ID NO: 12254 - RNA, 20 nt, Artificial Sequence
  HTT spacer sequence CTCN PAM
cucucuauaggagacagcua

SEQ ID NO: 12255 - RNA, 20 nt, Artificial Sequence
  HTT spacer sequence CTCN PAM
cucuauaggagacagcuauu

SEQ ID NO: 12256 - RNA, 20 nt, Artificial Sequence
  HTT spacer sequence CTCN PAM
cuauaggagacagcuauuca

SEQ ID NO: 12257 - RNA, 20 nt, Artificial Sequence
  HTT spacer sequence CTCN PAM
auaggagacagcuauucauu

SEQ ID NO: 12258 - RNA, 20 nt, Artificial Sequence
  HTT spacer sequence CTCN PAM
uauagagagagaggggugcc

SEQ ID NO: 12259 - RNA, 20 nt, Artificial Sequence
  HTT spacer sequence CTCN PAM
uucuuucaccuauuaaagcu

SEQ ID NO: 12260 - RNA, 20 nt, Artificial Sequence
  HTT spacer sequence CTCN PAM
acucuuaaccccacuccgug

SEQ ID NO: 12261 - RNA, 20 nt, Artificial Sequence
  HTT spacer sequence CTCN PAM
uaaccccacuccguguguau

SEQ ID NO: 12262 - RNA, 20 nt, Artificial Sequence
  HTT spacer sequence CTCN PAM
guguguaucuauguucuuga

SEQ ID NO: 12263 - RNA, 20 nt, Artificial Sequence
  HTT spacer sequence CTCN PAM
ugccaaggaaaucaagaaca

SEQ ID NO: 12264 - RNA, 20 nt, Artificial Sequence
  HTT spacer sequence CTCN PAM
ggaaauccugaugacauguu

SEQ ID NO: 12265 - RNA, 20 nt, Artificial Sequence
  HTT spacer sequence CTCN PAM
cuaaaauguauaaaaccaag

SEQ ID NO: 12266 - RNA, 20 nt, Artificial Sequence
  HTT spacer sequence CTCN PAM
ugucucccuaaaauguauaa

SEQ ID NO: 12267 - RNA, 20 nt, Artificial Sequence
  HTT spacer sequence CTCN PAM
aguuguccccgccuuucugg

SEQ ID NO: 12268 - RNA, 20 nt, Artificial Sequence
  HTT spacer sequence CTCN PAM
cugccucaaguuguccccgc

SEQ ID NO: 12269 - RNA, 20 nt, Artificial Sequence
  HTT spacer sequence CTCN PAM
cccugccucaaguugucccc

SEQ ID NO: 12270 - RNA, 20 nt, Artificial Sequence
  HTT spacer sequence CTCN PAM
cucccugccucaaguugucc

SEQ ID NO: 12271 - RNA, 20 nt, Artificial Sequence
  HTT spacer sequence CTCN PAM
gauaagccuuuccaaaggag

SEQ ID NO: 12272 - RNA, 20 nt, Artificial Sequence
  HTT spacer sequence CTCN PAM
uuuggaaaggcuuaucggag

SEQ ID NO: 12273 - RNA, 20 nt, Artificial Sequence
  HTT spacer sequence CTCN PAM
ugccuguaaugccagcacuu

SEQ ID NO: 12274 - RNA, 20 nt, Artificial Sequence
  HTT spacer sequence CTCN PAM
caaagugcuggcauuacagg

SEQ ID NO: 12275 - RNA, 20 nt, Artificial Sequence
  HTT spacer sequence CTCN PAM
gccucccaaagugcuggcau

SEQ ID NO: 12276 - RNA, 20 nt, Artificial Sequence
  HTT spacer sequence CTCN PAM
ggugauccacccaccuccgc

SEQ ID NO: 12277 - RNA, 20 nt, Artificial Sequence
  HTT spacer sequence CTCN PAM
ugaccucaggugauccaccc

SEQ ID NO: 12278 - RNA, 20 nt, Artificial Sequence
  HTT spacer sequence CTCN PAM
aacuccugaccucaggugau

SEQ ID NO: 12279 - RNA, 20 nt, Artificial Sequence
  HTT spacer sequence CTCN PAM
caaacuccugaccucaggug

SEQ ID NO: 12280 - RNA, 20 nt, Artificial Sequence
  HTT spacer sequence CTCN PAM
acuaaaaauacaaaaaauua

SEQ ID NO: 12281 - RNA, 20 nt, Artificial Sequence
  HTT spacer sequence CTCN PAM
ggaggcugaggcaggagaau

SEQ ID NO: 12282 - RNA, 20 nt, Artificial Sequence
  HTT spacer sequence CTCN PAM
cgaguagcugggauuacagg

SEQ ID NO: 12283 - RNA, 20 nt, Artificial Sequence
  HTT spacer sequence CTCN PAM
gccucccgaguagcugggau

SEQ ID NO: 12284 - RNA, 20 nt, Artificial Sequence
  HTT spacer sequence CTCN PAM
ugccucagccucccgaguag

SEQ ID NO: 12285 - RNA, 20 nt, Artificial Sequence
  HTT spacer sequence CTCN PAM
uccuucuggguucaagcuau

SEQ ID NO: 12286 - RNA, 20 nt, Artificial Sequence
  HTT spacer sequence CTCN PAM
cugcaaccucuuccuucugg

SEQ ID NO: 12287 - RNA, 20 nt, Artificial Sequence
  HTT spacer sequence CTCN PAM
gcucacugcaaccucuuccu

SEQ ID NO: 12288 - RNA, 20 nt, Artificial Sequence
  HTT spacer sequence CTCN PAM
agccugggcaacaagaguga

SEQ ID NO: 12289 - RNA, 20 nt, Artificial Sequence
  HTT spacer sequence CTCN PAM
uguugcccaggcuggagugc

SEQ ID NO: 12290 - RNA, 20 nt, Artificial Sequence
  HTT spacer sequence CTCN PAM
aucucagaaaaaaaaaaaaa

SEQ ID NO: 12291 - RNA, 20 nt, Artificial Sequence
  HTT spacer sequence CTCN PAM
gaaaaaaaaaaaaaaggccu

SEQ ID NO: 12292 - RNA, 20 nt, Artificial Sequence
  HTT spacer sequence CTCN PAM
cgccuguaaucccagcacuu

SEQ ID NO: 12293 - RNA, 20 nt, Artificial Sequence
  HTT spacer sequence CTCN PAM
gcuucccaaagugcugggau

SEQ ID NO: 12294 - RNA, 20 nt, Artificial Sequence
  HTT spacer sequence CTCN PAM
ugacuuugugaccugcccgc

SEQ ID NO: 12295 - RNA, 20 nt, Artificial Sequence
  HTT spacer sequence CTCN PAM
aucuccugacuuugugaccu

SEQ ID NO: 12296 - RNA, 20 nt, Artificial Sequence
  HTT spacer sequence CTCN PAM
acuaaaaaauacaaaaaacu

SEQ ID NO: 12297 - RNA, 20 nt, Artificial Sequence
  HTT spacer sequence CTCN PAM
ccaccacacccagcuaguuu

SEQ ID NO: 12298 - RNA, 20 nt, Artificial Sequence
  HTT spacer sequence CTCN PAM
gcaggcugaggcaggagaau

SEQ ID NO: 12299 - RNA, 20 nt, Artificial Sequence
  HTT spacer sequence CTCN PAM
gccugccgaguagcugggac

SEQ ID NO: 12300 - RNA, 20 nt, Artificial Sequence
  HTT spacer sequence CTCN PAM
ugccucagccugccgaguag

SEQ ID NO: 12301 - RNA, 20 nt, Artificial Sequence
  HTT spacer sequence CTCN PAM
ccgguucacgccauucuccu

SEQ ID NO: 12302 - RNA, 20 nt, Artificial Sequence
  HTT spacer sequence CTCN PAM
gccuccccgguucacgccau

SEQ ID NO: 12303 - RNA, 20 nt, Artificial Sequence
  HTT spacer sequence CTCN PAM
cugcaagcuccgccuccccg

SEQ ID NO: 12304 - RNA, 20 nt, Artificial Sequence
  HTT spacer sequence CTCN PAM
gcucacugcaagcuccgccu

SEQ ID NO: 12305 - RNA, 20 nt, Artificial Sequence
  HTT spacer sequence CTCN PAM
agcccggacgacagggcaag

SEQ ID NO: 12306 - RNA, 20 nt, Artificial Sequence
  HTT spacer sequence CTCN PAM
aucucaaauuaaaaaaaaaa

SEQ ID NO: 12307 - RNA, 20 nt, Artificial Sequence
  HTT spacer sequence CTCN PAM
aauuaaaaaaaaaaaaaaaa

SEQ ID NO: 12308 - RNA, 20 nt, Artificial Sequence
  HTT spacer sequence CTCN PAM
uuuuuuuuuuuuuuuuuuuu

SEQ ID NO: 12309 - RNA, 20 nt, Artificial Sequence
  HTT spacer sequence CTCN PAM
cuuuuuuuuuuuuuuuuuuu

SEQ ID NO: 12310 - RNA, 20 nt, Artificial Sequence
  HTT spacer sequence CTCN PAM
cucuuuuuuuuuuuuuuuuu

SEQ ID NO: 12311 - RNA, 20 nt, Artificial Sequence
  HTT spacer sequence CTCN PAM
cucucuuuuuuuuuuuuuuu

SEQ ID NO: 12312 - RNA, 20 nt, Artificial Sequence
  HTT spacer sequence CTCN PAM
gugagcagaaggaugacuuu

SEQ ID NO: 12313 - RNA, 20 nt, Artificial Sequence
  HTT spacer sequence CTCN PAM
cugagauagaugcauauucu

SEQ ID NO: 12314 - RNA, 20 nt, Artificial Sequence
  HTT spacer sequence CTCN PAM
cauuccauucaaagucaucc

SEQ ID NO: 12315 - RNA, 20 nt, Artificial Sequence
  HTT spacer sequence CTCN PAM
agguauguuccuuucacaua

SEQ ID NO: 12316 - RNA, 20 nt, Artificial Sequence
  HTT spacer sequence CTCN PAM
gccucccaaguagcugggac

SEQ ID NO: 12317 - RNA, 20 nt, Artificial Sequence
  HTT spacer sequence CTCN PAM
caaguagcugggaccacaag

SEQ ID NO: 12318 - RNA, 20 nt, Artificial Sequence
  HTT spacer sequence CTCN PAM
cuauguguccaggcuggucu

SEQ ID NO: 12319 - RNA, 20 nt, Artificial Sequence
  HTT spacer sequence CTCN PAM
gggguuuuagaccagccugg

SEQ ID NO: 12320 - RNA, 20 nt, Artificial Sequence
  HTT spacer sequence CTCN PAM
aaugguccucccgccucagc

SEQ ID NO: 12321 - RNA, 20 nt, Artificial Sequence
  HTT spacer sequence CTCN PAM
cgccucagccucccgaaaug

SEQ ID NO: 12322 - RNA, 20 nt, Artificial Sequence
  HTT spacer sequence CTCN PAM
gccucccgaaaugcugggau

SEQ ID NO: 12323 - RNA, 20 nt, Artificial Sequence
  HTT spacer sequence CTCN PAM
cgaaaugcugggauuacagg

SEQ ID NO: 12324 - RNA, 20 nt, Artificial Sequence
  HTT spacer sequence CTCN PAM
ugccuguaaucccagcauuu

SEQ ID NO: 12325 - RNA, 20 nt, Artificial Sequence
  HTT spacer sequence CTCN PAM
ccaaaaccucaugguuuucc

SEQ ID NO: 12326 - RNA, 20 nt, Artificial Sequence
  HTT spacer sequence CTCN PAM
aaaaccucaugguuuucccu

SEQ ID NO: 12327 - RNA, 20 nt, Artificial Sequence
  HTT spacer sequence CTCN PAM
ugguuuucccuguucucauc

SEQ ID NO: 12328 - RNA, 20 nt, Artificial Sequence
  HTT spacer sequence CTCN PAM
uccccugcacccucccuucc

SEQ ID NO: 12329 - RNA, 20 nt, Artificial Sequence
  HTT spacer sequence CTCN PAM
cuuccccuggaguacucacc

SEQ ID NO: 12330 - RNA, 20 nt, Artificial Sequence
  HTT spacer sequence CTCN PAM
aggggaagggagggugcagg

SEQ ID NO: 12331 - RNA, 20 nt, Artificial Sequence
  HTT spacer sequence CTCN PAM
ccuggccuuggaggucuggu

SEQ ID NO: 12332 - RNA, 20 nt, Artificial Sequence
  HTT spacer sequence CTCN PAM
aaggccaggugaguacucca

SEQ ID NO: 12333 - RNA, 20 nt, Artificial Sequence
  HTT spacer sequence CTCN PAM
caccagaccuccaaggccag

SEQ ID NO: 12334 - RNA, 20 nt, Artificial Sequence
  HTT spacer sequence CTCN PAM
ucacaugcugugccuagaau

SEQ ID NO: 12335 - RNA, 20 nt, Artificial Sequence
  HTT spacer sequence CTCN PAM
ccucugcggccugugcuuca

SEQ ID NO: 12336 - RNA, 20 nt, Artificial Sequence
  HTT spacer sequence CTCN PAM
gcggccugugcuucaccgcc

SEQ ID NO: 12337 - RNA, 20 nt, Artificial Sequence
  HTT spacer sequence CTCN PAM
cugucaaggcggugaagcac

SEQ ID NO: 12338 - RNA, 20 nt, Artificial Sequence
  HTT spacer sequence CTCN PAM
cuucggcucauucucgaagu

SEQ ID NO: 12339 - RNA, 20 nt, Artificial Sequence
  HTT spacer sequence CTCN PAM
uucucgaagucucaaacuuc

SEQ ID NO: 12340 - RNA, 20 nt, Artificial Sequence
  HTT spacer sequence CTCN PAM
aagucucaaacuucacuucu

SEQ ID NO: 12341 - RNA, 20 nt, Artificial Sequence
  HTT spacer sequence CTCN PAM
aacuucacuucuccugugcg

SEQ ID NO: 12342 - RNA, 20 nt, Artificial Sequence
  HTT spacer sequence CTCN PAM
ugugcgcugauucugaauuc

SEQ ID NO: 12343 - RNA, 20 nt, Artificial Sequence
  HTT spacer sequence CTCN PAM
ucugcuuggcguguuguuca

SEQ ID NO: 12344 - RNA, 20 nt, Artificial Sequence
  HTT spacer sequence CTCN PAM
gcagugcacaguggugauga

SEQ ID NO: 12345 - RNA, 20 nt, Artificial Sequence
  HTT spacer sequence CTCN PAM
ggaccucugcuuuaucauua

SEQ ID NO: 12346 - RNA, 20 nt, Artificial Sequence
  HTT spacer sequence CTCN PAM
gcuuuaucauuagaacagac

SEQ ID NO: 12347 - RNA, 20 nt, Artificial Sequence
  HTT spacer sequence CTCN PAM
ugcgguuucccacgacauuc

SEQ ID NO: 12348 - RNA, 20 nt, Artificial Sequence
  HTT spacer sequence CTCN PAM
cuuggaagaugagccgugag

SEQ ID NO: 12349 - RNA, 20 nt, Artificial Sequence
  HTT spacer sequence CTCN PAM
ucuuccaagugagaagugaa

SEQ ID NO: 12350 - RNA, 20 nt, Artificial Sequence
  HTT spacer sequence CTCN PAM
cggcucaucuuccaagugag

SEQ ID NO: 12351 - RNA, 20 nt, Artificial Sequence
  HTT spacer sequence CTCN PAM
agucaagcagaagcacagcc

SEQ ID NO: 12352 - RNA, 20 nt, Artificial Sequence
  HTT spacer sequence CTCN PAM
aaagcccacuuguuuccuua

SEQ ID NO: 12353 - RNA, 20 nt, Artificial Sequence
  HTT spacer sequence CTCN PAM
ggaaagaccuaugucccagu

SEQ ID NO: 12354 - RNA, 20 nt, Artificial Sequence
  HTT spacer sequence CTCN PAM
uuaguaaaagguccgguugg

SEQ ID NO: 12355 - RNA, 20 nt, Artificial Sequence
  HTT spacer sequence CTCN PAM
uccccaggccaggggagggg

SEQ ID NO: 12356 - RNA, 20 nt, Artificial Sequence
  HTT spacer sequence CTCN PAM
ccaggccaggggaggggucc

SEQ ID NO: 12357 - RNA, 20 nt, Artificial Sequence
  HTT spacer sequence CTCN PAM
ccuggccuggggaggaggau

SEQ ID NO: 12358 - RNA, 20 nt, Artificial Sequence
  HTT spacer sequence CTCN PAM
cugggguuggagccuuuagu

SEQ ID NO: 12359 - RNA, 20 nt, Artificial Sequence
  HTT spacer sequence CTCN PAM
aaccccagggaggaccccuc

SEQ ID NO: 12360 - RNA, 20 nt, Artificial Sequence
  HTT spacer sequence CTCN PAM
gacccccuacuaaaggcucc

SEQ ID NO: 12361 - RNA, 20 nt, Artificial Sequence
  HTT spacer sequence CTCN PAM
cuuccuuuguagcacuuacu

SEQ ID NO: 12362 - RNA, 20 nt, Artificial Sequence
  HTT spacer sequence CTCN PAM
guggagagggcucucuuuua

SEQ ID NO: 12363 - RNA, 20 nt, Artificial Sequence
  HTT spacer sequence CTCN PAM
acugagcaccucccuuccuu

SEQ ID NO: 12364 - RNA, 20 nt, Artificial Sequence
  HTT spacer sequence CTCN PAM
ccacugagcaccucccuucc

SEQ ID NO: 12365 - RNA, 20 nt, Artificial Sequence
  HTT spacer sequence CTCN PAM
cuuuuauguauuauauuucu

SEQ ID NO: 12366 - RNA, 20 nt, Artificial Sequence
  HTT spacer sequence CTCN PAM
uuuauguauuauauuucuuu

SEQ ID NO: 12367 - RNA, 20 nt, Artificial Sequence
  HTT spacer sequence CTCN PAM
ccaugaaagaaauauaauac

SEQ ID NO: 12368 - RNA, 20 nt, Artificial Sequence
  HTT spacer sequence CTCN PAM
gcugaucccugauccauauc

SEQ ID NO: 12369 - RNA, 20 nt, Artificial Sequence
  HTT spacer sequence CTCN PAM
ggacugaaacaccucugcug

SEQ ID NO: 12370 - RNA, 20 nt, Artificial Sequence
  HTT spacer sequence CTCN PAM
caagccacgcugacuuucuu

SEQ ID NO: 12371 - RNA, 20 nt, Artificial Sequence
  HTT spacer sequence CTCN PAM
caacucccaagccacgcuga

SEQ ID NO: 12372 - RNA, 20 nt, Artificial Sequence
  HTT spacer sequence CTCN PAM
agauaucuuaagacuagugg

SEQ ID NO: 12373 - RNA, 20 nt, Artificial Sequence
  HTT spacer sequence CTCN PAM
acuagucuuaagauaucuug

SEQ ID NO: 12374 - RNA, 20 nt, Artificial Sequence
  HTT spacer sequence CTCN PAM
gggcugccugguucuuguag

SEQ ID NO: 12375 - RNA, 20 nt, Artificial Sequence
  HTT spacer sequence CTCN PAM
gucguccuacaagaaccagg

SEQ ID NO: 12376 - RNA, 20 nt, Artificial Sequence
  HTT spacer sequence CTCN PAM
gcauacugcacccccagggg

SEQ ID NO: 12377 - RNA, 20 nt, Artificial Sequence
  HTT spacer sequence CTCN PAM
gaacagugcaaaugucaguc

SEQ ID NO: 12378 - RNA, 20 nt, Artificial Sequence
  HTT spacer sequence CTCN PAM
gccacugacagauagacuga

SEQ ID NO: 12379 - RNA, 20 nt, Artificial Sequence
  HTT spacer sequence CTCN PAM
aaggcuggcucugccacuga

SEQ ID NO: 12380 - RNA, 20 nt, Artificial Sequence
  HTT spacer sequence CTCN PAM
uugcaccccugcuccaaggc

SEQ ID NO: 12381 - RNA, 20 nt, Artificial Sequence
  HTT spacer sequence CTCN PAM
gcacuggccaggcaugcaga

SEQ ID NO: 12382 - RNA, 20 nt, Artificial Sequence
  HTT spacer sequence CTCN PAM
ucuagauggggccuucuguc

SEQ ID NO: 12383 - RNA, 20 nt, Artificial Sequence
  HTT spacer sequence CTCN PAM
gucucaucuagauggggccu

SEQ ID NO: 12384 - RNA, 20 nt, Artificial Sequence
  HTT spacer sequence CTCN PAM
uggcagcucaaacggccugg

SEQ ID NO: 12385 - RNA, 20 nt, Artificial Sequence
  HTT spacer sequence CTCN PAM
aacggccuggcagaugcuug

SEQ ID NO: 12386 - RNA, 20 nt, Artificial Sequence
  HTT spacer sequence CTCN PAM
aagcaucugccaggccguuu

SEQ ID NO: 12387 - RNA, 20 nt, Artificial Sequence
  HTT spacer sequence CTCN PAM
ccaagcaucugccaggccgu

SEQ ID NO: 12388 - RNA, 20 nt, Artificial Sequence
  HTT spacer sequence CTCN PAM
cuccaagcaucugccaggcc

SEQ ID NO: 12389 - RNA, 20 nt, Artificial Sequence
  HTT spacer sequence CTCN PAM
agaagcccccucucuccaag

SEQ ID NO: 12390 - RNA, 20 nt, Artificial Sequence
  HTT spacer sequence CTCN PAM
ucccagaaauggugcugucu

SEQ ID NO: 12391 - RNA, 20 nt, Artificial Sequence
  HTT spacer sequence CTCN PAM
cuucccagaaauggugcugu

SEQ ID NO: 12392 - RNA, 20 nt, Artificial Sequence
  HTT spacer sequence CTCN PAM
caggugacucucuucccaga

SEQ ID NO: 12393 - RNA, 20 nt, Artificial Sequence
  HTT spacer sequence CTCN PAM
ucccucccaggugacucucu

SEQ ID NO: 12394 - RNA, 20 nt, Artificial Sequence
  HTT spacer sequence CTCN PAM
ggcuuggaggugaagagagg

SEQ ID NO: 12395 - RNA, 20 nt, Artificial Sequence
  HTT spacer sequence CTCN PAM
aagccggagcguggccucau

SEQ ID NO: 12396 - RNA, 20 nt, Artificial Sequence
  HTT spacer sequence CTCN PAM
ucaccuccaagccggagcgu

SEQ ID NO: 12397 - RNA, 20 nt, Artificial Sequence
  HTT spacer sequence CTCN PAM
cuucaccuccaagccggagc

SEQ ID NO: 12398 - RNA, 20 nt, Artificial Sequence
  HTT spacer sequence CTCN PAM
aauucuuucuugcagcagcc

SEQ ID NO: 12399 - RNA, 20 nt, Artificial Sequence
  HTT spacer sequence CTCN PAM
uggccucaagcaaucuuccc

SEQ ID NO: 12400 - RNA, 20 nt, Artificial Sequence
  HTT spacer sequence CTCN PAM
agcaaucuucccaccucagc

SEQ ID NO: 12401 - RNA, 20 nt, Artificial Sequence
  HTT spacer sequence CTCN PAM
gccuccccaagcgcugggau

SEQ ID NO: 12402 - RNA, 20 nt, Artificial Sequence
  HTT spacer sequence CTCN PAM
ccaagcgcugggauuauaga

SEQ ID NO: 12403 - RNA, 20 nt, Artificial Sequence
  HTT spacer sequence CTCN PAM
ugucuauaaucccagcgcuu

SEQ ID NO: 12404 - RNA, 20 nt, Artificial Sequence
  HTT spacer sequence CTCN PAM
auaaaaucaucuuuuauugg

SEQ ID NO: 12405 - RNA, 20 nt, Artificial Sequence
  HTT spacer sequence CTCN PAM
guggcaggaacugggugcag

SEQ ID NO: 12406 - RNA, 20 nt, Artificial Sequence
  HTT spacer sequence CTCN PAM
uaaaauccugagaacuuccu

SEQ ID NO: 12407 - RNA, 20 nt, Artificial Sequence
  HTT spacer sequence CTCN PAM
ggauuuuaggagcucugugg

SEQ ID NO: 12408 - RNA, 20 nt, Artificial Sequence
  HTT spacer sequence CTCN PAM
cccaggaaguucucaggauu

SEQ ID NO: 12409 - RNA, 20 nt, Artificial Sequence
  HTT spacer sequence CTCN PAM
uuagaacaaaagaugcucac

SEQ ID NO: 12410 - RNA, 20 nt, Artificial Sequence
  HTT spacer sequence CTCN PAM
ugguggcuccuggauaggag

SEQ ID NO: 12411 - RNA, 20 nt, Artificial Sequence
  HTT spacer sequence CTCN PAM
uggauaggagugaaucacca

SEQ ID NO: 12412 - RNA, 20 nt, Artificial Sequence
  HTT spacer sequence CTCN PAM
uauccaggagccaccaagag

SEQ ID NO: 12413 - RNA, 20 nt, Artificial Sequence
  HTT spacer sequence CTCN PAM
ggcuugaucuuucuggugau

SEQ ID NO: 12414 - RNA, 20 nt, Artificial Sequence
  HTT spacer sequence CTCN PAM
aaaaaaaaaaaaaaaacuuu

SEQ ID NO: 12415 - RNA, 20 nt, Artificial Sequence
  HTT spacer sequence CTCN PAM
aucucaaaaaaaaaaaaaaa

SEQ ID NO: 12416 - RNA, 20 nt, Artificial Sequence
  HTT spacer sequence CTCN PAM
cucuguugcccaggcuggag

SEQ ID NO: 12417 - RNA, 20 nt, Artificial Sequence
  HTT spacer sequence CTCN PAM
guugcccaggcuggagugca

SEQ ID NO: 12418 - RNA, 20 nt, Artificial Sequence
  HTT spacer sequence CTCN PAM
agccugggcaacagagugag

SEQ ID NO: 12419 - RNA, 20 nt, Artificial Sequence
  HTT spacer sequence CTCN PAM
gcucacuacaagcucugccu

SEQ ID NO: 12420 - RNA, 20 nt, Artificial Sequence
  HTT spacer sequence CTCN PAM
cuacaagcucugccucccag

SEQ ID NO: 12421 - RNA, 20 nt, Artificial Sequence
  HTT spacer sequence CTCN PAM
gccucccagguucaagugau

SEQ ID NO: 12422 - RNA, 20 nt, Artificial Sequence
  HTT spacer sequence CTCN PAM
cagguucaagugauucuccu

SEQ ID NO: 12423 - RNA, 20 nt, Artificial Sequence
  HTT spacer sequence CTCN PAM
ugccucagccuccugagcag

SEQ ID NO: 12424 - RNA, 20 nt, Artificial Sequence
  HTT spacer sequence CTCN PAM
gccuccugagcaguugggac

SEQ ID NO: 12425 - RNA, 20 nt, Artificial Sequence
  HTT spacer sequence CTCN PAM
ugagcaguugggacuacagg

SEQ ID NO: 12426 - RNA, 20 nt, Artificial Sequence
  HTT spacer sequence CTCN PAM
ggaggcugaggcaggagaau

SEQ ID NO: 12427 - RNA, 20 nt, Artificial Sequence
  HTT spacer sequence CTCN PAM
gcuaaaaauacaaaaauuag

SEQ ID NO: 12428 - RNA, 20 nt, Artificial Sequence
  HTT spacer sequence CTCN PAM
aacuccuuaccuugugaucc

SEQ ID NO: 12429 - RNA, 20 nt, Artificial Sequence
  HTT spacer sequence CTCN PAM
uuaccuugugauccgccugc

SEQ ID NO: 12430 - RNA, 20 nt, Artificial Sequence
  HTT spacer sequence CTCN PAM
gccucccaaagugcugggau

SEQ ID NO: 12431 - RNA, 20 nt, Artificial Sequence
  HTT spacer sequence CTCN PAM
caaagugcugggauuacagg

SEQ ID NO: 12432 - RNA, 20 nt, Artificial Sequence
  HTT spacer sequence CTCN PAM
ugccuguaaucccagcacuu

SEQ ID NO: 12433 - RNA, 20 nt, Artificial Sequence
  HTT spacer sequence CTCN PAM
ccuugaaauuaauuuuugug

SEQ ID NO: 12434 - RNA, 20 nt, Artificial Sequence
  HTT spacer sequence CTCN PAM
uuacaugauuuuucuccccu

SEQ ID NO: 12435 - RNA, 20 nt, Artificial Sequence
  HTT spacer sequence CTCN PAM
cuuuacaugauuuuucuccc

SEQ ID NO: 12436 - RNA, 20 nt, Artificial Sequence
  HTT spacer sequence CTCN PAM
ugaaaauauccuauuuaggc

SEQ ID NO: 12437 - RNA, 20 nt, Artificial Sequence
  HTT spacer sequence CTCN PAM
aacaaucugacaugggaaug

SEQ ID NO: 12438 - RNA, 20 nt, Artificial Sequence
  HTT spacer sequence CTCN PAM
aaggugugcuaacauuccca

SEQ ID NO: 12439 - RNA, 20 nt, Artificial Sequence
  HTT spacer sequence CTCN PAM
cuaaggugugcuaacauucc

SEQ ID NO: 12440 - RNA, 20 nt, Artificial Sequence
  HTT spacer sequence CTCN PAM
agaaaaacaaaacuucccaa

SEQ ID NO: 12441 - RNA, 20 nt, Artificial Sequence
  HTT spacer sequence CTCN PAM
uuuaugaauacaaaacccuu

SEQ ID NO: 12442 - RNA, 20 nt, Artificial Sequence
  HTT spacer sequence CTCN PAM
uucuuuagcaugauaaaaua

SEQ ID NO: 12443 - RNA, 20 nt, Artificial Sequence
  HTT spacer sequence CTCN PAM
agcgugugcccuuaucgggu

SEQ ID NO: 12444 - RNA, 20 nt, Artificial Sequence
  HTT spacer sequence CTCN PAM
uauuccuaauuuuaacauua

SEQ ID NO: 12445 - RNA, 20 nt, Artificial Sequence
  HTT spacer sequence CTCN PAM
aaaaaaaaaaagaagaaaga

SEQ ID NO: 12446 - RNA, 20 nt, Artificial Sequence
  HTT spacer sequence CTCN PAM
gucucaaaaaaaaaaaagaa

SEQ ID NO: 12447 - RNA, 20 nt, Artificial Sequence
  HTT spacer sequence CTCN PAM
guugccaggcuggagugcag

SEQ ID NO: 12448 - RNA, 20 nt, Artificial Sequence
  HTT spacer sequence CTCN PAM
agccuggcaacagagcaaga

SEQ ID NO: 12449 - RNA, 20 nt, Artificial Sequence
  HTT spacer sequence CTCN PAM
cugcacgccccccgccuccc

SEQ ID NO: 12450 - RNA, 20 nt, Artificial Sequence
  HTT spacer sequence CTCN PAM
cagguucaagcgauucuccu

SEQ ID NO: 12451 - RNA, 20 nt, Artificial Sequence
  HTT spacer sequence CTCN PAM
ugccucagccucccgaguag

SEQ ID NO: 12452 - RNA, 20 nt, Artificial Sequence
  HTT spacer sequence CTCN PAM
gccucccgaguagcugggac

SEQ ID NO: 12453 - RNA, 20 nt, Artificial Sequence
  HTT spacer sequence CTCN PAM
cgaguagcugggacuacagg

SEQ ID NO: 12454 - RNA, 20 nt, Artificial Sequence
  HTT spacer sequence CTCN PAM
ggaggcugaggcaggagaau

SEQ ID NO: 12455 - RNA, 20 nt, Artificial Sequence
  HTT spacer sequence CTCN PAM
acuaaaauacaaaaaaaaau

SEQ ID NO: 12456 - RNA, 20 nt, Artificial Sequence
  HTT spacer sequence CTCN PAM
caaccucacguacugggauu

SEQ ID NO: 12457 - RNA, 20 nt, Artificial Sequence
  HTT spacer sequence CTCN PAM
cguacugggauuaccggugu

SEQ ID NO: 12458 - RNA, 20 nt, Artificial Sequence
  HTT spacer sequence CTCN PAM
caccgguaaucccaguacgu

SEQ ID NO: 12459 - RNA, 20 nt, Artificial Sequence
  HTT spacer sequence CTCN PAM
agauaaauccauaauaaguu

SEQ ID NO: 12460 - RNA, 20 nt, Artificial Sequence
  HTT spacer sequence CTCN PAM
gcuaugauguuugguagguu

SEQ ID NO: 12461 - RNA, 20 nt, Artificial Sequence
  HTT spacer sequence CTCN PAM
gacacugacgucagccuaca

SEQ ID NO: 12462 - RNA, 20 nt, Artificial Sequence
  HTT spacer sequence CTCN PAM
gcaguagacugugcugcugu

SEQ ID NO: 12463 - RNA, 20 nt, Artificial Sequence
  HTT spacer sequence CTCN PAM
caggcagccacgcagucaca

SEQ ID NO: 12464 - RNA, 20 nt, Artificial Sequence
  HTT spacer sequence CTCN PAM
ugaaaauaaagaugguccca

SEQ ID NO: 12465 - RNA, 20 nt, Artificial Sequence
  HTT spacer sequence CTCN PAM
guuaauguuuauguuugucu

SEQ ID NO: 12466 - RNA, 20 nt, Artificial Sequence
  HTT spacer sequence CTCN PAM
ucuggcuuccagccccgaaa

SEQ ID NO: 12467 - RNA, 20 nt, Artificial Sequence
  HTT spacer sequence CTCN PAM
cacccucuucuggcuuccag

SEQ ID NO: 12468 - RNA, 20 nt, Artificial Sequence
  HTT spacer sequence CTCN PAM
gcgcucccacccucuucugg

SEQ ID NO: 12469 - RNA, 20 nt, Artificial Sequence
  HTT spacer sequence CTCN PAM
cugcgcucccacccucuucu

SEQ ID NO: 12470 - RNA, 20 nt, Artificial Sequence
  HTT spacer sequence CTCN PAM
cucugcgcucccacccucuu

SEQ ID NO: 12471 - RNA, 20 nt, Artificial Sequence
  HTT spacer sequence CTCN PAM
cucucugcgcucccacccuc

SEQ ID NO: 12472 - RNA, 20 nt, Artificial Sequence
  HTT spacer sequence CTCN PAM
gccuuccagauaccuugucc

SEQ ID NO: 12473 - RNA, 20 nt, Artificial Sequence
  HTT spacer sequence CTCN PAM
uuuuuuuuugagguggcguc

SEQ ID NO: 12474 - RNA, 20 nt, Artificial Sequence
  HTT spacer sequence CTCN PAM
aaaaaaaaggaggcuuagcu

SEQ ID NO: 12475 - RNA, 20 nt, Artificial Sequence
  HTT spacer sequence CTCN PAM
cucuguugccaggcuggagu

SEQ ID NO: 12476 - RNA, 20 nt, Artificial Sequence
  HTT spacer sequence CTCN PAM
guugccaggcuggagugcaa

SEQ ID NO: 12477 - RNA, 20 nt, Artificial Sequence
  HTT spacer sequence CTCN PAM
agccuggcaacagagugaga

SEQ ID NO: 12478 - RNA, 20 nt, Artificial Sequence
  HTT spacer sequence CTCN PAM
gcucacugcaaccuccaccu

SEQ ID NO: 12479 - RNA, 20 nt, Artificial Sequence
  HTT spacer sequence CTCN PAM
cugcaaccuccaccucccug

SEQ ID NO: 12480 - RNA, 20 nt, Artificial Sequence
  HTT spacer sequence CTCN PAM
accucccugguucaagcgau

SEQ ID NO: 12481 - RNA, 20 nt, Artificial Sequence
  HTT spacer sequence CTCN PAM
cugguucaagcgauucuccu

SEQ ID NO: 12482 - RNA, 20 nt, Artificial Sequence
  HTT spacer sequence CTCN PAM
ugccucagccucccgaguag

SEQ ID NO: 12483 - RNA, 20 nt, Artificial Sequence
  HTT spacer sequence CTCN PAM
gccucccgaguagcugggau

SEQ ID NO: 12484 - RNA, 20 nt, Artificial Sequence
  HTT spacer sequence CTCN PAM
cgaguagcugggauuacagg

SEQ ID NO: 12485 - RNA, 20 nt, Artificial Sequence
  HTT spacer sequence CTCN PAM
ggaggcugaggcaggagaau

SEQ ID NO: 12486 - RNA, 20 nt, Artificial Sequence
  HTT spacer sequence CTCN PAM
cgccacuacacccagcugau

SEQ ID NO: 12487 - RNA, 20 nt, Artificial Sequence
  HTT spacer sequence CTCN PAM
acuaaaauuacaaaaaucag

SEQ ID NO: 12488 - RNA, 20 nt, Artificial Sequence
  HTT spacer sequence CTCN PAM
aucucuugacgucaugaucu

SEQ ID NO: 12489 - RNA, 20 nt, Artificial Sequence
  HTT spacer sequence CTCN PAM
ugacgucaugaucuguccac

SEQ ID NO: 12490 - RNA, 20 nt, Artificial Sequence
  HTT spacer sequence CTCN PAM
gccucccaaagugcugggau

SEQ ID NO: 12491 - RNA, 20 nt, Artificial Sequence
  HTT spacer sequence CTCN PAM
caaagugcugggauuauagg

SEQ ID NO: 12492 - RNA, 20 nt, Artificial Sequence
  HTT spacer sequence CTCN PAM
gacggggcacggugggucac

SEQ ID NO: 12493 - RNA, 20 nt, Artificial Sequence
  HTT spacer sequence CTCN PAM
ugagcauaggggacuaaaaa

SEQ ID NO: 12494 - RNA, 20 nt, Artificial Sequence
  HTT spacer sequence CTCN PAM
agaggcuuagcucagacggg

SEQ ID NO: 12495 - RNA, 20 nt, Artificial Sequence
  HTT spacer sequence CTCN PAM
gaaauauggaugguccucug

SEQ ID NO: 12496 - RNA, 20 nt, Artificial Sequence
  HTT spacer sequence CTCN PAM
gggaccauaccaaucccuuc

SEQ ID NO: 12497 - RNA, 20 nt, Artificial Sequence
  HTT spacer sequence CTCN PAM
aaacuggaacuuggauuaag

SEQ ID NO: 12498 - RNA, 20 nt, Artificial Sequence
  HTT spacer sequence CTCN PAM
ugggacacuagaaguccuag

SEQ ID NO: 12499 - RNA, 20 nt, Artificial Sequence
  HTT spacer sequence CTCN PAM
ccggaagaagauaauaccuu

SEQ ID NO: 12500 - RNA, 20 nt, Artificial Sequence
  HTT spacer sequence CTCN PAM
ggaagaagauaauaccuuaa

SEQ ID NO: 12501 - RNA, 20 nt, Artificial Sequence
  HTT spacer sequence CTCN PAM
cuaauaaauuucaaauacaa

SEQ ID NO: 12502 - RNA, 20 nt, Artificial Sequence
  HTT spacer sequence CTCN PAM
aauaaauuucaaauacaaug

SEQ ID NO: 12503 - RNA, 20 nt, Artificial Sequence
  HTT spacer sequence CTCN PAM
uaucacguuccugguaauuu

SEQ ID NO: 12504 - RNA, 20 nt, Artificial Sequence
  HTT spacer sequence CTCN PAM
ugccugaaguuucugcuaau

SEQ ID NO: 12505 - RNA, 20 nt, Artificial Sequence
  HTT spacer sequence CTCN PAM
gaggccuagaaucuaucuag

SEQ ID NO: 12506 - RNA, 20 nt, Artificial Sequence
  HTT spacer sequence CTCN PAM
gaggguauguuucucaugcc

SEQ ID NO: 12507 - RNA, 20 nt, Artificial Sequence
  HTT spacer sequence CTCN PAM
auuaucuagacacuagauag

SEQ ID NO: 12508 - RNA, 20 nt, Artificial Sequence
  HTT spacer sequence CTCN PAM
uugaacaugggaaacauagu

SEQ ID NO: 12509 - RNA, 20 nt, Artificial Sequence
  HTT spacer sequence CTCN PAM
aaaguaugcuguugucacau

SEQ ID NO: 12510 - RNA, 20 nt, Artificial Sequence
  HTT spacer sequence CTCN PAM
ggcuauuucuauucugcugu

SEQ ID NO: 12511 - RNA, 20 nt, Artificial Sequence
  HTT spacer sequence CTCN PAM
cuggcuauuucuauucugcu

SEQ ID NO: 12512 - RNA, 20 nt, Artificial Sequence
  HTT spacer sequence CTCN PAM
gugccuuauucuggguagug

SEQ ID NO: 12513 - RNA, 20 nt, Artificial Sequence
  HTT spacer sequence CTCN PAM
cagugccuuauucuggguag

SEQ ID NO: 12514 - RNA, 20 nt, Artificial Sequence
  HTT spacer sequence CTCN PAM
ccauauccuuucuucugcau

SEQ ID NO: 12515 - RNA, 20 nt, Artificial Sequence
  HTT spacer sequence CTCN PAM
caccauauccuuucuucugc

SEQ ID NO: 12516 - RNA, 20 nt, Artificial Sequence
  HTT spacer sequence CTCN PAM
aaauaaauguauauuagauc

SEQ ID NO: 12517 - RNA, 20 nt, Artificial Sequence
  HTT spacer sequence CTCN PAM
cugguacuccaaauaaaugu

SEQ ID NO: 12518 - RNA, 20 nt, Artificial Sequence
  HTT spacer sequence CTCN PAM
cccugguacuccaaauaaau

SEQ ID NO: 12519 - RNA, 20 nt, Artificial Sequence
  HTT spacer sequence CTCN PAM
cucccugguacuccaaauaa

SEQ ID NO: 12520 - RNA, 20 nt, Artificial Sequence
  HTT spacer sequence CTCN PAM
cucucccugguacuccaaau

SEQ ID NO: 12521 - RNA, 20 nt, Artificial Sequence
  HTT spacer sequence CTCN PAM
uucucucucucccugguacu

SEQ ID NO: 12522 - RNA, 20 nt, Artificial Sequence
  HTT spacer sequence CTCN PAM
gucaccguccuugaaacacg

SEQ ID NO: 12523 - RNA, 20 nt, Artificial Sequence
  HTT spacer sequence CTCN PAM
cagucaccguccuugaaaca

SEQ ID NO: 12524 - RNA, 20 nt, Artificial Sequence
  HTT spacer sequence CTCN PAM
uuggaauucacugggcuuug

SEQ ID NO: 12525 - RNA, 20 nt, Artificial Sequence
  HTT spacer sequence CTCN PAM
gaggcagaggguuaucagaa

SEQ ID NO: 12526 - RNA, 20 nt, Artificial Sequence
  HTT spacer sequence CTCN PAM
gaguguccccauuaaaugca

SEQ ID NO: 12527 - RNA, 20 nt, Artificial Sequence
  HTT spacer sequence CTCN PAM
gccucugaguguccccauua

SEQ ID NO: 12528 - RNA, 20 nt, Artificial Sequence
  HTT spacer sequence CTCN PAM
uucugauaacccucugccuc

SEQ ID NO: 12529 - RNA, 20 nt, Artificial Sequence
  HTT spacer sequence CTCN PAM
cccaaguucucaucauccca

SEQ ID NO: 12530 - RNA, 20 nt, Artificial Sequence
  HTT spacer sequence CTCN PAM
caaguucucaucaucccagg

SEQ ID NO: 12531 - RNA, 20 nt, Artificial Sequence
  HTT spacer sequence CTCN PAM
ucaucccagggccagggaca

SEQ ID NO: 12532 - RNA, 20 nt, Artificial Sequence
  HTT spacer sequence CTCN PAM
cuaaggugugaccagcuguc

SEQ ID NO: 12533 - RNA, 20 nt, Artificial Sequence
  HTT spacer sequence CTCN PAM
uagugaacucccuaaggugu

SEQ ID NO: 12534 - RNA, 20 nt, Artificial Sequence
  HTT spacer sequence CTCN PAM
ccuagugaacucccuaaggu

SEQ ID NO: 12535 - RNA, 20 nt, Artificial Sequence
  HTT spacer sequence CTCN PAM
guucccuuccaauuucccua

SEQ ID NO: 12536 - RNA, 20 nt, Artificial Sequence
  HTT spacer sequence CTCN PAM
cgguucccuuccaauuuccc

SEQ ID NO: 12537 - RNA, 20 nt, Artificial Sequence
  HTT spacer sequence CTCN PAM
cauugcuaugcgauuggcua

SEQ ID NO: 12538 - RNA, 20 nt, Artificial Sequence
  HTT spacer sequence CTCN PAM
gugaaagauuucuaagguca

SEQ ID NO: 12539 - RNA, 20 nt, Artificial Sequence
  HTT spacer sequence CTCN PAM
agaaguucuggaacgcagau

SEQ ID NO: 12540 - RNA, 20 nt, Artificial Sequence
  HTT spacer sequence CTCN PAM
aagccuuaccuauaccagcu

SEQ ID NO: 12541 - RNA, 20 nt, Artificial Sequence
  HTT spacer sequence CTCN PAM
guaggaaagcucaaagccuu

SEQ ID NO: 12542 - RNA, 20 nt, Artificial Sequence
  HTT spacer sequence CTCN PAM
agggccaucuggccaacaag

SEQ ID NO: 12543 - RNA, 20 nt, Artificial Sequence
  HTT spacer sequence CTCN PAM
agguccccuuugguaaccua

SEQ ID NO: 12544 - RNA, 20 nt, Artificial Sequence
  HTT spacer sequence CTCN PAM
ccuuacacccccagacguau

SEQ ID NO: 12545 - RNA, 20 nt, Artificial Sequence
  HTT spacer sequence CTCN PAM
uuacacccccagacguauca

SEQ ID NO: 12546 - RNA, 20 nt, Artificial Sequence
  HTT spacer sequence CTCN PAM
gucuuugguuuucuguaguu

SEQ ID NO: 12547 - RNA, 20 nt, Artificial Sequence
  HTT spacer sequence CTCN PAM
acagcaagaaugaaaagugg

SEQ ID NO: 12548 - RNA, 20 nt, Artificial Sequence
  HTT spacer sequence CTCN PAM
ggccuguaaucccagcacuu

SEQ ID NO: 12549 - RNA, 20 nt, Artificial Sequence
  HTT spacer sequence CTCN PAM
caaagugcugggauuacagg

SEQ ID NO: 12550 - RNA, 20 nt, Artificial Sequence
  HTT spacer sequence CTCN PAM
gccucccaaagugcugggau

SEQ ID NO: 12551 - RNA, 20 nt, Artificial Sequence
  HTT spacer sequence CTCN PAM
ugauccacccgccucggccu

SEQ ID NO: 12552 - RNA, 20 nt, Artificial Sequence
  HTT spacer sequence CTCN PAM
ugaccucgugauccacccgc

SEQ ID NO: 12553 - RNA, 20 nt, Artificial Sequence
  HTT spacer sequence CTCN PAM
acuaaaaauacaaaaaaauu

SEQ ID NO: 12554 - RNA, 20 nt, Artificial Sequence
  HTT spacer sequence CTCN PAM
ggaggcugaggcaggagaau

SEQ ID NO: 12555 - RNA, 20 nt, Artificial Sequence
  HTT spacer sequence CTCN PAM
cgaguagcugggacuacagg

SEQ ID NO: 12556 - RNA, 20 nt, Artificial Sequence
  HTT spacer sequence CTCN PAM
gccucccgaguagcugggac

SEQ ID NO: 12557 - RNA, 20 nt, Artificial Sequence
  HTT spacer sequence CTCN PAM
ugccucagccucccgaguag

SEQ ID NO: 12558 - RNA, 20 nt, Artificial Sequence
  HTT spacer sequence CTCN PAM
cggguucacgccauucuccu

SEQ ID NO: 12559 - RNA, 20 nt, Artificial Sequence
  HTT spacer sequence CTCN PAM
gccucccggguucacgccau

SEQ ID NO: 12560 - RNA, 20 nt, Artificial Sequence
  HTT spacer sequence CTCN PAM
cugcaagcuccgccucccgg

SEQ ID NO: 12561 - RNA, 20 nt, Artificial Sequence
  HTT spacer sequence CTCN PAM
gcucacugcaagcuccgccu

SEQ ID NO: 12562 - RNA, 20 nt, Artificial Sequence
  HTT spacer sequence CTCN PAM
agccugggugacagagcaag

SEQ ID NO: 12563 - RNA, 20 nt, Artificial Sequence
  HTT spacer sequence CTCN PAM
gucacccaggcuggagugca

SEQ ID NO: 12564 - RNA, 20 nt, Artificial Sequence
  HTT spacer sequence CTCN PAM
gucucaaaaaaaaaaaaaaa

SEQ ID NO: 12565 - RNA, 20 nt, Artificial Sequence
  HTT spacer sequence CTCN PAM
aaaaaaaaaaaaaaaaaaaa

SEQ ID NO: 12566 - RNA, 20 nt, Artificial Sequence
  HTT spacer sequence CTCN PAM
ugaaaggaagcaacugccgc

SEQ ID NO: 12567 - RNA, 20 nt, Artificial Sequence
  HTT spacer sequence CTCN PAM
ggggucauuuucuucugccu

SEQ ID NO: 12568 - RNA, 20 nt, Artificial Sequence
  HTT spacer sequence CTCN PAM
gaucuuccucuggggucauu

SEQ ID NO: 12569 - RNA, 20 nt, Artificial Sequence
  HTT spacer sequence CTCN PAM
auuucuuuccugaaucucug

SEQ ID NO: 12570 - RNA, 20 nt, Artificial Sequence
  HTT spacer sequence CTCN PAM
ccauuucuuuccugaaucuc

SEQ ID NO: 12571 - RNA, 20 nt, Artificial Sequence
  HTT spacer sequence CTCN PAM
acaacuguugugucucuauc

SEQ ID NO: 12572 - RNA, 20 nt, Artificial Sequence
  HTT spacer sequence CTCN PAM
aucuuuuguaacauauaugu

SEQ ID NO: 12573 - RNA, 20 nt, Artificial Sequence
  HTT spacer sequence CTCN PAM
cucugucgcccaggcuacag

SEQ ID NO: 12574 - RNA, 20 nt, Artificial Sequence
  HTT spacer sequence CTCN PAM
gucgcccaggcuacagugaa

SEQ ID NO: 12575 - RNA, 20 nt, Artificial Sequence
  HTT spacer sequence CTCN PAM
gcucacugcaaccucugccc

SEQ ID NO: 12576 - RNA, 20 nt, Artificial Sequence
  HTT spacer sequence CTCN PAM
cugcaaccucugccccuugg

SEQ ID NO: 12577 - RNA, 20 nt, Artificial Sequence
  HTT spacer sequence CTCN PAM
gccccuugggcucaaaugau

SEQ ID NO: 12578 - RNA, 20 nt, Artificial Sequence
  HTT spacer sequence CTCN PAM
aaugauucucuugccucagc

SEQ ID NO: 12579 - RNA, 20 nt, Artificial Sequence
  HTT spacer sequence CTCN PAM
ugccucagccuccugaguag

SEQ ID NO: 12580 - RNA, 20 nt, Artificial Sequence
  HTT spacer sequence CTCN PAM
gccuccugaguagcugagau

SEQ ID NO: 12581 - RNA, 20 nt, Artificial Sequence
  HTT spacer sequence CTCN PAM
ugaguagcugagauuacagg

SEQ ID NO: 12582 - RNA, 20 nt, Artificial Sequence
  HTT spacer sequence CTCN PAM
ggaggcugaggcaagagaau

SEQ ID NO: 12583 - RNA, 20 nt, Artificial Sequence
  HTT spacer sequence CTCN PAM
gcuacucaggaggcugaggc

SEQ ID NO: 12584 - RNA, 20 nt, Artificial Sequence
  HTT spacer sequence CTCN PAM
aguaaaaauacaaaaauuag

SEQ ID NO: 12585 - RNA, 20 nt, Artificial Sequence
  HTT spacer sequence CTCN PAM
auguuggccaggcuggucuu

SEQ ID NO: 12586 - RNA, 20 nt, Artificial Sequence
  HTT spacer sequence CTCN PAM
ggugauccaccugccugggc

SEQ ID NO: 12587 - RNA, 20 nt, Artificial Sequence
  HTT spacer sequence CTCN PAM
caaagugcuaggauuacagg

SEQ ID NO: 12588 - RNA, 20 nt, Artificial Sequence
  HTT spacer sequence CTCN PAM
cgccuguaauccuagcacuu

SEQ ID NO: 12589 - RNA, 20 nt, Artificial Sequence
  HTT spacer sequence CTCN PAM
aaauugggagaaaccaaaaa

SEQ ID NO: 12590 - RNA, 20 nt, Artificial Sequence
  HTT spacer sequence CTCN PAM
caauuuggaggguauuauug

SEQ ID NO: 12591 - RNA, 20 nt, Artificial Sequence
  HTT spacer sequence CTCN PAM
cugcauaaucaagaagagaa

SEQ ID NO: 12592 - RNA, 20 nt, Artificial Sequence
  HTT spacer sequence CTCN PAM
ucuugauuaugcagggagcu

SEQ ID NO: 12593 - RNA, 20 nt, Artificial Sequence
  HTT spacer sequence CTCN PAM
agguaucaaaaucuaacgua

SEQ ID NO: 12594 - RNA, 20 nt, Artificial Sequence
  HTT spacer sequence CTCN PAM
uuucauggucacccuagaaa

SEQ ID NO: 12595 - RNA, 20 nt, Artificial Sequence
  HTT spacer sequence CTCN PAM
ucuuuucauggucacccuag

SEQ ID NO: 12596 - RNA, 20 nt, Artificial Sequence
  HTT spacer sequence CTCN PAM
aaaaaaaaaaaacauacacc

SEQ ID NO: 12597 - RNA, 20 nt, Artificial Sequence
  HTT spacer sequence CTCN PAM
aucucaaaaaaaaaaaaaca

SEQ ID NO: 12598 - RNA, 20 nt, Artificial Sequence
  HTT spacer sequence CTCN PAM
cuuugucacccaggcuggag

SEQ ID NO: 12599 - RNA, 20 nt, Artificial Sequence
  HTT spacer sequence CTCN PAM
agccugggugacaaagugag

SEQ ID NO: 12600 - RNA, 20 nt, Artificial Sequence
  HTT spacer sequence CTCN PAM
cugcaaccuccuccucuugg

SEQ ID NO: 12601 - RNA, 20 nt, Artificial Sequence
  HTT spacer sequence CTCN PAM
uccucuuggguucaggccau

SEQ ID NO: 12602 - RNA, 20 nt, Artificial Sequence
  HTT spacer sequence CTCN PAM
ucuuggguucaggccauccu

SEQ ID NO: 12603 - RNA, 20 nt, Artificial Sequence
  HTT spacer sequence CTCN PAM
uggguucaggccauccuccc

SEQ ID NO: 12604 - RNA, 20 nt, Artificial Sequence
  HTT spacer sequence CTCN PAM
caccuaggccuccagaguag

SEQ ID NO: 12605 - RNA, 20 nt, Artificial Sequence
  HTT spacer sequence CTCN PAM
agaguaggugggaucacagg

SEQ ID NO: 12606 - RNA, 20 nt, Artificial Sequence
  HTT spacer sequence CTCN PAM
ggaggccuaggugggaggau

SEQ ID NO: 12607 - RNA, 20 nt, Artificial Sequence
  HTT spacer sequence CTCN PAM
acuaaauauuuaaaaaaaaa

SEQ ID NO: 12608 - RNA, 20 nt, Artificial Sequence
  HTT spacer sequence CTCN PAM
ugaccucaggcgaucugccu

SEQ ID NO: 12609 - RNA, 20 nt, Artificial Sequence
  HTT spacer sequence CTCN PAM
ggcgaucugccuaccucugc

SEQ ID NO: 12610 - RNA, 20 nt, Artificial Sequence
  HTT spacer sequence CTCN PAM
gccucucaaagugcugggau

SEQ ID NO: 12611 - RNA, 20 nt, Artificial Sequence
  HTT spacer sequence CTCN PAM
caaagugcugggauuacagg

SEQ ID NO: 12612 - RNA, 20 nt, Artificial Sequence
  HTT spacer sequence CTCN PAM
aagugcugggauuacaggug

SEQ ID NO: 12613 - RNA, 20 nt, Artificial Sequence
  HTT spacer sequence CTCN PAM
caccuguaaucccagcacuu

SEQ ID NO: 12614 - RNA, 20 nt, Artificial Sequence
  HTT spacer sequence CTCN PAM
guuaguuugaaagugaucac

SEQ ID NO: 12615 - RNA, 20 nt, Artificial Sequence
  HTT spacer sequence CTCN PAM
guuaccugguuuuugguuaa

SEQ ID NO: 12616 - RNA, 20 nt, Artificial Sequence
  HTT spacer sequence CTCN PAM
cguauaucaacgauuacagu

SEQ ID NO: 12617 - RNA, 20 nt, Artificial Sequence
  HTT spacer sequence CTCN PAM
aguuuaaaaacgaggguugu

SEQ ID NO: 12618 - RNA, 20 nt, Artificial Sequence
  HTT spacer sequence CTCN PAM
uuuuuaaacuagagcauuuc

SEQ ID NO: 12619 - RNA, 20 nt, Artificial Sequence
  HTT spacer sequence CTCN PAM
uuaccagcggugcaccuaga

SEQ ID NO: 12620 - RNA, 20 nt, Artificial Sequence
  HTT spacer sequence CTCN PAM
uucaucuguccuguuuccuu

SEQ ID NO: 12621 - RNA, 20 nt, Artificial Sequence
  HTT spacer sequence CTCN PAM
gccauccuaugagacgggaa

SEQ ID NO: 12622 - RNA, 20 nt, Artificial Sequence
  HTT spacer sequence CTCN PAM
uaggauggcugaggcgcagg

SEQ ID NO: 12623 - RNA, 20 nt, Artificial Sequence
  HTT spacer sequence CTCN PAM
uuaccagcuccuggcuuucu

SEQ ID NO: 12624 - RNA, 20 nt, Artificial Sequence
  HTT spacer sequence CTCN PAM
uggcuuucuucucuggaagg

SEQ ID NO: 12625 - RNA, 20 nt, Artificial Sequence
  HTT spacer sequence CTCN PAM
ggaagguuccugccuguuuu

SEQ ID NO: 12626 - RNA, 20 nt, Artificial Sequence
  HTT spacer sequence CTCN PAM
caccugcuccucucucagcc

SEQ ID NO: 12627 - RNA, 20 nt, Artificial Sequence
  HTT spacer sequence CTCN PAM
ucucucagcccucucagggg

SEQ ID NO: 12628 - RNA, 20 nt, Artificial Sequence
  HTT spacer sequence CTCN PAM
cucagcccucucaggggugg

SEQ ID NO: 12629 - RNA, 20 nt, Artificial Sequence
  HTT spacer sequence CTCN PAM
cagcccucucaggggugggg

SEQ ID NO: 12630 - RNA, 20 nt, Artificial Sequence
  HTT spacer sequence CTCN PAM
gcccucucagggguggggcu

SEQ ID NO: 12631 - RNA, 20 nt, Artificial Sequence
  HTT spacer sequence CTCN PAM
cagggguggggcuggaggcc

SEQ ID NO: 12632 - RNA, 20 nt, Artificial Sequence
  HTT spacer sequence CTCN PAM
gggguggggcuggaggccac

SEQ ID NO: 12633 - RNA, 20 nt, Artificial Sequence
  HTT spacer sequence CTCN PAM
agccccaccccugagagggc

SEQ ID NO: 12634 - RNA, 20 nt, Artificial Sequence
  HTT spacer sequence CTCN PAM
uugguggccuccagccccac

SEQ ID NO: 12635 - RNA, 20 nt, Artificial Sequence
  HTT spacer sequence CTCN PAM
ucugcucuccaguugcucga

SEQ ID NO: 12636 - RNA, 20 nt, Artificial Sequence
  HTT spacer sequence CTCN PAM
gcucuccaguugcucgacug

SEQ ID NO: 12637 - RNA, 20 nt, Artificial Sequence
  HTT spacer sequence CTCN PAM
ccaguugcucgacugcuccu

SEQ ID NO: 12638 - RNA, 20 nt, Artificial Sequence
  HTT spacer sequence CTCN PAM
aguugcucgacugcuccuca

SEQ ID NO: 12639 - RNA, 20 nt, Artificial Sequence
  HTT spacer sequence CTCN PAM
acugcuccucauuucccccu

SEQ ID NO: 12640 - RNA, 20 nt, Artificial Sequence
  HTT spacer sequence CTCN PAM
ucauuucccccuggggucug

SEQ ID NO: 12641 - RNA, 20 nt, Artificial Sequence
  HTT spacer sequence CTCN PAM
uuucccccuggggucugcgu

SEQ ID NO: 12642 - RNA, 20 nt, Artificial Sequence
  HTT spacer sequence CTCN PAM
ggucggggcugcucccgcuu

SEQ ID NO: 12643 - RNA, 20 nt, Artificial Sequence
  HTT spacer sequence CTCN PAM
cgcuuacugcccccugccca

SEQ ID NO: 12644 - RNA, 20 nt, Artificial Sequence
  HTT spacer sequence CTCN PAM
ggcugcuuucaaggccucuu

SEQ ID NO: 12645 - RNA, 20 nt, Artificial Sequence
  HTT spacer sequence CTCN PAM
ucucucuucucggcaggaca

SEQ ID NO: 12646 - RNA, 20 nt, Artificial Sequence
  HTT spacer sequence CTCN PAM
cuucucggcaggacaggcac

SEQ ID NO: 12647 - RNA, 20 nt, Artificial Sequence
  HTT spacer sequence CTCN PAM
ucucggcaggacaggcacag

SEQ ID NO: 12648 - RNA, 20 nt, Artificial Sequence
  HTT spacer sequence CTCN PAM
gcaggacaggcacaggcagg

SEQ ID NO: 12649 - RNA, 20 nt, Artificial Sequence
  HTT spacer sequence CTCN PAM
ccgcccagugagauucuuuc

SEQ ID NO: 12650 - RNA, 20 nt, Artificial Sequence
  HTT spacer sequence CTCN PAM
cugggcggggagcuaagcau

SEQ ID NO: 12651 - RNA, 20 nt, Artificial Sequence
  HTT spacer sequence CTCN PAM
auuccccugcccagagagag

SEQ ID NO: 12652 - RNA, 20 nt, Artificial Sequence
  HTT spacer sequence CTCN PAM
gggcaggggaauugagggcg

SEQ ID NO: 12653 - RNA, 20 nt, Artificial Sequence
  HTT spacer sequence CTCN PAM
cugggcaggggaauugaggg

SEQ ID NO: 12654 - RNA, 20 nt, Artificial Sequence
  HTT spacer sequence CTCN PAM
cucugggcaggggaauugag

SEQ ID NO: 12655 - RNA, 20 nt, Artificial Sequence
  HTT spacer sequence CTCN PAM
cucgcucuuuuuuuuuuuuu

SEQ ID NO: 12656 - RNA, 20 nt, Artificial Sequence
  HTT spacer sequence CTCN PAM
cgcucuuuuuuuuuuuuuug

SEQ ID NO: 12657 - RNA, 20 nt, Artificial Sequence
  HTT spacer sequence CTCN PAM
cucuuuuuuuuuuuuuugag

SEQ ID NO: 12658 - RNA, 20 nt, Artificial Sequence
  HTT spacer sequence CTCN PAM
uuuuuuuuuuuuugagacag

SEQ ID NO: 12659 - RNA, 20 nt, Artificial Sequence
  HTT spacer sequence CTCN PAM
aaaaaaaaaaaaagagcgag

SEQ ID NO: 12660 - RNA, 20 nt, Artificial Sequence
  HTT spacer sequence CTCN PAM
gucucaaaaaaaaaaaaaag

SEQ ID NO: 12661 - RNA, 20 nt, Artificial Sequence
  HTT spacer sequence CTCN PAM
gucacccaggcuggagugca

SEQ ID NO: 12662 - RNA, 20 nt, Artificial Sequence
  HTT spacer sequence CTCN PAM
agccugggugacagagcaag

SEQ ID NO: 12663 - RNA, 20 nt, Artificial Sequence
  HTT spacer sequence CTCN PAM
aucucagcucacugcaaccu

SEQ ID NO: 12664 - RNA, 20 nt, Artificial Sequence
  HTT spacer sequence CTCN PAM
gcucacugcaaccuccgccu

SEQ ID NO: 12665 - RNA, 20 nt, Artificial Sequence
  HTT spacer sequence CTCN PAM
cugcaaccuccgccuccugg

SEQ ID NO: 12666 - RNA, 20 nt, Artificial Sequence
  HTT spacer sequence CTCN PAM
gccuccuggguucaagcgau

SEQ ID NO: 12667 - RNA, 20 nt, Artificial Sequence
  HTT spacer sequence CTCN PAM
uggguucaagcgauucuccu

SEQ ID NO: 12668 - RNA, 20 nt, Artificial Sequence
  HTT spacer sequence CTCN PAM
ugccucagccucuugaguag

SEQ ID NO: 12669 - RNA, 20 nt, Artificial Sequence
  HTT spacer sequence CTCN PAM
gccucuugaguagcugggau

SEQ ID NO: 12670 - RNA, 20 nt, Artificial Sequence
  HTT spacer sequence CTCN PAM
ugaguagcugggauuacagg

SEQ ID NO: 12671 - RNA, 20 nt, Artificial Sequence
  HTT spacer sequence CTCN PAM
agaggcugaggcaggagaau

SEQ ID NO: 12672 - RNA, 20 nt, Artificial Sequence
  HTT spacer sequence CTCN PAM
acuaaaaauacaaaaauuag

SEQ ID NO: 12673 - RNA, 20 nt, Artificial Sequence
  HTT spacer sequence CTCN PAM
caacuaaaaauacaaaaauu

SEQ ID NO: 12674 - RNA, 20 nt, Artificial Sequence
  HTT spacer sequence CTCN PAM
cucaacuaaaaauacaaaaa

SEQ ID NO: 12675 - RNA, 20 nt, Artificial Sequence
  HTT spacer sequence CTCN PAM
ugaccucaggugaucagccc

SEQ ID NO: 12676 - RNA, 20 nt, Artificial Sequence
  HTT spacer sequence CTCN PAM
ggugaucagcccaccucggc

SEQ ID NO: 12677 - RNA, 20 nt, Artificial Sequence
  HTT spacer sequence CTCN PAM
gccucccaaagugcugggau

SEQ ID NO: 12678 - RNA, 20 nt, Artificial Sequence
  HTT spacer sequence CTCN PAM
caaagugcugggauuacagg

SEQ ID NO: 12679 - RNA, 20 nt, Artificial Sequence
  HTT spacer sequence CTCN PAM
caccuguaaucccagcacuu

SEQ ID NO: 12680 - RNA, 20 nt, Artificial Sequence
  HTT spacer sequence CTCN PAM
cuucuguguauguguacgcu

SEQ ID NO: 12681 - RNA, 20 nt, Artificial Sequence
  HTT spacer sequence CTCN PAM
ucuguguauguguacgcugu

SEQ ID NO: 12682 - RNA, 20 nt, Artificial Sequence
  HTT spacer sequence CTCN PAM
acaugguguguagucggcua

SEQ ID NO: 12683 - RNA, 20 nt, Artificial Sequence
  HTT spacer sequence CTCN PAM
ucuggaacaggauucuaaug

SEQ ID NO: 12684 - RNA, 20 nt, Artificial Sequence
  HTT spacer sequence CTCN PAM
gcuccuucugcccagcaucu

SEQ ID NO: 12685 - RNA, 20 nt, Artificial Sequence
  HTT spacer sequence CTCN PAM
uucugcccagcaucuaucuu

SEQ ID NO: 12686 - RNA, 20 nt, Artificial Sequence
  HTT spacer sequence CTCN PAM
gagacaccaugccagacugc

SEQ ID NO: 12687 - RNA, 20 nt, Artificial Sequence
  HTT spacer sequence CTCN PAM
gaggccuaaaaaugggcaca

SEQ ID NO: 12688 - RNA, 20 nt, Artificial Sequence
  HTT spacer sequence CTCN PAM
uuuuagaugaugccaaacuu

SEQ ID NO: 12689 - RNA, 20 nt, Artificial Sequence
  HTT spacer sequence CTCN PAM
gccauggcugaagcaguugu

SEQ ID NO: 12690 - RNA, 20 nt, Artificial Sequence
  HTT spacer sequence CTCN PAM
cuggauggguuggaauaauu

SEQ ID NO: 12691 - RNA, 20 nt, Artificial Sequence
  HTT spacer sequence CTCN PAM
caaaccaaauuauuccaacc

SEQ ID NO: 12692 - RNA, 20 nt, Artificial Sequence
  HTT spacer sequence CTCN PAM
aggucauucuguuauaugcu

SEQ ID NO: 12693 - RNA, 20 nt, Artificial Sequence
  HTT spacer sequence CTCN PAM
gacggaaguguauuucuccc

SEQ ID NO: 12694 - RNA, 20 nt, Artificial Sequence
  HTT spacer sequence CTCN PAM
cuuacagaugaaagaauucc

SEQ ID NO: 12695 - RNA, 20 nt, Artificial Sequence
  HTT spacer sequence CTCN PAM
uuccagcucccaucacccca

SEQ ID NO: 12696 - RNA, 20 nt, Artificial Sequence
  HTT spacer sequence CTCN PAM
caucaccccaggauguggcu

SEQ ID NO: 12697 - RNA, 20 nt, Artificial Sequence
  HTT spacer sequence CTCN PAM
agucccagccaacacauccc

SEQ ID NO: 12698 - RNA, 20 nt, Artificial Sequence
  HTT spacer sequence CTCN PAM
cuggaaugggauguguuggc

SEQ ID NO: 12699 - RNA, 20 nt, Artificial Sequence
  HTT spacer sequence CTCN PAM
uuacuucugcuugcaucucc

SEQ ID NO: 12700 - RNA, 20 nt, Artificial Sequence
  HTT spacer sequence CTCN PAM
cuggcuagcacuuacuuagu

SEQ ID NO: 12701 - RNA, 20 nt, Artificial Sequence
  HTT spacer sequence CTCN PAM
uagcuaguguaugacagucc

SEQ ID NO: 12702 - RNA, 20 nt, Artificial Sequence
  HTT spacer sequence CTCN PAM
aaagaaggucagagcggcug

SEQ ID NO: 12703 - RNA, 20 nt, Artificial Sequence
  HTT spacer sequence CTCN PAM
gaccuucuuuagagaccuuu

SEQ ID NO: 12704 - RNA, 20 nt, Artificial Sequence
  HTT spacer sequence CTCN PAM
auuacuuauuguuaugggac

SEQ ID NO: 12705 - RNA, 20 nt, Artificial Sequence
  HTT spacer sequence CTCN PAM
uucagguugauguccuaagc

SEQ ID NO: 12706 - RNA, 20 nt, Artificial Sequence
  HTT spacer sequence CTCN PAM
gaaugggauuguauuuggag

SEQ ID NO: 12707 - RNA, 20 nt, Artificial Sequence
  HTT spacer sequence CTCN PAM
aaauacaaucccauucugag

SEQ ID NO: 12708 - RNA, 20 nt, Artificial Sequence
  HTT spacer sequence CTCN PAM
uuaaagaaccugucuccaaa

SEQ ID NO: 12709 - RNA, 20 nt, Artificial Sequence
  HTT spacer sequence CTCN PAM
uuaccuccuuaaagaaccug

SEQ ID NO: 12710 - RNA, 20 nt, Artificial Sequence
  HTT spacer sequence CTCN PAM
uuuuagccuccuuaccuccu

SEQ ID NO: 12711 - RNA, 20 nt, Artificial Sequence
  HTT spacer sequence CTCN PAM
ucuuguaagacaucagucgg

SEQ ID NO: 12712 - RNA, 20 nt, Artificial Sequence
  HTT spacer sequence CTCN PAM
gagggacggccacgugagga

SEQ ID NO: 12713 - RNA, 20 nt, Artificial Sequence
  HTT spacer sequence CTCN PAM
gagcauguccguguccuaau

SEQ ID NO: 12714 - RNA, 20 nt, Artificial Sequence
  HTT spacer sequence CTCN PAM
cguggccgucccucugagca

SEQ ID NO: 12715 - RNA, 20 nt, Artificial Sequence
  HTT spacer sequence CTCN PAM
ggggaaaccaaccuugccaa

SEQ ID NO: 12716 - RNA, 20 nt, Artificial Sequence
  HTT spacer sequence CTCN PAM
gacuucuagccucuaggacc

SEQ ID NO: 12717 - RNA, 20 nt, Artificial Sequence
  HTT spacer sequence CTCN PAM
aggaccaugagaagauacau

SEQ ID NO: 12718 - RNA, 20 nt, Artificial Sequence
  HTT spacer sequence CTCN PAM
ugguccuagaggcuagaagu

SEQ ID NO: 12719 - RNA, 20 nt, Artificial Sequence
  HTT spacer sequence CTCN PAM
augacuagacaugugugcug

SEQ ID NO: 12720 - RNA, 20 nt, Artificial Sequence
  HTT spacer sequence CTCN PAM
acacguaacuacauauaacu

SEQ ID NO: 12721 - RNA, 20 nt, Artificial Sequence
  HTT spacer sequence CTCN PAM
acuucucgccaggguucagu

SEQ ID NO: 12722 - RNA, 20 nt, Artificial Sequence
  HTT spacer sequence CTCN PAM
ccaggguucagucaaauacc

SEQ ID NO: 12723 - RNA, 20 nt, Artificial Sequence
  HTT spacer sequence CTCN PAM
caccugagagcucagccggg

SEQ ID NO: 12724 - RNA, 20 nt, Artificial Sequence
  HTT spacer sequence CTCN PAM
ggugggaggcagcugguauu

SEQ ID NO: 12725 - RNA, 20 nt, Artificial Sequence
  HTT spacer sequence CTCN PAM
caggugggaggcagcuggua

SEQ ID NO: 12726 - RNA, 20 nt, Artificial Sequence
  HTT spacer sequence CTCN PAM
gccggggaagggucccuuuc

SEQ ID NO: 12727 - RNA, 20 nt, Artificial Sequence
  HTT spacer sequence CTCN PAM
cgugguguuggcaggaucca

SEQ ID NO: 12728 - RNA, 20 nt, Artificial Sequence
  HTT spacer sequence CTCN PAM
uggccugcuggacugagaac

SEQ ID NO: 12729 - RNA, 20 nt, Artificial Sequence
  HTT spacer sequence CTCN PAM
guccagcaggccaugaggaa

SEQ ID NO: 12730 - RNA, 20 nt, Artificial Sequence
  HTT spacer sequence CTCN PAM
guucucacugccuguuggcc

SEQ ID NO: 12731 - RNA, 20 nt, Artificial Sequence
  HTT spacer sequence CTCN PAM
cugccuguuggccagaggcc

SEQ ID NO: 12732 - RNA, 20 nt, Artificial Sequence
  HTT spacer sequence CTCN PAM
ggccaacaggcagugagaac

SEQ ID NO: 12733 - RNA, 20 nt, Artificial Sequence
  HTT spacer sequence CTCN PAM
ccaugugggccucuccaaca

SEQ ID NO: 12734 - RNA, 20 nt, Artificial Sequence
  HTT spacer sequence CTCN PAM
ccaacauggcagcugacuuc

SEQ ID NO: 12735 - RNA, 20 nt, Artificial Sequence
  HTT spacer sequence CTCN PAM
aacauggcagcugacuucau

SEQ ID NO: 12736 - RNA, 20 nt, Artificial Sequence
  HTT spacer sequence CTCN PAM
gaugaagucagcugccaugu

SEQ ID NO: 12737 - RNA, 20 nt, Artificial Sequence
  HTT spacer sequence CTCN PAM
guugccuucuuggcauggau

SEQ ID NO: 12738 - RNA, 20 nt, Artificial Sequence
  HTT spacer sequence CTCN PAM
cuguugccuucuuggcaugg

SEQ ID NO: 12739 - RNA, 20 nt, Artificial Sequence
  HTT spacer sequence CTCN PAM
cuggcccucucuguugccuu

SEQ ID NO: 12740 - RNA, 20 nt, Artificial Sequence
  HTT spacer sequence CTCN PAM
cggggaggggucauacaagg

SEQ ID NO: 12741 - RNA, 20 nt, Artificial Sequence
  HTT spacer sequence CTCN PAM
ccgugagcuugggcuguacc

SEQ ID NO: 12742 - RNA, 20 nt, Artificial Sequence
  HTT spacer sequence CTCN PAM
ugguauugacacccuuguau

SEQ ID NO: 12743 - RNA, 20 nt, Artificial Sequence
  HTT spacer sequence CTCN PAM
ccuccugguauugacacccu

SEQ ID NO: 12744 - RNA, 20 nt, Artificial Sequence
  HTT spacer sequence CTCN PAM
uaagauggccccagcacccc

SEQ ID NO: 12745 - RNA, 20 nt, Artificial Sequence
  HTT spacer sequence CTCN PAM
gugggcagacucauaagaug

SEQ ID NO: 12746 - RNA, 20 nt, Artificial Sequence
  HTT spacer sequence CTCN PAM
agguuguuaguuaccucagu

SEQ ID NO: 12747 - RNA, 20 nt, Artificial Sequence
  HTT spacer sequence CTCN PAM
gcuguuaauaagggccuuug

SEQ ID NO: 12748 - RNA, 20 nt, Artificial Sequence
  HTT spacer sequence CTCN PAM
aaaauaaauaaauaaauaaa

SEQ ID NO: 12749 - RNA, 20 nt, Artificial Sequence
  HTT spacer sequence CTCN PAM
gucucaaaaauaaauaaaua

SEQ ID NO: 12750 - RNA, 20 nt, Artificial Sequence
  HTT spacer sequence CTCN PAM
cucuugucacccaggcugga

SEQ ID NO: 12751 - RNA, 20 nt, Artificial Sequence
  HTT spacer sequence CTCN PAM
ugucacccaggcuggagugc

SEQ ID NO: 12752 - RNA, 20 nt, Artificial Sequence
  HTT spacer sequence CTCN PAM
agccugggugacaagaguga

SEQ ID NO: 12753 - RNA, 20 nt, Artificial Sequence
  HTT spacer sequence CTCN PAM
cugcaaccuccaccucccag

SEQ ID NO: 12754 - RNA, 20 nt, Artificial Sequence
  HTT spacer sequence CTCN PAM
accucccagguucaagcaau

SEQ ID NO: 12755 - RNA, 20 nt, Artificial Sequence
  HTT spacer sequence CTCN PAM
cagguucaagcaauucugcc

SEQ ID NO: 12756 - RNA, 20 nt, Artificial Sequence
  HTT spacer sequence CTCN PAM
gccuccggaauagcugggac

SEQ ID NO: 12757 - RNA, 20 nt, Artificial Sequence
  HTT spacer sequence CTCN PAM
ggaauagcugggacuacagg

SEQ ID NO: 12758 - RNA, 20 nt, Artificial Sequence
  HTT spacer sequence CTCN PAM
acuaaaaauacaaaaauuag

SEQ ID NO: 12759 - RNA, 20 nt, Artificial Sequence
  HTT spacer sequence CTCN PAM
aacuccugaccucuggugau

SEQ ID NO: 12760 - RNA, 20 nt, Artificial Sequence
  HTT spacer sequence CTCN PAM
ugaccucuggugaucugccu

SEQ ID NO: 12761 - RNA, 20 nt, Artificial Sequence
  HTT spacer sequence CTCN PAM
ggugaucugccugccuuggc

SEQ ID NO: 12762 - RNA, 20 nt, Artificial Sequence
  HTT spacer sequence CTCN PAM
caaagugcugggauuacagg

SEQ ID NO: 12763 - RNA, 20 nt, Artificial Sequence
  HTT spacer sequence CTCN PAM
cgccuguaaucccagcacuu

SEQ ID NO: 12764 - RNA, 20 nt, Artificial Sequence
  HTT spacer sequence CTCN PAM
cuggaacuuaauuuuuuuag

SEQ ID NO: 12765 - RNA, 20 nt, Artificial Sequence
  HTT spacer sequence CTCN PAM
aaaaaaauuaaguuccagcg

SEQ ID NO: 12766 - RNA, 20 nt, Artificial Sequence
  HTT spacer sequence CTCN PAM
aucacccaagcuggagugca

SEQ ID NO: 12767 - RNA, 20 nt, Artificial Sequence
  HTT spacer sequence CTCN PAM
agcuugggugauagagcgac

SEQ ID NO: 12768 - RNA, 20 nt, Artificial Sequence
  HTT spacer sequence CTCN PAM
cuugcagccucaaauuccug

SEQ ID NO: 12769 - RNA, 20 nt, Artificial Sequence
  HTT spacer sequence CTCN PAM
aauuccuggguucaggugau

SEQ ID NO: 12770 - RNA, 20 nt, Artificial Sequence
  HTT spacer sequence CTCN PAM
cacaucagccucccaagaac

SEQ ID NO: 12771 - RNA, 20 nt, Artificial Sequence
  HTT spacer sequence CTCN PAM
caagaacugggaacuaacag

SEQ ID NO: 12772 - RNA, 20 nt, Artificial Sequence
  HTT spacer sequence CTCN PAM
gcuguccuucucaagaaaag

SEQ ID NO: 12773 - RNA, 20 nt, Artificial Sequence
  HTT spacer sequence CTCN PAM
agaaaagggaggcuacugcu

SEQ ID NO: 12774 - RNA, 20 nt, Artificial Sequence
  HTT spacer sequence CTCN PAM
cuuuucuugagaaggacagc

SEQ ID NO: 12775 - RNA, 20 nt, Artificial Sequence
  HTT spacer sequence CTCN PAM
gagacaaggcggaggugcug

SEQ ID NO: 12776 - RNA, 20 nt, Artificial Sequence
  HTT spacer sequence CTCN PAM
gagccuguccuaaagggaaa

SEQ ID NO: 12777 - RNA, 20 nt, Artificial Sequence
  HTT spacer sequence CTCN PAM
gccuugucucagagccuguc

SEQ ID NO: 12778 - RNA, 20 nt, Artificial Sequence
  HTT spacer sequence CTCN PAM
guggccacaaacagcaccuc

SEQ ID NO: 12779 - RNA, 20 nt, Artificial Sequence
  HTT spacer sequence CTCN PAM
ggguugcagguguggccugg

SEQ ID NO: 12780 - RNA, 20 nt, Artificial Sequence
  HTT spacer sequence CTCN PAM
ucucugccugcaucaccccc

SEQ ID NO: 12781 - RNA, 20 nt, Artificial Sequence
  HTT spacer sequence CTCN PAM
cugccugcaucaccccccgg

SEQ ID NO: 12782 - RNA, 20 nt, Artificial Sequence
  HTT spacer sequence CTCN PAM
gccugcaucaccccccggcu

SEQ ID NO: 12783 - RNA, 20 nt, Artificial Sequence
  HTT spacer sequence CTCN PAM
gaggccaaccuuacucccug

SEQ ID NO: 12784 - RNA, 20 nt, Artificial Sequence
  HTT spacer sequence CTCN PAM
gagacaaccgcccagccggg

SEQ ID NO: 12785 - RNA, 20 nt, Artificial Sequence
  HTT spacer sequence CTCN PAM
cugcugggcaggcuggacag

SEQ ID NO: 12786 - RNA, 20 nt, Artificial Sequence
  HTT spacer sequence CTCN PAM
ccguuugccccucuaccacc

SEQ ID NO: 12787 - RNA, 20 nt, Artificial Sequence
  HTT spacer sequence CTCN PAM
guuugccccucuaccaccca

SEQ ID NO: 12788 - RNA, 20 nt, Artificial Sequence
  HTT spacer sequence CTCN PAM
accacccaaaaggcaggagg

SEQ ID NO: 12789 - RNA, 20 nt, Artificial Sequence
  HTT spacer sequence CTCN PAM
ugccuuuugggugguagagg

SEQ ID NO: 12790 - RNA, 20 nt, Artificial Sequence
  HTT spacer sequence CTCN PAM
ggagaccaggacccugcccg

SEQ ID NO: 12791 - RNA, 20 nt, Artificial Sequence
  HTT spacer sequence CTCN PAM
agagccuccugccuuuuggg

SEQ ID NO: 12792 - RNA, 20 nt, Artificial Sequence
  HTT spacer sequence CTCN PAM
cgccugggacacaggccgug

SEQ ID NO: 12793 - RNA, 20 nt, Artificial Sequence
  HTT spacer sequence CTCN PAM
gcugagcugcugcugaauga

SEQ ID NO: 12794 - RNA, 20 nt, Artificial Sequence
  HTT spacer sequence CTCN PAM
gcagaggucuguggggcacc

SEQ ID NO: 12795 - RNA, 20 nt, Artificial Sequence
  HTT spacer sequence CTCN PAM
gaccuuccggcaggaccccc

SEQ ID NO: 12796 - RNA, 20 nt, Artificial Sequence
  HTT spacer sequence CTCN PAM
cauaaagaaacgcccccagg

SEQ ID NO: 12797 - RNA, 20 nt, Artificial Sequence
  HTT spacer sequence CTCN PAM
uuccugugggcggcaucuug

SEQ ID NO: 12798 - RNA, 20 nt, Artificial Sequence
  HTT spacer sequence CTCN PAM
cugcacuaaucacagugccu

SEQ ID NO: 12799 - RNA, 20 nt, Artificial Sequence
  HTT spacer sequence CTCN PAM
gugggcagcaggcgcugacc

SEQ ID NO: 12800 - RNA, 20 nt, Artificial Sequence
  HTT spacer sequence CTCN PAM
ccucccuuccggggcgcugc

SEQ ID NO: 12801 - RNA, 20 nt, Artificial Sequence
  HTT spacer sequence CTCN PAM
ucccuuccggggcgcugcgc

SEQ ID NO: 12802 - RNA, 20 nt, Artificial Sequence
  HTT spacer sequence CTCN PAM
cuuccggggcgcugcgcugg

SEQ ID NO: 12803 - RNA, 20 nt, Artificial Sequence
  HTT spacer sequence CTCN PAM
ccagcucacugggggugggg

SEQ ID NO: 12804 - RNA, 20 nt, Artificial Sequence
  HTT spacer sequence CTCN PAM
agcucacuggggguggggug

SEQ ID NO: 12805 - RNA, 20 nt, Artificial Sequence
  HTT spacer sequence CTCN PAM
cugggggugggguggggguc

SEQ ID NO: 12806 - RNA, 20 nt, Artificial Sequence
  HTT spacer sequence CTCN PAM
ggucgugccgaccacgcgca

SEQ ID NO: 12807 - RNA, 20 nt, Artificial Sequence
  HTT spacer sequence CTCN PAM
gcgcucugcgcaggagcucg

SEQ ID NO: 12808 - RNA, 20 nt, Artificial Sequence
  HTT spacer sequence CTCN PAM
gcgcaggagcucgcccaccc

SEQ ID NO: 12809 - RNA, 20 nt, Artificial Sequence
  HTT spacer sequence CTCN PAM
ugcgcagagcgcagagaaug

SEQ ID NO: 12810 - RNA, 20 nt, Artificial Sequence
  HTT spacer sequence CTCN PAM
cccacccucuccccgugcag

SEQ ID NO: 12811 - RNA, 20 nt, Artificial Sequence
  HTT spacer sequence CTCN PAM
ccccgugcagagagccccgc

SEQ ID NO: 12812 - RNA, 20 nt, Artificial Sequence
  HTT spacer sequence CTCN PAM
ccgugcagagagccccgcag

SEQ ID NO: 12813 - RNA, 20 nt, Artificial Sequence
  HTT spacer sequence CTCN PAM
gcacggggagagggugggcg

SEQ ID NO: 12814 - RNA, 20 nt, Artificial Sequence
  HTT spacer sequence CTCN PAM
cugcacggggagaggguggg

SEQ ID NO: 12815 - RNA, 20 nt, Artificial Sequence
  HTT spacer sequence CTCN PAM
ccgcagggcuguccggguga

SEQ ID NO: 12816 - RNA, 20 nt, Artificial Sequence
  HTT spacer sequence CTCN PAM
cccggacagcccugcgggga

SEQ ID NO: 12817 - RNA, 20 nt, Artificial Sequence
  HTT spacer sequence CTCN PAM
ggccacgggccaguguggcg

SEQ ID NO: 12818 - RNA, 20 nt, Artificial Sequence
  HTT spacer sequence CTCN PAM
cgccacacuggcccguggcc

SEQ ID NO: 12819 - RNA, 20 nt, Artificial Sequence
  HTT spacer sequence CTCN PAM
gcucagaguccacggccggc

SEQ ID NO: 12820 - RNA, 20 nt, Artificial Sequence
  HTT spacer sequence CTCN PAM
gaguccacggccggcugucg

SEQ ID NO: 12821 - RNA, 20 nt, Artificial Sequence
  HTT spacer sequence CTCN PAM
gagccgagguggccuugggg

SEQ ID NO: 12822 - RNA, 20 nt, Artificial Sequence
  HTT spacer sequence CTCN PAM
aggcgucggcgggggauccu

SEQ ID NO: 12823 - RNA, 20 nt, Artificial Sequence
  HTT spacer sequence CTCN PAM
gcgcccccuccacggccccg

SEQ ID NO: 12824 - RNA, 20 nt, Artificial Sequence
  HTT spacer sequence CTCN PAM
acggccccgccccguccaug

SEQ ID NO: 12825 - RNA, 20 nt, Artificial Sequence
  HTT spacer sequence CTCN PAM
cccaugaaggacggggccau

SEQ ID NO: 12826 - RNA, 20 nt, Artificial Sequence
  HTT spacer sequence CTCN PAM
auggcccugccccuccgcgc

SEQ ID NO: 12827 - RNA, 20 nt, Artificial Sequence
  HTT spacer sequence CTCN PAM
gcgccccaccccucccucgc

SEQ ID NO: 12828 - RNA, 20 nt, Artificial Sequence
  HTT spacer sequence CTCN PAM
cucgccccaccucucaccuu

SEQ ID NO: 12829 - RNA, 20 nt, Artificial Sequence
  HTT spacer sequence CTCN PAM
ccccaccucucaccuuccug

SEQ ID NO: 12830 - RNA, 20 nt, Artificial Sequence
  HTT spacer sequence CTCN PAM
caccuuccugccccgccccc

SEQ ID NO: 12831 - RNA, 20 nt, Artificial Sequence
  HTT spacer sequence CTCN PAM
ccuuccugccccgcccccag

SEQ ID NO: 12832 - RNA, 20 nt, Artificial Sequence
  HTT spacer sequence CTCN PAM
ccaccccucaccggccaguc

SEQ ID NO: 12833 - RNA, 20 nt, Artificial Sequence
  HTT spacer sequence CTCN PAM
ccggccaguccccuccccua

SEQ ID NO: 12834 - RNA, 20 nt, Artificial Sequence
  HTT spacer sequence CTCN PAM
ccuaucccgcuccgccccuc

SEQ ID NO: 12835 - RNA, 20 nt, Artificial Sequence
  HTT spacer sequence CTCN PAM
gccccucagccgccccgccc

SEQ ID NO: 12836 - RNA, 20 nt, Artificial Sequence
  HTT spacer sequence CTCN PAM
gccgccccgccccucagccg

SEQ ID NO: 12837 - RNA, 20 nt, Artificial Sequence
  HTT spacer sequence CTCN PAM
gccggccugccuaauguccc

SEQ ID NO: 12838 - RNA, 20 nt, Artificial Sequence
  HTT spacer sequence CTCN PAM
ccccgccccucaggcggccu

SEQ ID NO: 12839 - RNA, 20 nt, Artificial Sequence
  HTT spacer sequence CTCN PAM
ggcggccucccugcugugcc

SEQ ID NO: 12840 - RNA, 20 nt, Artificial Sequence
  HTT spacer sequence CTCN PAM
cugcugugccccgccccggc

SEQ ID NO: 12841 - RNA, 20 nt, Artificial Sequence
  HTT spacer sequence CTCN PAM
ccacgccccuaccucaccac

SEQ ID NO: 12842 - RNA, 20 nt, Artificial Sequence
  HTT spacer sequence CTCN PAM
ccacgccccccgcaucgcca

SEQ ID NO: 12843 - RNA, 20 nt, Artificial Sequence
  HTT spacer sequence CTCN PAM
cuuaccaugcagucccgccc

SEQ ID NO: 12844 - RNA, 20 nt, Artificial Sequence
  HTT spacer sequence CTCN PAM
ucccgccucgccgcgacacu

SEQ ID NO: 12845 - RNA, 20 nt, Artificial Sequence
  HTT spacer sequence CTCN PAM
ccgcgacacuucacacacag

SEQ ID NO: 12846 - RNA, 20 nt, Artificial Sequence
  HTT spacer sequence CTCN PAM
ccccauuacagucucaccac

SEQ ID NO: 12847 - RNA, 20 nt, Artificial Sequence
  HTT spacer sequence CTCN PAM
ccacgccccguccccucucc

SEQ ID NO: 12848 - RNA, 20 nt, Artificial Sequence
  HTT spacer sequence CTCN PAM
ccguugagccccgcgccuuc

SEQ ID NO: 12849 - RNA, 20 nt, Artificial Sequence
  HTT spacer sequence CTCN PAM
guugagccccgcgccuucgc

SEQ ID NO: 12850 - RNA, 20 nt, Artificial Sequence
  HTT spacer sequence CTCN PAM
acggagaggggacggggcgu

SEQ ID NO: 12851 - RNA, 20 nt, Artificial Sequence
  HTT spacer sequence CTCN PAM
cacagcaaggccgcugacag

SEQ ID NO: 12852 - RNA, 20 nt, Artificial Sequence
  HTT spacer sequence CTCN PAM
gccaauggcuggccagggaa

SEQ ID NO: 12853 - RNA, 20 nt, Artificial Sequence
  HTT spacer sequence CTCN PAM
gccggcgcggccccgccucc

SEQ ID NO: 12854 - RNA, 20 nt, Artificial Sequence
  HTT spacer sequence CTCN PAM
gccggcgcagcgucugggac

SEQ ID NO: 12855 - RNA, 20 nt, Artificial Sequence
  HTT spacer sequence CTCN PAM
gguucugcuuuuaccugcgg

SEQ ID NO: 12856 - RNA, 20 nt, Artificial Sequence
  HTT spacer sequence CTCN PAM
gggccgcagguaaaagcaga

SEQ ID NO: 12857 - RNA, 20 nt, Artificial Sequence
  HTT spacer sequence CTCN PAM
gcaccggggcaaugaauggg

SEQ ID NO: 12858 - RNA, 20 nt, Artificial Sequence
  HTT spacer sequence CTCN PAM
cggcgccgcucagcaccggg

SEQ ID NO: 12859 - RNA, 20 nt, Artificial Sequence
  HTT spacer sequence CTCN PAM
ggccgacucgcggcgccgcu

SEQ ID NO: 12860 - RNA, 20 nt, Artificial Sequence
  HTT spacer sequence CTCN PAM
ggggacugccgugccgggcg

SEQ ID NO: 12861 - RNA, 20 nt, Artificial Sequence
  HTT spacer sequence CTCN PAM
cgcccggcacggcagucccc

SEQ ID NO: 12862 - RNA, 20 nt, Artificial Sequence
  HTT spacer sequence CTCN PAM
aaggccuucaucagcuuuuc

SEQ ID NO: 12863 - RNA, 20 nt, Artificial Sequence
  HTT spacer sequence CTCN PAM
aguccuuccagcagcagcag

SEQ ID NO: 12864 - RNA, 20 nt, Artificial Sequence
  HTT spacer sequence CTCN PAM
ucagcuuccucagccgccgc

SEQ ID NO: 12865 - RNA, 20 nt, Artificial Sequence
  HTT spacer sequence CTCN PAM
gcuuccucagccgccgccgc

SEQ ID NO: 12866 - RNA, 20 nt, Artificial Sequence
  HTT spacer sequence CTCN PAM
gccgccgccgcaggcacagc

SEQ ID NO: 12867 - RNA, 20 nt, Artificial Sequence
  HTT spacer sequence CTCN PAM
gccgcagccgcccccgccgc

SEQ ID NO: 12868 - RNA, 20 nt, Artificial Sequence
  HTT spacer sequence CTCN PAM
gccacagccgggccgggugg

SEQ ID NO: 12869 - RNA, 20 nt, Artificial Sequence
  HTT spacer sequence CTCN PAM
ucagccacagccgggccggg

SEQ ID NO: 12870 - RNA, 20 nt, Artificial Sequence
  HTT spacer sequence CTCN PAM
cggucggugcagcggcuccu

SEQ ID NO: 12871 - RNA, 20 nt, Artificial Sequence
  HTT spacer sequence CTCN PAM
cugucccggcgggucccagg

SEQ ID NO: 12872 - RNA, 20 nt, Artificial Sequence
  HTT spacer sequence CTCN PAM
gcggggccggggguucgugu

SEQ ID NO: 12873 - RNA, 20 nt, Artificial Sequence
  HTT spacer sequence CTCN PAM
gucucugcggggccgggggu

SEQ ID NO: 12874 - RNA, 20 nt, Artificial Sequence
  HTT spacer sequence CTCN PAM
ggguugcugggucacucugu

SEQ ID NO: 12875 - RNA, 20 nt, Artificial Sequence
  HTT spacer sequence CTCN PAM
ugggcucuggguugcugggu

SEQ ID NO: 12876 - RNA, 20 nt, Artificial Sequence
  HTT spacer sequence CTCN PAM
uggggcgaggccuuccccca

SEQ ID NO: 12877 - RNA, 20 nt, Artificial Sequence
  HTT spacer sequence CTCN PAM
ccccaggagggggcgggugu

SEQ ID NO: 12878 - RNA, 20 nt, Artificial Sequence
  HTT spacer sequence CTCN PAM
cucacuugggucuucccuug

SEQ ID NO: 12879 - RNA, 20 nt, Artificial Sequence
  HTT spacer sequence CTCN PAM
cuugggucuucccuuguccu

SEQ ID NO: 12880 - RNA, 20 nt, Artificial Sequence
  HTT spacer sequence CTCN PAM
cgcgaggggaggcagagccu

SEQ ID NO: 12881 - RNA, 20 nt, Artificial Sequence
  HTT spacer sequence CTCN PAM
cgaggggaggcagagccuug

SEQ ID NO: 12882 - RNA, 20 nt, Artificial Sequence
  HTT spacer sequence CTCN PAM
cgagaggacaagggaagacc

SEQ ID NO: 12883 - RNA, 20 nt, Artificial Sequence
  HTT spacer sequence CTCN PAM
ccucgcgagaggacaaggga

SEQ ID NO: 12884 - RNA, 20 nt, Artificial Sequence
  HTT spacer sequence CTCN PAM
gccuccccucgcgagaggac

SEQ ID NO: 12885 - RNA, 20 nt, Artificial Sequence
  HTT spacer sequence CTCN PAM
gugaauucaggacaggcccc

SEQ ID NO: 12886 - RNA, 20 nt, Artificial Sequence
  HTT spacer sequence CTCN PAM
ccucggugaauucaggacag

SEQ ID NO: 12887 - RNA, 20 nt, Artificial Sequence
  HTT spacer sequence CTCN PAM
gcccucucgcccuucgcagg

SEQ ID NO: 12888 - RNA, 20 nt, Artificial Sequence
  HTT spacer sequence CTCN PAM
cgcccuucgcaggaugcgaa

SEQ ID NO: 12889 - RNA, 20 nt, Artificial Sequence
  HTT spacer sequence CTCN PAM
cccuucgcaggaugcgaaga

SEQ ID NO: 12890 - RNA, 20 nt, Artificial Sequence
  HTT spacer sequence CTCN PAM
ucgcauccugcgaagggcga

SEQ ID NO: 12891 - RNA, 20 nt, Artificial Sequence
  HTT spacer sequence CTCN PAM
ccccaacucuucgcauccug

SEQ ID NO: 12892 - RNA, 20 nt, Artificial Sequence
  HTT spacer sequence CTCN PAM
caaauaaaaagaaacaaguu

SEQ ID NO: 12893 - RNA, 20 nt, Artificial Sequence
  HTT spacer sequence CTCN PAM
ucacaacgcaguuaaaagaa

SEQ ID NO: 12894 - RNA, 20 nt, Artificial Sequence
  HTT spacer sequence CTCN PAM
aaguucucuucacaacgcag

SEQ ID NO: 12895 - RNA, 20 nt, Artificial Sequence
  HTT spacer sequence CTCN PAM
uccaaguucucuucacaacg

SEQ ID NO: 12896 - RNA, 20 nt, Artificial Sequence
  HTT spacer sequence CTCN PAM
gcuccuccaaguucucuuca

SEQ ID NO: 12897 - RNA, 20 nt, Artificial Sequence
  HTT spacer sequence CTCN PAM
gugccacuucccucuucuag

SEQ ID NO: 12898 - RNA, 20 nt, Artificial Sequence
  HTT spacer sequence CTCN PAM
ucuagucugagagggaagag

SEQ ID NO: 12899 - RNA, 20 nt, Artificial Sequence
  HTT spacer sequence CTCN PAM
gacuagaagagggaaguggc

SEQ ID NO: 12900 - RNA, 20 nt, Artificial Sequence
  HTT spacer sequence CTCN PAM
cagacuagaagagggaagug

SEQ ID NO: 12901 - RNA, 20 nt, Artificial Sequence
  HTT spacer sequence CTCN PAM
ucccucucagacuagaagag

SEQ ID NO: 12902 - RNA, 20 nt, Artificial Sequence
  HTT spacer sequence CTCN PAM
aagugucccgcgcccccagc

SEQ ID NO: 12903 - RNA, 20 nt, Artificial Sequence
  HTT spacer sequence CTCN PAM
cgaagugucccgcgccccca

SEQ ID NO: 12904 - RNA, 20 nt, Artificial Sequence
  HTT spacer sequence CTCN PAM
ucucgaagugucccgcgccc

SEQ ID NO: 12905 - RNA, 20 nt, Artificial Sequence
  HTT spacer sequence CTCN PAM
aaaccccgccuccucucgaa

SEQ ID NO: 12906 - RNA, 20 nt, Artificial Sequence
  HTT spacer sequence CTCN PAM
agcuccaaaccccgccuccu

SEQ ID NO: 12907 - RNA, 20 nt, Artificial Sequence
  HTT spacer sequence CTCN PAM
ccagcuccaaaccccgccuc

SEQ ID NO: 12908 - RNA, 20 nt, Artificial Sequence
  HTT spacer sequence CTCN PAM
gcgggaguggcggggcaggg

SEQ ID NO: 12909 - RNA, 20 nt, Artificial Sequence
  HTT spacer sequence CTCN PAM
cgccgaggcguccuaaaagc

SEQ ID NO: 12910 - RNA, 20 nt, Artificial Sequence
  HTT spacer sequence CTCN PAM
ccgcccccccccugccccgc

SEQ ID NO: 12911 - RNA, 20 nt, Artificial Sequence
  HTT spacer sequence CTCN PAM
cuccccgcccccccccugcc

SEQ ID NO: 12912 - RNA, 20 nt, Artificial Sequence
  HTT spacer sequence CTCN PAM
cauuggacgcgcccucacuc

SEQ ID NO: 12913 - RNA, 20 nt, Artificial Sequence
  HTT spacer sequence CTCN PAM
ggcuguuuuaagugccacua

SEQ ID NO: 12914 - RNA, 20 nt, Artificial Sequence
  HTT spacer sequence CTCN PAM
aaucucaggcuguuuuaagu

SEQ ID NO: 12915 - RNA, 20 nt, Artificial Sequence
  HTT spacer sequence CTCN PAM
uccuacauugucaggacauu

SEQ ID NO: 12916 - RNA, 20 nt, Artificial Sequence
  HTT spacer sequence CTCN PAM
uagguggugcuuaaaaucgu

SEQ ID NO: 12917 - RNA, 20 nt, Artificial Sequence
  HTT spacer sequence CTCN PAM
ucuaagccuaaguuggucug

SEQ ID NO: 12918 - RNA, 20 nt, Artificial Sequence
  HTT spacer sequence CTCN PAM
uucaaacgccugcagaccaa

SEQ ID NO: 12919 - RNA, 20 nt, Artificial Sequence
  HTT spacer sequence CTCN PAM
uccuaauauuuaagauaauu

SEQ ID NO: 12920 - RNA, 20 nt, Artificial Sequence
  HTT spacer sequence CTCN PAM
ccaucagcaacguguugguu

SEQ ID NO: 12921 - RNA, 20 nt, Artificial Sequence
  HTT spacer sequence CTCN PAM
gcaauuaaccuccccaucag

SEQ ID NO: 12922 - RNA, 20 nt, Artificial Sequence
  HTT spacer sequence CTCN PAM
uucaucccucggcaauuaac

SEQ ID NO: 12923 - RNA, 20 nt, Artificial Sequence
  HTT spacer sequence CTCN PAM
gugggcaucucagaugugcc

SEQ ID NO: 12924 - RNA, 20 nt, Artificial Sequence
  HTT spacer sequence CTCN PAM
gaugugccagugaaaggguu

SEQ ID NO: 12925 - RNA, 20 nt, Artificial Sequence
  HTT spacer sequence CTCN PAM
ccaagaacaagcaacagaaa

SEQ ID NO: 12926 - RNA, 20 nt, Artificial Sequence
  HTT spacer sequence CTCN PAM
uuuccuguuucaaaaauucu

SEQ ID NO: 12927 - RNA, 20 nt, Artificial Sequence
  HTT spacer sequence CTCN PAM
cuuuuccuguuucaaaaauu

SEQ ID NO: 12928 - RNA, 20 nt, Artificial Sequence
  HTT spacer sequence CTCN PAM
acacacagacuuccagggaa

SEQ ID NO: 12929 - RNA, 20 nt, Artificial Sequence
  HTT spacer sequence CTCN PAM
uacuguacacucgacacaca

SEQ ID NO: 12930 - RNA, 20 nt, Artificial Sequence
  HTT spacer sequence CTCN PAM
ggugcaguucaggccuuucu

SEQ ID NO: 12931 - RNA, 20 nt, Artificial Sequence
  HTT spacer sequence CTCN PAM
uaccucucaguauucuauuu

SEQ ID NO: 12932 - RNA, 20 nt, Artificial Sequence
  HTT spacer sequence CTCN PAM
caguauucuauuuccgaucu

SEQ ID NO: 12933 - RNA, 20 nt, Artificial Sequence
  HTT spacer sequence CTCN PAM
guauucuauuuccgaucugg

SEQ ID NO: 12934 - RNA, 20 nt, Artificial Sequence
  HTT spacer sequence CTCN PAM
guuaagacugauuaauuuuu

SEQ ID NO: 12935 - RNA, 20 nt, Artificial Sequence
  HTT spacer sequence CTCN PAM
ucuucaaaguuuaauuagaa

SEQ ID NO: 12936 - RNA, 20 nt, Artificial Sequence
  HTT spacer sequence CTCN PAM
gaaucauuuucuaauuaaac

SEQ ID NO: 12937 - RNA, 20 nt, Artificial Sequence
  HTT spacer sequence CTCN PAM
ccgaaucauuuucuaauuaa

SEQ ID NO: 12938 - RNA, 20 nt, Artificial Sequence
  HTT spacer sequence CTCN PAM
aaauauccaaaaaguuuuuc

SEQ ID NO: 12939 - RNA, 20 nt, Artificial Sequence
  HTT spacer sequence CTCN PAM
ucaguaaguaauuucucauc

SEQ ID NO: 12940 - RNA, 20 nt, Artificial Sequence
  HTT spacer sequence CTCN PAM
uccagaaauuuacuguagug

SEQ ID NO: 12941 - RNA, 20 nt, Artificial Sequence
  HTT spacer sequence CTCN PAM
uagaaaagcacuacaguaaa

SEQ ID NO: 12942 - RNA, 20 nt, Artificial Sequence
  HTT spacer sequence CTCN PAM
ugaugggaaggaagaccuuu

SEQ ID NO: 12943 - RNA, 20 nt, Artificial Sequence
  HTT spacer sequence CTCN PAM
uucuuaugcugauuugacag

SEQ ID NO: 12944 - RNA, 20 nt, Artificial Sequence
  HTT spacer sequence CTCN PAM
uuugucaaggcagcaaagga

SEQ ID NO: 12945 - RNA, 20 nt, Artificial Sequence
  HTT spacer sequence CTCN PAM
gauuaaagguguaagccacc

SEQ ID NO: 12946 - RNA, 20 nt, Artificial Sequence
  HTT spacer sequence CTCN PAM
caaagugcucggauuaaagg

SEQ ID NO: 12947 - RNA, 20 nt, Artificial Sequence
  HTT spacer sequence CTCN PAM
ggugauucguccaccuaggc

SEQ ID NO: 12948 - RNA, 20 nt, Artificial Sequence
  HTT spacer sequence CTCN PAM
ugaccucaggugauucgucc

SEQ ID NO: 12949 - RNA, 20 nt, Artificial Sequence
  HTT spacer sequence CTCN PAM
aacuccugaccucaggugau

SEQ ID NO: 12950 - RNA, 20 nt, Artificial Sequence
  HTT spacer sequence CTCN PAM
acuaaaaauacaaaaauuag

SEQ ID NO: 12951 - RNA, 20 nt, Artificial Sequence
  HTT spacer sequence CTCN PAM
cagguagcuuggauuacagg

SEQ ID NO: 12952 - RNA, 20 nt, Artificial Sequence
  HTT spacer sequence CTCN PAM
gccucccagguagcuuggau

SEQ ID NO: 12953 - RNA, 20 nt, Artificial Sequence
  HTT spacer sequence CTCN PAM
cggguucaagcgauuuuccu

SEQ ID NO: 12954 - RNA, 20 nt, Artificial Sequence
  HTT spacer sequence CTCN PAM
gccucccggguucaagcgau

SEQ ID NO: 12955 - RNA, 20 nt, Artificial Sequence
  HTT spacer sequence CTCN PAM
cugcagacucugccucccgg

SEQ ID NO: 12956 - RNA, 20 nt, Artificial Sequence
  HTT spacer sequence CTCN PAM
acucacugcagacucugccu

SEQ ID NO: 12957 - RNA, 20 nt, Artificial Sequence
  HTT spacer sequence CTCN PAM
agccugggugacagagcgag

SEQ ID NO: 12958 - RNA, 20 nt, Artificial Sequence
  HTT spacer sequence CTCN PAM
gucacccaggcuggagugca

SEQ ID NO: 12959 - RNA, 20 nt, Artificial Sequence
  HTT spacer sequence CTCN PAM
cucugucacccaggcuggag

SEQ ID NO: 12960 - RNA, 20 nt, Artificial Sequence
  HTT spacer sequence CTCN PAM
aucucaaaaaaaauuuuuuu

SEQ ID NO: 12961 - RNA, 20 nt, Artificial Sequence
  HTT spacer sequence CTCN PAM
aaaaaaauuuuuuuuaaugu

SEQ ID NO: 12962 - RNA, 20 nt, Artificial Sequence
  HTT spacer sequence CTCN PAM
gaguaccuaacuuugucccc

SEQ ID NO: 12963 - RNA, 20 nt, Artificial Sequence
  HTT spacer sequence CTCN PAM
gaggaaagggguggaaggaa

SEQ ID NO: 12964 - RNA, 20 nt, Artificial Sequence
  HTT spacer sequence CTCN PAM
uguauccugccagauauaac

SEQ ID NO: 12965 - RNA, 20 nt, Artificial Sequence
  HTT spacer sequence CTCN PAM
aaaaacaaaaguaguuuaga

SEQ ID NO: 12966 - RNA, 20 nt, Artificial Sequence
  HTT spacer sequence CTCN PAM
aaaaauauauagauauauau

SEQ ID NO: 12967 - RNA, 20 nt, Artificial Sequence
  HTT spacer sequence CTCN PAM
cauugucacccaggcuggag

SEQ ID NO: 12968 - RNA, 20 nt, Artificial Sequence
  HTT spacer sequence CTCN PAM
agccugggugacaaugugag

SEQ ID NO: 12969 - RNA, 20 nt, Artificial Sequence
  HTT spacer sequence CTCN PAM
gcucacugcagucucugccu

SEQ ID NO: 12970 - RNA, 20 nt, Artificial Sequence
  HTT spacer sequence CTCN PAM
cugcagucucugccucccag

SEQ ID NO: 12971 - RNA, 20 nt, Artificial Sequence
  HTT spacer sequence CTCN PAM
gccucccagguucaaaugcu

SEQ ID NO: 12972 - RNA, 20 nt, Artificial Sequence
  HTT spacer sequence CTCN PAM
cagguucaaaugcuucuccu

SEQ ID NO: 12973 - RNA, 20 nt, Artificial Sequence
  HTT spacer sequence CTCN PAM
ugccucagccuucugaguag

SEQ ID NO: 12974 - RNA, 20 nt, Artificial Sequence
  HTT spacer sequence CTCN PAM
gccuucugaguagcugggau

SEQ ID NO: 12975 - RNA, 20 nt, Artificial Sequence
  HTT spacer sequence CTCN PAM
gaaggcugaggcaggagaag

SEQ ID NO: 12976 - RNA, 20 nt, Artificial Sequence
  HTT spacer sequence CTCN PAM
acuaaaaauacaaaaauuag

SEQ ID NO: 12977 - RNA, 20 nt, Artificial Sequence
  HTT spacer sequence CTCN PAM
ugaccuugugaucuguccac

SEQ ID NO: 12978 - RNA, 20 nt, Artificial Sequence
  HTT spacer sequence CTCN PAM
gccucccaaagugcugggau

SEQ ID NO: 12979 - RNA, 20 nt, Artificial Sequence
  HTT spacer sequence CTCN PAM
caaagugcugggauuacagg

SEQ ID NO: 12980 - RNA, 20 nt, Artificial Sequence
  HTT spacer sequence CTCN PAM
caccuguaaucccagcacuu

SEQ ID NO: 12981 - RNA, 20 nt, Artificial Sequence
  HTT spacer sequence CTCN PAM
gaaaucaacugcauuagguu

SEQ ID NO: 12982 - RNA, 20 nt, Artificial Sequence
  HTT spacer sequence CTCN PAM
guauuuugcuguugagaaag

SEQ ID NO: 12983 - RNA, 20 nt, Artificial Sequence
  HTT spacer sequence CTCN PAM
acagcaaaauacagagaaau

SEQ ID NO: 12984 - RNA, 20 nt, Artificial Sequence
  HTT spacer sequence CTCN PAM
uuucucaacagcaaaauaca

SEQ ID NO: 12985 - RNA, 20 nt, Artificial Sequence
  HTT spacer sequence CTCN PAM
aaauuagugaauaccuccuu

SEQ ID NO: 12986 - RNA, 20 nt, Artificial Sequence
  HTT spacer sequence CTCN PAM
caaaguuuggauuuuggcag

SEQ ID NO: 12987 - RNA, 20 nt, Artificial Sequence
  HTT spacer sequence CTCN PAM
ucucaaaguaagauugauga

SEQ ID NO: 12988 - RNA, 20 nt, Artificial Sequence
  HTT spacer sequence CTCN PAM
aaguaagauugaugaaagca

SEQ ID NO: 12989 - RNA, 20 nt, Artificial Sequence
  HTT spacer sequence CTCN PAM
ugcucuuugguguggaacug

SEQ ID NO: 12990 - RNA, 20 nt, Artificial Sequence
  HTT spacer sequence CTCN PAM
uugguguggaacuguggugu

SEQ ID NO: 12991 - RNA, 20 nt, Artificial Sequence
  HTT spacer sequence CTCN PAM
guuuaugaguguuugugcuc

SEQ ID NO: 12992 - RNA, 20 nt, Artificial Sequence
  HTT spacer sequence CTCN PAM
uaaacugaggcccaugcaug

SEQ ID NO: 12993 - RNA, 20 nt, Artificial Sequence
  HTT spacer sequence CTCN PAM
gcucagcauacaggaugcag

SEQ ID NO: 12994 - RNA, 20 nt, Artificial Sequence
  HTT spacer sequence CTCN PAM
gcauacaggaugcaggaguu

SEQ ID NO: 12995 - RNA, 20 nt, Artificial Sequence
  HTT spacer sequence CTCN PAM
ugcauccuguaugcugagca

SEQ ID NO: 12996 - RNA, 20 nt, Artificial Sequence
  HTT spacer sequence CTCN PAM
gcaaaucuagcaugcuuggg

SEQ ID NO: 12997 - RNA, 20 nt, Artificial Sequence
  HTT spacer sequence CTCN PAM
caagcaugcuagauuugcug

SEQ ID NO: 12998 - RNA, 20 nt, Artificial Sequence
  HTT spacer sequence CTCN PAM
caguaauuaggaggcaauua

SEQ ID NO: 12999 - RNA, 20 nt, Artificial Sequence
  HTT spacer sequence CTCN PAM
uaauuacugugaggacccuc

SEQ ID NO: 13000 - RNA, 20 nt, Artificial Sequence
  HTT spacer sequence CTCN PAM
uucagauuccuaucuggugu

SEQ ID NO: 13001 - RNA, 20 nt, Artificial Sequence
  HTT spacer sequence CTCN PAM
gcagugagcagacaaagcuc

SEQ ID NO: 13002 - RNA, 20 nt, Artificial Sequence
  HTT spacer sequence CTCN PAM
cugcugagcccugcaccuau

SEQ ID NO: 13003 - RNA, 20 nt, Artificial Sequence
  HTT spacer sequence CTCN PAM
gcccucgugaagcuuucauu

SEQ ID NO: 13004 - RNA, 20 nt, Artificial Sequence
  HTT spacer sequence CTCN PAM
ugaagcuuucauucuaauga

SEQ ID NO: 13005 - RNA, 20 nt, Artificial Sequence
  HTT spacer sequence CTCN PAM
acguauuaacguacuguaua

SEQ ID NO: 13006 - RNA, 20 nt, Artificial Sequence
  HTT spacer sequence CTCN PAM
auuaacccugacauuucccu

SEQ ID NO: 13007 - RNA, 20 nt, Artificial Sequence
  HTT spacer sequence CTCN PAM
uuuggaauuugucuagcagg

SEQ ID NO: 13008 - RNA, 20 nt, Artificial Sequence
  HTT spacer sequence CTCN PAM
aaaaaaacaaaacaaaacaa

SEQ ID NO: 13009 - RNA, 20 nt, Artificial Sequence
  HTT spacer sequence CTCN PAM
aucagccaggcuggagugca

SEQ ID NO: 13010 - RNA, 20 nt, Artificial Sequence
  HTT spacer sequence CTCN PAM
agccuggcugauagagcaag

SEQ ID NO: 13011 - RNA, 20 nt, Artificial Sequence
  HTT spacer sequence CTCN PAM
cugcaaccucugccucuugg

SEQ ID NO: 13012 - RNA, 20 nt, Artificial Sequence
  HTT spacer sequence CTCN PAM
gccucuuggguucaagugau

SEQ ID NO: 13013 - RNA, 20 nt, Artificial Sequence
  HTT spacer sequence CTCN PAM
uggguucaagugauucucau

SEQ ID NO: 13014 - RNA, 20 nt, Artificial Sequence
  HTT spacer sequence CTCN PAM
ugccucagccuccuguuuag

SEQ ID NO: 13015 - RNA, 20 nt, Artificial Sequence
  HTT spacer sequence CTCN PAM
gccuccuguuuagcugggau

SEQ ID NO: 13016 - RNA, 20 nt, Artificial Sequence
  HTT spacer sequence CTCN PAM
uguuuagcugggauuauaga

SEQ ID NO: 13017 - RNA, 20 nt, Artificial Sequence
  HTT spacer sequence CTCN PAM
ggggaaaaaaaaaaaauuac

SEQ ID NO: 13018 - RNA, 20 nt, Artificial Sequence
  HTT spacer sequence CTCN PAM
gucucgggggaaaaaaaaaa

SEQ ID NO: 13019 - RNA, 20 nt, Artificial Sequence
  HTT spacer sequence CTCN PAM
gucgcccaggcuggagugca

SEQ ID NO: 13020 - RNA, 20 nt, Artificial Sequence
  HTT spacer sequence CTCN PAM
agccugggcgacagagcaag

SEQ ID NO: 13021 - RNA, 20 nt, Artificial Sequence
  HTT spacer sequence CTCN PAM
gcucacugcaagcuccgcuu

SEQ ID NO: 13022 - RNA, 20 nt, Artificial Sequence
  HTT spacer sequence CTCN PAM
cugcaagcuccgcuucccga

SEQ ID NO: 13023 - RNA, 20 nt, Artificial Sequence
  HTT spacer sequence CTCN PAM
gcuucccgaguucacgccau

SEQ ID NO: 13024 - RNA, 20 nt, Artificial Sequence
  HTT spacer sequence CTCN PAM
ggaagcggagcuugcaguga

SEQ ID NO: 13025 - RNA, 20 nt, Artificial Sequence
  HTT spacer sequence CTCN PAM
ugccucagucucccaaguag

SEQ ID NO: 13026 - RNA, 20 nt, Artificial Sequence
  HTT spacer sequence CTCN PAM
gucucccaaguagcugggac

SEQ ID NO: 13027 - RNA, 20 nt, Artificial Sequence
  HTT spacer sequence CTCN PAM
caaguagcugggacuacagg

SEQ ID NO: 13028 - RNA, 20 nt, Artificial Sequence
  HTT spacer sequence CTCN PAM
auuaaaaauacaaaaaaauu

SEQ ID NO: 13029 - RNA, 20 nt, Artificial Sequence
  HTT spacer sequence CTCN PAM
ugaccucgucauccgccgac

SEQ ID NO: 13030 - RNA, 20 nt, Artificial Sequence
  HTT spacer sequence CTCN PAM
ucauccgccgaccuugugau

SEQ ID NO: 13031 - RNA, 20 nt, Artificial Sequence
  HTT spacer sequence CTCN PAM
gccucccaaagugcugggau

SEQ ID NO: 13032 - RNA, 20 nt, Artificial Sequence
  HTT spacer sequence CTCN PAM
caaagugcugggauuacagg

SEQ ID NO: 13033 - RNA, 20 nt, Artificial Sequence
  HTT spacer sequence CTCN PAM
ugccuguaaucccagcacuu

SEQ ID NO: 13034 - RNA, 20 nt, Artificial Sequence
  HTT spacer sequence CTCN PAM
acuaaaaauacaaaaauuac

SEQ ID NO: 13035 - RNA, 20 nt, Artificial Sequence
  HTT spacer sequence CTCN PAM
ucauggcaaaaccccaucuc

SEQ ID NO: 13036 - RNA, 20 nt, Artificial Sequence
  HTT spacer sequence CTCN PAM
aacucccggccucaugugau

SEQ ID NO: 13037 - RNA, 20 nt, Artificial Sequence
  HTT spacer sequence CTCN PAM
cggccucaugugaucugccu

SEQ ID NO: 13038 - RNA, 20 nt, Artificial Sequence
  HTT spacer sequence CTCN PAM
ugugaucugccugccuuggc

SEQ ID NO: 13039 - RNA, 20 nt, Artificial Sequence
  HTT spacer sequence CTCN PAM
caaagugcuaggauuacagg

SEQ ID NO: 13040 - RNA, 20 nt, Artificial Sequence
  HTT spacer sequence CTCN PAM
ugccuguaauccuagcacuu

SEQ ID NO: 13041 - RNA, 20 nt, Artificial Sequence
  HTT spacer sequence CTCN PAM
guggaccuucccugaacacc

SEQ ID NO: 13042 - RNA, 20 nt, Artificial Sequence
  HTT spacer sequence CTCN PAM
uuaacccaggcuggaaugca

SEQ ID NO: 13043 - RNA, 20 nt, Artificial Sequence
  HTT spacer sequence CTCN PAM
cuucagccuugaacuccugg

SEQ ID NO: 13044 - RNA, 20 nt, Artificial Sequence
  HTT spacer sequence CTCN PAM
ugggcucaagugauccuccc

SEQ ID NO: 13045 - RNA, 20 nt, Artificial Sequence
  HTT spacer sequence CTCN PAM
agugauccucccaccucaac

SEQ ID NO: 13046 - RNA, 20 nt, Artificial Sequence
  HTT spacer sequence CTCN PAM
caccucaaccucacaaugug

SEQ ID NO: 13047 - RNA, 20 nt, Artificial Sequence
  HTT spacer sequence CTCN PAM
accucacaauguguugggac

SEQ ID NO: 13048 - RNA, 20 nt, Artificial Sequence
  HTT spacer sequence CTCN PAM
caauguguugggacuauagg

SEQ ID NO: 13049 - RNA, 20 nt, Artificial Sequence
  HTT spacer sequence CTCN PAM
caccuauagucccaacacau

SEQ ID NO: 13050 - RNA, 20 nt, Artificial Sequence
  HTT spacer sequence CTCN PAM
aaagccaucaucuggccagg

SEQ ID NO: 13051 - RNA, 20 nt, Artificial Sequence
  HTT spacer sequence CTCN PAM
agcgaguuaagagucuagug

SEQ ID NO: 13052 - RNA, 20 nt, Artificial Sequence
  HTT spacer sequence CTCN PAM
cuugaggucuuuacucaaaa

SEQ ID NO: 13053 - RNA, 20 nt, Artificial Sequence
  HTT spacer sequence CTCN PAM
uaacucgcuugaggucuuua

SEQ ID NO: 13054 - RNA, 20 nt, Artificial Sequence
  HTT spacer sequence CTCN PAM
auucacccaacuaaaaugac

SEQ ID NO: 13055 - RNA, 20 nt, Artificial Sequence
  HTT spacer sequence CTCN PAM
cucaauucacccaacuaaaa

SEQ ID NO: 13056 - RNA, 20 nt, Artificial Sequence
  HTT spacer sequence CTCN PAM
uggaccuuacuucuuacuac

SEQ ID NO: 13057 - RNA, 20 nt, Artificial Sequence
  HTT spacer sequence CTCN PAM
cuugaccucuuggaccuuac

SEQ ID NO: 13058 - RNA, 20 nt, Artificial Sequence
  HTT spacer sequence CTCN PAM
cauaaaugccaauaucuuua

SEQ ID NO: 13059 - RNA, 20 nt, Artificial Sequence
  HTT spacer sequence CTCN PAM
cucacauaaaugccaauauc

SEQ ID NO: 13060 - RNA, 20 nt, Artificial Sequence
  HTT spacer sequence CTCN PAM
agugacaucccaucucacuc

SEQ ID NO: 13061 - RNA, 20 nt, Artificial Sequence
  HTT spacer sequence CTCN PAM
aauccuccagugacauccca

SEQ ID NO: 13062 - RNA, 20 nt, Artificial Sequence
  HTT spacer sequence CTCN PAM
gcucuaauccuccagugaca

SEQ ID NO: 13063 - RNA, 20 nt, Artificial Sequence
  HTT spacer sequence CTCN PAM
ucugcucuaauccuccagug

SEQ ID NO: 13064 - RNA, 20 nt, Artificial Sequence
  HTT spacer sequence CTCN PAM
ggcugacaacagagugaagg

SEQ ID NO: 13065 - RNA, 20 nt, Artificial Sequence
  HTT spacer sequence CTCN PAM
guugucagccagaguucacu

SEQ ID NO: 13066 - RNA, 20 nt, Artificial Sequence
  HTT spacer sequence CTCN PAM
gauaagcaugguggguucug

SEQ ID NO: 13067 - RNA, 20 nt, Artificial Sequence
  HTT spacer sequence CTCN PAM
cacugcccacagccgacagc

SEQ ID NO: 13068 - RNA, 20 nt, Artificial Sequence
  HTT spacer sequence CTCN PAM
gcuaaguauaacaauuuagc

SEQ ID NO: 13069 - RNA, 20 nt, Artificial Sequence
  HTT spacer sequence CTCN PAM
ugcuuguuaccaguuuaagc

SEQ ID NO: 13070 - RNA, 20 nt, Artificial Sequence
  HTT spacer sequence CTCN PAM
uucuuuuuuuuuuuuuugaa

SEQ ID NO: 13071 - RNA, 20 nt, Artificial Sequence
  HTT spacer sequence CTCN PAM
guuucaaaaaaaaaaaaaag

SEQ ID NO: 13072 - RNA, 20 nt, Artificial Sequence
  HTT spacer sequence CTCN PAM
ugucacccgggcuggagugc

SEQ ID NO: 13073 - RNA, 20 nt, Artificial Sequence
  HTT spacer sequence CTCN PAM
agcccgggugacaagagcga

SEQ ID NO: 13074 - RNA, 20 nt, Artificial Sequence
  HTT spacer sequence CTCN PAM
gcucacuaaaaccucuaccu

SEQ ID NO: 13075 - RNA, 20 nt, Artificial Sequence
  HTT spacer sequence CTCN PAM
cuaaaaccucuaccuccugg

SEQ ID NO: 13076 - RNA, 20 nt, Artificial Sequence
  HTT spacer sequence CTCN PAM
accuccuggguucaagugau

SEQ ID NO: 13077 - RNA, 20 nt, Artificial Sequence
  HTT spacer sequence CTCN PAM
uggguucaagugauucuucu

SEQ ID NO: 13078 - RNA, 20 nt, Artificial Sequence
  HTT spacer sequence CTCN PAM
gccucccaaguaacugggau

SEQ ID NO: 13079 - RNA, 20 nt, Artificial Sequence
  HTT spacer sequence CTCN PAM
caaguaacugggauuacagg

SEQ ID NO: 13080 - RNA, 20 nt, Artificial Sequence
  HTT spacer sequence CTCN PAM
acuaaaaacacaaaaauuag

SEQ ID NO: 13081 - RNA, 20 nt, Artificial Sequence
  HTT spacer sequence CTCN PAM
aacuucugaccucaggugau

SEQ ID NO: 13082 - RNA, 20 nt, Artificial Sequence
  HTT spacer sequence CTCN PAM
ggugauccacucgccucagc

SEQ ID NO: 13083 - RNA, 20 nt, Artificial Sequence
  HTT spacer sequence CTCN PAM
ccucagccugccaaagugcu

SEQ ID NO: 13084 - RNA, 20 nt, Artificial Sequence
  HTT spacer sequence CTCN PAM
gccugccaaagugcugggau

SEQ ID NO: 13085 - RNA, 20 nt, Artificial Sequence
  HTT spacer sequence CTCN PAM
uucuuauacuuaccuugcaa

SEQ ID NO: 13086 - RNA, 20 nt, Artificial Sequence
  HTT spacer sequence CTCN PAM
uuuuuucccuuuguauuuuu

SEQ ID NO: 13087 - RNA, 20 nt, Artificial Sequence
  HTT spacer sequence CTCN PAM
cccuuccuuuggauugucuu

SEQ ID NO: 13088 - RNA, 20 nt, Artificial Sequence
  HTT spacer sequence CTCN PAM
cuuccuuuggauugucuuuu

SEQ ID NO: 13089 - RNA, 20 nt, Artificial Sequence
  HTT spacer sequence CTCN PAM
acuucaucaaaauuaaaaac

SEQ ID NO: 13090 - RNA, 20 nt, Artificial Sequence
  HTT spacer sequence CTCN PAM
uauguuuucuucuaagaauu

SEQ ID NO: 13091 - RNA, 20 nt, Artificial Sequence
  HTT spacer sequence CTCN PAM
aaaauucuuagaagaaaaca

SEQ ID NO: 13092 - RNA, 20 nt, Artificial Sequence
  HTT spacer sequence CTCN PAM
aaauggaucagacuuaaaug

SEQ ID NO: 13093 - RNA, 20 nt, Artificial Sequence
  HTT spacer sequence CTCN PAM
ucaacaaacagugcugggac

SEQ ID NO: 13094 - RNA, 20 nt, Artificial Sequence
  HTT spacer sequence CTCN PAM
cauuucaugaauuuaaacug

SEQ ID NO: 13095 - RNA, 20 nt, Artificial Sequence
  HTT spacer sequence CTCN PAM
aacuuuguuccuuuucaaga

SEQ ID NO: 13096 - RNA, 20 nt, Artificial Sequence
  HTT spacer sequence CTCN PAM
gaauccuacuuggcuucuuu

SEQ ID NO: 13097 - RNA, 20 nt, Artificial Sequence
  HTT spacer sequence CTCN PAM
cagaauccuacuuggcuucu

SEQ ID NO: 13098 - RNA, 20 nt, Artificial Sequence
  HTT spacer sequence CTCN PAM
ccaaguugaucuacagauuc

SEQ ID NO: 13099 - RNA, 20 nt, Artificial Sequence
  HTT spacer sequence CTCN PAM
gucacagcuacgcggcucug

SEQ ID NO: 13100 - RNA, 20 nt, Artificial Sequence
  HTT spacer sequence CTCN PAM
gccauuguagcaugaaagua

SEQ ID NO: 13101 - RNA, 20 nt, Artificial Sequence
  HTT spacer sequence CTCN PAM
uacauauugcuuauggcuac

SEQ ID NO: 13102 - RNA, 20 nt, Artificial Sequence
  HTT spacer sequence CTCN PAM
ugacaggugaaaauuauaug

SEQ ID NO: 13103 - RNA, 20 nt, Artificial Sequence
  HTT spacer sequence CTCN PAM
uagguuaaaauaugauagga

SEQ ID NO: 13104 - RNA, 20 nt, Artificial Sequence
  HTT spacer sequence CTCN PAM
aaaaaaaaaaaaaaaaaaaa

SEQ ID NO: 13105 - RNA, 20 nt, Artificial Sequence
  HTT spacer sequence CTCN PAM
gucucaaaaaaaaaaaaaaa

SEQ ID NO: 13106 - RNA, 20 nt, Artificial Sequence
  HTT spacer sequence CTCN PAM
uguugcccaggcuggagugc

SEQ ID NO: 13107 - RNA, 20 nt, Artificial Sequence
  HTT spacer sequence CTCN PAM
agccugggcaacaagaguga

SEQ ID NO: 13108 - RNA, 20 nt, Artificial Sequence
  HTT spacer sequence CTCN PAM
gcucacugcaaccucugccu

SEQ ID NO: 13109 - RNA, 20 nt, Artificial Sequence
  HTT spacer sequence CTCN PAM
cugcaaccucugccucccag

SEQ ID NO: 13110 - RNA, 20 nt, Artificial Sequence
  HTT spacer sequence CTCN PAM
gccucccagguucaagacau

SEQ ID NO: 13111 - RNA, 20 nt, Artificial Sequence
  HTT spacer sequence CTCN PAM
cagguucaagacauucuccu

SEQ ID NO: 13112 - RNA, 20 nt, Artificial Sequence
  HTT spacer sequence CTCN PAM
ugcacggccucccuaguagc

SEQ ID NO: 13113 - RNA, 20 nt, Artificial Sequence
  HTT spacer sequence CTCN PAM
cuaguagcugggauuacagg

SEQ ID NO: 13114 - RNA, 20 nt, Artificial Sequence
  HTT spacer sequence CTCN PAM
acuaaaaauacaaaauuagc

SEQ ID NO: 13115 - RNA, 20 nt, Artificial Sequence
  HTT spacer sequence CTCN PAM
auguuggucaggcuggucuu

SEQ ID NO: 13116 - RNA, 20 nt, Artificial Sequence
  HTT spacer sequence CTCN PAM
ugaccucaggugauccaccc

SEQ ID NO: 13117 - RNA, 20 nt, Artificial Sequence
  HTT spacer sequence CTCN PAM
ggugauccacccgccucagc

SEQ ID NO: 13118 - RNA, 20 nt, Artificial Sequence
  HTT spacer sequence CTCN PAM
gccucccaaagugcugggau

SEQ ID NO: 13119 - RNA, 20 nt, Artificial Sequence
  HTT spacer sequence CTCN PAM
caaagugcugggauuacagg

SEQ ID NO: 13120 - RNA, 20 nt, Artificial Sequence
  HTT spacer sequence CTCN PAM
cacccuguaaucccagcacu

SEQ ID NO: 13121 - RNA, 20 nt, Artificial Sequence
  HTT spacer sequence CTCN PAM
gucaagcaaacaaaaaauga

SEQ ID NO: 13122 - RNA, 20 nt, Artificial Sequence
  HTT spacer sequence CTCN PAM
uuuaaaaagaaauucuaaaa

SEQ ID NO: 13123 - RNA, 20 nt, Artificial Sequence
  HTT spacer sequence CTCN PAM
aaaaguccucuuuuaaaaag

SEQ ID NO: 13124 - RNA, 20 nt, Artificial Sequence
  HTT spacer sequence CTCN PAM
cauuuuuguggcuguagaau

SEQ ID NO: 13125 - RNA, 20 nt, Artificial Sequence
  HTT spacer sequence CTCN PAM
cuaccuugagaaguccccau

SEQ ID NO: 13126 - RNA, 20 nt, Artificial Sequence
  HTT spacer sequence CTCN PAM
accuugagaaguccccaucc

SEQ ID NO: 13127 - RNA, 20 nt, Artificial Sequence
  HTT spacer sequence CTCN PAM
agguagagagaauaugucac

SEQ ID NO: 13128 - RNA, 20 nt, Artificial Sequence
  HTT spacer sequence CTCN PAM
auuuccuguaaauaagucaa

SEQ ID NO: 13129 - RNA, 20 nt, Artificial Sequence
  HTT spacer sequence CTCN PAM
aaacauuuagucuuauucag

SEQ ID NO: 13130 - RNA, 20 nt, Artificial Sequence
  HTT spacer sequence CTCN PAM
uuguugucugaauaagacua

SEQ ID NO: 13131 - RNA, 20 nt, Artificial Sequence
  HTT spacer sequence CTCN PAM
aacauacauucuagccccca

SEQ ID NO: 13132 - RNA, 20 nt, Artificial Sequence
  HTT spacer sequence CTCN PAM
cugugauagcaaggaccuau

SEQ ID NO: 13133 - RNA, 20 nt, Artificial Sequence
  HTT spacer sequence CTCN PAM
gggacagucguuugguauca

SEQ ID NO: 13134 - RNA, 20 nt, Artificial Sequence
  HTT spacer sequence CTCN PAM
uaagcagacucucucugcuu

SEQ ID NO: 13135 - RNA, 20 nt, Artificial Sequence
  HTT spacer sequence CTCN PAM
cucugcuugaccugacaaau

SEQ ID NO: 13136 - RNA, 20 nt, Artificial Sequence
  HTT spacer sequence CTCN PAM
cugcuugaccugacaaauca

SEQ ID NO: 13137 - RNA, 20 nt, Artificial Sequence
  HTT spacer sequence CTCN PAM
gcuugaccugacaaaucaga

SEQ ID NO: 13138 - RNA, 20 nt, Artificial Sequence
  HTT spacer sequence CTCN PAM
gauuugucaggucaagcaga

SEQ ID NO: 13139 - RNA, 20 nt, Artificial Sequence
  HTT spacer sequence CTCN PAM
cugaaccuguuaaaacacag

SEQ ID NO: 13140 - RNA, 20 nt, Artificial Sequence
  HTT spacer sequence CTCN PAM
aaugugcauguaagucacuc

SEQ ID NO: 13141 - RNA, 20 nt, Artificial Sequence
  HTT spacer sequence CTCN PAM
acuguaggugcuuagaccuu

SEQ ID NO: 13142 - RNA, 20 nt, Artificial Sequence
  HTT spacer sequence CTCN PAM
caaaugcuugcauuguuauu

SEQ ID NO: 13143 - RNA, 20 nt, Artificial Sequence
  HTT spacer sequence CTCN PAM
uauguguccagguguagcug

SEQ ID NO: 13144 - RNA, 20 nt, Artificial Sequence
  HTT spacer sequence CTCN PAM
gcuacaccuggacacauaug

SEQ ID NO: 13145 - RNA, 20 nt, Artificial Sequence
  HTT spacer sequence CTCN PAM
acggcccuacagcagauaag

SEQ ID NO: 13146 - RNA, 20 nt, Artificial Sequence
  HTT spacer sequence CTCN PAM
ucacagcuacagaaaugcuc

SEQ ID NO: 13147 - RNA, 20 nt, Artificial Sequence
  HTT spacer sequence CTCN PAM
cucaucacagcuacagaaau

SEQ ID NO: 13148 - RNA, 20 nt, Artificial Sequence
  HTT spacer sequence CTCN PAM
gcucacucaucacagcuaca

SEQ ID NO: 13149 - RNA, 20 nt, Artificial Sequence
  HTT spacer sequence CTCN PAM
ccucagcucacucaucacag

SEQ ID NO: 13150 - RNA, 20 nt, Artificial Sequence
  HTT spacer sequence CTCN PAM
gcaggcucaccucagcucac

SEQ ID NO: 13151 - RNA, 20 nt, Artificial Sequence
  HTT spacer sequence CTCN PAM
ccgcaggcucaccucagcuc

SEQ ID NO: 13152 - RNA, 20 nt, Artificial Sequence
  HTT spacer sequence CTCN PAM
cagccauugguagugggacu

SEQ ID NO: 13153 - RNA, 20 nt, Artificial Sequence
  HTT spacer sequence CTCN PAM
cuuagaugaacuggaaggac

SEQ ID NO: 13154 - RNA, 20 nt, Artificial Sequence
  HTT spacer sequence CTCN PAM
gaugaaaggguccuuccagu

SEQ ID NO: 13155 - RNA, 20 nt, Artificial Sequence
  HTT spacer sequence CTCN PAM
auaguggcugcucagaugaa

SEQ ID NO: 13156 - RNA, 20 nt, Artificial Sequence
  HTT spacer sequence CTCN PAM
uucgguuguuuuucuccaua

SEQ ID NO: 13157 - RNA, 20 nt, Artificial Sequence
  HTT spacer sequence CTCN PAM
ccucauucgguuguuuuucu

SEQ ID NO: 13158 - RNA, 20 nt, Artificial Sequence
  HTT spacer sequence CTCN PAM
ccccucauucgguuguuuuu

SEQ ID NO: 13159 - RNA, 20 nt, Artificial Sequence
  HTT spacer sequence CTCN PAM
uuugugcccuaaauaaaauu

SEQ ID NO: 13160 - RNA, 20 nt, Artificial Sequence
  HTT spacer sequence CTCN PAM
ccuuugugcccuaaauaaaa

SEQ ID NO: 13161 - RNA, 20 nt, Artificial Sequence
  HTT spacer sequence CTCN PAM
aaugucaccuucuaaccaca

SEQ ID NO: 13162 - RNA, 20 nt, Artificial Sequence
  HTT spacer sequence CTCN PAM
cgcuauacacauggcuugcc

SEQ ID NO: 13163 - RNA, 20 nt, Artificial Sequence
  HTT spacer sequence CTCN PAM
ucucccgcuauacacauggc

SEQ ID NO: 13164 - RNA, 20 nt, Artificial Sequence
  HTT spacer sequence CTCN PAM
cuucucccgcuauacacaug

SEQ ID NO: 13165 - RNA, 20 nt, Artificial Sequence
  HTT spacer sequence CTCN PAM
gccuggaccucucuucuccc

SEQ ID NO: 13166 - RNA, 20 nt, Artificial Sequence
  HTT spacer sequence CTCN PAM
aacauggaaagcauuucugc

SEQ ID NO: 13167 - RNA, 20 nt, Artificial Sequence
  HTT spacer sequence CTCN PAM
uuacugguucucaaacaugg

SEQ ID NO: 13168 - RNA, 20 nt, Artificial Sequence
  HTT spacer sequence CTCN PAM
uccuuauuucugcccuucac

SEQ ID NO: 13169 - RNA, 20 nt, Artificial Sequence
  HTT spacer sequence CTCN PAM
cagccucauccuuauuucug

SEQ ID NO: 13170 - RNA, 20 nt, Artificial Sequence
  HTT spacer sequence CTCN PAM
cgcagccucauccuuauuuc

SEQ ID NO: 13171 - RNA, 20 nt, Artificial Sequence
  HTT spacer sequence CTCN PAM
ucucucgcagccucauccuu

SEQ ID NO: 13172 - RNA, 20 nt, Artificial Sequence
  HTT spacer sequence CTCN PAM
caucucucgcagccucaucc

SEQ ID NO: 13173 - RNA, 20 nt, Artificial Sequence
  HTT spacer sequence CTCN PAM
aaccucucaucucucgcagc

SEQ ID NO: 13174 - RNA, 20 nt, Artificial Sequence
  HTT spacer sequence CTCN PAM
ucucuaaccucucaucucuc

SEQ ID NO: 13175 - RNA, 20 nt, Artificial Sequence
  HTT spacer sequence CTCN PAM
aacuacugguauuacaggca

SEQ ID NO: 13176 - RNA, 20 nt, Artificial Sequence
  HTT spacer sequence CTCN PAM
caccacaccgucucaaacua

SEQ ID NO: 13177 - RNA, 20 nt, Artificial Sequence
  HTT spacer sequence CTCN PAM
ggcaauccucccaccacacc

SEQ ID NO: 13178 - RNA, 20 nt, Artificial Sequence
  HTT spacer sequence CTCN PAM
acaaaaaacuuuaaaaaauu

SEQ ID NO: 13179 - RNA, 20 nt, Artificial Sequence
  HTT spacer sequence CTCN PAM
ggaggcugaggaggcuggag

SEQ ID NO: 13180 - RNA, 20 nt, Artificial Sequence
  HTT spacer sequence CTCN PAM
ugaguagcugggacuacagg

SEQ ID NO: 13181 - RNA, 20 nt, Artificial Sequence
  HTT spacer sequence CTCN PAM
gccuccugaguagcugggac

SEQ ID NO: 13182 - RNA, 20 nt, Artificial Sequence
  HTT spacer sequence CTCN PAM
ucagccuccugaguagcugg

SEQ ID NO: 13183 - RNA, 20 nt, Artificial Sequence
  HTT spacer sequence CTCN PAM
agccuccucagccuccugag

SEQ ID NO: 13184 - RNA, 20 nt, Artificial Sequence
  HTT spacer sequence CTCN PAM
agcaauccuccagccuccuc

SEQ ID NO: 13185 - RNA, 20 nt, Artificial Sequence
  HTT spacer sequence CTCN PAM
uggacucaagcaauccucca

SEQ ID NO: 13186 - RNA, 20 nt, Artificial Sequence
  HTT spacer sequence CTCN PAM
aacuccuggacucaagcaau

SEQ ID NO: 13187 - RNA, 20 nt, Artificial Sequence
  HTT spacer sequence CTCN PAM
cugcagccucaaacuccugg

SEQ ID NO: 13188 - RNA, 20 nt, Artificial Sequence
  HTT spacer sequence CTCN PAM
ugcccagguuguaguguagu

SEQ ID NO: 13189 - RNA, 20 nt, Artificial Sequence
  HTT spacer sequence CTCN PAM
cuugcccagguuguagugua

SEQ ID NO: 13190 - RNA, 20 nt, Artificial Sequence
  HTT spacer sequence CTCN PAM
cucucuugcccagguuguag

SEQ ID NO: 13191 - RNA, 20 nt, Artificial Sequence
  HTT spacer sequence CTCN PAM
aaauauacacacacacacac

SEQ ID NO: 13192 - RNA, 20 nt, Artificial Sequence
  HTT spacer sequence CTCN PAM
ccagcaugugguauugucaa

SEQ ID NO: 13193 - RNA, 20 nt, Artificial Sequence
  HTT spacer sequence CTCN PAM
ggaaaacaguuuggcaguuu

SEQ ID NO: 13194 - RNA, 20 nt, Artificial Sequence
  HTT spacer sequence CTCN PAM
aggauuaaugcccaggauug

SEQ ID NO: 13195 - RNA, 20 nt, Artificial Sequence
  HTT spacer sequence CTCN PAM
aguaugcauagcagcuuuac

SEQ ID NO: 13196 - RNA, 20 nt, Artificial Sequence
  HTT spacer sequence CTCN PAM
gauguccuucaacaggugaa

SEQ ID NO: 13197 - RNA, 20 nt, Artificial Sequence
  HTT spacer sequence CTCN PAM
guaauaaaaaggaaugagcu

SEQ ID NO: 13198 - RNA, 20 nt, Artificial Sequence
  HTT spacer sequence CTCN PAM
uuccuuuuuauuacugagua

SEQ ID NO: 13199 - RNA, 20 nt, Artificial Sequence
  HTT spacer sequence CTCN PAM
aucccuaaaacugugccauu

SEQ ID NO: 13200 - RNA, 20 nt, Artificial Sequence
  HTT spacer sequence CTCN PAM
aaccccaggcaaccacuaau

SEQ ID NO: 13201 - RNA, 20 nt, Artificial Sequence
  HTT spacer sequence CTCN PAM
acuaccccaucucuaacccc

SEQ ID NO: 13202 - RNA, 20 nt, Artificial Sequence
  HTT spacer sequence CTCN PAM
gccaccacuaaccuacucua

SEQ ID NO: 13203 - RNA, 20 nt, Artificial Sequence
  HTT spacer sequence CTCN PAM
ucugccaccacuaaccuacu

SEQ ID NO: 13204 - RNA, 20 nt, Artificial Sequence
  HTT spacer sequence CTCN PAM
ccucugccaccacuaaccua

SEQ ID NO: 13205 - RNA, 20 nt, Artificial Sequence
  HTT spacer sequence CTCN PAM
uuucucuccucugccaccac

SEQ ID NO: 13206 - RNA, 20 nt, Artificial Sequence
  HTT spacer sequence CTCN PAM
cuuuucucuccucugccacc

SEQ ID NO: 13207 - RNA, 20 nt, Artificial Sequence
  HTT spacer sequence CTCN PAM
cucucuuuucucuccucugc

SEQ ID NO: 13208 - RNA, 20 nt, Artificial Sequence
  HTT spacer sequence CTCN PAM
gucgccaaaaaaaaaaaaaa

SEQ ID NO: 13209 - RNA, 20 nt, Artificial Sequence
  HTT spacer sequence CTCN PAM
guugcccaggcuggagugca

SEQ ID NO: 13210 - RNA, 20 nt, Artificial Sequence
  HTT spacer sequence CTCN PAM
agccugggcaacagagcaag

SEQ ID NO: 13211 - RNA, 20 nt, Artificial Sequence
  HTT spacer sequence CTCN PAM
cugcaaccucugccuccugg

SEQ ID NO: 13212 - RNA, 20 nt, Artificial Sequence
  HTT spacer sequence CTCN PAM
gccuccuggguucaagugau

SEQ ID NO: 13213 - RNA, 20 nt, Artificial Sequence
  HTT spacer sequence CTCN PAM
uggguucaagugauacuugu

SEQ ID NO: 13214 - RNA, 20 nt, Artificial Sequence
  HTT spacer sequence CTCN PAM
gucucccauguucagaguga

SEQ ID NO: 13215 - RNA, 20 nt, Artificial Sequence
  HTT spacer sequence CTCN PAM
cauguucagagugaaacaaa

SEQ ID NO: 13216 - RNA, 20 nt, Artificial Sequence
  HTT spacer sequence CTCN PAM
gaacaugggagacugagaca

SEQ ID NO: 13217 - RNA, 20 nt, Artificial Sequence
  HTT spacer sequence CTCN PAM
gguuuguuucacucugaaca

SEQ ID NO: 13218 - RNA, 20 nt, Artificial Sequence
  HTT spacer sequence CTCN PAM
ugccuguaaucccagcacuu

SEQ ID NO: 13219 - RNA, 20 nt, Artificial Sequence
  HTT spacer sequence CTCN PAM
caaaagugcugggauuacag

SEQ ID NO: 13220 - RNA, 20 nt, Artificial Sequence
  HTT spacer sequence CTCN PAM
agugaucugcccaccuuggc

SEQ ID NO: 13221 - RNA, 20 nt, Artificial Sequence
  HTT spacer sequence CTCN PAM
ugaccucaagugaucugccc

SEQ ID NO: 13222 - RNA, 20 nt, Artificial Sequence
  HTT spacer sequence CTCN PAM
aacuccugaccucaagugau

SEQ ID NO: 13223 - RNA, 20 nt, Artificial Sequence
  HTT spacer sequence CTCN PAM
caaguagcugggacuacagg

SEQ ID NO: 13224 - RNA, 20 nt, Artificial Sequence
  HTT spacer sequence CTCN PAM
gccucccaaguagcugggac

SEQ ID NO: 13225 - RNA, 20 nt, Artificial Sequence
  HTT spacer sequence CTCN PAM
ugccucagccucccaaguag

SEQ ID NO: 13226 - RNA, 20 nt, Artificial Sequence
  HTT spacer sequence CTCN PAM
gguucaagcaguucucuugc

SEQ ID NO: 13227 - RNA, 20 nt, Artificial Sequence
  HTT spacer sequence CTCN PAM
gccccucggguucaagcagu

SEQ ID NO: 13228 - RNA, 20 nt, Artificial Sequence
  HTT spacer sequence CTCN PAM
cugcaaccucugccccucgg

SEQ ID NO: 13229 - RNA, 20 nt, Artificial Sequence
  HTT spacer sequence CTCN PAM
gcucacugcaaccucugccc

SEQ ID NO: 13230 - RNA, 20 nt, Artificial Sequence
  HTT spacer sequence CTCN PAM
cagcucacugcaaccucugc

SEQ ID NO: 13231 - RNA, 20 nt, Artificial Sequence
  HTT spacer sequence CTCN PAM
gucacacaggcugaagugca

SEQ ID NO: 13232 - RNA, 20 nt, Artificial Sequence
  HTT spacer sequence CTCN PAM
aucuccaaaaaaaaaaaacc

SEQ ID NO: 13233 - RNA, 20 nt, Artificial Sequence
  HTT spacer sequence CTCN PAM
aaaaaaaaaaaaccaagauc

SEQ ID NO: 13234 - RNA, 20 nt, Artificial Sequence
  HTT spacer sequence CTCN PAM
caccuguaaucccagcacuu

SEQ ID NO: 13235 - RNA, 20 nt, Artificial Sequence
  HTT spacer sequence CTCN PAM
caaagugcugggauuacagg

SEQ ID NO: 13236 - RNA, 20 nt, Artificial Sequence
  HTT spacer sequence CTCN PAM
gccucccaaagugcugggau

SEQ ID NO: 13237 - RNA, 20 nt, Artificial Sequence
  HTT spacer sequence CTCN PAM
ugaucugcccaucucggccu

SEQ ID NO: 13238 - RNA, 20 nt, Artificial Sequence
  HTT spacer sequence CTCN PAM
ugaccucgugaucugcccau

SEQ ID NO: 13239 - RNA, 20 nt, Artificial Sequence
  HTT spacer sequence CTCN PAM
acuaaaaaauacaaaaaauu

SEQ ID NO: 13240 - RNA, 20 nt, Artificial Sequence
  HTT spacer sequence CTCN PAM
caaguagcugggacuacagg

SEQ ID NO: 13241 - RNA, 20 nt, Artificial Sequence
  HTT spacer sequence CTCN PAM
ugcuucagccucccaaguag

SEQ ID NO: 13242 - RNA, 20 nt, Artificial Sequence
  HTT spacer sequence CTCN PAM
cggguucacaccauucuccu

SEQ ID NO: 13243 - RNA, 20 nt, Artificial Sequence
  HTT spacer sequence CTCN PAM
gccucccggguucacaccau

SEQ ID NO: 13244 - RNA, 20 nt, Artificial Sequence
  HTT spacer sequence CTCN PAM
cugccagcucugccucccgg

SEQ ID NO: 13245 - RNA, 20 nt, Artificial Sequence
  HTT spacer sequence CTCN PAM
gcucacugccagcucugccu

SEQ ID NO: 13246 - RNA, 20 nt, Artificial Sequence
  HTT spacer sequence CTCN PAM
agccugggcgacagagcaag

SEQ ID NO: 13247 - RNA, 20 nt, Artificial Sequence
  HTT spacer sequence CTCN PAM
gucgcccaggcuggagugca

SEQ ID NO: 13248 - RNA, 20 nt, Artificial Sequence
  HTT spacer sequence CTCN PAM
gucucgggggaaaaaaaaaa

SEQ ID NO: 13249 - RNA, 20 nt, Artificial Sequence
  HTT spacer sequence CTCN PAM
ggggaaaaaaaaaaauaaau

SEQ ID NO: 13250 - RNA, 20 nt, Artificial Sequence
  HTT spacer sequence CTCN PAM
aggacacuacagcauucuau

SEQ ID NO: 13251 - RNA, 20 nt, Artificial Sequence
  HTT spacer sequence CTCN PAM
uuacgcuugugugcccgugc

SEQ ID NO: 13252 - RNA, 20 nt, Artificial Sequence
  HTT spacer sequence CTCN PAM
aauuguguaaucaagcaauc

SEQ ID NO: 13253 - RNA, 20 nt, Artificial Sequence
  HTT spacer sequence CTCN PAM
ucuaauuguguaaucaagca

SEQ ID NO: 13254 - RNA, 20 nt, Artificial Sequence
  HTT spacer sequence CTCN PAM
gccagccuccucuaauugug

SEQ ID NO: 13255 - RNA, 20 nt, Artificial Sequence
  HTT spacer sequence CTCN PAM
aaaaaaaaaaaauuaaaaca

SEQ ID NO: 13256 - RNA, 20 nt, Artificial Sequence
  HTT spacer sequence CTCN PAM
guuccccaggcuagagugca

SEQ ID NO: 13257 - RNA, 20 nt, Artificial Sequence
  HTT spacer sequence CTCN PAM
agccuggggaacagagccag

SEQ ID NO: 13258 - RNA, 20 nt, Artificial Sequence
  HTT spacer sequence CTCN PAM
gccuccuggguucaagcagu

SEQ ID NO: 13259 - RNA, 20 nt, Artificial Sequence
  HTT spacer sequence CTCN PAM
uggguucaagcaguucuucu

SEQ ID NO: 13260 - RNA, 20 nt, Artificial Sequence
  HTT spacer sequence CTCN PAM
cgaguagcugggauuauagg

SEQ ID NO: 13261 - RNA, 20 nt, Artificial Sequence
  HTT spacer sequence CTCN PAM
ggaggcugcggcagaagaac

SEQ ID NO: 13262 - RNA, 20 nt, Artificial Sequence
  HTT spacer sequence CTCN PAM
acuaaaaauacaaaaaauag

SEQ ID NO: 13263 - RNA, 20 nt, Artificial Sequence
  HTT spacer sequence CTCN PAM
aacuccugaccucagaugau

SEQ ID NO: 13264 - RNA, 20 nt, Artificial Sequence
  HTT spacer sequence CTCN PAM
ugaccucagaugaucugcug

SEQ ID NO: 13265 - RNA, 20 nt, Artificial Sequence
  HTT spacer sequence CTCN PAM
gaugaucugcugccccagcc

SEQ ID NO: 13266 - RNA, 20 nt, Artificial Sequence
  HTT spacer sequence CTCN PAM
caaagugcugggauuacagg

SEQ ID NO: 13267 - RNA, 20 nt, Artificial Sequence
  HTT spacer sequence CTCN PAM
cgccuguaaucccagcacuu

SEQ ID NO: 13268 - RNA, 20 nt, Artificial Sequence
  HTT spacer sequence CTCN PAM
gagcaaggugguuucuuuuu

SEQ ID NO: 13269 - RNA, 20 nt, Artificial Sequence
  HTT spacer sequence CTCN PAM
gagcaagaacuggaaaaaca

SEQ ID NO: 13270 - RNA, 20 nt, Artificial Sequence
  HTT spacer sequence CTCN PAM
aacugacuuguucuacauga

SEQ ID NO: 13271 - RNA, 20 nt, Artificial Sequence
  HTT spacer sequence CTCN PAM
uuuuguccaauaagcaaacc

SEQ ID NO: 13272 - RNA, 20 nt, Artificial Sequence
  HTT spacer sequence CTCN PAM
gaaacuuaguagucuuuuag

SEQ ID NO: 13273 - RNA, 20 nt, Artificial Sequence
  HTT spacer sequence CTCN PAM
cuacuuuauuuugauagugc

SEQ ID NO: 13274 - RNA, 20 nt, Artificial Sequence
  HTT spacer sequence CTCN PAM
acuuuauuuugauagugcca

SEQ ID NO: 13275 - RNA, 20 nt, Artificial Sequence
  HTT spacer sequence CTCN PAM
uucccauccaaaccuauggc

SEQ ID NO: 13276 - RNA, 20 nt, Artificial Sequence
  HTT spacer sequence CTCN PAM
uuuugcuuggcugagaaguc

SEQ ID NO: 13277 - RNA, 20 nt, Artificial Sequence
  HTT spacer sequence CTCN PAM
gccaagcaaaaggagauaaa

SEQ ID NO: 13278 - RNA, 20 nt, Artificial Sequence
  HTT spacer sequence CTCN PAM
uauuaagacuucucagccaa

SEQ ID NO: 13279 - RNA, 20 nt, Artificial Sequence
  HTT spacer sequence CTCN PAM
guaaaauauaagcaauggcu

SEQ ID NO: 13280 - RNA, 20 nt, Artificial Sequence
  HTT spacer sequence CTCN PAM
aaaucguuaacugacuacaa

SEQ ID NO: 13281 - RNA, 20 nt, Artificial Sequence
  HTT spacer sequence CTCN PAM
auauauaccaggcugccuuc

SEQ ID NO: 13282 - RNA, 20 nt, Artificial Sequence
  HTT spacer sequence CTCN PAM
uguaaucuaugccaucaucu

SEQ ID NO: 13283 - RNA, 20 nt, Artificial Sequence
  HTT spacer sequence CTCN PAM
gcaguacagaagaugauggc

SEQ ID NO: 13284 - RNA, 20 nt, Artificial Sequence
  HTT spacer sequence CTCN PAM
aucaauuucacguuugaauc

SEQ ID NO: 13285 - RNA, 20 nt, Artificial Sequence
  HTT spacer sequence CTCN PAM
guauuucaccaauacucaau

SEQ ID NO: 13286 - RNA, 20 nt, Artificial Sequence
  HTT spacer sequence CTCN PAM
ucuguauuucaccaauacuc

SEQ ID NO: 13287 - RNA, 20 nt, Artificial Sequence
  HTT spacer sequence CTCN PAM
cuauaaugggggaagugagg

SEQ ID NO: 13288 - RNA, 20 nt, Artificial Sequence
  HTT spacer sequence CTCN PAM
auaaugggggaagugaggcc

SEQ ID NO: 13289 - RNA, 20 nt, Artificial Sequence
  HTT spacer sequence CTCN PAM
cuucccccauuauagagaga

SEQ ID NO: 13290 - RNA, 20 nt, Artificial Sequence
  HTT spacer sequence CTCN PAM
uaccuauaaucccagugcuu

SEQ ID NO: 13291 - RNA, 20 nt, Artificial Sequence
  HTT spacer sequence CTCN PAM
caaagcacugggauuauagg

SEQ ID NO: 13292 - RNA, 20 nt, Artificial Sequence
  HTT spacer sequence CTCN PAM
agcgaucuucccaucuuggc

SEQ ID NO: 13293 - RNA, 20 nt, Artificial Sequence
  HTT spacer sequence CTCN PAM
uggccucaagcgaucuuccc

SEQ ID NO: 13294 - RNA, 20 nt, Artificial Sequence
  HTT spacer sequence CTCN PAM
aacuccuggccucaagcgau

SEQ ID NO: 13295 - RNA, 20 nt, Artificial Sequence
  HTT spacer sequence CTCN PAM
cgauguugcccaauugcuca

SEQ ID NO: 13296 - RNA, 20 nt, Artificial Sequence
  HTT spacer sequence CTCN PAM
acaaaauauuuugaaaaaau

SEQ ID NO: 13297 - RNA, 20 nt, Artificial Sequence
  HTT spacer sequence CTCN PAM
ggaggcugagacgggaggau

SEQ ID NO: 13298 - RNA, 20 nt, Artificial Sequence
  HTT spacer sequence CTCN PAM
ugaguggcgcggaccacagg

SEQ ID NO: 13299 - RNA, 20 nt, Artificial Sequence
  HTT spacer sequence CTCN PAM
gccuccugaguggcgcggac

SEQ ID NO: 13300 - RNA, 20 nt, Artificial Sequence
  HTT spacer sequence CTCN PAM
cgucucagccuccugagugg

SEQ ID NO: 13301 - RNA, 20 nt, Artificial Sequence
  HTT spacer sequence CTCN PAM
uaggcugaaaggauccuccc

SEQ ID NO: 13302 - RNA, 20 nt, Artificial Sequence
  HTT spacer sequence CTCN PAM
cuuuagccuuaaacuccuag

SEQ ID NO: 13303 - RNA, 20 nt, Artificial Sequence
  HTT spacer sequence CTCN PAM
agccugggcagcagagcaag

SEQ ID NO: 13304 - RNA, 20 nt, Artificial Sequence
  HTT spacer sequence CTCN PAM
gcugcccaggcuggaguacg

SEQ ID NO: 13305 - RNA, 20 nt, Artificial Sequence
  HTT spacer sequence CTCN PAM
aaaaaaaaguaaaauaaagu

SEQ ID NO: 13306 - RNA, 20 nt, Artificial Sequence
  HTT spacer sequence CTCN PAM
cagaaaaaacagaugauguu

SEQ ID NO: 13307 - RNA, 20 nt, Artificial Sequence
  HTT spacer sequence CTCN PAM
ugcccugugcuucccugucc

SEQ ID NO: 13308 - RNA, 20 nt, Artificial Sequence
  HTT spacer sequence CTCN PAM
auguugcgggcagaaugggg

SEQ ID NO: 13309 - RNA, 20 nt, Artificial Sequence
  HTT spacer sequence CTCN PAM
acuacuaugaauaaaccguu

SEQ ID NO: 13310 - RNA, 20 nt, Artificial Sequence
  HTT spacer sequence CTCN PAM
cugaaugaaugaaugaggug

SEQ ID NO: 13311 - RNA, 20 nt, Artificial Sequence
  HTT spacer sequence CTCN PAM
uucauucauucagugagugu

SEQ ID NO: 13312 - RNA, 20 nt, Artificial Sequence
  HTT spacer sequence CTCN PAM
acuuaguucuacaccucauu

SEQ ID NO: 13313 - RNA, 20 nt, Artificial Sequence
  HTT spacer sequence CTCN PAM
agacaguucaaagugcaauu

SEQ ID NO: 13314 - RNA, 20 nt, Artificial Sequence
  HTT spacer sequence CTCN PAM
cuuauuugcuuuuucuuggc

SEQ ID NO: 13315 - RNA, 20 nt, Artificial Sequence
  HTT spacer sequence CTCN PAM
uauuugcuuuuucuuggcag

SEQ ID NO: 13316 - RNA, 20 nt, Artificial Sequence
  HTT spacer sequence CTCN PAM
gcuccuagcaguggcuggag

SEQ ID NO: 13317 - RNA, 20 nt, Artificial Sequence
  HTT spacer sequence CTCN PAM
uagcaguggcuggagcccac

SEQ ID NO: 13318 - RNA, 20 nt, Artificial Sequence
  HTT spacer sequence CTCN PAM
agccacugcuaggagcagag

SEQ ID NO: 13319 - RNA, 20 nt, Artificial Sequence
  HTT spacer sequence CTCN PAM
ucugugcuucgggauuagug

SEQ ID NO: 13320 - RNA, 20 nt, Artificial Sequence
  HTT spacer sequence CTCN PAM
gugcuucgggauuagugggg

SEQ ID NO: 13321 - RNA, 20 nt, Artificial Sequence
  HTT spacer sequence CTCN PAM
cugggaugaacuagcagcac

SEQ ID NO: 13322 - RNA, 20 nt, Artificial Sequence
  HTT spacer sequence CTCN PAM
guaggagacauauucaccua

SEQ ID NO: 13323 - RNA, 20 nt, Artificial Sequence
  HTT spacer sequence CTCN PAM
uacugagccauuggaaacag

SEQ ID NO: 13324 - RNA, 20 nt, Artificial Sequence
  HTT spacer sequence CTCN PAM
ugguagaagcuagaaaaagc

SEQ ID NO: 13325 - RNA, 20 nt, Artificial Sequence
  HTT spacer sequence CTCN PAM
aaaaaaaauuaaaaaaagaa

SEQ ID NO: 13326 - RNA, 20 nt, Artificial Sequence
  HTT spacer sequence CTCN PAM
gucucaaaaaaaaauuaaaa

SEQ ID NO: 13327 - RNA, 20 nt, Artificial Sequence
  HTT spacer sequence CTCN PAM
uguugcccaggcuggagugc

SEQ ID NO: 13328 - RNA, 20 nt, Artificial Sequence
  HTT spacer sequence CTCN PAM
agccugggcaacaagaguga

SEQ ID NO: 13329 - RNA, 20 nt, Artificial Sequence
  HTT spacer sequence CTCN PAM
gcucacugcaaccucugccu

SEQ ID NO: 13330 - RNA, 20 nt, Artificial Sequence
  HTT spacer sequence CTCN PAM
cugcaaccucugccuccugg

SEQ ID NO: 13331 - RNA, 20 nt, Artificial Sequence
  HTT spacer sequence CTCN PAM
gccuccuggguucaagugau

SEQ ID NO: 13332 - RNA, 20 nt, Artificial Sequence
  HTT spacer sequence CTCN PAM
uggguucaagugauucuccu

SEQ ID NO: 13333 - RNA, 20 nt, Artificial Sequence
  HTT spacer sequence CTCN PAM
ugccucagccucccaaguag

SEQ ID NO: 13334 - RNA, 20 nt, Artificial Sequence
  HTT spacer sequence CTCN PAM
gccucccaaguagcuggagu

SEQ ID NO: 13335 - RNA, 20 nt, Artificial Sequence
  HTT spacer sequence CTCN PAM
caaguagcuggaguuacagg

SEQ ID NO: 13336 - RNA, 20 nt, Artificial Sequence
  HTT spacer sequence CTCN PAM
agcuacuugggaggcugagg

SEQ ID NO: 13337 - RNA, 20 nt, Artificial Sequence
  HTT spacer sequence CTCN PAM
acuaaaaauacaaaauuagc

SEQ ID NO: 13338 - RNA, 20 nt, Artificial Sequence
  HTT spacer sequence CTCN PAM
aacucccaaccuuaggugau

SEQ ID NO: 13339 - RNA, 20 nt, Artificial Sequence
  HTT spacer sequence CTCN PAM
caaccuuaggugaucugccc

SEQ ID NO: 13340 - RNA, 20 nt, Artificial Sequence
  HTT spacer sequence CTCN PAM
gccucccaaagugcugggau

SEQ ID NO: 13341 - RNA, 20 nt, Artificial Sequence
  HTT spacer sequence CTCN PAM
caaagugcugggauuacagg

SEQ ID NO: 13342 - RNA, 20 nt, Artificial Sequence
  HTT spacer sequence CTCN PAM
cgccuguaaucccagcacuu

SEQ ID NO: 13343 - RNA, 20 nt, Artificial Sequence
  HTT spacer sequence CTCN PAM
uggccauugcuuuucacuuu

SEQ ID NO: 13344 - RNA, 20 nt, Artificial Sequence
  HTT spacer sequence CTCN PAM
aaaaaaaaaaaaaaacaaaa

SEQ ID NO: 13345 - RNA, 20 nt, Artificial Sequence
  HTT spacer sequence CTCN PAM
gucucaaaaaaaaaaaaaaa

SEQ ID NO: 13346 - RNA, 20 nt, Artificial Sequence
  HTT spacer sequence CTCN PAM
agccugggugacagaucgug

SEQ ID NO: 13347 - RNA, 20 nt, Artificial Sequence
  HTT spacer sequence CTCN PAM
gccucccagguucacgccau

SEQ ID NO: 13348 - RNA, 20 nt, Artificial Sequence
  HTT spacer sequence CTCN PAM
cagguucacgccauucuccu

SEQ ID NO: 13349 - RNA, 20 nt, Artificial Sequence
  HTT spacer sequence CTCN PAM
ugcuucagccuggcgaguag

SEQ ID NO: 13350 - RNA, 20 nt, Artificial Sequence
  HTT spacer sequence CTCN PAM
ccaggcugaagcaggagaau

SEQ ID NO: 13351 - RNA, 20 nt, Artificial Sequence
  HTT spacer sequence CTCN PAM
ccaccacacccggcuaauuu

SEQ ID NO: 13352 - RNA, 20 nt, Artificial Sequence
  HTT spacer sequence CTCN PAM
acuaaaaauacaaaaaauua

SEQ ID NO: 13353 - RNA, 20 nt, Artificial Sequence
  HTT spacer sequence CTCN PAM
ugaccucaugacccgcucaa

SEQ ID NO: 13354 - RNA, 20 nt, Artificial Sequence
  HTT spacer sequence CTCN PAM
ugacccgcucaacucagccu

SEQ ID NO: 13355 - RNA, 20 nt, Artificial Sequence
  HTT spacer sequence CTCN PAM
acucagccucccaaagugcu

SEQ ID NO: 13356 - RNA, 20 nt, Artificial Sequence
  HTT spacer sequence CTCN PAM
gccucccaaagugcugggau

SEQ ID NO: 13357 - RNA, 20 nt, Artificial Sequence
  HTT spacer sequence CTCN PAM
caaagugcugggauuacagg

SEQ ID NO: 13358 - RNA, 20 nt, Artificial Sequence
  HTT spacer sequence CTCN PAM
cgccuguaaucccagcacuu

SEQ ID NO: 13359 - RNA, 20 nt, Artificial Sequence
  HTT spacer sequence CTCN PAM
cuugucuuuuuauuguggua

SEQ ID NO: 13360 - RNA, 20 nt, Artificial Sequence
  HTT spacer sequence CTCN PAM
ugucuuuuuauugugguaaa

SEQ ID NO: 13361 - RNA, 20 nt, Artificial Sequence
  HTT spacer sequence CTCN PAM
cuaucauccauucuuuccug

SEQ ID NO: 13362 - RNA, 20 nt, Artificial Sequence
  HTT spacer sequence CTCN PAM
uacagacagaaaguagaaag

SEQ ID NO: 13363 - RNA, 20 nt, Artificial Sequence
  HTT spacer sequence CTCN PAM
ggagaccucauguaagugga

SEQ ID NO: 13364 - RNA, 20 nt, Artificial Sequence
  HTT spacer sequence CTCN PAM
agagcaguuacacucauaca

SEQ ID NO: 13365 - RNA, 20 nt, Artificial Sequence
  HTT spacer sequence CTCN PAM
uguaaguggauuccuacagg

SEQ ID NO: 13366 - RNA, 20 nt, Artificial Sequence
  HTT spacer sequence CTCN PAM
gugcauuuguauuauauacu

SEQ ID NO: 13367 - RNA, 20 nt, Artificial Sequence
  HTT spacer sequence CTCN PAM
uuucuguuguuugugaaaua

SEQ ID NO: 13368 - RNA, 20 nt, Artificial Sequence
  HTT spacer sequence CTCN PAM
uuuguuauuucauuuucuuc

SEQ ID NO: 13369 - RNA, 20 nt, Artificial Sequence
  HTT spacer sequence CTCN PAM
gcuaccuguguaagcugggu

SEQ ID NO: 13370 - RNA, 20 nt, Artificial Sequence
  HTT spacer sequence CTCN PAM
aacacguuacagcuuaucua

SEQ ID NO: 13371 - RNA, 20 nt, Artificial Sequence
  HTT spacer sequence CTCN PAM
uuuuugaaauguaaucccua

SEQ ID NO: 13372 - RNA, 20 nt, Artificial Sequence
  HTT spacer sequence CTCN PAM
gguggcuaaugaacauaucu

SEQ ID NO: 13373 - RNA, 20 nt, Artificial Sequence
  HTT spacer sequence CTCN PAM
aaaaaaaaaaaguaaagaua

SEQ ID NO: 13374 - RNA, 20 nt, Artificial Sequence
  HTT spacer sequence CTCN PAM
gucucaaaaaaaaaaaagua

SEQ ID NO: 13375 - RNA, 20 nt, Artificial Sequence
  HTT spacer sequence CTCN PAM
guugcccaggcuagagugca

SEQ ID NO: 13376 - RNA, 20 nt, Artificial Sequence
  HTT spacer sequence CTCN PAM
agccugggcaacagagcaag

SEQ ID NO: 13377 - RNA, 20 nt, Artificial Sequence
  HTT spacer sequence CTCN PAM
gcucacugcaagcuccaccu

SEQ ID NO: 13378 - RNA, 20 nt, Artificial Sequence
  HTT spacer sequence CTCN PAM
cugcaagcuccaccucccgg

SEQ ID NO: 13379 - RNA, 20 nt, Artificial Sequence
  HTT spacer sequence CTCN PAM
accucccggguucacgcuau

SEQ ID NO: 13380 - RNA, 20 nt, Artificial Sequence
  HTT spacer sequence CTCN PAM
cggguucacgcuauucuccu

SEQ ID NO: 13381 - RNA, 20 nt, Artificial Sequence
  HTT spacer sequence CTCN PAM
ugccccagccucccaaguag

SEQ ID NO: 13382 - RNA, 20 nt, Artificial Sequence
  HTT spacer sequence CTCN PAM
caaguagcugggacuacagg

SEQ ID NO: 13383 - RNA, 20 nt, Artificial Sequence
  HTT spacer sequence CTCN PAM
acuaaaaauacaaaaauuua

SEQ ID NO: 13384 - RNA, 20 nt, Artificial Sequence
  HTT spacer sequence CTCN PAM
ugaccucgugauccgcccgc

SEQ ID NO: 13385 - RNA, 20 nt, Artificial Sequence
  HTT spacer sequence CTCN PAM
ugauccgcccgccucggccu

SEQ ID NO: 13386 - RNA, 20 nt, Artificial Sequence
  HTT spacer sequence CTCN PAM
gccucccaaagugcugggau

SEQ ID NO: 13387 - RNA, 20 nt, Artificial Sequence
  HTT spacer sequence CTCN PAM
caaagugcugggauuacagg

SEQ ID NO: 13388 - RNA, 20 nt, Artificial Sequence
  HTT spacer sequence CTCN PAM
cgccuguaaucccagcacuu

SEQ ID NO: 13389 - RNA, 20 nt, Artificial Sequence
  HTT spacer sequence CTCN PAM
accauccaggucucagagaa

SEQ ID NO: 13390 - RNA, 20 nt, Artificial Sequence
  HTT spacer sequence CTCN PAM
gagaacauaauuucucucug

SEQ ID NO: 13391 - RNA, 20 nt, Artificial Sequence
  HTT spacer sequence CTCN PAM
gagaccuggaugguggagau

SEQ ID NO: 13392 - RNA, 20 nt, Artificial Sequence
  HTT spacer sequence CTCN PAM
cugaaagcuuauugacccag

SEQ ID NO: 13393 - RNA, 20 nt, Artificial Sequence
  HTT spacer sequence CTCN PAM
gaaagcuuauugacccagga

SEQ ID NO: 13394 - RNA, 20 nt, Artificial Sequence
  HTT spacer sequence CTCN PAM
uucaaucugagugcgucagg

SEQ ID NO: 13395 - RNA, 20 nt, Artificial Sequence
  HTT spacer sequence CTCN PAM
gauugaaagagaucuuauuu

SEQ ID NO: 13396 - RNA, 20 nt, Artificial Sequence
  HTT spacer sequence CTCN PAM
acauacuuuacuaauauaug

SEQ ID NO: 13397 - RNA, 20 nt, Artificial Sequence
  HTT spacer sequence CTCN PAM
uguuuuuauggaguaaugcu

SEQ ID NO: 13398 - RNA, 20 nt, Artificial Sequence
  HTT spacer sequence CTCN PAM
auaaaaacaagagacagacu

SEQ ID NO: 13399 - RNA, 20 nt, Artificial Sequence
  HTT spacer sequence CTCN PAM
gcauuacuccauaaaaacaa

SEQ ID NO: 13400 - RNA, 20 nt, Artificial Sequence
  HTT spacer sequence CTCN PAM
cagcauuacuccauaaaaac

SEQ ID NO: 13401 - RNA, 20 nt, Artificial Sequence
  HTT spacer sequence CTCN PAM
ucuguagaacaagcauaaug

SEQ ID NO: 13402 - RNA, 20 nt, Artificial Sequence
  HTT spacer sequence CTCN PAM
uuuuaacaugcucuucugua

SEQ ID NO: 13403 - RNA, 20 nt, Artificial Sequence
  HTT spacer sequence CTCN PAM
aaaaacuccuuuuaacaugc

SEQ ID NO: 13404 - RNA, 20 nt, Artificial Sequence
  HTT spacer sequence CTCN PAM
gacuccaaaaacuccuuuua

SEQ ID NO: 13405 - RNA, 20 nt, Artificial Sequence
  HTT spacer sequence CTCN PAM
cugacuccaaaaacuccuuu

SEQ ID NO: 13406 - RNA, 20 nt, Artificial Sequence
  HTT spacer sequence CTCN PAM
auacuuuuuagggauuucag

SEQ ID NO: 13407 - RNA, 20 nt, Artificial Sequence
  HTT spacer sequence CTCN PAM
gaaaucccuaaaaaguauag

SEQ ID NO: 13408 - RNA, 20 nt, Artificial Sequence
  HTT spacer sequence CTCN PAM
ucgcuguuuccuguuaacuc

SEQ ID NO: 13409 - RNA, 20 nt, Artificial Sequence
  HTT spacer sequence CTCN PAM
ccuaaaauauaauuaaacuu

SEQ ID NO: 13410 - RNA, 20 nt, Artificial Sequence
  HTT spacer sequence CTCN PAM
uaaaauauaauuaaacuuuu

SEQ ID NO: 13411 - RNA, 20 nt, Artificial Sequence
  HTT spacer sequence CTCN PAM
aaugagguuauauaaauggc

SEQ ID NO: 13412 - RNA, 20 nt, Artificial Sequence
  HTT spacer sequence CTCN PAM
uuagagacaaaaauuagucu

SEQ ID NO: 13413 - RNA, 20 nt, Artificial Sequence
  HTT spacer sequence CTCN PAM
cuaaaguggucuaaguuacu

SEQ ID NO: 13414 - RNA, 20 nt, Artificial Sequence
  HTT spacer sequence CTCN PAM
aaaguggucuaaguuacugg

SEQ ID NO: 13415 - RNA, 20 nt, Artificial Sequence
  HTT spacer sequence CTCN PAM
uccauacuuaggaaccagua

SEQ ID NO: 13416 - RNA, 20 nt, Artificial Sequence
  HTT spacer sequence CTCN PAM
cuguccuuuuucccaaacau

SEQ ID NO: 13417 - RNA, 20 nt, Artificial Sequence
  HTT spacer sequence CTCN PAM
aacagaaugcagaaguaugu

SEQ ID NO: 13418 - RNA, 20 nt, Artificial Sequence
  HTT spacer sequence CTCN PAM
ugggaauacccaggaaugcu

SEQ ID NO: 13419 - RNA, 20 nt, Artificial Sequence
  HTT spacer sequence CTCN PAM
aguaagcauuccuggguauu

SEQ ID NO: 13420 - RNA, 20 nt, Artificial Sequence
  HTT spacer sequence CTCN PAM
uacuaauauguaccuugaua

SEQ ID NO: 13421 - RNA, 20 nt, Artificial Sequence
  HTT spacer sequence CTCN PAM
cauauauuagcauaaaucag

SEQ ID NO: 13422 - RNA, 20 nt, Artificial Sequence
  HTT spacer sequence CTCN PAM
aaggaaucgauaaauaugca

SEQ ID NO: 13423 - RNA, 20 nt, Artificial Sequence
  HTT spacer sequence CTCN PAM
aaauuaacacagaaauuuaa

SEQ ID NO: 13424 - RNA, 20 nt, Artificial Sequence
  HTT spacer sequence CTCN PAM
acuagaauuuugaucaagau

SEQ ID NO: 13425 - RNA, 20 nt, Artificial Sequence
  HTT spacer sequence CTCN PAM
aaaucaucaccaggccuggu

SEQ ID NO: 13426 - RNA, 20 nt, Artificial Sequence
  HTT spacer sequence CTCN PAM
caaagugcugggauuacagg

SEQ ID NO: 13427 - RNA, 20 nt, Artificial Sequence
  HTT spacer sequence CTCN PAM
gccucccaaagugcugggau

SEQ ID NO: 13428 - RNA, 20 nt, Artificial Sequence
  HTT spacer sequence CTCN PAM
ggugaucugccugccucagc

SEQ ID NO: 13429 - RNA, 20 nt, Artificial Sequence
  HTT spacer sequence CTCN PAM
ugaccucaggugaucugccu

SEQ ID NO: 13430 - RNA, 20 nt, Artificial Sequence
  HTT spacer sequence CTCN PAM
aacucuugaccucaggugau

SEQ ID NO: 13431 - RNA, 20 nt, Artificial Sequence
  HTT spacer sequence CTCN PAM
acuaaaaauacaaaaauuag

SEQ ID NO: 13432 - RNA, 20 nt, Artificial Sequence
  HTT spacer sequence CTCN PAM
caaguagcugggacuacagg

SEQ ID NO: 13433 - RNA, 20 nt, Artificial Sequence
  HTT spacer sequence CTCN PAM
gccucccaaguagcugggac

SEQ ID NO: 13434 - RNA, 20 nt, Artificial Sequence
  HTT spacer sequence CTCN PAM
ugccucagccucccaaguag

SEQ ID NO: 13435 - RNA, 20 nt, Artificial Sequence
  HTT spacer sequence CTCN PAM
uggguucaagcaauucuccu

SEQ ID NO: 13436 - RNA, 20 nt, Artificial Sequence
  HTT spacer sequence CTCN PAM
ccgcaaccuguaccuccugg

SEQ ID NO: 13437 - RNA, 20 nt, Artificial Sequence
  HTT spacer sequence CTCN PAM
ugucgcccaggcuggaaugc

SEQ ID NO: 13438 - RNA, 20 nt, Artificial Sequence
  HTT spacer sequence CTCN PAM
agaaaaaagagaaaaaagaa

SEQ ID NO: 13439 - RNA, 20 nt, Artificial Sequence
  HTT spacer sequence CTCN PAM
uuuuucuugagacagaauuu

SEQ ID NO: 13440 - RNA, 20 nt, Artificial Sequence
  HTT spacer sequence CTCN PAM
ccauauuaguguugauuucu

SEQ ID NO: 13441 - RNA, 20 nt, Artificial Sequence
  HTT spacer sequence CTCN PAM
ucuuucuguucuauaccugu

SEQ ID NO: 13442 - RNA, 20 nt, Artificial Sequence
  HTT spacer sequence CTCN PAM
uuucccuaauacauauaugu

SEQ ID NO: 13443 - RNA, 20 nt, Artificial Sequence
  HTT spacer sequence CTCN PAM
gacuuugggagaacauuaua

SEQ ID NO: 13444 - RNA, 20 nt, Artificial Sequence
  HTT spacer sequence CTCN PAM
caaagucagagaaauguauc

SEQ ID NO: 13445 - RNA, 20 nt, Artificial Sequence
  HTT spacer sequence CTCN PAM
accucauauugcaaacaaac

SEQ ID NO: 13446 - RNA, 20 nt, Artificial Sequence
  HTT spacer sequence CTCN PAM
uauugcaaacaaacauaaag

SEQ ID NO: 13447 - RNA, 20 nt, Artificial Sequence
  HTT spacer sequence CTCN PAM
aacuaagauuacauuuuuua

SEQ ID NO: 13448 - RNA, 20 nt, Artificial Sequence
  HTT spacer sequence CTCN PAM
aaacaguuuuuuccuuuaua

SEQ ID NO: 13449 - RNA, 20 nt, Artificial Sequence
  HTT spacer sequence CTCN PAM
uuacacaggcuaguaaccuu

SEQ ID NO: 13450 - RNA, 20 nt, Artificial Sequence
  HTT spacer sequence CTCN PAM
gacucccagccuccagaacu

SEQ ID NO: 13451 - RNA, 20 nt, Artificial Sequence
  HTT spacer sequence CTCN PAM
cagccuccagaacugugacg

SEQ ID NO: 13452 - RNA, 20 nt, Artificial Sequence
  HTT spacer sequence CTCN PAM
agaacugugacgaguaagug

SEQ ID NO: 13453 - RNA, 20 nt, Artificial Sequence
  HTT spacer sequence CTCN PAM
ucacaguucuggaggcuggg

SEQ ID NO: 13454 - RNA, 20 nt, Artificial Sequence
  HTT spacer sequence CTCN PAM
agcugauuaggacacuagua

SEQ ID NO: 13455 - RNA, 20 nt, Artificial Sequence
  HTT spacer sequence CTCN PAM
gacaaaaaucugaauauucu

SEQ ID NO: 13456 - RNA, 20 nt, Artificial Sequence
  HTT spacer sequence CTCN PAM
agggugcuuaccccuaggaa

SEQ ID NO: 13457 - RNA, 20 nt, Artificial Sequence
  HTT spacer sequence CTCN PAM
auaaacacauaaauaaauau

SEQ ID NO: 13458 - RNA, 20 nt, Artificial Sequence
  HTT spacer sequence CTCN PAM
aucucaauaaacacauaaau

SEQ ID NO: 13459 - RNA, 20 nt, Artificial Sequence
  HTT spacer sequence CTCN PAM
ggcccaggcggacagugcaa

SEQ ID NO: 13460 - RNA, 20 nt, Artificial Sequence
  HTT spacer sequence CTCN PAM
gcucacugcaaccucugcuu

SEQ ID NO: 13461 - RNA, 20 nt, Artificial Sequence
  HTT spacer sequence CTCN PAM
cugcaaccucugcuucccgg

SEQ ID NO: 13462 - RNA, 20 nt, Artificial Sequence
  HTT spacer sequence CTCN PAM
gcuucccggguucaugugau

SEQ ID NO: 13463 - RNA, 20 nt, Artificial Sequence
  HTT spacer sequence CTCN PAM
ugccucagccuccugaguag

SEQ ID NO: 13464 - RNA, 20 nt, Artificial Sequence
  HTT spacer sequence CTCN PAM
gccuccugaguagcugggau

SEQ ID NO: 13465 - RNA, 20 nt, Artificial Sequence
  HTT spacer sequence CTCN PAM
ugaguagcugggauuacagg

SEQ ID NO: 13466 - RNA, 20 nt, Artificial Sequence
  HTT spacer sequence CTCN PAM
ggaggcugaggcaggagaau

SEQ ID NO: 13467 - RNA, 20 nt, Artificial Sequence
  HTT spacer sequence CTCN PAM
caccaccgcacccggcuaau

SEQ ID NO: 13468 - RNA, 20 nt, Artificial Sequence
  HTT spacer sequence CTCN PAM
acuaaaaauacaaaaaauua

SEQ ID NO: 13469 - RNA, 20 nt, Artificial Sequence
  HTT spacer sequence CTCN PAM
aacuccugaccucaugaucc

SEQ ID NO: 13470 - RNA, 20 nt, Artificial Sequence
  HTT spacer sequence CTCN PAM
ugaccucaugauccgcgccc

SEQ ID NO: 13471 - RNA, 20 nt, Artificial Sequence
  HTT spacer sequence CTCN PAM
ugauccgcgccccucggccu

SEQ ID NO: 13472 - RNA, 20 nt, Artificial Sequence
  HTT spacer sequence CTCN PAM
gccucccaguguugggauua

SEQ ID NO: 13473 - RNA, 20 nt, Artificial Sequence
  HTT spacer sequence CTCN PAM
caguguugggauuacaggug

SEQ ID NO: 13474 - RNA, 20 nt, Artificial Sequence
  HTT spacer sequence CTCN PAM
caccuguaaucccaacacug

SEQ ID NO: 13475 - RNA, 20 nt, Artificial Sequence
  HTT spacer sequence CTCN PAM
uguauaaauguaucuggcca

SEQ ID NO: 13476 - RNA, 20 nt, Artificial Sequence
  HTT spacer sequence CTCN PAM
aaaaaaaauuuuuuuaauaa

SEQ ID NO: 13477 - RNA, 20 nt, Artificial Sequence
  HTT spacer sequence CTCN PAM
gucacccaggcaggaugcag

SEQ ID NO: 13478 - RNA, 20 nt, Artificial Sequence
  HTT spacer sequence CTCN PAM
ugggcuuaagugauccuucu

SEQ ID NO: 13479 - RNA, 20 nt, Artificial Sequence
  HTT spacer sequence CTCN PAM
gccuuuugaguaccuggggg

SEQ ID NO: 13480 - RNA, 20 nt, Artificial Sequence
  HTT spacer sequence CTCN PAM
aaaggcugaggcagaaggau

SEQ ID NO: 13481 - RNA, 20 nt, Artificial Sequence
  HTT spacer sequence CTCN PAM
ucuauaaaacauuuaaaaau

SEQ ID NO: 13482 - RNA, 20 nt, Artificial Sequence
  HTT spacer sequence CTCN PAM
caccuuggccucccaaagcg

SEQ ID NO: 13483 - RNA, 20 nt, Artificial Sequence
  HTT spacer sequence CTCN PAM
caaagcgcugagauuacagg

SEQ ID NO: 13484 - RNA, 20 nt, Artificial Sequence
  HTT spacer sequence CTCN PAM
gcgcuuugggaggccaaggu

SEQ ID NO: 13485 - RNA, 20 nt, Artificial Sequence
  HTT spacer sequence CTCN PAM
ugccuguaaucucagcgcuu

SEQ ID NO: 13486 - RNA, 20 nt, Artificial Sequence
  HTT spacer sequence CTCN PAM
acauucauuuuccugggaua

SEQ ID NO: 13487 - RNA, 20 nt, Artificial Sequence
  HTT spacer sequence CTCN PAM
ccacauucauuuuccuggga

SEQ ID NO: 13488 - RNA, 20 nt, Artificial Sequence
  HTT spacer sequence CTCN PAM
ugccaugaccaggcaguaau

SEQ ID NO: 13489 - RNA, 20 nt, Artificial Sequence
  HTT spacer sequence CTCN PAM
guuuuuccucuugccaugac

SEQ ID NO: 13490 - RNA, 20 nt, Artificial Sequence
  HTT spacer sequence CTCN PAM
caguuuuuccucuugccaug

SEQ ID NO: 13491 - RNA, 20 nt, Artificial Sequence
  HTT spacer sequence CTCN PAM
ucucaguuuuuccucuugcc

SEQ ID NO: 13492 - RNA, 20 nt, Artificial Sequence
  HTT spacer sequence CTCN PAM
gucuccucucaguuuuuccu

SEQ ID NO: 13493 - RNA, 20 nt, Artificial Sequence
  HTT spacer sequence CTCN PAM
gccucagucuccucucaguu

SEQ ID NO: 13494 - RNA, 20 nt, Artificial Sequence
  HTT spacer sequence CTCN PAM
acccagcaaaccacuggcuc

SEQ ID NO: 13495 - RNA, 20 nt, Artificial Sequence
  HTT spacer sequence CTCN PAM
ucaacccagcaaaccacugg

SEQ ID NO: 13496 - RNA, 20 nt, Artificial Sequence
  HTT spacer sequence CTCN PAM
gccuccucaacccagcaaac

SEQ ID NO: 13497 - RNA, 20 nt, Artificial Sequence
  HTT spacer sequence CTCN PAM
cagcucugccuccucaaccc

SEQ ID NO: 13498 - RNA, 20 nt, Artificial Sequence
  HTT spacer sequence CTCN PAM
gcacucccagcucugccucc

SEQ ID NO: 13499 - RNA, 20 nt, Artificial Sequence
  HTT spacer sequence CTCN PAM
ccaccuugcaucucugcacu

SEQ ID NO: 13500 - RNA, 20 nt, Artificial Sequence
  HTT spacer sequence CTCN PAM
caccaccuugcaucucugca

SEQ ID NO: 13501 - RNA, 20 nt, Artificial Sequence
  HTT spacer sequence CTCN PAM
ucccugguauucuuccauau

SEQ ID NO: 13502 - RNA, 20 nt, Artificial Sequence
  HTT spacer sequence CTCN PAM
cuucccugguauucuuccau

SEQ ID NO: 13503 - RNA, 20 nt, Artificial Sequence
  HTT spacer sequence CTCN PAM
gcagcucucuucccugguau

SEQ ID NO: 13504 - RNA, 20 nt, Artificial Sequence
  HTT spacer sequence CTCN PAM
cucugcagcucucuucccug

SEQ ID NO: 13505 - RNA, 20 nt, Artificial Sequence
  HTT spacer sequence CTCN PAM
ggagaccugcacccugcccu

SEQ ID NO: 13506 - RNA, 20 nt, Artificial Sequence
  HTT spacer sequence CTCN PAM
ggagcucccucugcagcucu

SEQ ID NO: 13507 - RNA, 20 nt, Artificial Sequence
  HTT spacer sequence CTCN PAM
caguacccugucaugugugu

SEQ ID NO: 13508 - RNA, 20 nt, Artificial Sequence
  HTT spacer sequence CTCN PAM
guacccugucauguguguag

SEQ ID NO: 13509 - RNA, 20 nt, Artificial Sequence
  HTT spacer sequence CTCN PAM
gcuacacacaugacagggua

SEQ ID NO: 13510 - RNA, 20 nt, Artificial Sequence
  HTT spacer sequence CTCN PAM
ucaguacucagcuacacaca

SEQ ID NO: 13511 - RNA, 20 nt, Artificial Sequence
  HTT spacer sequence CTCN PAM
agcccugggucauuuccgca

SEQ ID NO: 13512 - RNA, 20 nt, Artificial Sequence
  HTT spacer sequence CTCN PAM
accuccagcccugggucauu

SEQ ID NO: 13513 - RNA, 20 nt, Artificial Sequence
  HTT spacer sequence CTCN PAM
aacuggugugauuagaaauu

SEQ ID NO: 13514 - RNA, 20 nt, Artificial Sequence
  HTT spacer sequence CTCN PAM
gcucucauagagcagguagg

SEQ ID NO: 13515 - RNA, 20 nt, Artificial Sequence
  HTT spacer sequence CTCN PAM
cauagagcagguaggguacu

SEQ ID NO: 13516 - RNA, 20 nt, Artificial Sequence
  HTT spacer sequence CTCN PAM
uagagcagguaggguacuca

SEQ ID NO: 13517 - RNA, 20 nt, Artificial Sequence
  HTT spacer sequence CTCN PAM
augagagcugagguuuucca

SEQ ID NO: 13518 - RNA, 20 nt, Artificial Sequence
  HTT spacer sequence CTCN PAM
gaaggguuugcccaccuagc

SEQ ID NO: 13519 - RNA, 20 nt, Artificial Sequence
  HTT spacer sequence CTCN PAM
gacccuaccuaauauuaaaa

SEQ ID NO: 13520 - RNA, 20 nt, Artificial Sequence
  HTT spacer sequence CTCN PAM
uuuuaauauuagguaggguc

SEQ ID NO: 13521 - RNA, 20 nt, Artificial Sequence
  HTT spacer sequence CTCN PAM
uccagccuuuaugcuauugu

SEQ ID NO: 13522 - RNA, 20 nt, Artificial Sequence
  HTT spacer sequence CTCN PAM
ccucuuuccccaaaagauau

SEQ ID NO: 13523 - RNA, 20 nt, Artificial Sequence
  HTT spacer sequence CTCN PAM
uuccccaaaagauaucaagu

SEQ ID NO: 13524 - RNA, 20 nt, Artificial Sequence
  HTT spacer sequence CTCN PAM
agggauuaggacuugauauc

SEQ ID NO: 13525 - RNA, 20 nt, Artificial Sequence
  HTT spacer sequence CTCN PAM
agauccugaauuuaaucaca

SEQ ID NO: 13526 - RNA, 20 nt, Artificial Sequence
  HTT spacer sequence CTCN PAM
ucucaagauccugaauuuaa

SEQ ID NO: 13527 - RNA, 20 nt, Artificial Sequence
  HTT spacer sequence CTCN PAM
uuuuuauauauaugugauug

SEQ ID NO: 13528 - RNA, 20 nt, Artificial Sequence
  HTT spacer sequence CTCN PAM
gccuccuuuuuauauauaug

SEQ ID NO: 13529 - RNA, 20 nt, Artificial Sequence
  HTT spacer sequence CTCN PAM
cucugccuccuuuuuauaua

SEQ ID NO: 13530 - RNA, 20 nt, Artificial Sequence
  HTT spacer sequence CTCN PAM
guguguaaaaucucccucug

SEQ ID NO: 13531 - RNA, 20 nt, Artificial Sequence
  HTT spacer sequence CTCN PAM
cuguguguaaaaucucccuc

SEQ ID NO: 13532 - RNA, 20 nt, Artificial Sequence
  HTT spacer sequence CTCN PAM
aauuuucaaggccagcaccu

SEQ ID NO: 13533 - RNA, 20 nt, Artificial Sequence
  HTT spacer sequence CTCN PAM
uccagcuuugguggcugcug

SEQ ID NO: 13534 - RNA, 20 nt, Artificial Sequence
  HTT spacer sequence CTCN PAM
gugccucuuccagcuuuggu

SEQ ID NO: 13535 - RNA, 20 nt, Artificial Sequence
  HTT spacer sequence CTCN PAM
uuuagagccuacuccagagg

SEQ ID NO: 13536 - RNA, 20 nt, Artificial Sequence
  HTT spacer sequence CTCN PAM
aaaugagaacugcuccgugc

SEQ ID NO: 13537 - RNA, 20 nt, Artificial Sequence
  HTT spacer sequence CTCN PAM
agagggaauguggugcugcc

SEQ ID NO: 13538 - RNA, 20 nt, Artificial Sequence
  HTT spacer sequence CTCN PAM
ggaguaggcucuaaaugaga

SEQ ID NO: 13539 - RNA, 20 nt, Artificial Sequence
  HTT spacer sequence CTCN PAM
aagaaacacccaagaaugau

SEQ ID NO: 13540 - RNA, 20 nt, Artificial Sequence
  HTT spacer sequence CTCN PAM
ccaagaaacacccaagaaug

SEQ ID NO: 13541 - RNA, 20 nt, Artificial Sequence
  HTT spacer sequence CTCN PAM
acuauuguccuaugacccug

SEQ ID NO: 13542 - RNA, 20 nt, Artificial Sequence
  HTT spacer sequence CTCN PAM
gguuuuccuaggcagagggc

SEQ ID NO: 13543 - RNA, 20 nt, Artificial Sequence
  HTT spacer sequence CTCN PAM
gccuaggaaaaccagagacc

SEQ ID NO: 13544 - RNA, 20 nt, Artificial Sequence
  HTT spacer sequence CTCN PAM
aguacccagggacacaaaca

SEQ ID NO: 13545 - RNA, 20 nt, Artificial Sequence
  HTT spacer sequence CTCN PAM
cuaaucucaaguacccaggg

SEQ ID NO: 13546 - RNA, 20 nt, Artificial Sequence
  HTT spacer sequence CTCN PAM
uaacgaguaugcugccuuca

SEQ ID NO: 13547 - RNA, 20 nt, Artificial Sequence
  HTT spacer sequence CTCN PAM
uuaagagucaucaccacucc

SEQ ID NO: 13548 - RNA, 20 nt, Artificial Sequence
  HTT spacer sequence CTCN PAM
gaaacaugugcuguguccac

SEQ ID NO: 13549 - RNA, 20 nt, Artificial Sequence
  HTT spacer sequence CTCN PAM
cugaaacaugugcugugucc

SEQ ID NO: 13550 - RNA, 20 nt, Artificial Sequence
  HTT spacer sequence CTCN PAM
auuuuguucuguacuaagaa

SEQ ID NO: 13551 - RNA, 20 nt, Artificial Sequence
  HTT spacer sequence CTCN PAM
cuuucuuuucccacauuucc

SEQ ID NO: 13552 - RNA, 20 nt, Artificial Sequence
  HTT spacer sequence CTCN PAM
uucuuuucccacauuuccuc

SEQ ID NO: 13553 - RNA, 20 nt, Artificial Sequence
  HTT spacer sequence CTCN PAM
uuuucuauucgacaaaacug

SEQ ID NO: 13554 - RNA, 20 nt, Artificial Sequence
  HTT spacer sequence CTCN PAM
augagcuauuggguacaccu

SEQ ID NO: 13555 - RNA, 20 nt, Artificial Sequence
  HTT spacer sequence CTCN PAM
uugagaacaguccaugauga

SEQ ID NO: 13556 - RNA, 20 nt, Artificial Sequence
  HTT spacer sequence CTCN PAM
cagaugggguggcggccggg

SEQ ID NO: 13557 - RNA, 20 nt, Artificial Sequence
  HTT spacer sequence CTCN PAM
gcccggccgccaccccaucu

SEQ ID NO: 13558 - RNA, 20 nt, Artificial Sequence
  HTT spacer sequence CTCN PAM
ucacuucccagauggggcgg

SEQ ID NO: 13559 - RNA, 20 nt, Artificial Sequence
  HTT spacer sequence CTCN PAM
cuucccagauggggcggccg

SEQ ID NO: 13560 - RNA, 20 nt, Artificial Sequence
  HTT spacer sequence CTCN PAM
gcccggccgccccaucuggg

SEQ ID NO: 13561 - RNA, 20 nt, Artificial Sequence
  HTT spacer sequence CTCN PAM
cagacggggcggcggcuggg

SEQ ID NO: 13562 - RNA, 20 nt, Artificial Sequence
  HTT spacer sequence CTCN PAM
cggacggggcggguggccgg

SEQ ID NO: 13563 - RNA, 20 nt, Artificial Sequence
  HTT spacer sequence CTCN PAM
cggacggggcggcuggccgg

SEQ ID NO: 13564 - RNA, 20 nt, Artificial Sequence
  HTT spacer sequence CTCN PAM
cggacggggcggguggccgg

SEQ ID NO: 13565 - RNA, 20 nt, Artificial Sequence
  HTT spacer sequence CTCN PAM
cggacggggcggcuggccgg

SEQ ID NO: 13566 - RNA, 20 nt, Artificial Sequence
  HTT spacer sequence CTCN PAM
cggacggagcggcugccggg

SEQ ID NO: 13567 - RNA, 20 nt, Artificial Sequence
  HTT spacer sequence CTCN PAM
guccgggagguggggggcag

SEQ ID NO: 13568 - RNA, 20 nt, Artificial Sequence
  HTT spacer sequence CTCN PAM
gcccggcagccgcuccgucc

SEQ ID NO: 13569 - RNA, 20 nt, Artificial Sequence
  HTT spacer sequence CTCN PAM
ucacuucccggacggggcgg

SEQ ID NO: 13570 - RNA, 20 nt, Artificial Sequence
  HTT spacer sequence CTCN PAM
cuucccggacggggcggcug

SEQ ID NO: 13571 - RNA, 20 nt, Artificial Sequence
  HTT spacer sequence CTCN PAM
gcccagcagccgccccgucc

SEQ ID NO: 13572 - RNA, 20 nt, Artificial Sequence
  HTT spacer sequence CTCN PAM
ucacuucucagacggggcgg

SEQ ID NO: 13573 - RNA, 20 nt, Artificial Sequence
  HTT spacer sequence CTCN PAM
cuucucagacggggcggcug

SEQ ID NO: 13574 - RNA, 20 nt, Artificial Sequence
  HTT spacer sequence CTCN PAM
gacggggcggcuggucagag

SEQ ID NO: 13575 - RNA, 20 nt, Artificial Sequence
  HTT spacer sequence CTCN PAM
gaccagccgccccgucugag

SEQ ID NO: 13576 - RNA, 20 nt, Artificial Sequence
  HTT spacer sequence CTCN PAM
ucaccucccagacggggugg

SEQ ID NO: 13577 - RNA, 20 nt, Artificial Sequence
  HTT spacer sequence CTCN PAM
ccucccagacgggguggcag

SEQ ID NO: 13578 - RNA, 20 nt, Artificial Sequence
  HTT spacer sequence CTCN PAM
cagacgggguggcagugggg

SEQ ID NO: 13579 - RNA, 20 nt, Artificial Sequence
  HTT spacer sequence CTCN PAM
gccccacugccaccccgucu

SEQ ID NO: 13580 - RNA, 20 nt, Artificial Sequence
  HTT spacer sequence CTCN PAM
gucugggaacuuaagaaugu

SEQ ID NO: 13581 - RNA, 20 nt, Artificial Sequence
  HTT spacer sequence CTCN PAM
gcccggccgugacuccgucu

SEQ ID NO: 13582 - RNA, 20 nt, Artificial Sequence
  HTT spacer sequence CTCN PAM
ucacaucucagacggggcgg

SEQ ID NO: 13583 - RNA, 20 nt, Artificial Sequence
  HTT spacer sequence CTCN PAM
gacggggcggcggggcagag

SEQ ID NO: 13584 - RNA, 20 nt, Artificial Sequence
  HTT spacer sequence CTCN PAM
gccccgccgccccgucugag

SEQ ID NO: 13585 - RNA, 20 nt, Artificial Sequence
  HTT spacer sequence CTCN PAM
ccacuucccagacgaugggc

SEQ ID NO: 13586 - RNA, 20 nt, Artificial Sequence
  HTT spacer sequence CTCN PAM
gcccggccgcccaucgucug

SEQ ID NO: 13587 - RNA, 20 nt, Artificial Sequence
  HTT spacer sequence CTCN PAM
ucacuuccuagaugggauga

SEQ ID NO: 13588 - RNA, 20 nt, Artificial Sequence
  HTT spacer sequence CTCN PAM
cuuccuagaugggaugacag

SEQ ID NO: 13589 - RNA, 20 nt, Artificial Sequence
  HTT spacer sequence CTCN PAM
ucccggcugucaucccaucu

SEQ ID NO: 13590 - RNA, 20 nt, Artificial Sequence
  HTT spacer sequence CTCN PAM
ucacuucccagacugggcag

SEQ ID NO: 13591 - RNA, 20 nt, Artificial Sequence
  HTT spacer sequence CTCN PAM
cuucccagacugggcagcca

SEQ ID NO: 13592 - RNA, 20 nt, Artificial Sequence
  HTT spacer sequence CTCN PAM
gccuggcugcccagucuggg

SEQ ID NO: 13593 - RNA, 20 nt, Artificial Sequence
  HTT spacer sequence CTCN PAM
ucacaucccagacgaugggc

SEQ ID NO: 13594 - RNA, 20 nt, Artificial Sequence
  HTT spacer sequence CTCN PAM
caucccagacgaugggcggc

SEQ ID NO: 13595 - RNA, 20 nt, Artificial Sequence
  HTT spacer sequence CTCN PAM
ucacuuccuagacggggugg

SEQ ID NO: 13596 - RNA, 20 nt, Artificial Sequence
  HTT spacer sequence CTCN PAM
cuuccuagacgggguggcgg

SEQ ID NO: 13597 - RNA, 20 nt, Artificial Sequence
  HTT spacer sequence CTCN PAM
gcccagccgccaccccgucu

SEQ ID NO: 13598 - RNA, 20 nt, Artificial Sequence
  HTT spacer sequence CTCN PAM
caaagugccaagauugcggc

SEQ ID NO: 13599 - RNA, 20 nt, Artificial Sequence
  HTT spacer sequence CTCN PAM
cagccgccugccuuggccuc

SEQ ID NO: 13600 - RNA, 20 nt, Artificial Sequence
  HTT spacer sequence CTCN PAM
ggucacuacaaccuucaccu

SEQ ID NO: 13601 - RNA, 20 nt, Artificial Sequence
  HTT spacer sequence CTCN PAM
agccugggcaacacugagca

SEQ ID NO: 13602 - RNA, 20 nt, Artificial Sequence
  HTT spacer sequence CTCN PAM
guguugcccaggcuggagug

SEQ ID NO: 13603 - RNA, 20 nt, Artificial Sequence
  HTT spacer sequence CTCN PAM
gugcucaguguugcccaggc

SEQ ID NO: 13604 - RNA, 20 nt, Artificial Sequence
  HTT spacer sequence CTCN PAM
cucagugcucaguguugccc

SEQ ID NO: 13605 - RNA, 20 nt, Artificial Sequence
  HTT spacer sequence CTCN PAM
cucacucagugcucaguguu

SEQ ID NO: 13606 - RNA, 20 nt, Artificial Sequence
  HTT spacer sequence CTCN PAM
gucugcaaucccggcaccuc

SEQ ID NO: 13607 - RNA, 20 nt, Artificial Sequence
  HTT spacer sequence CTCN PAM
ggaggccgaggcuggcagau

SEQ ID NO: 13608 - RNA, 20 nt, Artificial Sequence
  HTT spacer sequence CTCN PAM
cgaggugccgggauugcaga

SEQ ID NO: 13609 - RNA, 20 nt, Artificial Sequence
  HTT spacer sequence CTCN PAM
gccucccgaggugccgggau

SEQ ID NO: 13610 - RNA, 20 nt, Artificial Sequence
  HTT spacer sequence CTCN PAM
ugacugcaagugaucugcca

SEQ ID NO: 13611 - RNA, 20 nt, Artificial Sequence
  HTT spacer sequence CTCN PAM
agcuccugacugcaagugau

SEQ ID NO: 13612 - RNA, 20 nt, Artificial Sequence
  HTT spacer sequence CTCN PAM
accaaaaaacacgaaaacca

SEQ ID NO: 13613 - RNA, 20 nt, Artificial Sequence
  HTT spacer sequence CTCN PAM
gccugccaagugccugggau

SEQ ID NO: 13614 - RNA, 20 nt, Artificial Sequence
  HTT spacer sequence CTCN PAM
ugccucagccugccaagugc

SEQ ID NO: 13615 - RNA, 20 nt, Artificial Sequence
  HTT spacer sequence CTCN PAM
cuaccugauucuccugccuc

SEQ ID NO: 13616 - RNA, 20 nt, Artificial Sequence
  HTT spacer sequence CTCN PAM
cugcaaccucccuaccugau

SEQ ID NO: 13617 - RNA, 20 nt, Artificial Sequence
  HTT spacer sequence CTCN PAM
acucacugcaaccucccuac

SEQ ID NO: 13618 - RNA, 20 nt, Artificial Sequence
  HTT spacer sequence CTCN PAM
gcaucagagggagacugugc

SEQ ID NO: 13619 - RNA, 20 nt, Artificial Sequence
  HTT spacer sequence CTCN PAM
gaugccgagccaaggcugga

SEQ ID NO: 13620 - RNA, 20 nt, Artificial Sequence
  HTT spacer sequence CTCN PAM
cucugaugccgagccaaggc

SEQ ID NO: 13621 - RNA, 20 nt, Artificial Sequence
  HTT spacer sequence CTCN PAM
cacagucucccucugaugcc

SEQ ID NO: 13622 - RNA, 20 nt, Artificial Sequence
  HTT spacer sequence CTCN PAM
cccucgcacagucucccucu

SEQ ID NO: 13623 - RNA, 20 nt, Artificial Sequence
  HTT spacer sequence CTCN PAM
cccucgcccucgcacagucu

SEQ ID NO: 13624 - RNA, 20 nt, Artificial Sequence
  HTT spacer sequence CTCN PAM
cccucgcccucgcccucgca

SEQ ID NO: 13625 - RNA, 20 nt, Artificial Sequence
  HTT spacer sequence CTCN PAM
ggccucuaaaacugugaaag

SEQ ID NO: 13626 - RNA, 20 nt, Artificial Sequence
  HTT spacer sequence CTCN PAM
aaaacugugaaagaaaaaau

SEQ ID NO: 13627 - RNA, 20 nt, Artificial Sequence
  HTT spacer sequence CTCN PAM
uuuuuugguucauuagcuau

SEQ ID NO: 13628 - RNA, 20 nt, Artificial Sequence
  HTT spacer sequence CTCN PAM
uccccuauuucuggcuucuu

SEQ ID NO: 13629 - RNA, 20 nt, Artificial Sequence
  HTT spacer sequence CTCN PAM
uucuuuccuuuauuugccuc

SEQ ID NO: 13630 - RNA, 20 nt, Artificial Sequence
  HTT spacer sequence CTCN PAM
guauaugcugcugccugcaa

SEQ ID NO: 13631 - RNA, 20 nt, Artificial Sequence
  HTT spacer sequence CTCN PAM
ugcccaggaugagaugguca

SEQ ID NO: 13632 - RNA, 20 nt, Artificial Sequence
  HTT spacer sequence CTCN PAM
uccugggcaagagccuuugc

SEQ ID NO: 13633 - RNA, 20 nt, Artificial Sequence
  HTT spacer sequence CTCN PAM
guaguccggugcauaaacau

SEQ ID NO: 13634 - RNA, 20 nt, Artificial Sequence
  HTT spacer sequence CTCN PAM
aucacuguggauuugucugu

SEQ ID NO: 13635 - RNA, 20 nt, Artificial Sequence
  HTT spacer sequence CTCN PAM
caaugauuuguagaacacgu

SEQ ID NO: 13636 - RNA, 20 nt, Artificial Sequence
  HTT spacer sequence CTCN PAM
augauuuguagaacacguag

SEQ ID NO: 13637 - RNA, 20 nt, Artificial Sequence
  HTT spacer sequence CTCN PAM
uuggcauuuacaggacacuc

SEQ ID NO: 13638 - RNA, 20 nt, Artificial Sequence
  HTT spacer sequence CTCN PAM
acccagcaccagcagaagag

SEQ ID NO: 13639 - RNA, 20 nt, Artificial Sequence
  HTT spacer sequence CTCN PAM
ucugcuggugcuggguggag

SEQ ID NO: 13640 - RNA, 20 nt, Artificial Sequence
  HTT spacer sequence CTCN PAM
cucaagugcucacagaaugu

SEQ ID NO: 13641 - RNA, 20 nt, Artificial Sequence
  HTT spacer sequence CTCN PAM
caagugcucacagaauguuu

SEQ ID NO: 13642 - RNA, 20 nt, Artificial Sequence
  HTT spacer sequence CTCN PAM
agugcucacagaauguuugc

SEQ ID NO: 13643 - RNA, 20 nt, Artificial Sequence
  HTT spacer sequence CTCN PAM
cagaauguuugccaagauag

SEQ ID NO: 13644 - RNA, 20 nt, Artificial Sequence
  HTT spacer sequence CTCN PAM
aucuuggcaaacauucugug

SEQ ID NO: 13645 - RNA, 20 nt, Artificial Sequence
  HTT spacer sequence CTCN PAM
aaauuaaaagcauucaaauu

SEQ ID NO: 13646 - RNA, 20 nt, Artificial Sequence
  HTT spacer sequence CTCN PAM
gaauaauuugaaugcuuuua

SEQ ID NO: 13647 - RNA, 20 nt, Artificial Sequence
  HTT spacer sequence CTCN PAM
guaucauuaaguuggaauau

SEQ ID NO: 13648 - RNA, 20 nt, Artificial Sequence
  HTT spacer sequence CTCN PAM
gauauguggaaaaacccauu

SEQ ID NO: 13649 - RNA, 20 nt, Artificial Sequence
  HTT spacer sequence CTCN PAM
gcuucuaccuuuggaaacuu

SEQ ID NO: 13650 - RNA, 20 nt, Artificial Sequence
  HTT spacer sequence CTCN PAM
ggauuccauuugcuugucau

SEQ ID NO: 13651 - RNA, 20 nt, Artificial Sequence
  HTT spacer sequence CTCN PAM
caaaguggcagaacugcagg

SEQ ID NO: 13652 - RNA, 20 nt, Artificial Sequence
  HTT spacer sequence CTCN PAM
gccucccaaaguggcagaac

SEQ ID NO: 13653 - RNA, 20 nt, Artificial Sequence
  HTT spacer sequence CTCN PAM
aacaauccaccugccucggc

SEQ ID NO: 13654 - RNA, 20 nt, Artificial Sequence
  HTT spacer sequence CTCN PAM
cuaggcugcccaggcugguc

SEQ ID NO: 13655 - RNA, 20 nt, Artificial Sequence
  HTT spacer sequence CTCN PAM
ugguuagcugggacuacagg

SEQ ID NO: 13656 - RNA, 20 nt, Artificial Sequence
  HTT spacer sequence CTCN PAM
caccuuagacuccugguuag

SEQ ID NO: 13657 - RNA, 20 nt, Artificial Sequence
  HTT spacer sequence CTCN PAM
agcaauccucccaccuuaga

SEQ ID NO: 13658 - RNA, 20 nt, Artificial Sequence
  HTT spacer sequence CTCN PAM
cagacucaagcaauccuccc

SEQ ID NO: 13659 - RNA, 20 nt, Artificial Sequence
  HTT spacer sequence CTCN PAM
accucccagacucaagcaau

SEQ ID NO: 13660 - RNA, 20 nt, Artificial Sequence
  HTT spacer sequence CTCN PAM
uucuguugcccaggauggaa

SEQ ID NO: 13661 - RNA, 20 nt, Artificial Sequence
  HTT spacer sequence CTCN PAM
aaaacaaaaacaguuacuag

SEQ ID NO: 13662 - RNA, 20 nt, Artificial Sequence
  HTT spacer sequence CTCN PAM
uaucuuuaugauguccauuc

SEQ ID NO: 13663 - RNA, 20 nt, Artificial Sequence
  HTT spacer sequence CTCN PAM
uuccugauauugcuaauuug

SEQ ID NO: 13664 - RNA, 20 nt, Artificial Sequence
  HTT spacer sequence CTCN PAM
cucauuccugauauugcuaa

SEQ ID NO: 13665 - RNA, 20 nt, Artificial Sequence
  HTT spacer sequence CTCN PAM
uacaguccuuuuaauaucua

SEQ ID NO: 13666 - RNA, 20 nt, Artificial Sequence
  HTT spacer sequence CTCN PAM
caaggugcugggauuacagg

SEQ ID NO: 13667 - RNA, 20 nt, Artificial Sequence
  HTT spacer sequence CTCN PAM
gccucccaaggugcugggau

SEQ ID NO: 13668 - RNA, 20 nt, Artificial Sequence
  HTT spacer sequence CTCN PAM
ggugaucuguccaccucggc

SEQ ID NO: 13669 - RNA, 20 nt, Artificial Sequence
  HTT spacer sequence CTCN PAM
ugaccucaggugaucugucc

SEQ ID NO: 13670 - RNA, 20 nt, Artificial Sequence
  HTT spacer sequence CTCN PAM
gucucuacuaaaaauacaaa

SEQ ID NO: 13671 - RNA, 20 nt, Artificial Sequence
  HTT spacer sequence CTCN PAM
acuaaaaauacaaaaauuag

SEQ ID NO: 13672 - RNA, 20 nt, Artificial Sequence
  HTT spacer sequence CTCN PAM
caaguagcugggauuacagg

SEQ ID NO: 13673 - RNA, 20 nt, Artificial Sequence
  HTT spacer sequence CTCN PAM
gccucccaaguagcugggau

SEQ ID NO: 13674 - RNA, 20 nt, Artificial Sequence
  HTT spacer sequence CTCN PAM
ugccucagccucccaaguag

SEQ ID NO: 13675 - RNA, 20 nt, Artificial Sequence
  HTT spacer sequence CTCN PAM
cagguucaagcaauucuccu

SEQ ID NO: 13676 - RNA, 20 nt, Artificial Sequence
  HTT spacer sequence CTCN PAM
gccucccagguucaagcaau

SEQ ID NO: 13677 - RNA, 20 nt, Artificial Sequence
  HTT spacer sequence CTCN PAM
cugcaaccuccgccucccag

SEQ ID NO: 13678 - RNA, 20 nt, Artificial Sequence
  HTT spacer sequence CTCN PAM
gcucacugcaaccuccgccu

SEQ ID NO: 13679 - RNA, 20 nt, Artificial Sequence
  HTT spacer sequence CTCN PAM
agccugggugacagagcaag

SEQ ID NO: 13680 - RNA, 20 nt, Artificial Sequence
  HTT spacer sequence CTCN PAM
gucacccaggcuggagugca

SEQ ID NO: 13681 - RNA, 20 nt, Artificial Sequence
  HTT spacer sequence CTCN PAM
aucucaaaacaaauaaauaa

SEQ ID NO: 13682 - RNA, 20 nt, Artificial Sequence
  HTT spacer sequence CTCN PAM
aaacaaauaaauaaauaaaa

SEQ ID NO: 13683 - RNA, 20 nt, Artificial Sequence
  HTT spacer sequence CTCN PAM
uccauuucaucuauaaguug

SEQ ID NO: 13684 - RNA, 20 nt, Artificial Sequence
  HTT spacer sequence CTCN PAM
cucaagaagauauagauaag

SEQ ID NO: 13685 - RNA, 20 nt, Artificial Sequence
  HTT spacer sequence CTCN PAM
caagaagauauagauaagcu

SEQ ID NO: 13686 - RNA, 20 nt, Artificial Sequence
  HTT spacer sequence CTCN PAM
agaagauauagauaagcuga

SEQ ID NO: 13687 - RNA, 20 nt, Artificial Sequence
  HTT spacer sequence CTCN PAM
auucagacacuaaauuuuca

SEQ ID NO: 13688 - RNA, 20 nt, Artificial Sequence
  HTT spacer sequence CTCN PAM
cauucuguuucuguugacag

SEQ ID NO: 13689 - RNA, 20 nt, Artificial Sequence
  HTT spacer sequence CTCN PAM
aaagcaguacugucaacaga

SEQ ID NO: 13690 - RNA, 20 nt, Artificial Sequence
  HTT spacer sequence CTCN PAM
guucguuauucauggcuguc

SEQ ID NO: 13691 - RNA, 20 nt, Artificial Sequence
  HTT spacer sequence CTCN PAM
uaggcucauugcuaucuucc

SEQ ID NO: 13692 - RNA, 20 nt, Artificial Sequence
  HTT spacer sequence CTCN PAM
uugcuaucuuccaaccauug

SEQ ID NO: 13693 - RNA, 20 nt, Artificial Sequence
  HTT spacer sequence CTCN PAM
agguaaaaauugcaaacaau

SEQ ID NO: 13694 - RNA, 20 nt, Artificial Sequence
  HTT spacer sequence CTCN PAM
uuaucucuagguaaaaauug

SEQ ID NO: 13695 - RNA, 20 nt, Artificial Sequence
  HTT spacer sequence CTCN PAM
uucucuuuaucucuagguaa

SEQ ID NO: 13696 - RNA, 20 nt, Artificial Sequence
  HTT spacer sequence CTCN PAM
gaaaccaaaugucucuuucu

SEQ ID NO: 13697 - RNA, 20 nt, Artificial Sequence
  HTT spacer sequence CTCN PAM
uucaugaucccaaucuaacu

SEQ ID NO: 13698 - RNA, 20 nt, Artificial Sequence
  HTT spacer sequence CTCN PAM
uuuugaugcuucaaaaauag

SEQ ID NO: 13699 - RNA, 20 nt, Artificial Sequence
  HTT spacer sequence CTCN PAM
ucaguuuagcucucucuugg

SEQ ID NO: 13700 - RNA, 20 nt, Artificial Sequence
  HTT spacer sequence CTCN PAM
cucuuggcuuuguuuagaca

SEQ ID NO: 13701 - RNA, 20 nt, Artificial Sequence
  HTT spacer sequence CTCN PAM
cuuggcuuuguuuagacagu

SEQ ID NO: 13702 - RNA, 20 nt, Artificial Sequence
  HTT spacer sequence CTCN PAM
uggcuuuguuuagacaguug

SEQ ID NO: 13703 - RNA, 20 nt, Artificial Sequence
  HTT spacer sequence CTCN PAM
aacugucuaaacaaagccaa

SEQ ID NO: 13704 - RNA, 20 nt, Artificial Sequence
  HTT spacer sequence CTCN PAM
aguuuuugugacucuuuguc

SEQ ID NO: 13705 - RNA, 20 nt, Artificial Sequence
  HTT spacer sequence CTCN PAM
uugucucgcacaacaaaaac

SEQ ID NO: 13706 - RNA, 20 nt, Artificial Sequence
  HTT spacer sequence CTCN PAM
cacaacaaaaacacaaucug

SEQ ID NO: 13707 - RNA, 20 nt, Artificial Sequence
  HTT spacer sequence CTCN PAM
ugccccuuuuuaaucuugcu

SEQ ID NO: 13708 - RNA, 20 nt, Artificial Sequence
  HTT spacer sequence CTCN PAM
ccugccccuuuuuaaucuug

SEQ ID NO: 13709 - RNA, 20 nt, Artificial Sequence
  HTT spacer sequence CTCN PAM
uaaccuacaauauucuugga

SEQ ID NO: 13710 - RNA, 20 nt, Artificial Sequence
  HTT spacer sequence CTCN PAM
uuuuucuuuuuaaauuuucg

SEQ ID NO: 13711 - RNA, 20 nt, Artificial Sequence
  HTT spacer sequence CTCN PAM
ucuuuuuuaaaaaauaaacu

SEQ ID NO: 13712 - RNA, 20 nt, Artificial Sequence
  HTT spacer sequence CTCN PAM
cacuaaauuaggaugauaau

SEQ ID NO: 13713 - RNA, 20 nt, Artificial Sequence
  HTT spacer sequence CTCN PAM
uuacauuucauugucauguc

SEQ ID NO: 13714 - RNA, 20 nt, Artificial Sequence
  HTT spacer sequence CTCN PAM
ucuugacaguuucucuucuu

SEQ ID NO: 13715 - RNA, 20 nt, Artificial Sequence
  HTT spacer sequence CTCN PAM
ugacaguuucucuucuuuuu

SEQ ID NO: 13716 - RNA, 20 nt, Artificial Sequence
  HTT spacer sequence CTCN PAM
ucuuuuuuugcuuagaaauu

SEQ ID NO: 13717 - RNA, 20 nt, Artificial Sequence
  HTT spacer sequence CTCN PAM
agaauuucagaaacuucugg

SEQ ID NO: 13718 - RNA, 20 nt, Artificial Sequence
  HTT spacer sequence CTCN PAM
gcgucaucacugcacagcag

SEQ ID NO: 13719 - RNA, 20 nt, Artificial Sequence
  HTT spacer sequence CTCN PAM
acaaaguuaucaaaguaaga

SEQ ID NO: 13720 - RNA, 20 nt, Artificial Sequence
  HTT spacer sequence CTCN PAM
ucagagcuaucauuguugua

SEQ ID NO: 13721 - RNA, 20 nt, Artificial Sequence
  HTT spacer sequence CTCN PAM
gagcuaucauuguuguaggc

SEQ ID NO: 13722 - RNA, 20 nt, Artificial Sequence
  HTT spacer sequence CTCN PAM
gaggagaacaucauccacac

SEQ ID NO: 13723 - RNA, 20 nt, Artificial Sequence
  HTT spacer sequence CTCN PAM
gccuacaacaaugauagcuc

SEQ ID NO: 13724 - RNA, 20 nt, Artificial Sequence
  HTT spacer sequence CTCN PAM
cagccuacaacaaugauagc

SEQ ID NO: 13725 - RNA, 20 nt, Artificial Sequence
  HTT spacer sequence CTCN PAM
augaucgcuucuucucucag

SEQ ID NO: 13726 - RNA, 20 nt, Artificial Sequence
  HTT spacer sequence CTCN PAM
aaacagaagaacacucaaug

SEQ ID NO: 13727 - RNA, 20 nt, Artificial Sequence
  HTT spacer sequence CTCN PAM
gggacucaaaacagaagaac

SEQ ID NO: 13728 - RNA, 20 nt, Artificial Sequence
  HTT spacer sequence CTCN PAM
aaaccauacaucagaaagga

SEQ ID NO: 13729 - RNA, 20 nt, Artificial Sequence
  HTT spacer sequence CTCN PAM
guuguaugguuuggaggugc

SEQ ID NO: 13730 - RNA, 20 nt, Artificial Sequence
  HTT spacer sequence CTCN PAM
aaaccauacaacagagcacc

SEQ ID NO: 13731 - RNA, 20 nt, Artificial Sequence
  HTT spacer sequence CTCN PAM
guuguaugguuuggaggugc

SEQ ID NO: 13732 - RNA, 20 nt, Artificial Sequence
  HTT spacer sequence CTCN PAM
aaaccauacaacagagcacc

SEQ ID NO: 13733 - RNA, 20 nt, Artificial Sequence
  HTT spacer sequence CTCN PAM
auuguaugguuuggaggugc

SEQ ID NO: 13734 - RNA, 20 nt, Artificial Sequence
  HTT spacer sequence CTCN PAM
aaaccauacaauagagcacc

SEQ ID NO: 13735 - RNA, 20 nt, Artificial Sequence
  HTT spacer sequence CTCN PAM
guuguaugguuuggaggugc

SEQ ID NO: 13736 - RNA, 20 nt, Artificial Sequence
  HTT spacer sequence CTCN PAM
aaaccauacaacagagcacc

SEQ ID NO: 13737 - RNA, 20 nt, Artificial Sequence
  HTT spacer sequence CTCN PAM
uguaugguuuggaggugcuc

SEQ ID NO: 13738 - RNA, 20 nt, Artificial Sequence
  HTT spacer sequence CTCN PAM
aaaccauacaagagcaccuc

SEQ ID NO: 13739 - RNA, 20 nt, Artificial Sequence
  HTT spacer sequence CTCN PAM
uguaugguuuggaggugcuc

SEQ ID NO: 13740 - RNA, 20 nt, Artificial Sequence
  HTT spacer sequence CTCN PAM
aaaccauacaagagcaccuc

SEQ ID NO: 13741 - RNA, 20 nt, Artificial Sequence
  HTT spacer sequence CTCN PAM
guuguaugguuuggaggugg

SEQ ID NO: 13742 - RNA, 20 nt, Artificial Sequence
  HTT spacer sequence CTCN PAM
aaaccauacaacagagcacc

SEQ ID NO: 13743 - RNA, 20 nt, Artificial Sequence
  HTT spacer sequence CTCN PAM
auugcaugguuugcaggugc

SEQ ID NO: 13744 - RNA, 20 nt, Artificial Sequence
  HTT spacer sequence CTCN PAM
auuguaugguuuggaagugc

SEQ ID NO: 13745 - RNA, 20 nt, Artificial Sequence
  HTT spacer sequence CTCN PAM
uguaugguuuggaggugcuc

SEQ ID NO: 13746 - RNA, 20 nt, Artificial Sequence
  HTT spacer sequence CTCN PAM
aaaccauacaagagcacuuc

SEQ ID NO: 13747 - RNA, 20 nt, Artificial Sequence
  HTT spacer sequence CTCN PAM
uguaugguuuggagaugcuc

SEQ ID NO: 13748 - RNA, 20 nt, Artificial Sequence
  HTT spacer sequence CTCN PAM
aaaccauacaagagcaccuc

SEQ ID NO: 13749 - RNA, 20 nt, Artificial Sequence
  HTT spacer sequence CTCN PAM
auuguaugguuugcaggugc

SEQ ID NO: 13750 - RNA, 20 nt, Artificial Sequence
  HTT spacer sequence CTCN PAM
auuguaugguuuggaagugc

SEQ ID NO: 13751 - RNA, 20 nt, Artificial Sequence
  HTT spacer sequence CTCN PAM
uguaugguuuggaggugcuc

SEQ ID NO: 13752 - RNA, 20 nt, Artificial Sequence
  HTT spacer sequence CTCN PAM
aaaccauacaagagcacuuc

SEQ ID NO: 13753 - RNA, 20 nt, Artificial Sequence
  HTT spacer sequence CTCN PAM
uguaugguuuggaggugcuc

SEQ ID NO: 13754 - RNA, 20 nt, Artificial Sequence
  HTT spacer sequence CTCN PAM
aaaccauacaagagcaccuc

SEQ ID NO: 13755 - RNA, 20 nt, Artificial Sequence
  HTT spacer sequence CTCN PAM
guuguaugguuuggaggugc

SEQ ID NO: 13756 - RNA, 20 nt, Artificial Sequence
  HTT spacer sequence CTCN PAM
aaaccauacaacagagcacc

SEQ ID NO: 13757 - RNA, 20 nt, Artificial Sequence
  HTT spacer sequence CTCN PAM
guuguaugguuuggaggugc

SEQ ID NO: 13758 - RNA, 20 nt, Artificial Sequence
  HTT spacer sequence CTCN PAM
aaaccauacaacagagcacc

SEQ ID NO: 13759 - RNA, 20 nt, Artificial Sequence
  HTT spacer sequence CTCN PAM
uguaugguuuggaggugcuc

SEQ ID NO: 13760 - RNA, 20 nt, Artificial Sequence
  HTT spacer sequence CTCN PAM
aaaccauacaagagcaccuc

SEQ ID NO: 13761 - RNA, 20 nt, Artificial Sequence
  HTT spacer sequence CTCN PAM
auuguaugguuuggagaugc

SEQ ID NO: 13762 - RNA, 20 nt, Artificial Sequence
  HTT spacer sequence CTCN PAM
aaaccauacaauagagcacc

SEQ ID NO: 13763 - RNA, 20 nt, Artificial Sequence
  HTT spacer sequence CTCN PAM
gguaucugccugcauugcuu

SEQ ID NO: 13764 - RNA, 20 nt, Artificial Sequence
  HTT spacer sequence CTCN PAM
ugggaaaaugucacuacagg

SEQ ID NO: 13765 - RNA, 20 nt, Artificial Sequence
  HTT spacer sequence CTCN PAM
ggugccuguagugacauuuu

SEQ ID NO: 13766 - RNA, 20 nt, Artificial Sequence
  HTT spacer sequence CTCN PAM
ggcuucucuggugccuguag

SEQ ID NO: 13767 - RNA, 20 nt, Artificial Sequence
  HTT spacer sequence CTCN PAM
uagaaauuugggcauagcuc

SEQ ID NO: 13768 - RNA, 20 nt, Artificial Sequence
  HTT spacer sequence CTCN PAM
guuuucuuaaccauaaaaug

SEQ ID NO: 13769 - RNA, 20 nt, Artificial Sequence
  HTT spacer sequence CTCN PAM
uacacaugccacaaaaacau

SEQ ID NO: 13770 - RNA, 20 nt, Artificial Sequence
  HTT spacer sequence CTCN PAM
cacauacacagacacacacu

SEQ ID NO: 13771 - RNA, 20 nt, Artificial Sequence
  HTT spacer sequence CTCN PAM
cacauacacaauuuaauccu

SEQ ID NO: 13772 - RNA, 20 nt, Artificial Sequence
  HTT spacer sequence CTCN PAM
aagugguaagaaguguucuu

SEQ ID NO: 13773 - RNA, 20 nt, Artificial Sequence
  HTT spacer sequence CTCN PAM
uacccagcaagauugauggg

SEQ ID NO: 13774 - RNA, 20 nt, Artificial Sequence
  HTT spacer sequence CTCN PAM
uuuuccaucacaugguuucc

SEQ ID NO: 13775 - RNA, 20 nt, Artificial Sequence
  HTT spacer sequence CTCN PAM
ggagccaugggauucuagcu

SEQ ID NO: 13776 - RNA, 20 nt, Artificial Sequence
  HTT spacer sequence CTCN PAM
agagaagccagcguccugac

SEQ ID NO: 13777 - RNA, 20 nt, Artificial Sequence
  HTT spacer sequence CTCN PAM
cugucuugucccuagagugg

SEQ ID NO: 13778 - RNA, 20 nt, Artificial Sequence
  HTT spacer sequence CTCN PAM
agggacaagacagggagcua

SEQ ID NO: 13779 - RNA, 20 nt, Artificial Sequence
  HTT spacer sequence CTCN PAM
cuccgcuugcaauuccugcu

SEQ ID NO: 13780 - RNA, 20 nt, Artificial Sequence
  HTT spacer sequence CTCN PAM
ccgcuugcaauuccugcuuu

SEQ ID NO: 13781 - RNA, 20 nt, Artificial Sequence
  HTT spacer sequence CTCN PAM
gcuugcaauuccugcuuugc

SEQ ID NO: 13782 - RNA, 20 nt, Artificial Sequence
  HTT spacer sequence CTCN PAM
caucucacuuaugcagugac

SEQ ID NO: 13783 - RNA, 20 nt, Artificial Sequence
  HTT spacer sequence CTCN PAM
cuuaugcagugacguauauc

SEQ ID NO: 13784 - RNA, 20 nt, Artificial Sequence
  HTT spacer sequence CTCN PAM
gugccugcugaucauuggca

SEQ ID NO: 13785 - RNA, 20 nt, Artificial Sequence
  HTT spacer sequence CTCN PAM
acaggccuaaauauccuugc

SEQ ID NO: 13786 - RNA, 20 nt, Artificial Sequence
  HTT spacer sequence CTCN PAM
cuggcaggaccagggcgguc

SEQ ID NO: 13787 - RNA, 20 nt, Artificial Sequence
  HTT spacer sequence CTCN PAM
ugcaaagacagaccgcccug

SEQ ID NO: 13788 - RNA, 20 nt, Artificial Sequence
  HTT spacer sequence CTCN PAM
cucagucacccaggcuggag

SEQ ID NO: 13789 - RNA, 20 nt, Artificial Sequence
  HTT spacer sequence CTCN PAM
gucacccaggcuggagugca

SEQ ID NO: 13790 - RNA, 20 nt, Artificial Sequence
  HTT spacer sequence CTCN PAM
agccugggugacugagcgag

SEQ ID NO: 13791 - RNA, 20 nt, Artificial Sequence
  HTT spacer sequence CTCN PAM
uugcagccuugagcuaccgg

SEQ ID NO: 13792 - RNA, 20 nt, Artificial Sequence
  HTT spacer sequence CTCN PAM
aggcugcaaugagccgugau

SEQ ID NO: 13793 - RNA, 20 nt, Artificial Sequence
  HTT spacer sequence CTCN PAM
agcuauccuccuggcuuggc

SEQ ID NO: 13794 - RNA, 20 nt, Artificial Sequence
  HTT spacer sequence CTCN PAM
uggcuuggccccuugaguag

SEQ ID NO: 13795 - RNA, 20 nt, Artificial Sequence
  HTT spacer sequence CTCN PAM
aggggccaagccaggaggau

SEQ ID NO: 13796 - RNA, 20 nt, Artificial Sequence
  HTT spacer sequence CTCN PAM
acaaauaauuuuaaaaauua

SEQ ID NO: 13797 - RNA, 20 nt, Artificial Sequence
  HTT spacer sequence CTCN PAM
ccagguugcccaggcugguc

SEQ ID NO: 13798 - RNA, 20 nt, Artificial Sequence
  HTT spacer sequence CTCN PAM
agugauccucccuccuuggu

SEQ ID NO: 13799 - RNA, 20 nt, Artificial Sequence
  HTT spacer sequence CTCN PAM
cuccuugguuucccaaagug

SEQ ID NO: 13800 - RNA, 20 nt, Artificial Sequence
  HTT spacer sequence CTCN PAM
uugguuucccaaagugcugg

SEQ ID NO: 13801 - RNA, 20 nt, Artificial Sequence
  HTT spacer sequence CTCN PAM
caccugugaucccagcacuu

SEQ ID NO: 13802 - RNA, 20 nt, Artificial Sequence
  HTT spacer sequence CTCN PAM
gagucagaaaaucuaaaaag

SEQ ID NO: 13803 - RNA, 20 nt, Artificial Sequence
  HTT spacer sequence CTCN PAM
gaggaucaaauaucaagaac

SEQ ID NO: 13804 - RNA, 20 nt, Artificial Sequence
  HTT spacer sequence CTCN PAM
uuuuagauuuucugacucug

SEQ ID NO: 13805 - RNA, 20 nt, Artificial Sequence
  HTT spacer sequence CTCN PAM
uaacgucccauuugccauga

SEQ ID NO: 13806 - RNA, 20 nt, Artificial Sequence
  HTT spacer sequence CTCN PAM
gcccucuuaacgucccauuu

SEQ ID NO: 13807 - RNA, 20 nt, Artificial Sequence
  HTT spacer sequence CTCN PAM
cugcccucuuaacgucccau

SEQ ID NO: 13808 - RNA, 20 nt, Artificial Sequence
  HTT spacer sequence CTCN PAM
uucauuuuuuuuccaggaau

SEQ ID NO: 13809 - RNA, 20 nt, Artificial Sequence
  HTT spacer sequence CTCN PAM
gacacacaccaagccacugu

SEQ ID NO: 13810 - RNA, 20 nt, Artificial Sequence
  HTT spacer sequence CTCN PAM
ggugcucuuccuggcugucu

SEQ ID NO: 13811 - RNA, 20 nt, Artificial Sequence
  HTT spacer sequence CTCN PAM
uccuggcugucuccuugcuu

SEQ ID NO: 13812 - RNA, 20 nt, Artificial Sequence
  HTT spacer sequence CTCN PAM
uugcuucuuucccauguccu

SEQ ID NO: 13813 - RNA, 20 nt, Artificial Sequence
  HTT spacer sequence CTCN PAM
ucuuuguuuccagccauuuc

SEQ ID NO: 13814 - RNA, 20 nt, Artificial Sequence
  HTT spacer sequence CTCN PAM
cuuaugcuuaaguuuggugc

SEQ ID NO: 13815 - RNA, 20 nt, Artificial Sequence
  HTT spacer sequence CTCN PAM
cagauuccugcuuccucaga

SEQ ID NO: 13816 - RNA, 20 nt, Artificial Sequence
  HTT spacer sequence CTCN PAM
gauuccugcuuccucagaug

SEQ ID NO: 13817 - RNA, 20 nt, Artificial Sequence
  HTT spacer sequence CTCN PAM
gaugcuguaguugucaggcc

SEQ ID NO: 13818 - RNA, 20 nt, Artificial Sequence
  HTT spacer sequence CTCN PAM
cacuguggcagaguaggggg

SEQ ID NO: 13819 - RNA, 20 nt, Artificial Sequence
  HTT spacer sequence CTCN PAM
cuguggcagaguagggggag

SEQ ID NO: 13820 - RNA, 20 nt, Artificial Sequence
  HTT spacer sequence CTCN PAM
gccacagugagagcaaaccu

SEQ ID NO: 13821 - RNA, 20 nt, Artificial Sequence
  HTT spacer sequence CTCN PAM
cccuacucugccacagugag

SEQ ID NO: 13822 - RNA, 20 nt, Artificial Sequence
  HTT spacer sequence CTCN PAM
cacgccucccccuacucugc

SEQ ID NO: 13823 - RNA, 20 nt, Artificial Sequence
  HTT spacer sequence CTCN PAM
cccacgccucccccuacucu

SEQ ID NO: 13824 - RNA, 20 nt, Artificial Sequence
  HTT spacer sequence CTCN PAM
cuacagcuggccugggguca

SEQ ID NO: 13825 - RNA, 20 nt, Artificial Sequence
  HTT spacer sequence CTCN PAM
ugaguauggcugugugugua

SEQ ID NO: 13826 - RNA, 20 nt, Artificial Sequence
  HTT spacer sequence CTCN PAM
ugagaagacaaagucuagga

SEQ ID NO: 13827 - RNA, 20 nt, Artificial Sequence
  HTT spacer sequence CTCN PAM
acagaaaccacaugcaaaau

SEQ ID NO: 13828 - RNA, 20 nt, Artificial Sequence
  HTT spacer sequence CTCN PAM
cucagguagguuagucucag

SEQ ID NO: 13829 - RNA, 20 nt, Artificial Sequence
  HTT spacer sequence CTCN PAM
gguagguuagucucaggcgg

SEQ ID NO: 13830 - RNA, 20 nt, Artificial Sequence
  HTT spacer sequence CTCN PAM
ggcggugaagcacguguguc

SEQ ID NO: 13831 - RNA, 20 nt, Artificial Sequence
  HTT spacer sequence CTCN PAM
guucugugaggugcuggcaa

SEQ ID NO: 13832 - RNA, 20 nt, Artificial Sequence
  HTT spacer sequence CTCN PAM
cagaacggagacuuuaugcc

SEQ ID NO: 13833 - RNA, 20 nt, Artificial Sequence
  HTT spacer sequence CTCN PAM
ugacggugguggugauuugc

SEQ ID NO: 13834 - RNA, 20 nt, Artificial Sequence
  HTT spacer sequence CTCN PAM
cuagacaaaaaucacuucag

SEQ ID NO: 13835 - RNA, 20 nt, Artificial Sequence
  HTT spacer sequence CTCN PAM
aggaagccuuuccugccucc

SEQ ID NO: 13836 - RNA, 20 nt, Artificial Sequence
  HTT spacer sequence CTCN PAM
uucaccuacuggcugcugac

SEQ ID NO: 13837 - RNA, 20 nt, Artificial Sequence
  HTT spacer sequence CTCN PAM
aaucuacucuuucaccuacu

SEQ ID NO: 13838 - RNA, 20 nt, Artificial Sequence
  HTT spacer sequence CTCN PAM
ugucucaaggggugccagga

SEQ ID NO: 13839 - RNA, 20 nt, Artificial Sequence
  HTT spacer sequence CTCN PAM
aggggugccaggaagcugug

SEQ ID NO: 13840 - RNA, 20 nt, Artificial Sequence
  HTT spacer sequence CTCN PAM
acagcuuccuggcaccccuu

SEQ ID NO: 13841 - RNA, 20 nt, Artificial Sequence
  HTT spacer sequence CTCN PAM
ggcagcauaagauggguuca

SEQ ID NO: 13842 - RNA, 20 nt, Artificial Sequence
  HTT spacer sequence CTCN PAM
cuggcagcauaagauggguu

SEQ ID NO: 13843 - RNA, 20 nt, Artificial Sequence
  HTT spacer sequence CTCN PAM
uggugucccacucucuggca

SEQ ID NO: 13844 - RNA, 20 nt, Artificial Sequence
  HTT spacer sequence CTCN PAM
accaaacaagguacaacccc

SEQ ID NO: 13845 - RNA, 20 nt, Artificial Sequence
  HTT spacer sequence CTCN PAM
ugaagacuuuggaugugguc

SEQ ID NO: 13846 - RNA, 20 nt, Artificial Sequence
  HTT spacer sequence CTCN PAM
ccugaccacauccaaagucu

SEQ ID NO: 13847 - RNA, 20 nt, Artificial Sequence
  HTT spacer sequence CTCN PAM
uccuaaaugauacacucccc

SEQ ID NO: 13848 - RNA, 20 nt, Artificial Sequence
  HTT spacer sequence CTCN PAM
ccgggucacucuuccuaaau

SEQ ID NO: 13849 - RNA, 20 nt, Artificial Sequence
  HTT spacer sequence CTCN PAM
accccacguccucaccgggu

SEQ ID NO: 13850 - RNA, 20 nt, Artificial Sequence
  HTT spacer sequence CTCN PAM
ucuaccccacguccucaccg

SEQ ID NO: 13851 - RNA, 20 nt, Artificial Sequence
  HTT spacer sequence CTCN PAM
caccuguccuccucuacccc

SEQ ID NO: 13852 - RNA, 20 nt, Artificial Sequence
  HTT spacer sequence CTCN PAM
cucccaccuguccuccucua

SEQ ID NO: 13853 - RNA, 20 nt, Artificial Sequence
  HTT spacer sequence CTCN PAM
caccuggacucccucccacc

SEQ ID NO: 13854 - RNA, 20 nt, Artificial Sequence
  HTT spacer sequence CTCN PAM
cucccaccuggacucccucc

SEQ ID NO: 13855 - RNA, 20 nt, Artificial Sequence
  HTT spacer sequence CTCN PAM
ugcugggucuacucacuccc

SEQ ID NO: 13856 - RNA, 20 nt, Artificial Sequence
  HTT spacer sequence CTCN PAM
agccaggaugguggcagggc

SEQ ID NO: 13857 - RNA, 20 nt, Artificial Sequence
  HTT spacer sequence CTCN PAM
aggcccugcacuccugcugg

SEQ ID NO: 13858 - RNA, 20 nt, Artificial Sequence
  HTT spacer sequence CTCN PAM
cagcccugccaccauccugg

SEQ ID NO: 13859 - RNA, 20 nt, Artificial Sequence
  HTT spacer sequence CTCN PAM
ucacagcccugccaccaucc

SEQ ID NO: 13860 - RNA, 20 nt, Artificial Sequence
  HTT spacer sequence CTCN PAM
ccucacagcccugccaccau

SEQ ID NO: 13861 - RNA, 20 nt, Artificial Sequence
  HTT spacer sequence CTCN PAM
ugccccugcuuccgcagaca

SEQ ID NO: 13862 - RNA, 20 nt, Artificial Sequence
  HTT spacer sequence CTCN PAM
ucccucuugccccugcuucc

SEQ ID NO: 13863 - RNA, 20 nt, Artificial Sequence
  HTT spacer sequence CTCN PAM
caaucuacgccagucgcugg

SEQ ID NO: 13864 - RNA, 20 nt, Artificial Sequence
  HTT spacer sequence CTCN PAM
cacaaucuacgccagucgcu

SEQ ID NO: 13865 - RNA, 20 nt, Artificial Sequence
  HTT spacer sequence CTCN PAM
uaggaggggcugaguuuuag

SEQ ID NO: 13866 - RNA, 20 nt, Artificial Sequence
  HTT spacer sequence CTCN PAM
uaagagcagggaauggucuc

SEQ ID NO: 13867 - RNA, 20 nt, Artificial Sequence
  HTT spacer sequence CTCN PAM
gccccuccuaagagcaggga

SEQ ID NO: 13868 - RNA, 20 nt, Artificial Sequence
  HTT spacer sequence CTCN PAM
uguuauacaauaagcuuggu

SEQ ID NO: 13869 - RNA, 20 nt, Artificial Sequence
  HTT spacer sequence CTCN PAM
uuuaaggacuuucaguacaa

SEQ ID NO: 13870 - RNA, 20 nt, Artificial Sequence
  HTT spacer sequence CTCN PAM
gaaacguuuaaauccuaauc

SEQ ID NO: 13871 - RNA, 20 nt, Artificial Sequence
  HTT spacer sequence CTCN PAM
ucagaauuucccagaaugug

SEQ ID NO: 13872 - RNA, 20 nt, Artificial Sequence
  HTT spacer sequence CTCN PAM
gaauuucccagaaugugauc

SEQ ID NO: 13873 - RNA, 20 nt, Artificial Sequence
  HTT spacer sequence CTCN PAM
guccacuuacaucaacugcc

SEQ ID NO: 13874 - RNA, 20 nt, Artificial Sequence
  HTT spacer sequence CTCN PAM
uuaaccguggcaugggcagu

SEQ ID NO: 13875 - RNA, 20 nt, Artificial Sequence
  HTT spacer sequence CTCN PAM
cucuugggugggcaagcauu

SEQ ID NO: 13876 - RNA, 20 nt, Artificial Sequence
  HTT spacer sequence CTCN PAM
ugggugggcaagcauuugga

SEQ ID NO: 13877 - RNA, 20 nt, Artificial Sequence
  HTT spacer sequence CTCN PAM
uccaaaugcuugcccaccca

SEQ ID NO: 13878 - RNA, 20 nt, Artificial Sequence
  HTT spacer sequence CTCN PAM
uaugggugagaguggggcac

SEQ ID NO: 13879 - RNA, 20 nt, Artificial Sequence
  HTT spacer sequence CTCN PAM
cccauaggagccuucucuuc

SEQ ID NO: 13880 - RNA, 20 nt, Artificial Sequence
  HTT spacer sequence CTCN PAM
cacccauaggagccuucucu

SEQ ID NO: 13881 - RNA, 20 nt, Artificial Sequence
  HTT spacer sequence CTCN PAM
agcuaggggaugggacaggg

SEQ ID NO: 13882 - RNA, 20 nt, Artificial Sequence
  HTT spacer sequence CTCN PAM
aauguggacuuugugccguu

SEQ ID NO: 13883 - RNA, 20 nt, Artificial Sequence
  HTT spacer sequence CTCN PAM
caagugagcaaggaggguug

SEQ ID NO: 13884 - RNA, 20 nt, Artificial Sequence
  HTT spacer sequence CTCN PAM
cuugugaggcuaaaccagaa

SEQ ID NO: 13885 - RNA, 20 nt, Artificial Sequence
  HTT spacer sequence CTCN PAM
uugcucacuugugaggcuaa

SEQ ID NO: 13886 - RNA, 20 nt, Artificial Sequence
  HTT spacer sequence CTCN PAM
acccuccuugcucacuugug

SEQ ID NO: 13887 - RNA, 20 nt, Artificial Sequence
  HTT spacer sequence CTCN PAM
caacccuccuugcucacuug

SEQ ID NO: 13888 - RNA, 20 nt, Artificial Sequence
  HTT spacer sequence CTCN PAM
cagcacaucucucaacccuc

SEQ ID NO: 13889 - RNA, 20 nt, Artificial Sequence
  HTT spacer sequence CTCN PAM
gggucaggggggcagggacc

SEQ ID NO: 13890 - RNA, 20 nt, Artificial Sequence
  HTT spacer sequence CTCN PAM
cugucagguaugcccguggu

SEQ ID NO: 13891 - RNA, 20 nt, Artificial Sequence
  HTT spacer sequence CTCN PAM
ucacugucagguaugcccgu

SEQ ID NO: 13892 - RNA, 20 nt, Artificial Sequence
  HTT spacer sequence CTCN PAM
gccuugggaaguguucuagg

SEQ ID NO: 13893 - RNA, 20 nt, Artificial Sequence
  HTT spacer sequence CTCN PAM
ggccuagaacacuucccaag

SEQ ID NO: 13894 - RNA, 20 nt, Artificial Sequence
  HTT spacer sequence CTCN PAM
cucuggccuagaacacuucc

SEQ ID NO: 13895 - RNA, 20 nt, Artificial Sequence
  HTT spacer sequence CTCN PAM
ggacccugcagauguccagg

SEQ ID NO: 13896 - RNA, 20 nt, Artificial Sequence
  HTT spacer sequence CTCN PAM
gacggcacccuggacaucug

SEQ ID NO: 13897 - RNA, 20 nt, Artificial Sequence
  HTT spacer sequence CTCN PAM
aggggcuuuaggauuuauua

SEQ ID NO: 13898 - RNA, 20 nt, Artificial Sequence
  HTT spacer sequence CTCN PAM
aaaaaaaaaaaaaaaaaaau

SEQ ID NO: 13899 - RNA, 20 nt, Artificial Sequence
  HTT spacer sequence CTCN PAM
aucucaaaaaaaaaaaaaaa

SEQ ID NO: 13900 - RNA, 20 nt, Artificial Sequence
  HTT spacer sequence CTCN PAM
uguugcccaggcuggagugc

SEQ ID NO: 13901 - RNA, 20 nt, Artificial Sequence
  HTT spacer sequence CTCN PAM
agccugggcaacaagagcga

SEQ ID NO: 13902 - RNA, 20 nt, Artificial Sequence
  HTT spacer sequence CTCN PAM
cugcaaccuccgccucccgg

SEQ ID NO: 13903 - RNA, 20 nt, Artificial Sequence
  HTT spacer sequence CTCN PAM
gccucccggguucaaacuau

SEQ ID NO: 13904 - RNA, 20 nt, Artificial Sequence
  HTT spacer sequence CTCN PAM
cggguucaaacuauucuccu

SEQ ID NO: 13905 - RNA, 20 nt, Artificial Sequence
  HTT spacer sequence CTCN PAM
ugccucagccucucgaguag

SEQ ID NO: 13906 - RNA, 20 nt, Artificial Sequence
  HTT spacer sequence CTCN PAM
gccucucgaguagcugggau

SEQ ID NO: 13907 - RNA, 20 nt, Artificial Sequence
  HTT spacer sequence CTCN PAM
cgaguagcugggauuacagg

SEQ ID NO: 13908 - RNA, 20 nt, Artificial Sequence
  HTT spacer sequence CTCN PAM
aguagcugggauuacaggcg

SEQ ID NO: 13909 - RNA, 20 nt, Artificial Sequence
  HTT spacer sequence CTCN PAM
agaggcugaggcaggagaau

SEQ ID NO: 13910 - RNA, 20 nt, Artificial Sequence
  HTT spacer sequence CTCN PAM
acuaaaaaauacaaaaauua

SEQ ID NO: 13911 - RNA, 20 nt, Artificial Sequence
  HTT spacer sequence CTCN PAM
gucucuacuaaaaaauacaa

SEQ ID NO: 13912 - RNA, 20 nt, Artificial Sequence
  HTT spacer sequence CTCN PAM
auguuggucaggcuggucuu

SEQ ID NO: 13913 - RNA, 20 nt, Artificial Sequence
  HTT spacer sequence CTCN PAM
ugaccucaggugaucugccc

SEQ ID NO: 13914 - RNA, 20 nt, Artificial Sequence
  HTT spacer sequence CTCN PAM
ggugaucugcccgccuuggc

SEQ ID NO: 13915 - RNA, 20 nt, Artificial Sequence
  HTT spacer sequence CTCN PAM
caaagugcugggauuacagg

SEQ ID NO: 13916 - RNA, 20 nt, Artificial Sequence
  HTT spacer sequence CTCN PAM
ugccuguaaucccagcacuu

SEQ ID NO: 13917 - RNA, 20 nt, Artificial Sequence
  HTT spacer sequence CTCN PAM
uuuuagaacuagugauggga

SEQ ID NO: 13918 - RNA, 20 nt, Artificial Sequence
  HTT spacer sequence CTCN PAM
ugugauuuguuguaggcuuu

SEQ ID NO: 13919 - RNA, 20 nt, Artificial Sequence
  HTT spacer sequence CTCN PAM
agcucuauaaggaaauuaaa

SEQ ID NO: 13920 - RNA, 20 nt, Artificial Sequence
  HTT spacer sequence CTCN PAM
agcuguaaccuuggaagauu

SEQ ID NO: 13921 - RNA, 20 nt, Artificial Sequence
  HTT spacer sequence CTCN PAM
auaaggaaauuaaaaaggug

SEQ ID NO: 13922 - RNA, 20 nt, Artificial Sequence
  HTT spacer sequence CTCN PAM
uguaccccauaaauauauac

SEQ ID NO: 13923 - RNA, 20 nt, Artificial Sequence
  HTT spacer sequence CTCN PAM
agcauuuauccuuuguguua

SEQ ID NO: 13924 - RNA, 20 nt, Artificial Sequence
  HTT spacer sequence CTCN PAM
aaaauaaaauaaaauaagua

SEQ ID NO: 13925 - RNA, 20 nt, Artificial Sequence
  HTT spacer sequence CTCN PAM
gucucaaaaauaaaauaaaa

SEQ ID NO: 13926 - RNA, 20 nt, Artificial Sequence
  HTT spacer sequence CTCN PAM
agcaugggugaaagcaagac

SEQ ID NO: 13927 - RNA, 20 nt, Artificial Sequence
  HTT spacer sequence CTCN PAM
cugcaaccuccgccucccgg

SEQ ID NO: 13928 - RNA, 20 nt, Artificial Sequence
  HTT spacer sequence CTCN PAM
gccucccggguucaaccgaa

SEQ ID NO: 13929 - RNA, 20 nt, Artificial Sequence
  HTT spacer sequence CTCN PAM
cggguucaaccgaacuuugg

SEQ ID NO: 13930 - RNA, 20 nt, Artificial Sequence
  HTT spacer sequence CTCN PAM
aacuccugaccucaggugau

SEQ ID NO: 13931 - RNA, 20 nt, Artificial Sequence
  HTT spacer sequence CTCN PAM
ugaccucaggugauccgccc

SEQ ID NO: 13932 - RNA, 20 nt, Artificial Sequence
  HTT spacer sequence CTCN PAM
ggugauccgcccgccucggc

SEQ ID NO: 13933 - RNA, 20 nt, Artificial Sequence
  HTT spacer sequence CTCN PAM
gccucccaaaguguugggau

SEQ ID NO: 13934 - RNA, 20 nt, Artificial Sequence
  HTT spacer sequence CTCN PAM
caaaguguugggauuacagg

SEQ ID NO: 13935 - RNA, 20 nt, Artificial Sequence
  HTT spacer sequence CTCN PAM
cgccuguaaucccaacacuu

SEQ ID NO: 13936 - RNA, 20 nt, Artificial Sequence
  HTT spacer sequence CTCN PAM
ugccuguaaucccagcauuu

SEQ ID NO: 13937 - RNA, 20 nt, Artificial Sequence
  HTT spacer sequence CTCN PAM
caaaaugcugggauuacagg

SEQ ID NO: 13938 - RNA, 20 nt, Artificial Sequence
  HTT spacer sequence CTCN PAM
gccucccaaaaugcugggau

SEQ ID NO: 13939 - RNA, 20 nt, Artificial Sequence
  HTT spacer sequence CTCN PAM
ggugaucaccugccucagcc

SEQ ID NO: 13940 - RNA, 20 nt, Artificial Sequence
  HTT spacer sequence CTCN PAM
ugaucucaggugaucaccug

SEQ ID NO: 13941 - RNA, 20 nt, Artificial Sequence
  HTT spacer sequence CTCN PAM
aacuccugaucucaggugau

SEQ ID NO: 13942 - RNA, 20 nt, Artificial Sequence
  HTT spacer sequence CTCN PAM
auguuggccaggcuggucuc

SEQ ID NO: 13943 - RNA, 20 nt, Artificial Sequence
  HTT spacer sequence CTCN PAM
acuaaaaauacaaaaauuag

SEQ ID NO: 13944 - RNA, 20 nt, Artificial Sequence
  HTT spacer sequence CTCN PAM
ggaggcugagguaggggaau

SEQ ID NO: 13945 - RNA, 20 nt, Artificial Sequence
  HTT spacer sequence CTCN PAM
cgaguagccaggauuacagg

SEQ ID NO: 13946 - RNA, 20 nt, Artificial Sequence
  HTT spacer sequence CTCN PAM
gccucccgaguagccaggau

SEQ ID NO: 13947 - RNA, 20 nt, Artificial Sequence
  HTT spacer sequence CTCN PAM
acccccagguucaagcgauu

SEQ ID NO: 13948 - RNA, 20 nt, Artificial Sequence
  HTT spacer sequence CTCN PAM
cugcaaccuccacccccagg

SEQ ID NO: 13949 - RNA, 20 nt, Artificial Sequence
  HTT spacer sequence CTCN PAM
gcucacugcaaccuccaccc

SEQ ID NO: 13950 - RNA, 20 nt, Artificial Sequence
  HTT spacer sequence CTCN PAM
ggcuggaaugcaguggcgug

SEQ ID NO: 13951 - RNA, 20 nt, Artificial Sequence
  HTT spacer sequence CTCN PAM
gucgcucaggcuggaaugca

SEQ ID NO: 13952 - RNA, 20 nt, Artificial Sequence
  HTT spacer sequence CTCN PAM
cucugucgcucaggcuggaa

SEQ ID NO: 13953 - RNA, 20 nt, Artificial Sequence
  HTT spacer sequence CTCN PAM
aaaaauaaaaaugaaauaaa

SEQ ID NO: 13954 - RNA, 20 nt, Artificial Sequence
  HTT spacer sequence CTCN PAM
caccuuagucccagcacuuu

SEQ ID NO: 13955 - RNA, 20 nt, Artificial Sequence
  HTT spacer sequence CTCN PAM
gguucccaaagugcugggac

SEQ ID NO: 13956 - RNA, 20 nt, Artificial Sequence
  HTT spacer sequence CTCN PAM
agcauccaccugccucaggu

SEQ ID NO: 13957 - RNA, 20 nt, Artificial Sequence
  HTT spacer sequence CTCN PAM
uggucucaagcauccaccug

SEQ ID NO: 13958 - RNA, 20 nt, Artificial Sequence
  HTT spacer sequence CTCN PAM
aacuccuggucucaagcauc

SEQ ID NO: 13959 - RNA, 20 nt, Artificial Sequence
  HTT spacer sequence CTCN PAM
gcuacuugggagauugaggu

SEQ ID NO: 13960 - RNA, 20 nt, Artificial Sequence
  HTT spacer sequence CTCN PAM
caaguagcugagacuauagu

SEQ ID NO: 13961 - RNA, 20 nt, Artificial Sequence
  HTT spacer sequence CTCN PAM
aucucccaaguagcugagac

SEQ ID NO: 13962 - RNA, 20 nt, Artificial Sequence
  HTT spacer sequence CTCN PAM
caccucaaucucccaaguag

SEQ ID NO: 13963 - RNA, 20 nt, Artificial Sequence
  HTT spacer sequence CTCN PAM
auuaauccucccaccucaau

SEQ ID NO: 13964 - RNA, 20 nt, Artificial Sequence
  HTT spacer sequence CTCN PAM
gcuaccuauagauucaaccu

SEQ ID NO: 13965 - RNA, 20 nt, Artificial Sequence
  HTT spacer sequence CTCN PAM
cuuggucgcccaggcugaag

SEQ ID NO: 13966 - RNA, 20 nt, Artificial Sequence
  HTT spacer sequence CTCN PAM
aaagaaaaacaaaaaaacaa

SEQ ID NO: 13967 - RNA, 20 nt, Artificial Sequence
  HTT spacer sequence CTCN PAM
gcugugcugucgaauaccag

SEQ ID NO: 13968 - RNA, 20 nt, Artificial Sequence
  HTT spacer sequence CTCN PAM
gugauggaaauaagggccca

SEQ ID NO: 13969 - RNA, 20 nt, Artificial Sequence
  HTT spacer sequence CTCN PAM
guuaagcagcagguguggga

SEQ ID NO: 13970 - RNA, 20 nt, Artificial Sequence
  HTT spacer sequence CTCN PAM
uuauuagaugagaugagaau

SEQ ID NO: 13971 - RNA, 20 nt, Artificial Sequence
  HTT spacer sequence CTCN PAM
ucuaauaaagaguaaccuuu

SEQ ID NO: 13972 - RNA, 20 nt, Artificial Sequence
  HTT spacer sequence CTCN PAM
ucucaucuaauaaagaguaa

SEQ ID NO: 13973 - RNA, 20 nt, Artificial Sequence
  HTT spacer sequence CTCN PAM
aaaauuagaaaguaacaagg

SEQ ID NO: 13974 - RNA, 20 nt, Artificial Sequence
  HTT spacer sequence CTCN PAM
uggugacuaguaugugacuc

SEQ ID NO: 13975 - RNA, 20 nt, Artificial Sequence
  HTT spacer sequence CTCN PAM
uaaugcaacccucauugcac

SEQ ID NO: 13976 - RNA, 20 nt, Artificial Sequence
  HTT spacer sequence CTCN PAM
uugcacccccucagaauggu

SEQ ID NO: 13977 - RNA, 20 nt, Artificial Sequence
  HTT spacer sequence CTCN PAM
gaauggugccccucggaguu

SEQ ID NO: 13978 - RNA, 20 nt, Artificial Sequence
  HTT spacer sequence CTCN PAM
gaguuugcgugcugcccugu

SEQ ID NO: 13979 - RNA, 20 nt, Artificial Sequence
  HTT spacer sequence CTCN PAM
gaggggcaccauucugaggg

SEQ ID NO: 13980 - RNA, 20 nt, Artificial Sequence
  HTT spacer sequence CTCN PAM
acagggcagcacgcaaacuc

SEQ ID NO: 13981 - RNA, 20 nt, Artificial Sequence
  HTT spacer sequence CTCN PAM
gcaaaccuccacagggcagc

SEQ ID NO: 13982 - RNA, 20 nt, Artificial Sequence
  HTT spacer sequence CTCN PAM
ccugguucggccucagaaau

SEQ ID NO: 13983 - RNA, 20 nt, Artificial Sequence
  HTT spacer sequence CTCN PAM
gaaaugcagguaaguuguac

SEQ ID NO: 13984 - RNA, 20 nt, Artificial Sequence
  HTT spacer sequence CTCN PAM
ggauguugguuuuugucggg

SEQ ID NO: 13985 - RNA, 20 nt, Artificial Sequence
  HTT spacer sequence CTCN PAM
gcucagaugucauuucaaaa

SEQ ID NO: 13986 - RNA, 20 nt, Artificial Sequence
  HTT spacer sequence CTCN PAM
gaugucauuucaaaagucug

SEQ ID NO: 13987 - RNA, 20 nt, Artificial Sequence
  HTT spacer sequence CTCN PAM
gcccucuccaaauugcaguc

SEQ ID NO: 13988 - RNA, 20 nt, Artificial Sequence
  HTT spacer sequence CTCN PAM
ccaaauugcagucgaccuug

SEQ ID NO: 13989 - RNA, 20 nt, Artificial Sequence
  HTT spacer sequence CTCN PAM
aaauugcagucgaccuugcc

SEQ ID NO: 13990 - RNA, 20 nt, Artificial Sequence
  HTT spacer sequence CTCN PAM
uagcacuaauccaugucaga

SEQ ID NO: 13991 - RNA, 20 nt, Artificial Sequence
  HTT spacer sequence CTCN PAM
ugcggaagggugggauagaa

SEQ ID NO: 13992 - RNA, 20 nt, Artificial Sequence
  HTT spacer sequence CTCN PAM
guugcagcccagcagcgaua

SEQ ID NO: 13993 - RNA, 20 nt, Artificial Sequence
  HTT spacer sequence CTCN PAM
accuucaacaauuuggcaag

SEQ ID NO: 13994 - RNA, 20 nt, Artificial Sequence
  HTT spacer sequence CTCN PAM
uauagucagcaauaaugaaa

SEQ ID NO: 13995 - RNA, 20 nt, Artificial Sequence
  HTT spacer sequence CTCN PAM
uguaacagacaaauggauau

SEQ ID NO: 13996 - RNA, 20 nt, Artificial Sequence
  HTT spacer sequence CTCN PAM
auccguuaagauacaacugu

SEQ ID NO: 13997 - RNA, 20 nt, Artificial Sequence
  HTT spacer sequence CTCN PAM
cuccuucuccuuaaccagca

SEQ ID NO: 13998 - RNA, 20 nt, Artificial Sequence
  HTT spacer sequence CTCN PAM
uucuccuuaaccagcaauac

SEQ ID NO: 13999 - RNA, 20 nt, Artificial Sequence
  HTT spacer sequence CTCN PAM
uuaaccagcaauacaugcug

SEQ ID NO: 14000 - RNA, 20 nt, Artificial Sequence
  HTT spacer sequence CTCN PAM
gcuccauccugagucacugg

SEQ ID NO: 14001 - RNA, 20 nt, Artificial Sequence
  HTT spacer sequence CTCN PAM
auccugagucacugggaaug

SEQ ID NO: 14002 - RNA, 20 nt, Artificial Sequence
  HTT spacer sequence CTCN PAM
ggauggagcugagggucuau

SEQ ID NO: 14003 - RNA, 20 nt, Artificial Sequence
  HTT spacer sequence CTCN PAM
cuauuaauaugaacugaguu

SEQ ID NO: 14004 - RNA, 20 nt, Artificial Sequence
  HTT spacer sequence CTCN PAM
guucauauuaauagugaggg

SEQ ID NO: 14005 - RNA, 20 nt, Artificial Sequence
  HTT spacer sequence CTCN PAM
uaccuuugaucccagcacuu

SEQ ID NO: 14006 - RNA, 20 nt, Artificial Sequence
  HTT spacer sequence CTCN PAM
ugaagugcugggaucaaagg

SEQ ID NO: 14007 - RNA, 20 nt, Artificial Sequence
  HTT spacer sequence CTCN PAM
acaaaaaauacaaaacuuag

SEQ ID NO: 14008 - RNA, 20 nt, Artificial Sequence
  HTT spacer sequence CTCN PAM
agaggcugaggugggaggau

SEQ ID NO: 14009 - RNA, 20 nt, Artificial Sequence
  HTT spacer sequence CTCN PAM
aguggcugugaccacaggca

SEQ ID NO: 14010 - RNA, 20 nt, Artificial Sequence
  HTT spacer sequence CTCN PAM
cgaguggcugugaccacagg

SEQ ID NO: 14011 - RNA, 20 nt, Artificial Sequence
  HTT spacer sequence CTCN PAM
gccucucgaguggcugugac

SEQ ID NO: 14012 - RNA, 20 nt, Artificial Sequence
  HTT spacer sequence CTCN PAM
caccucagccucucgagugg

SEQ ID NO: 14013 - RNA, 20 nt, Artificial Sequence
  HTT spacer sequence CTCN PAM
agugauccucccaccucagc

SEQ ID NO: 14014 - RNA, 20 nt, Artificial Sequence
  HTT spacer sequence CTCN PAM
caggcucaagugauccuccc

SEQ ID NO: 14015 - RNA, 20 nt, Artificial Sequence
  HTT spacer sequence CTCN PAM
accucccaggcucaagugau

SEQ ID NO: 14016 - RNA, 20 nt, Artificial Sequence
  HTT spacer sequence CTCN PAM
acacgaccuccaccucccag

SEQ ID NO: 14017 - RNA, 20 nt, Artificial Sequence
  HTT spacer sequence CTCN PAM
agccugggcaacagagugag

SEQ ID NO: 14018 - RNA, 20 nt, Artificial Sequence
  HTT spacer sequence CTCN PAM
guugcccaggcuggagugca

SEQ ID NO: 14019 - RNA, 20 nt, Artificial Sequence
  HTT spacer sequence CTCN PAM
cucuguugcccaggcuggag

SEQ ID NO: 14020 - RNA, 20 nt, Artificial Sequence
  HTT spacer sequence CTCN PAM
aaaaaaccaaaauccagaaa

SEQ ID NO: 14021 - RNA, 20 nt, Artificial Sequence
  HTT spacer sequence CTCN PAM
gcagccauauaaguucuuuu

SEQ ID NO: 14022 - RNA, 20 nt, Artificial Sequence
  HTT spacer sequence CTCN PAM
uguacccauuucccagugcc

SEQ ID NO: 14023 - RNA, 20 nt, Artificial Sequence
  HTT spacer sequence CTCN PAM
aucuaaacggcacugggaaa

SEQ ID NO: 14024 - RNA, 20 nt, Artificial Sequence
  HTT spacer sequence CTCN PAM
ucaauggcucugucaccuca

SEQ ID NO: 14025 - RNA, 20 nt, Artificial Sequence
  HTT spacer sequence CTCN PAM
gucaccucagacacccugca

SEQ ID NO: 14026 - RNA, 20 nt, Artificial Sequence
  HTT spacer sequence CTCN PAM
gacacccugcauugacucau

SEQ ID NO: 14027 - RNA, 20 nt, Artificial Sequence
  HTT spacer sequence CTCN PAM
uuagucugauuagagucagg

SEQ ID NO: 14028 - RNA, 20 nt, Artificial Sequence
  HTT spacer sequence CTCN PAM
aaucagacuaaugagucaau

SEQ ID NO: 14029 - RNA, 20 nt, Artificial Sequence
  HTT spacer sequence CTCN PAM
ugaugguuuuuuuuuccccc

SEQ ID NO: 14030 - RNA, 20 nt, Artificial Sequence
  HTT spacer sequence CTCN PAM
gcggaacagucacuuccuua

SEQ ID NO: 14031 - RNA, 20 nt, Artificial Sequence
  HTT spacer sequence CTCN PAM
cuaaggaagugacuguuccg

SEQ ID NO: 14032 - RNA, 20 nt, Artificial Sequence
  HTT spacer sequence CTCN PAM
gaggccgugcuuguugccag

SEQ ID NO: 14033 - RNA, 20 nt, Artificial Sequence
  HTT spacer sequence CTCN PAM
gaggguggcuggggaaaccu

SEQ ID NO: 14034 - RNA, 20 nt, Artificial Sequence
  HTT spacer sequence CTCN PAM
gccacuagagggcagggcug

SEQ ID NO: 14035 - RNA, 20 nt, Artificial Sequence
  HTT spacer sequence CTCN PAM
aguggcagagucuggcaaca

SEQ ID NO: 14036 - RNA, 20 nt, Artificial Sequence
  HTT spacer sequence CTCN PAM
uggcaccucgcacccggccu

SEQ ID NO: 14037 - RNA, 20 nt, Artificial Sequence
  HTT spacer sequence CTCN PAM
cacccggccugcccugucac

SEQ ID NO: 14038 - RNA, 20 nt, Artificial Sequence
  HTT spacer sequence CTCN PAM
guguguugggugaauuccug

SEQ ID NO: 14039 - RNA, 20 nt, Artificial Sequence
  HTT spacer sequence CTCN PAM
cugcucuguguccuacacau

SEQ ID NO: 14040 - RNA, 20 nt, Artificial Sequence
  HTT spacer sequence CTCN PAM
guguccuacacauucggcuu

SEQ ID NO: 14041 - RNA, 20 nt, Artificial Sequence
  HTT spacer sequence CTCN PAM
ccccacaaccccauuuuaua

SEQ ID NO: 14042 - RNA, 20 nt, Artificial Sequence
  HTT spacer sequence CTCN PAM
ccacaaccccauuuuauaau

SEQ ID NO: 14043 - RNA, 20 nt, Artificial Sequence
  HTT spacer sequence CTCN PAM
uuuuucaggaaagcuuuauu

SEQ ID NO: 14044 - RNA, 20 nt, Artificial Sequence
  HTT spacer sequence CTCN PAM
uuuuuaauuagaaaauaagu

SEQ ID NO: 14045 - RNA, 20 nt, Artificial Sequence
  HTT spacer sequence CTCN PAM
gugaucauaagagaaaugaa

SEQ ID NO: 14046 - RNA, 20 nt, Artificial Sequence
  HTT spacer sequence CTCN PAM
uaugaucacagaggaucuaa

SEQ ID NO: 14047 - RNA, 20 nt, Artificial Sequence
  HTT spacer sequence CTCN PAM
caacacuugagcuucaucca

SEQ ID NO: 14048 - RNA, 20 nt, Artificial Sequence
  HTT spacer sequence CTCN PAM
aguguugggagacauccuuc

SEQ ID NO: 14049 - RNA, 20 nt, Artificial Sequence
  HTT spacer sequence CTCN PAM
uguucuuucagcugaguuuu

SEQ ID NO: 14050 - RNA, 20 nt, Artificial Sequence
  HTT spacer sequence CTCN PAM
gcugaaagaacaggaggaug

SEQ ID NO: 14051 - RNA, 20 nt, Artificial Sequence
  HTT spacer sequence CTCN PAM
ugaaggagagcuggaagaau

SEQ ID NO: 14052 - RNA, 20 nt, Artificial Sequence
  HTT spacer sequence CTCN PAM
uucaggagaaacagaagcaa

SEQ ID NO: 14053 - RNA, 20 nt, Artificial Sequence
  HTT spacer sequence CTCN PAM
ccuucaggagaaacagaagc

SEQ ID NO: 14054 - RNA, 20 nt, Artificial Sequence
  HTT spacer sequence CTCN PAM
aacaagcaagagacccgaag

SEQ ID NO: 14055 - RNA, 20 nt, Artificial Sequence
  HTT spacer sequence CTCN PAM
ugcuuguucgagucaggcac

SEQ ID NO: 14056 - RNA, 20 nt, Artificial Sequence
  HTT spacer sequence CTCN PAM
uggacugauucuucgggucu

SEQ ID NO: 14057 - RNA, 20 nt, Artificial Sequence
  HTT spacer sequence CTCN PAM
ggucacaaacaugcgaguga

SEQ ID NO: 14058 - RNA, 20 nt, Artificial Sequence
  HTT spacer sequence CTCN PAM
cauguuugugaccugaggca

SEQ ID NO: 14059 - RNA, 20 nt, Artificial Sequence
  HTT spacer sequence CTCN PAM
cagcaucacucgcauguuug

SEQ ID NO: 14060 - RNA, 20 nt, Artificial Sequence
  HTT spacer sequence CTCN PAM
cucacagcaucacucgcaug

SEQ ID NO: 14061 - RNA, 20 nt, Artificial Sequence
  HTT spacer sequence CTCN PAM
acagacucacucacagcauc

SEQ ID NO: 14062 - RNA, 20 nt, Artificial Sequence
  HTT spacer sequence CTCN PAM
cccuccacagacucacucac

SEQ ID NO: 14063 - RNA, 20 nt, Artificial Sequence
  HTT spacer sequence CTCN PAM
cuguucagaagcccucaccc

SEQ ID NO: 14064 - RNA, 20 nt, Artificial Sequence
  HTT spacer sequence CTCN PAM
cacaggacucccuguucaga

SEQ ID NO: 14065 - RNA, 20 nt, Artificial Sequence
  HTT spacer sequence CTCN PAM
aaaauaacacaaaugauggu

SEQ ID NO: 14066 - RNA, 20 nt, Artificial Sequence
  HTT spacer sequence CTCN PAM
uuucuuacuguggggugaag

SEQ ID NO: 14067 - RNA, 20 nt, Artificial Sequence
  HTT spacer sequence CTCN PAM
ucaccccacaguaagaaaug

SEQ ID NO: 14068 - RNA, 20 nt, Artificial Sequence
  HTT spacer sequence CTCN PAM
caauucaacucuucacccca

SEQ ID NO: 14069 - RNA, 20 nt, Artificial Sequence
  HTT spacer sequence CTCN PAM
ggaaaaaugccuuuucaauu

SEQ ID NO: 14070 - RNA, 20 nt, Artificial Sequence
  HTT spacer sequence CTCN PAM
aguacgccgaaaacaaaucu

SEQ ID NO: 14071 - RNA, 20 nt, Artificial Sequence
  HTT spacer sequence CTCN PAM
uuaaccuagcugcgggaaga

SEQ ID NO: 14072 - RNA, 20 nt, Artificial Sequence
  HTT spacer sequence CTCN PAM
uaccugcagucuuggcacag

SEQ ID NO: 14073 - RNA, 20 nt, Artificial Sequence
  HTT spacer sequence CTCN PAM
cugacgaggccuuguggguc

SEQ ID NO: 14074 - RNA, 20 nt, Artificial Sequence
  HTT spacer sequence CTCN PAM
ucagugagcuuucuccuacc

SEQ ID NO: 14075 - RNA, 20 nt, Artificial Sequence
  HTT spacer sequence CTCN PAM
gauagcugcaggacguucag

SEQ ID NO: 14076 - RNA, 20 nt, Artificial Sequence
  HTT spacer sequence CTCN PAM
acagauuacaggauucuuag

SEQ ID NO: 14077 - RNA, 20 nt, Artificial Sequence
  HTT spacer sequence CTCN PAM
uccuuuuugguaggucaguc

SEQ ID NO: 14078 - RNA, 20 nt, Artificial Sequence
  HTT spacer sequence CTCN PAM
aacccaggacugaccuacca

SEQ ID NO: 14079 - RNA, 20 nt, Artificial Sequence
  HTT spacer sequence CTCN PAM
ugggaggugaugauacacac

SEQ ID NO: 14080 - RNA, 20 nt, Artificial Sequence
  HTT spacer sequence CTCN PAM
caggagggucacuugggcuc

SEQ ID NO: 14081 - RNA, 20 nt, Artificial Sequence
  HTT spacer sequence CTCN PAM
acccaguguguaucaucacc

SEQ ID NO: 14082 - RNA, 20 nt, Artificial Sequence
  HTT spacer sequence CTCN PAM
uuacuaguuauuuuccucua

SEQ ID NO: 14083 - RNA, 20 nt, Artificial Sequence
  HTT spacer sequence CTCN PAM
aggcaaacugcccaacagcu

SEQ ID NO: 14084 - RNA, 20 nt, Artificial Sequence
  HTT spacer sequence CTCN PAM
aagcuauuuccuucguauuc

SEQ ID NO: 14085 - RNA, 20 nt, Artificial Sequence
  HTT spacer sequence CTCN PAM
gagaguaaaauaaaggaaua

SEQ ID NO: 14086 - RNA, 20 nt, Artificial Sequence
  HTT spacer sequence CTCN PAM
gaguugcccuauaugggucc

SEQ ID NO: 14087 - RNA, 20 nt, Artificial Sequence
  HTT spacer sequence CTCN PAM
cagaguugcccuauaugggu

SEQ ID NO: 14088 - RNA, 20 nt, Artificial Sequence
  HTT spacer sequence CTCN PAM
aacacauauuccuuuauuuu

SEQ ID NO: 14089 - RNA, 20 nt, Artificial Sequence
  HTT spacer sequence CTCN PAM
uauuagcugaaugauuugga

SEQ ID NO: 14090 - RNA, 20 nt, Artificial Sequence
  HTT spacer sequence CTCN PAM
cucauguuuuuucucuugag

SEQ ID NO: 14091 - RNA, 20 nt, Artificial Sequence
  HTT spacer sequence CTCN PAM
cauguuuuuucucuugagcu

SEQ ID NO: 14092 - RNA, 20 nt, Artificial Sequence
  HTT spacer sequence CTCN PAM
uguuuuuucucuugagcuuc

SEQ ID NO: 14093 - RNA, 20 nt, Artificial Sequence
  HTT spacer sequence CTCN PAM
ugagcuucgaaguuuucuug

SEQ ID NO: 14094 - RNA, 20 nt, Artificial Sequence
  HTT spacer sequence CTCN PAM
agagaaaaaacaugagagag

SEQ ID NO: 14095 - RNA, 20 nt, Artificial Sequence
  HTT spacer sequence CTCN PAM
uuaguauuaacaagaaaacu

SEQ ID NO: 14096 - RNA, 20 nt, Artificial Sequence
  HTT spacer sequence CTCN PAM
cuucgucauuccaaaacccc

SEQ ID NO: 14097 - RNA, 20 nt, Artificial Sequence
  HTT spacer sequence CTCN PAM
guaaaugguaguuucugcug

SEQ ID NO: 14098 - RNA, 20 nt, Artificial Sequence
  HTT spacer sequence CTCN PAM
uuggaaugggaguaggugcu

SEQ ID NO: 14099 - RNA, 20 nt, Artificial Sequence
  HTT spacer sequence CTCN PAM
cauuccaaagagaugguaau

SEQ ID NO: 14100 - RNA, 20 nt, Artificial Sequence
  HTT spacer sequence CTCN PAM
uuuguggucagaggcuguga

SEQ ID NO: 14101 - RNA, 20 nt, Artificial Sequence
  HTT spacer sequence CTCN PAM
gaccacaaaggagcaccuac

SEQ ID NO: 14102 - RNA, 20 nt, Artificial Sequence
  HTT spacer sequence CTCN PAM
cagccucugaccacaaagga

SEQ ID NO: 14103 - RNA, 20 nt, Artificial Sequence
  HTT spacer sequence CTCN PAM
cacagccucugaccacaaag

SEQ ID NO: 14104 - RNA, 20 nt, Artificial Sequence
  HTT spacer sequence CTCN PAM
acagcgccaguuugcccauc

SEQ ID NO: 14105 - RNA, 20 nt, Artificial Sequence
  HTT spacer sequence CTCN PAM
gugauaucucuggcugucag

SEQ ID NO: 14106 - RNA, 20 nt, Artificial Sequence
  HTT spacer sequence CTCN PAM
ggcugucagagcucagauga

SEQ ID NO: 14107 - RNA, 20 nt, Artificial Sequence
  HTT spacer sequence CTCN PAM
gacagccagagauaucacag

SEQ ID NO: 14108 - RNA, 20 nt, Artificial Sequence
  HTT spacer sequence CTCN PAM
gaugauagaugguauuuuug

SEQ ID NO: 14109 - RNA, 20 nt, Artificial Sequence
  HTT spacer sequence CTCN PAM
uaguucucaucauuuucaug

SEQ ID NO: 14110 - RNA, 20 nt, Artificial Sequence
  HTT spacer sequence CTCN PAM
ucauuuucaugauuucgauc

SEQ ID NO: 14111 - RNA, 20 nt, Artificial Sequence
  HTT spacer sequence CTCN PAM
aauggugaucgaaaucauga

SEQ ID NO: 14112 - RNA, 20 nt, Artificial Sequence
  HTT spacer sequence CTCN PAM
cugcucauuuaugguuauuc

SEQ ID NO: 14113 - RNA, 20 nt, Artificial Sequence
  HTT spacer sequence CTCN PAM
gcucauuuaugguuauucaa

SEQ ID NO: 14114 - RNA, 20 nt, Artificial Sequence
  HTT spacer sequence CTCN PAM
uuuaugguuauucaaauuua

SEQ ID NO: 14115 - RNA, 20 nt, Artificial Sequence
  HTT spacer sequence CTCN PAM
ugauaauaaauuugaauaac

SEQ ID NO: 14116 - RNA, 20 nt, Artificial Sequence
  HTT spacer sequence CTCN PAM
caaguagcuacaauuauagg

SEQ ID NO: 14117 - RNA, 20 nt, Artificial Sequence
  HTT spacer sequence CTCN PAM
gccucccaaguagcuacaau

SEQ ID NO: 14118 - RNA, 20 nt, Artificial Sequence
  HTT spacer sequence CTCN PAM
uaccucagccucccaaguag

SEQ ID NO: 14119 - RNA, 20 nt, Artificial Sequence
  HTT spacer sequence CTCN PAM
agcaauccuccuaccucagc

SEQ ID NO: 14120 - RNA, 20 nt, Artificial Sequence
  HTT spacer sequence CTCN PAM
uggccucaagcaauccuccu

SEQ ID NO: 14121 - RNA, 20 nt, Artificial Sequence
  HTT spacer sequence CTCN PAM
aacuccuggccucaagcaau

SEQ ID NO: 14122 - RNA, 20 nt, Artificial Sequence
  HTT spacer sequence CTCN PAM
cuaucuugcccaggcugguc

SEQ ID NO: 14123 - RNA, 20 nt, Artificial Sequence
  HTT spacer sequence CTCN PAM
aaaaaaacugaaaaaaaauu

SEQ ID NO: 14124 - RNA, 20 nt, Artificial Sequence
  HTT spacer sequence CTCN PAM
ggaggcugagacaggaggcu

SEQ ID NO: 14125 - RNA, 20 nt, Artificial Sequence
  HTT spacer sequence CTCN PAM
ugaguagcuaggaccacagg

SEQ ID NO: 14126 - RNA, 20 nt, Artificial Sequence
  HTT spacer sequence CTCN PAM
gccuccugaguagcuaggac

SEQ ID NO: 14127 - RNA, 20 nt, Artificial Sequence
  HTT spacer sequence CTCN PAM
ugucucagccuccugaguag

SEQ ID NO: 14128 - RNA, 20 nt, Artificial Sequence
  HTT spacer sequence CTCN PAM
guugagcccaggaguuggag

SEQ ID NO: 14129 - RNA, 20 nt, Artificial Sequence
  HTT spacer sequence CTCN PAM
accgagccuccugucucagc

SEQ ID NO: 14130 - RNA, 20 nt, Artificial Sequence
  HTT spacer sequence CTCN PAM
ugggcucaaccgagccuccu

SEQ ID NO: 14131 - RNA, 20 nt, Artificial Sequence
  HTT spacer sequence CTCN PAM
aacuccugggcucaaccgag

SEQ ID NO: 14132 - RNA, 20 nt, Artificial Sequence
  HTT spacer sequence CTCN PAM
aacuccaacuccugggcuca

SEQ ID NO: 14133 - RNA, 20 nt, Artificial Sequence
  HTT spacer sequence CTCN PAM
guguagccucgaacuccaac

SEQ ID NO: 14134 - RNA, 20 nt, Artificial Sequence
  HTT spacer sequence CTCN PAM
agcaugggugguaaaacaag

SEQ ID NO: 14135 - RNA, 20 nt, Artificial Sequence
  HTT spacer sequence CTCN PAM
uaauccuugugucucacagg

SEQ ID NO: 14136 - RNA, 20 nt, Artificial Sequence
  HTT spacer sequence CTCN PAM
caggcaaacauaacucuuag

SEQ ID NO: 14137 - RNA, 20 nt, Artificial Sequence
  HTT spacer sequence CTCN PAM
uaguauuucuuccaauauuu

SEQ ID NO: 14138 - RNA, 20 nt, Artificial Sequence
  HTT spacer sequence CTCN PAM
aagaaaaaaaaagaaagaaa

SEQ ID NO: 14139 - RNA, 20 nt, Artificial Sequence
  HTT spacer sequence CTCN PAM
aucucaaagaaaaaaaaaga

SEQ ID NO: 14140 - RNA, 20 nt, Artificial Sequence
  HTT spacer sequence CTCN PAM
uguugccaaggcuggagugc

SEQ ID NO: 14141 - RNA, 20 nt, Artificial Sequence
  HTT spacer sequence CTCN PAM
agccuuggcaacaagagcaa

SEQ ID NO: 14142 - RNA, 20 nt, Artificial Sequence
  HTT spacer sequence CTCN PAM
ccacaaccucugucucccgg

SEQ ID NO: 14143 - RNA, 20 nt, Artificial Sequence
  HTT spacer sequence CTCN PAM
gucucccggguucaagcgau

SEQ ID NO: 14144 - RNA, 20 nt, Artificial Sequence
  HTT spacer sequence CTCN PAM
cggguucaagcgauucuccu

SEQ ID NO: 14145 - RNA, 20 nt, Artificial Sequence
  HTT spacer sequence CTCN PAM
ugccucagccuccuaguagc

SEQ ID NO: 14146 - RNA, 20 nt, Artificial Sequence
  HTT spacer sequence CTCN PAM
gccuccuaguagcugggauu

SEQ ID NO: 14147 - RNA, 20 nt, Artificial Sequence
  HTT spacer sequence CTCN PAM
uaguagcugggauuacaggc

SEQ ID NO: 14148 - RNA, 20 nt, Artificial Sequence
  HTT spacer sequence CTCN PAM
gcuaauuuuguacuuuuagu

SEQ ID NO: 14149 - RNA, 20 nt, Artificial Sequence
  HTT spacer sequence CTCN PAM
acuaaaaguacaaaauuagc

SEQ ID NO: 14150 - RNA, 20 nt, Artificial Sequence
  HTT spacer sequence CTCN PAM
ggguuggucaggcuggucuc

SEQ ID NO: 14151 - RNA, 20 nt, Artificial Sequence
  HTT spacer sequence CTCN PAM
aacuccugaccucaggugau

SEQ ID NO: 14152 - RNA, 20 nt, Artificial Sequence
  HTT spacer sequence CTCN PAM
ugaccucaggugauccuccc

SEQ ID NO: 14153 - RNA, 20 nt, Artificial Sequence
  HTT spacer sequence CTCN PAM
ggugauccucccaccucagc

SEQ ID NO: 14154 - RNA, 20 nt, Artificial Sequence
  HTT spacer sequence CTCN PAM
caccucagccucccaaagug

SEQ ID NO: 14155 - RNA, 20 nt, Artificial Sequence
  HTT spacer sequence CTCN PAM
gccucccaaagugcugggau

SEQ ID NO: 14156 - RNA, 20 nt, Artificial Sequence
  HTT spacer sequence CTCN PAM
caaagugcugggauuacagg

SEQ ID NO: 14157 - RNA, 20 nt, Artificial Sequence
  HTT spacer sequence CTCN PAM
cgccuguaaucccagcacuu

SEQ ID NO: 14158 - RNA, 20 nt, Artificial Sequence
  HTT spacer sequence CTCN PAM
ucaaauaagaaacacaauca

SEQ ID NO: 14159 - RNA, 20 nt, Artificial Sequence
  HTT spacer sequence CTCN PAM
ggguugaaacuggagagagg

SEQ ID NO: 14160 - RNA, 20 nt, Artificial Sequence
  HTT spacer sequence CTCN PAM
aguuucaacccagagcaaaa

SEQ ID NO: 14161 - RNA, 20 nt, Artificial Sequence
  HTT spacer sequence CTCN PAM
ccaguuucaacccagagcaa

SEQ ID NO: 14162 - RNA, 20 nt, Artificial Sequence
  HTT spacer sequence CTCN PAM
cuccaguuucaacccagagc

SEQ ID NO: 14163 - RNA, 20 nt, Artificial Sequence
  HTT spacer sequence CTCN PAM
ccagguccucucuccaguuu

SEQ ID NO: 14164 - RNA, 20 nt, Artificial Sequence
  HTT spacer sequence CTCN PAM
uccccagguccucucuccag

SEQ ID NO: 14165 - RNA, 20 nt, Artificial Sequence
  HTT spacer sequence CTCN PAM
uccuccccagguccucucuc

SEQ ID NO: 14166 - RNA, 20 nt, Artificial Sequence
  HTT spacer sequence CTCN PAM
uccuccuccccagguccucu

SEQ ID NO: 14167 - RNA, 20 nt, Artificial Sequence
  HTT spacer sequence CTCN PAM
gcacccggggaucugcugau

SEQ ID NO: 14168 - RNA, 20 nt, Artificial Sequence
  HTT spacer sequence CTCN PAM
uaggccaggccccuaucgaa

SEQ ID NO: 14169 - RNA, 20 nt, Artificial Sequence
  HTT spacer sequence CTCN PAM
augauuagaccuugcaggug

SEQ ID NO: 14170 - RNA, 20 nt, Artificial Sequence
  HTT spacer sequence CTCN PAM
aagaugccuuccuaaggaug

SEQ ID NO: 14171 - RNA, 20 nt, Artificial Sequence
  HTT spacer sequence CTCN PAM
accuccaagaugccuuccua

SEQ ID NO: 14172 - RNA, 20 nt, Artificial Sequence
  HTT spacer sequence CTCN PAM
uccaccuccaagaugccuuc

SEQ ID NO: 14173 - RNA, 20 nt, Artificial Sequence
  HTT spacer sequence CTCN PAM
gacccugguuccuuucagag

SEQ ID NO: 14174 - RNA, 20 nt, Artificial Sequence
  HTT spacer sequence CTCN PAM
gaaaggaaccagggucugag

SEQ ID NO: 14175 - RNA, 20 nt, Artificial Sequence
  HTT spacer sequence CTCN PAM
uugcuggcuugugccuugau

SEQ ID NO: 14176 - RNA, 20 nt, Artificial Sequence
  HTT spacer sequence CTCN PAM
aggaaaacaaaaaguuguac

SEQ ID NO: 14177 - RNA, 20 nt, Artificial Sequence
  HTT spacer sequence CTCN PAM
aagaaaacagaugugaagau

SEQ ID NO: 14178 - RNA, 20 nt, Artificial Sequence
  HTT spacer sequence CTCN PAM
auaucgcuugcuuauuauuc

SEQ ID NO: 14179 - RNA, 20 nt, Artificial Sequence
  HTT spacer sequence CTCN PAM
caccuuccaacuucuuugua

SEQ ID NO: 14180 - RNA, 20 nt, Artificial Sequence
  HTT spacer sequence CTCN PAM
aguuggaugaccacacuggg

SEQ ID NO: 14181 - RNA, 20 nt, Artificial Sequence
  HTT spacer sequence CTCN PAM
cugccccagucugggcaggu

SEQ ID NO: 14182 - RNA, 20 nt, Artificial Sequence
  HTT spacer sequence CTCN PAM
gccccagucugggcagguug

SEQ ID NO: 14183 - RNA, 20 nt, Artificial Sequence
  HTT spacer sequence CTCN PAM
uugccauuagccuggaauuu

SEQ ID NO: 14184 - RNA, 20 nt, Artificial Sequence
  HTT spacer sequence CTCN PAM
cguuggaugcccaguuccua

SEQ ID NO: 14185 - RNA, 20 nt, Artificial Sequence
  HTT spacer sequence CTCN PAM
ggaagcuacuagacgauaga

SEQ ID NO: 14186 - RNA, 20 nt, Artificial Sequence
  HTT spacer sequence CTCN PAM
caggaagcuacuagacgaua

SEQ ID NO: 14187 - RNA, 20 nt, Artificial Sequence
  HTT spacer sequence CTCN PAM
cauucaucuucucucaggaa

SEQ ID NO: 14188 - RNA, 20 nt, Artificial Sequence
  HTT spacer sequence CTCN PAM
uacaauuucccucccauuca

SEQ ID NO: 14189 - RNA, 20 nt, Artificial Sequence
  HTT spacer sequence CTCN PAM
gaaaugcaaagucuuugccc

SEQ ID NO: 14190 - RNA, 20 nt, Artificial Sequence
  HTT spacer sequence CTCN PAM
aacgugacccgauuccuuaa

SEQ ID NO: 14191 - RNA, 20 nt, Artificial Sequence
  HTT spacer sequence CTCN PAM
ccaaaaauggaaagcuucca

SEQ ID NO: 14192 - RNA, 20 nt, Artificial Sequence
  HTT spacer sequence CTCN PAM
gagaaguucuugccuuuuau

SEQ ID NO: 14193 - RNA, 20 nt, Artificial Sequence
  HTT spacer sequence CTCN PAM
gagaaauguuaagaaaauuu

SEQ ID NO: 14194 - RNA, 20 nt, Artificial Sequence
  HTT spacer sequence CTCN PAM
ccugaaauugguuaguugga

SEQ ID NO: 14195 - RNA, 20 nt, Artificial Sequence
  HTT spacer sequence CTCN PAM
ugaaauugguuaguuggaug

SEQ ID NO: 14196 - RNA, 20 nt, Artificial Sequence
  HTT spacer sequence CTCN PAM
uagauugacucacaucuuac

SEQ ID NO: 14197 - RNA, 20 nt, Artificial Sequence
  HTT spacer sequence CTCN PAM
caucuuaccuuuuucuuuuc

SEQ ID NO: 14198 - RNA, 20 nt, Artificial Sequence
  HTT spacer sequence CTCN PAM
aacucuucuauucauuguua

SEQ ID NO: 14199 - RNA, 20 nt, Artificial Sequence
  HTT spacer sequence CTCN PAM
ucuauucauuguuauguuuu

SEQ ID NO: 14200 - RNA, 20 nt, Artificial Sequence
  HTT spacer sequence CTCN PAM
ugauggggucuugcccuguu

SEQ ID NO: 14201 - RNA, 20 nt, Artificial Sequence
  HTT spacer sequence CTCN PAM
cugcagccucaaauuccugg

SEQ ID NO: 14202 - RNA, 20 nt, Artificial Sequence
  HTT spacer sequence CTCN PAM
aauuccugggcucaagcagc

SEQ ID NO: 14203 - RNA, 20 nt, Artificial Sequence
  HTT spacer sequence CTCN PAM
agcagcuguucugccucacc

SEQ ID NO: 14204 - RNA, 20 nt, Artificial Sequence
  HTT spacer sequence CTCN PAM
cccucccaaguaguugggac

SEQ ID NO: 14205 - RNA, 20 nt, Artificial Sequence
  HTT spacer sequence CTCN PAM
caaguaguugggacuacagg

SEQ ID NO: 14206 - RNA, 20 nt, Artificial Sequence
  HTT spacer sequence CTCN PAM
aaaaaaaaaaaaaaaaagua

SEQ ID NO: 14207 - RNA, 20 nt, Artificial Sequence
  HTT spacer sequence CTCN PAM
aucucaaaaaaaaaaaaaaa

SEQ ID NO: 14208 - RNA, 20 nt, Artificial Sequence
  HTT spacer sequence CTCN PAM
gucgcccaggcuagagugcg

SEQ ID NO: 14209 - RNA, 20 nt, Artificial Sequence
  HTT spacer sequence CTCN PAM
agccugggcgacagaguagg

SEQ ID NO: 14210 - RNA, 20 nt, Artificial Sequence
  HTT spacer sequence CTCN PAM
cuuaagccucugccucccag

SEQ ID NO: 14211 - RNA, 20 nt, Artificial Sequence
  HTT spacer sequence CTCN PAM
gccucccagguucaagcagu

SEQ ID NO: 14212 - RNA, 20 nt, Artificial Sequence
  HTT spacer sequence CTCN PAM
cagguucaagcaguucuccu

SEQ ID NO: 14213 - RNA, 20 nt, Artificial Sequence
  HTT spacer sequence CTCN PAM
ugccucagccucucaaguag

SEQ ID NO: 14214 - RNA, 20 nt, Artificial Sequence
  HTT spacer sequence CTCN PAM
gccucucaaguagcugggau

SEQ ID NO: 14215 - RNA, 20 nt, Artificial Sequence
  HTT spacer sequence CTCN PAM
caaguagcugggauuacagg

SEQ ID NO: 14216 - RNA, 20 nt, Artificial Sequence
  HTT spacer sequence CTCN PAM
aguagcugggauuacaggug

SEQ ID NO: 14217 - RNA, 20 nt, Artificial Sequence
  HTT spacer sequence CTCN PAM
acuaaaaauacaaaaauuag

SEQ ID NO: 14218 - RNA, 20 nt, Artificial Sequence
  HTT spacer sequence CTCN PAM
ggcucuacuaaaaauacaaa

SEQ ID NO: 14219 - RNA, 20 nt, Artificial Sequence
  HTT spacer sequence CTCN PAM
aacgccugaccucaggugau

SEQ ID NO: 14220 - RNA, 20 nt, Artificial Sequence
  HTT spacer sequence CTCN PAM
ggugauccgccugccuuggc

SEQ ID NO: 14221 - RNA, 20 nt, Artificial Sequence
  HTT spacer sequence CTCN PAM
gaaagugccgggauuacagg

SEQ ID NO: 14222 - RNA, 20 nt, Artificial Sequence
  HTT spacer sequence CTCN PAM
cgccuguaaucccggcacuu

SEQ ID NO: 14223 - RNA, 20 nt, Artificial Sequence
  HTT spacer sequence CTCN PAM
ugagucagcuaguaucccug

SEQ ID NO: 14224 - RNA, 20 nt, Artificial Sequence
  HTT spacer sequence CTCN PAM
agaggaaaagacuuauagau

SEQ ID NO: 14225 - RNA, 20 nt, Artificial Sequence
  HTT spacer sequence CTCN PAM
uuuuccugcuuggaggcuau

SEQ ID NO: 14226 - RNA, 20 nt, Artificial Sequence
  HTT spacer sequence CTCN PAM
aagcaggaaaaugaguaauu

SEQ ID NO: 14227 - RNA, 20 nt, Artificial Sequence
  HTT spacer sequence CTCN PAM
cuuccaguccccgguugcag

SEQ ID NO: 14228 - RNA, 20 nt, Artificial Sequence
  HTT spacer sequence CTCN PAM
uacuuuuuguuuucugugug

SEQ ID NO: 14229 - RNA, 20 nt, Artificial Sequence
  HTT spacer sequence CTCN PAM
cgucuguccucagccuaugu

SEQ ID NO: 14230 - RNA, 20 nt, Artificial Sequence
  HTT spacer sequence CTCN PAM
gccuauguaaacaccucuug

SEQ ID NO: 14231 - RNA, 20 nt, Artificial Sequence
  HTT spacer sequence CTCN PAM
ugagauuaucccucucaauc

SEQ ID NO: 14232 - RNA, 20 nt, Artificial Sequence
  HTT spacer sequence CTCN PAM
agagguguuuacauaggcug

SEQ ID NO: 14233 - RNA, 20 nt, Artificial Sequence
  HTT spacer sequence CTCN PAM
caaucuuugccggagguggg

SEQ ID NO: 14234 - RNA, 20 nt, Artificial Sequence
  HTT spacer sequence CTCN PAM
aucuuugccggagguggggg

SEQ ID NO: 14235 - RNA, 20 nt, Artificial Sequence
  HTT spacer sequence CTCN PAM
ggcaaagauugagagggaua

SEQ ID NO: 14236 - RNA, 20 nt, Artificial Sequence
  HTT spacer sequence CTCN PAM
cccaccuccggcaaagauug

SEQ ID NO: 14237 - RNA, 20 nt, Artificial Sequence
  HTT spacer sequence CTCN PAM
aauccaaggcagcccaggaa

SEQ ID NO: 14238 - RNA, 20 nt, Artificial Sequence
  HTT spacer sequence CTCN PAM
ggugagugggugggaauuug

SEQ ID NO: 14239 - RNA, 20 nt, Artificial Sequence
  HTT spacer sequence CTCN PAM
ccugaggucuucccuccaau

SEQ ID NO: 14240 - RNA, 20 nt, Artificial Sequence
  HTT spacer sequence CTCN PAM
uugggcaaauucccacccac

SEQ ID NO: 14241 - RNA, 20 nt, Artificial Sequence
  HTT spacer sequence CTCN PAM
uggcuccuugggcaaauucc

SEQ ID NO: 14242 - RNA, 20 nt, Artificial Sequence
  HTT spacer sequence CTCN PAM
ccaucccuccacuuucagau

SEQ ID NO: 14243 - RNA, 20 nt, Artificial Sequence
  HTT spacer sequence CTCN PAM
aucccuccacuuucagaugu

SEQ ID NO: 14244 - RNA, 20 nt, Artificial Sequence
  HTT spacer sequence CTCN PAM
acuuucagauguauguggcg

SEQ ID NO: 14245 - RNA, 20 nt, Artificial Sequence
  HTT spacer sequence CTCN PAM
aaagcccgagcucuucuugg

SEQ ID NO: 14246 - RNA, 20 nt, Artificial Sequence
  HTT spacer sequence CTCN PAM
ggcuuuggaggcgccacaua

SEQ ID NO: 14247 - RNA, 20 nt, Artificial Sequence
  HTT spacer sequence CTCN PAM
ucuuggcgucuguggcuuca

SEQ ID NO: 14248 - RNA, 20 nt, Artificial Sequence
  HTT spacer sequence CTCN PAM
uacccuccccuguccccagc

SEQ ID NO: 14249 - RNA, 20 nt, Artificial Sequence
  HTT spacer sequence CTCN PAM
ccuguccccagcaaagcuug

SEQ ID NO: 14250 - RNA, 20 nt, Artificial Sequence
  HTT spacer sequence CTCN PAM
uguuacuuuuuagcuuccga

SEQ ID NO: 14251 - RNA, 20 nt, Artificial Sequence
  HTT spacer sequence CTCN PAM
gcuacccagaaaccccacaa

SEQ ID NO: 14252 - RNA, 20 nt, Artificial Sequence
  HTT spacer sequence CTCN PAM
cacccucugguuuauucuua

SEQ ID NO: 14253 - RNA, 20 nt, Artificial Sequence
  HTT spacer sequence CTCN PAM
gguuuauucuuauucucaaa

SEQ ID NO: 14254 - RNA, 20 nt, Artificial Sequence
  HTT spacer sequence CTCN PAM
aaauuaccugccaaacacug

SEQ ID NO: 14255 - RNA, 20 nt, Artificial Sequence
  HTT spacer sequence CTCN PAM
cuuguuuuuccuuuuccuga

SEQ ID NO: 14256 - RNA, 20 nt, Artificial Sequence
  HTT spacer sequence CTCN PAM
gaagccucuccccuauuccc

SEQ ID NO: 14257 - RNA, 20 nt, Artificial Sequence
  HTT spacer sequence CTCN PAM
ccccuauucccccgucacug

SEQ ID NO: 14258 - RNA, 20 nt, Artificial Sequence
  HTT spacer sequence CTCN PAM
ccuauucccccgucacugcu

SEQ ID NO: 14259 - RNA, 20 nt, Artificial Sequence
  HTT spacer sequence CTCN PAM
ugccuuccuccccaagguca

SEQ ID NO: 14260 - RNA, 20 nt, Artificial Sequence
  HTT spacer sequence CTCN PAM
ccaaggucaugacugcuggc

SEQ ID NO: 14261 - RNA, 20 nt, Artificial Sequence
  HTT spacer sequence CTCN PAM
ggaauuagaagccagcaguc

SEQ ID NO: 14262 - RNA, 20 nt, Artificial Sequence
  HTT spacer sequence CTCN PAM
ugaacuuaaugucgaccaaa

SEQ ID NO: 14263 - RNA, 20 nt, Artificial Sequence
  HTT spacer sequence CTCN PAM
caugaacuuaaugucgacca

SEQ ID NO: 14264 - RNA, 20 nt, Artificial Sequence
  HTT spacer sequence CTCN PAM
uaaaacuacaggaauacuaa

SEQ ID NO: 14265 - RNA, 20 nt, Artificial Sequence
  HTT spacer sequence CTCN PAM
caauagccaagaacuagaaa

SEQ ID NO: 14266 - RNA, 20 nt, Artificial Sequence
  HTT spacer sequence CTCN PAM
uaggugugucuuuuggagua

SEQ ID NO: 14267 - RNA, 20 nt, Artificial Sequence
  HTT spacer sequence CTCN PAM
aaaagacacaccuaagagug

SEQ ID NO: 14268 - RNA, 20 nt, Artificial Sequence
  HTT spacer sequence CTCN PAM
agcugugcaagauggaaacc

SEQ ID NO: 14269 - RNA, 20 nt, Artificial Sequence
  HTT spacer sequence CTCN PAM
accucuagcugugcaagaug

SEQ ID NO: 14270 - RNA, 20 nt, Artificial Sequence
  HTT spacer sequence CTCN PAM
gcugcaguagaaacugccaa

SEQ ID NO: 14271 - RNA, 20 nt, Artificial Sequence
  HTT spacer sequence CTCN PAM
aggaaagcuauuuggcaguu

SEQ ID NO: 14272 - RNA, 20 nt, Artificial Sequence
  HTT spacer sequence CTCN PAM
cccuuuugccacuguguaug

SEQ ID NO: 14273 - RNA, 20 nt, Artificial Sequence
  HTT spacer sequence CTCN PAM
uggaauccccauacacagug

SEQ ID NO: 14274 - RNA, 20 nt, Artificial Sequence
  HTT spacer sequence CTCN PAM
gguccucgcuagcacuugga

SEQ ID NO: 14275 - RNA, 20 nt, Artificial Sequence
  HTT spacer sequence CTCN PAM
cuagcacuuggaauugcuga

SEQ ID NO: 14276 - RNA, 20 nt, Artificial Sequence
  HTT spacer sequence CTCN PAM
uagccuuccugauggguguu

SEQ ID NO: 14277 - RNA, 20 nt, Artificial Sequence
  HTT spacer sequence CTCN PAM
gaaguuuaaugauucaugca

SEQ ID NO: 14278 - RNA, 20 nt, Artificial Sequence
  HTT spacer sequence CTCN PAM
ucccuuuugaaguacucuua

SEQ ID NO: 14279 - RNA, 20 nt, Artificial Sequence
  HTT spacer sequence CTCN PAM
uacagguauguugugcaugu

SEQ ID NO: 14280 - RNA, 20 nt, Artificial Sequence
  HTT spacer sequence CTCN PAM
ucuguguuugaacaguugua

SEQ ID NO: 14281 - RNA, 20 nt, Artificial Sequence
  HTT spacer sequence CTCN PAM
guguuugaacaguuguagcg

SEQ ID NO: 14282 - RNA, 20 nt, Artificial Sequence
  HTT spacer sequence CTCN PAM
uguuagcuggcuuggagaag

SEQ ID NO: 14283 - RNA, 20 nt, Artificial Sequence
  HTT spacer sequence CTCN PAM
aagccagcuaacaggaggcc

SEQ ID NO: 14284 - RNA, 20 nt, Artificial Sequence
  HTT spacer sequence CTCN PAM
acaaucccaagaaucccuuc

SEQ ID NO: 14285 - RNA, 20 nt, Artificial Sequence
  HTT spacer sequence CTCN PAM
ggucuaaucucuacaauccc

SEQ ID NO: 14286 - RNA, 20 nt, Artificial Sequence
  HTT spacer sequence CTCN PAM
ucaggucuaaucucuacaau

SEQ ID NO: 14287 - RNA, 20 nt, Artificial Sequence
  HTT spacer sequence CTCN PAM
aaggggccuccucaggucua

SEQ ID NO: 14288 - RNA, 20 nt, Artificial Sequence
  HTT spacer sequence CTCN PAM
cugacuaaauuuuauucuuu

SEQ ID NO: 14289 - RNA, 20 nt, Artificial Sequence
  HTT spacer sequence CTCN PAM
gacuaaauuuuauucuuuau

SEQ ID NO: 14290 - RNA, 20 nt, Artificial Sequence
  HTT spacer sequence CTCN PAM
ccgugugcugacucaucaua

SEQ ID NO: 14291 - RNA, 20 nt, Artificial Sequence
  HTT spacer sequence CTCN PAM
ucauaauaaugaguagcucu

SEQ ID NO: 14292 - RNA, 20 nt, Artificial Sequence
  HTT spacer sequence CTCN PAM
uuauuaugaugagucagcac

SEQ ID NO: 14293 - RNA, 20 nt, Artificial Sequence
  HTT spacer sequence CTCN PAM
cauugugcuugucuauuugg

SEQ ID NO: 14294 - RNA, 20 nt, Artificial Sequence
  HTT spacer sequence CTCN PAM
uugugcuugucuauuuggac

SEQ ID NO: 14295 - RNA, 20 nt, Artificial Sequence
  HTT spacer sequence CTCN PAM
uacaaugauuuuuuuuuuuu

SEQ ID NO: 14296 - RNA, 20 nt, Artificial Sequence
  HTT spacer sequence CTCN PAM
aagaaaaaaaaaaaaucauu

SEQ ID NO: 14297 - RNA, 20 nt, Artificial Sequence
  HTT spacer sequence CTCN PAM
gucucaaagaaaaaaaaaaa

SEQ ID NO: 14298 - RNA, 20 nt, Artificial Sequence
  HTT spacer sequence CTCN PAM
guugccuaggcuggagugca

SEQ ID NO: 14299 - RNA, 20 nt, Artificial Sequence
  HTT spacer sequence CTCN PAM
agccuaggcaacagagcaag

SEQ ID NO: 14300 - RNA, 20 nt, Artificial Sequence
  HTT spacer sequence CTCN PAM
gcucacugcagccuccaccu

SEQ ID NO: 14301 - RNA, 20 nt, Artificial Sequence
  HTT spacer sequence CTCN PAM
cugcagccuccaccucccag

SEQ ID NO: 14302 - RNA, 20 nt, Artificial Sequence
  HTT spacer sequence CTCN PAM
accucccagguucaagugau

SEQ ID NO: 14303 - RNA, 20 nt, Artificial Sequence
  HTT spacer sequence CTCN PAM
cagguucaagugauucuugu

SEQ ID NO: 14304 - RNA, 20 nt, Artificial Sequence
  HTT spacer sequence CTCN PAM
gcuucucaaguagcugagac

SEQ ID NO: 14305 - RNA, 20 nt, Artificial Sequence
  HTT spacer sequence CTCN PAM
aguagcugagacugcaggug

SEQ ID NO: 14306 - RNA, 20 nt, Artificial Sequence
  HTT spacer sequence CTCN PAM
gcuacuugagaagcugaggc

SEQ ID NO: 14307 - RNA, 20 nt, Artificial Sequence
  HTT spacer sequence CTCN PAM
acuaaaaauacaaacauuag

SEQ ID NO: 14308 - RNA, 20 nt, Artificial Sequence
  HTT spacer sequence CTCN PAM
aacuccugaccucaagugau

SEQ ID NO: 14309 - RNA, 20 nt, Artificial Sequence
  HTT spacer sequence CTCN PAM
ugaccucaagugaucugccu

SEQ ID NO: 14310 - RNA, 20 nt, Artificial Sequence
  HTT spacer sequence CTCN PAM
agugaucugccuucuucagc

SEQ ID NO: 14311 - RNA, 20 nt, Artificial Sequence
  HTT spacer sequence CTCN PAM
caaagugcugggauuacagg

SEQ ID NO: 14312 - RNA, 20 nt, Artificial Sequence
  HTT spacer sequence CTCN PAM
caccuguaaucccagcacuu

SEQ ID NO: 14313 - RNA, 20 nt, Artificial Sequence
  HTT spacer sequence CTCN PAM
guggcucacaccuguaaucc

SEQ ID NO: 14314 - RNA, 20 nt, Artificial Sequence
  HTT spacer sequence CTCN PAM
gacaaacuuuuuuagcugca

SEQ ID NO: 14315 - RNA, 20 nt, Artificial Sequence
  HTT spacer sequence CTCN PAM
agguguuuucucagggagaa

SEQ ID NO: 14316 - RNA, 20 nt, Artificial Sequence
  HTT spacer sequence CTCN PAM
gggagaaauuggaggcagua

SEQ ID NO: 14317 - RNA, 20 nt, Artificial Sequence
  HTT spacer sequence CTCN PAM
cugagaaaacaccuggagaa

SEQ ID NO: 14318 - RNA, 20 nt, Artificial Sequence
  HTT spacer sequence CTCN PAM
aauuucucccugagaaaaca

SEQ ID NO: 14319 - RNA, 20 nt, Artificial Sequence
  HTT spacer sequence CTCN PAM
cccaguggcuuacugccucc

SEQ ID NO: 14320 - RNA, 20 nt, Artificial Sequence
  HTT spacer sequence CTCN PAM
uugucagggaguccuguggc

SEQ ID NO: 14321 - RNA, 20 nt, Artificial Sequence
  HTT spacer sequence CTCN PAM
cugacaaggagccacaggac

SEQ ID NO: 14322 - RNA, 20 nt, Artificial Sequence
  HTT spacer sequence CTCN PAM
uugccagccacaggacuccc

SEQ ID NO: 14323 - RNA, 20 nt, Artificial Sequence
  HTT spacer sequence CTCN PAM
ccuugccagccacaggacuc

SEQ ID NO: 14324 - RNA, 20 nt, Artificial Sequence
  HTT spacer sequence CTCN PAM
caacccagccacaggacuuc

SEQ ID NO: 14325 - RNA, 20 nt, Artificial Sequence
  HTT spacer sequence CTCN PAM
cucccaacccagccacagga

SEQ ID NO: 14326 - RNA, 20 nt, Artificial Sequence
  HTT spacer sequence CTCN PAM
uccugugccuaacagugucc

SEQ ID NO: 14327 - RNA, 20 nt, Artificial Sequence
  HTT spacer sequence CTCN PAM
ggacacuguuaggcacagga

SEQ ID NO: 14328 - RNA, 20 nt, Artificial Sequence
  HTT spacer sequence CTCN PAM
gcaccucuggacacuguuag

SEQ ID NO: 14329 - RNA, 20 nt, Artificial Sequence
  HTT spacer sequence CTCN PAM
gucggggagacccuaaccca

SEQ ID NO: 14330 - RNA, 20 nt, Artificial Sequence
  HTT spacer sequence CTCN PAM
ccgacugagcuggucucggc

SEQ ID NO: 14331 - RNA, 20 nt, Artificial Sequence
  HTT spacer sequence CTCN PAM
agcgcugcuggguuaggguc

SEQ ID NO: 14332 - RNA, 20 nt, Artificial Sequence
  HTT spacer sequence CTCN PAM
auauuucugugugugugucu

SEQ ID NO: 14333 - RNA, 20 nt, Artificial Sequence
  HTT spacer sequence CTCN PAM
cagccuuuagagcugagagc

SEQ ID NO: 14334 - RNA, 20 nt, Artificial Sequence
  HTT spacer sequence CTCN PAM
aaaggcugugagaccccuga

SEQ ID NO: 14335 - RNA, 20 nt, Artificial Sequence
  HTT spacer sequence CTCN PAM
gcucuaaaggcugugagacc

SEQ ID NO: 14336 - RNA, 20 nt, Artificial Sequence
  HTT spacer sequence CTCN PAM
cagcucuaaaggcugugaga

SEQ ID NO: 14337 - RNA, 20 nt, Artificial Sequence
  HTT spacer sequence CTCN PAM
guucagggcucucagcucua

SEQ ID NO: 14338 - RNA, 20 nt, Artificial Sequence
  HTT spacer sequence CTCN PAM
uuucccauaagggauacuuu

SEQ ID NO: 14339 - RNA, 20 nt, Artificial Sequence
  HTT spacer sequence CTCN PAM
ucuuuuaauucggcccaucc

SEQ ID NO: 14340 - RNA, 20 nt, Artificial Sequence
  HTT spacer sequence CTCN PAM
ugcugcgguuaacuagccca

SEQ ID NO: 14341 - RNA, 20 nt, Artificial Sequence
  HTT spacer sequence CTCN PAM
ugcuauuguuuguggcuuaa

SEQ ID NO: 14342 - RNA, 20 nt, Artificial Sequence
  HTT spacer sequence CTCN PAM
uuccugucaacccacaaccu

SEQ ID NO: 14343 - RNA, 20 nt, Artificial Sequence
  HTT spacer sequence CTCN PAM
gaagcacuguaacauguuca

SEQ ID NO: 14344 - RNA, 20 nt, Artificial Sequence
  HTT spacer sequence CTCN PAM
caauacagaggucucgugua

SEQ ID NO: 14345 - RNA, 20 nt, Artificial Sequence
  HTT spacer sequence CTCN PAM
guauugggagcaggcccccc

SEQ ID NO: 14346 - RNA, 20 nt, Artificial Sequence
  HTT spacer sequence CTCN PAM
uguaaauucccugggaggcg

SEQ ID NO: 14347 - RNA, 20 nt, Artificial Sequence
  HTT spacer sequence CTCN PAM
cagggaauuuacacgagacc

SEQ ID NO: 14348 - RNA, 20 nt, Artificial Sequence
  HTT spacer sequence CTCN PAM
gagaaacagacuaugcuaac

SEQ ID NO: 14349 - RNA, 20 nt, Artificial Sequence
  HTT spacer sequence CTCN PAM
gaggcuuaucgccucccagg

SEQ ID NO: 14350 - RNA, 20 nt, Artificial Sequence
  HTT spacer sequence CTCN PAM
uucauggcgugguuagcaua

SEQ ID NO: 14351 - RNA, 20 nt, Artificial Sequence
  HTT spacer sequence CTCN PAM
gacagaguccccgacucaua

SEQ ID NO: 14352 - RNA, 20 nt, Artificial Sequence
  HTT spacer sequence CTCN PAM
gucagagcuacgccugggca

SEQ ID NO: 14353 - RNA, 20 nt, Artificial Sequence
  HTT spacer sequence CTCN PAM
uagugcuugcucagugcaug

SEQ ID NO: 14354 - RNA, 20 nt, Artificial Sequence
  HTT spacer sequence CTCN PAM
gugcaugcugaacaaugauu

SEQ ID NO: 14355 - RNA, 20 nt, Artificial Sequence
  HTT spacer sequence CTCN PAM
gagcauaguuuugaauaaug

SEQ ID NO: 14356 - RNA, 20 nt, Artificial Sequence
  HTT spacer sequence CTCN PAM
gagccaugacuugauuccaa

SEQ ID NO: 14357 - RNA, 20 nt, Artificial Sequence
  HTT spacer sequence CTCN PAM
aaugauggccauuuaaaucu

SEQ ID NO: 14358 - RNA, 20 nt, Artificial Sequence
  HTT spacer sequence CTCN PAM
uuuggauuguccuagaggcc

SEQ ID NO: 14359 - RNA, 20 nt, Artificial Sequence
  HTT spacer sequence CTCN PAM
aggacaauccaaaggagaaa

SEQ ID NO: 14360 - RNA, 20 nt, Artificial Sequence
  HTT spacer sequence CTCN PAM
ugggccucuaggacaaucca

SEQ ID NO: 14361 - RNA, 20 nt, Artificial Sequence
  HTT spacer sequence CTCN PAM
uaagaaauuagggaauacuu

SEQ ID NO: 14362 - RNA, 20 nt, Artificial Sequence
  HTT spacer sequence CTCN PAM
ggacuggaacaucuucgauc

SEQ ID NO: 14363 - RNA, 20 nt, Artificial Sequence
  HTT spacer sequence CTCN PAM
uaggguggggcauuuacugc

SEQ ID NO: 14364 - RNA, 20 nt, Artificial Sequence
  HTT spacer sequence CTCN PAM
uuucuccuuaacuuugucau

SEQ ID NO: 14365 - RNA, 20 nt, Artificial Sequence
  HTT spacer sequence CTCN PAM
uuaacuuugucauuuguuga

SEQ ID NO: 14366 - RNA, 20 nt, Artificial Sequence
  HTT spacer sequence CTCN PAM
gcccacaguauuuggggaca

SEQ ID NO: 14367 - RNA, 20 nt, Artificial Sequence
  HTT spacer sequence CTCN PAM
auucuagauacacucugccc

SEQ ID NO: 14368 - RNA, 20 nt, Artificial Sequence
  HTT spacer sequence CTCN PAM
accauugcggagaggacaug

SEQ ID NO: 14369 - RNA, 20 nt, Artificial Sequence
  HTT spacer sequence CTCN PAM
gcaaugguggaggccucaau

SEQ ID NO: 14370 - RNA, 20 nt, Artificial Sequence
  HTT spacer sequence CTCN PAM
ccgcaaugguggaggccuca

SEQ ID NO: 14371 - RNA, 20 nt, Artificial Sequence
  HTT spacer sequence CTCN PAM
gcauccauguccucuccgca

SEQ ID NO: 14372 - RNA, 20 nt, Artificial Sequence
  HTT spacer sequence CTCN PAM
ggggacugcucagcauccau

SEQ ID NO: 14373 - RNA, 20 nt, Artificial Sequence
  HTT spacer sequence CTCN PAM
ugagugucccaaauuugggg

SEQ ID NO: 14374 - RNA, 20 nt, Artificial Sequence
  HTT spacer sequence CTCN PAM
agagcaguuuacagacaugu

SEQ ID NO: 14375 - RNA, 20 nt, Artificial Sequence
  HTT spacer sequence CTCN PAM
aacuguuuauacuuugcaag

SEQ ID NO: 14376 - RNA, 20 nt, Artificial Sequence
  HTT spacer sequence CTCN PAM
uaugaagcuuaucauguauu

SEQ ID NO: 14377 - RNA, 20 nt, Artificial Sequence
  HTT spacer sequence CTCN PAM
cccaccauucggcggacagc

SEQ ID NO: 14378 - RNA, 20 nt, Artificial Sequence
  HTT spacer sequence CTCN PAM
cugcugauccagccgcuguc

SEQ ID NO: 14379 - RNA, 20 nt, Artificial Sequence
  HTT spacer sequence CTCN PAM
agaaggacacaauauuucua

SEQ ID NO: 14380 - RNA, 20 nt, Artificial Sequence
  HTT spacer sequence CTCN PAM
uagguaagguggaggcauau

SEQ ID NO: 14381 - RNA, 20 nt, Artificial Sequence
  HTT spacer sequence CTCN PAM
accuuaccuaagagcacauu

SEQ ID NO: 14382 - RNA, 20 nt, Artificial Sequence
  HTT spacer sequence CTCN PAM
uaugccuccaccuuaccuaa

SEQ ID NO: 14383 - RNA, 20 nt, Artificial Sequence
  HTT spacer sequence CTCN PAM
uccacucauaugccuccacc

SEQ ID NO: 14384 - RNA, 20 nt, Artificial Sequence
  HTT spacer sequence CTCN PAM
agcauguacucaagauagac

SEQ ID NO: 14385 - RNA, 20 nt, Artificial Sequence
  HTT spacer sequence CTCN PAM
agauagaccuuugaaauaaa

SEQ ID NO: 14386 - RNA, 20 nt, Artificial Sequence
  HTT spacer sequence CTCN PAM
gcuucuagaccaggcuauuu

SEQ ID NO: 14387 - RNA, 20 nt, Artificial Sequence
  HTT spacer sequence CTCN PAM
cagcagccccagugcaguuc

SEQ ID NO: 14388 - RNA, 20 nt, Artificial Sequence
  HTT spacer sequence CTCN PAM
gugacccugcagaugcagcc

SEQ ID NO: 14389 - RNA, 20 nt, Artificial Sequence
  HTT spacer sequence CTCN PAM
caccagcccacacccacugc

SEQ ID NO: 14390 - RNA, 20 nt, Artificial Sequence
  HTT spacer sequence CTCN PAM
gucugugucggccaugacua

SEQ ID NO: 14391 - RNA, 20 nt, Artificial Sequence
  HTT spacer sequence CTCN PAM
ccauagucauggccgacaca

SEQ ID NO: 14392 - RNA, 20 nt, Artificial Sequence
  HTT spacer sequence CTCN PAM
agccuacaagacucaccaua

SEQ ID NO: 14393 - RNA, 20 nt, Artificial Sequence
  HTT spacer sequence CTCN PAM
gguuccugcggguucucugu

SEQ ID NO: 14394 - RNA, 20 nt, Artificial Sequence
  HTT spacer sequence CTCN PAM
guaggucaguugacaguuuc

SEQ ID NO: 14395 - RNA, 20 nt, Artificial Sequence
  HTT spacer sequence CTCN PAM
uguuguuuggguaacugugg

SEQ ID NO: 14396 - RNA, 20 nt, Artificial Sequence
  HTT spacer sequence CTCN PAM
cuucagcacuugccaguguu

SEQ ID NO: 14397 - RNA, 20 nt, Artificial Sequence
  HTT spacer sequence CTCN PAM
cugccuuugaaagccagguc

SEQ ID NO: 14398 - RNA, 20 nt, Artificial Sequence
  HTT spacer sequence CTCN PAM
cuggaaaggaccuugcugag

SEQ ID NO: 14399 - RNA, 20 nt, Artificial Sequence
  HTT spacer sequence CTCN PAM
ggaaaggaccuugcugagcu

SEQ ID NO: 14400 - RNA, 20 nt, Artificial Sequence
  HTT spacer sequence CTCN PAM
gcaagguccuuuccagagag

SEQ ID NO: 14401 - RNA, 20 nt, Artificial Sequence
  HTT spacer sequence CTCN PAM
uggcguacucguucaugauc

SEQ ID NO: 14402 - RNA, 20 nt, Artificial Sequence
  HTT spacer sequence CTCN PAM
uucaugaucauguuugugcc

SEQ ID NO: 14403 - RNA, 20 nt, Artificial Sequence
  HTT spacer sequence CTCN PAM
caggaucucuucuuuuuuaa

SEQ ID NO: 14404 - RNA, 20 nt, Artificial Sequence
  HTT spacer sequence CTCN PAM
ggaucucuucuuuuuuaaca

SEQ ID NO: 14405 - RNA, 20 nt, Artificial Sequence
  HTT spacer sequence CTCN PAM
ucuuuuuuaacagauuaagc

SEQ ID NO: 14406 - RNA, 20 nt, Artificial Sequence
  HTT spacer sequence CTCN PAM
aaacagugagucagauguua

SEQ ID NO: 14407 - RNA, 20 nt, Artificial Sequence
  HTT spacer sequence CTCN PAM
cuguuuggagauucccggcu

SEQ ID NO: 14408 - RNA, 20 nt, Artificial Sequence
  HTT spacer sequence CTCN PAM
uuccugucgaggaugaacac

SEQ ID NO: 14409 - RNA, 20 nt, Artificial Sequence
  HTT spacer sequence CTCN PAM
acaggaacgaguaagccugu

SEQ ID NO: 14410 - RNA, 20 nt, Artificial Sequence
  HTT spacer sequence CTCN PAM
acucugcugauucuuggcgu

SEQ ID NO: 14411 - RNA, 20 nt, Artificial Sequence
  HTT spacer sequence CTCN PAM
gcugauucuuggcgugcugc

SEQ ID NO: 14412 - RNA, 20 nt, Artificial Sequence
  HTT spacer sequence CTCN PAM
cccugagguauuuggugccc

SEQ ID NO: 14413 - RNA, 20 nt, Artificial Sequence
  HTT spacer sequence CTCN PAM
gggugagcagcacgccaaga

SEQ ID NO: 14414 - RNA, 20 nt, Artificial Sequence
  HTT spacer sequence CTCN PAM
gaagcugccuuucaggcuug

SEQ ID NO: 14415 - RNA, 20 nt, Artificial Sequence
  HTT spacer sequence CTCN PAM
ccuucugcagagcagcuugu

SEQ ID NO: 14416 - RNA, 20 nt, Artificial Sequence
  HTT spacer sequence CTCN PAM
uucugcagagcagcuugucc

SEQ ID NO: 14417 - RNA, 20 nt, Artificial Sequence
  HTT spacer sequence CTCN PAM
gcagaaggagagacuuccau

SEQ ID NO: 14418 - RNA, 20 nt, Artificial Sequence
  HTT spacer sequence CTCN PAM
uaccuggacaagcugcucug

SEQ ID NO: 14419 - RNA, 20 nt, Artificial Sequence
  HTT spacer sequence CTCN PAM
aggcccugcaugugaaugac

SEQ ID NO: 14420 - RNA, 20 nt, Artificial Sequence
  HTT spacer sequence CTCN PAM
uccaaauuaaucgguucuuu

SEQ ID NO: 14421 - RNA, 20 nt, Artificial Sequence
  HTT spacer sequence CTCN PAM
guucugccgcuucucuucca

SEQ ID NO: 14422 - RNA, 20 nt, Artificial Sequence
  HTT spacer sequence CTCN PAM
cgguucugccgcuucucuuc

SEQ ID NO: 14423 - RNA, 20 nt, Artificial Sequence
  HTT spacer sequence CTCN PAM
aacucucgguucugccgcuu

SEQ ID NO: 14424 - RNA, 20 nt, Artificial Sequence
  HTT spacer sequence CTCN PAM
ggagcugcgcugcucguuuc

SEQ ID NO: 14425 - RNA, 20 nt, Artificial Sequence
  HTT spacer sequence CTCN PAM
agaguccacaccucuaacuc

SEQ ID NO: 14426 - RNA, 20 nt, Artificial Sequence
  HTT spacer sequence CTCN PAM
uuuccaacccuaggugcuga

SEQ ID NO: 14427 - RNA, 20 nt, Artificial Sequence
  HTT spacer sequence CTCN PAM
agcugucuucccucuguaug

SEQ ID NO: 14428 - RNA, 20 nt, Artificial Sequence
  HTT spacer sequence CTCN PAM
guaugucccugucaccguga

SEQ ID NO: 14429 - RNA, 20 nt, Artificial Sequence
  HTT spacer sequence CTCN PAM
cggugacagggacauacaga

SEQ ID NO: 14430 - RNA, 20 nt, Artificial Sequence
  HTT spacer sequence CTCN PAM
ucaggugccguguuaccuaa

SEQ ID NO: 14431 - RNA, 20 nt, Artificial Sequence
  HTT spacer sequence CTCN PAM
ggugccguguuaccuaagcc

SEQ ID NO: 14432 - RNA, 20 nt, Artificial Sequence
  HTT spacer sequence CTCN PAM
cagagaccacugcuacccug

SEQ ID NO: 14433 - RNA, 20 nt, Artificial Sequence
  HTT spacer sequence CTCN PAM
gagaccacugcuacccuguu

SEQ ID NO: 14434 - RNA, 20 nt, Artificial Sequence
  HTT spacer sequence CTCN PAM
gagaggcuuagguaacacgg

SEQ ID NO: 14435 - RNA, 20 nt, Artificial Sequence
  HTT spacer sequence CTCN PAM
gguuuuagaaacaggguagc

SEQ ID NO: 14436 - RNA, 20 nt, Artificial Sequence
  HTT spacer sequence CTCN PAM
aucaguauuuacugggugga

SEQ ID NO: 14437 - RNA, 20 nt, Artificial Sequence
  HTT spacer sequence CTCN PAM
gggauaggggcuggguauac

SEQ ID NO: 14438 - RNA, 20 nt, Artificial Sequence
  HTT spacer sequence CTCN PAM
ccauuguauacccagccccu

SEQ ID NO: 14439 - RNA, 20 nt, Artificial Sequence
  HTT spacer sequence CTCN PAM
acggggcagaagcugcagcu

SEQ ID NO: 14440 - RNA, 20 nt, Artificial Sequence
  HTT spacer sequence CTCN PAM
cucaaggagauagggacgug

SEQ ID NO: 14441 - RNA, 20 nt, Artificial Sequence
  HTT spacer sequence CTCN PAM
aggagauagggacguggucg

SEQ ID NO: 14442 - RNA, 20 nt, Artificial Sequence
  HTT spacer sequence CTCN PAM
uugagugagcauauaccacc

SEQ ID NO: 14443 - RNA, 20 nt, Artificial Sequence
  HTT spacer sequence CTCN PAM
uuccaaugcagagaaaccuu

SEQ ID NO: 14444 - RNA, 20 nt, Artificial Sequence
  HTT spacer sequence CTCN PAM
gcauuggaaagagaaguucc

SEQ ID NO: 14445 - RNA, 20 nt, Artificial Sequence
  HTT spacer sequence CTCN PAM
gguuauuucacuaacuaugu

SEQ ID NO: 14446 - RNA, 20 nt, Artificial Sequence
  HTT spacer sequence CTCN PAM
uuuuaagcaauuggauuuuu

SEQ ID NO: 14447 - RNA, 20 nt, Artificial Sequence
  HTT spacer sequence CTCN PAM
gugcuuaaauuauuagcauu

SEQ ID NO: 14448 - RNA, 20 nt, Artificial Sequence
  HTT spacer sequence CTCN PAM
gcuguuuaucaacacgcagc

SEQ ID NO: 14449 - RNA, 20 nt, Artificial Sequence
  HTT spacer sequence CTCN PAM
uaagaaaguauuggggcuga

SEQ ID NO: 14450 - RNA, 20 nt, Artificial Sequence
  HTT spacer sequence CTCN PAM
gccccaauacuuucuuaaga

SEQ ID NO: 14451 - RNA, 20 nt, Artificial Sequence
  HTT spacer sequence CTCN PAM
cagccccaauacuuucuuaa

SEQ ID NO: 14452 - RNA, 20 nt, Artificial Sequence
  HTT spacer sequence CTCN PAM
gcuuuuauucugaaaaauaa

SEQ ID NO: 14453 - RNA, 20 nt, Artificial Sequence
  HTT spacer sequence CTCN PAM
ugggauaugacauuuauauu

SEQ ID NO: 14454 - RNA, 20 nt, Artificial Sequence
  HTT spacer sequence CTCN PAM
gcaguguuuuuugugaagga

SEQ ID NO: 14455 - RNA, 20 nt, Artificial Sequence
  HTT spacer sequence CTCN PAM
acaaaacacucagcaguguu

SEQ ID NO: 14456 - RNA, 20 nt, Artificial Sequence
  HTT spacer sequence CTCN PAM
auaaaaagcuagcuuaaaaa

SEQ ID NO: 14457 - RNA, 20 nt, Artificial Sequence
  HTT spacer sequence CTCN PAM
ugaccaguuauauuucauuu

SEQ ID NO: 14458 - RNA, 20 nt, Artificial Sequence
  HTT spacer sequence CTCN PAM
cuuuuuuuauuauuugaaag

SEQ ID NO: 14459 - RNA, 20 nt, Artificial Sequence
  HTT spacer sequence CTCN PAM
uauuucaucuauaaguauuu

SEQ ID NO: 14460 - RNA, 20 nt, Artificial Sequence
  HTT spacer sequence CTCN PAM
auagaugaggacucuucuuu

SEQ ID NO: 14461 - RNA, 20 nt, Artificial Sequence
  HTT spacer sequence CTCN PAM
ucuauagagauacugaaaua

SEQ ID NO: 14462 - RNA, 20 nt, Artificial Sequence
  HTT spacer sequence CTCN PAM
ucuuuauuuuuaaaacuuua

SEQ ID NO: 14463 - RNA, 20 nt, Artificial Sequence
  HTT spacer sequence CTCN PAM
caaaguucugggauuacagg

SEQ ID NO: 14464 - RNA, 20 nt, Artificial Sequence
  HTT spacer sequence CTCN PAM
cagguucaagugauccgccc

SEQ ID NO: 14465 - RNA, 20 nt, Artificial Sequence
  HTT spacer sequence CTCN PAM
aacucccagguucaagugau

SEQ ID NO: 14466 - RNA, 20 nt, Artificial Sequence
  HTT spacer sequence CTCN PAM
caaguagcugggacuacagg

SEQ ID NO: 14467 - RNA, 20 nt, Artificial Sequence
  HTT spacer sequence CTCN PAM
gccucccaaguagcugggac

SEQ ID NO: 14468 - RNA, 20 nt, Artificial Sequence
  HTT spacer sequence CTCN PAM
caucucagccucccaaguag

SEQ ID NO: 14469 - RNA, 20 nt, Artificial Sequence
  HTT spacer sequence CTCN PAM
ugugacccucccaucucagc

SEQ ID NO: 14470 - RNA, 20 nt, Artificial Sequence
  HTT spacer sequence CTCN PAM
auccugggugauggagcaag

SEQ ID NO: 14471 - RNA, 20 nt, Artificial Sequence
  HTT spacer sequence CTCN PAM
aucacccaggauggagugca

SEQ ID NO: 14472 - RNA, 20 nt, Artificial Sequence
  HTT spacer sequence CTCN PAM
aaaaaacaaaacugcaaaac

SEQ ID NO: 14473 - RNA, 20 nt, Artificial Sequence
  HTT spacer sequence CTCN PAM
uuaucaauuuuucucucuac

SEQ ID NO: 14474 - RNA, 20 nt, Artificial Sequence
  HTT spacer sequence CTCN PAM
cuacucuuuuggaaucagca

SEQ ID NO: 14475 - RNA, 20 nt, Artificial Sequence
  HTT spacer sequence CTCN PAM
acucuuuuggaaucagcauc

SEQ ID NO: 14476 - RNA, 20 nt, Artificial Sequence
  HTT spacer sequence CTCN PAM
uuuggaaucagcaucuaaau

SEQ ID NO: 14477 - RNA, 20 nt, Artificial Sequence
  HTT spacer sequence CTCN PAM
uugaugaacugguuccccuc

SEQ ID NO: 14478 - RNA, 20 nt, Artificial Sequence
  HTT spacer sequence CTCN PAM
aucccaguuuuuuucccuua

SEQ ID NO: 14479 - RNA, 20 nt, Artificial Sequence
  HTT spacer sequence CTCN PAM
aagggaaaaaaacugggaug

SEQ ID NO: 14480 - RNA, 20 nt, Artificial Sequence
  HTT spacer sequence CTCN PAM
auaaaugaacucuaagggaa

SEQ ID NO: 14481 - RNA, 20 nt, Artificial Sequence
  HTT spacer sequence CTCN PAM
acuguguaaauuaacaccuu

SEQ ID NO: 14482 - RNA, 20 nt, Artificial Sequence
  HTT spacer sequence CTCN PAM
ucucuguauuuccuguaaau

SEQ ID NO: 14483 - RNA, 20 nt, Artificial Sequence
  HTT spacer sequence CTCN PAM
guauuuccuguaaaucaaua

SEQ ID NO: 14484 - RNA, 20 nt, Artificial Sequence
  HTT spacer sequence CTCN PAM
aauuauugauuuacaggaaa

SEQ ID NO: 14485 - RNA, 20 nt, Artificial Sequence
  HTT spacer sequence CTCN PAM
gauauaaaauauacacuaaa

SEQ ID NO: 14486 - RNA, 20 nt, Artificial Sequence
  HTT spacer sequence CTCN PAM
uuuaaaaaguauugaaacua

SEQ ID NO: 14487 - RNA, 20 nt, Artificial Sequence
  HTT spacer sequence CTCN PAM
auuuuuuuuaacugaugcuu

SEQ ID NO: 14488 - RNA, 20 nt, Artificial Sequence
  HTT spacer sequence CTCN PAM
aaacuuuuaugaucaagcag

SEQ ID NO: 14489 - RNA, 20 nt, Artificial Sequence
  HTT spacer sequence CTCN PAM
accuugcuaaacgguuuagu

SEQ ID NO: 14490 - RNA, 20 nt, Artificial Sequence
  HTT spacer sequence CTCN PAM
aggccccaccaugugcaccu

SEQ ID NO: 14491 - RNA, 20 nt, Artificial Sequence
  HTT spacer sequence CTCN PAM
ugacugaacuucuccaggcc

SEQ ID NO: 14492 - RNA, 20 nt, Artificial Sequence
  HTT spacer sequence CTCN PAM
gugccgggucagauuccacg

SEQ ID NO: 14493 - RNA, 20 nt, Artificial Sequence
  HTT spacer sequence CTCN PAM
caacucugugccgggucaga

SEQ ID NO: 14494 - RNA, 20 nt, Artificial Sequence
  HTT spacer sequence CTCN PAM
ugucuucucccaacucugug

SEQ ID NO: 14495 - RNA, 20 nt, Artificial Sequence
  HTT spacer sequence CTCN PAM
ugggacuuagcaaagaccac

SEQ ID NO: 14496 - RNA, 20 nt, Artificial Sequence
  HTT spacer sequence CTCN PAM
cccuuucacuccugggacuu

SEQ ID NO: 14497 - RNA, 20 nt, Artificial Sequence
  HTT spacer sequence CTCN PAM
cagcacacgagugugggugc

SEQ ID NO: 14498 - RNA, 20 nt, Artificial Sequence
  HTT spacer sequence CTCN PAM
ugugcugugagcacugucuc

SEQ ID NO: 14499 - RNA, 20 nt, Artificial Sequence
  HTT spacer sequence CTCN PAM
gucuacgcacccacacucgu

SEQ ID NO: 14500 - RNA, 20 nt, Artificial Sequence
  HTT spacer sequence CTCN PAM
uagauuagcaagagugcugg

SEQ ID NO: 14501 - RNA, 20 nt, Artificial Sequence
  HTT spacer sequence CTCN PAM
ugcuaaucuaugagaaagcc

SEQ ID NO: 14502 - RNA, 20 nt, Artificial Sequence
  HTT spacer sequence CTCN PAM
guaaccagcacucuugcuaa

SEQ ID NO: 14503 - RNA, 20 nt, Artificial Sequence
  HTT spacer sequence CTCN PAM
aucccuguccuuccaggauu

SEQ ID NO: 14504 - RNA, 20 nt, Artificial Sequence
  HTT spacer sequence CTCN PAM
cauccauacccuuuuuuccc

SEQ ID NO: 14505 - RNA, 20 nt, Artificial Sequence
  HTT spacer sequence CTCN PAM
aaaguaaauaaaugaugugg

SEQ ID NO: 14506 - RNA, 20 nt, Artificial Sequence
  HTT spacer sequence CTCN PAM
agauaugauuaucucuauaa

SEQ ID NO: 14507 - RNA, 20 nt, Artificial Sequence
  HTT spacer sequence CTCN PAM
auaacauaucuuacuccauc

SEQ ID NO: 14508 - RNA, 20 nt, Artificial Sequence
  HTT spacer sequence CTCN PAM
aucuucuuuugacuaaaaac

SEQ ID NO: 14509 - RNA, 20 nt, Artificial Sequence
  HTT spacer sequence CTCN PAM
ugguaauuuaauuaagaaca

SEQ ID NO: 14510 - RNA, 20 nt, Artificial Sequence
  HTT spacer sequence CTCN PAM
auuuuucaauuuauuccuuu

SEQ ID NO: 14511 - RNA, 20 nt, Artificial Sequence
  HTT spacer sequence CTCN PAM
cucaccuaggcaugcaguaa

SEQ ID NO: 14512 - RNA, 20 nt, Artificial Sequence
  HTT spacer sequence CTCN PAM
caccuaggcaugcaguaaaa

SEQ ID NO: 14513 - RNA, 20 nt, Artificial Sequence
  HTT spacer sequence CTCN PAM
ccuaggcaugcaguaaaagc

SEQ ID NO: 14514 - RNA, 20 nt, Artificial Sequence
  HTT spacer sequence CTCN PAM
gcccagcuucuuaaacauac

SEQ ID NO: 14515 - RNA, 20 nt, Artificial Sequence
  HTT spacer sequence CTCN PAM
uuguugauaauauaugcaua

SEQ ID NO: 14516 - RNA, 20 nt, Artificial Sequence
  HTT spacer sequence CTCN PAM
cuccuuguugauaauauaug

SEQ ID NO: 14517 - RNA, 20 nt, Artificial Sequence
  HTT spacer sequence CTCN PAM
uauggaugguuacuaauugc

SEQ ID NO: 14518 - RNA, 20 nt, Artificial Sequence
  HTT spacer sequence CTCN PAM
aaucuauuacuugcuuaaaa

SEQ ID NO: 14519 - RNA, 20 nt, Artificial Sequence
  HTT spacer sequence CTCN PAM
uacucuaaucuauuacuugc

SEQ ID NO: 14520 - RNA, 20 nt, Artificial Sequence
  HTT spacer sequence CTCN PAM
uucaaaugacauggaguagu

SEQ ID NO: 14521 - RNA, 20 nt, Artificial Sequence
  HTT spacer sequence CTCN PAM
augucauuugaaagagaaug

SEQ ID NO: 14522 - RNA, 20 nt, Artificial Sequence
  HTT spacer sequence CTCN PAM
gaaagaaagaaagauuucag

SEQ ID NO: 14523 - RNA, 20 nt, Artificial Sequence
  HTT spacer sequence CTCN PAM
gaaagaaauauuucauuauu

SEQ ID NO: 14524 - RNA, 20 nt, Artificial Sequence
  HTT spacer sequence CTCN PAM
acuucuaggcagagaacauu

SEQ ID NO: 14525 - RNA, 20 nt, Artificial Sequence
  HTT spacer sequence CTCN PAM
gccuagaaguugagccaaaa

SEQ ID NO: 14526 - RNA, 20 nt, Artificial Sequence
  HTT spacer sequence CTCN PAM
uagguaacacuauuuacauu

SEQ ID NO: 14527 - RNA, 20 nt, Artificial Sequence
  HTT spacer sequence CTCN PAM
auaguaugaaagcagugcug

SEQ ID NO: 14528 - RNA, 20 nt, Artificial Sequence
  HTT spacer sequence CTCN PAM
uaaauucuguuagcaacagc

SEQ ID NO: 14529 - RNA, 20 nt, Artificial Sequence
  HTT spacer sequence CTCN PAM
ucugcccccuccuaaauucu

SEQ ID NO: 14530 - RNA, 20 nt, Artificial Sequence
  HTT spacer sequence CTCN PAM
auguaauaaggaaaucagca

SEQ ID NO: 14531 - RNA, 20 nt, Artificial Sequence
  HTT spacer sequence CTCN PAM
caauguaauaaggaaaucag

SEQ ID NO: 14532 - RNA, 20 nt, Artificial Sequence
  HTT spacer sequence CTCN PAM
ucucaauguaauaaggaaau

SEQ ID NO: 14533 - RNA, 20 nt, Artificial Sequence
  HTT spacer sequence CTCN PAM
uggcuccucucaauguaaua

SEQ ID NO: 14534 - RNA, 20 nt, Artificial Sequence
  HTT spacer sequence CTCN PAM
acguaaucagcuuauacuuu

SEQ ID NO: 14535 - RNA, 20 nt, Artificial Sequence
  HTT spacer sequence CTCN PAM
acacuaccuuuguagcauga

SEQ ID NO: 14536 - RNA, 20 nt, Artificial Sequence
  HTT spacer sequence CTCN PAM
guuccggugaaacuuuaggu

SEQ ID NO: 14537 - RNA, 20 nt, Artificial Sequence
  HTT spacer sequence CTCN PAM
ucugaugguaacuucuauac

SEQ ID NO: 14538 - RNA, 20 nt, Artificial Sequence
  HTT spacer sequence CTCN PAM
cuuuuagcucuucugauggu

SEQ ID NO: 14539 - RNA, 20 nt, Artificial Sequence
  HTT spacer sequence CTCN PAM
ucuacacugucugauuuuga

SEQ ID NO: 14540 - RNA, 20 nt, Artificial Sequence
  HTT spacer sequence CTCN PAM
uaauguaucugaaguucaaa

SEQ ID NO: 14541 - RNA, 20 nt, Artificial Sequence
  HTT spacer sequence CTCN PAM
aauuuaaacuguaaacaaac

SEQ ID NO: 14542 - RNA, 20 nt, Artificial Sequence
  HTT spacer sequence CTCN PAM
gcagccuggggguuggggac

SEQ ID NO: 14543 - RNA, 20 nt, Artificial Sequence
  HTT spacer sequence CTCN PAM
gcagccuggggguuggggac

SEQ ID NO: 14544 - RNA, 20 nt, Artificial Sequence
  HTT spacer sequence CTCN PAM
cuuccugcugggcagccugg

SEQ ID NO: 14545 - RNA, 20 nt, Artificial Sequence
  HTT spacer sequence CTCN PAM
ccugcugcucacuuccugcu

SEQ ID NO: 14546 - RNA, 20 nt, Artificial Sequence
  HTT spacer sequence CTCN PAM
ggugggaaugccagcucacc

SEQ ID NO: 14547 - RNA, 20 nt, Artificial Sequence
  HTT spacer sequence CTCN PAM
ugucagaucaguggcagcau

SEQ ID NO: 14548 - RNA, 20 nt, Artificial Sequence
  HTT spacer sequence CTCN PAM
uaugggaaucuaaugcugcc

SEQ ID NO: 14549 - RNA, 20 nt, Artificial Sequence
  HTT spacer sequence CTCN PAM
caugugcaguucacaauagg

SEQ ID NO: 14550 - RNA, 20 nt, Artificial Sequence
  HTT spacer sequence CTCN PAM
uuaugagaaucuaaugccug

SEQ ID NO: 14551 - RNA, 20 nt, Artificial Sequence
  HTT spacer sequence CTCN PAM
uaaggagcgcacaaccuaga

SEQ ID NO: 14552 - RNA, 20 nt, Artificial Sequence
  HTT spacer sequence CTCN PAM
gaucaucaggcauuagauuc

SEQ ID NO: 14553 - RNA, 20 nt, Artificial Sequence
  HTT spacer sequence CTCN PAM
ucuugaaaccauccccuggc

SEQ ID NO: 14554 - RNA, 20 nt, Artificial Sequence
  HTT spacer sequence CTCN PAM
caugaaaccagucucuggug

SEQ ID NO: 14555 - RNA, 20 nt, Artificial Sequence
  HTT spacer sequence CTCN PAM
ggugccagaaagguugggua

SEQ ID NO: 14556 - RNA, 20 nt, Artificial Sequence
  HTT spacer sequence CTCN PAM
uucucaguggcacucauaau

SEQ ID NO: 14557 - RNA, 20 nt, Artificial Sequence
  HTT spacer sequence CTCN PAM
guggcacucauaauaguguu

SEQ ID NO: 14558 - RNA, 20 nt, Artificial Sequence
  HTT spacer sequence CTCN PAM
uaauaguguuuuuugauuuu

SEQ ID NO: 14559 - RNA, 20 nt, Artificial Sequence
  HTT spacer sequence CTCN PAM
ccccuccguguaugcugggc

SEQ ID NO: 14560 - RNA, 20 nt, Artificial Sequence
  HTT spacer sequence CTCN PAM
ccuccguguaugcugggcuu

SEQ ID NO: 14561 - RNA, 20 nt, Artificial Sequence
  HTT spacer sequence CTCN PAM
guguaugcugggcuuuauuu

SEQ ID NO: 14562 - RNA, 20 nt, Artificial Sequence
  HTT spacer sequence CTCN PAM
auuucccaaaacuggugacu

SEQ ID NO: 14563 - RNA, 20 nt, Artificial Sequence
  HTT spacer sequence CTCN PAM
ugcugcuccucuagugcaag

SEQ ID NO: 14564 - RNA, 20 nt, Artificial Sequence
  HTT spacer sequence CTCN PAM
ucuagugcaagugcuccauu

SEQ ID NO: 14565 - RNA, 20 nt, Artificial Sequence
  HTT spacer sequence CTCN PAM
agugcaagugcuccauuuau

SEQ ID NO: 14566 - RNA, 20 nt, Artificial Sequence
  HTT spacer sequence CTCN PAM
auuuauuuuuaaggaauuaa

SEQ ID NO: 14567 - RNA, 20 nt, Artificial Sequence
  HTT spacer sequence CTCN PAM
cccuaaauauuucccuauca

SEQ ID NO: 14568 - RNA, 20 nt, Artificial Sequence
  HTT spacer sequence CTCN PAM
gaccagaacaccuguguuuc

SEQ ID NO: 14569 - RNA, 20 nt, Artificial Sequence
  HTT spacer sequence CTCN PAM
guuucuagguuuaugaacug

SEQ ID NO: 14570 - RNA, 20 nt, Artificial Sequence
  HTT spacer sequence CTCN PAM
ggucacaacauuguggucuu

SEQ ID NO: 14571 - RNA, 20 nt, Artificial Sequence
  HTT spacer sequence CTCN PAM
agggcuccggucacaacauu

SEQ ID NO: 14572 - RNA, 20 nt, Artificial Sequence
  HTT spacer sequence CTCN PAM
ucagaacgccuccacccgag

SEQ ID NO: 14573 - RNA, 20 nt, Artificial Sequence
  HTT spacer sequence CTCN PAM
acccgagcuucugcaaaccc

SEQ ID NO: 14574 - RNA, 20 nt, Artificial Sequence
  HTT spacer sequence CTCN PAM
gguggaggcguucugaagag

SEQ ID NO: 14575 - RNA, 20 nt, Artificial Sequence
  HTT spacer sequence CTCN PAM
ccgcugcuaaggaggagucu

SEQ ID NO: 14576 - RNA, 20 nt, Artificial Sequence
  HTT spacer sequence CTCN PAM
uuagcagcggugagcugccc

SEQ ID NO: 14577 - RNA, 20 nt, Artificial Sequence
  HTT spacer sequence CTCN PAM
uccuuagcagcggugagcug

SEQ ID NO: 14578 - RNA, 20 nt, Artificial Sequence
  HTT spacer sequence CTCN PAM
cacuacggcuucggccacca

SEQ ID NO: 14579 - RNA, 20 nt, Artificial Sequence
  HTT spacer sequence CTCN PAM
uacaauuaacuuugcaguaa

SEQ ID NO: 14580 - RNA, 20 nt, Artificial Sequence
  HTT spacer sequence CTCN PAM
auugauuaugggccugcccu

SEQ ID NO: 14581 - RNA, 20 nt, Artificial Sequence
  HTT spacer sequence CTCN PAM
ccuauuuauaaaauaaagau

SEQ ID NO: 14582 - RNA, 20 nt, Artificial Sequence
  HTT spacer sequence CTCN PAM
cgccuguaauuucagcacuu

SEQ ID NO: 14583 - RNA, 20 nt, Artificial Sequence
  HTT spacer sequence CTCN PAM
ugggcugaagcgauccuucc

SEQ ID NO: 14584 - RNA, 20 nt, Artificial Sequence
  HTT spacer sequence CTCN PAM
aacuccugggcugaagcgau

SEQ ID NO: 14585 - RNA, 20 nt, Artificial Sequence
  HTT spacer sequence CTCN PAM
cuuggccagguugucucaaa

SEQ ID NO: 14586 - RNA, 20 nt, Artificial Sequence
  HTT spacer sequence CTCN PAM
acaaaaaaaaaaaaaaaaaa

SEQ ID NO: 14587 - RNA, 20 nt, Artificial Sequence
  HTT spacer sequence CTCN PAM
aaagcagcugggacuacagg

SEQ ID NO: 14588 - RNA, 20 nt, Artificial Sequence
  HTT spacer sequence CTCN PAM
gccuccaaagcagcugggac

SEQ ID NO: 14589 - RNA, 20 nt, Artificial Sequence
  HTT spacer sequence CTCN PAM
ugggcuuaagcaauccuacc

SEQ ID NO: 14590 - RNA, 20 nt, Artificial Sequence
  HTT spacer sequence CTCN PAM
accucuugggcuuaagcaau

SEQ ID NO: 14591 - RNA, 20 nt, Artificial Sequence
  HTT spacer sequence CTCN PAM
gugcagcugccaucaagauu

SEQ ID NO: 14592 - RNA, 20 nt, Artificial Sequence
  HTT spacer sequence CTCN PAM
gucaccaggcucagugcagc

SEQ ID NO: 14593 - RNA, 20 nt, Artificial Sequence
  HTT spacer sequence CTCN PAM
aaauaaauuuaaaaauaaaa

SEQ ID NO: 14594 - RNA, 20 nt, Artificial Sequence
  HTT spacer sequence CTCN PAM
uauuuuauuuuuaaauuuau

SEQ ID NO: 14595 - RNA, 20 nt, Artificial Sequence
  HTT spacer sequence CTCN PAM
uuuugccacccaaccugcua

SEQ ID NO: 14596 - RNA, 20 nt, Artificial Sequence
  HTT spacer sequence CTCN PAM
uccugauucuuuucucugcc

SEQ ID NO: 14597 - RNA, 20 nt, Artificial Sequence
  HTT spacer sequence CTCN PAM
ugauucuuuucucugccuug

SEQ ID NO: 14598 - RNA, 20 nt, Artificial Sequence
  HTT spacer sequence CTCN PAM
gccuuggcugccuccugugg

SEQ ID NO: 14599 - RNA, 20 nt, Artificial Sequence
  HTT spacer sequence CTCN PAM
uguggcauuuuaggugcuga

SEQ ID NO: 14600 - RNA, 20 nt, Artificial Sequence
  HTT spacer sequence CTCN PAM
gcaccuaaaaugccacagga

SEQ ID NO: 14601 - RNA, 20 nt, Artificial Sequence
  HTT spacer sequence CTCN PAM
uguuaauuugccagaaaugg

SEQ ID NO: 14602 - RNA, 20 nt, Artificial Sequence
  HTT spacer sequence CTCN PAM
gacgacuugaagaugccauu

SEQ ID NO: 14603 - RNA, 20 nt, Artificial Sequence
  HTT spacer sequence CTCN PAM
gaucccucugacgacuugaa

SEQ ID NO: 14604 - RNA, 20 nt, Artificial Sequence
  HTT spacer sequence CTCN PAM
cagaucccucugacgacuug

SEQ ID NO: 14605 - RNA, 20 nt, Artificial Sequence
  HTT spacer sequence CTCN PAM
agucaggccaggaaggaacu

SEQ ID NO: 14606 - RNA, 20 nt, Artificial Sequence
  HTT spacer sequence CTCN PAM
gcgucugccuccacugccca

SEQ ID NO: 14607 - RNA, 20 nt, Artificial Sequence
  HTT spacer sequence CTCN PAM
acugcccagucaccuccucu

SEQ ID NO: 14608 - RNA, 20 nt, Artificial Sequence
  HTT spacer sequence CTCN PAM
ucuccaugcucuuggggcug

SEQ ID NO: 14609 - RNA, 20 nt, Artificial Sequence
  HTT spacer sequence CTCN PAM
ccaugcucuuggggcugggc

SEQ ID NO: 14610 - RNA, 20 nt, Artificial Sequence
  HTT spacer sequence CTCN PAM
augcucuuggggcugggccc

SEQ ID NO: 14611 - RNA, 20 nt, Artificial Sequence
  HTT spacer sequence CTCN PAM
uggggcugggcccuacccca

SEQ ID NO: 14612 - RNA, 20 nt, Artificial Sequence
  HTT spacer sequence CTCN PAM
agggcagcacugcauggugg

SEQ ID NO: 14613 - RNA, 20 nt, Artificial Sequence
  HTT spacer sequence CTCN PAM
cugcuccagggcagcacugc

SEQ ID NO: 14614 - RNA, 20 nt, Artificial Sequence
  HTT spacer sequence CTCN PAM
ugccagacaggacccaccaa

SEQ ID NO: 14615 - RNA, 20 nt, Artificial Sequence
  HTT spacer sequence CTCN PAM
caugccagacaggacccacc

SEQ ID NO: 14616 - RNA, 20 nt, Artificial Sequence
  HTT spacer sequence CTCN PAM
caaaggcagcucucaugcca

SEQ ID NO: 14617 - RNA, 20 nt, Artificial Sequence
  HTT spacer sequence CTCN PAM
accacugggucuggugccua

SEQ ID NO: 14618 - RNA, 20 nt, Artificial Sequence
  HTT spacer sequence CTCN PAM
ggccucuccuaagccacugc

SEQ ID NO: 14619 - RNA, 20 nt, Artificial Sequence
  HTT spacer sequence CTCN PAM
ccuaagccacugcaacgugg

SEQ ID NO: 14620 - RNA, 20 nt, Artificial Sequence
  HTT spacer sequence CTCN PAM
uaagccacugcaacgugguc

SEQ ID NO: 14621 - RNA, 20 nt, Artificial Sequence
  HTT spacer sequence CTCN PAM
cagccuccacauuagagaga

SEQ ID NO: 14622 - RNA, 20 nt, Artificial Sequence
  HTT spacer sequence CTCN PAM
acauuagagagaaucugacu

SEQ ID NO: 14623 - RNA, 20 nt, Artificial Sequence
  HTT spacer sequence CTCN PAM
aauguggaggcugugaguaa

SEQ ID NO: 14624 - RNA, 20 nt, Artificial Sequence
  HTT spacer sequence CTCN PAM
cuaauguggaggcugugagu

SEQ ID NO: 14625 - RNA, 20 nt, Artificial Sequence
  HTT spacer sequence CTCN PAM
ugugaacauaaauguuugcc

SEQ ID NO: 14626 - RNA, 20 nt, Artificial Sequence
  HTT spacer sequence CTCN PAM
ugguucuggcaaacauuuau

SEQ ID NO: 14627 - RNA, 20 nt, Artificial Sequence
  HTT spacer sequence CTCN PAM
uuauuuguaaggcacgcauu

SEQ ID NO: 14628 - RNA, 20 nt, Artificial Sequence
  HTT spacer sequence CTCN PAM
gauuauuuagcugacuaaca

SEQ ID NO: 14629 - RNA, 20 nt, Artificial Sequence
  HTT spacer sequence CTCN PAM
aguuuuaaaguugaaucaag

SEQ ID NO: 14630 - RNA, 20 nt, Artificial Sequence
  HTT spacer sequence CTCN PAM
agcugcaaaucacagaaagu

SEQ ID NO: 14631 - RNA, 20 nt, Artificial Sequence
  HTT spacer sequence CTCN PAM
ugcagcccuguccuuucaag

SEQ ID NO: 14632 - RNA, 20 nt, Artificial Sequence
  HTT spacer sequence CTCN PAM
gauuucugaaauaaucaccu

SEQ ID NO: 14633 - RNA, 20 nt, Artificial Sequence
  HTT spacer sequence CTCN PAM
guguauaucucuucucagau

SEQ ID NO: 14634 - RNA, 20 nt, Artificial Sequence
  HTT spacer sequence CTCN PAM
ucucagaugagugauuauau

SEQ ID NO: 14635 - RNA, 20 nt, Artificial Sequence
  HTT spacer sequence CTCN PAM
gaugagugauuauaugugug

SEQ ID NO: 14636 - RNA, 20 nt, Artificial Sequence
  HTT spacer sequence CTCN PAM
ucugagaagagauauacaca

SEQ ID NO: 14637 - RNA, 20 nt, Artificial Sequence
  HTT spacer sequence CTCN PAM
gucccuuuacaaaaaaaguc

SEQ ID NO: 14638 - RNA, 20 nt, Artificial Sequence
  HTT spacer sequence CTCN PAM
uuugcaacauucagcucugc

SEQ ID NO: 14639 - RNA, 20 nt, Artificial Sequence
  HTT spacer sequence CTCN PAM
gcccugugacaggaaugcag

SEQ ID NO: 14640 - RNA, 20 nt, Artificial Sequence
  HTT spacer sequence CTCN PAM
ugucuuuacaacugcauucc

SEQ ID NO: 14641 - RNA, 20 nt, Artificial Sequence
  HTT spacer sequence CTCN PAM
caaaauauaacaacacauuc

SEQ ID NO: 14642 - RNA, 20 nt, Artificial Sequence
  HTT spacer sequence CTCN PAM
guaaauuuuauuuaguauua

SEQ ID NO: 14643 - RNA, 20 nt, Artificial Sequence
  HTT spacer sequence CTCN PAM
cuauguugaccaggcuggaa

SEQ ID NO: 14644 - RNA, 20 nt, Artificial Sequence
  HTT spacer sequence CTCN PAM
accaaaacaaaacaaaacaa

SEQ ID NO: 14645 - RNA, 20 nt, Artificial Sequence
  HTT spacer sequence CTCN PAM
gcugcugcucagggggcuga

SEQ ID NO: 14646 - RNA, 20 nt, Artificial Sequence
  HTT spacer sequence CTCN PAM
gggggcugaggcaagaggau

SEQ ID NO: 14647 - RNA, 20 nt, Artificial Sequence
  HTT spacer sequence CTCN PAM
gcccccugagcagcagcuga

SEQ ID NO: 14648 - RNA, 20 nt, Artificial Sequence
  HTT spacer sequence CTCN PAM
ugccucagcccccugagcag

SEQ ID NO: 14649 - RNA, 20 nt, Artificial Sequence
  HTT spacer sequence CTCN PAM
aacaauccucuugccucagc

SEQ ID NO: 14650 - RNA, 20 nt, Artificial Sequence
  HTT spacer sequence CTCN PAM
ugggcucaaacaauccucuu

SEQ ID NO: 14651 - RNA, 20 nt, Artificial Sequence
  HTT spacer sequence CTCN PAM
aacuccugggcucaaacaau

SEQ ID NO: 14652 - RNA, 20 nt, Artificial Sequence
  HTT spacer sequence CTCN PAM
cugugaccucaaacuccugg

SEQ ID NO: 14653 - RNA, 20 nt, Artificial Sequence
  HTT spacer sequence CTCN PAM
agccuaggcaacagaaugag

SEQ ID NO: 14654 - RNA, 20 nt, Artificial Sequence
  HTT spacer sequence CTCN PAM
uucuguugccuaggcuggag

SEQ ID NO: 14655 - RNA, 20 nt, Artificial Sequence
  HTT spacer sequence CTCN PAM
aaucaugacacaaaaaagga

SEQ ID NO: 14656 - RNA, 20 nt, Artificial Sequence
  HTT spacer sequence CTCN PAM
auuaaauacucaaaucauga

SEQ ID NO: 14657 - RNA, 20 nt, Artificial Sequence
  HTT spacer sequence CTCN PAM
caauuaaauacucaaaucau

SEQ ID NO: 14658 - RNA, 20 nt, Artificial Sequence
  HTT spacer sequence CTCN PAM
uaagaaauguuuacuuaauu

SEQ ID NO: 14659 - RNA, 20 nt, Artificial Sequence
  HTT spacer sequence CTCN PAM
uacuaugaugacgcaaauau

SEQ ID NO: 14660 - RNA, 20 nt, Artificial Sequence
  HTT spacer sequence CTCN PAM
aacuugauuaaguaucucau

SEQ ID NO: 14661 - RNA, 20 nt, Artificial Sequence
  HTT spacer sequence CTCN PAM
uaauucaagaauauagacau

SEQ ID NO: 14662 - RNA, 20 nt, Artificial Sequence
  HTT spacer sequence CTCN PAM
ccuaauucaagaauauagac

SEQ ID NO: 14663 - RNA, 20 nt, Artificial Sequence
  HTT spacer sequence CTCN PAM
ccgccacuggaaaaagcgac

SEQ ID NO: 14664 - RNA, 20 nt, Artificial Sequence
  HTT spacer sequence CTCN PAM
gaugaguuuauccucuucug

SEQ ID NO: 14665 - RNA, 20 nt, Artificial Sequence
  HTT spacer sequence CTCN PAM
ucugagcaaugugaaucagu

SEQ ID NO: 14666 - RNA, 20 nt, Artificial Sequence
  HTT spacer sequence CTCN PAM
ucuggcugggacaugggaua

SEQ ID NO: 14667 - RNA, 20 nt, Artificial Sequence
  HTT spacer sequence CTCN PAM
uuuaagccuuuuugguauuu

SEQ ID NO: 14668 - RNA, 20 nt, Artificial Sequence
  HTT spacer sequence CTCN PAM
augggggaaaaauaccaaaa

SEQ ID NO: 14669 - RNA, 20 nt, Artificial Sequence
  HTT spacer sequence CTCN PAM
caaugggggaaaaauaccaa

SEQ ID NO: 14670 - RNA, 20 nt, Artificial Sequence
  HTT spacer sequence CTCN PAM
ucuguuauagcuggaaaauc

SEQ ID NO: 14671 - RNA, 20 nt, Artificial Sequence
  HTT spacer sequence CTCN PAM
accuucaucugucuuauaau

SEQ ID NO: 14672 - RNA, 20 nt, Artificial Sequence
  HTT spacer sequence CTCN PAM
aggacacccccacuacuuuc

SEQ ID NO: 14673 - RNA, 20 nt, Artificial Sequence
  HTT spacer sequence CTCN PAM
cuucugguggcagccuagcu

SEQ ID NO: 14674 - RNA, 20 nt, Artificial Sequence
  HTT spacer sequence CTCN PAM
ucugguggcagccuagcucu

SEQ ID NO: 14675 - RNA, 20 nt, Artificial Sequence
  HTT spacer sequence CTCN PAM
ugugccuuugaggaaauuac

SEQ ID NO: 14676 - RNA, 20 nt, Artificial Sequence
  HTT spacer sequence CTCN PAM
aaggcacaagagcuaggcug

SEQ ID NO: 14677 - RNA, 20 nt, Artificial Sequence
  HTT spacer sequence CTCN PAM
guggaacauauuugcaaacc

SEQ ID NO: 14678 - RNA, 20 nt, Artificial Sequence
  HTT spacer sequence CTCN PAM
aucuuccaaaucagugguuu

SEQ ID NO: 14679 - RNA, 20 nt, Artificial Sequence
  HTT spacer sequence CTCN PAM
agguaaagaacuuauuuugu

SEQ ID NO: 14680 - RNA, 20 nt, Artificial Sequence
  HTT spacer sequence CTCN PAM
uuuuuucacucuuaaucuca

SEQ ID NO: 14681 - RNA, 20 nt, Artificial Sequence
  HTT spacer sequence CTCN PAM
uaaucucacaucauuguaag

SEQ ID NO: 14682 - RNA, 20 nt, Artificial Sequence
  HTT spacer sequence CTCN PAM
caucauuguaaguuuaugga

SEQ ID NO: 14683 - RNA, 20 nt, Artificial Sequence
  HTT spacer sequence CTCN PAM
ucaaagaaaaagucagaagu

SEQ ID NO: 14684 - RNA, 20 nt, Artificial Sequence
  HTT spacer sequence CTCN PAM
caugugauguagccacaaag

SEQ ID NO: 14685 - RNA, 20 nt, Artificial Sequence
  HTT spacer sequence CTCN PAM
uuaaaucuuuguggcuacau

SEQ ID NO: 14686 - RNA, 20 nt, Artificial Sequence
  HTT spacer sequence CTCN PAM
uuaauguaauucugaagaug

SEQ ID NO: 14687 - RNA, 20 nt, Artificial Sequence
  HTT spacer sequence CTCN PAM
aauaccuaaaagucacuuuc

SEQ ID NO: 14688 - RNA, 20 nt, Artificial Sequence
  HTT spacer sequence CTCN PAM
aaugacacaccagaauuuau

SEQ ID NO: 14689 - RNA, 20 nt, Artificial Sequence
  HTT spacer sequence CTCN PAM
aacuauaccacaaaacauuu

SEQ ID NO: 14690 - RNA, 20 nt, Artificial Sequence
  HTT spacer sequence CTCN PAM
acauucuuuguguuuaauac

SEQ ID NO: 14691 - RNA, 20 nt, Artificial Sequence
  HTT spacer sequence CTCN PAM
acaguauuaaacacaaagaa

SEQ ID NO: 14692 - RNA, 20 nt, Artificial Sequence
  HTT spacer sequence CTCN PAM
aauauaguuuaucaucauau

SEQ ID NO: 14693 - RNA, 20 nt, Artificial Sequence
  HTT spacer sequence CTCN PAM
uaagaauauuuaauuuacuc

SEQ ID NO: 14694 - RNA, 20 nt, Artificial Sequence
  HTT spacer sequence CTCN PAM
aaaaugaaacucauaagaau

SEQ ID NO: 14695 - RNA, 20 nt, Artificial Sequence
  HTT spacer sequence CTCN PAM
uaggagaagaagaagccuug

SEQ ID NO: 14696 - RNA, 20 nt, Artificial Sequence
  HTT spacer sequence CTCN PAM
uaagagcacuuugccuagua

SEQ ID NO: 14697 - RNA, 20 nt, Artificial Sequence
  HTT spacer sequence CTCN PAM
aaggcuucuucuucuccuaa

SEQ ID NO: 14698 - RNA, 20 nt, Artificial Sequence
  HTT spacer sequence CTCN PAM
gaaucgagaucggaugucag

SEQ ID NO: 14699 - RNA, 20 nt, Artificial Sequence
  HTT spacer sequence CTCN PAM
auucagagucauccuccaag

SEQ ID NO: 14700 - RNA, 20 nt, Artificial Sequence
  HTT spacer sequence CTCN PAM
gccuuaacagguaguucuca

SEQ ID NO: 14701 - RNA, 20 nt, Artificial Sequence
  HTT spacer sequence CTCN PAM
cuaguuagccgcuggugugg

SEQ ID NO: 14702 - RNA, 20 nt, Artificial Sequence
  HTT spacer sequence CTCN PAM
ucccccugcaccugguggac

SEQ ID NO: 14703 - RNA, 20 nt, Artificial Sequence
  HTT spacer sequence CTCN PAM
acugcugcccccagucgugc

SEQ ID NO: 14704 - RNA, 20 nt, Artificial Sequence
  HTT spacer sequence CTCN PAM
gaagcuugugugucuguggu

SEQ ID NO: 14705 - RNA, 20 nt, Artificial Sequence
  HTT spacer sequence CTCN PAM
agccauaaaccuaauuuuaa

SEQ ID NO: 14706 - RNA, 20 nt, Artificial Sequence
  HTT spacer sequence CTCN PAM
caaagcccuaugcucaagcc

SEQ ID NO: 14707 - RNA, 20 nt, Artificial Sequence
  HTT spacer sequence CTCN PAM
ugaguuggauggguuaugcu

SEQ ID NO: 14708 - RNA, 20 nt, Artificial Sequence
  HTT spacer sequence CTCN PAM
ugagauguuucgaccugcca

SEQ ID NO: 14709 - RNA, 20 nt, Artificial Sequence
  HTT spacer sequence CTCN PAM
aaaaagaaaaaagauaacua

SEQ ID NO: 14710 - RNA, 20 nt, Artificial Sequence
  HTT spacer sequence CTCN PAM
aucucaaaaaagaaaaaaga

SEQ ID NO: 14711 - RNA, 20 nt, Artificial Sequence
  HTT spacer sequence CTCN PAM
cacugucacccagugcagau

SEQ ID NO: 14712 - RNA, 20 nt, Artificial Sequence
  HTT spacer sequence CTCN PAM
agugacacuggguaucugca

SEQ ID NO: 14713 - RNA, 20 nt, Artificial Sequence
  HTT spacer sequence CTCN PAM
uggugcacugcagccuccgc

SEQ ID NO: 14714 - RNA, 20 nt, Artificial Sequence
  HTT spacer sequence CTCN PAM
gccuucuggguuccagcgau

SEQ ID NO: 14715 - RNA, 20 nt, Artificial Sequence
  HTT spacer sequence CTCN PAM
ugccucagccucccaaguag

SEQ ID NO: 14716 - RNA, 20 nt, Artificial Sequence
  HTT spacer sequence CTCN PAM
gccucccaaguagcugggac

SEQ ID NO: 14717 - RNA, 20 nt, Artificial Sequence
  HTT spacer sequence CTCN PAM
caaguagcugggacuacagg

SEQ ID NO: 14718 - RNA, 20 nt, Artificial Sequence
  HTT spacer sequence CTCN PAM
acaaaaaaauacaaaaauua

SEQ ID NO: 14719 - RNA, 20 nt, Artificial Sequence
  HTT spacer sequence CTCN PAM
ugaccucaagugaucugccu

SEQ ID NO: 14720 - RNA, 20 nt, Artificial Sequence
  HTT spacer sequence CTCN PAM
agugaucugccugccucagc

SEQ ID NO: 14721 - RNA, 20 nt, Artificial Sequence
  HTT spacer sequence CTCN PAM
gccucccacagugccgggau

SEQ ID NO: 14722 - RNA, 20 nt, Artificial Sequence
  HTT spacer sequence CTCN PAM
cacagugccgggauuacagg

SEQ ID NO: 14723 - RNA, 20 nt, Artificial Sequence
  HTT spacer sequence CTCN PAM
uguaaucccggcacuguggg

SEQ ID NO: 14724 - RNA, 20 nt, Artificial Sequence
  HTT spacer sequence CTCN PAM
cuccuguaaucccggcacug

SEQ ID NO: 14725 - RNA, 20 nt, Artificial Sequence
  HTT spacer sequence CTCN PAM
guguacuuuauaaaagauga

SEQ ID NO: 14726 - RNA, 20 nt, Artificial Sequence
  HTT spacer sequence CTCN PAM
ucuuuuauaaaguacacaga

SEQ ID NO: 14727 - RNA, 20 nt, Artificial Sequence
  HTT spacer sequence CTCN PAM
uauaauccaguuauuaguac

SEQ ID NO: 14728 - RNA, 20 nt, Artificial Sequence
  HTT spacer sequence CTCN PAM
aaauauuuaagucuuacuuu

SEQ ID NO: 14729 - RNA, 20 nt, Artificial Sequence
  HTT spacer sequence CTCN PAM
cuaaauauuuaagucuuacu

SEQ ID NO: 14730 - RNA, 20 nt, Artificial Sequence
  HTT spacer sequence CTCN PAM
caugcuuaccgacccaacug

SEQ ID NO: 14731 - RNA, 20 nt, Artificial Sequence
  HTT spacer sequence CTCN PAM
uggggcaguugggucgguaa

SEQ ID NO: 14732 - RNA, 20 nt, Artificial Sequence
  HTT spacer sequence CTCN PAM
uggaagauaaaccuguaaca

SEQ ID NO: 14733 - RNA, 20 nt, Artificial Sequence
  HTT spacer sequence CTCN PAM
aguccuauucuccuggaaga

SEQ ID NO: 14734 - RNA, 20 nt, Artificial Sequence
  HTT spacer sequence CTCN PAM
acuccaguccuauucuccug

SEQ ID NO: 14735 - RNA, 20 nt, Artificial Sequence
  HTT spacer sequence CTCN PAM
ggggugggcuugccuucuuc

SEQ ID NO: 14736 - RNA, 20 nt, Artificial Sequence
  HTT spacer sequence CTCN PAM
cuggggugggcuugccuucu

SEQ ID NO: 14737 - RNA, 20 nt, Artificial Sequence
  HTT spacer sequence CTCN PAM
ucucucuggggugggcuugc

SEQ ID NO: 14738 - RNA, 20 nt, Artificial Sequence
  HTT spacer sequence CTCN PAM
aagcaagcaguggucagaaa

SEQ ID NO: 14739 - RNA, 20 nt, Artificial Sequence
  HTT spacer sequence CTCN PAM
agcuaaggcuuggaguaguc

SEQ ID NO: 14740 - RNA, 20 nt, Artificial Sequence
  HTT spacer sequence CTCN PAM
aagccuuagcuggagcaaua

SEQ ID NO: 14741 - RNA, 20 nt, Artificial Sequence
  HTT spacer sequence CTCN PAM
aaugcuguuucacugcaaaa

SEQ ID NO: 14742 - RNA, 20 nt, Artificial Sequence
  HTT spacer sequence CTCN PAM
cacuacaguacccaccuuau

SEQ ID NO: 14743 - RNA, 20 nt, Artificial Sequence
  HTT spacer sequence CTCN PAM
cacugccucccacuacagua

SEQ ID NO: 14744 - RNA, 20 nt, Artificial Sequence
  HTT spacer sequence CTCN PAM
cacacugccucccacuacag

SEQ ID NO: 14745 - RNA, 20 nt, Artificial Sequence
  HTT spacer sequence CTCN PAM
cgccauuugacaaaugagug

SEQ ID NO: 14746 - RNA, 20 nt, Artificial Sequence
  HTT spacer sequence CTCN PAM
ccauuugacaaaugaguguu

SEQ ID NO: 14747 - RNA, 20 nt, Artificial Sequence
  HTT spacer sequence CTCN PAM
uuugucaaauggcgagagaa

SEQ ID NO: 14748 - RNA, 20 nt, Artificial Sequence
  HTT spacer sequence CTCN PAM
gucuucagccucagugaagg

SEQ ID NO: 14749 - RNA, 20 nt, Artificial Sequence
  HTT spacer sequence CTCN PAM
gugaaggaugagaucagugg

SEQ ID NO: 14750 - RNA, 20 nt, Artificial Sequence
  HTT spacer sequence CTCN PAM
uccuucacugaggcugaaga

SEQ ID NO: 14751 - RNA, 20 nt, Artificial Sequence
  HTT spacer sequence CTCN PAM
acugaucucauccuucacug

SEQ ID NO: 14752 - RNA, 20 nt, Artificial Sequence
  HTT spacer sequence CTCN PAM
ccacugaucucauccuucac

SEQ ID NO: 14753 - RNA, 20 nt, Artificial Sequence
  HTT spacer sequence CTCN PAM
agggucagcaggucaugaca

SEQ ID NO: 14754 - RNA, 20 nt, Artificial Sequence
  HTT spacer sequence CTCN PAM
guggaucuggccagcuguga

SEQ ID NO: 14755 - RNA, 20 nt, Artificial Sequence
  HTT spacer sequence CTCN PAM
gccacugauggggaugagga

SEQ ID NO: 14756 - RNA, 20 nt, Artificial Sequence
  HTT spacer sequence CTCN PAM
uccccaucaguggcagagcu

SEQ ID NO: 14757 - RNA, 20 nt, Artificial Sequence
  HTT spacer sequence CTCN PAM
ucauccccaucaguggcaga

SEQ ID NO: 14758 - RNA, 20 nt, Artificial Sequence
  HTT spacer sequence CTCN PAM
agauauccuccucaucccca

SEQ ID NO: 14759 - RNA, 20 nt, Artificial Sequence
  HTT spacer sequence CTCN PAM
agccaggucagcgccguccc

SEQ ID NO: 14760 - RNA, 20 nt, Artificial Sequence
  HTT spacer sequence CTCN PAM
ucgcccaucagcgacagcuc

SEQ ID NO: 14761 - RNA, 20 nt, Artificial Sequence
  HTT spacer sequence CTCN PAM
cagaccaccaccgaagggcc

SEQ ID NO: 14762 - RNA, 20 nt, Artificial Sequence
  HTT spacer sequence CTCN PAM
gcccacuuacaauuucagaa

SEQ ID NO: 14763 - RNA, 20 nt, Artificial Sequence
  HTT spacer sequence CTCN PAM
aauaaaaaauaaaaaaaaag

SEQ ID NO: 14764 - RNA, 20 nt, Artificial Sequence
  HTT spacer sequence CTCN PAM
gucucaaauaaaaaauaaaa

SEQ ID NO: 14765 - RNA, 20 nt, Artificial Sequence
  HTT spacer sequence CTCN PAM
cuccauagugcaguggaggc

SEQ ID NO: 14766 - RNA, 20 nt, Artificial Sequence
  HTT spacer sequence CTCN PAM
auagugcaguggaggccggg

SEQ ID NO: 14767 - RNA, 20 nt, Artificial Sequence
  HTT spacer sequence CTCN PAM
acugcacuauggagugagac

SEQ ID NO: 14768 - RNA, 20 nt, Artificial Sequence
  HTT spacer sequence CTCN PAM
ugccuguaaucccagcacuu

SEQ ID NO: 14769 - RNA, 20 nt, Artificial Sequence
  HTT spacer sequence CTCN PAM
caaagugcugggauuacagg

SEQ ID NO: 14770 - RNA, 20 nt, Artificial Sequence
  HTT spacer sequence CTCN PAM
gucucccaaagugcugggau

SEQ ID NO: 14771 - RNA, 20 nt, Artificial Sequence
  HTT spacer sequence CTCN PAM
agugauccgccugccucagu

SEQ ID NO: 14772 - RNA, 20 nt, Artificial Sequence
  HTT spacer sequence CTCN PAM
ugaccucaagugauccgccu

SEQ ID NO: 14773 - RNA, 20 nt, Artificial Sequence
  HTT spacer sequence CTCN PAM
aacuccugaccucaagugau

SEQ ID NO: 14774 - RNA, 20 nt, Artificial Sequence
  HTT spacer sequence CTCN PAM
acuaaaaauacaaaaauuag

SEQ ID NO: 14775 - RNA, 20 nt, Artificial Sequence
  HTT spacer sequence CTCN PAM
cuaacagcugggacuacaga

SEQ ID NO: 14776 - RNA, 20 nt, Artificial Sequence
  HTT spacer sequence CTCN PAM
gccucccuaacagcugggac

SEQ ID NO: 14777 - RNA, 20 nt, Artificial Sequence
  HTT spacer sequence CTCN PAM
ugccucagccucccuaacag

SEQ ID NO: 14778 - RNA, 20 nt, Artificial Sequence
  HTT spacer sequence CTCN PAM
agcaauucuccugccucagc

SEQ ID NO: 14779 - RNA, 20 nt, Artificial Sequence
  HTT spacer sequence CTCN PAM
caggcucaagcaauucuccu

SEQ ID NO: 14780 - RNA, 20 nt, Artificial Sequence
  HTT spacer sequence CTCN PAM
gccucccaggcucaagcaau

SEQ ID NO: 14781 - RNA, 20 nt, Artificial Sequence
  HTT spacer sequence CTCN PAM
uugcaaccucugccucccag

SEQ ID NO: 14782 - RNA, 20 nt, Artificial Sequence
  HTT spacer sequence CTCN PAM
gcucauugcaaccucugccu

SEQ ID NO: 14783 - RNA, 20 nt, Artificial Sequence
  HTT spacer sequence CTCN PAM
agcccgggcaacagagcaag

SEQ ID NO: 14784 - RNA, 20 nt, Artificial Sequence
  HTT spacer sequence CTCN PAM
guugcccgggcuggagugca

SEQ ID NO: 14785 - RNA, 20 nt, Artificial Sequence
  HTT spacer sequence CTCN PAM
auuucaaaaaaaauaaaaaa

SEQ ID NO: 14786 - RNA, 20 nt, Artificial Sequence
  HTT spacer sequence CTCN PAM
uucucagcccacugcaacuu

SEQ ID NO: 14787 - RNA, 20 nt, Artificial Sequence
  HTT spacer sequence CTCN PAM
gcccacugcaacuucugccu

SEQ ID NO: 14788 - RNA, 20 nt, Artificial Sequence
  HTT spacer sequence CTCN PAM
caggcucgagcgauucuccc

SEQ ID NO: 14789 - RNA, 20 nt, Artificial Sequence
  HTT spacer sequence CTCN PAM
agcgauucucccgccucagc

SEQ ID NO: 14790 - RNA, 20 nt, Artificial Sequence
  HTT spacer sequence CTCN PAM
agccugggaggcagaaguug

SEQ ID NO: 14791 - RNA, 20 nt, Artificial Sequence
  HTT spacer sequence CTCN PAM
cgccucagccuccugaguag

SEQ ID NO: 14792 - RNA, 20 nt, Artificial Sequence
  HTT spacer sequence CTCN PAM
gccuccugaguaggugggau

SEQ ID NO: 14793 - RNA, 20 nt, Artificial Sequence
  HTT spacer sequence CTCN PAM
ugaguaggugggauuacagg

SEQ ID NO: 14794 - RNA, 20 nt, Artificial Sequence
  HTT spacer sequence CTCN PAM
ggaggcugaggcgggagaau

SEQ ID NO: 14795 - RNA, 20 nt, Artificial Sequence
  HTT spacer sequence CTCN PAM
gcuaauguuuguauuuucag

SEQ ID NO: 14796 - RNA, 20 nt, Artificial Sequence
  HTT spacer sequence CTCN PAM
acugaaaauacaaacauuag

SEQ ID NO: 14797 - RNA, 20 nt, Artificial Sequence
  HTT spacer sequence CTCN PAM
aacuccugaccuuagaugau

SEQ ID NO: 14798 - RNA, 20 nt, Artificial Sequence
  HTT spacer sequence CTCN PAM
ugaccuuagaugauccaccc

SEQ ID NO: 14799 - RNA, 20 nt, Artificial Sequence
  HTT spacer sequence CTCN PAM
uaaaguauugggauuauagu

SEQ ID NO: 14800 - RNA, 20 nt, Artificial Sequence
  HTT spacer sequence CTCN PAM
caacuauaaucccaauacuu

SEQ ID NO: 14801 - RNA, 20 nt, Artificial Sequence
  HTT spacer sequence CTCN PAM
aaagauggcagguggcaggg

SEQ ID NO: 14802 - RNA, 20 nt, Artificial Sequence
  HTT spacer sequence CTCN PAM
agggaagaacucaaaagaug

SEQ ID NO: 14803 - RNA, 20 nt, Artificial Sequence
  HTT spacer sequence CTCN PAM
ugcuuguucucuuguuaucu

SEQ ID NO: 14804 - RNA, 20 nt, Artificial Sequence
  HTT spacer sequence CTCN PAM
uguuaucuaauaccccuauu

SEQ ID NO: 14805 - RNA, 20 nt, Artificial Sequence
  HTT spacer sequence CTCN PAM
auuaaugaucuaagcugcgc

SEQ ID NO: 14806 - RNA, 20 nt, Artificial Sequence
  HTT spacer sequence CTCN PAM
ccauuaaugaucuaagcugc

SEQ ID NO: 14807 - RNA, 20 nt, Artificial Sequence
  HTT spacer sequence CTCN PAM
ucugauaccuucacugaagg

SEQ ID NO: 14808 - RNA, 20 nt, Artificial Sequence
  HTT spacer sequence CTCN PAM
guguucaacacaaaagacac

SEQ ID NO: 14809 - RNA, 20 nt, Artificial Sequence
  HTT spacer sequence CTCN PAM
gcuaaaauugagugcauuuu

SEQ ID NO: 14810 - RNA, 20 nt, Artificial Sequence
  HTT spacer sequence CTCN PAM
auuuuagcagaguucauaua

SEQ ID NO: 14811 - RNA, 20 nt, Artificial Sequence
  HTT spacer sequence CTCN PAM
uuaaggauuuuuaaaaauaa

SEQ ID NO: 14812 - RNA, 20 nt, Artificial Sequence
  HTT spacer sequence CTCN PAM
ucucuaaguuaguggacaaa

SEQ ID NO: 14813 - RNA, 20 nt, Artificial Sequence
  HTT spacer sequence CTCN PAM
aaguuaguggacaaaaaacc

SEQ ID NO: 14814 - RNA, 20 nt, Artificial Sequence
  HTT spacer sequence CTCN PAM
uggauagucuaauaauguuu

SEQ ID NO: 14815 - RNA, 20 nt, Artificial Sequence
  HTT spacer sequence CTCN PAM
acauggacuuguagcaaaca

SEQ ID NO: 14816 - RNA, 20 nt, Artificial Sequence
  HTT spacer sequence CTCN PAM
auuuuauuuucaguuuuaaa

SEQ ID NO: 14817 - RNA, 20 nt, Artificial Sequence
  HTT spacer sequence CTCN PAM
guaaccuuuugaucauguaa

SEQ ID NO: 14818 - RNA, 20 nt, Artificial Sequence
  HTT spacer sequence CTCN PAM
guucccauugaacucuauuc

SEQ ID NO: 14819 - RNA, 20 nt, Artificial Sequence
  HTT spacer sequence CTCN PAM
auuccuccuuucccgccaag

SEQ ID NO: 14820 - RNA, 20 nt, Artificial Sequence
  HTT spacer sequence CTCN PAM
uuucccgccaagucccuggc

SEQ ID NO: 14821 - RNA, 20 nt, Artificial Sequence
  HTT spacer sequence CTCN PAM
uauacuuuaggagucacaca

SEQ ID NO: 14822 - RNA, 20 nt, Artificial Sequence
  HTT spacer sequence CTCN PAM
uaaaguauaugagaacccaa

SEQ ID NO: 14823 - RNA, 20 nt, Artificial Sequence
  HTT spacer sequence CTCN PAM
ugcauguuguagccuauguu

SEQ ID NO: 14824 - RNA, 20 nt, Artificial Sequence
  HTT spacer sequence CTCN PAM
guccauggacacuuguauug

SEQ ID NO: 14825 - RNA, 20 nt, Artificial Sequence
  HTT spacer sequence CTCN PAM
uggagacucugcuuuccauu

SEQ ID NO: 14826 - RNA, 20 nt, Artificial Sequence
  HTT spacer sequence CTCN PAM
aggagcuaucuguacaccca

SEQ ID NO: 14827 - RNA, 20 nt, Artificial Sequence
  HTT spacer sequence CTCN PAM
gcuuuccauuuuuuuggcua

SEQ ID NO: 14828 - RNA, 20 nt, Artificial Sequence
  HTT spacer sequence CTCN PAM
auuucuggguauuuagccaa

SEQ ID NO: 14829 - RNA, 20 nt, Artificial Sequence
  HTT spacer sequence CTCN PAM
augauaugaauguuuuaaau

SEQ ID NO: 14830 - RNA, 20 nt, Artificial Sequence
  HTT spacer sequence CTCN PAM
uaaauugcaaagacuaaauc

SEQ ID NO: 14831 - RNA, 20 nt, Artificial Sequence
  HTT spacer sequence CTCN PAM
uauuuccaacuugcuguaaa

SEQ ID NO: 14832 - RNA, 20 nt, Artificial Sequence
  HTT spacer sequence CTCN PAM
aaaaaaauuccaauguggac

SEQ ID NO: 14833 - RNA, 20 nt, Artificial Sequence
  HTT spacer sequence CTCN PAM
aaaaacuccaaaaaaauucc

SEQ ID NO: 14834 - RNA, 20 nt, Artificial Sequence
  HTT spacer sequence CTCN PAM
auuagcucuaaaaacuccaa

SEQ ID NO: 14835 - RNA, 20 nt, Artificial Sequence
  HTT spacer sequence CTCN PAM
uucccacuacauuaugaaaa

SEQ ID NO: 14836 - RNA, 20 nt, Artificial Sequence
  HTT spacer sequence CTCN PAM
uagcaguuuccaugcgugca

SEQ ID NO: 14837 - RNA, 20 nt, Artificial Sequence
  HTT spacer sequence CTCN PAM
ucugucauuuauuucaaggc

SEQ ID NO: 14838 - RNA, 20 nt, Artificial Sequence
  HTT spacer sequence CTCN PAM
uuccucauugcacuuccaug

SEQ ID NO: 14839 - RNA, 20 nt, Artificial Sequence
  HTT spacer sequence CTCN PAM
uugcacuuccauguuggagg

SEQ ID NO: 14840 - RNA, 20 nt, Artificial Sequence
  HTT spacer sequence CTCN PAM
aacauggaagugcaaugagg

SEQ ID NO: 14841 - RNA, 20 nt, Artificial Sequence
  HTT spacer sequence CTCN PAM
uggugaucacacuucaaaau

SEQ ID NO: 14842 - RNA, 20 nt, Artificial Sequence
  HTT spacer sequence CTCN PAM
cagccccccuugaaccguuu

SEQ ID NO: 14843 - RNA, 20 nt, Artificial Sequence
  HTT spacer sequence CTCN PAM
ucuucauccuggggcugucc

SEQ ID NO: 14844 - RNA, 20 nt, Artificial Sequence
  HTT spacer sequence CTCN PAM
gaggccuucaggaacucuuc

SEQ ID NO: 14845 - RNA, 20 nt, Artificial Sequence
  HTT spacer sequence CTCN PAM
gaggcuucaucaggaagaau

SEQ ID NO: 14846 - RNA, 20 nt, Artificial Sequence
  HTT spacer sequence CTCN PAM
uccauggguauguggacuac

SEQ ID NO: 14847 - RNA, 20 nt, Artificial Sequence
  HTT spacer sequence CTCN PAM
gaaaacaguaucaaaggacu

SEQ ID NO: 14848 - RNA, 20 nt, Artificial Sequence
  HTT spacer sequence CTCN PAM
auuggucauuuucaucagcu

SEQ ID NO: 14849 - RNA, 20 nt, Artificial Sequence
  HTT spacer sequence CTCN PAM
aaaguauaagauuuagauca

SEQ ID NO: 14850 - RNA, 20 nt, Artificial Sequence
  HTT spacer sequence CTCN PAM
guuuuuaaagcccuucaaca

SEQ ID NO: 14851 - RNA, 20 nt, Artificial Sequence
  HTT spacer sequence CTCN PAM
uguuuuucaauaaaugugcc

SEQ ID NO: 14852 - RNA, 20 nt, Artificial Sequence
  HTT spacer sequence CTCN PAM
acacaaauuuaucaacacug

SEQ ID NO: 14853 - RNA, 20 nt, Artificial Sequence
  HTT spacer sequence CTCN PAM
caacacaaauuuaucaacac

SEQ ID NO: 14854 - RNA, 20 nt, Artificial Sequence
  HTT spacer sequence CTCN PAM
ccuuguuuucuugaucaccc

SEQ ID NO: 14855 - RNA, 20 nt, Artificial Sequence
  HTT spacer sequence CTCN PAM
agccuaugucccucaccuug

SEQ ID NO: 14856 - RNA, 20 nt, Artificial Sequence
  HTT spacer sequence CTCN PAM
gaaacaccaagucgucucaa

SEQ ID NO: 14857 - RNA, 20 nt, Artificial Sequence
  HTT spacer sequence CTCN PAM
cacaagcucagaaacaccaa

SEQ ID NO: 14858 - RNA, 20 nt, Artificial Sequence
  HTT spacer sequence CTCN PAM
ucccaggccuguuguuuucu

SEQ ID NO: 14859 - RNA, 20 nt, Artificial Sequence
  HTT spacer sequence CTCN PAM
aggcuguggguaguaccugg

SEQ ID NO: 14860 - RNA, 20 nt, Artificial Sequence
  HTT spacer sequence CTCN PAM
ggcaauucucaaggcugugg

SEQ ID NO: 14861 - RNA, 20 nt, Artificial Sequence
  HTT spacer sequence CTCN PAM
uuugagagugugccccagac

SEQ ID NO: 14862 - RNA, 20 nt, Artificial Sequence
  HTT spacer sequence CTCN PAM
aaggaggcagaacucaggca

SEQ ID NO: 14863 - RNA, 20 nt, Artificial Sequence
  HTT spacer sequence CTCN PAM
caaaggaggcagaacucagg

SEQ ID NO: 14864 - RNA, 20 nt, Artificial Sequence
  HTT spacer sequence CTCN PAM
cuucauauuaucuuuuuaca

SEQ ID NO: 14865 - RNA, 20 nt, Artificial Sequence
  HTT spacer sequence CTCN PAM
ucauauuaucuuuuuacaug

SEQ ID NO: 14866 - RNA, 20 nt, Artificial Sequence
  HTT spacer sequence CTCN PAM
aggacaaggaauagcguuuc

SEQ ID NO: 14867 - RNA, 20 nt, Artificial Sequence
  HTT spacer sequence CTCN PAM
cuaucuaccaggcccacuuc

SEQ ID NO: 14868 - RNA, 20 nt, Artificial Sequence
  HTT spacer sequence CTCN PAM
uagauuugggcuuccccagg

SEQ ID NO: 14869 - RNA, 20 nt, Artificial Sequence
  HTT spacer sequence CTCN PAM
cugcaugcugcauuuauccc

SEQ ID NO: 14870 - RNA, 20 nt, Artificial Sequence
  HTT spacer sequence CTCN PAM
gacuugucuguuucugcuug

SEQ ID NO: 14871 - RNA, 20 nt, Artificial Sequence
  HTT spacer sequence CTCN PAM
gugaggucaggugugcauau

SEQ ID NO: 14872 - RNA, 20 nt, Artificial Sequence
  HTT spacer sequence CTCN PAM
cagagaccauggccaagcag

SEQ ID NO: 14873 - RNA, 20 nt, Artificial Sequence
  HTT spacer sequence CTCN PAM
uuauccccagcaccuggcuu

SEQ ID NO: 14874 - RNA, 20 nt, Artificial Sequence
  HTT spacer sequence CTCN PAM
ggaacuaucuguugaaugaa

SEQ ID NO: 14875 - RNA, 20 nt, Artificial Sequence
  HTT spacer sequence CTCN PAM
acaauacauucaugcauuag

SEQ ID NO: 14876 - RNA, 20 nt, Artificial Sequence
  HTT spacer sequence CTCN PAM
uacucaacaauacauucaug

SEQ ID NO: 14877 - RNA, 20 nt, Artificial Sequence
  HTT spacer sequence CTCN PAM
uuucuagccuugccgcauca

SEQ ID NO: 14878 - RNA, 20 nt, Artificial Sequence
  HTT spacer sequence CTCN PAM
gcaccucuuguccauugugu

SEQ ID NO: 14879 - RNA, 20 nt, Artificial Sequence
  HTT spacer sequence CTCN PAM
uguccauuguguccgccuuu

SEQ ID NO: 14880 - RNA, 20 nt, Artificial Sequence
  HTT spacer sequence CTCN PAM
ccauuuuuucccccuguuag

SEQ ID NO: 14881 - RNA, 20 nt, Artificial Sequence
  HTT spacer sequence CTCN PAM
gaaaccuaguuauuuccuuc

SEQ ID NO: 14882 - RNA, 20 nt, Artificial Sequence
  HTT spacer sequence CTCN PAM
gcugcacgcaaggcaaaaac

SEQ ID NO: 14883 - RNA, 20 nt, Artificial Sequence
  HTT spacer sequence CTCN PAM
gauucuacuuccucugcugc

SEQ ID NO: 14884 - RNA, 20 nt, Artificial Sequence
  HTT spacer sequence CTCN PAM
uccucagauucuacuuccuc

SEQ ID NO: 14885 - RNA, 20 nt, Artificial Sequence
  HTT spacer sequence CTCN PAM
gcuagugaaaaccaaacuca

SEQ ID NO: 14886 - RNA, 20 nt, Artificial Sequence
  HTT spacer sequence CTCN PAM
ccucggcuagugaaaaccaa

SEQ ID NO: 14887 - RNA, 20 nt, Artificial Sequence
  HTT spacer sequence CTCN PAM
cuccccucggcuagugaaaa

SEQ ID NO: 14888 - RNA, 20 nt, Artificial Sequence
  HTT spacer sequence CTCN PAM
caucauuuccucccuccccu

SEQ ID NO: 14889 - RNA, 20 nt, Artificial Sequence
  HTT spacer sequence CTCN PAM
aacaacagauuguuuucaaa

SEQ ID NO: 14890 - RNA, 20 nt, Artificial Sequence
  HTT spacer sequence CTCN PAM
caucccuguccggaaccagc

SEQ ID NO: 14891 - RNA, 20 nt, Artificial Sequence
  HTT spacer sequence CTCN PAM
gcugugugggagcagcugug

SEQ ID NO: 14892 - RNA, 20 nt, Artificial Sequence
  HTT spacer sequence CTCN PAM
cacacagcugagggccaggg

SEQ ID NO: 14893 - RNA, 20 nt, Artificial Sequence
  HTT spacer sequence CTCN PAM
acccggaaucuuucuucagc

SEQ ID NO: 14894 - RNA, 20 nt, Artificial Sequence
  HTT spacer sequence CTCN PAM
auaaaguuccucuugacacc

SEQ ID NO: 14895 - RNA, 20 nt, Artificial Sequence
  HTT spacer sequence CTCN PAM
ugacaccacggaauacccug

SEQ ID NO: 14896 - RNA, 20 nt, Artificial Sequence
  HTT spacer sequence CTCN PAM
gauuuaaucauuauuguaaa

SEQ ID NO: 14897 - RNA, 20 nt, Artificial Sequence
  HTT spacer sequence CTCN PAM
aaaacuaaaauagucaauac

SEQ ID NO: 14898 - RNA, 20 nt, Artificial Sequence
  HTT spacer sequence CTCN PAM
aaacacuuacugcucuaaaa

SEQ ID NO: 14899 - RNA, 20 nt, Artificial Sequence
  HTT spacer sequence CTCN PAM
ucagaaaacacaugaauagu

SEQ ID NO: 14900 - RNA, 20 nt, Artificial Sequence
  HTT spacer sequence CTCN PAM
auggguuucaucuaaaggga

SEQ ID NO: 14901 - RNA, 20 nt, Artificial Sequence
  HTT spacer sequence CTCN PAM
ucuauggguuucaucuaaag

SEQ ID NO: 14902 - RNA, 20 nt, Artificial Sequence
  HTT spacer sequence CTCN PAM
gcacguaagagccaacauau

SEQ ID NO: 14903 - RNA, 20 nt, Artificial Sequence
  HTT spacer sequence CTCN PAM
uacgugcugagguuucuacu

SEQ ID NO: 14904 - RNA, 20 nt, Artificial Sequence
  HTT spacer sequence CTCN PAM
gcgccacugcgaccaggcac

SEQ ID NO: 14905 - RNA, 20 nt, Artificial Sequence
  HTT spacer sequence CTCN PAM
gccaggccaggcauucacac

SEQ ID NO: 14906 - RNA, 20 nt, Artificial Sequence
  HTT spacer sequence CTCN PAM
gggugagugggaaccaggac

SEQ ID NO: 14907 - RNA, 20 nt, Artificial Sequence
  HTT spacer sequence CTCN PAM
cccugagugugaaugccugg

SEQ ID NO: 14908 - RNA, 20 nt, Artificial Sequence
  HTT spacer sequence CTCN PAM
gccaguccugguucccacuc

SEQ ID NO: 14909 - RNA, 20 nt, Artificial Sequence
  HTT spacer sequence CTCN PAM
aucgcgcccaugcuuacuau

SEQ ID NO: 14910 - RNA, 20 nt, Artificial Sequence
  HTT spacer sequence CTCN PAM
auaguaagcaugggcgcgau

SEQ ID NO: 14911 - RNA, 20 nt, Artificial Sequence
  HTT spacer sequence CTCN PAM
uucucucuuuuucuuugggu

SEQ ID NO: 14912 - RNA, 20 nt, Artificial Sequence
  HTT spacer sequence CTCN PAM
cuuuuucuuugggugagagg

SEQ ID NO: 14913 - RNA, 20 nt, Artificial Sequence
  HTT spacer sequence CTCN PAM
uuuucuuugggugagagggu

SEQ ID NO: 14914 - RNA, 20 nt, Artificial Sequence
  HTT spacer sequence CTCN PAM
cccaaagaaaaagagagaac

SEQ ID NO: 14915 - RNA, 20 nt, Artificial Sequence
  HTT spacer sequence CTCN PAM
cacccaaagaaaaagagaga

SEQ ID NO: 14916 - RNA, 20 nt, Artificial Sequence
  HTT spacer sequence CTCN PAM
uauaaauucaaaaacacaag

SEQ ID NO: 14917 - RNA, 20 nt, Artificial Sequence
  HTT spacer sequence CTCN PAM
auaccacagacuuucuggau

SEQ ID NO: 14918 - RNA, 20 nt, Artificial Sequence
  HTT spacer sequence CTCN PAM
aauucuuaaauccugaaacu

SEQ ID NO: 14919 - RNA, 20 nt, Artificial Sequence
  HTT spacer sequence CTCN PAM
ucacaccucuuuuucucuuu

SEQ ID NO: 14920 - RNA, 20 nt, Artificial Sequence
  HTT spacer sequence CTCN PAM
uuuucucuuuccugagaauu

SEQ ID NO: 14921 - RNA, 20 nt, Artificial Sequence
  HTT spacer sequence CTCN PAM
uuccugagaauuaagcuuuu

SEQ ID NO: 14922 - RNA, 20 nt, Artificial Sequence
  HTT spacer sequence CTCN PAM
ggaaagagaaaaagaggugu

SEQ ID NO: 14923 - RNA, 20 nt, Artificial Sequence
  HTT spacer sequence CTCN PAM
aaacaaaagcuuaauucuca

SEQ ID NO: 14924 - RNA, 20 nt, Artificial Sequence
  HTT spacer sequence CTCN PAM
gccauggaacaauucccuac

SEQ ID NO: 14925 - RNA, 20 nt, Artificial Sequence
  HTT spacer sequence CTCN PAM
acagaggaacaguaugucuc

SEQ ID NO: 14926 - RNA, 20 nt, Artificial Sequence
  HTT spacer sequence CTCN PAM
guggagauaaauugcucagc

SEQ ID NO: 14927 - RNA, 20 nt, Artificial Sequence
  HTT spacer sequence CTCN PAM
gacaucuugaacuacaucga

SEQ ID NO: 14928 - RNA, 20 nt, Artificial Sequence
  HTT spacer sequence CTCN PAM
augaucgauguaguucaaga

SEQ ID NO: 14929 - RNA, 20 nt, Artificial Sequence
  HTT spacer sequence CTCN PAM
aaccugugggucuccaugau

SEQ ID NO: 14930 - RNA, 20 nt, Artificial Sequence
  HTT spacer sequence CTCN PAM
ucgaaccugugggucuccau

SEQ ID NO: 14931 - RNA, 20 nt, Artificial Sequence
  HTT spacer sequence CTCN PAM
gugggacccucaucugcucc

SEQ ID NO: 14932 - RNA, 20 nt, Artificial Sequence
  HTT spacer sequence CTCN PAM
ucugcuccauccucagcagg

SEQ ID NO: 14933 - RNA, 20 nt, Artificial Sequence
  HTT spacer sequence CTCN PAM
auccucagcaggucccgcuu

SEQ ID NO: 14934 - RNA, 20 nt, Artificial Sequence
  HTT spacer sequence CTCN PAM
gcaggucccgcuuccacgug

SEQ ID NO: 14935 - RNA, 20 nt, Artificial Sequence
  HTT spacer sequence CTCN PAM
cacguggaagcgggaccugc

SEQ ID NO: 14936 - RNA, 20 nt, Artificial Sequence
  HTT spacer sequence CTCN PAM
cagguaacggccaguuuuuc

SEQ ID NO: 14937 - RNA, 20 nt, Artificial Sequence
  HTT spacer sequence CTCN PAM
uccuucaguguuuuccgcag

SEQ ID NO: 14938 - RNA, 20 nt, Artificial Sequence
  HTT spacer sequence CTCN PAM
cagcuguacaagcuaacuug

SEQ ID NO: 14939 - RNA, 20 nt, Artificial Sequence
  HTT spacer sequence CTCN PAM
cccucacagcuguacaagcu

SEQ ID NO: 14940 - RNA, 20 nt, Artificial Sequence
  HTT spacer sequence CTCN PAM
aauuuuaauuguagcaauga

SEQ ID NO: 14941 - RNA, 20 nt, Artificial Sequence
  HTT spacer sequence CTCN PAM
aaagcuguaaccaguaauac

SEQ ID NO: 14942 - RNA, 20 nt, Artificial Sequence
  HTT spacer sequence CTCN PAM
cagcuuuagaaagaaaacgu

SEQ ID NO: 14943 - RNA, 20 nt, Artificial Sequence
  HTT spacer sequence CTCN PAM
gcuuuagaaagaaaacguug

SEQ ID NO: 14944 - RNA, 20 nt, Artificial Sequence
  HTT spacer sequence CTCN PAM
gaauauuuguuugaaauaga

SEQ ID NO: 14945 - RNA, 20 nt, Artificial Sequence
  HTT spacer sequence CTCN PAM
uccuaaaggauauauuuaga

SEQ ID NO: 14946 - RNA, 20 nt, Artificial Sequence
  HTT spacer sequence CTCN PAM
caccuguaaucugaccacuu

SEQ ID NO: 14947 - RNA, 20 nt, Artificial Sequence
  HTT spacer sequence CTCN PAM
caaaguggucagauuacagg

SEQ ID NO: 14948 - RNA, 20 nt, Artificial Sequence
  HTT spacer sequence CTCN PAM
agcaauccuuccaccuuggc

SEQ ID NO: 14949 - RNA, 20 nt, Artificial Sequence
  HTT spacer sequence CTCN PAM
ugggcucaagcaauccuucc

SEQ ID NO: 14950 - RNA, 20 nt, Artificial Sequence
  HTT spacer sequence CTCN PAM
gcuacucgggaagcugaggu

SEQ ID NO: 14951 - RNA, 20 nt, Artificial Sequence
  HTT spacer sequence CTCN PAM
ggaagcugagguggaggggg

SEQ ID NO: 14952 - RNA, 20 nt, Artificial Sequence
  HTT spacer sequence CTCN PAM
gcuucccgaguagcugagac

SEQ ID NO: 14953 - RNA, 20 nt, Artificial Sequence
  HTT spacer sequence CTCN PAM
accucagcuucccgaguagc

SEQ ID NO: 14954 - RNA, 20 nt, Artificial Sequence
  HTT spacer sequence CTCN PAM
agcaauccccccuccaccuc

SEQ ID NO: 14955 - RNA, 20 nt, Artificial Sequence
  HTT spacer sequence CTCN PAM
ggggcucaagcaaucccccc

SEQ ID NO: 14956 - RNA, 20 nt, Artificial Sequence
  HTT spacer sequence CTCN PAM
agccugggcaacagagugag

SEQ ID NO: 14957 - RNA, 20 nt, Artificial Sequence
  HTT spacer sequence CTCN PAM
guugcccaggcuagagggca

SEQ ID NO: 14958 - RNA, 20 nt, Artificial Sequence
  HTT spacer sequence CTCN PAM
cucuguugcccaggcuagag

SEQ ID NO: 14959 - RNA, 20 nt, Artificial Sequence
  HTT spacer sequence CTCN PAM
aaaauaauaguaauaauaau

SEQ ID NO: 14960 - RNA, 20 nt, Artificial Sequence
  HTT spacer sequence CTCN PAM
uaccauacuaugggccuagc

SEQ ID NO: 14961 - RNA, 20 nt, Artificial Sequence
  HTT spacer sequence CTCN PAM
cuuuaacucuuaccauacua

SEQ ID NO: 14962 - RNA, 20 nt, Artificial Sequence
  HTT spacer sequence CTCN PAM
accucuguuucuguauaaag

SEQ ID NO: 14963 - RNA, 20 nt, Artificial Sequence
  HTT spacer sequence CTCN PAM
guuucuguauaaaguggaau

SEQ ID NO: 14964 - RNA, 20 nt, Artificial Sequence
  HTT spacer sequence CTCN PAM
auucuuuaagugauagcaug

SEQ ID NO: 14965 - RNA, 20 nt, Artificial Sequence
  HTT spacer sequence CTCN PAM
uaagucacaacuggccaguc

SEQ ID NO: 14966 - RNA, 20 nt, Artificial Sequence
  HTT spacer sequence CTCN PAM
uguugacuggccaguuguga

SEQ ID NO: 14967 - RNA, 20 nt, Artificial Sequence
  HTT spacer sequence CTCN PAM
cccuuuuaaaaugucaugcc

SEQ ID NO: 14968 - RNA, 20 nt, Artificial Sequence
  HTT spacer sequence CTCN PAM
cuaguuuccagguuuucagu

SEQ ID NO: 14969 - RNA, 20 nt, Artificial Sequence
  HTT spacer sequence CTCN PAM
aguuuccagguuuucaguca

SEQ ID NO: 14970 - RNA, 20 nt, Artificial Sequence
  HTT spacer sequence CTCN PAM
aaaaagacacaacugacuga

SEQ ID NO: 14971 - RNA, 20 nt, Artificial Sequence
  HTT spacer sequence CTCN PAM
uagcaugcuuccuucugcuc

SEQ ID NO: 14972 - RNA, 20 nt, Artificial Sequence
  HTT spacer sequence CTCN PAM
aucuuguggcuagcuggggg

SEQ ID NO: 14973 - RNA, 20 nt, Artificial Sequence
  HTT spacer sequence CTCN PAM
ccugcagccccaagcaccca

SEQ ID NO: 14974 - RNA, 20 nt, Artificial Sequence
  HTT spacer sequence CTCN PAM
cgugcuguggaguacauagu

SEQ ID NO: 14975 - RNA, 20 nt, Artificial Sequence
  HTT spacer sequence CTCN PAM
ugcuguggaguacauaguga

SEQ ID NO: 14976 - RNA, 20 nt, Artificial Sequence
  HTT spacer sequence CTCN PAM
acagcacgagagaacagaac

SEQ ID NO: 14977 - RNA, 20 nt, Artificial Sequence
  HTT spacer sequence CTCN PAM
gacccagggguaggaacaag

SEQ ID NO: 14978 - RNA, 20 nt, Artificial Sequence
  HTT spacer sequence CTCN PAM
guaacugaucaauguuugug

SEQ ID NO: 14979 - RNA, 20 nt, Artificial Sequence
  HTT spacer sequence CTCN PAM
aacagcaacuucacaaacau

SEQ ID NO: 14980 - RNA, 20 nt, Artificial Sequence
  HTT spacer sequence CTCN PAM
caaacagcaacuucacaaac

SEQ ID NO: 14981 - RNA, 20 nt, Artificial Sequence
  HTT spacer sequence CTCN PAM
guaaauacaagcuuaaaagu

SEQ ID NO: 14982 - RNA, 20 nt, Artificial Sequence
  HTT spacer sequence CTCN PAM
agaacauugauuaagaauac

SEQ ID NO: 14983 - RNA, 20 nt, Artificial Sequence
  HTT spacer sequence CTCN PAM
caagaacauugauuaagaau

SEQ ID NO: 14984 - RNA, 20 nt, Artificial Sequence
  HTT spacer sequence CTCN PAM
ucaacacacaauguucuggg

SEQ ID NO: 14985 - RNA, 20 nt, Artificial Sequence
  HTT spacer sequence CTCN PAM
aaccgucaagacgcggguac

SEQ ID NO: 14986 - RNA, 20 nt, Artificial Sequence
  HTT spacer sequence CTCN PAM
guacccgcgucuugacgguu

SEQ ID NO: 14987 - RNA, 20 nt, Artificial Sequence
  HTT spacer sequence CTCN PAM
ugccuuggaccuuguguucc

SEQ ID NO: 14988 - RNA, 20 nt, Artificial Sequence
  HTT spacer sequence CTCN PAM
ugacacaguucuggaacaca

SEQ ID NO: 14989 - RNA, 20 nt, Artificial Sequence
  HTT spacer sequence CTCN PAM
gcagcagcagcuacagugag

SEQ ID NO: 14990 - RNA, 20 nt, Artificial Sequence
  HTT spacer sequence CTCN PAM
cuguagcugcugcugcagag

SEQ ID NO: 14991 - RNA, 20 nt, Artificial Sequence
  HTT spacer sequence CTCN PAM
gaggaacaguuccuauuggc

SEQ ID NO: 14992 - RNA, 20 nt, Artificial Sequence
  HTT spacer sequence CTCN PAM
gagucagcacaucgaugauc

SEQ ID NO: 14993 - RNA, 20 nt, Artificial Sequence
  HTT spacer sequence CTCN PAM
ccagccaauaggaacuguuc

SEQ ID NO: 14994 - RNA, 20 nt, Artificial Sequence
  HTT spacer sequence CTCN PAM
guccucaccagccaauagga

SEQ ID NO: 14995 - RNA, 20 nt, Artificial Sequence
  HTT spacer sequence CTCN PAM
gcaaggguuuccagaagcuc

SEQ ID NO: 14996 - RNA, 20 nt, Artificial Sequence
  HTT spacer sequence CTCN PAM
cuuaccugaagucaaucucu

SEQ ID NO: 14997 - RNA, 20 nt, Artificial Sequence
  HTT spacer sequence CTCN PAM
auugaaaguucugggaucac

SEQ ID NO: 14998 - RNA, 20 nt, Artificial Sequence
  HTT spacer sequence CTCN PAM
gauuucugauggacagggua

SEQ ID NO: 14999 - RNA, 20 nt, Artificial Sequence
  HTT spacer sequence CTCN PAM
ucccaguggcuuuuugcuga

SEQ ID NO: 15000 - RNA, 20 nt, Artificial Sequence
  HTT spacer sequence CTCN PAM
caguggcuuuuugcugaacu

SEQ ID NO: 15001 - RNA, 20 nt, Artificial Sequence
  HTT spacer sequence CTCN PAM
aaauaaauaauaaaauaaaa

SEQ ID NO: 15002 - RNA, 20 nt, Artificial Sequence
  HTT spacer sequence CTCN PAM
gucgcccaggcuugaaugca

SEQ ID NO: 15003 - RNA, 20 nt, Artificial Sequence
  HTT spacer sequence CTCN PAM
cugaagcuuugaacucuagg

SEQ ID NO: 15004 - RNA, 20 nt, Artificial Sequence
  HTT spacer sequence CTCN PAM
aggacucaagugguccuccu

SEQ ID NO: 15005 - RNA, 20 nt, Artificial Sequence
  HTT spacer sequence CTCN PAM
agugguccuccugccucagc

SEQ ID NO: 15006 - RNA, 20 nt, Artificial Sequence
  HTT spacer sequence CTCN PAM
ugccucagccucccgauuag

SEQ ID NO: 15007 - RNA, 20 nt, Artificial Sequence
  HTT spacer sequence CTCN PAM
gccucccgauuagcuaggag

SEQ ID NO: 15008 - RNA, 20 nt, Artificial Sequence
  HTT spacer sequence CTCN PAM
cgauuagcuaggagaauagg

SEQ ID NO: 15009 - RNA, 20 nt, Artificial Sequence
  HTT spacer sequence CTCN PAM
uagcuaaucgggaggcugag

SEQ ID NO: 15010 - RNA, 20 nt, Artificial Sequence
  HTT spacer sequence CTCN PAM
aacuccugggcuugauugau

SEQ ID NO: 15011 - RNA, 20 nt, Artificial Sequence
  HTT spacer sequence CTCN PAM
ugggcuugauugauccucca

SEQ ID NO: 15012 - RNA, 20 nt, Artificial Sequence
  HTT spacer sequence CTCN PAM
aucuuggccucccaaagugc

SEQ ID NO: 15013 - RNA, 20 nt, Artificial Sequence
  HTT spacer sequence CTCN PAM
caaagugcugggauuacagg

SEQ ID NO: 15014 - RNA, 20 nt, Artificial Sequence
  HTT spacer sequence CTCN PAM
ugccuguaaucccagcacuu

SEQ ID NO: 15015 - RNA, 20 nt, Artificial Sequence
  HTT spacer sequence CTCN PAM
ucuacuuauauuuuaaaauu

SEQ ID NO: 15016 - RNA, 20 nt, Artificial Sequence
  HTT spacer sequence CTCN PAM
ucauuuaaguauucuggaua

SEQ ID NO: 15017 - RNA, 20 nt, Artificial Sequence
  HTT spacer sequence CTCN PAM
uuuauucccacuauccagaa

SEQ ID NO: 15018 - RNA, 20 nt, Artificial Sequence
  HTT spacer sequence CTCN PAM
ucauuauacugaaccuaggu

SEQ ID NO: 15019 - RNA, 20 nt, Artificial Sequence
  HTT spacer sequence CTCN PAM
cguuuuuuaauugcaacaaa

SEQ ID NO: 15020 - RNA, 20 nt, Artificial Sequence
  HTT spacer sequence CTCN PAM
cugcaaccacagcucacguu

SEQ ID NO: 15021 - RNA, 20 nt, Artificial Sequence
  HTT spacer sequence CTCN PAM
guugccaggcugaagugcaa

SEQ ID NO: 15022 - RNA, 20 nt, Artificial Sequence
  HTT spacer sequence CTCN PAM
cucuguugccaggcugaagu

SEQ ID NO: 15023 - RNA, 20 nt, Artificial Sequence
  HTT spacer sequence CTCN PAM
aaaaaaaaaaaauaacauga

SEQ ID NO: 15024 - RNA, 20 nt, Artificial Sequence
  HTT spacer sequence CTCN PAM
uguuauuuuuuuuuuuuuga

SEQ ID NO: 15025 - RNA, 20 nt, Artificial Sequence
  HTT spacer sequence CTCN PAM
uagaaaaugaaagugccaac

SEQ ID NO: 15026 - RNA, 20 nt, Artificial Sequence
  HTT spacer sequence CTCN PAM
agccaaaacuacucuuagaa

SEQ ID NO: 15027 - RNA, 20 nt, Artificial Sequence
  HTT spacer sequence CTCN PAM
auaaaagguggcuuggaaaa

SEQ ID NO: 15028 - RNA, 20 nt, Artificial Sequence
  HTT spacer sequence CTCN PAM
gcuccacccacagauaggga

SEQ ID NO: 15029 - RNA, 20 nt, Artificial Sequence
  HTT spacer sequence CTCN PAM
acccacagauagggacgcug

SEQ ID NO: 15030 - RNA, 20 nt, Artificial Sequence
  HTT spacer sequence CTCN PAM
gcgucccuaucugugggugg

SEQ ID NO: 15031 - RNA, 20 nt, Artificial Sequence
  HTT spacer sequence CTCN PAM
ugcacgcucagcgucccuau

SEQ ID NO: 15032 - RNA, 20 nt, Artificial Sequence
  HTT spacer sequence CTCN PAM
auaaccugcuaucuugcugc

SEQ ID NO: 15033 - RNA, 20 nt, Artificial Sequence
  HTT spacer sequence CTCN PAM
ccccuucuguggcuugagcc

SEQ ID NO: 15034 - RNA, 20 nt, Artificial Sequence
  HTT spacer sequence CTCN PAM
agccacagaaggggugagcu

SEQ ID NO: 15035 - RNA, 20 nt, Artificial Sequence
  HTT spacer sequence CTCN PAM
guaagugcccuauaaaauug

SEQ ID NO: 15036 - RNA, 20 nt, Artificial Sequence
  HTT spacer sequence CTCN PAM
guaaacuguuuuucuuuuuc

SEQ ID NO: 15037 - RNA, 20 nt, Artificial Sequence
  HTT spacer sequence CTCN PAM
auaagacaguacucaguaaa

SEQ ID NO: 15038 - RNA, 20 nt, Artificial Sequence
  HTT spacer sequence CTCN PAM
caauuccagacucaauaaga

SEQ ID NO: 15039 - RNA, 20 nt, Artificial Sequence
  HTT spacer sequence CTCN PAM
cacaauuccagacucaauaa

SEQ ID NO: 15040 - RNA, 20 nt, Artificial Sequence
  HTT spacer sequence CTCN PAM
auuuauuuaaagccauuggc

SEQ ID NO: 15041 - RNA, 20 nt, Artificial Sequence
  HTT spacer sequence CTCN PAM
aaacaacaaaaaaggccaau

SEQ ID NO: 15042 - RNA, 20 nt, Artificial Sequence
  HTT spacer sequence CTCN PAM
uccaggugcccuggaaggac

SEQ ID NO: 15043 - RNA, 20 nt, Artificial Sequence
  HTT spacer sequence CTCN PAM
ggagcaagcuggcgguaagu

SEQ ID NO: 15044 - RNA, 20 nt, Artificial Sequence
  HTT spacer sequence CTCN PAM
agagcaggcucauccaggug

SEQ ID NO: 15045 - RNA, 20 nt, Artificial Sequence
  HTT spacer sequence CTCN PAM
guaaacacuuaccgccagcu

SEQ ID NO: 15046 - RNA, 20 nt, Artificial Sequence
  HTT spacer sequence CTCN PAM
uuuguuaggcuggugagcuu

SEQ ID NO: 15047 - RNA, 20 nt, Artificial Sequence
  HTT spacer sequence CTCN PAM
ccagccuaacaaaagagcac

SEQ ID NO: 15048 - RNA, 20 nt, Artificial Sequence
  HTT spacer sequence CTCN PAM
aaaaagcucaccagccuaac

SEQ ID NO: 15049 - RNA, 20 nt, Artificial Sequence
  HTT spacer sequence CTCN PAM
guguaaguuuucugcuuuug

SEQ ID NO: 15050 - RNA, 20 nt, Artificial Sequence
  HTT spacer sequence CTCN PAM
ucauuauacagggguaagcg

SEQ ID NO: 15051 - RNA, 20 nt, Artificial Sequence
  HTT spacer sequence CTCN PAM
caaaaauaaaccgcuuaccc

SEQ ID NO: 15052 - RNA, 20 nt, Artificial Sequence
  HTT spacer sequence CTCN PAM
cuuucaccuucuugaaggua

SEQ ID NO: 15053 - RNA, 20 nt, Artificial Sequence
  HTT spacer sequence CTCN PAM
aaaugcauucgucauguuuu

SEQ ID NO: 15054 - RNA, 20 nt, Artificial Sequence
  HTT spacer sequence CTCN PAM
acauuacuagacuuaaaucc

SEQ ID NO: 15055 - RNA, 20 nt, Artificial Sequence
  HTT spacer sequence CTCN PAM
cuagcuuuccaaaauaucuu

SEQ ID NO: 15056 - RNA, 20 nt, Artificial Sequence
  HTT spacer sequence CTCN PAM
cuaaagcuuuuaaaacugca

SEQ ID NO: 15057 - RNA, 20 nt, Artificial Sequence
  HTT spacer sequence CTCN PAM
aaagcuuuuaaaacugcaag

SEQ ID NO: 15058 - RNA, 20 nt, Artificial Sequence
  HTT spacer sequence CTCN PAM
uucuugcaguuuuaaaagcu

SEQ ID NO: 15059 - RNA, 20 nt, Artificial Sequence
  HTT spacer sequence CTCN PAM
auaauguugucauccauuug

SEQ ID NO: 15060 - RNA, 20 nt, Artificial Sequence
  HTT spacer sequence CTCN PAM
aagcaaauggaugacaacau

SEQ ID NO: 15061 - RNA, 20 nt, Artificial Sequence
  HTT spacer sequence CTCN PAM
uuuccuuuuuugguugaagu

SEQ ID NO: 15062 - RNA, 20 nt, Artificial Sequence
  HTT spacer sequence CTCN PAM
uaucuuuuaguacuucaacc

SEQ ID NO: 15063 - RNA, 20 nt, Artificial Sequence
  HTT spacer sequence CTCN PAM
uuccauucucguaucuuuua

SEQ ID NO: 15064 - RNA, 20 nt, Artificial Sequence
  HTT spacer sequence CTCN PAM
cuuuccauucucguaucuuu

SEQ ID NO: 15065 - RNA, 20 nt, Artificial Sequence
  HTT spacer sequence CTCN PAM
acauccuuugaauucuuccc

SEQ ID NO: 15066 - RNA, 20 nt, Artificial Sequence
  HTT spacer sequence CTCN PAM
gauucaggaauacugcucua

SEQ ID NO: 15067 - RNA, 20 nt, Artificial Sequence
  HTT spacer sequence CTCN PAM
uuucagccauucuauucuua

SEQ ID NO: 15068 - RNA, 20 nt, Artificial Sequence
  HTT spacer sequence CTCN PAM
auaguccaaaauuuuuacaa

SEQ ID NO: 15069 - RNA, 20 nt, Artificial Sequence
  HTT spacer sequence CTCN PAM
agguggcagcagaauugaag

SEQ ID NO: 15070 - RNA, 20 nt, Artificial Sequence
  HTT spacer sequence CTCN PAM
augaguuucuuguucaaaau

SEQ ID NO: 15071 - RNA, 20 nt, Artificial Sequence
  HTT spacer sequence CTCN PAM
uagaguauauagcaaaauau

SEQ ID NO: 15072 - RNA, 20 nt, Artificial Sequence
  HTT spacer sequence CTCN PAM
gaaaaagaaaacuauacaca

SEQ ID NO: 15073 - RNA, 20 nt, Artificial Sequence
  HTT spacer sequence CTCN PAM
acuuccaggaauucucagaa

SEQ ID NO: 15074 - RNA, 20 nt, Artificial Sequence
  HTT spacer sequence CTCN PAM
aaaaaaaaauaaaaaaaaaa

SEQ ID NO: 15075 - RNA, 20 nt, Artificial Sequence
  HTT spacer sequence CTCN PAM
gucucaaaaaaaaaauaaaa

SEQ ID NO: 15076 - RNA, 20 nt, Artificial Sequence
  HTT spacer sequence CTCN PAM
auuguccaggugcuaucucg

SEQ ID NO: 15077 - RNA, 20 nt, Artificial Sequence
  HTT spacer sequence CTCN PAM
gcucacugcaaccucugucu

SEQ ID NO: 15078 - RNA, 20 nt, Artificial Sequence
  HTT spacer sequence CTCN PAM
cugcaaccucugucucccug

SEQ ID NO: 15079 - RNA, 20 nt, Artificial Sequence
  HTT spacer sequence CTCN PAM
gucucccugguucaagcgau

SEQ ID NO: 15080 - RNA, 20 nt, Artificial Sequence
  HTT spacer sequence CTCN PAM
cugguucaagcgauucuccu

SEQ ID NO: 15081 - RNA, 20 nt, Artificial Sequence
  HTT spacer sequence CTCN PAM
ugccucagccucccgaguag

SEQ ID NO: 15082 - RNA, 20 nt, Artificial Sequence
  HTT spacer sequence CTCN PAM
gccucccgaguagcugggau

SEQ ID NO: 15083 - RNA, 20 nt, Artificial Sequence
  HTT spacer sequence CTCN PAM
cgaguagcugggauuacagg

SEQ ID NO: 15084 - RNA, 20 nt, Artificial Sequence
  HTT spacer sequence CTCN PAM
ggaggcugaggcaggagaau

SEQ ID NO: 15085 - RNA, 20 nt, Artificial Sequence
  HTT spacer sequence CTCN PAM
acuaaaaauacaaaaauuaa

SEQ ID NO: 15086 - RNA, 20 nt, Artificial Sequence
  HTT spacer sequence CTCN PAM
aacuucugaccccgugaucc

SEQ ID NO: 15087 - RNA, 20 nt, Artificial Sequence
  HTT spacer sequence CTCN PAM
caaagugcugggauuacagg

SEQ ID NO: 15088 - RNA, 20 nt, Artificial Sequence
  HTT spacer sequence CTCN PAM
cgccuguaaucccagcacuu

SEQ ID NO: 15089 - RNA, 20 nt, Artificial Sequence
  HTT spacer sequence CTCN PAM
auaaagcuauuagaagauuu

SEQ ID NO: 15090 - RNA, 20 nt, Artificial Sequence
  HTT spacer sequence CTCN PAM
cuuugaguguauaguaaacu

SEQ ID NO: 15091 - RNA, 20 nt, Artificial Sequence
  HTT spacer sequence CTCN PAM
aagugaguacauuucaagaa

SEQ ID NO: 15092 - RNA, 20 nt, Artificial Sequence
  HTT spacer sequence CTCN PAM
aauuuuaucacauuucuguc

SEQ ID NO: 15093 - RNA, 20 nt, Artificial Sequence
  HTT spacer sequence CTCN PAM
gguuccugccccaacuccua

SEQ ID NO: 15094 - RNA, 20 nt, Artificial Sequence
  HTT spacer sequence CTCN PAM
uaggcagccacucaucuauu

SEQ ID NO: 15095 - RNA, 20 nt, Artificial Sequence
  HTT spacer sequence CTCN PAM
ucuauuuucugucccuuaag

SEQ ID NO: 15096 - RNA, 20 nt, Artificial Sequence
  HTT spacer sequence CTCN PAM
ugccuguaaucccagcacuu

SEQ ID NO: 15097 - RNA, 20 nt, Artificial Sequence
  HTT spacer sequence CTCN PAM
caaagugcugggauuacagg

SEQ ID NO: 15098 - RNA, 20 nt, Artificial Sequence
  HTT spacer sequence CTCN PAM
gccucccaaagugcugggau

SEQ ID NO: 15099 - RNA, 20 nt, Artificial Sequence
  HTT spacer sequence CTCN PAM
agugauccaccaaccucggc

SEQ ID NO: 15100 - RNA, 20 nt, Artificial Sequence
  HTT spacer sequence CTCN PAM
ugaccucaagugauccacca

SEQ ID NO: 15101 - RNA, 20 nt, Artificial Sequence
  HTT spacer sequence CTCN PAM
aacuccugaccucaagugau

SEQ ID NO: 15102 - RNA, 20 nt, Artificial Sequence
  HTT spacer sequence CTCN PAM
acuaaaaauacaaaaauuag

SEQ ID NO: 15103 - RNA, 20 nt, Artificial Sequence
  HTT spacer sequence CTCN PAM
ggaggcugaggcaggagaau

SEQ ID NO: 15104 - RNA, 20 nt, Artificial Sequence
  HTT spacer sequence CTCN PAM
cgaguagcugggauuacagg

SEQ ID NO: 15105 - RNA, 20 nt, Artificial Sequence
  HTT spacer sequence CTCN PAM
gccucccgaguagcugggau

SEQ ID NO: 15106 - RNA, 20 nt, Artificial Sequence
  HTT spacer sequence CTCN PAM
ugccucagccucccgaguag

SEQ ID NO: 15107 - RNA, 20 nt, Artificial Sequence
  HTT spacer sequence CTCN PAM
cagguucaagugauucuccu

SEQ ID NO: 15108 - RNA, 20 nt, Artificial Sequence
  HTT spacer sequence CTCN PAM
gccucccagguucaagugau

SEQ ID NO: 15109 - RNA, 20 nt, Artificial Sequence
  HTT spacer sequence CTCN PAM
cugcaaccuccgccucccag

SEQ ID NO: 15110 - RNA, 20 nt, Artificial Sequence
  HTT spacer sequence CTCN PAM
gcucacugcaaccuccgccu

SEQ ID NO: 15111 - RNA, 20 nt, Artificial Sequence
  HTT spacer sequence CTCN PAM
guugcccagguuggaaggca

SEQ ID NO: 15112 - RNA, 20 nt, Artificial Sequence
  HTT spacer sequence CTCN PAM
cuguugcccagguuggaagg

SEQ ID NO: 15113 - RNA, 20 nt, Artificial Sequence
  HTT spacer sequence CTCN PAM
cucuguugcccagguuggaa

SEQ ID NO: 15114 - RNA, 20 nt, Artificial Sequence
  HTT spacer sequence CTCN PAM
aaacaaacaaagauuuguau

SEQ ID NO: 15115 - RNA, 20 nt, Artificial Sequence
  HTT spacer sequence CTCN PAM
caauuaaguaaaagaagcca

SEQ ID NO: 15116 - RNA, 20 nt, Artificial Sequence
  HTT spacer sequence CTCN PAM
auaauauccaucugauggau

SEQ ID NO: 15117 - RNA, 20 nt, Artificial Sequence
  HTT spacer sequence CTCN PAM
ugaguagaucaccuagaagu

SEQ ID NO: 15118 - RNA, 20 nt, Artificial Sequence
  HTT spacer sequence CTCN PAM
agagaaaugaagacaugucu

SEQ ID NO: 15119 - RNA, 20 nt, Artificial Sequence
  HTT spacer sequence CTCN PAM
ucaaaaacauaccauuguuc

SEQ ID NO: 15120 - RNA, 20 nt, Artificial Sequence
  HTT spacer sequence CTCN PAM
cuuccucccucccuucccua

SEQ ID NO: 15121 - RNA, 20 nt, Artificial Sequence
  HTT spacer sequence CTCN PAM
cucccuucccuacuucccuc

SEQ ID NO: 15122 - RNA, 20 nt, Artificial Sequence
  HTT spacer sequence CTCN PAM
cuucccuacuucccucuccc

SEQ ID NO: 15123 - RNA, 20 nt, Artificial Sequence
  HTT spacer sequence CTCN PAM
cccuuucccuuucccuuccc

SEQ ID NO: 15124 - RNA, 20 nt, Artificial Sequence
  HTT spacer sequence CTCN PAM
cuuucccuuucccuuccccu

SEQ ID NO: 15125 - RNA, 20 nt, Artificial Sequence
  HTT spacer sequence CTCN PAM
gacuucaccauguaaccaaa

SEQ ID NO: 15126 - RNA, 20 nt, Artificial Sequence
  HTT spacer sequence CTCN PAM
ggugacagguguacuaaaau

SEQ ID NO: 15127 - RNA, 20 nt, Artificial Sequence
  HTT spacer sequence CTCN PAM
ccuuccagccuuccgccuug

SEQ ID NO: 15128 - RNA, 20 nt, Artificial Sequence
  HTT spacer sequence CTCN PAM
caaggcggaaggcuggaagg

SEQ ID NO: 15129 - RNA, 20 nt, Artificial Sequence
  HTT spacer sequence CTCN PAM
aauguccauuauaccacacu

SEQ ID NO: 15130 - RNA, 20 nt, Artificial Sequence
  HTT spacer sequence CTCN PAM
gcucccacuucugagaacau

SEQ ID NO: 15131 - RNA, 20 nt, Artificial Sequence
  HTT spacer sequence CTCN PAM
cacuucugagaacauauagc

SEQ ID NO: 15132 - RNA, 20 nt, Artificial Sequence
  HTT spacer sequence CTCN PAM
gaagugggagcugagcugug

SEQ ID NO: 15133 - RNA, 20 nt, Artificial Sequence
  HTT spacer sequence CTCN PAM
cacuaccagaaugugauugu

SEQ ID NO: 15134 - RNA, 20 nt, Artificial Sequence
  HTT spacer sequence CTCN PAM
ccaguacaaauauuucaaaa

SEQ ID NO: 15135 - RNA, 20 nt, Artificial Sequence
  HTT spacer sequence CTCN PAM
uuauuuauuuauuuuuuuug

SEQ ID NO: 15136 - RNA, 20 nt, Artificial Sequence
  HTT spacer sequence CTCN PAM
aaaaaaauaaauaaauaaag

SEQ ID NO: 15137 - RNA, 20 nt, Artificial Sequence
  HTT spacer sequence CTCN PAM
uucuaugaugcccaggcugg

SEQ ID NO: 15138 - RNA, 20 nt, Artificial Sequence
  HTT spacer sequence CTCN PAM
agccugggcaucauagaaug

SEQ ID NO: 15139 - RNA, 20 nt, Artificial Sequence
  HTT spacer sequence CTCN PAM
gcucacugcagucucugccu

SEQ ID NO: 15140 - RNA, 20 nt, Artificial Sequence
  HTT spacer sequence CTCN PAM
cugcagucucugccucccag

SEQ ID NO: 15141 - RNA, 20 nt, Artificial Sequence
  HTT spacer sequence CTCN PAM
gccucccagguucaagugau

SEQ ID NO: 15142 - RNA, 20 nt, Artificial Sequence
  HTT spacer sequence CTCN PAM
cagguucaagugauucccac

SEQ ID NO: 15143 - RNA, 20 nt, Artificial Sequence
  HTT spacer sequence CTCN PAM
caggaagcuggaauuacagg

SEQ ID NO: 15144 - RNA, 20 nt, Artificial Sequence
  HTT spacer sequence CTCN PAM
ccuguaauuccagcuuccug

SEQ ID NO: 15145 - RNA, 20 nt, Artificial Sequence
  HTT spacer sequence CTCN PAM
accaaaaaauacaaaaauua

SEQ ID NO: 15146 - RNA, 20 nt, Artificial Sequence
  HTT spacer sequence CTCN PAM
agcuccugaccucaagugau

SEQ ID NO: 15147 - RNA, 20 nt, Artificial Sequence
  HTT spacer sequence CTCN PAM
ugaccucaagugauccaccu

SEQ ID NO: 15148 - RNA, 20 nt, Artificial Sequence
  HTT spacer sequence CTCN PAM
agugauccaccugccuuggc

SEQ ID NO: 15149 - RNA, 20 nt, Artificial Sequence
  HTT spacer sequence CTCN PAM
cgccuguaaucccagcacuu

SEQ ID NO: 15150 - RNA, 20 nt, Artificial Sequence
  HTT spacer sequence CTCN PAM
caaguaaucaaagaaaugca

SEQ ID NO: 15151 - RNA, 20 nt, Artificial Sequence
  HTT spacer sequence CTCN PAM
uuucauuuacuuaauagguu

SEQ ID NO: 15152 - RNA, 20 nt, Artificial Sequence
  HTT spacer sequence CTCN PAM
gaauaggcaagucauauaaa

SEQ ID NO: 15153 - RNA, 20 nt, Artificial Sequence
  HTT spacer sequence CTCN PAM
acaaacaaacaaacaaaaag

SEQ ID NO: 15154 - RNA, 20 nt, Artificial Sequence
  HTT spacer sequence CTCN PAM
gucuccacaaacaaacaaac

SEQ ID NO: 15155 - RNA, 20 nt, Artificial Sequence
  HTT spacer sequence CTCN PAM
cucugucacucaggcaggaa

SEQ ID NO: 15156 - RNA, 20 nt, Artificial Sequence
  HTT spacer sequence CTCN PAM
gucacucaggcaggaaugca

SEQ ID NO: 15157 - RNA, 20 nt, Artificial Sequence
  HTT spacer sequence CTCN PAM
ggcaggaaugcaguggugga

SEQ ID NO: 15158 - RNA, 20 nt, Artificial Sequence
  HTT spacer sequence CTCN PAM
uugcaacuauugccuccugg

SEQ ID NO: 15159 - RNA, 20 nt, Artificial Sequence
  HTT spacer sequence CTCN PAM
uggguucaagcgauuuuccu

SEQ ID NO: 15160 - RNA, 20 nt, Artificial Sequence
  HTT spacer sequence CTCN PAM
gccucccaaguagcugggau

SEQ ID NO: 15161 - RNA, 20 nt, Artificial Sequence
  HTT spacer sequence CTCN PAM
caaguagcugggauuacagg

SEQ ID NO: 15162 - RNA, 20 nt, Artificial Sequence
  HTT spacer sequence CTCN PAM
uguaaucccagcuacuuggg

SEQ ID NO: 15163 - RNA, 20 nt, Artificial Sequence
  HTT spacer sequence CTCN PAM
acuaaagauacaaaaauuag

SEQ ID NO: 15164 - RNA, 20 nt, Artificial Sequence
  HTT spacer sequence CTCN PAM
uggccucaagcggucccccu

SEQ ID NO: 15165 - RNA, 20 nt, Artificial Sequence
  HTT spacer sequence CTCN PAM
agcggucccccugucucggc

SEQ ID NO: 15166 - RNA, 20 nt, Artificial Sequence
  HTT spacer sequence CTCN PAM
gccucccaaagugcugggau

SEQ ID NO: 15167 - RNA, 20 nt, Artificial Sequence
  HTT spacer sequence CTCN PAM
caaagugcugggauuacagg

SEQ ID NO: 15168 - RNA, 20 nt, Artificial Sequence
  HTT spacer sequence CTCN PAM
cgccuguaaucccagcacuu

SEQ ID NO: 15169 - RNA, 20 nt, Artificial Sequence
  HTT spacer sequence CTCN PAM
ugaucaagucuccaugagga

SEQ ID NO: 15170 - RNA, 20 nt, Artificial Sequence
  HTT spacer sequence CTCN PAM
augaggaaagagacuuuaau

SEQ ID NO: 15171 - RNA, 20 nt, Artificial Sequence
  HTT spacer sequence CTCN PAM
uggagacuugaucaugagua

SEQ ID NO: 15172 - RNA, 20 nt, Artificial Sequence
  HTT spacer sequence CTCN PAM
uuccucauggagacuugauc

SEQ ID NO: 15173 - RNA, 20 nt, Artificial Sequence
  HTT spacer sequence CTCN PAM
guaauacuuuuagaaacaau

SEQ ID NO: 15174 - RNA, 20 nt, Artificial Sequence
  HTT spacer sequence CTCN PAM
auuugaauucaguuuagauu

SEQ ID NO: 15175 - RNA, 20 nt, Artificial Sequence
  HTT spacer sequence CTCN PAM
cagauggcaaagcuuaagcu

SEQ ID NO: 15176 - RNA, 20 nt, Artificial Sequence
  HTT spacer sequence CTCN PAM
gugcucaguacucuguggac

SEQ ID NO: 15177 - RNA, 20 nt, Artificial Sequence
  HTT spacer sequence CTCN PAM
guacucuguggacagacacu

SEQ ID NO: 15178 - RNA, 20 nt, Artificial Sequence
  HTT spacer sequence CTCN PAM
guggacagacacuguucagc

SEQ ID NO: 15179 - RNA, 20 nt, Artificial Sequence
  HTT spacer sequence CTCN PAM
uucuaaaccuucugaucaac

SEQ ID NO: 15180 - RNA, 20 nt, Artificial Sequence
  HTT spacer sequence CTCN PAM
cgccuguaauccagcacuau

SEQ ID NO: 15181 - RNA, 20 nt, Artificial Sequence
  HTT spacer sequence CTCN PAM
gccccccauagugcuggauu

SEQ ID NO: 15182 - RNA, 20 nt, Artificial Sequence
  HTT spacer sequence CTCN PAM
ugauccacccaccucagccc

SEQ ID NO: 15183 - RNA, 20 nt, Artificial Sequence
  HTT spacer sequence CTCN PAM
ugaccucgugauccacccac

SEQ ID NO: 15184 - RNA, 20 nt, Artificial Sequence
  HTT spacer sequence CTCN PAM
ugaacuccugaccucgugau

SEQ ID NO: 15185 - RNA, 20 nt, Artificial Sequence
  HTT spacer sequence CTCN PAM
acuaaaacuacaaaaauuag

SEQ ID NO: 15186 - RNA, 20 nt, Artificial Sequence
  HTT spacer sequence CTCN PAM
ggaggcugaggcaggagaau

SEQ ID NO: 15187 - RNA, 20 nt, Artificial Sequence
  HTT spacer sequence CTCN PAM
ugaguagcugggauuacagg

SEQ ID NO: 15188 - RNA, 20 nt, Artificial Sequence
  HTT spacer sequence CTCN PAM
gccuccugaguagcugggau

SEQ ID NO: 15189 - RNA, 20 nt, Artificial Sequence
  HTT spacer sequence CTCN PAM
ugccucagccuccugaguag

SEQ ID NO: 15190 - RNA, 20 nt, Artificial Sequence
  HTT spacer sequence CTCN PAM
gccguccagguucaagugau

SEQ ID NO: 15191 - RNA, 20 nt, Artificial Sequence
  HTT spacer sequence CTCN PAM
cugcaaccucugccguccag

SEQ ID NO: 15192 - RNA, 20 nt, Artificial Sequence
  HTT spacer sequence CTCN PAM
ggccugggccacagagugac

SEQ ID NO: 15193 - RNA, 20 nt, Artificial Sequence
  HTT spacer sequence CTCN PAM
guggcccaggccggaguaca

SEQ ID NO: 15194 - RNA, 20 nt, Artificial Sequence
  HTT spacer sequence CTCN PAM
aaaaaaaaaaaaaaagaaaa

SEQ ID NO: 15195 - RNA, 20 nt, Artificial Sequence
  HTT spacer sequence CTCN PAM
gacauaacugggugcuguac

SEQ ID NO: 15196 - RNA, 20 nt, Artificial Sequence
  HTT spacer sequence CTCN PAM
ugcacccacucggacauaac

SEQ ID NO: 15197 - RNA, 20 nt, Artificial Sequence
  HTT spacer sequence CTCN PAM
caugcacccacucggacaua

SEQ ID NO: 15198 - RNA, 20 nt, Artificial Sequence
  HTT spacer sequence CTCN PAM
gggucacucucaugcaccca

SEQ ID NO: 15199 - RNA, 20 nt, Artificial Sequence
  HTT spacer sequence CTCN PAM
aaucucagggucacucucau

SEQ ID NO: 15200 - RNA, 20 nt, Artificial Sequence
  HTT spacer sequence CTCN PAM
gguggcguucuucaagcacg

SEQ ID NO: 15201 - RNA, 20 nt, Artificial Sequence
  HTT spacer sequence CTCN PAM
cccccuuucucagguggcgu

SEQ ID NO: 15202 - RNA, 20 nt, Artificial Sequence
  HTT spacer sequence CTCN PAM
gguuaccagcggacaccacu

SEQ ID NO: 15203 - RNA, 20 nt, Artificial Sequence
  HTT spacer sequence CTCN PAM
cugcagauggcuaagccaac

SEQ ID NO: 15204 - RNA, 20 nt, Artificial Sequence
  HTT spacer sequence CTCN PAM
ucccugcagauggcuaagcc

SEQ ID NO: 15205 - RNA, 20 nt, Artificial Sequence
  HTT spacer sequence CTCN PAM
ccugugauagaccacccucc

SEQ ID NO: 15206 - RNA, 20 nt, Artificial Sequence
  HTT spacer sequence CTCN PAM
ugccacggccacuacuggau

SEQ ID NO: 15207 - RNA, 20 nt, Artificial Sequence
  HTT spacer sequence CTCN PAM
ugcaugagacgcagccucca

SEQ ID NO: 15208 - RNA, 20 nt, Artificial Sequence
  HTT spacer sequence CTCN PAM
ugcaugagaaguuucaggua

SEQ ID NO: 15209 - RNA, 20 nt, Artificial Sequence
  HTT spacer sequence CTCN PAM
aucucauuucuccgucagca

SEQ ID NO: 15210 - RNA, 20 nt, Artificial Sequence
  HTT spacer sequence CTCN PAM
uuucuccgucagcacaauaa

SEQ ID NO: 15211 - RNA, 20 nt, Artificial Sequence
  HTT spacer sequence CTCN PAM
gucagcacaauaaccaggua

SEQ ID NO: 15212 - RNA, 20 nt, Artificial Sequence
  HTT spacer sequence CTCN PAM
ggauguuugaguguagguca

SEQ ID NO: 15213 - RNA, 20 nt, Artificial Sequence
  HTT spacer sequence CTCN PAM
aacauccugagcugaagcuu

SEQ ID NO: 15214 - RNA, 20 nt, Artificial Sequence
  HTT spacer sequence CTCN PAM
aaaugauaauauccuaucaa

SEQ ID NO: 15215 - RNA, 20 nt, Artificial Sequence
  HTT spacer sequence CTCN PAM
guauuuaagcucugccacaa

SEQ ID NO: 15216 - RNA, 20 nt, Artificial Sequence
  HTT spacer sequence CTCN PAM
gccacaaucacucagcugug

SEQ ID NO: 15217 - RNA, 20 nt, Artificial Sequence
  HTT spacer sequence CTCN PAM
gcugugacacuguaaaucuc

SEQ ID NO: 15218 - RNA, 20 nt, Artificial Sequence
  HTT spacer sequence CTCN PAM
uaauaguuuauuacauucca

SEQ ID NO: 15219 - RNA, 20 nt, Artificial Sequence
  HTT spacer sequence CTCN PAM
uuaaagguaacacaacuaaa

SEQ ID NO: 15220 - RNA, 20 nt, Artificial Sequence
  HTT spacer sequence CTCN PAM
ccaaaaaaucaacaggcaug

SEQ ID NO: 15221 - RNA, 20 nt, Artificial Sequence
  HTT spacer sequence CTCN PAM
caaaucacugaacuagugga

SEQ ID NO: 15222 - RNA, 20 nt, Artificial Sequence
  HTT spacer sequence CTCN PAM
acaauaaaugugaaugauaa

SEQ ID NO: 15223 - RNA, 20 nt, Artificial Sequence
  HTT spacer sequence CTCN PAM
ccuaagaagcagauaagaau

SEQ ID NO: 15224 - RNA, 20 nt, Artificial Sequence
  HTT spacer sequence CTCN PAM
gcaagcuagaauucugaaga

SEQ ID NO: 15225 - RNA, 20 nt, Artificial Sequence
  HTT spacer sequence CTCN PAM
uuuuuucugcugaguaacag

SEQ ID NO: 15226 - RNA, 20 nt, Artificial Sequence
  HTT spacer sequence CTCN PAM
gcagaaaaaaagaguaucau

SEQ ID NO: 15227 - RNA, 20 nt, Artificial Sequence
  HTT spacer sequence CTCN PAM
gcuuaucaaauaucaaaguc

SEQ ID NO: 15228 - RNA, 20 nt, Artificial Sequence
  HTT spacer sequence CTCN PAM
cgccuguaauccuaacacuu

SEQ ID NO: 15229 - RNA, 20 nt, Artificial Sequence
  HTT spacer sequence CTCN PAM
caaaguguuaggauuacagg

SEQ ID NO: 15230 - RNA, 20 nt, Artificial Sequence
  HTT spacer sequence CTCN PAM
agcgaccugcccaccugggc

SEQ ID NO: 15231 - RNA, 20 nt, Artificial Sequence
  HTT spacer sequence CTCN PAM
gggguucaagaccacccagg

SEQ ID NO: 15232 - RNA, 20 nt, Artificial Sequence
  HTT spacer sequence CTCN PAM
acucaaauacaaaaaauuag

SEQ ID NO: 15233 - RNA, 20 nt, Artificial Sequence
  HTT spacer sequence CTCN PAM
aauacaaaaaauuagccagg

SEQ ID NO: 15234 - RNA, 20 nt, Artificial Sequence
  HTT spacer sequence CTCN PAM
ggaggcugagggaugagaau

SEQ ID NO: 15235 - RNA, 20 nt, Artificial Sequence
  HTT spacer sequence CTCN PAM
cgaguagcugggauuacagg

SEQ ID NO: 15236 - RNA, 20 nt, Artificial Sequence
  HTT spacer sequence CTCN PAM
gccucccgaguagcugggau

SEQ ID NO: 15237 - RNA, 20 nt, Artificial Sequence
  HTT spacer sequence CTCN PAM
ucccucagccucccgaguag

SEQ ID NO: 15238 - RNA, 20 nt, Artificial Sequence
  HTT spacer sequence CTCN PAM
agugauucucaucccucagc

SEQ ID NO: 15239 - RNA, 20 nt, Artificial Sequence
  HTT spacer sequence CTCN PAM
ggggcucaagugauucucau

SEQ ID NO: 15240 - RNA, 20 nt, Artificial Sequence
  HTT spacer sequence CTCN PAM
gccuccggggcucaagugau

SEQ ID NO: 15241 - RNA, 20 nt, Artificial Sequence
  HTT spacer sequence CTCN PAM
cugcaaccucugccuccggg

SEQ ID NO: 15242 - RNA, 20 nt, Artificial Sequence
  HTT spacer sequence CTCN PAM
cagcuugggcuacagaguga

SEQ ID NO: 15243 - RNA, 20 nt, Artificial Sequence
  HTT spacer sequence CTCN PAM
guagcccaagcugggagugc

SEQ ID NO: 15244 - RNA, 20 nt, Artificial Sequence
  HTT spacer sequence CTCN PAM
cucuguagcccaagcuggga

SEQ ID NO: 15245 - RNA, 20 nt, Artificial Sequence
  HTT spacer sequence CTCN PAM
gucucaaaaaaagacacaca

SEQ ID NO: 15246 - RNA, 20 nt, Artificial Sequence
  HTT spacer sequence CTCN PAM
aaaaaagacacacacacaaa

SEQ ID NO: 15247 - RNA, 20 nt, Artificial Sequence
  HTT spacer sequence CTCN PAM
auguuuuuuuuguuugugug

SEQ ID NO: 15248 - RNA, 20 nt, Artificial Sequence
  HTT spacer sequence CTCN PAM
gauaauuuccuuuguuuaaa

SEQ ID NO: 15249 - RNA, 20 nt, Artificial Sequence
  HTT spacer sequence CTCN PAM
gaacuggcauuuucucucuu

SEQ ID NO: 15250 - RNA, 20 nt, Artificial Sequence
  HTT spacer sequence CTCN PAM
cuuggagaagauucaggaca

SEQ ID NO: 15251 - RNA, 20 nt, Artificial Sequence
  HTT spacer sequence CTCN PAM
uggagaagauucaggacaaa

SEQ ID NO: 15252 - RNA, 20 nt, Artificial Sequence
  HTT spacer sequence CTCN PAM
aagagagaaaaugccaguuc

SEQ ID NO: 15253 - RNA, 20 nt, Artificial Sequence
  HTT spacer sequence CTCN PAM
uuuaagauaaguagaagcag

SEQ ID NO: 15254 - RNA, 20 nt, Artificial Sequence
  HTT spacer sequence CTCN PAM
uucacugcuucuacuuaucu

SEQ ID NO: 15255 - RNA, 20 nt, Artificial Sequence
  HTT spacer sequence CTCN PAM
guuggcaucuauuaauaaau

SEQ ID NO: 15256 - RNA, 20 nt, Artificial Sequence
  HTT spacer sequence CTCN PAM
caguuccaaacuucagcagg

SEQ ID NO: 15257 - RNA, 20 nt, Artificial Sequence
  HTT spacer sequence CTCN PAM
ugacaauucagcugugguca

SEQ ID NO: 15258 - RNA, 20 nt, Artificial Sequence
  HTT spacer sequence CTCN PAM
gcugcacaauuggucauugu

SEQ ID NO: 15259 - RNA, 20 nt, Artificial Sequence
  HTT spacer sequence CTCN PAM
uuaguuuuguugagugucuc

SEQ ID NO: 15260 - RNA, 20 nt, Artificial Sequence
  HTT spacer sequence CTCN PAM
acaaaacuaaggagauuaug

SEQ ID NO: 15261 - RNA, 20 nt, Artificial Sequence
  HTT spacer sequence CTCN PAM
guggacaagacacugugagg

SEQ ID NO: 15262 - RNA, 20 nt, Artificial Sequence
  HTT spacer sequence CTCN PAM
cagugucuuguccacggaga

SEQ ID NO: 15263 - RNA, 20 nt, Artificial Sequence
  HTT spacer sequence CTCN PAM
aauuccuuuagaacacaugg

SEQ ID NO: 15264 - RNA, 20 nt, Artificial Sequence
  HTT spacer sequence CTCN PAM
cacggcacuuuuuugcauuc

SEQ ID NO: 15265 - RNA, 20 nt, Artificial Sequence
  HTT spacer sequence CTCN PAM
ucucccacggcacuuuuuug

SEQ ID NO: 15266 - RNA, 20 nt, Artificial Sequence
  HTT spacer sequence CTCN PAM
acuucucaucucccacggca

SEQ ID NO: 15267 - RNA, 20 nt, Artificial Sequence
  HTT spacer sequence CTCN PAM
ccuuacagcguugccuacua

SEQ ID NO: 15268 - RNA, 20 nt, Artificial Sequence
  HTT spacer sequence CTCN PAM
cagucugccccgaacacuuu

SEQ ID NO: 15269 - RNA, 20 nt, Artificial Sequence
  HTT spacer sequence CTCN PAM
cuuccucccagucugccccg

SEQ ID NO: 15270 - RNA, 20 nt, Artificial Sequence
  HTT spacer sequence CTCN PAM
acuuuuaagugaaacgggcu

SEQ ID NO: 15271 - RNA, 20 nt, Artificial Sequence
  HTT spacer sequence CTCN PAM
auauuuuuguuauuagaaua

SEQ ID NO: 15272 - RNA, 20 nt, Artificial Sequence
  HTT spacer sequence CTCN PAM
auauauucuaauaacaaaaa

SEQ ID NO: 15273 - RNA, 20 nt, Artificial Sequence
  HTT spacer sequence CTCN PAM
ugaaagguuauuuuccauag

SEQ ID NO: 15274 - RNA, 20 nt, Artificial Sequence
  HTT spacer sequence CTCN PAM
ugaacuaaucacaucaacca

SEQ ID NO: 15275 - RNA, 20 nt, Artificial Sequence
  HTT spacer sequence CTCN PAM
ggugguugaugugauuaguu

SEQ ID NO: 15276 - RNA, 20 nt, Artificial Sequence
  HTT spacer sequence CTCN PAM
caguaagucucuuucuugau

SEQ ID NO: 15277 - RNA, 20 nt, Artificial Sequence
  HTT spacer sequence CTCN PAM
uucuugaucggucuuacuga

SEQ ID NO: 15278 - RNA, 20 nt, Artificial Sequence
  HTT spacer sequence CTCN PAM
ccguaagaugaccauacaac

SEQ ID NO: 15279 - RNA, 20 nt, Artificial Sequence
  HTT spacer sequence CTCN PAM
uacuuauccaugaggcuugc

SEQ ID NO: 15280 - RNA, 20 nt, Artificial Sequence
  HTT spacer sequence CTCN PAM
uggauaaguaagagcuguaa

SEQ ID NO: 15281 - RNA, 20 nt, Artificial Sequence
  HTT spacer sequence CTCN PAM
gcuuacuccaggaauguaaa

SEQ ID NO: 15282 - RNA, 20 nt, Artificial Sequence
  HTT spacer sequence CTCN PAM
aggaauguaaaugacuaugu

SEQ ID NO: 15283 - RNA, 20 nt, Artificial Sequence
  HTT spacer sequence CTCN PAM
ugccuguaaucccagcacuu

SEQ ID NO: 15284 - RNA, 20 nt, Artificial Sequence
  HTT spacer sequence CTCN PAM
caaagugcugggauuacagg

SEQ ID NO: 15285 - RNA, 20 nt, Artificial Sequence
  HTT spacer sequence CTCN PAM
cuugaggucaggagucggau

SEQ ID NO: 15286 - RNA, 20 nt, Artificial Sequence
  HTT spacer sequence CTCN PAM
agugagcccccaaccuuggc

SEQ ID NO: 15287 - RNA, 20 nt, Artificial Sequence
  HTT spacer sequence CTCN PAM
ugaccucaagugagccccca

SEQ ID NO: 15288 - RNA, 20 nt, Artificial Sequence
  HTT spacer sequence CTCN PAM
acuaaaaauacaaaaauuag

SEQ ID NO: 15289 - RNA, 20 nt, Artificial Sequence
  HTT spacer sequence CTCN PAM
ggaggcugaggcaggagaau

SEQ ID NO: 15290 - RNA, 20 nt, Artificial Sequence
  HTT spacer sequence CTCN PAM
ugaguagcugggauuacagg

SEQ ID NO: 15291 - RNA, 20 nt, Artificial Sequence
  HTT spacer sequence CTCN PAM
gccuccugaguagcugggau

SEQ ID NO: 15292 - RNA, 20 nt, Artificial Sequence
  HTT spacer sequence CTCN PAM
ugccucagccuccugaguag

SEQ ID NO: 15293 - RNA, 20 nt, Artificial Sequence
  HTT spacer sequence CTCN PAM
cagguucaagcgauucuccu

SEQ ID NO: 15294 - RNA, 20 nt, Artificial Sequence
  HTT spacer sequence CTCN PAM
accucccagguucaagcgau

SEQ ID NO: 15295 - RNA, 20 nt, Artificial Sequence
  HTT spacer sequence CTCN PAM
cugcaaccucuaccucccag

SEQ ID NO: 15296 - RNA, 20 nt, Artificial Sequence
  HTT spacer sequence CTCN PAM
gcucacugcaaccucuaccu

SEQ ID NO: 15297 - RNA, 20 nt, Artificial Sequence
  HTT spacer sequence CTCN PAM
agccugugcaauagagcgag

SEQ ID NO: 15298 - RNA, 20 nt, Artificial Sequence
  HTT spacer sequence CTCN PAM
auugcacaggcuggagugca

SEQ ID NO: 15299 - RNA, 20 nt, Artificial Sequence
  HTT spacer sequence CTCN PAM
cucuauugcacaggcuggag

SEQ ID NO: 15300 - RNA, 20 nt, Artificial Sequence
  HTT spacer sequence CTCN PAM
gucucaaaaaaaaaaaaaaa

SEQ ID NO: 15301 - RNA, 20 nt, Artificial Sequence
  HTT spacer sequence CTCN PAM
aaaaaaaaaaaaaaaaaaga

SEQ ID NO: 15302 - RNA, 20 nt, Artificial Sequence
  HTT spacer sequence CTCN PAM
gugaccugguaauauauacu

SEQ ID NO: 15303 - RNA, 20 nt, Artificial Sequence
  HTT spacer sequence CTCN PAM
aaaaaaaaauaauaaaauua

SEQ ID NO: 15304 - RNA, 20 nt, Artificial Sequence
  HTT spacer sequence CTCN PAM
gucucaaaaaaaaaauaaua

SEQ ID NO: 15305 - RNA, 20 nt, Artificial Sequence
  HTT spacer sequence CTCN PAM
uguugcccaggcuggagugc

SEQ ID NO: 15306 - RNA, 20 nt, Artificial Sequence
  HTT spacer sequence CTCN PAM
agccugggcaacaagagcaa

SEQ ID NO: 15307 - RNA, 20 nt, Artificial Sequence
  HTT spacer sequence CTCN PAM
gcucaccacaaccuccaccu

SEQ ID NO: 15308 - RNA, 20 nt, Artificial Sequence
  HTT spacer sequence CTCN PAM
ccacaaccuccaccucccgg

SEQ ID NO: 15309 - RNA, 20 nt, Artificial Sequence
  HTT spacer sequence CTCN PAM
accucccggguucaagcaau

SEQ ID NO: 15310 - RNA, 20 nt, Artificial Sequence
  HTT spacer sequence CTCN PAM
cggguucaagcaauucuccu

SEQ ID NO: 15311 - RNA, 20 nt, Artificial Sequence
  HTT spacer sequence CTCN PAM
ugccucagccuccugaguag

SEQ ID NO: 15312 - RNA, 20 nt, Artificial Sequence
  HTT spacer sequence CTCN PAM
gccuccugaguagcugggau

SEQ ID NO: 15313 - RNA, 20 nt, Artificial Sequence
  HTT spacer sequence CTCN PAM
ugaguagcugggauuacagg

SEQ ID NO: 15314 - RNA, 20 nt, Artificial Sequence
  HTT spacer sequence CTCN PAM
ggaggcugaggcaggagaau

SEQ ID NO: 15315 - RNA, 20 nt, Artificial Sequence
  HTT spacer sequence CTCN PAM
acuaaaaauacaaaauuagc

SEQ ID NO: 15316 - RNA, 20 nt, Artificial Sequence
  HTT spacer sequence CTCN PAM
auguuggucaggcuggucuc

SEQ ID NO: 15317 - RNA, 20 nt, Artificial Sequence
  HTT spacer sequence CTCN PAM
aacucccaaccucaggugau

SEQ ID NO: 15318 - RNA, 20 nt, Artificial Sequence
  HTT spacer sequence CTCN PAM
caaccucaggugauccgccc

SEQ ID NO: 15319 - RNA, 20 nt, Artificial Sequence
  HTT spacer sequence CTCN PAM
ggugauccgcccuccucgac

SEQ ID NO: 15320 - RNA, 20 nt, Artificial Sequence
  HTT spacer sequence CTCN PAM
ucgaccccccaaagugcugg

SEQ ID NO: 15321 - RNA, 20 nt, Artificial Sequence
  HTT spacer sequence CTCN PAM
accccccaaagugcugggau

SEQ ID NO: 15322 - RNA, 20 nt, Artificial Sequence
  HTT spacer sequence CTCN PAM
caccuguaaucccagcacuu

SEQ ID NO: 15323 - RNA, 20 nt, Artificial Sequence
  HTT spacer sequence CTCN PAM
aaagcaucacacuauauacu

SEQ ID NO: 15324 - RNA, 20 nt, Artificial Sequence
  HTT spacer sequence CTCN PAM
auauuguuaaaaauucucca

SEQ ID NO: 15325 - RNA, 20 nt, Artificial Sequence
  HTT spacer sequence CTCN PAM
auauuacaauccagauuaua

SEQ ID NO: 15326 - RNA, 20 nt, Artificial Sequence
  HTT spacer sequence CTCN PAM
cacuggcagauaaucaccaa

SEQ ID NO: 15327 - RNA, 20 nt, Artificial Sequence
  HTT spacer sequence CTCN PAM
aauuuucuaaaaugagcaag

SEQ ID NO: 15328 - RNA, 20 nt, Artificial Sequence
  HTT spacer sequence CTCN PAM
uuuuagaaaauuugagaaua

SEQ ID NO: 15329 - RNA, 20 nt, Artificial Sequence
  HTT spacer sequence CTCN PAM
aaaaauaaaaauaaaaaggu

SEQ ID NO: 15330 - RNA, 20 nt, Artificial Sequence
  HTT spacer sequence CTCN PAM
cucuguugcccaggcuagag

SEQ ID NO: 15331 - RNA, 20 nt, Artificial Sequence
  HTT spacer sequence CTCN PAM
guugcccaggcuagagcaca

SEQ ID NO: 15332 - RNA, 20 nt, Artificial Sequence
  HTT spacer sequence CTCN PAM
agccugggcaacagagugag

SEQ ID NO: 15333 - RNA, 20 nt, Artificial Sequence
  HTT spacer sequence CTCN PAM
cugcagccuccgcuuccugg

SEQ ID NO: 15334 - RNA, 20 nt, Artificial Sequence
  HTT spacer sequence CTCN PAM
gcuuccuggguucaaaugau

SEQ ID NO: 15335 - RNA, 20 nt, Artificial Sequence
  HTT spacer sequence CTCN PAM
ggccccagccuccugagugg

SEQ ID NO: 15336 - RNA, 20 nt, Artificial Sequence
  HTT spacer sequence CTCN PAM
ugaguggcuggaauuacagg

SEQ ID NO: 15337 - RNA, 20 nt, Artificial Sequence
  HTT spacer sequence CTCN PAM
ggaggcuggggccagagaau

SEQ ID NO: 15338 - RNA, 20 nt, Artificial Sequence
  HTT spacer sequence CTCN PAM
acuaaaaauacaaaaauuag

SEQ ID NO: 15339 - RNA, 20 nt, Artificial Sequence
  HTT spacer sequence CTCN PAM
aacuccugaccucgugaucc

SEQ ID NO: 15340 - RNA, 20 nt, Artificial Sequence
  HTT spacer sequence CTCN PAM
ugaccucgugauccacccac

SEQ ID NO: 15341 - RNA, 20 nt, Artificial Sequence
  HTT spacer sequence CTCN PAM
ugauccacccaccucggccu

SEQ ID NO: 15342 - RNA, 20 nt, Artificial Sequence
  HTT spacer sequence CTCN PAM
gccucccaaagugcugggau

SEQ ID NO: 15343 - RNA, 20 nt, Artificial Sequence
  HTT spacer sequence CTCN PAM
caaagugcugggauuacagg

SEQ ID NO: 15344 - RNA, 20 nt, Artificial Sequence
  HTT spacer sequence CTCN PAM
cgccuguaaucccagcacuu

SEQ ID NO: 15345 - RNA, 20 nt, Artificial Sequence
  HTT spacer sequence CTCN PAM
cugaccagccugcagaaacc

SEQ ID NO: 15346 - RNA, 20 nt, Artificial Sequence
  HTT spacer sequence CTCN PAM
agcuuaccacaucgucuccc

SEQ ID NO: 15347 - RNA, 20 nt, Artificial Sequence
  HTT spacer sequence CTCN PAM
gcuccuaaggaugugcaggg

SEQ ID NO: 15348 - RNA, 20 nt, Artificial Sequence
  HTT spacer sequence CTCN PAM
uaaggaugugcaggggcagu

SEQ ID NO: 15349 - RNA, 20 nt, Artificial Sequence
  HTT spacer sequence CTCN PAM
acugccccugcacauccuua

SEQ ID NO: 15350 - RNA, 20 nt, Artificial Sequence
  HTT spacer sequence CTCN PAM
caacugccccugcacauccu

SEQ ID NO: 15351 - RNA, 20 nt, Artificial Sequence
  HTT spacer sequence CTCN PAM
cacccuuccgccucucaacu

SEQ ID NO: 15352 - RNA, 20 nt, Artificial Sequence
  HTT spacer sequence CTCN PAM
cuucauugggauauaauugc

SEQ ID NO: 15353 - RNA, 20 nt, Artificial Sequence
  HTT spacer sequence CTCN PAM
ucauugggauauaauugcca

SEQ ID NO: 15354 - RNA, 20 nt, Artificial Sequence
  HTT spacer sequence CTCN PAM
aacacguguuaucagaaugg

SEQ ID NO: 15355 - RNA, 20 nt, Artificial Sequence
  HTT spacer sequence CTCN PAM
guuuucuucucauuguuugu

SEQ ID NO: 15356 - RNA, 20 nt, Artificial Sequence
  HTT spacer sequence CTCN PAM
uuguuuguacuuuuuauaaa

SEQ ID NO: 15357 - RNA, 20 nt, Artificial Sequence
  HTT spacer sequence CTCN PAM
uguuacccuuuauaaaaagu

SEQ ID NO: 15358 - RNA, 20 nt, Artificial Sequence
  HTT spacer sequence CTCN PAM
guuuggaugcugugaagcuu

SEQ ID NO: 15359 - RNA, 20 nt, Artificial Sequence
  HTT spacer sequence CTCN PAM
aaaugcaaacugggaaggca

SEQ ID NO: 15360 - RNA, 20 nt, Artificial Sequence
  HTT spacer sequence CTCN PAM
guauauauuaauaguugucu

SEQ ID NO: 15361 - RNA, 20 nt, Artificial Sequence
  HTT spacer sequence CTCN PAM
cacagcuaauauagcagaaa

SEQ ID NO: 15362 - RNA, 20 nt, Artificial Sequence
  HTT spacer sequence CTCN PAM
ugucacuagucucacacagc

SEQ ID NO: 15363 - RNA, 20 nt, Artificial Sequence
  HTT spacer sequence CTCN PAM
uuagcuugacucuuuccaaa

SEQ ID NO: 15364 - RNA, 20 nt, Artificial Sequence
  HTT spacer sequence CTCN PAM
uuccaaaauuauuugcugug

SEQ ID NO: 15365 - RNA, 20 nt, Artificial Sequence
  HTT spacer sequence CTCN PAM
aguagauggcccuacuagca

SEQ ID NO: 15366 - RNA, 20 nt, Artificial Sequence
  HTT spacer sequence CTCN PAM
agcauucaggaauaggcuuu

SEQ ID NO: 15367 - RNA, 20 nt, Artificial Sequence
  HTT spacer sequence CTCN PAM
guaauugauacacaaaauga

SEQ ID NO: 15368 - RNA, 20 nt, Artificial Sequence
  HTT spacer sequence CTCN PAM
caucacauuugagaaguaaa

SEQ ID NO: 15369 - RNA, 20 nt, Artificial Sequence
  HTT spacer sequence CTCN PAM
aaugugaugugagucaccaa

SEQ ID NO: 15370 - RNA, 20 nt, Artificial Sequence
  HTT spacer sequence CTCN PAM
agaaugauugcuuucccacc

SEQ ID NO: 15371 - RNA, 20 nt, Artificial Sequence
  HTT spacer sequence CTCN PAM
cauacagacugagcagcuac

SEQ ID NO: 15372 - RNA, 20 nt, Artificial Sequence
  HTT spacer sequence CTCN PAM
gucuguaugugaggaaggug

SEQ ID NO: 15373 - RNA, 20 nt, Artificial Sequence
  HTT spacer sequence CTCN PAM
aaugccaaaguugcccagaa

SEQ ID NO: 15374 - RNA, 20 nt, Artificial Sequence
  HTT spacer sequence CTCN PAM
uuucugcaucuguucacaag

SEQ ID NO: 15375 - RNA, 20 nt, Artificial Sequence
  HTT spacer sequence CTCN PAM
uaaauaucaaccccuuguga

SEQ ID NO: 15376 - RNA, 20 nt, Artificial Sequence
  HTT spacer sequence CTCN PAM
auauccauucuauguucucu

SEQ ID NO: 15377 - RNA, 20 nt, Artificial Sequence
  HTT spacer sequence CTCN PAM
uaaugcucagucagcaccuc

SEQ ID NO: 15378 - RNA, 20 nt, Artificial Sequence
  HTT spacer sequence CTCN PAM
gucagcaccucaggugguug

SEQ ID NO: 15379 - RNA, 20 nt, Artificial Sequence
  HTT spacer sequence CTCN PAM
ggugguuggaguucaaugcu

SEQ ID NO: 15380 - RNA, 20 nt, Artificial Sequence
  HTT spacer sequence CTCN PAM
aaccaccugaggugcugacu

SEQ ID NO: 15381 - RNA, 20 nt, Artificial Sequence
  HTT spacer sequence CTCN PAM
auccccuagaaaagacagug

SEQ ID NO: 15382 - RNA, 20 nt, Artificial Sequence
  HTT spacer sequence CTCN PAM
aauaagcaggacuacccagg

SEQ ID NO: 15383 - RNA, 20 nt, Artificial Sequence
  HTT spacer sequence CTCN PAM
uuauuacuauggaaaaauag

SEQ ID NO: 15384 - RNA, 20 nt, Artificial Sequence
  HTT spacer sequence CTCN PAM
uuuauuuugugccuguuuac

SEQ ID NO: 15385 - RNA, 20 nt, Artificial Sequence
  HTT spacer sequence CTCN PAM
auggcauuaacaugcccaaa

SEQ ID NO: 15386 - RNA, 20 nt, Artificial Sequence
  HTT spacer sequence CTCN PAM
ucuccaguucagcagaacca

SEQ ID NO: 15387 - RNA, 20 nt, Artificial Sequence
  HTT spacer sequence CTCN PAM
aguucagcagaaccauuguc

SEQ ID NO: 15388 - RNA, 20 nt, Artificial Sequence
  HTT spacer sequence CTCN PAM
aaugauuuuuauggagcucu

SEQ ID NO: 15389 - RNA, 20 nt, Artificial Sequence
  HTT spacer sequence CTCN PAM
auaaaaaucauuugagaaau

SEQ ID NO: 15390 - RNA, 20 nt, Artificial Sequence
  HTT spacer sequence CTCN PAM
gauuuauaggaaagauguua

SEQ ID NO: 15391 - RNA, 20 nt, Artificial Sequence
  HTT spacer sequence CTCN PAM
gaaauuguuuuauuuuuaau

SEQ ID NO: 15392 - RNA, 20 nt, Artificial Sequence
  HTT spacer sequence CTCN PAM
uggaauugcaagagaaagga

SEQ ID NO: 15393 - RNA, 20 nt, Artificial Sequence
  HTT spacer sequence CTCN PAM
ugcaauuccaagaggaaggc

SEQ ID NO: 15394 - RNA, 20 nt, Artificial Sequence
  HTT spacer sequence CTCN PAM
ggaagcagacauuugcaaag

SEQ ID NO: 15395 - RNA, 20 nt, Artificial Sequence
  HTT spacer sequence CTCN PAM
acugagugccucagaugagu

SEQ ID NO: 15396 - RNA, 20 nt, Artificial Sequence
  HTT spacer sequence CTCN PAM
guggaggcacucuggaagca

SEQ ID NO: 15397 - RNA, 20 nt, Artificial Sequence
  HTT spacer sequence CTCN PAM
gaugagucuaggaagagcug

SEQ ID NO: 15398 - RNA, 20 nt, Artificial Sequence
  HTT spacer sequence CTCN PAM
ucugaggcacucaguggagg

SEQ ID NO: 15399 - RNA, 20 nt, Artificial Sequence
  HTT spacer sequence CTCN PAM
uccuagacucaucugaggca

SEQ ID NO: 15400 - RNA, 20 nt, Artificial Sequence
  HTT spacer sequence CTCN PAM
cgucagcuugguucccauug

SEQ ID NO: 15401 - RNA, 20 nt, Artificial Sequence
  HTT spacer sequence CTCN PAM
ucagcuugguucccauugga

SEQ ID NO: 15402 - RNA, 20 nt, Artificial Sequence
  HTT spacer sequence CTCN PAM
cagcccaucaagaugcuuug

SEQ ID NO: 15403 - RNA, 20 nt, Artificial Sequence
  HTT spacer sequence CTCN PAM
gcccaucaagaugcuuugau

SEQ ID NO: 15404 - RNA, 20 nt, Artificial Sequence
  HTT spacer sequence CTCN PAM
guaccaguaccugcaagcaa

SEQ ID NO: 15405 - RNA, 20 nt, Artificial Sequence
  HTT spacer sequence CTCN PAM
aggacuuggauuuugauuuc

SEQ ID NO: 15406 - RNA, 20 nt, Artificial Sequence
  HTT spacer sequence CTCN PAM
ccacccccauucccccuaag

SEQ ID NO: 15407 - RNA, 20 nt, Artificial Sequence
  HTT spacer sequence CTCN PAM
uaugcucaccacccccauuc

SEQ ID NO: 15408 - RNA, 20 nt, Artificial Sequence
  HTT spacer sequence CTCN PAM
gcacagaacagcugccaacu

SEQ ID NO: 15409 - RNA, 20 nt, Artificial Sequence
  HTT spacer sequence CTCN PAM
ucccaauauagccccucagu

SEQ ID NO: 15410 - RNA, 20 nt, Artificial Sequence
  HTT spacer sequence CTCN PAM
guuaacuacaaguaaacuca

SEQ ID NO: 15411 - RNA, 20 nt, Artificial Sequence
  HTT spacer sequence CTCN PAM
uuuugaauuucauuuuaaug

SEQ ID NO: 15412 - RNA, 20 nt, Artificial Sequence
  HTT spacer sequence CTCN PAM
cucgggcacugggauguuaa

SEQ ID NO: 15413 - RNA, 20 nt, Artificial Sequence
  HTT spacer sequence CTCN PAM
ggcacugggauguuaagaaa

SEQ ID NO: 15414 - RNA, 20 nt, Artificial Sequence
  HTT spacer sequence CTCN PAM
aguuaguuuuagauuagagg

SEQ ID NO: 15415 - RNA, 20 nt, Artificial Sequence
  HTT spacer sequence CTCN PAM
aaucuaaaacuaacuugaga

SEQ ID NO: 15416 - RNA, 20 nt, Artificial Sequence
  HTT spacer sequence CTCN PAM
gugugaccacugcacuuuug

SEQ ID NO: 15417 - RNA, 20 nt, Artificial Sequence
  HTT spacer sequence CTCN PAM
ccuugggcagauuuaugggc

SEQ ID NO: 15418 - RNA, 20 nt, Artificial Sequence
  HTT spacer sequence CTCN PAM
uugggcagauuuaugggcug

SEQ ID NO: 15419 - RNA, 20 nt, Artificial Sequence
  HTT spacer sequence CTCN PAM
uuccuaccagcccauaaauc

SEQ ID NO: 15420 - RNA, 20 nt, Artificial Sequence
  HTT spacer sequence CTCN PAM
guguugugcucuuuccuacc

SEQ ID NO: 15421 - RNA, 20 nt, Artificial Sequence
  HTT spacer sequence CTCN PAM
ccguguugugcucuuuccua

SEQ ID NO: 15422 - RNA, 20 nt, Artificial Sequence
  HTT spacer sequence CTCN PAM
auuaucaucgccaaggugcu

SEQ ID NO: 15423 - RNA, 20 nt, Artificial Sequence
  HTT spacer sequence CTCN PAM
gucuuccuugcuggccacau

SEQ ID NO: 15424 - RNA, 20 nt, Artificial Sequence
  HTT spacer sequence CTCN PAM
caaaaucaauuucaauggac

SEQ ID NO: 15425 - RNA, 20 nt, Artificial Sequence
  HTT spacer sequence CTCN PAM
augaaagaauuggggccugu

SEQ ID NO: 15426 - RNA, 20 nt, Artificial Sequence
  HTT spacer sequence CTCN PAM
uauagcccccugaagcaaau

SEQ ID NO: 15427 - RNA, 20 nt, Artificial Sequence
  HTT spacer sequence CTCN PAM
ccuauagcccccugaagcaa

SEQ ID NO: 15428 - RNA, 20 nt, Artificial Sequence
  HTT spacer sequence CTCN PAM
ucuuuuagucccuuucacga

SEQ ID NO: 15429 - RNA, 20 nt, Artificial Sequence
  HTT spacer sequence CTCN PAM
agcccauguucaaguuggau

SEQ ID NO: 15430 - RNA, 20 nt, Artificial Sequence
  HTT spacer sequence CTCN PAM
uccagcccauguucaaguug

SEQ ID NO: 15431 - RNA, 20 nt, Artificial Sequence
  HTT spacer sequence CTCN PAM
cuaccuucuccuccagccca

SEQ ID NO: 15432 - RNA, 20 nt, Artificial Sequence
  HTT spacer sequence CTCN PAM
ggagauuaauguugaugcua

SEQ ID NO: 15433 - RNA, 20 nt, Artificial Sequence
  HTT spacer sequence CTCN PAM
ugagucucccuaccuucucc

SEQ ID NO: 15434 - RNA, 20 nt, Artificial Sequence
  HTT spacer sequence CTCN PAM
uacaaucagugucuucccua

SEQ ID NO: 15435 - RNA, 20 nt, Artificial Sequence
  HTT spacer sequence CTCN PAM
uucauucucuuacaaucagu

SEQ ID NO: 15436 - RNA, 20 nt, Artificial Sequence
  HTT spacer sequence CTCN PAM
aacugaaacugauguuuccc

SEQ ID NO: 15437 - RNA, 20 nt, Artificial Sequence
  HTT spacer sequence CTCN PAM
caacauagggucuuaaauga

SEQ ID NO: 15438 - RNA, 20 nt, Artificial Sequence
  HTT spacer sequence CTCN PAM
acauagggucuuaaaugacu

SEQ ID NO: 15439 - RNA, 20 nt, Artificial Sequence
  HTT spacer sequence CTCN PAM
accccaauagcaugggaagg

SEQ ID NO: 15440 - RNA, 20 nt, Artificial Sequence
  HTT spacer sequence CTCN PAM
ccaccccaauagcaugggaa

SEQ ID NO: 15441 - RNA, 20 nt, Artificial Sequence
  HTT spacer sequence CTCN PAM
caaaucucugagaaguucau

SEQ ID NO: 15442 - RNA, 20 nt, Artificial Sequence
  HTT spacer sequence CTCN PAM
gagaaguucaugggccucug

SEQ ID NO: 15443 - RNA, 20 nt, Artificial Sequence
  HTT spacer sequence CTCN PAM
gagauuugggagcacuggcu

SEQ ID NO: 15444 - RNA, 20 nt, Artificial Sequence
  HTT spacer sequence CTCN PAM
gaagaagaagccaacccagc

SEQ ID NO: 15445 - RNA, 20 nt, Artificial Sequence
  HTT spacer sequence CTCN PAM
ugcuugguggcugcuggguu

SEQ ID NO: 15446 - RNA, 20 nt, Artificial Sequence
  HTT spacer sequence CTCN PAM
ucuugcuugguggcugcugg

SEQ ID NO: 15447 - RNA, 20 nt, Artificial Sequence
  HTT spacer sequence CTCN PAM
accaugggcaccagggcccg

SEQ ID NO: 15448 - RNA, 20 nt, Artificial Sequence
  HTT spacer sequence CTCN PAM
ucucucaccugcugaaggug

SEQ ID NO: 15449 - RNA, 20 nt, Artificial Sequence
  HTT spacer sequence CTCN PAM
caccugcugaaggugauuaa

SEQ ID NO: 15450 - RNA, 20 nt, Artificial Sequence
  HTT spacer sequence CTCN PAM
ccugcugaaggugauuaaca

SEQ ID NO: 15451 - RNA, 20 nt, Artificial Sequence
  HTT spacer sequence CTCN PAM
uggacccgcaauaaagguaa

SEQ ID NO: 15452 - RNA, 20 nt, Artificial Sequence
  HTT spacer sequence CTCN PAM
uuuugcuuuaaaugaacaaa

SEQ ID NO: 15453 - RNA, 20 nt, Artificial Sequence
  HTT spacer sequence CTCN PAM
gauugugacacuaaauuuaa

SEQ ID NO: 15454 - RNA, 20 nt, Artificial Sequence
  HTT spacer sequence CTCN PAM
ugccuguuauuccagcacuu

SEQ ID NO: 15455 - RNA, 20 nt, Artificial Sequence
  HTT spacer sequence CTCN PAM
caaagugcuggaauaacagg

SEQ ID NO: 15456 - RNA, 20 nt, Artificial Sequence
  HTT spacer sequence CTCN PAM
gucucccaaagugcuggaau

SEQ ID NO: 15457 - RNA, 20 nt, Artificial Sequence
  HTT spacer sequence CTCN PAM
agugauccacuugccucagu

SEQ ID NO: 15458 - RNA, 20 nt, Artificial Sequence
  HTT spacer sequence CTCN PAM
uggccucaagugauccacuu

SEQ ID NO: 15459 - RNA, 20 nt, Artificial Sequence
  HTT spacer sequence CTCN PAM
aacucuuggccucaagugau

SEQ ID NO: 15460 - RNA, 20 nt, Artificial Sequence
  HTT spacer sequence CTCN PAM
cuacuaaaaauacaaaaaau

SEQ ID NO: 15461 - RNA, 20 nt, Artificial Sequence
  HTT spacer sequence CTCN PAM
acuaaaaauacaaaaaauua

SEQ ID NO: 15462 - RNA, 20 nt, Artificial Sequence
  HTT spacer sequence CTCN PAM
agccuguaaucccagcacuu

SEQ ID NO: 15463 - RNA, 20 nt, Artificial Sequence
  HTT spacer sequence CTCN PAM
caaagugcugggauuacagg

SEQ ID NO: 15464 - RNA, 20 nt, Artificial Sequence
  HTT spacer sequence CTCN PAM
gccucccaaagugcugggau

SEQ ID NO: 15465 - RNA, 20 nt, Artificial Sequence
  HTT spacer sequence CTCN PAM
ugauccgcccaccucggccu

SEQ ID NO: 15466 - RNA, 20 nt, Artificial Sequence
  HTT spacer sequence CTCN PAM
ugaccucgugauccgcccac

SEQ ID NO: 15467 - RNA, 20 nt, Artificial Sequence
  HTT spacer sequence CTCN PAM
acuaaaaauacaaaaaaauu

SEQ ID NO: 15468 - RNA, 20 nt, Artificial Sequence
  HTT spacer sequence CTCN PAM
gauaauuuuuuuguauuuuu

SEQ ID NO: 15469 - RNA, 20 nt, Artificial Sequence
  HTT spacer sequence CTCN PAM
ggaggcugaggcaggagaau

SEQ ID NO: 15470 - RNA, 20 nt, Artificial Sequence
  HTT spacer sequence CTCN PAM
cgagcagcugggacuacagg

SEQ ID NO: 15471 - RNA, 20 nt, Artificial Sequence
  HTT spacer sequence CTCN PAM
gccucccgagcagcugggac

SEQ ID NO: 15472 - RNA, 20 nt, Artificial Sequence
  HTT spacer sequence CTCN PAM
ugccucagccucccgagcag

SEQ ID NO: 15473 - RNA, 20 nt, Artificial Sequence
  HTT spacer sequence CTCN PAM
cggauucacgccauucuccu

SEQ ID NO: 15474 - RNA, 20 nt, Artificial Sequence
  HTT spacer sequence CTCN PAM
gccucccggauucacgccau

SEQ ID NO: 15475 - RNA, 20 nt, Artificial Sequence
  HTT spacer sequence CTCN PAM
cugcaagcuccgccucccgg

SEQ ID NO: 15476 - RNA, 20 nt, Artificial Sequence
  HTT spacer sequence CTCN PAM
gcucacugcaagcuccgccu

SEQ ID NO: 15477 - RNA, 20 nt, Artificial Sequence
  HTT spacer sequence CTCN PAM
agccugggugacagagcgag

SEQ ID NO: 15478 - RNA, 20 nt, Artificial Sequence
  HTT spacer sequence CTCN PAM
gucacccaggcuggagugca

SEQ ID NO: 15479 - RNA, 20 nt, Artificial Sequence
  HTT spacer sequence CTCN PAM
cucugucacccaggcuggag

SEQ ID NO: 15480 - RNA, 20 nt, Artificial Sequence
  HTT spacer sequence CTCN PAM
gucucaaaaaaaaaauuaga

SEQ ID NO: 15481 - RNA, 20 nt, Artificial Sequence
  HTT spacer sequence CTCN PAM
aaaaaaaaauuagaugggca

SEQ ID NO: 15482 - RNA, 20 nt, Artificial Sequence
  HTT spacer sequence CTCN PAM
caaguagcugggauuacagg

SEQ ID NO: 15483 - RNA, 20 nt, Artificial Sequence
  HTT spacer sequence CTCN PAM
gccucccaaguagcugggau

SEQ ID NO: 15484 - RNA, 20 nt, Artificial Sequence
  HTT spacer sequence CTCN PAM
ugccucagccucccaaguag

SEQ ID NO: 15485 - RNA, 20 nt, Artificial Sequence
  HTT spacer sequence CTCN PAM
cuugccucagccucccaagu

SEQ ID NO: 15486 - RNA, 20 nt, Artificial Sequence
  HTT spacer sequence CTCN PAM
cagguucaagcaacucucuu

SEQ ID NO: 15487 - RNA, 20 nt, Artificial Sequence
  HTT spacer sequence CTCN PAM
gccucccagguucaagcaac

SEQ ID NO: 15488 - RNA, 20 nt, Artificial Sequence
  HTT spacer sequence CTCN PAM
agccugggugacagagucag

SEQ ID NO: 15489 - RNA, 20 nt, Artificial Sequence
  HTT spacer sequence CTCN PAM
gucacccaggcuggagugca

SEQ ID NO: 15490 - RNA, 20 nt, Artificial Sequence
  HTT spacer sequence CTCN PAM
uuccaaaagaagaaaaaaau

SEQ ID NO: 15491 - RNA, 20 nt, Artificial Sequence
  HTT spacer sequence CTCN PAM
uuuaguaucaucagucacug

SEQ ID NO: 15492 - RNA, 20 nt, Artificial Sequence
  HTT spacer sequence CTCN PAM
uagggauaacagugacugau

SEQ ID NO: 15493 - RNA, 20 nt, Artificial Sequence
  HTT spacer sequence CTCN PAM
gaauugauguuccuggccaa

SEQ ID NO: 15494 - RNA, 20 nt, Artificial Sequence
  HTT spacer sequence CTCN PAM
uugcugucuccuuaaaucuu

SEQ ID NO: 15495 - RNA, 20 nt, Artificial Sequence
  HTT spacer sequence CTCN PAM
uuaaaucuugguuaauggcu

SEQ ID NO: 15496 - RNA, 20 nt, Artificial Sequence
  HTT spacer sequence CTCN PAM
auaacuaugcuagccaggac

SEQ ID NO: 15497 - RNA, 20 nt, Artificial Sequence
  HTT spacer sequence CTCN PAM
gggacaguuuugcuuuucug

SEQ ID NO: 15498 - RNA, 20 nt, Artificial Sequence
  HTT spacer sequence CTCN PAM
aaaaaaaaaaaaaaaaaaag

SEQ ID NO: 15499 - RNA, 20 nt, Artificial Sequence
  HTT spacer sequence CTCN PAM
aucucaaaaaaaaaaaaaaa

SEQ ID NO: 15500 - RNA, 20 nt, Artificial Sequence
  HTT spacer sequence CTCN PAM
agcccaggcaacaagaauga

SEQ ID NO: 15501 - RNA, 20 nt, Artificial Sequence
  HTT spacer sequence CTCN PAM
gcucacugcaacuucugccu

SEQ ID NO: 15502 - RNA, 20 nt, Artificial Sequence
  HTT spacer sequence CTCN PAM
cugcaacuucugccuccugg

SEQ ID NO: 15503 - RNA, 20 nt, Artificial Sequence
  HTT spacer sequence CTCN PAM
uggguucaaacgauucuucu

SEQ ID NO: 15504 - RNA, 20 nt, Artificial Sequence
  HTT spacer sequence CTCN PAM
gccucucgaggcagauuaca

SEQ ID NO: 15505 - RNA, 20 nt, Artificial Sequence
  HTT spacer sequence CTCN PAM
cgaggcagauuacagcuggg

SEQ ID NO: 15506 - RNA, 20 nt, Artificial Sequence
  HTT spacer sequence CTCN PAM
aggcagauuacagcugggau

SEQ ID NO: 15507 - RNA, 20 nt, Artificial Sequence
  HTT spacer sequence CTCN PAM
agaggcugaggcagaagaau

SEQ ID NO: 15508 - RNA, 20 nt, Artificial Sequence
  HTT spacer sequence CTCN PAM
acuaaaacuacaaaaaaauu

SEQ ID NO: 15509 - RNA, 20 nt, Artificial Sequence
  HTT spacer sequence CTCN PAM
aacuccugaccugaagugau

SEQ ID NO: 15510 - RNA, 20 nt, Artificial Sequence
  HTT spacer sequence CTCN PAM
ugaccugaagugaucuaucc

SEQ ID NO: 15511 - RNA, 20 nt, Artificial Sequence
  HTT spacer sequence CTCN PAM
caaaguguugggauuacggg

SEQ ID NO: 15512 - RNA, 20 nt, Artificial Sequence
  HTT spacer sequence CTCN PAM
ugcccguaaucccaacacuu

SEQ ID NO: 15513 - RNA, 20 nt, Artificial Sequence
  HTT spacer sequence CTCN PAM
cucuuugccuugucuucuac

SEQ ID NO: 15514 - RNA, 20 nt, Artificial Sequence
  HTT spacer sequence CTCN PAM
cuuugccuugucuucuaccu

SEQ ID NO: 15515 - RNA, 20 nt, Artificial Sequence
  HTT spacer sequence CTCN PAM
uugccuugucuucuaccuuu

SEQ ID NO: 15516 - RNA, 20 nt, Artificial Sequence
  HTT spacer sequence CTCN PAM
cuacuaacuucccauucucc

SEQ ID NO: 15517 - RNA, 20 nt, Artificial Sequence
  HTT spacer sequence CTCN PAM
uuuagcugccaucagucuuc

SEQ ID NO: 15518 - RNA, 20 nt, Artificial Sequence
  HTT spacer sequence CTCN PAM
cuucucugcaaacaucucug

SEQ ID NO: 15519 - RNA, 20 nt, Artificial Sequence
  HTT spacer sequence CTCN PAM
gcaaacaucucuggagaguc

SEQ ID NO: 15520 - RNA, 20 nt, Artificial Sequence
  HTT spacer sequence CTCN PAM
ggagagucccagccucagcc

SEQ ID NO: 15521 - RNA, 20 nt, Artificial Sequence
  HTT spacer sequence CTCN PAM
agagauguuugcagagaagg

SEQ ID NO: 15522 - RNA, 20 nt, Artificial Sequence
  HTT spacer sequence CTCN PAM
ccagagauguuugcagagaa

SEQ ID NO: 15523 - RNA, 20 nt, Artificial Sequence
  HTT spacer sequence CTCN PAM
gcccacagagcuucccacug

SEQ ID NO: 15524 - RNA, 20 nt, Artificial Sequence
  HTT spacer sequence CTCN PAM
gugggcugaggcugggacuc

SEQ ID NO: 15525 - RNA, 20 nt, Artificial Sequence
  HTT spacer sequence CTCN PAM
gagguggaccuuguuugcaa

SEQ ID NO: 15526 - RNA, 20 nt, Artificial Sequence
  HTT spacer sequence CTCN PAM
gagcagugggaagcucugug

SEQ ID NO: 15527 - RNA, 20 nt, Artificial Sequence
  HTT spacer sequence CTCN PAM
cuuggccuggacccugucua

SEQ ID NO: 15528 - RNA, 20 nt, Artificial Sequence
  HTT spacer sequence CTCN PAM
uggccuggacccugucuacu

SEQ ID NO: 15529 - RNA, 20 nt, Artificial Sequence
  HTT spacer sequence CTCN PAM
auagcagcguuucccgccca

SEQ ID NO: 15530 - RNA, 20 nt, Artificial Sequence
  HTT spacer sequence CTCN PAM
gggcacugcucugguccugc

SEQ ID NO: 15531 - RNA, 20 nt, Artificial Sequence
  HTT spacer sequence CTCN PAM
gguccugccugccuuucccu

SEQ ID NO: 15532 - RNA, 20 nt, Artificial Sequence
  HTT spacer sequence CTCN PAM
uuguauccugcaggcugcua

SEQ ID NO: 15533 - RNA, 20 nt, Artificial Sequence
  HTT spacer sequence CTCN PAM
agauggggguagcagccugc

SEQ ID NO: 15534 - RNA, 20 nt, Artificial Sequence
  HTT spacer sequence CTCN PAM
ucaguuggcuuucagagggc

SEQ ID NO: 15535 - RNA, 20 nt, Artificial Sequence
  HTT spacer sequence CTCN PAM
gaaagccaacugaagaggac

SEQ ID NO: 15536 - RNA, 20 nt, Artificial Sequence
  HTT spacer sequence CTCN PAM
uggguguucccuuacccacu

SEQ ID NO: 15537 - RNA, 20 nt, Artificial Sequence
  HTT spacer sequence CTCN PAM
ccagucacuggguucagucc

SEQ ID NO: 15538 - RNA, 20 nt, Artificial Sequence
  HTT spacer sequence CTCN PAM
guccuaggccgucuucucuc

SEQ ID NO: 15539 - RNA, 20 nt, Artificial Sequence
  HTT spacer sequence CTCN PAM
cuuuguagucucugggccag

SEQ ID NO: 15540 - RNA, 20 nt, Artificial Sequence
  HTT spacer sequence CTCN PAM
uuguagucucugggccagug

SEQ ID NO: 15541 - RNA, 20 nt, Artificial Sequence
  HTT spacer sequence CTCN PAM
gggccagugcuguucuagag

SEQ ID NO: 15542 - RNA, 20 nt, Artificial Sequence
  HTT spacer sequence CTCN PAM
agaacagcacuggcccagag

SEQ ID NO: 15543 - RNA, 20 nt, Artificial Sequence
  HTT spacer sequence CTCN PAM
cuagaacagcacuggcccag

SEQ ID NO: 15544 - RNA, 20 nt, Artificial Sequence
  HTT spacer sequence CTCN PAM
auagcuaugccaggcaagac

SEQ ID NO: 15545 - RNA, 20 nt, Artificial Sequence
  HTT spacer sequence CTCN PAM
acagcuauauguguuuagug

SEQ ID NO: 15546 - RNA, 20 nt, Artificial Sequence
  HTT spacer sequence CTCN PAM
aguauugggcagggcagccu

SEQ ID NO: 15547 - RNA, 20 nt, Artificial Sequence
  HTT spacer sequence CTCN PAM
ggcugcccugcccaauacug

SEQ ID NO: 15548 - RNA, 20 nt, Artificial Sequence
  HTT spacer sequence CTCN PAM
caggcugcccugcccaauac

SEQ ID NO: 15549 - RNA, 20 nt, Artificial Sequence
  HTT spacer sequence CTCN PAM
ugucuucagugucuagauga

SEQ ID NO: 15550 - RNA, 20 nt, Artificial Sequence
  HTT spacer sequence CTCN PAM
ucuagacacugaagacagga

SEQ ID NO: 15551 - RNA, 20 nt, Artificial Sequence
  HTT spacer sequence CTCN PAM
gaggaccugucucuggagcu

SEQ ID NO: 15552 - RNA, 20 nt, Artificial Sequence
  HTT spacer sequence CTCN PAM
gaggucccucaucuagacac

SEQ ID NO: 15553 - RNA, 20 nt, Artificial Sequence
  HTT spacer sequence CTCN PAM
ggagcugcaguucaauguag

SEQ ID NO: 15554 - RNA, 20 nt, Artificial Sequence
  HTT spacer sequence CTCN PAM
agagacagguccucugaggu

SEQ ID NO: 15555 - RNA, 20 nt, Artificial Sequence
  HTT spacer sequence CTCN PAM
ucacaccgugucugacauau

SEQ ID NO: 15556 - RNA, 20 nt, Artificial Sequence
  HTT spacer sequence CTCN PAM
gcuuucuguccuccucccca

SEQ ID NO: 15557 - RNA, 20 nt, Artificial Sequence
  HTT spacer sequence CTCN PAM
uccccacaucugccccugcc

SEQ ID NO: 15558 - RNA, 20 nt, Artificial Sequence
  HTT spacer sequence CTCN PAM
ccacaucugccccugcccca

SEQ ID NO: 15559 - RNA, 20 nt, Artificial Sequence
  HTT spacer sequence CTCN PAM
ccaagucuuuuguuuccccu

SEQ ID NO: 15560 - RNA, 20 nt, Artificial Sequence
  HTT spacer sequence CTCN PAM
caaaauauuuaguaggggaa

SEQ ID NO: 15561 - RNA, 20 nt, Artificial Sequence
  HTT spacer sequence CTCN PAM
guuaaaaaccggacugcagg

SEQ ID NO: 15562 - RNA, 20 nt, Artificial Sequence
  HTT spacer sequence CTCN PAM
cgccuguaauuccagaacuu

SEQ ID NO: 15563 - RNA, 20 nt, Artificial Sequence
  HTT spacer sequence CTCN PAM
caaaguucuggaauuacagg

SEQ ID NO: 15564 - RNA, 20 nt, Artificial Sequence
  HTT spacer sequence CTCN PAM
gccucccaaaguucuggaau

SEQ ID NO: 15565 - RNA, 20 nt, Artificial Sequence
  HTT spacer sequence CTCN PAM
ugaccuugugaugcacuggu

SEQ ID NO: 15566 - RNA, 20 nt, Artificial Sequence
  HTT spacer sequence CTCN PAM
aucuccugaccuugugaugc

SEQ ID NO: 15567 - RNA, 20 nt, Artificial Sequence
  HTT spacer sequence CTCN PAM
cacggugaaaccccgucucu

SEQ ID NO: 15568 - RNA, 20 nt, Artificial Sequence
  HTT spacer sequence CTCN PAM
acuaaaaauacaaaaaaaaa

SEQ ID NO: 15569 - RNA, 20 nt, Artificial Sequence
  HTT spacer sequence CTCN PAM
cagguagcugggacuauggg

SEQ ID NO: 15570 - RNA, 20 nt, Artificial Sequence
  HTT spacer sequence CTCN PAM
ugcaucagccucccagguag

SEQ ID NO: 15571 - RNA, 20 nt, Artificial Sequence
  HTT spacer sequence CTCN PAM
cagguucacgccguucuccu

SEQ ID NO: 15572 - RNA, 20 nt, Artificial Sequence
  HTT spacer sequence CTCN PAM
gccucccagguucacgccgu

SEQ ID NO: 15573 - RNA, 20 nt, Artificial Sequence
  HTT spacer sequence CTCN PAM
cugcaagcuccgccucccag

SEQ ID NO: 15574 - RNA, 20 nt, Artificial Sequence
  HTT spacer sequence CTCN PAM
gcucacugcaagcuccgccu

SEQ ID NO: 15575 - RNA, 20 nt, Artificial Sequence
  HTT spacer sequence CTCN PAM
agccugggcgacagagcgag

SEQ ID NO: 15576 - RNA, 20 nt, Artificial Sequence
  HTT spacer sequence CTCN PAM
gucgcccaggcuggagugca

SEQ ID NO: 15577 - RNA, 20 nt, Artificial Sequence
  HTT spacer sequence CTCN PAM
cucugucgcccaggcuggag

SEQ ID NO: 15578 - RNA, 20 nt, Artificial Sequence
  HTT spacer sequence CTCN PAM
gucucaaaaacaaaacaaaa

SEQ ID NO: 15579 - RNA, 20 nt, Artificial Sequence
  HTT spacer sequence CTCN PAM
aaaacaaaacaaaacaaaaa

SEQ ID NO: 15580 - RNA, 20 nt, Artificial Sequence
  HTT spacer sequence CTCN PAM
cuucuuccugugcagccugg

SEQ ID NO: 15581 - RNA, 20 nt, Artificial Sequence
  HTT spacer sequence CTCN PAM
gaugguaaugcuugcucacu

SEQ ID NO: 15582 - RNA, 20 nt, Artificial Sequence
  HTT spacer sequence CTCN PAM
aucuccucucaggccagugg

SEQ ID NO: 15583 - RNA, 20 nt, Artificial Sequence
  HTT spacer sequence CTCN PAM
ucucaggccagugguggcau

SEQ ID NO: 15584 - RNA, 20 nt, Artificial Sequence
  HTT spacer sequence CTCN PAM
caggccagugguggcauuag

SEQ ID NO: 15585 - RNA, 20 nt, Artificial Sequence
  HTT spacer sequence CTCN PAM
ggccagugguggcauuagau

SEQ ID NO: 15586 - RNA, 20 nt, Artificial Sequence
  HTT spacer sequence CTCN PAM
uaggagcguguaugaguucg

SEQ ID NO: 15587 - RNA, 20 nt, Artificial Sequence
  HTT spacer sequence CTCN PAM
uaugagaaucuaaugccacc

SEQ ID NO: 15588 - RNA, 20 nt, Artificial Sequence
  HTT spacer sequence CTCN PAM
uacacgcuccuaugagaauc

SEQ ID NO: 15589 - RNA, 20 nt, Artificial Sequence
  HTT spacer sequence CTCN PAM
cacuucuguaaagacauacc

SEQ ID NO: 15590 - RNA, 20 nt, Artificial Sequence
  HTT spacer sequence CTCN PAM
gguaugucuuuacagaagug

SEQ ID NO: 15591 - RNA, 20 nt, Artificial Sequence
  HTT spacer sequence CTCN PAM
uuucuuuauaugucucaggu

SEQ ID NO: 15592 - RNA, 20 nt, Artificial Sequence
  HTT spacer sequence CTCN PAM
caguucugcaggcuguacag

SEQ ID NO: 15593 - RNA, 20 nt, Artificial Sequence
  HTT spacer sequence CTCN PAM
ggaaacuugcagucauggca

SEQ ID NO: 15594 - RNA, 20 nt, Artificial Sequence
  HTT spacer sequence CTCN PAM
uuuuccugugggccauguga

SEQ ID NO: 15595 - RNA, 20 nt, Artificial Sequence
  HTT spacer sequence CTCN PAM
cuuuuuccugugggccaugu

SEQ ID NO: 15596 - RNA, 20 nt, Artificial Sequence
  HTT spacer sequence CTCN PAM
uucucucuuuuuccuguggg

SEQ ID NO: 15597 - RNA, 20 nt, Artificial Sequence
  HTT spacer sequence CTCN PAM
ccuucucucuuuuuccugug

SEQ ID NO: 15598 - RNA, 20 nt, Artificial Sequence
  HTT spacer sequence CTCN PAM
cuccuucucucuuuuuccug

SEQ ID NO: 15599 - RNA, 20 nt, Artificial Sequence
  HTT spacer sequence CTCN PAM
cucuccuucucucuuuuucc

SEQ ID NO: 15600 - RNA, 20 nt, Artificial Sequence
  HTT spacer sequence CTCN PAM
cucucuccuucucucuuuuu

SEQ ID NO: 15601 - RNA, 20 nt, Artificial Sequence
  HTT spacer sequence CTCN PAM
cucucucuccuucucucuuu

SEQ ID NO: 15602 - RNA, 20 nt, Artificial Sequence
  HTT spacer sequence CTCN PAM
cucucucucuccuucucucu

SEQ ID NO: 15603 - RNA, 20 nt, Artificial Sequence
  HTT spacer sequence CTCN PAM
gucucucucucucucuccuu

SEQ ID NO: 15604 - RNA, 20 nt, Artificial Sequence
  HTT spacer sequence CTCN PAM
cugucucucucucucucucc

SEQ ID NO: 15605 - RNA, 20 nt, Artificial Sequence
  HTT spacer sequence CTCN PAM
cucugucucucucucucucu

SEQ ID NO: 15606 - RNA, 20 nt, Artificial Sequence
  HTT spacer sequence CTCN PAM
cucucugucucucucucucu

SEQ ID NO: 15607 - RNA, 20 nt, Artificial Sequence
  HTT spacer sequence CTCN PAM
cucucucugucucucucucu

SEQ ID NO: 15608 - RNA, 20 nt, Artificial Sequence
  HTT spacer sequence CTCN PAM
cucucucucugucucucucu

SEQ ID NO: 15609 - RNA, 20 nt, Artificial Sequence
  HTT spacer sequence CTCN PAM
aucuuucuuuuucucucucu

SEQ ID NO: 15610 - RNA, 20 nt, Artificial Sequence
  HTT spacer sequence CTCN PAM
caaucuuucuuuuucucucu

SEQ ID NO: 15611 - RNA, 20 nt, Artificial Sequence
  HTT spacer sequence CTCN PAM
cucucaaucuuucuuuuucu

SEQ ID NO: 15612 - RNA, 20 nt, Artificial Sequence
  HTT spacer sequence CTCN PAM
cccucucaaucuuucuuuuu

SEQ ID NO: 15613 - RNA, 20 nt, Artificial Sequence
  HTT spacer sequence CTCN PAM
cucccucucaaucuuucuuu

SEQ ID NO: 15614 - RNA, 20 nt, Artificial Sequence
  HTT spacer sequence CTCN PAM
ucucucccucucaaucuuuc

SEQ ID NO: 15615 - RNA, 20 nt, Artificial Sequence
  HTT spacer sequence CTCN PAM
cuccucucucccucucaauc

SEQ ID NO: 15616 - RNA, 20 nt, Artificial Sequence
  HTT spacer sequence CTCN PAM
uuucucccuccucucucccu

SEQ ID NO: 15617 - RNA, 20 nt, Artificial Sequence
  HTT spacer sequence CTCN PAM
ccuuucucccuccucucucc

SEQ ID NO: 15618 - RNA, 20 nt, Artificial Sequence
  HTT spacer sequence CTCN PAM
cccuacaggcacucuccuuu

SEQ ID NO: 15619 - RNA, 20 nt, Artificial Sequence
  HTT spacer sequence CTCN PAM
uuuguguagcaacucccccu

SEQ ID NO: 15620 - RNA, 20 nt, Artificial Sequence
  HTT spacer sequence CTCN PAM
accauuagaaacuaccccca

SEQ ID NO: 15621 - RNA, 20 nt, Artificial Sequence
  HTT spacer sequence CTCN PAM
caccaggccccaccuccgac

SEQ ID NO: 15622 - RNA, 20 nt, Artificial Sequence
  HTT spacer sequence CTCN PAM
gacacuggagauuacaauuc

SEQ ID NO: 15623 - RNA, 20 nt, Artificial Sequence
  HTT spacer sequence CTCN PAM
agugucggagguggggccug

SEQ ID NO: 15624 - RNA, 20 nt, Artificial Sequence
  HTT spacer sequence CTCN PAM
ugcugaauuguaaucuccag

SEQ ID NO: 15625 - RNA, 20 nt, Artificial Sequence
  HTT spacer sequence CTCN PAM
guguccccacccaaaucuca

SEQ ID NO: 15626 - RNA, 20 nt, Artificial Sequence
  HTT spacer sequence CTCN PAM
gauaugguuuggcucugugu

SEQ ID NO: 15627 - RNA, 20 nt, Artificial Sequence
  HTT spacer sequence CTCN PAM
aaugugcaguucacaauagg

SEQ ID NO: 15628 - RNA, 20 nt, Artificial Sequence
  HTT spacer sequence CTCN PAM
uuaugagaaucuaaugccug

SEQ ID NO: 15629 - RNA, 20 nt, Artificial Sequence
  HTT spacer sequence CTCN PAM
uaaggagcaugcaaccuaga

SEQ ID NO: 15630 - RNA, 20 nt, Artificial Sequence
  HTT spacer sequence CTCN PAM
aaucaucaucaggcauuaga

SEQ ID NO: 15631 - RNA, 20 nt, Artificial Sequence
  HTT spacer sequence CTCN PAM
gcacauaugcaugcaccugu

SEQ ID NO: 15632 - RNA, 20 nt, Artificial Sequence
  HTT spacer sequence CTCN PAM
gccacuucugguccagacug

SEQ ID NO: 15633 - RNA, 20 nt, Artificial Sequence
  HTT spacer sequence CTCN PAM
uuuggauuacugcacuagcc

SEQ ID NO: 15634 - RNA, 20 nt, Artificial Sequence
  HTT spacer sequence CTCN PAM
aaaaaauuaaauuaaauuuu

SEQ ID NO: 15635 - RNA, 20 nt, Artificial Sequence
  HTT spacer sequence CTCN PAM
aagcugggcaacagaaugac

SEQ ID NO: 15636 - RNA, 20 nt, Artificial Sequence
  HTT spacer sequence CTCN PAM
cugcggccucgaucucccag

SEQ ID NO: 15637 - RNA, 20 nt, Artificial Sequence
  HTT spacer sequence CTCN PAM
aucucccaggcucaagugau

SEQ ID NO: 15638 - RNA, 20 nt, Artificial Sequence
  HTT spacer sequence CTCN PAM
caggcucaagugauccuucu

SEQ ID NO: 15639 - RNA, 20 nt, Artificial Sequence
  HTT spacer sequence CTCN PAM
agugauccuucugccucagc

SEQ ID NO: 15640 - RNA, 20 nt, Artificial Sequence
  HTT spacer sequence CTCN PAM
gccuucucaguaguugggac

SEQ ID NO: 15641 - RNA, 20 nt, Artificial Sequence
  HTT spacer sequence CTCN PAM
guaguugggacuacaggcau

SEQ ID NO: 15642 - RNA, 20 nt, Artificial Sequence
  HTT spacer sequence CTCN PAM
aaaaaaaaaaaaaaucaaaa

SEQ ID NO: 15643 - RNA, 20 nt, Artificial Sequence
  HTT spacer sequence CTCN PAM
gucucaaaaaaaaaaaaaaa

SEQ ID NO: 15644 - RNA, 20 nt, Artificial Sequence
  HTT spacer sequence CTCN PAM
gccugucgcccaggcuggag

SEQ ID NO: 15645 - RNA, 20 nt, Artificial Sequence
  HTT spacer sequence CTCN PAM
agccugggcgacaggcugag

SEQ ID NO: 15646 - RNA, 20 nt, Artificial Sequence
  HTT spacer sequence CTCN PAM
gcucacugcaacuucugccu

SEQ ID NO: 15647 - RNA, 20 nt, Artificial Sequence
  HTT spacer sequence CTCN PAM
cugcaacuucugccucccag

SEQ ID NO: 15648 - RNA, 20 nt, Artificial Sequence
  HTT spacer sequence CTCN PAM
cagguucaagugauucuccu

SEQ ID NO: 15649 - RNA, 20 nt, Artificial Sequence
  HTT spacer sequence CTCN PAM
ugccucagccucccgaguag

SEQ ID NO: 15650 - RNA, 20 nt, Artificial Sequence
  HTT spacer sequence CTCN PAM
gccucccgaguaguugggau

SEQ ID NO: 15651 - RNA, 20 nt, Artificial Sequence
  HTT spacer sequence CTCN PAM
cgaguaguugggauuacagg

SEQ ID NO: 15652 - RNA, 20 nt, Artificial Sequence
  HTT spacer sequence CTCN PAM
ggaggcugaggcaggagaau

SEQ ID NO: 15653 - RNA, 20 nt, Artificial Sequence
  HTT spacer sequence CTCN PAM
acuaaaaauacaaaaaguua

SEQ ID NO: 15654 - RNA, 20 nt, Artificial Sequence
  HTT spacer sequence CTCN PAM
aacuugugaccucgugauua

SEQ ID NO: 15655 - RNA, 20 nt, Artificial Sequence
  HTT spacer sequence CTCN PAM
ugauuagcccgccucggccu

SEQ ID NO: 15656 - RNA, 20 nt, Artificial Sequence
  HTT spacer sequence CTCN PAM
gccucccaaagugcugggau

SEQ ID NO: 15657 - RNA, 20 nt, Artificial Sequence
  HTT spacer sequence CTCN PAM
caaagugcugggauuacagg

SEQ ID NO: 15658 - RNA, 20 nt, Artificial Sequence
  HTT spacer sequence CTCN PAM
cgccuguaaucccagcacuu

SEQ ID NO: 15659 - RNA, 20 nt, Artificial Sequence
  HTT spacer sequence CTCN PAM
cagccaggaaacagcauucu

SEQ ID NO: 15660 - RNA, 20 nt, Artificial Sequence
  HTT spacer sequence CTCN PAM
agaaugcuguuuccuggcug

SEQ ID NO: 15661 - RNA, 20 nt, Artificial Sequence
  HTT spacer sequence CTCN PAM
uuaguaugcccacagaguug

SEQ ID NO: 15662 - RNA, 20 nt, Artificial Sequence
  HTT spacer sequence CTCN PAM
gugggcauacuaaagagaau

SEQ ID NO: 15663 - RNA, 20 nt, Artificial Sequence
  HTT spacer sequence CTCN PAM
guacucuuuacccaaaaccu

SEQ ID NO: 15664 - RNA, 20 nt, Artificial Sequence
  HTT spacer sequence CTCN PAM
uuacccaaaaccuccaugcc

SEQ ID NO: 15665 - RNA, 20 nt, Artificial Sequence
  HTT spacer sequence CTCN PAM
augccuccagcugcaggcag

SEQ ID NO: 15666 - RNA, 20 nt, Artificial Sequence
  HTT spacer sequence CTCN PAM
agcugcaggcagccacuaac

SEQ ID NO: 15667 - RNA, 20 nt, Artificial Sequence
  HTT spacer sequence CTCN PAM
gugacucuacgucuucugga

SEQ ID NO: 15668 - RNA, 20 nt, Artificial Sequence
  HTT spacer sequence CTCN PAM
acgucuucuggacauuacug

SEQ ID NO: 15669 - RNA, 20 nt, Artificial Sequence
  HTT spacer sequence CTCN PAM
uacagucagugagcuuguga

SEQ ID NO: 15670 - RNA, 20 nt, Artificial Sequence
  HTT spacer sequence CTCN PAM
cugacuguaugagcccaucc

SEQ ID NO: 15671 - RNA, 20 nt, Artificial Sequence
  HTT spacer sequence CTCN PAM
cuguuuuucuuuuuuuuuua

SEQ ID NO: 15672 - RNA, 20 nt, Artificial Sequence
  HTT spacer sequence CTCN PAM
guuuuucuuuuuuuuuuaaa

SEQ ID NO: 15673 - RNA, 20 nt, Artificial Sequence
  HTT spacer sequence CTCN PAM
cggguucaagcgauucuccu

SEQ ID NO: 15674 - RNA, 20 nt, Artificial Sequence
  HTT spacer sequence CTCN PAM
ugccucagccucccgagugg

SEQ ID NO: 15675 - RNA, 20 nt, Artificial Sequence
  HTT spacer sequence CTCN PAM
gccucccgaguggcugggac

SEQ ID NO: 15676 - RNA, 20 nt, Artificial Sequence
  HTT spacer sequence CTCN PAM
cgaguggcugggacuacagg

SEQ ID NO: 15677 - RNA, 20 nt, Artificial Sequence
  HTT spacer sequence CTCN PAM
ggaggcugaggcaggagaau

SEQ ID NO: 15678 - RNA, 20 nt, Artificial Sequence
  HTT spacer sequence CTCN PAM
acuaaaaaaaaaaaaaaaaa

SEQ ID NO: 15679 - RNA, 20 nt, Artificial Sequence
  HTT spacer sequence CTCN PAM
aucuccugacuucaugaucc

SEQ ID NO: 15680 - RNA, 20 nt, Artificial Sequence
  HTT spacer sequence CTCN PAM
ugacuucaugauccgccugc

SEQ ID NO: 15681 - RNA, 20 nt, Artificial Sequence
  HTT spacer sequence CTCN PAM
gccucccaaagugcugggau

SEQ ID NO: 15682 - RNA, 20 nt, Artificial Sequence
  HTT spacer sequence CTCN PAM
caaagugcugggauuacagg

SEQ ID NO: 15683 - RNA, 20 nt, Artificial Sequence
  HTT spacer sequence CTCN PAM
cgccuguaaucccagcacuu

SEQ ID NO: 15684 - RNA, 20 nt, Artificial Sequence
  HTT spacer sequence CTCN PAM
cacuucuggagguugggaag

SEQ ID NO: 15685 - RNA, 20 nt, Artificial Sequence
  HTT spacer sequence CTCN PAM
agaagugugagaaguaaauu

SEQ ID NO: 15686 - RNA, 20 nt, Artificial Sequence
  HTT spacer sequence CTCN PAM
uguggugagggggugaggaa

SEQ ID NO: 15687 - RNA, 20 nt, Artificial Sequence
  HTT spacer sequence CTCN PAM
ccacaugagggcaaggcgaa

SEQ ID NO: 15688 - RNA, 20 nt, Artificial Sequence
  HTT spacer sequence CTCN PAM
cccccucaccacaugagggc

SEQ ID NO: 15689 - RNA, 20 nt, Artificial Sequence
  HTT spacer sequence CTCN PAM
guggggccucuuauauaugg

SEQ ID NO: 15690 - RNA, 20 nt, Artificial Sequence
  HTT spacer sequence CTCN PAM
uauauauggaugcuaaucuc

SEQ ID NO: 15691 - RNA, 20 nt, Artificial Sequence
  HTT spacer sequence CTCN PAM
uucaugaggggucugcccuc

SEQ ID NO: 15692 - RNA, 20 nt, Artificial Sequence
  HTT spacer sequence CTCN PAM
ugaaugagauuagcauccau

SEQ ID NO: 15693 - RNA, 20 nt, Artificial Sequence
  HTT spacer sequence CTCN PAM
ugacccagucaccucccaaa

SEQ ID NO: 15694 - RNA, 20 nt, Artificial Sequence
  HTT spacer sequence CTCN PAM
caaaggccccaccuccuaau

SEQ ID NO: 15695 - RNA, 20 nt, Artificial Sequence
  HTT spacer sequence CTCN PAM
uaauaccaucacccugguaa

SEQ ID NO: 15696 - RNA, 20 nt, Artificial Sequence
  HTT spacer sequence CTCN PAM
cugaucuuagaaaagugcuu

SEQ ID NO: 15697 - RNA, 20 nt, Artificial Sequence
  HTT spacer sequence CTCN PAM
cucccugaucuuagaaaagu

SEQ ID NO: 15698 - RNA, 20 nt, Artificial Sequence
  HTT spacer sequence CTCN PAM
gcuacuuacucacucccuga

SEQ ID NO: 15699 - RNA, 20 nt, Artificial Sequence
  HTT spacer sequence CTCN PAM
auuccacaugucagucaucu

SEQ ID NO: 15700 - RNA, 20 nt, Artificial Sequence
  HTT spacer sequence CTCN PAM
gcuccaugauggcugccucc

SEQ ID NO: 15701 - RNA, 20 nt, Artificial Sequence
  HTT spacer sequence CTCN PAM
augauggcugccuccuagag

SEQ ID NO: 15702 - RNA, 20 nt, Artificial Sequence
  HTT spacer sequence CTCN PAM
uagagcauugggagucucga

SEQ ID NO: 15703 - RNA, 20 nt, Artificial Sequence
  HTT spacer sequence CTCN PAM
aggaggcagccaucauggag

SEQ ID NO: 15704 - RNA, 20 nt, Artificial Sequence
  HTT spacer sequence CTCN PAM
caaugcucuaggaggcagcc

SEQ ID NO: 15705 - RNA, 20 nt, Artificial Sequence
  HTT spacer sequence CTCN PAM
auguucuauaugcucucaug

SEQ ID NO: 15706 - RNA, 20 nt, Artificial Sequence
  HTT spacer sequence CTCN PAM
cauguguuguguauuggaga

SEQ ID NO: 15707 - RNA, 20 nt, Artificial Sequence
  HTT spacer sequence CTCN PAM
uguguuguguauuggagaua

SEQ ID NO: 15708 - RNA, 20 nt, Artificial Sequence
  HTT spacer sequence CTCN PAM
aauacacaacacaugagagc

SEQ ID NO: 15709 - RNA, 20 nt, Artificial Sequence
  HTT spacer sequence CTCN PAM
acuaucuccaauacacaaca

SEQ ID NO: 15710 - RNA, 20 nt, Artificial Sequence
  HTT spacer sequence CTCN PAM
gagccuguuuccucuuuuag

SEQ ID NO: 15711 - RNA, 20 nt, Artificial Sequence
  HTT spacer sequence CTCN PAM
gagaugaaguaacuuauuca

SEQ ID NO: 15712 - RNA, 20 nt, Artificial Sequence
  HTT spacer sequence CTCN PAM
uuuagaaacaggaguuuaaa

SEQ ID NO: 15713 - RNA, 20 nt, Artificial Sequence
  HTT spacer sequence CTCN PAM
uguuucuaaaagaggaaaca

SEQ ID NO: 15714 - RNA, 20 nt, Artificial Sequence
  HTT spacer sequence CTCN PAM
ugccuguaauuccagcacuu

SEQ ID NO: 15715 - RNA, 20 nt, Artificial Sequence
  HTT spacer sequence CTCN PAM
caaagugcuggaauuacagg

SEQ ID NO: 15716 - RNA, 20 nt, Artificial Sequence
  HTT spacer sequence CTCN PAM
gccucccaaagugcuggaau

SEQ ID NO: 15717 - RNA, 20 nt, Artificial Sequence
  HTT spacer sequence CTCN PAM
caucucagccucccaaagug

SEQ ID NO: 15718 - RNA, 20 nt, Artificial Sequence
  HTT spacer sequence CTCN PAM
agugauccucccaucucagc

SEQ ID NO: 15719 - RNA, 20 nt, Artificial Sequence
  HTT spacer sequence CTCN PAM
aagcuccagugauccuccca

SEQ ID NO: 15720 - RNA, 20 nt, Artificial Sequence
  HTT spacer sequence CTCN PAM
aacuccaagcuccagugauc

SEQ ID NO: 15721 - RNA, 20 nt, Artificial Sequence
  HTT spacer sequence CTCN PAM
cacuaugaugcccaggcugg

SEQ ID NO: 15722 - RNA, 20 nt, Artificial Sequence
  HTT spacer sequence CTCN PAM
ucaagaaauuaaaaaauuag

SEQ ID NO: 15723 - RNA, 20 nt, Artificial Sequence
  HTT spacer sequence CTCN PAM
agaaauuaaaaaauuagcug

SEQ ID NO: 15724 - RNA, 20 nt, Artificial Sequence
  HTT spacer sequence CTCN PAM
ggaggcugaggugggaggau

SEQ ID NO: 15725 - RNA, 20 nt, Artificial Sequence
  HTT spacer sequence CTCN PAM
agaguagaugggaccacagg

SEQ ID NO: 15726 - RNA, 20 nt, Artificial Sequence
  HTT spacer sequence CTCN PAM
gccuccagaguagaugggac

SEQ ID NO: 15727 - RNA, 20 nt, Artificial Sequence
  HTT spacer sequence CTCN PAM
caccucagccuccagaguag

SEQ ID NO: 15728 - RNA, 20 nt, Artificial Sequence
  HTT spacer sequence CTCN PAM
agcaauccucccaccucagc

SEQ ID NO: 15729 - RNA, 20 nt, Artificial Sequence
  HTT spacer sequence CTCN PAM
ugggcucaagcaauccuccc

SEQ ID NO: 15730 - RNA, 20 nt, Artificial Sequence
  HTT spacer sequence CTCN PAM
accuccugggcucaagcaau

SEQ ID NO: 15731 - RNA, 20 nt, Artificial Sequence
  HTT spacer sequence CTCN PAM
ucacccaggauggggugcaa

SEQ ID NO: 15732 - RNA, 20 nt, Artificial Sequence
  HTT spacer sequence CTCN PAM
cucgucacccaggauggggu

SEQ ID NO: 15733 - RNA, 20 nt, Artificial Sequence
  HTT spacer sequence CTCN PAM
aaaaagaaaaaaaaaaugcu

SEQ ID NO: 15734 - RNA, 20 nt, Artificial Sequence
  HTT spacer sequence CTCN PAM
aacagcaaacaaccagggca

SEQ ID NO: 15735 - RNA, 20 nt, Artificial Sequence
  HTT spacer sequence CTCN PAM
cugagggcuccuuccaucuu

SEQ ID NO: 15736 - RNA, 20 nt, Artificial Sequence
  HTT spacer sequence CTCN PAM
gggagcccccaggcccaugc

SEQ ID NO: 15737 - RNA, 20 nt, Artificial Sequence
  HTT spacer sequence CTCN PAM
uuccaucuucaacucauucu

SEQ ID NO: 15738 - RNA, 20 nt, Artificial Sequence
  HTT spacer sequence CTCN PAM
uucucugugcaccuguuagg

SEQ ID NO: 15739 - RNA, 20 nt, Artificial Sequence
  HTT spacer sequence CTCN PAM
gugcaccuguuaggaaguug

SEQ ID NO: 15740 - RNA, 20 nt, Artificial Sequence
  HTT spacer sequence CTCN PAM
uuuuguucuuggacccugau

SEQ ID NO: 15741 - RNA, 20 nt, Artificial Sequence
  HTT spacer sequence CTCN PAM
uuuuaauaaaugguaaaacc

SEQ ID NO: 15742 - RNA, 20 nt, Artificial Sequence
  HTT spacer sequence CTCN PAM
aacaaaccccccuucucuaa

SEQ ID NO: 15743 - RNA, 20 nt, Artificial Sequence
  HTT spacer sequence CTCN PAM
aagucccauccgacgaaagg

SEQ ID NO: 15744 - RNA, 20 nt, Artificial Sequence
  HTT spacer sequence CTCN PAM
uuccccuuucgucggauggg

SEQ ID NO: 15745 - RNA, 20 nt, Artificial Sequence
  HTT spacer sequence CTCN PAM
ugguucuuucuccuuccccu

SEQ ID NO: 15746 - RNA, 20 nt, Artificial Sequence
  HTT spacer sequence CTCN PAM
acgguacagaugcuuguucu

SEQ ID NO: 15747 - RNA, 20 nt, Artificial Sequence
  HTT spacer sequence CTCN PAM
cugccuuucuugggacucaa

SEQ ID NO: 15748 - RNA, 20 nt, Artificial Sequence
  HTT spacer sequence CTCN PAM
cuuccccacgcuguuuccua

SEQ ID NO: 15749 - RNA, 20 nt, Artificial Sequence
  HTT spacer sequence CTCN PAM
ugucccucccuuccccacgc

SEQ ID NO: 15750 - RNA, 20 nt, Artificial Sequence
  HTT spacer sequence CTCN PAM
aaaacaccaaguuacuuaaa

SEQ ID NO: 15751 - RNA, 20 nt, Artificial Sequence
  HTT spacer sequence CTCN PAM
cuuuacugauguguauuaua

SEQ ID NO: 15752 - RNA, 20 nt, Artificial Sequence
  HTT spacer sequence CTCN PAM
cacuuuacugauguguauua

SEQ ID NO: 15753 - RNA, 20 nt, Artificial Sequence
  HTT spacer sequence CTCN PAM
aggugcgguucaagauauua

SEQ ID NO: 15754 - RNA, 20 nt, Artificial Sequence
  HTT spacer sequence CTCN PAM
aggcuuccagcccuagcaug

SEQ ID NO: 15755 - RNA, 20 nt, Artificial Sequence
  HTT spacer sequence CTCN PAM
augcuagggcuggaagccug

SEQ ID NO: 15756 - RNA, 20 nt, Artificial Sequence
  HTT spacer sequence CTCN PAM
ccuaugcuucccugguugca

SEQ ID NO: 15757 - RNA, 20 nt, Artificial Sequence
  HTT spacer sequence CTCN PAM
uaugcuucccugguugcagg

SEQ ID NO: 15758 - RNA, 20 nt, Artificial Sequence
  HTT spacer sequence CTCN PAM
agccaucaccugcaaccagg

SEQ ID NO: 15759 - RNA, 20 nt, Artificial Sequence
  HTT spacer sequence CTCN PAM
ccagccaucaccugcaacca

SEQ ID NO: 15760 - RNA, 20 nt, Artificial Sequence
  HTT spacer sequence CTCN PAM
ugauuuucaguaagggaagu

SEQ ID NO: 15761 - RNA, 20 nt, Artificial Sequence
  HTT spacer sequence CTCN PAM
cuacaucuauuccuaagcau

SEQ ID NO: 15762 - RNA, 20 nt, Artificial Sequence
  HTT spacer sequence CTCN PAM
uccaaauguaaauauuccau

SEQ ID NO: 15763 - RNA, 20 nt, Artificial Sequence
  HTT spacer sequence CTCN PAM
ccuuuagcucuuccaaaugu

SEQ ID NO: 15764 - RNA, 20 nt, Artificial Sequence
  HTT spacer sequence CTCN PAM
cgccuuuagcucuuccaaau

SEQ ID NO: 15765 - RNA, 20 nt, Artificial Sequence
  HTT spacer sequence CTCN PAM
gaugacuuuauccccacuuu

SEQ ID NO: 15766 - RNA, 20 nt, Artificial Sequence
  HTT spacer sequence CTCN PAM
aacucagaugacuuuauccc

SEQ ID NO: 15767 - RNA, 20 nt, Artificial Sequence
  HTT spacer sequence CTCN PAM
uccaacucagaugacuuuau

SEQ ID NO: 15768 - RNA, 20 nt, Artificial Sequence
  HTT spacer sequence CTCN PAM
aaacuugugaaugguuuaag

SEQ ID NO: 15769 - RNA, 20 nt, Artificial Sequence
  HTT spacer sequence CTCN PAM
cggugggcaguggcaggggc

SEQ ID NO: 15770 - RNA, 20 nt, Artificial Sequence
  HTT spacer sequence CTCN PAM
gugggcaguggcaggggcag

SEQ ID NO: 15771 - RNA, 20 nt, Artificial Sequence
  HTT spacer sequence CTCN PAM
ugccccugccacugcccacc

SEQ ID NO: 15772 - RNA, 20 nt, Artificial Sequence
  HTT spacer sequence CTCN PAM
ccugccccugccacugccca

SEQ ID NO: 15773 - RNA, 20 nt, Artificial Sequence
  HTT spacer sequence CTCN PAM
ucuccugccccugccacugc

SEQ ID NO: 15774 - RNA, 20 nt, Artificial Sequence
  HTT spacer sequence CTCN PAM
gcuaucugggacgccuggcc

SEQ ID NO: 15775 - RNA, 20 nt, Artificial Sequence
  HTT spacer sequence CTCN PAM
cuccagacccauucucacgc

SEQ ID NO: 15776 - RNA, 20 nt, Artificial Sequence
  HTT spacer sequence CTCN PAM
agacccauucucacgcuguc

SEQ ID NO: 15777 - RNA, 20 nt, Artificial Sequence
  HTT spacer sequence CTCN PAM
cgcugucucuuggcacccag

SEQ ID NO: 15778 - RNA, 20 nt, Artificial Sequence
  HTT spacer sequence CTCN PAM
uggcacccaggggccaguga

SEQ ID NO: 15779 - RNA, 20 nt, Artificial Sequence
  HTT spacer sequence CTCN PAM
cauuuguuuuguguauauag

SEQ ID NO: 15780 - RNA, 20 nt, Artificial Sequence
  HTT spacer sequence CTCN PAM
aaaaaauaaauaaauaaaau

SEQ ID NO: 15781 - RNA, 20 nt, Artificial Sequence
  HTT spacer sequence CTCN PAM
gucucaaaaaaauaaauaaa

SEQ ID NO: 15782 - RNA, 20 nt, Artificial Sequence
  HTT spacer sequence CTCN PAM
cucugucacccaggcuggag

SEQ ID NO: 15783 - RNA, 20 nt, Artificial Sequence
  HTT spacer sequence CTCN PAM
gucacccaggcuggagugca

SEQ ID NO: 15784 - RNA, 20 nt, Artificial Sequence
  HTT spacer sequence CTCN PAM
agccugggugacagagugag

SEQ ID NO: 15785 - RNA, 20 nt, Artificial Sequence
  HTT spacer sequence CTCN PAM
gcucagugcaagcucugccu

SEQ ID NO: 15786 - RNA, 20 nt, Artificial Sequence
  HTT spacer sequence CTCN PAM
gugcaagcucugccuccugg

SEQ ID NO: 15787 - RNA, 20 nt, Artificial Sequence
  HTT spacer sequence CTCN PAM
gccuccuggguucaagcaau

SEQ ID NO: 15788 - RNA, 20 nt, Artificial Sequence
  HTT spacer sequence CTCN PAM
uggguucaagcaauucuccu

SEQ ID NO: 15789 - RNA, 20 nt, Artificial Sequence
  HTT spacer sequence CTCN PAM
ugccucagccuccugaguag

SEQ ID NO: 15790 - RNA, 20 nt, Artificial Sequence
  HTT spacer sequence CTCN PAM
gccuccugaguagcugggac

SEQ ID NO: 15791 - RNA, 20 nt, Artificial Sequence
  HTT spacer sequence CTCN PAM
ugaguagcugggacuacagg

SEQ ID NO: 15792 - RNA, 20 nt, Artificial Sequence
  HTT spacer sequence CTCN PAM
ggaggcugaggcaggagaau

SEQ ID NO: 15793 - RNA, 20 nt, Artificial Sequence
  HTT spacer sequence CTCN PAM
acuaauaaaaaauacaaaaa

SEQ ID NO: 15794 - RNA, 20 nt, Artificial Sequence
  HTT spacer sequence CTCN PAM
ugaccucgugauccguccac

SEQ ID NO: 15795 - RNA, 20 nt, Artificial Sequence
  HTT spacer sequence CTCN PAM
ugauccguccaccucagccu

SEQ ID NO: 15796 - RNA, 20 nt, Artificial Sequence
  HTT spacer sequence CTCN PAM
gccucucaaagugcugggau

SEQ ID NO: 15797 - RNA, 20 nt, Artificial Sequence
  HTT spacer sequence CTCN PAM
caaagugcugggauuacagg

SEQ ID NO: 15798 - RNA, 20 nt, Artificial Sequence
  HTT spacer sequence CTCN PAM
aagugcugggauuacaggca

SEQ ID NO: 15799 - RNA, 20 nt, Artificial Sequence
  HTT spacer sequence CTCN PAM
ugccuguaaucccagcacuu

SEQ ID NO: 15800 - RNA, 20 nt, Artificial Sequence
  HTT spacer sequence CTCN PAM
caccuguaaucccagcacuu

SEQ ID NO: 15801 - RNA, 20 nt, Artificial Sequence
  HTT spacer sequence CTCN PAM
caaagugcugggauuacagg

SEQ ID NO: 15802 - RNA, 20 nt, Artificial Sequence
  HTT spacer sequence CTCN PAM
gccucccaaagugcugggau

SEQ ID NO: 15803 - RNA, 20 nt, Artificial Sequence
  HTT spacer sequence CTCN PAM
ugauccgcccaccucagccu

SEQ ID NO: 15804 - RNA, 20 nt, Artificial Sequence
  HTT spacer sequence CTCN PAM
cgaccucgugauccgcccac

SEQ ID NO: 15805 - RNA, 20 nt, Artificial Sequence
  HTT spacer sequence CTCN PAM
acuaaaaauaccacaaaaaa

SEQ ID NO: 15806 - RNA, 20 nt, Artificial Sequence
  HTT spacer sequence CTCN PAM
cgccagucgucccagcuacu

SEQ ID NO: 15807 - RNA, 20 nt, Artificial Sequence
  HTT spacer sequence CTCN PAM
caaguagcugggacgacugg

SEQ ID NO: 15808 - RNA, 20 nt, Artificial Sequence
  HTT spacer sequence CTCN PAM
gccucccaaguagcugggac

SEQ ID NO: 15809 - RNA, 20 nt, Artificial Sequence
  HTT spacer sequence CTCN PAM
ugccucagccucccaaguag

SEQ ID NO: 15810 - RNA, 20 nt, Artificial Sequence
  HTT spacer sequence CTCN PAM
accugccagauucaagcaau

SEQ ID NO: 15811 - RNA, 20 nt, Artificial Sequence
  HTT spacer sequence CTCN PAM
cugcaaccuccaccugccag

SEQ ID NO: 15812 - RNA, 20 nt, Artificial Sequence
  HTT spacer sequence CTCN PAM
gcucacugcaaccuccaccu

SEQ ID NO: 15813 - RNA, 20 nt, Artificial Sequence
  HTT spacer sequence CTCN PAM
agccugggcgauagagcgag

SEQ ID NO: 15814 - RNA, 20 nt, Artificial Sequence
  HTT spacer sequence CTCN PAM
aucgcccaggcuagagugca

SEQ ID NO: 15815 - RNA, 20 nt, Artificial Sequence
  HTT spacer sequence CTCN PAM
cucuaucgcccaggcuagag

SEQ ID NO: 15816 - RNA, 20 nt, Artificial Sequence
  HTT spacer sequence CTCN PAM
gucucaaaaaaaaaaaaaaa

SEQ ID NO: 15817 - RNA, 20 nt, Artificial Sequence
  HTT spacer sequence CTCN PAM
aaaaaaaaaaaaaaagaaga

SEQ ID NO: 15818 - RNA, 20 nt, Artificial Sequence
  HTT spacer sequence CTCN PAM
cguaucauuguuuuguggug

SEQ ID NO: 15819 - RNA, 20 nt, Artificial Sequence
  HTT spacer sequence CTCN PAM
ccacaaaacaaugauacgug

SEQ ID NO: 15820 - RNA, 20 nt, Artificial Sequence
  HTT spacer sequence CTCN PAM
uucagugauuuucuugcaua

SEQ ID NO: 15821 - RNA, 20 nt, Artificial Sequence
  HTT spacer sequence CTCN PAM
ugaacucauuccuccugucu

SEQ ID NO: 15822 - RNA, 20 nt, Artificial Sequence
  HTT spacer sequence CTCN PAM
uuccuccugucuauaaauga

SEQ ID NO: 15823 - RNA, 20 nt, Artificial Sequence
  HTT spacer sequence CTCN PAM
ugucuauaaaugaaauuuug

SEQ ID NO: 15824 - RNA, 20 nt, Artificial Sequence
  HTT spacer sequence CTCN PAM
aaaaaaaccuugaauguguu

SEQ ID NO: 15825 - RNA, 20 nt, Artificial Sequence
  HTT spacer sequence CTCN PAM
aucucaaaaaaaaccuugaa

SEQ ID NO: 15826 - RNA, 20 nt, Artificial Sequence
  HTT spacer sequence CTCN PAM
agccugggugaagaagacuc

SEQ ID NO: 15827 - RNA, 20 nt, Artificial Sequence
  HTT spacer sequence CTCN PAM
ucucacugcaaccuccgccu

SEQ ID NO: 15828 - RNA, 20 nt, Artificial Sequence
  HTT spacer sequence CTCN PAM
cugcaaccuccgccucccag

SEQ ID NO: 15829 - RNA, 20 nt, Artificial Sequence
  HTT spacer sequence CTCN PAM
gccucccagguucaagcaau

SEQ ID NO: 15830 - RNA, 20 nt, Artificial Sequence
  HTT spacer sequence CTCN PAM
cagguucaagcaauucuccu

SEQ ID NO: 15831 - RNA, 20 nt, Artificial Sequence
  HTT spacer sequence CTCN PAM
ugccucagccuccugaguag

SEQ ID NO: 15832 - RNA, 20 nt, Artificial Sequence
  HTT spacer sequence CTCN PAM
gccuccugaguagcugggau

SEQ ID NO: 15833 - RNA, 20 nt, Artificial Sequence
  HTT spacer sequence CTCN PAM
ugaguagcugggauuacagg

SEQ ID NO: 15834 - RNA, 20 nt, Artificial Sequence
  HTT spacer sequence CTCN PAM
ggaggcugaggcaggagaau

SEQ ID NO: 15835 - RNA, 20 nt, Artificial Sequence
  HTT spacer sequence CTCN PAM
acuucuacuaaaaauacaaa

SEQ ID NO: 15836 - RNA, 20 nt, Artificial Sequence
  HTT spacer sequence CTCN PAM
aacuccugaccucaagugau

SEQ ID NO: 15837 - RNA, 20 nt, Artificial Sequence
  HTT spacer sequence CTCN PAM
ugaccucaagugauccgccu

SEQ ID NO: 15838 - RNA, 20 nt, Artificial Sequence
  HTT spacer sequence CTCN PAM
agugauccgccugccuuggc

SEQ ID NO: 15839 - RNA, 20 nt, Artificial Sequence
  HTT spacer sequence CTCN PAM
caccuguaaucccagcacuu

SEQ ID NO: 15840 - RNA, 20 nt, Artificial Sequence
  HTT spacer sequence CTCN PAM
agcguuuuaaaagaugcucu

SEQ ID NO: 15841 - RNA, 20 nt, Artificial Sequence
  HTT spacer sequence CTCN PAM
uuucuaaggauugacuguag

SEQ ID NO: 15842 - RNA, 20 nt, Artificial Sequence
  HTT spacer sequence CTCN PAM
uguacuacagucaauccuua

SEQ ID NO: 15843 - RNA, 20 nt, Artificial Sequence
  HTT spacer sequence CTCN PAM
gccuuuacaaguguaaaauu

SEQ ID NO: 15844 - RNA, 20 nt, Artificial Sequence
  HTT spacer sequence CTCN PAM
aagucaaaagucuucaaacu

SEQ ID NO: 15845 - RNA, 20 nt, Artificial Sequence
  HTT spacer sequence CTCN PAM
ugaaguuguuggccacuaag

SEQ ID NO: 15846 - RNA, 20 nt, Artificial Sequence
  HTT spacer sequence CTCN PAM
gagagguucuggaauuggcc

SEQ ID NO: 15847 - RNA, 20 nt, Artificial Sequence
  HTT spacer sequence CTCN PAM
gagccuaagauuccuuagug

SEQ ID NO: 15848 - RNA, 20 nt, Artificial Sequence
  HTT spacer sequence CTCN PAM
cugagccuaagauuccuuag

SEQ ID NO: 15849 - RNA, 20 nt, Artificial Sequence
  HTT spacer sequence CTCN PAM
uaugauucucuaacugauuu

SEQ ID NO: 15850 - RNA, 20 nt, Artificial Sequence
  HTT spacer sequence CTCN PAM
aacugauuucucacaaagca

SEQ ID NO: 15851 - RNA, 20 nt, Artificial Sequence
  HTT spacer sequence CTCN PAM
caaagcaaacaagcaaucau

SEQ ID NO: 15852 - RNA, 20 nt, Artificial Sequence
  HTT spacer sequence CTCN PAM
ucuuauuuuguuauuuaaaa

SEQ ID NO: 15853 - RNA, 20 nt, Artificial Sequence
  HTT spacer sequence CTCN PAM
acuuauguuuguuagucaau

SEQ ID NO: 15854 - RNA, 20 nt, Artificial Sequence
  HTT spacer sequence CTCN PAM
uuacuucuaguuaaucaaaa

SEQ ID NO: 15855 - RNA, 20 nt, Artificial Sequence
  HTT spacer sequence CTCN PAM
gaccuuuugauuaacuagaa

SEQ ID NO: 15856 - RNA, 20 nt, Artificial Sequence
  HTT spacer sequence CTCN PAM
uuaaaacuuggcaaguuauu

SEQ ID NO: 15857 - RNA, 20 nt, Artificial Sequence
  HTT spacer sequence CTCN PAM
gguccuguuacaacaaguaa

SEQ ID NO: 15858 - RNA, 20 nt, Artificial Sequence
  HTT spacer sequence CTCN PAM
ucacuggggaguuucuauca

SEQ ID NO: 15859 - RNA, 20 nt, Artificial Sequence
  HTT spacer sequence CTCN PAM
ccagugaugaggauuuacuu

SEQ ID NO: 15860 - RNA, 20 nt, Artificial Sequence
  HTT spacer sequence CTCN PAM
aacugcaugauguccugaaa

SEQ ID NO: 15861 - RNA, 20 nt, Artificial Sequence
  HTT spacer sequence CTCN PAM
gcaucuuuuaaaaauauaua

SEQ ID NO: 15862 - RNA, 20 nt, Artificial Sequence
  HTT spacer sequence CTCN PAM
aagggcuuauacauccuaca

SEQ ID NO: 15863 - RNA, 20 nt, Artificial Sequence
  HTT spacer sequence CTCN PAM
uaucucaaagggcuuauaca

SEQ ID NO: 15864 - RNA, 20 nt, Artificial Sequence
  HTT spacer sequence CTCN PAM
cagcuaagauugauuacagu

SEQ ID NO: 15865 - RNA, 20 nt, Artificial Sequence
  HTT spacer sequence CTCN PAM
gucacuguaaucaaucuuag

SEQ ID NO: 15866 - RNA, 20 nt, Artificial Sequence
  HTT spacer sequence CTCN PAM
accagggccacuucccccua

SEQ ID NO: 15867 - RNA, 20 nt, Artificial Sequence
  HTT spacer sequence CTCN PAM
agacuccaccagggccacuu

SEQ ID NO: 15868 - RNA, 20 nt, Artificial Sequence
  HTT spacer sequence CTCN PAM
cgugaggcucacacaaaaau

SEQ ID NO: 15869 - RNA, 20 nt, Artificial Sequence
  HTT spacer sequence CTCN PAM
cgggagggaaggaagccugu

SEQ ID NO: 15870 - RNA, 20 nt, Artificial Sequence
  HTT spacer sequence CTCN PAM
cacaaaaauacagcaacaug

SEQ ID NO: 15871 - RNA, 20 nt, Artificial Sequence
  HTT spacer sequence CTCN PAM
gccuaacaugagccacaauu

SEQ ID NO: 15872 - RNA, 20 nt, Artificial Sequence
  HTT spacer sequence CTCN PAM
uguuaggcagaggguaccug

SEQ ID NO: 15873 - RNA, 20 nt, Artificial Sequence
  HTT spacer sequence CTCN PAM
cagaagaaaagcagguguuc

SEQ ID NO: 15874 - RNA, 20 nt, Artificial Sequence
  HTT spacer sequence CTCN PAM
ccaugcccagacuauuugaa

SEQ ID NO: 15875 - RNA, 20 nt, Artificial Sequence
  HTT spacer sequence CTCN PAM
uggggguaucuggugaacag

SEQ ID NO: 15876 - RNA, 20 nt, Artificial Sequence
  HTT spacer sequence CTCN PAM
agccaauuagugcagaaaaa

SEQ ID NO: 15877 - RNA, 20 nt, Artificial Sequence
  HTT spacer sequence CTCN PAM
uaguucucuaguuucaguag

SEQ ID NO: 15878 - RNA, 20 nt, Artificial Sequence
  HTT spacer sequence CTCN PAM
aguuucaguaguuucauuua

SEQ ID NO: 15879 - RNA, 20 nt, Artificial Sequence
  HTT spacer sequence CTCN PAM
ucuauuagaagcauccuugu

SEQ ID NO: 15880 - RNA, 20 nt, Artificial Sequence
  HTT spacer sequence CTCN PAM
gucuaaaaaagaaaaaaaaa

SEQ ID NO: 15881 - RNA, 20 nt, Artificial Sequence
  HTT spacer sequence CTCN PAM
guccccagguuggagugcag

SEQ ID NO: 15882 - RNA, 20 nt, Artificial Sequence
  HTT spacer sequence CTCN PAM
aaccuggggacagagcaaga

SEQ ID NO: 15883 - RNA, 20 nt, Artificial Sequence
  HTT spacer sequence CTCN PAM
cugcagucucagggcucaag

SEQ ID NO: 15884 - RNA, 20 nt, Artificial Sequence
  HTT spacer sequence CTCN PAM
gggcucaagugauccuccca

SEQ ID NO: 15885 - RNA, 20 nt, Artificial Sequence
  HTT spacer sequence CTCN PAM
agugauccucccaccucagc

SEQ ID NO: 15886 - RNA, 20 nt, Artificial Sequence
  HTT spacer sequence CTCN PAM
caccucagcuccugaguacc

SEQ ID NO: 15887 - RNA, 20 nt, Artificial Sequence
  HTT spacer sequence CTCN PAM
gcuccugaguaccugggacu

SEQ ID NO: 15888 - RNA, 20 nt, Artificial Sequence
  HTT spacer sequence CTCN PAM
ugaguaccugggacuaccgg

SEQ ID NO: 15889 - RNA, 20 nt, Artificial Sequence
  HTT spacer sequence CTCN PAM
ggagcugaggugggaggauc

SEQ ID NO: 15890 - RNA, 20 nt, Artificial Sequence
  HTT spacer sequence CTCN PAM
acaaaaaauguaaaaauuag

SEQ ID NO: 15891 - RNA, 20 nt, Artificial Sequence
  HTT spacer sequence CTCN PAM
cuaaguugccugggcugguc

SEQ ID NO: 15892 - RNA, 20 nt, Artificial Sequence
  HTT spacer sequence CTCN PAM
agcuccuggcuuaaguaauc

SEQ ID NO: 15893 - RNA, 20 nt, Artificial Sequence
  HTT spacer sequence CTCN PAM
uggcuuaaguaauccucccu

SEQ ID NO: 15894 - RNA, 20 nt, Artificial Sequence
  HTT spacer sequence CTCN PAM
cuccuuggccucccaaagug

SEQ ID NO: 15895 - RNA, 20 nt, Artificial Sequence
  HTT spacer sequence CTCN PAM
uuggccucccaaagugcugg

SEQ ID NO: 15896 - RNA, 20 nt, Artificial Sequence
  HTT spacer sequence CTCN PAM
caaagugcugggauuacagg

SEQ ID NO: 15897 - RNA, 20 nt, Artificial Sequence
  HTT spacer sequence CTCN PAM
caccuguaaucccagcacuu

SEQ ID NO: 15898 - RNA, 20 nt, Artificial Sequence
  HTT spacer sequence CTCN PAM
uaaauaccauuaagcuacaa

SEQ ID NO: 15899 - RNA, 20 nt, Artificial Sequence
  HTT spacer sequence CTCN PAM
cuaaaucaaucuacaaguag

SEQ ID NO: 15900 - RNA, 20 nt, Artificial Sequence
  HTT spacer sequence CTCN PAM
gauguuaagucacccugucc

SEQ ID NO: 15901 - RNA, 20 nt, Artificial Sequence
  HTT spacer sequence CTCN PAM
gaagcacaugaaauuuaaag

SEQ ID NO: 15902 - RNA, 20 nt, Artificial Sequence
  HTT spacer sequence CTCN PAM
ugcacauuucuugauaaaug

SEQ ID NO: 15903 - RNA, 20 nt, Artificial Sequence
  HTT spacer sequence CTCN PAM
gguauuccucuguuuuuguu

SEQ ID NO: 15904 - RNA, 20 nt, Artificial Sequence
  HTT spacer sequence CTCN PAM
guuuuuguuacuaauaguua

SEQ ID NO: 15905 - RNA, 20 nt, Artificial Sequence
  HTT spacer sequence CTCN PAM
aaccuuguaaaauaugaaga

SEQ ID NO: 15906 - RNA, 20 nt, Artificial Sequence
  HTT spacer sequence CTCN PAM
uuaagcugcaugguucucau

SEQ ID NO: 15907 - RNA, 20 nt, Artificial Sequence
  HTT spacer sequence CTCN PAM
ugucagcucccaaagcagaa

SEQ ID NO: 15908 - RNA, 20 nt, Artificial Sequence
  HTT spacer sequence CTCN PAM
caaagcagaagacggcaugu

SEQ ID NO: 15909 - RNA, 20 nt, Artificial Sequence
  HTT spacer sequence CTCN PAM
acggcauuuuucaacaugcc

SEQ ID NO: 15910 - RNA, 20 nt, Artificial Sequence
  HTT spacer sequence CTCN PAM
uaucaucuugaauuucaggg

SEQ ID NO: 15911 - RNA, 20 nt, Artificial Sequence
  HTT spacer sequence CTCN PAM
uagugcuugcuaucuguuua

SEQ ID NO: 15912 - RNA, 20 nt, Artificial Sequence
  HTT spacer sequence CTCN PAM
agcauguucugcuguaauuc

SEQ ID NO: 15913 - RNA, 20 nt, Artificial Sequence
  HTT spacer sequence CTCN PAM
cuggcaucuuggacuccugu

SEQ ID NO: 15914 - RNA, 20 nt, Artificial Sequence
  HTT spacer sequence CTCN PAM
uguuuccuuugcucugucau

SEQ ID NO: 15915 - RNA, 20 nt, Artificial Sequence
  HTT spacer sequence CTCN PAM
gucauccccgcggucagcuc

SEQ ID NO: 15916 - RNA, 20 nt, Artificial Sequence
  HTT spacer sequence CTCN PAM
ugcugcgcagcuucucagcu

SEQ ID NO: 15917 - RNA, 20 nt, Artificial Sequence
  HTT spacer sequence CTCN PAM
gcugaagugcguuuggagug

SEQ ID NO: 15918 - RNA, 20 nt, Artificial Sequence
  HTT spacer sequence CTCN PAM
aaacgcacuucagcugagaa

SEQ ID NO: 15919 - RNA, 20 nt, Artificial Sequence
  HTT spacer sequence CTCN PAM
aagauccagcaagacacgcc

SEQ ID NO: 15920 - RNA, 20 nt, Artificial Sequence
  HTT spacer sequence CTCN PAM
gguuuccuugguuccuucug

SEQ ID NO: 15921 - RNA, 20 nt, Artificial Sequence
  HTT spacer sequence CTCN PAM
gcagaaggaaccaaggaaac

SEQ ID NO: 15922 - RNA, 20 nt, Artificial Sequence
  HTT spacer sequence CTCN PAM
gcgucuccacuccccauuuc

SEQ ID NO: 15923 - RNA, 20 nt, Artificial Sequence
  HTT spacer sequence CTCN PAM
acuccccauuucuugugugg

SEQ ID NO: 15924 - RNA, 20 nt, Artificial Sequence
  HTT spacer sequence CTCN PAM
ccauuucuuguguggcccuu

SEQ ID NO: 15925 - RNA, 20 nt, Artificial Sequence
  HTT spacer sequence CTCN PAM
ucugauuccuuuugucuucc

SEQ ID NO: 15926 - RNA, 20 nt, Artificial Sequence
  HTT spacer sequence CTCN PAM
gauuccuuuugucuucccug

SEQ ID NO: 15927 - RNA, 20 nt, Artificial Sequence
  HTT spacer sequence CTCN PAM
aaaccaaagcaagaaaccag

SEQ ID NO: 15928 - RNA, 20 nt, Artificial Sequence
  HTT spacer sequence CTCN PAM
acagaacuuuugcagcucuu

SEQ ID NO: 15929 - RNA, 20 nt, Artificial Sequence
  HTT spacer sequence CTCN PAM
ucugaagaccuggaagcuuu

SEQ ID NO: 15930 - RNA, 20 nt, Artificial Sequence
  HTT spacer sequence CTCN PAM
ucucaugaccucuuuucccu

SEQ ID NO: 15931 - RNA, 20 nt, Artificial Sequence
  HTT spacer sequence CTCN PAM
ugaccucuuuucccuucuuu

SEQ ID NO: 15932 - RNA, 20 nt, Artificial Sequence
  HTT spacer sequence CTCN PAM
uuucccuucuuugagagcua

SEQ ID NO: 15933 - RNA, 20 nt, Artificial Sequence
  HTT spacer sequence CTCN PAM
aagaagggaaaagaggucau

SEQ ID NO: 15934 - RNA, 20 nt, Artificial Sequence
  HTT spacer sequence CTCN PAM
caaagaagggaaaagagguc

SEQ ID NO: 15935 - RNA, 20 nt, Artificial Sequence
  HTT spacer sequence CTCN PAM
uuccagaauuccaugccuuc

SEQ ID NO: 15936 - RNA, 20 nt, Artificial Sequence
  HTT spacer sequence CTCN PAM
cacuuaccuguuguccagga

SEQ ID NO: 15937 - RNA, 20 nt, Artificial Sequence
  HTT spacer sequence CTCN PAM
uggacaacagguaaguggga

SEQ ID NO: 15938 - RNA, 20 nt, Artificial Sequence
  HTT spacer sequence CTCN PAM
ccuggacaacagguaagugg

SEQ ID NO: 15939 - RNA, 20 nt, Artificial Sequence
  HTT spacer sequence CTCN PAM
aauaugcacagcaaucugac

SEQ ID NO: 15940 - RNA, 20 nt, Artificial Sequence
  HTT spacer sequence CTCN PAM
uccaauaugcacagcaaucu

SEQ ID NO: 15941 - RNA, 20 nt, Artificial Sequence
  HTT spacer sequence CTCN PAM
ucaucucacaugacaucacc

SEQ ID NO: 15942 - RNA, 20 nt, Artificial Sequence
  HTT spacer sequence CTCN PAM
caugacaucaccacaucacc

SEQ ID NO: 15943 - RNA, 20 nt, Artificial Sequence
  HTT spacer sequence CTCN PAM
uuccuuggacccucaguggu

SEQ ID NO: 15944 - RNA, 20 nt, Artificial Sequence
  HTT spacer sequence CTCN PAM
guggugucacugcuggauuu

SEQ ID NO: 15945 - RNA, 20 nt, Artificial Sequence
  HTT spacer sequence CTCN PAM
cauuuucaguuucugugucu

SEQ ID NO: 15946 - RNA, 20 nt, Artificial Sequence
  HTT spacer sequence CTCN PAM
ugccugcuucugacuucgcc

SEQ ID NO: 15947 - RNA, 20 nt, Artificial Sequence
  HTT spacer sequence CTCN PAM
gggcgaagucagaagcaggc

SEQ ID NO: 15948 - RNA, 20 nt, Artificial Sequence
  HTT spacer sequence CTCN PAM
uucacaaggguucuuagauu

SEQ ID NO: 15949 - RNA, 20 nt, Artificial Sequence
  HTT spacer sequence CTCN PAM
gugaacauaaaucuaagaac

SEQ ID NO: 15950 - RNA, 20 nt, Artificial Sequence
  HTT spacer sequence CTCN PAM
gaaaagaaggugcucaguga

SEQ ID NO: 15951 - RNA, 20 nt, Artificial Sequence
  HTT spacer sequence CTCN PAM
ccuuaccuuucuuguuaugc

SEQ ID NO: 15952 - RNA, 20 nt, Artificial Sequence
  HTT spacer sequence CTCN PAM
gagucuguaaaauagaauug

SEQ ID NO: 15953 - RNA, 20 nt, Artificial Sequence
  HTT spacer sequence CTCN PAM
gagaaugggucaggaccaaa

SEQ ID NO: 15954 - RNA, 20 nt, Artificial Sequence
  HTT spacer sequence CTCN PAM
cagggauccuaguguauaag

SEQ ID NO: 15955 - RNA, 20 nt, Artificial Sequence
  HTT spacer sequence CTCN PAM
uuaugaaagaaaguuaggaa

SEQ ID NO: 15956 - RNA, 20 nt, Artificial Sequence
  HTT spacer sequence CTCN PAM
uucaaaggcuuucagguuac

SEQ ID NO: 15957 - RNA, 20 nt, Artificial Sequence
  HTT spacer sequence CTCN PAM
ccuugcagggugugucugcg

SEQ ID NO: 15958 - RNA, 20 nt, Artificial Sequence
  HTT spacer sequence CTCN PAM
acugugcggcgccguacacu

SEQ ID NO: 15959 - RNA, 20 nt, Artificial Sequence
  HTT spacer sequence CTCN PAM
uaauguacaaccaaagacac

SEQ ID NO: 15960 - RNA, 20 nt, Artificial Sequence
  HTT spacer sequence CTCN PAM
ccuucaccuucccaagguca

SEQ ID NO: 15961 - RNA, 20 nt, Artificial Sequence
  HTT spacer sequence CTCN PAM
uucaccuucccaaggucacg

SEQ ID NO: 15962 - RNA, 20 nt, Artificial Sequence
  HTT spacer sequence CTCN PAM
aaacuuuuccgugcuguucu

SEQ ID NO: 15963 - RNA, 20 nt, Artificial Sequence
  HTT spacer sequence CTCN PAM
gcucagccuuggauguucuu

SEQ ID NO: 15964 - RNA, 20 nt, Artificial Sequence
  HTT spacer sequence CTCN PAM
gccuuggauguucuuucuca

SEQ ID NO: 15965 - RNA, 20 nt, Artificial Sequence
  HTT spacer sequence CTCN PAM
gauacuagagcuggccacac

SEQ ID NO: 15966 - RNA, 20 nt, Artificial Sequence
  HTT spacer sequence CTCN PAM
aguaucugagaaagaacauc

SEQ ID NO: 15967 - RNA, 20 nt, Artificial Sequence
  HTT spacer sequence CTCN PAM
uuggguuguggcuggcacac

SEQ ID NO: 15968 - RNA, 20 nt, Artificial Sequence
  HTT spacer sequence CTCN PAM
gcccagaagacgcacaucaa

SEQ ID NO: 15969 - RNA, 20 nt, Artificial Sequence
  HTT spacer sequence CTCN PAM
auccuagaugaacucagccc

SEQ ID NO: 15970 - RNA, 20 nt, Artificial Sequence
  HTT spacer sequence CTCN PAM
agggugccuccgggagacuc

SEQ ID NO: 15971 - RNA, 20 nt, Artificial Sequence
  HTT spacer sequence CTCN PAM
gggagacuccucccugcccc

SEQ ID NO: 15972 - RNA, 20 nt, Artificial Sequence
  HTT spacer sequence CTCN PAM
cggaggcacccuggagaacc

SEQ ID NO: 15973 - RNA, 20 nt, Artificial Sequence
  HTT spacer sequence CTCN PAM
ucccugccccacgugcuugc

SEQ ID NO: 15974 - RNA, 20 nt, Artificial Sequence
  HTT spacer sequence CTCN PAM
cugccccacgugcuugcguc

SEQ ID NO: 15975 - RNA, 20 nt, Artificial Sequence
  HTT spacer sequence CTCN PAM
gccuuagccaugaaguuuag

SEQ ID NO: 15976 - RNA, 20 nt, Artificial Sequence
  HTT spacer sequence CTCN PAM
acaaacacauuuugaaaccc

SEQ ID NO: 15977 - RNA, 20 nt, Artificial Sequence
  HTT spacer sequence CTCN PAM
cgccccgcccccuuacccgu

SEQ ID NO: 15978 - RNA, 20 nt, Artificial Sequence
  HTT spacer sequence CTCN PAM
uuugugccugaggaaguaac

SEQ ID NO: 15979 - RNA, 20 nt, Artificial Sequence
  HTT spacer sequence CTCN PAM
ggcacaaaagagcaagucac

SEQ ID NO: 15980 - RNA, 20 nt, Artificial Sequence
  HTT spacer sequence CTCN PAM
guuacuuccucaggcacaaa

SEQ ID NO: 15981 - RNA, 20 nt, Artificial Sequence
  HTT spacer sequence CTCN PAM
gacacagauagucucugacu

SEQ ID NO: 15982 - RNA, 20 nt, Artificial Sequence
  HTT spacer sequence CTCN PAM
gacuuaucucacagaaaguc

SEQ ID NO: 15983 - RNA, 20 nt, Artificial Sequence
  HTT spacer sequence CTCN PAM
cagaaagucagcggcagagc

SEQ ID NO: 15984 - RNA, 20 nt, Artificial Sequence
  HTT spacer sequence CTCN PAM
gccgcugacuuucugugaga

SEQ ID NO: 15985 - RNA, 20 nt, Artificial Sequence
  HTT spacer sequence CTCN PAM
ggcucugccgcugacuuucu

SEQ ID NO: 15986 - RNA, 20 nt, Artificial Sequence
  HTT spacer sequence CTCN PAM
uagauuuucuuuuucuuuuu

SEQ ID NO: 15987 - RNA, 20 nt, Artificial Sequence
  HTT spacer sequence CTCN PAM
uaauguuaucccucccccag

SEQ ID NO: 15988 - RNA, 20 nt, Artificial Sequence
  HTT spacer sequence CTCN PAM
cccaguccccucacucccca

SEQ ID NO: 15989 - RNA, 20 nt, Artificial Sequence
  HTT spacer sequence CTCN PAM
cuccccaugggccccggugu

SEQ ID NO: 15990 - RNA, 20 nt, Artificial Sequence
  HTT spacer sequence CTCN PAM
ccaugggccccgguguguga

SEQ ID NO: 15991 - RNA, 20 nt, Artificial Sequence
  HTT spacer sequence CTCN PAM
ucccugugcccauguguucu

SEQ ID NO: 15992 - RNA, 20 nt, Artificial Sequence
  HTT spacer sequence CTCN PAM
cugugcccauguguucucau

SEQ ID NO: 15993 - RNA, 20 nt, Artificial Sequence
  HTT spacer sequence CTCN PAM
uuguucaauuuccacuugug

SEQ ID NO: 15994 - RNA, 20 nt, Artificial Sequence
  HTT spacer sequence CTCN PAM
caaguggaaauugaacaaug

SEQ ID NO: 15995 - RNA, 20 nt, Artificial Sequence
  HTT spacer sequence CTCN PAM
cucacaaguggaaauugaac

SEQ ID NO: 15996 - RNA, 20 nt, Artificial Sequence
  HTT spacer sequence CTCN PAM
gcaaacuaucacaagaucag

SEQ ID NO: 15997 - RNA, 20 nt, Artificial Sequence
  HTT spacer sequence CTCN PAM
uccuuuuuuauggcuguaua

SEQ ID NO: 15998 - RNA, 20 nt, Artificial Sequence
  HTT spacer sequence CTCN PAM
aaggucuagaacuagaaaua

SEQ ID NO: 15999 - RNA, 20 nt, Artificial Sequence
  HTT spacer sequence CTCN PAM
caccaacaguguaaaagugu

SEQ ID NO: 16000 - RNA, 20 nt, Artificial Sequence
  HTT spacer sequence CTCN PAM
ccagcaucuguuguuucgug

SEQ ID NO: 16001 - RNA, 20 nt, Artificial Sequence
  HTT spacer sequence CTCN PAM
agcaucuguuguuucgugac

SEQ ID NO: 16002 - RNA, 20 nt, Artificial Sequence
  HTT spacer sequence CTCN PAM
cgccaguuaggauggcgauc

SEQ ID NO: 16003 - RNA, 20 nt, Artificial Sequence
  HTT spacer sequence CTCN PAM
uugugauuuugaucugcauu

SEQ ID NO: 16004 - RNA, 20 nt, Artificial Sequence
  HTT spacer sequence CTCN PAM
aaugaccaguggugaugagc

SEQ ID NO: 16005 - RNA, 20 nt, Artificial Sequence
  HTT spacer sequence CTCN PAM
ucaccacuggucauuagaga

SEQ ID NO: 16006 - RNA, 20 nt, Artificial Sequence
  HTT spacer sequence CTCN PAM
gaugauaguuucuuuugcua

SEQ ID NO: 16007 - RNA, 20 nt, Artificial Sequence
  HTT spacer sequence CTCN PAM
uuaguuuaauuagaucccgu

SEQ ID NO: 16008 - RNA, 20 nt, Artificial Sequence
  HTT spacer sequence CTCN PAM
agauggaucaaagacuuaaa

SEQ ID NO: 16009 - RNA, 20 nt, Artificial Sequence
  HTT spacer sequence CTCN PAM
gaaauaccaccacacaucua

SEQ ID NO: 16010 - RNA, 20 nt, Artificial Sequence
  HTT spacer sequence CTCN PAM
guucuguuccauuggucuau

SEQ ID NO: 16011 - RNA, 20 nt, Artificial Sequence
  HTT spacer sequence CTCN PAM
agcuuuguucuucuagccca

SEQ ID NO: 16012 - RNA, 20 nt, Artificial Sequence
  HTT spacer sequence CTCN PAM
uuuuugguuccauaugaagu

SEQ ID NO: 16013 - RNA, 20 nt, Artificial Sequence
  HTT spacer sequence CTCN PAM
cuuauuuccuugagcagugg

SEQ ID NO: 16014 - RNA, 20 nt, Artificial Sequence
  HTT spacer sequence CTCN PAM
uauuuccuugagcagugguu

SEQ ID NO: 16015 - RNA, 20 nt, Artificial Sequence
  HTT spacer sequence CTCN PAM
aggaaauaagagaggacaca

SEQ ID NO: 16016 - RNA, 20 nt, Artificial Sequence
  HTT spacer sequence CTCN PAM
uugaagagguccuucacauc

SEQ ID NO: 16017 - RNA, 20 nt, Artificial Sequence
  HTT spacer sequence CTCN PAM
ucaaggagaacuacaaacca

SEQ ID NO: 16018 - RNA, 20 nt, Artificial Sequence
  HTT spacer sequence CTCN PAM
cauucacaaaugcuacuaag

SEQ ID NO: 16019 - RNA, 20 nt, Artificial Sequence
  HTT spacer sequence CTCN PAM
ugauuuggcucucuguuugu

SEQ ID NO: 16020 - RNA, 20 nt, Artificial Sequence
  HTT spacer sequence CTCN PAM
cuguuugucuguuauuggug

SEQ ID NO: 16021 - RNA, 20 nt, Artificial Sequence
  HTT spacer sequence CTCN PAM
guuugucuguuauuggugua

SEQ ID NO: 16022 - RNA, 20 nt, Artificial Sequence
  HTT spacer sequence CTCN PAM
ggauacaaaaucaaugugca

SEQ ID NO: 16023 - RNA, 20 nt, Artificial Sequence
  HTT spacer sequence CTCN PAM
uuaagcugauuagcaacuuc

SEQ ID NO: 16024 - RNA, 20 nt, Artificial Sequence
  HTT spacer sequence CTCN PAM
aaaucuccuuaagcugauua

SEQ ID NO: 16025 - RNA, 20 nt, Artificial Sequence
  HTT spacer sequence CTCN PAM
cuuccuauuugaauacccuu

SEQ ID NO: 16026 - RNA, 20 nt, Artificial Sequence
  HTT spacer sequence CTCN PAM
uccuauuugaauacccuuua

SEQ ID NO: 16027 - RNA, 20 nt, Artificial Sequence
  HTT spacer sequence CTCN PAM
ugccugauugcgcuggccag

SEQ ID NO: 16028 - RNA, 20 nt, Artificial Sequence
  HTT spacer sequence CTCN PAM
uauucaacauaguauuggaa

SEQ ID NO: 16029 - RNA, 20 nt, Artificial Sequence
  HTT spacer sequence CTCN PAM
ccacuccuauucaacauagu

SEQ ID NO: 16030 - RNA, 20 nt, Artificial Sequence
  HTT spacer sequence CTCN PAM
caccacuccuauucaacaua

SEQ ID NO: 16031 - RNA, 20 nt, Artificial Sequence
  HTT spacer sequence CTCN PAM
cucaccacuccuauucaaca

SEQ ID NO: 16032 - RNA, 20 nt, Artificial Sequence
  HTT spacer sequence CTCN PAM
uacuauguugagauacguuc

SEQ ID NO: 16033 - RNA, 20 nt, Artificial Sequence
  HTT spacer sequence CTCN PAM
acauaguaagagcuauuuau

SEQ ID NO: 16034 - RNA, 20 nt, Artificial Sequence
  HTT spacer sequence CTCN PAM
auaaacuagguaucgaugga

SEQ ID NO: 16035 - RNA, 20 nt, Artificial Sequence
  HTT spacer sequence CTCN PAM
caauaaacuagguaucgaug

SEQ ID NO: 16036 - RNA, 20 nt, Artificial Sequence
  HTT spacer sequence CTCN PAM
acagaugcagaaaaggccuu

SEQ ID NO: 16037 - RNA, 20 nt, Artificial Sequence
  HTT spacer sequence CTCN PAM
auaaaauacuggcaaacuga

SEQ ID NO: 16038 - RNA, 20 nt, Artificial Sequence
  HTT spacer sequence CTCN PAM
uuuuuuguugugucucugcc

SEQ ID NO: 16039 - RNA, 20 nt, Artificial Sequence
  HTT spacer sequence CTCN PAM
gccaggcuuugguaucagga

SEQ ID NO: 16040 - RNA, 20 nt, Artificial Sequence
  HTT spacer sequence CTCN PAM
uaaaaugaguuagggaggau

SEQ ID NO: 16041 - RNA, 20 nt, Artificial Sequence
  HTT spacer sequence CTCN PAM
uuuuaugaggccagcaucau

SEQ ID NO: 16042 - RNA, 20 nt, Artificial Sequence
  HTT spacer sequence CTCN PAM
cuaacucauuuuaugaggcc

SEQ ID NO: 16043 - RNA, 20 nt, Artificial Sequence
  HTT spacer sequence CTCN PAM
cuuuuucuauugauuggaau

SEQ ID NO: 16044 - RNA, 20 nt, Artificial Sequence
  HTT spacer sequence CTCN PAM
uuuucuauugauuggaauag

SEQ ID NO: 16045 - RNA, 20 nt, Artificial Sequence
  HTT spacer sequence CTCN PAM
ucuuuguaccucugguagaa

SEQ ID NO: 16046 - RNA, 20 nt, Artificial Sequence
  HTT spacer sequence CTCN PAM
uuguaccucugguagaauuc

SEQ ID NO: 16047 - RNA, 20 nt, Artificial Sequence
  HTT spacer sequence CTCN PAM
gguagaauucggcugugaau

SEQ ID NO: 16048 - RNA, 20 nt, Artificial Sequence
  HTT spacer sequence CTCN PAM
aguuuagaaccuguuaucag

SEQ ID NO: 16049 - RNA, 20 nt, Artificial Sequence
  HTT spacer sequence CTCN PAM
gaauagacugauaacagguu

SEQ ID NO: 16050 - RNA, 20 nt, Artificial Sequence
  HTT spacer sequence CTCN PAM
caagacuaaaccagaaaaaa

SEQ ID NO: 16051 - RNA, 20 nt, Artificial Sequence
  HTT spacer sequence CTCN PAM
acccaaauaaacuagaaaau

SEQ ID NO: 16052 - RNA, 20 nt, Artificial Sequence
  HTT spacer sequence CTCN PAM
gaugguaguuuguauuucug

SEQ ID NO: 16053 - RNA, 20 nt, Artificial Sequence
  HTT spacer sequence CTCN PAM
auaaaaacgauaaaggggau

SEQ ID NO: 16054 - RNA, 20 nt, Artificial Sequence
  HTT spacer sequence CTCN PAM
cuuuucuucuuuauuagucu

SEQ ID NO: 16055 - RNA, 20 nt, Artificial Sequence
  HTT spacer sequence CTCN PAM
uuucuucuuuauuagucuug

SEQ ID NO: 16056 - RNA, 20 nt, Artificial Sequence
  HTT spacer sequence CTCN PAM
aaaaaaaaucaaugaaucca

SEQ ID NO: 16057 - RNA, 20 nt, Artificial Sequence
  HTT spacer sequence CTCN PAM
aucuccuucaguucugcucu

SEQ ID NO: 16058 - RNA, 20 nt, Artificial Sequence
  HTT spacer sequence CTCN PAM
uucaguucugcucugaucuu

SEQ ID NO: 16059 - RNA, 20 nt, Artificial Sequence
  HTT spacer sequence CTCN PAM
gaucuuaguuauuuuuuguc

SEQ ID NO: 16060 - RNA, 20 nt, Artificial Sequence
  HTT spacer sequence CTCN PAM
ugcuuuucuaguucuuuuaa

SEQ ID NO: 16061 - RNA, 20 nt, Artificial Sequence
  HTT spacer sequence CTCN PAM
ugugggcauuuagugcuaua

SEQ ID NO: 16062 - RNA, 20 nt, Artificial Sequence
  HTT spacer sequence CTCN PAM
acacacugcuuuaaaugugu

SEQ ID NO: 16063 - RNA, 20 nt, Artificial Sequence
  HTT spacer sequence CTCN PAM
gggacacauuuaaagcagug

SEQ ID NO: 16064 - RNA, 20 nt, Artificial Sequence
  HTT spacer sequence CTCN PAM
uugguuuccaagaaaauuuu

SEQ ID NO: 16065 - RNA, 20 nt, Artificial Sequence
  HTT spacer sequence CTCN PAM
ugaaugacuacuggguaaau

SEQ ID NO: 16066 - RNA, 20 nt, Artificial Sequence
  HTT spacer sequence CTCN PAM
aaaccacacaacuacaugga

SEQ ID NO: 16067 - RNA, 20 nt, Artificial Sequence
  HTT spacer sequence CTCN PAM
cucaaaaccacacaacuaca

SEQ ID NO: 16068 - RNA, 20 nt, Artificial Sequence
  HTT spacer sequence CTCN PAM
auccugaguucuaauuugau

SEQ ID NO: 16069 - RNA, 20 nt, Artificial Sequence
  HTT spacer sequence CTCN PAM
ggauugagaaucucacucaa

SEQ ID NO: 16070 - RNA, 20 nt, Artificial Sequence
  HTT spacer sequence CTCN PAM
gcaaauguaaaagaacagaa

SEQ ID NO: 16071 - RNA, 20 nt, Artificial Sequence
  HTT spacer sequence CTCN PAM
ucagcaaauguaaaagaaca

SEQ ID NO: 16072 - RNA, 20 nt, Artificial Sequence
  HTT spacer sequence CTCN PAM
gcaccacauugcacuuauuc

SEQ ID NO: 16073 - RNA, 20 nt, Artificial Sequence
  HTT spacer sequence CTCN PAM
gcaccccaaaucaacagaac

SEQ ID NO: 16074 - RNA, 20 nt, Artificial Sequence
  HTT spacer sequence CTCN PAM
gcacuggaccaagcggaccu

SEQ ID NO: 16075 - RNA, 20 nt, Artificial Sequence
  HTT spacer sequence CTCN PAM
uugaucugccuaauauugac

SEQ ID NO: 16076 - RNA, 20 nt, Artificial Sequence
  HTT spacer sequence CTCN PAM
cacuauuaccgggugggagu

SEQ ID NO: 16077 - RNA, 20 nt, Artificial Sequence
  HTT spacer sequence CTCN PAM
cacccgguaauagugggaga

SEQ ID NO: 16078 - RNA, 20 nt, Artificial Sequence
  HTT spacer sequence CTCN PAM
uuguaggucucuaagaacuu

SEQ ID NO: 16079 - RNA, 20 nt, Artificial Sequence
  HTT spacer sequence CTCN PAM
aagaacuugcuucaugaauc

SEQ ID NO: 16080 - RNA, 20 nt, Artificial Sequence
  HTT spacer sequence CTCN PAM
uguauugggggcguguauau

SEQ ID NO: 16081 - RNA, 20 nt, Artificial Sequence
  HTT spacer sequence CTCN PAM
ucuuguugaauugaucccuu

SEQ ID NO: 16082 - RNA, 20 nt, Artificial Sequence
  HTT spacer sequence CTCN PAM
uuugaacuuuguugauuuaa

SEQ ID NO: 16083 - RNA, 20 nt, Artificial Sequence
  HTT spacer sequence CTCN PAM
gauaaaacagacuuuaaauc

SEQ ID NO: 16084 - RNA, 20 nt, Artificial Sequence
  HTT spacer sequence CTCN PAM
aucccuuuauuuugagccaa

SEQ ID NO: 16085 - RNA, 20 nt, Artificial Sequence
  HTT spacer sequence CTCN PAM
aaauaaagggauggaggaag

SEQ ID NO: 16086 - RNA, 20 nt, Artificial Sequence
  HTT spacer sequence CTCN PAM
uuggcucaaaauaaagggau

SEQ ID NO: 16087 - RNA, 20 nt, Artificial Sequence
  HTT spacer sequence CTCN PAM
caugcaaagacacucauugg

SEQ ID NO: 16088 - RNA, 20 nt, Artificial Sequence
  HTT spacer sequence CTCN PAM
ugaauacagcacaccaaugg

SEQ ID NO: 16089 - RNA, 20 nt, Artificial Sequence
  HTT spacer sequence CTCN PAM
uuauccaauuugccagucug

SEQ ID NO: 16090 - RNA, 20 nt, Artificial Sequence
  HTT spacer sequence CTCN PAM
ugaaggaagcacuaaacaug

SEQ ID NO: 16091 - RNA, 20 nt, Artificial Sequence
  HTT spacer sequence CTCN PAM
uguaaggcaggccugguggu

SEQ ID NO: 16092 - RNA, 20 nt, Artificial Sequence
  HTT spacer sequence CTCN PAM
gcauuugcuugucuguaaag

SEQ ID NO: 16093 - RNA, 20 nt, Artificial Sequence
  HTT spacer sequence CTCN PAM
uucacuuaugaagcuuaguu

SEQ ID NO: 16094 - RNA, 20 nt, Artificial Sequence
  HTT spacer sequence CTCN PAM
cacucuuuucuggcuuguag

SEQ ID NO: 16095 - RNA, 20 nt, Artificial Sequence
  HTT spacer sequence CTCN PAM
uuucuggcuuguaggauuuc

SEQ ID NO: 16096 - RNA, 20 nt, Artificial Sequence
  HTT spacer sequence CTCN PAM
gcagaaauccuacaagccag

SEQ ID NO: 16097 - RNA, 20 nt, Artificial Sequence
  HTT spacer sequence CTCN PAM
cugcagaaauccuacaagcc

SEQ ID NO: 16098 - RNA, 20 nt, Artificial Sequence
  HTT spacer sequence CTCN PAM
cuggcugcccuuuccuucau

SEQ ID NO: 16099 - RNA, 20 nt, Artificial Sequence
  HTT spacer sequence CTCN PAM
ggcugcccuuuccuucauuu

SEQ ID NO: 16100 - RNA, 20 nt, Artificial Sequence
  HTT spacer sequence CTCN PAM
ucucgaggaguaucuuugug

SEQ ID NO: 16101 - RNA, 20 nt, Artificial Sequence
  HTT spacer sequence CTCN PAM
aggaguaucuuugugguguu

SEQ ID NO: 16102 - RNA, 20 nt, Artificial Sequence
  HTT spacer sequence CTCN PAM
agaagagcaaccccaagaca

SEQ ID NO: 16103 - RNA, 20 nt, Artificial Sequence
  HTT spacer sequence CTCN PAM
ucgagaagagcaaccccaag

SEQ ID NO: 16104 - RNA, 20 nt, Artificial Sequence
  HTT spacer sequence CTCN PAM
guauuuccugaauuugaaug

SEQ ID NO: 16105 - RNA, 20 nt, Artificial Sequence
  HTT spacer sequence CTCN PAM
uggauaauauccugaagagu

SEQ ID NO: 16106 - RNA, 20 nt, Artificial Sequence
  HTT spacer sequence CTCN PAM
ucaggauauuauccaggaga

SEQ ID NO: 16107 - RNA, 20 nt, Artificial Sequence
  HTT spacer sequence CTCN PAM
ccaucacuuucagguacacc

SEQ ID NO: 16108 - RNA, 20 nt, Artificial Sequence
  HTT spacer sequence CTCN PAM
aagaaauaugggacuaugug

SEQ ID NO: 16109 - RNA, 20 nt, Artificial Sequence
  HTT spacer sequence CTCN PAM
uuuuucucuaaucuugucuu

SEQ ID NO: 16110 - RNA, 20 nt, Artificial Sequence
  HTT spacer sequence CTCN PAM
aaucuugucuucucgcuuua

SEQ ID NO: 16111 - RNA, 20 nt, Artificial Sequence
  HTT spacer sequence CTCN PAM
cuuuauuucauuaauuugau

SEQ ID NO: 16112 - RNA, 20 nt, Artificial Sequence
  HTT spacer sequence CTCN PAM
uucugugguuuuuagcucca

SEQ ID NO: 16113 - RNA, 20 nt, Artificial Sequence
  HTT spacer sequence CTCN PAM
aucaggucauuuaagcucuu

SEQ ID NO: 16114 - RNA, 20 nt, Artificial Sequence
  HTT spacer sequence CTCN PAM
ucucuacacugguuauucua

SEQ ID NO: 16115 - RNA, 20 nt, Artificial Sequence
  HTT spacer sequence CTCN PAM
acacugguuauucuagccau

SEQ ID NO: 16116 - RNA, 20 nt, Artificial Sequence
  HTT spacer sequence CTCN PAM
uuuagcucggagaaguuugu

SEQ ID NO: 16117 - RNA, 20 nt, Artificial Sequence
  HTT spacer sequence CTCN PAM
gagaaguuuguuauuaccga

SEQ ID NO: 16118 - RNA, 20 nt, Artificial Sequence
  HTT spacer sequence CTCN PAM
gagcuaaaggagcauguucu

SEQ ID NO: 16119 - RNA, 20 nt, Artificial Sequence
  HTT spacer sequence CTCN PAM
uucuccauccaguuuuguuc

SEQ ID NO: 16120 - RNA, 20 nt, Artificial Sequence
  HTT spacer sequence CTCN PAM
auccaguuuuguucccuugc

SEQ ID NO: 16121 - RNA, 20 nt, Artificial Sequence
  HTT spacer sequence CTCN PAM
ccagcaagggaacaaaacug

SEQ ID NO: 16122 - RNA, 20 nt, Artificial Sequence
  HTT spacer sequence CTCN PAM
ucaccagcaagggaacaaaa

SEQ ID NO: 16123 - RNA, 20 nt, Artificial Sequence
  HTT spacer sequence CTCN PAM
aaaggaucacaacuccucac

SEQ ID NO: 16124 - RNA, 20 nt, Artificial Sequence
  HTT spacer sequence CTCN PAM
uccaaaggaucacaacuccu

SEQ ID NO: 16125 - RNA, 20 nt, Artificial Sequence
  HTT spacer sequence CTCN PAM
ucuccuccaaaggaucacaa

SEQ ID NO: 16126 - RNA, 20 nt, Artificial Sequence
  HTT spacer sequence CTCN PAM
ccaucauugugguuuuaucu

SEQ ID NO: 16127 - RNA, 20 nt, Artificial Sequence
  HTT spacer sequence CTCN PAM
gcugcaggucuguuggaguu

SEQ ID NO: 16128 - RNA, 20 nt, Artificial Sequence
  HTT spacer sequence CTCN PAM
aacagaccugcagcugaggg

SEQ ID NO: 16129 - RNA, 20 nt, Artificial Sequence
  HTT spacer sequence CTCN PAM
agcaaacuccaacagaccug

SEQ ID NO: 16130 - RNA, 20 nt, Artificial Sequence
  HTT spacer sequence CTCN PAM
aggcccuguuugccugggca

SEQ ID NO: 16131 - RNA, 20 nt, Artificial Sequence
  HTT spacer sequence CTCN PAM
gcuggugaugcccaggcaaa

SEQ ID NO: 16132 - RNA, 20 nt, Artificial Sequence
  HTT spacer sequence CTCN PAM
ggaaacaucgucccagagca

SEQ ID NO: 16133 - RNA, 20 nt, Artificial Sequence
  HTT spacer sequence CTCN PAM
gggacgauguuuccagagga

SEQ ID NO: 16134 - RNA, 20 nt, Artificial Sequence
  HTT spacer sequence CTCN PAM
uacaggcagacaccuucgug

SEQ ID NO: 16135 - RNA, 20 nt, Artificial Sequence
  HTT spacer sequence CTCN PAM
caguaggggccaacaaacac

SEQ ID NO: 16136 - RNA, 20 nt, Artificial Sequence
  HTT spacer sequence CTCN PAM
cagucaggcuacaugggggu

SEQ ID NO: 16137 - RNA, 20 nt, Artificial Sequence
  HTT spacer sequence CTCN PAM
agugggucccugacccccau

SEQ ID NO: 16138 - RNA, 20 nt, Artificial Sequence
  HTT spacer sequence CTCN PAM
gauaaugaacagacugccuc

SEQ ID NO: 16139 - RNA, 20 nt, Artificial Sequence
  HTT spacer sequence CTCN PAM
cgguacggcauucaagcucc

SEQ ID NO: 16140 - RNA, 20 nt, Artificial Sequence
  HTT spacer sequence CTCN PAM
cuucagagcugucaggcacg

SEQ ID NO: 16141 - RNA, 20 nt, Artificial Sequence
  HTT spacer sequence CTCN PAM
ucagagcugucaggcacgua

SEQ ID NO: 16142 - RNA, 20 nt, Artificial Sequence
  HTT spacer sequence CTCN PAM
gaagagagcagugguucucc

SEQ ID NO: 16143 - RNA, 20 nt, Artificial Sequence
  HTT spacer sequence CTCN PAM
agauuuaaacauacgugccu

SEQ ID NO: 16144 - RNA, 20 nt, Artificial Sequence
  HTT spacer sequence CTCN PAM
gggggaagggcacaucugaa

SEQ ID NO: 16145 - RNA, 20 nt, Artificial Sequence
  HTT spacer sequence CTCN PAM
agauuccaccucugggggaa

SEQ ID NO: 16146 - RNA, 20 nt, Artificial Sequence
  HTT spacer sequence CTCN PAM
cuagauuccaccucuggggg

SEQ ID NO: 16147 - RNA, 20 nt, Artificial Sequence
  HTT spacer sequence CTCN PAM
gcaaggccuacugccucucu

SEQ ID NO: 16148 - RNA, 20 nt, Artificial Sequence
  HTT spacer sequence CTCN PAM
gcccaguucgagcuucccug

SEQ ID NO: 16149 - RNA, 20 nt, Artificial Sequence
  HTT spacer sequence CTCN PAM
aacugggcagagcccacugc

SEQ ID NO: 16150 - RNA, 20 nt, Artificial Sequence
  HTT spacer sequence CTCN PAM
caguguaaacaaagcagcag

SEQ ID NO: 16151 - RNA, 20 nt, Artificial Sequence
  HTT spacer sequence CTCN PAM
agccucagcagugguggaca

SEQ ID NO: 16152 - RNA, 20 nt, Artificial Sequence
  HTT spacer sequence CTCN PAM
gcagugguggacaccccucc

SEQ ID NO: 16153 - RNA, 20 nt, Artificial Sequence
  HTT spacer sequence CTCN PAM
cccagccaagcuccugcauc

SEQ ID NO: 16154 - RNA, 20 nt, Artificial Sequence
  HTT spacer sequence CTCN PAM
ugcaucccaggucgauuuca

SEQ ID NO: 16155 - RNA, 20 nt, Artificial Sequence
  HTT spacer sequence CTCN PAM
gaaaucgaccugggaugcag

SEQ ID NO: 16156 - RNA, 20 nt, Artificial Sequence
  HTT spacer sequence CTCN PAM
cugcuagcgcagcacucuga

SEQ ID NO: 16157 - RNA, 20 nt, Artificial Sequence
  HTT spacer sequence CTCN PAM
gcgggucccacgcccauggg

SEQ ID NO: 16158 - RNA, 20 nt, Artificial Sequence
  HTT spacer sequence CTCN PAM
ugugccuggcucagcggguc

SEQ ID NO: 16159 - RNA, 20 nt, Artificial Sequence
  HTT spacer sequence CTCN PAM
ccugugccuggcucagcggg

SEQ ID NO: 16160 - RNA, 20 nt, Artificial Sequence
  HTT spacer sequence CTCN PAM
uggucugcugguugugaaga

SEQ ID NO: 16161 - RNA, 20 nt, Artificial Sequence
  HTT spacer sequence CTCN PAM
ugcccaaauacugcacuuuu

SEQ ID NO: 16162 - RNA, 20 nt, Artificial Sequence
  HTT spacer sequence CTCN PAM
uucagguacagucacucaug

SEQ ID NO: 16163 - RNA, 20 nt, Artificial Sequence
  HTT spacer sequence CTCN PAM
uggcuuccuuuggcuuggaa

SEQ ID NO: 16164 - RNA, 20 nt, Artificial Sequence
  HTT spacer sequence CTCN PAM
ccugggaagcacaagggguc

SEQ ID NO: 16165 - RNA, 20 nt, Artificial Sequence
  HTT spacer sequence CTCN PAM
gugggcugcacccacugucc

SEQ ID NO: 16166 - RNA, 20 nt, Artificial Sequence
  HTT spacer sequence CTCN PAM
cugggacuugcuggacagug

SEQ ID NO: 16167 - RNA, 20 nt, Artificial Sequence
  HTT spacer sequence CTCN PAM
guuggaaaugcagaaaucac

SEQ ID NO: 16168 - RNA, 20 nt, Artificial Sequence
  HTT spacer sequence CTCN PAM
cugggagcuguagacuggag

SEQ ID NO: 16169 - RNA, 20 nt, Artificial Sequence
  HTT spacer sequence CTCN PAM
cagugagaucgacacagaag

SEQ ID NO: 16170 - RNA, 20 nt, Artificial Sequence
  HTT spacer sequence CTCN PAM
agucuacagcucccagugag

SEQ ID NO: 16171 - RNA, 20 nt, Artificial Sequence
  HTT spacer sequence CTCN PAM
aaaaacaagggaugcuucca

SEQ ID NO: 16172 - RNA, 20 nt, Artificial Sequence
  HTT spacer sequence CTCN PAM
accucaaaaaacaagggaug

SEQ ID NO: 16173 - RNA, 20 nt, Artificial Sequence
  HTT spacer sequence CTCN PAM
gucgcccaggcugacgugca

SEQ ID NO: 16174 - RNA, 20 nt, Artificial Sequence
  HTT spacer sequence CTCN PAM
gcccacugcaaccuuugccu

SEQ ID NO: 16175 - RNA, 20 nt, Artificial Sequence
  HTT spacer sequence CTCN PAM
ugguuucaagcgauucuccu

SEQ ID NO: 16176 - RNA, 20 nt, Artificial Sequence
  HTT spacer sequence CTCN PAM
uaccucagccuccggaguag

SEQ ID NO: 16177 - RNA, 20 nt, Artificial Sequence
  HTT spacer sequence CTCN PAM
gccuccggaguagcugggau

SEQ ID NO: 16178 - RNA, 20 nt, Artificial Sequence
  HTT spacer sequence CTCN PAM
ggaguagcugggauuacagg

SEQ ID NO: 16179 - RNA, 20 nt, Artificial Sequence
  HTT spacer sequence CTCN PAM
ggaggcugagguaggagaau

SEQ ID NO: 16180 - RNA, 20 nt, Artificial Sequence
  HTT spacer sequence CTCN PAM
acuaaaaauacaaaaaauua

SEQ ID NO: 16181 - RNA, 20 nt, Artificial Sequence
  HTT spacer sequence CTCN PAM
aacuccugaccuugugaucc

SEQ ID NO: 16182 - RNA, 20 nt, Artificial Sequence
  HTT spacer sequence CTCN PAM
ugaccuugugauccacccac

SEQ ID NO: 16183 - RNA, 20 nt, Artificial Sequence
  HTT spacer sequence CTCN PAM
gccuccuagagugcugggau

SEQ ID NO: 16184 - RNA, 20 nt, Artificial Sequence
  HTT spacer sequence CTCN PAM
uagagugcugggaucacagg

SEQ ID NO: 16185 - RNA, 20 nt, Artificial Sequence
  HTT spacer sequence CTCN PAM
aggaggcugaggugggugga

SEQ ID NO: 16186 - RNA, 20 nt, Artificial Sequence
  HTT spacer sequence CTCN PAM
cucucuuugcccuaaaccac

SEQ ID NO: 16187 - RNA, 20 nt, Artificial Sequence
  HTT spacer sequence CTCN PAM
cuuugcccuaaaccacugug

SEQ ID NO: 16188 - RNA, 20 nt, Artificial Sequence
  HTT spacer sequence CTCN PAM
uugcccuaaaccacugugcu

SEQ ID NO: 16189 - RNA, 20 nt, Artificial Sequence
  HTT spacer sequence CTCN PAM
auguauaacacauuuuagca

SEQ ID NO: 16190 - RNA, 20 nt, Artificial Sequence
  HTT spacer sequence CTCN PAM
cguucaaauuuaaaacauau

SEQ ID NO: 16191 - RNA, 20 nt, Artificial Sequence
  HTT spacer sequence CTCN PAM
ucucugaaaauuuuuacauu

SEQ ID NO: 16192 - RNA, 20 nt, Artificial Sequence
  HTT spacer sequence CTCN PAM
gaaaauuuuuacauuuggca

SEQ ID NO: 16193 - RNA, 20 nt, Artificial Sequence
  HTT spacer sequence CTCN PAM
ggccugugucuuuacaguua

SEQ ID NO: 16194 - RNA, 20 nt, Artificial Sequence
  HTT spacer sequence CTCN PAM
ccucuccuuuuuuguuuuuc

SEQ ID NO: 16195 - RNA, 20 nt, Artificial Sequence
  HTT spacer sequence CTCN PAM
ccuuuuuuguuuuucuaagu

SEQ ID NO: 16196 - RNA, 20 nt, Artificial Sequence
  HTT spacer sequence CTCN PAM
uuuuuuguuuuucuaaguuc

SEQ ID NO: 16197 - RNA, 20 nt, Artificial Sequence
  HTT spacer sequence CTCN PAM
gucuugaaacagcaaaaaag

SEQ ID NO: 16198 - RNA, 20 nt, Artificial Sequence
  HTT spacer sequence CTCN PAM
cauauccuuuuguuuguacu

SEQ ID NO: 16199 - RNA, 20 nt, Artificial Sequence
  HTT spacer sequence CTCN PAM
ccugcuuaauuguugaguuu

SEQ ID NO: 16200 - RNA, 20 nt, Artificial Sequence
  HTT spacer sequence CTCN PAM
acaauuaagcaggugaggcu

SEQ ID NO: 16201 - RNA, 20 nt, Artificial Sequence
  HTT spacer sequence CTCN PAM
aaaagaccacggauaaaaac

SEQ ID NO: 16202 - RNA, 20 nt, Artificial Sequence
  HTT spacer sequence CTCN PAM
aaacagucaggggccaagug

SEQ ID NO: 16203 - RNA, 20 nt, Artificial Sequence
  HTT spacer sequence CTCN PAM
cucacugacucacagcaugg

SEQ ID NO: 16204 - RNA, 20 nt, Artificial Sequence
  HTT spacer sequence CTCN PAM
cugacucacagcauggcaag

SEQ ID NO: 16205 - RNA, 20 nt, Artificial Sequence
  HTT spacer sequence CTCN PAM
cagcauggcaagguuucaga

SEQ ID NO: 16206 - RNA, 20 nt, Artificial Sequence
  HTT spacer sequence CTCN PAM
uucugccacacagcaguucu

SEQ ID NO: 16207 - RNA, 20 nt, Artificial Sequence
  HTT spacer sequence CTCN PAM
gaacugcuguguggcagaaa

SEQ ID NO: 16208 - RNA, 20 nt, Artificial Sequence
  HTT spacer sequence CTCN PAM
agccuggccugacaaucuaa

SEQ ID NO: 16209 - RNA, 20 nt, Artificial Sequence
  HTT spacer sequence CTCN PAM
auaguuuguauaucucaagc

SEQ ID NO: 16210 - RNA, 20 nt, Artificial Sequence
  HTT spacer sequence CTCN PAM
gaugccuucaccuaagcaag

SEQ ID NO: 16211 - RNA, 20 nt, Artificial Sequence
  HTT spacer sequence CTCN PAM
gcaugugugcggggcugggu

SEQ ID NO: 16212 - RNA, 20 nt, Artificial Sequence
  HTT spacer sequence CTCN PAM
acacccagccccgcacacau

SEQ ID NO: 16213 - RNA, 20 nt, Artificial Sequence
  HTT spacer sequence CTCN PAM
gaccucaacacccagccccg

SEQ ID NO: 16214 - RNA, 20 nt, Artificial Sequence
  HTT spacer sequence CTCN PAM
agcuacacuugugcucagac

SEQ ID NO: 16215 - RNA, 20 nt, Artificial Sequence
  HTT spacer sequence CTCN PAM
ccagcuacacuugugcucag

SEQ ID NO: 16216 - RNA, 20 nt, Artificial Sequence
  HTT spacer sequence CTCN PAM
ccucuccagcuacacuugug

SEQ ID NO: 16217 - RNA, 20 nt, Artificial Sequence
  HTT spacer sequence CTCN PAM
uacccgucgccacaucaagc

SEQ ID NO: 16218 - RNA, 20 nt, Artificial Sequence
  HTT spacer sequence CTCN PAM
cagaagucugaagaaaaccu

SEQ ID NO: 16219 - RNA, 20 nt, Artificial Sequence
  HTT spacer sequence CTCN PAM
gugccuuuaaauccuggaac

SEQ ID NO: 16220 - RNA, 20 nt, Artificial Sequence
  HTT spacer sequence CTCN PAM
uuuuuauacauaauugaaau

SEQ ID NO: 16221 - RNA, 20 nt, Artificial Sequence
  HTT spacer sequence CTCN PAM
uuacuguuccauuuuauaug

SEQ ID NO: 16222 - RNA, 20 nt, Artificial Sequence
  HTT spacer sequence CTCN PAM
acaaaaagaaaaacaaaaau

SEQ ID NO: 16223 - RNA, 20 nt, Artificial Sequence
  HTT spacer sequence CTCN PAM
gggcugaggugggaggauug

SEQ ID NO: 16224 - RNA, 20 nt, Artificial Sequence
  HTT spacer sequence CTCN PAM
gccccgaguagcugggacca

SEQ ID NO: 16225 - RNA, 20 nt, Artificial Sequence
  HTT spacer sequence CTCN PAM
caccucagccccgaguagcu

SEQ ID NO: 16226 - RNA, 20 nt, Artificial Sequence
  HTT spacer sequence CTCN PAM
agcaauccucccaccucagc

SEQ ID NO: 16227 - RNA, 20 nt, Artificial Sequence
  HTT spacer sequence CTCN PAM
caaggcucaagcaauccucc

SEQ ID NO: 16228 - RNA, 20 nt, Artificial Sequence
  HTT spacer sequence CTCN PAM
accucccaaggcucaagcaa

SEQ ID NO: 16229 - RNA, 20 nt, Artificial Sequence
  HTT spacer sequence CTCN PAM
uugcagccucaaccucccaa

SEQ ID NO: 16230 - RNA, 20 nt, Artificial Sequence
  HTT spacer sequence CTCN PAM
agcaugggugacagacuuua

SEQ ID NO: 16231 - RNA, 20 nt, Artificial Sequence
  HTT spacer sequence CTCN PAM
auaaacccaggcacaagaaa

SEQ ID NO: 16232 - RNA, 20 nt, Artificial Sequence
  HTT spacer sequence CTCN PAM
aaaaaaaaaaaaagaaagaa

SEQ ID NO: 16233 - RNA, 20 nt, Artificial Sequence
  HTT spacer sequence CTCN PAM
cucugucgccugcguuggag

SEQ ID NO: 16234 - RNA, 20 nt, Artificial Sequence
  HTT spacer sequence CTCN PAM
gucgccugcguuggagugca

SEQ ID NO: 16235 - RNA, 20 nt, Artificial Sequence
  HTT spacer sequence CTCN PAM
aacgcaggcgacagagcgag

SEQ ID NO: 16236 - RNA, 20 nt, Artificial Sequence
  HTT spacer sequence CTCN PAM
cugcaagcucugccuccugg

SEQ ID NO: 16237 - RNA, 20 nt, Artificial Sequence
  HTT spacer sequence CTCN PAM
gccuccuggguucacgccau

SEQ ID NO: 16238 - RNA, 20 nt, Artificial Sequence
  HTT spacer sequence CTCN PAM
uggguucacgccauucuccu

SEQ ID NO: 16239 - RNA, 20 nt, Artificial Sequence
  HTT spacer sequence CTCN PAM
ugccucagccuccugaguag

SEQ ID NO: 16240 - RNA, 20 nt, Artificial Sequence
  HTT spacer sequence CTCN PAM
gccuccugaguagcugggac

SEQ ID NO: 16241 - RNA, 20 nt, Artificial Sequence
  HTT spacer sequence CTCN PAM
ugaguagcugggacuacagg

SEQ ID NO: 16242 - RNA, 20 nt, Artificial Sequence
  HTT spacer sequence CTCN PAM
ggaggcugaggcaggagaau

SEQ ID NO: 16243 - RNA, 20 nt, Artificial Sequence
  HTT spacer sequence CTCN PAM
acuaaaaauacaaaaaauua

SEQ ID NO: 16244 - RNA, 20 nt, Artificial Sequence
  HTT spacer sequence CTCN PAM
ucucuacuaaaaauacaaaa

SEQ ID NO: 16245 - RNA, 20 nt, Artificial Sequence
  HTT spacer sequence CTCN PAM
aucuccugaccucgugaucu

SEQ ID NO: 16246 - RNA, 20 nt, Artificial Sequence
  HTT spacer sequence CTCN PAM
ugaccucgugaucugcccgc

SEQ ID NO: 16247 - RNA, 20 nt, Artificial Sequence
  HTT spacer sequence CTCN PAM
ugaucugcccgccugggccu

SEQ ID NO: 16248 - RNA, 20 nt, Artificial Sequence
  HTT spacer sequence CTCN PAM
caaagugcugggauuacagg

SEQ ID NO: 16249 - RNA, 20 nt, Artificial Sequence
  HTT spacer sequence CTCN PAM
cgccuguaaucccagcacuu

SEQ ID NO: 16250 - RNA, 20 nt, Artificial Sequence
  HTT spacer sequence CTCN PAM
cuccuuuuuucccucucuua

SEQ ID NO: 16251 - RNA, 20 nt, Artificial Sequence
  HTT spacer sequence CTCN PAM
uuuuuucccucucuuaaagg

SEQ ID NO: 16252 - RNA, 20 nt, Artificial Sequence
  HTT spacer sequence CTCN PAM
cuuaaaggggcugugauuuc

SEQ ID NO: 16253 - RNA, 20 nt, Artificial Sequence
  HTT spacer sequence CTCN PAM
uaaaggggcugugauuuccu

SEQ ID NO: 16254 - RNA, 20 nt, Artificial Sequence
  HTT spacer sequence CTCN PAM
uuucaguguuugauuguuuu

SEQ ID NO: 16255 - RNA, 20 nt, Artificial Sequence
  HTT spacer sequence CTCN PAM
gaucuuuucuucuacagugu

SEQ ID NO: 16256 - RNA, 20 nt, Artificial Sequence
  HTT spacer sequence CTCN PAM
guuguuaaucuguuaaucug

SEQ ID NO: 16257 - RNA, 20 nt, Artificial Sequence
  HTT spacer sequence CTCN PAM
cucuguugcccaggcuggag

SEQ ID NO: 16258 - RNA, 20 nt, Artificial Sequence
  HTT spacer sequence CTCN PAM
guugcccaggcuggaguuua

SEQ ID NO: 16259 - RNA, 20 nt, Artificial Sequence
  HTT spacer sequence CTCN PAM
agccugggcaacagagugag

SEQ ID NO: 16260 - RNA, 20 nt, Artificial Sequence
  HTT spacer sequence CTCN PAM
cugcaaccuccaccucccag

SEQ ID NO: 16261 - RNA, 20 nt, Artificial Sequence
  HTT spacer sequence CTCN PAM
accucccaggcucaagcaau

SEQ ID NO: 16262 - RNA, 20 nt, Artificial Sequence
  HTT spacer sequence CTCN PAM
caggcucaagcaauucuucu

SEQ ID NO: 16263 - RNA, 20 nt, Artificial Sequence
  HTT spacer sequence CTCN PAM
agcaauucuucugccucagc

SEQ ID NO: 16264 - RNA, 20 nt, Artificial Sequence
  HTT spacer sequence CTCN PAM
gccucccgaguagcugggac

SEQ ID NO: 16265 - RNA, 20 nt, Artificial Sequence
  HTT spacer sequence CTCN PAM
cgaguagcugggacuauagg

SEQ ID NO: 16266 - RNA, 20 nt, Artificial Sequence
  HTT spacer sequence CTCN PAM
ggaggcugaggcagaagaau

SEQ ID NO: 16267 - RNA, 20 nt, Artificial Sequence
  HTT spacer sequence CTCN PAM
aauaaaaauacacaaauuag

SEQ ID NO: 16268 - RNA, 20 nt, Artificial Sequence
  HTT spacer sequence CTCN PAM
ugaccucaggugauucaucc

SEQ ID NO: 16269 - RNA, 20 nt, Artificial Sequence
  HTT spacer sequence CTCN PAM
ggugauucauccgccucggu

SEQ ID NO: 16270 - RNA, 20 nt, Artificial Sequence
  HTT spacer sequence CTCN PAM
gucucccaaaguguugggau

SEQ ID NO: 16271 - RNA, 20 nt, Artificial Sequence
  HTT spacer sequence CTCN PAM
caaaguguugggauuauagg

SEQ ID NO: 16272 - RNA, 20 nt, Artificial Sequence
  HTT spacer sequence CTCN PAM
ugccuauaaucccaacacuu

SEQ ID NO: 16273 - RNA, 20 nt, Artificial Sequence
  HTT spacer sequence CTCN PAM
agaaguuugauuuaggucuu

SEQ ID NO: 16274 - RNA, 20 nt, Artificial Sequence
  HTT spacer sequence CTCN PAM
cuguguuucuguuuagcuuu

SEQ ID NO: 16275 - RNA, 20 nt, Artificial Sequence
  HTT spacer sequence CTCN PAM
gcuaguucuaagaucuucua

SEQ ID NO: 16276 - RNA, 20 nt, Artificial Sequence
  HTT spacer sequence CTCN PAM
uugguugauugauacuccuc

SEQ ID NO: 16277 - RNA, 20 nt, Artificial Sequence
  HTT spacer sequence CTCN PAM
ucguuuuggguuguauuuuc

SEQ ID NO: 16278 - RNA, 20 nt, Artificial Sequence
  HTT spacer sequence CTCN PAM
uuuuggguuguauuuuccug

SEQ ID NO: 16279 - RNA, 20 nt, Artificial Sequence
  HTT spacer sequence CTCN PAM
uuguauggcugccaauuuuu

SEQ ID NO: 16280 - RNA, 20 nt, Artificial Sequence
  HTT spacer sequence CTCN PAM
agaagaucuaugggaacaca

SEQ ID NO: 16281 - RNA, 20 nt, Artificial Sequence
  HTT spacer sequence CTCN PAM
gaacaaagcucaagaagauc

SEQ ID NO: 16282 - RNA, 20 nt, Artificial Sequence
  HTT spacer sequence CTCN PAM
acuaaccucagaacaaagcu

SEQ ID NO: 16283 - RNA, 20 nt, Artificial Sequence
  HTT spacer sequence CTCN PAM
uuugggucuugcuuuauaau

SEQ ID NO: 16284 - RNA, 20 nt, Artificial Sequence
  HTT spacer sequence CTCN PAM
aacccaucugacaaauuaua

SEQ ID NO: 16285 - RNA, 20 nt, Artificial Sequence
  HTT spacer sequence CTCN PAM
uuaggaauaauuagguacca

SEQ ID NO: 16286 - RNA, 20 nt, Artificial Sequence
  HTT spacer sequence CTCN PAM
uaagcaugguaccuaauuau

SEQ ID NO: 16287 - RNA, 20 nt, Artificial Sequence
  HTT spacer sequence CTCN PAM
ggauggucuugccuccuaag

SEQ ID NO: 16288 - RNA, 20 nt, Artificial Sequence
  HTT spacer sequence CTCN PAM
accuaaugaaccagaaaguu

SEQ ID NO: 16289 - RNA, 20 nt, Artificial Sequence
  HTT spacer sequence CTCN PAM
gcaggcggacuggaaaaccc

SEQ ID NO: 16290 - RNA, 20 nt, Artificial Sequence
  HTT spacer sequence CTCN PAM
cacagggcuagaaagucacu

SEQ ID NO: 16291 - RNA, 20 nt, Artificial Sequence
  HTT spacer sequence CTCN PAM
gcgcucacacagggcuagaa

SEQ ID NO: 16292 - RNA, 20 nt, Artificial Sequence
  HTT spacer sequence CTCN PAM
gcuccuucuaauccuuucca

SEQ ID NO: 16293 - RNA, 20 nt, Artificial Sequence
  HTT spacer sequence CTCN PAM
uucuaauccuuuccaaugcu

SEQ ID NO: 16294 - RNA, 20 nt, Artificial Sequence
  HTT spacer sequence CTCN PAM
gggaguuuucucacacacau

SEQ ID NO: 16295 - RNA, 20 nt, Artificial Sequence
  HTT spacer sequence CTCN PAM
cugaggccagggaaagaagc

SEQ ID NO: 16296 - RNA, 20 nt, Artificial Sequence
  HTT spacer sequence CTCN PAM
cacacauaucucugcugagu

SEQ ID NO: 16297 - RNA, 20 nt, Artificial Sequence
  HTT spacer sequence CTCN PAM
gcugaguacucgagagggac

SEQ ID NO: 16298 - RNA, 20 nt, Artificial Sequence
  HTT spacer sequence CTCN PAM
gcagagauaugugugugaga

SEQ ID NO: 16299 - RNA, 20 nt, Artificial Sequence
  HTT spacer sequence CTCN PAM
agagggaccuuccccagauc

SEQ ID NO: 16300 - RNA, 20 nt, Artificial Sequence
  HTT spacer sequence CTCN PAM
aguacucagcagagauaugu

SEQ ID NO: 16301 - RNA, 20 nt, Artificial Sequence
  HTT spacer sequence CTCN PAM
cgaguacucagcagagauau

SEQ ID NO: 16302 - RNA, 20 nt, Artificial Sequence
  HTT spacer sequence CTCN PAM
agagcucucucugucuuguu

SEQ ID NO: 16303 - RNA, 20 nt, Artificial Sequence
  HTT spacer sequence CTCN PAM
ggagaucuggggaagguccc

SEQ ID NO: 16304 - RNA, 20 nt, Artificial Sequence
  HTT spacer sequence CTCN PAM
cucugucuuguuuucucuuc

SEQ ID NO: 16305 - RNA, 20 nt, Artificial Sequence
  HTT spacer sequence CTCN PAM
cugucuuguuuucucuucuc

SEQ ID NO: 16306 - RNA, 20 nt, Artificial Sequence
  HTT spacer sequence CTCN PAM
gucuuguuuucucuucucug

SEQ ID NO: 16307 - RNA, 20 nt, Artificial Sequence
  HTT spacer sequence CTCN PAM
ucucuggugcucugucuuau

SEQ ID NO: 16308 - RNA, 20 nt, Artificial Sequence
  HTT spacer sequence CTCN PAM
ggugcucugucuuaugaacu

SEQ ID NO: 16309 - RNA, 20 nt, Artificial Sequence
  HTT spacer sequence CTCN PAM
gucuuaugaacuguggcugu

SEQ ID NO: 16310 - RNA, 20 nt, Artificial Sequence
  HTT spacer sequence CTCN PAM
uuagauucucagcaccucuu

SEQ ID NO: 16311 - RNA, 20 nt, Artificial Sequence
  HTT spacer sequence CTCN PAM
gcaccucuucaauucagagg

SEQ ID NO: 16312 - RNA, 20 nt, Artificial Sequence
  HTT spacer sequence CTCN PAM
ucaauucagaggguugccug

SEQ ID NO: 16313 - RNA, 20 nt, Artificial Sequence
  HTT spacer sequence CTCN PAM
gaauugaagaggugcugaga

SEQ ID NO: 16314 - RNA, 20 nt, Artificial Sequence
  HTT spacer sequence CTCN PAM
uccuugugccacagccuagg

SEQ ID NO: 16315 - RNA, 20 nt, Artificial Sequence
  HTT spacer sequence CTCN PAM
uugugccacagccuaggaac

SEQ ID NO: 16316 - RNA, 20 nt, Artificial Sequence
  HTT spacer sequence CTCN PAM
cucaaagcagcgaguugggg

SEQ ID NO: 16317 - RNA, 20 nt, Artificial Sequence
  HTT spacer sequence CTCN PAM
caaagcagcgaguuggggca

SEQ ID NO: 16318 - RNA, 20 nt, Artificial Sequence
  HTT spacer sequence CTCN PAM
aagcagcgaguuggggcagc

SEQ ID NO: 16319 - RNA, 20 nt, Artificial Sequence
  HTT spacer sequence CTCN PAM
cugcuuugagagaguuccua

SEQ ID NO: 16320 - RNA, 20 nt, Artificial Sequence
  HTT spacer sequence CTCN PAM
cgucucccagggaucacugu

SEQ ID NO: 16321 - RNA, 20 nt, Artificial Sequence
  HTT spacer sequence CTCN PAM
ucucccagggaucacugucc

SEQ ID NO: 16322 - RNA, 20 nt, Artificial Sequence
  HTT spacer sequence CTCN PAM
cagggaucacuguccuucau

SEQ ID NO: 16323 - RNA, 20 nt, Artificial Sequence
  HTT spacer sequence CTCN PAM
uguccagugucuugaggacu

SEQ ID NO: 16324 - RNA, 20 nt, Artificial Sequence
  HTT spacer sequence CTCN PAM
agacacuggacaugagcaau

SEQ ID NO: 16325 - RNA, 20 nt, Artificial Sequence
  HTT spacer sequence CTCN PAM
ggguuuugucuguuuuguuu

SEQ ID NO: 16326 - RNA, 20 nt, Artificial Sequence
  HTT spacer sequence CTCN PAM
ggcaggaggguaaacccagu

SEQ ID NO: 16327 - RNA, 20 nt, Artificial Sequence
  HTT spacer sequence CTCN PAM
ugccugagacaaccaaagca

SEQ ID NO: 16328 - RNA, 20 nt, Artificial Sequence
  HTT spacer sequence CTCN PAM
cccucauugugcucaguagu

SEQ ID NO: 16329 - RNA, 20 nt, Artificial Sequence
  HTT spacer sequence CTCN PAM
uugugcucaguaguggaagu

SEQ ID NO: 16330 - RNA, 20 nt, Artificial Sequence
  HTT spacer sequence CTCN PAM
guaguggaagucucacucua

SEQ ID NO: 16331 - RNA, 20 nt, Artificial Sequence
  HTT spacer sequence CTCN PAM
cucuauuacauuagauauua

SEQ ID NO: 16332 - RNA, 20 nt, Artificial Sequence
  HTT spacer sequence CTCN PAM
auuacauuagauauuaguau

SEQ ID NO: 16333 - RNA, 20 nt, Artificial Sequence
  HTT spacer sequence CTCN PAM
gcuacaaauacuaauaucua

SEQ ID NO: 16334 - RNA, 20 nt, Artificial Sequence
  HTT spacer sequence CTCN PAM
ccaaguaccagggaaccagg

SEQ ID NO: 16335 - RNA, 20 nt, Artificial Sequence
  HTT spacer sequence CTCN PAM
ugaaaggccagaaacagcau

SEQ ID NO: 16336 - RNA, 20 nt, Artificial Sequence
  HTT spacer sequence CTCN PAM
ccuuuuccagggcuucaguu

SEQ ID NO: 16337 - RNA, 20 nt, Artificial Sequence
  HTT spacer sequence CTCN PAM
cagcagauacccaauacaug

SEQ ID NO: 16338 - RNA, 20 nt, Artificial Sequence
  HTT spacer sequence CTCN PAM
aaguauauucuaaguguuua

SEQ ID NO: 16339 - RNA, 20 nt, Artificial Sequence
  HTT spacer sequence CTCN PAM
agggccacacauuuuuaaaa

SEQ ID NO: 16340 - RNA, 20 nt, Artificial Sequence
  HTT spacer sequence CTCN PAM
acuaauaagcaauagauucu

SEQ ID NO: 16341 - RNA, 20 nt, Artificial Sequence
  HTT spacer sequence CTCN PAM
acuuguuuaacaaaauaucc

SEQ ID NO: 16342 - RNA, 20 nt, Artificial Sequence
  HTT spacer sequence CTCN PAM
ccacuuguuuaacaaaauau

SEQ ID NO: 16343 - RNA, 20 nt, Artificial Sequence
  HTT spacer sequence CTCN PAM
cuccacuuguuuaacaaaau

SEQ ID NO: 16344 - RNA, 20 nt, Artificial Sequence
  HTT spacer sequence CTCN PAM
cucuccacuuguuuaacaaa

SEQ ID NO: 16345 - RNA, 20 nt, Artificial Sequence
  HTT spacer sequence CTCN PAM
uugaguuagcaucuucuucu

SEQ ID NO: 16346 - RNA, 20 nt, Artificial Sequence
  HTT spacer sequence CTCN PAM
aagagcgccaccauucugaa

SEQ ID NO: 16347 - RNA, 20 nt, Artificial Sequence
  HTT spacer sequence CTCN PAM
aaaaaaaaaaaaaaagaauc

SEQ ID NO: 16348 - RNA, 20 nt, Artificial Sequence
  HTT spacer sequence CTCN PAM
uguugcccagguaacaacuc

SEQ ID NO: 16349 - RNA, 20 nt, Artificial Sequence
  HTT spacer sequence CTCN PAM
agugcaauggcgccaucucg

SEQ ID NO: 16350 - RNA, 20 nt, Artificial Sequence
  HTT spacer sequence CTCN PAM
gcucacuguaaccucugccu

SEQ ID NO: 16351 - RNA, 20 nt, Artificial Sequence
  HTT spacer sequence CTCN PAM
cuguaaccucugccucccug

SEQ ID NO: 16352 - RNA, 20 nt, Artificial Sequence
  HTT spacer sequence CTCN PAM
gccucccugguucaagcgau

SEQ ID NO: 16353 - RNA, 20 nt, Artificial Sequence
  HTT spacer sequence CTCN PAM
cugguucaagcgauucuccu

SEQ ID NO: 16354 - RNA, 20 nt, Artificial Sequence
  HTT spacer sequence CTCN PAM
ugccucagccucucaaguag

SEQ ID NO: 16355 - RNA, 20 nt, Artificial Sequence
  HTT spacer sequence CTCN PAM
gccucucaaguagcugggau

SEQ ID NO: 16356 - RNA, 20 nt, Artificial Sequence
  HTT spacer sequence CTCN PAM
caaguagcugggauuacagg

SEQ ID NO: 16357 - RNA, 20 nt, Artificial Sequence
  HTT spacer sequence CTCN PAM
aguagcugggauuacaggug

SEQ ID NO: 16358 - RNA, 20 nt, Artificial Sequence
  HTT spacer sequence CTCN PAM
accaaaaauacaaaauuagc

SEQ ID NO: 16359 - RNA, 20 nt, Artificial Sequence
  HTT spacer sequence CTCN PAM
ugaccucaagugaugcaccu

SEQ ID NO: 16360 - RNA, 20 nt, Artificial Sequence
  HTT spacer sequence CTCN PAM
agugaugcaccugccucgau

SEQ ID NO: 16361 - RNA, 20 nt, Artificial Sequence
  HTT spacer sequence CTCN PAM
aucucccaaaaugcugggau

SEQ ID NO: 16362 - RNA, 20 nt, Artificial Sequence
  HTT spacer sequence CTCN PAM
caaaaugcugggauuacagg

SEQ ID NO: 16363 - RNA, 20 nt, Artificial Sequence
  HTT spacer sequence CTCN PAM
cgccuguaaucccagcauuu

SEQ ID NO: 16364 - RNA, 20 nt, Artificial Sequence
  HTT spacer sequence CTCN PAM
cagccccuucuugauucuug

SEQ ID NO: 16365 - RNA, 20 nt, Artificial Sequence
  HTT spacer sequence CTCN PAM
uuauagauguugauaaaaau

SEQ ID NO: 16366 - RNA, 20 nt, Artificial Sequence
  HTT spacer sequence CTCN PAM
caagcauuuuuaucaacauc

SEQ ID NO: 16367 - RNA, 20 nt, Artificial Sequence
  HTT spacer sequence CTCN PAM
ucucacaagcauuuuuauca

SEQ ID NO: 16368 - RNA, 20 nt, Artificial Sequence
  HTT spacer sequence CTCN PAM
acagaugcagggcucuuagc

SEQ ID NO: 16369 - RNA, 20 nt, Artificial Sequence
  HTT spacer sequence CTCN PAM
uagcugcuuugcacacuucu

SEQ ID NO: 16370 - RNA, 20 nt, Artificial Sequence
  HTT spacer sequence CTCN PAM
uuaauucaauaaacuguuau

SEQ ID NO: 16371 - RNA, 20 nt, Artificial Sequence
  HTT spacer sequence CTCN PAM
gauuuuccucuacuauuuac

SEQ ID NO: 16372 - RNA, 20 nt, Artificial Sequence
  HTT spacer sequence CTCN PAM
acuauuuacacaauuuaaau

SEQ ID NO: 16373 - RNA, 20 nt, Artificial Sequence
  HTT spacer sequence CTCN PAM
gagucgcuuaaugucucacu

SEQ ID NO: 16374 - RNA, 20 nt, Artificial Sequence
  HTT spacer sequence CTCN PAM
gagaugacccguuauuguac

SEQ ID NO: 16375 - RNA, 20 nt, Artificial Sequence
  HTT spacer sequence CTCN PAM
cuugucuuucuacagugugu

SEQ ID NO: 16376 - RNA, 20 nt, Artificial Sequence
  HTT spacer sequence CTCN PAM
ucaacacacuguagaaagac

SEQ ID NO: 16377 - RNA, 20 nt, Artificial Sequence
  HTT spacer sequence CTCN PAM
acuaaagcaggauuucaggu

SEQ ID NO: 16378 - RNA, 20 nt, Artificial Sequence
  HTT spacer sequence CTCN PAM
uacuuguugaacacaaacag

SEQ ID NO: 16379 - RNA, 20 nt, Artificial Sequence
  HTT spacer sequence CTCN PAM
ucuguuaagacguucgggua

SEQ ID NO: 16380 - RNA, 20 nt, Artificial Sequence
  HTT spacer sequence CTCN PAM
uuaagaggcaggcgcuguug

SEQ ID NO: 16381 - RNA, 20 nt, Artificial Sequence
  HTT spacer sequence CTCN PAM
uaaggaguagcagcguuuug

SEQ ID NO: 16382 - RNA, 20 nt, Artificial Sequence
  HTT spacer sequence CTCN PAM
cagcugauuaugccaacagc

SEQ ID NO: 16383 - RNA, 20 nt, Artificial Sequence
  HTT spacer sequence CTCN PAM
guccaugauugagccaagag

SEQ ID NO: 16384 - RNA, 20 nt, Artificial Sequence
  HTT spacer sequence CTCN PAM
aucauggacugagccaaaaa

SEQ ID NO: 16385 - RNA, 20 nt, Artificial Sequence
  HTT spacer sequence CTCN PAM
uggcucaaucauggacugag

SEQ ID NO: 16386 - RNA, 20 nt, Artificial Sequence
  HTT spacer sequence CTCN PAM
ccaggaggacgaggucuguc

SEQ ID NO: 16387 - RNA, 20 nt, Artificial Sequence
  HTT spacer sequence CTCN PAM
uggggagugaagggaaggau

SEQ ID NO: 16388 - RNA, 20 nt, Artificial Sequence
  HTT spacer sequence CTCN PAM
uccuccuggggagugaaggg

SEQ ID NO: 16389 - RNA, 20 nt, Artificial Sequence
  HTT spacer sequence CTCN PAM
acagugacagaccucguccu

SEQ ID NO: 16390 - RNA, 20 nt, Artificial Sequence
  HTT spacer sequence CTCN PAM
gcccuccacagugacagacc

SEQ ID NO: 16391 - RNA, 20 nt, Artificial Sequence
  HTT spacer sequence CTCN PAM
ucugcaaccucgcuaguuaa

SEQ ID NO: 16392 - RNA, 20 nt, Artificial Sequence
  HTT spacer sequence CTCN PAM
gcaaccucgcuaguuaacuu

SEQ ID NO: 16393 - RNA, 20 nt, Artificial Sequence
  HTT spacer sequence CTCN PAM
cuaguuaacuuccagucccu

SEQ ID NO: 16394 - RNA, 20 nt, Artificial Sequence
  HTT spacer sequence CTCN PAM
gaguuucuguuuagaaugcu

SEQ ID NO: 16395 - RNA, 20 nt, Artificial Sequence
  HTT spacer sequence CTCN PAM
gagggacuggaaguuaacua

SEQ ID NO: 16396 - RNA, 20 nt, Artificial Sequence
  HTT spacer sequence CTCN PAM
aucucauuuagaauugcaag

SEQ ID NO: 16397 - RNA, 20 nt, Artificial Sequence
  HTT spacer sequence CTCN PAM
uuuagaauugcaaggaaacc

SEQ ID NO: 16398 - RNA, 20 nt, Artificial Sequence
  HTT spacer sequence CTCN PAM
ugagguauuaauagugauuc

SEQ ID NO: 16399 - RNA, 20 nt, Artificial Sequence
  HTT spacer sequence CTCN PAM
ugagauauuguaugaagugc

SEQ ID NO: 16400 - RNA, 20 nt, Artificial Sequence
  HTT spacer sequence CTCN PAM
cagcgugaaauucuuccugu

SEQ ID NO: 16401 - RNA, 20 nt, Artificial Sequence
  HTT spacer sequence CTCN PAM
cacacaaauaucaaauccau

SEQ ID NO: 16402 - RNA, 20 nt, Artificial Sequence
  HTT spacer sequence CTCN PAM
uuuuuuucacuguaguuguu

SEQ ID NO: 16403 - RNA, 20 nt, Artificial Sequence
  HTT spacer sequence CTCN PAM
cuuuggcacaaacuuggccu

SEQ ID NO: 16404 - RNA, 20 nt, Artificial Sequence
  HTT spacer sequence CTCN PAM
uuggcacaaacuuggccucc

SEQ ID NO: 16405 - RNA, 20 nt, Artificial Sequence
  HTT spacer sequence CTCN PAM
caguuugauggcuuaucuuc

SEQ ID NO: 16406 - RNA, 20 nt, Artificial Sequence
  HTT spacer sequence CTCN PAM
gccuugugacuugcuggggu

SEQ ID NO: 16407 - RNA, 20 nt, Artificial Sequence
  HTT spacer sequence CTCN PAM
uccagugugaggccaggcuu

SEQ ID NO: 16408 - RNA, 20 nt, Artificial Sequence
  HTT spacer sequence CTCN PAM
agugugaggccaggcuugua

SEQ ID NO: 16409 - RNA, 20 nt, Artificial Sequence
  HTT spacer sequence CTCN PAM
cacuggaggagccaaggcgc

SEQ ID NO: 16410 - RNA, 20 nt, Artificial Sequence
  HTT spacer sequence CTCN PAM
cugacgccagccugaggaac

SEQ ID NO: 16411 - RNA, 20 nt, Artificial Sequence
  HTT spacer sequence CTCN PAM
ggcuggcgucagcgagggcc

SEQ ID NO: 16412 - RNA, 20 nt, Artificial Sequence
  HTT spacer sequence CTCN PAM
gccugcaccauguuccucag

SEQ ID NO: 16413 - RNA, 20 nt, Artificial Sequence
  HTT spacer sequence CTCN PAM
ugcuccgccugcaccauguu

SEQ ID NO: 16414 - RNA, 20 nt, Artificial Sequence
  HTT spacer sequence CTCN PAM
ggguaacaguuguggcaaga

SEQ ID NO: 16415 - RNA, 20 nt, Artificial Sequence
  HTT spacer sequence CTCN PAM
uucgugcuuccaccaacgac

SEQ ID NO: 16416 - RNA, 20 nt, Artificial Sequence
  HTT spacer sequence CTCN PAM
gaauacagcagacuauuaga

SEQ ID NO: 16417 - RNA, 20 nt, Artificial Sequence
  HTT spacer sequence CTCN PAM
aggagauauauaugguugau

SEQ ID NO: 16418 - RNA, 20 nt, Artificial Sequence
  HTT spacer sequence CTCN PAM
uagaguucucugaauacagc

SEQ ID NO: 16419 - RNA, 20 nt, Artificial Sequence
  HTT spacer sequence CTCN PAM
cuggccacacacuucuugga

SEQ ID NO: 16420 - RNA, 20 nt, Artificial Sequence
  HTT spacer sequence CTCN PAM
cucacuggccacacacuucu

SEQ ID NO: 16421 - RNA, 20 nt, Artificial Sequence
  HTT spacer sequence CTCN PAM
gagguggggguagaggagga

SEQ ID NO: 16422 - RNA, 20 nt, Artificial Sequence
  HTT spacer sequence CTCN PAM
gagauguguaagucccaagc

SEQ ID NO: 16423 - RNA, 20 nt, Artificial Sequence
  HTT spacer sequence CTCN PAM
acccccaccucugagaugug

SEQ ID NO: 16424 - RNA, 20 nt, Artificial Sequence
  HTT spacer sequence CTCN PAM
ucuacccccaccucugagau

SEQ ID NO: 16425 - RNA, 20 nt, Artificial Sequence
  HTT spacer sequence CTCN PAM
uccucuacccccaccucuga

SEQ ID NO: 16426 - RNA, 20 nt, Artificial Sequence
  HTT spacer sequence CTCN PAM
guguuccuccuccucuaccc

SEQ ID NO: 16427 - RNA, 20 nt, Artificial Sequence
  HTT spacer sequence CTCN PAM
gcccacucaguguuccuccu

SEQ ID NO: 16428 - RNA, 20 nt, Artificial Sequence
  HTT spacer sequence CTCN PAM
cauugccaaagugugucagc

SEQ ID NO: 16429 - RNA, 20 nt, Artificial Sequence
  HTT spacer sequence CTCN PAM
uugccaaagugugucagcaa

SEQ ID NO: 16430 - RNA, 20 nt, Artificial Sequence
  HTT spacer sequence CTCN PAM
acagguccugugcuuugaau

SEQ ID NO: 16431 - RNA, 20 nt, Artificial Sequence
  HTT spacer sequence CTCN PAM
gaacaccagcacuacugugc

SEQ ID NO: 16432 - RNA, 20 nt, Artificial Sequence
  HTT spacer sequence CTCN PAM
uuucacuuaaauuuguuuuu

SEQ ID NO: 16433 - RNA, 20 nt, Artificial Sequence
  HTT spacer sequence CTCN PAM
aaaaaaaaaaaaacaaauuu

SEQ ID NO: 16434 - RNA, 20 nt, Artificial Sequence
  HTT spacer sequence CTCN PAM
gucucaaaaaaaaaaaaaac

SEQ ID NO: 16435 - RNA, 20 nt, Artificial Sequence
  HTT spacer sequence CTCN PAM
gucgcccaggcuggagugca

SEQ ID NO: 16436 - RNA, 20 nt, Artificial Sequence
  HTT spacer sequence CTCN PAM
agccugggcgacagagcaag

SEQ ID NO: 16437 - RNA, 20 nt, Artificial Sequence
  HTT spacer sequence CTCN PAM
gcucacugcaagcucugcau

SEQ ID NO: 16438 - RNA, 20 nt, Artificial Sequence
  HTT spacer sequence CTCN PAM
cugcaagcucugcauccugg

SEQ ID NO: 16439 - RNA, 20 nt, Artificial Sequence
  HTT spacer sequence CTCN PAM
gcauccuggguucaugccau

SEQ ID NO: 16440 - RNA, 20 nt, Artificial Sequence
  HTT spacer sequence CTCN PAM
ugccucagccucccgaguag

SEQ ID NO: 16441 - RNA, 20 nt, Artificial Sequence
  HTT spacer sequence CTCN PAM
gccucccgaguagcugggac

SEQ ID NO: 16442 - RNA, 20 nt, Artificial Sequence
  HTT spacer sequence CTCN PAM
cgaguagcugggacuacagg

SEQ ID NO: 16443 - RNA, 20 nt, Artificial Sequence
  HTT spacer sequence CTCN PAM
ggaggcugaggcaggagaau

SEQ ID NO: 16444 - RNA, 20 nt, Artificial Sequence
  HTT spacer sequence CTCN PAM
acuaaaaauacaaaaaaaag

SEQ ID NO: 16445 - RNA, 20 nt, Artificial Sequence
  HTT spacer sequence CTCN PAM
aucuccugaccucgugaucu

SEQ ID NO: 16446 - RNA, 20 nt, Artificial Sequence
  HTT spacer sequence CTCN PAM
ugaccucgugaucugcccgu

SEQ ID NO: 16447 - RNA, 20 nt, Artificial Sequence
  HTT spacer sequence CTCN PAM
ugaucugcccgucccggccu

SEQ ID NO: 16448 - RNA, 20 nt, Artificial Sequence
  HTT spacer sequence CTCN PAM
caaagugcugggauuacagg

SEQ ID NO: 16449 - RNA, 20 nt, Artificial Sequence
  HTT spacer sequence CTCN PAM
cgccuguaaucccagcacuu

SEQ ID NO: 16450 - RNA, 20 nt, Artificial Sequence
  HTT spacer sequence CTCN PAM
uuucacuuaaauuuauguuu

SEQ ID NO: 16451 - RNA, 20 nt, Artificial Sequence
  HTT spacer sequence CTCN PAM
aauaccuguucauacuuaag

SEQ ID NO: 16452 - RNA, 20 nt, Artificial Sequence
  HTT spacer sequence CTCN PAM
aguguuuuaauuguagcuau

SEQ ID NO: 16453 - RNA, 20 nt, Artificial Sequence
  HTT spacer sequence CTCN PAM
ugacucuaguguuuuaauug

SEQ ID NO: 16454 - RNA, 20 nt, Artificial Sequence
  HTT spacer sequence CTCN PAM
aauauauaguaaguacauca

SEQ ID NO: 16455 - RNA, 20 nt, Artificial Sequence
  HTT spacer sequence CTCN PAM
ugaaacuccaauauauagua

SEQ ID NO: 16456 - RNA, 20 nt, Artificial Sequence
  HTT spacer sequence CTCN PAM
caugcuuauuaauaccccaa

SEQ ID NO: 16457 - RNA, 20 nt, Artificial Sequence
  HTT spacer sequence CTCN PAM
aaaaaaaucauguaauuucu

SEQ ID NO: 16458 - RNA, 20 nt, Artificial Sequence
  HTT spacer sequence CTCN PAM
caaaucucacuuaagacugg

SEQ ID NO: 16459 - RNA, 20 nt, Artificial Sequence
  HTT spacer sequence CTCN PAM
aaucucacuuaagacugggc

SEQ ID NO: 16460 - RNA, 20 nt, Artificial Sequence
  HTT spacer sequence CTCN PAM
cuuaagacugggcugaguag

SEQ ID NO: 16461 - RNA, 20 nt, Artificial Sequence
  HTT spacer sequence CTCN PAM
gcccagucuuaagugagauu

SEQ ID NO: 16462 - RNA, 20 nt, Artificial Sequence
  HTT spacer sequence CTCN PAM
gacuugaguagccuucugcg

SEQ ID NO: 16463 - RNA, 20 nt, Artificial Sequence
  HTT spacer sequence CTCN PAM
agucugagcuuuuuucugcu

SEQ ID NO: 16464 - RNA, 20 nt, Artificial Sequence
  HTT spacer sequence CTCN PAM
cagaaggcuacucaagucug

SEQ ID NO: 16465 - RNA, 20 nt, Artificial Sequence
  HTT spacer sequence CTCN PAM
cucgcagaaggcuacucaag

SEQ ID NO: 16466 - RNA, 20 nt, Artificial Sequence
  HTT spacer sequence CTCN PAM
ucacucgcagaaggcuacuc

SEQ ID NO: 16467 - RNA, 20 nt, Artificial Sequence
  HTT spacer sequence CTCN PAM
aaauagagugucauuaucug

SEQ ID NO: 16468 - RNA, 20 nt, Artificial Sequence
  HTT spacer sequence CTCN PAM
auuuagaguuuacagcugcc

SEQ ID NO: 16469 - RNA, 20 nt, Artificial Sequence
  HTT spacer sequence CTCN PAM
ucagauaaugacacucuauu

SEQ ID NO: 16470 - RNA, 20 nt, Artificial Sequence
  HTT spacer sequence CTCN PAM
guguggcagcaucgcccucu

SEQ ID NO: 16471 - RNA, 20 nt, Artificial Sequence
  HTT spacer sequence CTCN PAM
aucugacacguucugaucgu

SEQ ID NO: 16472 - RNA, 20 nt, Artificial Sequence
  HTT spacer sequence CTCN PAM
aaccaauuucacauucacac

SEQ ID NO: 16473 - RNA, 20 nt, Artificial Sequence
  HTT spacer sequence CTCN PAM
ugcucaaaccaauuucacau

SEQ ID NO: 16474 - RNA, 20 nt, Artificial Sequence
  HTT spacer sequence CTCN PAM
gauauacuccugcucaaacc

SEQ ID NO: 16475 - RNA, 20 nt, Artificial Sequence
  HTT spacer sequence CTCN PAM
gcacucagauauacuccugc

SEQ ID NO: 16476 - RNA, 20 nt, Artificial Sequence
  HTT spacer sequence CTCN PAM
ucugcacucagauauacucc

SEQ ID NO: 16477 - RNA, 20 nt, Artificial Sequence
  HTT spacer sequence CTCN PAM
uucucugcuucccuuuuauu

SEQ ID NO: 16478 - RNA, 20 nt, Artificial Sequence
  HTT spacer sequence CTCN PAM
gcuucccuuuuauucccauu

SEQ ID NO: 16479 - RNA, 20 nt, Artificial Sequence
  HTT spacer sequence CTCN PAM
agaaagugucuacccaguug

SEQ ID NO: 16480 - RNA, 20 nt, Artificial Sequence
  HTT spacer sequence CTCN PAM
cgagugucacaaagaaccgu

SEQ ID NO: 16481 - RNA, 20 nt, Artificial Sequence
  HTT spacer sequence CTCN PAM
ugagguuugucuucaacugg

SEQ ID NO: 16482 - RNA, 20 nt, Artificial Sequence
  HTT spacer sequence CTCN PAM
ggcgugucagugcuagagag

SEQ ID NO: 16483 - RNA, 20 nt, Artificial Sequence
  HTT spacer sequence CTCN PAM
agcacugacacgccugaguu

SEQ ID NO: 16484 - RNA, 20 nt, Artificial Sequence
  HTT spacer sequence CTCN PAM
cuagcacugacacgccugag

SEQ ID NO: 16485 - RNA, 20 nt, Artificial Sequence
  HTT spacer sequence CTCN PAM
aguuuccucucuagcacuga

SEQ ID NO: 16486 - RNA, 20 nt, Artificial Sequence
  HTT spacer sequence CTCN PAM
gcuccaguuuccucucuagc

SEQ ID NO: 16487 - RNA, 20 nt, Artificial Sequence
  HTT spacer sequence CTCN PAM
uguuauaaaagcuuuaaaac

SEQ ID NO: 16488 - RNA, 20 nt, Artificial Sequence
  HTT spacer sequence CTCN PAM
ucaguugcugcugcuuaucu

SEQ ID NO: 16489 - RNA, 20 nt, Artificial Sequence
  HTT spacer sequence CTCN PAM
gcaagucagcauccuugccc

SEQ ID NO: 16490 - RNA, 20 nt, Artificial Sequence
  HTT spacer sequence CTCN PAM
cuggacucaaggcuaaccug

SEQ ID NO: 16491 - RNA, 20 nt, Artificial Sequence
  HTT spacer sequence CTCN PAM
aggcuaaccugggguuggcu

SEQ ID NO: 16492 - RNA, 20 nt, Artificial Sequence
  HTT spacer sequence CTCN PAM
ccuccaaaauaaguuugaau

SEQ ID NO: 16493 - RNA, 20 nt, Artificial Sequence
  HTT spacer sequence CTCN PAM
aaaauaaguuugaauuuaaa

SEQ ID NO: 16494 - RNA, 20 nt, Artificial Sequence
  HTT spacer sequence CTCN PAM
caauuuaaauucaaacuuau

SEQ ID NO: 16495 - RNA, 20 nt, Artificial Sequence
  HTT spacer sequence CTCN PAM
agauuuugcaaaaauguucc

SEQ ID NO: 16496 - RNA, 20 nt, Artificial Sequence
  HTT spacer sequence CTCN PAM
uuaaaaaggaauggaauuua

SEQ ID NO: 16497 - RNA, 20 nt, Artificial Sequence
  HTT spacer sequence CTCN PAM
guuacuguccugcuaaauuc

SEQ ID NO: 16498 - RNA, 20 nt, Artificial Sequence
  HTT spacer sequence CTCN PAM
uggaguccaugugggagcug

SEQ ID NO: 16499 - RNA, 20 nt, Artificial Sequence
  HTT spacer sequence CTCN PAM
aggagcacgggucucaguua

SEQ ID NO: 16500 - RNA, 20 nt, Artificial Sequence
  HTT spacer sequence CTCN PAM
cacauggacuccaggagcac

SEQ ID NO: 16501 - RNA, 20 nt, Artificial Sequence
  HTT spacer sequence CTCN PAM
gcacaagcauuugcacgcuu

SEQ ID NO: 16502 - RNA, 20 nt, Artificial Sequence
  HTT spacer sequence CTCN PAM
ugacugcauuaccuuccucc

SEQ ID NO: 16503 - RNA, 20 nt, Artificial Sequence
  HTT spacer sequence CTCN PAM
uauaguugcugugggcacca

SEQ ID NO: 16504 - RNA, 20 nt, Artificial Sequence
  HTT spacer sequence CTCN PAM
agauucgucccaguuaaauc

SEQ ID NO: 16505 - RNA, 20 nt, Artificial Sequence
  HTT spacer sequence CTCN PAM
aaaaugacaguuaaauuuug

SEQ ID NO: 16506 - RNA, 20 nt, Artificial Sequence
  HTT spacer sequence CTCN PAM
caaauauuccuaccccacau

SEQ ID NO: 16507 - RNA, 20 nt, Artificial Sequence
  HTT spacer sequence CTCN PAM
auuuccuucuagacguaaau

SEQ ID NO: 16508 - RNA, 20 nt, Artificial Sequence
  HTT spacer sequence CTCN PAM
ccugaaagggucuguuuccc

SEQ ID NO: 16509 - RNA, 20 nt, Artificial Sequence
  HTT spacer sequence CTCN PAM
uagggaaacagacccuuuca

SEQ ID NO: 16510 - RNA, 20 nt, Artificial Sequence
  HTT spacer sequence CTCN PAM
guucuccuagggaaacagac

SEQ ID NO: 16511 - RNA, 20 nt, Artificial Sequence
  HTT spacer sequence CTCN PAM
gucaacacugauuuuccaca

SEQ ID NO: 16512 - RNA, 20 nt, Artificial Sequence
  HTT spacer sequence CTCN PAM
aaaaaaaaacaaaaaaaaac

SEQ ID NO: 16513 - RNA, 20 nt, Artificial Sequence
  HTT spacer sequence CTCN PAM
aucucaaaaaaaaaacaaaa

SEQ ID NO: 16514 - RNA, 20 nt, Artificial Sequence
  HTT spacer sequence CTCN PAM
cucugucacccaggcuggag

SEQ ID NO: 16515 - RNA, 20 nt, Artificial Sequence
  HTT spacer sequence CTCN PAM
gucacccaggcuggagugca

SEQ ID NO: 16516 - RNA, 20 nt, Artificial Sequence
  HTT spacer sequence CTCN PAM
agccugggugacagagcgag

SEQ ID NO: 16517 - RNA, 20 nt, Artificial Sequence
  HTT spacer sequence CTCN PAM
gcucacugccagcuccgccu

SEQ ID NO: 16518 - RNA, 20 nt, Artificial Sequence
  HTT spacer sequence CTCN PAM
cugccagcuccgccucagag

SEQ ID NO: 16519 - RNA, 20 nt, Artificial Sequence
  HTT spacer sequence CTCN PAM
gccucagagguucacgccau

SEQ ID NO: 16520 - RNA, 20 nt, Artificial Sequence
  HTT spacer sequence CTCN PAM
gagguucacgccauucuccu

SEQ ID NO: 16521 - RNA, 20 nt, Artificial Sequence
  HTT spacer sequence CTCN PAM
gaggcggagcuggcagugag

SEQ ID NO: 16522 - RNA, 20 nt, Artificial Sequence
  HTT spacer sequence CTCN PAM
ugccucagccucccgaguag

SEQ ID NO: 16523 - RNA, 20 nt, Artificial Sequence
  HTT spacer sequence CTCN PAM
gccucccgaguagcugggac

SEQ ID NO: 16524 - RNA, 20 nt, Artificial Sequence
  HTT spacer sequence CTCN PAM
cgaguagcugggacuacagg

SEQ ID NO: 16525 - RNA, 20 nt, Artificial Sequence
  HTT spacer sequence CTCN PAM
ggaggcugaggcaggagaau

SEQ ID NO: 16526 - RNA, 20 nt, Artificial Sequence
  HTT spacer sequence CTCN PAM
acuaaaaauacaaaaaauua

SEQ ID NO: 16527 - RNA, 20 nt, Artificial Sequence
  HTT spacer sequence CTCN PAM
ucucuacuaaaaauacaaaa

SEQ ID NO: 16528 - RNA, 20 nt, Artificial Sequence
  HTT spacer sequence CTCN PAM
aucuccugaccucgugaucu

SEQ ID NO: 16529 - RNA, 20 nt, Artificial Sequence
  HTT spacer sequence CTCN PAM
ugaccucgugaucugcccgc

SEQ ID NO: 16530 - RNA, 20 nt, Artificial Sequence
  HTT spacer sequence CTCN PAM
ugaucugcccgccucggccu

SEQ ID NO: 16531 - RNA, 20 nt, Artificial Sequence
  HTT spacer sequence CTCN PAM
gccucccaaagugcugggau

SEQ ID NO: 16532 - RNA, 20 nt, Artificial Sequence
  HTT spacer sequence CTCN PAM
caaagugcugggaugacagg

SEQ ID NO: 16533 - RNA, 20 nt, Artificial Sequence
  HTT spacer sequence CTCN PAM
cgccugucaucccagcacuu

SEQ ID NO: 16534 - RNA, 20 nt, Artificial Sequence
  HTT spacer sequence CTCN PAM
uucauuaaaagcagacccca

SEQ ID NO: 16535 - RNA, 20 nt, Artificial Sequence
  HTT spacer sequence CTCN PAM
ccucaggaaauagucauugg

SEQ ID NO: 16536 - RNA, 20 nt, Artificial Sequence
  HTT spacer sequence CTCN PAM
ucaggaaauagucauuggga

SEQ ID NO: 16537 - RNA, 20 nt, Artificial Sequence
  HTT spacer sequence CTCN PAM
ggaaauagucauugggaacu

SEQ ID NO: 16538 - RNA, 20 nt, Artificial Sequence
  HTT spacer sequence CTCN PAM
uagugucaaaggaaaggaaa

SEQ ID NO: 16539 - RNA, 20 nt, Artificial Sequence
  HTT spacer sequence CTCN PAM
ccagucagccuccuaguguc

SEQ ID NO: 16540 - RNA, 20 nt, Artificial Sequence
  HTT spacer sequence CTCN PAM
gccccugcugcccacagcca

SEQ ID NO: 16541 - RNA, 20 nt, Artificial Sequence
  HTT spacer sequence CTCN PAM
cagccccugcugcccacagc

SEQ ID NO: 16542 - RNA, 20 nt, Artificial Sequence
  HTT spacer sequence CTCN PAM
ucucagccccugcugcccac

SEQ ID NO: 16543 - RNA, 20 nt, Artificial Sequence
  HTT spacer sequence CTCN PAM
caggggggcacggguacccc

SEQ ID NO: 16544 - RNA, 20 nt, Artificial Sequence
  HTT spacer sequence CTCN PAM
ggggggcacggguaccccaa

SEQ ID NO: 16545 - RNA, 20 nt, Artificial Sequence
  HTT spacer sequence CTCN PAM
ggcuucccuugggguacccg

SEQ ID NO: 16546 - RNA, 20 nt, Artificial Sequence
  HTT spacer sequence CTCN PAM
gguuucauguuuguucugau

SEQ ID NO: 16547 - RNA, 20 nt, Artificial Sequence
  HTT spacer sequence CTCN PAM
caguucuuaagauucaguac

SEQ ID NO: 16548 - RNA, 20 nt, Artificial Sequence
  HTT spacer sequence CTCN PAM
augcugauaaagauuuauug

SEQ ID NO: 16549 - RNA, 20 nt, Artificial Sequence
  HTT spacer sequence CTCN PAM
auaaaucuuuaucagcauag

SEQ ID NO: 16550 - RNA, 20 nt, Artificial Sequence
  HTT spacer sequence CTCN PAM
ugcuguauguuugcauucug

SEQ ID NO: 16551 - RNA, 20 nt, Artificial Sequence
  HTT spacer sequence CTCN PAM
gggcagaaugcaaacauaca

SEQ ID NO: 16552 - RNA, 20 nt, Artificial Sequence
  HTT spacer sequence CTCN PAM
gagaaaaccaggccauaugc

SEQ ID NO: 16553 - RNA, 20 nt, Artificial Sequence
  HTT spacer sequence CTCN PAM
gagccucugggcagaaugca

SEQ ID NO: 16554 - RNA, 20 nt, Artificial Sequence
  HTT spacer sequence CTCN PAM
augcuuuauccauggaagcu

SEQ ID NO: 16555 - RNA, 20 nt, Artificial Sequence
  HTT spacer sequence CTCN PAM
ccgucagguugggaaagcug

SEQ ID NO: 16556 - RNA, 20 nt, Artificial Sequence
  HTT spacer sequence CTCN PAM
caugcagcccuuacgugucg

SEQ ID NO: 16557 - RNA, 20 nt, Artificial Sequence
  HTT spacer sequence CTCN PAM
cagaugguugggggacgaag

SEQ ID NO: 16558 - RNA, 20 nt, Artificial Sequence
  HTT spacer sequence CTCN PAM
gaugguugggggacgaaggu

SEQ ID NO: 16559 - RNA, 20 nt, Artificial Sequence
  HTT spacer sequence CTCN PAM
uuuggguaucuuauuacuaa

SEQ ID NO: 16560 - RNA, 20 nt, Artificial Sequence
  HTT spacer sequence CTCN PAM
ucuguucacguuaauggcag

SEQ ID NO: 16561 - RNA, 20 nt, Artificial Sequence
  HTT spacer sequence CTCN PAM
uggaauuuauuauuuguuuu

SEQ ID NO: 16562 - RNA, 20 nt, Artificial Sequence
  HTT spacer sequence CTCN PAM
uuggaaaaacaaauaauaaa

SEQ ID NO: 16563 - RNA, 20 nt, Artificial Sequence
  HTT spacer sequence CTCN PAM
ggguauaguaaaguuguuga

SEQ ID NO: 16564 - RNA, 20 nt, Artificial Sequence
  HTT spacer sequence CTCN PAM
acaacuuuacuauacccuga

SEQ ID NO: 16565 - RNA, 20 nt, Artificial Sequence
  HTT spacer sequence CTCN PAM
auucugaaaucagccuagau

SEQ ID NO: 16566 - RNA, 20 nt, Artificial Sequence
  HTT spacer sequence CTCN PAM
ugcuuaucugcauaaauuuu

SEQ ID NO: 16567 - RNA, 20 nt, Artificial Sequence
  HTT spacer sequence CTCN PAM
uaaaaauuaauguauaucuc

SEQ ID NO: 16568 - RNA, 20 nt, Artificial Sequence
  HTT spacer sequence CTCN PAM
agacuuguuuggaaguaguu

SEQ ID NO: 16569 - RNA, 20 nt, Artificial Sequence
  HTT spacer sequence CTCN PAM
accacaagauuucauuccac

SEQ ID NO: 16570 - RNA, 20 nt, Artificial Sequence
  HTT spacer sequence CTCN PAM
aagaagauuuaaaaacuagu

SEQ ID NO: 16571 - RNA, 20 nt, Artificial Sequence
  HTT spacer sequence CTCN PAM
gcagcuuuuucuugcuagau

SEQ ID NO: 16572 - RNA, 20 nt, Artificial Sequence
  HTT spacer sequence CTCN PAM
acaucuagcaagaaaaagcu

SEQ ID NO: 16573 - RNA, 20 nt, Artificial Sequence
  HTT spacer sequence CTCN PAM
acuguguuuuggggcaaguu

SEQ ID NO: 16574 - RNA, 20 nt, Artificial Sequence
  HTT spacer sequence CTCN PAM
uuugaguuucaauuucuuca

SEQ ID NO: 16575 - RNA, 20 nt, Artificial Sequence
  HTT spacer sequence CTCN PAM
aaagagaaacaguaacuugc

SEQ ID NO: 16576 - RNA, 20 nt, Artificial Sequence
  HTT spacer sequence CTCN PAM
ugaagaaauugaaacucaaa

SEQ ID NO: 16577 - RNA, 20 nt, Artificial Sequence
  HTT spacer sequence CTCN PAM
uugcucuugaagaaauugaa

SEQ ID NO: 16578 - RNA, 20 nt, Artificial Sequence
  HTT spacer sequence CTCN PAM
gccucuuugcucuugaagaa

SEQ ID NO: 16579 - RNA, 20 nt, Artificial Sequence
  HTT spacer sequence CTCN PAM
ucugccucuuugcucuugaa

SEQ ID NO: 16580 - RNA, 20 nt, Artificial Sequence
  HTT spacer sequence CTCN PAM
ccucugccucuuugcucuug

SEQ ID NO: 16581 - RNA, 20 nt, Artificial Sequence
  HTT spacer sequence CTCN PAM
gaaccuuuacacaugucccu

SEQ ID NO: 16582 - RNA, 20 nt, Artificial Sequence
  HTT spacer sequence CTCN PAM
gcgcgagggcacagauggga

SEQ ID NO: 16583 - RNA, 20 nt, Artificial Sequence
  HTT spacer sequence CTCN PAM
cgcagagcagggacaugugu

SEQ ID NO: 16584 - RNA, 20 nt, Artificial Sequence
  HTT spacer sequence CTCN PAM
aaccccaccccugccacagu

SEQ ID NO: 16585 - RNA, 20 nt, Artificial Sequence
  HTT spacer sequence CTCN PAM
gauucccuaaaaacaaaaac

SEQ ID NO: 16586 - RNA, 20 nt, Artificial Sequence
  HTT spacer sequence CTCN PAM
gugauggcaucauggccagu

SEQ ID NO: 16587 - RNA, 20 nt, Artificial Sequence
  HTT spacer sequence CTCN PAM
ggcucugcaugugugucugu

SEQ ID NO: 16588 - RNA, 20 nt, Artificial Sequence
  HTT spacer sequence CTCN PAM
gcaugugugucuguguaugu

SEQ ID NO: 16589 - RNA, 20 nt, Artificial Sequence
  HTT spacer sequence CTCN PAM
aaccaguaccuucacauaca

SEQ ID NO: 16590 - RNA, 20 nt, Artificial Sequence
  HTT spacer sequence CTCN PAM
uuugaaacgucucuaaccag

SEQ ID NO: 16591 - RNA, 20 nt, Artificial Sequence
  HTT spacer sequence CTCN PAM
ucucuuuugaaacgucucua

SEQ ID NO: 16592 - RNA, 20 nt, Artificial Sequence
  HTT spacer sequence CTCN PAM
cuucucuuuugaaacgucuc

SEQ ID NO: 16593 - RNA, 20 nt, Artificial Sequence
  HTT spacer sequence CTCN PAM
cagcaauuuguaaucuucuc

SEQ ID NO: 16594 - RNA, 20 nt, Artificial Sequence
  HTT spacer sequence CTCN PAM
gcaauuuguaaucuucucag

SEQ ID NO: 16595 - RNA, 20 nt, Artificial Sequence
  HTT spacer sequence CTCN PAM
gggaaaaaaauucaagaaac

SEQ ID NO: 16596 - RNA, 20 nt, Artificial Sequence
  HTT spacer sequence CTCN PAM
cauccagugguauuggagau

SEQ ID NO: 16597 - RNA, 20 nt, Artificial Sequence
  HTT spacer sequence CTCN PAM
uccagugguauuggagauau

SEQ ID NO: 16598 - RNA, 20 nt, Artificial Sequence
  HTT spacer sequence CTCN PAM
aauaccacuggaugagagau

SEQ ID NO: 16599 - RNA, 20 nt, Artificial Sequence
  HTT spacer sequence CTCN PAM
agcaaaaucaucaggcaaaa

SEQ ID NO: 16600 - RNA, 20 nt, Artificial Sequence
  HTT spacer sequence CTCN PAM
uggguuccuuauuuaagcuc

SEQ ID NO: 16601 - RNA, 20 nt, Artificial Sequence
  HTT spacer sequence CTCN PAM
uuccacaggcugggggcuug

SEQ ID NO: 16602 - RNA, 20 nt, Artificial Sequence
  HTT spacer sequence CTCN PAM
uucauaaaaccacacuagcu

SEQ ID NO: 16603 - RNA, 20 nt, Artificial Sequence
  HTT spacer sequence CTCN PAM
aagaaagauuugcaacucau

SEQ ID NO: 16604 - RNA, 20 nt, Artificial Sequence
  HTT spacer sequence CTCN PAM
cugacuccuuugcuggaauc

SEQ ID NO: 16605 - RNA, 20 nt, Artificial Sequence
  HTT spacer sequence CTCN PAM
uuugcuggaaucuguaggcu

SEQ ID NO: 16606 - RNA, 20 nt, Artificial Sequence
  HTT spacer sequence CTCN PAM
cagaugugagaauggcacua

SEQ ID NO: 16607 - RNA, 20 nt, Artificial Sequence
  HTT spacer sequence CTCN PAM
caucugggaguuugcaaggg

SEQ ID NO: 16608 - RNA, 20 nt, Artificial Sequence
  HTT spacer sequence CTCN PAM
aaguaguagugccauucuca

SEQ ID NO: 16609 - RNA, 20 nt, Artificial Sequence
  HTT spacer sequence CTCN PAM
gcgugugugcagaagagcau

SEQ ID NO: 16610 - RNA, 20 nt, Artificial Sequence
  HTT spacer sequence CTCN PAM
ucugcacacacgcugagucg

SEQ ID NO: 16611 - RNA, 20 nt, Artificial Sequence
  HTT spacer sequence CTCN PAM
caacacagcccgguugaugc

SEQ ID NO: 16612 - RNA, 20 nt, Artificial Sequence
  HTT spacer sequence CTCN PAM
caguguuuacauagcuaagc

SEQ ID NO: 16613 - RNA, 20 nt, Artificial Sequence
  HTT spacer sequence CTCN PAM
guguuuacauagcuaagcca

SEQ ID NO: 16614 - RNA, 20 nt, Artificial Sequence
  HTT spacer sequence CTCN PAM
caagggcuucagauucacac

SEQ ID NO: 16615 - RNA, 20 nt, Artificial Sequence
  HTT spacer sequence CTCN PAM
aaguccaggaaaccaaacac

SEQ ID NO: 16616 - RNA, 20 nt, Artificial Sequence
  HTT spacer sequence CTCN PAM
cagaugaccaagcuucccag

SEQ ID NO: 16617 - RNA, 20 nt, Artificial Sequence
  HTT spacer sequence CTCN PAM
cacagaugaccaagcuuccc

SEQ ID NO: 16618 - RNA, 20 nt, Artificial Sequence
  HTT spacer sequence CTCN PAM
gacccucucacagaugacca

SEQ ID NO: 16619 - RNA, 20 nt, Artificial Sequence
  HTT spacer sequence CTCN PAM
cugacccucucacagaugac

SEQ ID NO: 16620 - RNA, 20 nt, Artificial Sequence
  HTT spacer sequence CTCN PAM
cugacccuucgguggcaugc

SEQ ID NO: 16621 - RNA, 20 nt, Artificial Sequence
  HTT spacer sequence CTCN PAM
gggccggagagaguaugugu

SEQ ID NO: 16622 - RNA, 20 nt, Artificial Sequence
  HTT spacer sequence CTCN PAM
ggcccugagacaugcacaca

SEQ ID NO: 16623 - RNA, 20 nt, Artificial Sequence
  HTT spacer sequence CTCN PAM
ccggcccugagacaugcaca

SEQ ID NO: 16624 - RNA, 20 nt, Artificial Sequence
  HTT spacer sequence CTCN PAM
cuccggcccugagacaugca

SEQ ID NO: 16625 - RNA, 20 nt, Artificial Sequence
  HTT spacer sequence CTCN PAM
gugacacauacucucuccgg

SEQ ID NO: 16626 - RNA, 20 nt, Artificial Sequence
  HTT spacer sequence CTCN PAM
cagugacacauacucucucc

SEQ ID NO: 16627 - RNA, 20 nt, Artificial Sequence
  HTT spacer sequence CTCN PAM
gaccucucagugacacauac

SEQ ID NO: 16628 - RNA, 20 nt, Artificial Sequence
  HTT spacer sequence CTCN PAM
uugacacacacacaaacacu

SEQ ID NO: 16629 - RNA, 20 nt, Artificial Sequence
  HTT spacer sequence CTCN PAM
gugaagggcacaaugcaacc

SEQ ID NO: 16630 - RNA, 20 nt, Artificial Sequence
  HTT spacer sequence CTCN PAM
gaccccucagugaagggcac

SEQ ID NO: 16631 - RNA, 20 nt, Artificial Sequence
  HTT spacer sequence CTCN PAM
cguguguguguguguacgug

SEQ ID NO: 16632 - RNA, 20 nt, Artificial Sequence
  HTT spacer sequence CTCN PAM
gugacacacacacacguaca

SEQ ID NO: 16633 - RNA, 20 nt, Artificial Sequence
  HTT spacer sequence CTCN PAM
gaccccucagugacacacac

SEQ ID NO: 16634 - RNA, 20 nt, Artificial Sequence
  HTT spacer sequence CTCN PAM
gugacauguacgcacacaca

SEQ ID NO: 16635 - RNA, 20 nt, Artificial Sequence
  HTT spacer sequence CTCN PAM
gaccccucagugacauguac

SEQ ID NO: 16636 - RNA, 20 nt, Artificial Sequence
  HTT spacer sequence CTCN PAM
gugugugugcucaugugugu

SEQ ID NO: 16637 - RNA, 20 nt, Artificial Sequence
  HTT spacer sequence CTCN PAM
ugugugugcauacgugucac

SEQ ID NO: 16638 - RNA, 20 nt, Artificial Sequence
  HTT spacer sequence CTCN PAM
gugacacguaugcacacaca

SEQ ID NO: 16639 - RNA, 20 nt, Artificial Sequence
  HTT spacer sequence CTCN PAM
gaccccucagugacacguau

SEQ ID NO: 16640 - RNA, 20 nt, Artificial Sequence
  HTT spacer sequence CTCN PAM
gugugugcucauuugugagc

SEQ ID NO: 16641 - RNA, 20 nt, Artificial Sequence
  HTT spacer sequence CTCN PAM
uuugugagcguaugugucac

SEQ ID NO: 16642 - RNA, 20 nt, Artificial Sequence
  HTT spacer sequence CTCN PAM
caaaugagcacacacagagg

SEQ ID NO: 16643 - RNA, 20 nt, Artificial Sequence
  HTT spacer sequence CTCN PAM
gugacacauacgcucacaaa

SEQ ID NO: 16644 - RNA, 20 nt, Artificial Sequence
  HTT spacer sequence CTCN PAM
gacccccucagugacacaua

SEQ ID NO: 16645 - RNA, 20 nt, Artificial Sequence
  HTT spacer sequence CTCN PAM
gugugugugcucauguguga

SEQ ID NO: 16646 - RNA, 20 nt, Artificial Sequence
  HTT spacer sequence CTCN PAM
ugugugagcguaugugucac

SEQ ID NO: 16647 - RNA, 20 nt, Artificial Sequence
  HTT spacer sequence CTCN PAM
cacaugagcacacacacaga

SEQ ID NO: 16648 - RNA, 20 nt, Artificial Sequence
  HTT spacer sequence CTCN PAM
gugacacauacgcucacaca

SEQ ID NO: 16649 - RNA, 20 nt, Artificial Sequence
  HTT spacer sequence CTCN PAM
gacccccucagugacacaua

SEQ ID NO: 16650 - RNA, 20 nt, Artificial Sequence
  HTT spacer sequence CTCN PAM
gugugugugcucauguguga

SEQ ID NO: 16651 - RNA, 20 nt, Artificial Sequence
  HTT spacer sequence CTCN PAM
ugugugagcguaugugucac

SEQ ID NO: 16652 - RNA, 20 nt, Artificial Sequence
  HTT spacer sequence CTCN PAM
cacaugagcacacacacaga

SEQ ID NO: 16653 - RNA, 20 nt, Artificial Sequence
  HTT spacer sequence CTCN PAM
gugacacauacgcucacaca

SEQ ID NO: 16654 - RNA, 20 nt, Artificial Sequence
  HTT spacer sequence CTCN PAM
ugacauugagggucagagug

SEQ ID NO: 16655 - RNA, 20 nt, Artificial Sequence
  HTT spacer sequence CTCN PAM
augucaugagcacauaggaa

SEQ ID NO: 16656 - RNA, 20 nt, Artificial Sequence
  HTT spacer sequence CTCN PAM
gacccucaaugucaugagca

SEQ ID NO: 16657 - RNA, 20 nt, Artificial Sequence
  HTT spacer sequence CTCN PAM
uguguuagaccaaaauaaga

SEQ ID NO: 16658 - RNA, 20 nt, Artificial Sequence
  HTT spacer sequence CTCN PAM
gucauuagauagauaaggga

SEQ ID NO: 16659 - RNA, 20 nt, Artificial Sequence
  HTT spacer sequence CTCN PAM
cucugucauuagauagauaa

SEQ ID NO: 16660 - RNA, 20 nt, Artificial Sequence
  HTT spacer sequence CTCN PAM
agaauaaucuacuugauuca

SEQ ID NO: 16661 - RNA, 20 nt, Artificial Sequence
  HTT spacer sequence CTCN PAM
aauucaaaagucaauuugaa

SEQ ID NO: 16662 - RNA, 20 nt, Artificial Sequence
  HTT spacer sequence CTCN PAM
uauaauuuaacaccacuucu

SEQ ID NO: 16663 - RNA, 20 nt, Artificial Sequence
  HTT spacer sequence CTCN PAM
gaacacugaucauuuuguga

SEQ ID NO: 16664 - RNA, 20 nt, Artificial Sequence
  HTT spacer sequence CTCN PAM
uccucugaacacugaucauu

SEQ ID NO: 16665 - RNA, 20 nt, Artificial Sequence
  HTT spacer sequence CTCN PAM
uaccauaaaccaaguaugug

SEQ ID NO: 16666 - RNA, 20 nt, Artificial Sequence
  HTT spacer sequence CTCN PAM
acaucuacaaaaugcuuuca

SEQ ID NO: 16667 - RNA, 20 nt, Artificial Sequence
  HTT spacer sequence CTCN PAM
caacaucuacaaaaugcuuu

SEQ ID NO: 16668 - RNA, 20 nt, Artificial Sequence
  HTT spacer sequence CTCN PAM
gcagcccauaguccacgacc

SEQ ID NO: 16669 - RNA, 20 nt, Artificial Sequence
  HTT spacer sequence CTCN PAM
uuguauuaagaggaacaaau

SEQ ID NO: 16670 - RNA, 20 nt, Artificial Sequence
  HTT spacer sequence CTCN PAM
uaauacaaagaggucgugga

SEQ ID NO: 16671 - RNA, 20 nt, Artificial Sequence
  HTT spacer sequence CTCN PAM
uuuccugcaucagcuuuauu

SEQ ID NO: 16672 - RNA, 20 nt, Artificial Sequence
  HTT spacer sequence CTCN PAM
uuuuggguuucaagcucuuu

SEQ ID NO: 16673 - RNA, 20 nt, Artificial Sequence
  HTT spacer sequence CTCN PAM
guaacauugacaccaccacc

SEQ ID NO: 16674 - RNA, 20 nt, Artificial Sequence
  HTT spacer sequence CTCN PAM
uccaguaccaucagguaaga

SEQ ID NO: 16675 - RNA, 20 nt, Artificial Sequence
  HTT spacer sequence CTCN PAM
uaccugaugguacuggauga

SEQ ID NO: 16676 - RNA, 20 nt, Artificial Sequence
  HTT spacer sequence CTCN PAM
cuguuaacuguguuacuuug

SEQ ID NO: 16677 - RNA, 20 nt, Artificial Sequence
  HTT spacer sequence CTCN PAM
ccaucccccugcaccggcau

SEQ ID NO: 16678 - RNA, 20 nt, Artificial Sequence
  HTT spacer sequence CTCN PAM
cuccccaucccccugcaccg

SEQ ID NO: 16679 - RNA, 20 nt, Artificial Sequence
  HTT spacer sequence CTCN PAM
accacacccccccacccccc

SEQ ID NO: 16680 - RNA, 20 nt, Artificial Sequence
  HTT spacer sequence CTCN PAM
ccaacuccaccacacccccc

SEQ ID NO: 16681 - RNA, 20 nt, Artificial Sequence
  HTT spacer sequence CTCN PAM
ugccacugcaccuccccaac

SEQ ID NO: 16682 - RNA, 20 nt, Artificial Sequence
  HTT spacer sequence CTCN PAM
aaaaaaaaaaaaggauacac

SEQ ID NO: 16683 - RNA, 20 nt, Artificial Sequence
  HTT spacer sequence CTCN PAM
aucucaaaaaaaaaaaaagg

SEQ ID NO: 16684 - RNA, 20 nt, Artificial Sequence
  HTT spacer sequence CTCN PAM
cuccgucgcccaggcuggag

SEQ ID NO: 16685 - RNA, 20 nt, Artificial Sequence
  HTT spacer sequence CTCN PAM
ccgucgcccaggcuggagug

SEQ ID NO: 16686 - RNA, 20 nt, Artificial Sequence
  HTT spacer sequence CTCN PAM
gucgcccaggcuggagugug

SEQ ID NO: 16687 - RNA, 20 nt, Artificial Sequence
  HTT spacer sequence CTCN PAM
agccugggcgacggagagag

SEQ ID NO: 16688 - RNA, 20 nt, Artificial Sequence
  HTT spacer sequence CTCN PAM
uugcaagcuccaccucccgg

SEQ ID NO: 16689 - RNA, 20 nt, Artificial Sequence
  HTT spacer sequence CTCN PAM
accucccggguuuaagcaau

SEQ ID NO: 16690 - RNA, 20 nt, Artificial Sequence
  HTT spacer sequence CTCN PAM
cggguuuaagcaauucuccu

SEQ ID NO: 16691 - RNA, 20 nt, Artificial Sequence
  HTT spacer sequence CTCN PAM
ugccuccaccucccgaguag

SEQ ID NO: 16692 - RNA, 20 nt, Artificial Sequence
  HTT spacer sequence CTCN PAM
accucccgaguagcugggau

SEQ ID NO: 16693 - RNA, 20 nt, Artificial Sequence
  HTT spacer sequence CTCN PAM
cgaguagcugggauuacagg

SEQ ID NO: 16694 - RNA, 20 nt, Artificial Sequence
  HTT spacer sequence CTCN PAM
ggagguggaggcaggagaau

SEQ ID NO: 16695 - RNA, 20 nt, Artificial Sequence
  HTT spacer sequence CTCN PAM
acuaaaaauacaaaaaaaaa

SEQ ID NO: 16696 - RNA, 20 nt, Artificial Sequence
  HTT spacer sequence CTCN PAM
ugaccucaagugauccuccu

SEQ ID NO: 16697 - RNA, 20 nt, Artificial Sequence
  HTT spacer sequence CTCN PAM
agugauccuccugccuuggc

SEQ ID NO: 16698 - RNA, 20 nt, Artificial Sequence
  HTT spacer sequence CTCN PAM
ugccuuggccucccaaagug

SEQ ID NO: 16699 - RNA, 20 nt, Artificial Sequence
  HTT spacer sequence CTCN PAM
caaagugcuaggauuacagg

SEQ ID NO: 16700 - RNA, 20 nt, Artificial Sequence
  HTT spacer sequence CTCN PAM
cgccuguaauccuagcacuu

SEQ ID NO: 16701 - RNA, 20 nt, Artificial Sequence
  HTT spacer sequence CTCN PAM
uguggcugugcccacuuuaa

SEQ ID NO: 16702 - RNA, 20 nt, Artificial Sequence
  HTT spacer sequence CTCN PAM
uggucugagagucacgagau

SEQ ID NO: 16703 - RNA, 20 nt, Artificial Sequence
  HTT spacer sequence CTCN PAM
gaccaggagucaggugaacu

SEQ ID NO: 16704 - RNA, 20 nt, Artificial Sequence
  HTT spacer sequence CTCN PAM
cagaccaggagucaggugaa

SEQ ID NO: 16705 - RNA, 20 nt, Artificial Sequence
  HTT spacer sequence CTCN PAM
ugacucucagaccaggaguc

SEQ ID NO: 16706 - RNA, 20 nt, Artificial Sequence
  HTT spacer sequence CTCN PAM
cuaucuugaacgaucucgug

SEQ ID NO: 16707 - RNA, 20 nt, Artificial Sequence
  HTT spacer sequence CTCN PAM
uuuccaaaacgaggaccaaa

SEQ ID NO: 16708 - RNA, 20 nt, Artificial Sequence
  HTT spacer sequence CTCN PAM
uuuuggaaaagagggccuca

SEQ ID NO: 16709 - RNA, 20 nt, Artificial Sequence
  HTT spacer sequence CTCN PAM
acucugaaauaaaaacuuua

SEQ ID NO: 16710 - RNA, 20 nt, Artificial Sequence
  HTT spacer sequence CTCN PAM
gaaauaaaaacuuuauuugu

SEQ ID NO: 16711 - RNA, 20 nt, Artificial Sequence
  HTT spacer sequence CTCN PAM
aagaaaaagaccuuagcccu

SEQ ID NO: 16712 - RNA, 20 nt, Artificial Sequence
  HTT spacer sequence CTCN PAM
aaaugucuuugaauucuuau

SEQ ID NO: 16713 - RNA, 20 nt, Artificial Sequence
  HTT spacer sequence CTCN PAM
gccuuccucaaaaugucuuu

SEQ ID NO: 16714 - RNA, 20 nt, Artificial Sequence
  HTT spacer sequence CTCN PAM
cuuuuuaaaugacuucuccu

SEQ ID NO: 16715 - RNA, 20 nt, Artificial Sequence
  HTT spacer sequence CTCN PAM
uuuuaaaugacuucuccuuu

SEQ ID NO: 16716 - RNA, 20 nt, Artificial Sequence
  HTT spacer sequence CTCN PAM
uuucuuuuaacuugcacugu

SEQ ID NO: 16717 - RNA, 20 nt, Artificial Sequence
  HTT spacer sequence CTCN PAM
cuuauuuugucaauucuuuu

SEQ ID NO: 16718 - RNA, 20 nt, Artificial Sequence
  HTT spacer sequence CTCN PAM
uaagaagcagcacuuucuuu

SEQ ID NO: 16719 - RNA, 20 nt, Artificial Sequence
  HTT spacer sequence CTCN PAM
uuaugauacauguacuuuug

SEQ ID NO: 16720 - RNA, 20 nt, Artificial Sequence
  HTT spacer sequence CTCN PAM
uuuucagaccucuuuaugau

SEQ ID NO: 16721 - RNA, 20 nt, Artificial Sequence
  HTT spacer sequence CTCN PAM
gccugccaccaccugcuugc

SEQ ID NO: 16722 - RNA, 20 nt, Artificial Sequence
  HTT spacer sequence CTCN PAM
augacacccacccacccaag

SEQ ID NO: 16723 - RNA, 20 nt, Artificial Sequence
  HTT spacer sequence CTCN PAM
ccaugacacccacccaccca

SEQ ID NO: 16724 - RNA, 20 nt, Artificial Sequence
  HTT spacer sequence CTCN PAM
ucuccaugacacccacccac

SEQ ID NO: 16725 - RNA, 20 nt, Artificial Sequence
  HTT spacer sequence CTCN PAM
cugaacauguggcugaugaa

SEQ ID NO: 16726 - RNA, 20 nt, Artificial Sequence
  HTT spacer sequence CTCN PAM
ggauaugucuguuuagaaau

SEQ ID NO: 16727 - RNA, 20 nt, Artificial Sequence
  HTT spacer sequence CTCN PAM
accauguauaccucugggaa

SEQ ID NO: 16728 - RNA, 20 nt, Artificial Sequence
  HTT spacer sequence CTCN PAM
gggaagcaggugcucuucag

SEQ ID NO: 16729 - RNA, 20 nt, Artificial Sequence
  HTT spacer sequence CTCN PAM
ucaguagauugccucugcag

SEQ ID NO: 16730 - RNA, 20 nt, Artificial Sequence
  HTT spacer sequence CTCN PAM
gcagagaacacagaauugaa

SEQ ID NO: 16731 - RNA, 20 nt, Artificial Sequence
  HTT spacer sequence CTCN PAM
gcagaggcaaucuacugaag

SEQ ID NO: 16732 - RNA, 20 nt, Artificial Sequence
  HTT spacer sequence CTCN PAM
uugccuuuguggacauucac

SEQ ID NO: 16733 - RNA, 20 nt, Artificial Sequence
  HTT spacer sequence CTCN PAM
gauugugaaauauuacaaau

SEQ ID NO: 16734 - RNA, 20 nt, Artificial Sequence
  HTT spacer sequence CTCN PAM
ugagcaaagugugcaccuug

SEQ ID NO: 16735 - RNA, 20 nt, Artificial Sequence
  HTT spacer sequence CTCN PAM
ggaggauuugccaucauugu

SEQ ID NO: 16736 - RNA, 20 nt, Artificial Sequence
  HTT spacer sequence CTCN PAM
agggcacauacaaggugcac

SEQ ID NO: 16737 - RNA, 20 nt, Artificial Sequence
  HTT spacer sequence CTCN PAM
ugucauagaguggggguugc

SEQ ID NO: 16738 - RNA, 20 nt, Artificial Sequence
  HTT spacer sequence CTCN PAM
augacaugagaaauguaggg

SEQ ID NO: 16739 - RNA, 20 nt, Artificial Sequence
  HTT spacer sequence CTCN PAM
cugggaucacaucuguuugg

SEQ ID NO: 16740 - RNA, 20 nt, Artificial Sequence
  HTT spacer sequence CTCN PAM
aggauccaaacagaugugau

SEQ ID NO: 16741 - RNA, 20 nt, Artificial Sequence
  HTT spacer sequence CTCN PAM
uggcagcagacuuucuaauu

SEQ ID NO: 16742 - RNA, 20 nt, Artificial Sequence
  HTT spacer sequence CTCN PAM
uauagguguuggagauguuc

SEQ ID NO: 16743 - RNA, 20 nt, Artificial Sequence
  HTT spacer sequence CTCN PAM
aacaccuauaagagcgugca

SEQ ID NO: 16744 - RNA, 20 nt, Artificial Sequence
  HTT spacer sequence CTCN PAM
uuguggcacugcugcaggac

SEQ ID NO: 16745 - RNA, 20 nt, Artificial Sequence
  HTT spacer sequence CTCN PAM
acagauagcugacaucaucc

SEQ ID NO: 16746 - RNA, 20 nt, Artificial Sequence
  HTT spacer sequence CTCN PAM
caauguuagccaaacagcag

SEQ ID NO: 16747 - RNA, 20 nt, Artificial Sequence
  HTT spacer sequence CTCN PAM
uccuucaguccuaaucugug

SEQ ID NO: 16748 - RNA, 20 nt, Artificial Sequence
  HTT spacer sequence CTCN PAM
gugcuagucaugggacagcu

SEQ ID NO: 16749 - RNA, 20 nt, Artificial Sequence
  HTT spacer sequence CTCN PAM
caaugccaucucagguuggu

SEQ ID NO: 16750 - RNA, 20 nt, Artificial Sequence
  HTT spacer sequence CTCN PAM
gguugguauugcccaccuac

SEQ ID NO: 16751 - RNA, 20 nt, Artificial Sequence
  HTT spacer sequence CTCN PAM
gagagguuauggaggugauc

SEQ ID NO: 16752 - RNA, 20 nt, Artificial Sequence
  HTT spacer sequence CTCN PAM
gagcugugggauccccccug

SEQ ID NO: 16753 - RNA, 20 nt, Artificial Sequence
  HTT spacer sequence CTCN PAM
cggagcugugggaucccccc

SEQ ID NO: 16754 - RNA, 20 nt, Artificial Sequence
  HTT spacer sequence CTCN PAM
auaaccucucggagcugugg

SEQ ID NO: 16755 - RNA, 20 nt, Artificial Sequence
  HTT spacer sequence CTCN PAM
aaagcugugugcugccugau

SEQ ID NO: 16756 - RNA, 20 nt, Artificial Sequence
  HTT spacer sequence CTCN PAM
ccccagcacucuaaagcugu

SEQ ID NO: 16757 - RNA, 20 nt, Artificial Sequence
  HTT spacer sequence CTCN PAM
aaagcccgaacccuuaccuc

SEQ ID NO: 16758 - RNA, 20 nt, Artificial Sequence
  HTT spacer sequence CTCN PAM
uacacugccuccugcauucu

SEQ ID NO: 16759 - RNA, 20 nt, Artificial Sequence
  HTT spacer sequence CTCN PAM
ugcauucuggucaacccagu

SEQ ID NO: 16760 - RNA, 20 nt, Artificial Sequence
  HTT spacer sequence CTCN PAM
cucugucacccaggcuagag

SEQ ID NO: 16761 - RNA, 20 nt, Artificial Sequence
  HTT spacer sequence CTCN PAM
gucacccaggcuagagugca

SEQ ID NO: 16762 - RNA, 20 nt, Artificial Sequence
  HTT spacer sequence CTCN PAM
agccugggugacagagugag

SEQ ID NO: 16763 - RNA, 20 nt, Artificial Sequence
  HTT spacer sequence CTCN PAM
cugcaacaaccucugccucc

SEQ ID NO: 16764 - RNA, 20 nt, Artificial Sequence
  HTT spacer sequence CTCN PAM
gccucccagguucaaccaau

SEQ ID NO: 16765 - RNA, 20 nt, Artificial Sequence
  HTT spacer sequence CTCN PAM
cagguucaaccaauucuccc

SEQ ID NO: 16766 - RNA, 20 nt, Artificial Sequence
  HTT spacer sequence CTCN PAM
caccucagccuccugaguag

SEQ ID NO: 16767 - RNA, 20 nt, Artificial Sequence
  HTT spacer sequence CTCN PAM
gccuccugaguagcaaggac

SEQ ID NO: 16768 - RNA, 20 nt, Artificial Sequence
  HTT spacer sequence CTCN PAM
ugaguagcaaggaccacagg

SEQ ID NO: 16769 - RNA, 20 nt, Artificial Sequence
  HTT spacer sequence CTCN PAM
ggaggcugaggugggagaau

SEQ ID NO: 16770 - RNA, 20 nt, Artificial Sequence
  HTT spacer sequence CTCN PAM
acuaaaaauacaaaaaacua

SEQ ID NO: 16771 - RNA, 20 nt, Artificial Sequence
  HTT spacer sequence CTCN PAM
ucucuacuaaaaauacaaaa

SEQ ID NO: 16772 - RNA, 20 nt, Artificial Sequence
  HTT spacer sequence CTCN PAM
cuguguugcccaggcugguu

SEQ ID NO: 16773 - RNA, 20 nt, Artificial Sequence
  HTT spacer sequence CTCN PAM
ugggcgcaagugauccacca

SEQ ID NO: 16774 - RNA, 20 nt, Artificial Sequence
  HTT spacer sequence CTCN PAM
caccuguaaugccagcacuu

SEQ ID NO: 16775 - RNA, 20 nt, Artificial Sequence
  HTT spacer sequence CTCN PAM
ccuggccuauucaucacuaa

SEQ ID NO: 16776 - RNA, 20 nt, Artificial Sequence
  HTT spacer sequence CTCN PAM
guagcucacagagaagggug

SEQ ID NO: 16777 - RNA, 20 nt, Artificial Sequence
  HTT spacer sequence CTCN PAM
cagagaagggugguggggac

SEQ ID NO: 16778 - RNA, 20 nt, Artificial Sequence
  HTT spacer sequence CTCN PAM
gugagcuacagaggugcugc

SEQ ID NO: 16779 - RNA, 20 nt, Artificial Sequence
  HTT spacer sequence CTCN PAM
uugaggcagcucugccagaa

SEQ ID NO: 16780 - RNA, 20 nt, Artificial Sequence
  HTT spacer sequence CTCN PAM
aggagguccccaccacccuu

SEQ ID NO: 16781 - RNA, 20 nt, Artificial Sequence
  HTT spacer sequence CTCN PAM
gccagaaaaucucaugagcu

SEQ ID NO: 16782 - RNA, 20 nt, Artificial Sequence
  HTT spacer sequence CTCN PAM
ugagcugccuggcacagcuu

SEQ ID NO: 16783 - RNA, 20 nt, Artificial Sequence
  HTT spacer sequence CTCN PAM
ugagauuuucuggcagagcu

SEQ ID NO: 16784 - RNA, 20 nt, Artificial Sequence
  HTT spacer sequence CTCN PAM
agcugugccaggcagcucau

SEQ ID NO: 16785 - RNA, 20 nt, Artificial Sequence
  HTT spacer sequence CTCN PAM
gcaaauacauguuuguucau

SEQ ID NO: 16786 - RNA, 20 nt, Artificial Sequence
  HTT spacer sequence CTCN PAM
guauaguacgaguaguccgu

SEQ ID NO: 16787 - RNA, 20 nt, Artificial Sequence
  HTT spacer sequence CTCN PAM
uacuauacagaguaguuguu

SEQ ID NO: 16788 - RNA, 20 nt, Artificial Sequence
  HTT spacer sequence CTCN PAM
aaguuuaaaucaaaugccaa

SEQ ID NO: 16789 - RNA, 20 nt, Artificial Sequence
  HTT spacer sequence CTCN PAM
agauaacauuccauuaugaa

SEQ ID NO: 16790 - RNA, 20 nt, Artificial Sequence
  HTT spacer sequence CTCN PAM
ccagaagccaagaucccugu

SEQ ID NO: 16791 - RNA, 20 nt, Artificial Sequence
  HTT spacer sequence CTCN PAM
cugccuacagaugguuuuag

SEQ ID NO: 16792 - RNA, 20 nt, Artificial Sequence
  HTT spacer sequence CTCN PAM
gauuacgcacagaaaagaau

SEQ ID NO: 16793 - RNA, 20 nt, Artificial Sequence
  HTT spacer sequence CTCN PAM
acucagauuacgcacagaaa

SEQ ID NO: 16794 - RNA, 20 nt, Artificial Sequence
  HTT spacer sequence CTCN PAM
acucuacucagauuacgcac

SEQ ID NO: 16795 - RNA, 20 nt, Artificial Sequence
  HTT spacer sequence CTCN PAM
ccacaggugcauguugcauu

SEQ ID NO: 16796 - RNA, 20 nt, Artificial Sequence
  HTT spacer sequence CTCN PAM
aagaaggcagggggucuuuc

SEQ ID NO: 16797 - RNA, 20 nt, Artificial Sequence
  HTT spacer sequence CTCN PAM
cuugcuuuucuauugucugu

SEQ ID NO: 16798 - RNA, 20 nt, Artificial Sequence
  HTT spacer sequence CTCN PAM
uggauucuucuguacggugu

SEQ ID NO: 16799 - RNA, 20 nt, Artificial Sequence
  HTT spacer sequence CTCN PAM
ucccuccuggauucuucugu

SEQ ID NO: 16800 - RNA, 20 nt, Artificial Sequence
  HTT spacer sequence CTCN PAM
cuucccuccuggauucuucu

SEQ ID NO: 16801 - RNA, 20 nt, Artificial Sequence
  HTT spacer sequence CTCN PAM
caccgcagacaccaccuaac

SEQ ID NO: 16802 - RNA, 20 nt, Artificial Sequence
  HTT spacer sequence CTCN PAM
ucaccagcugaacaaugcca

SEQ ID NO: 16803 - RNA, 20 nt, Artificial Sequence
  HTT spacer sequence CTCN PAM
aaugucaccagaucaccaaa

SEQ ID NO: 16804 - RNA, 20 nt, Artificial Sequence
  HTT spacer sequence CTCN PAM
uaggcuuguaucuuuccuuu

SEQ ID NO: 16805 - RNA, 20 nt, Artificial Sequence
  HTT spacer sequence CTCN PAM
gccuggaauguuccuucccc

SEQ ID NO: 16806 - RNA, 20 nt, Artificial Sequence
  HTT spacer sequence CTCN PAM
uugcuuguacccuaacagca

SEQ ID NO: 16807 - RNA, 20 nt, Artificial Sequence
  HTT spacer sequence CTCN PAM
acccucauugcuuguacccu

SEQ ID NO: 16808 - RNA, 20 nt, Artificial Sequence
  HTT spacer sequence CTCN PAM
uccacccucauugcuuguac

SEQ ID NO: 16809 - RNA, 20 nt, Artificial Sequence
  HTT spacer sequence CTCN PAM
ccauggcugccccacuccuc

SEQ ID NO: 16810 - RNA, 20 nt, Artificial Sequence
  HTT spacer sequence CTCN PAM
cuucccuccccauggcugcc

SEQ ID NO: 16811 - RNA, 20 nt, Artificial Sequence
  HTT spacer sequence CTCN PAM
cucccuucccuccccauggc

SEQ ID NO: 16812 - RNA, 20 nt, Artificial Sequence
  HTT spacer sequence CTCN PAM
ccccaccaggccucacuccc

SEQ ID NO: 16813 - RNA, 20 nt, Artificial Sequence
  HTT spacer sequence CTCN PAM
acacuggccucaccccacca

SEQ ID NO: 16814 - RNA, 20 nt, Artificial Sequence
  HTT spacer sequence CTCN PAM
uccacacuggccucacccca

SEQ ID NO: 16815 - RNA, 20 nt, Artificial Sequence
  HTT spacer sequence CTCN PAM
aggcuccuccacacuggccu

SEQ ID NO: 16816 - RNA, 20 nt, Artificial Sequence
  HTT spacer sequence CTCN PAM
caaggcuccuccacacuggc

SEQ ID NO: 16817 - RNA, 20 nt, Artificial Sequence
  HTT spacer sequence CTCN PAM
ggaauaagaaugauccugcu

SEQ ID NO: 16818 - RNA, 20 nt, Artificial Sequence
  HTT spacer sequence CTCN PAM
acucaggaauaagaaugauc

SEQ ID NO: 16819 - RNA, 20 nt, Artificial Sequence
  HTT spacer sequence CTCN PAM
aggcuauucucaacucagga

SEQ ID NO: 16820 - RNA, 20 nt, Artificial Sequence
  HTT spacer sequence CTCN PAM
cccucaaggcuauucucaac

SEQ ID NO: 16821 - RNA, 20 nt, Artificial Sequence
  HTT spacer sequence CTCN PAM
ccucccccucaaggcuauuc

SEQ ID NO: 16822 - RNA, 20 nt, Artificial Sequence
  HTT spacer sequence CTCN PAM
gcccucaccucccccucaag

SEQ ID NO: 16823 - RNA, 20 nt, Artificial Sequence
  HTT spacer sequence CTCN PAM
cauggguggcccugcucugc

SEQ ID NO: 16824 - RNA, 20 nt, Artificial Sequence
  HTT spacer sequence CTCN PAM
agugccgggucucacauggg

SEQ ID NO: 16825 - RNA, 20 nt, Artificial Sequence
  HTT spacer sequence CTCN PAM
caugccacaucuaagccacc

SEQ ID NO: 16826 - RNA, 20 nt, Artificial Sequence
  HTT spacer sequence CTCN PAM
cacaugccacaucuaagcca

SEQ ID NO: 16827 - RNA, 20 nt, Artificial Sequence
  HTT spacer sequence CTCN PAM
cucacaugccacaucuaagc

SEQ ID NO: 16828 - RNA, 20 nt, Artificial Sequence
  HTT spacer sequence CTCN PAM
cucucacaugccacaucuaa

SEQ ID NO: 16829 - RNA, 20 nt, Artificial Sequence
  HTT spacer sequence CTCN PAM
cccugaaaucacccccaaag

SEQ ID NO: 16830 - RNA, 20 nt, Artificial Sequence
  HTT spacer sequence CTCN PAM
ugcugcccccaaugucugcc

SEQ ID NO: 16831 - RNA, 20 nt, Artificial Sequence
  HTT spacer sequence CTCN PAM
gaccuccugcugcccccaau

SEQ ID NO: 16832 - RNA, 20 nt, Artificial Sequence
  HTT spacer sequence CTCN PAM
acugcuacauccagacaggc

SEQ ID NO: 16833 - RNA, 20 nt, Artificial Sequence
  HTT spacer sequence CTCN PAM
uuaggcaccuauggggucuc

SEQ ID NO: 16834 - RNA, 20 nt, Artificial Sequence
  HTT spacer sequence CTCN PAM
ccucauuaggcaccuauggg

SEQ ID NO: 16835 - RNA, 20 nt, Artificial Sequence
  HTT spacer sequence CTCN PAM
uacaccugaugcuggccuca

SEQ ID NO: 16836 - RNA, 20 nt, Artificial Sequence
  HTT spacer sequence CTCN PAM
aggcucauacaccugaugcu

SEQ ID NO: 16837 - RNA, 20 nt, Artificial Sequence
  HTT spacer sequence CTCN PAM
acaacuccaggcucauacac

SEQ ID NO: 16838 - RNA, 20 nt, Artificial Sequence
  HTT spacer sequence CTCN PAM
cgacaacuccaggcucauac

SEQ ID NO: 16839 - RNA, 20 nt, Artificial Sequence
  HTT spacer sequence CTCN PAM
gaugcugacccccugcccca

SEQ ID NO: 16840 - RNA, 20 nt, Artificial Sequence
  HTT spacer sequence CTCN PAM
caguggacccagacuggcug

SEQ ID NO: 16841 - RNA, 20 nt, Artificial Sequence
  HTT spacer sequence CTCN PAM
agccagucuggguccacugu

SEQ ID NO: 16842 - RNA, 20 nt, Artificial Sequence
  HTT spacer sequence CTCN PAM
ccagccagucuggguccacu

SEQ ID NO: 16843 - RNA, 20 nt, Artificial Sequence
  HTT spacer sequence CTCN PAM
ucuccagccagucugggucc

SEQ ID NO: 16844 - RNA, 20 nt, Artificial Sequence
  HTT spacer sequence CTCN PAM
uccucuccagccagucuggg

SEQ ID NO: 16845 - RNA, 20 nt, Artificial Sequence
  HTT spacer sequence CTCN PAM
uccuccucuccagccagucu

SEQ ID NO: 16846 - RNA, 20 nt, Artificial Sequence
  HTT spacer sequence CTCN PAM
guauucaagcuccuccuccu

SEQ ID NO: 16847 - RNA, 20 nt, Artificial Sequence
  HTT spacer sequence CTCN PAM
gcaggcucgguauucaagcu

SEQ ID NO: 16848 - RNA, 20 nt, Artificial Sequence
  HTT spacer sequence CTCN PAM
aaggucagguaggugagggg

SEQ ID NO: 16849 - RNA, 20 nt, Artificial Sequence
  HTT spacer sequence CTCN PAM
ccuaccugaccuuggagcug

SEQ ID NO: 16850 - RNA, 20 nt, Artificial Sequence
  HTT spacer sequence CTCN PAM
ccucaccuaccugaccuugg

SEQ ID NO: 16851 - RNA, 20 nt, Artificial Sequence
  HTT spacer sequence CTCN PAM
cccugccccagcacuggcuc

SEQ ID NO: 16852 - RNA, 20 nt, Artificial Sequence
  HTT spacer sequence CTCN PAM
ugcacaaaaugccuuaaaaa

SEQ ID NO: 16853 - RNA, 20 nt, Artificial Sequence
  HTT spacer sequence CTCN PAM
gugcugccaaaccugggcca

SEQ ID NO: 16854 - RNA, 20 nt, Artificial Sequence
  HTT spacer sequence CTCN PAM
ucagugcccucggugcugcc

SEQ ID NO: 16855 - RNA, 20 nt, Artificial Sequence
  HTT spacer sequence CTCN PAM
aaaagcacucaucagugccc

SEQ ID NO: 16856 - RNA, 20 nt, Artificial Sequence
  HTT spacer sequence CTCN PAM
uccaaaagcacucaucagug

SEQ ID NO: 16857 - RNA, 20 nt, Artificial Sequence
  HTT spacer sequence CTCN PAM
cuuugcuccuccaaaagcac

SEQ ID NO: 16858 - RNA, 20 nt, Artificial Sequence
  HTT spacer sequence CTCN PAM
uguccuuucaggaacacauu

SEQ ID NO: 16859 - RNA, 20 nt, Artificial Sequence
  HTT spacer sequence CTCN PAM
ccuguccuuucaggaacaca

SEQ ID NO: 16860 - RNA, 20 nt, Artificial Sequence
  HTT spacer sequence CTCN PAM
cuccuguccuuucaggaaca

SEQ ID NO: 16861 - RNA, 20 nt, Artificial Sequence
  HTT spacer sequence CTCN PAM
ucaaguaaaaccuuuuccca

SEQ ID NO: 16862 - RNA, 20 nt, Artificial Sequence
  HTT spacer sequence CTCN PAM
guucccucuucaaguaaaac

SEQ ID NO: 16863 - RNA, 20 nt, Artificial Sequence
  HTT spacer sequence CTCN PAM
ggcuacugcccuauuucucc

SEQ ID NO: 16864 - RNA, 20 nt, Artificial Sequence
  HTT spacer sequence CTCN PAM
ucuggcuacugcccuauuuc

SEQ ID NO: 16865 - RNA, 20 nt, Artificial Sequence
  HTT spacer sequence CTCN PAM
uccucuggcuacugcccuau

SEQ ID NO: 16866 - RNA, 20 nt, Artificial Sequence
  HTT spacer sequence CTCN PAM
ccuccucuggcuacugcccu

SEQ ID NO: 16867 - RNA, 20 nt, Artificial Sequence
  HTT spacer sequence CTCN PAM
ucuccuccucuggcuacugc

SEQ ID NO: 16868 - RNA, 20 nt, Artificial Sequence
  HTT spacer sequence CTCN PAM
gugcguaaacaggccuucau

SEQ ID NO: 16869 - RNA, 20 nt, Artificial Sequence
  HTT spacer sequence CTCN PAM
cuguugcuucugcccucagu

SEQ ID NO: 16870 - RNA, 20 nt, Artificial Sequence
  HTT spacer sequence CTCN PAM
ugugucaugaacugauccuc

SEQ ID NO: 16871 - RNA, 20 nt, Artificial Sequence
  HTT spacer sequence CTCN PAM
gucauccaugcagccaaucc

SEQ ID NO: 16872 - RNA, 20 nt, Artificial Sequence
  HTT spacer sequence CTCN PAM
cagaguugcuggggaggagg

SEQ ID NO: 16873 - RNA, 20 nt, Artificial Sequence
  HTT spacer sequence CTCN PAM
gggagaacccacagugcucu

SEQ ID NO: 16874 - RNA, 20 nt, Artificial Sequence
  HTT spacer sequence CTCN PAM
ccagcaacucugggagaacc

SEQ ID NO: 16875 - RNA, 20 nt, Artificial Sequence
  HTT spacer sequence CTCN PAM
uccccagcaacucugggaga

SEQ ID NO: 16876 - RNA, 20 nt, Artificial Sequence
  HTT spacer sequence CTCN PAM
gccuccuccccagcaacucu

SEQ ID NO: 16877 - RNA, 20 nt, Artificial Sequence
  HTT spacer sequence CTCN PAM
ccaacucugccuccucccca

SEQ ID NO: 16878 - RNA, 20 nt, Artificial Sequence
  HTT spacer sequence CTCN PAM
ccugugcucaccaacucugc

SEQ ID NO: 16879 - RNA, 20 nt, Artificial Sequence
  HTT spacer sequence CTCN PAM
aggauuccugcauccuggac

SEQ ID NO: 16880 - RNA, 20 nt, Artificial Sequence
  HTT spacer sequence CTCN PAM
agucaguuguucccuuguug

SEQ ID NO: 16881 - RNA, 20 nt, Artificial Sequence
  HTT spacer sequence CTCN PAM
caacacuggccacaucuuac

SEQ ID NO: 16882 - RNA, 20 nt, Artificial Sequence
  HTT spacer sequence CTCN PAM
gcaaacagaugugguguuuu

SEQ ID NO: 16883 - RNA, 20 nt, Artificial Sequence
  HTT spacer sequence CTCN PAM
guagaaacaaaaauuggaaa

SEQ ID NO: 16884 - RNA, 20 nt, Artificial Sequence
  HTT spacer sequence CTCN PAM
ugccuguaaucccagcacuu

SEQ ID NO: 16885 - RNA, 20 nt, Artificial Sequence
  HTT spacer sequence CTCN PAM
caaagugcugggauuacagg

SEQ ID NO: 16886 - RNA, 20 nt, Artificial Sequence
  HTT spacer sequence CTCN PAM
agcaaucugccugccuuggc

SEQ ID NO: 16887 - RNA, 20 nt, Artificial Sequence
  HTT spacer sequence CTCN PAM
ggaguuugagaccagccugg

SEQ ID NO: 16888 - RNA, 20 nt, Artificial Sequence
  HTT spacer sequence CTCN PAM
ugagcucaagcaaucugccu

SEQ ID NO: 16889 - RNA, 20 nt, Artificial Sequence
  HTT spacer sequence CTCN PAM
aacuccugagcucaagcaau

SEQ ID NO: 16890 - RNA, 20 nt, Artificial Sequence
  HTT spacer sequence CTCN PAM
acuagaaauacaaaaaguag

SEQ ID NO: 16891 - RNA, 20 nt, Artificial Sequence
  HTT spacer sequence CTCN PAM
ggaggcugaggugggaggau

SEQ ID NO: 16892 - RNA, 20 nt, Artificial Sequence
  HTT spacer sequence CTCN PAM
ugaguuagccaggacuacag

SEQ ID NO: 16893 - RNA, 20 nt, Artificial Sequence
  HTT spacer sequence CTCN PAM
gccuccugaguuagccagga

SEQ ID NO: 16894 - RNA, 20 nt, Artificial Sequence
  HTT spacer sequence CTCN PAM
caccucagccuccugaguua

SEQ ID NO: 16895 - RNA, 20 nt, Artificial Sequence
  HTT spacer sequence CTCN PAM
agugauccucccaccucagc

SEQ ID NO: 16896 - RNA, 20 nt, Artificial Sequence
  HTT spacer sequence CTCN PAM
uggggcacagagugagacuc

SEQ ID NO: 16897 - RNA, 20 nt, Artificial Sequence
  HTT spacer sequence CTCN PAM
gugccccaggagugcagugg

SEQ ID NO: 16898 - RNA, 20 nt, Artificial Sequence
  HTT spacer sequence CTCN PAM
cucugugccccaggagugca

SEQ ID NO: 16899 - RNA, 20 nt, Artificial Sequence
  HTT spacer sequence CTCN PAM
guuagaaagagagagagaga

SEQ ID NO: 16900 - RNA, 20 nt, Artificial Sequence
  HTT spacer sequence CTCN PAM
uucuaacagagucucacucu

SEQ ID NO: 16901 - RNA, 20 nt, Artificial Sequence
  HTT spacer sequence CTCN PAM
cuuucuaacagagucucacu

SEQ ID NO: 16902 - RNA, 20 nt, Artificial Sequence
  HTT spacer sequence CTCN PAM
cucuuucuaacagagucuca

SEQ ID NO: 16903 - RNA, 20 nt, Artificial Sequence
  HTT spacer sequence CTCN PAM
cucucuuucuaacagagucu

SEQ ID NO: 16904 - RNA, 20 nt, Artificial Sequence
  HTT spacer sequence CTCN PAM
cucucucuuucuaacagagu

SEQ ID NO: 16905 - RNA, 20 nt, Artificial Sequence
  HTT spacer sequence CTCN PAM
ucuuucucucucucucuuuc

SEQ ID NO: 16906 - RNA, 20 nt, Artificial Sequence
  HTT spacer sequence CTCN PAM
cuucuuucucucucucucuu

SEQ ID NO: 16907 - RNA, 20 nt, Artificial Sequence
  HTT spacer sequence CTCN PAM
cucuucuuucucucucucuc

SEQ ID NO: 16908 - RNA, 20 nt, Artificial Sequence
  HTT spacer sequence CTCN PAM
cucucucuucuuucucucuc

SEQ ID NO: 16909 - RNA, 20 nt, Artificial Sequence
  HTT spacer sequence CTCN PAM
cucccucucucuucuuucuc

SEQ ID NO: 16910 - RNA, 20 nt, Artificial Sequence
  HTT spacer sequence CTCN PAM
cuuccauuucuuccauuuau

SEQ ID NO: 16911 - RNA, 20 nt, Artificial Sequence
  HTT spacer sequence CTCN PAM
ccuuccucccuuccauuucu

SEQ ID NO: 16912 - RNA, 20 nt, Artificial Sequence
  HTT spacer sequence CTCN PAM
cuccccuuccucccuuccau

SEQ ID NO: 16913 - RNA, 20 nt, Artificial Sequence
  HTT spacer sequence CTCN PAM
caaggcaacuggcugaacuu

SEQ ID NO: 16914 - RNA, 20 nt, Artificial Sequence
  HTT spacer sequence CTCN PAM
auugcacuggguuaagugag

SEQ ID NO: 16915 - RNA, 20 nt, Artificial Sequence
  HTT spacer sequence CTCN PAM
cuuaacccagugcaauggag

SEQ ID NO: 16916 - RNA, 20 nt, Artificial Sequence
  HTT spacer sequence CTCN PAM
ucucacuuaacccagugcaa

SEQ ID NO: 16917 - RNA, 20 nt, Artificial Sequence
  HTT spacer sequence CTCN PAM
gcucuucucacuuaacccag

SEQ ID NO: 16918 - RNA, 20 nt, Artificial Sequence
  HTT spacer sequence CTCN PAM
gugggugagggggcaaggau

SEQ ID NO: 16919 - RNA, 20 nt, Artificial Sequence
  HTT spacer sequence CTCN PAM
cccacagagguuuuguuuua

SEQ ID NO: 16920 - RNA, 20 nt, Artificial Sequence
  HTT spacer sequence CTCN PAM
cacaacaguuguaacaaaug

SEQ ID NO: 16921 - RNA, 20 nt, Artificial Sequence
  HTT spacer sequence CTCN PAM
aucccucccacaacaguugu

SEQ ID NO: 16922 - RNA, 20 nt, Artificial Sequence
  HTT spacer sequence CTCN PAM
aauauacaaaagugugaaaa

SEQ ID NO: 16923 - RNA, 20 nt, Artificial Sequence
  HTT spacer sequence CTCN PAM
uuuaaaagcauuuuaaguuc

SEQ ID NO: 16924 - RNA, 20 nt, Artificial Sequence
  HTT spacer sequence CTCN PAM
ucgucaccuucccucauuua

SEQ ID NO: 16925 - RNA, 20 nt, Artificial Sequence
  HTT spacer sequence CTCN PAM
agggcaaaucaucauaauca

SEQ ID NO: 16926 - RNA, 20 nt, Artificial Sequence
  HTT spacer sequence CTCN PAM
caugaagcccuuggaguguu

SEQ ID NO: 16927 - RNA, 20 nt, Artificial Sequence
  HTT spacer sequence CTCN PAM
ugaagcccuuggaguguuaa

SEQ ID NO: 16928 - RNA, 20 nt, Artificial Sequence
  HTT spacer sequence CTCN PAM
aagggcuucaugagagucaa

SEQ ID NO: 16929 - RNA, 20 nt, Artificial Sequence
  HTT spacer sequence CTCN PAM
aauaauguauuuaacacucc

SEQ ID NO: 16930 - RNA, 20 nt, Artificial Sequence
  HTT spacer sequence CTCN PAM
cuccguccgguagacaugcu

SEQ ID NO: 16931 - RNA, 20 nt, Artificial Sequence
  HTT spacer sequence CTCN PAM
guccgguagacaugcuuuua

SEQ ID NO: 16932 - RNA, 20 nt, Artificial Sequence
  HTT spacer sequence CTCN PAM
guaaaagcaugucuaccgga

SEQ ID NO: 16933 - RNA, 20 nt, Artificial Sequence
  HTT spacer sequence CTCN PAM
aaacacaauggugagucucu

SEQ ID NO: 16934 - RNA, 20 nt, Artificial Sequence
  HTT spacer sequence CTCN PAM
ccauuguguuuggagugacg

SEQ ID NO: 16935 - RNA, 20 nt, Artificial Sequence
  HTT spacer sequence CTCN PAM
cgccuggcucagcagaugaa

SEQ ID NO: 16936 - RNA, 20 nt, Artificial Sequence
  HTT spacer sequence CTCN PAM
ccuggcucagcagaugaauc

SEQ ID NO: 16937 - RNA, 20 nt, Artificial Sequence
  HTT spacer sequence CTCN PAM
gcagaugaaucuggacggcu

SEQ ID NO: 16938 - RNA, 20 nt, Artificial Sequence
  HTT spacer sequence CTCN PAM
gauuacugggaccaccccca

SEQ ID NO: 16939 - RNA, 20 nt, Artificial Sequence
  HTT spacer sequence CTCN PAM
gacauucugggggugguccc

SEQ ID NO: 16940 - RNA, 20 nt, Artificial Sequence
  HTT spacer sequence CTCN PAM
agaagcccuacccaaacuga

SEQ ID NO: 16941 - RNA, 20 nt, Artificial Sequence
  HTT spacer sequence CTCN PAM
caagaagcccuacccaaacu

SEQ ID NO: 16942 - RNA, 20 nt, Artificial Sequence
  HTT spacer sequence CTCN PAM
guuccgcaccacccccacac

SEQ ID NO: 16943 - RNA, 20 nt, Artificial Sequence
  HTT spacer sequence CTCN PAM
cucugucgcccaggcuggag

SEQ ID NO: 16944 - RNA, 20 nt, Artificial Sequence
  HTT spacer sequence CTCN PAM
gucgcccaggcuggaguaca

SEQ ID NO: 16945 - RNA, 20 nt, Artificial Sequence
  HTT spacer sequence CTCN PAM
agccugggcgacagagugag

SEQ ID NO: 16946 - RNA, 20 nt, Artificial Sequence
  HTT spacer sequence CTCN PAM
gcucacugcaagcucugccu

SEQ ID NO: 16947 - RNA, 20 nt, Artificial Sequence
  HTT spacer sequence CTCN PAM
cugcaagcucugccuuccag

SEQ ID NO: 16948 - RNA, 20 nt, Artificial Sequence
  HTT spacer sequence CTCN PAM
gccuuccagcuucacaccau

SEQ ID NO: 16949 - RNA, 20 nt, Artificial Sequence
  HTT spacer sequence CTCN PAM
ugccucagccucccgaguug

SEQ ID NO: 16950 - RNA, 20 nt, Artificial Sequence
  HTT spacer sequence CTCN PAM
gccucccgaguugcugggac

SEQ ID NO: 16951 - RNA, 20 nt, Artificial Sequence
  HTT spacer sequence CTCN PAM
cgaguugcugggacuacaag

SEQ ID NO: 16952 - RNA, 20 nt, Artificial Sequence
  HTT spacer sequence CTCN PAM
ggaggcugaggcaggagaau

SEQ ID NO: 16953 - RNA, 20 nt, Artificial Sequence
  HTT spacer sequence CTCN PAM
acuaaaaauacaaaaaaauu

SEQ ID NO: 16954 - RNA, 20 nt, Artificial Sequence
  HTT spacer sequence CTCN PAM
ugaccucgugacccgcccau

SEQ ID NO: 16955 - RNA, 20 nt, Artificial Sequence
  HTT spacer sequence CTCN PAM
ugacccgcccaucucagccu

SEQ ID NO: 16956 - RNA, 20 nt, Artificial Sequence
  HTT spacer sequence CTCN PAM
gccucccaaagugcugggau

SEQ ID NO: 16957 - RNA, 20 nt, Artificial Sequence
  HTT spacer sequence CTCN PAM
caaagugcugggauuacagg

SEQ ID NO: 16958 - RNA, 20 nt, Artificial Sequence
  HTT spacer sequence CTCN PAM
cgccuguaaucccagcacuu

SEQ ID NO: 16959 - RNA, 20 nt, Artificial Sequence
  HTT spacer sequence CTCN PAM
aaaaaaaauaaaaaggccgg

SEQ ID NO: 16960 - RNA, 20 nt, Artificial Sequence
  HTT spacer sequence CTCN PAM
aucuccaaaaaaaauaaaaa

SEQ ID NO: 16961 - RNA, 20 nt, Artificial Sequence
  HTT spacer sequence CTCN PAM
gucacccaggcuggaguaca

SEQ ID NO: 16962 - RNA, 20 nt, Artificial Sequence
  HTT spacer sequence CTCN PAM
agccugggugacagagcaag

SEQ ID NO: 16963 - RNA, 20 nt, Artificial Sequence
  HTT spacer sequence CTCN PAM
acucacugcaaccuccgccu

SEQ ID NO: 16964 - RNA, 20 nt, Artificial Sequence
  HTT spacer sequence CTCN PAM
cugcaaccuccgccucccgg

SEQ ID NO: 16965 - RNA, 20 nt, Artificial Sequence
  HTT spacer sequence CTCN PAM
gccucccggguucaagcaau

SEQ ID NO: 16966 - RNA, 20 nt, Artificial Sequence
  HTT spacer sequence CTCN PAM
cggguucaagcaauuuuccu

SEQ ID NO: 16967 - RNA, 20 nt, Artificial Sequence
  HTT spacer sequence CTCN PAM
gccucccgaguagcugggac

SEQ ID NO: 16968 - RNA, 20 nt, Artificial Sequence
  HTT spacer sequence CTCN PAM
cgaguagcugggacuacagg

SEQ ID NO: 16969 - RNA, 20 nt, Artificial Sequence
  HTT spacer sequence CTCN PAM
ggaggcugaggcaggaaaau

SEQ ID NO: 16970 - RNA, 20 nt, Artificial Sequence
  HTT spacer sequence CTCN PAM
acuaaaaauacaaaaaauua

SEQ ID NO: 16971 - RNA, 20 nt, Artificial Sequence
  HTT spacer sequence CTCN PAM
ugaccuugugauccgcccgc

SEQ ID NO: 16972 - RNA, 20 nt, Artificial Sequence
  HTT spacer sequence CTCN PAM
gccucccaaaguguugggau

SEQ ID NO: 16973 - RNA, 20 nt, Artificial Sequence
  HTT spacer sequence CTCN PAM
caaaguguugggauuacagg

SEQ ID NO: 16974 - RNA, 20 nt, Artificial Sequence
  HTT spacer sequence CTCN PAM
cgcaccaagccaagaguuug

SEQ ID NO: 16975 - RNA, 20 nt, Artificial Sequence
  HTT spacer sequence CTCN PAM
caccaagccaagaguuugca

SEQ ID NO: 16976 - RNA, 20 nt, Artificial Sequence
  HTT spacer sequence CTCN PAM
uggcuuggugcgagagccac

SEQ ID NO: 16977 - RNA, 20 nt, Artificial Sequence
  HTT spacer sequence CTCN PAM
cagaaaagcaggcauuaguu

SEQ ID NO: 16978 - RNA, 20 nt, Artificial Sequence
  HTT spacer sequence CTCN PAM
gugauagagagguuuauugg

SEQ ID NO: 16979 - RNA, 20 nt, Artificial Sequence
  HTT spacer sequence CTCN PAM
aucacugagucccaaagugu

SEQ ID NO: 16980 - RNA, 20 nt, Artificial Sequence
  HTT spacer sequence CTCN PAM
cuaucacugagucccaaagu

SEQ ID NO: 16981 - RNA, 20 nt, Artificial Sequence
  HTT spacer sequence CTCN PAM
uauuuuacuauccuaccaau

SEQ ID NO: 16982 - RNA, 20 nt, Artificial Sequence
  HTT spacer sequence CTCN PAM
cggacgccuaaaauaaacau

SEQ ID NO: 16983 - RNA, 20 nt, Artificial Sequence
  HTT spacer sequence CTCN PAM
aaauggccagaauucccgau

SEQ ID NO: 16984 - RNA, 20 nt, Artificial Sequence
  HTT spacer sequence CTCN PAM
uauucaggagcucuccuucu

SEQ ID NO: 16985 - RNA, 20 nt, Artificial Sequence
  HTT spacer sequence CTCN PAM
ugaauacgagaaagaacaau

SEQ ID NO: 16986 - RNA, 20 nt, Artificial Sequence
  HTT spacer sequence CTCN PAM
ccuucucuccguauuuaauc

SEQ ID NO: 16987 - RNA, 20 nt, Artificial Sequence
  HTT spacer sequence CTCN PAM
uucucuccguauuuaaucuc

SEQ ID NO: 16988 - RNA, 20 nt, Artificial Sequence
  HTT spacer sequence CTCN PAM
ccguauuuaaucuccuguac

SEQ ID NO: 16989 - RNA, 20 nt, Artificial Sequence
  HTT spacer sequence CTCN PAM
guauuuaaucuccuguacag

SEQ ID NO: 16990 - RNA, 20 nt, Artificial Sequence
  HTT spacer sequence CTCN PAM
uguacaguaauuaauagguu

SEQ ID NO: 16991 - RNA, 20 nt, Artificial Sequence
  HTT spacer sequence CTCN PAM
uaaccuauuaauuacuguac

SEQ ID NO: 16992 - RNA, 20 nt, Artificial Sequence
  HTT spacer sequence CTCN PAM
gauagaaagcauaccuugaa

SEQ ID NO: 16993 - RNA, 20 nt, Artificial Sequence
  HTT spacer sequence CTCN PAM
gaagugaagcaagaccaggu

SEQ ID NO: 16994 - RNA, 20 nt, Artificial Sequence
  HTT spacer sequence CTCN PAM
ugguucauaccugucuugaa

SEQ ID NO: 16995 - RNA, 20 nt, Artificial Sequence
  HTT spacer sequence CTCN PAM
uguccucaguagagaugcua

SEQ ID NO: 16996 - RNA, 20 nt, Artificial Sequence
  HTT spacer sequence CTCN PAM
guagagaugcuacagcagug

SEQ ID NO: 16997 - RNA, 20 nt, Artificial Sequence
  HTT spacer sequence CTCN PAM
acugaggacaagagacagaa

SEQ ID NO: 16998 - RNA, 20 nt, Artificial Sequence
  HTT spacer sequence CTCN PAM
ccucaggcagggcagggcag

SEQ ID NO: 16999 - RNA, 20 nt, Artificial Sequence
  HTT spacer sequence CTCN PAM
ggcagggcagggcagugggg

SEQ ID NO: 17000 - RNA, 20 nt, Artificial Sequence
  HTT spacer sequence CTCN PAM
uggguuucaacuucccugac

SEQ ID NO: 17001 - RNA, 20 nt, Artificial Sequence
  HTT spacer sequence CTCN PAM
cuuuuacuggcuucucuugg

SEQ ID NO: 17002 - RNA, 20 nt, Artificial Sequence
  HTT spacer sequence CTCN PAM
gauugucaccaugugcuggc

SEQ ID NO: 17003 - RNA, 20 nt, Artificial Sequence
  HTT spacer sequence CTCN PAM
cugcagggcagccugccucc

SEQ ID NO: 17004 - RNA, 20 nt, Artificial Sequence
  HTT spacer sequence CTCN PAM
aauaaauacguguaguauca

SEQ ID NO: 17005 - RNA, 20 nt, Artificial Sequence
  HTT spacer sequence CTCN PAM
uaaauuguuuggaagcuccc

SEQ ID NO: 17006 - RNA, 20 nt, Artificial Sequence
  HTT spacer sequence CTCN PAM
ccaaggacagugaugaggca

SEQ ID NO: 17007 - RNA, 20 nt, Artificial Sequence
  HTT spacer sequence CTCN PAM
ucacuguccuuggggagcuu

SEQ ID NO: 17008 - RNA, 20 nt, Artificial Sequence
  HTT spacer sequence CTCN PAM
uaagugcuugcugccuagau

SEQ ID NO: 17009 - RNA, 20 nt, Artificial Sequence
  HTT spacer sequence CTCN PAM
ccaccuuugcuagauucuga

SEQ ID NO: 17010 - RNA, 20 nt, Artificial Sequence
  HTT spacer sequence CTCN PAM
accuuugcuagauucugagc

SEQ ID NO: 17011 - RNA, 20 nt, Artificial Sequence
  HTT spacer sequence CTCN PAM
gaaucuagcaaagguggaga

SEQ ID NO: 17012 - RNA, 20 nt, Artificial Sequence
  HTT spacer sequence CTCN PAM
gugaaugcucagaaucuagc

SEQ ID NO: 17013 - RNA, 20 nt, Artificial Sequence
  HTT spacer sequence CTCN PAM
aacucagugaaugcucagaa

SEQ ID NO: 17014 - RNA, 20 nt, Artificial Sequence
  HTT spacer sequence CTCN PAM
acugaugacaaaccaaguga

SEQ ID NO: 17015 - RNA, 20 nt, Artificial Sequence
  HTT spacer sequence CTCN PAM
uucgacaacacagggcaucu

SEQ ID NO: 17016 - RNA, 20 nt, Artificial Sequence
  HTT spacer sequence CTCN PAM
gugaggaaggugauacacag

SEQ ID NO: 17017 - RNA, 20 nt, Artificial Sequence
  HTT spacer sequence CTCN PAM
cugaggaugaaauggcaggu

SEQ ID NO: 17018 - RNA, 20 nt, Artificial Sequence
  HTT spacer sequence CTCN PAM
guguaucaccuuccucacug

SEQ ID NO: 17019 - RNA, 20 nt, Artificial Sequence
  HTT spacer sequence CTCN PAM
cuguguaucaccuuccucac

SEQ ID NO: 17020 - RNA, 20 nt, Artificial Sequence
  HTT spacer sequence CTCN PAM
gcauuucacuuuagcgguua

SEQ ID NO: 17021 - RNA, 20 nt, Artificial Sequence
  HTT spacer sequence CTCN PAM
accuauauuuuuacuuuaua

SEQ ID NO: 17022 - RNA, 20 nt, Artificial Sequence
  HTT spacer sequence CTCN PAM
uuuccaccuucagcuguuuu

SEQ ID NO: 17023 - RNA, 20 nt, Artificial Sequence
  HTT spacer sequence CTCN PAM
cucauuuccaccuucagcug

SEQ ID NO: 17024 - RNA, 20 nt, Artificial Sequence
  HTT spacer sequence CTCN PAM
aggaagacuaaugugauuca

SEQ ID NO: 17025 - RNA, 20 nt, Artificial Sequence
  HTT spacer sequence CTCN PAM
uuccccauucugcacuauac

SEQ ID NO: 17026 - RNA, 20 nt, Artificial Sequence
  HTT spacer sequence CTCN PAM
cagaguguaggagcugugcu

SEQ ID NO: 17027 - RNA, 20 nt, Artificial Sequence
  HTT spacer sequence CTCN PAM
gaguguaggagcugugcugc

SEQ ID NO: 17028 - RNA, 20 nt, Artificial Sequence
  HTT spacer sequence CTCN PAM
gagaguguauagugcagaau

SEQ ID NO: 17029 - RNA, 20 nt, Artificial Sequence
  HTT spacer sequence CTCN PAM
uacacucugagaguguauag

SEQ ID NO: 17030 - RNA, 20 nt, Artificial Sequence
  HTT spacer sequence CTCN PAM
gccuugcccagugugccagu

SEQ ID NO: 17031 - RNA, 20 nt, Artificial Sequence
  HTT spacer sequence CTCN PAM
uacagcaacaaauauuuuca

SEQ ID NO: 17032 - RNA, 20 nt, Artificial Sequence
  HTT spacer sequence CTCN PAM
uggguauauacccaaaagaa

SEQ ID NO: 17033 - RNA, 20 nt, Artificial Sequence
  HTT spacer sequence CTCN PAM
auggaugaauggauaagcaa

SEQ ID NO: 17034 - RNA, 20 nt, Artificial Sequence
  HTT spacer sequence CTCN PAM
uguaaguggaaucacauagu

SEQ ID NO: 17035 - RNA, 20 nt, Artificial Sequence
  HTT spacer sequence CTCN PAM
aggucccucauguaagugga

SEQ ID NO: 17036 - RNA, 20 nt, Artificial Sequence
  HTT spacer sequence CTCN PAM
ccugcagccccuggcaacca

SEQ ID NO: 17037 - RNA, 20 nt, Artificial Sequence
  HTT spacer sequence CTCN PAM
ccuccccugcagccccuggc

SEQ ID NO: 17038 - RNA, 20 nt, Artificial Sequence
  HTT spacer sequence CTCN PAM
ucaucuuguaaaaauaacuc

SEQ ID NO: 17039 - RNA, 20 nt, Artificial Sequence
  HTT spacer sequence CTCN PAM
cuucaucuuguaaaaauaac

SEQ ID NO: 17040 - RNA, 20 nt, Artificial Sequence
  HTT spacer sequence CTCN PAM
uaacuauuuuuaacuguaca

SEQ ID NO: 17041 - RNA, 20 nt, Artificial Sequence
  HTT spacer sequence CTCN PAM
ugccugaaauccaagcacuu

SEQ ID NO: 17042 - RNA, 20 nt, Artificial Sequence
  HTT spacer sequence CTCN PAM
aagugcuuggauuucaggca

SEQ ID NO: 17043 - RNA, 20 nt, Artificial Sequence
  HTT spacer sequence CTCN PAM
caaagugcuuggauuucagg

SEQ ID NO: 17044 - RNA, 20 nt, Artificial Sequence
  HTT spacer sequence CTCN PAM
ugccuuggccucucaaagug

SEQ ID NO: 17045 - RNA, 20 nt, Artificial Sequence
  HTT spacer sequence CTCN PAM
agcaauccuccugccuuggc

SEQ ID NO: 17046 - RNA, 20 nt, Artificial Sequence
  HTT spacer sequence CTCN PAM
uuggcucaagcaauccuccu

SEQ ID NO: 17047 - RNA, 20 nt, Artificial Sequence
  HTT spacer sequence CTCN PAM
aacuccuuggcucaagcaau

SEQ ID NO: 17048 - RNA, 20 nt, Artificial Sequence
  HTT spacer sequence CTCN PAM
gcaacaugguaggaccccau

SEQ ID NO: 17049 - RNA, 20 nt, Artificial Sequence
  HTT spacer sequence CTCN PAM
ggagacugaggcuggaggau

SEQ ID NO: 17050 - RNA, 20 nt, Artificial Sequence
  HTT spacer sequence CTCN PAM
ugaguagcugggaccacaug

SEQ ID NO: 17051 - RNA, 20 nt, Artificial Sequence
  HTT spacer sequence CTCN PAM
gucuccugaguagcugggac

SEQ ID NO: 17052 - RNA, 20 nt, Artificial Sequence
  HTT spacer sequence CTCN PAM
agccucagucuccugaguag

SEQ ID NO: 17053 - RNA, 20 nt, Artificial Sequence
  HTT spacer sequence CTCN PAM
agcgauccuccagccucagu

SEQ ID NO: 17054 - RNA, 20 nt, Artificial Sequence
  HTT spacer sequence CTCN PAM
ugggcucaagcgauccucca

SEQ ID NO: 17055 - RNA, 20 nt, Artificial Sequence
  HTT spacer sequence CTCN PAM
agugagauguguucaugcca

SEQ ID NO: 17056 - RNA, 20 nt, Artificial Sequence
  HTT spacer sequence CTCN PAM
cuagagacuuaaccuccugg

SEQ ID NO: 17057 - RNA, 20 nt, Artificial Sequence
  HTT spacer sequence CTCN PAM
agccucggcuauagaguaag

SEQ ID NO: 17058 - RNA, 20 nt, Artificial Sequence
  HTT spacer sequence CTCN PAM
gcuauagaguaagacccugc

SEQ ID NO: 17059 - RNA, 20 nt, Artificial Sequence
  HTT spacer sequence CTCN PAM
auagccgaggcuggagugca

SEQ ID NO: 17060 - RNA, 20 nt, Artificial Sequence
  HTT spacer sequence CTCN PAM
aaaaaacaaaacaaaacaag

SEQ ID NO: 17061 - RNA, 20 nt, Artificial Sequence
  HTT spacer sequence CTCN PAM
ugucuuguuuuguuuuguuu

SEQ ID NO: 17062 - RNA, 20 nt, Artificial Sequence
  HTT spacer sequence CTCN PAM
caaaguguugggauuacagg

SEQ ID NO: 17063 - RNA, 20 nt, Artificial Sequence
  HTT spacer sequence CTCN PAM
uggcuucaagugauccuuuu

SEQ ID NO: 17064 - RNA, 20 nt, Artificial Sequence
  HTT spacer sequence CTCN PAM
ggcuggucccaagcuccugg

SEQ ID NO: 17065 - RNA, 20 nt, Artificial Sequence
  HTT spacer sequence CTCN PAM
auauguugcucaggcugguc

SEQ ID NO: 17066 - RNA, 20 nt, Artificial Sequence
  HTT spacer sequence CTCN PAM
acaaagaaaaucaaaaacua

SEQ ID NO: 17067 - RNA, 20 nt, Artificial Sequence
  HTT spacer sequence CTCN PAM
caaguagcugggacuacagg

SEQ ID NO: 17068 - RNA, 20 nt, Artificial Sequence
  HTT spacer sequence CTCN PAM
gccucccaaguagcugggac

SEQ ID NO: 17069 - RNA, 20 nt, Artificial Sequence
  HTT spacer sequence CTCN PAM
caccucagccucccaaguag

SEQ ID NO: 17070 - RNA, 20 nt, Artificial Sequence
  HTT spacer sequence CTCN PAM
ugagcucaggaguucgaggc

SEQ ID NO: 17071 - RNA, 20 nt, Artificial Sequence
  HTT spacer sequence CTCN PAM
agagauccucccaccucagc

SEQ ID NO: 17072 - RNA, 20 nt, Artificial Sequence
  HTT spacer sequence CTCN PAM
ggaguucgaggcugcaggga

SEQ ID NO: 17073 - RNA, 20 nt, Artificial Sequence
  HTT spacer sequence CTCN PAM
ugagcucaagagauccuccc

SEQ ID NO: 17074 - RNA, 20 nt, Artificial Sequence
  HTT spacer sequence CTCN PAM
aacuccugagcucaagagau

SEQ ID NO: 17075 - RNA, 20 nt, Artificial Sequence
  HTT spacer sequence CTCN PAM
cugcagccucgaacuccuga

SEQ ID NO: 17076 - RNA, 20 nt, Artificial Sequence
  HTT spacer sequence CTCN PAM
agccugggcuacagaaugau

SEQ ID NO: 17077 - RNA, 20 nt, Artificial Sequence
  HTT spacer sequence CTCN PAM
uauuaaaaaaaaauccaaaa

SEQ ID NO: 17078 - RNA, 20 nt, Artificial Sequence
  HTT spacer sequence CTCN PAM
gguuuacuuuuuuuuuuuuu

SEQ ID NO: 17079 - RNA, 20 nt, Artificial Sequence
  HTT spacer sequence CTCN PAM
cagguuuacuuuuuuuuuuu

SEQ ID NO: 17080 - RNA, 20 nt, Artificial Sequence
  HTT spacer sequence CTCN PAM
uccuguguuaaauuuggagg

SEQ ID NO: 17081 - RNA, 20 nt, Artificial Sequence
  HTT spacer sequence CTCN PAM
uguguuaaauuuggaggcca

SEQ ID NO: 17082 - RNA, 20 nt, Artificial Sequence
  HTT spacer sequence CTCN PAM
aaauuuaacacaggaggagg

SEQ ID NO: 17083 - RNA, 20 nt, Artificial Sequence
  HTT spacer sequence CTCN PAM
caccugaaaucccagcacuu

SEQ ID NO: 17084 - RNA, 20 nt, Artificial Sequence
  HTT spacer sequence CTCN PAM
caaagugcugggauuucagg

SEQ ID NO: 17085 - RNA, 20 nt, Artificial Sequence
  HTT spacer sequence CTCN PAM
gccucccaaagugcugggau

SEQ ID NO: 17086 - RNA, 20 nt, Artificial Sequence
  HTT spacer sequence CTCN PAM
agcgaucaccccgccucagc

SEQ ID NO: 17087 - RNA, 20 nt, Artificial Sequence
  HTT spacer sequence CTCN PAM
agcucaagcgaucaccccgc

SEQ ID NO: 17088 - RNA, 20 nt, Artificial Sequence
  HTT spacer sequence CTCN PAM
ugcuauguuguccaggcugg

SEQ ID NO: 17089 - RNA, 20 nt, Artificial Sequence
  HTT spacer sequence CTCN PAM
acaaaaauaaaaaaauaaaa

SEQ ID NO: 17090 - RNA, 20 nt, Artificial Sequence
  HTT spacer sequence CTCN PAM
uggcuauuuuuuuuuauuuu

SEQ ID NO: 17091 - RNA, 20 nt, Artificial Sequence
  HTT spacer sequence CTCN PAM
ugccacuacuccuggcuauu

SEQ ID NO: 17092 - RNA, 20 nt, Artificial Sequence
  HTT spacer sequence CTCN PAM
ggcucaugccacuacuccug

SEQ ID NO: 17093 - RNA, 20 nt, Artificial Sequence
  HTT spacer sequence CTCN PAM
ugggcucaggcucaugccac

SEQ ID NO: 17094 - RNA, 20 nt, Artificial Sequence
  HTT spacer sequence CTCN PAM
cuacagcuugaccuccuggg

SEQ ID NO: 17095 - RNA, 20 nt, Artificial Sequence
  HTT spacer sequence CTCN PAM
agccugggcgagaucgagac

SEQ ID NO: 17096 - RNA, 20 nt, Artificial Sequence
  HTT spacer sequence CTCN PAM
cccaggcuggagugcagugg

SEQ ID NO: 17097 - RNA, 20 nt, Artificial Sequence
  HTT spacer sequence CTCN PAM
aucucgcccaggcuggagug

SEQ ID NO: 17098 - RNA, 20 nt, Artificial Sequence
  HTT spacer sequence CTCN PAM
agagaaagaaaaugacaagg

SEQ ID NO: 17099 - RNA, 20 nt, Artificial Sequence
  HTT spacer sequence CTCN PAM
agagacauggucucgaucuc

SEQ ID NO: 17100 - RNA, 20 nt, Artificial Sequence
  HTT spacer sequence CTCN PAM
uuacaaacgaucguucuucu

SEQ ID NO: 17101 - RNA, 20 nt, Artificial Sequence
  HTT spacer sequence CTCN PAM
caagaaaauagaaaggcaau

SEQ ID NO: 17102 - RNA, 20 nt, Artificial Sequence
  HTT spacer sequence CTCN PAM
agaaaauagaaaggcaauuc

SEQ ID NO: 17103 - RNA, 20 nt, Artificial Sequence
  HTT spacer sequence CTCN PAM
uauuuggaccaugacuuaau

SEQ ID NO: 17104 - RNA, 20 nt, Artificial Sequence
  HTT spacer sequence CTCN PAM
uuuaagcggcuuaggaguca

SEQ ID NO: 17105 - RNA, 20 nt, Artificial Sequence
  HTT spacer sequence CTCN PAM
uaagccgcuuaaaggagaac

SEQ ID NO: 17106 - RNA, 20 nt, Artificial Sequence
  HTT spacer sequence CTCN PAM
uucuauaggucuuugaucgu

SEQ ID NO: 17107 - RNA, 20 nt, Artificial Sequence
  HTT spacer sequence CTCN PAM
cuugggaacuagauucagau

SEQ ID NO: 17108 - RNA, 20 nt, Artificial Sequence
  HTT spacer sequence CTCN PAM
ugggaacuagauucagauag

SEQ ID NO: 17109 - RNA, 20 nt, Artificial Sequence
  HTT spacer sequence CTCN PAM
agcaguauuuacauuaugac

SEQ ID NO: 17110 - RNA, 20 nt, Artificial Sequence
  HTT spacer sequence CTCN PAM
aaaaaaaaaagaaagaaaga

SEQ ID NO: 17111 - RNA, 20 nt, Artificial Sequence
  HTT spacer sequence CTCN PAM
gucucaaaaaaaaaaagaaa

SEQ ID NO: 17112 - RNA, 20 nt, Artificial Sequence
  HTT spacer sequence CTCN PAM
uguugcccauccuggagugc

SEQ ID NO: 17113 - RNA, 20 nt, Artificial Sequence
  HTT spacer sequence CTCN PAM
aggaugggcaacaagaguga

SEQ ID NO: 17114 - RNA, 20 nt, Artificial Sequence
  HTT spacer sequence CTCN PAM
gcucaccgcaaccucugccu

SEQ ID NO: 17115 - RNA, 20 nt, Artificial Sequence
  HTT spacer sequence CTCN PAM
ccgcaaccucugccucccag

SEQ ID NO: 17116 - RNA, 20 nt, Artificial Sequence
  HTT spacer sequence CTCN PAM
gccucccagguucaagcaau

SEQ ID NO: 17117 - RNA, 20 nt, Artificial Sequence
  HTT spacer sequence CTCN PAM
cagguucaagcaauucuccu

SEQ ID NO: 17118 - RNA, 20 nt, Artificial Sequence
  HTT spacer sequence CTCN PAM
ugccucagccucccgaguag

SEQ ID NO: 17119 - RNA, 20 nt, Artificial Sequence
  HTT spacer sequence CTCN PAM
gccucccgaguagcugggau

SEQ ID NO: 17120 - RNA, 20 nt, Artificial Sequence
  HTT spacer sequence CTCN PAM
cgaguagcugggauuacggg

SEQ ID NO: 17121 - RNA, 20 nt, Artificial Sequence
  HTT spacer sequence CTCN PAM
ggaggcugaggcaggagaau

SEQ ID NO: 17122 - RNA, 20 nt, Artificial Sequence
  HTT spacer sequence CTCN PAM
acuaaaaauacaaaaaauua

SEQ ID NO: 17123 - RNA, 20 nt, Artificial Sequence
  HTT spacer sequence CTCN PAM
auguugaggcuggucucgaa

SEQ ID NO: 17124 - RNA, 20 nt, Artificial Sequence
  HTT spacer sequence CTCN PAM
acauggagaaacccugucuc

SEQ ID NO: 17125 - RNA, 20 nt, Artificial Sequence
  HTT spacer sequence CTCN PAM
aacuccugaccucaggugau

SEQ ID NO: 17126 - RNA, 20 nt, Artificial Sequence
  HTT spacer sequence CTCN PAM
ugaccucaggugauccaccc

SEQ ID NO: 17127 - RNA, 20 nt, Artificial Sequence
  HTT spacer sequence CTCN PAM
ggugauccacccgccucggc

SEQ ID NO: 17128 - RNA, 20 nt, Artificial Sequence
  HTT spacer sequence CTCN PAM
gccucccaaagugcugggau

SEQ ID NO: 17129 - RNA, 20 nt, Artificial Sequence
  HTT spacer sequence CTCN PAM
caaagugcugggauuacagg

SEQ ID NO: 17130 - RNA, 20 nt, Artificial Sequence
  HTT spacer sequence CTCN PAM
caccuguaaucccagcacuu

SEQ ID NO: 17131 - RNA, 20 nt, Artificial Sequence
  HTT spacer sequence CTCN PAM
ggccgggugcgguggcucac

SEQ ID NO: 17132 - RNA, 20 nt, Artificial Sequence
  HTT spacer sequence CTCN PAM
accaucuacuugccaaauua

SEQ ID NO: 17133 - RNA, 20 nt, Artificial Sequence
  HTT spacer sequence CTCN PAM
aucucuaccaucuacuugcc

SEQ ID NO: 17134 - RNA, 20 nt, Artificial Sequence
  HTT spacer sequence CTCN PAM
ccaccucuaucucuaccauc

SEQ ID NO: 17135 - RNA, 20 nt, Artificial Sequence
  HTT spacer sequence CTCN PAM
auauuuuggucugucaacuu

SEQ ID NO: 17136 - RNA, 20 nt, Artificial Sequence
  HTT spacer sequence CTCN PAM
gaagccucuauauuuugguc

SEQ ID NO: 17137 - RNA, 20 nt, Artificial Sequence
  HTT spacer sequence CTCN PAM
aaauagaacuaaacauguaa

SEQ ID NO: 17138 - RNA, 20 nt, Artificial Sequence
  HTT spacer sequence CTCN PAM
uaacaaucugaauuacaugu

SEQ ID NO: 17139 - RNA, 20 nt, Artificial Sequence
  HTT spacer sequence CTCN PAM
uuuauacuaccuccuaacaa

SEQ ID NO: 17140 - RNA, 20 nt, Artificial Sequence
  HTT spacer sequence CTCN PAM
ucuuuauuacgguagaguua

SEQ ID NO: 17141 - RNA, 20 nt, Artificial Sequence
  HTT spacer sequence CTCN PAM
accguaauaaagaugagauu

SEQ ID NO: 17142 - RNA, 20 nt, Artificial Sequence
  HTT spacer sequence CTCN PAM
aguuuaaacugggguuuuau

SEQ ID NO: 17143 - RNA, 20 nt, Artificial Sequence
  HTT spacer sequence CTCN PAM
uacucuaguuuaaacugggg

SEQ ID NO: 17144 - RNA, 20 nt, Artificial Sequence
  HTT spacer sequence CTCN PAM
uggaaagugcaggcaagggu

SEQ ID NO: 17145 - RNA, 20 nt, Artificial Sequence
  HTT spacer sequence CTCN PAM
gcucugcuuucuucuuuuca

SEQ ID NO: 17146 - RNA, 20 nt, Artificial Sequence
  HTT spacer sequence CTCN PAM
gcuuucuucuuuucauuuau

SEQ ID NO: 17147 - RNA, 20 nt, Artificial Sequence
  HTT spacer sequence CTCN PAM
cuuugucgccuaggcugaag

SEQ ID NO: 17148 - RNA, 20 nt, Artificial Sequence
  HTT spacer sequence CTCN PAM
cacugcacuucaugccacug

SEQ ID NO: 17149 - RNA, 20 nt, Artificial Sequence
  HTT spacer sequence CTCN PAM
cucuagccucgaacuccugg

SEQ ID NO: 17150 - RNA, 20 nt, Artificial Sequence
  HTT spacer sequence CTCN PAM
agccucgaacuccugggcuc

SEQ ID NO: 17151 - RNA, 20 nt, Artificial Sequence
  HTT spacer sequence CTCN PAM
aacuccugggcucuagaguu

SEQ ID NO: 17152 - RNA, 20 nt, Artificial Sequence
  HTT spacer sequence CTCN PAM
ugggcucuagaguucuuccu

SEQ ID NO: 17153 - RNA, 20 nt, Artificial Sequence
  HTT spacer sequence CTCN PAM
agaguucuuccugccucagc

SEQ ID NO: 17154 - RNA, 20 nt, Artificial Sequence
  HTT spacer sequence CTCN PAM
agagcccaggaguucgaggc

SEQ ID NO: 17155 - RNA, 20 nt, Artificial Sequence
  HTT spacer sequence CTCN PAM
gccuucuaaguagcugagac

SEQ ID NO: 17156 - RNA, 20 nt, Artificial Sequence
  HTT spacer sequence CTCN PAM
gcuacuuagaaggcugaggc

SEQ ID NO: 17157 - RNA, 20 nt, Artificial Sequence
  HTT spacer sequence CTCN PAM
uagcuucaggcgauccuccu

SEQ ID NO: 17158 - RNA, 20 nt, Artificial Sequence
  HTT spacer sequence CTCN PAM
ugccucugccucccaaaaug

SEQ ID NO: 17159 - RNA, 20 nt, Artificial Sequence
  HTT spacer sequence CTCN PAM
gccucccaaaaugcugaggu

SEQ ID NO: 17160 - RNA, 20 nt, Artificial Sequence
  HTT spacer sequence CTCN PAM
caaaaugcugagguuauagg

SEQ ID NO: 17161 - RNA, 20 nt, Artificial Sequence
  HTT spacer sequence CTCN PAM
gcauuuugggaggcagaggc

SEQ ID NO: 17162 - RNA, 20 nt, Artificial Sequence
  HTT spacer sequence CTCN PAM
ucucugcuuccuguguuagu

SEQ ID NO: 17163 - RNA, 20 nt, Artificial Sequence
  HTT spacer sequence CTCN PAM
gcuuccuguguuaguuuugu

SEQ ID NO: 17164 - RNA, 20 nt, Artificial Sequence
  HTT spacer sequence CTCN PAM
ggugggcuguuuucacauga

SEQ ID NO: 17165 - RNA, 20 nt, Artificial Sequence
  HTT spacer sequence CTCN PAM
agcaggcuguguucucagcc

SEQ ID NO: 17166 - RNA, 20 nt, Artificial Sequence
  HTT spacer sequence CTCN PAM
gccccucaaguaggccuaug

SEQ ID NO: 17167 - RNA, 20 nt, Artificial Sequence
  HTT spacer sequence CTCN PAM
aguaggccuaugugauuggc

SEQ ID NO: 17168 - RNA, 20 nt, Artificial Sequence
  HTT spacer sequence CTCN PAM
ugcaaggccaaucacauagg

SEQ ID NO: 17169 - RNA, 20 nt, Artificial Sequence
  HTT spacer sequence CTCN PAM
gguccacaugggccaaaugg

SEQ ID NO: 17170 - RNA, 20 nt, Artificial Sequence
  HTT spacer sequence CTCN PAM
cauuuggcccauguggacca

SEQ ID NO: 17171 - RNA, 20 nt, Artificial Sequence
  HTT spacer sequence CTCN PAM
ucaauggaaugcuguccagu

SEQ ID NO: 17172 - RNA, 20 nt, Artificial Sequence
  HTT spacer sequence CTCN PAM
ucaucaauggaaugcugucc

SEQ ID NO: 17173 - RNA, 20 nt, Artificial Sequence
  HTT spacer sequence CTCN PAM
gggaguaagggagaggagca

SEQ ID NO: 17174 - RNA, 20 nt, Artificial Sequence
  HTT spacer sequence CTCN PAM
cggagaccagccccaccucc

SEQ ID NO: 17175 - RNA, 20 nt, Artificial Sequence
  HTT spacer sequence CTCN PAM
cuuacucccggagaccagcc

SEQ ID NO: 17176 - RNA, 20 nt, Artificial Sequence
  HTT spacer sequence CTCN PAM
cccuuacucccggagaccag

SEQ ID NO: 17177 - RNA, 20 nt, Artificial Sequence
  HTT spacer sequence CTCN PAM
ucucccuuacucccggagac

SEQ ID NO: 17178 - RNA, 20 nt, Artificial Sequence
  HTT spacer sequence CTCN PAM
aaaauucuaacugcugugcu

SEQ ID NO: 17179 - RNA, 20 nt, Artificial Sequence
  HTT spacer sequence CTCN PAM
caucccuuuuuaaggcaacu

SEQ ID NO: 17180 - RNA, 20 nt, Artificial Sequence
  HTT spacer sequence CTCN PAM
uuucucuuacuggauuuuug

SEQ ID NO: 17181 - RNA, 20 nt, Artificial Sequence
  HTT spacer sequence CTCN PAM
uacuggauuuuuguacacau

SEQ ID NO: 17182 - RNA, 20 nt, Artificial Sequence
  HTT spacer sequence CTCN PAM
aagauauguaugcaaaaugu

SEQ ID NO: 17183 - RNA, 20 nt, Artificial Sequence
  HTT spacer sequence CTCN PAM
aauggaccaaggcugaaaau

SEQ ID NO: 17184 - RNA, 20 nt, Artificial Sequence
  HTT spacer sequence CTCN PAM
uggcguggcccgccuccaug

SEQ ID NO: 17185 - RNA, 20 nt, Artificial Sequence
  HTT spacer sequence CTCN PAM
augcuagcaggcucugguug

SEQ ID NO: 17186 - RNA, 20 nt, Artificial Sequence
  HTT spacer sequence CTCN PAM
gguugugccaaguucaguug

SEQ ID NO: 17187 - RNA, 20 nt, Artificial Sequence
  HTT spacer sequence CTCN PAM
acugaacuuggcacaaccag

SEQ ID NO: 17188 - RNA, 20 nt, Artificial Sequence
  HTT spacer sequence CTCN PAM
ugccugcacggaacuuccag

SEQ ID NO: 17189 - RNA, 20 nt, Artificial Sequence
  HTT spacer sequence CTCN PAM
gccugcccacccauuucguc

SEQ ID NO: 17190 - RNA, 20 nt, Artificial Sequence
  HTT spacer sequence CTCN PAM
gaaauccugccucugccugc

SEQ ID NO: 17191 - RNA, 20 nt, Artificial Sequence
  HTT spacer sequence CTCN PAM
cucagaaauccugccucugc

SEQ ID NO: 17192 - RNA, 20 nt, Artificial Sequence
  HTT spacer sequence CTCN PAM
cccucagaaauccugccucu

SEQ ID NO: 17193 - RNA, 20 nt, Artificial Sequence
  HTT spacer sequence CTCN PAM
gcaaaaagcuagcuacuucu

SEQ ID NO: 17194 - RNA, 20 nt, Artificial Sequence
  HTT spacer sequence CTCN PAM
ucucugcaaaaagcuagcua

SEQ ID NO: 17195 - RNA, 20 nt, Artificial Sequence
  HTT spacer sequence CTCN PAM
ugggugccggaacucuucuc

SEQ ID NO: 17196 - RNA, 20 nt, Artificial Sequence
  HTT spacer sequence CTCN PAM
cuugggugccggaacucuuc

SEQ ID NO: 17197 - RNA, 20 nt, Artificial Sequence
  HTT spacer sequence CTCN PAM
gcugcucucuugggugccgg

SEQ ID NO: 17198 - RNA, 20 nt, Artificial Sequence
  HTT spacer sequence CTCN PAM
cagcugcucucuugggugcc

SEQ ID NO: 17199 - RNA, 20 nt, Artificial Sequence
  HTT spacer sequence CTCN PAM
aggauucuguggcgccgugc

SEQ ID NO: 17200 - RNA, 20 nt, Artificial Sequence
  HTT spacer sequence CTCN PAM
ucauggccucugcauucagc

SEQ ID NO: 17201 - RNA, 20 nt, Artificial Sequence
  HTT spacer sequence CTCN PAM
gcauucagcugcugucaccc

SEQ ID NO: 17202 - RNA, 20 nt, Artificial Sequence
  HTT spacer sequence CTCN PAM
gcacaggccauggccaaaau

SEQ ID NO: 17203 - RNA, 20 nt, Artificial Sequence
  HTT spacer sequence CTCN PAM
aguuuuugagccuuacuugc

SEQ ID NO: 17204 - RNA, 20 nt, Artificial Sequence
  HTT spacer sequence CTCN PAM
aaaacuagaguccacuauga

SEQ ID NO: 17205 - RNA, 20 nt, Artificial Sequence
  HTT spacer sequence CTCN PAM
acuuuaaacuuauuacagug

SEQ ID NO: 17206 - RNA, 20 nt, Artificial Sequence
  HTT spacer sequence CTCN PAM
uggcaucaaauccaaaccaa

SEQ ID NO: 17207 - RNA, 20 nt, Artificial Sequence
  HTT spacer sequence CTCN PAM
uccuggcaucaaauccaaac

SEQ ID NO: 17208 - RNA, 20 nt, Artificial Sequence
  HTT spacer sequence CTCN PAM
uuucuaaggacuagucuugc

SEQ ID NO: 17209 - RNA, 20 nt, Artificial Sequence
  HTT spacer sequence CTCN PAM
gacauguagaaggacacaga

SEQ ID NO: 17210 - RNA, 20 nt, Artificial Sequence
  HTT spacer sequence CTCN PAM
gugcagcucaaaugugguca

SEQ ID NO: 17211 - RNA, 20 nt, Artificial Sequence
  HTT spacer sequence CTCN PAM
aauguggucacugucuuauu

SEQ ID NO: 17212 - RNA, 20 nt, Artificial Sequence
  HTT spacer sequence CTCN PAM
ccuuccaucucacaauugag

SEQ ID NO: 17213 - RNA, 20 nt, Artificial Sequence
  HTT spacer sequence CTCN PAM
uuccaucucacaauugaggc

SEQ ID NO: 17214 - RNA, 20 nt, Artificial Sequence
  HTT spacer sequence CTCN PAM
caauugaggcaaaauauugu

SEQ ID NO: 17215 - RNA, 20 nt, Artificial Sequence
  HTT spacer sequence CTCN PAM
auugugagauggaaggagag

SEQ ID NO: 17216 - RNA, 20 nt, Artificial Sequence
  HTT spacer sequence CTCN PAM
gcuggaaguccuauuggaca

SEQ ID NO: 17217 - RNA, 20 nt, Artificial Sequence
  HTT spacer sequence CTCN PAM
guguggauaguggcuccugu

SEQ ID NO: 17218 - RNA, 20 nt, Artificial Sequence
  HTT spacer sequence CTCN PAM
uguaugagacagugcagguc

SEQ ID NO: 17219 - RNA, 20 nt, Artificial Sequence
  HTT spacer sequence CTCN PAM
uacaggagccacuauccaca

SEQ ID NO: 17220 - RNA, 20 nt, Artificial Sequence
  HTT spacer sequence CTCN PAM
acagaccugcacugucucau

SEQ ID NO: 17221 - RNA, 20 nt, Artificial Sequence
  HTT spacer sequence CTCN PAM
caccaguaaagcugcuucuc

SEQ ID NO: 17222 - RNA, 20 nt, Artificial Sequence
  HTT spacer sequence CTCN PAM
acucccaccaguaaagcugc

SEQ ID NO: 17223 - RNA, 20 nt, Artificial Sequence
  HTT spacer sequence CTCN PAM
aagcccuccacucccaccag

SEQ ID NO: 17224 - RNA, 20 nt, Artificial Sequence
  HTT spacer sequence CTCN PAM
ccaagcccuccacucccacc

SEQ ID NO: 17225 - RNA, 20 nt, Artificial Sequence
  HTT spacer sequence CTCN PAM
uaucuugaaaccaaucaaau

SEQ ID NO: 17226 - RNA, 20 nt, Artificial Sequence
  HTT spacer sequence CTCN PAM
uguuuuuauauaaguaaggu

SEQ ID NO: 17227 - RNA, 20 nt, Artificial Sequence
  HTT spacer sequence CTCN PAM
uguugggagaggaggguauu

SEQ ID NO: 17228 - RNA, 20 nt, Artificial Sequence
  HTT spacer sequence CTCN PAM
caacaagaggaaaagcagga

SEQ ID NO: 17229 - RNA, 20 nt, Artificial Sequence
  HTT spacer sequence CTCN PAM
cccaacaagaggaaaagcag

SEQ ID NO: 17230 - RNA, 20 nt, Artificial Sequence
  HTT spacer sequence CTCN PAM
ucucccaacaagaggaaaag

SEQ ID NO: 17231 - RNA, 20 nt, Artificial Sequence
  HTT spacer sequence CTCN PAM
uguuuacaacauuuggggua

SEQ ID NO: 17232 - RNA, 20 nt, Artificial Sequence
  HTT spacer sequence CTCN PAM
cuuuugguccaagauagacu

SEQ ID NO: 17233 - RNA, 20 nt, Artificial Sequence
  HTT spacer sequence CTCN PAM
uuugguccaagauagacugg

SEQ ID NO: 17234 - RNA, 20 nt, Artificial Sequence
  HTT spacer sequence CTCN PAM
ggugccaucaucuguuucua

SEQ ID NO: 17235 - RNA, 20 nt, Artificial Sequence
  HTT spacer sequence CTCN PAM
ugggccucuggugccaucau

SEQ ID NO: 17236 - RNA, 20 nt, Artificial Sequence
  HTT spacer sequence CTCN PAM
aauucagccacauggacaac

SEQ ID NO: 17237 - RNA, 20 nt, Artificial Sequence
  HTT spacer sequence CTCN PAM
acacggccuuccagcuuugc

SEQ ID NO: 17238 - RNA, 20 nt, Artificial Sequence
  HTT spacer sequence CTCN PAM
ccgugauuuucaaggacaca

SEQ ID NO: 17239 - RNA, 20 nt, Artificial Sequence
  HTT spacer sequence CTCN PAM
ucccugccugccauccagac

SEQ ID NO: 17240 - RNA, 20 nt, Artificial Sequence
  HTT spacer sequence CTCN PAM
ugccacccugacuggguaua

SEQ ID NO: 17241 - RNA, 20 nt, Artificial Sequence
  HTT spacer sequence CTCN PAM
cugaguccuggucgugggug

SEQ ID NO: 17242 - RNA, 20 nt, Artificial Sequence
  HTT spacer sequence CTCN PAM
gggaggaaggggcagcagcu

SEQ ID NO: 17243 - RNA, 20 nt, Artificial Sequence
  HTT spacer sequence CTCN PAM
accacccacgaccaggacuc

SEQ ID NO: 17244 - RNA, 20 nt, Artificial Sequence
  HTT spacer sequence CTCN PAM
cggaggcaugcucaccccuu

SEQ ID NO: 17245 - RNA, 20 nt, Artificial Sequence
  HTT spacer sequence CTCN PAM
gugagcgucauggcacaucu

SEQ ID NO: 17246 - RNA, 20 nt, Artificial Sequence
  HTT spacer sequence CTCN PAM
ccccuuccucuguggcagag

SEQ ID NO: 17247 - RNA, 20 nt, Artificial Sequence
  HTT spacer sequence CTCN PAM
guggcagaggggauggcugc

SEQ ID NO: 17248 - RNA, 20 nt, Artificial Sequence
  HTT spacer sequence CTCN PAM
gccacagaggaaggggugag

SEQ ID NO: 17249 - RNA, 20 nt, Artificial Sequence
  HTT spacer sequence CTCN PAM
ucccuguccuuuccaaagcg

SEQ ID NO: 17250 - RNA, 20 nt, Artificial Sequence
  HTT spacer sequence CTCN PAM
uccaguauuccugcuuugcc

SEQ ID NO: 17251 - RNA, 20 nt, Artificial Sequence
  HTT spacer sequence CTCN PAM
cuuccaguauuccugcuuug

SEQ ID NO: 17252 - RNA, 20 nt, Artificial Sequence
  HTT spacer sequence CTCN PAM
cucuuccaguauuccugcuu

SEQ ID NO: 17253 - RNA, 20 nt, Artificial Sequence
  HTT spacer sequence CTCN PAM
cagcauuauaauuguuagua

SEQ ID NO: 17254 - RNA, 20 nt, Artificial Sequence
  HTT spacer sequence CTCN PAM
uggguaugugguagguuuaa

SEQ ID NO: 17255 - RNA, 20 nt, Artificial Sequence
  HTT spacer sequence CTCN PAM
gugaaguauuucccgcuuug

SEQ ID NO: 17256 - RNA, 20 nt, Artificial Sequence
  HTT spacer sequence CTCN PAM
caucaggccacuucuugggu

SEQ ID NO: 17257 - RNA, 20 nt, Artificial Sequence
  HTT spacer sequence CTCN PAM
ucaggccacuucuuggguug

SEQ ID NO: 17258 - RNA, 20 nt, Artificial Sequence
  HTT spacer sequence CTCN PAM
ccacuaucaacccaagaagu

SEQ ID NO: 17259 - RNA, 20 nt, Artificial Sequence
  HTT spacer sequence CTCN PAM
acgccacacagugacugggg

SEQ ID NO: 17260 - RNA, 20 nt, Artificial Sequence
  HTT spacer sequence CTCN PAM
ucuccacgccacacagugac

SEQ ID NO: 17261 - RNA, 20 nt, Artificial Sequence
  HTT spacer sequence CTCN PAM
cugugucauagcugaacaag

SEQ ID NO: 17262 - RNA, 20 nt, Artificial Sequence
  HTT spacer sequence CTCN PAM
gugucauagcugaacaagcc

SEQ ID NO: 17263 - RNA, 20 nt, Artificial Sequence
  HTT spacer sequence CTCN PAM
gggcugggcuuguucagcua

SEQ ID NO: 17264 - RNA, 20 nt, Artificial Sequence
  HTT spacer sequence CTCN PAM
cugggcugggcuuguucagc

SEQ ID NO: 17265 - RNA, 20 nt, Artificial Sequence
  HTT spacer sequence CTCN PAM
uagggcagaaaccucucugg

SEQ ID NO: 17266 - RNA, 20 nt, Artificial Sequence
  HTT spacer sequence CTCN PAM
cgaugguggaauugggaugc

SEQ ID NO: 17267 - RNA, 20 nt, Artificial Sequence
  HTT spacer sequence CTCN PAM
augguggaauugggaugcga

SEQ ID NO: 17268 - RNA, 20 nt, Artificial Sequence
  HTT spacer sequence CTCN PAM
caaaaacacggcuugcggag

SEQ ID NO: 17269 - RNA, 20 nt, Artificial Sequence
  HTT spacer sequence CTCN PAM
gcaagccguguuuuugugag

SEQ ID NO: 17270 - RNA, 20 nt, Artificial Sequence
  HTT spacer sequence CTCN PAM
gggugcagccugcauccgcc

SEQ ID NO: 17271 - RNA, 20 nt, Artificial Sequence
  HTT spacer sequence CTCN PAM
uuuccugcacugccaucgug

SEQ ID NO: 17272 - RNA, 20 nt, Artificial Sequence
  HTT spacer sequence CTCN PAM
gggcacuuggucccuuucuc

SEQ ID NO: 17273 - RNA, 20 nt, Artificial Sequence
  HTT spacer sequence CTCN PAM
uccccugagucccuuuggcu

SEQ ID NO: 17274 - RNA, 20 nt, Artificial Sequence
  HTT spacer sequence CTCN PAM
ggggaagagaaagggaccaa

SEQ ID NO: 17275 - RNA, 20 nt, Artificial Sequence
  HTT spacer sequence CTCN PAM
ccugugccacccuugugauc

SEQ ID NO: 17276 - RNA, 20 nt, Artificial Sequence
  HTT spacer sequence CTCN PAM
gccuucuuucugucucagac

SEQ ID NO: 17277 - RNA, 20 nt, Artificial Sequence
  HTT spacer sequence CTCN PAM
gacugcugcucaucacuacu

SEQ ID NO: 17278 - RNA, 20 nt, Artificial Sequence
  HTT spacer sequence CTCN PAM
ucacuacucgggacccuagg

SEQ ID NO: 17279 - RNA, 20 nt, Artificial Sequence
  HTT spacer sequence CTCN PAM
ggacccuaggaagggagguu

SEQ ID NO: 17280 - RNA, 20 nt, Artificial Sequence
  HTT spacer sequence CTCN PAM
cuuccuagggucccgaguag

SEQ ID NO: 17281 - RNA, 20 nt, Artificial Sequence
  HTT spacer sequence CTCN PAM
guggaaccucccuuccuagg

SEQ ID NO: 17282 - RNA, 20 nt, Artificial Sequence
  HTT spacer sequence CTCN PAM
ucucagccacguucucagug

SEQ ID NO: 17283 - RNA, 20 nt, Artificial Sequence
  HTT spacer sequence CTCN PAM
gccacguucucagugccacu

SEQ ID NO: 17284 - RNA, 20 nt, Artificial Sequence
  HTT spacer sequence CTCN PAM
gugccacuguugucuuuguu

SEQ ID NO: 17285 - RNA, 20 nt, Artificial Sequence
  HTT spacer sequence CTCN PAM
ggugugaagccauggaaaug

SEQ ID NO: 17286 - RNA, 20 nt, Artificial Sequence
  HTT spacer sequence CTCN PAM
auacauugucauaaaaccaa

SEQ ID NO: 17287 - RNA, 20 nt, Artificial Sequence
  HTT spacer sequence CTCN PAM
augugggaauucggggaccc

SEQ ID NO: 17288 - RNA, 20 nt, Artificial Sequence
  HTT spacer sequence CTCN PAM
uuuccuucuuuugguucugu

SEQ ID NO: 17289 - RNA, 20 nt, Artificial Sequence
  HTT spacer sequence CTCN PAM
aggccuucacauccucugug

SEQ ID NO: 17290 - RNA, 20 nt, Artificial Sequence
  HTT spacer sequence CTCN PAM
gugucugguuggggacaagg

SEQ ID NO: 17291 - RNA, 20 nt, Artificial Sequence
  HTT spacer sequence CTCN PAM
uuguccccaaccagacacag

SEQ ID NO: 17292 - RNA, 20 nt, Artificial Sequence
  HTT spacer sequence CTCN PAM
ccuuguccccaaccagacac

SEQ ID NO: 17293 - RNA, 20 nt, Artificial Sequence
  HTT spacer sequence CTCN PAM
cguggugacaggucacagcc

SEQ ID NO: 17294 - RNA, 20 nt, Artificial Sequence
  HTT spacer sequence CTCN PAM
uggugacaggucacagcccc

SEQ ID NO: 17295 - RNA, 20 nt, Artificial Sequence
  HTT spacer sequence CTCN PAM
guccccuuuuacaggguggg

SEQ ID NO: 17296 - RNA, 20 nt, Artificial Sequence
  HTT spacer sequence CTCN PAM
caguccccuuuuacagggug

SEQ ID NO: 17297 - RNA, 20 nt, Artificial Sequence
  HTT spacer sequence CTCN PAM
gauguguuuucugugaggau

SEQ ID NO: 17298 - RNA, 20 nt, Artificial Sequence
  HTT spacer sequence CTCN PAM
cagaaaacacaucagagacc

SEQ ID NO: 17299 - RNA, 20 nt, Artificial Sequence
  HTT spacer sequence CTCN PAM
uccuggaaucaccuguuuuu

SEQ ID NO: 17300 - RNA, 20 nt, Artificial Sequence
  HTT spacer sequence CTCN PAM
uuccaaggguuucccugacu

SEQ ID NO: 17301 - RNA, 20 nt, Artificial Sequence
  HTT spacer sequence CTCN PAM
uucugaagccaccacuaauc

SEQ ID NO: 17302 - RNA, 20 nt, Artificial Sequence
  HTT spacer sequence CTCN PAM
cugcagcucauucugaagcc

SEQ ID NO: 17303 - RNA, 20 nt, Artificial Sequence
  HTT spacer sequence CTCN PAM
ccgcagagagagugaugaau

SEQ ID NO: 17304 - RNA, 20 nt, Artificial Sequence
  HTT spacer sequence CTCN PAM
gcagagagagugaugaaucc

SEQ ID NO: 17305 - RNA, 20 nt, Artificial Sequence
  HTT spacer sequence CTCN PAM
gcggagagcaaggcagacac

SEQ ID NO: 17306 - RNA, 20 nt, Artificial Sequence
  HTT spacer sequence CTCN PAM
cugcggagagcaaggcagac

SEQ ID NO: 17307 - RNA, 20 nt, Artificial Sequence
  HTT spacer sequence CTCN PAM
cucugcggagagcaaggcag

SEQ ID NO: 17308 - RNA, 20 nt, Artificial Sequence
  HTT spacer sequence CTCN PAM
ugagccucuguccaguuguu

SEQ ID NO: 17309 - RNA, 20 nt, Artificial Sequence
  HTT spacer sequence CTCN PAM
ugagaaggauucaucacucu

SEQ ID NO: 17310 - RNA, 20 nt, Artificial Sequence
  HTT spacer sequence CTCN PAM
guccaguuguuccucccucc

SEQ ID NO: 17311 - RNA, 20 nt, Artificial Sequence
  HTT spacer sequence CTCN PAM
cuccaccuggaagggacccu

SEQ ID NO: 17312 - RNA, 20 nt, Artificial Sequence
  HTT spacer sequence CTCN PAM
accuggaagggacccugggu

SEQ ID NO: 17313 - RNA, 20 nt, Artificial Sequence
  HTT spacer sequence CTCN PAM
uaacaucccagcggaacagg

SEQ ID NO: 17314 - RNA, 20 nt, Artificial Sequence
  HTT spacer sequence CTCN PAM
uccuccugccggcuuccugg

SEQ ID NO: 17315 - RNA, 20 nt, Artificial Sequence
  HTT spacer sequence CTCN PAM
ugccggcuuccuggccccuc

SEQ ID NO: 17316 - RNA, 20 nt, Artificial Sequence
  HTT spacer sequence CTCN PAM
uaugucugcuuccugacgcc

SEQ ID NO: 17317 - RNA, 20 nt, Artificial Sequence
  HTT spacer sequence CTCN PAM
ggaauugaauuuugccuuug

SEQ ID NO: 17318 - RNA, 20 nt, Artificial Sequence
  HTT spacer sequence CTCN PAM
caccuguaauccugugcacu

SEQ ID NO: 17319 - RNA, 20 nt, Artificial Sequence
  HTT spacer sequence CTCN PAM
agcaaucugcccaccuuggc

SEQ ID NO: 17320 - RNA, 20 nt, Artificial Sequence
  HTT spacer sequence CTCN PAM
ugggcucaagcaaucugccc

SEQ ID NO: 17321 - RNA, 20 nt, Artificial Sequence
  HTT spacer sequence CTCN PAM
aacuccugggcucaagcaau

SEQ ID NO: 17322 - RNA, 20 nt, Artificial Sequence
  HTT spacer sequence CTCN PAM
ggcuaaucucaaacuccugg

SEQ ID NO: 17323 - RNA, 20 nt, Artificial Sequence
  HTT spacer sequence CTCN PAM
cagcuacucaggaaccugag

SEQ ID NO: 17324 - RNA, 20 nt, Artificial Sequence
  HTT spacer sequence CTCN PAM
ggaaccugagacaggaggau

SEQ ID NO: 17325 - RNA, 20 nt, Artificial Sequence
  HTT spacer sequence CTCN PAM
gguuccugaguagcugggag

SEQ ID NO: 17326 - RNA, 20 nt, Artificial Sequence
  HTT spacer sequence CTCN PAM
ugucucagguuccugaguag

SEQ ID NO: 17327 - RNA, 20 nt, Artificial Sequence
  HTT spacer sequence CTCN PAM
auugauccuccugucucagg

SEQ ID NO: 17328 - RNA, 20 nt, Artificial Sequence
  HTT spacer sequence CTCN PAM
ggggcucaauugauccuccu

SEQ ID NO: 17329 - RNA, 20 nt, Artificial Sequence
  HTT spacer sequence CTCN PAM
agucuggucaaacagaguga

SEQ ID NO: 17330 - RNA, 20 nt, Artificial Sequence
  HTT spacer sequence CTCN PAM
guuugaccagacuggaguac

SEQ ID NO: 17331 - RNA, 20 nt, Artificial Sequence
  HTT spacer sequence CTCN PAM
cucuguuugaccagacugga

SEQ ID NO: 17332 - RNA, 20 nt, Artificial Sequence
  HTT spacer sequence CTCN PAM
uuuacacuuaacagccacac

SEQ ID NO: 17333 - RNA, 20 nt, Artificial Sequence
  HTT spacer sequence CTCN PAM
ugcuuccuucaugagggguc

SEQ ID NO: 17334 - RNA, 20 nt, Artificial Sequence
  HTT spacer sequence CTCN PAM
ugaaggaagcaggagggcac

SEQ ID NO: 17335 - RNA, 20 nt, Artificial Sequence
  HTT spacer sequence CTCN PAM
cucuguguacacuccauucu

SEQ ID NO: 17336 - RNA, 20 nt, Artificial Sequence
  HTT spacer sequence CTCN PAM
guguacacuccauucucauu

SEQ ID NO: 17337 - RNA, 20 nt, Artificial Sequence
  HTT spacer sequence CTCN PAM
auucucauugcccauggugg

SEQ ID NO: 17338 - RNA, 20 nt, Artificial Sequence
  HTT spacer sequence CTCN PAM
uugcccauggugguuuguuu

SEQ ID NO: 17339 - RNA, 20 nt, Artificial Sequence
  HTT spacer sequence CTCN PAM
uguuucucaagccauggcag

SEQ ID NO: 17340 - RNA, 20 nt, Artificial Sequence
  HTT spacer sequence CTCN PAM
agccauggcagccugccucu

SEQ ID NO: 17341 - RNA, 20 nt, Artificial Sequence
  HTT spacer sequence CTCN PAM
ugcccucuuuacuaaaaagg

SEQ ID NO: 17342 - RNA, 20 nt, Artificial Sequence
  HTT spacer sequence CTCN PAM
uuacuaaaaaggccuuugca

SEQ ID NO: 17343 - RNA, 20 nt, Artificial Sequence
  HTT spacer sequence CTCN PAM
gcaaaggccuuuuuaguaaa

SEQ ID NO: 17344 - RNA, 20 nt, Artificial Sequence
  HTT spacer sequence CTCN PAM
cucauccuaggcccuccagc

SEQ ID NO: 17345 - RNA, 20 nt, Artificial Sequence
  HTT spacer sequence CTCN PAM
cauccuaggcccuccagcuu

SEQ ID NO: 17346 - RNA, 20 nt, Artificial Sequence
  HTT spacer sequence CTCN PAM
uccuaggcccuccagcuuga

SEQ ID NO: 17347 - RNA, 20 nt, Artificial Sequence
  HTT spacer sequence CTCN PAM
agcuugauucuguggagcug

SEQ ID NO: 17348 - RNA, 20 nt, Artificial Sequence
  HTT spacer sequence CTCN PAM
acagaaucaagcuggagggc

SEQ ID NO: 17349 - RNA, 20 nt, Artificial Sequence
  HTT spacer sequence CTCN PAM
ugucacucaguagcuugugg

SEQ ID NO: 17350 - RNA, 20 nt, Artificial Sequence
  HTT spacer sequence CTCN PAM
guagcuuguggggucuucuc

SEQ ID NO: 17351 - RNA, 20 nt, Artificial Sequence
  HTT spacer sequence CTCN PAM
gucuagccacuuaauugauu

SEQ ID NO: 17352 - RNA, 20 nt, Artificial Sequence
  HTT spacer sequence CTCN PAM
aguugcuguccauggucucu

SEQ ID NO: 17353 - RNA, 20 nt, Artificial Sequence
  HTT spacer sequence CTCN PAM
aggaacacaaucaauuaagu

SEQ ID NO: 17354 - RNA, 20 nt, Artificial Sequence
  HTT spacer sequence CTCN PAM
cguuacuguuuucucugugu

SEQ ID NO: 17355 - RNA, 20 nt, Artificial Sequence
  HTT spacer sequence CTCN PAM
uuacuguuuucucuguguuu

SEQ ID NO: 17356 - RNA, 20 nt, Artificial Sequence
  HTT spacer sequence CTCN PAM
guguuucugccucucuccuu

SEQ ID NO: 17357 - RNA, 20 nt, Artificial Sequence
  HTT spacer sequence CTCN PAM
cuccuuggccuugguagguc

SEQ ID NO: 17358 - RNA, 20 nt, Artificial Sequence
  HTT spacer sequence CTCN PAM
ccuuggccuugguaggucca

SEQ ID NO: 17359 - RNA, 20 nt, Artificial Sequence
  HTT spacer sequence CTCN PAM
uuggccuugguagguccauc

SEQ ID NO: 17360 - RNA, 20 nt, Artificial Sequence
  HTT spacer sequence CTCN PAM
cauggacaacuuucucuugc

SEQ ID NO: 17361 - RNA, 20 nt, Artificial Sequence
  HTT spacer sequence CTCN PAM
uggacaacuuucucuugcug

SEQ ID NO: 17362 - RNA, 20 nt, Artificial Sequence
  HTT spacer sequence CTCN PAM
ugcugguccuuguaguccug

SEQ ID NO: 17363 - RNA, 20 nt, Artificial Sequence
  HTT spacer sequence CTCN PAM
acacgggacuuguccugcca

SEQ ID NO: 17364 - RNA, 20 nt, Artificial Sequence
  HTT spacer sequence CTCN PAM
gacuugcacuuaaaauugaa

SEQ ID NO: 17365 - RNA, 20 nt, Artificial Sequence
  HTT spacer sequence CTCN PAM
ccagggccucuucuuguuaa

SEQ ID NO: 17366 - RNA, 20 nt, Artificial Sequence
  HTT spacer sequence CTCN PAM
agggccucuucuuguuaauu

SEQ ID NO: 17367 - RNA, 20 nt, Artificial Sequence
  HTT spacer sequence CTCN PAM
ucuuguuaauuagaucauua

SEQ ID NO: 17368 - RNA, 20 nt, Artificial Sequence
  HTT spacer sequence CTCN PAM
ucccgcuaccccaggaaccc

SEQ ID NO: 17369 - RNA, 20 nt, Artificial Sequence
  HTT spacer sequence CTCN PAM
cgcuaccccaggaacccuaa

SEQ ID NO: 17370 - RNA, 20 nt, Artificial Sequence
  HTT spacer sequence CTCN PAM
uccucucuaucuacuaggag

SEQ ID NO: 17371 - RNA, 20 nt, Artificial Sequence
  HTT spacer sequence CTCN PAM
ucucuaucuacuaggaggug

SEQ ID NO: 17372 - RNA, 20 nt, Artificial Sequence
  HTT spacer sequence CTCN PAM
cuaucuacuaggagguggcc

SEQ ID NO: 17373 - RNA, 20 nt, Artificial Sequence
  HTT spacer sequence CTCN PAM
aucuacuaggagguggcccu

SEQ ID NO: 17374 - RNA, 20 nt, Artificial Sequence
  HTT spacer sequence CTCN PAM
uaguagauagagaggaggag

SEQ ID NO: 17375 - RNA, 20 nt, Artificial Sequence
  HTT spacer sequence CTCN PAM
gaguccgucucaucuuccac

SEQ ID NO: 17376 - RNA, 20 nt, Artificial Sequence
  HTT spacer sequence CTCN PAM
gagggccaccuccuaguaga

SEQ ID NO: 17377 - RNA, 20 nt, Artificial Sequence
  HTT spacer sequence CTCN PAM
ucuuccaccugaacuucccu

SEQ ID NO: 17378 - RNA, 20 nt, Artificial Sequence
  HTT spacer sequence CTCN PAM
agcagcugccaccccggggg

SEQ ID NO: 17379 - RNA, 20 nt, Artificial Sequence
  HTT spacer sequence CTCN PAM
gcccccgggguggcagcugc

SEQ ID NO: 17380 - RNA, 20 nt, Artificial Sequence
  HTT spacer sequence CTCN PAM
augccuugugcagugcugag

SEQ ID NO: 17381 - RNA, 20 nt, Artificial Sequence
  HTT spacer sequence CTCN PAM
gcacugcacaaggcauggag

SEQ ID NO: 17382 - RNA, 20 nt, Artificial Sequence
  HTT spacer sequence CTCN PAM
uguuugcuccuuauuacagc

SEQ ID NO: 17383 - RNA, 20 nt, Artificial Sequence
  HTT spacer sequence CTCN PAM
uuauuacagcccugcgaaca

SEQ ID NO: 17384 - RNA, 20 nt, Artificial Sequence
  HTT spacer sequence CTCN PAM
uaauuccaucuuacaccuaa

SEQ ID NO: 17385 - RNA, 20 nt, Artificial Sequence
  HTT spacer sequence CTCN PAM
gcuuccuuagguguaagaug

SEQ ID NO: 17386 - RNA, 20 nt, Artificial Sequence
  HTT spacer sequence CTCN PAM
acugucuacuaccuggguga

SEQ ID NO: 17387 - RNA, 20 nt, Artificial Sequence
  HTT spacer sequence CTCN PAM
gaaucagacugccugguuca

SEQ ID NO: 17388 - RNA, 20 nt, Artificial Sequence
  HTT spacer sequence CTCN PAM
gccaccuagaacacagcuug

SEQ ID NO: 17389 - RNA, 20 nt, Artificial Sequence
  HTT spacer sequence CTCN PAM
guggccuggcugcaucuucc

SEQ ID NO: 17390 - RNA, 20 nt, Artificial Sequence
  HTT spacer sequence CTCN PAM
ucacucagggggcccaugca

SEQ ID NO: 17391 - RNA, 20 nt, Artificial Sequence
  HTT spacer sequence CTCN PAM
gggggcccaugcaggaacag

SEQ ID NO: 17392 - RNA, 20 nt, Artificial Sequence
  HTT spacer sequence CTCN PAM
guuccugcaugggcccccug

SEQ ID NO: 17393 - RNA, 20 nt, Artificial Sequence
  HTT spacer sequence CTCN PAM
uccuucuguggggcccucug

SEQ ID NO: 17394 - RNA, 20 nt, Artificial Sequence
  HTT spacer sequence CTCN PAM
agcccauucugcacuggccu

SEQ ID NO: 17395 - RNA, 20 nt, Artificial Sequence
  HTT spacer sequence CTCN PAM
acacuugcuuccuggucagc

SEQ ID NO: 17396 - RNA, 20 nt, Artificial Sequence
  HTT spacer sequence CTCN PAM
agguuuccugggauuucucu

SEQ ID NO: 17397 - RNA, 20 nt, Artificial Sequence
  HTT spacer sequence CTCN PAM
uccagguuuccugggauuuc

SEQ ID NO: 17398 - RNA, 20 nt, Artificial Sequence
  HTT spacer sequence CTCN PAM
ggcuccuccagguuuccugg

SEQ ID NO: 17399 - RNA, 20 nt, Artificial Sequence
  HTT spacer sequence CTCN PAM
ucgucgugaccuggucugca

SEQ ID NO: 17400 - RNA, 20 nt, Artificial Sequence
  HTT spacer sequence CTCN PAM
ucgugaccuggucugcauuc

SEQ ID NO: 17401 - RNA, 20 nt, Artificial Sequence
  HTT spacer sequence CTCN PAM
gagugugcugcuucuguuag

SEQ ID NO: 17402 - RNA, 20 nt, Artificial Sequence
  HTT spacer sequence CTCN PAM
gagaaugcagaccaggucac

SEQ ID NO: 17403 - RNA, 20 nt, Artificial Sequence
  HTT spacer sequence CTCN PAM
cuuccuuggucucagguuau

SEQ ID NO: 17404 - RNA, 20 nt, Artificial Sequence
  HTT spacer sequence CTCN PAM
gguuauaguuuaaggcauug

SEQ ID NO: 17405 - RNA, 20 nt, Artificial Sequence
  HTT spacer sequence CTCN PAM
acaaugccuuaaacuauaac

SEQ ID NO: 17406 - RNA, 20 nt, Artificial Sequence
  HTT spacer sequence CTCN PAM
guuuuuaccuguuuuaggac

SEQ ID NO: 17407 - RNA, 20 nt, Artificial Sequence
  HTT spacer sequence CTCN PAM
aaaaaaaaaaaaaaaaaaaa

SEQ ID NO: 17408 - RNA, 20 nt, Artificial Sequence
  HTT spacer sequence CTCN PAM
aucucaaaaaaaaaaaaaaa

SEQ ID NO: 17409 - RNA, 20 nt, Artificial Sequence
  HTT spacer sequence CTCN PAM
cuccauugcccaggcuagag

SEQ ID NO: 17410 - RNA, 20 nt, Artificial Sequence
  HTT spacer sequence CTCN PAM
auugcccaggcuagagugca

SEQ ID NO: 17411 - RNA, 20 nt, Artificial Sequence
  HTT spacer sequence CTCN PAM
agccugggcaauggagcgag

SEQ ID NO: 17412 - RNA, 20 nt, Artificial Sequence
  HTT spacer sequence CTCN PAM
uggguucaagcaauucuugu

SEQ ID NO: 17413 - RNA, 20 nt, Artificial Sequence
  HTT spacer sequence CTCN PAM
cgccucccaaauaccuggga

SEQ ID NO: 17414 - RNA, 20 nt, Artificial Sequence
  HTT spacer sequence CTCN PAM
caaauaccugggauuacagg

SEQ ID NO: 17415 - RNA, 20 nt, Artificial Sequence
  HTT spacer sequence CTCN PAM
gccaauuuuuguauuuuuag

SEQ ID NO: 17416 - RNA, 20 nt, Artificial Sequence
  HTT spacer sequence CTCN PAM
acuaaaaauacaaaaauugg

SEQ ID NO: 17417 - RNA, 20 nt, Artificial Sequence
  HTT spacer sequence CTCN PAM
aacuccugaccucaagugau

SEQ ID NO: 17418 - RNA, 20 nt, Artificial Sequence
  HTT spacer sequence CTCN PAM
ugaccucaagugaucugccc

SEQ ID NO: 17419 - RNA, 20 nt, Artificial Sequence
  HTT spacer sequence CTCN PAM
agugaucugcccaccuuggc

SEQ ID NO: 17420 - RNA, 20 nt, Artificial Sequence
  HTT spacer sequence CTCN PAM
caaagugcugugauuauagg

SEQ ID NO: 17421 - RNA, 20 nt, Artificial Sequence
  HTT spacer sequence CTCN PAM
cgccuauaaucacagcacuu

SEQ ID NO: 17422 - RNA, 20 nt, Artificial Sequence
  HTT spacer sequence CTCN PAM
cccagaucugggcugccugg

SEQ ID NO: 17423 - RNA, 20 nt, Artificial Sequence
  HTT spacer sequence CTCN PAM
cccccagaucugggcugccu

SEQ ID NO: 17424 - RNA, 20 nt, Artificial Sequence
  HTT spacer sequence CTCN PAM
guuucccaagucuugcugcc

SEQ ID NO: 17425 - RNA, 20 nt, Artificial Sequence
  HTT spacer sequence CTCN PAM
cccugcugggcuuugcagcc

SEQ ID NO: 17426 - RNA, 20 nt, Artificial Sequence
  HTT spacer sequence CTCN PAM
cugcugggcuuugcagccug

SEQ ID NO: 17427 - RNA, 20 nt, Artificial Sequence
  HTT spacer sequence CTCN PAM
gugccuuugaccuuguuuau

SEQ ID NO: 17428 - RNA, 20 nt, Artificial Sequence
  HTT spacer sequence CTCN PAM
uuuggauaaacaaggucaaa

SEQ ID NO: 17429 - RNA, 20 nt, Artificial Sequence
  HTT spacer sequence CTCN PAM
ccuuuggauaaacaagguca

SEQ ID NO: 17430 - RNA, 20 nt, Artificial Sequence
  HTT spacer sequence CTCN PAM
aggaaucaugacuucauucu

SEQ ID NO: 17431 - RNA, 20 nt, Artificial Sequence
  HTT spacer sequence CTCN PAM
gggcuccaggaaucaugacu

SEQ ID NO: 17432 - RNA, 20 nt, Artificial Sequence
  HTT spacer sequence CTCN PAM
acagcauccuucucagggcu

SEQ ID NO: 17433 - RNA, 20 nt, Artificial Sequence
  HTT spacer sequence CTCN PAM
gcuagauucuaccggcaaau

SEQ ID NO: 17434 - RNA, 20 nt, Artificial Sequence
  HTT spacer sequence CTCN PAM
gcaacacacucagcuagauu

SEQ ID NO: 17435 - RNA, 20 nt, Artificial Sequence
  HTT spacer sequence CTCN PAM
ccacacacaaugcuggcacc

SEQ ID NO: 17436 - RNA, 20 nt, Artificial Sequence
  HTT spacer sequence CTCN PAM
auggccgggcacagaggcca

SEQ ID NO: 17437 - RNA, 20 nt, Artificial Sequence
  HTT spacer sequence CTCN PAM
gugcccggccauggagcauc

SEQ ID NO: 17438 - RNA, 20 nt, Artificial Sequence
  HTT spacer sequence CTCN PAM
ugacaccugacagccaagug

SEQ ID NO: 17439 - RNA, 20 nt, Artificial Sequence
  HTT spacer sequence CTCN PAM
gcaggcuccugacaccugac

SEQ ID NO: 17440 - RNA, 20 nt, Artificial Sequence
  HTT spacer sequence CTCN PAM
gugugcccucugcaggcucc

SEQ ID NO: 17441 - RNA, 20 nt, Artificial Sequence
  HTT spacer sequence CTCN PAM
ccuggccuccuucagcauuu

SEQ ID NO: 17442 - RNA, 20 nt, Artificial Sequence
  HTT spacer sequence CTCN PAM
uucagcauuucugucccuca

SEQ ID NO: 17443 - RNA, 20 nt, Artificial Sequence
  HTT spacer sequence CTCN PAM
guccuuagcaagcccaggag

SEQ ID NO: 17444 - RNA, 20 nt, Artificial Sequence
  HTT spacer sequence CTCN PAM
ugggcuugcuaaggacugag

SEQ ID NO: 17445 - RNA, 20 nt, Artificial Sequence
  HTT spacer sequence CTCN PAM
acagcuccugggcuugcuaa

SEQ ID NO: 17446 - RNA, 20 nt, Artificial Sequence
  HTT spacer sequence CTCN PAM
gcaccugccaaacucaacag

SEQ ID NO: 17447 - RNA, 20 nt, Artificial Sequence
  HTT spacer sequence CTCN PAM
guccugugggggccccgcug

SEQ ID NO: 17448 - RNA, 20 nt, Artificial Sequence
  HTT spacer sequence CTCN PAM
ggccacagcggggcccccac

SEQ ID NO: 17449 - RNA, 20 nt, Artificial Sequence
  HTT spacer sequence CTCN PAM
aaucacugcacucgggccac

SEQ ID NO: 17450 - RNA, 20 nt, Artificial Sequence
  HTT spacer sequence CTCN PAM
gcgccucgaaucacugcacu

SEQ ID NO: 17451 - RNA, 20 nt, Artificial Sequence
  HTT spacer sequence CTCN PAM
uucuccaggagcuguguuca

SEQ ID NO: 17452 - RNA, 20 nt, Artificial Sequence
  HTT spacer sequence CTCN PAM
aggagcuguguucagacuuu

SEQ ID NO: 17453 - RNA, 20 nt, Artificial Sequence
  HTT spacer sequence CTCN PAM
uggagaaggagucagggaac

SEQ ID NO: 17454 - RNA, 20 nt, Artificial Sequence
  HTT spacer sequence CTCN PAM
uggcuuggagcuccuggagg

SEQ ID NO: 17455 - RNA, 20 nt, Artificial Sequence
  HTT spacer sequence CTCN PAM
aagccaagagcugcgaaagu

SEQ ID NO: 17456 - RNA, 20 nt, Artificial Sequence
  HTT spacer sequence CTCN PAM
uggagggcuuggcauugccg

SEQ ID NO: 17457 - RNA, 20 nt, Artificial Sequence
  HTT spacer sequence CTCN PAM
aggagcuccaagccaagagc

SEQ ID NO: 17458 - RNA, 20 nt, Artificial Sequence
  HTT spacer sequence CTCN PAM
acauuggucggcaaugccaa

SEQ ID NO: 17459 - RNA, 20 nt, Artificial Sequence
  HTT spacer sequence CTCN PAM
cugucgaccuccacauuggu

SEQ ID NO: 17460 - RNA, 20 nt, Artificial Sequence
  HTT spacer sequence CTCN PAM
cacugucgaccuccacauug

SEQ ID NO: 17461 - RNA, 20 nt, Artificial Sequence
  HTT spacer sequence CTCN PAM
cucacugucgaccuccacau

SEQ ID NO: 17462 - RNA, 20 nt, Artificial Sequence
  HTT spacer sequence CTCN PAM
ucucucacugucgaccucca

SEQ ID NO: 17463 - RNA, 20 nt, Artificial Sequence
  HTT spacer sequence CTCN PAM
cgccuuaaucccagcacuuu

SEQ ID NO: 17464 - RNA, 20 nt, Artificial Sequence
  HTT spacer sequence CTCN PAM
caaagugcugggauuaaggc

SEQ ID NO: 17465 - RNA, 20 nt, Artificial Sequence
  HTT spacer sequence CTCN PAM
gccucccaaagugcugggau

SEQ ID NO: 17466 - RNA, 20 nt, Artificial Sequence
  HTT spacer sequence CTCN PAM
ugauccacccgccucagccu

SEQ ID NO: 17467 - RNA, 20 nt, Artificial Sequence
  HTT spacer sequence CTCN PAM
ggaguucaagaccagccugg

SEQ ID NO: 17468 - RNA, 20 nt, Artificial Sequence
  HTT spacer sequence CTCN PAM
ugagcucgugauccacccgc

SEQ ID NO: 17469 - RNA, 20 nt, Artificial Sequence
  HTT spacer sequence CTCN PAM
auacuaaaaauacaaauauu

SEQ ID NO: 17470 - RNA, 20 nt, Artificial Sequence
  HTT spacer sequence CTCN PAM
caaguagcuaggauuacagg

SEQ ID NO: 17471 - RNA, 20 nt, Artificial Sequence
  HTT spacer sequence CTCN PAM
gccucccaaguagcuaggau

SEQ ID NO: 17472 - RNA, 20 nt, Artificial Sequence
  HTT spacer sequence CTCN PAM
ugccucagccucccaaguag

SEQ ID NO: 17473 - RNA, 20 nt, Artificial Sequence
  HTT spacer sequence CTCN PAM
accuuccgguuucaagcugu

SEQ ID NO: 17474 - RNA, 20 nt, Artificial Sequence
  HTT spacer sequence CTCN PAM
cugcaaacuccaccuuccgg

SEQ ID NO: 17475 - RNA, 20 nt, Artificial Sequence
  HTT spacer sequence CTCN PAM
aaccugggcaacaagagcaa

SEQ ID NO: 17476 - RNA, 20 nt, Artificial Sequence
  HTT spacer sequence CTCN PAM
uguugcccagguuggagugc

SEQ ID NO: 17477 - RNA, 20 nt, Artificial Sequence
  HTT spacer sequence CTCN PAM
aucucaaaaaaaaaaaaaaa

SEQ ID NO: 17478 - RNA, 20 nt, Artificial Sequence
  HTT spacer sequence CTCN PAM
aaaaaaaaaaaaaaaguagg

SEQ ID NO: 17479 - RNA, 20 nt, Artificial Sequence
  HTT spacer sequence CTCN PAM
cauacuuacguauucagaac

SEQ ID NO: 17480 - RNA, 20 nt, Artificial Sequence
  HTT spacer sequence CTCN PAM
gccuguuucauuuuuaugua

SEQ ID NO: 17481 - RNA, 20 nt, Artificial Sequence
  HTT spacer sequence CTCN PAM
guccagugccacauggcuac

SEQ ID NO: 17482 - RNA, 20 nt, Artificial Sequence
  HTT spacer sequence CTCN PAM
uuaacuuuguuucuaggaau

SEQ ID NO: 17483 - RNA, 20 nt, Artificial Sequence
  HTT spacer sequence CTCN PAM
ggaacauuccuagaaacaaa

SEQ ID NO: 17484 - RNA, 20 nt, Artificial Sequence
  HTT spacer sequence CTCN PAM
uuccaugaucaccacccacc

SEQ ID NO: 17485 - RNA, 20 nt, Artificial Sequence
  HTT spacer sequence CTCN PAM
ggugucagauacugcugcuu

SEQ ID NO: 17486 - RNA, 20 nt, Artificial Sequence
  HTT spacer sequence CTCN PAM
ggacagggugcugggcuggc

SEQ ID NO: 17487 - RNA, 20 nt, Artificial Sequence
  HTT spacer sequence CTCN PAM
caguaaccugagcuuuggcc

SEQ ID NO: 17488 - RNA, 20 nt, Artificial Sequence
  HTT spacer sequence CTCN PAM
gguuacugggagucucagga

SEQ ID NO: 17489 - RNA, 20 nt, Artificial Sequence
  HTT spacer sequence CTCN PAM
caaaaaauggaaaaugaaaa

SEQ ID NO: 17490 - RNA, 20 nt, Artificial Sequence
  HTT spacer sequence CTCN PAM
guggcuccuacuaaguucua

SEQ ID NO: 17491 - RNA, 20 nt, Artificial Sequence
  HTT spacer sequence CTCN PAM
uacuaaguucuaguccuuaa

SEQ ID NO: 17492 - RNA, 20 nt, Artificial Sequence
  HTT spacer sequence CTCN PAM
uuauaaaguaaaugugguuc

SEQ ID NO: 17493 - RNA, 20 nt, Artificial Sequence
  HTT spacer sequence CTCN PAM
uggaaauguuauuuuaccau

SEQ ID NO: 17494 - RNA, 20 nt, Artificial Sequence
  HTT spacer sequence CTCN PAM
uuauggguggcccucuuuuu

SEQ ID NO: 17495 - RNA, 20 nt, Artificial Sequence
  HTT spacer sequence CTCN PAM
uuuugcaaaagguuuucagg

SEQ ID NO: 17496 - RNA, 20 nt, Artificial Sequence
  HTT spacer sequence CTCN PAM
auuucuaggugcuccaacac

SEQ ID NO: 17497 - RNA, 20 nt, Artificial Sequence
  HTT spacer sequence CTCN PAM
aacacuccauuauuuguaua

SEQ ID NO: 17498 - RNA, 20 nt, Artificial Sequence
  HTT spacer sequence CTCN PAM
auuauuuguauauguaugga

SEQ ID NO: 17499 - RNA, 20 nt, Artificial Sequence
  HTT spacer sequence CTCN PAM
gcacaguauuucuggaaggc

SEQ ID NO: 17500 - RNA, 20 nt, Artificial Sequence
  HTT spacer sequence CTCN PAM
agaucccacgcuggggaaaa

SEQ ID NO: 17501 - RNA, 20 nt, Artificial Sequence
  HTT spacer sequence CTCN PAM
agaacuucuuuuccccagcg

SEQ ID NO: 17502 - RNA, 20 nt, Artificial Sequence
  HTT spacer sequence CTCN PAM
uuugucuccagaacuucuuu

SEQ ID NO: 17503 - RNA, 20 nt, Artificial Sequence
  HTT spacer sequence CTCN PAM
cugcucaguauggauacugg

SEQ ID NO: 17504 - RNA, 20 nt, Artificial Sequence
  HTT spacer sequence CTCN PAM
gcucaguauggauacuggac

SEQ ID NO: 17505 - RNA, 20 nt, Artificial Sequence
  HTT spacer sequence CTCN PAM
guauggauacuggaccuugu

SEQ ID NO: 17506 - RNA, 20 nt, Artificial Sequence
  HTT spacer sequence CTCN PAM
caguagggccaguucauggc

SEQ ID NO: 17507 - RNA, 20 nt, Artificial Sequence
  HTT spacer sequence CTCN PAM
gcuggaaaguccacuguugg

SEQ ID NO: 17508 - RNA, 20 nt, Artificial Sequence
  HTT spacer sequence CTCN PAM
caacaguggacuuuccagcu

SEQ ID NO: 17509 - RNA, 20 nt, Artificial Sequence
  HTT spacer sequence CTCN PAM
gugccguauguagugggguc

SEQ ID NO: 17510 - RNA, 20 nt, Artificial Sequence
  HTT spacer sequence CTCN PAM
aacagaaugaccagacccca

SEQ ID NO: 17511 - RNA, 20 nt, Artificial Sequence
  HTT spacer sequence CTCN PAM
uccaacagaaugaccagacc

SEQ ID NO: 17512 - RNA, 20 nt, Artificial Sequence
  HTT spacer sequence CTCN PAM
gucaucguaacaggccuaag

SEQ ID NO: 17513 - RNA, 20 nt, Artificial Sequence
  HTT spacer sequence CTCN PAM
ugcccccacagugcucaguc

SEQ ID NO: 17514 - RNA, 20 nt, Artificial Sequence
  HTT spacer sequence CTCN PAM
uaguucugugcugcuuuaac

SEQ ID NO: 17515 - RNA, 20 nt, Artificial Sequence
  HTT spacer sequence CTCN PAM
uuuucugacagaugggccug

SEQ ID NO: 17516 - RNA, 20 nt, Artificial Sequence
  HTT spacer sequence CTCN PAM
gauguuauaucagaaagcuc

SEQ ID NO: 17517 - RNA, 20 nt, Artificial Sequence
  HTT spacer sequence CTCN PAM
gaaucugggaauuguguccc

SEQ ID NO: 17518 - RNA, 20 nt, Artificial Sequence
  HTT spacer sequence CTCN PAM
aauucaggggacacaauucc

SEQ ID NO: 17519 - RNA, 20 nt, Artificial Sequence
  HTT spacer sequence CTCN PAM
ucaucuaagcauuucuguua

SEQ ID NO: 17520 - RNA, 20 nt, Artificial Sequence
  HTT spacer sequence CTCN PAM
gagggcaaacuacagcuuuu

SEQ ID NO: 17521 - RNA, 20 nt, Artificial Sequence
  HTT spacer sequence CTCN PAM
gagggcugaaugaagacgcu

SEQ ID NO: 17522 - RNA, 20 nt, Artificial Sequence
  HTT spacer sequence CTCN PAM
gauccaguuuuccuuuauaa

SEQ ID NO: 17523 - RNA, 20 nt, Artificial Sequence
  HTT spacer sequence CTCN PAM
ugccuauaaucccagcaccu

SEQ ID NO: 17524 - RNA, 20 nt, Artificial Sequence
  HTT spacer sequence CTCN PAM
ggugaucugcccgccuuggc

SEQ ID NO: 17525 - RNA, 20 nt, Artificial Sequence
  HTT spacer sequence CTCN PAM
aaguccuggccucaggugau

SEQ ID NO: 17526 - RNA, 20 nt, Artificial Sequence
  HTT spacer sequence CTCN PAM
acugaaaauaacaaaaauua

SEQ ID NO: 17527 - RNA, 20 nt, Artificial Sequence
  HTT spacer sequence CTCN PAM
gcuaauuuuuguuauuuuca

SEQ ID NO: 17528 - RNA, 20 nt, Artificial Sequence
  HTT spacer sequence CTCN PAM
gaaggcugaggcgggagaau

SEQ ID NO: 17529 - RNA, 20 nt, Artificial Sequence
  HTT spacer sequence CTCN PAM
gccuucugaguagcagggac

SEQ ID NO: 17530 - RNA, 20 nt, Artificial Sequence
  HTT spacer sequence CTCN PAM
cgccucagccuucugaguag

SEQ ID NO: 17531 - RNA, 20 nt, Artificial Sequence
  HTT spacer sequence CTCN PAM
uagguucaagcgauucuccc

SEQ ID NO: 17532 - RNA, 20 nt, Artificial Sequence
  HTT spacer sequence CTCN PAM
cugcaaccuuuuccuccuag

SEQ ID NO: 17533 - RNA, 20 nt, Artificial Sequence
  HTT spacer sequence CTCN PAM
gcucacugcaaccuuuuccu

SEQ ID NO: 17534 - RNA, 20 nt, Artificial Sequence
  HTT spacer sequence CTCN PAM
agccugggugacagagugag

SEQ ID NO: 17535 - RNA, 20 nt, Artificial Sequence
  HTT spacer sequence CTCN PAM
gucacccaggcuagagugca

SEQ ID NO: 17536 - RNA, 20 nt, Artificial Sequence
  HTT spacer sequence CTCN PAM
cucugucacccaggcuagag

SEQ ID NO: 17537 - RNA, 20 nt, Artificial Sequence
  HTT spacer sequence CTCN PAM
aucucaaaaaaaaaaaaaaa

SEQ ID NO: 17538 - RNA, 20 nt, Artificial Sequence
  HTT spacer sequence CTCN PAM
aaaaaaaaaaaaaaaaaaaa

SEQ ID NO: 17539 - RNA, 20 nt, Artificial Sequence
  HTT spacer sequence CTCN PAM
caugcuuguuacauauuauc

SEQ ID NO: 17540 - RNA, 20 nt, Artificial Sequence
  HTT spacer sequence CTCN PAM
augggcaucuuggacacuua

SEQ ID NO: 17541 - RNA, 20 nt, Artificial Sequence
  HTT spacer sequence CTCN PAM
cuaugggcaucuuggacacu

SEQ ID NO: 17542 - RNA, 20 nt, Artificial Sequence
  HTT spacer sequence CTCN PAM
gcucucuaugggcaucuugg

SEQ ID NO: 17543 - RNA, 20 nt, Artificial Sequence
  HTT spacer sequence CTCN PAM
uagcacuguguuuuuccagc

SEQ ID NO: 17544 - RNA, 20 nt, Artificial Sequence
  HTT spacer sequence CTCN PAM
ucccccaccacccacagcug

SEQ ID NO: 17545 - RNA, 20 nt, Artificial Sequence
  HTT spacer sequence CTCN PAM
uggaaauaaaaagauacuca

SEQ ID NO: 17546 - RNA, 20 nt, Artificial Sequence
  HTT spacer sequence CTCN PAM
ucucauggaaauaaaaagau

SEQ ID NO: 17547 - RNA, 20 nt, Artificial Sequence
  HTT spacer sequence CTCN PAM
uuuuuuagccauagacucag

SEQ ID NO: 17548 - RNA, 20 nt, Artificial Sequence
  HTT spacer sequence CTCN PAM
gcagccauaaaauugcugua

SEQ ID NO: 17549 - RNA, 20 nt, Artificial Sequence
  HTT spacer sequence CTCN PAM
ugacccucucucgguuugug

SEQ ID NO: 17550 - RNA, 20 nt, Artificial Sequence
  HTT spacer sequence CTCN PAM
cucgguuugugugcaucucc

SEQ ID NO: 17551 - RNA, 20 nt, Artificial Sequence
  HTT spacer sequence CTCN PAM
cgguuugugugcaucuccuc

SEQ ID NO: 17552 - RNA, 20 nt, Artificial Sequence
  HTT spacer sequence CTCN PAM
guuugugugcaucuccucuc

SEQ ID NO: 17553 - RNA, 20 nt, Artificial Sequence
  HTT spacer sequence CTCN PAM
ucucaggcuggcucccagau

SEQ ID NO: 17554 - RNA, 20 nt, Artificial Sequence
  HTT spacer sequence CTCN PAM
caggcuggcucccagauggg

SEQ ID NO: 17555 - RNA, 20 nt, Artificial Sequence
  HTT spacer sequence CTCN PAM
ggcuggcucccagaugggag

SEQ ID NO: 17556 - RNA, 20 nt, Artificial Sequence
  HTT spacer sequence CTCN PAM
cagaugggagcuggcuccag

SEQ ID NO: 17557 - RNA, 20 nt, Artificial Sequence
  HTT spacer sequence CTCN PAM
caucugggagccagccugag

SEQ ID NO: 17558 - RNA, 20 nt, Artificial Sequence
  HTT spacer sequence CTCN PAM
aggcgacacugggugcucug

SEQ ID NO: 17559 - RNA, 20 nt, Artificial Sequence
  HTT spacer sequence CTCN PAM
gcuccaggagguccuuaugu

SEQ ID NO: 17560 - RNA, 20 nt, Artificial Sequence
  HTT spacer sequence CTCN PAM
aggagguccuuauguggguc

SEQ ID NO: 17561 - RNA, 20 nt, Artificial Sequence
  HTT spacer sequence CTCN PAM
uggagcagagcacccagugu

SEQ ID NO: 17562 - RNA, 20 nt, Artificial Sequence
  HTT spacer sequence CTCN PAM
cuuauggacucugucacugu

SEQ ID NO: 17563 - RNA, 20 nt, Artificial Sequence
  HTT spacer sequence CTCN PAM
uauggacucugucacugugg

SEQ ID NO: 17564 - RNA, 20 nt, Artificial Sequence
  HTT spacer sequence CTCN PAM
gucacuguggguuuaugauu

SEQ ID NO: 17565 - RNA, 20 nt, Artificial Sequence
  HTT spacer sequence CTCN PAM
caaucugucuuaccucuugg

SEQ ID NO: 17566 - RNA, 20 nt, Artificial Sequence
  HTT spacer sequence CTCN PAM
aucugucuuaccucuuggug

SEQ ID NO: 17567 - RNA, 20 nt, Artificial Sequence
  HTT spacer sequence CTCN PAM
uggugaacuguuagaguccu

SEQ ID NO: 17568 - RNA, 20 nt, Artificial Sequence
  HTT spacer sequence CTCN PAM
aacaguucaccaagagguaa

SEQ ID NO: 17569 - RNA, 20 nt, Artificial Sequence
  HTT spacer sequence CTCN PAM
ucuuguucugagucacccua

SEQ ID NO: 17570 - RNA, 20 nt, Artificial Sequence
  HTT spacer sequence CTCN PAM
gaacaagaugagcugggaag

SEQ ID NO: 17571 - RNA, 20 nt, Artificial Sequence
  HTT spacer sequence CTCN PAM
ggccauacaccgcccgguac

SEQ ID NO: 17572 - RNA, 20 nt, Artificial Sequence
  HTT spacer sequence CTCN PAM
aauucagccccaauuuguag

SEQ ID NO: 17573 - RNA, 20 nt, Artificial Sequence
  HTT spacer sequence CTCN PAM
uauuugaauugcaaauacug

SEQ ID NO: 17574 - RNA, 20 nt, Artificial Sequence
  HTT spacer sequence CTCN PAM
ucucuuucagaggcucauua

SEQ ID NO: 17575 - RNA, 20 nt, Artificial Sequence
  HTT spacer sequence CTCN PAM
uucagaggcucauuacccua

SEQ ID NO: 17576 - RNA, 20 nt, Artificial Sequence
  HTT spacer sequence CTCN PAM
gaaagagaagaggcaguauu

SEQ ID NO: 17577 - RNA, 20 nt, Artificial Sequence
  HTT spacer sequence CTCN PAM
uuacccuauagcuguauuau

SEQ ID NO: 17578 - RNA, 20 nt, Artificial Sequence
  HTT spacer sequence CTCN PAM
agcuguaauugugcacuuug

SEQ ID NO: 17579 - RNA, 20 nt, Artificial Sequence
  HTT spacer sequence CTCN PAM
gugggccguccugccagcgc

SEQ ID NO: 17580 - RNA, 20 nt, Artificial Sequence
  HTT spacer sequence CTCN PAM
cccaaccacaucaagauaua

SEQ ID NO: 17581 - RNA, 20 nt, Artificial Sequence
  HTT spacer sequence CTCN PAM
auaucuugaugugguugggg

SEQ ID NO: 17582 - RNA, 20 nt, Artificial Sequence
  HTT spacer sequence CTCN PAM
ucuauaucuugaugugguug

SEQ ID NO: 17583 - RNA, 20 nt, Artificial Sequence
  HTT spacer sequence CTCN PAM
uccucugccacauccugccc

SEQ ID NO: 17584 - RNA, 20 nt, Artificial Sequence
  HTT spacer sequence CTCN PAM
gccacauccugccccucccc

SEQ ID NO: 17585 - RNA, 20 nt, Artificial Sequence
  HTT spacer sequence CTCN PAM
ccaggucuaaccaccaaucc

SEQ ID NO: 17586 - RNA, 20 nt, Artificial Sequence
  HTT spacer sequence CTCN PAM
gucccucuguucagcccauu

SEQ ID NO: 17587 - RNA, 20 nt, Artificial Sequence
  HTT spacer sequence CTCN PAM
guucagcccauugcagaagg

SEQ ID NO: 17588 - RNA, 20 nt, Artificial Sequence
  HTT spacer sequence CTCN PAM
ugccuguaaucccaguauuu

SEQ ID NO: 17589 - RNA, 20 nt, Artificial Sequence
  HTT spacer sequence CTCN PAM
aaauacugggauuacaggca

SEQ ID NO: 17590 - RNA, 20 nt, Artificial Sequence
  HTT spacer sequence CTCN PAM
caaaauacugggauuacagg

SEQ ID NO: 17591 - RNA, 20 nt, Artificial Sequence
  HTT spacer sequence CTCN PAM
cacuucagccucucaaaaua

SEQ ID NO: 17592 - RNA, 20 nt, Artificial Sequence
  HTT spacer sequence CTCN PAM
agucauccucccacuucagc

SEQ ID NO: 17593 - RNA, 20 nt, Artificial Sequence
  HTT spacer sequence CTCN PAM
cagccucaagucauccuccc

SEQ ID NO: 17594 - RNA, 20 nt, Artificial Sequence
  HTT spacer sequence CTCN PAM
agaaaaaaaaaauuuaaaaa

SEQ ID NO: 17595 - RNA, 20 nt, Artificial Sequence
  HTT spacer sequence CTCN PAM
caagcagcugaacuacaggg

SEQ ID NO: 17596 - RNA, 20 nt, Artificial Sequence
  HTT spacer sequence CTCN PAM
gccucccaagcagcugaacu

SEQ ID NO: 17597 - RNA, 20 nt, Artificial Sequence
  HTT spacer sequence CTCN PAM
ugccucagccucccaagcag

SEQ ID NO: 17598 - RNA, 20 nt, Artificial Sequence
  HTT spacer sequence CTCN PAM
agugauccuccugccucagc

SEQ ID NO: 17599 - RNA, 20 nt, Artificial Sequence
  HTT spacer sequence CTCN PAM
ggaguuagagguuacaguga

SEQ ID NO: 17600 - RNA, 20 nt, Artificial Sequence
  HTT spacer sequence CTCN PAM
ugagcucaagugauccuccu

SEQ ID NO: 17601 - RNA, 20 nt, Artificial Sequence
  HTT spacer sequence CTCN PAM
aacuccugagcucaagugau

SEQ ID NO: 17602 - RNA, 20 nt, Artificial Sequence
  HTT spacer sequence CTCN PAM
cuguaaccucuaacuccuga

SEQ ID NO: 17603 - RNA, 20 nt, Artificial Sequence
  HTT spacer sequence CTCN PAM
agccuaggugacacagcaag

SEQ ID NO: 17604 - RNA, 20 nt, Artificial Sequence
  HTT spacer sequence CTCN PAM
ggggaaaaaagaaagaaacg

SEQ ID NO: 17605 - RNA, 20 nt, Artificial Sequence
  HTT spacer sequence CTCN PAM
gaaggcugcacaccgcgugg

SEQ ID NO: 17606 - RNA, 20 nt, Artificial Sequence
  HTT spacer sequence CTCN PAM
ccgaaaggggccagacucag

SEQ ID NO: 17607 - RNA, 20 nt, Artificial Sequence
  HTT spacer sequence CTCN PAM
cuccuugcaacugcugagca

SEQ ID NO: 17608 - RNA, 20 nt, Artificial Sequence
  HTT spacer sequence CTCN PAM
uugcaacugcugagcauugu

SEQ ID NO: 17609 - RNA, 20 nt, Artificial Sequence
  HTT spacer sequence CTCN PAM
gcaguugcaaggagcgagcc

SEQ ID NO: 17610 - RNA, 20 nt, Artificial Sequence
  HTT spacer sequence CTCN PAM
guuucccaacuggugaagug

SEQ ID NO: 17611 - RNA, 20 nt, Artificial Sequence
  HTT spacer sequence CTCN PAM
ucuaaauccugagggauuac

SEQ ID NO: 17612 - RNA, 20 nt, Artificial Sequence
  HTT spacer sequence CTCN PAM
ggauuuagaagagaacuggu

SEQ ID NO: 17613 - RNA, 20 nt, Artificial Sequence
  HTT spacer sequence CTCN PAM
guccccguuaaggcccuuug

SEQ ID NO: 17614 - RNA, 20 nt, Artificial Sequence
  HTT spacer sequence CTCN PAM
gucagacccugaaggucaga

SEQ ID NO: 17615 - RNA, 20 nt, Artificial Sequence
  HTT spacer sequence CTCN PAM
gaccuucagggucugaccga

SEQ ID NO: 17616 - RNA, 20 nt, Artificial Sequence
  HTT spacer sequence CTCN PAM
caaacugccccucugaccuu

SEQ ID NO: 17617 - RNA, 20 nt, Artificial Sequence
  HTT spacer sequence CTCN PAM
aguccauacaguuaaaaugu

SEQ ID NO: 17618 - RNA, 20 nt, Artificial Sequence
  HTT spacer sequence CTCN PAM
uggcucuaguccauacaguu

SEQ ID NO: 17619 - RNA, 20 nt, Artificial Sequence
  HTT spacer sequence CTCN PAM
agguuuauaauucccacgua

SEQ ID NO: 17620 - RNA, 20 nt, Artificial Sequence
  HTT spacer sequence CTCN PAM
cuuuauuguuuuuuucuuuu

SEQ ID NO: 17621 - RNA, 20 nt, Artificial Sequence
  HTT spacer sequence CTCN PAM
acacugacuucucacuuuau

SEQ ID NO: 17622 - RNA, 20 nt, Artificial Sequence
  HTT spacer sequence CTCN PAM
aaacauguugauguuauacg

SEQ ID NO: 17623 - RNA, 20 nt, Artificial Sequence
  HTT spacer sequence CTCN PAM
cugcuuucauguuuuacugu

SEQ ID NO: 17624 - RNA, 20 nt, Artificial Sequence
  HTT spacer sequence CTCN PAM
aucugccgugaaaguugcca

SEQ ID NO: 17625 - RNA, 20 nt, Artificial Sequence
  HTT spacer sequence CTCN PAM
auuaucaaacauagccagug

SEQ ID NO: 17626 - RNA, 20 nt, Artificial Sequence
  HTT spacer sequence CTCN PAM
cacuggcuauguuugauaau

SEQ ID NO: 17627 - RNA, 20 nt, Artificial Sequence
  HTT spacer sequence CTCN PAM
guuaucuauuccuaagcuac

SEQ ID NO: 17628 - RNA, 20 nt, Artificial Sequence
  HTT spacer sequence CTCN PAM
caguuaucuauuccuaagcu

SEQ ID NO: 17629 - RNA, 20 nt, Artificial Sequence
  HTT spacer sequence CTCN PAM
cugccauccagaaacauugu

SEQ ID NO: 17630 - RNA, 20 nt, Artificial Sequence
  HTT spacer sequence CTCN PAM
uucuagaagacacagucugu

SEQ ID NO: 17631 - RNA, 20 nt, Artificial Sequence
  HTT spacer sequence CTCN PAM
agacaucuggggacuaagua

SEQ ID NO: 17632 - RNA, 20 nt, Artificial Sequence
  HTT spacer sequence CTCN PAM
ucuccagacaucuggggacu

SEQ ID NO: 17633 - RNA, 20 nt, Artificial Sequence
  HTT spacer sequence CTCN PAM
ucuucuccagacaucugggg

SEQ ID NO: 17634 - RNA, 20 nt, Artificial Sequence
  HTT spacer sequence CTCN PAM
auugcacauuccaaguuugg

SEQ ID NO: 17635 - RNA, 20 nt, Artificial Sequence
  HTT spacer sequence CTCN PAM
ucguacuauuucucuauugc

SEQ ID NO: 17636 - RNA, 20 nt, Artificial Sequence
  HTT spacer sequence CTCN PAM
cauucucuucugugauuaug

SEQ ID NO: 17637 - RNA, 20 nt, Artificial Sequence
  HTT spacer sequence CTCN PAM
uucucuucugugauuauguc

SEQ ID NO: 17638 - RNA, 20 nt, Artificial Sequence
  HTT spacer sequence CTCN PAM
ucugugauuaugucguaagu

SEQ ID NO: 17639 - RNA, 20 nt, Artificial Sequence
  HTT spacer sequence CTCN PAM
accccguuuacaggcauuuc

SEQ ID NO: 17640 - RNA, 20 nt, Artificial Sequence
  HTT spacer sequence CTCN PAM
cucaaccccguuuacaggca

SEQ ID NO: 17641 - RNA, 20 nt, Artificial Sequence
  HTT spacer sequence CTCN PAM
ugguccccaccucccucaac

SEQ ID NO: 17642 - RNA, 20 nt, Artificial Sequence
  HTT spacer sequence CTCN PAM
ggaacccagaccgcccggug

SEQ ID NO: 17643 - RNA, 20 nt, Artificial Sequence
  HTT spacer sequence CTCN PAM
aucgaaacuaaaucuagaau

SEQ ID NO: 17644 - RNA, 20 nt, Artificial Sequence
  HTT spacer sequence CTCN PAM
aauuauaugucacagcagaa

SEQ ID NO: 17645 - RNA, 20 nt, Artificial Sequence
  HTT spacer sequence CTCN PAM
caguccaacuuagaauccag

SEQ ID NO: 17646 - RNA, 20 nt, Artificial Sequence
  HTT spacer sequence CTCN PAM
cacaguccaacuuagaaucc

SEQ ID NO: 17647 - RNA, 20 nt, Artificial Sequence
  HTT spacer sequence CTCN PAM
uuuaucaaaugcccggcuau

SEQ ID NO: 17648 - RNA, 20 nt, Artificial Sequence
  HTT spacer sequence CTCN PAM
cgccuacaugaugcugggua

SEQ ID NO: 17649 - RNA, 20 nt, Artificial Sequence
  HTT spacer sequence CTCN PAM
aauuaacaaacauacccagc

SEQ ID NO: 17650 - RNA, 20 nt, Artificial Sequence
  HTT spacer sequence CTCN PAM
ugguauuaauuuuuaaaaaa

SEQ ID NO: 17651 - RNA, 20 nt, Artificial Sequence
  HTT spacer sequence CTCN PAM
agaggcugagguaggaagau

SEQ ID NO: 17652 - RNA, 20 nt, Artificial Sequence
  HTT spacer sequence CTCN PAM
aguugcuggaauuuaggcau

SEQ ID NO: 17653 - RNA, 20 nt, Artificial Sequence
  HTT spacer sequence CTCN PAM
cgaguugcuggaauuuaggc

SEQ ID NO: 17654 - RNA, 20 nt, Artificial Sequence
  HTT spacer sequence CTCN PAM
gccucucgaguugcuggaau

SEQ ID NO: 17655 - RNA, 20 nt, Artificial Sequence
  HTT spacer sequence CTCN PAM
agugaucuuccuaccucagc

SEQ ID NO: 17656 - RNA, 20 nt, Artificial Sequence
  HTT spacer sequence CTCN PAM
ugggcucaagugaucuuccu

SEQ ID NO: 17657 - RNA, 20 nt, Artificial Sequence
  HTT spacer sequence CTCN PAM
aacuccugggcucaagugau

SEQ ID NO: 17658 - RNA, 20 nt, Artificial Sequence
  HTT spacer sequence CTCN PAM
caccauagcccaggcuuguc

SEQ ID NO: 17659 - RNA, 20 nt, Artificial Sequence
  HTT spacer sequence CTCN PAM
aaaaaaauaaaaaauaaaaa

SEQ ID NO: 17660 - RNA, 20 nt, Artificial Sequence
  HTT spacer sequence CTCN PAM
ugccuguaaucacagcucuu

SEQ ID NO: 17661 - RNA, 20 nt, Artificial Sequence
  HTT spacer sequence CTCN PAM
uugagaagcugagggcggag

SEQ ID NO: 17662 - RNA, 20 nt, Artificial Sequence
  HTT spacer sequence CTCN PAM
aagagcugugauuacaggca

SEQ ID NO: 17663 - RNA, 20 nt, Artificial Sequence
  HTT spacer sequence CTCN PAM
gcuucucaaagagcugugau

SEQ ID NO: 17664 - RNA, 20 nt, Artificial Sequence
  HTT spacer sequence CTCN PAM
gcccucagcuucucaaagag

SEQ ID NO: 17665 - RNA, 20 nt, Artificial Sequence
  HTT spacer sequence CTCN PAM
agccauccuccgcccucagc

SEQ ID NO: 17666 - RNA, 20 nt, Artificial Sequence
  HTT spacer sequence CTCN PAM
caggcucaagccauccuccg

SEQ ID NO: 17667 - RNA, 20 nt, Artificial Sequence
  HTT spacer sequence CTCN PAM
aacucccaggcucaagccau

SEQ ID NO: 17668 - RNA, 20 nt, Artificial Sequence
  HTT spacer sequence CTCN PAM
guguugccaggcuggucucg

SEQ ID NO: 17669 - RNA, 20 nt, Artificial Sequence
  HTT spacer sequence CTCN PAM
accaaaaaaagaaagagagg

SEQ ID NO: 17670 - RNA, 20 nt, Artificial Sequence
  HTT spacer sequence CTCN PAM
uucuuuuuuugguagaggca

SEQ ID NO: 17671 - RNA, 20 nt, Artificial Sequence
  HTT spacer sequence CTCN PAM
cuuucuuuuuuugguagagg

SEQ ID NO: 17672 - RNA, 20 nt, Artificial Sequence
  HTT spacer sequence CTCN PAM
gguggcugggaccacaggca

SEQ ID NO: 17673 - RNA, 20 nt, Artificial Sequence
  HTT spacer sequence CTCN PAM
cagguggcugggaccacagg

SEQ ID NO: 17674 - RNA, 20 nt, Artificial Sequence
  HTT spacer sequence CTCN PAM
gucucucagguggcugggac

SEQ ID NO: 17675 - RNA, 20 nt, Artificial Sequence
  HTT spacer sequence CTCN PAM
cuucucagucucucaggugg

SEQ ID NO: 17676 - RNA, 20 nt, Artificial Sequence
  HTT spacer sequence CTCN PAM
agcaauccucccuucucagu

SEQ ID NO: 17677 - RNA, 20 nt, Artificial Sequence
  HTT spacer sequence CTCN PAM
aacuucugggcucaagcaau

SEQ ID NO: 17678 - RNA, 20 nt, Artificial Sequence
  HTT spacer sequence CTCN PAM
cugcagccucaaacuucugg

SEQ ID NO: 17679 - RNA, 20 nt, Artificial Sequence
  HTT spacer sequence CTCN PAM
ggccugggugacaaggcgag

SEQ ID NO: 17680 - RNA, 20 nt, Artificial Sequence
  HTT spacer sequence CTCN PAM
ccuugucacccaggccggag

SEQ ID NO: 17681 - RNA, 20 nt, Artificial Sequence
  HTT spacer sequence CTCN PAM
aaaauaauuuuuuuaaguua

SEQ ID NO: 17682 - RNA, 20 nt, Artificial Sequence
  HTT spacer sequence CTCN PAM
uuaaagaaaaaaaaauaacu

SEQ ID NO: 17683 - RNA, 20 nt, Artificial Sequence
  HTT spacer sequence CTCN PAM
cacaaguuauuuuuuuuucu

SEQ ID NO: 17684 - RNA, 20 nt, Artificial Sequence
  HTT spacer sequence CTCN PAM
augguaaauaugugaugcua

SEQ ID NO: 17685 - RNA, 20 nt, Artificial Sequence
  HTT spacer sequence CTCN PAM
guuuauuuguuuuuuuguaa

SEQ ID NO: 17686 - RNA, 20 nt, Artificial Sequence
  HTT spacer sequence CTCN PAM
uguaaucauacuacucagag

SEQ ID NO: 17687 - RNA, 20 nt, Artificial Sequence
  HTT spacer sequence CTCN PAM
gagauaacuugcuguuagau

SEQ ID NO: 17688 - RNA, 20 nt, Artificial Sequence
  HTT spacer sequence CTCN PAM
gaguaguaugauuacaggag

SEQ ID NO: 17689 - RNA, 20 nt, Artificial Sequence
  HTT spacer sequence CTCN PAM
ccaacugaaagagguguuau

SEQ ID NO: 17690 - RNA, 20 nt, Artificial Sequence
  HTT spacer sequence CTCN PAM
aacugaaagagguguuaucc

SEQ ID NO: 17691 - RNA, 20 nt, Artificial Sequence
  HTT spacer sequence CTCN PAM
uucaguuggagagucggcuu

SEQ ID NO: 17692 - RNA, 20 nt, Artificial Sequence
  HTT spacer sequence CTCN PAM
aggauaacaccucuuucagu

SEQ ID NO: 17693 - RNA, 20 nt, Artificial Sequence
  HTT spacer sequence CTCN PAM
auugaaguaguuuuucuauu

SEQ ID NO: 17694 - RNA, 20 nt, Artificial Sequence
  HTT spacer sequence CTCN PAM
aaauucugaagcuuuuugag

SEQ ID NO: 17695 - RNA, 20 nt, Artificial Sequence
  HTT spacer sequence CTCN PAM
aaaagcuucagaauuuggag

SEQ ID NO: 17696 - RNA, 20 nt, Artificial Sequence
  HTT spacer sequence CTCN PAM
cuaaauccgaaaaucugaaa

SEQ ID NO: 17697 - RNA, 20 nt, Artificial Sequence
  HTT spacer sequence CTCN PAM
acaaauaaguauaaugcaca

SEQ ID NO: 17698 - RNA, 20 nt, Artificial Sequence
  HTT spacer sequence CTCN PAM
gcauguuuaaaaauauauau

SEQ ID NO: 17699 - RNA, 20 nt, Artificial Sequence
  HTT spacer sequence CTCN PAM
uuuuccaauuuugugauagu

SEQ ID NO: 17700 - RNA, 20 nt, Artificial Sequence
  HTT spacer sequence CTCN PAM
aauuacucuuuuuccaauuu

SEQ ID NO: 17701 - RNA, 20 nt, Artificial Sequence
  HTT spacer sequence CTCN PAM
cgggcuucgggccggcuaag

SEQ ID NO: 17702 - RNA, 20 nt, Artificial Sequence
  HTT spacer sequence CTCN PAM
cccgggcuucgggccggcua

SEQ ID NO: 17703 - RNA, 20 nt, Artificial Sequence
  HTT spacer sequence CTCN PAM
cugaggccugccuuuguccu

SEQ ID NO: 17704 - RNA, 20 nt, Artificial Sequence
  HTT spacer sequence CTCN PAM
gcgagauccgcagguagcag

SEQ ID NO: 17705 - RNA, 20 nt, Artificial Sequence
  HTT spacer sequence CTCN PAM
gagagcuggacugcuguacc

SEQ ID NO: 17706 - RNA, 20 nt, Artificial Sequence
  HTT spacer sequence CTCN PAM
gagacacuaacaaauggcca

SEQ ID NO: 17707 - RNA, 20 nt, Artificial Sequence
  HTT spacer sequence CTCN PAM
cagagacacuaacaaauggc

SEQ ID NO: 17708 - RNA, 20 nt, Artificial Sequence
  HTT spacer sequence CTCN PAM
gccgcagugcgugguuggag

SEQ ID NO: 17709 - RNA, 20 nt, Artificial Sequence
  HTT spacer sequence CTCN PAM
aaccacgcacugcggcagag

SEQ ID NO: 17710 - RNA, 20 nt, Artificial Sequence
  HTT spacer sequence CTCN PAM
auuuaccaaggccgucaccu

SEQ ID NO: 17711 - RNA, 20 nt, Artificial Sequence
  HTT spacer sequence CTCN PAM
ucaauuauuugugcucauac

SEQ ID NO: 17712 - RNA, 20 nt, Artificial Sequence
  HTT spacer sequence CTCN PAM
auuauuugugcucauacacu

SEQ ID NO: 17713 - RNA, 20 nt, Artificial Sequence
  HTT spacer sequence CTCN PAM
uacacuguauauuuuuagug

SEQ ID NO: 17714 - RNA, 20 nt, Artificial Sequence
  HTT spacer sequence CTCN PAM
cuaaaaauauacaguguaug

SEQ ID NO: 17715 - RNA, 20 nt, Artificial Sequence
  HTT spacer sequence CTCN PAM
uucuuacccuuucuggccuu

SEQ ID NO: 17716 - RNA, 20 nt, Artificial Sequence
  HTT spacer sequence CTCN PAM
ucuuguguacuugaaaauga

SEQ ID NO: 17717 - RNA, 20 nt, Artificial Sequence
  HTT spacer sequence CTCN PAM
caucauauuuuuccuuagug

SEQ ID NO: 17718 - RNA, 20 nt, Artificial Sequence
  HTT spacer sequence CTCN PAM
ucauauuuuuccuuaguguc

SEQ ID NO: 17719 - RNA, 20 nt, Artificial Sequence
  HTT spacer sequence CTCN PAM
augacuccgagcacuuaacg

SEQ ID NO: 17720 - RNA, 20 nt, Artificial Sequence
  HTT spacer sequence CTCN PAM
gagcacuuaacguggcucau

SEQ ID NO: 17721 - RNA, 20 nt, Artificial Sequence
  HTT spacer sequence CTCN PAM
gagucauggagguucugaca

SEQ ID NO: 17722 - RNA, 20 nt, Artificial Sequence
  HTT spacer sequence CTCN PAM
uuguaaaucacauucaagau

SEQ ID NO: 17723 - RNA, 20 nt, Artificial Sequence
  HTT spacer sequence CTCN PAM
ugggaaaggcugaucagauc

SEQ ID NO: 17724 - RNA, 20 nt, Artificial Sequence
  HTT spacer sequence CTCN PAM
aguacaggacuucaucagug

SEQ ID NO: 17725 - RNA, 20 nt, Artificial Sequence
  HTT spacer sequence CTCN PAM
gcugccagcggccuguucau

SEQ ID NO: 17726 - RNA, 20 nt, Artificial Sequence
  HTT spacer sequence CTCN PAM
uugugaaaaccuuucaacug

SEQ ID NO: 17727 - RNA, 20 nt, Artificial Sequence
  HTT spacer sequence CTCN PAM
auuuuuaaggcagggaaaac

SEQ ID NO: 17728 - RNA, 20 nt, Artificial Sequence
  HTT spacer sequence CTCN PAM
ucagugcuuggaggggaucc

SEQ ID NO: 17729 - RNA, 20 nt, Artificial Sequence
  HTT spacer sequence CTCN PAM
aagcacugaagaguuuucuu

SEQ ID NO: 17730 - RNA, 20 nt, Artificial Sequence
  HTT spacer sequence CTCN PAM
gccagucgggagcugugcuc

SEQ ID NO: 17731 - RNA, 20 nt, Artificial Sequence
  HTT spacer sequence CTCN PAM
cgacuggcugagauggaucc

SEQ ID NO: 17732 - RNA, 20 nt, Artificial Sequence
  HTT spacer sequence CTCN PAM
cgcuguauguggacaggcuu

SEQ ID NO: 17733 - RNA, 20 nt, Artificial Sequence
  HTT spacer sequence CTCN PAM
cauggucgacauccuugcuu

SEQ ID NO: 17734 - RNA, 20 nt, Artificial Sequence
  HTT spacer sequence CTCN PAM
ucccaauaccuguaaauuug

SEQ ID NO: 17735 - RNA, 20 nt, Artificial Sequence
  HTT spacer sequence CTCN PAM
guaaguauggucuugacaug

SEQ ID NO: 17736 - RNA, 20 nt, Artificial Sequence
  HTT spacer sequence CTCN PAM
uguguccgaucugacuguuu

SEQ ID NO: 17737 - RNA, 20 nt, Artificial Sequence
  HTT spacer sequence CTCN PAM
uuuaaaaaggaugaacugau

SEQ ID NO: 17738 - RNA, 20 nt, Artificial Sequence
  HTT spacer sequence CTCN PAM
ugcucauuuaaaaaggauga

SEQ ID NO: 17739 - RNA, 20 nt, Artificial Sequence
  HTT spacer sequence CTCN PAM
aauagacaaaaacacauuag

SEQ ID NO: 17740 - RNA, 20 nt, Artificial Sequence
  HTT spacer sequence CTCN PAM
acagaauccaggaauaccuu

SEQ ID NO: 17741 - RNA, 20 nt, Artificial Sequence
  HTT spacer sequence CTCN PAM
gaagguauuccuggauucug

SEQ ID NO: 17742 - RNA, 20 nt, Artificial Sequence
  HTT spacer sequence CTCN PAM
cucagagguaaugcuggaaa

SEQ ID NO: 17743 - RNA, 20 nt, Artificial Sequence
  HTT spacer sequence CTCN PAM
gagguaaugcuggaaacaca

SEQ ID NO: 17744 - RNA, 20 nt, Artificial Sequence
  HTT spacer sequence CTCN PAM
gagcgagcccgcugcucuga

SEQ ID NO: 17745 - RNA, 20 nt, Artificial Sequence
  HTT spacer sequence CTCN PAM
cuuucuaaagaguaaaggau

SEQ ID NO: 17746 - RNA, 20 nt, Artificial Sequence
  HTT spacer sequence CTCN PAM
uuagaaagugagaucugguu

SEQ ID NO: 17747 - RNA, 20 nt, Artificial Sequence
  HTT spacer sequence CTCN PAM
cgucacagacgugauccugc

SEQ ID NO: 17748 - RNA, 20 nt, Artificial Sequence
  HTT spacer sequence CTCN PAM
acucacgucacagacgugau

SEQ ID NO: 17749 - RNA, 20 nt, Artificial Sequence
  HTT spacer sequence CTCN PAM
ugguggcuguuugagaggua

SEQ ID NO: 17750 - RNA, 20 nt, Artificial Sequence
  HTT spacer sequence CTCN PAM
aacagccaccaggagugcaa

SEQ ID NO: 17751 - RNA, 20 nt, Artificial Sequence
  HTT spacer sequence CTCN PAM
caaacagccaccaggagugc

SEQ ID NO: 17752 - RNA, 20 nt, Artificial Sequence
  HTT spacer sequence CTCN PAM
ucacaggacagugaauacag

SEQ ID NO: 17753 - RNA, 20 nt, Artificial Sequence
  HTT spacer sequence CTCN PAM
uguuuagcaauuagaugaca

SEQ ID NO: 17754 - RNA, 20 nt, Artificial Sequence
  HTT spacer sequence CTCN PAM
gauuugccaacucuuguuua

SEQ ID NO: 17755 - RNA, 20 nt, Artificial Sequence
  HTT spacer sequence CTCN PAM
cagauuugccaacucuuguu

SEQ ID NO: 17756 - RNA, 20 nt, Artificial Sequence
  HTT spacer sequence CTCN PAM
auccuuggcaugcaggacuu

SEQ ID NO: 17757 - RNA, 20 nt, Artificial Sequence
  HTT spacer sequence CTCN PAM
aagacuuugcaaacacaacu

SEQ ID NO: 17758 - RNA, 20 nt, Artificial Sequence
  HTT spacer sequence CTCN PAM
uaugugaguguauuuccaug

SEQ ID NO: 17759 - RNA, 20 nt, Artificial Sequence
  HTT spacer sequence CTCN PAM
cauaggagauguagggauuu

SEQ ID NO: 17760 - RNA, 20 nt, Artificial Sequence
  HTT spacer sequence CTCN PAM
cacacacaaucccugccccc

SEQ ID NO: 17761 - RNA, 20 nt, Artificial Sequence
  HTT spacer sequence CTCN PAM
cacacacacaaucccugccc

SEQ ID NO: 17762 - RNA, 20 nt, Artificial Sequence
  HTT spacer sequence CTCN PAM
cucucacacacacaaucccu

SEQ ID NO: 17763 - RNA, 20 nt, Artificial Sequence
  HTT spacer sequence CTCN PAM
cccucucacacacacaaucc

SEQ ID NO: 17764 - RNA, 20 nt, Artificial Sequence
  HTT spacer sequence CTCN PAM
cucccucucacacacacaau

SEQ ID NO: 17765 - RNA, 20 nt, Artificial Sequence
  HTT spacer sequence CTCN PAM
cucucccucucacacacaca

SEQ ID NO: 17766 - RNA, 20 nt, Artificial Sequence
  HTT spacer sequence CTCN PAM
gcugucucucucucccucuc

SEQ ID NO: 17767 - RNA, 20 nt, Artificial Sequence
  HTT spacer sequence CTCN PAM
uucucugcugucucucucuc

SEQ ID NO: 17768 - RNA, 20 nt, Artificial Sequence
  HTT spacer sequence CTCN PAM
aaguacacagcaugauaauu

SEQ ID NO: 17769 - RNA, 20 nt, Artificial Sequence
  HTT spacer sequence CTCN PAM
aaagacugaaaagcauaaua

SEQ ID NO: 17770 - RNA, 20 nt, Artificial Sequence
  HTT spacer sequence CTCN PAM
aaagacugaaaagcauaaua

SEQ ID NO: 17771 - RNA, 20 nt, Artificial Sequence
  HTT spacer sequence CTCN PAM
uuuguaauuugcauuaugaa

SEQ ID NO: 17772 - RNA, 20 nt, Artificial Sequence
  HTT spacer sequence CTCN PAM
cauagcagauggcgggagau

SEQ ID NO: 17773 - RNA, 20 nt, Artificial Sequence
  HTT spacer sequence CTCN PAM
uagcagauggcgggagauaa

SEQ ID NO: 17774 - RNA, 20 nt, Artificial Sequence
  HTT spacer sequence CTCN PAM
cgccaucugcuaugagagug

SEQ ID NO: 17775 - RNA, 20 nt, Artificial Sequence
  HTT spacer sequence CTCN PAM
ucuggacugaagacuaaguc

SEQ ID NO: 17776 - RNA, 20 nt, Artificial Sequence
  HTT spacer sequence CTCN PAM
cucaucuggacugaagacua

SEQ ID NO: 17777 - RNA, 20 nt, Artificial Sequence
  HTT spacer sequence CTCN PAM
ucuggcacaagauauuuaua

SEQ ID NO: 17778 - RNA, 20 nt, Artificial Sequence
  HTT spacer sequence CTCN PAM
aaugcacaaauuccacuauc

SEQ ID NO: 17779 - RNA, 20 nt, Artificial Sequence
  HTT spacer sequence CTCN PAM
aacacugcaacaggcaauac

SEQ ID NO: 17780 - RNA, 20 nt, Artificial Sequence
  HTT spacer sequence CTCN PAM
auuaauauuuuccagaaauu

SEQ ID NO: 17781 - RNA, 20 nt, Artificial Sequence
  HTT spacer sequence CTCN PAM
aacaggucaugauacaaaug

SEQ ID NO: 17782 - RNA, 20 nt, Artificial Sequence
  HTT spacer sequence CTCN PAM
ucaauacucaaacaggucau

SEQ ID NO: 17783 - RNA, 20 nt, Artificial Sequence
  HTT spacer sequence CTCN PAM
uuagaguguauauuucuaga

SEQ ID NO: 17784 - RNA, 20 nt, Artificial Sequence
  HTT spacer sequence CTCN PAM
aaggagaugcacuauuagug

SEQ ID NO: 17785 - RNA, 20 nt, Artificial Sequence
  HTT spacer sequence CTCN PAM
gcacacuaggauucuagaaa

SEQ ID NO: 17786 - RNA, 20 nt, Artificial Sequence
  HTT spacer sequence CTCN PAM
auucccugcuggacagguuu

SEQ ID NO: 17787 - RNA, 20 nt, Artificial Sequence
  HTT spacer sequence CTCN PAM
ccaccaugcaagacucacuu

SEQ ID NO: 17788 - RNA, 20 nt, Artificial Sequence
  HTT spacer sequence CTCN PAM
accaugcaagacucacuuag

SEQ ID NO: 17789 - RNA, 20 nt, Artificial Sequence
  HTT spacer sequence CTCN PAM
cuuagucccucuccuccagu

SEQ ID NO: 17790 - RNA, 20 nt, Artificial Sequence
  HTT spacer sequence CTCN PAM
ccuccagucucuucccaccc

SEQ ID NO: 17791 - RNA, 20 nt, Artificial Sequence
  HTT spacer sequence CTCN PAM
uccagucucuucccacccgc

SEQ ID NO: 17792 - RNA, 20 nt, Artificial Sequence
  HTT spacer sequence CTCN PAM
agucucuucccacccgcugg

SEQ ID NO: 17793 - RNA, 20 nt, Artificial Sequence
  HTT spacer sequence CTCN PAM
ucccacccgcuggacgggga

SEQ ID NO: 17794 - RNA, 20 nt, Artificial Sequence
  HTT spacer sequence CTCN PAM
cuguuuccagugacacgugc

SEQ ID NO: 17795 - RNA, 20 nt, Artificial Sequence
  HTT spacer sequence CTCN PAM
caugcagacacgcuggacac

SEQ ID NO: 17796 - RNA, 20 nt, Artificial Sequence
  HTT spacer sequence CTCN PAM
gcgcccugugccucccaugc

SEQ ID NO: 17797 - RNA, 20 nt, Artificial Sequence
  HTT spacer sequence CTCN PAM
gucaccuguggcagauacag

SEQ ID NO: 17798 - RNA, 20 nt, Artificial Sequence
  HTT spacer sequence CTCN PAM
guaucugccacaggugacag

SEQ ID NO: 17799 - RNA, 20 nt, Artificial Sequence
  HTT spacer sequence CTCN PAM
cuguaucugccacaggugac

SEQ ID NO: 17800 - RNA, 20 nt, Artificial Sequence
  HTT spacer sequence CTCN PAM
gcacucucuguaucugccac

SEQ ID NO: 17801 - RNA, 20 nt, Artificial Sequence
  HTT spacer sequence CTCN PAM
ucugcacucucuguaucugc

SEQ ID NO: 17802 - RNA, 20 nt, Artificial Sequence
  HTT spacer sequence CTCN PAM
uuggguccacggcaccuccu

SEQ ID NO: 17803 - RNA, 20 nt, Artificial Sequence
  HTT spacer sequence CTCN PAM
gcucggcucagugaagcugu

SEQ ID NO: 17804 - RNA, 20 nt, Artificial Sequence
  HTT spacer sequence CTCN PAM
gcucagugaagcugugguua

SEQ ID NO: 17805 - RNA, 20 nt, Artificial Sequence
  HTT spacer sequence CTCN PAM
gugaagcugugguuagagac

SEQ ID NO: 17806 - RNA, 20 nt, Artificial Sequence
  HTT spacer sequence CTCN PAM
aaccacagcuucacugagcc

SEQ ID NO: 17807 - RNA, 20 nt, Artificial Sequence
  HTT spacer sequence CTCN PAM
gaccuugauggccccccacg

SEQ ID NO: 17808 - RNA, 20 nt, Artificial Sequence
  HTT spacer sequence CTCN PAM
cucagaccuugauggccccc

SEQ ID NO: 17809 - RNA, 20 nt, Artificial Sequence
  HTT spacer sequence CTCN PAM
uaccaaaagggucccacauc

SEQ ID NO: 17810 - RNA, 20 nt, Artificial Sequence
  HTT spacer sequence CTCN PAM
ccccacacuccuaccaaaag

SEQ ID NO: 17811 - RNA, 20 nt, Artificial Sequence
  HTT spacer sequence CTCN PAM
cuccaucuccucauaccuuc

SEQ ID NO: 17812 - RNA, 20 nt, Artificial Sequence
  HTT spacer sequence CTCN PAM
aucuccucauaccuucuggc

SEQ ID NO: 17813 - RNA, 20 nt, Artificial Sequence
  HTT spacer sequence CTCN PAM
ucauaccuucuggccaccug

SEQ ID NO: 17814 - RNA, 20 nt, Artificial Sequence
  HTT spacer sequence CTCN PAM
uaccuucuggccaccuguga

SEQ ID NO: 17815 - RNA, 20 nt, Artificial Sequence
  HTT spacer sequence CTCN PAM
cagguggccagaagguauga

SEQ ID NO: 17816 - RNA, 20 nt, Artificial Sequence
  HTT spacer sequence CTCN PAM
acugcucauaccucaugguu

SEQ ID NO: 17817 - RNA, 20 nt, Artificial Sequence
  HTT spacer sequence CTCN PAM
uaccucaugguuagggacca

SEQ ID NO: 17818 - RNA, 20 nt, Artificial Sequence
  HTT spacer sequence CTCN PAM
ugguuagggaccaccuggag

SEQ ID NO: 17819 - RNA, 20 nt, Artificial Sequence
  HTT spacer sequence CTCN PAM
agguggucccuaaccaugag

SEQ ID NO: 17820 - RNA, 20 nt, Artificial Sequence
  HTT spacer sequence CTCN PAM
accaaggcuccagguggucc

SEQ ID NO: 17821 - RNA, 20 nt, Artificial Sequence
  HTT spacer sequence CTCN PAM
accaaggcucuaccaaggcu

SEQ ID NO: 17822 - RNA, 20 nt, Artificial Sequence
  HTT spacer sequence CTCN PAM
acuuuccuggacaaaguuca

SEQ ID NO: 17823 - RNA, 20 nt, Artificial Sequence
  HTT spacer sequence CTCN PAM
auucgcuaagcaccugcccu

SEQ ID NO: 17824 - RNA, 20 nt, Artificial Sequence
  HTT spacer sequence CTCN PAM
ccagcaaccagggcagggca

SEQ ID NO: 17825 - RNA, 20 nt, Artificial Sequence
  HTT spacer sequence CTCN PAM
ccccagcaaccagggcaggg

SEQ ID NO: 17826 - RNA, 20 nt, Artificial Sequence
  HTT spacer sequence CTCN PAM
ucucuccccagcaaccaggg

SEQ ID NO: 17827 - RNA, 20 nt, Artificial Sequence
  HTT spacer sequence CTCN PAM
uggguugucugcuuuacuca

SEQ ID NO: 17828 - RNA, 20 nt, Artificial Sequence
  HTT spacer sequence CTCN PAM
ccuggguugucugcuuuacu

SEQ ID NO: 17829 - RNA, 20 nt, Artificial Sequence
  HTT spacer sequence CTCN PAM
cccuucaccuggugaacuuc

SEQ ID NO: 17830 - RNA, 20 nt, Artificial Sequence
  HTT spacer sequence CTCN PAM
cagccucccccuucaccugg

SEQ ID NO: 17831 - RNA, 20 nt, Artificial Sequence
  HTT spacer sequence CTCN PAM
ccacaccacagguuuucccc

SEQ ID NO: 17832 - RNA, 20 nt, Artificial Sequence
  HTT spacer sequence CTCN PAM
cagccuagugcgguguuccc

SEQ ID NO: 17833 - RNA, 20 nt, Artificial Sequence
  HTT spacer sequence CTCN PAM
gccuagugcgguguucccaa

SEQ ID NO: 17834 - RNA, 20 nt, Artificial Sequence
  HTT spacer sequence CTCN PAM
agggaugugaaguccccuug

SEQ ID NO: 17835 - RNA, 20 nt, Artificial Sequence
  HTT spacer sequence CTCN PAM
gcaccuuccagcagugcaga

SEQ ID NO: 17836 - RNA, 20 nt, Artificial Sequence
  HTT spacer sequence CTCN PAM
guacggggggagcaguggag

SEQ ID NO: 17837 - RNA, 20 nt, Artificial Sequence
  HTT spacer sequence CTCN PAM
ccccguaccgaguucaucau

SEQ ID NO: 17838 - RNA, 20 nt, Artificial Sequence
  HTT spacer sequence CTCN PAM
acugcuccccccguaccgag

SEQ ID NO: 17839 - RNA, 20 nt, Artificial Sequence
  HTT spacer sequence CTCN PAM
gcuuuucuugugacuuccaa

SEQ ID NO: 17840 - RNA, 20 nt, Artificial Sequence
  HTT spacer sequence CTCN PAM
ucaucaugugacccacuugu

SEQ ID NO: 17841 - RNA, 20 nt, Artificial Sequence
  HTT spacer sequence CTCN PAM
agucugggcagggacgggau

SEQ ID NO: 17842 - RNA, 20 nt, Artificial Sequence
  HTT spacer sequence CTCN PAM
gacaucccgucccugcccag

SEQ ID NO: 17843 - RNA, 20 nt, Artificial Sequence
  HTT spacer sequence CTCN PAM
ccgacaucccgucccugccc

SEQ ID NO: 17844 - RNA, 20 nt, Artificial Sequence
  HTT spacer sequence CTCN PAM
acucugaauggggccgggaa

SEQ ID NO: 17845 - RNA, 20 nt, Artificial Sequence
  HTT spacer sequence CTCN PAM
gaauggggccgggaaguggg

SEQ ID NO: 17846 - RNA, 20 nt, Artificial Sequence
  HTT spacer sequence CTCN PAM
ccacuucccggccccauuca

SEQ ID NO: 17847 - RNA, 20 nt, Artificial Sequence
  HTT spacer sequence CTCN PAM
auuucagauggggucgggac

SEQ ID NO: 17848 - RNA, 20 nt, Artificial Sequence
  HTT spacer sequence CTCN PAM
aucagcauaacccccauguc

SEQ ID NO: 17849 - RNA, 20 nt, Artificial Sequence
  HTT spacer sequence CTCN PAM
guggauucuaauguggcuga

SEQ ID NO: 17850 - RNA, 20 nt, Artificial Sequence
  HTT spacer sequence CTCN PAM
ucccaaaccauacacccagc

SEQ ID NO: 17851 - RNA, 20 nt, Artificial Sequence
  HTT spacer sequence CTCN PAM
acuggaggaacaaacacagg

SEQ ID NO: 17852 - RNA, 20 nt, Artificial Sequence
  HTT spacer sequence CTCN PAM
aguggaggccagauaguucu

SEQ ID NO: 17853 - RNA, 20 nt, Artificial Sequence
  HTT spacer sequence CTCN PAM
auggccaagacagaauggaa

SEQ ID NO: 17854 - RNA, 20 nt, Artificial Sequence
  HTT spacer sequence CTCN PAM
uuuacgacuaaagaucaacu

SEQ ID NO: 17855 - RNA, 20 nt, Artificial Sequence
  HTT spacer sequence CTCN PAM
cugcauccaagggucucuuu

SEQ ID NO: 17856 - RNA, 20 nt, Artificial Sequence
  HTT spacer sequence CTCN PAM
acucacaccucuguuagaug

SEQ ID NO: 17857 - RNA, 20 nt, Artificial Sequence
  HTT spacer sequence CTCN PAM
caccucuguuagauguagug

SEQ ID NO: 17858 - RNA, 20 nt, Artificial Sequence
  HTT spacer sequence CTCN PAM
guuagauguagugagguucu

SEQ ID NO: 17859 - RNA, 20 nt, Artificial Sequence
  HTT spacer sequence CTCN PAM
cuacaucuaacagaggugug

SEQ ID NO: 17860 - RNA, 20 nt, Artificial Sequence
  HTT spacer sequence CTCN PAM
gacaucugggguuggggggu

SEQ ID NO: 17861 - RNA, 20 nt, Artificial Sequence
  HTT spacer sequence CTCN PAM
gcgcagggugcccucugaca

SEQ ID NO: 17862 - RNA, 20 nt, Artificial Sequence
  HTT spacer sequence CTCN PAM
uagcucugcgcagggugccc

SEQ ID NO: 17863 - RNA, 20 nt, Artificial Sequence
  HTT spacer sequence CTCN PAM
cccgugggcagguccuguga

SEQ ID NO: 17864 - RNA, 20 nt, Artificial Sequence
  HTT spacer sequence CTCN PAM
caggaccugcccacggguga

SEQ ID NO: 17865 - RNA, 20 nt, Artificial Sequence
  HTT spacer sequence CTCN PAM
uggguauggugcagccaugg

SEQ ID NO: 17866 - RNA, 20 nt, Artificial Sequence
  HTT spacer sequence CTCN PAM
gaccuacuaggacgggagaa

SEQ ID NO: 17867 - RNA, 20 nt, Artificial Sequence
  HTT spacer sequence CTCN PAM
cguccuaguaggucugagaa

SEQ ID NO: 17868 - RNA, 20 nt, Artificial Sequence
  HTT spacer sequence CTCN PAM
uggugcuuuagcccugcguu

SEQ ID NO: 17869 - RNA, 20 nt, Artificial Sequence
  HTT spacer sequence CTCN PAM
cauuugcugcauaucaacgc

SEQ ID NO: 17870 - RNA, 20 nt, Artificial Sequence
  HTT spacer sequence CTCN PAM
caggugcccacuucccuccc

SEQ ID NO: 17871 - RNA, 20 nt, Artificial Sequence
  HTT spacer sequence CTCN PAM
acaggcauuuguccucccag

SEQ ID NO: 17872 - RNA, 20 nt, Artificial Sequence
  HTT spacer sequence CTCN PAM
cggccucuacaggcauuugu

SEQ ID NO: 17873 - RNA, 20 nt, Artificial Sequence
  HTT spacer sequence CTCN PAM
uuucaugaacaccugccguc

SEQ ID NO: 17874 - RNA, 20 nt, Artificial Sequence
  HTT spacer sequence CTCN PAM
ccacaaggucucuuuucaug

SEQ ID NO: 17875 - RNA, 20 nt, Artificial Sequence
  HTT spacer sequence CTCN PAM
ucaguacaucagaacacacu

SEQ ID NO: 17876 - RNA, 20 nt, Artificial Sequence
  HTT spacer sequence CTCN PAM
acugaaaacaacaggagaau

SEQ ID NO: 17877 - RNA, 20 nt, Artificial Sequence
  HTT spacer sequence CTCN PAM
uguuguuuucaguugagcuc

SEQ ID NO: 17878 - RNA, 20 nt, Artificial Sequence
  HTT spacer sequence CTCN PAM
aaaaaaaaaaaaaagauaaa

SEQ ID NO: 17879 - RNA, 20 nt, Artificial Sequence
  HTT spacer sequence CTCN PAM
cuguugucccccaggcugga

SEQ ID NO: 17880 - RNA, 20 nt, Artificial Sequence
  HTT spacer sequence CTCN PAM
agccugggggacaacagcga

SEQ ID NO: 17881 - RNA, 20 nt, Artificial Sequence
  HTT spacer sequence CTCN PAM
cugcaaccuccgccuccugg

SEQ ID NO: 17882 - RNA, 20 nt, Artificial Sequence
  HTT spacer sequence CTCN PAM
gccuccuggguucauacgau

SEQ ID NO: 17883 - RNA, 20 nt, Artificial Sequence
  HTT spacer sequence CTCN PAM
uggguucauacgauucuccu

SEQ ID NO: 17884 - RNA, 20 nt, Artificial Sequence
  HTT spacer sequence CTCN PAM
ugccucagccucccaaauag

SEQ ID NO: 17885 - RNA, 20 nt, Artificial Sequence
  HTT spacer sequence CTCN PAM
gccucccaaauagcugguau

SEQ ID NO: 17886 - RNA, 20 nt, Artificial Sequence
  HTT spacer sequence CTCN PAM
caaauagcugguauuaacag

SEQ ID NO: 17887 - RNA, 20 nt, Artificial Sequence
  HTT spacer sequence CTCN PAM
acuaaaaauacaaaaauuag

SEQ ID NO: 17888 - RNA, 20 nt, Artificial Sequence
  HTT spacer sequence CTCN PAM
aacuccugaccucaggugau

SEQ ID NO: 17889 - RNA, 20 nt, Artificial Sequence
  HTT spacer sequence CTCN PAM
ugaccucaggugauccgccc

SEQ ID NO: 17890 - RNA, 20 nt, Artificial Sequence
  HTT spacer sequence CTCN PAM
ggugauccgcccaccucggc

SEQ ID NO: 17891 - RNA, 20 nt, Artificial Sequence
  HTT spacer sequence CTCN PAM
gccucccaaagugcugggau

SEQ ID NO: 17892 - RNA, 20 nt, Artificial Sequence
  HTT spacer sequence CTCN PAM
caaagugcugggauuauagg

SEQ ID NO: 17893 - RNA, 20 nt, Artificial Sequence
  HTT spacer sequence CTCN PAM
ggccuauaaucccagcacuu

SEQ ID NO: 17894 - RNA, 20 nt, Artificial Sequence
  HTT spacer sequence CTCN PAM
guaaguuagcuuucacugca

SEQ ID NO: 17895 - RNA, 20 nt, Artificial Sequence
  HTT spacer sequence CTCN PAM
gaaaagcaucaugaaugcca

SEQ ID NO: 17896 - RNA, 20 nt, Artificial Sequence
  HTT spacer sequence CTCN PAM
gugauacaccaaccacccua

SEQ ID NO: 17897 - RNA, 20 nt, Artificial Sequence
  HTT spacer sequence CTCN PAM
uggauuugcuugaaauaaaa

SEQ ID NO: 17898 - RNA, 20 nt, Artificial Sequence
  HTT spacer sequence CTCN PAM
uaguauuuuaaguaauauuu

SEQ ID NO: 17899 - RNA, 20 nt, Artificial Sequence
  HTT spacer sequence CTCN PAM
cuuaguauuuuaaguaauau

SEQ ID NO: 17900 - RNA, 20 nt, Artificial Sequence
  HTT spacer sequence CTCN PAM
augccuguuauaaauauuug

SEQ ID NO: 17901 - RNA, 20 nt, Artificial Sequence
  HTT spacer sequence CTCN PAM
gaaacauuugccuuauucuu

SEQ ID NO: 17902 - RNA, 20 nt, Artificial Sequence
  HTT spacer sequence CTCN PAM
uaaucuguuguuauuguuug

SEQ ID NO: 17903 - RNA, 20 nt, Artificial Sequence
  HTT spacer sequence CTCN PAM
gauuucaggaguucaaccua

SEQ ID NO: 17904 - RNA, 20 nt, Artificial Sequence
  HTT spacer sequence CTCN PAM
ugaaaucagagcauuaaagg

SEQ ID NO: 17905 - RNA, 20 nt, Artificial Sequence
  HTT spacer sequence CTCN PAM
augcuuaagccuagggauga

SEQ ID NO: 17906 - RNA, 20 nt, Artificial Sequence
  HTT spacer sequence CTCN PAM
ucccuaggcuuaagcaugga

SEQ ID NO: 17907 - RNA, 20 nt, Artificial Sequence
  HTT spacer sequence CTCN PAM
ucuggccaccagaaauuuca

SEQ ID NO: 17908 - RNA, 20 nt, Artificial Sequence
  HTT spacer sequence CTCN PAM
cgggcugcuucaaaaagggc

SEQ ID NO: 17909 - RNA, 20 nt, Artificial Sequence
  HTT spacer sequence CTCN PAM
ggcccgugugagcggcaccg

SEQ ID NO: 17910 - RNA, 20 nt, Artificial Sequence
  HTT spacer sequence CTCN PAM
cacgggccagagucaccuca

SEQ ID NO: 17911 - RNA, 20 nt, Artificial Sequence
  HTT spacer sequence CTCN PAM
cugcuguccaucaugucuuc

SEQ ID NO: 17912 - RNA, 20 nt, Artificial Sequence
  HTT spacer sequence CTCN PAM
ggcuggaagacaugauggac

SEQ ID NO: 17913 - RNA, 20 nt, Artificial Sequence
  HTT spacer sequence CTCN PAM
gcaggcagcucgggcuggaa

SEQ ID NO: 17914 - RNA, 20 nt, Artificial Sequence
  HTT spacer sequence CTCN PAM
aguaggccgccggcucugca

SEQ ID NO: 17915 - RNA, 20 nt, Artificial Sequence
  HTT spacer sequence CTCN PAM
guaaacgcuuucaauguauu

SEQ ID NO: 17916 - RNA, 20 nt, Artificial Sequence
  HTT spacer sequence CTCN PAM
uuagcuaccucuguaaacgc

SEQ ID NO: 17917 - RNA, 20 nt, Artificial Sequence
  HTT spacer sequence CTCN PAM
gcucagaauuucuuccugug

SEQ ID NO: 17918 - RNA, 20 nt, Artificial Sequence
  HTT spacer sequence CTCN PAM
gaauuucuuccuguguguuu

SEQ ID NO: 17919 - RNA, 20 nt, Artificial Sequence
  HTT spacer sequence CTCN PAM
aagcccuugaggaaggcugg

SEQ ID NO: 17920 - RNA, 20 nt, Artificial Sequence
  HTT spacer sequence CTCN PAM
agggcuuagagcccuauguc

SEQ ID NO: 17921 - RNA, 20 nt, Artificial Sequence
  HTT spacer sequence CTCN PAM
ggggagaugcagccccaaac

SEQ ID NO: 17922 - RNA, 20 nt, Artificial Sequence
  HTT spacer sequence CTCN PAM
ccugaggucuggcccagccu

SEQ ID NO: 17923 - RNA, 20 nt, Artificial Sequence
  HTT spacer sequence CTCN PAM
guggcacaucuacacauccg

SEQ ID NO: 17924 - RNA, 20 nt, Artificial Sequence
  HTT spacer sequence CTCN PAM
agacauuguuccucaguggc

SEQ ID NO: 17925 - RNA, 20 nt, Artificial Sequence
  HTT spacer sequence CTCN PAM
gagaauugcuugacugccuu

SEQ ID NO: 17926 - RNA, 20 nt, Artificial Sequence
  HTT spacer sequence CTCN PAM
gagaaucugaugaaagcuca

SEQ ID NO: 17927 - RNA, 20 nt, Artificial Sequence
  HTT spacer sequence CTCN PAM
cguuugcacccacccacgag

SEQ ID NO: 17928 - RNA, 20 nt, Artificial Sequence
  HTT spacer sequence CTCN PAM
ugggugggugcaaacgugag

SEQ ID NO: 17929 - RNA, 20 nt, Artificial Sequence
  HTT spacer sequence CTCN PAM
ggcccgggcccuggcacagu

SEQ ID NO: 17930 - RNA, 20 nt, Artificial Sequence
  HTT spacer sequence CTCN PAM
aaacugcccagucauuugca

SEQ ID NO: 17931 - RNA, 20 nt, Artificial Sequence
  HTT spacer sequence CTCN PAM
ugagaaagagaaggacauug

SEQ ID NO: 17932 - RNA, 20 nt, Artificial Sequence
  HTT spacer sequence CTCN PAM
ggaggaaggugcaaaugacu

SEQ ID NO: 17933 - RNA, 20 nt, Artificial Sequence
  HTT spacer sequence CTCN PAM
uucucaggaggaaggugcaa

SEQ ID NO: 17934 - RNA, 20 nt, Artificial Sequence
  HTT spacer sequence CTCN PAM
aggguugccaccacgaauuu

SEQ ID NO: 17935 - RNA, 20 nt, Artificial Sequence
  HTT spacer sequence CTCN PAM
uaccucaaggguugccacca

SEQ ID NO: 17936 - RNA, 20 nt, Artificial Sequence
  HTT spacer sequence CTCN PAM
ggagcucaguguugcugugg

SEQ ID NO: 17937 - RNA, 20 nt, Artificial Sequence
  HTT spacer sequence CTCN PAM
cgagcugccucuuaccucaa

SEQ ID NO: 17938 - RNA, 20 nt, Artificial Sequence
  HTT spacer sequence CTCN PAM
guguugcuguggggaggggg

SEQ ID NO: 17939 - RNA, 20 nt, Artificial Sequence
  HTT spacer sequence CTCN PAM
ccacagcaacacugagcucc

SEQ ID NO: 17940 - RNA, 20 nt, Artificial Sequence
  HTT spacer sequence CTCN PAM
ucagugucagccccaugccc

SEQ ID NO: 17941 - RNA, 20 nt, Artificial Sequence
  HTT spacer sequence CTCN PAM
gaccaguccagucacuuuuc

SEQ ID NO: 17942 - RNA, 20 nt, Artificial Sequence
  HTT spacer sequence CTCN PAM
gccuggcaguaagucuuguc

SEQ ID NO: 17943 - RNA, 20 nt, Artificial Sequence
  HTT spacer sequence CTCN PAM
ccucgccacuccucauggug

SEQ ID NO: 17944 - RNA, 20 nt, Artificial Sequence
  HTT spacer sequence CTCN PAM
ccacuccucaugguggccug

SEQ ID NO: 17945 - RNA, 20 nt, Artificial Sequence
  HTT spacer sequence CTCN PAM
ucaugguggccugugagguc

SEQ ID NO: 17946 - RNA, 20 nt, Artificial Sequence
  HTT spacer sequence CTCN PAM
ugguggccugugaggucagc

SEQ ID NO: 17947 - RNA, 20 nt, Artificial Sequence
  HTT spacer sequence CTCN PAM
caggccaccaugaggagugg

SEQ ID NO: 17948 - RNA, 20 nt, Artificial Sequence
  HTT spacer sequence CTCN PAM
ucugcaccuaccauguuagg

SEQ ID NO: 17949 - RNA, 20 nt, Artificial Sequence
  HTT spacer sequence CTCN PAM
aaaauuaggauccaccuaac

SEQ ID NO: 17950 - RNA, 20 nt, Artificial Sequence
  HTT spacer sequence CTCN PAM
gcaaggacacacuuugcaga

SEQ ID NO: 17951 - RNA, 20 nt, Artificial Sequence
  HTT spacer sequence CTCN PAM
gugggucugcaaaguguguc

SEQ ID NO: 17952 - RNA, 20 nt, Artificial Sequence
  HTT spacer sequence CTCN PAM
gccuccaccucacaccaaag

SEQ ID NO: 17953 - RNA, 20 nt, Artificial Sequence
  HTT spacer sequence CTCN PAM
accucacaccaaagaaaggg

SEQ ID NO: 17954 - RNA, 20 nt, Artificial Sequence
  HTT spacer sequence CTCN PAM
caccaaagaaagggaggagu

SEQ ID NO: 17955 - RNA, 20 nt, Artificial Sequence
  HTT spacer sequence CTCN PAM
cuuucuuuggugugaggugg

SEQ ID NO: 17956 - RNA, 20 nt, Artificial Sequence
  HTT spacer sequence CTCN PAM
ucccuuucuuuggugugagg

SEQ ID NO: 17957 - RNA, 20 nt, Artificial Sequence
  HTT spacer sequence CTCN PAM
caaaaugauaaauacacccu

SEQ ID NO: 17958 - RNA, 20 nt, Artificial Sequence
  HTT spacer sequence CTCN PAM
acgugguucagaauaagggu

SEQ ID NO: 17959 - RNA, 20 nt, Artificial Sequence
  HTT spacer sequence CTCN PAM
cacaacccccugugagauag

SEQ ID NO: 17960 - RNA, 20 nt, Artificial Sequence
  HTT spacer sequence CTCN PAM
caacccccugugagauaggc

SEQ ID NO: 17961 - RNA, 20 nt, Artificial Sequence
  HTT spacer sequence CTCN PAM
caggggguugugagagucaa

SEQ ID NO: 17962 - RNA, 20 nt, Artificial Sequence
  HTT spacer sequence CTCN PAM
guuacucccauuugacaggu

SEQ ID NO: 17963 - RNA, 20 nt, Artificial Sequence
  HTT spacer sequence CTCN PAM
cauuugacaggugaggaaag

SEQ ID NO: 17964 - RNA, 20 nt, Artificial Sequence
  HTT spacer sequence CTCN PAM
ccugucaaaugggaguaaca

SEQ ID NO: 17965 - RNA, 20 nt, Artificial Sequence
  HTT spacer sequence CTCN PAM
aagccuugcuuuccucaccu

SEQ ID NO: 17966 - RNA, 20 nt, Artificial Sequence
  HTT spacer sequence CTCN PAM
gagcuaggaaguagccauuc

SEQ ID NO: 17967 - RNA, 20 nt, Artificial Sequence
  HTT spacer sequence CTCN PAM
gaggaccugggcaagucacu

SEQ ID NO: 17968 - RNA, 20 nt, Artificial Sequence
  HTT spacer sequence CTCN PAM
caaauucaaccuaugacaga

SEQ ID NO: 17969 - RNA, 20 nt, Artificial Sequence
  HTT spacer sequence CTCN PAM
aauucaaccuaugacagagg

SEQ ID NO: 17970 - RNA, 20 nt, Artificial Sequence
  HTT spacer sequence CTCN PAM
gucauagguugaauuugaga

SEQ ID NO: 17971 - RNA, 20 nt, Artificial Sequence
  HTT spacer sequence CTCN PAM
cacagcaccagggcuugccu

SEQ ID NO: 17972 - RNA, 20 nt, Artificial Sequence
  HTT spacer sequence CTCN PAM
uccuuggggcucccacagca

SEQ ID NO: 17973 - RNA, 20 nt, Artificial Sequence
  HTT spacer sequence CTCN PAM
ggccugguggccacguagcc

SEQ ID NO: 17974 - RNA, 20 nt, Artificial Sequence
  HTT spacer sequence CTCN PAM
ugggcuacguggccaccagg

SEQ ID NO: 17975 - RNA, 20 nt, Artificial Sequence
  HTT spacer sequence CTCN PAM
ccugggcuacguggccacca

SEQ ID NO: 17976 - RNA, 20 nt, Artificial Sequence
  HTT spacer sequence CTCN PAM
uguagaaaucucuccugggc

SEQ ID NO: 17977 - RNA, 20 nt, Artificial Sequence
  HTT spacer sequence CTCN PAM
uucagcgcugugggcuccug

SEQ ID NO: 17978 - RNA, 20 nt, Artificial Sequence
  HTT spacer sequence CTCN PAM
ccuucagcgcugugggcucc

SEQ ID NO: 17979 - RNA, 20 nt, Artificial Sequence
  HTT spacer sequence CTCN PAM
cuccuucagcgcugugggcu

SEQ ID NO: 17980 - RNA, 20 nt, Artificial Sequence
  HTT spacer sequence CTCN PAM
cucuccuucagcgcuguggg

SEQ ID NO: 17981 - RNA, 20 nt, Artificial Sequence
  HTT spacer sequence CTCN PAM
gcugccucucucuccuucag

SEQ ID NO: 17982 - RNA, 20 nt, Artificial Sequence
  HTT spacer sequence CTCN PAM
gccacaaagcccccuuacuc

SEQ ID NO: 17983 - RNA, 20 nt, Artificial Sequence
  HTT spacer sequence CTCN PAM
cugccacaaagcccccuuac

SEQ ID NO: 17984 - RNA, 20 nt, Artificial Sequence
  HTT spacer sequence CTCN PAM
auuacauucaguccugaccc

SEQ ID NO: 17985 - RNA, 20 nt, Artificial Sequence
  HTT spacer sequence CTCN PAM
gacauggcuccauuacauuc

SEQ ID NO: 17986 - RNA, 20 nt, Artificial Sequence
  HTT spacer sequence CTCN PAM
gugcuuuggacgguuccaca

SEQ ID NO: 17987 - RNA, 20 nt, Artificial Sequence
  HTT spacer sequence CTCN PAM
uguaccuucguuuggggaag

SEQ ID NO: 17988 - RNA, 20 nt, Artificial Sequence
  HTT spacer sequence CTCN PAM
guacuucccuuuaggcccug

SEQ ID NO: 17989 - RNA, 20 nt, Artificial Sequence
  HTT spacer sequence CTCN PAM
uggaucaaaugccaggacag

SEQ ID NO: 17990 - RNA, 20 nt, Artificial Sequence
  HTT spacer sequence CTCN PAM
gcgggaucugcucauggauc

SEQ ID NO: 17991 - RNA, 20 nt, Artificial Sequence
  HTT spacer sequence CTCN PAM
aggcagggcuggacugcugc

SEQ ID NO: 17992 - RNA, 20 nt, Artificial Sequence
  HTT spacer sequence CTCN PAM
ggagcguggucuccuccaca

SEQ ID NO: 17993 - RNA, 20 nt, Artificial Sequence
  HTT spacer sequence CTCN PAM
agaggccaggcagcugcagg

SEQ ID NO: 17994 - RNA, 20 nt, Artificial Sequence
  HTT spacer sequence CTCN PAM
uccacagaguuugugaccca

SEQ ID NO: 17995 - RNA, 20 nt, Artificial Sequence
  HTT spacer sequence CTCN PAM
acagaguuugugacccacgc

SEQ ID NO: 17996 - RNA, 20 nt, Artificial Sequence
  HTT spacer sequence CTCN PAM
guggaggagaccacgcucca

SEQ ID NO: 17997 - RNA, 20 nt, Artificial Sequence
  HTT spacer sequence CTCN PAM
cucaucuacugugugcacuu

SEQ ID NO: 17998 - RNA, 20 nt, Artificial Sequence
  HTT spacer sequence CTCN PAM
ucuacugugugcacuucauc

SEQ ID NO: 17999 - RNA, 20 nt, Artificial Sequence
  HTT spacer sequence CTCN PAM
aggaugaagugcacacagua

SEQ ID NO: 18000 - RNA, 20 nt, Artificial Sequence
  HTT spacer sequence CTCN PAM
ccggccuccaggaugaagug

SEQ ID NO: 18001 - RNA, 20 nt, Artificial Sequence
  HTT spacer sequence CTCN PAM
auccccaauuccuagcuuag

SEQ ID NO: 18002 - RNA, 20 nt, Artificial Sequence
  HTT spacer sequence CTCN PAM
ccauccccaauuccuagcuu

SEQ ID NO: 18003 - RNA, 20 nt, Artificial Sequence
  HTT spacer sequence CTCN PAM
uacucuccaauauauuggag

SEQ ID NO: 18004 - RNA, 20 nt, Artificial Sequence
  HTT spacer sequence CTCN PAM
ccaauauauuggagucuaca

SEQ ID NO: 18005 - RNA, 20 nt, Artificial Sequence
  HTT spacer sequence CTCN PAM
aauauauuggagucuacacu

SEQ ID NO: 18006 - RNA, 20 nt, Artificial Sequence
  HTT spacer sequence CTCN PAM
aauauauuggagaguaagag

SEQ ID NO: 18007 - RNA, 20 nt, Artificial Sequence
  HTT spacer sequence CTCN PAM
aaacuuuaugucucugugau

SEQ ID NO: 18008 - RNA, 20 nt, Artificial Sequence
  HTT spacer sequence CTCN PAM
gugaucuuuggucuuagcug

SEQ ID NO: 18009 - RNA, 20 nt, Artificial Sequence
  HTT spacer sequence CTCN PAM
gacagaaaacaaauaaucuu

SEQ ID NO: 18010 - RNA, 20 nt, Artificial Sequence
  HTT spacer sequence CTCN PAM
acaagggucauuagccacaa

SEQ ID NO: 18011 - RNA, 20 nt, Artificial Sequence
  HTT spacer sequence CTCN PAM
aacauguaaacuaugacguc

SEQ ID NO: 18012 - RNA, 20 nt, Artificial Sequence
  HTT spacer sequence CTCN PAM
auaacauuuaauuuaaaaau

SEQ ID NO: 18013 - RNA, 20 nt, Artificial Sequence
  HTT spacer sequence CTCN PAM
aagaagucuggcuuuuaagu

SEQ ID NO: 18014 - RNA, 20 nt, Artificial Sequence
  HTT spacer sequence CTCN PAM
agauacuaucaaaaucauca

SEQ ID NO: 18015 - RNA, 20 nt, Artificial Sequence
  HTT spacer sequence CTCN PAM
uaauaaccucagggugagag

SEQ ID NO: 18016 - RNA, 20 nt, Artificial Sequence
  HTT spacer sequence CTCN PAM
gggugagagauggccaacag

SEQ ID NO: 18017 - RNA, 20 nt, Artificial Sequence
  HTT spacer sequence CTCN PAM
cccugagguuauuaugagac

SEQ ID NO: 18018 - RNA, 20 nt, Artificial Sequence
  HTT spacer sequence CTCN PAM
cacccugagguuauuaugag

SEQ ID NO: 18019 - RNA, 20 nt, Artificial Sequence
  HTT spacer sequence CTCN PAM
uguuggccaucucucacccu

SEQ ID NO: 18020 - RNA, 20 nt, Artificial Sequence
  HTT spacer sequence CTCN PAM
acugucuccuguuggccauc

SEQ ID NO: 18021 - RNA, 20 nt, Artificial Sequence
  HTT spacer sequence CTCN PAM
ugguuagugguauaugucug

SEQ ID NO: 18022 - RNA, 20 nt, Artificial Sequence
  HTT spacer sequence CTCN PAM
gucuaguauugucuguuugu

SEQ ID NO: 18023 - RNA, 20 nt, Artificial Sequence
  HTT spacer sequence CTCN PAM
caaaaguugaaagggauaga

SEQ ID NO: 18024 - RNA, 20 nt, Artificial Sequence
  HTT spacer sequence CTCN PAM
uuguucuguuguaauuuuag

SEQ ID NO: 18025 - RNA, 20 nt, Artificial Sequence
  HTT spacer sequence CTCN PAM
aggcugcacugcaacuaaaa

SEQ ID NO: 18026 - RNA, 20 nt, Artificial Sequence
  HTT spacer sequence CTCN PAM
ccaggcugcacugcaacuaa

SEQ ID NO: 18027 - RNA, 20 nt, Artificial Sequence
  HTT spacer sequence CTCN PAM
cugauggcuuuugggguauu

SEQ ID NO: 18028 - RNA, 20 nt, Artificial Sequence
  HTT spacer sequence CTCN PAM
ucgcugauggcuuuuggggu

SEQ ID NO: 18029 - RNA, 20 nt, Artificial Sequence
  HTT spacer sequence CTCN PAM
uccucgcugauggcuuuugg

SEQ ID NO: 18030 - RNA, 20 nt, Artificial Sequence
  HTT spacer sequence CTCN PAM
uccuccucgcugauggcuuu

SEQ ID NO: 18031 - RNA, 20 nt, Artificial Sequence
  HTT spacer sequence CTCN PAM
guguguuuggaucuacuucc

SEQ ID NO: 18032 - RNA, 20 nt, Artificial Sequence
  HTT spacer sequence CTCN PAM
ggacccauuuuuuucuuaca

SEQ ID NO: 18033 - RNA, 20 nt, Artificial Sequence
  HTT spacer sequence CTCN PAM
aggacuuaaaaaucauucac

SEQ ID NO: 18034 - RNA, 20 nt, Artificial Sequence
  HTT spacer sequence CTCN PAM
gugaaugauuuuuaaguccu

SEQ ID NO: 18035 - RNA, 20 nt, Artificial Sequence
  HTT spacer sequence CTCN PAM
ccgcggugcacgucucugug

SEQ ID NO: 18036 - RNA, 20 nt, Artificial Sequence
  HTT spacer sequence CTCN PAM
uggaagcgcaccguagcucc

SEQ ID NO: 18037 - RNA, 20 nt, Artificial Sequence
  HTT spacer sequence CTCN PAM
gcuguguccugcugcuccuc

SEQ ID NO: 18038 - RNA, 20 nt, Artificial Sequence
  HTT spacer sequence CTCN PAM
ucccuagcugucagggaggc

SEQ ID NO: 18039 - RNA, 20 nt, Artificial Sequence
  HTT spacer sequence CTCN PAM
cuagcugucagggaggcugu

SEQ ID NO: 18040 - RNA, 20 nt, Artificial Sequence
  HTT spacer sequence CTCN PAM
cugacagcuagggaggagca

SEQ ID NO: 18041 - RNA, 20 nt, Artificial Sequence
  HTT spacer sequence CTCN PAM
uuuguuuccgagugaacacc

SEQ ID NO: 18042 - RNA, 20 nt, Artificial Sequence
  HTT spacer sequence CTCN PAM
gaaacaaaagagcuggcaaa

SEQ ID NO: 18043 - RNA, 20 nt, Artificial Sequence
  HTT spacer sequence CTCN PAM
gacccuacagaccagcuggg

SEQ ID NO: 18044 - RNA, 20 nt, Artificial Sequence
  HTT spacer sequence CTCN PAM
cccaguggcaucccagcugg

SEQ ID NO: 18045 - RNA, 20 nt, Artificial Sequence
  HTT spacer sequence CTCN PAM
cuuccccccgcacuucccac

SEQ ID NO: 18046 - RNA, 20 nt, Artificial Sequence
  HTT spacer sequence CTCN PAM
gcaguuauucugagauccuu

SEQ ID NO: 18047 - RNA, 20 nt, Artificial Sequence
  HTT spacer sequence CTCN PAM
gaauaacugcagaguguggg

SEQ ID NO: 18048 - RNA, 20 nt, Artificial Sequence
  HTT spacer sequence CTCN PAM
aggaucucagaauaacugca

SEQ ID NO: 18049 - RNA, 20 nt, Artificial Sequence
  HTT spacer sequence CTCN PAM
gaaauuaaugcucggccucu

SEQ ID NO: 18050 - RNA, 20 nt, Artificial Sequence
  HTT spacer sequence CTCN PAM
gccucuggucagcaagcaac

SEQ ID NO: 18051 - RNA, 20 nt, Artificial Sequence
  HTT spacer sequence CTCN PAM
ggucagcaagcaacaaccuu

SEQ ID NO: 18052 - RNA, 20 nt, Artificial Sequence
  HTT spacer sequence CTCN PAM
acaaaagguuguugcuugcu

SEQ ID NO: 18053 - RNA, 20 nt, Artificial Sequence
  HTT spacer sequence CTCN PAM
ugugggaaacauuuauuuau

SEQ ID NO: 18054 - RNA, 20 nt, Artificial Sequence
  HTT spacer sequence CTCN PAM
gugucagguucagccaucug

SEQ ID NO: 18055 - RNA, 20 nt, Artificial Sequence
  HTT spacer sequence CTCN PAM
caauucuagaguagguauuu

SEQ ID NO: 18056 - RNA, 20 nt, Artificial Sequence
  HTT spacer sequence CTCN PAM
agaauugggaggaaagugca

SEQ ID NO: 18057 - RNA, 20 nt, Artificial Sequence
  HTT spacer sequence CTCN PAM
caacaggcacugccaccauu

SEQ ID NO: 18058 - RNA, 20 nt, Artificial Sequence
  HTT spacer sequence CTCN PAM
gugggacaggcaacaggggc

SEQ ID NO: 18059 - RNA, 20 nt, Artificial Sequence
  HTT spacer sequence CTCN PAM
ccuggagccuguccacacau

SEQ ID NO: 18060 - RNA, 20 nt, Artificial Sequence
  HTT spacer sequence CTCN PAM
aggugaggcacccccaccuc

SEQ ID NO: 18061 - RNA, 20 nt, Artificial Sequence
  HTT spacer sequence CTCN PAM
agguaagcgugcuguguaaa

SEQ ID NO: 18062 - RNA, 20 nt, Artificial Sequence
  HTT spacer sequence CTCN PAM
guggcucaggaaacacgccu

SEQ ID NO: 18063 - RNA, 20 nt, Artificial Sequence
  HTT spacer sequence CTCN PAM
ggaaacacgccuuuucaauc

SEQ ID NO: 18064 - RNA, 20 nt, Artificial Sequence
  HTT spacer sequence CTCN PAM
ugauugaaaaggcguguuuc

SEQ ID NO: 18065 - RNA, 20 nt, Artificial Sequence
  HTT spacer sequence CTCN PAM
ccgcuuuugugcaauccugg

SEQ ID NO: 18066 - RNA, 20 nt, Artificial Sequence
  HTT spacer sequence CTCN PAM
auccacaaccaggauugcac

SEQ ID NO: 18067 - RNA, 20 nt, Artificial Sequence
  HTT spacer sequence CTCN PAM
ucugguucccgguucaaggu

SEQ ID NO: 18068 - RNA, 20 nt, Artificial Sequence
  HTT spacer sequence CTCN PAM
aauuacaaaaccuugaaccg

SEQ ID NO: 18069 - RNA, 20 nt, Artificial Sequence
  HTT spacer sequence CTCN PAM
gaauuuguaucucaaaccuc

SEQ ID NO: 18070 - RNA, 20 nt, Artificial Sequence
  HTT spacer sequence CTCN PAM
aaccucuguggguccuucag

SEQ ID NO: 18071 - RNA, 20 nt, Artificial Sequence
  HTT spacer sequence CTCN PAM
guggguccuucaggcuucag

SEQ ID NO: 18072 - RNA, 20 nt, Artificial Sequence
  HTT spacer sequence CTCN PAM
cuacucugcaucuuccagcc

SEQ ID NO: 18073 - RNA, 20 nt, Artificial Sequence
  HTT spacer sequence CTCN PAM
gcaucuuccagccgaguggc

SEQ ID NO: 18074 - RNA, 20 nt, Artificial Sequence
  HTT spacer sequence CTCN PAM
gcuggaagaugcagaguagg

SEQ ID NO: 18075 - RNA, 20 nt, Artificial Sequence
  HTT spacer sequence CTCN PAM
ggcuguggauccugugcuuc

SEQ ID NO: 18076 - RNA, 20 nt, Artificial Sequence
  HTT spacer sequence CTCN PAM
ccacagaagcacaggaucca

SEQ ID NO: 18077 - RNA, 20 nt, Artificial Sequence
  HTT spacer sequence CTCN PAM
auguaaagcaccuggaacgg

SEQ ID NO: 18078 - RNA, 20 nt, Artificial Sequence
  HTT spacer sequence CTCN PAM
acaaaugcuaucaugauuuu

SEQ ID NO: 18079 - RNA, 20 nt, Artificial Sequence
  HTT spacer sequence CTCN PAM
acuguuuuaaagcaauggaa

SEQ ID NO: 18080 - RNA, 20 nt, Artificial Sequence
  HTT spacer sequence CTCN PAM
aaccgccaagaugucucaac

SEQ ID NO: 18081 - RNA, 20 nt, Artificial Sequence
  HTT spacer sequence CTCN PAM
aacucaaaccgccaagaugu

SEQ ID NO: 18082 - RNA, 20 nt, Artificial Sequence
  HTT spacer sequence CTCN PAM
uuaggcaagagugggaagcu

SEQ ID NO: 18083 - RNA, 20 nt, Artificial Sequence
  HTT spacer sequence CTCN PAM
ugccuaaagagggccauggg

SEQ ID NO: 18084 - RNA, 20 nt, Artificial Sequence
  HTT spacer sequence CTCN PAM
auaggacguuacuucuuaaa

SEQ ID NO: 18085 - RNA, 20 nt, Artificial Sequence
  HTT spacer sequence CTCN PAM
cgccuguaaucccagcacuu

SEQ ID NO: 18086 - RNA, 20 nt, Artificial Sequence
  HTT spacer sequence CTCN PAM
caaagugcugggauuacagg

SEQ ID NO: 18087 - RNA, 20 nt, Artificial Sequence
  HTT spacer sequence CTCN PAM
gccucccaaagugcugggau

SEQ ID NO: 18088 - RNA, 20 nt, Artificial Sequence
  HTT spacer sequence CTCN PAM
ugauccgcccgccucggccu

SEQ ID NO: 18089 - RNA, 20 nt, Artificial Sequence
  HTT spacer sequence CTCN PAM
ugaccucgugauccgcccgc

SEQ ID NO: 18090 - RNA, 20 nt, Artificial Sequence
  HTT spacer sequence CTCN PAM
aucuccugaccucgugaucc

SEQ ID NO: 18091 - RNA, 20 nt, Artificial Sequence
  HTT spacer sequence CTCN PAM
acuaaaaauacaaaaaauua

SEQ ID NO: 18092 - RNA, 20 nt, Artificial Sequence
  HTT spacer sequence CTCN PAM
caaguagcugggacuacagg

SEQ ID NO: 18093 - RNA, 20 nt, Artificial Sequence
  HTT spacer sequence CTCN PAM
gccucccaaguagcugggac

SEQ ID NO: 18094 - RNA, 20 nt, Artificial Sequence
  HTT spacer sequence CTCN PAM
ugccucagccucccaaguag

SEQ ID NO: 18095 - RNA, 20 nt, Artificial Sequence
  HTT spacer sequence CTCN PAM
cggguucacgccauucuccu

SEQ ID NO: 18096 - RNA, 20 nt, Artificial Sequence
  HTT spacer sequence CTCN PAM
gccucccggguucacgccau

SEQ ID NO: 18097 - RNA, 20 nt, Artificial Sequence
  HTT spacer sequence CTCN PAM
cugcaagcuccgccucccgg

SEQ ID NO: 18098 - RNA, 20 nt, Artificial Sequence
  HTT spacer sequence CTCN PAM
gcucacugcaagcuccgccu

SEQ ID NO: 18099 - RNA, 20 nt, Artificial Sequence
  HTT spacer sequence CTCN PAM
agccugggcgacagagcaag

SEQ ID NO: 18100 - RNA, 20 nt, Artificial Sequence
  HTT spacer sequence CTCN PAM
gucgcccaggcuggagugca

SEQ ID NO: 18101 - RNA, 20 nt, Artificial Sequence
  HTT spacer sequence CTCN PAM
gucucaaaaaaaaaaaaaaa

SEQ ID NO: 18102 - RNA, 20 nt, Artificial Sequence
  HTT spacer sequence CTCN PAM
aaaaaaaaaaaaaauauuaa

SEQ ID NO: 18103 - RNA, 20 nt, Artificial Sequence
  HTT spacer sequence CTCN PAM
uuagcguggggcuuaauugc

SEQ ID NO: 18104 - RNA, 20 nt, Artificial Sequence
  HTT spacer sequence CTCN PAM
uuggacuuaagcaauuaagc

SEQ ID NO: 18105 - RNA, 20 nt, Artificial Sequence
  HTT spacer sequence CTCN PAM
auccuaggaaguugcccaaa

SEQ ID NO: 18106 - RNA, 20 nt, Artificial Sequence
  HTT spacer sequence CTCN PAM
uggccuguggguaauagcca

SEQ ID NO: 18107 - RNA, 20 nt, Artificial Sequence
  HTT spacer sequence CTCN PAM
cugccucaacaaaucauauu

SEQ ID NO: 18108 - RNA, 20 nt, Artificial Sequence
  HTT spacer sequence CTCN PAM
acaaaucauauuuuaguagg

SEQ ID NO: 18109 - RNA, 20 nt, Artificial Sequence
  HTT spacer sequence CTCN PAM
agacaccauucuguggaucu

SEQ ID NO: 18110 - RNA, 20 nt, Artificial Sequence
  HTT spacer sequence CTCN PAM
caaggcagacgcuguggaca

SEQ ID NO: 18111 - RNA, 20 nt, Artificial Sequence
  HTT spacer sequence CTCN PAM
agcacucugaccuaggaaag

SEQ ID NO: 18112 - RNA, 20 nt, Artificial Sequence
  HTT spacer sequence CTCN PAM
gaccuaggaaagccagugaa

SEQ ID NO: 18113 - RNA, 20 nt, Artificial Sequence
  HTT spacer sequence CTCN PAM
gcuaguaucaaagggccaug

SEQ ID NO: 18114 - RNA, 20 nt, Artificial Sequence
  HTT spacer sequence CTCN PAM
caggaccugugucugucccu

SEQ ID NO: 18115 - RNA, 20 nt, Artificial Sequence
  HTT spacer sequence CTCN PAM
ggucucccaggaccuguguc

SEQ ID NO: 18116 - RNA, 20 nt, Artificial Sequence
  HTT spacer sequence CTCN PAM
ucuuucucuggucucccagg

SEQ ID NO: 18117 - RNA, 20 nt, Artificial Sequence
  HTT spacer sequence CTCN PAM
gccccucgucuuucucuggu

SEQ ID NO: 18118 - RNA, 20 nt, Artificial Sequence
  HTT spacer sequence CTCN PAM
ucugccccucgucuuucucu

SEQ ID NO: 18119 - RNA, 20 nt, Artificial Sequence
  HTT spacer sequence CTCN PAM
gacuuccuuuaggacaccuc

SEQ ID NO: 18120 - RNA, 20 nt, Artificial Sequence
  HTT spacer sequence CTCN PAM
gccucagacuuccuuuagga

SEQ ID NO: 18121 - RNA, 20 nt, Artificial Sequence
  HTT spacer sequence CTCN PAM
ucagccucagacuuccuuua

SEQ ID NO: 18122 - RNA, 20 nt, Artificial Sequence
  HTT spacer sequence CTCN PAM
gugauaaggccagcagcagc

SEQ ID NO: 18123 - RNA, 20 nt, Artificial Sequence
  HTT spacer sequence CTCN PAM
cugugauaaggccagcagca

SEQ ID NO: 18124 - RNA, 20 nt, Artificial Sequence
  HTT spacer sequence CTCN PAM
ggcccacucucugugauaag

SEQ ID NO: 18125 - RNA, 20 nt, Artificial Sequence
  HTT spacer sequence CTCN PAM
ggccuugguucccagcccuc

SEQ ID NO: 18126 - RNA, 20 nt, Artificial Sequence
  HTT spacer sequence CTCN PAM
gguucaggaccauuccagca

SEQ ID NO: 18127 - RNA, 20 nt, Artificial Sequence
  HTT spacer sequence CTCN PAM
ccauuuucugcugggauugc

SEQ ID NO: 18128 - RNA, 20 nt, Artificial Sequence
  HTT spacer sequence CTCN PAM
gagucuaaguggauuccaca

SEQ ID NO: 18129 - RNA, 20 nt, Artificial Sequence
  HTT spacer sequence CTCN PAM
gaguuggccacugaaggccu

SEQ ID NO: 18130 - RNA, 20 nt, Artificial Sequence
  HTT spacer sequence CTCN PAM
agcuguaacuguggaaucca

SEQ ID NO: 18131 - RNA, 20 nt, Artificial Sequence
  HTT spacer sequence CTCN PAM
cuuaaccguugcuuguuuag

SEQ ID NO: 18132 - RNA, 20 nt, Artificial Sequence
  HTT spacer sequence CTCN PAM
uaaccguugcuuguuuagau

SEQ ID NO: 18133 - RNA, 20 nt, Artificial Sequence
  HTT spacer sequence CTCN PAM
caggcugcagugauauacuu

SEQ ID NO: 18134 - RNA, 20 nt, Artificial Sequence
  HTT spacer sequence CTCN PAM
accauuucugccaccaucuc

SEQ ID NO: 18135 - RNA, 20 nt, Artificial Sequence
  HTT spacer sequence CTCN PAM
gcagucgguguuggccuugg

SEQ ID NO: 18136 - RNA, 20 nt, Artificial Sequence
  HTT spacer sequence CTCN PAM
cgccauugcuaaggaacauc

SEQ ID NO: 18137 - RNA, 20 nt, Artificial Sequence
  HTT spacer sequence CTCN PAM
ccagugggggcacacgugug

SEQ ID NO: 18138 - RNA, 20 nt, Artificial Sequence
  HTT spacer sequence CTCN PAM
uuccuugcagaagaccaagu

SEQ ID NO: 18139 - RNA, 20 nt, Artificial Sequence
  HTT spacer sequence CTCN PAM
cgugugcccagcccagggcc

SEQ ID NO: 18140 - RNA, 20 nt, Artificial Sequence
  HTT spacer sequence CTCN PAM
cacgugugcccagcccaggg

SEQ ID NO: 18141 - RNA, 20 nt, Artificial Sequence
  HTT spacer sequence CTCN PAM
gggcugcggggauucugucc

SEQ ID NO: 18142 - RNA, 20 nt, Artificial Sequence
  HTT spacer sequence CTCN PAM
ggcaccacguguggaggucg

SEQ ID NO: 18143 - RNA, 20 nt, Artificial Sequence
  HTT spacer sequence CTCN PAM
acacguggugccugaggaaa

SEQ ID NO: 18144 - RNA, 20 nt, Artificial Sequence
  HTT spacer sequence CTCN PAM
guucauuuuagaaaacccag

SEQ ID NO: 18145 - RNA, 20 nt, Artificial Sequence
  HTT spacer sequence CTCN PAM
uagggauguagggccucagu

SEQ ID NO: 18146 - RNA, 20 nt, Artificial Sequence
  HTT spacer sequence CTCN PAM
agaaucaggucuaacacuaa

SEQ ID NO: 18147 - RNA, 20 nt, Artificial Sequence
  HTT spacer sequence CTCN PAM
agugagugagauuuuccuuu

SEQ ID NO: 18148 - RNA, 20 nt, Artificial Sequence
  HTT spacer sequence CTCN PAM
agggggugugguuucugguc

SEQ ID NO: 18149 - RNA, 20 nt, Artificial Sequence
  HTT spacer sequence CTCN PAM
cucgagggggugugguuucu

SEQ ID NO: 18150 - RNA, 20 nt, Artificial Sequence
  HTT spacer sequence CTCN PAM
cucacucgaggggguguggu

SEQ ID NO: 18151 - RNA, 20 nt, Artificial Sequence
  HTT spacer sequence CTCN PAM
aaaggaaaaucucacucacu

SEQ ID NO: 18152 - RNA, 20 nt, Artificial Sequence
  HTT spacer sequence CTCN PAM
ugccuguaaucccagcacuu

SEQ ID NO: 18153 - RNA, 20 nt, Artificial Sequence
  HTT spacer sequence CTCN PAM
agugauccgcccaccuuggc

SEQ ID NO: 18154 - RNA, 20 nt, Artificial Sequence
  HTT spacer sequence CTCN PAM
aaauccugaccucaagugau

SEQ ID NO: 18155 - RNA, 20 nt, Artificial Sequence
  HTT spacer sequence CTCN PAM
acuaaaaauauaaaaauuag

SEQ ID NO: 18156 - RNA, 20 nt, Artificial Sequence
  HTT spacer sequence CTCN PAM
ggagacugagacaggagaau

SEQ ID NO: 18157 - RNA, 20 nt, Artificial Sequence
  HTT spacer sequence CTCN PAM
ugaguagcugggauuacagg

SEQ ID NO: 18158 - RNA, 20 nt, Artificial Sequence
  HTT spacer sequence CTCN PAM
gucuccugaguagcugggau

SEQ ID NO: 18159 - RNA, 20 nt, Artificial Sequence
  HTT spacer sequence CTCN PAM
ugucucagucuccugaguag

SEQ ID NO: 18160 - RNA, 20 nt, Artificial Sequence
  HTT spacer sequence CTCN PAM
uggguucaagcgauucuccu

SEQ ID NO: 18161 - RNA, 20 nt, Artificial Sequence
  HTT spacer sequence CTCN PAM
gcuuacugcaaccuucgccu

SEQ ID NO: 18162 - RNA, 20 nt, Artificial Sequence
  HTT spacer sequence CTCN PAM
agccugggcaacagagcaag

SEQ ID NO: 18163 - RNA, 20 nt, Artificial Sequence
  HTT spacer sequence CTCN PAM
guugcccaggcuagagugca

SEQ ID NO: 18164 - RNA, 20 nt, Artificial Sequence
  HTT spacer sequence CTCN PAM
gucucaaaaaaaaaaaaggu

SEQ ID NO: 18165 - RNA, 20 nt, Artificial Sequence
  HTT spacer sequence CTCN PAM
aaaaaaaaaaagguaggugu

SEQ ID NO: 18166 - RNA, 20 nt, Artificial Sequence
  HTT spacer sequence CTCN PAM
uguuaucugaaacaaggguu

SEQ ID NO: 18167 - RNA, 20 nt, Artificial Sequence
  HTT spacer sequence CTCN PAM
ucauguuaucugaaacaagg

SEQ ID NO: 18168 - RNA, 20 nt, Artificial Sequence
  HTT spacer sequence CTCN PAM
agcuaagcuccucauguuau

SEQ ID NO: 18169 - RNA, 20 nt, Artificial Sequence
  HTT spacer sequence CTCN PAM
ucaagcuaagcuccucaugu

SEQ ID NO: 18170 - RNA, 20 nt, Artificial Sequence
  HTT spacer sequence CTCN PAM
ccucaagcuaagcuccucau

SEQ ID NO: 18171 - RNA, 20 nt, Artificial Sequence
  HTT spacer sequence CTCN PAM
cucuccucaagcuaagcucc

SEQ ID NO: 18172 - RNA, 20 nt, Artificial Sequence
  HTT spacer sequence CTCN PAM
aucaacccucacucuccuca

SEQ ID NO: 18173 - RNA, 20 nt, Artificial Sequence
  HTT spacer sequence CTCN PAM
caccagcccgcugaaauaag

SEQ ID NO: 18174 - RNA, 20 nt, Artificial Sequence
  HTT spacer sequence CTCN PAM
ggcaggaaagaaaggccgac

SEQ ID NO: 18175 - RNA, 20 nt, Artificial Sequence
  HTT spacer sequence CTCN PAM
cacccugccaggucggccuu

SEQ ID NO: 18176 - RNA, 20 nt, Artificial Sequence
  HTT spacer sequence CTCN PAM
cugaccuacaccugcuggcu

SEQ ID NO: 18177 - RNA, 20 nt, Artificial Sequence
  HTT spacer sequence CTCN PAM
auucucccugaccuacaccu

SEQ ID NO: 18178 - RNA, 20 nt, Artificial Sequence
  HTT spacer sequence CTCN PAM
ucccugggaccuggcuccau

SEQ ID NO: 18179 - RNA, 20 nt, Artificial Sequence
  HTT spacer sequence CTCN PAM
ggcagccacaagccucuucc

SEQ ID NO: 18180 - RNA, 20 nt, Artificial Sequence
  HTT spacer sequence CTCN PAM
agcauacauacacacacgug

SEQ ID NO: 18181 - RNA, 20 nt, Artificial Sequence
  HTT spacer sequence CTCN PAM
ccagcauacauacacacacg

SEQ ID NO: 18182 - RNA, 20 nt, Artificial Sequence
  HTT spacer sequence CTCN PAM
cuagacucuccagcauacau

SEQ ID NO: 18183 - RNA, 20 nt, Artificial Sequence
  HTT spacer sequence CTCN PAM
aaggacgcaguauuguuuga

SEQ ID NO: 18184 - RNA, 20 nt, Artificial Sequence
  HTT spacer sequence CTCN PAM
ggaucaaacaauacugcguc

SEQ ID NO: 18185 - RNA, 20 nt, Artificial Sequence
  HTT spacer sequence CTCN PAM
caggaucaaacaauacugcg

SEQ ID NO: 18186 - RNA, 20 nt, Artificial Sequence
  HTT spacer sequence CTCN PAM
ucuucggaauaagcccgcca

SEQ ID NO: 18187 - RNA, 20 nt, Artificial Sequence
  HTT spacer sequence CTCN PAM
cuguucugcaacugcuucca

SEQ ID NO: 18188 - RNA, 20 nt, Artificial Sequence
  HTT spacer sequence CTCN PAM
ucccaggaaagccuacaacu

SEQ ID NO: 18189 - RNA, 20 nt, Artificial Sequence
  HTT spacer sequence CTCN PAM
cuucccaggaaagccuacaa

SEQ ID NO: 18190 - RNA, 20 nt, Artificial Sequence
  HTT spacer sequence CTCN PAM
agcaccccugcugcucucuu

SEQ ID NO: 18191 - RNA, 20 nt, Artificial Sequence
  HTT spacer sequence CTCN PAM
cggccccacucuuggugcac

SEQ ID NO: 18192 - RNA, 20 nt, Artificial Sequence
  HTT spacer sequence CTCN PAM
gccccacucuuggugcacag

SEQ ID NO: 18193 - RNA, 20 nt, Artificial Sequence
  HTT spacer sequence CTCN PAM
uggugcacagcgagucacug

SEQ ID NO: 18194 - RNA, 20 nt, Artificial Sequence
  HTT spacer sequence CTCN PAM
cugugcaccaagaguggggc

SEQ ID NO: 18195 - RNA, 20 nt, Artificial Sequence
  HTT spacer sequence CTCN PAM
uaaccagaugcuaaugaacc

SEQ ID NO: 18196 - RNA, 20 nt, Artificial Sequence
  HTT spacer sequence CTCN PAM
uuuggaggggcucguggaga

SEQ ID NO: 18197 - RNA, 20 nt, Artificial Sequence
  HTT spacer sequence CTCN PAM
aaaggagcaguuacugucuc

SEQ ID NO: 18198 - RNA, 20 nt, Artificial Sequence
  HTT spacer sequence CTCN PAM
uggagaccaugcaggagggc

SEQ ID NO: 18199 - RNA, 20 nt, Artificial Sequence
  HTT spacer sequence CTCN PAM
acgagccccuccaaaggagc

SEQ ID NO: 18200 - RNA, 20 nt, Artificial Sequence
  HTT spacer sequence CTCN PAM
ugcauggucuccacgagccc

SEQ ID NO: 18201 - RNA, 20 nt, Artificial Sequence
  HTT spacer sequence CTCN PAM
agaccgugcccuccugcaug

SEQ ID NO: 18202 - RNA, 20 nt, Artificial Sequence
  HTT spacer sequence CTCN PAM
ggacggcaugaccucaagac

SEQ ID NO: 18203 - RNA, 20 nt, Artificial Sequence
  HTT spacer sequence CTCN PAM
ggugugcucuggacggcaug

SEQ ID NO: 18204 - RNA, 20 nt, Artificial Sequence
  HTT spacer sequence CTCN PAM
agcaagcucuucacuggcau

SEQ ID NO: 18205 - RNA, 20 nt, Artificial Sequence
  HTT spacer sequence CTCN PAM
ucacuggcauugaggaguuc

SEQ ID NO: 18206 - RNA, 20 nt, Artificial Sequence
  HTT spacer sequence CTCN PAM
augccagugaagagcuugcu

SEQ ID NO: 18207 - RNA, 20 nt, Artificial Sequence
  HTT spacer sequence CTCN PAM
ucaaugccagugaagagcuu

SEQ ID NO: 18208 - RNA, 20 nt, Artificial Sequence
  HTT spacer sequence CTCN PAM
gggaacuccucaaugccagu

SEQ ID NO: 18209 - RNA, 20 nt, Artificial Sequence
  HTT spacer sequence CTCN PAM
cccuggguggguaccagaga

SEQ ID NO: 18210 - RNA, 20 nt, Artificial Sequence
  HTT spacer sequence CTCN PAM
cuggguggguaccagagagg

SEQ ID NO: 18211 - RNA, 20 nt, Artificial Sequence
  HTT spacer sequence CTCN PAM
gguacccacccagggagaga

SEQ ID NO: 18212 - RNA, 20 nt, Artificial Sequence
  HTT spacer sequence CTCN PAM
cugguacccacccagggaga

SEQ ID NO: 18213 - RNA, 20 nt, Artificial Sequence
  HTT spacer sequence CTCN PAM
ucucugguacccacccaggg

SEQ ID NO: 18214 - RNA, 20 nt, Artificial Sequence
  HTT spacer sequence CTCN PAM
ccuaugcuccucucugguac

SEQ ID NO: 18215 - RNA, 20 nt, Artificial Sequence
  HTT spacer sequence CTCN PAM
uuaaaucgguuaugcucccc

SEQ ID NO: 18216 - RNA, 20 nt, Artificial Sequence
  HTT spacer sequence CTCN PAM
cuuuaaaucgguuaugcucc

SEQ ID NO: 18217 - RNA, 20 nt, Artificial Sequence
  HTT spacer sequence CTCN PAM
ccacaggaaagcccucucuu

SEQ ID NO: 18218 - RNA, 20 nt, Artificial Sequence
  HTT spacer sequence CTCN PAM
uaccucaccacaggaaagcc

SEQ ID NO: 18219 - RNA, 20 nt, Artificial Sequence
  HTT spacer sequence CTCN PAM
augauaaugaccagcuaauc

SEQ ID NO: 18220 - RNA, 20 nt, Artificial Sequence
  HTT spacer sequence CTCN PAM
gccuuugugcagaugggcug

SEQ ID NO: 18221 - RNA, 20 nt, Artificial Sequence
  HTT spacer sequence CTCN PAM
cugaaggcauguaagcugag

SEQ ID NO: 18222 - RNA, 20 nt, Artificial Sequence
  HTT spacer sequence CTCN PAM
gcuuacaugccuucagugag

SEQ ID NO: 18223 - RNA, 20 nt, Artificial Sequence
  HTT spacer sequence CTCN PAM
cggucuggccagcucagcuu

SEQ ID NO: 18224 - RNA, 20 nt, Artificial Sequence
  HTT spacer sequence CTCN PAM
ggauucuucugugcauggca

SEQ ID NO: 18225 - RNA, 20 nt, Artificial Sequence
  HTT spacer sequence CTCN PAM
gacaagugccaugcacagaa

SEQ ID NO: 18226 - RNA, 20 nt, Artificial Sequence
  HTT spacer sequence CTCN PAM
cgcacagagaacuggacuuc

SEQ ID NO: 18227 - RNA, 20 nt, Artificial Sequence
  HTT spacer sequence CTCN PAM
gugcgugaggugcucagaca

SEQ ID NO: 18228 - RNA, 20 nt, Artificial Sequence
  HTT spacer sequence CTCN PAM
gaaguccaguucucugugcg

SEQ ID NO: 18229 - RNA, 20 nt, Artificial Sequence
  HTT spacer sequence CTCN PAM
gauauguuuauuggcaagca

SEQ ID NO: 18230 - RNA, 20 nt, Artificial Sequence
  HTT spacer sequence CTCN PAM
uugaacgccugccuuuauuc

SEQ ID NO: 18231 - RNA, 20 nt, Artificial Sequence
  HTT spacer sequence CTCN PAM
cccacaaacagcaggugcug

SEQ ID NO: 18232 - RNA, 20 nt, Artificial Sequence
  HTT spacer sequence CTCN PAM
aacuccugccugcuucuccc

SEQ ID NO: 18233 - RNA, 20 nt, Artificial Sequence
  HTT spacer sequence CTCN PAM
ugccugcuucucccagcacu

SEQ ID NO: 18234 - RNA, 20 nt, Artificial Sequence
  HTT spacer sequence CTCN PAM
cagcacucccugaguggggu

SEQ ID NO: 18235 - RNA, 20 nt, Artificial Sequence
  HTT spacer sequence CTCN PAM
cugaguggggugugccagca

SEQ ID NO: 18236 - RNA, 20 nt, Artificial Sequence
  HTT spacer sequence CTCN PAM
gggagugcugggagaagcag

SEQ ID NO: 18237 - RNA, 20 nt, Artificial Sequence
  HTT spacer sequence CTCN PAM
ggaugaggacaggaaguggg

SEQ ID NO: 18238 - RNA, 20 nt, Artificial Sequence
  HTT spacer sequence CTCN PAM
uccugaggcugcuggcacac

SEQ ID NO: 18239 - RNA, 20 nt, Artificial Sequence
  HTT spacer sequence CTCN PAM
cacuuccuguccucauccug

SEQ ID NO: 18240 - RNA, 20 nt, Artificial Sequence
  HTT spacer sequence CTCN PAM
gcccucccacuuccuguccu

SEQ ID NO: 18241 - RNA, 20 nt, Artificial Sequence
  HTT spacer sequence CTCN PAM
caaaucugcucugcccuccc

SEQ ID NO: 18242 - RNA, 20 nt, Artificial Sequence
  HTT spacer sequence CTCN PAM
aacugcuuccugggacuucc

SEQ ID NO: 18243 - RNA, 20 nt, Artificial Sequence
  HTT spacer sequence CTCN PAM
cccagaaaacagcuccaacu

SEQ ID NO: 18244 - RNA, 20 nt, Artificial Sequence
  HTT spacer sequence CTCN PAM
gggacaguguugggguagug

SEQ ID NO: 18245 - RNA, 20 nt, Artificial Sequence
  HTT spacer sequence CTCN PAM
cuaccccaacacugucccag

SEQ ID NO: 18246 - RNA, 20 nt, Artificial Sequence
  HTT spacer sequence CTCN PAM
ucacuaccccaacacugucc

SEQ ID NO: 18247 - RNA, 20 nt, Artificial Sequence
  HTT spacer sequence CTCN PAM
cuccucacuaccccaacacu

SEQ ID NO: 18248 - RNA, 20 nt, Artificial Sequence
  HTT spacer sequence CTCN PAM
acugggcucccuccucacua

SEQ ID NO: 18249 - RNA, 20 nt, Artificial Sequence
  HTT spacer sequence CTCN PAM
ccacugggcucccuccucac

SEQ ID NO: 18250 - RNA, 20 nt, Artificial Sequence
  HTT spacer sequence CTCN PAM
caguaugucuguccugacuc

SEQ ID NO: 18251 - RNA, 20 nt, Artificial Sequence
  HTT spacer sequence CTCN PAM
acucggaugaugucacuucc

SEQ ID NO: 18252 - RNA, 20 nt, Artificial Sequence
  HTT spacer sequence CTCN PAM
gaugaugucacuuccuuuuc

SEQ ID NO: 18253 - RNA, 20 nt, Artificial Sequence
  HTT spacer sequence CTCN PAM
gguguggaagcuuggauggu

SEQ ID NO: 18254 - RNA, 20 nt, Artificial Sequence
  HTT spacer sequence CTCN PAM
cgguuugggugaccauccaa

SEQ ID NO: 18255 - RNA, 20 nt, Artificial Sequence
  HTT spacer sequence CTCN PAM
gggaaugcugugccaaaauc

SEQ ID NO: 18256 - RNA, 20 nt, Artificial Sequence
  HTT spacer sequence CTCN PAM
acggggaucucagggaaugc

SEQ ID NO: 18257 - RNA, 20 nt, Artificial Sequence
  HTT spacer sequence CTCN PAM
aggaaaaggaagucuuuaag

SEQ ID NO: 18258 - RNA, 20 nt, Artificial Sequence
  HTT spacer sequence CTCN PAM
uuaaagacuuccuuuuccug

SEQ ID NO: 18259 - RNA, 20 nt, Artificial Sequence
  HTT spacer sequence CTCN PAM
uggggccucuccuucagguc

SEQ ID NO: 18260 - RNA, 20 nt, Artificial Sequence
  HTT spacer sequence CTCN PAM
ccuucaggucaccauugucg

SEQ ID NO: 18261 - RNA, 20 nt, Artificial Sequence
  HTT spacer sequence CTCN PAM
uucaggucaccauugucgga

SEQ ID NO: 18262 - RNA, 20 nt, Artificial Sequence
  HTT spacer sequence CTCN PAM
cgguagauguccgacaaugg

SEQ ID NO: 18263 - RNA, 20 nt, Artificial Sequence
  HTT spacer sequence CTCN PAM
ggauuuccucccgguagaug

SEQ ID NO: 18264 - RNA, 20 nt, Artificial Sequence
  HTT spacer sequence CTCN PAM
uuugacuccagaaaagauuu

SEQ ID NO: 18265 - RNA, 20 nt, Artificial Sequence
  HTT spacer sequence CTCN PAM
agaaaagauuuaagcaugau

SEQ ID NO: 18266 - RNA, 20 nt, Artificial Sequence
  HTT spacer sequence CTCN PAM
uuuuauacugagaaaauaga

SEQ ID NO: 18267 - RNA, 20 nt, Artificial Sequence
  HTT spacer sequence CTCN PAM
guauaaaaggaguuuugcca

SEQ ID NO: 18268 - RNA, 20 nt, Artificial Sequence
  HTT spacer sequence CTCN PAM
cguuguccacuacacaugaa

SEQ ID NO: 18269 - RNA, 20 nt, Artificial Sequence
  HTT spacer sequence CTCN PAM
gaauguuuucuuguguucac

SEQ ID NO: 18270 - RNA, 20 nt, Artificial Sequence
  HTT spacer sequence CTCN PAM
gugguccauuuucucauaug

SEQ ID NO: 18271 - RNA, 20 nt, Artificial Sequence
  HTT spacer sequence CTCN PAM
uaugggaacaagcagacggg

SEQ ID NO: 18272 - RNA, 20 nt, Artificial Sequence
  HTT spacer sequence CTCN PAM
cgucugcuuguucccauaug

SEQ ID NO: 18273 - RNA, 20 nt, Artificial Sequence
  HTT spacer sequence CTCN PAM
aucugcucccgucugcuugu

SEQ ID NO: 18274 - RNA, 20 nt, Artificial Sequence
  HTT spacer sequence CTCN PAM
ccuuccccagagccuagagg

SEQ ID NO: 18275 - RNA, 20 nt, Artificial Sequence
  HTT spacer sequence CTCN PAM
ggggaaggcgagugccaaga

SEQ ID NO: 18276 - RNA, 20 nt, Artificial Sequence
  HTT spacer sequence CTCN PAM
aggcucuggggaaggcgagu

SEQ ID NO: 18277 - RNA, 20 nt, Artificial Sequence
  HTT spacer sequence CTCN PAM
ccaugcugccucuaggcucu

SEQ ID NO: 18278 - RNA, 20 nt, Artificial Sequence
  HTT spacer sequence CTCN PAM
gacaguccuggucugcuucc

SEQ ID NO: 18279 - RNA, 20 nt, Artificial Sequence
  HTT spacer sequence CTCN PAM
uaccugagcagcgcagggca

SEQ ID NO: 18280 - RNA, 20 nt, Artificial Sequence
  HTT spacer sequence CTCN PAM
gguaggagggcuggaagcag

SEQ ID NO: 18281 - RNA, 20 nt, Artificial Sequence
  HTT spacer sequence CTCN PAM
agagacccucaguuuuguca

SEQ ID NO: 18282 - RNA, 20 nt, Artificial Sequence
  HTT spacer sequence CTCN PAM
agagguuagacggacuugcc

SEQ ID NO: 18283 - RNA, 20 nt, Artificial Sequence
  HTT spacer sequence CTCN PAM
guuuugucauauguaaaaug

SEQ ID NO: 18284 - RNA, 20 nt, Artificial Sequence
  HTT spacer sequence CTCN PAM
ugccaucaaauaggggcaaa

SEQ ID NO: 18285 - RNA, 20 nt, Artificial Sequence
  HTT spacer sequence CTCN PAM
gugacugugcccugcugugg

SEQ ID NO: 18286 - RNA, 20 nt, Artificial Sequence
  HTT spacer sequence CTCN PAM
acuguccaguccucucccca

SEQ ID NO: 18287 - RNA, 20 nt, Artificial Sequence
  HTT spacer sequence CTCN PAM
ccccagucccucgggcuucu

SEQ ID NO: 18288 - RNA, 20 nt, Artificial Sequence
  HTT spacer sequence CTCN PAM
ccagucccucgggcuucugc

SEQ ID NO: 18289 - RNA, 20 nt, Artificial Sequence
  HTT spacer sequence CTCN PAM
ggcuucugcagauuugaggc

SEQ ID NO: 18290 - RNA, 20 nt, Artificial Sequence
  HTT spacer sequence CTCN PAM
aaucugcagaagcccgaggg

SEQ ID NO: 18291 - RNA, 20 nt, Artificial Sequence
  HTT spacer sequence CTCN PAM
ugccacaaccuucugggauc

SEQ ID NO: 18292 - RNA, 20 nt, Artificial Sequence
  HTT spacer sequence CTCN PAM
acuuuccccuuuauaauuca

SEQ ID NO: 18293 - RNA, 20 nt, Artificial Sequence
  HTT spacer sequence CTCN PAM
uuggacauugaauuauaaag

SEQ ID NO: 18294 - RNA, 20 nt, Artificial Sequence
  HTT spacer sequence CTCN PAM
cuuuggacauugaauuauaa

SEQ ID NO: 18295 - RNA, 20 nt, Artificial Sequence
  HTT spacer sequence CTCN PAM
gggcucucuuuggacauuga

SEQ ID NO: 18296 - RNA, 20 nt, Artificial Sequence
  HTT spacer sequence CTCN PAM
cgccagcugccucacggagc

SEQ ID NO: 18297 - RNA, 20 nt, Artificial Sequence
  HTT spacer sequence CTCN PAM
cggagcuccuccucuuccug

SEQ ID NO: 18298 - RNA, 20 nt, Artificial Sequence
  HTT spacer sequence CTCN PAM
gugaggcagcuggcgugagg

SEQ ID NO: 18299 - RNA, 20 nt, Artificial Sequence
  HTT spacer sequence CTCN PAM
uccucuuccuggcugugagg

SEQ ID NO: 18300 - RNA, 20 nt, Artificial Sequence
  HTT spacer sequence CTCN PAM
ucuuccuggcugugaggauc

SEQ ID NO: 18301 - RNA, 20 nt, Artificial Sequence
  HTT spacer sequence CTCN PAM
uccuggcugugaggaucggu

SEQ ID NO: 18302 - RNA, 20 nt, Artificial Sequence
  HTT spacer sequence CTCN PAM
cagccaggaagaggaggagc

SEQ ID NO: 18303 - RNA, 20 nt, Artificial Sequence
  HTT spacer sequence CTCN PAM
ugcucucucccccuugccua

SEQ ID NO: 18304 - RNA, 20 nt, Artificial Sequence
  HTT spacer sequence CTCN PAM
cucccccuugccuaacacga

SEQ ID NO: 18305 - RNA, 20 nt, Artificial Sequence
  HTT spacer sequence CTCN PAM
cccccuugccuaacacgagc

SEQ ID NO: 18306 - RNA, 20 nt, Artificial Sequence
  HTT spacer sequence CTCN PAM
cccuugccuaacacgagcac

SEQ ID NO: 18307 - RNA, 20 nt, Artificial Sequence
  HTT spacer sequence CTCN PAM
uguuaggcaagggggagaga

SEQ ID NO: 18308 - RNA, 20 nt, Artificial Sequence
  HTT spacer sequence CTCN PAM
ugaacugcccaucggacgug

SEQ ID NO: 18309 - RNA, 20 nt, Artificial Sequence
  HTT spacer sequence CTCN PAM
uuuucuuuguucauuuuuuu

SEQ ID NO: 18310 - RNA, 20 nt, Artificial Sequence
  HTT spacer sequence CTCN PAM
ccuucucucugucucuuguu

SEQ ID NO: 18311 - RNA, 20 nt, Artificial Sequence
  HTT spacer sequence CTCN PAM
uucucucugucucuuguucu

SEQ ID NO: 18312 - RNA, 20 nt, Artificial Sequence
  HTT spacer sequence CTCN PAM
cugucucuuguucuuucuuu

SEQ ID NO: 18313 - RNA, 20 nt, Artificial Sequence
  HTT spacer sequence CTCN PAM
gucucuuguucuuucuuuac

SEQ ID NO: 18314 - RNA, 20 nt, Artificial Sequence
  HTT spacer sequence CTCN PAM
uguucuuucuuuaccccguu

SEQ ID NO: 18315 - RNA, 20 nt, Artificial Sequence
  HTT spacer sequence CTCN PAM
aguucuccuguccuaagcac

SEQ ID NO: 18316 - RNA, 20 nt, Artificial Sequence
  HTT spacer sequence CTCN PAM
uguccuaagcaccccauccc

SEQ ID NO: 18317 - RNA, 20 nt, Artificial Sequence
  HTT spacer sequence CTCN PAM
cuggccuuaccacaaguggc

SEQ ID NO: 18318 - RNA, 20 nt, Artificial Sequence
  HTT spacer sequence CTCN PAM
ggccuuaccacaaguggcgu

SEQ ID NO: 18319 - RNA, 20 nt, Artificial Sequence
  HTT spacer sequence CTCN PAM
gacaucaugauggggacaug

SEQ ID NO: 18320 - RNA, 20 nt, Artificial Sequence
  HTT spacer sequence CTCN PAM
aaugcagcucaucaauaggg

SEQ ID NO: 18321 - RNA, 20 nt, Artificial Sequence
  HTT spacer sequence CTCN PAM
ucaauagggauggagggucu

SEQ ID NO: 18322 - RNA, 20 nt, Artificial Sequence
  HTT spacer sequence CTCN PAM
aucccuauugaugagcugca

SEQ ID NO: 18323 - RNA, 20 nt, Artificial Sequence
  HTT spacer sequence CTCN PAM
uuuuaaucuauucuucuaga

SEQ ID NO: 18324 - RNA, 20 nt, Artificial Sequence
  HTT spacer sequence CTCN PAM
gaccugucuagaagaauaga

SEQ ID NO: 18325 - RNA, 20 nt, Artificial Sequence
  HTT spacer sequence CTCN PAM
auaaagcugcuaaaaauuua

SEQ ID NO: 18326 - RNA, 20 nt, Artificial Sequence
  HTT spacer sequence CTCN PAM
aagcggacagcuugguggcc

SEQ ID NO: 18327 - RNA, 20 nt, Artificial Sequence
  HTT spacer sequence CTCN PAM
guggauaaaacuaauggcca

SEQ ID NO: 18328 - RNA, 20 nt, Artificial Sequence
  HTT spacer sequence CTCN PAM
gggcuggacuccagggaaga

SEQ ID NO: 18329 - RNA, 20 nt, Artificial Sequence
  HTT spacer sequence CTCN PAM
agggaagauuuuagcccauu

SEQ ID NO: 18330 - RNA, 20 nt, Artificial Sequence
  HTT spacer sequence CTCN PAM
cuaaaugggcuaaaaucuuc

SEQ ID NO: 18331 - RNA, 20 nt, Artificial Sequence
  HTT spacer sequence CTCN PAM
ugcagggccagggccacuuc

SEQ ID NO: 18332 - RNA, 20 nt, Artificial Sequence
  HTT spacer sequence CTCN PAM
acuggggguugaccaggcug

SEQ ID NO: 18333 - RNA, 20 nt, Artificial Sequence
  HTT spacer sequence CTCN PAM
caugugucucggacagugca

SEQ ID NO: 18334 - RNA, 20 nt, Artificial Sequence
  HTT spacer sequence CTCN PAM
ugugucucggacagugcagc

SEQ ID NO: 18335 - RNA, 20 nt, Artificial Sequence
  HTT spacer sequence CTCN PAM
gacagugcagccgaugucua

SEQ ID NO: 18336 - RNA, 20 nt, Artificial Sequence
  HTT spacer sequence CTCN PAM
augaugaaauggaggggaua

SEQ ID NO: 18337 - RNA, 20 nt, Artificial Sequence
  HTT spacer sequence CTCN PAM
auuucaucauugaggaaacc

SEQ ID NO: 18338 - RNA, 20 nt, Artificial Sequence
  HTT spacer sequence CTCN PAM
cacaguucuaugaugcgggg

SEQ ID NO: 18339 - RNA, 20 nt, Artificial Sequence
  HTT spacer sequence CTCN PAM
cugcccuuggcguggagccu

SEQ ID NO: 18340 - RNA, 20 nt, Artificial Sequence
  HTT spacer sequence CTCN PAM
acgccaagggcagugagucc

SEQ ID NO: 18341 - RNA, 20 nt, Artificial Sequence
  HTT spacer sequence CTCN PAM
aggggccgugcugugucggc

SEQ ID NO: 18342 - RNA, 20 nt, Artificial Sequence
  HTT spacer sequence CTCN PAM
ccguuacaggcuugagaagg

SEQ ID NO: 18343 - RNA, 20 nt, Artificial Sequence
  HTT spacer sequence CTCN PAM
guuacaggcuugagaagggu

SEQ ID NO: 18344 - RNA, 20 nt, Artificial Sequence
  HTT spacer sequence CTCN PAM
agccuguaacggagagcuga

SEQ ID NO: 18345 - RNA, 20 nt, Artificial Sequence
  HTT spacer sequence CTCN PAM
cucauguaacauuuauauuu

SEQ ID NO: 18346 - RNA, 20 nt, Artificial Sequence
  HTT spacer sequence CTCN PAM
cauguaacauuuauauuucu

SEQ ID NO: 18347 - RNA, 20 nt, Artificial Sequence
  HTT spacer sequence CTCN PAM
uguaacauuuauauuucuag

SEQ ID NO: 18348 - RNA, 20 nt, Artificial Sequence
  HTT spacer sequence CTCN PAM
guuugaagaaacuugggcca

SEQ ID NO: 18349 - RNA, 20 nt, Artificial Sequence
  HTT spacer sequence CTCN PAM
uugguguccuggugacgcag

SEQ ID NO: 18350 - RNA, 20 nt, Artificial Sequence
  HTT spacer sequence CTCN PAM
ugauggagcaggaggagagc

SEQ ID NO: 18351 - RNA, 20 nt, Artificial Sequence
  HTT spacer sequence CTCN PAM
aucacgaggggcugcgucac

SEQ ID NO: 18352 - RNA, 20 nt, Artificial Sequence
  HTT spacer sequence CTCN PAM
ugcuccaucacgaggggcug

SEQ ID NO: 18353 - RNA, 20 nt, Artificial Sequence
  HTT spacer sequence CTCN PAM
uccugcuccaucacgagggg

SEQ ID NO: 18354 - RNA, 20 nt, Artificial Sequence
  HTT spacer sequence CTCN PAM
ccuccugcuccaucacgagg

SEQ ID NO: 18355 - RNA, 20 nt, Artificial Sequence
  HTT spacer sequence CTCN PAM
uaccuuauuuuugaaagagu

SEQ ID NO: 18356 - RNA, 20 nt, Artificial Sequence
  HTT spacer sequence CTCN PAM
uucaaaaauaagguaagaga

SEQ ID NO: 18357 - RNA, 20 nt, Artificial Sequence
  HTT spacer sequence CTCN PAM
ggaauaucagucaagacacc

SEQ ID NO: 18358 - RNA, 20 nt, Artificial Sequence
  HTT spacer sequence CTCN PAM
gcaggcuuugucccugcucu

SEQ ID NO: 18359 - RNA, 20 nt, Artificial Sequence
  HTT spacer sequence CTCN PAM
gaauauugauaaacuaaaag

SEQ ID NO: 18360 - RNA, 20 nt, Artificial Sequence
  HTT spacer sequence CTCN PAM
ucugaauauugauaaacuaa

SEQ ID NO: 18361 - RNA, 20 nt, Artificial Sequence
  HTT spacer sequence CTCN PAM
uggccuuuauaaagugccuu

SEQ ID NO: 18362 - RNA, 20 nt, Artificial Sequence
  HTT spacer sequence CTCN PAM
gcaagacauuagaaaaauga

SEQ ID NO: 18363 - RNA, 20 nt, Artificial Sequence
  HTT spacer sequence CTCN PAM
gguacagcggagccagcaga

SEQ ID NO: 18364 - RNA, 20 nt, Artificial Sequence
  HTT spacer sequence CTCN PAM
gcuguaccagagcacaguua

SEQ ID NO: 18365 - RNA, 20 nt, Artificial Sequence
  HTT spacer sequence CTCN PAM
cagaaaugacaguuuggagg

SEQ ID NO: 18366 - RNA, 20 nt, Artificial Sequence
  HTT spacer sequence CTCN PAM
aaacugucauuucugugagu

SEQ ID NO: 18367 - RNA, 20 nt, Artificial Sequence
  HTT spacer sequence CTCN PAM
uacauuuuacaggccuugcu

SEQ ID NO: 18368 - RNA, 20 nt, Artificial Sequence
  HTT spacer sequence CTCN PAM
aaacaugaauuacuuuuuaa

SEQ ID NO: 18369 - RNA, 20 nt, Artificial Sequence
  HTT spacer sequence CTCN PAM
uuugggcacaaaacuccaaa

SEQ ID NO: 18370 - RNA, 20 nt, Artificial Sequence
  HTT spacer sequence CTCN PAM
gcacacacgggcccugaaac

SEQ ID NO: 18371 - RNA, 20 nt, Artificial Sequence
  HTT spacer sequence CTCN PAM
cggggcacaaggcagggccu

SEQ ID NO: 18372 - RNA, 20 nt, Artificial Sequence
  HTT spacer sequence CTCN PAM
gccugacagaaauccuuugg

SEQ ID NO: 18373 - RNA, 20 nt, Artificial Sequence
  HTT spacer sequence CTCN PAM
ucuuccucccauugaggcag

SEQ ID NO: 18374 - RNA, 20 nt, Artificial Sequence
  HTT spacer sequence CTCN PAM
uccucccauugaggcaggga

SEQ ID NO: 18375 - RNA, 20 nt, Artificial Sequence
  HTT spacer sequence CTCN PAM
cauugaggcagggaagacuc

SEQ ID NO: 18376 - RNA, 20 nt, Artificial Sequence
  HTT spacer sequence CTCN PAM
augggaggaagaggagccuu

SEQ ID NO: 18377 - RNA, 20 nt, Artificial Sequence
  HTT spacer sequence CTCN PAM
ggguucugcaggcagaggug

SEQ ID NO: 18378 - RNA, 20 nt, Artificial Sequence
  HTT spacer sequence CTCN PAM
gccugcagaacccagagucu

SEQ ID NO: 18379 - RNA, 20 nt, Artificial Sequence
  HTT spacer sequence CTCN PAM
uguugacaugugggcucucc

SEQ ID NO: 18380 - RNA, 20 nt, Artificial Sequence
  HTT spacer sequence CTCN PAM
ccuuccaggaagacacagag

SEQ ID NO: 18381 - RNA, 20 nt, Artificial Sequence
  HTT spacer sequence CTCN PAM
uuccaggaagacacagagag

SEQ ID NO: 18382 - RNA, 20 nt, Artificial Sequence
  HTT spacer sequence CTCN PAM
gugucuuccuggaaggagag

SEQ ID NO: 18383 - RNA, 20 nt, Artificial Sequence
  HTT spacer sequence CTCN PAM
cugugucuuccuggaaggag

SEQ ID NO: 18384 - RNA, 20 nt, Artificial Sequence
  HTT spacer sequence CTCN PAM
cuggugcucagugcaaugac

SEQ ID NO: 18385 - RNA, 20 nt, Artificial Sequence
  HTT spacer sequence CTCN PAM
gugcaaugacugugccugug

SEQ ID NO: 18386 - RNA, 20 nt, Artificial Sequence
  HTT spacer sequence CTCN PAM
aagcagcuuacagcuggguu

SEQ ID NO: 18387 - RNA, 20 nt, Artificial Sequence
  HTT spacer sequence CTCN PAM
gaaagcucucgacaccaggu

SEQ ID NO: 18388 - RNA, 20 nt, Artificial Sequence
  HTT spacer sequence CTCN PAM
cgacaccagguuugcuugag

SEQ ID NO: 18389 - RNA, 20 nt, Artificial Sequence
  HTT spacer sequence CTCN PAM
acaccagguuugcuugaguu

SEQ ID NO: 18390 - RNA, 20 nt, Artificial Sequence
  HTT spacer sequence CTCN PAM
agcaaaccuggugucgagag

SEQ ID NO: 18391 - RNA, 20 nt, Artificial Sequence
  HTT spacer sequence CTCN PAM
gggacauagcaggugcuggg

SEQ ID NO: 18392 - RNA, 20 nt, Artificial Sequence
  HTT spacer sequence CTCN PAM
ugcacaggccacacggacgg

SEQ ID NO: 18393 - RNA, 20 nt, Artificial Sequence
  HTT spacer sequence CTCN PAM
uggucagugagaagcuggaa

SEQ ID NO: 18394 - RNA, 20 nt, Artificial Sequence
  HTT spacer sequence CTCN PAM
cugaccaggaggccaccuuu

SEQ ID NO: 18395 - RNA, 20 nt, Artificial Sequence
  HTT spacer sequence CTCN PAM
auaaccccacgucaguuccu

SEQ ID NO: 18396 - RNA, 20 nt, Artificial Sequence
  HTT spacer sequence CTCN PAM
gcuaacgucuuccccuaaau

SEQ ID NO: 18397 - RNA, 20 nt, Artificial Sequence
  HTT spacer sequence CTCN PAM
uuccugcucugcuaacgucu

SEQ ID NO: 18398 - RNA, 20 nt, Artificial Sequence
  HTT spacer sequence CTCN PAM
cggacaggugcucacuuagg

SEQ ID NO: 18399 - RNA, 20 nt, Artificial Sequence
  HTT spacer sequence CTCN PAM
cuuaggaagugaguuucauu

SEQ ID NO: 18400 - RNA, 20 nt, Artificial Sequence
  HTT spacer sequence CTCN PAM
cuuccuaagugagcaccugu

SEQ ID NO: 18401 - RNA, 20 nt, Artificial Sequence
  HTT spacer sequence CTCN PAM
gcuuugccuaaaggaaccug

SEQ ID NO: 18402 - RNA, 20 nt, Artificial Sequence
  HTT spacer sequence CTCN PAM
uuaccuuuuuucuaaaaugu

SEQ ID NO: 18403 - RNA, 20 nt, Artificial Sequence
  HTT spacer sequence CTCN PAM
caaaccuacauuuuagaaaa

SEQ ID NO: 18404 - RNA, 20 nt, Artificial Sequence
  HTT spacer sequence CTCN PAM
gcuuccucccaaaccuacau

SEQ ID NO: 18405 - RNA, 20 nt, Artificial Sequence
  HTT spacer sequence CTCN PAM
gauaaugcucagcuuccucc

SEQ ID NO: 18406 - RNA, 20 nt, Artificial Sequence
  HTT spacer sequence CTCN PAM
acaaucccucugauaaugcu

SEQ ID NO: 18407 - RNA, 20 nt, Artificial Sequence
  HTT spacer sequence CTCN PAM
ugcuccacaaucccucugau

SEQ ID NO: 18408 - RNA, 20 nt, Artificial Sequence
  HTT spacer sequence CTCN PAM
uugaaaccauugcuugaauc

SEQ ID NO: 18409 - RNA, 20 nt, Artificial Sequence
  HTT spacer sequence CTCN PAM
cuuugaaaccauugcuugaa

SEQ ID NO: 18410 - RNA, 20 nt, Artificial Sequence
  HTT spacer sequence CTCN PAM
cucuuugaaaccauugcuug

SEQ ID NO: 18411 - RNA, 20 nt, Artificial Sequence
  HTT spacer sequence CTCN PAM
gucuccggcuacuacaggua

SEQ ID NO: 18412 - RNA, 20 nt, Artificial Sequence
  HTT spacer sequence CTCN PAM
ggcuacuacagguaccugag

SEQ ID NO: 18413 - RNA, 20 nt, Artificial Sequence
  HTT spacer sequence CTCN PAM
gguaccuguaguagccggag

SEQ ID NO: 18414 - RNA, 20 nt, Artificial Sequence
  HTT spacer sequence CTCN PAM
cccgcacccuuucccucagg

SEQ ID NO: 18415 - RNA, 20 nt, Artificial Sequence
  HTT spacer sequence CTCN PAM
uucuagcccaaguacaaccg

SEQ ID NO: 18416 - RNA, 20 nt, Artificial Sequence
  HTT spacer sequence CTCN PAM
cauucuagcccaaguacaac

SEQ ID NO: 18417 - RNA, 20 nt, Artificial Sequence
  HTT spacer sequence CTCN PAM
ccacaccagugaugcgggaa

SEQ ID NO: 18418 - RNA, 20 nt, Artificial Sequence
  HTT spacer sequence CTCN PAM
ggucuucccgcaucacuggu

SEQ ID NO: 18419 - RNA, 20 nt, Artificial Sequence
  HTT spacer sequence CTCN PAM
gaccacacucaggucuuccc

SEQ ID NO: 18420 - RNA, 20 nt, Artificial Sequence
  HTT spacer sequence CTCN PAM
aacucagaccacacucaggu

SEQ ID NO: 18421 - RNA, 20 nt, Artificial Sequence
  HTT spacer sequence CTCN PAM
ugcuuaugaaaggggcagcg

SEQ ID NO: 18422 - RNA, 20 nt, Artificial Sequence
  HTT spacer sequence CTCN PAM
cugggccugacuaagacucc

SEQ ID NO: 18423 - RNA, 20 nt, Artificial Sequence
  HTT spacer sequence CTCN PAM
uucauuuccagauuuuacuu

SEQ ID NO: 18424 - RNA, 20 nt, Artificial Sequence
  HTT spacer sequence CTCN PAM
ccugccagucaagaaaugag

SEQ ID NO: 18425 - RNA, 20 nt, Artificial Sequence
  HTT spacer sequence CTCN PAM
ugccagucaagaaaugagaa

SEQ ID NO: 18426 - RNA, 20 nt, Artificial Sequence
  HTT spacer sequence CTCN PAM
uuucuugacuggcaggagag

SEQ ID NO: 18427 - RNA, 20 nt, Artificial Sequence
  HTT spacer sequence CTCN PAM
cgggcuguaagaccagcagg

SEQ ID NO: 18428 - RNA, 20 nt, Artificial Sequence
  HTT spacer sequence CTCN PAM
accaaguucaucuacacaag

SEQ ID NO: 18429 - RNA, 20 nt, Artificial Sequence
  HTT spacer sequence CTCN PAM
agcuuuuccuaagaaaccau

SEQ ID NO: 18430 - RNA, 20 nt, Artificial Sequence
  HTT spacer sequence CTCN PAM
ggcccagcugugcccugccc

SEQ ID NO: 18431 - RNA, 20 nt, Artificial Sequence
  HTT spacer sequence CTCN PAM
cugcaccucuccccucccug

SEQ ID NO: 18432 - RNA, 20 nt, Artificial Sequence
  HTT spacer sequence CTCN PAM
ccccucccugggcccugccu

SEQ ID NO: 18433 - RNA, 20 nt, Artificial Sequence
  HTT spacer sequence CTCN PAM
ccucccugggcccugccugu

SEQ ID NO: 18434 - RNA, 20 nt, Artificial Sequence
  HTT spacer sequence CTCN PAM
cugggcccugccugucacug

SEQ ID NO: 18435 - RNA, 20 nt, Artificial Sequence
  HTT spacer sequence CTCN PAM
cccaccaagccuuccgguug

SEQ ID NO: 18436 - RNA, 20 nt, Artificial Sequence
  HTT spacer sequence CTCN PAM
caccaagccuuccgguugug

SEQ ID NO: 18437 - RNA, 20 nt, Artificial Sequence
  HTT spacer sequence CTCN PAM
gaugccugugauagggcagg

SEQ ID NO: 18438 - RNA, 20 nt, Artificial Sequence
  HTT spacer sequence CTCN PAM
ucuuuuaaaccaggugacaa

SEQ ID NO: 18439 - RNA, 20 nt, Artificial Sequence
  HTT spacer sequence CTCN PAM
cuucuuuuaaaccaggugac

SEQ ID NO: 18440 - RNA, 20 nt, Artificial Sequence
  HTT spacer sequence CTCN PAM
aaaguauuuuagcguagagc

SEQ ID NO: 18441 - RNA, 20 nt, Artificial Sequence
  HTT spacer sequence CTCN PAM
acgcuaaaauacuuuugagu

SEQ ID NO: 18442 - RNA, 20 nt, Artificial Sequence
  HTT spacer sequence CTCN PAM
gugauuccguagcuauuuag

SEQ ID NO: 18443 - RNA, 20 nt, Artificial Sequence
  HTT spacer sequence CTCN PAM
uaaauagcuacggaaucaca

SEQ ID NO: 18444 - RNA, 20 nt, Artificial Sequence
  HTT spacer sequence CTCN PAM
uagacacugcguauaacaca

SEQ ID NO: 18445 - RNA, 20 nt, Artificial Sequence
  HTT spacer sequence CTCN PAM
aauguuuauuagggcguuga

SEQ ID NO: 18446 - RNA, 20 nt, Artificial Sequence
  HTT spacer sequence CTCN PAM
guuuacuucaacgcccuaau

SEQ ID NO: 18447 - RNA, 20 nt, Artificial Sequence
  HTT spacer sequence CTCN PAM
aagugcucaguuuacuucaa

SEQ ID NO: 18448 - RNA, 20 nt, Artificial Sequence
  HTT spacer sequence CTCN PAM
uugaaggcuggauccauggc

SEQ ID NO: 18449 - RNA, 20 nt, Artificial Sequence
  HTT spacer sequence CTCN PAM
uaagucaggaggacccagga

SEQ ID NO: 18450 - RNA, 20 nt, Artificial Sequence
  HTT spacer sequence CTCN PAM
ugacuuaugagcuccuugaa

SEQ ID NO: 18451 - RNA, 20 nt, Artificial Sequence
  HTT spacer sequence CTCN PAM
uggguccuccugacuuauga

SEQ ID NO: 18452 - RNA, 20 nt, Artificial Sequence
  HTT spacer sequence CTCN PAM
uuucugccuucuaugacagg

SEQ ID NO: 18453 - RNA, 20 nt, Artificial Sequence
  HTT spacer sequence CTCN PAM
gugccccucuuuucugccuu

SEQ ID NO: 18454 - RNA, 20 nt, Artificial Sequence
  HTT spacer sequence CTCN PAM
cacccaccucugugccccuc

SEQ ID NO: 18455 - RNA, 20 nt, Artificial Sequence
  HTT spacer sequence CTCN PAM
uggagcuccaaggggagcaa

SEQ ID NO: 18456 - RNA, 20 nt, Artificial Sequence
  HTT spacer sequence CTCN PAM
aggagcugccuguguaugcc

SEQ ID NO: 18457 - RNA, 20 nt, Artificial Sequence
  HTT spacer sequence CTCN PAM
aaggggagcaagugcuucca

SEQ ID NO: 18458 - RNA, 20 nt, Artificial Sequence
  HTT spacer sequence CTCN PAM
ccuuggagcuccaggagcug

SEQ ID NO: 18459 - RNA, 20 nt, Artificial Sequence
  HTT spacer sequence CTCN PAM
acgcccccuucccuggaagc

SEQ ID NO: 18460 - RNA, 20 nt, Artificial Sequence
  HTT spacer sequence CTCN PAM
aaaggggccuccacgccccc

SEQ ID NO: 18461 - RNA, 20 nt, Artificial Sequence
  HTT spacer sequence CTCN PAM
uccaaaggggccuccacgcc

SEQ ID NO: 18462 - RNA, 20 nt, Artificial Sequence
  HTT spacer sequence CTCN PAM
gccagaccccagaucaacuu

SEQ ID NO: 18463 - RNA, 20 nt, Artificial Sequence
  HTT spacer sequence CTCN PAM
cgcuaaauguccccagcuaa

SEQ ID NO: 18464 - RNA, 20 nt, Artificial Sequence
  HTT spacer sequence CTCN PAM
ugucuuucugcugggcaucc

SEQ ID NO: 18465 - RNA, 20 nt, Artificial Sequence
  HTT spacer sequence CTCN PAM
ucaugucuuucugcugggca

SEQ ID NO: 18466 - RNA, 20 nt, Artificial Sequence
  HTT spacer sequence CTCN PAM
cgcuccugccggcuguaucu

SEQ ID NO: 18467 - RNA, 20 nt, Artificial Sequence
  HTT spacer sequence CTCN PAM
ugccggcuguaucuggucag

SEQ ID NO: 18468 - RNA, 20 nt, Artificial Sequence
  HTT spacer sequence CTCN PAM
gugcccaggcugaccagaua

SEQ ID NO: 18469 - RNA, 20 nt, Artificial Sequence
  HTT spacer sequence CTCN PAM
gggggacccagauaagcauu

SEQ ID NO: 18470 - RNA, 20 nt, Artificial Sequence
  HTT spacer sequence CTCN PAM
cugggggacccagauaagca

SEQ ID NO: 18471 - RNA, 20 nt, Artificial Sequence
  HTT spacer sequence CTCN PAM
ccugcaacugcugacuccua

SEQ ID NO: 18472 - RNA, 20 nt, Artificial Sequence
  HTT spacer sequence CTCN PAM
uaagcuuuugcagcucagcc

SEQ ID NO: 18473 - RNA, 20 nt, Artificial Sequence
  HTT spacer sequence CTCN PAM
gcccacaaccaguuccuauu

SEQ ID NO: 18474 - RNA, 20 nt, Artificial Sequence
  HTT spacer sequence CTCN PAM
gugaauaggaacugguugug

SEQ ID NO: 18475 - RNA, 20 nt, Artificial Sequence
  HTT spacer sequence CTCN PAM
caccucugugaauaggaacu

SEQ ID NO: 18476 - RNA, 20 nt, Artificial Sequence
  HTT spacer sequence CTCN PAM
gcucccaccucugugaauag

SEQ ID NO: 18477 - RNA, 20 nt, Artificial Sequence
  HTT spacer sequence CTCN PAM
augacaaauaagacugcagc

SEQ ID NO: 18478 - RNA, 20 nt, Artificial Sequence
  HTT spacer sequence CTCN PAM
gucacuuuuucucuaugaca

SEQ ID NO: 18479 - RNA, 20 nt, Artificial Sequence
  HTT spacer sequence CTCN PAM
gcacaaccugggcccuccug

SEQ ID NO: 18480 - RNA, 20 nt, Artificial Sequence
  HTT spacer sequence CTCN PAM
ugccaguggcggcgagggca

SEQ ID NO: 18481 - RNA, 20 nt, Artificial Sequence
  HTT spacer sequence CTCN PAM
ccgccacuggcaggagggcc

SEQ ID NO: 18482 - RNA, 20 nt, Artificial Sequence
  HTT spacer sequence CTCN PAM
cggcugggugccugucuggg

SEQ ID NO: 18483 - RNA, 20 nt, Artificial Sequence
  HTT spacer sequence CTCN PAM
ugcccagacaggcacccagc

SEQ ID NO: 18484 - RNA, 20 nt, Artificial Sequence
  HTT spacer sequence CTCN PAM
gggugcugguguucacaggu

SEQ ID NO: 18485 - RNA, 20 nt, Artificial Sequence
  HTT spacer sequence CTCN PAM
ucagccacgagaagcugcug

SEQ ID NO: 18486 - RNA, 20 nt, Artificial Sequence
  HTT spacer sequence CTCN PAM
uggcugaugagggcaccugu

SEQ ID NO: 18487 - RNA, 20 nt, Artificial Sequence
  HTT spacer sequence CTCN PAM
ggguugaucuguagcagcag

SEQ ID NO: 18488 - RNA, 20 nt, Artificial Sequence
  HTT spacer sequence CTCN PAM
cgcucgggguugaucuguag

SEQ ID NO: 18489 - RNA, 20 nt, Artificial Sequence
  HTT spacer sequence CTCN PAM
ccagcucccgcucgggguug

SEQ ID NO: 18490 - RNA, 20 nt, Artificial Sequence
  HTT spacer sequence CTCN PAM
ugcuccccagcucccgcucg

SEQ ID NO: 18491 - RNA, 20 nt, Artificial Sequence
  HTT spacer sequence CTCN PAM
gccaggucagucucgcgccc

SEQ ID NO: 18492 - RNA, 20 nt, Artificial Sequence
  HTT spacer sequence CTCN PAM
cgcccccgccgccuggccuc

SEQ ID NO: 18493 - RNA, 20 nt, Artificial Sequence
  HTT spacer sequence CTCN PAM
guccguuucuguccucagac

SEQ ID NO: 18494 - RNA, 20 nt, Artificial Sequence
  HTT spacer sequence CTCN PAM
gacuuuggcgcuugacacac

SEQ ID NO: 18495 - RNA, 20 nt, Artificial Sequence
  HTT spacer sequence CTCN PAM
ugggugugucaagcgccaaa

SEQ ID NO: 18496 - RNA, 20 nt, Artificial Sequence
  HTT spacer sequence CTCN PAM
gugcacuuuuuaaaugaaag

SEQ ID NO: 18497 - RNA, 20 nt, Artificial Sequence
  HTT spacer sequence CTCN PAM
gcuugcgggaccuaggaaua

SEQ ID NO: 18498 - RNA, 20 nt, Artificial Sequence
  HTT spacer sequence CTCN PAM
uaacuacuuucuggaauaca

SEQ ID NO: 18499 - RNA, 20 nt, Artificial Sequence
  HTT spacer sequence CTCN PAM
cauguagcgauagagaugug

SEQ ID NO: 18500 - RNA, 20 nt, Artificial Sequence
  HTT spacer sequence CTCN PAM
aucgcuacaugugaggucuc

SEQ ID NO: 18501 - RNA, 20 nt, Artificial Sequence
  HTT spacer sequence CTCN PAM
uacacacaucucuaucgcua

SEQ ID NO: 18502 - RNA, 20 nt, Artificial Sequence
  HTT spacer sequence CTCN PAM
cugucucuuacacacaucuc

SEQ ID NO: 18503 - RNA, 20 nt, Artificial Sequence
  HTT spacer sequence CTCN PAM
cacugucucuuacacacauc

SEQ ID NO: 18504 - RNA, 20 nt, Artificial Sequence
  HTT spacer sequence CTCN PAM
cgguccuugcuuaaguccaa

SEQ ID NO: 18505 - RNA, 20 nt, Artificial Sequence
  HTT spacer sequence CTCN PAM
ccccccuuuuugugucucac

SEQ ID NO: 18506 - RNA, 20 nt, Artificial Sequence
  HTT spacer sequence CTCN PAM
guccucaccccccuuuuugu

SEQ ID NO: 18507 - RNA, 20 nt, Artificial Sequence
  HTT spacer sequence CTCN PAM
acucuguccucaccccccuu

SEQ ID NO: 18508 - RNA, 20 nt, Artificial Sequence
  HTT spacer sequence CTCN PAM
ggaggaaguagacgccauga

SEQ ID NO: 18509 - RNA, 20 nt, Artificial Sequence
  HTT spacer sequence CTCN PAM
ugagcauuucagcugacucc

SEQ ID NO: 18510 - RNA, 20 nt, Artificial Sequence
  HTT spacer sequence CTCN PAM
cggccacgccugcggccccc

SEQ ID NO: 18511 - RNA, 20 nt, Artificial Sequence
  HTT spacer sequence CTCN PAM
uggggggcucccugaguguc

SEQ ID NO: 18512 - RNA, 20 nt, Artificial Sequence
  HTT spacer sequence CTCN PAM
cugagugucccugucccugu

SEQ ID NO: 18513 - RNA, 20 nt, Artificial Sequence
  HTT spacer sequence CTCN PAM
gggagccccccaagagcugg

SEQ ID NO: 18514 - RNA, 20 nt, Artificial Sequence
  HTT spacer sequence CTCN PAM
cacccagaacuggccacagg

SEQ ID NO: 18515 - RNA, 20 nt, Artificial Sequence
  HTT spacer sequence CTCN PAM
gccacuuccuagcaggucac

SEQ ID NO: 18516 - RNA, 20 nt, Artificial Sequence
  HTT spacer sequence CTCN PAM
ucagauaagugaagggauuc

SEQ ID NO: 18517 - RNA, 20 nt, Artificial Sequence
  HTT spacer sequence CTCN PAM
gauaagugaagggauucaag

SEQ ID NO: 18518 - RNA, 20 nt, Artificial Sequence
  HTT spacer sequence CTCN PAM
uaaaauguuauagauuacag

SEQ ID NO: 18519 - RNA, 20 nt, Artificial Sequence
  HTT spacer sequence CTCN PAM
gccuccuaaaauguuauaga

SEQ ID NO: 18520 - RNA, 20 nt, Artificial Sequence
  HTT spacer sequence CTCN PAM
ugccucagccuccuaaaaug

SEQ ID NO: 18521 - RNA, 20 nt, Artificial Sequence
  HTT spacer sequence CTCN PAM
gguaagccuccugccucagc

SEQ ID NO: 18522 - RNA, 20 nt, Artificial Sequence
  HTT spacer sequence CTCN PAM
ggagguugaggcugcaguga

SEQ ID NO: 18523 - RNA, 20 nt, Artificial Sequence
  HTT spacer sequence CTCN PAM
ugagcucagguaagccuccu

SEQ ID NO: 18524 - RNA, 20 nt, Artificial Sequence
  HTT spacer sequence CTCN PAM
accuccugagcucagguaag

SEQ ID NO: 18525 - RNA, 20 nt, Artificial Sequence
  HTT spacer sequence CTCN PAM
cugcagccucaaccuccuga

SEQ ID NO: 18526 - RNA, 20 nt, Artificial Sequence
  HTT spacer sequence CTCN PAM
agccugggcaacagaccagu

SEQ ID NO: 18527 - RNA, 20 nt, Artificial Sequence
  HTT spacer sequence CTCN PAM
gucccuuaaaaaaaaaugua

SEQ ID NO: 18528 - RNA, 20 nt, Artificial Sequence
  HTT spacer sequence CTCN PAM
acgccaugugccaucauaug

SEQ ID NO: 18529 - RNA, 20 nt, Artificial Sequence
  HTT spacer sequence CTCN PAM
accccggugcugugucuuuc

SEQ ID NO: 18530 - RNA, 20 nt, Artificial Sequence
  HTT spacer sequence CTCN PAM
ccggguuccugauuuaguga

SEQ ID NO: 18531 - RNA, 20 nt, Artificial Sequence
  HTT spacer sequence CTCN PAM
uuguagcuuuuguuucugug

SEQ ID NO: 18532 - RNA, 20 nt, Artificial Sequence
  HTT spacer sequence CTCN PAM
uaaguguuucuaaacaccau

SEQ ID NO: 18533 - RNA, 20 nt, Artificial Sequence
  HTT spacer sequence CTCN PAM
gagaguuuccucuucugagu

SEQ ID NO: 18534 - RNA, 20 nt, Artificial Sequence
  HTT spacer sequence CTCN PAM
gagcucauaaguguuucuaa

SEQ ID NO: 18535 - RNA, 20 nt, Artificial Sequence
  HTT spacer sequence CTCN PAM
cagagcucauaaguguuucu

SEQ ID NO: 18536 - RNA, 20 nt, Artificial Sequence
  HTT spacer sequence CTCN PAM
ucugaguuccuggccugcag

SEQ ID NO: 18537 - RNA, 20 nt, Artificial Sequence
  HTT spacer sequence CTCN PAM
gaagaggaaacucucagagc

SEQ ID NO: 18538 - RNA, 20 nt, Artificial Sequence
  HTT spacer sequence CTCN PAM
cugccuguacuguccuguuu

SEQ ID NO: 18539 - RNA, 20 nt, Artificial Sequence
  HTT spacer sequence CTCN PAM
gccuguacuguccuguuuug

SEQ ID NO: 18540 - RNA, 20 nt, Artificial Sequence
  HTT spacer sequence CTCN PAM
cugcuuccugucacugaaac

SEQ ID NO: 18541 - RNA, 20 nt, Artificial Sequence
  HTT spacer sequence CTCN PAM
ucuguccuuucaccuuugac

SEQ ID NO: 18542 - RNA, 20 nt, Artificial Sequence
  HTT spacer sequence CTCN PAM
gccugcccuucagaaacacu

SEQ ID NO: 18543 - RNA, 20 nt, Artificial Sequence
  HTT spacer sequence CTCN PAM
cagccugcccuucagaaaca

SEQ ID NO: 18544 - RNA, 20 nt, Artificial Sequence
  HTT spacer sequence CTCN PAM
cucucagccugcccuucaga

SEQ ID NO: 18545 - RNA, 20 nt, Artificial Sequence
  HTT spacer sequence CTCN PAM
cacucucagccugcccuuca

SEQ ID NO: 18546 - RNA, 20 nt, Artificial Sequence
  HTT spacer sequence CTCN PAM
cugggugccucuggccuugu

SEQ ID NO: 18547 - RNA, 20 nt, Artificial Sequence
  HTT spacer sequence CTCN PAM
ggccuuguccugggcccagg

SEQ ID NO: 18548 - RNA, 20 nt, Artificial Sequence
  HTT spacer sequence CTCN PAM
ggcacagaccagugucccug

SEQ ID NO: 18549 - RNA, 20 nt, Artificial Sequence
  HTT spacer sequence CTCN PAM
guccaguggcaucuaggggc

SEQ ID NO: 18550 - RNA, 20 nt, Artificial Sequence
  HTT spacer sequence CTCN PAM
uucccaaaagcaaguagcgg

SEQ ID NO: 18551 - RNA, 20 nt, Artificial Sequence
  HTT spacer sequence CTCN PAM
cccagaccccuaacccccac

SEQ ID NO: 18552 - RNA, 20 nt, Artificial Sequence
  HTT spacer sequence CTCN PAM
ccucgcccagaccccuaacc

SEQ ID NO: 18553 - RNA, 20 nt, Artificial Sequence
  HTT spacer sequence CTCN PAM
uccuuggccugagagcuguu

SEQ ID NO: 18554 - RNA, 20 nt, Artificial Sequence
  HTT spacer sequence CTCN PAM
uuggccugagagcuguucau

SEQ ID NO: 18555 - RNA, 20 nt, Artificial Sequence
  HTT spacer sequence CTCN PAM
ggccaaggaggagccccugc

SEQ ID NO: 18556 - RNA, 20 nt, Artificial Sequence
  HTT spacer sequence CTCN PAM
caggccaaggaggagccccu

SEQ ID NO: 18557 - RNA, 20 nt, Artificial Sequence
  HTT spacer sequence CTCN PAM
ucgcccacucccugcagggu

SEQ ID NO: 18558 - RNA, 20 nt, Artificial Sequence
  HTT spacer sequence CTCN PAM
cccacucccugcagggugcu

SEQ ID NO: 18559 - RNA, 20 nt, Artificial Sequence
  HTT spacer sequence CTCN PAM
cugcagggugcuggguccca

SEQ ID NO: 18560 - RNA, 20 nt, Artificial Sequence
  HTT spacer sequence CTCN PAM
cguucuuggcaccaagggcc

SEQ ID NO: 18561 - RNA, 20 nt, Artificial Sequence
  HTT spacer sequence CTCN PAM
aucaucacuggcacuagccc

SEQ ID NO: 18562 - RNA, 20 nt, Artificial Sequence
  HTT spacer sequence CTCN PAM
aggcuucccgagaaccaggc

SEQ ID NO: 18563 - RNA, 20 nt, Artificial Sequence
  HTT spacer sequence CTCN PAM
agcacuuggcacagugcugu

SEQ ID NO: 18564 - RNA, 20 nt, Artificial Sequence
  HTT spacer sequence CTCN PAM
ggaagccucgagcacuuggc

SEQ ID NO: 18565 - RNA, 20 nt, Artificial Sequence
  HTT spacer sequence CTCN PAM
uuucugccugguucucggga

SEQ ID NO: 18566 - RNA, 20 nt, Artificial Sequence
  HTT spacer sequence CTCN PAM
acuguccuccuuucugccug

SEQ ID NO: 18567 - RNA, 20 nt, Artificial Sequence
  HTT spacer sequence CTCN PAM
agaucacgcagccaccacgc

SEQ ID NO: 18568 - RNA, 20 nt, Artificial Sequence
  HTT spacer sequence CTCN PAM
cgccuuugugacccgcgcuc

SEQ ID NO: 18569 - RNA, 20 nt, Artificial Sequence
  HTT spacer sequence CTCN PAM
cucgcgccuuugugacccgc

SEQ ID NO: 18570 - RNA, 20 nt, Artificial Sequence
  HTT spacer sequence CTCN PAM
ggccuuggguuuaccgcaau

SEQ ID NO: 18571 - RNA, 20 nt, Artificial Sequence
  HTT spacer sequence CTCN PAM
cgcacuggcagucauugcgg

SEQ ID NO: 18572 - RNA, 20 nt, Artificial Sequence
  HTT spacer sequence CTCN PAM
cguauugguuccguguuuug

SEQ ID NO: 18573 - RNA, 20 nt, Artificial Sequence
  HTT spacer sequence CTCN PAM
auucagaugucacuuaggag

SEQ ID NO: 18574 - RNA, 20 nt, Artificial Sequence
  HTT spacer sequence CTCN PAM
uaagugacaucugaauggag

SEQ ID NO: 18575 - RNA, 20 nt, Artificial Sequence
  HTT spacer sequence CTCN PAM
acgaagggaugcuuucacuc

SEQ ID NO: 18576 - RNA, 20 nt, Artificial Sequence
  HTT spacer sequence CTCN PAM
uucugugucacccuccucag

SEQ ID NO: 18577 - RNA, 20 nt, Artificial Sequence
  HTT spacer sequence CTCN PAM
ucagcugcuccugggguuga

SEQ ID NO: 18578 - RNA, 20 nt, Artificial Sequence
  HTT spacer sequence CTCN PAM
gcugcuccugggguugacug

SEQ ID NO: 18579 - RNA, 20 nt, Artificial Sequence
  HTT spacer sequence CTCN PAM
ugggguugacuggccccuga

SEQ ID NO: 18580 - RNA, 20 nt, Artificial Sequence
  HTT spacer sequence CTCN PAM
agcacaugcuaaaggcauga

SEQ ID NO: 18581 - RNA, 20 nt, Artificial Sequence
  HTT spacer sequence CTCN PAM
cugugggcucccuugcccgu

SEQ ID NO: 18582 - RNA, 20 nt, Artificial Sequence
  HTT spacer sequence CTCN PAM
gugggcucccuugcccguaa

SEQ ID NO: 18583 - RNA, 20 nt, Artificial Sequence
  HTT spacer sequence CTCN PAM
cuugcccguaaccuggggug

SEQ ID NO: 18584 - RNA, 20 nt, Artificial Sequence
  HTT spacer sequence CTCN PAM
gcacaugccuaccgucuaac

SEQ ID NO: 18585 - RNA, 20 nt, Artificial Sequence
  HTT spacer sequence CTCN PAM
ugguggguggguguggccac

SEQ ID NO: 18586 - RNA, 20 nt, Artificial Sequence
  HTT spacer sequence CTCN PAM
gugcugcggccacagugcca

SEQ ID NO: 18587 - RNA, 20 nt, Artificial Sequence
  HTT spacer sequence CTCN PAM
guguggcuggggaacagcau

SEQ ID NO: 18588 - RNA, 20 nt, Artificial Sequence
  HTT spacer sequence CTCN PAM
ggggugugaugcuguucccc

SEQ ID NO: 18589 - RNA, 20 nt, Artificial Sequence
  HTT spacer sequence CTCN PAM
cucaggggugugaugcuguu

SEQ ID NO: 18590 - RNA, 20 nt, Artificial Sequence
  HTT spacer sequence CTCN PAM
ucccucaggggugugaugcu

SEQ ID NO: 18591 - RNA, 20 nt, Artificial Sequence
  HTT spacer sequence CTCN PAM
ucccauuccuccucccucag

SEQ ID NO: 18592 - RNA, 20 nt, Artificial Sequence
  HTT spacer sequence CTCN PAM
uccucgucccauuccuccuc

SEQ ID NO: 18593 - RNA, 20 nt, Artificial Sequence
  HTT spacer sequence CTCN PAM
ucuuccucgucccauuccuc

SEQ ID NO: 18594 - RNA, 20 nt, Artificial Sequence
  HTT spacer sequence CTCN PAM
uccucuuccucgucccauuc

SEQ ID NO: 18595 - RNA, 20 nt, Artificial Sequence
  HTT spacer sequence CTCN PAM
uccuccucuuccucguccca

SEQ ID NO: 18596 - RNA, 20 nt, Artificial Sequence
  HTT spacer sequence CTCN PAM
agucaacuccagguuuucca

SEQ ID NO: 18597 - RNA, 20 nt, Artificial Sequence
  HTT spacer sequence CTCN PAM
agguuuuccaauggccuuuu

SEQ ID NO: 18598 - RNA, 20 nt, Artificial Sequence
  HTT spacer sequence CTCN PAM
aacaaaucaaaugacugaua

SEQ ID NO: 18599 - RNA, 20 nt, Artificial Sequence
  HTT spacer sequence CTCN PAM
uuucaagaagcaccucaaac

SEQ ID NO: 18600 - RNA, 20 nt, Artificial Sequence
  HTT spacer sequence CTCN PAM
caucucauguacuuggaaaa

SEQ ID NO: 18601 - RNA, 20 nt, Artificial Sequence
  HTT spacer sequence CTCN PAM
ucucauguacuuggaaaaua

SEQ ID NO: 18602 - RNA, 20 nt, Artificial Sequence
  HTT spacer sequence CTCN PAM
uguacuuggaaaauacccau

SEQ ID NO: 18603 - RNA, 20 nt, Artificial Sequence
  HTT spacer sequence CTCN PAM
cauauuccacaggaaacacc

SEQ ID NO: 18604 - RNA, 20 nt, Artificial Sequence
  HTT spacer sequence CTCN PAM
agcccgguguuuccugugga

SEQ ID NO: 18605 - RNA, 20 nt, Artificial Sequence
  HTT spacer sequence CTCN PAM
uguucgcaguuuuugcuuga

SEQ ID NO: 18606 - RNA, 20 nt, Artificial Sequence
  HTT spacer sequence CTCN PAM
agcaaaaacugcgaacagga

SEQ ID NO: 18607 - RNA, 20 nt, Artificial Sequence
  HTT spacer sequence CTCN PAM
gccaggaggaccccggccau

SEQ ID NO: 18608 - RNA, 20 nt, Artificial Sequence
  HTT spacer sequence CTCN PAM
uggcugagcuggacggcagg

SEQ ID NO: 18609 - RNA, 20 nt, Artificial Sequence
  HTT spacer sequence CTCN PAM
cugaucaggauggccggggu

SEQ ID NO: 18610 - RNA, 20 nt, Artificial Sequence
  HTT spacer sequence CTCN PAM
cuuacggaucugaccaccuc

SEQ ID NO: 18611 - RNA, 20 nt, Artificial Sequence
  HTT spacer sequence CTCN PAM
caccugcacgugccacacgc

SEQ ID NO: 18612 - RNA, 20 nt, Artificial Sequence
  HTT spacer sequence CTCN PAM
ugcaugcaacacacacacag

SEQ ID NO: 18613 - RNA, 20 nt, Artificial Sequence
  HTT spacer sequence CTCN PAM
acaugcaugcaccacacaca

SEQ ID NO: 18614 - RNA, 20 nt, Artificial Sequence
  HTT spacer sequence CTCN PAM
uggguguaagaacacgacuu

SEQ ID NO: 18615 - RNA, 20 nt, Artificial Sequence
  HTT spacer sequence CTCN PAM
ccuugcccuccugguuuucc

SEQ ID NO: 18616 - RNA, 20 nt, Artificial Sequence
  HTT spacer sequence CTCN PAM
ugguuuuccacaucuccagc

SEQ ID NO: 18617 - RNA, 20 nt, Artificial Sequence
  HTT spacer sequence CTCN PAM
agcuucuaguggucucagac

SEQ ID NO: 18618 - RNA, 20 nt, Artificial Sequence
  HTT spacer sequence CTCN PAM
gacuuguucaccgagcgcaa

SEQ ID NO: 18619 - RNA, 20 nt, Artificial Sequence
  HTT spacer sequence CTCN PAM
gugaacaagucugagaccac

SEQ ID NO: 18620 - RNA, 20 nt, Artificial Sequence
  HTT spacer sequence CTCN PAM
aacugguugcgcucggugaa

SEQ ID NO: 18621 - RNA, 20 nt, Artificial Sequence
  HTT spacer sequence CTCN PAM
ucuucugaagggugcacccu

SEQ ID NO: 18622 - RNA, 20 nt, Artificial Sequence
  HTT spacer sequence CTCN PAM
cucaguaccuggugccugcc

SEQ ID NO: 18623 - RNA, 20 nt, Artificial Sequence
  HTT spacer sequence CTCN PAM
guaccuggugccugccaccu

SEQ ID NO: 18624 - RNA, 20 nt, Artificial Sequence
  HTT spacer sequence CTCN PAM
gugccaccugucacuuacca

SEQ ID NO: 18625 - RNA, 20 nt, Artificial Sequence
  HTT spacer sequence CTCN PAM
ggccaacaccaggucccaag

SEQ ID NO: 18626 - RNA, 20 nt, Artificial Sequence
  HTT spacer sequence CTCN PAM
uuccaagaguugacccgaac

SEQ ID NO: 18627 - RNA, 20 nt, Artificial Sequence
  HTT spacer sequence CTCN PAM
uggaaggaggcagccgcacc

SEQ ID NO: 18628 - RNA, 20 nt, Artificial Sequence
  HTT spacer sequence CTCN PAM
acggcccacgugagcugcag

SEQ ID NO: 18629 - RNA, 20 nt, Artificial Sequence
  HTT spacer sequence CTCN PAM
cgugggccguggaguccggu

SEQ ID NO: 18630 - RNA, 20 nt, Artificial Sequence
  HTT spacer sequence CTCN PAM
gauggaggggguucagcgac

SEQ ID NO: 18631 - RNA, 20 nt, Artificial Sequence
  HTT spacer sequence CTCN PAM
aucugagaagcacugcagcu

SEQ ID NO: 18632 - RNA, 20 nt, Artificial Sequence
  HTT spacer sequence CTCN PAM
gcgccaccacacaccguggu

SEQ ID NO: 18633 - RNA, 20 nt, Artificial Sequence
  HTT spacer sequence CTCN PAM
gcccugaggccugacugccu

SEQ ID NO: 18634 - RNA, 20 nt, Artificial Sequence
  HTT spacer sequence CTCN PAM
gggcagagcauggggaagcc

SEQ ID NO: 18635 - RNA, 20 nt, Artificial Sequence
  HTT spacer sequence CTCN PAM
cuccccuucucaguuauguu

SEQ ID NO: 18636 - RNA, 20 nt, Artificial Sequence
  HTT spacer sequence CTCN PAM
ccuucucaguuauguuccag

SEQ ID NO: 18637 - RNA, 20 nt, Artificial Sequence
  HTT spacer sequence CTCN PAM
guuauguuccaggccccccg

SEQ ID NO: 18638 - RNA, 20 nt, Artificial Sequence
  HTT spacer sequence CTCN PAM
gggggccuggaacauaacug

SEQ ID NO: 18639 - RNA, 20 nt, Artificial Sequence
  HTT spacer sequence CTCN PAM
ccugggggccguuuugucac

SEQ ID NO: 18640 - RNA, 20 nt, Artificial Sequence
  HTT spacer sequence CTCN PAM
ugggggccguuuugucacag

SEQ ID NO: 18641 - RNA, 20 nt, Artificial Sequence
  HTT spacer sequence CTCN PAM
uuuuagcguggugguugucu

SEQ ID NO: 18642 - RNA, 20 nt, Artificial Sequence
  HTT spacer sequence CTCN PAM
ccguucugggggcuggaagu

SEQ ID NO: 18643 - RNA, 20 nt, Artificial Sequence
  HTT spacer sequence CTCN PAM
ucacacaccaaaucugcugg

SEQ ID NO: 18644 - RNA, 20 nt, Artificial Sequence
  HTT spacer sequence CTCN PAM
cugcuucauagauggcaucu

SEQ ID NO: 18645 - RNA, 20 nt, Artificial Sequence
  HTT spacer sequence CTCN PAM
gcuucauagauggcaucuuc

SEQ ID NO: 18646 - RNA, 20 nt, Artificial Sequence
  HTT spacer sequence CTCN PAM
cgguggaaggagugaacaag

SEQ ID NO: 18647 - RNA, 20 nt, Artificial Sequence
  HTT spacer sequence CTCN PAM
uuccaccgugaggacccagc

SEQ ID NO: 18648 - RNA, 20 nt, Artificial Sequence
  HTT spacer sequence CTCN PAM
cucaggccuuuuagaagggc

SEQ ID NO: 18649 - RNA, 20 nt, Artificial Sequence
  HTT spacer sequence CTCN PAM
ggccuuuuagaagggcccca

SEQ ID NO: 18650 - RNA, 20 nt, Artificial Sequence
  HTT spacer sequence CTCN PAM
cccaucaugaccucaucacc

SEQ ID NO: 18651 - RNA, 20 nt, Artificial Sequence
  HTT spacer sequence CTCN PAM
caucaugaccucaucaccuc

SEQ ID NO: 18652 - RNA, 20 nt, Artificial Sequence
  HTT spacer sequence CTCN PAM
ucaccucccaaggccccacc

SEQ ID NO: 18653 - RNA, 20 nt, Artificial Sequence
  HTT spacer sequence CTCN PAM
caaggccccaccuucuugua

SEQ ID NO: 18654 - RNA, 20 nt, Artificial Sequence
  HTT spacer sequence CTCN PAM
uacacugacaccuaauuugc

SEQ ID NO: 18655 - RNA, 20 nt, Artificial Sequence
  HTT spacer sequence CTCN PAM
ugaaacuccuacacugacac

SEQ ID NO: 18656 - RNA, 20 nt, Artificial Sequence
  HTT spacer sequence CTCN PAM
ugaguuccuccuuauucugc

SEQ ID NO: 18657 - RNA, 20 nt, Artificial Sequence
  HTT spacer sequence CTCN PAM
agaggaugaacacuugaccg

SEQ ID NO: 18658 - RNA, 20 nt, Artificial Sequence
  HTT spacer sequence CTCN PAM
uuauucugcuucugguuuau

SEQ ID NO: 18659 - RNA, 20 nt, Artificial Sequence
  HTT spacer sequence CTCN PAM
gacaguucugccauccuuga

SEQ ID NO: 18660 - RNA, 20 nt, Artificial Sequence
  HTT spacer sequence CTCN PAM
gguuccuugucauguggcau

SEQ ID NO: 18661 - RNA, 20 nt, Artificial Sequence
  HTT spacer sequence CTCN PAM
uuucuucaacaaacaccuga

SEQ ID NO: 18662 - RNA, 20 nt, Artificial Sequence
  HTT spacer sequence CTCN PAM
gguguuuguugaagaaauga

SEQ ID NO: 18663 - RNA, 20 nt, Artificial Sequence
  HTT spacer sequence CTCN PAM
ccaagggccccagacggcug

SEQ ID NO: 18664 - RNA, 20 nt, Artificial Sequence
  HTT spacer sequence CTCN PAM
ggacgggcuccuguguguca

SEQ ID NO: 18665 - RNA, 20 nt, Artificial Sequence
  HTT spacer sequence CTCN PAM
ugugugucaggaacgacaau

SEQ ID NO: 18666 - RNA, 20 nt, Artificial Sequence
  HTT spacer sequence CTCN PAM
agccgcuaacauuugcggag

SEQ ID NO: 18667 - RNA, 20 nt, Artificial Sequence
  HTT spacer sequence CTCN PAM
gcaaauguuagcggcuggag

SEQ ID NO: 18668 - RNA, 20 nt, Artificial Sequence
  HTT spacer sequence CTCN PAM
uccucccgcacccccaccug

SEQ ID NO: 18669 - RNA, 20 nt, Artificial Sequence
  HTT spacer sequence CTCN PAM
cgcacccccaccugacaagg

SEQ ID NO: 18670 - RNA, 20 nt, Artificial Sequence
  HTT spacer sequence CTCN PAM
gaccuuggccgccuagggug

SEQ ID NO: 18671 - RNA, 20 nt, Artificial Sequence
  HTT spacer sequence CTCN PAM
gcugcauuuugugugaccca

SEQ ID NO: 18672 - RNA, 20 nt, Artificial Sequence
  HTT spacer sequence CTCN PAM
accucugcugcauuuugugu

SEQ ID NO: 18673 - RNA, 20 nt, Artificial Sequence
  HTT spacer sequence CTCN PAM
ccucaaccucugcugcauuu

SEQ ID NO: 18674 - RNA, 20 nt, Artificial Sequence
  HTT spacer sequence CTCN PAM
aggucacggacaugugcuca

SEQ ID NO: 18675 - RNA, 20 nt, Artificial Sequence
  HTT spacer sequence CTCN PAM
cucucugcgagucuugacug

SEQ ID NO: 18676 - RNA, 20 nt, Artificial Sequence
  HTT spacer sequence CTCN PAM
cugcgagucuugacugcucu

SEQ ID NO: 18677 - RNA, 20 nt, Artificial Sequence
  HTT spacer sequence CTCN PAM
gcgagucuugacugcucuug

SEQ ID NO: 18678 - RNA, 20 nt, Artificial Sequence
  HTT spacer sequence CTCN PAM
cagagagggagucaggcucc

SEQ ID NO: 18679 - RNA, 20 nt, Artificial Sequence
  HTT spacer sequence CTCN PAM
ugccuagacucuguccuccc

SEQ ID NO: 18680 - RNA, 20 nt, Artificial Sequence
  HTT spacer sequence CTCN PAM
guccuccccgagcccaaacg

SEQ ID NO: 18681 - RNA, 20 nt, Artificial Sequence
  HTT spacer sequence CTCN PAM
ccgagcccaaacgccaguca

SEQ ID NO: 18682 - RNA, 20 nt, Artificial Sequence
  HTT spacer sequence CTCN PAM
gggaggacagagucuaggca

SEQ ID NO: 18683 - RNA, 20 nt, Artificial Sequence
  HTT spacer sequence CTCN PAM
gcagccguccagggagugga

SEQ ID NO: 18684 - RNA, 20 nt, Artificial Sequence
  HTT spacer sequence CTCN PAM
cuggacggcugcugagucac

SEQ ID NO: 18685 - RNA, 20 nt, Artificial Sequence
  HTT spacer sequence CTCN PAM
auuguuuccacucccuggac

SEQ ID NO: 18686 - RNA, 20 nt, Artificial Sequence
  HTT spacer sequence CTCN PAM
cuucacggcgaacacccucu

SEQ ID NO: 18687 - RNA, 20 nt, Artificial Sequence
  HTT spacer sequence CTCN PAM
ucacggcgaacacccucugg

SEQ ID NO: 18688 - RNA, 20 nt, Artificial Sequence
  HTT spacer sequence CTCN PAM
ggguguugcccacacgaugu

SEQ ID NO: 18689 - RNA, 20 nt, Artificial Sequence
  HTT spacer sequence CTCN PAM
uggaagggguccuucuccuu

SEQ ID NO: 18690 - RNA, 20 nt, Artificial Sequence
  HTT spacer sequence CTCN PAM
uuugugggaaguuucagcug

SEQ ID NO: 18691 - RNA, 20 nt, Artificial Sequence
  HTT spacer sequence CTCN PAM
ggcccagaucccccuaggca

SEQ ID NO: 18692 - RNA, 20 nt, Artificial Sequence
  HTT spacer sequence CTCN PAM
uuugauuacugauggcacaa

SEQ ID NO: 18693 - RNA, 20 nt, Artificial Sequence
  HTT spacer sequence CTCN PAM
cucccagcucuuugugcacu

SEQ ID NO: 18694 - RNA, 20 nt, Artificial Sequence
  HTT spacer sequence CTCN PAM
cagcucuuugugcacucaug

SEQ ID NO: 18695 - RNA, 20 nt, Artificial Sequence
  HTT spacer sequence CTCN PAM
uugugcacucaugcuuucug

SEQ ID NO: 18696 - RNA, 20 nt, Artificial Sequence
  HTT spacer sequence CTCN PAM
ugcuuucuggaagauggcca

SEQ ID NO: 18697 - RNA, 20 nt, Artificial Sequence
  HTT spacer sequence CTCN PAM
gugaagguuuucagcgcguc

SEQ ID NO: 18698 - RNA, 20 nt, Artificial Sequence
  HTT spacer sequence CTCN PAM
ggauacguggguaccaagca

SEQ ID NO: 18699 - RNA, 20 nt, Artificial Sequence
  HTT spacer sequence CTCN PAM
aaacgacaugcucuggauac

SEQ ID NO: 18700 - RNA, 20 nt, Artificial Sequence
  HTT spacer sequence CTCN PAM
gguggcacggauuucacaac

SEQ ID NO: 18701 - RNA, 20 nt, Artificial Sequence
  HTT spacer sequence CTCN PAM
cggguggcacggauuucaca

SEQ ID NO: 18702 - RNA, 20 nt, Artificial Sequence
  HTT spacer sequence CTCN PAM
cuaaggacugcguacggccc

SEQ ID NO: 18703 - RNA, 20 nt, Artificial Sequence
  HTT spacer sequence CTCN PAM
cacgcacaacgccacacggc

SEQ ID NO: 18704 - RNA, 20 nt, Artificial Sequence
  HTT spacer sequence CTCN PAM
cccugugcuauccccucaca

SEQ ID NO: 18705 - RNA, 20 nt, Artificial Sequence
  HTT spacer sequence CTCN PAM
ucuuuugguccuuguuccug

SEQ ID NO: 18706 - RNA, 20 nt, Artificial Sequence
  HTT spacer sequence CTCN PAM
uuugguccuuguuccuggga

SEQ ID NO: 18707 - RNA, 20 nt, Artificial Sequence
  HTT spacer sequence CTCN PAM
cagccaucccaggaacaagg

SEQ ID NO: 18708 - RNA, 20 nt, Artificial Sequence
  HTT spacer sequence CTCN PAM
gcaggggaaauggccggacg

SEQ ID NO: 18709 - RNA, 20 nt, Artificial Sequence
  HTT spacer sequence CTCN PAM
ccgcaggggaaauggccgga

SEQ ID NO: 18710 - RNA, 20 nt, Artificial Sequence
  HTT spacer sequence CTCN PAM
uaccacugccgagaaccuca

SEQ ID NO: 18711 - RNA, 20 nt, Artificial Sequence
  HTT spacer sequence CTCN PAM
gcagugguaggagccucucc

SEQ ID NO: 18712 - RNA, 20 nt, Artificial Sequence
  HTT spacer sequence CTCN PAM
ucauuccacaaaaacaagag

SEQ ID NO: 18713 - RNA, 20 nt, Artificial Sequence
  HTT spacer sequence CTCN PAM
uguuuuuguggaaugaugag

SEQ ID NO: 18714 - RNA, 20 nt, Artificial Sequence
  HTT spacer sequence CTCN PAM
augggaauucugugucccca

SEQ ID NO: 18715 - RNA, 20 nt, Artificial Sequence
  HTT spacer sequence CTCN PAM
uucagcccaagacuaugggg

SEQ ID NO: 18716 - RNA, 20 nt, Artificial Sequence
  HTT spacer sequence CTCN PAM
ucacuguuaaagagcagauu

SEQ ID NO: 18717 - RNA, 20 nt, Artificial Sequence
  HTT spacer sequence CTCN PAM
cuguuaaagagcagauugaa

SEQ ID NO: 18718 - RNA, 20 nt, Artificial Sequence
  HTT spacer sequence CTCN PAM
uuaacagugaggagaccccu

SEQ ID NO: 18719 - RNA, 20 nt, Artificial Sequence
  HTT spacer sequence CTCN PAM
auuucacuuaguauccaaaa

SEQ ID NO: 18720 - RNA, 20 nt, Artificial Sequence
  HTT spacer sequence CTCN PAM
cagcuaagauguguuauggu

SEQ ID NO: 18721 - RNA, 20 nt, Artificial Sequence
  HTT spacer sequence CTCN PAM
gcuaagauguguuaugguaa

SEQ ID NO: 18722 - RNA, 20 nt, Artificial Sequence
  HTT spacer sequence CTCN PAM
gcccuugcuaauuuucuuug

SEQ ID NO: 18723 - RNA, 20 nt, Artificial Sequence
  HTT spacer sequence CTCN PAM
ggacaucgccccaugggccu

SEQ ID NO: 18724 - RNA, 20 nt, Artificial Sequence
  HTT spacer sequence CTCN PAM
agccugguguccucgggaca

SEQ ID NO: 18725 - RNA, 20 nt, Artificial Sequence
  HTT spacer sequence CTCN PAM
cccagcggggucgugcagga

SEQ ID NO: 18726 - RNA, 20 nt, Artificial Sequence
  HTT spacer sequence CTCN PAM
cagcggggucgugcaggacg

SEQ ID NO: 18727 - RNA, 20 nt, Artificial Sequence
  HTT spacer sequence CTCN PAM
ccgcacagugagccgugaca

SEQ ID NO: 18728 - RNA, 20 nt, Artificial Sequence
  HTT spacer sequence CTCN PAM
cugugcggggaguuaagugc

SEQ ID NO: 18729 - RNA, 20 nt, Artificial Sequence
  HTT spacer sequence CTCN PAM
agugugcuuuccuggcgacg

SEQ ID NO: 18730 - RNA, 20 nt, Artificial Sequence
  HTT spacer sequence CTCN PAM
gugccaggguuuuuacuggg

SEQ ID NO: 18731 - RNA, 20 nt, Artificial Sequence
  HTT spacer sequence CTCN PAM
gccugccucgugcccagacu

SEQ ID NO: 18732 - RNA, 20 nt, Artificial Sequence
  HTT spacer sequence CTCN PAM
ugcccagacucuggacuccc

SEQ ID NO: 18733 - RNA, 20 nt, Artificial Sequence
  HTT spacer sequence CTCN PAM
ggacucccggagggaaggca

SEQ ID NO: 18734 - RNA, 20 nt, Artificial Sequence
  HTT spacer sequence CTCN PAM
cggagggaaggcaaguucuc

SEQ ID NO: 18735 - RNA, 20 nt, Artificial Sequence
  HTT spacer sequence CTCN PAM
gggaguccagagucugggca

SEQ ID NO: 18736 - RNA, 20 nt, Artificial Sequence
  HTT spacer sequence CTCN PAM
gcaccaacccuggugcccac

SEQ ID NO: 18737 - RNA, 20 nt, Artificial Sequence
  HTT spacer sequence CTCN PAM
gcugcuugugugggcaccag

SEQ ID NO: 18738 - RNA, 20 nt, Artificial Sequence
  HTT spacer sequence CTCN PAM
cugugcucagcugcuugugu

SEQ ID NO: 18739 - RNA, 20 nt, Artificial Sequence
  HTT spacer sequence CTCN PAM
ucagugaggauggugggcac

SEQ ID NO: 18740 - RNA, 20 nt, Artificial Sequence
  HTT spacer sequence CTCN PAM
gugaggauggugggcaccgu

SEQ ID NO: 18741 - RNA, 20 nt, Artificial Sequence
  HTT spacer sequence CTCN PAM
cugaggaggggcucccugug

SEQ ID NO: 18742 - RNA, 20 nt, Artificial Sequence
  HTT spacer sequence CTCN PAM
caggauggucuccggccugc

SEQ ID NO: 18743 - RNA, 20 nt, Artificial Sequence
  HTT spacer sequence CTCN PAM
ggauggucuccggccugcug

SEQ ID NO: 18744 - RNA, 20 nt, Artificial Sequence
  HTT spacer sequence CTCN PAM
ggccugcuguguagucucuu

SEQ ID NO: 18745 - RNA, 20 nt, Artificial Sequence
  HTT spacer sequence CTCN PAM
ucugcacacaagcgugaggg

SEQ ID NO: 18746 - RNA, 20 nt, Artificial Sequence
  HTT spacer sequence CTCN PAM
cgcuugugugcagaagagac

SEQ ID NO: 18747 - RNA, 20 nt, Artificial Sequence
  HTT spacer sequence CTCN PAM
gcuguggggaggagccacug

SEQ ID NO: 18748 - RNA, 20 nt, Artificial Sequence
  HTT spacer sequence CTCN PAM
ccacagccgaggcgggggcg

SEQ ID NO: 18749 - RNA, 20 nt, Artificial Sequence
  HTT spacer sequence CTCN PAM
uccccacagccgaggcgggg

SEQ ID NO: 18750 - RNA, 20 nt, Artificial Sequence
  HTT spacer sequence CTCN PAM
cgucccaguggcuccucccc

SEQ ID NO: 18751 - RNA, 20 nt, Artificial Sequence
  HTT spacer sequence CTCN PAM
gguggcaugcagcagcuuuu

SEQ ID NO: 18752 - RNA, 20 nt, Artificial Sequence
  HTT spacer sequence CTCN PAM
gccacggccuuguccuaggc

SEQ ID NO: 18753 - RNA, 20 nt, Artificial Sequence
  HTT spacer sequence CTCN PAM
agcaggcggcugacaggcuc

SEQ ID NO: 18754 - RNA, 20 nt, Artificial Sequence
  HTT spacer sequence CTCN PAM
ccagcaggcggcugacaggc

SEQ ID NO: 18755 - RNA, 20 nt, Artificial Sequence
  HTT spacer sequence CTCN PAM
ggagcagccaccugcccagc

SEQ ID NO: 18756 - RNA, 20 nt, Artificial Sequence
  HTT spacer sequence CTCN PAM
ugagcgugcucuccagcagg

SEQ ID NO: 18757 - RNA, 20 nt, Artificial Sequence
  HTT spacer sequence CTCN PAM
aacccugcugggcagguggc

SEQ ID NO: 18758 - RNA, 20 nt, Artificial Sequence
  HTT spacer sequence CTCN PAM
augugcuggagugcgaccug

SEQ ID NO: 18759 - RNA, 20 nt, Artificial Sequence
  HTT spacer sequence CTCN PAM
agcacauagaggacgccgug

SEQ ID NO: 18760 - RNA, 20 nt, Artificial Sequence
  HTT spacer sequence CTCN PAM
ucccggucaucagcgacuau

SEQ ID NO: 18761 - RNA, 20 nt, Artificial Sequence
  HTT spacer sequence CTCN PAM
ucuccaaccugaaagggauc

SEQ ID NO: 18762 - RNA, 20 nt, Artificial Sequence
  HTT spacer sequence CTCN PAM
ccaaccugaaagggaucgcc

SEQ ID NO: 18763 - RNA, 20 nt, Artificial Sequence
  HTT spacer sequence CTCN PAM
aaccugaaagggaucgccca

SEQ ID NO: 18764 - RNA, 20 nt, Artificial Sequence
  HTT spacer sequence CTCN PAM
cugggcgaucccuuucaggu

SEQ ID NO: 18765 - RNA, 20 nt, Artificial Sequence
  HTT spacer sequence CTCN PAM
cacucacugggcgaucccuu

SEQ ID NO: 18766 - RNA, 20 nt, Artificial Sequence
  HTT spacer sequence CTCN PAM
gaaugagcugugaaggaagc

SEQ ID NO: 18767 - RNA, 20 nt, Artificial Sequence
  HTT spacer sequence CTCN PAM
uucugagacccccgccccag

SEQ ID NO: 18768 - RNA, 20 nt, Artificial Sequence
  HTT spacer sequence CTCN PAM
ccaagugcccaggcuccugg

SEQ ID NO: 18769 - RNA, 20 nt, Artificial Sequence
  HTT spacer sequence CTCN PAM
aagugcccaggcuccuggcc

SEQ ID NO: 18770 - RNA, 20 nt, Artificial Sequence
  HTT spacer sequence CTCN PAM
uggccagauggcaggccagg

SEQ ID NO: 18771 - RNA, 20 nt, Artificial Sequence
  HTT spacer sequence CTCN PAM
gccauggcacccaccugggu

SEQ ID NO: 18772 - RNA, 20 nt, Artificial Sequence
  HTT spacer sequence CTCN PAM
cugaccucagccauggcacc

SEQ ID NO: 18773 - RNA, 20 nt, Artificial Sequence
  HTT spacer sequence CTCN PAM
ugcgucucacugaccucagc

SEQ ID NO: 18774 - RNA, 20 nt, Artificial Sequence
  HTT spacer sequence CTCN PAM
aggacgcaccugugcucuug

SEQ ID NO: 18775 - RNA, 20 nt, Artificial Sequence
  HTT spacer sequence CTCN PAM
ggcaccuccagcgagcugga

SEQ ID NO: 18776 - RNA, 20 nt, Artificial Sequence
  HTT spacer sequence CTCN PAM
agcgagcuggagcucucgcc

SEQ ID NO: 18777 - RNA, 20 nt, Artificial Sequence
  HTT spacer sequence CTCN PAM
cuggaggugcccgaggaagc

SEQ ID NO: 18778 - RNA, 20 nt, Artificial Sequence
  HTT spacer sequence CTCN PAM
agcucgcuggaggugcccga

SEQ ID NO: 18779 - RNA, 20 nt, Artificial Sequence
  HTT spacer sequence CTCN PAM
cgccucugcugcugucucau

SEQ ID NO: 18780 - RNA, 20 nt, Artificial Sequence
  HTT spacer sequence CTCN PAM
ccucugcugcugucucaugu

SEQ ID NO: 18781 - RNA, 20 nt, Artificial Sequence
  HTT spacer sequence CTCN PAM
gcugcugucucauguggcgc

SEQ ID NO: 18782 - RNA, 20 nt, Artificial Sequence
  HTT spacer sequence CTCN PAM
uguggcgcuuagcacacucu

SEQ ID NO: 18783 - RNA, 20 nt, Artificial Sequence
  HTT spacer sequence CTCN PAM
cccacgugcccauuccugac

SEQ ID NO: 18784 - RNA, 20 nt, Artificial Sequence
  HTT spacer sequence CTCN PAM
cacgugcccauuccugacuc

SEQ ID NO: 18785 - RNA, 20 nt, Artificial Sequence
  HTT spacer sequence CTCN PAM
gcucucgaggccaucggcuc

SEQ ID NO: 18786 - RNA, 20 nt, Artificial Sequence
  HTT spacer sequence CTCN PAM
cgaggccaucggcucucauu

SEQ ID NO: 18787 - RNA, 20 nt, Artificial Sequence
  HTT spacer sequence CTCN PAM
aggccaucggcucucauucu

SEQ ID NO: 18788 - RNA, 20 nt, Artificial Sequence
  HTT spacer sequence CTCN PAM
agagcagagucaggaauggg

SEQ ID NO: 18789 - RNA, 20 nt, Artificial Sequence
  HTT spacer sequence CTCN PAM
cauucucugcucccagaacc

SEQ ID NO: 18790 - RNA, 20 nt, Artificial Sequence
  HTT spacer sequence CTCN PAM
uucucugcucccagaacccu

SEQ ID NO: 18791 - RNA, 20 nt, Artificial Sequence
  HTT spacer sequence CTCN PAM
gcucccagaacccuguuauu

SEQ ID NO: 18792 - RNA, 20 nt, Artificial Sequence
  HTT spacer sequence CTCN PAM
cagaacccuguuauuaccca

SEQ ID NO: 18793 - RNA, 20 nt, Artificial Sequence
  HTT spacer sequence CTCN PAM
ucucugcaccuuccccgccc

SEQ ID NO: 18794 - RNA, 20 nt, Artificial Sequence
  HTT spacer sequence CTCN PAM
cugcaccuuccccgcccugg

SEQ ID NO: 18795 - RNA, 20 nt, Artificial Sequence
  HTT spacer sequence CTCN PAM
gcaccuuccccgcccuggcc

SEQ ID NO: 18796 - RNA, 20 nt, Artificial Sequence
  HTT spacer sequence CTCN PAM
cucuuguuuccacugugauu

SEQ ID NO: 18797 - RNA, 20 nt, Artificial Sequence
  HTT spacer sequence CTCN PAM
uguuuccacugugauuccga

SEQ ID NO: 18798 - RNA, 20 nt, Artificial Sequence
  HTT spacer sequence CTCN PAM
ccuuaucuuaaagcugcugg

SEQ ID NO: 18799 - RNA, 20 nt, Artificial Sequence
  HTT spacer sequence CTCN PAM
gcgagcaagucaagcucuuc

SEQ ID NO: 18800 - RNA, 20 nt, Artificial Sequence
  HTT spacer sequence CTCN PAM
cugagggguugcggcaccag

SEQ ID NO: 18801 - RNA, 20 nt, Artificial Sequence
  HTT spacer sequence CTCN PAM
ucacagcgaugucuuacaag

SEQ ID NO: 18802 - RNA, 20 nt, Artificial Sequence
  HTT spacer sequence CTCN PAM
gcgcuuguaagacaucgcug

SEQ ID NO: 18803 - RNA, 20 nt, Artificial Sequence
  HTT spacer sequence CTCN PAM
gugacacccuggucucaccg

SEQ ID NO: 18804 - RNA, 20 nt, Artificial Sequence
  HTT spacer sequence CTCN PAM
ccgccacucuuccaaagucg

SEQ ID NO: 18805 - RNA, 20 nt, Artificial Sequence
  HTT spacer sequence CTCN PAM
uccaaagucgcagaggcuuu

SEQ ID NO: 18806 - RNA, 20 nt, Artificial Sequence
  HTT spacer sequence CTCN PAM
gcgacuuuggaagaguggcg

SEQ ID NO: 18807 - RNA, 20 nt, Artificial Sequence
  HTT spacer sequence CTCN PAM
gcuaaagccucugcgacuuu

SEQ ID NO: 18808 - RNA, 20 nt, Artificial Sequence
  HTT spacer sequence CTCN PAM
cugagucauaggcuucugca

SEQ ID NO: 18809 - RNA, 20 nt, Artificial Sequence
  HTT spacer sequence CTCN PAM
gagucauaggcuucugcaca

SEQ ID NO: 18810 - RNA, 20 nt, Artificial Sequence
  HTT spacer sequence CTCN PAM
gagaggcugggcccaucucu

SEQ ID NO: 18811 - RNA, 20 nt, Artificial Sequence
  HTT spacer sequence CTCN PAM
cgugugcagaagccuaugac

SEQ ID NO: 18812 - RNA, 20 nt, Artificial Sequence
  HTT spacer sequence CTCN PAM
aaagacagcucccgugugca

SEQ ID NO: 18813 - RNA, 20 nt, Artificial Sequence
  HTT spacer sequence CTCN PAM
cucuaaagacagcucccgug

SEQ ID NO: 18814 - RNA, 20 nt, Artificial Sequence
  HTT spacer sequence CTCN PAM
cccauguggguggcugauga

SEQ ID NO: 18815 - RNA, 20 nt, Artificial Sequence
  HTT spacer sequence CTCN PAM
acucccccauguggguggcu

SEQ ID NO: 18816 - RNA, 20 nt, Artificial Sequence
  HTT spacer sequence CTCN PAM
uaauucuugcccucaacucc

SEQ ID NO: 18817 - RNA, 20 nt, Artificial Sequence
  HTT spacer sequence CTCN PAM
cagaccccuucccaucuuug

SEQ ID NO: 18818 - RNA, 20 nt, Artificial Sequence
  HTT spacer sequence CTCN PAM
acuuugaccuagcccccguu

SEQ ID NO: 18819 - RNA, 20 nt, Artificial Sequence
  HTT spacer sequence CTCN PAM
aggucuuccacucaacuuug

SEQ ID NO: 18820 - RNA, 20 nt, Artificial Sequence
  HTT spacer sequence CTCN PAM
cuccaggucuuccacucaac

SEQ ID NO: 18821 - RNA, 20 nt, Artificial Sequence
  HTT spacer sequence CTCN PAM
guaggcacaguucagacagg

SEQ ID NO: 18822 - RNA, 20 nt, Artificial Sequence
  HTT spacer sequence CTCN PAM
ugucugaacugugccuacag

SEQ ID NO: 18823 - RNA, 20 nt, Artificial Sequence
  HTT spacer sequence CTCN PAM
cuccugucugaacugugccu

SEQ ID NO: 18824 - RNA, 20 nt, Artificial Sequence
  HTT spacer sequence CTCN PAM
caccucccuccugucugaac

SEQ ID NO: 18825 - RNA, 20 nt, Artificial Sequence
  HTT spacer sequence CTCN PAM
agcaugucccaaauccugcc

SEQ ID NO: 18826 - RNA, 20 nt, Artificial Sequence
  HTT spacer sequence CTCN PAM
ucaggggccauugcccucau

SEQ ID NO: 18827 - RNA, 20 nt, Artificial Sequence
  HTT spacer sequence CTCN PAM
uccaggccagagugucacaa

SEQ ID NO: 18828 - RNA, 20 nt, Artificial Sequence
  HTT spacer sequence CTCN PAM
ggccuggaugagggcaaugg

SEQ ID NO: 18829 - RNA, 20 nt, Artificial Sequence
  HTT spacer sequence CTCN PAM
ccacgggcuugugacacucu

SEQ ID NO: 18830 - RNA, 20 nt, Artificial Sequence
  HTT spacer sequence CTCN PAM
ccugucauccuugcugggca

SEQ ID NO: 18831 - RNA, 20 nt, Artificial Sequence
  HTT spacer sequence CTCN PAM
gcaucccuggagccuggcau

SEQ ID NO: 18832 - RNA, 20 nt, Artificial Sequence
  HTT spacer sequence CTCN PAM
agggaugcagagacaguugc

SEQ ID NO: 18833 - RNA, 20 nt, Artificial Sequence
  HTT spacer sequence CTCN PAM
ugcugugggcauggaggacu

SEQ ID NO: 18834 - RNA, 20 nt, Artificial Sequence
  HTT spacer sequence CTCN PAM
augcccacagcaagagccau

SEQ ID NO: 18835 - RNA, 20 nt, Artificial Sequence
  HTT spacer sequence CTCN PAM
gggaaggagaguugaggugg

SEQ ID NO: 18836 - RNA, 20 nt, Artificial Sequence
  HTT spacer sequence CTCN PAM
uucccugaguccuccaugcc

SEQ ID NO: 18837 - RNA, 20 nt, Artificial Sequence
  HTT spacer sequence CTCN PAM
ccuucccugaguccuccaug

SEQ ID NO: 18838 - RNA, 20 nt, Artificial Sequence
  HTT spacer sequence CTCN PAM
acucuccuucccugaguccu

SEQ ID NO: 18839 - RNA, 20 nt, Artificial Sequence
  HTT spacer sequence CTCN PAM
uggaccaccucaacucuccu

SEQ ID NO: 18840 - RNA, 20 nt, Artificial Sequence
  HTT spacer sequence CTCN PAM
gcaucccaaacgcaacuccu

SEQ ID NO: 18841 - RNA, 20 nt, Artificial Sequence
  HTT spacer sequence CTCN PAM
cugcaucccaaacgcaacuc

SEQ ID NO: 18842 - RNA, 20 nt, Artificial Sequence
  HTT spacer sequence CTCN PAM
gcaccaugggcagaggggcc

SEQ ID NO: 18843 - RNA, 20 nt, Artificial Sequence
  HTT spacer sequence CTCN PAM
gcccauggugcugaggucag

SEQ ID NO: 18844 - RNA, 20 nt, Artificial Sequence
  HTT spacer sequence CTCN PAM
gagguggaggugggaccacg

SEQ ID NO: 18845 - RNA, 20 nt, Artificial Sequence
  HTT spacer sequence CTCN PAM
gaggcacgugacacggcccc

SEQ ID NO: 18846 - RNA, 20 nt, Artificial Sequence
  HTT spacer sequence CTCN PAM
accucggaggcacgugacac

SEQ ID NO: 18847 - RNA, 20 nt, Artificial Sequence
  HTT spacer sequence CTCN PAM
ucuguucacaguggccacuc

SEQ ID NO: 18848 - RNA, 20 nt, Artificial Sequence
  HTT spacer sequence CTCN PAM
guucacaguggccacucauu

SEQ ID NO: 18849 - RNA, 20 nt, Artificial Sequence
  HTT spacer sequence CTCN PAM
uucagucccuggcuaccagg

SEQ ID NO: 18850 - RNA, 20 nt, Artificial Sequence
  HTT spacer sequence CTCN PAM
cugugccauggggaaggccg

SEQ ID NO: 18851 - RNA, 20 nt, Artificial Sequence
  HTT spacer sequence CTCN PAM
ggaaguagaggggacuggcc

SEQ ID NO: 18852 - RNA, 20 nt, Artificial Sequence
  HTT spacer sequence CTCN PAM
acuuccugagugcccugugc

SEQ ID NO: 18853 - RNA, 20 nt, Artificial Sequence
  HTT spacer sequence CTCN PAM
uugagggacagagagaggaa

SEQ ID NO: 18854 - RNA, 20 nt, Artificial Sequence
  HTT spacer sequence CTCN PAM
acgaggcccuagauucccac

SEQ ID NO: 18855 - RNA, 20 nt, Artificial Sequence
  HTT spacer sequence CTCN PAM
gucccucaacgaggcccuag

SEQ ID NO: 18856 - RNA, 20 nt, Artificial Sequence
  HTT spacer sequence CTCN PAM
cugucccucaacgaggcccu

SEQ ID NO: 18857 - RNA, 20 nt, Artificial Sequence
  HTT spacer sequence CTCN PAM
cucugucccucaacgaggcc

SEQ ID NO: 18858 - RNA, 20 nt, Artificial Sequence
  HTT spacer sequence CTCN PAM
augcuggccaccacacacuu

SEQ ID NO: 18859 - RNA, 20 nt, Artificial Sequence
  HTT spacer sequence CTCN PAM
ccuguggccaccuccaugcu

SEQ ID NO: 18860 - RNA, 20 nt, Artificial Sequence
  HTT spacer sequence CTCN PAM
gccuccccuguggccaccuc

SEQ ID NO: 18861 - RNA, 20 nt, Artificial Sequence
  HTT spacer sequence CTCN PAM
gccuaacucagccuccccug

SEQ ID NO: 18862 - RNA, 20 nt, Artificial Sequence
  HTT spacer sequence CTCN PAM
cggccuaacucagccucccc

SEQ ID NO: 18863 - RNA, 20 nt, Artificial Sequence
  HTT spacer sequence CTCN PAM
ccaacgcccugcccucucgg

SEQ ID NO: 18864 - RNA, 20 nt, Artificial Sequence
  HTT spacer sequence CTCN PAM
gccacucagggaguggucaa

SEQ ID NO: 18865 - RNA, 20 nt, Artificial Sequence
  HTT spacer sequence CTCN PAM
gggaguggucaagcagaggc

SEQ ID NO: 18866 - RNA, 20 nt, Artificial Sequence
  HTT spacer sequence CTCN PAM
cugaguggcugagcccgucu

SEQ ID NO: 18867 - RNA, 20 nt, Artificial Sequence
  HTT spacer sequence CTCN PAM
gcuugaccacucccugagug

SEQ ID NO: 18868 - RNA, 20 nt, Artificial Sequence
  HTT spacer sequence CTCN PAM
cccaggccccugcaaccugg

SEQ ID NO: 18869 - RNA, 20 nt, Artificial Sequence
  HTT spacer sequence CTCN PAM
ggguaggcgcucccgggagc

SEQ ID NO: 18870 - RNA, 20 nt, Artificial Sequence
  HTT spacer sequence CTCN PAM
cgggagcccgccuggcccau

SEQ ID NO: 18871 - RNA, 20 nt, Artificial Sequence
  HTT spacer sequence CTCN PAM
cgggagcgccuacccugagu

SEQ ID NO: 18872 - RNA, 20 nt, Artificial Sequence
  HTT spacer sequence CTCN PAM
acacucccgcguggggccgg

SEQ ID NO: 18873 - RNA, 20 nt, Artificial Sequence
  HTT spacer sequence CTCN PAM
cgcguggggccggacaugcu

SEQ ID NO: 18874 - RNA, 20 nt, Artificial Sequence
  HTT spacer sequence CTCN PAM
ccacguuggauggggguggc

SEQ ID NO: 18875 - RNA, 20 nt, Artificial Sequence
  HTT spacer sequence CTCN PAM
acguuggauggggguggcug

SEQ ID NO: 18876 - RNA, 20 nt, Artificial Sequence
  HTT spacer sequence CTCN PAM
gccacccccauccaacgugg

SEQ ID NO: 18877 - RNA, 20 nt, Artificial Sequence
  HTT spacer sequence CTCN PAM
cguuuucagcugcgugaaca

SEQ ID NO: 18878 - RNA, 20 nt, Artificial Sequence
  HTT spacer sequence CTCN PAM
uugagaacuauccucuggac

SEQ ID NO: 18879 - RNA, 20 nt, Artificial Sequence
  HTT spacer sequence CTCN PAM
augagguaaaacgcaguggc

SEQ ID NO: 18880 - RNA, 20 nt, Artificial Sequence
  HTT spacer sequence CTCN PAM
ggacguagggccggaauuuu

SEQ ID NO: 18881 - RNA, 20 nt, Artificial Sequence
  HTT spacer sequence CTCN PAM
ccuguauuauugaugcugaa

SEQ ID NO: 18882 - RNA, 20 nt, Artificial Sequence
  HTT spacer sequence CTCN PAM
gcacacggggagugggcuuc

SEQ ID NO: 18883 - RNA, 20 nt, Artificial Sequence
  HTT spacer sequence CTCN PAM
ccgugugcagaggaagacag

SEQ ID NO: 18884 - RNA, 20 nt, Artificial Sequence
  HTT spacer sequence CTCN PAM
uuuccuugcaggaucauacc

SEQ ID NO: 18885 - RNA, 20 nt, Artificial Sequence
  HTT spacer sequence CTCN PAM
cgaccaagucaaaacuggcc

SEQ ID NO: 18886 - RNA, 20 nt, Artificial Sequence
  HTT spacer sequence CTCN PAM
ucccgaccaagucaaaacug

SEQ ID NO: 18887 - RNA, 20 nt, Artificial Sequence
  HTT spacer sequence CTCN PAM
gguguucaugccuccucccg

SEQ ID NO: 18888 - RNA, 20 nt, Artificial Sequence
  HTT spacer sequence CTCN PAM
gugucaaagaaucgcugcac

SEQ ID NO: 18889 - RNA, 20 nt, Artificial Sequence
  HTT spacer sequence CTCN PAM
cugugcagauguguggggug

SEQ ID NO: 18890 - RNA, 20 nt, Artificial Sequence
  HTT spacer sequence CTCN PAM
cuuccagacagcaucacccc

SEQ ID NO: 18891 - RNA, 20 nt, Artificial Sequence
  HTT spacer sequence CTCN PAM
ucacuuccagacagcaucac

SEQ ID NO: 18892 - RNA, 20 nt, Artificial Sequence
  HTT spacer sequence CTCN PAM
aucauuuaccacugugcccu

SEQ ID NO: 18893 - RNA, 20 nt, Artificial Sequence
  HTT spacer sequence CTCN PAM
gaggccuggagcgccuccug

SEQ ID NO: 18894 - RNA, 20 nt, Artificial Sequence
  HTT spacer sequence CTCN PAM
gagggcacagugguaaauga

SEQ ID NO: 18895 - RNA, 20 nt, Artificial Sequence
  HTT spacer sequence CTCN PAM
aggccucugagggcacagug

SEQ ID NO: 18896 - RNA, 20 nt, Artificial Sequence
  HTT spacer sequence CTCN PAM
ugcucucugagcagcucucc

SEQ ID NO: 18897 - RNA, 20 nt, Artificial Sequence
  HTT spacer sequence CTCN PAM
cugagcagcucucccgccug

SEQ ID NO: 18898 - RNA, 20 nt, Artificial Sequence
  HTT spacer sequence CTCN PAM
gagcagcucucccgccugga

SEQ ID NO: 18899 - RNA, 20 nt, Artificial Sequence
  HTT spacer sequence CTCN PAM
gagagcaggaggcgcuccag

SEQ ID NO: 18900 - RNA, 20 nt, Artificial Sequence
  HTT spacer sequence CTCN PAM
cccgccuggaugcagaaucg

SEQ ID NO: 18901 - RNA, 20 nt, Artificial Sequence
  HTT spacer sequence CTCN PAM
cgccuggaugcagaaucgcu

SEQ ID NO: 18902 - RNA, 20 nt, Artificial Sequence
  HTT spacer sequence CTCN PAM
gcuugaccagcgauucugca

SEQ ID NO: 18903 - RNA, 20 nt, Artificial Sequence
  HTT spacer sequence CTCN PAM
guccacacucagcuugacca

SEQ ID NO: 18904 - RNA, 20 nt, Artificial Sequence
  HTT spacer sequence CTCN PAM
gggccugaugcucaccugca

SEQ ID NO: 18905 - RNA, 20 nt, Artificial Sequence
  HTT spacer sequence CTCN PAM
ccugcauguacacaggugag

SEQ ID NO: 18906 - RNA, 20 nt, Artificial Sequence
  HTT spacer sequence CTCN PAM
ccuguguacaugcaggugag

SEQ ID NO: 18907 - RNA, 20 nt, Artificial Sequence
  HTT spacer sequence CTCN PAM
cuugaacaggacuugggcug

SEQ ID NO: 18908 - RNA, 20 nt, Artificial Sequence
  HTT spacer sequence CTCN PAM
ugccucccuugaacaggacu

SEQ ID NO: 18909 - RNA, 20 nt, Artificial Sequence
  HTT spacer sequence CTCN PAM
cucaagggaccucgacuagg

SEQ ID NO: 18910 - RNA, 20 nt, Artificial Sequence
  HTT spacer sequence CTCN PAM
agggaccucgacuaggugcc

SEQ ID NO: 18911 - RNA, 20 nt, Artificial Sequence
  HTT spacer sequence CTCN PAM
acuaggugcccucugauuuc

SEQ ID NO: 18912 - RNA, 20 nt, Artificial Sequence
  HTT spacer sequence CTCN PAM
gauuucacacuucugguguu

SEQ ID NO: 18913 - RNA, 20 nt, Artificial Sequence
  HTT spacer sequence CTCN PAM
ggagcccccagggcuggagu

SEQ ID NO: 18914 - RNA, 20 nt, Artificial Sequence
  HTT spacer sequence CTCN PAM
agagccuuucuugcaaggug

SEQ ID NO: 18915 - RNA, 20 nt, Artificial Sequence
  HTT spacer sequence CTCN PAM
agcccugggggcuccagagc

SEQ ID NO: 18916 - RNA, 20 nt, Artificial Sequence
  HTT spacer sequence CTCN PAM
ucccauguggcugagcuggg

SEQ ID NO: 18917 - RNA, 20 nt, Artificial Sequence
  HTT spacer sequence CTCN PAM
gccacaugggaugagugacc

SEQ ID NO: 18918 - RNA, 20 nt, Artificial Sequence
  HTT spacer sequence CTCN PAM
agggacucacuggaccccug

SEQ ID NO: 18919 - RNA, 20 nt, Artificial Sequence
  HTT spacer sequence CTCN PAM
cuggaccccuguguacaaag

SEQ ID NO: 18920 - RNA, 20 nt, Artificial Sequence
  HTT spacer sequence CTCN PAM
guagacagugcuuuguacac

SEQ ID NO: 18921 - RNA, 20 nt, Artificial Sequence
  HTT spacer sequence CTCN PAM
auacaacccaauaggcucug

SEQ ID NO: 18922 - RNA, 20 nt, Artificial Sequence
  HTT spacer sequence CTCN PAM
uuuccuguaacaaaaguguu

SEQ ID NO: 18923 - RNA, 20 nt, Artificial Sequence
  HTT spacer sequence CTCN PAM
cugucgggggcugcaggauu

SEQ ID NO: 18924 - RNA, 20 nt, Artificial Sequence
  HTT spacer sequence CTCN PAM
auagcaacaaucacugacuc

SEQ ID NO: 18925 - RNA, 20 nt, Artificial Sequence
  HTT spacer sequence CTCN PAM
gccguuagcuucccuagaac

SEQ ID NO: 18926 - RNA, 20 nt, Artificial Sequence
  HTT spacer sequence CTCN PAM
agcaacagcgccaggggauc

SEQ ID NO: 18927 - RNA, 20 nt, Artificial Sequence
  HTT spacer sequence CTCN PAM
ggguuccacuggcgagcugg

SEQ ID NO: 18928 - RNA, 20 nt, Artificial Sequence
  HTT spacer sequence CTCN PAM
ccaguggaacccugagccaa

SEQ ID NO: 18929 - RNA, 20 nt, Artificial Sequence
  HTT spacer sequence CTCN PAM
gguguagcguugaccaguuc

SEQ ID NO: 18930 - RNA, 20 nt, Artificial Sequence
  HTT spacer sequence CTCN PAM
ccugagggcucagggacagu

SEQ ID NO: 18931 - RNA, 20 nt, Artificial Sequence
  HTT spacer sequence CTCN PAM
ugagggcucagggacaguac

SEQ ID NO: 18932 - RNA, 20 nt, Artificial Sequence
  HTT spacer sequence CTCN PAM
ggagagaugggcaggcacug

SEQ ID NO: 18933 - RNA, 20 nt, Artificial Sequence
  HTT spacer sequence CTCN PAM
gggacaguaccuggcaguug

SEQ ID NO: 18934 - RNA, 20 nt, Artificial Sequence
  HTT spacer sequence CTCN PAM
gggaggguggggcagaagcc

SEQ ID NO: 18935 - RNA, 20 nt, Artificial Sequence
  HTT spacer sequence CTCN PAM
cagaggcuggucauuccugc

SEQ ID NO: 18936 - RNA, 20 nt, Artificial Sequence
  HTT spacer sequence CTCN PAM
cuguacaggcuucugcccca

SEQ ID NO: 18937 - RNA, 20 nt, Artificial Sequence
  HTT spacer sequence CTCN PAM
ucacuguacaggcuucugcc

SEQ ID NO: 18938 - RNA, 20 nt, Artificial Sequence
  HTT spacer sequence CTCN PAM
uccucacuguacaggcuucu

SEQ ID NO: 18939 - RNA, 20 nt, Artificial Sequence
  HTT spacer sequence CTCN PAM
gccuggcugccuaucgugag

SEQ ID NO: 18940 - RNA, 20 nt, Artificial Sequence
  HTT spacer sequence CTCN PAM
cgauaggcagccaggcugag

SEQ ID NO: 18941 - RNA, 20 nt, Artificial Sequence
  HTT spacer sequence CTCN PAM
cacgauaggcagccaggcug

SEQ ID NO: 18942 - RNA, 20 nt, Artificial Sequence
  HTT spacer sequence CTCN PAM
ccucucacgauaggcagcca

SEQ ID NO: 18943 - RNA, 20 nt, Artificial Sequence
  HTT spacer sequence CTCN PAM
cacagccccgugggcucccc

SEQ ID NO: 18944 - RNA, 20 nt, Artificial Sequence
  HTT spacer sequence CTCN PAM
caggcaccacggccccccuc

SEQ ID NO: 18945 - RNA, 20 nt, Artificial Sequence
  HTT spacer sequence CTCN PAM
cccugcucacaggcaccacg

SEQ ID NO: 18946 - RNA, 20 nt, Artificial Sequence
  HTT spacer sequence CTCN PAM
ucacccugcucacaggcacc

SEQ ID NO: 18947 - RNA, 20 nt, Artificial Sequence
  HTT spacer sequence CTCN PAM
ugccgcugcuccucacccug

SEQ ID NO: 18948 - RNA, 20 nt, Artificial Sequence
  HTT spacer sequence CTCN PAM
aagaugcauguguggguucc

SEQ ID NO: 18949 - RNA, 20 nt, Artificial Sequence
  HTT spacer sequence CTCN PAM
ccugcucuggaaguggguua

SEQ ID NO: 18950 - RNA, 20 nt, Artificial Sequence
  HTT spacer sequence CTCN PAM
ggaaguggguuaggagcuug

SEQ ID NO: 18951 - RNA, 20 nt, Artificial Sequence
  HTT spacer sequence CTCN PAM
uaacccacuuccagagcagg

SEQ ID NO: 18952 - RNA, 20 nt, Artificial Sequence
  HTT spacer sequence CTCN PAM
aggacaagggccccugauuu

SEQ ID NO: 18953 - RNA, 20 nt, Artificial Sequence
  HTT spacer sequence CTCN PAM
caggccucaguccuggcgac

SEQ ID NO: 18954 - RNA, 20 nt, Artificial Sequence
  HTT spacer sequence CTCN PAM
ggccucaguccuggcgacau

SEQ ID NO: 18955 - RNA, 20 nt, Artificial Sequence
  HTT spacer sequence CTCN PAM
guccuggcgacaugguggau

SEQ ID NO: 18956 - RNA, 20 nt, Artificial Sequence
  HTT spacer sequence CTCN PAM
agauccaccaugucgccagg

SEQ ID NO: 18957 - RNA, 20 nt, Artificial Sequence
  HTT spacer sequence CTCN PAM
ccaaucaggguggccagugg

SEQ ID NO: 18958 - RNA, 20 nt, Artificial Sequence
  HTT spacer sequence CTCN PAM
aaucaggguggccagugggg

SEQ ID NO: 18959 - RNA, 20 nt, Artificial Sequence
  HTT spacer sequence CTCN PAM
ccacuggccacccugauugg

SEQ ID NO: 18960 - RNA, 20 nt, Artificial Sequence
  HTT spacer sequence CTCN PAM
agagcauacucagguggacc

SEQ ID NO: 18961 - RNA, 20 nt, Artificial Sequence
  HTT spacer sequence CTCN PAM
ugagaaaagccaaauggcuc

SEQ ID NO: 18962 - RNA, 20 nt, Artificial Sequence
  HTT spacer sequence CTCN PAM
gguggaccuugcuccacugu

SEQ ID NO: 18963 - RNA, 20 nt, Artificial Sequence
  HTT spacer sequence CTCN PAM
acuguuugaccagaugaggc

SEQ ID NO: 18964 - RNA, 20 nt, Artificial Sequence
  HTT spacer sequence CTCN PAM
ucuggucaaacaguggagca

SEQ ID NO: 18965 - RNA, 20 nt, Artificial Sequence
  HTT spacer sequence CTCN PAM
aaaagaaaagaaaaaaaaaa

SEQ ID NO: 18966 - RNA, 20 nt, Artificial Sequence
  HTT spacer sequence CTCN PAM
aucucaaaaagaaaagaaaa

SEQ ID NO: 18967 - RNA, 20 nt, Artificial Sequence
  HTT spacer sequence CTCN PAM
agccugggugacaagggaaa

SEQ ID NO: 18968 - RNA, 20 nt, Artificial Sequence
  HTT spacer sequence CTCN PAM
gcucacugcaaccuccgccu

SEQ ID NO: 18969 - RNA, 20 nt, Artificial Sequence
  HTT spacer sequence CTCN PAM
cugcaaccuccgccucccgg

SEQ ID NO: 18970 - RNA, 20 nt, Artificial Sequence
  HTT spacer sequence CTCN PAM
gccucccggguucaagugau

SEQ ID NO: 18971 - RNA, 20 nt, Artificial Sequence
  HTT spacer sequence CTCN PAM
cggguucaagugauucuccu

SEQ ID NO: 18972 - RNA, 20 nt, Artificial Sequence
  HTT spacer sequence CTCN PAM
ugccucagccucccuaguag

SEQ ID NO: 18973 - RNA, 20 nt, Artificial Sequence
  HTT spacer sequence CTCN PAM
gccucccuaguagcugggau

SEQ ID NO: 18974 - RNA, 20 nt, Artificial Sequence
  HTT spacer sequence CTCN PAM
cuaguagcugggauuacagg

SEQ ID NO: 18975 - RNA, 20 nt, Artificial Sequence
  HTT spacer sequence CTCN PAM
acuaaaaacacaaaaauuag

SEQ ID NO: 18976 - RNA, 20 nt, Artificial Sequence
  HTT spacer sequence CTCN PAM
aacuccugaacucaagugau

SEQ ID NO: 18977 - RNA, 20 nt, Artificial Sequence
  HTT spacer sequence CTCN PAM
ugaacucaagugauccaccc

SEQ ID NO: 18978 - RNA, 20 nt, Artificial Sequence
  HTT spacer sequence CTCN PAM
agugauccacccuccuuggc

SEQ ID NO: 18979 - RNA, 20 nt, Artificial Sequence
  HTT spacer sequence CTCN PAM
uuggccucccaaagugcugg

SEQ ID NO: 18980 - RNA, 20 nt, Artificial Sequence
  HTT spacer sequence CTCN PAM
caaagugcugggauugcagg

SEQ ID NO: 18981 - RNA, 20 nt, Artificial Sequence
  HTT spacer sequence CTCN PAM
cgccugcaaucccagcacuu

SEQ ID NO: 18982 - RNA, 20 nt, Artificial Sequence
  HTT spacer sequence CTCN PAM
gcaucguucuucagucccca

SEQ ID NO: 18983 - RNA, 20 nt, Artificial Sequence
  HTT spacer sequence CTCN PAM
cugagcaccacugcgacugg

SEQ ID NO: 18984 - RNA, 20 nt, Artificial Sequence
  HTT spacer sequence CTCN PAM
gugagcauauggggacugaa

SEQ ID NO: 18985 - RNA, 20 nt, Artificial Sequence
  HTT spacer sequence CTCN PAM
cugugcccgucugccagucg

SEQ ID NO: 18986 - RNA, 20 nt, Artificial Sequence
  HTT spacer sequence CTCN PAM
ccaccuagcauugggcccac

SEQ ID NO: 18987 - RNA, 20 nt, Artificial Sequence
  HTT spacer sequence CTCN PAM
aaagaguguggugcacgccu

SEQ ID NO: 18988 - RNA, 20 nt, Artificial Sequence
  HTT spacer sequence CTCN PAM
uuggagcacucgccaccuag

SEQ ID NO: 18989 - RNA, 20 nt, Artificial Sequence
  HTT spacer sequence CTCN PAM
ccagacgccacagggaggca

SEQ ID NO: 18990 - RNA, 20 nt, Artificial Sequence
  HTT spacer sequence CTCN PAM
agacgccacagggaggcacc

SEQ ID NO: 18991 - RNA, 20 nt, Artificial Sequence
  HTT spacer sequence CTCN PAM
cuguggcgucuggagagcgg

SEQ ID NO: 18992 - RNA, 20 nt, Artificial Sequence
  HTT spacer sequence CTCN PAM
cagcugaccacagauuucuc

SEQ ID NO: 18993 - RNA, 20 nt, Artificial Sequence
  HTT spacer sequence CTCN PAM
cuguggagcagugucuucag

SEQ ID NO: 18994 - RNA, 20 nt, Artificial Sequence
  HTT spacer sequence CTCN PAM
guggagcagugucuucagag

SEQ ID NO: 18995 - RNA, 20 nt, Artificial Sequence
  HTT spacer sequence CTCN PAM
acagagagaaaucugugguc

SEQ ID NO: 18996 - RNA, 20 nt, Artificial Sequence
  HTT spacer sequence CTCN PAM
gaagacacugcuccacagag

SEQ ID NO: 18997 - RNA, 20 nt, Artificial Sequence
  HTT spacer sequence CTCN PAM
cccagcaguggcauggcagc

SEQ ID NO: 18998 - RNA, 20 nt, Artificial Sequence
  HTT spacer sequence CTCN PAM
acccgcccgcagacccucgc

SEQ ID NO: 18999 - RNA, 20 nt, Artificial Sequence
  HTT spacer sequence CTCN PAM
uggcucuacccgcccgcaga

SEQ ID NO: 19000 - RNA, 20 nt, Artificial Sequence
  HTT spacer sequence CTCN PAM
caggugcuccuggcucuacc

SEQ ID NO: 19001 - RNA, 20 nt, Artificial Sequence
  HTT spacer sequence CTCN PAM
guuacacacggcuggcaugu

SEQ ID NO: 19002 - RNA, 20 nt, Artificial Sequence
  HTT spacer sequence CTCN PAM
ucagugcacacaugccagcc

SEQ ID NO: 19003 - RNA, 20 nt, Artificial Sequence
  HTT spacer sequence CTCN PAM
gggggcguguuucaggaucu

SEQ ID NO: 19004 - RNA, 20 nt, Artificial Sequence
  HTT spacer sequence CTCN PAM
cugcuucuucccuaaccaga

SEQ ID NO: 19005 - RNA, 20 nt, Artificial Sequence
  HTT spacer sequence CTCN PAM
cgcugcuucuucccuaacca

SEQ ID NO: 19006 - RNA, 20 nt, Artificial Sequence
  HTT spacer sequence CTCN PAM
acaaacaucccuauguguuc

SEQ ID NO: 19007 - RNA, 20 nt, Artificial Sequence
  HTT spacer sequence CTCN PAM
uuuguaacauccuucccgcu

SEQ ID NO: 19008 - RNA, 20 nt, Artificial Sequence
  HTT spacer sequence CTCN PAM
ucuuaggaguucuggucccu

SEQ ID NO: 19009 - RNA, 20 nt, Artificial Sequence
  HTT spacer sequence CTCN PAM
uaggaguucuggucccuaca

SEQ ID NO: 19010 - RNA, 20 nt, Artificial Sequence
  HTT spacer sequence CTCN PAM
uaagaggaguuugaaagcua

SEQ ID NO: 19011 - RNA, 20 nt, Artificial Sequence
  HTT spacer sequence CTCN PAM
cacgcccuguagggaccaga

SEQ ID NO: 19012 - RNA, 20 nt, Artificial Sequence
  HTT spacer sequence CTCN PAM
ucuuaggaguucuggucccu

SEQ ID NO: 19013 - RNA, 20 nt, Artificial Sequence
  HTT spacer sequence CTCN PAM
uaggaguucuggucccuaca

SEQ ID NO: 19014 - RNA, 20 nt, Artificial Sequence
  HTT spacer sequence CTCN PAM
uaagaggaguuugaaagcua

SEQ ID NO: 19015 - RNA, 20 nt, Artificial Sequence
  HTT spacer sequence CTCN PAM
cacacccuguagggaccaga

SEQ ID NO: 19016 - RNA, 20 nt, Artificial Sequence
  HTT spacer sequence CTCN PAM
gcacaggcccugggcuccca

SEQ ID NO: 19017 - RNA, 20 nt, Artificial Sequence
  HTT spacer sequence CTCN PAM
acgagcuagacagaggaagg

SEQ ID NO: 19018 - RNA, 20 nt, Artificial Sequence
  HTT spacer sequence CTCN PAM
uggaggcaggcugcucggca

SEQ ID NO: 19019 - RNA, 20 nt, Artificial Sequence
  HTT spacer sequence CTCN PAM
gucuagcucguggaggcagg

SEQ ID NO: 19020 - RNA, 20 nt, Artificial Sequence
  HTT spacer sequence CTCN PAM
aaauucguacuccaguugcu

SEQ ID NO: 19021 - RNA, 20 nt, Artificial Sequence
  HTT spacer sequence CTCN PAM
aguugcuuaggcucugacuu

SEQ ID NO: 19022 - RNA, 20 nt, Artificial Sequence
  HTT spacer sequence CTCN PAM
gacuuuccccacuuggaaag

SEQ ID NO: 19023 - RNA, 20 nt, Artificial Sequence
  HTT spacer sequence CTCN PAM
cggccgagggucccucccag

SEQ ID NO: 19024 - RNA, 20 nt, Artificial Sequence
  HTT spacer sequence CTCN PAM
gccgugagggacuuuccaag

SEQ ID NO: 19025 - RNA, 20 nt, Artificial Sequence
  HTT spacer sequence CTCN PAM
cagcccugauuucacaucgg

SEQ ID NO: 19026 - RNA, 20 nt, Artificial Sequence
  HTT spacer sequence CTCN PAM
aauacuggggaaaaugccga

SEQ ID NO: 19027 - RNA, 20 nt, Artificial Sequence
  HTT spacer sequence CTCN PAM
gcgggcagguggggcagcug

SEQ ID NO: 19028 - RNA, 20 nt, Artificial Sequence
  HTT spacer sequence CTCN PAM
cacagcugccccaccugccc

SEQ ID NO: 19029 - RNA, 20 nt, Artificial Sequence
  HTT spacer sequence CTCN PAM
gaccugcgucccuccuccca

SEQ ID NO: 19030 - RNA, 20 nt, Artificial Sequence
  HTT spacer sequence CTCN PAM
ucccaggaucaggaaaggcu

SEQ ID NO: 19031 - RNA, 20 nt, Artificial Sequence
  HTT spacer sequence CTCN PAM
caggaucaggaaaggcuuuc

SEQ ID NO: 19032 - RNA, 20 nt, Artificial Sequence
  HTT spacer sequence CTCN PAM
ggcuucacaaggaaagccuu

SEQ ID NO: 19033 - RNA, 20 nt, Artificial Sequence
  HTT spacer sequence CTCN PAM
gaugacuuuguucaugaugu

SEQ ID NO: 19034 - RNA, 20 nt, Artificial Sequence
  HTT spacer sequence CTCN PAM
ccgaugacuuuguucaugau

SEQ ID NO: 19035 - RNA, 20 nt, Artificial Sequence
  HTT spacer sequence CTCN PAM
ccuuauacaccacgguggcc

SEQ ID NO: 19036 - RNA, 20 nt, Artificial Sequence
  HTT spacer sequence CTCN PAM
auccccaucccacaugcaac

SEQ ID NO: 19037 - RNA, 20 nt, Artificial Sequence
  HTT spacer sequence CTCN PAM
aggcuuucccacuccauccc

SEQ ID NO: 19038 - RNA, 20 nt, Artificial Sequence
  HTT spacer sequence CTCN PAM
accuccaggcuuucccacuc

SEQ ID NO: 19039 - RNA, 20 nt, Artificial Sequence
  HTT spacer sequence CTCN PAM
gacuucccagcagauucgcc

SEQ ID NO: 19040 - RNA, 20 nt, Artificial Sequence
  HTT spacer sequence CTCN PAM
gcuggcgaaucugcugggaa

SEQ ID NO: 19041 - RNA, 20 nt, Artificial Sequence
  HTT spacer sequence CTCN PAM
uccgcuuuaaagcagcaaug

SEQ ID NO: 19042 - RNA, 20 nt, Artificial Sequence
  HTT spacer sequence CTCN PAM
gcuuuaaagcagcaaugccu

SEQ ID NO: 19043 - RNA, 20 nt, Artificial Sequence
  HTT spacer sequence CTCN PAM
ggcccccaccccacccccgc

SEQ ID NO: 19044 - RNA, 20 nt, Artificial Sequence
  HTT spacer sequence CTCN PAM
ggcaccugcuugcuccuugc

SEQ ID NO: 19045 - RNA, 20 nt, Artificial Sequence
  HTT spacer sequence CTCN PAM
uugcagguguuucagacucu

SEQ ID NO: 19046 - RNA, 20 nt, Artificial Sequence
  HTT spacer sequence CTCN PAM
gcacagcaccgggcagucgu

SEQ ID NO: 19047 - RNA, 20 nt, Artificial Sequence
  HTT spacer sequence CTCN PAM
ccaacuucacgcagagggcc

SEQ ID NO: 19048 - RNA, 20 nt, Artificial Sequence
  HTT spacer sequence CTCN PAM
aacuucacgcagagggcccc

SEQ ID NO: 19049 - RNA, 20 nt, Artificial Sequence
  HTT spacer sequence CTCN PAM
gcgugaaguuggagagggac

SEQ ID NO: 19050 - RNA, 20 nt, Artificial Sequence
  HTT spacer sequence CTCN PAM
acguggccauggcgaccggg

SEQ ID NO: 19051 - RNA, 20 nt, Artificial Sequence
  HTT spacer sequence CTCN PAM
ccugcuucuuugucagcgcg

SEQ ID NO: 19052 - RNA, 20 nt, Artificial Sequence
  HTT spacer sequence CTCN PAM
ugcuucuuugucagcgcguc

SEQ ID NO: 19053 - RNA, 20 nt, Artificial Sequence
  HTT spacer sequence CTCN PAM
cugggucccuggugcuggcc

SEQ ID NO: 19054 - RNA, 20 nt, Artificial Sequence
  HTT spacer sequence CTCN PAM
gggucccuggugcuggcccc

SEQ ID NO: 19055 - RNA, 20 nt, Artificial Sequence
  HTT spacer sequence CTCN PAM
guguugacaagggaaacggg

SEQ ID NO: 19056 - RNA, 20 nt, Artificial Sequence
  HTT spacer sequence CTCN PAM
uguuucaugauaagguuuug

SEQ ID NO: 19057 - RNA, 20 nt, Artificial Sequence
  HTT spacer sequence CTCN PAM
gccccagggaaguaaaaugc

SEQ ID NO: 19058 - RNA, 20 nt, Artificial Sequence
  HTT spacer sequence CTCN PAM
uuucuguaccccugucagca

SEQ ID NO: 19059 - RNA, 20 nt, Artificial Sequence
  HTT spacer sequence CTCN PAM
cagaggggccgguguauggc

SEQ ID NO: 19060 - RNA, 20 nt, Artificial Sequence
  HTT spacer sequence CTCN PAM
gaggggccgguguauggcag

SEQ ID NO: 19061 - RNA, 20 nt, Artificial Sequence
  HTT spacer sequence CTCN PAM
gagaggcccuggucagcaaa

SEQ ID NO: 19062 - RNA, 20 nt, Artificial Sequence
  HTT spacer sequence CTCN PAM
ugccauacaccggccccucu

SEQ ID NO: 19063 - RNA, 20 nt, Artificial Sequence
  HTT spacer sequence CTCN PAM
gcugcgacccuccugccaua

SEQ ID NO: 19064 - RNA, 20 nt, Artificial Sequence
  HTT spacer sequence CTCN PAM
acagaaaggccccucagcug

SEQ ID NO: 19065 - RNA, 20 nt, Artificial Sequence
  HTT spacer sequence CTCN PAM
cccaggcccuccacagaaag

SEQ ID NO: 19066 - RNA, 20 nt, Artificial Sequence
  HTT spacer sequence CTCN PAM
ccucacccaggcccuccaca

SEQ ID NO: 19067 - RNA, 20 nt, Artificial Sequence
  HTT spacer sequence CTCN PAM
cuccccucacccaggcccuc

SEQ ID NO: 19068 - RNA, 20 nt, Artificial Sequence
  HTT spacer sequence CTCN PAM
gcagacgucccgcccacucg

SEQ ID NO: 19069 - RNA, 20 nt, Artificial Sequence
  HTT spacer sequence CTCN PAM
cgggcucuguguggcugggc

SEQ ID NO: 19070 - RNA, 20 nt, Artificial Sequence
  HTT spacer sequence CTCN PAM
guguggcugggcuucuccug

SEQ ID NO: 19071 - RNA, 20 nt, Artificial Sequence
  HTT spacer sequence CTCN PAM
ugacacugcuucucauuagc

SEQ ID NO: 19072 - RNA, 20 nt, Artificial Sequence
  HTT spacer sequence CTCN PAM
uuagcuuuggucauugugcc

SEQ ID NO: 19073 - RNA, 20 nt, Artificial Sequence
  HTT spacer sequence CTCN PAM
aucgcccucucggggaaagg

SEQ ID NO: 19074 - RNA, 20 nt, Artificial Sequence
  HTT spacer sequence CTCN PAM
cggggaaaggcuuaaguaaa

SEQ ID NO: 19075 - RNA, 20 nt, Artificial Sequence
  HTT spacer sequence CTCN PAM
gggaaaggcuuaaguaaaga

SEQ ID NO: 19076 - RNA, 20 nt, Artificial Sequence
  HTT spacer sequence CTCN PAM
uggcagccagcaucuggggg

SEQ ID NO: 19077 - RNA, 20 nt, Artificial Sequence
  HTT spacer sequence CTCN PAM
uguggucugucuuggggaag

SEQ ID NO: 19078 - RNA, 20 nt, Artificial Sequence
  HTT spacer sequence CTCN PAM
aagcagcacaguuguccugg

SEQ ID NO: 19079 - RNA, 20 nt, Artificial Sequence
  HTT spacer sequence CTCN PAM
gcccucacugcauuggagca

SEQ ID NO: 19080 - RNA, 20 nt, Artificial Sequence
  HTT spacer sequence CTCN PAM
cugcauuggagcagggcuag

SEQ ID NO: 19081 - RNA, 20 nt, Artificial Sequence
  HTT spacer sequence CTCN PAM
aaugcagugagggcagagcc

SEQ ID NO: 19082 - RNA, 20 nt, Artificial Sequence
  HTT spacer sequence CTCN PAM
acuagcccugcuccaaugca

SEQ ID NO: 19083 - RNA, 20 nt, Artificial Sequence
  HTT spacer sequence CTCN PAM
ugugcagcgcugguggccgg

SEQ ID NO: 19084 - RNA, 20 nt, Artificial Sequence
  HTT spacer sequence CTCN PAM
ccuggccuggcuccugugca

SEQ ID NO: 19085 - RNA, 20 nt, Artificial Sequence
  HTT spacer sequence CTCN PAM
gcagcacucaccuggccugg

SEQ ID NO: 19086 - RNA, 20 nt, Artificial Sequence
  HTT spacer sequence CTCN PAM
auuccugcaacccuuggcug

SEQ ID NO: 19087 - RNA, 20 nt, Artificial Sequence
  HTT spacer sequence CTCN PAM
accuccauuccugcaacccu

SEQ ID NO: 19088 - RNA, 20 nt, Artificial Sequence
  HTT spacer sequence CTCN PAM
agcugcaucagcgccuccac

SEQ ID NO: 19089 - RNA, 20 nt, Artificial Sequence
  HTT spacer sequence CTCN PAM
gcucgcucuccaggcucccu

SEQ ID NO: 19090 - RNA, 20 nt, Artificial Sequence
  HTT spacer sequence CTCN PAM
cucuccaggcucccuggacc

SEQ ID NO: 19091 - RNA, 20 nt, Artificial Sequence
  HTT spacer sequence CTCN PAM
ccaggcucccuggaccccuu

SEQ ID NO: 19092 - RNA, 20 nt, Artificial Sequence
  HTT spacer sequence CTCN PAM
aggcucccuggaccccuuug

SEQ ID NO: 19093 - RNA, 20 nt, Artificial Sequence
  HTT spacer sequence CTCN PAM
cuggaccccuuuguagacug

SEQ ID NO: 19094 - RNA, 20 nt, Artificial Sequence
  HTT spacer sequence CTCN PAM
ugaaacagucuacaaagggg

SEQ ID NO: 19095 - RNA, 20 nt, Artificial Sequence
  HTT spacer sequence CTCN PAM
ccugaaacagucuacaaagg

SEQ ID NO: 19096 - RNA, 20 nt, Artificial Sequence
  HTT spacer sequence CTCN PAM
caggugaggacagggaggca

SEQ ID NO: 19097 - RNA, 20 nt, Artificial Sequence
  HTT spacer sequence CTCN PAM
ccugggaguuccucuccuga

SEQ ID NO: 19098 - RNA, 20 nt, Artificial Sequence
  HTT spacer sequence CTCN PAM
cuguccucaccugggaguuc

SEQ ID NO: 19099 - RNA, 20 nt, Artificial Sequence
  HTT spacer sequence CTCN PAM
uuugccggccuuuuuccuua

SEQ ID NO: 19100 - RNA, 20 nt, Artificial Sequence
  HTT spacer sequence CTCN PAM
ugcaccagccucccacaugu

SEQ ID NO: 19101 - RNA, 20 nt, Artificial Sequence
  HTT spacer sequence CTCN PAM
cacaugucaucagcaggaug

SEQ ID NO: 19102 - RNA, 20 nt, Artificial Sequence
  HTT spacer sequence CTCN PAM
agcuugcccauccugcugau

SEQ ID NO: 19103 - RNA, 20 nt, Artificial Sequence
  HTT spacer sequence CTCN PAM
aucuggugucuguagaaguc

SEQ ID NO: 19104 - RNA, 20 nt, Artificial Sequence
  HTT spacer sequence CTCN PAM
ucuaucuggugucuguagaa

SEQ ID NO: 19105 - RNA, 20 nt, Artificial Sequence
  HTT spacer sequence CTCN PAM
uccucuaucuggugucugua

SEQ ID NO: 19106 - RNA, 20 nt, Artificial Sequence
  HTT spacer sequence CTCN PAM
accgcagggccuuccagucu

SEQ ID NO: 19107 - RNA, 20 nt, Artificial Sequence
  HTT spacer sequence CTCN PAM
agcacagacuggaaggcccu

SEQ ID NO: 19108 - RNA, 20 nt, Artificial Sequence
  HTT spacer sequence CTCN PAM
gcagguggugaccuugugga

SEQ ID NO: 19109 - RNA, 20 nt, Artificial Sequence
  HTT spacer sequence CTCN PAM
caccauggcgcucagcaggu

SEQ ID NO: 19110 - RNA, 20 nt, Artificial Sequence
  HTT spacer sequence CTCN PAM
cccaccauggcgcucagcag

SEQ ID NO: 19111 - RNA, 20 nt, Artificial Sequence
  HTT spacer sequence CTCN PAM
cagucucucccaccauggcg

SEQ ID NO: 19112 - RNA, 20 nt, Artificial Sequence
  HTT spacer sequence CTCN PAM
ggccccagcugccgccucac

SEQ ID NO: 19113 - RNA, 20 nt, Artificial Sequence
  HTT spacer sequence CTCN PAM
accgagccagcuuggucccu

SEQ ID NO: 19114 - RNA, 20 nt, Artificial Sequence
  HTT spacer sequence CTCN PAM
guggaggcagggcacaaggg

SEQ ID NO: 19115 - RNA, 20 nt, Artificial Sequence
  HTT spacer sequence CTCN PAM
gccauguggcagaagugcuc

SEQ ID NO: 19116 - RNA, 20 nt, Artificial Sequence
  HTT spacer sequence CTCN PAM
uuguggcaguggccaggcag

SEQ ID NO: 19117 - RNA, 20 nt, Artificial Sequence
  HTT spacer sequence CTCN PAM
cugccuggccacugccacaa

SEQ ID NO: 19118 - RNA, 20 nt, Artificial Sequence
  HTT spacer sequence CTCN PAM
gccccaccaggacugcagac

SEQ ID NO: 19119 - RNA, 20 nt, Artificial Sequence
  HTT spacer sequence CTCN PAM
ggcucagccccaccaggacu

SEQ ID NO: 19120 - RNA, 20 nt, Artificial Sequence
  HTT spacer sequence CTCN PAM
ugcuuucuggaaggccucag

SEQ ID NO: 19121 - RNA, 20 nt, Artificial Sequence
  HTT spacer sequence CTCN PAM
ugauagucaccugcugguug

SEQ ID NO: 19122 - RNA, 20 nt, Artificial Sequence
  HTT spacer sequence CTCN PAM
ugcaucugggccagaagucc

SEQ ID NO: 19123 - RNA, 20 nt, Artificial Sequence
  HTT spacer sequence CTCN PAM
cuccugcaggcuggcuguug

SEQ ID NO: 19124 - RNA, 20 nt, Artificial Sequence
  HTT spacer sequence CTCN PAM
ugcaggcuggcuguuggccc

SEQ ID NO: 19125 - RNA, 20 nt, Artificial Sequence
  HTT spacer sequence CTCN PAM
gcuguccugcaguagaaggu

SEQ ID NO: 19126 - RNA, 20 nt, Artificial Sequence
  HTT spacer sequence CTCN PAM
cggcaccuucuacugcagga

SEQ ID NO: 19127 - RNA, 20 nt, Artificial Sequence
  HTT spacer sequence CTCN PAM
cugguggggugugcaugcca

SEQ ID NO: 19128 - RNA, 20 nt, Artificial Sequence
  HTT spacer sequence CTCN PAM
cuucucucuuuucuucucag

SEQ ID NO: 19129 - RNA, 20 nt, Artificial Sequence
  HTT spacer sequence CTCN PAM
cuuuucuucucaggauuuaa

SEQ ID NO: 19130 - RNA, 20 nt, Artificial Sequence
  HTT spacer sequence CTCN PAM
uuucuucucaggauuuaaaa

SEQ ID NO: 19131 - RNA, 20 nt, Artificial Sequence
  HTT spacer sequence CTCN PAM
ggauuuaaaauuuaauuaua

SEQ ID NO: 19132 - RNA, 20 nt, Artificial Sequence
  HTT spacer sequence CTCN PAM
uuacugauauaauuaaauuu

SEQ ID NO: 19133 - RNA, 20 nt, Artificial Sequence
  HTT spacer sequence CTCN PAM
uucuaugcccguguaaagua

SEQ ID NO: 19134 - RNA, 20 nt, Artificial Sequence
  HTT spacer sequence CTCN PAM
cucuccuguagccacuggca

SEQ ID NO: 19135 - RNA, 20 nt, Artificial Sequence
  HTT spacer sequence CTCN PAM
ccuguagccacuggcauagc

SEQ ID NO: 19136 - RNA, 20 nt, Artificial Sequence
  HTT spacer sequence CTCN PAM
uguagccacuggcauagccc

SEQ ID NO: 19137 - RNA, 20 nt, Artificial Sequence
  HTT spacer sequence CTCN PAM
ugagcacccgcugacauuuc

SEQ ID NO: 19138 - RNA, 20 nt, Artificial Sequence
  HTT spacer sequence CTCN PAM
ggagggcuaugccaguggcu

SEQ ID NO: 19139 - RNA, 20 nt, Artificial Sequence
  HTT spacer sequence CTCN PAM
acaucccagucaccuuguga

SEQ ID NO: 19140 - RNA, 20 nt, Artificial Sequence
  HTT spacer sequence CTCN PAM
cuacaucccagucaccuugu

SEQ ID NO: 19141 - RNA, 20 nt, Artificial Sequence
  HTT spacer sequence CTCN PAM
guccugcuguggccaccugc

SEQ ID NO: 19142 - RNA, 20 nt, Artificial Sequence
  HTT spacer sequence CTCN PAM
ccugcagccccuccuccucg

SEQ ID NO: 19143 - RNA, 20 nt, Artificial Sequence
  HTT spacer sequence CTCN PAM
uccucgggcacagacgacug

SEQ ID NO: 19144 - RNA, 20 nt, Artificial Sequence
  HTT spacer sequence CTCN PAM
ucgggcacagacgacugucg

SEQ ID NO: 19145 - RNA, 20 nt, Artificial Sequence
  HTT spacer sequence CTCN PAM
ggcacagacgacugucguuc

SEQ ID NO: 19146 - RNA, 20 nt, Artificial Sequence
  HTT spacer sequence CTCN PAM
acccaccagucagggacagc

SEQ ID NO: 19147 - RNA, 20 nt, Artificial Sequence
  HTT spacer sequence CTCN PAM
cugucacucagcugagaagg

SEQ ID NO: 19148 - RNA, 20 nt, Artificial Sequence
  HTT spacer sequence CTCN PAM
gcugagaaggccagcccucc

SEQ ID NO: 19149 - RNA, 20 nt, Artificial Sequence
  HTT spacer sequence CTCN PAM
gcugagugacagggaggcug

SEQ ID NO: 19150 - RNA, 20 nt, Artificial Sequence
  HTT spacer sequence CTCN PAM
cuggcugugagcagccucca

SEQ ID NO: 19151 - RNA, 20 nt, Artificial Sequence
  HTT spacer sequence CTCN PAM
cagccagggagggcuggccu

SEQ ID NO: 19152 - RNA, 20 nt, Artificial Sequence
  HTT spacer sequence CTCN PAM
acuguguccagagacauggg

SEQ ID NO: 19153 - RNA, 20 nt, Artificial Sequence
  HTT spacer sequence CTCN PAM
ggacacaguggaggcugcuc

SEQ ID NO: 19154 - RNA, 20 nt, Artificial Sequence
  HTT spacer sequence CTCN PAM
cacuccuguuccuugcuagc

SEQ ID NO: 19155 - RNA, 20 nt, Artificial Sequence
  HTT spacer sequence CTCN PAM
uguuccuugcuagcccuggg

SEQ ID NO: 19156 - RNA, 20 nt, Artificial Sequence
  HTT spacer sequence CTCN PAM
uaggcagacgccaccccagg

SEQ ID NO: 19157 - RNA, 20 nt, Artificial Sequence
  HTT spacer sequence CTCN PAM
auggaugcaugcccuaagag

SEQ ID NO: 19158 - RNA, 20 nt, Artificial Sequence
  HTT spacer sequence CTCN PAM
uagggcaugcauccauggag

SEQ ID NO: 19159 - RNA, 20 nt, Artificial Sequence
  HTT spacer sequence CTCN PAM
gugacacucuuagggcaugc

SEQ ID NO: 19160 - RNA, 20 nt, Artificial Sequence
  HTT spacer sequence CTCN PAM
gacaaaacacagcucaguga

SEQ ID NO: 19161 - RNA, 20 nt, Artificial Sequence
  HTT spacer sequence CTCN PAM
cucggucaacagcaaagcuu

SEQ ID NO: 19162 - RNA, 20 nt, Artificial Sequence
  HTT spacer sequence CTCN PAM
cggucaacagcaaagcuugg

SEQ ID NO: 19163 - RNA, 20 nt, Artificial Sequence
  HTT spacer sequence CTCN PAM
gucaacagcaaagcuuggug

SEQ ID NO: 19164 - RNA, 20 nt, Artificial Sequence
  HTT spacer sequence CTCN PAM
gucacuaacagugccaagac

SEQ ID NO: 19165 - RNA, 20 nt, Artificial Sequence
  HTT spacer sequence CTCN PAM
ugacuaaaaggggucaccgu

SEQ ID NO: 19166 - RNA, 20 nt, Artificial Sequence
  HTT spacer sequence CTCN PAM
ccugacuaaaaggggucacc

SEQ ID NO: 19167 - RNA, 20 nt, Artificial Sequence
  HTT spacer sequence CTCN PAM
ucggagacugccccacggcc

SEQ ID NO: 19168 - RNA, 20 nt, Artificial Sequence
  HTT spacer sequence CTCN PAM
gaugagcacagaucugcacu

SEQ ID NO: 19169 - RNA, 20 nt, Artificial Sequence
  HTT spacer sequence CTCN PAM
gacagggccguggggcaguc

SEQ ID NO: 19170 - RNA, 20 nt, Artificial Sequence
  HTT spacer sequence CTCN PAM
uauccccaggccaggucccu

SEQ ID NO: 19171 - RNA, 20 nt, Artificial Sequence
  HTT spacer sequence CTCN PAM
uguuugcaggcccagaggag

SEQ ID NO: 19172 - RNA, 20 nt, Artificial Sequence
  HTT spacer sequence CTCN PAM
gggccugcaaacaggaggcu

SEQ ID NO: 19173 - RNA, 20 nt, Artificial Sequence
  HTT spacer sequence CTCN PAM
ucugggccugcaaacaggag

SEQ ID NO: 19174 - RNA, 20 nt, Artificial Sequence
  HTT spacer sequence CTCN PAM
uacaucagcagcagcccggc

SEQ ID NO: 19175 - RNA, 20 nt, Artificial Sequence
  HTT spacer sequence CTCN PAM
caaauccagcuccuacauca

SEQ ID NO: 19176 - RNA, 20 nt, Artificial Sequence
  HTT spacer sequence CTCN PAM
gcuugccgacuggcugugag

SEQ ID NO: 19177 - RNA, 20 nt, Artificial Sequence
  HTT spacer sequence CTCN PAM
cagccagucggcaagcagag

SEQ ID NO: 19178 - RNA, 20 nt, Artificial Sequence
  HTT spacer sequence CTCN PAM
ucucacagccagucggcaag

SEQ ID NO: 19179 - RNA, 20 nt, Artificial Sequence
  HTT spacer sequence CTCN PAM
gcuuccucagcccuagaggc

SEQ ID NO: 19180 - RNA, 20 nt, Artificial Sequence
  HTT spacer sequence CTCN PAM
gcccuagaggcgagccaggc

SEQ ID NO: 19181 - RNA, 20 nt, Artificial Sequence
  HTT spacer sequence CTCN PAM
agggcugaggaagcagagcc

SEQ ID NO: 19182 - RNA, 20 nt, Artificial Sequence
  HTT spacer sequence CTCN PAM
ccucuagggcugaggaagca

SEQ ID NO: 19183 - RNA, 20 nt, Artificial Sequence
  HTT spacer sequence CTCN PAM
acuuaccacauucaauaccc

SEQ ID NO: 19184 - RNA, 20 nt, Artificial Sequence
  HTT spacer sequence CTCN PAM
gugcaggugcugccuugaga

SEQ ID NO: 19185 - RNA, 20 nt, Artificial Sequence
  HTT spacer sequence CTCN PAM
aggcagcaccugcacagagu

SEQ ID NO: 19186 - RNA, 20 nt, Artificial Sequence
  HTT spacer sequence CTCN PAM
ccuauguggcagcuggggag

SEQ ID NO: 19187 - RNA, 20 nt, Artificial Sequence
  HTT spacer sequence CTCN PAM
uauguggcagcuggggagca

SEQ ID NO: 19188 - RNA, 20 nt, Artificial Sequence
  HTT spacer sequence CTCN PAM
ccagcugccacauaggagag

SEQ ID NO: 19189 - RNA, 20 nt, Artificial Sequence
  HTT spacer sequence CTCN PAM
gcugcuccccagcugccaca

SEQ ID NO: 19190 - RNA, 20 nt, Artificial Sequence
  HTT spacer sequence CTCN PAM
cguaugugggcagcauacaa

SEQ ID NO: 19191 - RNA, 20 nt, Artificial Sequence
  HTT spacer sequence CTCN PAM
cccucacguaugugggcagc

SEQ ID NO: 19192 - RNA, 20 nt, Artificial Sequence
  HTT spacer sequence CTCN PAM
cuuucagcucccccucacgu

SEQ ID NO: 19193 - RNA, 20 nt, Artificial Sequence
  HTT spacer sequence CTCN PAM
ucugagcagccucugccagg

SEQ ID NO: 19194 - RNA, 20 nt, Artificial Sequence
  HTT spacer sequence CTCN PAM
gagcagccucugccaggccu

SEQ ID NO: 19195 - RNA, 20 nt, Artificial Sequence
  HTT spacer sequence CTCN PAM
gaggaggggcucccuuucag

SEQ ID NO: 19196 - RNA, 20 nt, Artificial Sequence
  HTT spacer sequence CTCN PAM
gccaggccuguaugaggcuu

SEQ ID NO: 19197 - RNA, 20 nt, Artificial Sequence
  HTT spacer sequence CTCN PAM
uacaggccuggcagaggcug

SEQ ID NO: 19198 - RNA, 20 nt, Artificial Sequence
  HTT spacer sequence CTCN PAM
caacagaggccucccccagc

SEQ ID NO: 19199 - RNA, 20 nt, Artificial Sequence
  HTT spacer sequence CTCN PAM
guugggagcuggugggaaaa

SEQ ID NO: 19200 - RNA, 20 nt, Artificial Sequence
  HTT spacer sequence CTCN PAM
cccagccaggaccaccucgu

SEQ ID NO: 19201 - RNA, 20 nt, Artificial Sequence
  HTT spacer sequence CTCN PAM
uccucguggcggggcagcag

SEQ ID NO: 19202 - RNA, 20 nt, Artificial Sequence
  HTT spacer sequence CTCN PAM
uggcggggcagcaggagcgg

SEQ ID NO: 19203 - RNA, 20 nt, Artificial Sequence
  HTT spacer sequence CTCN PAM
ugcugccccgccacgaggac

SEQ ID NO: 19204 - RNA, 20 nt, Artificial Sequence
  HTT spacer sequence CTCN PAM
aacaucggaccccuuucuac

SEQ ID NO: 19205 - RNA, 20 nt, Artificial Sequence
  HTT spacer sequence CTCN PAM
ucaaacaucggaccccuuuc

SEQ ID NO: 19206 - RNA, 20 nt, Artificial Sequence
  HTT spacer sequence CTCN PAM
uguuucucauccuagcuuuu

SEQ ID NO: 19207 - RNA, 20 nt, Artificial Sequence
  HTT spacer sequence CTCN PAM
uccuagcuuuuuccuggaaa

SEQ ID NO: 19208 - RNA, 20 nt, Artificial Sequence
  HTT spacer sequence CTCN PAM
uucccaaaccuucuagcggg

SEQ ID NO: 19209 - RNA, 20 nt, Artificial Sequence
  HTT spacer sequence CTCN PAM
gaacuguuggcugcucccca

SEQ ID NO: 19210 - RNA, 20 nt, Artificial Sequence
  HTT spacer sequence CTCN PAM
ccacccgccucccgccuccc

SEQ ID NO: 19211 - RNA, 20 nt, Artificial Sequence
  HTT spacer sequence CTCN PAM
cgccucccccgcagguuaug

SEQ ID NO: 19212 - RNA, 20 nt, Artificial Sequence
  HTT spacer sequence CTCN PAM
cccgcagguuaugucagcag

SEQ ID NO: 19213 - RNA, 20 nt, Artificial Sequence
  HTT spacer sequence CTCN PAM
gagacagcaguaucacaggc

SEQ ID NO: 19214 - RNA, 20 nt, Artificial Sequence
  HTT spacer sequence CTCN PAM
gagcugcugacauaaccugc

SEQ ID NO: 19215 - RNA, 20 nt, Artificial Sequence
  HTT spacer sequence CTCN PAM
guuuuacauucacaguguua

SEQ ID NO: 19216 - RNA, 20 nt, Artificial Sequence
  HTT spacer sequence CTCN PAM
acauagaguuugucuuccuc

SEQ ID NO: 19217 - RNA, 20 nt, Artificial Sequence
  HTT spacer sequence CTCN PAM
auguugagcccagcgauaug

SEQ ID NO: 19218 - RNA, 20 nt, Artificial Sequence
  HTT spacer sequence CTCN PAM
uguuuacgacgugaucuaaa

SEQ ID NO: 19219 - RNA, 20 nt, Artificial Sequence
  HTT spacer sequence CTCN PAM
gaacaccccgcucuggcagu

SEQ ID NO: 19220 - RNA, 20 nt, Artificial Sequence
  HTT spacer sequence CTCN PAM
ggcaguaggugucccccacc

SEQ ID NO: 19221 - RNA, 20 nt, Artificial Sequence
  HTT spacer sequence CTCN PAM
ggagaugaauaugagcucau

SEQ ID NO: 19222 - RNA, 20 nt, Artificial Sequence
  HTT spacer sequence CTCN PAM
ggagcacacaggcaggucuu

SEQ ID NO: 19223 - RNA, 20 nt, Artificial Sequence
  HTT spacer sequence CTCN PAM
uauucaucuccggagcacac

SEQ ID NO: 19224 - RNA, 20 nt, Artificial Sequence
  HTT spacer sequence CTCN PAM
uuaguaaaaaugacuucacc

SEQ ID NO: 19225 - RNA, 20 nt, Artificial Sequence
  HTT spacer sequence CTCN PAM
caagacggagaugcauggcc

SEQ ID NO: 19226 - RNA, 20 nt, Artificial Sequence
  HTT spacer sequence CTCN PAM
agacggagaugcauggccuc

SEQ ID NO: 19227 - RNA, 20 nt, Artificial Sequence
  HTT spacer sequence CTCN PAM
gucuugagaggugugugugu

SEQ ID NO: 19228 - RNA, 20 nt, Artificial Sequence
  HTT spacer sequence CTCN PAM
aagagugcccgugucgguuc

SEQ ID NO: 19229 - RNA, 20 nt, Artificial Sequence
  HTT spacer sequence CTCN PAM
uagaggccaugcaucuccgu

SEQ ID NO: 19230 - RNA, 20 nt, Artificial Sequence
  HTT spacer sequence CTCN PAM
uucauugcccacuaggaucc

SEQ ID NO: 19231 - RNA, 20 nt, Artificial Sequence
  HTT spacer sequence CTCN PAM
auaucagcucucugcagaag

SEQ ID NO: 19232 - RNA, 20 nt, Artificial Sequence
  HTT spacer sequence CTCN PAM
cugcagaagggaggaagacu

SEQ ID NO: 19233 - RNA, 20 nt, Artificial Sequence
  HTT spacer sequence CTCN PAM
gcagaagggaggaagacuuu

SEQ ID NO: 19234 - RNA, 20 nt, Artificial Sequence
  HTT spacer sequence CTCN PAM
cuucugcagagagcugauau

SEQ ID NO: 19235 - RNA, 20 nt, Artificial Sequence
  HTT spacer sequence CTCN PAM
ccacagcccacccccaaaac

SEQ ID NO: 19236 - RNA, 20 nt, Artificial Sequence
  HTT spacer sequence CTCN PAM
cuuccgcugcgggcccagcu

SEQ ID NO: 19237 - RNA, 20 nt, Artificial Sequence
  HTT spacer sequence CTCN PAM
gcugggcccgcagcggaagg

SEQ ID NO: 19238 - RNA, 20 nt, Artificial Sequence
  HTT spacer sequence CTCN PAM
uuguuacuguccacccucau

SEQ ID NO: 19239 - RNA, 20 nt, Artificial Sequence
  HTT spacer sequence CTCN PAM
uuucugccagcgcauguguc

SEQ ID NO: 19240 - RNA, 20 nt, Artificial Sequence
  HTT spacer sequence CTCN PAM
agacacccagaauguagcau

SEQ ID NO: 19241 - RNA, 20 nt, Artificial Sequence
  HTT spacer sequence CTCN PAM
gaugcuacauucuggguguc

SEQ ID NO: 19242 - RNA, 20 nt, Artificial Sequence
  HTT spacer sequence CTCN PAM
cccccaucuucauggagggg

SEQ ID NO: 19243 - RNA, 20 nt, Artificial Sequence
  HTT spacer sequence CTCN PAM
augaagaugggggcgagggg

SEQ ID NO: 19244 - RNA, 20 nt, Artificial Sequence
  HTT spacer sequence CTCN PAM
gaaaugacccccuccaugaa

SEQ ID NO: 19245 - RNA, 20 nt, Artificial Sequence
  HTT spacer sequence CTCN PAM
gagccaaugaacagcuccuc

SEQ ID NO: 19246 - RNA, 20 nt, Artificial Sequence
  HTT spacer sequence CTCN PAM
gagggcucugaaaugacccc

SEQ ID NO: 19247 - RNA, 20 nt, Artificial Sequence
  HTT spacer sequence CTCN PAM
uccucuuggagcugagauga

SEQ ID NO: 19248 - RNA, 20 nt, Artificial Sequence
  HTT spacer sequence CTCN PAM
ucuuggagcugagaugagcc

SEQ ID NO: 19249 - RNA, 20 nt, Artificial Sequence
  HTT spacer sequence CTCN PAM
uggagcugagaugagcccca

SEQ ID NO: 19250 - RNA, 20 nt, Artificial Sequence
  HTT spacer sequence CTCN PAM
aagaggaggagcuguucauu

SEQ ID NO: 19251 - RNA, 20 nt, Artificial Sequence
  HTT spacer sequence CTCN PAM
gcuccaagaggaggagcugu

SEQ ID NO: 19252 - RNA, 20 nt, Artificial Sequence
  HTT spacer sequence CTCN PAM
ucucagcuccaagaggagga

SEQ ID NO: 19253 - RNA, 20 nt, Artificial Sequence
  HTT spacer sequence CTCN PAM
acguggggcucaucucagcu

SEQ ID NO: 19254 - RNA, 20 nt, Artificial Sequence
  HTT spacer sequence CTCN PAM
ggacggauaguagacagcaa

SEQ ID NO: 19255 - RNA, 20 nt, Artificial Sequence
  HTT spacer sequence CTCN PAM
guguguggccgccuggcagg

SEQ ID NO: 19256 - RNA, 20 nt, Artificial Sequence
  HTT spacer sequence CTCN PAM
cguugcgggguggagugagg

SEQ ID NO: 19257 - RNA, 20 nt, Artificial Sequence
  HTT spacer sequence CTCN PAM
accccgcaacgggaggaagu

SEQ ID NO: 19258 - RNA, 20 nt, Artificial Sequence
  HTT spacer sequence CTCN PAM
cuccaccccgcaacgggagg

SEQ ID NO: 19259 - RNA, 20 nt, Artificial Sequence
  HTT spacer sequence CTCN PAM
acccaccagacacacagaac

SEQ ID NO: 19260 - RNA, 20 nt, Artificial Sequence
  HTT spacer sequence CTCN PAM
ugcuaccugugagcauccuu

SEQ ID NO: 19261 - RNA, 20 nt, Artificial Sequence
  HTT spacer sequence CTCN PAM
cagguagcaagagaagccug

SEQ ID NO: 19262 - RNA, 20 nt, Artificial Sequence
  HTT spacer sequence CTCN PAM
ucgggcuuugucccuccccc

SEQ ID NO: 19263 - RNA, 20 nt, Artificial Sequence
  HTT spacer sequence CTCN PAM
cccgcuuccucccucugcgg

SEQ ID NO: 19264 - RNA, 20 nt, Artificial Sequence
  HTT spacer sequence CTCN PAM
cucugcggggaggacccggg

SEQ ID NO: 19265 - RNA, 20 nt, Artificial Sequence
  HTT spacer sequence CTCN PAM
gcggggaggacccgggacca

SEQ ID NO: 19266 - RNA, 20 nt, Artificial Sequence
  HTT spacer sequence CTCN PAM
ccgcagagggaggaagcggg

SEQ ID NO: 19267 - RNA, 20 nt, Artificial Sequence
  HTT spacer sequence CTCN PAM
aagucuacccuggccagcag

SEQ ID NO: 19268 - RNA, 20 nt, Artificial Sequence
  HTT spacer sequence CTCN PAM
agaggggucacguguaggag

SEQ ID NO: 19269 - RNA, 20 nt, Artificial Sequence
  HTT spacer sequence CTCN PAM
ggaggacagcuccaagucua

SEQ ID NO: 19270 - RNA, 20 nt, Artificial Sequence
  HTT spacer sequence CTCN PAM
uacacgugaccccucuggag

SEQ ID NO: 19271 - RNA, 20 nt, Artificial Sequence
  HTT spacer sequence CTCN PAM
cuccuacacgugaccccucu

SEQ ID NO: 19272 - RNA, 20 nt, Artificial Sequence
  HTT spacer sequence CTCN PAM
agaucuuccuucuucucacu

SEQ ID NO: 19273 - RNA, 20 nt, Artificial Sequence
  HTT spacer sequence CTCN PAM
caagaucuuccuucuucuca

SEQ ID NO: 19274 - RNA, 20 nt, Artificial Sequence
  HTT spacer sequence CTCN PAM
gcagcucucaagaucuuccu

SEQ ID NO: 19275 - RNA, 20 nt, Artificial Sequence
  HTT spacer sequence CTCN PAM
aaggucccucagcagcucuc

SEQ ID NO: 19276 - RNA, 20 nt, Artificial Sequence
  HTT spacer sequence CTCN PAM
ccaaggucccucagcagcuc

SEQ ID NO: 19277 - RNA, 20 nt, Artificial Sequence
  HTT spacer sequence CTCN PAM
ggauggcucagacgaggaca

SEQ ID NO: 19278 - RNA, 20 nt, Artificial Sequence
  HTT spacer sequence CTCN PAM
gacgaggacacucgcuugcc

SEQ ID NO: 19279 - RNA, 20 nt, Artificial Sequence
  HTT spacer sequence CTCN PAM
ucugagccauccugagcucu

SEQ ID NO: 19280 - RNA, 20 nt, Artificial Sequence
  HTT spacer sequence CTCN PAM
cuugccgggccugggccucc

SEQ ID NO: 19281 - RNA, 20 nt, Artificial Sequence
  HTT spacer sequence CTCN PAM
ugggaaggagggagcugcuc

SEQ ID NO: 19282 - RNA, 20 nt, Artificial Sequence
  HTT spacer sequence CTCN PAM
uucccaggaggcccaggccc

SEQ ID NO: 19283 - RNA, 20 nt, Artificial Sequence
  HTT spacer sequence CTCN PAM
cuccuucccaggaggcccag

SEQ ID NO: 19284 - RNA, 20 nt, Artificial Sequence
  HTT spacer sequence CTCN PAM
gaaugccgcaugacaacuga

SEQ ID NO: 19285 - RNA, 20 nt, Artificial Sequence
  HTT spacer sequence CTCN PAM
ucccccaugugccugucacg

SEQ ID NO: 19286 - RNA, 20 nt, Artificial Sequence
  HTT spacer sequence CTCN PAM
ggugcagucaaaggaacgcc

SEQ ID NO: 19287 - RNA, 20 nt, Artificial Sequence
  HTT spacer sequence CTCN PAM
guuguuucuaagagcagagu

SEQ ID NO: 19288 - RNA, 20 nt, Artificial Sequence
  HTT spacer sequence CTCN PAM
uagaaacaacugaggggaag

SEQ ID NO: 19289 - RNA, 20 nt, Artificial Sequence
  HTT spacer sequence CTCN PAM
gcucuuagaaacaacugagg

SEQ ID NO: 19290 - RNA, 20 nt, Artificial Sequence
  HTT spacer sequence CTCN PAM
cgcugcaaucugggugguaa

SEQ ID NO: 19291 - RNA, 20 nt, Artificial Sequence
  HTT spacer sequence CTCN PAM
aaggcuggcaguuaccaccc

SEQ ID NO: 19292 - RNA, 20 nt, Artificial Sequence
  HTT spacer sequence CTCN PAM
guaggcagguccacguuggc

SEQ ID NO: 19293 - RNA, 20 nt, Artificial Sequence
  HTT spacer sequence CTCN PAM
gacccaaguggggccuccuu

SEQ ID NO: 19294 - RNA, 20 nt, Artificial Sequence
  HTT spacer sequence CTCN PAM
uuguccaggucucacugcuu

SEQ ID NO: 19295 - RNA, 20 nt, Artificial Sequence
  HTT spacer sequence CTCN PAM
cugcuuugcaccguggucag

SEQ ID NO: 19296 - RNA, 20 nt, Artificial Sequence
  HTT spacer sequence CTCN PAM
gaccacggugcaaagcagug

SEQ ID NO: 19297 - RNA, 20 nt, Artificial Sequence
  HTT spacer sequence CTCN PAM
gcugacagucccucugacca

SEQ ID NO: 19298 - RNA, 20 nt, Artificial Sequence
  HTT spacer sequence CTCN PAM
agcucagcugacagucccuc

SEQ ID NO: 19299 - RNA, 20 nt, Artificial Sequence
  HTT spacer sequence CTCN PAM
ccuggagccagcagggcugu

SEQ ID NO: 19300 - RNA, 20 nt, Artificial Sequence
  HTT spacer sequence CTCN PAM
aggggagcucaagcucagcu

SEQ ID NO: 19301 - RNA, 20 nt, Artificial Sequence
  HTT spacer sequence CTCN PAM
cccaucacagcccugcuggc

SEQ ID NO: 19302 - RNA, 20 nt, Artificial Sequence
  HTT spacer sequence CTCN PAM
gggacucgcccaucacagcc

SEQ ID NO: 19303 - RNA, 20 nt, Artificial Sequence
  HTT spacer sequence CTCN PAM
gaagcauucaggucugggug

SEQ ID NO: 19304 - RNA, 20 nt, Artificial Sequence
  HTT spacer sequence CTCN PAM
cagaagcauucaggucuggg

SEQ ID NO: 19305 - RNA, 20 nt, Artificial Sequence
  HTT spacer sequence CTCN PAM
ucaguccuucccuuugcucu

SEQ ID NO: 19306 - RNA, 20 nt, Artificial Sequence
  HTT spacer sequence CTCN PAM
cgucaguccuucccuuugcu

SEQ ID NO: 19307 - RNA, 20 nt, Artificial Sequence
  HTT spacer sequence CTCN PAM
cacagcaacaacugaugguu

SEQ ID NO: 19308 - RNA, 20 nt, Artificial Sequence
  HTT spacer sequence CTCN PAM
ugaagcaaagcaagccucac

SEQ ID NO: 19309 - RNA, 20 nt, Artificial Sequence
  HTT spacer sequence CTCN PAM
gcaaggucuagguucucaug

SEQ ID NO: 19310 - RNA, 20 nt, Artificial Sequence
  HTT spacer sequence CTCN PAM
agcucagcaaggucuagguu

SEQ ID NO: 19311 - RNA, 20 nt, Artificial Sequence
  HTT spacer sequence CTCN PAM
uaagugcuucuccagcaggg

SEQ ID NO: 19312 - RNA, 20 nt, Artificial Sequence
  HTT spacer sequence CTCN PAM
agcaggggcagaaacugucc

SEQ ID NO: 19313 - RNA, 20 nt, Artificial Sequence
  HTT spacer sequence CTCN PAM
auaaugccagauguuagcug

SEQ ID NO: 19314 - RNA, 20 nt, Artificial Sequence
  HTT spacer sequence CTCN PAM
ucccuggcuacagaaaacac

SEQ ID NO: 19315 - RNA, 20 nt, Artificial Sequence
  HTT spacer sequence CTCN PAM
caucugcagggcaggaagac

SEQ ID NO: 19316 - RNA, 20 nt, Artificial Sequence
  HTT spacer sequence CTCN PAM
cacagcucccaucugcaggg

SEQ ID NO: 19317 - RNA, 20 nt, Artificial Sequence
  HTT spacer sequence CTCN PAM
agcagcucccacagcuccca

SEQ ID NO: 19318 - RNA, 20 nt, Artificial Sequence
  HTT spacer sequence CTCN PAM
agcagcuccagcagcuccca

SEQ ID NO: 19319 - RNA, 20 nt, Artificial Sequence
  HTT spacer sequence CTCN PAM
ggacuuggcccauggcacug

SEQ ID NO: 19320 - RNA, 20 nt, Artificial Sequence
  HTT spacer sequence CTCN PAM
gugcugggccugaugaccug

SEQ ID NO: 19321 - RNA, 20 nt, Artificial Sequence
  HTT spacer sequence CTCN PAM
agucucugugcugggccuga

SEQ ID NO: 19322 - RNA, 20 nt, Artificial Sequence
  HTT spacer sequence CTCN PAM
cagggcccaccacccuucca

SEQ ID NO: 19323 - RNA, 20 nt, Artificial Sequence
  HTT spacer sequence CTCN PAM
uuggccauugacaccugcgu

SEQ ID NO: 19324 - RNA, 20 nt, Artificial Sequence
  HTT spacer sequence CTCN PAM
cagguaacccccaaagcagc

SEQ ID NO: 19325 - RNA, 20 nt, Artificial Sequence
  HTT spacer sequence CTCN PAM
gguguggccggggcugcugu

SEQ ID NO: 19326 - RNA, 20 nt, Artificial Sequence
  HTT spacer sequence CTCN PAM
aagaagccucugcucagccc

SEQ ID NO: 19327 - RNA, 20 nt, Artificial Sequence
  HTT spacer sequence CTCN PAM
gcucagcccagcggggaugc

SEQ ID NO: 19328 - RNA, 20 nt, Artificial Sequence
  HTT spacer sequence CTCN PAM
gcccagcggggaugcuucua

SEQ ID NO: 19329 - RNA, 20 nt, Artificial Sequence
  HTT spacer sequence CTCN PAM
ggacgagccucucggaagcc

SEQ ID NO: 19330 - RNA, 20 nt, Artificial Sequence
  HTT spacer sequence CTCN PAM
uccggagcuuagaagcaucc

SEQ ID NO: 19331 - RNA, 20 nt, Artificial Sequence
  HTT spacer sequence CTCN PAM
cggaagccuuggugauuggu

SEQ ID NO: 19332 - RNA, 20 nt, Artificial Sequence
  HTT spacer sequence CTCN PAM
gaagccuuggugauuggugg

SEQ ID NO: 19333 - RNA, 20 nt, Artificial Sequence
  HTT spacer sequence CTCN PAM
ggugcaggguauuuagucaa

SEQ ID NO: 19334 - RNA, 20 nt, Artificial Sequence
  HTT spacer sequence CTCN PAM
gcaaacauugacuaaauacc

SEQ ID NO: 19335 - RNA, 20 nt, Artificial Sequence
  HTT spacer sequence CTCN PAM
gcugucugugccaggagaga

SEQ ID NO: 19336 - RNA, 20 nt, Artificial Sequence
  HTT spacer sequence CTCN PAM
uggcacagacagcagagcag

SEQ ID NO: 19337 - RNA, 20 nt, Artificial Sequence
  HTT spacer sequence CTCN PAM
ccuggcacagacagcagagc

SEQ ID NO: 19338 - RNA, 20 nt, Artificial Sequence
  HTT spacer sequence CTCN PAM
ugcugccugcuccucuuggg

SEQ ID NO: 19339 - RNA, 20 nt, Artificial Sequence
  HTT spacer sequence CTCN PAM
ucuugggcacgugcgggggc

SEQ ID NO: 19340 - RNA, 20 nt, Artificial Sequence
  HTT spacer sequence CTCN PAM
ugggcacgugcgggggcccc

SEQ ID NO: 19341 - RNA, 20 nt, Artificial Sequence
  HTT spacer sequence CTCN PAM
gagcagggauagggaucagu

SEQ ID NO: 19342 - RNA, 20 nt, Artificial Sequence
  HTT spacer sequence CTCN PAM
gagaaagggggcccccgcac

SEQ ID NO: 19343 - RNA, 20 nt, Artificial Sequence
  HTT spacer sequence CTCN PAM
ggcagacugaucccuauccc

SEQ ID NO: 19344 - RNA, 20 nt, Artificial Sequence
  HTT spacer sequence CTCN PAM
aguggcaugccccgccccaa

SEQ ID NO: 19345 - RNA, 20 nt, Artificial Sequence
  HTT spacer sequence CTCN PAM
cuaaaucugucuccucauag

SEQ ID NO: 19346 - RNA, 20 nt, Artificial Sequence
  HTT spacer sequence CTCN PAM
ucauaggugacaccgcucca

SEQ ID NO: 19347 - RNA, 20 nt, Artificial Sequence
  HTT spacer sequence CTCN PAM
uaggugacaccgcuccaggg

SEQ ID NO: 19348 - RNA, 20 nt, Artificial Sequence
  HTT spacer sequence CTCN PAM
agggccccccaguggccucu

SEQ ID NO: 19349 - RNA, 20 nt, Artificial Sequence
  HTT spacer sequence CTCN PAM
ccuuucagagcuaccuaaau

SEQ ID NO: 19350 - RNA, 20 nt, Artificial Sequence
  HTT spacer sequence CTCN PAM
uuucagagcuaccuaaauuc

SEQ ID NO: 19351 - RNA, 20 nt, Artificial Sequence
  HTT spacer sequence CTCN PAM
gaaaggagaggccacugggg

SEQ ID NO: 19352 - RNA, 20 nt, Artificial Sequence
  HTT spacer sequence CTCN PAM
gaagugaccagaauuuaggu

SEQ ID NO: 19353 - RNA, 20 nt, Artificial Sequence
  HTT spacer sequence CTCN PAM
auuucucugaagugaccaga

SEQ ID NO: 19354 - RNA, 20 nt, Artificial Sequence
  HTT spacer sequence CTCN PAM
cugguccagguguggacagc

SEQ ID NO: 19355 - RNA, 20 nt, Artificial Sequence
  HTT spacer sequence CTCN PAM
gugugccaggcuguccacac

SEQ ID NO: 19356 - RNA, 20 nt, Artificial Sequence
  HTT spacer sequence CTCN PAM
ucuuucugaaauuaccagcc

SEQ ID NO: 19357 - RNA, 20 nt, Artificial Sequence
  HTT spacer sequence CTCN PAM
ugagugggcuuugcaguccc

SEQ ID NO: 19358 - RNA, 20 nt, Artificial Sequence
  HTT spacer sequence CTCN PAM
cgagggguucaccgcugcuu

SEQ ID NO: 19359 - RNA, 20 nt, Artificial Sequence
  HTT spacer sequence CTCN PAM
ccaugccacggcagagcugc

SEQ ID NO: 19360 - RNA, 20 nt, Artificial Sequence
  HTT spacer sequence CTCN PAM
gccguggcauggggagggac

SEQ ID NO: 19361 - RNA, 20 nt, Artificial Sequence
  HTT spacer sequence CTCN PAM
acacagccuuccucuuccuc

SEQ ID NO: 19362 - RNA, 20 nt, Artificial Sequence
  HTT spacer sequence CTCN PAM
uccucaucggagagcacacc

SEQ ID NO: 19363 - RNA, 20 nt, Artificial Sequence
  HTT spacer sequence CTCN PAM
ucggagagcacacccugucc

SEQ ID NO: 19364 - RNA, 20 nt, Artificial Sequence
  HTT spacer sequence CTCN PAM
gaugaggaagaggaaggcug

SEQ ID NO: 19365 - RNA, 20 nt, Artificial Sequence
  HTT spacer sequence CTCN PAM
ccgaugaggaagaggaaggc

SEQ ID NO: 19366 - RNA, 20 nt, Artificial Sequence
  HTT spacer sequence CTCN PAM
gcaaggggacagggugugcu

SEQ ID NO: 19367 - RNA, 20 nt, Artificial Sequence
  HTT spacer sequence CTCN PAM
acgcaccacgcaggggaagc

SEQ ID NO: 19368 - RNA, 20 nt, Artificial Sequence
  HTT spacer sequence CTCN PAM
ucugacuuacagugcuccac

SEQ ID NO: 19369 - RNA, 20 nt, Artificial Sequence
  HTT spacer sequence CTCN PAM
cccuggcuacuucccucauc

SEQ ID NO: 19370 - RNA, 20 nt, Artificial Sequence
  HTT spacer sequence CTCN PAM
ccucacccuggcuacuuccc

SEQ ID NO: 19371 - RNA, 20 nt, Artificial Sequence
  HTT spacer sequence CTCN PAM
acccgguacucaccucaccc

SEQ ID NO: 19372 - RNA, 20 nt, Artificial Sequence
  HTT spacer sequence CTCN PAM
acaugaugugacacagccaa

SEQ ID NO: 19373 - RNA, 20 nt, Artificial Sequence
  HTT spacer sequence CTCN PAM
guuggcugugucacaucaug

SEQ ID NO: 19374 - RNA, 20 nt, Artificial Sequence
  HTT spacer sequence CTCN PAM
guccucgguuggcuguguca

SEQ ID NO: 19375 - RNA, 20 nt, Artificial Sequence
  HTT spacer sequence CTCN PAM
gggaagccugcaguggggcc

SEQ ID NO: 19376 - RNA, 20 nt, Artificial Sequence
  HTT spacer sequence CTCN PAM
ggccccacugcaggcuuccc

SEQ ID NO: 19377 - RNA, 20 nt, Artificial Sequence
  HTT spacer sequence CTCN PAM
gcgagcccacgagucugguc

SEQ ID NO: 19378 - RNA, 20 nt, Artificial Sequence
  HTT spacer sequence CTCN PAM
cggaggaugccuuuccucag

SEQ ID NO: 19379 - RNA, 20 nt, Artificial Sequence
  HTT spacer sequence CTCN PAM
ugggcucgcggaggaugccu

SEQ ID NO: 19380 - RNA, 20 nt, Artificial Sequence
  HTT spacer sequence CTCN PAM
uggaccagacucgugggcuc

SEQ ID NO: 19381 - RNA, 20 nt, Artificial Sequence
  HTT spacer sequence CTCN PAM
acccacagacacugucacgg

SEQ ID NO: 19382 - RNA, 20 nt, Artificial Sequence
  HTT spacer sequence CTCN PAM
uuugggaaaccauguggaca

SEQ ID NO: 19383 - RNA, 20 nt, Artificial Sequence
  HTT spacer sequence CTCN PAM
gcagccccagcagccuggcu

SEQ ID NO: 19384 - RNA, 20 nt, Artificial Sequence
  HTT spacer sequence CTCN PAM
agccacuugcccaaaaggca

SEQ ID NO: 19385 - RNA, 20 nt, Artificial Sequence
  HTT spacer sequence CTCN PAM
guggcucaagccacuugccc

SEQ ID NO: 19386 - RNA, 20 nt, Artificial Sequence
  HTT spacer sequence CTCN PAM
gggggggcccgccagugugg

SEQ ID NO: 19387 - RNA, 20 nt, Artificial Sequence
  HTT spacer sequence CTCN PAM
acccuacaccaggccuccag

SEQ ID NO: 19388 - RNA, 20 nt, Artificial Sequence
  HTT spacer sequence CTCN PAM
agguguccuggucgggggug

SEQ ID NO: 19389 - RNA, 20 nt, Artificial Sequence
  HTT spacer sequence CTCN PAM
cagguccacagggcccaccc

SEQ ID NO: 19390 - RNA, 20 nt, Artificial Sequence
  HTT spacer sequence CTCN PAM
agugaugcccugacccugac

SEQ ID NO: 19391 - RNA, 20 nt, Artificial Sequence
  HTT spacer sequence CTCN PAM
gccuccagugaugcccugac

SEQ ID NO: 19392 - RNA, 20 nt, Artificial Sequence
  HTT spacer sequence CTCN PAM
augcuuggucaggcagcuac

SEQ ID NO: 19393 - RNA, 20 nt, Artificial Sequence
  HTT spacer sequence CTCN PAM
ggaccagccuguccuagcag

SEQ ID NO: 19394 - RNA, 20 nt, Artificial Sequence
  HTT spacer sequence CTCN PAM
ggacagcccacccgcccaac

SEQ ID NO: 19395 - RNA, 20 nt, Artificial Sequence
  HTT spacer sequence CTCN PAM
uggccccaauugcucugggg

SEQ ID NO: 19396 - RNA, 20 nt, Artificial Sequence
  HTT spacer sequence CTCN PAM
ggggaaguccaggcuccgga

SEQ ID NO: 19397 - RNA, 20 nt, Artificial Sequence
  HTT spacer sequence CTCN PAM
ggagccugcccaggggcccc

SEQ ID NO: 19398 - RNA, 20 nt, Artificial Sequence
  HTT spacer sequence CTCN PAM
ggagccuggacuuccccaga

SEQ ID NO: 19399 - RNA, 20 nt, Artificial Sequence
  HTT spacer sequence CTCN PAM
acgugguucucugccuucac

SEQ ID NO: 19400 - RNA, 20 nt, Artificial Sequence
  HTT spacer sequence CTCN PAM
gccuucacccaagcccugaa

SEQ ID NO: 19401 - RNA, 20 nt, Artificial Sequence
  HTT spacer sequence CTCN PAM
ucagcugccaaauccccacc

SEQ ID NO: 19402 - RNA, 20 nt, Artificial Sequence
  HTT spacer sequence CTCN PAM
gcugccaaauccccacccau

SEQ ID NO: 19403 - RNA, 20 nt, Artificial Sequence
  HTT spacer sequence CTCN PAM
ccacugcugcuccuggaagg

SEQ ID NO: 19404 - RNA, 20 nt, Artificial Sequence
  HTT spacer sequence CTCN PAM
uggaaggugccccucagugg

SEQ ID NO: 19405 - RNA, 20 nt, Artificial Sequence
  HTT spacer sequence CTCN PAM
gugggacgcccaccuccucu

SEQ ID NO: 19406 - RNA, 20 nt, Artificial Sequence
  HTT spacer sequence CTCN PAM
ucucugggcuucuguguuug

SEQ ID NO: 19407 - RNA, 20 nt, Artificial Sequence
  HTT spacer sequence CTCN PAM
cugggcuucuguguuuggga

SEQ ID NO: 19408 - RNA, 20 nt, Artificial Sequence
  HTT spacer sequence CTCN PAM
gggcuucuguguuugggagc

SEQ ID NO: 19409 - RNA, 20 nt, Artificial Sequence
  HTT spacer sequence CTCN PAM
caaacacagaagcccagaga

SEQ ID NO: 19410 - RNA, 20 nt, Artificial Sequence
  HTT spacer sequence CTCN PAM
gcauuucuggguggauuuuc

SEQ ID NO: 19411 - RNA, 20 nt, Artificial Sequence
  HTT spacer sequence CTCN PAM
uccugcucagcauuucuggg

SEQ ID NO: 19412 - RNA, 20 nt, Artificial Sequence
  HTT spacer sequence CTCN PAM
cauccugcucagcauuucug

SEQ ID NO: 19413 - RNA, 20 nt, Artificial Sequence
  HTT spacer sequence CTCN PAM
uuauuuagaagggauggagg

SEQ ID NO: 19414 - RNA, 20 nt, Artificial Sequence
  HTT spacer sequence CTCN PAM
aucccuucuaaauaaugagg

SEQ ID NO: 19415 - RNA, 20 nt, Artificial Sequence
  HTT spacer sequence CTCN PAM
cuaggccuccaucccuucua

SEQ ID NO: 19416 - RNA, 20 nt, Artificial Sequence
  HTT spacer sequence CTCN PAM
ggcuagaagcaugcucccua

SEQ ID NO: 19417 - RNA, 20 nt, Artificial Sequence
  HTT spacer sequence CTCN PAM
ugccgaggccugaccugccc

SEQ ID NO: 19418 - RNA, 20 nt, Artificial Sequence
  HTT spacer sequence CTCN PAM
gcaggagcugucccuggugc

SEQ ID NO: 19419 - RNA, 20 nt, Artificial Sequence
  HTT spacer sequence CTCN PAM
cucaggugcugcugguugac

SEQ ID NO: 19420 - RNA, 20 nt, Artificial Sequence
  HTT spacer sequence CTCN PAM
ggugcugcugguugaccagc

SEQ ID NO: 19421 - RNA, 20 nt, Artificial Sequence
  HTT spacer sequence CTCN PAM
ggcccuaggagaccccguag

SEQ ID NO: 19422 - RNA, 20 nt, Artificial Sequence
  HTT spacer sequence CTCN PAM
uagggccagaggcuggucaa

SEQ ID NO: 19423 - RNA, 20 nt, Artificial Sequence
  HTT spacer sequence CTCN PAM
gucgcuacggggucuccuag

SEQ ID NO: 19424 - RNA, 20 nt, Artificial Sequence
  HTT spacer sequence CTCN PAM
uaccuuggcaaagcugcaug

SEQ ID NO: 19425 - RNA, 20 nt, Artificial Sequence
  HTT spacer sequence CTCN PAM
ccagcaggggacagaugugg

SEQ ID NO: 19426 - RNA, 20 nt, Artificial Sequence
  HTT spacer sequence CTCN PAM
caggcaggagcagcugggug

SEQ ID NO: 19427 - RNA, 20 nt, Artificial Sequence
  HTT spacer sequence CTCN PAM
ugccugggaggguccccaca

SEQ ID NO: 19428 - RNA, 20 nt, Artificial Sequence
  HTT spacer sequence CTCN PAM
cauuggaggucagugugagg

SEQ ID NO: 19429 - RNA, 20 nt, Artificial Sequence
  HTT spacer sequence CTCN PAM
aaugugaggacaagaaccag

SEQ ID NO: 19430 - RNA, 20 nt, Artificial Sequence
  HTT spacer sequence CTCN PAM
cacugaccuccaaugugagg

SEQ ID NO: 19431 - RNA, 20 nt, Artificial Sequence
  HTT spacer sequence CTCN PAM
gccucgggaaaggccaugga

SEQ ID NO: 19432 - RNA, 20 nt, Artificial Sequence
  HTT spacer sequence CTCN PAM
ggaaaggccauggagcuugc

SEQ ID NO: 19433 - RNA, 20 nt, Artificial Sequence
  HTT spacer sequence CTCN PAM
auggccuuucccgaggcaga

SEQ ID NO: 19434 - RNA, 20 nt, Artificial Sequence
  HTT spacer sequence CTCN PAM
caugugcacugagccuggga

SEQ ID NO: 19435 - RNA, 20 nt, Artificial Sequence
  HTT spacer sequence CTCN PAM
gugcacaugggaggcccugg

SEQ ID NO: 19436 - RNA, 20 nt, Artificial Sequence
  HTT spacer sequence CTCN PAM
ucccaggcucagugcacaug

SEQ ID NO: 19437 - RNA, 20 nt, Artificial Sequence
  HTT spacer sequence CTCN PAM
cuucccaggcucagugcaca

SEQ ID NO: 19438 - RNA, 20 nt, Artificial Sequence
  HTT spacer sequence CTCN PAM
aacccucucuucccaggcuc

SEQ ID NO: 19439 - RNA, 20 nt, Artificial Sequence
  HTT spacer sequence CTCN PAM
acuccaacccucucuuccca

SEQ ID NO: 19440 - RNA, 20 nt, Artificial Sequence
  HTT spacer sequence CTCN PAM
aggcagcauucccaggguaa

SEQ ID NO: 19441 - RNA, 20 nt, Artificial Sequence
  HTT spacer sequence CTCN PAM
cugcgcccacuggaacucgg

SEQ ID NO: 19442 - RNA, 20 nt, Artificial Sequence
  HTT spacer sequence CTCN PAM
ggcaggcagggguguaggug

SEQ ID NO: 19443 - RNA, 20 nt, Artificial Sequence
  HTT spacer sequence CTCN PAM
ucuagagccguccggugggg

SEQ ID NO: 19444 - RNA, 20 nt, Artificial Sequence
  HTT spacer sequence CTCN PAM
agagccguccggugggggcc

SEQ ID NO: 19445 - RNA, 20 nt, Artificial Sequence
  HTT spacer sequence CTCN PAM
agaggaggcaccuacacccc

SEQ ID NO: 19446 - RNA, 20 nt, Artificial Sequence
  HTT spacer sequence CTCN PAM
aagguggauuuguggaaggg

SEQ ID NO: 19447 - RNA, 20 nt, Artificial Sequence
  HTT spacer sequence CTCN PAM
acccccuuccacaaauccac

SEQ ID NO: 19448 - RNA, 20 nt, Artificial Sequence
  HTT spacer sequence CTCN PAM
acgugcccucuacccccuuc

SEQ ID NO: 19449 - RNA, 20 nt, Artificial Sequence
  HTT spacer sequence CTCN PAM
ccaggguucugggagggcug

SEQ ID NO: 19450 - RNA, 20 nt, Artificial Sequence
  HTT spacer sequence CTCN PAM
cagaacccuggggaggucau

SEQ ID NO: 19451 - RNA, 20 nt, Artificial Sequence
  HTT spacer sequence CTCN PAM
acaacagggguaacaggauc

SEQ ID NO: 19452 - RNA, 20 nt, Artificial Sequence
  HTT spacer sequence CTCN PAM
ccuccacaacagggguaaca

SEQ ID NO: 19453 - RNA, 20 nt, Artificial Sequence
  HTT spacer sequence CTCN PAM
ccacuaaccuguuuccucac

SEQ ID NO: 19454 - RNA, 20 nt, Artificial Sequence
  HTT spacer sequence CTCN PAM
gcauggaccuuagucauguc

SEQ ID NO: 19455 - RNA, 20 nt, Artificial Sequence
  HTT spacer sequence CTCN PAM
agcgacucagcauggaccuu

SEQ ID NO: 19456 - RNA, 20 nt, Artificial Sequence
  HTT spacer sequence CTCN PAM
cggcacaagggguaagcaga

SEQ ID NO: 19457 - RNA, 20 nt, Artificial Sequence
  HTT spacer sequence CTCN PAM
uggcaucucccggcacaagg

SEQ ID NO: 19458 - RNA, 20 nt, Artificial Sequence
  HTT spacer sequence CTCN PAM
cagcaucucuuggcaucucc

SEQ ID NO: 19459 - RNA, 20 nt, Artificial Sequence
  HTT spacer sequence CTCN PAM
gcccuuggagucauggcuac

SEQ ID NO: 19460 - RNA, 20 nt, Artificial Sequence
  HTT spacer sequence CTCN PAM
aagggcagagguggggcugg

SEQ ID NO: 19461 - RNA, 20 nt, Artificial Sequence
  HTT spacer sequence CTCN PAM
ccggggagggccgaacccug

SEQ ID NO: 19462 - RNA, 20 nt, Artificial Sequence
  HTT spacer sequence CTCN PAM
ccggugaggucagggaccgg

SEQ ID NO: 19463 - RNA, 20 nt, Artificial Sequence
  HTT spacer sequence CTCN PAM
ggaacaggguucggcccucc

SEQ ID NO: 19464 - RNA, 20 nt, Artificial Sequence
  HTT spacer sequence CTCN PAM
ucaggaacaggguucggccc

SEQ ID NO: 19465 - RNA, 20 nt, Artificial Sequence
  HTT spacer sequence CTCN PAM
aggaagcccuggcuccucag

SEQ ID NO: 19466 - RNA, 20 nt, Artificial Sequence
  HTT spacer sequence CTCN PAM
ucuaggaagcccuggcuccu

SEQ ID NO: 19467 - RNA, 20 nt, Artificial Sequence
  HTT spacer sequence CTCN PAM
uucaucugcaggcacuccac

SEQ ID NO: 19468 - RNA, 20 nt, Artificial Sequence
  HTT spacer sequence CTCN PAM
acagagcucucugugccagc

SEQ ID NO: 19469 - RNA, 20 nt, Artificial Sequence
  HTT spacer sequence CTCN PAM
guggagugccugcagaugaa

SEQ ID NO: 19470 - RNA, 20 nt, Artificial Sequence
  HTT spacer sequence CTCN PAM
cugugccagcccccagcacg

SEQ ID NO: 19471 - RNA, 20 nt, Artificial Sequence
  HTT spacer sequence CTCN PAM
gugccagcccccagcacgga

SEQ ID NO: 19472 - RNA, 20 nt, Artificial Sequence
  HTT spacer sequence CTCN PAM
gugcugggggcuggcacaga

SEQ ID NO: 19473 - RNA, 20 nt, Artificial Sequence
  HTT spacer sequence CTCN PAM
acuaaggucagcccuccgug

SEQ ID NO: 19474 - RNA, 20 nt, Artificial Sequence
  HTT spacer sequence CTCN PAM
acucgacuaaggucagcccu

SEQ ID NO: 19475 - RNA, 20 nt, Artificial Sequence
  HTT spacer sequence CTCN PAM
ugaggcccagauggaaggga

SEQ ID NO: 19476 - RNA, 20 nt, Artificial Sequence
  HTT spacer sequence CTCN PAM
ggagacaucaucccuacugc

SEQ ID NO: 19477 - RNA, 20 nt, Artificial Sequence
  HTT spacer sequence CTCN PAM
uggggcugaugguggggcca

SEQ ID NO: 19478 - RNA, 20 nt, Artificial Sequence
  HTT spacer sequence CTCN PAM
gcacccccuacacugggucc

SEQ ID NO: 19479 - RNA, 20 nt, Artificial Sequence
  HTT spacer sequence CTCN PAM
gaguuccucacacaucccug

SEQ ID NO: 19480 - RNA, 20 nt, Artificial Sequence
  HTT spacer sequence CTCN PAM
gaggggucucugcacccccu

SEQ ID NO: 19481 - RNA, 20 nt, Artificial Sequence
  HTT spacer sequence CTCN PAM
cacaucccuggggcccuccc

SEQ ID NO: 19482 - RNA, 20 nt, Artificial Sequence
  HTT spacer sequence CTCN PAM
ccauacacuuccuauccuga

SEQ ID NO: 19483 - RNA, 20 nt, Artificial Sequence
  HTT spacer sequence CTCN PAM
ugcccgcagucaggauagga

SEQ ID NO: 19484 - RNA, 20 nt, Artificial Sequence
  HTT spacer sequence CTCN PAM
cucuugcccgcagucaggau

SEQ ID NO: 19485 - RNA, 20 nt, Artificial Sequence
  HTT spacer sequence CTCN PAM
ggggaaggacagggcagggg

SEQ ID NO: 19486 - RNA, 20 nt, Artificial Sequence
  HTT spacer sequence CTCN PAM
caggggaaggacagggcagg

SEQ ID NO: 19487 - RNA, 20 nt, Artificial Sequence
  HTT spacer sequence CTCN PAM
gucccaccuccaaggugccu

SEQ ID NO: 19488 - RNA, 20 nt, Artificial Sequence
  HTT spacer sequence CTCN PAM
aaggugccucagaggacagc

SEQ ID NO: 19489 - RNA, 20 nt, Artificial Sequence
  HTT spacer sequence CTCN PAM
gaggacagcaggggcagcgg

SEQ ID NO: 19490 - RNA, 20 nt, Artificial Sequence
  HTT spacer sequence CTCN PAM
gaggcaccuuggagguggga

SEQ ID NO: 19491 - RNA, 20 nt, Artificial Sequence
  HTT spacer sequence CTCN PAM
gcccgcugccccugcugucc

SEQ ID NO: 19492 - RNA, 20 nt, Artificial Sequence
  HTT spacer sequence CTCN PAM
gccucugcccgcugccccug

SEQ ID NO: 19493 - RNA, 20 nt, Artificial Sequence
  HTT spacer sequence CTCN PAM
ucauuccaggcucagcugcc

SEQ ID NO: 19494 - RNA, 20 nt, Artificial Sequence
  HTT spacer sequence CTCN PAM
uuccaggcucagcugcccuu

SEQ ID NO: 19495 - RNA, 20 nt, Artificial Sequence
  HTT spacer sequence CTCN PAM
gcugcccuucuuggggcagc

SEQ ID NO: 19496 - RNA, 20 nt, Artificial Sequence
  HTT spacer sequence CTCN PAM
ggugugggcugccccaagaa

SEQ ID NO: 19497 - RNA, 20 nt, Artificial Sequence
  HTT spacer sequence CTCN PAM
caggugugggcugccccaag

SEQ ID NO: 19498 - RNA, 20 nt, Artificial Sequence
  HTT spacer sequence CTCN PAM
ugcaguuggucaggccugag

SEQ ID NO: 19499 - RNA, 20 nt, Artificial Sequence
  HTT spacer sequence CTCN PAM
ggccugaccaacugcaggag

SEQ ID NO: 19500 - RNA, 20 nt, Artificial Sequence
  HTT spacer sequence CTCN PAM
ucaggccugaccaacugcag

SEQ ID NO: 19501 - RNA, 20 nt, Artificial Sequence
  HTT spacer sequence CTCN PAM
gcugaccacaguggcauuua

SEQ ID NO: 19502 - RNA, 20 nt, Artificial Sequence
  HTT spacer sequence CTCN PAM
acagagcccugccugacaug

SEQ ID NO: 19503 - RNA, 20 nt, Artificial Sequence
  HTT spacer sequence CTCN PAM
guggagcccacggcaccugu

SEQ ID NO: 19504 - RNA, 20 nt, Artificial Sequence
  HTT spacer sequence CTCN PAM
gggcagaacccccaggccac

SEQ ID NO: 19505 - RNA, 20 nt, Artificial Sequence
  HTT spacer sequence CTCN PAM
gguuccgguuccgcugcauc

SEQ ID NO: 19506 - RNA, 20 nt, Artificial Sequence
  HTT spacer sequence CTCN PAM
cggcaggcugugguccuccg

SEQ ID NO: 19507 - RNA, 20 nt, Artificial Sequence
  HTT spacer sequence CTCN PAM
gcaggcugugguccuccggc

SEQ ID NO: 19508 - RNA, 20 nt, Artificial Sequence
  HTT spacer sequence CTCN PAM
ggccagccugggggcaucuc

SEQ ID NO: 19509 - RNA, 20 nt, Artificial Sequence
  HTT spacer sequence CTCN PAM
gucccucagccccacagggg

SEQ ID NO: 19510 - RNA, 20 nt, Artificial Sequence
  HTT spacer sequence CTCN PAM
gccccacaggggccugcccc

SEQ ID NO: 19511 - RNA, 20 nt, Artificial Sequence
  HTT spacer sequence CTCN PAM
agccccgucuccgcacgcug

SEQ ID NO: 19512 - RNA, 20 nt, Artificial Sequence
  HTT spacer sequence CTCN PAM
aggcccaggcugcggggcag

SEQ ID NO: 19513 - RNA, 20 nt, Artificial Sequence
  HTT spacer sequence CTCN PAM
gcacgcugugccgaaucugg

SEQ ID NO: 19514 - RNA, 20 nt, Artificial Sequence
  HTT spacer sequence CTCN PAM
cugcguacccagacugugcc

SEQ ID NO: 19515 - RNA, 20 nt, Artificial Sequence
  HTT spacer sequence CTCN PAM
ucccaggagugcccuguggc

SEQ ID NO: 19516 - RNA, 20 nt, Artificial Sequence
  HTT spacer sequence CTCN PAM
ugggaagagccacgggcaug

SEQ ID NO: 19517 - RNA, 20 nt, Artificial Sequence
  HTT spacer sequence CTCN PAM
cccuggcuugcugggcugau

SEQ ID NO: 19518 - RNA, 20 nt, Artificial Sequence
  HTT spacer sequence CTCN PAM
ugugucucaaacagagcuca

SEQ ID NO: 19519 - RNA, 20 nt, Artificial Sequence
  HTT spacer sequence CTCN PAM
aacagagcucaccuuugcca

SEQ ID NO: 19520 - RNA, 20 nt, Artificial Sequence
  HTT spacer sequence CTCN PAM
guuugagacacaggagggaa

SEQ ID NO: 19521 - RNA, 20 nt, Artificial Sequence
  HTT spacer sequence CTCN PAM
ccuuugccaucacugcuguc

SEQ ID NO: 19522 - RNA, 20 nt, Artificial Sequence
  HTT spacer sequence CTCN PAM
ccggccggugccagaggccc

SEQ ID NO: 19523 - RNA, 20 nt, Artificial Sequence
  HTT spacer sequence CTCN PAM
ggcaccggccggugaggaca

SEQ ID NO: 19524 - RNA, 20 nt, Artificial Sequence
  HTT spacer sequence CTCN PAM
gggcagggccuggcucugac

SEQ ID NO: 19525 - RNA, 20 nt, Artificial Sequence
  HTT spacer sequence CTCN PAM
gaccaacccgggcuuccagu

SEQ ID NO: 19526 - RNA, 20 nt, Artificial Sequence
  HTT spacer sequence CTCN PAM
agcccccaggcgcccugggc

SEQ ID NO: 19527 - RNA, 20 nt, Artificial Sequence
  HTT spacer sequence CTCN PAM
ugcuccagcccccaggcgcc

SEQ ID NO: 19528 - RNA, 20 nt, Artificial Sequence
  HTT spacer sequence CTCN PAM
uuuugcuucucuugcuccag

SEQ ID NO: 19529 - RNA, 20 nt, Artificial Sequence
  HTT spacer sequence CTCN PAM
caagaaccccaaacccccac

SEQ ID NO: 19530 - RNA, 20 nt, Artificial Sequence
  HTT spacer sequence CTCN PAM
uggguguccugguccugggg

SEQ ID NO: 19531 - RNA, 20 nt, Artificial Sequence
  HTT spacer sequence CTCN PAM
gaaggccccugccuucugaa

SEQ ID NO: 19532 - RNA, 20 nt, Artificial Sequence
  HTT spacer sequence CTCN PAM
cucagaaggccccugccuuc

SEQ ID NO: 19533 - RNA, 20 nt, Artificial Sequence
  HTT spacer sequence CTCN PAM
gccuccucgucgcucguccu

SEQ ID NO: 19534 - RNA, 20 nt, Artificial Sequence
  HTT spacer sequence CTCN PAM
ucgucgcucguccucucugu

SEQ ID NO: 19535 - RNA, 20 nt, Artificial Sequence
  HTT spacer sequence CTCN PAM
ucgcucguccucucuguuuc

SEQ ID NO: 19536 - RNA, 20 nt, Artificial Sequence
  HTT spacer sequence CTCN PAM
uccucucuguuucucccacc

SEQ ID NO: 19537 - RNA, 20 nt, Artificial Sequence
  HTT spacer sequence CTCN PAM
cuguuucucccaccuuuugc

SEQ ID NO: 19538 - RNA, 20 nt, Artificial Sequence
  HTT spacer sequence CTCN PAM
guuucucccaccuuuugccc

SEQ ID NO: 19539 - RNA, 20 nt, Artificial Sequence
  HTT spacer sequence CTCN PAM
caccuuuugcccccuuucuc

SEQ ID NO: 19540 - RNA, 20 nt, Artificial Sequence
  HTT spacer sequence CTCN PAM
uugccuguucccacccgagg

SEQ ID NO: 19541 - RNA, 20 nt, Artificial Sequence
  HTT spacer sequence CTCN PAM
ggugggaacaggcaaggaga

SEQ ID NO: 19542 - RNA, 20 nt, Artificial Sequence
  HTT spacer sequence CTCN PAM
uggccugcgugagccggggc

SEQ ID NO: 19543 - RNA, 20 nt, Artificial Sequence
  HTT spacer sequence CTCN PAM
cgcaggccaagagggggccu

SEQ ID NO: 19544 - RNA, 20 nt, Artificial Sequence
  HTT spacer sequence CTCN PAM
ccgccgcccaggcggaucgg

SEQ ID NO: 19545 - RNA, 20 nt, Artificial Sequence
  HTT spacer sequence CTCN PAM
caccgccgcccaggcggauc

SEQ ID NO: 19546 - RNA, 20 nt, Artificial Sequence
  HTT spacer sequence CTCN PAM
cggcccugccucucaccgcc

SEQ ID NO: 19547 - RNA, 20 nt, Artificial Sequence
  HTT spacer sequence CTCN PAM
ccgcaauauugauggcccgu

SEQ ID NO: 19548 - RNA, 20 nt, Artificial Sequence
  HTT spacer sequence CTCN PAM
guugcuauggaaacgugaca

SEQ ID NO: 19549 - RNA, 20 nt, Artificial Sequence
  HTT spacer sequence CTCN PAM
aaauggggccuacaucugac

SEQ ID NO: 19550 - RNA, 20 nt, Artificial Sequence
  HTT spacer sequence CTCN PAM
acgcucaaaauggggccuac

SEQ ID NO: 19551 - RNA, 20 nt, Artificial Sequence
  HTT spacer sequence CTCN PAM
aaggcagcuccacgcucaaa

SEQ ID NO: 19552 - RNA, 20 nt, Artificial Sequence
  HTT spacer sequence CTCN PAM
cucgaaggcagcuccacgcu

SEQ ID NO: 19553 - RNA, 20 nt, Artificial Sequence
  HTT spacer sequence CTCN PAM
cgcucgcucgaaggcagcuc

SEQ ID NO: 19554 - RNA, 20 nt, Artificial Sequence
  HTT spacer sequence CTCN PAM
cgcccauggugcguggggcc

SEQ ID NO: 19555 - RNA, 20 nt, Artificial Sequence
  HTT spacer sequence CTCN PAM
cugagcgcgcucucucaccc

SEQ ID NO: 19556 - RNA, 20 nt, Artificial Sequence
  HTT spacer sequence CTCN PAM
gcgagggccccggcccggcc

SEQ ID NO: 19557 - RNA, 20 nt, Artificial Sequence
  HTT spacer sequence CTCN PAM
cucaccccacaggcgccucc

SEQ ID NO: 19558 - RNA, 20 nt, Artificial Sequence
  HTT spacer sequence CTCN PAM
caccccacaggcgccuccgg

SEQ ID NO: 19559 - RNA, 20 nt, Artificial Sequence
  HTT spacer sequence CTCN PAM
ccccacaggcgccuccggca

SEQ ID NO: 19560 - RNA, 20 nt, Artificial Sequence
  HTT spacer sequence CTCN PAM
ggcauggcggcggccgaggg

SEQ ID NO: 19561 - RNA, 20 nt, Artificial Sequence
  HTT spacer sequence CTCN PAM
gccgccgccaugccggaggc

SEQ ID NO: 19562 - RNA, 20 nt, Artificial Sequence
  HTT spacer sequence CTCN PAM
ugucuccccaggcggagaag

SEQ ID NO: 19563 - RNA, 20 nt, Artificial Sequence
  HTT spacer sequence CTCN PAM
ccaggcggagaagcaccggc

SEQ ID NO: 19564 - RNA, 20 nt, Artificial Sequence
  HTT spacer sequence CTCN PAM
gccuggggagacacgaggua

SEQ ID NO: 19565 - RNA, 20 nt, Artificial Sequence
  HTT spacer sequence CTCN PAM
gcguccguccaguugcgggc

SEQ ID NO: 19566 - RNA, 20 nt, Artificial Sequence
  HTT spacer sequence CTCN PAM
ugcuggucugggaggaguuc

SEQ ID NO: 19567 - RNA, 20 nt, Artificial Sequence
  HTT spacer sequence CTCN PAM
cagaccagcaugaggccgcg

SEQ ID NO: 19568 - RNA, 20 nt, Artificial Sequence
  HTT spacer sequence CTCN PAM
ucccagaccagcaugaggcc

SEQ ID NO: 19569 - RNA, 20 nt, Artificial Sequence
  HTT spacer sequence CTCN PAM
ucgaagaacuccucccagac

SEQ ID NO: 19570 - RNA, 20 nt, Artificial Sequence
  HTT spacer sequence CTCN PAM
agcagaccaagcgcaacgcc

SEQ ID NO: 19571 - RNA, 20 nt, Artificial Sequence
  HTT spacer sequence CTCN PAM
uacaccuuggcguugcgcuu

SEQ ID NO: 19572 - RNA, 20 nt, Artificial Sequence
  HTT spacer sequence CTCN PAM
ucgagaugaccggcgagcgc

SEQ ID NO: 19573 - RNA, 20 nt, Artificial Sequence
  HTT spacer sequence CTCN PAM
aagagcuugcuggccaucuu

SEQ ID NO: 19574 - RNA, 20 nt, Artificial Sequence
  HTT spacer sequence CTCN PAM
ccggucaucucgaagagcuu

SEQ ID NO: 19575 - RNA, 20 nt, Artificial Sequence
  HTT spacer sequence CTCN PAM
cccagccugcgcucgccggu

SEQ ID NO: 19576 - RNA, 20 nt, Artificial Sequence
  HTT spacer sequence CTCN PAM
ucgcccagccugcgcucgcc

SEQ ID NO: 19577 - RNA, 20 nt, Artificial Sequence
  HTT spacer sequence CTCN PAM
cccaccuguacuggaagguc

SEQ ID NO: 19578 - RNA, 20 nt, Artificial Sequence
  HTT spacer sequence CTCN PAM
ugacuuucuuggagcucuga

SEQ ID NO: 19579 - RNA, 20 nt, Artificial Sequence
  HTT spacer sequence CTCN PAM
aagaaagucaggagcggccc

SEQ ID NO: 19580 - RNA, 20 nt, Artificial Sequence
  HTT spacer sequence CTCN PAM
gagucgggacgauguguggg

SEQ ID NO: 19581 - RNA, 20 nt, Artificial Sequence
  HTT spacer sequence CTCN PAM
gagcuccaagaaagucagga

SEQ ID NO: 19582 - RNA, 20 nt, Artificial Sequence
  HTT spacer sequence CTCN PAM
ucuggccggguaugggcaga

SEQ ID NO: 19583 - RNA, 20 nt, Artificial Sequence
  HTT spacer sequence CTCN PAM
ggccggguaugggcagaacc

SEQ ID NO: 19584 - RNA, 20 nt, Artificial Sequence
  HTT spacer sequence CTCN PAM
ccccgugggguucugcccau

SEQ ID NO: 19585 - RNA, 20 nt, Artificial Sequence
  HTT spacer sequence CTCN PAM
guuuccccacuuccccaaug

SEQ ID NO: 19586 - RNA, 20 nt, Artificial Sequence
  HTT spacer sequence CTCN PAM
uagacugguuuccugcccuu

SEQ ID NO: 19587 - RNA, 20 nt, Artificial Sequence
  HTT spacer sequence CTCN PAM
gcucuuagacugguuuccug

SEQ ID NO: 19588 - RNA, 20 nt, Artificial Sequence
  HTT spacer sequence CTCN PAM
gcccagcaccagccccaccc

SEQ ID NO: 19589 - RNA, 20 nt, Artificial Sequence
  HTT spacer sequence CTCN PAM
caggacguaugggcggucug

SEQ ID NO: 19590 - RNA, 20 nt, Artificial Sequence
  HTT spacer sequence CTCN PAM
gaggcagcaacacucauggu

SEQ ID NO: 19591 - RNA, 20 nt, Artificial Sequence
  HTT spacer sequence CTCN PAM
gagggacagugcccagaccg

SEQ ID NO: 19592 - RNA, 20 nt, Artificial Sequence
  HTT spacer sequence CTCN PAM
ugguggugcccacugaccuc

SEQ ID NO: 19593 - RNA, 20 nt, Artificial Sequence
  HTT spacer sequence CTCN PAM
cacccugcucccccauaggg

SEQ ID NO: 19594 - RNA, 20 nt, Artificial Sequence
  HTT spacer sequence CTCN PAM
cccauagggaggcggcggcu

SEQ ID NO: 19595 - RNA, 20 nt, Artificial Sequence
  HTT spacer sequence CTCN PAM
cuaugggggagcagggugug

SEQ ID NO: 19596 - RNA, 20 nt, Artificial Sequence
  HTT spacer sequence CTCN PAM
ccaccaccaagcucccaagc

SEQ ID NO: 19597 - RNA, 20 nt, Artificial Sequence
  HTT spacer sequence CTCN PAM
caagcucagcagggguuuca

SEQ ID NO: 19598 - RNA, 20 nt, Artificial Sequence
  HTT spacer sequence CTCN PAM
gcagggguuucaggggccua

SEQ ID NO: 19599 - RNA, 20 nt, Artificial Sequence
  HTT spacer sequence CTCN PAM
auuuccccaaugacgcagua

SEQ ID NO: 19600 - RNA, 20 nt, Artificial Sequence
  HTT spacer sequence CTCN PAM
cuugcagucucaauuucccc

SEQ ID NO: 19601 - RNA, 20 nt, Artificial Sequence
  HTT spacer sequence CTCN PAM
uucucacuugcagucucaau

SEQ ID NO: 19602 - RNA, 20 nt, Artificial Sequence
  HTT spacer sequence CTCN PAM
gugcucugcgacuuggagca

SEQ ID NO: 19603 - RNA, 20 nt, Artificial Sequence
  HTT spacer sequence CTCN PAM
gcgacuuggagcauccacug

SEQ ID NO: 19604 - RNA, 20 nt, Artificial Sequence
  HTT spacer sequence CTCN PAM
aagucgcagagcacugagcc

SEQ ID NO: 19605 - RNA, 20 nt, Artificial Sequence
  HTT spacer sequence CTCN PAM
guggaugcuccaagucgcag

SEQ ID NO: 19606 - RNA, 20 nt, Artificial Sequence
  HTT spacer sequence CTCN PAM
gccaugagccggugagcccc

SEQ ID NO: 19607 - RNA, 20 nt, Artificial Sequence
  HTT spacer sequence CTCN PAM
uggcagaggcucaguggaug

SEQ ID NO: 19608 - RNA, 20 nt, Artificial Sequence
  HTT spacer sequence CTCN PAM
ccggcucauggcagaggcuc

SEQ ID NO: 19609 - RNA, 20 nt, Artificial Sequence
  HTT spacer sequence CTCN PAM
ccuggugauuucuggaaaua

SEQ ID NO: 19610 - RNA, 20 nt, Artificial Sequence
  HTT spacer sequence CTCN PAM
uucuucuucgcaccguaagc

SEQ ID NO: 19611 - RNA, 20 nt, Artificial Sequence
  HTT spacer sequence CTCN PAM
accucuuucuucuucgcacc

SEQ ID NO: 19612 - RNA, 20 nt, Artificial Sequence
  HTT spacer sequence CTCN PAM
cagcgugggggcucccggcc

SEQ ID NO: 19613 - RNA, 20 nt, Artificial Sequence
  HTT spacer sequence CTCN PAM
cggccuggccccaccucugc

SEQ ID NO: 19614 - RNA, 20 nt, Artificial Sequence
  HTT spacer sequence CTCN PAM
gcuccugcuacauggcaggu

SEQ ID NO: 19615 - RNA, 20 nt, Artificial Sequence
  HTT spacer sequence CTCN PAM
ugcuacauggcaggugggcc

SEQ ID NO: 19616 - RNA, 20 nt, Artificial Sequence
  HTT spacer sequence CTCN PAM
ggccuucccugcagguugcc

SEQ ID NO: 19617 - RNA, 20 nt, Artificial Sequence
  HTT spacer sequence CTCN PAM
cuggcugggugguccccucc

SEQ ID NO: 19618 - RNA, 20 nt, Artificial Sequence
  HTT spacer sequence CTCN PAM
uagacgccaacaucucccug

SEQ ID NO: 19619 - RNA, 20 nt, Artificial Sequence
  HTT spacer sequence CTCN PAM
ggcacaggcaaggucacagg

SEQ ID NO: 19620 - RNA, 20 nt, Artificial Sequence
  HTT spacer sequence CTCN PAM
ccgcaccugugaccuugccu

SEQ ID NO: 19621 - RNA, 20 nt, Artificial Sequence
  HTT spacer sequence CTCN PAM
ccacacccaaaaccaucacc

SEQ ID NO: 19622 - RNA, 20 nt, Artificial Sequence
  HTT spacer sequence CTCN PAM
gugcaagacccuccccacac

SEQ ID NO: 19623 - RNA, 20 nt, Artificial Sequence
  HTT spacer sequence CTCN PAM
cuccgugcaagacccucccc

SEQ ID NO: 19624 - RNA, 20 nt, Artificial Sequence
  HTT spacer sequence CTCN PAM
ugcugccacccucgcuccgu

SEQ ID NO: 19625 - RNA, 20 nt, Artificial Sequence
  HTT spacer sequence CTCN PAM
cccugcagcuuccagcucuu

SEQ ID NO: 19626 - RNA, 20 nt, Artificial Sequence
  HTT spacer sequence CTCN PAM
gcugccauucucccccugca

SEQ ID NO: 19627 - RNA, 20 nt, Artificial Sequence
  HTT spacer sequence CTCN PAM
cugcugccauucucccccug

SEQ ID NO: 19628 - RNA, 20 nt, Artificial Sequence
  HTT spacer sequence CTCN PAM
ggcagccccaggcccagccc

SEQ ID NO: 19629 - RNA, 20 nt, Artificial Sequence
  HTT spacer sequence CTCN PAM
ccggcagccccaggcccagc

SEQ ID NO: 19630 - RNA, 20 nt, Artificial Sequence
  HTT spacer sequence CTCN PAM
cauccuggaagcugacaggc

SEQ ID NO: 19631 - RNA, 20 nt, Artificial Sequence
  HTT spacer sequence CTCN PAM
cucagcugcuccaccuccgg

SEQ ID NO: 19632 - RNA, 20 nt, Artificial Sequence
  HTT spacer sequence CTCN PAM
gcugcuccaccuccggguca

SEQ ID NO: 19633 - RNA, 20 nt, Artificial Sequence
  HTT spacer sequence CTCN PAM
accuccgggucaggcaggug

SEQ ID NO: 19634 - RNA, 20 nt, Artificial Sequence
  HTT spacer sequence CTCN PAM
gggucaggcaggugagccug

SEQ ID NO: 19635 - RNA, 20 nt, Artificial Sequence
  HTT spacer sequence CTCN PAM
ccugccugacccggaggugg

SEQ ID NO: 19636 - RNA, 20 nt, Artificial Sequence
  HTT spacer sequence CTCN PAM
gccccaggcucaccugccug

SEQ ID NO: 19637 - RNA, 20 nt, Artificial Sequence
  HTT spacer sequence CTCN PAM
cugccccaggcucaccugcc

SEQ ID NO: 19638 - RNA, 20 nt, Artificial Sequence
  HTT spacer sequence CTCN PAM
gccucucugccccaggcuca

SEQ ID NO: 19639 - RNA, 20 nt, Artificial Sequence
  HTT spacer sequence CTCN PAM
cagccucucugccccaggcu

SEQ ID NO: 19640 - RNA, 20 nt, Artificial Sequence
  HTT spacer sequence CTCN PAM
ggugcucucagccucucugc

SEQ ID NO: 19641 - RNA, 20 nt, Artificial Sequence
  HTT spacer sequence CTCN PAM
cacaaguggcucaggugcuc

SEQ ID NO: 19642 - RNA, 20 nt, Artificial Sequence
  HTT spacer sequence CTCN PAM
cccacaaguggcucaggugc

SEQ ID NO: 19643 - RNA, 20 nt, Artificial Sequence
  HTT spacer sequence CTCN PAM
ggcgaggagccggccuccag

SEQ ID NO: 19644 - RNA, 20 nt, Artificial Sequence
  HTT spacer sequence CTCN PAM
ccugaggggggcaguggggg

SEQ ID NO: 19645 - RNA, 20 nt, Artificial Sequence
  HTT spacer sequence CTCN PAM
ucgccugaggggggcagugg

SEQ ID NO: 19646 - RNA, 20 nt, Artificial Sequence
  HTT spacer sequence CTCN PAM
agcacagcagaagggaaccc

SEQ ID NO: 19647 - RNA, 20 nt, Artificial Sequence
  HTT spacer sequence CTCN PAM
cacuagggcuggggacuggg

SEQ ID NO: 19648 - RNA, 20 nt, Artificial Sequence
  HTT spacer sequence CTCN PAM
uccccacucccacuagggcu

SEQ ID NO: 19649 - RNA, 20 nt, Artificial Sequence
  HTT spacer sequence CTCN PAM
caggcuggcggucuguccgg

SEQ ID NO: 19650 - RNA, 20 nt, Artificial Sequence
  HTT spacer sequence CTCN PAM
gcuuucaguugcguugauuu

SEQ ID NO: 19651 - RNA, 20 nt, Artificial Sequence
  HTT spacer sequence CTCN PAM
gaaaaaaucaaaucaacgca

SEQ ID NO: 19652 - RNA, 20 nt, Artificial Sequence
  HTT spacer sequence CTCN PAM
uucaaggcucagaaaaaauc

SEQ ID NO: 19653 - RNA, 20 nt, Artificial Sequence
  HTT spacer sequence CTCN PAM
gcacccuaggucccggcuuu

SEQ ID NO: 19654 - RNA, 20 nt, Artificial Sequence
  HTT spacer sequence CTCN PAM
aacccaacauccgucaugcu

SEQ ID NO: 19655 - RNA, 20 nt, Artificial Sequence
  HTT spacer sequence CTCN PAM
cgucgcaagccagccgcuca

SEQ ID NO: 19656 - RNA, 20 nt, Artificial Sequence
  HTT spacer sequence CTCN PAM
gcccucacgucgcaagccag

SEQ ID NO: 19657 - RNA, 20 nt, Artificial Sequence
  HTT spacer sequence CTCN PAM
caccucagcccucacgucgc

SEQ ID NO: 19658 - RNA, 20 nt, Artificial Sequence
  HTT spacer sequence CTCN PAM
gaagauacccaggcucacac

SEQ ID NO: 19659 - RNA, 20 nt, Artificial Sequence
  HTT spacer sequence CTCN PAM
uaguccugcucaggcaccug

SEQ ID NO: 19660 - RNA, 20 nt, Artificial Sequence
  HTT spacer sequence CTCN PAM
ggcaccuggugaggaaggga

SEQ ID NO: 19661 - RNA, 20 nt, Artificial Sequence
  HTT spacer sequence CTCN PAM
ccaggugccugagcaggacu

SEQ ID NO: 19662 - RNA, 20 nt, Artificial Sequence
  HTT spacer sequence CTCN PAM
gcgucccuuccucaccaggu

SEQ ID NO: 19663 - RNA, 20 nt, Artificial Sequence
  HTT spacer sequence CTCN PAM
cacugcccucugcgucccuu

SEQ ID NO: 19664 - RNA, 20 nt, Artificial Sequence
  HTT spacer sequence CTCN PAM
ccucugacucaggaauucac

SEQ ID NO: 19665 - RNA, 20 nt, Artificial Sequence
  HTT spacer sequence CTCN PAM
gacucaggaauucacgggca

SEQ ID NO: 19666 - RNA, 20 nt, Artificial Sequence
  HTT spacer sequence CTCN PAM
ggaauucacgggcaccaccu

SEQ ID NO: 19667 - RNA, 20 nt, Artificial Sequence
  HTT spacer sequence CTCN PAM
cuggcuggcucugguuggug

SEQ ID NO: 19668 - RNA, 20 nt, Artificial Sequence
  HTT spacer sequence CTCN PAM
gguuggugucuggccagguu

SEQ ID NO: 19669 - RNA, 20 nt, Artificial Sequence
  HTT spacer sequence CTCN PAM
ucagagucccaggggagggu

SEQ ID NO: 19670 - RNA, 20 nt, Artificial Sequence
  HTT spacer sequence CTCN PAM
gaagaggcuuucagcauaaa

SEQ ID NO: 19671 - RNA, 20 nt, Artificial Sequence
  HTT spacer sequence CTCN PAM
ccugggacucugaagaggcu

SEQ ID NO: 19672 - RNA, 20 nt, Artificial Sequence
  HTT spacer sequence CTCN PAM
auuccuggaggcugagagau

SEQ ID NO: 19673 - RNA, 20 nt, Artificial Sequence
  HTT spacer sequence CTCN PAM
aggaauggagacagaaaccc

SEQ ID NO: 19674 - RNA, 20 nt, Artificial Sequence
  HTT spacer sequence CTCN PAM
gccuccaggaauggagacag

SEQ ID NO: 19675 - RNA, 20 nt, Artificial Sequence
  HTT spacer sequence CTCN PAM
cagccuccaggaauggagac

SEQ ID NO: 19676 - RNA, 20 nt, Artificial Sequence
  HTT spacer sequence CTCN PAM
ucucucagccuccaggaaug

SEQ ID NO: 19677 - RNA, 20 nt, Artificial Sequence
  HTT spacer sequence CTCN PAM
gcugcacccucaucucucag

SEQ ID NO: 19678 - RNA, 20 nt, Artificial Sequence
  HTT spacer sequence CTCN PAM
acuccagacccugcagucug

SEQ ID NO: 19679 - RNA, 20 nt, Artificial Sequence
  HTT spacer sequence CTCN PAM
agacccugcagucugggcug

SEQ ID NO: 19680 - RNA, 20 nt, Artificial Sequence
  HTT spacer sequence CTCN PAM
gagcugccacagucagccuu

SEQ ID NO: 19681 - RNA, 20 nt, Artificial Sequence
  HTT spacer sequence CTCN PAM
gaggggcugcgguguggaag

SEQ ID NO: 19682 - RNA, 20 nt, Artificial Sequence
  HTT spacer sequence CTCN PAM
gugaacuaaggcugacugug

SEQ ID NO: 19683 - RNA, 20 nt, Artificial Sequence
  HTT spacer sequence CTCN PAM
gcuucccccucggugaacua

SEQ ID NO: 19684 - RNA, 20 nt, Artificial Sequence
  HTT spacer sequence CTCN PAM
gggccucagcuucccccucg

SEQ ID NO: 19685 - RNA, 20 nt, Artificial Sequence
  HTT spacer sequence CTCN PAM
ugcucugggccucagcuucc

SEQ ID NO: 19686 - RNA, 20 nt, Artificial Sequence
  HTT spacer sequence CTCN PAM
caugcucugggccucagcuu

SEQ ID NO: 19687 - RNA, 20 nt, Artificial Sequence
  HTT spacer sequence CTCN PAM
gcuaaggacuauguggcccu

SEQ ID NO: 19688 - RNA, 20 nt, Artificial Sequence
  HTT spacer sequence CTCN PAM
aucuuuguccuuuuucuuua

SEQ ID NO: 19689 - RNA, 20 nt, Artificial Sequence
  HTT spacer sequence CTCN PAM
ccauagcagaggcuuuucuu

SEQ ID NO: 19690 - RNA, 20 nt, Artificial Sequence
  HTT spacer sequence CTCN PAM
gcuauggggagacugcgggu

SEQ ID NO: 19691 - RNA, 20 nt, Artificial Sequence
  HTT spacer sequence CTCN PAM
uuauauauuaaggcuguugg

SEQ ID NO: 19692 - RNA, 20 nt, Artificial Sequence
  HTT spacer sequence CTCN PAM
ggcuucuucagcccaacagc

SEQ ID NO: 19693 - RNA, 20 nt, Artificial Sequence
  HTT spacer sequence CTCN PAM
caggcuucuucagcccaaca

SEQ ID NO: 19694 - RNA, 20 nt, Artificial Sequence
  HTT spacer sequence CTCN PAM
acagaaccagccacccucuc

SEQ ID NO: 19695 - RNA, 20 nt, Artificial Sequence
  HTT spacer sequence CTCN PAM
uacacugagaauaggccuuu

SEQ ID NO: 19696 - RNA, 20 nt, Artificial Sequence
  HTT spacer sequence CTCN PAM
guguaggaggcccccaaacu

SEQ ID NO: 19697 - RNA, 20 nt, Artificial Sequence
  HTT spacer sequence CTCN PAM
uuucuccaaagagugggcug

SEQ ID NO: 19698 - RNA, 20 nt, Artificial Sequence
  HTT spacer sequence CTCN PAM
aaagagugggcuggcucaag

SEQ ID NO: 19699 - RNA, 20 nt, Artificial Sequence
  HTT spacer sequence CTCN PAM
uuggagaaacgagaaaaggc

SEQ ID NO: 19700 - RNA, 20 nt, Artificial Sequence
  HTT spacer sequence CTCN PAM
aguagggcagagagagaagc

SEQ ID NO: 19701 - RNA, 20 nt, Artificial Sequence
  HTT spacer sequence CTCN PAM
gcccuacuugagccagccca

SEQ ID NO: 19702 - RNA, 20 nt, Artificial Sequence
  HTT spacer sequence CTCN PAM
cugcccuacuugagccagcc

SEQ ID NO: 19703 - RNA, 20 nt, Artificial Sequence
  HTT spacer sequence CTCN PAM
cucugcccuacuugagccag

SEQ ID NO: 19704 - RNA, 20 nt, Artificial Sequence
  HTT spacer sequence CTCN PAM
gccccaggcuucucucucug

SEQ ID NO: 19705 - RNA, 20 nt, Artificial Sequence
  HTT spacer sequence CTCN PAM
cacgcucugugcuggugucu

SEQ ID NO: 19706 - RNA, 20 nt, Artificial Sequence
  HTT spacer sequence CTCN PAM
gugcuggugucuucacagcc

SEQ ID NO: 19707 - RNA, 20 nt, Artificial Sequence
  HTT spacer sequence CTCN PAM
ccaucuggcugugccuguuu

SEQ ID NO: 19708 - RNA, 20 nt, Artificial Sequence
  HTT spacer sequence CTCN PAM
uucagaauccagcuuauugu

SEQ ID NO: 19709 - RNA, 20 nt, Artificial Sequence
  HTT spacer sequence CTCN PAM
ugcuaccugccagggugugg

SEQ ID NO: 19710 - RNA, 20 nt, Artificial Sequence
  HTT spacer sequence CTCN PAM
uacucuugcuaccugccagg

SEQ ID NO: 19711 - RNA, 20 nt, Artificial Sequence
  HTT spacer sequence CTCN PAM
ccuacucuugcuaccugcca

SEQ ID NO: 19712 - RNA, 20 nt, Artificial Sequence
  HTT spacer sequence CTCN PAM
cuccuacucuugcuaccugc

SEQ ID NO: 19713 - RNA, 20 nt, Artificial Sequence
  HTT spacer sequence CTCN PAM
ucucuccuacucuugcuacc

SEQ ID NO: 19714 - RNA, 20 nt, Artificial Sequence
  HTT spacer sequence CTCN PAM
gagcacagguuggguuugga

SEQ ID NO: 19715 - RNA, 20 nt, Artificial Sequence
  HTT spacer sequence CTCN PAM
gagugggugucuccucucuc

SEQ ID NO: 19716 - RNA, 20 nt, Artificial Sequence
  HTT spacer sequence CTCN PAM
aaacccaaccugugcucgga

SEQ ID NO: 19717 - RNA, 20 nt, Artificial Sequence
  HTT spacer sequence CTCN PAM
gucacucaaaggcagagugg

SEQ ID NO: 19718 - RNA, 20 nt, Artificial Sequence
  HTT spacer sequence CTCN PAM
aaggcagaguggggaguggg

SEQ ID NO: 19719 - RNA, 20 nt, Artificial Sequence
  HTT spacer sequence CTCN PAM
gccuuugagugacagagugc

SEQ ID NO: 19720 - RNA, 20 nt, Artificial Sequence
  HTT spacer sequence CTCN PAM
ccacucugccuuugagugac

SEQ ID NO: 19721 - RNA, 20 nt, Artificial Sequence
  HTT spacer sequence CTCN PAM
uaaggcccagugcccacucc

SEQ ID NO: 19722 - RNA, 20 nt, Artificial Sequence
  HTT spacer sequence CTCN PAM
cuggacccaguaccuccuaa

SEQ ID NO: 19723 - RNA, 20 nt, Artificial Sequence
  HTT spacer sequence CTCN PAM
gccucacuggacccaguacc

SEQ ID NO: 19724 - RNA, 20 nt, Artificial Sequence
  HTT spacer sequence CTCN PAM
ggccaggccagggaagaagc

SEQ ID NO: 19725 - RNA, 20 nt, Artificial Sequence
  HTT spacer sequence CTCN PAM
ugccuugaccucccagaggg

SEQ ID NO: 19726 - RNA, 20 nt, Artificial Sequence
  HTT spacer sequence CTCN PAM
cagagggcagccgaggccca

SEQ ID NO: 19727 - RNA, 20 nt, Artificial Sequence
  HTT spacer sequence CTCN PAM
gggaggucaaggcaggagac

SEQ ID NO: 19728 - RNA, 20 nt, Artificial Sequence
  HTT spacer sequence CTCN PAM
gcugcccucugggaggucaa

SEQ ID NO: 19729 - RNA, 20 nt, Artificial Sequence
  HTT spacer sequence CTCN PAM
ccugggccucggcugcccuc

SEQ ID NO: 19730 - RNA, 20 nt, Artificial Sequence
  HTT spacer sequence CTCN PAM
cagggcaggaccugucugca

SEQ ID NO: 19731 - RNA, 20 nt, Artificial Sequence
  HTT spacer sequence CTCN PAM
gggcaggaccugucugcagg

SEQ ID NO: 19732 - RNA, 20 nt, Artificial Sequence
  HTT spacer sequence CTCN PAM
ugcagacagguccugcccug

SEQ ID NO: 19733 - RNA, 20 nt, Artificial Sequence
  HTT spacer sequence CTCN PAM
uuaccacugggacccccagc

SEQ ID NO: 19734 - RNA, 20 nt, Artificial Sequence
  HTT spacer sequence CTCN PAM
gggcagguugcagguuguag

SEQ ID NO: 19735 - RNA, 20 nt, Artificial Sequence
  HTT spacer sequence CTCN PAM
ugcccagacuguagguucaa

SEQ ID NO: 19736 - RNA, 20 nt, Artificial Sequence
  HTT spacer sequence CTCN PAM
caugccauucuugguugaac

SEQ ID NO: 19737 - RNA, 20 nt, Artificial Sequence
  HTT spacer sequence CTCN PAM
cccagcuacagggcagauuu

SEQ ID NO: 19738 - RNA, 20 nt, Artificial Sequence
  HTT spacer sequence CTCN PAM
auuuuuauaucaaugacaua

SEQ ID NO: 19739 - RNA, 20 nt, Artificial Sequence
  HTT spacer sequence CTCN PAM
gagaggugaaugaaccugcc

SEQ ID NO: 19740 - RNA, 20 nt, Artificial Sequence
  HTT spacer sequence CTCN PAM
gagccucuauuuuuauauca

SEQ ID NO: 19741 - RNA, 20 nt, Artificial Sequence
  HTT spacer sequence CTCN PAM
cugagccucuauuuuuauau

SEQ ID NO: 19742 - RNA, 20 nt, Artificial Sequence
  HTT spacer sequence CTCN PAM
acacuuugcugugugacuuu

SEQ ID NO: 19743 - RNA, 20 nt, Artificial Sequence
  HTT spacer sequence CTCN PAM
ucuccacacuuugcugugug

SEQ ID NO: 19744 - RNA, 20 nt, Artificial Sequence
  HTT spacer sequence CTCN PAM
gggcuguggacacugaagcc

SEQ ID NO: 19745 - RNA, 20 nt, Artificial Sequence
  HTT spacer sequence CTCN PAM
aacgccaguggcugucgcuc

SEQ ID NO: 19746 - RNA, 20 nt, Artificial Sequence
  HTT spacer sequence CTCN PAM
cugaggcauucucucccgaa

SEQ ID NO: 19747 - RNA, 20 nt, Artificial Sequence
  HTT spacer sequence CTCN PAM
gggagcgacagccacuggcg

SEQ ID NO: 19748 - RNA, 20 nt, Artificial Sequence
  HTT spacer sequence CTCN PAM
cccgaacaacacaguuauua

SEQ ID NO: 19749 - RNA, 20 nt, Artificial Sequence
  HTT spacer sequence CTCN PAM
cgaacaacacaguuauuaua

SEQ ID NO: 19750 - RNA, 20 nt, Artificial Sequence
  HTT spacer sequence CTCN PAM
accuuucaaaaugaauuauu

SEQ ID NO: 19751 - RNA, 20 nt, Artificial Sequence
  HTT spacer sequence CTCN PAM
uugcagagagucuagaaacu

SEQ ID NO: 19752 - RNA, 20 nt, Artificial Sequence
  HTT spacer sequence CTCN PAM
gcaaugagcaaauacugcuu

SEQ ID NO: 19753 - RNA, 20 nt, Artificial Sequence
  HTT spacer sequence CTCN PAM
cugcaaugagcaaauacugc

SEQ ID NO: 19754 - RNA, 20 nt, Artificial Sequence
  HTT spacer sequence CTCN PAM
gauguuaaaaaggaagcaca

SEQ ID NO: 19755 - RNA, 20 nt, Artificial Sequence
  HTT spacer sequence CTCN PAM
agggucaagaugacaaugga

SEQ ID NO: 19756 - RNA, 20 nt, Artificial Sequence
  HTT spacer sequence CTCN PAM
ccagcaaaaucggccaggcu

SEQ ID NO: 19757 - RNA, 20 nt, Artificial Sequence
  HTT spacer sequence CTCN PAM
gcuggcaagggccuccccag

SEQ ID NO: 19758 - RNA, 20 nt, Artificial Sequence
  HTT spacer sequence CTCN PAM
cggcuggcaagggccucccc

SEQ ID NO: 19759 - RNA, 20 nt, Artificial Sequence
  HTT spacer sequence CTCN PAM
ugccugugccggcguggcgc

SEQ ID NO: 19760 - RNA, 20 nt, Artificial Sequence
  HTT spacer sequence CTCN PAM
gcugaggcugggcaggacag

SEQ ID NO: 19761 - RNA, 20 nt, Artificial Sequence
  HTT spacer sequence CTCN PAM
gcagaggggcgcgccacgcc

SEQ ID NO: 19762 - RNA, 20 nt, Artificial Sequence
  HTT spacer sequence CTCN PAM
guuucucacccuuggcucuu

SEQ ID NO: 19763 - RNA, 20 nt, Artificial Sequence
  HTT spacer sequence CTCN PAM
cccuuggcucuugugucucu

SEQ ID NO: 19764 - RNA, 20 nt, Artificial Sequence
  HTT spacer sequence CTCN PAM
ugugucucucguuucaggaa

SEQ ID NO: 19765 - RNA, 20 nt, Artificial Sequence
  HTT spacer sequence CTCN PAM
cguuucaggaaauuaaaaug

SEQ ID NO: 19766 - RNA, 20 nt, Artificial Sequence
  HTT spacer sequence CTCN PAM
uuucaggaaauuaaaaugca

SEQ ID NO: 19767 - RNA, 20 nt, Artificial Sequence
  HTT spacer sequence CTCN PAM
cuaucugucaugcauuuuaa

SEQ ID NO: 19768 - RNA, 20 nt, Artificial Sequence
  HTT spacer sequence CTCN PAM
gggaccuuggccagaauccc

SEQ ID NO: 19769 - RNA, 20 nt, Artificial Sequence
  HTT spacer sequence CTCN PAM
acgucccagaccgaggcguc

SEQ ID NO: 19770 - RNA, 20 nt, Artificial Sequence
  HTT spacer sequence CTCN PAM
gucugggacguggagggccc

SEQ ID NO: 19771 - RNA, 20 nt, Artificial Sequence
  HTT spacer sequence CTCN PAM
guacuucccguauaaccagu

SEQ ID NO: 19772 - RNA, 20 nt, Artificial Sequence
  HTT spacer sequence CTCN PAM
uacgaaggccgcuucgagga

SEQ ID NO: 19773 - RNA, 20 nt, Artificial Sequence
  HTT spacer sequence CTCN PAM
aagcggccuucguaggagca

SEQ ID NO: 19774 - RNA, 20 nt, Artificial Sequence
  HTT spacer sequence CTCN PAM
gacagcuccuccagcuuacu

SEQ ID NO: 19775 - RNA, 20 nt, Artificial Sequence
  HTT spacer sequence CTCN PAM
uccagcuuacugucccuuaa

SEQ ID NO: 19776 - RNA, 20 nt, Artificial Sequence
  HTT spacer sequence CTCN PAM
agcuuacugucccuuaaguu

SEQ ID NO: 19777 - RNA, 20 nt, Artificial Sequence
  HTT spacer sequence CTCN PAM
gcccccaccauuuagagaaa

SEQ ID NO: 19778 - RNA, 20 nt, Artificial Sequence
  HTT spacer sequence CTCN PAM
aaauggugggggcugagaua

SEQ ID NO: 19779 - RNA, 20 nt, Artificial Sequence
  HTT spacer sequence CTCN PAM
cagucccuuucucuaaaugg

SEQ ID NO: 19780 - RNA, 20 nt, Artificial Sequence
  HTT spacer sequence CTCN PAM
gcaaccacuguggccgccgc

SEQ ID NO: 19781 - RNA, 20 nt, Artificial Sequence
  HTT spacer sequence CTCN PAM
agggacaggcggccucagac

SEQ ID NO: 19782 - RNA, 20 nt, Artificial Sequence
  HTT spacer sequence CTCN PAM
gaccagggagggcuuuagug

SEQ ID NO: 19783 - RNA, 20 nt, Artificial Sequence
  HTT spacer sequence CTCN PAM
cuggucugaggccgccuguc

SEQ ID NO: 19784 - RNA, 20 nt, Artificial Sequence
  HTT spacer sequence CTCN PAM
gucugccuguggacacuaaa

SEQ ID NO: 19785 - RNA, 20 nt, Artificial Sequence
  HTT spacer sequence CTCN PAM
cagcuccaucacuuuugagc

SEQ ID NO: 19786 - RNA, 20 nt, Artificial Sequence
  HTT spacer sequence CTCN PAM
aucacuuuugagcugcacgg

SEQ ID NO: 19787 - RNA, 20 nt, Artificial Sequence
  HTT spacer sequence CTCN PAM
aaagugauggagcugggaga

SEQ ID NO: 19788 - RNA, 20 nt, Artificial Sequence
  HTT spacer sequence CTCN PAM
ggccucagucucccuccuau

SEQ ID NO: 19789 - RNA, 20 nt, Artificial Sequence
  HTT spacer sequence CTCN PAM
gucucccuccuauaaaaugg

SEQ ID NO: 19790 - RNA, 20 nt, Artificial Sequence
  HTT spacer sequence CTCN PAM
cuccuauaaaauggggguaa

SEQ ID NO: 19791 - RNA, 20 nt, Artificial Sequence
  HTT spacer sequence CTCN PAM
uauaaaauggggguaaauca

SEQ ID NO: 19792 - RNA, 20 nt, Artificial Sequence
  HTT spacer sequence CTCN PAM
gaggguggcugggagcauca

SEQ ID NO: 19793 - RNA, 20 nt, Artificial Sequence
  HTT spacer sequence CTCN PAM
gagaaagguacugauuuacc

SEQ ID NO: 19794 - RNA, 20 nt, Artificial Sequence
  HTT spacer sequence CTCN PAM
cagccacccucugagaaagg

SEQ ID NO: 19795 - RNA, 20 nt, Artificial Sequence
  HTT spacer sequence CTCN PAM
ugugaugcucccagccaccc

SEQ ID NO: 19796 - RNA, 20 nt, Artificial Sequence
  HTT spacer sequence CTCN PAM
ccugugaugcucccagccac

SEQ ID NO: 19797 - RNA, 20 nt, Artificial Sequence
  HTT spacer sequence CTCN PAM
gugugccgggccccaugcug

SEQ ID NO: 19798 - RNA, 20 nt, Artificial Sequence
  HTT spacer sequence CTCN PAM
cuccgugugccgggccccau

SEQ ID NO: 19799 - RNA, 20 nt, Artificial Sequence
  HTT spacer sequence CTCN PAM
cuuagcccacacagacccca

SEQ ID NO: 19800 - RNA, 20 nt, Artificial Sequence
  HTT spacer sequence CTCN PAM
caggcuagcugcccucucag

SEQ ID NO: 19801 - RNA, 20 nt, Artificial Sequence
  HTT spacer sequence CTCN PAM
cagcacuggggagggugucg

SEQ ID NO: 19802 - RNA, 20 nt, Artificial Sequence
  HTT spacer sequence CTCN PAM
gcacuggggagggugucggg

SEQ ID NO: 19803 - RNA, 20 nt, Artificial Sequence
  HTT spacer sequence CTCN PAM
ccagugcugagagggcagcu

SEQ ID NO: 19804 - RNA, 20 nt, Artificial Sequence
  HTT spacer sequence CTCN PAM
ucacguguugccgugggcau

SEQ ID NO: 19805 - RNA, 20 nt, Artificial Sequence
  HTT spacer sequence CTCN PAM
gccauccaucccacaccuca

SEQ ID NO: 19806 - RNA, 20 nt, Artificial Sequence
  HTT spacer sequence CTCN PAM
gacccgucccgugcuggcca

SEQ ID NO: 19807 - RNA, 20 nt, Artificial Sequence
  HTT spacer sequence CTCN PAM
cagggcagccgggagccagg

SEQ ID NO: 19808 - RNA, 20 nt, Artificial Sequence
  HTT spacer sequence CTCN PAM
cggcugcccugugagcaucu

SEQ ID NO: 19809 - RNA, 20 nt, Artificial Sequence
  HTT spacer sequence CTCN PAM
ccaggcccaccccgcaggug

SEQ ID NO: 19810 - RNA, 20 nt, Artificial Sequence
  HTT spacer sequence CTCN PAM
gggcuccccaggcccacccc

SEQ ID NO: 19811 - RNA, 20 nt, Artificial Sequence
  HTT spacer sequence CTCN PAM
aaagcaccuucucugggcuc

SEQ ID NO: 19812 - RNA, 20 nt, Artificial Sequence
  HTT spacer sequence CTCN PAM
ucaaaagcaccuucucuggg

SEQ ID NO: 19813 - RNA, 20 nt, Artificial Sequence
  HTT spacer sequence CTCN PAM
aaauggccaacuucuauuuu

SEQ ID NO: 19814 - RNA, 20 nt, Artificial Sequence
  HTT spacer sequence CTCN PAM
aauccacaaucuuccuguuc

SEQ ID NO: 19815 - RNA, 20 nt, Artificial Sequence
  HTT spacer sequence CTCN PAM
ccugcccuggucuucaaguc

SEQ ID NO: 19816 - RNA, 20 nt, Artificial Sequence
  HTT spacer sequence CTCN PAM
ugucagaaagacuugaagac

SEQ ID NO: 19817 - RNA, 20 nt, Artificial Sequence
  HTT spacer sequence CTCN PAM
acuaaagauacuuuucugac

SEQ ID NO: 19818 - RNA, 20 nt, Artificial Sequence
  HTT spacer sequence CTCN PAM
gaggagggucccucucaugc

SEQ ID NO: 19819 - RNA, 20 nt, Artificial Sequence
  HTT spacer sequence CTCN PAM
gagacgccuucucuacuaaa

SEQ ID NO: 19820 - RNA, 20 nt, Artificial Sequence
  HTT spacer sequence CTCN PAM
ucggagacgccuucucuacu

SEQ ID NO: 19821 - RNA, 20 nt, Artificial Sequence
  HTT spacer sequence CTCN PAM
caugccgggggccgcugcuu

SEQ ID NO: 19822 - RNA, 20 nt, Artificial Sequence
  HTT spacer sequence CTCN PAM
ugccgggggccgcugcuuga

SEQ ID NO: 19823 - RNA, 20 nt, Artificial Sequence
  HTT spacer sequence CTCN PAM
ggauuucucauugaagaccu

SEQ ID NO: 19824 - RNA, 20 nt, Artificial Sequence
  HTT spacer sequence CTCN PAM
uugaagaccugagacaaaaa

SEQ ID NO: 19825 - RNA, 20 nt, Artificial Sequence
  HTT spacer sequence CTCN PAM
ggucuucaaugagaaauccu

SEQ ID NO: 19826 - RNA, 20 nt, Artificial Sequence
  HTT spacer sequence CTCN PAM
ugcugguuccuucuagcugc

SEQ ID NO: 19827 - RNA, 20 nt, Artificial Sequence
  HTT spacer sequence CTCN PAM
ggccuccugcugguuccuuc

SEQ ID NO: 19828 - RNA, 20 nt, Artificial Sequence
  HTT spacer sequence CTCN PAM
guccacgggaacaacagcca

SEQ ID NO: 19829 - RNA, 20 nt, Artificial Sequence
  HTT spacer sequence CTCN PAM
gacucagcugccuggggccu

SEQ ID NO: 19830 - RNA, 20 nt, Artificial Sequence
  HTT spacer sequence CTCN PAM
gcugccuggggccuugcaca

SEQ ID NO: 19831 - RNA, 20 nt, Artificial Sequence
  HTT spacer sequence CTCN PAM
cugaucaggcccaaagcgcg

SEQ ID NO: 19832 - RNA, 20 nt, Artificial Sequence
  HTT spacer sequence CTCN PAM
cgccccugagguuggcugua

SEQ ID NO: 19833 - RNA, 20 nt, Artificial Sequence
  HTT spacer sequence CTCN PAM
ggggcgugagauccgcgcuu

SEQ ID NO: 19834 - RNA, 20 nt, Artificial Sequence
  HTT spacer sequence CTCN PAM
cagcucagagcagagugugg

SEQ ID NO: 19835 - RNA, 20 nt, Artificial Sequence
  HTT spacer sequence CTCN PAM
gcucagagcagagugugggc

SEQ ID NO: 19836 - RNA, 20 nt, Artificial Sequence
  HTT spacer sequence CTCN PAM
gagcagagugugggccaggg

SEQ ID NO: 19837 - RNA, 20 nt, Artificial Sequence
  HTT spacer sequence CTCN PAM
gagcugagaggguacagcca

SEQ ID NO: 19838 - RNA, 20 nt, Artificial Sequence
  HTT spacer sequence CTCN PAM
gcucugagcugagaggguac

SEQ ID NO: 19839 - RNA, 20 nt, Artificial Sequence
  HTT spacer sequence CTCN PAM
ucccuggcccacacucugcu

SEQ ID NO: 19840 - RNA, 20 nt, Artificial Sequence
  HTT spacer sequence CTCN PAM
agugccugcucaucccuggc

SEQ ID NO: 19841 - RNA, 20 nt, Artificial Sequence
  HTT spacer sequence CTCN PAM
cugcccuucagggaggucug

SEQ ID NO: 19842 - RNA, 20 nt, Artificial Sequence
  HTT spacer sequence CTCN PAM
cugaagggcagggagcugcc

SEQ ID NO: 19843 - RNA, 20 nt, Artificial Sequence
  HTT spacer sequence CTCN PAM
gcagaccucccugaagggca

SEQ ID NO: 19844 - RNA, 20 nt, Artificial Sequence
  HTT spacer sequence CTCN PAM
gcugcugggguaggggccac

SEQ ID NO: 19845 - RNA, 20 nt, Artificial Sequence
  HTT spacer sequence CTCN PAM
caggaggcgcccacagggcu

SEQ ID NO: 19846 - RNA, 20 nt, Artificial Sequence
  HTT spacer sequence CTCN PAM
ggaggcgcccacagggcugg

SEQ ID NO: 19847 - RNA, 20 nt, Artificial Sequence
  HTT spacer sequence CTCN PAM
ugagagcucugcugcugggg

SEQ ID NO: 19848 - RNA, 20 nt, Artificial Sequence
  HTT spacer sequence CTCN PAM
ccaccucuaccagagcucug

SEQ ID NO: 19849 - RNA, 20 nt, Artificial Sequence
  HTT spacer sequence CTCN PAM
accagagcucugagguccug

SEQ ID NO: 19850 - RNA, 20 nt, Artificial Sequence
  HTT spacer sequence CTCN PAM
gguagagguggugaguaaag

SEQ ID NO: 19851 - RNA, 20 nt, Artificial Sequence
  HTT spacer sequence CTCN PAM
gagguccuggggagagagcc

SEQ ID NO: 19852 - RNA, 20 nt, Artificial Sequence
  HTT spacer sequence CTCN PAM
gagcucugguagagguggug

SEQ ID NO: 19853 - RNA, 20 nt, Artificial Sequence
  HTT spacer sequence CTCN PAM
ccaggaccucagagcucugg

SEQ ID NO: 19854 - RNA, 20 nt, Artificial Sequence
  HTT spacer sequence CTCN PAM
ccccaggaccucagagcucu

SEQ ID NO: 19855 - RNA, 20 nt, Artificial Sequence
  HTT spacer sequence CTCN PAM
cuccccaggaccucagagcu

SEQ ID NO: 19856 - RNA, 20 nt, Artificial Sequence
  HTT spacer sequence CTCN PAM
ugugggccccacacccucua

SEQ ID NO: 19857 - RNA, 20 nt, Artificial Sequence
  HTT spacer sequence CTCN PAM
aggugccuguccuucugccu

SEQ ID NO: 19858 - RNA, 20 nt, Artificial Sequence
  HTT spacer sequence CTCN PAM
cuaccaaggugugccggccc

SEQ ID NO: 19859 - RNA, 20 nt, Artificial Sequence
  HTT spacer sequence CTCN PAM
accaaggugugccggcccca

SEQ ID NO: 19860 - RNA, 20 nt, Artificial Sequence
  HTT spacer sequence CTCN PAM
cggcggccuagaaauggggc

SEQ ID NO: 19861 - RNA, 20 nt, Artificial Sequence
  HTT spacer sequence CTCN PAM
caucucaggcccuuccuucu

SEQ ID NO: 19862 - RNA, 20 nt, Artificial Sequence
  HTT spacer sequence CTCN PAM
ggcccuuccuucugggaccu

SEQ ID NO: 19863 - RNA, 20 nt, Artificial Sequence
  HTT spacer sequence CTCN PAM
guuuccccaucugccuaagg

SEQ ID NO: 19864 - RNA, 20 nt, Artificial Sequence
  HTT spacer sequence CTCN PAM
ggaccccuguagggaagcca

SEQ ID NO: 19865 - RNA, 20 nt, Artificial Sequence
  HTT spacer sequence CTCN PAM
gcacuacccagcacccccca

SEQ ID NO: 19866 - RNA, 20 nt, Artificial Sequence
  HTT spacer sequence CTCN PAM
cccuggggguggucucucca

SEQ ID NO: 19867 - RNA, 20 nt, Artificial Sequence
  HTT spacer sequence CTCN PAM
cuggggguggucucuccacc

SEQ ID NO: 19868 - RNA, 20 nt, Artificial Sequence
  HTT spacer sequence CTCN PAM
ccaccccuggcccccaacug

SEQ ID NO: 19869 - RNA, 20 nt, Artificial Sequence
  HTT spacer sequence CTCN PAM
accccuggcccccaacuggg

SEQ ID NO: 19870 - RNA, 20 nt, Artificial Sequence
  HTT spacer sequence CTCN PAM
gccccaguugggggccaggg

SEQ ID NO: 19871 - RNA, 20 nt, Artificial Sequence
  HTT spacer sequence CTCN PAM
cuggcaggauaugccccucu

SEQ ID NO: 19872 - RNA, 20 nt, Artificial Sequence
  HTT spacer sequence CTCN PAM
gcagcccagaacaucccacc

SEQ ID NO: 19873 - RNA, 20 nt, Artificial Sequence
  HTT spacer sequence CTCN PAM
cuuucuuucuuuuucuuuuu

SEQ ID NO: 19874 - RNA, 20 nt, Artificial Sequence
  HTT spacer sequence CTCN PAM
uucuuucuuuuucuuuuuuu

SEQ ID NO: 19875 - RNA, 20 nt, Artificial Sequence
  HTT spacer sequence CTCN PAM
aaaaaaaaaaaaaagaaaaa

SEQ ID NO: 19876 - RNA, 20 nt, Artificial Sequence
  HTT spacer sequence CTCN PAM
gucucaaaaaaaaaaaaaaa

SEQ ID NO: 19877 - RNA, 20 nt, Artificial Sequence
  HTT spacer sequence CTCN PAM
cucuugugcagagagcagug

SEQ ID NO: 19878 - RNA, 20 nt, Artificial Sequence
  HTT spacer sequence CTCN PAM
ugugcagagagcaguggcgc

SEQ ID NO: 19879 - RNA, 20 nt, Artificial Sequence
  HTT spacer sequence CTCN PAM
gcacaagagcgagacuccgu

SEQ ID NO: 19880 - RNA, 20 nt, Artificial Sequence
  HTT spacer sequence CTCN PAM
cugcacaagagcgagacucc

SEQ ID NO: 19881 - RNA, 20 nt, Artificial Sequence
  HTT spacer sequence CTCN PAM
cugcaaccuccgccucgugg

SEQ ID NO: 19882 - RNA, 20 nt, Artificial Sequence
  HTT spacer sequence CTCN PAM
gccucguggguucaagcgau

SEQ ID NO: 19883 - RNA, 20 nt, Artificial Sequence
  HTT spacer sequence CTCN PAM
uggguucaagcgauucuccu

SEQ ID NO: 19884 - RNA, 20 nt, Artificial Sequence
  HTT spacer sequence CTCN PAM
ugccucagccucccgaguag

SEQ ID NO: 19885 - RNA, 20 nt, Artificial Sequence
  HTT spacer sequence CTCN PAM
gccucccgaguagcugggau

SEQ ID NO: 19886 - RNA, 20 nt, Artificial Sequence
  HTT spacer sequence CTCN PAM
cgaguagcugggauuacagg

SEQ ID NO: 19887 - RNA, 20 nt, Artificial Sequence
  HTT spacer sequence CTCN PAM
ggaggcugaggcaggagaau

SEQ ID NO: 19888 - RNA, 20 nt, Artificial Sequence
  HTT spacer sequence CTCN PAM
acuaaaaauacaaaaauuag

SEQ ID NO: 19889 - RNA, 20 nt, Artificial Sequence
  HTT spacer sequence CTCN PAM
ugaccucaggugauccaccu

SEQ ID NO: 19890 - RNA, 20 nt, Artificial Sequence
  HTT spacer sequence CTCN PAM
ggugauccaccugccucugc

SEQ ID NO: 19891 - RNA, 20 nt, Artificial Sequence
  HTT spacer sequence CTCN PAM
gccucccaaagugcugggau

SEQ ID NO: 19892 - RNA, 20 nt, Artificial Sequence
  HTT spacer sequence CTCN PAM
caaagugcugggauuacagg

SEQ ID NO: 19893 - RNA, 20 nt, Artificial Sequence
  HTT spacer sequence CTCN PAM
acacccggccaccccuguua

SEQ ID NO: 19894 - RNA, 20 nt, Artificial Sequence
  HTT spacer sequence CTCN PAM
uuugcacauggaauaugaga

SEQ ID NO: 19895 - RNA, 20 nt, Artificial Sequence
  HTT spacer sequence CTCN PAM
uauuccaugugcaaaggagg

SEQ ID NO: 19896 - RNA, 20 nt, Artificial Sequence
  HTT spacer sequence CTCN PAM
gggucucauauuccaugugc

SEQ ID NO: 19897 - RNA, 20 nt, Artificial Sequence
  HTT spacer sequence CTCN PAM
cuggggccucaguuucccca

SEQ ID NO: 19898 - RNA, 20 nt, Artificial Sequence
  HTT spacer sequence CTCN PAM
guuuccccauuugcccagua

SEQ ID NO: 19899 - RNA, 20 nt, Artificial Sequence
  HTT spacer sequence CTCN PAM
cgacaauccuacugggcaaa

SEQ ID NO: 19900 - RNA, 20 nt, Artificial Sequence
  HTT spacer sequence CTCN PAM
ccggacccucccgacaaucc

SEQ ID NO: 19901 - RNA, 20 nt, Artificial Sequence
  HTT spacer sequence CTCN PAM
guggccagcacguccacagc

SEQ ID NO: 19902 - RNA, 20 nt, Artificial Sequence
  HTT spacer sequence CTCN PAM
gaccuggaaggacagugccg

SEQ ID NO: 19903 - RNA, 20 nt, Artificial Sequence
  HTT spacer sequence CTCN PAM
uccgaccuggaaggacagug

SEQ ID NO: 19904 - RNA, 20 nt, Artificial Sequence
  HTT spacer sequence CTCN PAM
gcaccuugcgcuucuucacc

SEQ ID NO: 19905 - RNA, 20 nt, Artificial Sequence
  HTT spacer sequence CTCN PAM
agcagccgcagcugcuucuu

SEQ ID NO: 19906 - RNA, 20 nt, Artificial Sequence
  HTT spacer sequence CTCN PAM
accauggccuccagcagccg

SEQ ID NO: 19907 - RNA, 20 nt, Artificial Sequence
  HTT spacer sequence CTCN PAM
uccaccauggccuccagcag

SEQ ID NO: 19908 - RNA, 20 nt, Artificial Sequence
  HTT spacer sequence CTCN PAM
gccggcgcugcuccuccacc

SEQ ID NO: 19909 - RNA, 20 nt, Artificial Sequence
  HTT spacer sequence CTCN PAM
acggcgcggcucagccggcg

SEQ ID NO: 19910 - RNA, 20 nt, Artificial Sequence
  HTT spacer sequence CTCN PAM
uccacggcgcggcucagccg

SEQ ID NO: 19911 - RNA, 20 nt, Artificial Sequence
  HTT spacer sequence CTCN PAM
cggcaggucuccuccacggc

SEQ ID NO: 19912 - RNA, 20 nt, Artificial Sequence
  HTT spacer sequence CTCN PAM
gcaccugcaggaugugcugc

SEQ ID NO: 19913 - RNA, 20 nt, Artificial Sequence
  HTT spacer sequence CTCN PAM
ugcagcugcaggcucugcac

SEQ ID NO: 19914 - RNA, 20 nt, Artificial Sequence
  HTT spacer sequence CTCN PAM
ucaugcgcuccugcagcugc

SEQ ID NO: 19915 - RNA, 20 nt, Artificial Sequence
  HTT spacer sequence CTCN PAM
agcagacucaucaugcgcuc

SEQ ID NO: 19916 - RNA, 20 nt, Artificial Sequence
  HTT spacer sequence CTCN PAM
ccagcagacucaucaugcgc

SEQ ID NO: 19917 - RNA, 20 nt, Artificial Sequence
  HTT spacer sequence CTCN PAM
ggccacccagggcaggccac

SEQ ID NO: 19918 - RNA, 20 nt, Artificial Sequence
  HTT spacer sequence CTCN PAM
ggccaggcgggcaagggggc

SEQ ID NO: 19919 - RNA, 20 nt, Artificial Sequence
  HTT spacer sequence CTCN PAM
cggggcggcccccuugcccg

SEQ ID NO: 19920 - RNA, 20 nt, Artificial Sequence
  HTT spacer sequence CTCN PAM
gcucgcggggcggcccccuu

SEQ ID NO: 19921 - RNA, 20 nt, Artificial Sequence
  HTT spacer sequence CTCN PAM
ggcaggaugucccuucugag

SEQ ID NO: 19922 - RNA, 20 nt, Artificial Sequence
  HTT spacer sequence CTCN PAM
gaagggacauccugccagag

SEQ ID NO: 19923 - RNA, 20 nt, Artificial Sequence
  HTT spacer sequence CTCN PAM
aaauaccccucagaagggac

SEQ ID NO: 19924 - RNA, 20 nt, Artificial Sequence
  HTT spacer sequence CTCN PAM
cgguccccagggccuggggg

SEQ ID NO: 19925 - RNA, 20 nt, Artificial Sequence
  HTT spacer sequence CTCN PAM
agucuccagcaugaaugccc

SEQ ID NO: 19926 - RNA, 20 nt, Artificial Sequence
  HTT spacer sequence CTCN PAM
agcaugaaugcccuuccucg

SEQ ID NO: 19927 - RNA, 20 nt, Artificial Sequence
  HTT spacer sequence CTCN PAM
gacacaggccagggccucug

SEQ ID NO: 19928 - RNA, 20 nt, Artificial Sequence
  HTT spacer sequence CTCN PAM
gggguucacuccgaguaaga

SEQ ID NO: 19929 - RNA, 20 nt, Artificial Sequence
  HTT spacer sequence CTCN PAM
gaguaagaacguccuagagc

SEQ ID NO: 19930 - RNA, 20 nt, Artificial Sequence
  HTT spacer sequence CTCN PAM
gagugaaccccagaggcccu

SEQ ID NO: 19931 - RNA, 20 nt, Artificial Sequence
  HTT spacer sequence CTCN PAM
aggacguucuuacucggagu

SEQ ID NO: 19932 - RNA, 20 nt, Artificial Sequence
  HTT spacer sequence CTCN PAM
ccagugucguuacuaucaau

SEQ ID NO: 19933 - RNA, 20 nt, Artificial Sequence
  HTT spacer sequence CTCN PAM
agugucguuacuaucaauga

SEQ ID NO: 19934 - RNA, 20 nt, Artificial Sequence
  HTT spacer sequence CTCN PAM
ccaagccagcaacagcaaac

SEQ ID NO: 19935 - RNA, 20 nt, Artificial Sequence
  HTT spacer sequence CTCN PAM
agccugccccaacccguuuc

SEQ ID NO: 19936 - RNA, 20 nt, Artificial Sequence
  HTT spacer sequence CTCN PAM
cccagcuccagccugcccca

SEQ ID NO: 19937 - RNA, 20 nt, Artificial Sequence
  HTT spacer sequence CTCN PAM
cuccugaagggaacccugug

SEQ ID NO: 19938 - RNA, 20 nt, Artificial Sequence
  HTT spacer sequence CTCN PAM
ccugaagggaacccuguguc

SEQ ID NO: 19939 - RNA, 20 nt, Artificial Sequence
  HTT spacer sequence CTCN PAM
ugaagggaacccuguguccu

SEQ ID NO: 19940 - RNA, 20 nt, Artificial Sequence
  HTT spacer sequence CTCN PAM
cucaccaggaccucugcguc

SEQ ID NO: 19941 - RNA, 20 nt, Artificial Sequence
  HTT spacer sequence CTCN PAM
ccaggaccucugcgucucuc

SEQ ID NO: 19942 - RNA, 20 nt, Artificial Sequence
  HTT spacer sequence CTCN PAM
gcgucucuccuuaaauggcc

SEQ ID NO: 19943 - RNA, 20 nt, Artificial Sequence
  HTT spacer sequence CTCN PAM
ccuuaaauggccucugacgc

SEQ ID NO: 19944 - RNA, 20 nt, Artificial Sequence
  HTT spacer sequence CTCN PAM
uuaaauggccucugacgccu

SEQ ID NO: 19945 - RNA, 20 nt, Artificial Sequence
  HTT spacer sequence CTCN PAM
gacgccugaugaaaacccca

SEQ ID NO: 19946 - RNA, 20 nt, Artificial Sequence
  HTT spacer sequence CTCN PAM
uggaaggucgcugggguuuu

SEQ ID NO: 19947 - RNA, 20 nt, Artificial Sequence
  HTT spacer sequence CTCN PAM
guuuggagcaucagguguuu

SEQ ID NO: 19948 - RNA, 20 nt, Artificial Sequence
  HTT spacer sequence CTCN PAM
aaacagagcugaauaaaagc

SEQ ID NO: 19949 - RNA, 20 nt, Artificial Sequence
  HTT spacer sequence CTCN PAM
uuagcaaugacacuaauaaa

SEQ ID NO: 19950 - RNA, 20 nt, Artificial Sequence
  HTT spacer sequence CTCN PAM
acagggcugugcaugugaac

SEQ ID NO: 19951 - RNA, 20 nt, Artificial Sequence
  HTT spacer sequence CTCN PAM
agcacccagaacacucaaca

SEQ ID NO: 19952 - RNA, 20 nt, Artificial Sequence
  HTT spacer sequence CTCN PAM
uggagcuuaugcucccaugc

SEQ ID NO: 19953 - RNA, 20 nt, Artificial Sequence
  HTT spacer sequence CTCN PAM
aagaggccagggccuuugug

SEQ ID NO: 19954 - RNA, 20 nt, Artificial Sequence
  HTT spacer sequence CTCN PAM
caugcggggaagacacaugg

SEQ ID NO: 19955 - RNA, 20 nt, Artificial Sequence
  HTT spacer sequence CTCN PAM
acugacccaugugucuuccc

SEQ ID NO: 19956 - RNA, 20 nt, Artificial Sequence
  HTT spacer sequence CTCN PAM
cuuccagcacuuaucacaac

SEQ ID NO: 19957 - RNA, 20 nt, Artificial Sequence
  HTT spacer sequence CTCN PAM
ggccaaccccucccuuccag

SEQ ID NO: 19958 - RNA, 20 nt, Artificial Sequence
  HTT spacer sequence CTCN PAM
guguccucaggccaaccccu

SEQ ID NO: 19959 - RNA, 20 nt, Artificial Sequence
  HTT spacer sequence CTCN PAM
acguaugucugccuccgugu

SEQ ID NO: 19960 - RNA, 20 nt, Artificial Sequence
  HTT spacer sequence CTCN PAM
gggccuucgcacuggccguu

SEQ ID NO: 19961 - RNA, 20 nt, Artificial Sequence
  HTT spacer sequence CTCN PAM
gccucugggccuucgcacug

SEQ ID NO: 19962 - RNA, 20 nt, Artificial Sequence
  HTT spacer sequence CTCN PAM
aguguccucugccucugggc

SEQ ID NO: 19963 - RNA, 20 nt, Artificial Sequence
  HTT spacer sequence CTCN PAM
ugggcuugcuccaguguccu

SEQ ID NO: 19964 - RNA, 20 nt, Artificial Sequence
  HTT spacer sequence CTCN PAM
uagcugcuccugggcuugcu

SEQ ID NO: 19965 - RNA, 20 nt, Artificial Sequence
  HTT spacer sequence CTCN PAM
ccacgggcugcacgggcuuc

SEQ ID NO: 19966 - RNA, 20 nt, Artificial Sequence
  HTT spacer sequence CTCN PAM
uccccacgggcugcacgggc

SEQ ID NO: 19967 - RNA, 20 nt, Artificial Sequence
  HTT spacer sequence CTCN PAM
cacuaagcuugaaaagcaug

SEQ ID NO: 19968 - RNA, 20 nt, Artificial Sequence
  HTT spacer sequence CTCN PAM
gggucugacaucgguggggg

SEQ ID NO: 19969 - RNA, 20 nt, Artificial Sequence
  HTT spacer sequence CTCN PAM
gucccccaccgaugucagac

SEQ ID NO: 19970 - RNA, 20 nt, Artificial Sequence
  HTT spacer sequence CTCN PAM
accaccccucugucccccac

SEQ ID NO: 19971 - RNA, 20 nt, Artificial Sequence
  HTT spacer sequence CTCN PAM
ccucacugccggcccuucca

SEQ ID NO: 19972 - RNA, 20 nt, Artificial Sequence
  HTT spacer sequence CTCN PAM
cugccggcccuuccaccagu

SEQ ID NO: 19973 - RNA, 20 nt, Artificial Sequence
  HTT spacer sequence CTCN PAM
uucuagaagcuccagcuuuc

SEQ ID NO: 19974 - RNA, 20 nt, Artificial Sequence
  HTT spacer sequence CTCN PAM
agcuuucccaaagcugaauu

SEQ ID NO: 19975 - RNA, 20 nt, Artificial Sequence
  HTT spacer sequence CTCN PAM
augagccuccuuggccggga

SEQ ID NO: 19976 - RNA, 20 nt, Artificial Sequence
  HTT spacer sequence CTCN PAM
uagagaauucagcuuuggga

SEQ ID NO: 19977 - RNA, 20 nt, Artificial Sequence
  HTT spacer sequence CTCN PAM
uuggccgggacucgggcguc

SEQ ID NO: 19978 - RNA, 20 nt, Artificial Sequence
  HTT spacer sequence CTCN PAM
ggcgucugguugcccuggcu

SEQ ID NO: 19979 - RNA, 20 nt, Artificial Sequence
  HTT spacer sequence CTCN PAM
uuugcagccagggcaaccag

SEQ ID NO: 19980 - RNA, 20 nt, Artificial Sequence
  HTT spacer sequence CTCN PAM
aacacaccuggccccagccu

SEQ ID NO: 19981 - RNA, 20 nt, Artificial Sequence
  HTT spacer sequence CTCN PAM
uggaauuaggcaaguugcug

SEQ ID NO: 19982 - RNA, 20 nt, Artificial Sequence
  HTT spacer sequence CTCN PAM
ggguucagaaaaaucucccu

SEQ ID NO: 19983 - RNA, 20 nt, Artificial Sequence
  HTT spacer sequence CTCN PAM
cucuggcugccaagcgagca

SEQ ID NO: 19984 - RNA, 20 nt, Artificial Sequence
  HTT spacer sequence CTCN PAM
ggcugccaagcgagcaggcc

SEQ ID NO: 19985 - RNA, 20 nt, Artificial Sequence
  HTT spacer sequence CTCN PAM
cuuggcagccagagggagau

SEQ ID NO: 19986 - RNA, 20 nt, Artificial Sequence
  HTT spacer sequence CTCN PAM
acggccugcucgcuuggcag

SEQ ID NO: 19987 - RNA, 20 nt, Artificial Sequence
  HTT spacer sequence CTCN PAM
gcaccugucuccacggccug

SEQ ID NO: 19988 - RNA, 20 nt, Artificial Sequence
  HTT spacer sequence CTCN PAM
uccuacccucuagggggucu

SEQ ID NO: 19989 - RNA, 20 nt, Artificial Sequence
  HTT spacer sequence CTCN PAM
agggggucuugaggucagcc

SEQ ID NO: 19990 - RNA, 20 nt, Artificial Sequence
  HTT spacer sequence CTCN PAM
agacccccuagaggguagga

SEQ ID NO: 19991 - RNA, 20 nt, Artificial Sequence
  HTT spacer sequence CTCN PAM
ugccuggcugaccucaagac

SEQ ID NO: 19992 - RNA, 20 nt, Artificial Sequence
  HTT spacer sequence CTCN PAM
cuugccuggcugaccucaag

SEQ ID NO: 19993 - RNA, 20 nt, Artificial Sequence
  HTT spacer sequence CTCN PAM
acugggugugggaccagccu

SEQ ID NO: 19994 - RNA, 20 nt, Artificial Sequence
  HTT spacer sequence CTCN PAM
acaccaccaugguccacagg

SEQ ID NO: 19995 - RNA, 20 nt, Artificial Sequence
  HTT spacer sequence CTCN PAM
gccugccugugugaaggaga

SEQ ID NO: 19996 - RNA, 20 nt, Artificial Sequence
  HTT spacer sequence CTCN PAM
uucacacaggcaggccgagg

SEQ ID NO: 19997 - RNA, 20 nt, Artificial Sequence
  HTT spacer sequence CTCN PAM
ccuucacacaggcaggccga

SEQ ID NO: 19998 - RNA, 20 nt, Artificial Sequence
  HTT spacer sequence CTCN PAM
acagaacacgccggccucuc

SEQ ID NO: 19999 - RNA, 20 nt, Artificial Sequence
  HTT spacer sequence CTCN PAM
ccuuugggcuccacagaaca

SEQ ID NO: 20000 - RNA, 20 nt, Artificial Sequence
  HTT spacer sequence CTCN PAM
gaggguccuggagcucccac

SEQ ID NO: 20001 - RNA, 20 nt, Artificial Sequence
  HTT spacer sequence CTCN PAM
gagugaagugaauccugcuu

SEQ ID NO: 20002 - RNA, 20 nt, Artificial Sequence
  HTT spacer sequence CTCN PAM
aggacccucagagugaagug

SEQ ID NO: 20003 - RNA, 20 nt, Artificial Sequence
  HTT spacer sequence CTCN PAM
cacccuccucagccaucucc

SEQ ID NO: 20004 - RNA, 20 nt, Artificial Sequence
  HTT spacer sequence CTCN PAM
ucagccaucuccccagagcc

SEQ ID NO: 20005 - RNA, 20 nt, Artificial Sequence
  HTT spacer sequence CTCN PAM
gccaucuccccagagccugu

SEQ ID NO: 20006 - RNA, 20 nt, Artificial Sequence
  HTT spacer sequence CTCN PAM
ccagagccugugugccgagg

SEQ ID NO: 20007 - RNA, 20 nt, Artificial Sequence
  HTT spacer sequence CTCN PAM
ggggagauggcugaggaggg

SEQ ID NO: 20008 - RNA, 20 nt, Artificial Sequence
  HTT spacer sequence CTCN PAM
gcacacaggcucuggggaga

SEQ ID NO: 20009 - RNA, 20 nt, Artificial Sequence
  HTT spacer sequence CTCN PAM
gcccauguugcugugggaug

SEQ ID NO: 20010 - RNA, 20 nt, Artificial Sequence
  HTT spacer sequence CTCN PAM
ucccacagcaacaugggccg

SEQ ID NO: 20011 - RNA, 20 nt, Artificial Sequence
  HTT spacer sequence CTCN PAM
caucccacagcaacaugggc

SEQ ID NO: 20012 - RNA, 20 nt, Artificial Sequence
  HTT spacer sequence CTCN PAM
gccucucaucccacagcaac

SEQ ID NO: 20013 - RNA, 20 nt, Artificial Sequence
  HTT spacer sequence CTCN PAM
cgacacucugccucucaucc

SEQ ID NO: 20014 - RNA, 20 nt, Artificial Sequence
  HTT spacer sequence CTCN PAM
uuacacccucacgacacucu

SEQ ID NO: 20015 - RNA, 20 nt, Artificial Sequence
  HTT spacer sequence CTCN PAM
caccacugccgccgcuccuu

SEQ ID NO: 20016 - RNA, 20 nt, Artificial Sequence
  HTT spacer sequence CTCN PAM
ucccaccacugccgccgcuc

SEQ ID NO: 20017 - RNA, 20 nt, Artificial Sequence
  HTT spacer sequence CTCN PAM
cuccucccaccacugccgcc

SEQ ID NO: 20018 - RNA, 20 nt, Artificial Sequence
  HTT spacer sequence CTCN PAM
accacagggucagcggcguc

SEQ ID NO: 20019 - RNA, 20 nt, Artificial Sequence
  HTT spacer sequence CTCN PAM
ucucaaccacagggucagcg

SEQ ID NO: 20020 - RNA, 20 nt, Artificial Sequence
  HTT spacer sequence CTCN PAM
gugcaucucuucucaaccac

SEQ ID NO: 20021 - RNA, 20 nt, Artificial Sequence
  HTT spacer sequence CTCN PAM
ugcaagccaguguggcugcc

SEQ ID NO: 20022 - RNA, 20 nt, Artificial Sequence
  HTT spacer sequence CTCN PAM
gcaggugcuauggcagccac

SEQ ID NO: 20023 - RNA, 20 nt, Artificial Sequence
  HTT spacer sequence CTCN PAM
uggggccacccuuccuucug

SEQ ID NO: 20024 - RNA, 20 nt, Artificial Sequence
  HTT spacer sequence CTCN PAM
guccuccuggggccacccuu

SEQ ID NO: 20025 - RNA, 20 nt, Artificial Sequence
  HTT spacer sequence CTCN PAM
ggcccgcaucagaugugccc

SEQ ID NO: 20026 - RNA, 20 nt, Artificial Sequence
  HTT spacer sequence CTCN PAM
caaaacucaggcccgcauca

SEQ ID NO: 20027 - RNA, 20 nt, Artificial Sequence
  HTT spacer sequence CTCN PAM
agccaguuuccagcuccggg

SEQ ID NO: 20028 - RNA, 20 nt, Artificial Sequence
  HTT spacer sequence CTCN PAM
gggacccacccgccucguag

SEQ ID NO: 20029 - RNA, 20 nt, Artificial Sequence
  HTT spacer sequence CTCN PAM
uaggcaagacaccacccaag

SEQ ID NO: 20030 - RNA, 20 nt, Artificial Sequence
  HTT spacer sequence CTCN PAM
aacuggacaccugugccacc

SEQ ID NO: 20031 - RNA, 20 nt, Artificial Sequence
  HTT spacer sequence CTCN PAM
guggucagcagcugggggca

SEQ ID NO: 20032 - RNA, 20 nt, Artificial Sequence
  HTT spacer sequence CTCN PAM
cauggggccagugugggguu

SEQ ID NO: 20033 - RNA, 20 nt, Artificial Sequence
  HTT spacer sequence CTCN PAM
uaacagggagccagucacaa

SEQ ID NO: 20034 - RNA, 20 nt, Artificial Sequence
  HTT spacer sequence CTCN PAM
cuguuaggaggcuggggaac

SEQ ID NO: 20035 - RNA, 20 nt, Artificial Sequence
  HTT spacer sequence CTCN PAM
agagggaagggugcccgcgg

SEQ ID NO: 20036 - RNA, 20 nt, Artificial Sequence
  HTT spacer sequence CTCN PAM
agggcuugugacuggcuccc

SEQ ID NO: 20037 - RNA, 20 nt, Artificial Sequence
  HTT spacer sequence CTCN PAM
cgagggcuugugacuggcuc

SEQ ID NO: 20038 - RNA, 20 nt, Artificial Sequence
  HTT spacer sequence CTCN PAM
cacaagacauaacagaugga

SEQ ID NO: 20039 - RNA, 20 nt, Artificial Sequence
  HTT spacer sequence CTCN PAM
aucuguuaugucuuguggga

SEQ ID NO: 20040 - RNA, 20 nt, Artificial Sequence
  HTT spacer sequence CTCN PAM
acagcaguuucagggugaag

SEQ ID NO: 20041 - RNA, 20 nt, Artificial Sequence
  HTT spacer sequence CTCN PAM
cggugugcugucccggaugc

SEQ ID NO: 20042 - RNA, 20 nt, Artificial Sequence
  HTT spacer sequence CTCN PAM
cccucucuaaucagagucag

SEQ ID NO: 20043 - RNA, 20 nt, Artificial Sequence
  HTT spacer sequence CTCN PAM
cuaaucagagucagugauuc

SEQ ID NO: 20044 - RNA, 20 nt, Artificial Sequence
  HTT spacer sequence CTCN PAM
aaucagagucagugauucau

SEQ ID NO: 20045 - RNA, 20 nt, Artificial Sequence
  HTT spacer sequence CTCN PAM
gauuagagagggcgagaaga

SEQ ID NO: 20046 - RNA, 20 nt, Artificial Sequence
  HTT spacer sequence CTCN PAM
aaggugauggaagggcauga

SEQ ID NO: 20047 - RNA, 20 nt, Artificial Sequence
  HTT spacer sequence CTCN PAM
aggcuggagcagcaucgccu

SEQ ID NO: 20048 - RNA, 20 nt, Artificial Sequence
  HTT spacer sequence CTCN PAM
agccuggagaaggucgggca

SEQ ID NO: 20049 - RNA, 20 nt, Artificial Sequence
  HTT spacer sequence CTCN PAM
ugucagcagaacucagcugu

SEQ ID NO: 20050 - RNA, 20 nt, Artificial Sequence
  HTT spacer sequence CTCN PAM
gcuguagaauaucguggggu

SEQ ID NO: 20051 - RNA, 20 nt, Artificial Sequence
  HTT spacer sequence CTCN PAM
uuaauggaccaacaacuaag

SEQ ID NO: 20052 - RNA, 20 nt, Artificial Sequence
  HTT spacer sequence CTCN PAM
gccauugcuaaaauauuuga

SEQ ID NO: 20053 - RNA, 20 nt, Artificial Sequence
  HTT spacer sequence CTCN PAM
ugauucuaguuuucaauguu

SEQ ID NO: 20054 - RNA, 20 nt, Artificial Sequence
  HTT spacer sequence CTCN PAM
caaagugcugggauuacagg

SEQ ID NO: 20055 - RNA, 20 nt, Artificial Sequence
  HTT spacer sequence CTCN PAM
gccucccaaagugcugggau

SEQ ID NO: 20056 - RNA, 20 nt, Artificial Sequence
  HTT spacer sequence CTCN PAM
cgccucagccucccaaagug

SEQ ID NO: 20057 - RNA, 20 nt, Artificial Sequence
  HTT spacer sequence CTCN PAM
gaggucaggaguucaagacc

SEQ ID NO: 20058 - RNA, 20 nt, Artificial Sequence
  HTT spacer sequence CTCN PAM
gaggauccucccgccucagc

SEQ ID NO: 20059 - RNA, 20 nt, Artificial Sequence
  HTT spacer sequence CTCN PAM
ugaccucagaggauccuccc

SEQ ID NO: 20060 - RNA, 20 nt, Artificial Sequence
  HTT spacer sequence CTCN PAM
auguuggucaggcuggucuu

SEQ ID NO: 20061 - RNA, 20 nt, Artificial Sequence
  HTT spacer sequence CTCN PAM
ucauuacuaaaaauacaaaa

SEQ ID NO: 20062 - RNA, 20 nt, Artificial Sequence
  HTT spacer sequence CTCN PAM
caaguagcugggauuacagg

SEQ ID NO: 20063 - RNA, 20 nt, Artificial Sequence
  HTT spacer sequence CTCN PAM
gccucccaaguagcugggau

SEQ ID NO: 20064 - RNA, 20 nt, Artificial Sequence
  HTT spacer sequence CTCN PAM
ugccucagccucccaaguag

SEQ ID NO: 20065 - RNA, 20 nt, Artificial Sequence
  HTT spacer sequence CTCN PAM
cggguucaagcgauucuccu

SEQ ID NO: 20066 - RNA, 20 nt, Artificial Sequence
  HTT spacer sequence CTCN PAM
gccucccggguucaagcgau

SEQ ID NO: 20067 - RNA, 20 nt, Artificial Sequence
  HTT spacer sequence CTCN PAM
cugcaaccuccgccucccgg

SEQ ID NO: 20068 - RNA, 20 nt, Artificial Sequence
  HTT spacer sequence CTCN PAM
gcucacugcaaccuccgccu

SEQ ID NO: 20069 - RNA, 20 nt, Artificial Sequence
  HTT spacer sequence CTCN PAM
agccugggugacagugaaac

SEQ ID NO: 20070 - RNA, 20 nt, Artificial Sequence
  HTT spacer sequence CTCN PAM
gucucaaaaaaaaaaaaaaa

SEQ ID NO: 20071 - RNA, 20 nt, Artificial Sequence
  HTT spacer sequence CTCN PAM
aaaaaaaaaaaaaauuaaaa

SEQ ID NO: 20072 - RNA, 20 nt, Artificial Sequence
  HTT spacer sequence CTCN PAM
acuuucuucauuucuuaucc

SEQ ID NO: 20073 - RNA, 20 nt, Artificial Sequence
  HTT spacer sequence CTCN PAM
cagucuuuuguacauuuggc

SEQ ID NO: 20074 - RNA, 20 nt, Artificial Sequence
  HTT spacer sequence CTCN PAM
uuaaaccagcuuaaacuugu

SEQ ID NO: 20075 - RNA, 20 nt, Artificial Sequence
  HTT spacer sequence CTCN PAM
uuuucaacaaguuuaagcug

SEQ ID NO: 20076 - RNA, 20 nt, Artificial Sequence
  HTT spacer sequence CTCN PAM
gaaugggauauuucuucauc

SEQ ID NO: 20077 - RNA, 20 nt, Artificial Sequence
  HTT spacer sequence CTCN PAM
acugaagagaacuaugcagu

SEQ ID NO: 20078 - RNA, 20 nt, Artificial Sequence
  HTT spacer sequence CTCN PAM
ucaguagagguccuguuccu

SEQ ID NO: 20079 - RNA, 20 nt, Artificial Sequence
  HTT spacer sequence CTCN PAM
gguauuauuuagauuuuuca

SEQ ID NO: 20080 - RNA, 20 nt, Artificial Sequence
  HTT spacer sequence CTCN PAM
agcgcucagguauuauuuag

SEQ ID NO: 20081 - RNA, 20 nt, Artificial Sequence
  HTT spacer sequence CTCN PAM
ugaaagcuccaaagucaaug

SEQ ID NO: 20082 - RNA, 20 nt, Artificial Sequence
  HTT spacer sequence CTCN PAM
aaagucaaugucaucauuuu

SEQ ID NO: 20083 - RNA, 20 nt, Artificial Sequence
  HTT spacer sequence CTCN PAM
auaauaucacuucuugguuu

SEQ ID NO: 20084 - RNA, 20 nt, Artificial Sequence
  HTT spacer sequence CTCN PAM
cgcugacuggccuuggacuu

SEQ ID NO: 20085 - RNA, 20 nt, Artificial Sequence
  HTT spacer sequence CTCN PAM
gccucccucggagucgggga

SEQ ID NO: 20086 - RNA, 20 nt, Artificial Sequence
  HTT spacer sequence CTCN PAM
cucggagucggggaguugga

SEQ ID NO: 20087 - RNA, 20 nt, Artificial Sequence
  HTT spacer sequence CTCN PAM
gagucggggaguuggaaccg

SEQ ID NO: 20088 - RNA, 20 nt, Artificial Sequence
  HTT spacer sequence CTCN PAM
gagggaggccgagcggucuu

SEQ ID NO: 20089 - RNA, 20 nt, Artificial Sequence
  HTT spacer sequence CTCN PAM
ccgacuccgagggaggccga

SEQ ID NO: 20090 - RNA, 20 nt, Artificial Sequence
  HTT spacer sequence CTCN PAM
gucugcgguuccaacucccc

SEQ ID NO: 20091 - RNA, 20 nt, Artificial Sequence
  HTT spacer sequence CTCN PAM
agcagccacaugaucucagu

SEQ ID NO: 20092 - RNA, 20 nt, Artificial Sequence
  HTT spacer sequence CTCN PAM
auuucccgacguucguccug

SEQ ID NO: 20093 - RNA, 20 nt, Artificial Sequence
  HTT spacer sequence CTCN PAM
ugcguugcuggugggaugug

SEQ ID NO: 20094 - RNA, 20 nt, Artificial Sequence
  HTT spacer sequence CTCN PAM
uggaagcggcugcaccacau

SEQ ID NO: 20095 - RNA, 20 nt, Artificial Sequence
  HTT spacer sequence CTCN PAM
ggucagugccacuccuagac

SEQ ID NO: 20096 - RNA, 20 nt, Artificial Sequence
  HTT spacer sequence CTCN PAM
uagacaggccacccugcggc

SEQ ID NO: 20097 - RNA, 20 nt, Artificial Sequence
  HTT spacer sequence CTCN PAM
aacuggucugaggaccccuc

SEQ ID NO: 20098 - RNA, 20 nt, Artificial Sequence
  HTT spacer sequence CTCN PAM
gaccaguuugaggacggcug

SEQ ID NO: 20099 - RNA, 20 nt, Artificial Sequence
  HTT spacer sequence CTCN PAM
acgcucuuaaaaaucauuaa

SEQ ID NO: 20100 - RNA, 20 nt, Artificial Sequence
  HTT spacer sequence CTCN PAM
uaaaaaucauuaaaaguggg

SEQ ID NO: 20101 - RNA, 20 nt, Artificial Sequence
  HTT spacer sequence CTCN PAM
caccuguaaucccagcacuu

SEQ ID NO: 20102 - RNA, 20 nt, Artificial Sequence
  HTT spacer sequence CTCN PAM
caaagugcugggauuacagg

SEQ ID NO: 20103 - RNA, 20 nt, Artificial Sequence
  HTT spacer sequence CTCN PAM
ugauccgccugucuuggccu

SEQ ID NO: 20104 - RNA, 20 nt, Artificial Sequence
  HTT spacer sequence CTCN PAM
auguccugaccucgugaucc

SEQ ID NO: 20105 - RNA, 20 nt, Artificial Sequence
  HTT spacer sequence CTCN PAM
acuaaaaauacaaaaaauua

SEQ ID NO: 20106 - RNA, 20 nt, Artificial Sequence
  HTT spacer sequence CTCN PAM
caaguagcugggacuacagg

SEQ ID NO: 20107 - RNA, 20 nt, Artificial Sequence
  HTT spacer sequence CTCN PAM
gccucccaaguagcugggac

SEQ ID NO: 20108 - RNA, 20 nt, Artificial Sequence
  HTT spacer sequence CTCN PAM
uggcucagccucccaaguag

SEQ ID NO: 20109 - RNA, 20 nt, Artificial Sequence
  HTT spacer sequence CTCN PAM
uggguucacgccauucuccu

SEQ ID NO: 20110 - RNA, 20 nt, Artificial Sequence
  HTT spacer sequence CTCN PAM
accuccuggguucacgccau

SEQ ID NO: 20111 - RNA, 20 nt, Artificial Sequence
  HTT spacer sequence CTCN PAM
cugcaagcuccaccuccugg

SEQ ID NO: 20112 - RNA, 20 nt, Artificial Sequence
  HTT spacer sequence CTCN PAM
gcucacugcaagcuccaccu

SEQ ID NO: 20113 - RNA, 20 nt, Artificial Sequence
  HTT spacer sequence CTCN PAM
acugcacuccagccugggca

SEQ ID NO: 20114 - RNA, 20 nt, Artificial Sequence
  HTT spacer sequence CTCN PAM
agccugggcagcagagcgag

SEQ ID NO: 20115 - RNA, 20 nt, Artificial Sequence
  HTT spacer sequence CTCN PAM
gcugcccaggcuggagugca

SEQ ID NO: 20116 - RNA, 20 nt, Artificial Sequence
  HTT spacer sequence CTCN PAM
cucugcugcccaggcuggag

SEQ ID NO: 20117 - RNA, 20 nt, Artificial Sequence
  HTT spacer sequence CTCN PAM
gucucaaaaaaaaauaauaa

SEQ ID NO: 20118 - RNA, 20 nt, Artificial Sequence
  HTT spacer sequence CTCN PAM
aaaaaaaauaauaaauaaau

SEQ ID NO: 20119 - RNA, 20 nt, Artificial Sequence
  HTT spacer sequence CTCN PAM
cauaagcaaaaguucuuugg

SEQ ID NO: 20120 - RNA, 20 nt, Artificial Sequence
  HTT spacer sequence CTCN PAM
gguuuaauuucuaauaagau

SEQ ID NO: 20121 - RNA, 20 nt, Artificial Sequence
  HTT spacer sequence CTCN PAM
cgaaaacuuuuuguuuugga

SEQ ID NO: 20122 - RNA, 20 nt, Artificial Sequence
  HTT spacer sequence CTCN PAM
ggcuuaagagaagcccacug

SEQ ID NO: 20123 - RNA, 20 nt, Artificial Sequence
  HTT spacer sequence CTCN PAM
uaagccagagauuuacgacc

SEQ ID NO: 20124 - RNA, 20 nt, Artificial Sequence
  HTT spacer sequence CTCN PAM
cagcaggcucuggguccguc

SEQ ID NO: 20125 - RNA, 20 nt, Artificial Sequence
  HTT spacer sequence CTCN PAM
gcaggcucuggguccgucca

SEQ ID NO: 20126 - RNA, 20 nt, Artificial Sequence
  HTT spacer sequence CTCN PAM
ggguccguccacuuuggggg

SEQ ID NO: 20127 - RNA, 20 nt, Artificial Sequence
  HTT spacer sequence CTCN PAM
uauacuucacaaccaaaaca

SEQ ID NO: 20128 - RNA, 20 nt, Artificial Sequence
  HTT spacer sequence CTCN PAM
auucacuccuauacuucaca

SEQ ID NO: 20129 - RNA, 20 nt, Artificial Sequence
  HTT spacer sequence CTCN PAM
uucuuacccagauguguauu

SEQ ID NO: 20130 - RNA, 20 nt, Artificial Sequence
  HTT spacer sequence CTCN PAM
aaaaaaaaaaaacaaaccac

SEQ ID NO: 20131 - RNA, 20 nt, Artificial Sequence
  HTT spacer sequence CTCN PAM
gucuccaaaaaaaaaaaaca

SEQ ID NO: 20132 - RNA, 20 nt, Artificial Sequence
  HTT spacer sequence CTCN PAM
gucacucaggcuggagugca

SEQ ID NO: 20133 - RNA, 20 nt, Artificial Sequence
  HTT spacer sequence CTCN PAM
ggcuggagugcaguggcgcg

SEQ ID NO: 20134 - RNA, 20 nt, Artificial Sequence
  HTT spacer sequence CTCN PAM
agccugagugacagagcggg

SEQ ID NO: 20135 - RNA, 20 nt, Artificial Sequence
  HTT spacer sequence CTCN PAM
cugcaagcuccgccuccugg

SEQ ID NO: 20136 - RNA, 20 nt, Artificial Sequence
  HTT spacer sequence CTCN PAM
gccuccuggguucacugcaa

SEQ ID NO: 20137 - RNA, 20 nt, Artificial Sequence
  HTT spacer sequence CTCN PAM
uggguucacugcaagcucug

SEQ ID NO: 20138 - RNA, 20 nt, Artificial Sequence
  HTT spacer sequence CTCN PAM
gccucccggguucacgccau

SEQ ID NO: 20139 - RNA, 20 nt, Artificial Sequence
  HTT spacer sequence CTCN PAM
cggguucacgccauucuccu

SEQ ID NO: 20140 - RNA, 20 nt, Artificial Sequence
  HTT spacer sequence CTCN PAM
ugccucagccuccugaguag

SEQ ID NO: 20141 - RNA, 20 nt, Artificial Sequence
  HTT spacer sequence CTCN PAM
gccuccugaguagcugggac

SEQ ID NO: 20142 - RNA, 20 nt, Artificial Sequence
  HTT spacer sequence CTCN PAM
ugaguagcugggacuacagg

SEQ ID NO: 20143 - RNA, 20 nt, Artificial Sequence
  HTT spacer sequence CTCN PAM
ggaggcugaggcaggagaau

SEQ ID NO: 20144 - RNA, 20 nt, Artificial Sequence
  HTT spacer sequence CTCN PAM
acuaaaaauacaaaaaauua

SEQ ID NO: 20145 - RNA, 20 nt, Artificial Sequence
  HTT spacer sequence CTCN PAM
aucuccugacaucgugaucc

SEQ ID NO: 20146 - RNA, 20 nt, Artificial Sequence
  HTT spacer sequence CTCN PAM
ugacaucgugauccacccgc

SEQ ID NO: 20147 - RNA, 20 nt, Artificial Sequence
  HTT spacer sequence CTCN PAM
gccucccaaagugcuggaau

SEQ ID NO: 20148 - RNA, 20 nt, Artificial Sequence
  HTT spacer sequence CTCN PAM
caaagugcuggaauuacagg

SEQ ID NO: 20149 - RNA, 20 nt, Artificial Sequence
  HTT spacer sequence CTCN PAM
ugaaaugaaguagaaguuca

SEQ ID NO: 20150 - RNA, 20 nt, Artificial Sequence
  HTT spacer sequence CTCN PAM
guccaucaugccuuugugac

SEQ ID NO: 20151 - RNA, 20 nt, Artificial Sequence
  HTT spacer sequence CTCN PAM
cacgcugggccuuugguuca

SEQ ID NO: 20152 - RNA, 20 nt, Artificial Sequence
  HTT spacer sequence CTCN PAM
ugguggugucuuucagaauu

SEQ ID NO: 20153 - RNA, 20 nt, Artificial Sequence
  HTT spacer sequence CTCN PAM
uucaaagaaaauagcugaca

SEQ ID NO: 20154 - RNA, 20 nt, Artificial Sequence
  HTT spacer sequence CTCN PAM
cuuuguucguuuuccaaaaa

SEQ ID NO: 20155 - RNA, 20 nt, Artificial Sequence
  HTT spacer sequence CTCN PAM
gguuguucagccuugggugu

SEQ ID NO: 20156 - RNA, 20 nt, Artificial Sequence
  HTT spacer sequence CTCN PAM
aaaaaaggaugugcaaaaac

SEQ ID NO: 20157 - RNA, 20 nt, Artificial Sequence
  HTT spacer sequence CTCN PAM
auacguguguuccagaucca

SEQ ID NO: 20158 - RNA, 20 nt, Artificial Sequence
  HTT spacer sequence CTCN PAM
gcccauugcacaccugcauu

SEQ ID NO: 20159 - RNA, 20 nt, Artificial Sequence
  HTT spacer sequence CTCN PAM
gcguggacguggggcaggcg

SEQ ID NO: 20160 - RNA, 20 nt, Artificial Sequence
  HTT spacer sequence CTCN PAM
ggcaggacguugaaaagaug

SEQ ID NO: 20161 - RNA, 20 nt, Artificial Sequence
  HTT spacer sequence CTCN PAM
cacacucgaccauuuucacu

SEQ ID NO: 20162 - RNA, 20 nt, Artificial Sequence
  HTT spacer sequence CTCN PAM
accauuuucacuccaucacg

SEQ ID NO: 20163 - RNA, 20 nt, Artificial Sequence
  HTT spacer sequence CTCN PAM
aucacggacauuuggaagug

SEQ ID NO: 20164 - RNA, 20 nt, Artificial Sequence
  HTT spacer sequence CTCN PAM
gggcugcgccggggcucggg

SEQ ID NO: 20165 - RNA, 20 nt, Artificial Sequence
  HTT spacer sequence CTCN PAM
gggccugccugcguuccugc

SEQ ID NO: 20166 - RNA, 20 nt, Artificial Sequence
  HTT spacer sequence CTCN PAM
ggucuugccacaucagugcg

SEQ ID NO: 20167 - RNA, 20 nt, Artificial Sequence
  HTT spacer sequence CTCN PAM
gugaagaccccgugaagacc

SEQ ID NO: 20168 - RNA, 20 nt, Artificial Sequence
  HTT spacer sequence CTCN PAM
gggacccuuggugacccaca

SEQ ID NO: 20169 - RNA, 20 nt, Artificial Sequence
  HTT spacer sequence CTCN PAM
gccugugggucaccaagggu

SEQ ID NO: 20170 - RNA, 20 nt, Artificial Sequence
  HTT spacer sequence CTCN PAM
ggucucggccugugggucac

SEQ ID NO: 20171 - RNA, 20 nt, Artificial Sequence
  HTT spacer sequence CTCN PAM
agcauucaggcagugguucu

SEQ ID NO: 20172 - RNA, 20 nt, Artificial Sequence
  HTT spacer sequence CTCN PAM
ggucaccugugugcccgcuc

SEQ ID NO: 20173 - RNA, 20 nt, Artificial Sequence
  HTT spacer sequence CTCN PAM
cucaggucaccugugugccc

SEQ ID NO: 20174 - RNA, 20 nt, Artificial Sequence
  HTT spacer sequence CTCN PAM
ucuguccuugcccgguaccc

SEQ ID NO: 20175 - RNA, 20 nt, Artificial Sequence
  HTT spacer sequence CTCN PAM
ggguaccgggcaaggacaga

SEQ ID NO: 20176 - RNA, 20 nt, Artificial Sequence
  HTT spacer sequence CTCN PAM
cuggcgauugguggacgcac

SEQ ID NO: 20177 - RNA, 20 nt, Artificial Sequence
  HTT spacer sequence CTCN PAM
gugugacuggguggcgucau

SEQ ID NO: 20178 - RNA, 20 nt, Artificial Sequence
  HTT spacer sequence CTCN PAM
gggcccgcuugggggcacgg

SEQ ID NO: 20179 - RNA, 20 nt, Artificial Sequence
  HTT spacer sequence CTCN PAM
cugcugucuuguaggcacug

SEQ ID NO: 20180 - RNA, 20 nt, Artificial Sequence
  HTT spacer sequence CTCN PAM
aaacccuguaaagacaaaga

SEQ ID NO: 20181 - RNA, 20 nt, Artificial Sequence
  HTT spacer sequence CTCN PAM
acucgaaacccuguaaagac

SEQ ID NO: 20182 - RNA, 20 nt, Artificial Sequence
  HTT spacer sequence CTCN PAM
ucuaacauacuagacacuua

SEQ ID NO: 20183 - RNA, 20 nt, Artificial Sequence
  HTT spacer sequence CTCN PAM
cuucuaacauacuagacacu

SEQ ID NO: 20184 - RNA, 20 nt, Artificial Sequence
  HTT spacer sequence CTCN PAM
aaucccccuacagccuuauu

SEQ ID NO: 20185 - RNA, 20 nt, Artificial Sequence
  HTT spacer sequence CTCN PAM
ccccacggcuccaauccccc

SEQ ID NO: 20186 - RNA, 20 nt, Artificial Sequence
  HTT spacer sequence CTCN PAM
caccccacggcuccaauccc

SEQ ID NO: 20187 - RNA, 20 nt, Artificial Sequence
  HTT spacer sequence CTCN PAM
caugacauuuuuugaaggcc

SEQ ID NO: 20188 - RNA, 20 nt, Artificial Sequence
  HTT spacer sequence CTCN PAM
auccgcucacaugacauuuu

SEQ ID NO: 20189 - RNA, 20 nt, Artificial Sequence
  HTT spacer sequence CTCN PAM
cacuccauccgcucacauga

SEQ ID NO: 20190 - RNA, 20 nt, Artificial Sequence
  HTT spacer sequence CTCN PAM
ccugagcacugggagcugca

SEQ ID NO: 20191 - RNA, 20 nt, Artificial Sequence
  HTT spacer sequence CTCN PAM
ggugagggcgccccucccac

SEQ ID NO: 20192 - RNA, 20 nt, Artificial Sequence
  HTT spacer sequence CTCN PAM
cagugcucaggugagggcgc

SEQ ID NO: 20193 - RNA, 20 nt, Artificial Sequence
  HTT spacer sequence CTCN PAM
caccuagacagugcagcucc

SEQ ID NO: 20194 - RNA, 20 nt, Artificial Sequence
  HTT spacer sequence CTCN PAM
gagggcgaggugggccugga

SEQ ID NO: 20195 - RNA, 20 nt, Artificial Sequence
  HTT spacer sequence CTCN PAM
gagccagcucccaccuagac

SEQ ID NO: 20196 - RNA, 20 nt, Artificial Sequence
  HTT spacer sequence CTCN PAM
cccucagagccagcucccac

SEQ ID NO: 20197 - RNA, 20 nt, Artificial Sequence
  HTT spacer sequence CTCN PAM
ugucccagcagaaagcaggg

SEQ ID NO: 20198 - RNA, 20 nt, Artificial Sequence
  HTT spacer sequence CTCN PAM
cuugucccagcagaaagcag

SEQ ID NO: 20199 - RNA, 20 nt, Artificial Sequence
  HTT spacer sequence CTCN PAM
gggacucucuugucccagca

SEQ ID NO: 20200 - RNA, 20 nt, Artificial Sequence
  HTT spacer sequence CTCN PAM
cugcuccgggacucucuugu

SEQ ID NO: 20201 - RNA, 20 nt, Artificial Sequence
  HTT spacer sequence CTCN PAM
acgccacaccugacccuccc

SEQ ID NO: 20202 - RNA, 20 nt, Artificial Sequence
  HTT spacer sequence CTCN PAM
caggcuccacgccacaccug

SEQ ID NO: 20203 - RNA, 20 nt, Artificial Sequence
  HTT spacer sequence CTCN PAM
cccaccucccaggcuccacg

SEQ ID NO: 20204 - RNA, 20 nt, Artificial Sequence
  HTT spacer sequence CTCN PAM
ggaggcauccuggccuaggg

SEQ ID NO: 20205 - RNA, 20 nt, Artificial Sequence
  HTT spacer sequence CTCN PAM
ugagcaccccucacccaccu

SEQ ID NO: 20206 - RNA, 20 nt, Artificial Sequence
  HTT spacer sequence CTCN PAM
ccuaggccaggaugccuccu

SEQ ID NO: 20207 - RNA, 20 nt, Artificial Sequence
  HTT spacer sequence CTCN PAM
gugugcuggcuuugcgcucg

SEQ ID NO: 20208 - RNA, 20 nt, Artificial Sequence
  HTT spacer sequence CTCN PAM
uggccaucuccaggacucag

SEQ ID NO: 20209 - RNA, 20 nt, Artificial Sequence
  HTT spacer sequence CTCN PAM
aggacucagaacaugcgaga

SEQ ID NO: 20210 - RNA, 20 nt, Artificial Sequence
  HTT spacer sequence CTCN PAM
gaacaugcgagaggcacgca

SEQ ID NO: 20211 - RNA, 20 nt, Artificial Sequence
  HTT spacer sequence CTCN PAM
cauguucugaguccuggaga

SEQ ID NO: 20212 - RNA, 20 nt, Artificial Sequence
  HTT spacer sequence CTCN PAM
cgcauguucugaguccugga

SEQ ID NO: 20213 - RNA, 20 nt, Artificial Sequence
  HTT spacer sequence CTCN PAM
accuugcgugccucucgcau

SEQ ID NO: 20214 - RNA, 20 nt, Artificial Sequence
  HTT spacer sequence CTCN PAM
cacacgcuccaccuugcgug

SEQ ID NO: 20215 - RNA, 20 nt, Artificial Sequence
  HTT spacer sequence CTCN PAM
gcuggguccggagggagagg

SEQ ID NO: 20216 - RNA, 20 nt, Artificial Sequence
  HTT spacer sequence CTCN PAM
ggacccagcugagaugaacu

SEQ ID NO: 20217 - RNA, 20 nt, Artificial Sequence
  HTT spacer sequence CTCN PAM
cuccggacccagcugagaug

SEQ ID NO: 20218 - RNA, 20 nt, Artificial Sequence
  HTT spacer sequence CTCN PAM
cccuccggacccagcugaga

SEQ ID NO: 20219 - RNA, 20 nt, Artificial Sequence
  HTT spacer sequence CTCN PAM
uguucuagggguagggugcc

SEQ ID NO: 20220 - RNA, 20 nt, Artificial Sequence
  HTT spacer sequence CTCN PAM
cagaugugucaguucuuggc

SEQ ID NO: 20221 - RNA, 20 nt, Artificial Sequence
  HTT spacer sequence CTCN PAM
ccucagcucagggaaguggg

SEQ ID NO: 20222 - RNA, 20 nt, Artificial Sequence
  HTT spacer sequence CTCN PAM
gcucagggaagugggacccc

SEQ ID NO: 20223 - RNA, 20 nt, Artificial Sequence
  HTT spacer sequence CTCN PAM
gggaagugggaccccugcac

SEQ ID NO: 20224 - RNA, 20 nt, Artificial Sequence
  HTT spacer sequence CTCN PAM
guuuaucuccgccuugcugg

SEQ ID NO: 20225 - RNA, 20 nt, Artificial Sequence
  HTT spacer sequence CTCN PAM
gccuugcugggcacuagcuc

SEQ ID NO: 20226 - RNA, 20 nt, Artificial Sequence
  HTT spacer sequence CTCN PAM
gcuucacugcuuuccgucaa

SEQ ID NO: 20227 - RNA, 20 nt, Artificial Sequence
  HTT spacer sequence CTCN PAM
ccugcucugcaccaccaugu

SEQ ID NO: 20228 - RNA, 20 nt, Artificial Sequence
  HTT spacer sequence CTCN PAM
ugcucugcaccaccaugucc

SEQ ID NO: 20229 - RNA, 20 nt, Artificial Sequence
  HTT spacer sequence CTCN PAM
gcaccaccauguccagaccu

SEQ ID NO: 20230 - RNA, 20 nt, Artificial Sequence
  HTT spacer sequence CTCN PAM
aggucuggacaugguggugc

SEQ ID NO: 20231 - RNA, 20 nt, Artificial Sequence
  HTT spacer sequence CTCN PAM
ucccccacaaaugucauauu

SEQ ID NO: 20232 - RNA, 20 nt, Artificial Sequence
  HTT spacer sequence CTCN PAM
aggggguaaauaugacauuu

SEQ ID NO: 20233 - RNA, 20 nt, Artificial Sequence
  HTT spacer sequence CTCN PAM
agguccucuaggggguaaau

SEQ ID NO: 20234 - RNA, 20 nt, Artificial Sequence
  HTT spacer sequence CTCN PAM
uguccucuagguccucuagg

SEQ ID NO: 20235 - RNA, 20 nt, Artificial Sequence
  HTT spacer sequence CTCN PAM
cuccuguccucuagguccuc

SEQ ID NO: 20236 - RNA, 20 nt, Artificial Sequence
  HTT spacer sequence CTCN PAM
ggucugcccuccccguuggg

SEQ ID NO: 20237 - RNA, 20 nt, Artificial Sequence
  HTT spacer sequence CTCN PAM
ccguuggggccaagugcccg

SEQ ID NO: 20238 - RNA, 20 nt, Artificial Sequence
  HTT spacer sequence CTCN PAM
cuaagaaaggcugugacguu

SEQ ID NO: 20239 - RNA, 20 nt, Artificial Sequence
  HTT spacer sequence CTCN PAM
agccccaaaggcguucccca

SEQ ID NO: 20240 - RNA, 20 nt, Artificial Sequence
  HTT spacer sequence CTCN PAM
uuuggauguuuucccugauc

SEQ ID NO: 20241 - RNA, 20 nt, Artificial Sequence
  HTT spacer sequence CTCN PAM
gcuguagccugugggcuacc

SEQ ID NO: 20242 - RNA, 20 nt, Artificial Sequence
  HTT spacer sequence CTCN PAM
cccugggcacacccucagcu

SEQ ID NO: 20243 - RNA, 20 nt, Artificial Sequence
  HTT spacer sequence CTCN PAM
cgcccugggcacacccucag

SEQ ID NO: 20244 - RNA, 20 nt, Artificial Sequence
  HTT spacer sequence CTCN PAM
gcggggcucugggcugcccu

SEQ ID NO: 20245 - RNA, 20 nt, Artificial Sequence
  HTT spacer sequence CTCN PAM
gggcugcccuugcggcguga

SEQ ID NO: 20246 - RNA, 20 nt, Artificial Sequence
  HTT spacer sequence CTCN PAM
cgccgcaagggcagcccaga

SEQ ID NO: 20247 - RNA, 20 nt, Artificial Sequence
  HTT spacer sequence CTCN PAM
ugcugccgggcgugcugggc

SEQ ID NO: 20248 - RNA, 20 nt, Artificial Sequence
  HTT spacer sequence CTCN PAM
gcccagcacgcccggcagca

SEQ ID NO: 20249 - RNA, 20 nt, Artificial Sequence
  HTT spacer sequence CTCN PAM
uccuaggaggucacggagga

SEQ ID NO: 20250 - RNA, 20 nt, Artificial Sequence
  HTT spacer sequence CTCN PAM
uaggaagagcuguccaagac

SEQ ID NO: 20251 - RNA, 20 nt, Artificial Sequence
  HTT spacer sequence CTCN PAM
gugaccuccuaggaagagcu

SEQ ID NO: 20252 - RNA, 20 nt, Artificial Sequence
  HTT spacer sequence CTCN PAM
uuuggaaacgguuuuuaggg

SEQ ID NO: 20253 - RNA, 20 nt, Artificial Sequence
  HTT spacer sequence CTCN PAM
cagccugaguccgaucucac

SEQ ID NO: 20254 - RNA, 20 nt, Artificial Sequence
  HTT spacer sequence CTCN PAM
gccugaguccgaucucacag

SEQ ID NO: 20255 - RNA, 20 nt, Artificial Sequence
  HTT spacer sequence CTCN PAM
ggcugagaggugcacacccu

SEQ ID NO: 20256 - RNA, 20 nt, Artificial Sequence
  HTT spacer sequence CTCN PAM
cagagacugugugagcugcu

SEQ ID NO: 20257 - RNA, 20 nt, Artificial Sequence
  HTT spacer sequence CTCN PAM
gugagaucggacucaggcug

SEQ ID NO: 20258 - RNA, 20 nt, Artificial Sequence
  HTT spacer sequence CTCN PAM
cacagucucugugagaucgg

SEQ ID NO: 20259 - RNA, 20 nt, Artificial Sequence
  HTT spacer sequence CTCN PAM
cccucgugacccccuucagc

SEQ ID NO: 20260 - RNA, 20 nt, Artificial Sequence
  HTT spacer sequence CTCN PAM
ugacccccuucagcucaugc

SEQ ID NO: 20261 - RNA, 20 nt, Artificial Sequence
  HTT spacer sequence CTCN PAM
ugccagccugccugaucugc

SEQ ID NO: 20262 - RNA, 20 nt, Artificial Sequence
  HTT spacer sequence CTCN PAM
cacaaguaccugcugcucug

SEQ ID NO: 20263 - RNA, 20 nt, Artificial Sequence
  HTT spacer sequence CTCN PAM
gaaccuugccauuuucggca

SEQ ID NO: 20264 - RNA, 20 nt, Artificial Sequence
  HTT spacer sequence CTCN PAM
uccucuugaacgggagaauc

SEQ ID NO: 20265 - RNA, 20 nt, Artificial Sequence
  HTT spacer sequence CTCN PAM
ucuugaacgggagaaucgga

SEQ ID NO: 20266 - RNA, 20 nt, Artificial Sequence
  HTT spacer sequence CTCN PAM
ugaacgggagaaucggauuc

SEQ ID NO: 20267 - RNA, 20 nt, Artificial Sequence
  HTT spacer sequence CTCN PAM
cguucaagaggaggagggca

SEQ ID NO: 20268 - RNA, 20 nt, Artificial Sequence
  HTT spacer sequence CTCN PAM
acacacuggaauccgauucu

SEQ ID NO: 20269 - RNA, 20 nt, Artificial Sequence
  HTT spacer sequence CTCN PAM
ugggucccuuacugauggag

SEQ ID NO: 20270 - RNA, 20 nt, Artificial Sequence
  HTT spacer sequence CTCN PAM
aucaguaagggacccacgag

SEQ ID NO: 20271 - RNA, 20 nt, Artificial Sequence
  HTT spacer sequence CTCN PAM
ccaucaguaagggacccacg

SEQ ID NO: 20272 - RNA, 20 nt, Artificial Sequence
  HTT spacer sequence CTCN PAM
gcaauaaaccguggugcagc

SEQ ID NO: 20273 - RNA, 20 nt, Artificial Sequence
  HTT spacer sequence CTCN PAM
cuguguacuuguguacacua

SEQ ID NO: 20274 - RNA, 20 nt, Artificial Sequence
  HTT spacer sequence CTCN PAM
guguacuuguguacacuagu

SEQ ID NO: 20275 - RNA, 20 nt, Artificial Sequence
  HTT spacer sequence CTCN PAM
cuaguguacacaaguacaca

SEQ ID NO: 20276 - RNA, 20 nt, Artificial Sequence
  HTT spacer sequence CTCN PAM
uccuucaaaacucacuagug

SEQ ID NO: 20277 - RNA, 20 nt, Artificial Sequence
  HTT spacer sequence CTCN PAM
aggggaaacgaaaaguugua

SEQ ID NO: 20278 - RNA, 20 nt, Artificial Sequence
  HTT spacer sequence CTCN PAM
cguguaagccauuuguagcc

SEQ ID NO: 20279 - RNA, 20 nt, Artificial Sequence
  HTT spacer sequence CTCN PAM
acccgaccucacguguaagc

SEQ ID NO: 20280 - RNA, 20 nt, Artificial Sequence
  HTT spacer sequence CTCN PAM
ucuacaaacggugcuguaac

SEQ ID NO: 20281 - RNA, 20 nt, Artificial Sequence
  HTT spacer sequence CTCN PAM
auagcgacaggacacccucu

SEQ ID NO: 20282 - RNA, 20 nt, Artificial Sequence
  HTT spacer sequence CTCN PAM
uucuugaagauggauggccu

SEQ ID NO: 20283 - RNA, 20 nt, Artificial Sequence
  HTT spacer sequence CTCN PAM
uuuuuaggaucugaaauuau

SEQ ID NO: 20284 - RNA, 20 nt, Artificial Sequence
  HTT spacer sequence CTCN PAM
agaauguagcgucagaaauu

SEQ ID NO: 20285 - RNA, 20 nt, Artificial Sequence
  HTT spacer sequence CTCN PAM
agaagcacacagguggggau

SEQ ID NO: 20286 - RNA, 20 nt, Artificial Sequence
  HTT spacer sequence CTCN PAM
gaccccaucugucugcucua

SEQ ID NO: 20287 - RNA, 20 nt, Artificial Sequence
  HTT spacer sequence CTCN PAM
ccucugaccccaucugucug

SEQ ID NO: 20288 - RNA, 20 nt, Artificial Sequence
  HTT spacer sequence CTCN PAM
caaauccccgcugccucacc

SEQ ID NO: 20289 - RNA, 20 nt, Artificial Sequence
  HTT spacer sequence CTCN PAM
ugccucccaaauccccgcug

SEQ ID NO: 20290 - RNA, 20 nt, Artificial Sequence
  HTT spacer sequence CTCN PAM
gccaaccauggcccugaccu

SEQ ID NO: 20291 - RNA, 20 nt, Artificial Sequence
  HTT spacer sequence CTCN PAM
ugaccaucaguggccucugc

SEQ ID NO: 20292 - RNA, 20 nt, Artificial Sequence
  HTT spacer sequence CTCN PAM
uccugcugugugcagccucc

SEQ ID NO: 20293 - RNA, 20 nt, Artificial Sequence
  HTT spacer sequence CTCN PAM
ugcugugugcagccuccuuc

SEQ ID NO: 20294 - RNA, 20 nt, Artificial Sequence
  HTT spacer sequence CTCN PAM
uuccugccgggcccugcuga

SEQ ID NO: 20295 - RNA, 20 nt, Artificial Sequence
  HTT spacer sequence CTCN PAM
ggccgcccugaggugcacag

SEQ ID NO: 20296 - RNA, 20 nt, Artificial Sequence
  HTT spacer sequence CTCN PAM
gggcggccugaggucagggc

SEQ ID NO: 20297 - RNA, 20 nt, Artificial Sequence
  HTT spacer sequence CTCN PAM
gugcaccucagggcggccug

SEQ ID NO: 20298 - RNA, 20 nt, Artificial Sequence
  HTT spacer sequence CTCN PAM
uagauaagauugcuggaucc

SEQ ID NO: 20299 - RNA, 20 nt, Artificial Sequence
  HTT spacer sequence CTCN PAM
ugggacccugcaggcuccua

SEQ ID NO: 20300 - RNA, 20 nt, Artificial Sequence
  HTT spacer sequence CTCN PAM
cuugucucaugggacccugc

SEQ ID NO: 20301 - RNA, 20 nt, Artificial Sequence
  HTT spacer sequence CTCN PAM
ucuguuugcgcaagaagcaa

SEQ ID NO: 20302 - RNA, 20 nt, Artificial Sequence
  HTT spacer sequence CTCN PAM
accucgucuguuugcgcaag

SEQ ID NO: 20303 - RNA, 20 nt, Artificial Sequence
  HTT spacer sequence CTCN PAM
uccaccucgucuguuugcgc

SEQ ID NO: 20304 - RNA, 20 nt, Artificial Sequence
  HTT spacer sequence CTCN PAM
ccaucggccuucuagggccc

SEQ ID NO: 20305 - RNA, 20 nt, Artificial Sequence
  HTT spacer sequence CTCN PAM
aucggccuucuagggcccug

SEQ ID NO: 20306 - RNA, 20 nt, Artificial Sequence
  HTT spacer sequence CTCN PAM
gggcccuagaaggccgaugg

SEQ ID NO: 20307 - RNA, 20 nt, Artificial Sequence
  HTT spacer sequence CTCN PAM
ggacugccucagggcccuag

SEQ ID NO: 20308 - RNA, 20 nt, Artificial Sequence
  HTT spacer sequence CTCN PAM
cccucaggacugccucaggg

SEQ ID NO: 20309 - RNA, 20 nt, Artificial Sequence
  HTT spacer sequence CTCN PAM
ggugggcguggcccucaccc

SEQ ID NO: 20310 - RNA, 20 nt, Artificial Sequence
  HTT spacer sequence CTCN PAM
gcucuggugggcguggcccu

SEQ ID NO: 20311 - RNA, 20 nt, Artificial Sequence
  HTT spacer sequence CTCN PAM
ggccccuccgcucugguggg

SEQ ID NO: 20312 - RNA, 20 nt, Artificial Sequence
  HTT spacer sequence CTCN PAM
cacagaagcagccaggccca

SEQ ID NO: 20313 - RNA, 20 nt, Artificial Sequence
  HTT spacer sequence CTCN PAM
aaaauugcauuuggcuucaa

SEQ ID NO: 20314 - RNA, 20 nt, Artificial Sequence
  HTT spacer sequence CTCN PAM
caaaaauugcauuuggcuuc

SEQ ID NO: 20315 - RNA, 20 nt, Artificial Sequence
  HTT spacer sequence CTCN PAM
ccuuuugggcacuaaauucc

SEQ ID NO: 20316 - RNA, 20 nt, Artificial Sequence
  HTT spacer sequence CTCN PAM
cuccccuuuugggcacuaaa

SEQ ID NO: 20317 - RNA, 20 nt, Artificial Sequence
  HTT spacer sequence CTCN PAM
uacagcauggcauuggcucg

SEQ ID NO: 20318 - RNA, 20 nt, Artificial Sequence
  HTT spacer sequence CTCN PAM
ugaggcugcugaauggggcg

SEQ ID NO: 20319 - RNA, 20 nt, Artificial Sequence
  HTT spacer sequence CTCN PAM
cgagccaaugccaugcugua

SEQ ID NO: 20320 - RNA, 20 nt, Artificial Sequence
  HTT spacer sequence CTCN PAM
ccacgccccauucagcagcc

SEQ ID NO: 20321 - RNA, 20 nt, Artificial Sequence
  HTT spacer sequence CTCN PAM
uccccacgccccauucagca

SEQ ID NO: 20322 - RNA, 20 nt, Artificial Sequence
  HTT spacer sequence CTCN PAM
ugggccagcagaccacccac

SEQ ID NO: 20323 - RNA, 20 nt, Artificial Sequence
  HTT spacer sequence CTCN PAM
cggccuguggguggucugcu

SEQ ID NO: 20324 - RNA, 20 nt, Artificial Sequence
  HTT spacer sequence CTCN PAM
ggcugcccucccggccugug

SEQ ID NO: 20325 - RNA, 20 nt, Artificial Sequence
  HTT spacer sequence CTCN PAM
ucaggcugcccucccggccu

SEQ ID NO: 20326 - RNA, 20 nt, Artificial Sequence
  HTT spacer sequence CTCN PAM
uucuuggggaacuuugcuga

SEQ ID NO: 20327 - RNA, 20 nt, Artificial Sequence
  HTT spacer sequence CTCN PAM
ugccaccccgcccgcuggcu

SEQ ID NO: 20328 - RNA, 20 nt, Artificial Sequence
  HTT spacer sequence CTCN PAM
cuagcccagcugcagcuccu

SEQ ID NO: 20329 - RNA, 20 nt, Artificial Sequence
  HTT spacer sequence CTCN PAM
cugcccguggggugcuauga

SEQ ID NO: 20330 - RNA, 20 nt, Artificial Sequence
  HTT spacer sequence CTCN PAM
gcccguggggugcuaugaaa

SEQ ID NO: 20331 - RNA, 20 nt, Artificial Sequence
  HTT spacer sequence CTCN PAM
aaaucacaccggcuuucaua

SEQ ID NO: 20332 - RNA, 20 nt, Artificial Sequence
  HTT spacer sequence CTCN PAM
gcagggcuguccccaggcug

SEQ ID NO: 20333 - RNA, 20 nt, Artificial Sequence
  HTT spacer sequence CTCN PAM
ugcaaugucggcagccuggg

SEQ ID NO: 20334 - RNA, 20 nt, Artificial Sequence
  HTT spacer sequence CTCN PAM
acggggccccagaucugggg

SEQ ID NO: 20335 - RNA, 20 nt, Artificial Sequence
  HTT spacer sequence CTCN PAM
gcggacacagagucaaaucu

SEQ ID NO: 20336 - RNA, 20 nt, Artificial Sequence
  HTT spacer sequence CTCN PAM
guguccgcagaguccgguga

SEQ ID NO: 20337 - RNA, 20 nt, Artificial Sequence
  HTT spacer sequence CTCN PAM
cccacaggcccaguguaccc

SEQ ID NO: 20338 - RNA, 20 nt, Artificial Sequence
  HTT spacer sequence CTCN PAM
aggaggggaagaugggggcg

SEQ ID NO: 20339 - RNA, 20 nt, Artificial Sequence
  HTT spacer sequence CTCN PAM
uugagggccaacccacagcc

SEQ ID NO: 20340 - RNA, 20 nt, Artificial Sequence
  HTT spacer sequence CTCN PAM
acaacgccaccccugccugc

SEQ ID NO: 20341 - RNA, 20 nt, Artificial Sequence
  HTT spacer sequence CTCN PAM
uggaccuccacaacgccacc

SEQ ID NO: 20342 - RNA, 20 nt, Artificial Sequence
  HTT spacer sequence CTCN PAM
ucauggaccuccacaacgcc

SEQ ID NO: 20343 - RNA, 20 nt, Artificial Sequence
  HTT spacer sequence CTCN PAM
caggcugcccugcccuccuc

SEQ ID NO: 20344 - RNA, 20 nt, Artificial Sequence
  HTT spacer sequence CTCN PAM
cccgugcugccaggaucuac

SEQ ID NO: 20345 - RNA, 20 nt, Artificial Sequence
  HTT spacer sequence CTCN PAM
gggcccuucccuuacucacc

SEQ ID NO: 20346 - RNA, 20 nt, Artificial Sequence
  HTT spacer sequence CTCN PAM
ucagggcccuucccuuacuc

SEQ ID NO: 20347 - RNA, 20 nt, Artificial Sequence
  HTT spacer sequence CTCN PAM
ccuccucagggcccuucccu

SEQ ID NO: 20348 - RNA, 20 nt, Artificial Sequence
  HTT spacer sequence CTCN PAM
ggucuugcucagcccuagac

SEQ ID NO: 20349 - RNA, 20 nt, Artificial Sequence
  HTT spacer sequence CTCN PAM
gcccuagacuggcucugacc

SEQ ID NO: 20350 - RNA, 20 nt, Artificial Sequence
  HTT spacer sequence CTCN PAM
gaccccacacccaggguugc

SEQ ID NO: 20351 - RNA, 20 nt, Artificial Sequence
  HTT spacer sequence CTCN PAM
ccccaccacguugcaacccu

SEQ ID NO: 20352 - RNA, 20 nt, Artificial Sequence
  HTT spacer sequence CTCN PAM
uggguggcccugcugcugug

SEQ ID NO: 20353 - RNA, 20 nt, Artificial Sequence
  HTT spacer sequence CTCN PAM
aagucaggaggaaggaggcc

SEQ ID NO: 20354 - RNA, 20 nt, Artificial Sequence
  HTT spacer sequence CTCN PAM
ugacuuggagacccugugca

SEQ ID NO: 20355 - RNA, 20 nt, Artificial Sequence
  HTT spacer sequence CTCN PAM
uuccuccugacuuggagacc

SEQ ID NO: 20356 - RNA, 20 nt, Artificial Sequence
  HTT spacer sequence CTCN PAM
uggccuccuuccuccugacu

SEQ ID NO: 20357 - RNA, 20 nt, Artificial Sequence
  HTT spacer sequence CTCN PAM
acuccuggccuccuuccucc

SEQ ID NO: 20358 - RNA, 20 nt, Artificial Sequence
  HTT spacer sequence CTCN PAM
gcccugccacgcaggguugu

SEQ ID NO: 20359 - RNA, 20 nt, Artificial Sequence
  HTT spacer sequence CTCN PAM
guccuacugcucggggucca

SEQ ID NO: 20360 - RNA, 20 nt, Artificial Sequence
  HTT spacer sequence CTCN PAM
ggguccagguucuggggcuc

SEQ ID NO: 20361 - RNA, 20 nt, Artificial Sequence
  HTT spacer sequence CTCN PAM
guccucugcgagcaccucuc

SEQ ID NO: 20362 - RNA, 20 nt, Artificial Sequence
  HTT spacer sequence CTCN PAM
gcgagcaccucucagccucg

SEQ ID NO: 20363 - RNA, 20 nt, Artificial Sequence
  HTT spacer sequence CTCN PAM
cagaggacagagccccagaa

SEQ ID NO: 20364 - RNA, 20 nt, Artificial Sequence
  HTT spacer sequence CTCN PAM
cagccucgcaccccugggga

SEQ ID NO: 20365 - RNA, 20 nt, Artificial Sequence
  HTT spacer sequence CTCN PAM
gccucgcaccccuggggagc

SEQ ID NO: 20366 - RNA, 20 nt, Artificial Sequence
  HTT spacer sequence CTCN PAM
caccccuggggagcggcuuu

SEQ ID NO: 20367 - RNA, 20 nt, Artificial Sequence
  HTT spacer sequence CTCN PAM
ccaggggugcgaggcugaga

SEQ ID NO: 20368 - RNA, 20 nt, Artificial Sequence
  HTT spacer sequence CTCN PAM
caggugcgccugggaacccu

SEQ ID NO: 20369 - RNA, 20 nt, Artificial Sequence
  HTT spacer sequence CTCN PAM
ccugcgaaaggggagcgggg

SEQ ID NO: 20370 - RNA, 20 nt, Artificial Sequence
  HTT spacer sequence CTCN PAM
ccuuucgcaggugagaacag

SEQ ID NO: 20371 - RNA, 20 nt, Artificial Sequence
  HTT spacer sequence CTCN PAM
ccgcuccccuuucgcaggug

SEQ ID NO: 20372 - RNA, 20 nt, Artificial Sequence
  HTT spacer sequence CTCN PAM
ugcuccuccuccugcaggca

SEQ ID NO: 20373 - RNA, 20 nt, Artificial Sequence
  HTT spacer sequence CTCN PAM
uccuccugcaggcaccgccc

SEQ ID NO: 20374 - RNA, 20 nt, Artificial Sequence
  HTT spacer sequence CTCN PAM
uccugcaggcaccgccccuc

SEQ ID NO: 20375 - RNA, 20 nt, Artificial Sequence
  HTT spacer sequence CTCN PAM
ugcaggcaccgccccuccac

SEQ ID NO: 20376 - RNA, 20 nt, Artificial Sequence
  HTT spacer sequence CTCN PAM
accccacagagggcuucugc

SEQ ID NO: 20377 - RNA, 20 nt, Artificial Sequence
  HTT spacer sequence CTCN PAM
gugggguggaggggcggugc

SEQ ID NO: 20378 - RNA, 20 nt, Artificial Sequence
  HTT spacer sequence CTCN PAM
ugacuuauucccuuguuuaa

SEQ ID NO: 20379 - RNA, 20 nt, Artificial Sequence
  HTT spacer sequence CTCN PAM
gcucagggcggguggggucu

SEQ ID NO: 20380 - RNA, 20 nt, Artificial Sequence
  HTT spacer sequence CTCN PAM
gggcggguggggucuggagu

SEQ ID NO: 20381 - RNA, 20 nt, Artificial Sequence
  HTT spacer sequence CTCN PAM
agaccccacccgcccugagc

SEQ ID NO: 20382 - RNA, 20 nt, Artificial Sequence
  HTT spacer sequence CTCN PAM
cccaacagcccaccugcucc

SEQ ID NO: 20383 - RNA, 20 nt, Artificial Sequence
  HTT spacer sequence CTCN PAM
ccgcccggccgccuggcgca

SEQ ID NO: 20384 - RNA, 20 nt, Artificial Sequence
  HTT spacer sequence CTCN PAM
gcgccaggcggccgggcggg

SEQ ID NO: 20385 - RNA, 20 nt, Artificial Sequence
  HTT spacer sequence CTCN PAM
aaacuagggccucugcgcca

SEQ ID NO: 20386 - RNA, 20 nt, Artificial Sequence
  HTT spacer sequence CTCN PAM
ccaaacuagggccucugcgc

SEQ ID NO: 20387 - RNA, 20 nt, Artificial Sequence
  HTT spacer sequence CTCN PAM
gaauuuggauucaaccacgg

SEQ ID NO: 20388 - RNA, 20 nt, Artificial Sequence
  HTT spacer sequence CTCN PAM
cucauuuuccaaaacgccuu

SEQ ID NO: 20389 - RNA, 20 nt, Artificial Sequence
  HTT spacer sequence CTCN PAM
uuuuccaaaacgccuuuguc

SEQ ID NO: 20390 - RNA, 20 nt, Artificial Sequence
  HTT spacer sequence CTCN PAM
ugaaaguucuuugaacagga

SEQ ID NO: 20391 - RNA, 20 nt, Artificial Sequence
  HTT spacer sequence CTCN PAM
ccagggugccagcuggcauc

SEQ ID NO: 20392 - RNA, 20 nt, Artificial Sequence
  HTT spacer sequence CTCN PAM
gccuucgaaacuaauggaau

SEQ ID NO: 20393 - RNA, 20 nt, Artificial Sequence
  HTT spacer sequence CTCN PAM
accgagcggcugcagcaggg

SEQ ID NO: 20394 - RNA, 20 nt, Artificial Sequence
  HTT spacer sequence CTCN PAM
guggagcgcugcuauucuua

SEQ ID NO: 20395 - RNA, 20 nt, Artificial Sequence
  HTT spacer sequence CTCN PAM
gggcccugcugcagccgcuc

SEQ ID NO: 20396 - RNA, 20 nt, Artificial Sequence
  HTT spacer sequence CTCN PAM
augugggagccgugcccagg

SEQ ID NO: 20397 - RNA, 20 nt, Artificial Sequence
  HTT spacer sequence CTCN PAM
cacauggaggcuggcgccca

SEQ ID NO: 20398 - RNA, 20 nt, Artificial Sequence
  HTT spacer sequence CTCN PAM
cugggcacggcucccacaug

SEQ ID NO: 20399 - RNA, 20 nt, Artificial Sequence
  HTT spacer sequence CTCN PAM
cgcagcccacaccaggugcc

SEQ ID NO: 20400 - RNA, 20 nt, Artificial Sequence
  HTT spacer sequence CTCN PAM
cuuacaggcagcugcugaag

SEQ ID NO: 20401 - RNA, 20 nt, Artificial Sequence
  HTT spacer sequence CTCN PAM
accugaccaggacgguccca

SEQ ID NO: 20402 - RNA, 20 nt, Artificial Sequence
  HTT spacer sequence CTCN PAM
uccaccugaccaggacgguc

SEQ ID NO: 20403 - RNA, 20 nt, Artificial Sequence
  HTT spacer sequence CTCN PAM
ggguccaaaguccaggacac

SEQ ID NO: 20404 - RNA, 20 nt, Artificial Sequence
  HTT spacer sequence CTCN PAM
auacaaauuucagcaggcuu

SEQ ID NO: 20405 - RNA, 20 nt, Artificial Sequence
  HTT spacer sequence CTCN PAM
augucuuuuauuucucuuuc

SEQ ID NO: 20406 - RNA, 20 nt, Artificial Sequence
  HTT spacer sequence CTCN PAM
uucuugccuuauuuucuggc

SEQ ID NO: 20407 - RNA, 20 nt, Artificial Sequence
  HTT spacer sequence CTCN PAM
uagccagaaaauaaggcaag

SEQ ID NO: 20408 - RNA, 20 nt, Artificial Sequence
  HTT spacer sequence CTCN PAM
aguacaauguugaaaagaag

SEQ ID NO: 20409 - RNA, 20 nt, Artificial Sequence
  HTT spacer sequence CTCN PAM
ugaacacagacacaaaaucc

SEQ ID NO: 20410 - RNA, 20 nt, Artificial Sequence
  HTT spacer sequence CTCN PAM
ugauguccuugucagguuuu

SEQ ID NO: 20411 - RNA, 20 nt, Artificial Sequence
  HTT spacer sequence CTCN PAM
gauaucaaaaccugacaagg

SEQ ID NO: 20412 - RNA, 20 nt, Artificial Sequence
  HTT spacer sequence CTCN PAM
ugcacuuacuguaugaaacc

SEQ ID NO: 20413 - RNA, 20 nt, Artificial Sequence
  HTT spacer sequence CTCN PAM
uuuuucugaaaaaaauugug

SEQ ID NO: 20414 - RNA, 20 nt, Artificial Sequence
  HTT spacer sequence CTCN PAM
uauuuuugucauucccuucc

SEQ ID NO: 20415 - RNA, 20 nt, Artificial Sequence
  HTT spacer sequence CTCN PAM
uuauuuucuagcuucuuaau

SEQ ID NO: 20416 - RNA, 20 nt, Artificial Sequence
  HTT spacer sequence CTCN PAM
gaucauuuauuucaaacuag

SEQ ID NO: 20417 - RNA, 20 nt, Artificial Sequence
  HTT spacer sequence CTCN PAM
ggucaaacaagauaucacaa

SEQ ID NO: 20418 - RNA, 20 nt, Artificial Sequence
  HTT spacer sequence CTCN PAM
uuaaaugcuaaaggacugaa

SEQ ID NO: 20419 - RNA, 20 nt, Artificial Sequence
  HTT spacer sequence CTCN PAM
ugaaaagaguauuuauucua

SEQ ID NO: 20420 - RNA, 20 nt, Artificial Sequence
  HTT spacer sequence CTCN PAM
uuucaagagcacaugguaca

SEQ ID NO: 20421 - RNA, 20 nt, Artificial Sequence
  HTT spacer sequence CTCN PAM
cgccuguaaucccagcacuu

SEQ ID NO: 20422 - RNA, 20 nt, Artificial Sequence
  HTT spacer sequence CTCN PAM
aauguuugaaaauauagcca

SEQ ID NO: 20423 - RNA, 20 nt, Artificial Sequence
  HTT spacer sequence CTCN PAM
aucuacuuugaaaucauauu

SEQ ID NO: 20424 - RNA, 20 nt, Artificial Sequence
  HTT spacer sequence CTCN PAM
uagauccccaaagcucaaua

SEQ ID NO: 20425 - RNA, 20 nt, Artificial Sequence
  HTT spacer sequence CTCN PAM
aacugaauuuaaaaaaauca

SEQ ID NO: 20426 - RNA, 20 nt, Artificial Sequence
  HTT spacer sequence CTCN PAM
ccauuuuaccuguacucuuu

SEQ ID NO: 20427 - RNA, 20 nt, Artificial Sequence
  HTT spacer sequence CTCN PAM
ccaauacauguuuuauuuca

SEQ ID NO: 20428 - RNA, 20 nt, Artificial Sequence
  HTT spacer sequence CTCN PAM
ggaaacaaucacaaauagaa

SEQ ID NO: 20429 - RNA, 20 nt, Artificial Sequence
  HTT spacer sequence CTCN PAM
cacaugagcagagcagucac

SEQ ID NO: 20430 - RNA, 20 nt, Artificial Sequence
  HTT spacer sequence CTCN PAM
ugugugagaagcucuggaaa

SEQ ID NO: 20431 - RNA, 20 nt, Artificial Sequence
  HTT spacer sequence CTCN PAM
gcucaugugugagaagcucu

SEQ ID NO: 20432 - RNA, 20 nt, Artificial Sequence
  HTT spacer sequence CTCN PAM
ccuugacaaucuuuuaaaaa

SEQ ID NO: 20433 - RNA, 20 nt, Artificial Sequence
  HTT spacer sequence CTCN PAM
acagccuccccuugacaauc

SEQ ID NO: 20434 - RNA, 20 nt, Artificial Sequence
  HTT spacer sequence CTCN PAM
ucccuuacccauugugauag

SEQ ID NO: 20435 - RNA, 20 nt, Artificial Sequence
  HTT spacer sequence CTCN PAM
ggguauuccaaagcacaucc

SEQ ID NO: 20436 - RNA, 20 nt, Artificial Sequence
  HTT spacer sequence CTCN PAM
auguguaucauauuugaccu

SEQ ID NO: 20437 - RNA, 20 nt, Artificial Sequence
  HTT spacer sequence CTCN PAM
gaaccacaaaagaaugucaa

SEQ ID NO: 20438 - RNA, 20 nt, Artificial Sequence
  HTT spacer sequence CTCN PAM
ucuaauacaucuugaauacu

SEQ ID NO: 20439 - RNA, 20 nt, Artificial Sequence
  HTT spacer sequence CTCN PAM
uguaaaauaagcaauaaaaa

SEQ ID NO: 20440 - RNA, 20 nt, Artificial Sequence
  HTT spacer sequence CTCN PAM
auugaagagagaugugaaua

SEQ ID NO: 20441 - RNA, 20 nt, Artificial Sequence
  HTT spacer sequence CTCN PAM
ucaauugagauuauuccuua

SEQ ID NO: 20442 - RNA, 20 nt, Artificial Sequence
  HTT spacer sequence CTCN PAM
cuucaauugagauuauuccu

SEQ ID NO: 20443 - RNA, 20 nt, Artificial Sequence
  HTT spacer sequence CTCN PAM
guuuauucacaucucucuuc

SEQ ID NO: 20444 - RNA, 20 nt, Artificial Sequence
  HTT spacer sequence CTCN PAM
gcacuggcaaauuugaaaga

SEQ ID NO: 20445 - RNA, 20 nt, Artificial Sequence
  HTT spacer sequence CTCN PAM
uaaagcaacaccuagauuca

SEQ ID NO: 20446 - RNA, 20 nt, Artificial Sequence
  HTT spacer sequence CTCN PAM
caaagagcugggauuacagg

SEQ ID NO: 20447 - RNA, 20 nt, Artificial Sequence
  HTT spacer sequence CTCN PAM
agugauccacccaccugggc

SEQ ID NO: 20448 - RNA, 20 nt, Artificial Sequence
  HTT spacer sequence CTCN PAM
uacccucaagugauccaccc

SEQ ID NO: 20449 - RNA, 20 nt, Artificial Sequence
  HTT spacer sequence CTCN PAM
guuucuacuaaaaauacaaa

SEQ ID NO: 20450 - RNA, 20 nt, Artificial Sequence
  HTT spacer sequence CTCN PAM
guucaguucacucuguuguu

SEQ ID NO: 20451 - RNA, 20 nt, Artificial Sequence
  HTT spacer sequence CTCN PAM
cccacgaugggcagcagcua

SEQ ID NO: 20452 - RNA, 20 nt, Artificial Sequence
  HTT spacer sequence CTCN PAM
gucucccccacgaugggcag

SEQ ID NO: 20453 - RNA, 20 nt, Artificial Sequence
  HTT spacer sequence CTCN PAM
aaucccaaacucugucuccc

SEQ ID NO: 20454 - RNA, 20 nt, Artificial Sequence
  HTT spacer sequence CTCN PAM
uagaagaaaaucaacacuuc

SEQ ID NO: 20455 - RNA, 20 nt, Artificial Sequence
  HTT spacer sequence CTCN PAM
gauaaagauaauagaaucca

SEQ ID NO: 20456 - RNA, 20 nt, Artificial Sequence
  HTT spacer sequence CTCN PAM
guucaugcugcugcaaucau

SEQ ID NO: 20457 - RNA, 20 nt, Artificial Sequence
  HTT spacer sequence CTCN PAM
gaccacuauuauuucugaug

SEQ ID NO: 20458 - RNA, 20 nt, Artificial Sequence
  HTT spacer sequence CTCN PAM
aaaaaauaauaauaaaacaa

SEQ ID NO: 20459 - RNA, 20 nt, Artificial Sequence
  HTT spacer sequence CTCN PAM
gcugguguaucccacuggcc

SEQ ID NO: 20460 - RNA, 20 nt, Artificial Sequence
  HTT spacer sequence CTCN PAM
caucucugcugguguauccc

SEQ ID NO: 20461 - RNA, 20 nt, Artificial Sequence
  HTT spacer sequence CTCN PAM
ugcucccaucucugcuggug

SEQ ID NO: 20462 - RNA, 20 nt, Artificial Sequence
  HTT spacer sequence CTCN PAM
cucuggagucugauagcccu

SEQ ID NO: 20463 - RNA, 20 nt, Artificial Sequence
  HTT spacer sequence CTCN PAM
cuggagucugauagcccuuc

SEQ ID NO: 20464 - RNA, 20 nt, Artificial Sequence
  HTT spacer sequence CTCN PAM
ggagucugauagcccuucgu

SEQ ID NO: 20465 - RNA, 20 nt, Artificial Sequence
  HTT spacer sequence CTCN PAM
agagagagcacagcccuccu

SEQ ID NO: 20466 - RNA, 20 nt, Artificial Sequence
  HTT spacer sequence CTCN PAM
agccaacaacccaauuccca

SEQ ID NO: 20467 - RNA, 20 nt, Artificial Sequence
  HTT spacer sequence CTCN PAM
ugccgccccuggggcucaag

SEQ ID NO: 20468 - RNA, 20 nt, Artificial Sequence
  HTT spacer sequence CTCN PAM
cccuggccaaugggaagcgc

SEQ ID NO: 20469 - RNA, 20 nt, Artificial Sequence
  HTT spacer sequence CTCN PAM
agggcauccugcuggcgcuu

SEQ ID NO: 20470 - RNA, 20 nt, Artificial Sequence
  HTT spacer sequence CTCN PAM
ccuccagggcauccugcugg

SEQ ID NO: 20471 - RNA, 20 nt, Artificial Sequence
  HTT spacer sequence CTCN PAM
gcugcucccuaaacuacccc

SEQ ID NO: 20472 - RNA, 20 nt, Artificial Sequence
  HTT spacer sequence CTCN PAM
cuaaacuaccccaccgcccc

SEQ ID NO: 20473 - RNA, 20 nt, Artificial Sequence
  HTT spacer sequence CTCN PAM
cugaaugcuuuuuuuuuuuu

SEQ ID NO: 20474 - RNA, 20 nt, Artificial Sequence
  HTT spacer sequence CTCN PAM
acacucaggaggcugaggua

SEQ ID NO: 20475 - RNA, 20 nt, Artificial Sequence
  HTT spacer sequence CTCN PAM
ggaggcugagguaggaggau

SEQ ID NO: 20476 - RNA, 20 nt, Artificial Sequence
  HTT spacer sequence CTCN PAM
ugaguguugagauuacaggc

SEQ ID NO: 20477 - RNA, 20 nt, Artificial Sequence
  HTT spacer sequence CTCN PAM
gccuccugaguguugagauu

SEQ ID NO: 20478 - RNA, 20 nt, Artificial Sequence
  HTT spacer sequence CTCN PAM
uaccucagccuccugagugu

SEQ ID NO: 20479 - RNA, 20 nt, Artificial Sequence
  HTT spacer sequence CTCN PAM
agccauccuccuaccucagc

SEQ ID NO: 20480 - RNA, 20 nt, Artificial Sequence
  HTT spacer sequence CTCN PAM
acuucccagacucaagccau

SEQ ID NO: 20481 - RNA, 20 nt, Artificial Sequence
  HTT spacer sequence CTCN PAM
cugcagccucaacuucccag

SEQ ID NO: 20482 - RNA, 20 nt, Artificial Sequence
  HTT spacer sequence CTCN PAM
agccugggcaacagggcaag

SEQ ID NO: 20483 - RNA, 20 nt, Artificial Sequence
  HTT spacer sequence CTCN PAM
aaaaaaaaaaaaaaaaaaaa

SEQ ID NO: 20484 - RNA, 20 nt, Artificial Sequence
  HTT spacer sequence CTCN PAM
ggccgccagggccaggggcu

SEQ ID NO: 20485 - RNA, 20 nt, Artificial Sequence
  HTT spacer sequence CTCN PAM
uggcaauuagggacguuguc

SEQ ID NO: 20486 - RNA, 20 nt, Artificial Sequence
  HTT spacer sequence CTCN PAM
acuuaguaacaauaugcucu

SEQ ID NO: 20487 - RNA, 20 nt, Artificial Sequence
  HTT spacer sequence CTCN PAM
auuuaauuaacuuuguguau

SEQ ID NO: 20488 - RNA, 20 nt, Artificial Sequence
  HTT spacer sequence CTCN PAM
cugauggugaauuccacaac

SEQ ID NO: 20489 - RNA, 20 nt, Artificial Sequence
  HTT spacer sequence CTCN PAM
accaaaaacacaaaaaauua

SEQ ID NO: 20490 - RNA, 20 nt, Artificial Sequence
  HTT spacer sequence CTCN PAM
aacuccugagcuuaagugag

SEQ ID NO: 20491 - RNA, 20 nt, Artificial Sequence
  HTT spacer sequence CTCN PAM
ugagcuuaagugagccaccu

SEQ ID NO: 20492 - RNA, 20 nt, Artificial Sequence
  HTT spacer sequence CTCN PAM
ggaguuggagaccagccugg

SEQ ID NO: 20493 - RNA, 20 nt, Artificial Sequence
  HTT spacer sequence CTCN PAM
cuuaagcucaggaguuggag

SEQ ID NO: 20494 - RNA, 20 nt, Artificial Sequence
  HTT spacer sequence CTCN PAM
gccuuccaaagagcugggau

SEQ ID NO: 20495 - RNA, 20 nt, Artificial Sequence
  HTT spacer sequence CTCN PAM
uuggaaggcugagguaggug

SEQ ID NO: 20496 - RNA, 20 nt, Artificial Sequence
  HTT spacer sequence CTCN PAM
agggcagggacaaguggccc

SEQ ID NO: 20497 - RNA, 20 nt, Artificial Sequence
  HTT spacer sequence CTCN PAM
ggaggcugagcucugcggcc

SEQ ID NO: 20498 - RNA, 20 nt, Artificial Sequence
  HTT spacer sequence CTCN PAM
ugaggcuccagggcagggac

SEQ ID NO: 20499 - RNA, 20 nt, Artificial Sequence
  HTT spacer sequence CTCN PAM
gccuccugaggcuccagggc

SEQ ID NO: 20500 - RNA, 20 nt, Artificial Sequence
  HTT spacer sequence CTCN PAM
gcggccugcuuccuucuggc

SEQ ID NO: 20501 - RNA, 20 nt, Artificial Sequence
  HTT spacer sequence CTCN PAM
ggaagauuccaccaucugcg

SEQ ID NO: 20502 - RNA, 20 nt, Artificial Sequence
  HTT spacer sequence CTCN PAM
aaaaaaaaaaaaaaagagcc

SEQ ID NO: 20503 - RNA, 20 nt, Artificial Sequence
  HTT spacer sequence CTCN PAM
aucucaaaaaaaaaaaaaaa

SEQ ID NO: 20504 - RNA, 20 nt, Artificial Sequence
  HTT spacer sequence CTCN PAM
gucaccuaggcuggagugca

SEQ ID NO: 20505 - RNA, 20 nt, Artificial Sequence
  HTT spacer sequence CTCN PAM
agccuaggugacagagugaa

SEQ ID NO: 20506 - RNA, 20 nt, Artificial Sequence
  HTT spacer sequence CTCN PAM
gcucacagcaaccuccgccu

SEQ ID NO: 20507 - RNA, 20 nt, Artificial Sequence
  HTT spacer sequence CTCN PAM
cagcaaccuccgccuccggg

SEQ ID NO: 20508 - RNA, 20 nt, Artificial Sequence
  HTT spacer sequence CTCN PAM
gccuccggggcucaagugau

SEQ ID NO: 20509 - RNA, 20 nt, Artificial Sequence
  HTT spacer sequence CTCN PAM
ggggcucaagugauucuccu

SEQ ID NO: 20510 - RNA, 20 nt, Artificial Sequence
  HTT spacer sequence CTCN PAM
cgccgcguuuuucccucgag

SEQ ID NO: 20511 - RNA, 20 nt, Artificial Sequence
  HTT spacer sequence CTCN PAM
cccgccgcguuuuucccucg

SEQ ID NO: 20512 - RNA, 20 nt, Artificial Sequence
  HTT spacer sequence CTCN PAM
uucucucccgccgcguuuuu

SEQ ID NO: 20513 - RNA, 20 nt, Artificial Sequence
  HTT spacer sequence CTCN PAM
cugccccuuccuuccugccu

SEQ ID NO: 20514 - RNA, 20 nt, Artificial Sequence
  HTT spacer sequence CTCN PAM
ccguccccgccccuccuccg

SEQ ID NO: 20515 - RNA, 20 nt, Artificial Sequence
  HTT spacer sequence CTCN PAM
guccccgccccuccuccggc

SEQ ID NO: 20516 - RNA, 20 nt, Artificial Sequence
  HTT spacer sequence CTCN PAM
uccggccucggccccgcccu

SEQ ID NO: 20517 - RNA, 20 nt, Artificial Sequence
  HTT spacer sequence CTCN PAM
ggccucggccccgcccucgc

SEQ ID NO: 20518 - RNA, 20 nt, Artificial Sequence
  HTT spacer sequence CTCN PAM
gccccgcccucgccucgacc

SEQ ID NO: 20519 - RNA, 20 nt, Artificial Sequence
  HTT spacer sequence CTCN PAM
ccucgaccccggggggcggu

SEQ ID NO: 20520 - RNA, 20 nt, Artificial Sequence
  HTT spacer sequence CTCN PAM
accccggggggcgguggcug

SEQ ID NO: 20521 - RNA, 20 nt, Artificial Sequence
  HTT spacer sequence CTCN PAM
gcagccaccgccccccgggg

SEQ ID NO: 20522 - RNA, 20 nt, Artificial Sequence
  HTT spacer sequence CTCN PAM
gggcgcuucggcccgcgcca

SEQ ID NO: 20523 - RNA, 20 nt, Artificial Sequence
  HTT spacer sequence CTCN PAM
cgcuccgggcgcuucggccc

SEQ ID NO: 20524 - RNA, 20 nt, Artificial Sequence
  HTT spacer sequence CTCN PAM
cucccgcuccgggcgcuucg

SEQ ID NO: 20525 - RNA, 20 nt, Artificial Sequence
  HTT spacer sequence CTCN PAM
cagcgcucccgggcgcaucu

SEQ ID NO: 20526 - RNA, 20 nt, Artificial Sequence
  HTT spacer sequence CTCN PAM
ucggacuccacgagcggccg

SEQ ID NO: 20527 - RNA, 20 nt, Artificial Sequence
  HTT spacer sequence CTCN PAM
acgagcggccgcuuuguuag

SEQ ID NO: 20528 - RNA, 20 nt, Artificial Sequence
  HTT spacer sequence CTCN PAM
uggaguccgacgagggaacc

SEQ ID NO: 20529 - RNA, 20 nt, Artificial Sequence
  HTT spacer sequence CTCN PAM
gaaggcagcuucugcccuaa

SEQ ID NO: 20530 - RNA, 20 nt, Artificial Sequence
  HTT spacer sequence CTCN PAM
agacgcacugcagcgaccug

SEQ ID NO: 20531 - RNA, 20 nt, Artificial Sequence
  HTT spacer sequence CTCN PAM
acggcucugggcccccucuc

SEQ ID NO: 20532 - RNA, 20 nt, Artificial Sequence
  HTT spacer sequence CTCN PAM
gucuacacuccacggcucug

SEQ ID NO: 20533 - RNA, 20 nt, Artificial Sequence
  HTT spacer sequence CTCN PAM
cugucuacacuccacggcuc

SEQ ID NO: 20534 - RNA, 20 nt, Artificial Sequence
  HTT spacer sequence CTCN PAM
cucugucuacacuccacggc

SEQ ID NO: 20535 - RNA, 20 nt, Artificial Sequence
  HTT spacer sequence CTCN PAM
gggcccucucucugucuaca

SEQ ID NO: 20536 - RNA, 20 nt, Artificial Sequence
  HTT spacer sequence CTCN PAM
gucuacacuagauggcucug

SEQ ID NO: 20537 - RNA, 20 nt, Artificial Sequence
  HTT spacer sequence CTCN PAM
cugucuacacuagauggcuc

SEQ ID NO: 20538 - RNA, 20 nt, Artificial Sequence
  HTT spacer sequence CTCN PAM
acagcuauggguccccucuc

SEQ ID NO: 20539 - RNA, 20 nt, Artificial Sequence
  HTT spacer sequence CTCN PAM
gugccugaguuuccucauug

SEQ ID NO: 20540 - RNA, 20 nt, Artificial Sequence
  HTT spacer sequence CTCN PAM
ggcacagagaagguggucac

SEQ ID NO: 20541 - RNA, 20 nt, Artificial Sequence
  HTT spacer sequence CTCN PAM
uuggaccugucuuuggagcu

SEQ ID NO: 20542 - RNA, 20 nt, Artificial Sequence
  HTT spacer sequence CTCN PAM
aguccccaaaagcacuggcc

SEQ ID NO: 20543 - RNA, 20 nt, Artificial Sequence
  HTT spacer sequence CTCN PAM
ggcaagggcagugggguggc

SEQ ID NO: 20544 - RNA, 20 nt, Artificial Sequence
  HTT spacer sequence CTCN PAM
gccaccccacugcccuugcc

SEQ ID NO: 20545 - RNA, 20 nt, Artificial Sequence
  HTT spacer sequence CTCN PAM
gugacuggcagagcagaggg

SEQ ID NO: 20546 - RNA, 20 nt, Artificial Sequence
  HTT spacer sequence CTCN PAM
gccagucacagaggcauccg

SEQ ID NO: 20547 - RNA, 20 nt, Artificial Sequence
  HTT spacer sequence CTCN PAM
gcucugccagucacagaggc

SEQ ID NO: 20548 - RNA, 20 nt, Artificial Sequence
  HTT spacer sequence CTCN PAM
cucugcucugccagucacag

SEQ ID NO: 20549 - RNA, 20 nt, Artificial Sequence
  HTT spacer sequence CTCN PAM
ucccucugcucugccaguca

SEQ ID NO: 20550 - RNA, 20 nt, Artificial Sequence
  HTT spacer sequence CTCN PAM
ggucaccacugcccugucgc

SEQ ID NO: 20551 - RNA, 20 nt, Artificial Sequence
  HTT spacer sequence CTCN PAM
gggagguugacaaagacaag

SEQ ID NO: 20552 - RNA, 20 nt, Artificial Sequence
  HTT spacer sequence CTCN PAM
cugagaccuccggucaccac

SEQ ID NO: 20553 - RNA, 20 nt, Artificial Sequence
  HTT spacer sequence CTCN PAM
gcccuugucuuugucaaccu

SEQ ID NO: 20554 - RNA, 20 nt, Artificial Sequence
  HTT spacer sequence CTCN PAM
cguggacuggagguacagua

SEQ ID NO: 20555 - RNA, 20 nt, Artificial Sequence
  HTT spacer sequence CTCN PAM
uugcagugccugucgagugc

SEQ ID NO: 20556 - RNA, 20 nt, Artificial Sequence
  HTT spacer sequence CTCN PAM
ucuuugcagugccugucgag

SEQ ID NO: 20557 - RNA, 20 nt, Artificial Sequence
  HTT spacer sequence CTCN PAM
cuuucugcccuguuuaggau

SEQ ID NO: 20558 - RNA, 20 nt, Artificial Sequence
  HTT spacer sequence CTCN PAM
uccuaaacagggcagaaagg

SEQ ID NO: 20559 - RNA, 20 nt, Artificial Sequence
  HTT spacer sequence CTCN PAM
gggaagaagggguggccagg

SEQ ID NO: 20560 - RNA, 20 nt, Artificial Sequence
  HTT spacer sequence CTCN PAM
uacaacugggaagggaaaug

SEQ ID NO: 20561 - RNA, 20 nt, Artificial Sequence
  HTT spacer sequence CTCN PAM
cuuaguggcugaaaauggca

SEQ ID NO: 20562 - RNA, 20 nt, Artificial Sequence
  HTT spacer sequence CTCN PAM
ccaauuaccuuuuaacuuag

SEQ ID NO: 20563 - RNA, 20 nt, Artificial Sequence
  HTT spacer sequence CTCN PAM
aauuaccuuuuaacuuagcu

SEQ ID NO: 20564 - RNA, 20 nt, Artificial Sequence
  HTT spacer sequence CTCN PAM
uaaaaaaaaaauugaacaaa

SEQ ID NO: 20565 - RNA, 20 nt, Artificial Sequence
  HTT spacer sequence CTCN PAM
gucucuuaaaaaaaaaauug

SEQ ID NO: 20566 - RNA, 20 nt, Artificial Sequence
  HTT spacer sequence CTCN PAM
cucuuuugcccaggcuggag

SEQ ID NO: 20567 - RNA, 20 nt, Artificial Sequence
  HTT spacer sequence CTCN PAM
uuugcccaggcuggagugca

SEQ ID NO: 20568 - RNA, 20 nt, Artificial Sequence
  HTT spacer sequence CTCN PAM
agccugggcaaaagagugag

SEQ ID NO: 20569 - RNA, 20 nt, Artificial Sequence
  HTT spacer sequence CTCN PAM
cugcagccccaaacuccugg

SEQ ID NO: 20570 - RNA, 20 nt, Artificial Sequence
  HTT spacer sequence CTCN PAM
ugggcucaagcgaucccccu

SEQ ID NO: 20571 - RNA, 20 nt, Artificial Sequence
  HTT spacer sequence CTCN PAM
cacgcugcuaaaucaaguuc

SEQ ID NO: 20572 - RNA, 20 nt, Artificial Sequence
  HTT spacer sequence CTCN PAM
guccguaaauugacaguucc

SEQ ID NO: 20573 - RNA, 20 nt, Artificial Sequence
  HTT spacer sequence CTCN PAM
ccacccccaggucuaggcag

SEQ ID NO: 20574 - RNA, 20 nt, Artificial Sequence
  HTT spacer sequence CTCN PAM
ucaccacccccaggucuagg

SEQ ID NO: 20575 - RNA, 20 nt, Artificial Sequence
  HTT spacer sequence CTCN PAM
cguggcuccucaccaccccc

SEQ ID NO: 20576 - RNA, 20 nt, Artificial Sequence
  HTT spacer sequence CTCN PAM
ucacguggcuccucaccacc

SEQ ID NO: 20577 - RNA, 20 nt, Artificial Sequence
  HTT spacer sequence CTCN PAM
uggggccugaagcgcugugc

SEQ ID NO: 20578 - RNA, 20 nt, Artificial Sequence
  HTT spacer sequence CTCN PAM
ucuguaacacggggucuguc

SEQ ID NO: 20579 - RNA, 20 nt, Artificial Sequence
  HTT spacer sequence CTCN PAM
guaacacggggucugucccg

SEQ ID NO: 20580 - RNA, 20 nt, Artificial Sequence
  HTT spacer sequence CTCN PAM
ucuguaacacggggucuguc

SEQ ID NO: 20581 - RNA, 20 nt, Artificial Sequence
  HTT spacer sequence CTCN PAM
guaacacggggucugucccc

SEQ ID NO: 20582 - RNA, 20 nt, Artificial Sequence
  HTT spacer sequence CTCN PAM
ucuguaacacggggucuguc

SEQ ID NO: 20583 - RNA, 20 nt, Artificial Sequence
  HTT spacer sequence CTCN PAM
guaacacggggucugucccg

SEQ ID NO: 20584 - RNA, 20 nt, Artificial Sequence
  HTT spacer sequence CTCN PAM
cucugcacagauuuaaaaac

SEQ ID NO: 20585 - RNA, 20 nt, Artificial Sequence
  HTT spacer sequence CTCN PAM
gcacagauuuaaaaaccaca

SEQ ID NO: 20586 - RNA, 20 nt, Artificial Sequence
  HTT spacer sequence CTCN PAM
acuugauauuuacuucuguu

SEQ ID NO: 20587 - RNA, 20 nt, Artificial Sequence
  HTT spacer sequence CTCN PAM
ccaaaccucaacaucccccu

SEQ ID NO: 20588 - RNA, 20 nt, Artificial Sequence
  HTT spacer sequence CTCN PAM
cugggucccuccccaaaccu

SEQ ID NO: 20589 - RNA, 20 nt, Artificial Sequence
  HTT spacer sequence CTCN PAM
cacugggucccuccccaaac

SEQ ID NO: 20590 - RNA, 20 nt, Artificial Sequence
  HTT spacer sequence CTCN PAM
cucacugggucccuccccaa

SEQ ID NO: 20591 - RNA, 20 nt, Artificial Sequence
  HTT spacer sequence CTCN PAM
agaggcuggacccaguggga

SEQ ID NO: 20592 - RNA, 20 nt, Artificial Sequence
  HTT spacer sequence CTCN PAM
ugaggcucucucacuggguc

SEQ ID NO: 20593 - RNA, 20 nt, Artificial Sequence
  HTT spacer sequence CTCN PAM
ccgcuguaccccacuugccg

SEQ ID NO: 20594 - RNA, 20 nt, Artificial Sequence
  HTT spacer sequence CTCN PAM
ugcuggacuccccgcuguac

SEQ ID NO: 20595 - RNA, 20 nt, Artificial Sequence
  HTT spacer sequence CTCN PAM
ccuugcaugguggccacacc

SEQ ID NO: 20596 - RNA, 20 nt, Artificial Sequence
  HTT spacer sequence CTCN PAM
guacggcgaccuaggcaggg

SEQ ID NO: 20597 - RNA, 20 nt, Artificial Sequence
  HTT spacer sequence CTCN PAM
caucccugcuggcuguuggc

SEQ ID NO: 20598 - RNA, 20 nt, Artificial Sequence
  HTT spacer sequence CTCN PAM
ggccaacagccagcagggau

SEQ ID NO: 20599 - RNA, 20 nt, Artificial Sequence
  HTT spacer sequence CTCN PAM
cugaccccaaaccccaucac

SEQ ID NO: 20600 - RNA, 20 nt, Artificial Sequence
  HTT spacer sequence CTCN PAM
aaaaaagcaccuggaaucca

SEQ ID NO: 20601 - RNA, 20 nt, Artificial Sequence
  HTT spacer sequence CTCN PAM
ucauuuuaggcaacuaagca

SEQ ID NO: 20602 - RNA, 20 nt, Artificial Sequence
  HTT spacer sequence CTCN PAM
uuuuaggcaacuaagcaaug

SEQ ID NO: 20603 - RNA, 20 nt, Artificial Sequence
  HTT spacer sequence CTCN PAM
caaaauaaucacauaaguuc

SEQ ID NO: 20604 - RNA, 20 nt, Artificial Sequence
  HTT spacer sequence CTCN PAM
gauuucggcagaauauuccc

SEQ ID NO: 20605 - RNA, 20 nt, Artificial Sequence
  HTT spacer sequence CTCN PAM
uucuggcaauuuaaauugcu

SEQ ID NO: 20606 - RNA, 20 nt, Artificial Sequence
  HTT spacer sequence CTCN PAM
uuaaagaucacuuuaaaaag

SEQ ID NO: 20607 - RNA, 20 nt, Artificial Sequence
  HTT spacer sequence CTCN PAM
ucugcaagacucuuuaaaga

SEQ ID NO: 20608 - RNA, 20 nt, Artificial Sequence
  HTT spacer sequence CTCN PAM
ggccugcuguguagucucuu

SEQ ID NO: 20609 - RNA, 20 nt, Artificial Sequence
  HTT spacer sequence CTCN PAM
uuaauaaugagcuguucguu

SEQ ID NO: 20610 - RNA, 20 nt, Artificial Sequence
  HTT spacer sequence CTCN PAM
uuauuaaagagcccaucuuu

SEQ ID NO: 20611 - RNA, 20 nt, Artificial Sequence
  HTT spacer sequence CTCN PAM
uuguucccuuggagccauau

SEQ ID NO: 20612 - RNA, 20 nt, Artificial Sequence
  HTT spacer sequence CTCN PAM
uggucuuggaagcucaucag

SEQ ID NO: 20613 - RNA, 20 nt, Artificial Sequence
  HTT spacer sequence CTCN PAM
ucagaauguuuagagcuggg

SEQ ID NO: 20614 - RNA, 20 nt, Artificial Sequence
  HTT spacer sequence CTCN PAM
aaacauucugaugagcuucc

SEQ ID NO: 20615 - RNA, 20 nt, Artificial Sequence
  HTT spacer sequence CTCN PAM
ccagcucuaaacauucugau

SEQ ID NO: 20616 - RNA, 20 nt, Artificial Sequence
  HTT spacer sequence CTCN PAM
aaacgcccauugccugggcc

SEQ ID NO: 20617 - RNA, 20 nt, Artificial Sequence
  HTT spacer sequence CTCN PAM
gcacccuugggggcgacggc

SEQ ID NO: 20618 - RNA, 20 nt, Artificial Sequence
  HTT spacer sequence CTCN PAM
acacuccgcacccuuggggg

SEQ ID NO: 20619 - RNA, 20 nt, Artificial Sequence
  HTT spacer sequence CTCN PAM
cccgggcaaccuccacacuc

SEQ ID NO: 20620 - RNA, 20 nt, Artificial Sequence
  HTT spacer sequence CTCN PAM
gcugcgucaugagagggagc

SEQ ID NO: 20621 - RNA, 20 nt, Artificial Sequence
  HTT spacer sequence CTCN PAM
ugacgcagcugagcacacag

SEQ ID NO: 20622 - RNA, 20 nt, Artificial Sequence
  HTT spacer sequence CTCN PAM
caugacgcagcugagcacac

SEQ ID NO: 20623 - RNA, 20 nt, Artificial Sequence
  HTT spacer sequence CTCN PAM
cucucaugacgcagcugagc

SEQ ID NO: 20624 - RNA, 20 nt, Artificial Sequence
  HTT spacer sequence CTCN PAM
gagcuggagaccagauacuu

SEQ ID NO: 20625 - RNA, 20 nt, Artificial Sequence
  HTT spacer sequence CTCN PAM
gaggcccacgaaauccgcag

SEQ ID NO: 20626 - RNA, 20 nt, Artificial Sequence
  HTT spacer sequence CTCN PAM
agcucggaggcccacgaaau

SEQ ID NO: 20627 - RNA, 20 nt, Artificial Sequence
  HTT spacer sequence CTCN PAM
ugaagauguagugaaauuaa

SEQ ID NO: 20628 - RNA, 20 nt, Artificial Sequence
  HTT spacer sequence CTCN PAM
gguguccuucacauggugau

SEQ ID NO: 20629 - RNA, 20 nt, Artificial Sequence
  HTT spacer sequence CTCN PAM
augaaggaaaaggcuggcug

SEQ ID NO: 20630 - RNA, 20 nt, Artificial Sequence
  HTT spacer sequence CTCN PAM
guuuauaccuagugcuuuag

SEQ ID NO: 20631 - RNA, 20 nt, Artificial Sequence
  HTT spacer sequence CTCN PAM
gcucuguuuauaccuagugc

SEQ ID NO: 20632 - RNA, 20 nt, Artificial Sequence
  HTT spacer sequence CTCN PAM
cucugcucuguuuauaccua

SEQ ID NO: 20633 - RNA, 20 nt, Artificial Sequence
  HTT spacer sequence CTCN PAM
acgacucgcucugcucuguu

SEQ ID NO: 20634 - RNA, 20 nt, Artificial Sequence
  HTT spacer sequence CTCN PAM
gguuuucaaaaaucauauug

SEQ ID NO: 20635 - RNA, 20 nt, Artificial Sequence
  HTT spacer sequence CTCN PAM
cacaaaggcucggguuuuca

SEQ ID NO: 20636 - RNA, 20 nt, Artificial Sequence
  HTT spacer sequence CTCN PAM
gaauugcucgcacaaaggcu

SEQ ID NO: 20637 - RNA, 20 nt, Artificial Sequence
  HTT spacer sequence CTCN PAM
gaaagggaucuuuguuucaa

SEQ ID NO: 20638 - RNA, 20 nt, Artificial Sequence
  HTT spacer sequence CTCN PAM
auuugauguuggacaugaaa

SEQ ID NO: 20639 - RNA, 20 nt, Artificial Sequence
  HTT spacer sequence CTCN PAM
uuagaaagcauguugggauu

SEQ ID NO: 20640 - RNA, 20 nt, Artificial Sequence
  HTT spacer sequence CTCN PAM
auugagcuuccuuccacgag

SEQ ID NO: 20641 - RNA, 20 nt, Artificial Sequence
  HTT spacer sequence CTCN PAM
auggagccuaaguagcccac

SEQ ID NO: 20642 - RNA, 20 nt, Artificial Sequence
  HTT spacer sequence CTCN PAM
uggaaggaagcucaauggag

SEQ ID NO: 20643 - RNA, 20 nt, Artificial Sequence
  HTT spacer sequence CTCN PAM
aaccuggaguccgacagcuu

SEQ ID NO: 20644 - RNA, 20 nt, Artificial Sequence
  HTT spacer sequence CTCN PAM
agguuggagcucguggaagg

SEQ ID NO: 20645 - RNA, 20 nt, Artificial Sequence
  HTT spacer sequence CTCN PAM
gcccgcaggcgccgcaugca

SEQ ID NO: 20646 - RNA, 20 nt, Artificial Sequence
  HTT spacer sequence CTCN PAM
cuggugaccaugaagaucau

SEQ ID NO: 20647 - RNA, 20 nt, Artificial Sequence
  HTT spacer sequence CTCN PAM
gcugcacacagucgugcaug

SEQ ID NO: 20648 - RNA, 20 nt, Artificial Sequence
  HTT spacer sequence CTCN PAM
agccuugucagugcucagcu

SEQ ID NO: 20649 - RNA, 20 nt, Artificial Sequence
  HTT spacer sequence CTCN PAM
gccacgacuccagccuuguc

SEQ ID NO: 20650 - RNA, 20 nt, Artificial Sequence
  HTT spacer sequence CTCN PAM
gccggguacucggccacgac

SEQ ID NO: 20651 - RNA, 20 nt, Artificial Sequence
  HTT spacer sequence CTCN PAM
cgucgucauucgucugcaug

SEQ ID NO: 20652 - RNA, 20 nt, Artificial Sequence
  HTT spacer sequence CTCN PAM
ugggccaggcucccgucguc

SEQ ID NO: 20653 - RNA, 20 nt, Artificial Sequence
  HTT spacer sequence CTCN PAM
uccugggccaggcucccguc

SEQ ID NO: 20654 - RNA, 20 nt, Artificial Sequence
  HTT spacer sequence CTCN PAM
uccuccugggccaggcuccc

SEQ ID NO: 20655 - RNA, 20 nt, Artificial Sequence
  HTT spacer sequence CTCN PAM
gcgguuuggguuugagugca

SEQ ID NO: 20656 - RNA, 20 nt, Artificial Sequence
  HTT spacer sequence CTCN PAM
aacccaaaccgccgagcaau

SEQ ID NO: 20657 - RNA, 20 nt, Artificial Sequence
  HTT spacer sequence CTCN PAM
cuccccguccugcaguucau

SEQ ID NO: 20658 - RNA, 20 nt, Artificial Sequence
  HTT spacer sequence CTCN PAM
ccguccugcaguucaucucu

SEQ ID NO: 20659 - RNA, 20 nt, Artificial Sequence
  HTT spacer sequence CTCN PAM
guccuguaccgagacauggg

SEQ ID NO: 20660 - RNA, 20 nt, Artificial Sequence
  HTT spacer sequence CTCN PAM
guacaggacagagaugaacu

SEQ ID NO: 20661 - RNA, 20 nt, Artificial Sequence
  HTT spacer sequence CTCN PAM
cccaugucucgguacaggac

SEQ ID NO: 20662 - RNA, 20 nt, Artificial Sequence
  HTT spacer sequence CTCN PAM
aucagcucacccaugucucg

SEQ ID NO: 20663 - RNA, 20 nt, Artificial Sequence
  HTT spacer sequence CTCN PAM
ugguggaaguucccaaugcc

SEQ ID NO: 20664 - RNA, 20 nt, Artificial Sequence
  HTT spacer sequence CTCN PAM
uccugguggaaguucccaau

SEQ ID NO: 20665 - RNA, 20 nt, Artificial Sequence
  HTT spacer sequence CTCN PAM
ucuccuccugguggaaguuc

SEQ ID NO: 20666 - RNA, 20 nt, Artificial Sequence
  HTT spacer sequence CTCN PAM
cacccagguccaccacaagg

SEQ ID NO: 20667 - RNA, 20 nt, Artificial Sequence
  HTT spacer sequence CTCN PAM
agcagacacggccccggagg

SEQ ID NO: 20668 - RNA, 20 nt, Artificial Sequence
  HTT spacer sequence CTCN PAM
agcucccacccagguccacc

SEQ ID NO: 20669 - RNA, 20 nt, Artificial Sequence
  HTT spacer sequence CTCN PAM
ggggccgugucugcucgagc

SEQ ID NO: 20670 - RNA, 20 nt, Artificial Sequence
  HTT spacer sequence CTCN PAM
cacccacaccgucccacgcg

SEQ ID NO: 20671 - RNA, 20 nt, Artificial Sequence
  HTT spacer sequence CTCN PAM
cuggacugggcccuucuguc

SEQ ID NO: 20672 - RNA, 20 nt, Artificial Sequence
  HTT spacer sequence CTCN PAM
cuucgggguccggacagaag

SEQ ID NO: 20673 - RNA, 20 nt, Artificial Sequence
  HTT spacer sequence CTCN PAM
aauggggggcucccuucggg

SEQ ID NO: 20674 - RNA, 20 nt, Artificial Sequence
  HTT spacer sequence CTCN PAM
ucagacugacagguucuggg

SEQ ID NO: 20675 - RNA, 20 nt, Artificial Sequence
  HTT spacer sequence CTCN PAM
ccuguggaggugcccccagc

SEQ ID NO: 20676 - RNA, 20 nt, Artificial Sequence
  HTT spacer sequence CTCN PAM
uguggaggugcccccagcuu

SEQ ID NO: 20677 - RNA, 20 nt, Artificial Sequence
  HTT spacer sequence CTCN PAM
acaggagaggcuggcccuag

SEQ ID NO: 20678 - RNA, 20 nt, Artificial Sequence
  HTT spacer sequence CTCN PAM
aggaagcugggggcaccucc

SEQ ID NO: 20679 - RNA, 20 nt, Artificial Sequence
  HTT spacer sequence CTCN PAM
ucaaggaagcugggggcacc

SEQ ID NO: 20680 - RNA, 20 nt, Artificial Sequence
  HTT spacer sequence CTCN PAM
guccccccuuccaagagggg

SEQ ID NO: 20681 - RNA, 20 nt, Artificial Sequence
  HTT spacer sequence CTCN PAM
uggaaggggggacugagcuc

SEQ ID NO: 20682 - RNA, 20 nt, Artificial Sequence
  HTT spacer sequence CTCN PAM
cgguccacgugcuccgggag

SEQ ID NO: 20683 - RNA, 20 nt, Artificial Sequence
  HTT spacer sequence CTCN PAM
gggaguggcagugcggacac

SEQ ID NO: 20684 - RNA, 20 nt, Artificial Sequence
  HTT spacer sequence CTCN PAM
cggagcacguggaccgggag

SEQ ID NO: 20685 - RNA, 20 nt, Artificial Sequence
  HTT spacer sequence CTCN PAM
uacacagauuccaccgaugg

SEQ ID NO: 20686 - RNA, 20 nt, Artificial Sequence
  HTT spacer sequence CTCN PAM
uaugagcaagauccccgcag

SEQ ID NO: 20687 - RNA, 20 nt, Artificial Sequence
  HTT spacer sequence CTCN PAM
uaggagggggcagugugccg

SEQ ID NO: 20688 - RNA, 20 nt, Artificial Sequence
  HTT spacer sequence CTCN PAM
acccuguagcggucugcggg

SEQ ID NO: 20689 - RNA, 20 nt, Artificial Sequence
  HTT spacer sequence CTCN PAM
ucggggcauucagcgggggc

SEQ ID NO: 20690 - RNA, 20 nt, Artificial Sequence
  HTT spacer sequence CTCN PAM
cucuucggggcauucagcgg

SEQ ID NO: 20691 - RNA, 20 nt, Artificial Sequence
  HTT spacer sequence CTCN PAM
uggcaggcuuaccuuuuuau

SEQ ID NO: 20692 - RNA, 20 nt, Artificial Sequence
  HTT spacer sequence CTCN PAM
gcgcggaggcccggccuccu

SEQ ID NO: 20693 - RNA, 20 nt, Artificial Sequence
  HTT spacer sequence CTCN PAM
gcgcugaguggcuccuggca

SEQ ID NO: 20694 - RNA, 20 nt, Artificial Sequence
  HTT spacer sequence CTCN PAM
ucacuuagcagucacgggga

SEQ ID NO: 20695 - RNA, 20 nt, Artificial Sequence
  HTT spacer sequence CTCN PAM
ugcuggacaaagucccuucc

SEQ ID NO: 20696 - RNA, 20 nt, Artificial Sequence
  HTT spacer sequence CTCN PAM
cacacuggcagcaccgccuc

SEQ ID NO: 20697 - RNA, 20 nt, Artificial Sequence
  HTT spacer sequence CTCN PAM
ggaaggacuuccuccagcca

SEQ ID NO: 20698 - RNA, 20 nt, Artificial Sequence
  HTT spacer sequence CTCN PAM
ggcuguuuacgauguaaaga

SEQ ID NO: 20699 - RNA, 20 nt, Artificial Sequence
  HTT spacer sequence CTCN PAM
ggaugugaacaaacacuaaa

SEQ ID NO: 20700 - RNA, 20 nt, Artificial Sequence
  HTT spacer sequence CTCN PAM
aaggcugcuggcuggguagg

SEQ ID NO: 20701 - RNA, 20 nt, Artificial Sequence
  HTT spacer sequence CTCN PAM
ccuaacuacacagggaggcc

SEQ ID NO: 20702 - RNA, 20 nt, Artificial Sequence
  HTT spacer sequence CTCN PAM
ccaguuagagcagcagaagc

SEQ ID NO: 20703 - RNA, 20 nt, Artificial Sequence
  HTT spacer sequence CTCN PAM
aacuggggaggcuaugggau

SEQ ID NO: 20704 - RNA, 20 nt, Artificial Sequence
  HTT spacer sequence CTCN PAM
ugaccccuggaagcuucugc

SEQ ID NO: 20705 - RNA, 20 nt, Artificial Sequence
  HTT spacer sequence CTCN PAM
uccuugucagcuucucccuc

SEQ ID NO: 20706 - RNA, 20 nt, Artificial Sequence
  HTT spacer sequence CTCN PAM
cuccucuggggaggagcaag

SEQ ID NO: 20707 - RNA, 20 nt, Artificial Sequence
  HTT spacer sequence CTCN PAM
ucuggggaggagcaaggaag

SEQ ID NO: 20708 - RNA, 20 nt, Artificial Sequence
  HTT spacer sequence CTCN PAM
ggggaggagcaaggaagggg

SEQ ID NO: 20709 - RNA, 20 nt, Artificial Sequence
  HTT spacer sequence CTCN PAM
ccagaggagggagaagcuga

SEQ ID NO: 20710 - RNA, 20 nt, Artificial Sequence
  HTT spacer sequence CTCN PAM
uccccagaggagggagaagc

SEQ ID NO: 20711 - RNA, 20 nt, Artificial Sequence
  HTT spacer sequence CTCN PAM
ccuuccuugcuccuccccag

SEQ ID NO: 20712 - RNA, 20 nt, Artificial Sequence
  HTT spacer sequence CTCN PAM
gcuccccuuccuugcuccuc

SEQ ID NO: 20713 - RNA, 20 nt, Artificial Sequence
  HTT spacer sequence CTCN PAM
ccaaagagguuuucuaguuu

SEQ ID NO: 20714 - RNA, 20 nt, Artificial Sequence
  HTT spacer sequence CTCN PAM
uuggugagcaauuuggcaaa

SEQ ID NO: 20715 - RNA, 20 nt, Artificial Sequence
  HTT spacer sequence CTCN PAM
cucucucucucucucucucu

SEQ ID NO: 20716 - RNA, 20 nt, Artificial Sequence
  HTT spacer sequence CTCN PAM
cucucucucucucucucucu

SEQ ID NO: 20717 - RNA, 20 nt, Artificial Sequence
  HTT spacer sequence CTCN PAM
uucaauaaaaaagggggcau

SEQ ID NO: 20718 - RNA, 20 nt, Artificial Sequence
  HTT spacer sequence CTCN PAM
acaguguucauuucacccag

SEQ ID NO: 20719 - RNA, 20 nt, Artificial Sequence
  HTT spacer sequence CTCN PAM
cguugccaagcuggaaaagg

SEQ ID NO: 20720 - RNA, 20 nt, Artificial Sequence
  HTT spacer sequence CTCN PAM
gggaccaaaaucuguggcuc

SEQ ID NO: 20721 - RNA, 20 nt, Artificial Sequence
  HTT spacer sequence CTCN PAM
aagcugguggaagcuaucaa

SEQ ID NO: 20722 - RNA, 20 nt, Artificial Sequence
  HTT spacer sequence CTCN PAM
cuugucuuccaaguuaaccu

SEQ ID NO: 20723 - RNA, 20 nt, Artificial Sequence
  HTT spacer sequence CTCN PAM
acugucgccuucacacaggu

SEQ ID NO: 20724 - RNA, 20 nt, Artificial Sequence
  HTT spacer sequence CTCN PAM
uugguccugcgggcuugacg

SEQ ID NO: 20725 - RNA, 20 nt, Artificial Sequence
  HTT spacer sequence CTCN PAM
ucaggccuucccuugacagu

SEQ ID NO: 20726 - RNA, 20 nt, Artificial Sequence
  HTT spacer sequence CTCN PAM
ggacgcaggcaggcaggaag

SEQ ID NO: 20727 - RNA, 20 nt, Artificial Sequence
  HTT spacer sequence CTCN PAM
gugggagccacgucacgugc

SEQ ID NO: 20728 - RNA, 20 nt, Artificial Sequence
  HTT spacer sequence CTCN PAM
cacugagcugguugucuucc

SEQ ID NO: 20729 - RNA, 20 nt, Artificial Sequence
  HTT spacer sequence CTCN PAM
gcggguggugaucgcacgug

SEQ ID NO: 20730 - RNA, 20 nt, Artificial Sequence
  HTT spacer sequence CTCN PAM
uucuccaccaagguugugac

SEQ ID NO: 20731 - RNA, 20 nt, Artificial Sequence
  HTT spacer sequence CTCN PAM
accaagguugugacaguauc

SEQ ID NO: 20732 - RNA, 20 nt, Artificial Sequence
  HTT spacer sequence CTCN PAM
uaguggggauguccccugug

SEQ ID NO: 20733 - RNA, 20 nt, Artificial Sequence
  HTT spacer sequence CTCN PAM
gcuucuucucuugcuugucu

SEQ ID NO: 20734 - RNA, 20 nt, Artificial Sequence
  HTT spacer sequence CTCN PAM
ugcuugucucugguugguac

SEQ ID NO: 20735 - RNA, 20 nt, Artificial Sequence
  HTT spacer sequence CTCN PAM
gguugguacugugggccagc

SEQ ID NO: 20736 - RNA, 20 nt, Artificial Sequence
  HTT spacer sequence CTCN PAM
ggccacaggcagcuacccaa

SEQ ID NO: 20737 - RNA, 20 nt, Artificial Sequence
  HTT spacer sequence CTCN PAM
ugugauugacugguucaccc

SEQ ID NO: 20738 - RNA, 20 nt, Artificial Sequence
  HTT spacer sequence CTCN PAM
augaauggcugaaagcaccu

SEQ ID NO: 20739 - RNA, 20 nt, Artificial Sequence
  HTT spacer sequence CTCN PAM
gacguccaucuucuuggcca

SEQ ID NO: 20740 - RNA, 20 nt, Artificial Sequence
  HTT spacer sequence CTCN PAM
uccuucccuuuggccuucuu

SEQ ID NO: 20741 - RNA, 20 nt, Artificial Sequence
  HTT spacer sequence CTCN PAM
uucccuuuggccuucuuccc

SEQ ID NO: 20742 - RNA, 20 nt, Artificial Sequence
  HTT spacer sequence CTCN PAM
agcuaccuaagaugcugaaa

SEQ ID NO: 20743 - RNA, 20 nt, Artificial Sequence
  HTT spacer sequence CTCN PAM
ucuccagcuaccuaagaugc

SEQ ID NO: 20744 - RNA, 20 nt, Artificial Sequence
  HTT spacer sequence CTCN PAM
ggaguuuuaucaguguuuua

SEQ ID NO: 20745 - RNA, 20 nt, Artificial Sequence
  HTT spacer sequence CTCN PAM
agagcuacauggguaggaag

SEQ ID NO: 20746 - RNA, 20 nt, Artificial Sequence
  HTT spacer sequence CTCN PAM
agcuaccaaaaauucauuca

SEQ ID NO: 20747 - RNA, 20 nt, Artificial Sequence
  HTT spacer sequence CTCN PAM
auuugaccuccagcuaccaa

SEQ ID NO: 20748 - RNA, 20 nt, Artificial Sequence
  HTT spacer sequence CTCN PAM
cuauuugaccuccagcuacc

SEQ ID NO: 20749 - RNA, 20 nt, Artificial Sequence
  HTT spacer sequence CTCN PAM
caagaaaauucccacucucu

SEQ ID NO: 20750 - RNA, 20 nt, Artificial Sequence
  HTT spacer sequence CTCN PAM
ucccaagaaaauucccacuc

SEQ ID NO: 20751 - RNA, 20 nt, Artificial Sequence
  HTT spacer sequence CTCN PAM
aagcaugcauaaaucaccuu

SEQ ID NO: 20752 - RNA, 20 nt, Artificial Sequence
  HTT spacer sequence CTCN PAM
agcagcacaucaaaaagaua

SEQ ID NO: 20753 - RNA, 20 nt, Artificial Sequence
  HTT spacer sequence CTCN PAM
uauucaacauaguacuggaa

SEQ ID NO: 20754 - RNA, 20 nt, Artificial Sequence
  HTT spacer sequence CTCN PAM
ggcuaggacuuccaguacua

SEQ ID NO: 20755 - RNA, 20 nt, Artificial Sequence
  HTT spacer sequence CTCN PAM
ugccugacugcucuggcuag

SEQ ID NO: 20756 - RNA, 20 nt, Artificial Sequence
  HTT spacer sequence CTCN PAM
aauugguaugccuuuuauuu

SEQ ID NO: 20757 - RNA, 20 nt, Artificial Sequence
  HTT spacer sequence CTCN PAM
ucucuaauugguaugccuuu

SEQ ID NO: 20758 - RNA, 20 nt, Artificial Sequence
  HTT spacer sequence CTCN PAM
ucuucucuaauugguaugcc

SEQ ID NO: 20759 - RNA, 20 nt, Artificial Sequence
  HTT spacer sequence CTCN PAM
cucugucacccaggcuggag

SEQ ID NO: 20760 - RNA, 20 nt, Artificial Sequence
  HTT spacer sequence CTCN PAM
gucacccaggcuggagcaca

SEQ ID NO: 20761 - RNA, 20 nt, Artificial Sequence
  HTT spacer sequence CTCN PAM
agccugggugacagagcgag

SEQ ID NO: 20762 - RNA, 20 nt, Artificial Sequence
  HTT spacer sequence CTCN PAM
aacucuuggacucaagggau

SEQ ID NO: 20763 - RNA, 20 nt, Artificial Sequence
  HTT spacer sequence CTCN PAM
uggacucaagggauccuccc

SEQ ID NO: 20764 - RNA, 20 nt, Artificial Sequence
  HTT spacer sequence CTCN PAM
agggauccucccgccucagc

SEQ ID NO: 20765 - RNA, 20 nt, Artificial Sequence
  HTT spacer sequence CTCN PAM
cgccucagccucccaaguag

SEQ ID NO: 20766 - RNA, 20 nt, Artificial Sequence
  HTT spacer sequence CTCN PAM
gccucccaaguagcuagaac

SEQ ID NO: 20767 - RNA, 20 nt, Artificial Sequence
  HTT spacer sequence CTCN PAM
caaguagcuagaacuacagg

SEQ ID NO: 20768 - RNA, 20 nt, Artificial Sequence
  HTT spacer sequence CTCN PAM
gcuagaucauuauugguaua

SEQ ID NO: 20769 - RNA, 20 nt, Artificial Sequence
  HTT spacer sequence CTCN PAM
uuuuugguuccauauaaauu

SEQ ID NO: 20770 - RNA, 20 nt, Artificial Sequence
  HTT spacer sequence CTCN PAM
agcuuuguucuuuuugcuua

SEQ ID NO: 20771 - RNA, 20 nt, Artificial Sequence
  HTT spacer sequence CTCN PAM
auuuuguugucuaguuuuau

SEQ ID NO: 20772 - RNA, 20 nt, Artificial Sequence
  HTT spacer sequence CTCN PAM
cccuugucuacuaaccaugu

SEQ ID NO: 20773 - RNA, 20 nt, Artificial Sequence
  HTT spacer sequence CTCN PAM
cauccagacuggacaugguu

SEQ ID NO: 20774 - RNA, 20 nt, Artificial Sequence
  HTT spacer sequence CTCN PAM
aaggggaaguugucaggcca

SEQ ID NO: 20775 - RNA, 20 nt, Artificial Sequence
  HTT spacer sequence CTCN PAM
uuguacuggaaaagcagcgu

SEQ ID NO: 20776 - RNA, 20 nt, Artificial Sequence
  HTT spacer sequence CTCN PAM
cauuguacuggaaaagcagc

SEQ ID NO: 20777 - RNA, 20 nt, Artificial Sequence
  HTT spacer sequence CTCN PAM
cgccuguaaucccggcacuu

SEQ ID NO: 20778 - RNA, 20 nt, Artificial Sequence
  HTT spacer sequence CTCN PAM
aguaguaauaaauguauuaa

SEQ ID NO: 20779 - RNA, 20 nt, Artificial Sequence
  HTT spacer sequence CTCN PAM
cuuuuuccccuuaaaguuuc

SEQ ID NO: 20780 - RNA, 20 nt, Artificial Sequence
  HTT spacer sequence CTCN PAM
gguugaagcauuuacaauuu

SEQ ID NO: 20781 - RNA, 20 nt, Artificial Sequence
  HTT spacer sequence CTCN PAM
augaaugcaaaauaacaaag

SEQ ID NO: 20782 - RNA, 20 nt, Artificial Sequence
  HTT spacer sequence CTCN PAM
ggaaugcaaguauggucuau

SEQ ID NO: 20783 - RNA, 20 nt, Artificial Sequence
  HTT spacer sequence CTCN PAM
aacacagacuuuaaaauuau

SEQ ID NO: 20784 - RNA, 20 nt, Artificial Sequence
  HTT spacer sequence CTCN PAM
cucaaacacagacuuuaaaa

SEQ ID NO: 20785 - RNA, 20 nt, Artificial Sequence
  HTT spacer sequence CTCN PAM
uacuuucccuucucauuauc

SEQ ID NO: 20786 - RNA, 20 nt, Artificial Sequence
  HTT spacer sequence CTCN PAM
caaaacaaaaaauuaauggu

SEQ ID NO: 20787 - RNA, 20 nt, Artificial Sequence
  HTT spacer sequence CTCN PAM
uccuucucuuuucccucccu

SEQ ID NO: 20788 - RNA, 20 nt, Artificial Sequence
  HTT spacer sequence CTCN PAM
uuucccucccuuucuucucc

SEQ ID NO: 20789 - RNA, 20 nt, Artificial Sequence
  HTT spacer sequence CTCN PAM
cuuucuucuccuuuuccucg

SEQ ID NO: 20790 - RNA, 20 nt, Artificial Sequence
  HTT spacer sequence CTCN PAM
uuuuccucguauauugaauc

SEQ ID NO: 20791 - RNA, 20 nt, Artificial Sequence
  HTT spacer sequence CTCN PAM
uauauugaaucuuauauuuu

SEQ ID NO: 20792 - RNA, 20 nt, Artificial Sequence
  HTT spacer sequence CTCN PAM
cuccagaggauuucaauaac

SEQ ID NO: 20793 - RNA, 20 nt, Artificial Sequence
  HTT spacer sequence CTCN PAM
agaggauuucaauaacuuuu

SEQ ID NO: 20794 - RNA, 20 nt, Artificial Sequence
  HTT spacer sequence CTCN PAM
ggagggaggauaaaaauaaa

SEQ ID NO: 20795 - RNA, 20 nt, Artificial Sequence
  HTT spacer sequence CTCN PAM
agaagaagaucaggcagaug

SEQ ID NO: 20796 - RNA, 20 nt, Artificial Sequence
  HTT spacer sequence CTCN PAM
augugccagucacccaacac

SEQ ID NO: 20797 - RNA, 20 nt, Artificial Sequence
  HTT spacer sequence CTCN PAM
gggauauuacugcauucuuc

SEQ ID NO: 20798 - RNA, 20 nt, Artificial Sequence
  HTT spacer sequence CTCN PAM
cucccugcuuucuugccuua

SEQ ID NO: 20799 - RNA, 20 nt, Artificial Sequence
  HTT spacer sequence CTCN PAM
cugcuuucuugccuuauguu

SEQ ID NO: 20800 - RNA, 20 nt, Artificial Sequence
  HTT spacer sequence CTCN PAM
acuuaaaugucuuuucaugu

SEQ ID NO: 20801 - RNA, 20 nt, Artificial Sequence
  HTT spacer sequence CTCN PAM
gugcggcaggaagaauucca

SEQ ID NO: 20802 - RNA, 20 nt, Artificial Sequence
  HTT spacer sequence CTCN PAM
caccuguaaucccagcacuu

SEQ ID NO: 20803 - RNA, 20 nt, Artificial Sequence
  HTT spacer sequence CTCN PAM
ggggcagccacgucacagau

SEQ ID NO: 20804 - RNA, 20 nt, Artificial Sequence
  HTT spacer sequence CTCN PAM
gauaaaaaccaguuccugcg

SEQ ID NO: 20805 - RNA, 20 nt, Artificial Sequence
  HTT spacer sequence CTCN PAM
gccgcaggaacugguuuuua

SEQ ID NO: 20806 - RNA, 20 nt, Artificial Sequence
  HTT spacer sequence CTCN PAM
uuccccuuccuggccaauga

SEQ ID NO: 20807 - RNA, 20 nt, Artificial Sequence
  HTT spacer sequence CTCN PAM
uuggccaggaaggggaaaga

SEQ ID NO: 20808 - RNA, 20 nt, Artificial Sequence
  HTT spacer sequence CTCN PAM
cauuggccaggaaggggaaa

SEQ ID NO: 20809 - RNA, 20 nt, Artificial Sequence
  HTT spacer sequence CTCN PAM
ucacuguccucucauuggcc

SEQ ID NO: 20810 - RNA, 20 nt, Artificial Sequence
  HTT spacer sequence CTCN PAM
gaagcuggccccaggugguc

SEQ ID NO: 20811 - RNA, 20 nt, Artificial Sequence
  HTT spacer sequence CTCN PAM
cacagugccugucagggggc

SEQ ID NO: 20812 - RNA, 20 nt, Artificial Sequence
  HTT spacer sequence CTCN PAM
ggcacccaaaguaagccccc

SEQ ID NO: 20813 - RNA, 20 nt, Artificial Sequence
  HTT spacer sequence CTCN PAM
gcgggggaggaggaugcgca

SEQ ID NO: 20814 - RNA, 20 nt, Artificial Sequence
  HTT spacer sequence CTCN PAM
cccgcagagucuguccucug

SEQ ID NO: 20815 - RNA, 20 nt, Artificial Sequence
  HTT spacer sequence CTCN PAM
ucccccgcagagucuguccu

SEQ ID NO: 20816 - RNA, 20 nt, Artificial Sequence
  HTT spacer sequence CTCN PAM
cagccugccggcaagggcaa

SEQ ID NO: 20817 - RNA, 20 nt, Artificial Sequence
  HTT spacer sequence CTCN PAM
gcacagggccccagcccugc

SEQ ID NO: 20818 - RNA, 20 nt, Artificial Sequence
  HTT spacer sequence CTCN PAM
uguuaaaacccauacagugu

SEQ ID NO: 20819 - RNA, 20 nt, Artificial Sequence
  HTT spacer sequence CTCN PAM
gggacacacacuguaugggu

SEQ ID NO: 20820 - RNA, 20 nt, Artificial Sequence
  HTT spacer sequence CTCN PAM
uuuuccuugguccccucccc

SEQ ID NO: 20821 - RNA, 20 nt, Artificial Sequence
  HTT spacer sequence CTCN PAM
cccuugggagguuccucugg

SEQ ID NO: 20822 - RNA, 20 nt, Artificial Sequence
  HTT spacer sequence CTCN PAM
caagggggaggggaccaagg

SEQ ID NO: 20823 - RNA, 20 nt, Artificial Sequence
  HTT spacer sequence CTCN PAM
gggccucacuuguuuggacu

SEQ ID NO: 20824 - RNA, 20 nt, Artificial Sequence
  HTT spacer sequence CTCN PAM
cuuguuuggacuuuggcgug

SEQ ID NO: 20825 - RNA, 20 nt, Artificial Sequence
  HTT spacer sequence CTCN PAM
acuucucgggaguggccagg

SEQ ID NO: 20826 - RNA, 20 nt, Artificial Sequence
  HTT spacer sequence CTCN PAM
ggaguggccaggagguacca

SEQ ID NO: 20827 - RNA, 20 nt, Artificial Sequence
  HTT spacer sequence CTCN PAM
cgagaaguggaggucacugg

SEQ ID NO: 20828 - RNA, 20 nt, Artificial Sequence
  HTT spacer sequence CTCN PAM
uggccacucccgagaagugg

SEQ ID NO: 20829 - RNA, 20 nt, Artificial Sequence
  HTT spacer sequence CTCN PAM
uucgcuccccuggcccuggc

SEQ ID NO: 20830 - RNA, 20 nt, Artificial Sequence
  HTT spacer sequence CTCN PAM
ccuggcccuggcagcccucg

SEQ ID NO: 20831 - RNA, 20 nt, Artificial Sequence
  HTT spacer sequence CTCN PAM
ccuuggcagagaggaggaca

SEQ ID NO: 20832 - RNA, 20 nt, Artificial Sequence
  HTT spacer sequence CTCN PAM
gccaaggcgagggcugccag

SEQ ID NO: 20833 - RNA, 20 nt, Artificial Sequence
  HTT spacer sequence CTCN PAM
cugccaaggcgagggcugcc

SEQ ID NO: 20834 - RNA, 20 nt, Artificial Sequence
  HTT spacer sequence CTCN PAM
ucucugccaaggcgagggcu

SEQ ID NO: 20835 - RNA, 20 nt, Artificial Sequence
  HTT spacer sequence CTCN PAM
cagacggccuggcaaggacc

SEQ ID NO: 20836 - RNA, 20 nt, Artificial Sequence
  HTT spacer sequence CTCN PAM
gcugcuaucuaggcaggaac

SEQ ID NO: 20837 - RNA, 20 nt, Artificial Sequence
  HTT spacer sequence CTCN PAM
ggagcuccauucugcucacc

SEQ ID NO: 20838 - RNA, 20 nt, Artificial Sequence
  HTT spacer sequence CTCN PAM
agaggcuggacaaacccgug

SEQ ID NO: 20839 - RNA, 20 nt, Artificial Sequence
  HTT spacer sequence CTCN PAM
auucugcucacccccucuca

SEQ ID NO: 20840 - RNA, 20 nt, Artificial Sequence
  HTT spacer sequence CTCN PAM
cccccucucacuuccuggca

SEQ ID NO: 20841 - RNA, 20 nt, Artificial Sequence
  HTT spacer sequence CTCN PAM
cacuuccuggcauccguguc

SEQ ID NO: 20842 - RNA, 20 nt, Artificial Sequence
  HTT spacer sequence CTCN PAM
cuuccuggcauccguguccc

SEQ ID NO: 20843 - RNA, 20 nt, Artificial Sequence
  HTT spacer sequence CTCN PAM
ccaggggacacggaugccag

SEQ ID NO: 20844 - RNA, 20 nt, Artificial Sequence
  HTT spacer sequence CTCN PAM
ucugauuccucuccuuccug

SEQ ID NO: 20845 - RNA, 20 nt, Artificial Sequence
  HTT spacer sequence CTCN PAM
ccuuccugggcugaguccug

SEQ ID NO: 20846 - RNA, 20 nt, Artificial Sequence
  HTT spacer sequence CTCN PAM
uuccugggcugaguccuggg

SEQ ID NO: 20847 - RNA, 20 nt, Artificial Sequence
  HTT spacer sequence CTCN PAM
gcccaggaaggagaggaauc

SEQ ID NO: 20848 - RNA, 20 nt, Artificial Sequence
  HTT spacer sequence CTCN PAM
gcgcccugggcccuuccugc

SEQ ID NO: 20849 - RNA, 20 nt, Artificial Sequence
  HTT spacer sequence CTCN PAM
cguuggggccgccguggcuu

SEQ ID NO: 20850 - RNA, 20 nt, Artificial Sequence
  HTT spacer sequence CTCN PAM
uggcucagcugacugucucg

SEQ ID NO: 20851 - RNA, 20 nt, Artificial Sequence
  HTT spacer sequence CTCN PAM
gcugacugucucgaguucuc

SEQ ID NO: 20852 - RNA, 20 nt, Artificial Sequence
  HTT spacer sequence CTCN PAM
aguucucggccuccuccugg

SEQ ID NO: 20853 - RNA, 20 nt, Artificial Sequence
  HTT spacer sequence CTCN PAM
agacagucagcugagccagg

SEQ ID NO: 20854 - RNA, 20 nt, Artificial Sequence
  HTT spacer sequence CTCN PAM
gccuccuccuggucacgcug

SEQ ID NO: 20855 - RNA, 20 nt, Artificial Sequence
  HTT spacer sequence CTCN PAM
uccuggucacgcuggccuuc

SEQ ID NO: 20856 - RNA, 20 nt, Artificial Sequence
  HTT spacer sequence CTCN PAM
uggucacgcuggccuuccgg

SEQ ID NO: 20857 - RNA, 20 nt, Artificial Sequence
  HTT spacer sequence CTCN PAM
uucauaacuugacuugucug

SEQ ID NO: 20858 - RNA, 20 nt, Artificial Sequence
  HTT spacer sequence CTCN PAM
ccuccagccccuuccacugu

SEQ ID NO: 20859 - RNA, 20 nt, Artificial Sequence
  HTT spacer sequence CTCN PAM
uccagccccuuccacuguuc

SEQ ID NO: 20860 - RNA, 20 nt, Artificial Sequence
  HTT spacer sequence CTCN PAM
agccccuuccacuguuccaa

SEQ ID NO: 20861 - RNA, 20 nt, Artificial Sequence
  HTT spacer sequence CTCN PAM
gaggcgucuccccaacccuc

SEQ ID NO: 20862 - RNA, 20 nt, Artificial Sequence
  HTT spacer sequence CTCN PAM
gaggaaggggcuuggaacag

SEQ ID NO: 20863 - RNA, 20 nt, Artificial Sequence
  HTT spacer sequence CTCN PAM
ccaacccuccugcugguggc

SEQ ID NO: 20864 - RNA, 20 nt, Artificial Sequence
  HTT spacer sequence CTCN PAM
ugcugguggccgcucuugca

SEQ ID NO: 20865 - RNA, 20 nt, Artificial Sequence
  HTT spacer sequence CTCN PAM
ugcacugcuugggugggcgg

SEQ ID NO: 20866 - RNA, 20 nt, Artificial Sequence
  HTT spacer sequence CTCN PAM
gggcuugacuccucugcugc

SEQ ID NO: 20867 - RNA, 20 nt, Artificial Sequence
  HTT spacer sequence CTCN PAM
ucugcugccacccugagugg

SEQ ID NO: 20868 - RNA, 20 nt, Artificial Sequence
  HTT spacer sequence CTCN PAM
gcugccacccugagugguca

SEQ ID NO: 20869 - RNA, 20 nt, Artificial Sequence
  HTT spacer sequence CTCN PAM
ggguggcagcagaggaguca

SEQ ID NO: 20870 - RNA, 20 nt, Artificial Sequence
  HTT spacer sequence CTCN PAM
cuaggccccguuccacuccu

SEQ ID NO: 20871 - RNA, 20 nt, Artificial Sequence
  HTT spacer sequence CTCN PAM
aggccccguuccacuccugu

SEQ ID NO: 20872 - RNA, 20 nt, Artificial Sequence
  HTT spacer sequence CTCN PAM
ugugggagggcagugaugcu

SEQ ID NO: 20873 - RNA, 20 nt, Artificial Sequence
  HTT spacer sequence CTCN PAM
cacaggaguggaacggggcc

SEQ ID NO: 20874 - RNA, 20 nt, Artificial Sequence
  HTT spacer sequence CTCN PAM
agcaucacugcccucccaca

SEQ ID NO: 20875 - RNA, 20 nt, Artificial Sequence
  HTT spacer sequence CTCN PAM
ccagcaucacugcccuccca

SEQ ID NO: 20876 - RNA, 20 nt, Artificial Sequence
  HTT spacer sequence CTCN PAM
cgcucuccagcaucacugcc

SEQ ID NO: 20877 - RNA, 20 nt, Artificial Sequence
  HTT spacer sequence CTCN PAM
ccgccccucacgcucuccag

SEQ ID NO: 20878 - RNA, 20 nt, Artificial Sequence
  HTT spacer sequence CTCN PAM
gugccugugugccaugacgc

SEQ ID NO: 20879 - RNA, 20 nt, Artificial Sequence
  HTT spacer sequence CTCN PAM
ggggcagccaccaacagucc

SEQ ID NO: 20880 - RNA, 20 nt, Artificial Sequence
  HTT spacer sequence CTCN PAM
gugcccacgugccgugacgc

SEQ ID NO: 20881 - RNA, 20 nt, Artificial Sequence
  HTT spacer sequence CTCN PAM
uguugggugucaccuaguuu

SEQ ID NO: 20882 - RNA, 20 nt, Artificial Sequence
  HTT spacer sequence CTCN PAM
gcccaaacuaggugacaccc

SEQ ID NO: 20883 - RNA, 20 nt, Artificial Sequence
  HTT spacer sequence CTCN PAM
cacuccgcccaaacuaggug

SEQ ID NO: 20884 - RNA, 20 nt, Artificial Sequence
  HTT spacer sequence CTCN PAM
ugacucauugggccgucugg

SEQ ID NO: 20885 - RNA, 20 nt, Artificial Sequence
  HTT spacer sequence CTCN PAM
uugggccgucuggcuuuccc

SEQ ID NO: 20886 - RNA, 20 nt, Artificial Sequence
  HTT spacer sequence CTCN PAM
accuggagagugccucugag

SEQ ID NO: 20887 - RNA, 20 nt, Artificial Sequence
  HTT spacer sequence CTCN PAM
agguggaggugucccgggaa

SEQ ID NO: 20888 - RNA, 20 nt, Artificial Sequence
  HTT spacer sequence CTCN PAM
ccagguggaggugucccggg

SEQ ID NO: 20889 - RNA, 20 nt, Artificial Sequence
  HTT spacer sequence CTCN PAM
gagaaccucccagagucugc

SEQ ID NO: 20890 - RNA, 20 nt, Artificial Sequence
  HTT spacer sequence CTCN PAM
gaggcacucuccagguggag

SEQ ID NO: 20891 - RNA, 20 nt, Artificial Sequence
  HTT spacer sequence CTCN PAM
cagagucugccccuuguguu

SEQ ID NO: 20892 - RNA, 20 nt, Artificial Sequence
  HTT spacer sequence CTCN PAM
gggagguucucagaggcacu

SEQ ID NO: 20893 - RNA, 20 nt, Artificial Sequence
  HTT spacer sequence CTCN PAM
gauggacuuuucguuuccug

SEQ ID NO: 20894 - RNA, 20 nt, Artificial Sequence
  HTT spacer sequence CTCN PAM
aggaaacgaaaaguccaucu

SEQ ID NO: 20895 - RNA, 20 nt, Artificial Sequence
  HTT spacer sequence CTCN PAM
ugacaaaacuccaggaaacg

SEQ ID NO: 20896 - RNA, 20 nt, Artificial Sequence
  HTT spacer sequence CTCN PAM
ugucucucucucuuuucuuu

SEQ ID NO: 20897 - RNA, 20 nt, Artificial Sequence
  HTT spacer sequence CTCN PAM
cucucuuuucuuucagucug

SEQ ID NO: 20898 - RNA, 20 nt, Artificial Sequence
  HTT spacer sequence CTCN PAM
cucuuuucuuucagucugca

SEQ ID NO: 20899 - RNA, 20 nt, Artificial Sequence
  HTT spacer sequence CTCN PAM
cuuuucuuucagucugcaac

SEQ ID NO: 20900 - RNA, 20 nt, Artificial Sequence
  HTT spacer sequence CTCN PAM
uuucuuucagucugcaacug

SEQ ID NO: 20901 - RNA, 20 nt, Artificial Sequence
  HTT spacer sequence CTCN PAM
ggaaggacggguuguuugcc

SEQ ID NO: 20902 - RNA, 20 nt, Artificial Sequence
  HTT spacer sequence CTCN PAM
uugugggcggguucuaggug

SEQ ID NO: 20903 - RNA, 20 nt, Artificial Sequence
  HTT spacer sequence CTCN PAM
ccuagaacccgcccacaagg

SEQ ID NO: 20904 - RNA, 20 nt, Artificial Sequence
  HTT spacer sequence CTCN PAM
gcguguguuuuggaagcugu

SEQ ID NO: 20905 - RNA, 20 nt, Artificial Sequence
  HTT spacer sequence CTCN PAM
uaacaaacagcuuccaaaac

SEQ ID NO: 20906 - RNA, 20 nt, Artificial Sequence
  HTT spacer sequence CTCN PAM
aucacacugguguucagggc

SEQ ID NO: 20907 - RNA, 20 nt, Artificial Sequence
  HTT spacer sequence CTCN PAM
gacacacagcgcucuaucac

SEQ ID NO: 20908 - RNA, 20 nt, Artificial Sequence
  HTT spacer sequence CTCN PAM
ucagacacacagcgcucuau

SEQ ID NO: 20909 - RNA, 20 nt, Artificial Sequence
  HTT spacer sequence CTCN PAM
ucccuuguuguauaaccagc

SEQ ID NO: 20910 - RNA, 20 nt, Artificial Sequence
  HTT spacer sequence CTCN PAM
aauucagaaagcacuuugaa

SEQ ID NO: 20911 - RNA, 20 nt, Artificial Sequence
  HTT spacer sequence CTCN PAM
cccaaauuuccugaauugcu

SEQ ID NO: 20912 - RNA, 20 nt, Artificial Sequence
  HTT spacer sequence CTCN PAM
agaaaaguauaauagacgaa

SEQ ID NO: 20913 - RNA, 20 nt, Artificial Sequence
  HTT spacer sequence CTCN PAM
auucgucuauuauacuuuuc

SEQ ID NO: 20914 - RNA, 20 nt, Artificial Sequence
  HTT spacer sequence CTCN PAM
caauucgucuauuauacuuu

SEQ ID NO: 20915 - RNA, 20 nt, Artificial Sequence
  HTT spacer sequence CTCN PAM
ucaucccacacucucaauuc

SEQ ID NO: 20916 - RNA, 20 nt, Artificial Sequence
  HTT spacer sequence CTCN PAM
gaugucauccuuaucauuuu

SEQ ID NO: 20917 - RNA, 20 nt, Artificial Sequence
  HTT spacer sequence CTCN PAM
ccaaaguaaggagaguuccu

SEQ ID NO: 20918 - RNA, 20 nt, Artificial Sequence
  HTT spacer sequence CTCN PAM
aaaguaaggagaguuccucc

SEQ ID NO: 20919 - RNA, 20 nt, Artificial Sequence
  HTT spacer sequence CTCN PAM
uuacuuuggagagguuuuuu

SEQ ID NO: 20920 - RNA, 20 nt, Artificial Sequence
  HTT spacer sequence CTCN PAM
ccuuacuuuggagagguuuu

SEQ ID NO: 20921 - RNA, 20 nt, Artificial Sequence
  HTT spacer sequence CTCN PAM
gaaauauuccucuuuucuuc

SEQ ID NO: 20922 - RNA, 20 nt, Artificial Sequence
  HTT spacer sequence CTCN PAM
uuucuucuaacacuccugac

SEQ ID NO: 20923 - RNA, 20 nt, Artificial Sequence
  HTT spacer sequence CTCN PAM
ugacaguccgcaggcucucg

SEQ ID NO: 20924 - RNA, 20 nt, Artificial Sequence
  HTT spacer sequence CTCN PAM
cggguuucaucgucaccuca

SEQ ID NO: 20925 - RNA, 20 nt, Artificial Sequence
  HTT spacer sequence CTCN PAM
gguuucaucgucaccucacg

SEQ ID NO: 20926 - RNA, 20 nt, Artificial Sequence
  HTT spacer sequence CTCN PAM
cgcuuuuguccccacuucug

SEQ ID NO: 20927 - RNA, 20 nt, Artificial Sequence
  HTT spacer sequence CTCN PAM
gggacagaaguggggacaaa

SEQ ID NO: 20928 - RNA, 20 nt, Artificial Sequence
  HTT spacer sequence CTCN PAM
cagggacagaaguggggaca

SEQ ID NO: 20929 - RNA, 20 nt, Artificial Sequence
  HTT spacer sequence CTCN PAM
gcccaucccuggcccacagc

SEQ ID NO: 20930 - RNA, 20 nt, Artificial Sequence
  HTT spacer sequence CTCN PAM
aacccaccggccccugggca

SEQ ID NO: 20931 - RNA, 20 nt, Artificial Sequence
  HTT spacer sequence CTCN PAM
uuaacgcacaaauacagugg

SEQ ID NO: 20932 - RNA, 20 nt, Artificial Sequence
  HTT spacer sequence CTCN PAM
cacuuucugugguccugcag

SEQ ID NO: 20933 - RNA, 20 nt, Artificial Sequence
  HTT spacer sequence CTCN PAM
cuuucugugguccugcagcu

SEQ ID NO: 20934 - RNA, 20 nt, Artificial Sequence
  HTT spacer sequence CTCN PAM
guccucggccucggaaaggg

SEQ ID NO: 20935 - RNA, 20 nt, Artificial Sequence
  HTT spacer sequence CTCN PAM
gccucggaaagggcugcugu

SEQ ID NO: 20936 - RNA, 20 nt, Artificial Sequence
  HTT spacer sequence CTCN PAM
gaaagggcugcuguccccag

SEQ ID NO: 20937 - RNA, 20 nt, Artificial Sequence
  HTT spacer sequence CTCN PAM
gucugccuaccuggggacag

SEQ ID NO: 20938 - RNA, 20 nt, Artificial Sequence
  HTT spacer sequence CTCN PAM
gagcccucgcaggccagcca

SEQ ID NO: 20939 - RNA, 20 nt, Artificial Sequence
  HTT spacer sequence CTCN PAM
gagcucugucugccuaccug

SEQ ID NO: 20940 - RNA, 20 nt, Artificial Sequence
  HTT spacer sequence CTCN PAM
caggccagccacucuguagg

SEQ ID NO: 20941 - RNA, 20 nt, Artificial Sequence
  HTT spacer sequence CTCN PAM
guaggaaggccaggaggacc

SEQ ID NO: 20942 - RNA, 20 nt, Artificial Sequence
  HTT spacer sequence CTCN PAM
uggccuuccuacagaguggc

SEQ ID NO: 20943 - RNA, 20 nt, Artificial Sequence
  HTT spacer sequence CTCN PAM
gucugcccaccugggguccu

SEQ ID NO: 20944 - RNA, 20 nt, Artificial Sequence
  HTT spacer sequence CTCN PAM
gagcccuugugggccagcgg

SEQ ID NO: 20945 - RNA, 20 nt, Artificial Sequence
  HTT spacer sequence CTCN PAM
gagcucugucugcccaccug

SEQ ID NO: 20946 - RNA, 20 nt, Artificial Sequence
  HTT spacer sequence CTCN PAM
guaggaggaggagcauaucu

SEQ ID NO: 20947 - RNA, 20 nt, Artificial Sequence
  HTT spacer sequence CTCN PAM
uacagagccgcuggcccaca

SEQ ID NO: 20948 - RNA, 20 nt, Artificial Sequence
  HTT spacer sequence CTCN PAM
uccuacagagccgcuggccc

SEQ ID NO: 20949 - RNA, 20 nt, Artificial Sequence
  HTT spacer sequence CTCN PAM
uccuccuacagagccgcugg

SEQ ID NO: 20950 - RNA, 20 nt, Artificial Sequence
  HTT spacer sequence CTCN PAM
gcuucaggugccagugcgug

SEQ ID NO: 20951 - RNA, 20 nt, Artificial Sequence
  HTT spacer sequence CTCN PAM
ggucucggcuucaggugcca

SEQ ID NO: 20952 - RNA, 20 nt, Artificial Sequence
  HTT spacer sequence CTCN PAM
ugugguggagauguauuuug

SEQ ID NO: 20953 - RNA, 20 nt, Artificial Sequence
  HTT spacer sequence CTCN PAM
accacacgagugucgggauc

SEQ ID NO: 20954 - RNA, 20 nt, Artificial Sequence
  HTT spacer sequence CTCN PAM
accuuaagacugauuaaaug

SEQ ID NO: 20955 - RNA, 20 nt, Artificial Sequence
  HTT spacer sequence CTCN PAM
cuccaccuuaagacugauua

SEQ ID NO: 20956 - RNA, 20 nt, Artificial Sequence
  HTT spacer sequence CTCN PAM
uucugccguguucucacuuc

SEQ ID NO: 20957 - RNA, 20 nt, Artificial Sequence
  HTT spacer sequence CTCN PAM
cuucuccuuucuggcagaag

SEQ ID NO: 20958 - RNA, 20 nt, Artificial Sequence
  HTT spacer sequence CTCN PAM
uuucuggcagaagacauuca

SEQ ID NO: 20959 - RNA, 20 nt, Artificial Sequence
  HTT spacer sequence CTCN PAM
aaaagauugcuucugucagc

SEQ ID NO: 20960 - RNA, 20 nt, Artificial Sequence
  HTT spacer sequence CTCN PAM
ggguuccugcaucuauugcu

SEQ ID NO: 20961 - RNA, 20 nt, Artificial Sequence
  HTT spacer sequence CTCN PAM
caagggugggaagucucuag

SEQ ID NO: 20962 - RNA, 20 nt, Artificial Sequence
  HTT spacer sequence CTCN PAM
agcuccucgccgugcuggcu

SEQ ID NO: 20963 - RNA, 20 nt, Artificial Sequence
  HTT spacer sequence CTCN PAM
ucgccgugcuggcucugugu

SEQ ID NO: 20964 - RNA, 20 nt, Artificial Sequence
  HTT spacer sequence CTCN PAM
ccgugcuggcucuguguguc

SEQ ID NO: 20965 - RNA, 20 nt, Artificial Sequence
  HTT spacer sequence CTCN PAM
gugugucccucugaggaagu

SEQ ID NO: 20966 - RNA, 20 nt, Artificial Sequence
  HTT spacer sequence CTCN PAM
gaggaaguguguccuggcuc

SEQ ID NO: 20967 - RNA, 20 nt, Artificial Sequence
  HTT spacer sequence CTCN PAM
gagggacacacagagccagc

SEQ ID NO: 20968 - RNA, 20 nt, Artificial Sequence
  HTT spacer sequence CTCN PAM
ucgccacgcuggcucugugu

SEQ ID NO: 20969 - RNA, 20 nt, Artificial Sequence
  HTT spacer sequence CTCN PAM
ccacgcuggcucuguguguc

SEQ ID NO: 20970 - RNA, 20 nt, Artificial Sequence
  HTT spacer sequence CTCN PAM
gugugucccucugaggaagu

SEQ ID NO: 20971 - RNA, 20 nt, Artificial Sequence
  HTT spacer sequence CTCN PAM
gaggaaguguauccuggcca

SEQ ID NO: 20972 - RNA, 20 nt, Artificial Sequence
  HTT spacer sequence CTCN PAM
gagggacacacagagccagc

SEQ ID NO: 20973 - RNA, 20 nt, Artificial Sequence
  HTT spacer sequence CTCN PAM
gcguggccaggauacacuuc

SEQ ID NO: 20974 - RNA, 20 nt, Artificial Sequence
  HTT spacer sequence CTCN PAM
uccuucuuuucccaguguca

SEQ ID NO: 20975 - RNA, 20 nt, Artificial Sequence
  HTT spacer sequence CTCN PAM
uucuuuucccagugucagac

SEQ ID NO: 20976 - RNA, 20 nt, Artificial Sequence
  HTT spacer sequence CTCN PAM
auggagagccccagucacag

SEQ ID NO: 20977 - RNA, 20 nt, Artificial Sequence
  HTT spacer sequence CTCN PAM
auggagggacgggccugucc

SEQ ID NO: 20978 - RNA, 20 nt, Artificial Sequence
  HTT spacer sequence CTCN PAM
ccauggagggacgggccugu

SEQ ID NO: 20979 - RNA, 20 nt, Artificial Sequence
  HTT spacer sequence CTCN PAM
gugacuggggcucuccaugg

SEQ ID NO: 20980 - RNA, 20 nt, Artificial Sequence
  HTT spacer sequence CTCN PAM
ucugugacuggggcucucca

SEQ ID NO: 20981 - RNA, 20 nt, Artificial Sequence
  HTT spacer sequence CTCN PAM
uccucugugacuggggcucu

SEQ ID NO: 20982 - RNA, 20 nt, Artificial Sequence
  HTT spacer sequence CTCN PAM
cgucuccuccucugugacug

SEQ ID NO: 20983 - RNA, 20 nt, Artificial Sequence
  HTT spacer sequence CTCN PAM
cucccgucuccuccucugug

SEQ ID NO: 20984 - RNA, 20 nt, Artificial Sequence
  HTT spacer sequence CTCN PAM
ucccucccgucuccuccucu

SEQ ID NO: 20985 - RNA, 20 nt, Artificial Sequence
  HTT spacer sequence CTCN PAM
uccucccucccgucuccucc

SEQ ID NO: 20986 - RNA, 20 nt, Artificial Sequence
  HTT spacer sequence CTCN PAM
cgucuccuccucccucccgu

SEQ ID NO: 20987 - RNA, 20 nt, Artificial Sequence
  HTT spacer sequence CTCN PAM
cucccgucuccuccucccuc

SEQ ID NO: 20988 - RNA, 20 nt, Artificial Sequence
  HTT spacer sequence CTCN PAM
ucccucccgucuccuccucc

SEQ ID NO: 20989 - RNA, 20 nt, Artificial Sequence
  HTT spacer sequence CTCN PAM
uccucccucccgucuccucc

SEQ ID NO: 20990 - RNA, 20 nt, Artificial Sequence
  HTT spacer sequence CTCN PAM
cgucuccuccucccucccgu

SEQ ID NO: 20991 - RNA, 20 nt, Artificial Sequence
  HTT spacer sequence CTCN PAM
cucccgucuccuccucccuc

SEQ ID NO: 20992 - RNA, 20 nt, Artificial Sequence
  HTT spacer sequence CTCN PAM
ucccucccgucuccuccucc

SEQ ID NO: 20993 - RNA, 20 nt, Artificial Sequence
  HTT spacer sequence CTCN PAM
uccucccucccgucuccucc

SEQ ID NO: 20994 - RNA, 20 nt, Artificial Sequence
  HTT spacer sequence CTCN PAM
cgucuccuccucccucccgu

SEQ ID NO: 20995 - RNA, 20 nt, Artificial Sequence
  HTT spacer sequence CTCN PAM
cucccgucuccuccucccuc

SEQ ID NO: 20996 - RNA, 20 nt, Artificial Sequence
  HTT spacer sequence CTCN PAM
ucccucccgucuccuccucc

SEQ ID NO: 20997 - RNA, 20 nt, Artificial Sequence
  HTT spacer sequence CTCN PAM
uauaagcaaagaaacugaag

SEQ ID NO: 20998 - RNA, 20 nt, Artificial Sequence
  HTT spacer sequence CTCN PAM
uuuuacucuuauaagcaaag

SEQ ID NO: 20999 - RNA, 20 nt, Artificial Sequence
  HTT spacer sequence CTCN PAM
ugugcacauuaaacaagaua

SEQ ID NO: 21000 - RNA, 20 nt, Artificial Sequence
  HTT spacer sequence CTCN PAM
agaucggugucacauucugc

SEQ ID NO: 21001 - RNA, 20 nt, Artificial Sequence
  HTT spacer sequence CTCN PAM
gugcccuacaucuaacaacg

SEQ ID NO: 21002 - RNA, 20 nt, Artificial Sequence
  HTT spacer sequence CTCN PAM
gccucggugcccuacaucua

SEQ ID NO: 21003 - RNA, 20 nt, Artificial Sequence
  HTT spacer sequence CTCN PAM
ccacucugccucggugcccu

SEQ ID NO: 21004 - RNA, 20 nt, Artificial Sequence
  HTT spacer sequence CTCN PAM
caguagucugcaggugagau

SEQ ID NO: 21005 - RNA, 20 nt, Artificial Sequence
  HTT spacer sequence CTCN PAM
ccugcagacuacugugagcu

SEQ ID NO: 21006 - RNA, 20 nt, Artificial Sequence
  HTT spacer sequence CTCN PAM
ggccugcaggggaaagcccu

SEQ ID NO: 21007 - RNA, 20 nt, Artificial Sequence
  HTT spacer sequence CTCN PAM
gccagggcuuuccccugcag

SEQ ID NO: 21008 - RNA, 20 nt, Artificial Sequence
  HTT spacer sequence CTCN PAM
cagccagggcuuuccccugc

SEQ ID NO: 21009 - RNA, 20 nt, Artificial Sequence
  HTT spacer sequence CTCN PAM
acccuggcucccacccaccc

SEQ ID NO: 21010 - RNA, 20 nt, Artificial Sequence
  HTT spacer sequence CTCN PAM
cacccaccccccagcccugg

SEQ ID NO: 21011 - RNA, 20 nt, Artificial Sequence
  HTT spacer sequence CTCN PAM
acacgcccagccccaugguc

SEQ ID NO: 21012 - RNA, 20 nt, Artificial Sequence
  HTT spacer sequence CTCN PAM
aggaccauggggcugggcgu

SEQ ID NO: 21013 - RNA, 20 nt, Artificial Sequence
  HTT spacer sequence CTCN PAM
ccaggaccauggggcugggc

SEQ ID NO: 21014 - RNA, 20 nt, Artificial Sequence
  HTT spacer sequence CTCN PAM
agcccuggacccuccagcgc

SEQ ID NO: 21015 - RNA, 20 nt, Artificial Sequence
  HTT spacer sequence CTCN PAM
agcgccugcagccccugcug

SEQ ID NO: 21016 - RNA, 20 nt, Artificial Sequence
  HTT spacer sequence CTCN PAM
ggcagaaagaggcccccucc

SEQ ID NO: 21017 - RNA, 20 nt, Artificial Sequence
  HTT spacer sequence CTCN PAM
uucugccugaggcaccagaa

SEQ ID NO: 21018 - RNA, 20 nt, Artificial Sequence
  HTT spacer sequence CTCN PAM
cccacacccugcccuccacg

SEQ ID NO: 21019 - RNA, 20 nt, Artificial Sequence
  HTT spacer sequence CTCN PAM
acggcagugacaggagccug

SEQ ID NO: 21020 - RNA, 20 nt, Artificial Sequence
  HTT spacer sequence CTCN PAM
ugucacugccguggagggca

SEQ ID NO: 21021 - RNA, 20 nt, Artificial Sequence
  HTT spacer sequence CTCN PAM
ggcuguguuuccacacagag

SEQ ID NO: 21022 - RNA, 20 nt, Artificial Sequence
  HTT spacer sequence CTCN PAM
guguggaaacacagccagag

SEQ ID NO: 21023 - RNA, 20 nt, Artificial Sequence
  HTT spacer sequence CTCN PAM
cacugaccacagccuauaaa

SEQ ID NO: 21024 - RNA, 20 nt, Artificial Sequence
  HTT spacer sequence CTCN PAM
gugcacugaggugggccugg

SEQ ID NO: 21025 - RNA, 20 nt, Artificial Sequence
  HTT spacer sequence CTCN PAM
gugcacugagucucccacug

SEQ ID NO: 21026 - RNA, 20 nt, Artificial Sequence
  HTT spacer sequence CTCN PAM
agcaccccaguguuuuuaug

SEQ ID NO: 21027 - RNA, 20 nt, Artificial Sequence
  HTT spacer sequence CTCN PAM
ccgaguuccaaggagggacu

SEQ ID NO: 21028 - RNA, 20 nt, Artificial Sequence
  HTT spacer sequence CTCN PAM
gggagcauuuuucccauaaa

SEQ ID NO: 21029 - RNA, 20 nt, Artificial Sequence
  HTT spacer sequence CTCN PAM
uuggaacucggggagcauuu

SEQ ID NO: 21030 - RNA, 20 nt, Artificial Sequence
  HTT spacer sequence CTCN PAM
gucccuccuuggaacucggg

SEQ ID NO: 21031 - RNA, 20 nt, Artificial Sequence
  HTT spacer sequence CTCN PAM
ucagucccuccuuggaacuc

SEQ ID NO: 21032 - RNA, 20 nt, Artificial Sequence
  HTT spacer sequence CTCN PAM
ccaagccaacuccucagucc

SEQ ID NO: 21033 - RNA, 20 nt, Artificial Sequence
  HTT spacer sequence CTCN PAM
gcugggcugucucugccugg

SEQ ID NO: 21034 - RNA, 20 nt, Artificial Sequence
  HTT spacer sequence CTCN PAM
gccuggucauccugucuagu

SEQ ID NO: 21035 - RNA, 20 nt, Artificial Sequence
  HTT spacer sequence CTCN PAM
cuuagaaauauuuuguguuc

SEQ ID NO: 21036 - RNA, 20 nt, Artificial Sequence
  HTT spacer sequence CTCN PAM
uugaacacaaaauauuucua

SEQ ID NO: 21037 - RNA, 20 nt, Artificial Sequence
  HTT spacer sequence CTCN PAM
cuggcacggcucguugaaca

SEQ ID NO: 21038 - RNA, 20 nt, Artificial Sequence
  HTT spacer sequence CTCN PAM
cacuggcacggcucguugaa

SEQ ID NO: 21039 - RNA, 20 nt, Artificial Sequence
  HTT spacer sequence CTCN PAM
cucacuggcacggcucguug

SEQ ID NO: 21040 - RNA, 20 nt, Artificial Sequence
  HTT spacer sequence CTCN PAM
cgcuggagaguuuuaguuuu

SEQ ID NO: 21041 - RNA, 20 nt, Artificial Sequence
  HTT spacer sequence CTCN PAM
cuggagaguuuuaguuuugu

SEQ ID NO: 21042 - RNA, 20 nt, Artificial Sequence
  HTT spacer sequence CTCN PAM
agcgagagccuaagcuauaa

SEQ ID NO: 21043 - RNA, 20 nt, Artificial Sequence
  HTT spacer sequence CTCN PAM
ccagcgagagccuaagcuau

SEQ ID NO: 21044 - RNA, 20 nt, Artificial Sequence
  HTT spacer sequence CTCN PAM
guuuuaaggaaguuggacua

SEQ ID NO: 21045 - RNA, 20 nt, Artificial Sequence
  HTT spacer sequence CTCN PAM
aacuugacaaagauugccaa

SEQ ID NO: 21046 - RNA, 20 nt, Artificial Sequence
  HTT spacer sequence CTCN PAM
uuggcuacaaacggguggcc

SEQ ID NO: 21047 - RNA, 20 nt, Artificial Sequence
  HTT spacer sequence CTCN PAM
ggaaaaaggguuacagcugg

SEQ ID NO: 21048 - RNA, 20 nt, Artificial Sequence
  HTT spacer sequence CTCN PAM
ggggggcacggcagggcugu

SEQ ID NO: 21049 - RNA, 20 nt, Artificial Sequence
  HTT spacer sequence CTCN PAM
cugcccccacccacagcccu

SEQ ID NO: 21050 - RNA, 20 nt, Artificial Sequence
  HTT spacer sequence CTCN PAM
agcuggaaucugcucccugc

SEQ ID NO: 21051 - RNA, 20 nt, Artificial Sequence
  HTT spacer sequence CTCN PAM
ccagcuggaaucugcucccu

SEQ ID NO: 21052 - RNA, 20 nt, Artificial Sequence
  HTT spacer sequence CTCN PAM
auaaugcuagaaugugcuuc

SEQ ID NO: 21053 - RNA, 20 nt, Artificial Sequence
  HTT spacer sequence CTCN PAM
cuauaaugcuagaaugugcu

SEQ ID NO: 21054 - RNA, 20 nt, Artificial Sequence
  HTT spacer sequence CTCN PAM
cacuucugucugaauaacuu

SEQ ID NO: 21055 - RNA, 20 nt, Artificial Sequence
  HTT spacer sequence CTCN PAM
accucacacuucugucugaa

SEQ ID NO: 21056 - RNA, 20 nt, Artificial Sequence
  HTT spacer sequence CTCN PAM
agcucgaccucacacuucug

SEQ ID NO: 21057 - RNA, 20 nt, Artificial Sequence
  HTT spacer sequence CTCN PAM
cuccagcucgaccucacacu

SEQ ID NO: 21058 - RNA, 20 nt, Artificial Sequence
  HTT spacer sequence CTCN PAM
uuucuucacaacgccccauc

SEQ ID NO: 21059 - RNA, 20 nt, Artificial Sequence
  HTT spacer sequence CTCN PAM
uggaaaaaggaaccucucac

SEQ ID NO: 21060 - RNA, 20 nt, Artificial Sequence
  HTT spacer sequence CTCN PAM
caccucuccuggucuggcuc

SEQ ID NO: 21061 - RNA, 20 nt, Artificial Sequence
  HTT spacer sequence CTCN PAM
ccucuccuggucuggcucug

SEQ ID NO: 21062 - RNA, 20 nt, Artificial Sequence
  HTT spacer sequence CTCN PAM
ccuggucuggcucugcacag

SEQ ID NO: 21063 - RNA, 20 nt, Artificial Sequence
  HTT spacer sequence CTCN PAM
uggucuggcucugcacagag

SEQ ID NO: 21064 - RNA, 20 nt, Artificial Sequence
  HTT spacer sequence CTCN PAM
gcacagagcuggagccgcgg

SEQ ID NO: 21065 - RNA, 20 nt, Artificial Sequence
  HTT spacer sequence CTCN PAM
gugcagagccagaccaggag

SEQ ID NO: 21066 - RNA, 20 nt, Artificial Sequence
  HTT spacer sequence CTCN PAM
agcucugugcagagccagac

SEQ ID NO: 21067 - RNA, 20 nt, Artificial Sequence
  HTT spacer sequence CTCN PAM
guuggucaagcucugugcca

SEQ ID NO: 21068 - RNA, 20 nt, Artificial Sequence
  HTT spacer sequence CTCN PAM
gugccaagaggccugccaga

SEQ ID NO: 21069 - RNA, 20 nt, Artificial Sequence
  HTT spacer sequence CTCN PAM
uggcacagagcuugaccaac

SEQ ID NO: 21070 - RNA, 20 nt, Artificial Sequence
  HTT spacer sequence CTCN PAM
cccacugcagccuccacagg

SEQ ID NO: 21071 - RNA, 20 nt, Artificial Sequence
  HTT spacer sequence CTCN PAM
acagguggauguucccgcug

SEQ ID NO: 21072 - RNA, 20 nt, Artificial Sequence
  HTT spacer sequence CTCN PAM
ccuucugaagucggggugug

SEQ ID NO: 21073 - RNA, 20 nt, Artificial Sequence
  HTT spacer sequence CTCN PAM
acaccccgacuucagaaggu

SEQ ID NO: 21074 - RNA, 20 nt, Artificial Sequence
  HTT spacer sequence CTCN PAM
ccgauagucuccacaccccg

SEQ ID NO: 21075 - RNA, 20 nt, Artificial Sequence
  HTT spacer sequence CTCN PAM
cagagcgcccaccuccuccu

SEQ ID NO: 21076 - RNA, 20 nt, Artificial Sequence
  HTT spacer sequence CTCN PAM
gggagcuccccgauagucuc

SEQ ID NO: 21077 - RNA, 20 nt, Artificial Sequence
  HTT spacer sequence CTCN PAM
uccugcguacggcgucugug

SEQ ID NO: 21078 - RNA, 20 nt, Artificial Sequence
  HTT spacer sequence CTCN PAM
ugcguacggcgucugugcca

SEQ ID NO: 21079 - RNA, 20 nt, Artificial Sequence
  HTT spacer sequence CTCN PAM
ggcuuugggggacgguggca

SEQ ID NO: 21080 - RNA, 20 nt, Artificial Sequence
  HTT spacer sequence CTCN PAM
agcugcuucucaaacacucc

SEQ ID NO: 21081 - RNA, 20 nt, Artificial Sequence
  HTT spacer sequence CTCN PAM
aacacuccguucucgcagcc

SEQ ID NO: 21082 - RNA, 20 nt, Artificial Sequence
  HTT spacer sequence CTCN PAM
guucucgcagccucacccug

SEQ ID NO: 21083 - RNA, 20 nt, Artificial Sequence
  HTT spacer sequence CTCN PAM
cagccucacccuggggaccc

SEQ ID NO: 21084 - RNA, 20 nt, Artificial Sequence
  HTT spacer sequence CTCN PAM
cccuggggacccccgacacg

SEQ ID NO: 21085 - RNA, 20 nt, Artificial Sequence
  HTT spacer sequence CTCN PAM
auccccauguccuccucaug

SEQ ID NO: 21086 - RNA, 20 nt, Artificial Sequence
  HTT spacer sequence CTCN PAM
ucaugccuugugccucagcu

SEQ ID NO: 21087 - RNA, 20 nt, Artificial Sequence
  HTT spacer sequence CTCN PAM
ugccuugugccucagcucug

SEQ ID NO: 21088 - RNA, 20 nt, Artificial Sequence
  HTT spacer sequence CTCN PAM
gcucugcccugaccccacuc

SEQ ID NO: 21089 - RNA, 20 nt, Artificial Sequence
  HTT spacer sequence CTCN PAM
gcccugaccccacucugucc

SEQ ID NO: 21090 - RNA, 20 nt, Artificial Sequence
  HTT spacer sequence CTCN PAM
guccacucagcugccccccu

SEQ ID NO: 21091 - RNA, 20 nt, Artificial Sequence
  HTT spacer sequence CTCN PAM
gcugccccccuacucguccu

SEQ ID NO: 21092 - RNA, 20 nt, Artificial Sequence
  HTT spacer sequence CTCN PAM
uccuccaugcagaccucagu

SEQ ID NO: 21093 - RNA, 20 nt, Artificial Sequence
  HTT spacer sequence CTCN PAM
augcagaccucagucuuggc

SEQ ID NO: 21094 - RNA, 20 nt, Artificial Sequence
  HTT spacer sequence CTCN PAM
gucuuggcccugucucugca

SEQ ID NO: 21095 - RNA, 20 nt, Artificial Sequence
  HTT spacer sequence CTCN PAM
gcagccauccucccgcuccc

SEQ ID NO: 21096 - RNA, 20 nt, Artificial Sequence
  HTT spacer sequence CTCN PAM
cgcucccuucuccugaacgc

SEQ ID NO: 21097 - RNA, 20 nt, Artificial Sequence
  HTT spacer sequence CTCN PAM
cuucuccugaacgcuggugg

SEQ ID NO: 21098 - RNA, 20 nt, Artificial Sequence
  HTT spacer sequence CTCN PAM
ugaacgcuggugguugcccc

SEQ ID NO: 21099 - RNA, 20 nt, Artificial Sequence
  HTT spacer sequence CTCN PAM
accagcucagagccccuguu

SEQ ID NO: 21100 - RNA, 20 nt, Artificial Sequence
  HTT spacer sequence CTCN PAM
gagccccuguucccccaacc

SEQ ID NO: 21101 - RNA, 20 nt, Artificial Sequence
  HTT spacer sequence CTCN PAM
gagcugguggagggguccag

SEQ ID NO: 21102 - RNA, 20 nt, Artificial Sequence
  HTT spacer sequence CTCN PAM
aauggugccucaggcacaug

SEQ ID NO: 21103 - RNA, 20 nt, Artificial Sequence
  HTT spacer sequence CTCN PAM
ggcacaugcgguuucccucu

SEQ ID NO: 21104 - RNA, 20 nt, Artificial Sequence
  HTT spacer sequence CTCN PAM
ucccuuccugaccaccugcc

SEQ ID NO: 21105 - RNA, 20 nt, Artificial Sequence
  HTT spacer sequence CTCN PAM
ggaugggggcagguggucag

SEQ ID NO: 21106 - RNA, 20 nt, Artificial Sequence
  HTT spacer sequence CTCN PAM
acguggcaggucagaguugu

(The sequence listing continues in the following parts.)

1. A polynucleotide comprising the following component sequences:
a. a first AAV inverted terminal repeat (ITR) sequence;
b. a second AAV ITR sequence;
c. a first promoter sequence;
d. a sequence encoding a CRISPR protein;
e. a sequence encoding a first guide RNA (gRNA); and,
f. optionally, at least one accessory element sequence,
wherein the polynucleotide is configured for incorporation into a recombinant adeno-associated virus (AAV).

2. The polynucleotide of claim 1, wherein the sequences encoding the CRISPR protein and the first gRNA are less than about 3100, less than about 3090, less than about 3080, less than about 3070, less than about 3060, less than about 3050, or less than about 3040 nucleotides in combined length.

3. The polynucleotide of claim 1 or 2, wherein the sequences of the first promoter and the at least one accessory element have greater than at least about 1300, at least about 1350, at least about 1360, at least about 1370, at least about 1380, at least about 1390, at least about 1400, at least about 1500, at least about 1600 nucleotides, at least 1650, at least about 1700, at least about 1750, at least about 1800, at least about 1850, or at least about 1900 nucleotides in combined length.

4. The polynucleotide of claim 1 or 2, wherein the sequences of the first promoter and the at least one accessory element have greater than 1314 nucleotides in combined length.

5. The polynucleotide of claim 1 or 2, wherein the sequences of the first promoter and the at least one accessory element have greater than 1381 nucleotides in combined length.

6. The polynucleotide of any one of claims 1-5, wherein the first promoter sequence and the sequence encoding the CRISPR protein are operably linked.

7. The polynucleotide of claim 6, wherein the first promoter is a pol II promoter.

8. The polynucleotide of claim 6 or claim 7, wherein the first promoter is selected from the group consisting of polyubiquitin C (UBC) promoter, cytomegalovirus (CMV) promoter, simian virus 40 (SV40) promoter, chicken beta-Actin promoter and rabbit beta-Globin splice acceptor site fusion (CAG), chicken β-actin promoter with cytomegalovirus enhancer (CB7), PGK promoter, Jens Tornoe (JeT) promoter, GUSB promoter, CBA hybrid (CBh) promoter, elongation factor-1 alpha (EF-1alpha) promoter, beta-actin promoter, Rous sarcoma virus (RSV) promoter, silencing-prone spleen focus forming virus (SFFV) promoter, CMVd1 promoter, truncated human CMV (tCMVd2), minimal CMV promoter, hepB promoter, chicken β-actin promoter, HSV TK promoter, Mini-TK promoter, minimal IL-2 promoter, GRP94 promoter, Super Core Promoter 1, Super Core Promoter 2, Super Core Promoter 3, adenovirus major late (AdML) promoter, MLC promoter, MCK promoter, GRK1 protein promoter, Rho promoter, CAR protein promoter, hSyn Promoter, U1a promoter, Ribosomal Protein Large subunit 30 (Rpl30) promoter, Ribosomal Protein Small subunit 18 (Rps18) promoter, CMV53 promoter, minimal SV40 promoter, CMV53 promoter, SFCp promoter, Mecp2 promoter, pJB42CAT5 promoter, MLP promoter, EFS promoter, MeP426 promoter, MecP2 promoter, MHCK7 promoter, beta-glucuronidase (GUSB) promoter, CK7 promoter, and CK8e promoter.

9. The polynucleotide of claim 8, wherein the first promoter is a truncated variant of the UBC, CMV, SV40, CAG, CB7, PGK, JeT, GUSB, CB, EF-1alpha, beta-actin, RSV, SFFV, CMVd1, tCMVd2, minimal CMV, chicken β-actin, HSV TK, Mini-TK, minimal IL-2, GRP94, Super Core Promoter 1, Super Core Promoter 2, MLC, MCK, GRK1 protein Rho, CAR protein, hSyn, U1a, Ribosomal Protein Large subunit 30 (Rpl30), Ribosomal Protein Small subunit 18 (Rps18), CMV53, minimal SV40, CMV53, SFCp, pJB42CAT5, MLP, EFS, MeP426, MecP2, MHCK7, CK7, or CK8e promoter.

10. The polynucleotide of claim 7 or claim 8, wherein the first promoter sequence has less than about 400 nucleotides, less than about 350 nucleotides, less than about 300 nucleotides, less than about 200 nucleotides, less than about 150 nucleotides, less than about 100 nucleotides, less than about 80 nucleotides, or less than about 40 nucleotides.

11. The polynucleotide of claim 7 or claim 8, wherein the first promoter sequence has between about 40 to about 585 nucleotides, between about 100 to about 400 nucleotides, or between about 150 to about 300 nucleotides.

12. The polynucleotide of any one of claims 1-11, wherein the first promoter is selected from the group consisting of SEQ ID NOS: 40370-40400 as set forth in Table 8, or a sequence having at least 85%, at least 90%, at least 95%, at least 95%, at least 96%, at least 97%, at least 98%, or at least 99% identity thereto.

13. The polynucleotide of any one of claims 1-12, wherein the first promoter is selected from the group consisting of SEQ ID NOS: 41030-41044 as set forth in Table 24, or a sequence having at least 85%, at least 90%, at least 95%, at least 95%, at least 96%, at least 97%, at least 98%, or at least 99% identity thereto.

14. The polynucleotide of any one of claims 1-13, wherein the at least one accessory element is operably linked to the sequence encoding the CRISPR protein.

15. The polynucleotide of any one of claims 1-14, further comprising a second promoter.

16. The polynucleotide of claim 15, wherein the second promoter sequence and the sequence encoding the first gRNA are operably linked.

17. The polynucleotide of claim 15 or claim 16, wherein the second promoter is a pol III promoter.

18. The polynucleotide of any one of claims 15-17, wherein the second promoter is selected from the group consisting of U6, mini U61, mini U62, mini U63, BiH1 (Bidrectional H1 promoter), BiU6 (Bidirectional U6 promoter), gorilla U6, rhesus U6, human 7sk, and human H1 promoters.

19. The polynucleotide of claim 18, wherein the second promoter is a truncated variant of the U6, mini U61, mini U62, mini U63, BiH1, BiU6, gorilla U6, rhesus U6, human 7sk, or human H1 promoters.

20. The polynucleotide of claim 18 or claim 19, wherein the second promoter sequence has less than about 250 nucleotides, less than about 220 nucleotides, less than about 200 nucleotides, less than about 160 nucleotides, less than about 140 nucleotides, less than about 130 nucleotides, less than about 120 nucleotides, less than about 100 nucleotides, less than about 80 nucleotides, or less than about 70 nucleotides.

21. The polynucleotide of claim 18 or claim 19, wherein the second promoter sequence has between about 70 to about 245 nucleotides, between about 100 to about 220 nucleotides, or between about 120 to about 160 nucleotides.

22. The polynucleotide of any one of claims 15-21, wherein the second promoter sequence is selected from the group consisting SEQ ID NOS: 40401-40420 and 41010-41029 as set forth in Table 9, or a sequence having at least 85%, at least 90%, at least 95%, at least 95%, at least 96%, at least 97%, at least 98%, or at least 99% identity thereto.

23. The polynucleotide of any one of claims 15-22, wherein the second promoter enhances transcription of the first gRNA.

24. The polynucleotide of any one of claims 15-23, wherein the sequences of the first promoter and the second promoter are greater than at least about 1300, at least about 1350, at least about 1360, at least about 1370, at least about 1380, at least about 1390, at least about 1400, at least about 1500, at least about 1600 nucleotides, at least 1650, at least about 1700, at least about 1750, at least about 1800, at least about 1850, or at least about 1900 nucleotides in combined length.

25. The polynucleotide of any one of claims 15-24, wherein the sequences of the first promoter, the second promoter and the at least one accessory element are greater than at least about 1300, at least about 1350, at least about 1360, at least about 1370, at least about 1380, at least about 1390, at least about 1400, at least about 1500, at least about 1600 nucleotides, at least 1650, at least about 1700, at least about 1750, at least about 1800, at least about 1850, or at least about 1900 nucleotides in combined length.

26. The polynucleotide of any one of claims 15-25, wherein the sequences of the first promoter, the second promoter, and the at least one accessory element are greater than 1314 nucleotides in combined length.

27. The polynucleotide of any one of claims 15-26, wherein the sequences of the first promoter, the second promoter, and the at least one accessory element are greater than 1381 nucleotides in combined length.

28. The polynucleotide of any one of claims 1-27, comprising two or more accessory element sequences.

29. The polynucleotide of claim 28, wherein the sequences of the first promoter, the second promoter, and the two or more accessory elements are greater than at least about 1300, at least about 1350, at least about 1360, at least about 1370, at least about 1380, at least about 1390, at least about 1400, at least about 1500, at least about 1600, at least 1650, at least about 1700, at least about 1750, at least about 1800, at least about 1850, or greater than at least about 1900 nucleotides in combined length.

30. The polynucleotide of claim 28, wherein the sequences of the first promoter, the second promoter, and the two or more accessory elements are greater than 1314 nucleotides in combined length.

31. The polynucleotide of claim 28, wherein the sequences of the first promoter, the second promoter, and the two or more accessory elements are greater than 1381 nucleotides in combined length.

32. The polynucleotide of any one of claim 15-31, wherein at least 25%, 26%, 27%, 28%, 29%, 30%, 31%, 32%, 33%, 34%, or at least 35% or more of the length of the polynucleotide sequence comprises the sequences of the first and second promoters and the at least one accessory element.

33. The polynucleotide of any one of claims 1-32, wherein the accessory elements are selected from the group consisting of a poly(A) signal, a gene enhancer element, an intron, a posttranscriptional regulatory element (PTRE), a nuclear localization signal (NLS), a deaminase, a DNA glycosylase inhibitor, a stimulator of CRISPR-mediated homology-directed repair, and an activator of transcription, and a repressor of transcription.

34. The polynucleotide of any one of claims 1-32, wherein the accessory elements enhance the transcription, transcription termination, expression, binding of a target nucleic acid, editing of a target nucleic acid, or performance of the CRISPR protein as compared to an otherwise identical polynucleotide lacking said accessory elements.

35. The polynucleotide of claim 34, wherein the enhanced performance is an increase in editing of a target nucleic acid by the expressed CRISPR protein and the first gRNA in an in vitro assay of at least about 10%, at least about 20%, at least about 30%, at least about 40%, at least about 50%, at least about 60%, at least about 70%, at least about 80%, at least about 90%, at least about 100%, at least about 150%, at least about 200%, or at least about 300%.

36. The polynucleotide of any one of claims 1-35, wherein the encoded CRISPR protein is a Class 2 CRISPR protein.

37. The polynucleotide of claim 36, wherein the encoded CRISPR protein is a Class 2, Type V CRISPR protein.

38. The polynucleotide of claim 37, wherein the encoded Class 2, Type V CRISPR protein comprises:
a. a NTSB domain comprising a sequence of QPASKKIDQNKLKPEMDEKGNLTTAGFACSQCGQPLFVYKLEQVSEKGKAYTNYFGRC NVAEHEKLILLAQLKPEKDSDEAVTYSLGKFGQ (SEQ ID NO: 41818), or a sequence having at least 80% at least 90%, at least 95%, at least 96%, at least 97%, at least 98% or at least 99% identity thereto;
b. a helical I-II domain comprising a sequence of RALDFYSIHVTKESTHPVKPLAQIAGNRYASGPVGKALSDACMGTIASFLSKYQDIIIEH QKVVKGNQKRLESLRELAGKENLEYPSVTLPPQPHTKEGVDAYNEVIARVRMWVNLN LWQKLKLSRDDAKPLLRLKGFPSF (SEQ ID NO: 41819), or a sequence having at least 80%, at least 90%, at least 95%, at least 96%, at least 97%, at least 98% or at least 99% identity thereto;
c. a helical II domain comprising a sequence of PLVERQANEVDWWDMVCNVKKLINEKKEDGKVFWQNLAGYKRQEALRPYLSSEEDR KKGKKFARYQLGDLLLHLEKKHGEDWGKVYDEAWERIDKKVEGLSKHIKLEEERRSE DAQSKAALTDWLRAKASFVIEGLKEADKDEFCRCELKLQKWYGDLRGKPFAIEAE (SEQ ID NO: 41820), or a sequence having at least 80%, at least 90%, at least 95%, at least 96%, at least 97%, at least 98% or at least 99% identity thereto; and
d. a RuvC-I domain comprising a sequence of SSNIKPMNLIGVDRGENIPAVIALTDPEGCPLSRFKDSLGNPTHILRIGESYKEKQRTIQAK KEVEQRRAGGYSRKYASKAKNLADDMVRNTARDLLYYAVTQDAMLIFENLSRGFGRQ GKRTFMAERQYTRMEDWLTAKLAYEGLPSKTYLSKTLAQYTSKTC (SEQ ID NO: 41821), or a sequence having at least 80%, at least 90%, at least 95%, at least 96%, at least 97%, at least 98% or at least 99% identity thereto.

39. The polynucleotide of claim 38, wherein the encoded Class 2, Type V CRISPR protein comprises an OBD-I domain comprising a sequence of QEIKRINKIRRRLVKDSNTKKAGKTGPMKTLLVRVMTPDLRERLENLRKKPENIPQ (SEQ ID NO: 41822), or a sequence having at least 80%, at least 90%, at least 95%, at least 96%, at least 97%, at least 98%, or at least 99% identity thereto.

40. The polynucleotide of claim 38 or claim 39, wherein the encoded Class 2, Type V CRISPR protein comprises an OBD-II domain comprising a sequence of NSILDISGFSKQYNCAFIWQKDGVKKLNLYLIINYFKGGKLRFKKIKPEAFEANRFYT VINKKSGEIVPMEVNFNFDDPNLIILPLAFGKRQGREFIWNDLLSLETGSLKLANGRV IEKTLYNRRTRQDEPALFVALTFERREVLD (SEQ ID NO: 41823), or a sequence having at least 80%, at least 90%, at least 95%, at least 96%, at least 97%, at least 98%, or at least 99% identity thereto.

41. The polynucleotide of any one of claims 38-40, wherein the encoded Class 2, Type V CRISPR protein comprises a helical I-I domain comprising a sequence of PISNTSRANLNKLLTDYTEMKKAILHVYWEEFQKDPVGLMSRVA (SEQ ID NO: 41824), or a sequence having at least 80%, at least 90%, at least 95%, at least 96%, at least 97%, at least 98%, or at least 99% identity thereto.

42. The polynucleotide of any one of claims 38-41, wherein the encoded Class 2, Type V CRISPR protein comprises a TSL domain comprising a sequence of SNCGFTITSADYDRVLEKLKKTATGWMTTINGKELKVEGQITYYNRYKRQNVVKD LSVELDRLSEESVNNDISSWTKGRSGEALSLLKKRFSHRPVQEKFVCLNCGFETH (SEQ ID NO: 41825), or a sequence having at least 80%, at least 90%, at least 95%, at least 96%, at least 97%, at least 98%, or at least 99% identity thereto.

43. The polynucleotide of any one of claims 38-42, wherein the encoded Class 2, Type V CRISPR protein comprises a RuvC-II domain comprising a sequence of ADEQAALNIARSWLFLRSQEYKKYQTNKTTGNTDKRAFVETWQSFYRKKLKEVWK PAV (SEQ ID NO: 41826), or a sequence having at least 80%, at least 90%, at least 95%, at least 96%, at least 97%, at least 98%, or at least 99% identity thereto.

44. The polynucleotide of any one of claims 38-43, wherein the encoded Class 2, Type V CRISPR protein comprises the sequence of SEQ ID NO: 145, or a sequence having at least 80%, at least 90%, at least 95%, at least 96%, at least 97%, at least 98%, or at least 99% identity thereto.

45. The polynucleotide of any one of claims 38-44, wherein the encoded Class 2, Type V CRISPR protein comprises at least one modification in one or more domains.

46. The polynucleotide of claim 45, wherein the at least one modification comprises:
a. at least one amino acid substitution in a domain;
b. at least one amino acid deletion in a domain;
c. at least one amino acid insertion in a domain; or
d. any combination of (a)-(c).

47. The polynucleotide of claim 45 or claim 46, comprising a modification at one or more amino acid positions in the NTSB domain relative to SEQ ID NO: 41818 selected from the group consisting of P2, S4, Q9, E15, G20, G33, L41, Y51, F55, L68, A70, E75, K88, and G90.

48. The polynucleotide of claim 47, wherein the one or more modifications at one or more amino acid positions in the NTSB domain are selected from the group consisting of an insertion of G at position 2, an insertion of I at position 4, an insertion of L at position 4, Q9P, E15S, G20D, a deletion of S at position 30, G33T, L41A, Y51T, F55V, L68D, L68E, L68K, A70Y, A70S, E75A, E75D, E75P, K88Q, and G90Q relative to SEQ ID NO: 41818.

49. The polynucleotide of any one of claims 45-48, comprising a modification at one or more amino acid positions in the helical I-II domain relative to SEQ ID NO: 41819 selected from the group consisting of 124, A25, Y29 G32, G44, S48, S51, Q54, 156, V63, S73, L74, K97, V100, M112, L 116, G137, F138, and S140.

50. The polynucleotide of claim 49, wherein the one or more modifications at one or more amino acid positions in the helical I-II domain are selected from the group consisting of an insertion of T at position 24, an insertion of C at position 25, Y29F, G32Y, G32N, G32H, G32S, G32T, G32A, G32V, a deletion of G at position 32, G32S, G32T, G44L, G44H, S48H, S48T, S51T, Q54H, I56T, V63T, S73H, L74Y, K97G, K97S, K97D, K97E, V100L, M112T, M112W, M112R, M112K, L116K, G137R, G137K, G137N, an insertion of Q at position 138, and S140Q relative to SEQ ID NO: 41819.

51. The polynucleotide of any one of claims 45-50, comprising a modification at one or more amino acid positions in the helical II domain relative to SEQ ID NO: 41820 selected from the group consisting of L2, V3, E4, R5, Q6, A7, E9, V10, D11, W12, W13, D14, M15, V16, C17, N18, V19, K20, L22, I23, E25, K26, K31, Q35, L37, A38, K41, R42, Q43, E44, L46, K57, Y65, G68, L70, L71, L72, E75, G79, D81, W82, K84, V85, Y86, D87, 193, K95, K96, E98, L100, K102, 1104, K105, E109, R110, D114, K 118, A120, L121, W124, L125, R126, A127, A129, 1133, E134, G135, L136, E138, D140, K141, D142, E143, F144, C145, C147, E148, L149, K150, L151, Q152, K153, L158, E166, and A167.

52. The polynucleotide of claim 51, wherein the one or more modifications at one or more amino acid positions in the helical II domain are selected from the group consisting of an insertion of A at position 2, an insertion of H at position 2, a deletion of L at position 2 and a deletion of V at position 3, V3E, V3Q, V3F, a deletion of V at position 3, an insertion of D at position 3, V3P, E4P, a deletion of E at position 4, E4D, E4L, E4R, R5N, Q6V, an insertion of Q at position 6, an insertion of G at position 7, an insertion of H at position 9, an insertion of A at position 9, VD10, an insertion of T1 at position 0, a deletion of V at position 10, an insertion of F at position 10, an insertion of D at position 11, a deletion of D at position 11, D11S, a deletion of W at position 12, W12T, W12H, an insertion of P at position 12, an insertion of Q at position 13, an insertion of G at position 12, an insertion of R at position 13, W13P, W13D, an insertion of D at position 13, W13L, an insertion of P at position 14, an insertion of D at position 14, a deletion of D at position 14 and a deletion of M at position 15, a deletion of M at position 15, an insertion of T at position 16, an insertion of P at position 17, N18I, V19N, V19H, K20D, L22D, 123S, E25C, E25P, an insertion of G at position 25, K26T, K27E, K31L, K31Y, Q35D, Q35P, an insertion of S at position 37, a deletion of L at position 37 and a deletion of A at position 38, K41L, an insertion of R at position 42, a deletion of Q at position 43 and a deletion of E at position 44, L46N, K57Q, Y65T, G68M, L70V, L71C, L72D, L72N, L72W, L72Y, E75F, E75L, E75Y, G79P, an insertion of E at position 79, an insertion of T at position 81, an insertion of R at position 81, an insertion of W at position 81, an insertion of Y at position 81, an insertion of W at position 82, an insertion of Y at position 82, W82G, W82R, K84D, K84H, K84P, K84T, V85L, V85A, an insertion of L at position 85, Y86C, D87G, D87M, D87P, I93C, K95T, K96R, E98G, L100A, K102H, I104T, I104S, I104Q, K105D, an insertion of K at position 109, E109L, RI 10D, a deletion of R at position 110, D 14E, an insertion of D at position 114, K 118P, A120R, L121T, W124L, L125C, R126D, A127E, A127L, A129T, A129K, I133E, an insertion of C at position 133, an insertion of S at position 134, an insertion of G at position 134, an insertion of R at position 135, G135P, L136K, L136D, L136S, L136H, a deletion of E at position 138, D140R, an insertion of D at position 140, an insertion of P at position 141, an insertion of D at position 142, a deletion of E at position 143+a deletion of F at position 144, an insertion of Q at position 143, F144K, a deletion of F at position 144, a deletion of F at position 144 and a deletion of C at position 145, C145R, an insertion of G at position 145, C145K, C147D, an insertion of V at position 148, E148D, an insertion of H at position 149, L149R, K150R, L151H, Q152C, K153P, L158S, E166L, and an insertion of F at position 167 relative to SEQ ID NO: 41820.

53. The polynucleotide of any one of claims 45-52, comprising a modification at one or more amino acid positions in the RuvC-I domain relative to SEQ ID NO: 41821 selected from the group consisting of 14, K5, P6, M7, N8, L9, V12, G49, K63, K80, N83, R90, M125, and L146.

54. The polynucleotide of claim 53, wherein the one or more modifications at one or more amino acid positions in the RuvC-I domain are selected from the group consisting of an insertion of I at position 4, an insertion of S at position 5, an insertion of T at position 6, an insertion of N at position 6, an insertion of R at position 7, an insertion of K at position 7, an insertion of H at position 8, an insertion of S at position 8, V12L, G49W, G49R, S51R, S51K, K62S, K62T, K62E, V65A, K80E, N83G, R90H, R90G, M125S, M125A, L137Y, an insertion of P at position 137, a deletion of L at position 141, L141R, L141D, an insertion of Q at position 142, an insertion of R at position 143, an insertion of N at position 143, E144N, an insertion of P at position 146, L146F, P147A, K149Q, T150V, an insertion of R at position 152, an insertion of H153, T155Q, an insertion of H at position 155, an insertion of R at position 155, an insertion of L at position 156, a deletion of L at position 156, an insertion of W at position 156, an insertion of A at position 157, an insertion of F at position 157, A157S, Q158K, a deletion of Y at position 159, T160Y, T160F, an insertion of I at position 161, S161P, T163P, an insertion of N at position 163, C164K, and C164M relative to SEQ ID NO: 41821.

55. The polynucleotide of any one of claims 45-54, comprising a modification at one or more amino acid positions in the OBD-I domain relative to SEQ ID NO: 41822 selected from the group consisting of I3, K4, R5, 16, N7, K8, K15, D16, N18, P27, M28, V33, R34, M36, R41, L47, R48, E52, P55, and Q56.

56. The polynucleotide of claim 55, wherein the one or more modifications at one or more amino acid positions in the OBD-I domain are selected from the group consisting of an insertion of G at position 3, I3G, I3E, an insertion of G at position 4, K4G, K4P, K4S, K4W, K4W, R5P, an insertion of P at position 5, an insertion of G at position 5, R5S, an insertion of S at position 5, R5A, R5P, R5G, R5L, I6A, I6L, an insertion of G at position 6, N7Q, N7L, N7S, K8G, K15F, D16W, an insertion of F at position 16, an insertion of F18, an insertion of P at position 27, M28P, M28H, V33T, R34P, M36Y, R41P, L47P, an insertion of P at position 48, E52P, an insertion of P at position 55, a deletion of P at position 55 and a deletion of Q at position 56, Q56S, Q56P, an insertion of D at position 56, an insertion of T at position 56, and Q56P relative to SEQ ID NO: 41822.

57. The polynucleotide of any one of claims 45-56, comprising a modification at one or more amino acid positions in the OBD-II domain relative to SEQ ID NO: 41823 selected from the group consisting of S2, I3, L4, K11, V24, K37, R42, A53, T58, K63, M70, 182, Q92, G93, K110, L121, R124, R141, E143, V144, and L145.

58. The polynucleotide of claim 57, wherein the one or more modifications at one or more amino acid positions in the OBD-II domain are selected from the group consisting of a deletion of S at position 2, I3R, I3K, a deletion of I at position 3 and a deletion of L4, a deletion of L at position 4, K11T, an insertion of P at position 24, K37G, R42E, an insertion of S at position 53, an insertion of R at position 58, a deletion of K at position 63, M70T, I82T, Q92L, Q92F, Q92V, Q92A, an insertion of A at position 93, K110Q, R115Q, L121T, an insertion of A at position 124, an insertion of R at position 141, an insertion of D at position 143, an insertion of A at position 143, an insertion of W at position 144, and an insertion of A at position 145 relative to SEQ ID NO: 41823.

59. The polynucleotide of any one of claims 45-58, comprising a modification at one or more amino acid positions in the TSL domain relative to SEQ ID NO: 41825 selected from the group consisting of S1, N2, C3, G4, F5, 17, K18, V58, S67, T76, G78, S80, G81, E82, S85, V96, and E98.

60. The polynucleotide of claim 59, wherein the one or more modifications at one or more amino acid positions in the OBD-II domain are selected from the group consisting of an insertion of M at position 1, a deletion of N at position 2, an insertion of V at position 2, C3S, an insertion of G at position 4, an insertion of W at position 4, F5P, an insertion of W at position 7, K18G, V58D, an insertion of A at position 67, T76E, T76D, T76N, G78D, a deletion of S at position 80, a deletion of G at position 81, an insertion of E at position 82, an insertion of N at position 82, S85I, V96C, V96T, and E98D relative to SEQ ID NO: 41825.

61. The polynucleotide of any one of claims 45-60, wherein the expressed Class 2, Type V CRISPR protein exhibits an improved characteristic relative to SEQ ID NO: 2 or SEQ ID NO: 145, wherein the improved characteristic comprises increased binding affinity to a gRNA, increased binding affinity to the target nucleic acid, improved ability to utilize a greater spectrum of PAM sequences in the editing of the target nucleic acid, improved unwinding of the target nucleic acid, increased editing activity, improved editing efficiency, improved editing specificity for cleavage of the target nucleic acid, decreased off-target editing or cleavage of the target nucleic acid, increased percentage of a eukaryotic genome that can be edited, increased activity of the nuclease, increased target strand loading for double strand cleavage, decreased target strand loading for single strand nicking, increased binding of the non-target strand of DNA, improved protein stability, increased protein:gRNA (RNP) complex stability, and improved fusion characteristics.

62. The polynucleotide of claim 61, wherein the improved characteristic comprises increased cleavage activity at a target nucleic sequence comprising an TTC, ATC, GTC, or CTC PAM sequence.

63. The polynucleotide of claim 62, wherein the improved characteristic comprises increased cleavage activity at a target nucleic acid sequence comprising an ATC or CTC PAM sequence relative to cleavage activity of the sequence of SEQ ID NO: 145.

64. The polynucleotide of claim 63, wherein the improved cleavage activity is an enrichment score (log 2) of at least about 1.5, at least about 2.0, at least about 2.5, at least about 3, at least about 3.5, at least about 4, at least about 4.5, at least about 5, at least about 6, at least about 7, at least about 8 or more greater compared to score of the sequence of SEQ ID NO: 145 in an in vitro assay.

65. The polynucleotide of claim 63, wherein the improved characteristic comprises increased cleavage activity at a target nucleic acid sequence comprising an CTC PAM sequence relative to the sequence of SEQ ID NO: 145.

66. The polynucleotide of claim 65, wherein the improved cleavage activity is an enrichment score (log₂) of at least about 2, at least about 2.5, at least about 3, at least about 3.5, at least about 4, at least about 4.5, at least about 5, or at least about 6 or more greater compared to the score of the sequence of SEQ ID NO: 145 in an in vitro assay.

67. The polynucleotide of claim 62, wherein the improved characteristic comprises increased cleavage activity at a target nucleic acid sequence comprising an TTC PAM sequence relative to the sequence of SEQ ID NO: 145.

68. The polynucleotide of claim 67, wherein the improved cleavage activity is an enrichment score of at least about 1.5, at least about 2.0, at least about 2.5, at least about 3, at least about 3.5, at least about 4, at least about 4.5, at least about 5, or at least about 6 log₂ or more greater compared to the sequence of SEQ ID NO: 145 in an in vitro assay.

69. The polynucleotide of claim 61, wherein the improved characteristic comprises increased specificity for cleavage of the target nucleic acid sequence relative to the sequence of SEQ ID NO: 145.

70. The polynucleotide of claim 69, wherein the increased specificity is an enrichment score of at least about 2.0, at least about 2.5, at least about 3, at least about 3.5, at least about 4, at least about 4.5, at least about 5, or at least about 6 log 2 or more greater compared to the sequence of SEQ ID NO: 145 in an in vitro assay.

71. The polynucleotide of claim 61, wherein the improved characteristic comprises decreased off-target cleavage of the target nucleic acid sequence.

72. The polynucleotide of claim 37, wherein the encoded Class 2, Type V CRISPR protein is selected from the group consisting of Cas12f, Cas12j (CasPhi), and CasX.

73. The polynucleotide of claim 72, wherein the encoded CasX comprises a sequence selected from the group consisting of SEQ ID NOS: 1-3, 49-160, and 40208-40369, or a sequence having at least 85%, at least 90%, at least 95%, at least 95%, at least 96%, at least 97%, at least 98%, or at least 99% identity thereto.

74. The polynucleotide of claim 72, wherein the encoded CasX comprises a sequence selected from the group consisting of the sequences of SEQ ID NOS: 1-3, 49-160, 40208-40369 and 40828-40912.

75. The polynucleotide of claim 72, wherein the CasX sequence of the polynucleotide comprises a sequence selected from the group consisting of SEQ ID NOS: 40577-40588, as set forth in Table 21, or a sequence having at least 85%, at least 90%, at least 95%, at least 95%, at least 96%, at least 97%, at least 98%, or at least 99% identity thereto.

76. The polynucleotide of claim 72, wherein the CasX sequence of the polynucleotide comprises a sequence selected from the group consisting of SEQ ID NOS: 40577-40588, as set forth in Table 21.

77. The polynucleotide of any one of claims 1-76, wherein the polynucleotide encodes one or more NLS linked to the sequence encoding the CRISPR protein.

78. The polynucleotide of claim 77, wherein the sequences encoding the one or more NLS are positioned at or near the 5′ end of the sequence encoding the CRISPR protein.

79. The polynucleotide of claim 77, wherein the sequences encoding the one or more NLS are positioned at or near at the 3′ end of the sequence encoding the CRISPR protein.

80. The polynucleotide of claim 78 or claim 79, wherein the polynucleotide encodes at least two NLS, wherein the sequences encoding the at least two NLS are positioned at or near the 5′ and 3′ ends of the sequence encoding the CRISPR protein.

81. The polynucleotide of any one of claims 77-80, wherein the one or more encoded NLS are selected from the group of sequences consisting of PKKKRKV (SEQ ID NO: 196), KRPAATKKAGQAKKKK (SEQ ID NO: 197), PAAKRVKLD (SEQ ID NO: 248), RQRRNELKRSP (SEQ ID NO: 161), NQSSNFGPMKGGNFGGRSSGPYGGGGQYFAKPRNQGGY (SEQ ID NO: 162), RMRIZFKNKGKDTAELRRRRVEVSVELRKAKKDEQILKRRNV (SEQ ID NO: 163), VSRKRPRP (SEQ ID NO: 164), PPKKARED (SEQ ID NO: 165), PQPKKKPL (SEQ ID NO: 166), SALIKKKKKMAP (SEQ ID NO: 167), DRLRR (SEQ ID NO: 168), PKQKKRK (SEQ ID NO: 169), RKLKKKIKKL (SEQ ID NO: 170), REKKKFLKRR (SEQ ID NO: 171), KRKGDEVDGVDEVAKKKSKK (SEQ ID NO: 172), RKCLQAGMNLEARKTKK (SEQ ID NO: 173), PRPRKIPR (SEQ ID NO: 174), PPRKKRTVV (SEQ ID NO: 175), NLSKKKKRKREK (SEQ ID NO: 176), RRPSRPFRKP (SEQ ID NO: 177), KRPRSPSS (SEQ ID NO: 178), KRGINDRNFWRGENERKTR (SEQ ID NO: 179), PRPPKMARYDN (SEQ ID NO: 180), KRSFSKAF (SEQ ID NO: 181), KLKIKRPVK (SEQ ID NO: 182), PKKKRKVPPPPAAKRVKLD (SEQ ID NO: 183), PKTRRRPRRSQRKRPPT (SEQ ID NO: 184), SRRRKANPTKLSENAKKLAKEVEN (SEQ ID NO: 41827), KTRRRPRRSQRKRPPT (SEQ ID NO: 186), RRKKRRPRRKKRR (SEQ ID NO: 187), PKKKSRKPKKKSRK (SEQ ID NO: 188), HKKKHPDASVNFSEFSK (SEQ ID NO: 189), QRPGPYDRPQRPGPYDRP (SEQ ID NO: 190), LSPSLSPLLSPSLSPL (SEQ ID NO: 191), RGKGGKGLGKGGAKRHRK (SEQ ID NO: 192), PKRGRGRPKRGRGR (SEQ ID NO: 193), PKKKRKVPPPPKKKRKV (SEQ ID NO: 195), PAKRARRGYKC (SEQ ID NO: 40188), KLGPRKATGRW (SEQ ID NO: 40189), PRRKREE (SEQ ID NO: 40190), PYRGRKE (SEQ ID NO: 40191), PLRKRPRR (SEQ ID NO: 40192), PLRKRPRRGSPLRKRPRR (SEQ ID NO: 40193), PAAKRVKLDGGKRTADGSEFESPKKKRKV (SEQ ID NO: 40194), PAAKRVKLDGGKRTADGSEFESPKKKRKVGIHGVPAA (SEQ ID NO: 40195), PAAKRVKLDGGKRTADGSEFESPKKKRKVAEAAAKEAAAKEAAAKA (SEQ ID NO: 40196), PAAKRVKLDGGKRTADGSEFESPKKKRKVPG (SEQ ID NO: 40710), KRKGSPERGERKRHW (SEQ ID NO: 40198), KRTADSQHSTPPKTKRKVEFEPKKKRKV (SEQ ID NO: 41828), and PKKKRKVGGSKRTADSQHSTPPKTKRKVEFEPKKKRKV (SEQ ID NO: 40200) wherein the one or more NLS are linked to the CRISPR variant or to adjacent NLS with a linker peptide wherein the linker peptide is selected from the group consisting of RS, (G)n (SEQ ID NO: 40201), (GS)n (SEQ ID NO: 40202), (GSGGS)n (SEQ ID NO: 208), (GGSGGS)n (SEQ ID NO: 209), (GGGS)n (SEQ ID NO: 210), GGSG (SEQ ID NO: 211), GGSGG (SEQ ID NO: 212), GSGSG (SEQ ID NO: 213), GSGGG (SEQ ID NO: 214), GGGSG (SEQ ID NO: 215), GSSSG (SEQ ID NO: 216), GPGP (SEQ ID NO: 217), GGP, PPP, PPAPPA (SEQ ID NO: 218), PPPG (SEQ ID NO: 40207), PPPGPPP (SEQ ID NO: 219), PPP(GGGS)n (SEQ ID NO: 40203), (GGGS)nPPP (SEQ ID NO: 40204), AEAAAKEAAAKEAAAKA (SEQ ID NO: 40205), and TPPKTKRKVEFE (SEQ ID NO: 40206), wherein n is 1 to 5.

82. The polynucleotide of any one of claims 77-80, wherein the one or more encoded NLS are selected from the group consisting of SEQ ID NOS: 40443-40501 as set forth in Table 15 and Table 16, or a sequence having at least 85%, at least 90%, at least 95%, at least 95%, at least 96%, at least 97%, at least 98% identity thereto.

83. The polynucleotide of any one of claims 77-80, wherein the one or more encoded NLS are selected from the group of sequences consisting of SEQ ID NOS: 40443-40501 as set forth in Table 15 and Table 16.

84. The polynucleotide of any one of claims 1-83, wherein the encoded first gRNA comprises a sequence selected from the group consisting of SEQ ID NOS: 2101-2285, 39981-40026, 40913-40958, and 41817 as set forth in Table 2, or a sequence having at least 85%, at least 90%, at least 95%, at least 95%, at least 96%, at least 97%, at least 98% identity thereto.

85. The polynucleotide of any one of claims 1-84, wherein the encoded first gRNA comprises a sequence selected from the group consisting of SEQ ID NOS: 2101-2285, 39981-40026, 40913-40958, and 41817 as set forth in Table 2.

86. The polynucleotide of claim 85, wherein the encoded first gRNA comprises a targeting sequence complementary to a target nucleic acid sequence, wherein the targeting sequence has at least 15 to 30 nucleotides.

87. The polynucleotide of claim 86, wherein the targeting sequence has 18, 19, or 20 nucleotides.

88. The polynucleotide of any one of claims 1-87, comprising a sequence encoding a second gRNA and a third promoter operably linked to the second gRNA.

89. The polynucleotide of claim 88, wherein the third promoter is a pol III promoter.

90. The polynucleotide of claim 88 or claim 89, wherein the third promoter is selected from the group consisting of U6, mini U61, mini U62, mini U63, BiH1 (Bidrectional H1 promoter), BiU6 (Bidirectional U6 promoter), gorilla U6, rhesus U6, human 7sk, and human H1 promoters.

91. The polynucleotide of claim 90, wherein the third promoter is a truncated variant of the U6, mini U61, mini U62, mini U63, BiH1, BiU6, gorilla U6, rhesus U6, human 7sk, or human H1 promoters.

92. The polynucleotide of any one of claims 88-91, wherein the third promoter has less than about 250 nucleotides, less than about 220 nucleotides, less than about 200 nucleotides, less than about 160 nucleotides, less than about 140 nucleotides, less than about 130 nucleotides, less than about 120 nucleotides, less than about 100 nucleotides, less than about 80 nucleotides, or less than about 70 nucleotides.

93. The polynucleotide of any one of claims 88-91, wherein the third promoter has between about 70 to about 245 nucleotides, between about 100 to about 220 nucleotides, or between about 120 to about 160 nucleotides.

94. The polynucleotide of any one of claims 88-93, wherein the third promoter is selected from the group consisting SEQ ID NOS: 40401-40420 and 41010-41029 as set forth in Table 9, or a sequence having at least 85%, at least 90%, at least 95%, at least 95%, at least 96%, at least 97%, at least 98%, or at least 99% identity thereto.

95. The polynucleotide of any one of claims 88-94, wherein the third promoter enhances transcription of the second gRNA.

96. The polynucleotide of any one of claims 88-95, wherein the encoded second gRNA comprises a sequence selected from the group consisting of SEQ ID NOS: 2101-2285, and 39981-40026, 40913-40958, and 41817 as set forth in Table 2, or a sequence having at least 85%, at least 90%, at least 95%, at least 95%, at least 96%, at least 97%, at least 98% identity thereto.

97. The polynucleotide of any one of claims 88-95, wherein the encoded second gRNA comprises a sequence selected from the group consisting of SEQ ID NOS: 2101-2285, 39981-40026, 40913-40958, and 41817 as set forth in Table 2.

98. The polynucleotide of any one of claims 89-97, wherein the encoded second gRNA comprises a targeting sequence complementary to a target nucleic acid sequence different than the target nucleic acid of claim 86 or claim 87, wherein the targeting sequence has at least 15 to 30 nucleotides.

99. The polynucleotide of claim 98, wherein the targeting sequence has 18, 19, or 20 nucleotides.

100. The polynucleotide of any one of claims 86-99, wherein the targeting sequence is selected from the group consisting of SEQ ID NOS: 41056-41776 as set forth in Table 27, or a sequence having at least 80%, at least 90%, or at least 95% sequence identity thereto.

101. The polynucleotide of any one of claims 86-99, wherein the targeting sequence is selected from the group consisting of SEQ ID NOS: 41056-41776 as set forth in Table 27.

102. The polynucleotide of any one of claims 86-101, wherein the encoded first and second gRNA comprise a scaffold sequence having one or more modifications relative to SEQ ID NO: 2238, wherein the one or more modifications result in an improved characteristic in the expressed first and second gRNA.

103. The polynucleotide of claim 102, wherein the one or more modifications comprise one or more nucleotide substitutions, insertions, and/or deletions as set forth in Table 28.

104. The polynucleotide of claim 102 or claim 103, wherein the improved characteristic is one or more functional properties selected from the group consisting of increased editing activity, increased pseudoknot stem stability, increased triplex region stability, increased scaffold stem stability, extended stem stability, reduced off-target folding intermediates, and increased binding affinity to a Class 2, Type V CRISPR protein, optionally in an in vitro assay.

105. The polynucleotide of any one of claims 102-104, wherein the expressed gRNA scaffold exhibits an improved enrichment score (log₂) of at least about 2.0, at least about 2.5, at least about 3, or at least about 3.5 greater compared to the score of the gRNA scaffold of SEQ ID NO: 2238 in an in vitro assay.

106. The polynucleotide of claim 84-101, wherein the encoded first and second gRNA comprise a scaffold sequence having one or more modifications relative to SEQ ID NO: 2239, wherein the one or more modifications result in an improved characteristic in the expressed first and second gRNA.

107. The polynucleotide of claim 106, wherein the one or more modifications comprise one or more nucleotide substitutions, insertions, and/or deletions as set forth in Table 29.

108. The polynucleotide of claim 106 or claim 107, wherein the improved characteristic is one or more functional properties selected from the group consisting of increased editing activity, increased pseudoknot stem stability, increased triplex region stability, increased scaffold stem stability, extended stem stability, reduced off-target folding intermediates, and increased binding affinity to a Class 2, Type V CRISPR protein, optionally in an in vitro assay.

109. The polynucleotide of any one of claims 106-108, wherein the expressed gRNA scaffold exhibits an improved enrichment score (log₂) of at least about 1.2, at least about 1.5, at least about 2.0, at least about 2.5, at least about 3, or at least about 3.5 greater compared to the score of the gRNA scaffold of SEQ ID NO: 2239 in an in vitro assay.

110. The polynucleotide of any one of claims 106-109, comprising one or more modifications at positions relative to the sequence of SEQ ID NO: 2239 selected from the group consisting of C9, U11, C17, U24, A29, U54, G64, A88, and A95.

111. The polynucleotide of claim 110, comprising one or more modifications relative to the sequence of SEQ ID NO: 2239 selected from the group consisting of C9U, U11C, C17G, U24C, A29C, an insertion of G at position 54, an insertion of C at position 64, A88G, and A95G.

112. The polynucleotide of claim 111, comprising modifications relative to the sequence of SEQ ID NO: 2239 consisting of C9U, U11C, C17G, U24C, A29C, an insertion of G at position 54, an insertion of C at position 64, A88G, and A95G.

113. The polynucleotide of any one of claims 106-112, wherein the improved characteristic is selected from the group consisting of pseudoknot stem stability, triplex region stability, scaffold bubble stability, extended stem stability, and binding affinity to a Class 2, Type V CRISPR protein.

114. The polynucleotide of claim 112, wherein the insertion of C at position 64 and the A88G substitution relative to the sequence of SEQ ID NO: 2239 resolves an asymmetrical bulge element of the extended stem, enhancing the stability of the extended stem of the gRNA scaffold.

115. The polynucleotide of claim 112, wherein the substitutions of U11C, U24C, and A95G increase the stability of the triplex region of the gRNA scaffold.

116. The polynucleotide of claim 112, wherein the substitution of A29C increases the stability of the pseudoknot stem.

117. The polynucleotide of any one of claims 1-116, wherein the accessory element is a post-transcriptional regulatory element (PTRE) selected from the group consisting of cytomegalovirus immediate/early intronA, hepatitis B virus PRE (HPRE), Woodchuck Hepatitis virus PRE (WPRE), and 5′ untranslated region (UTR) of human heat shock protein 70 mRNA (Hsp70).

118. The polynucleotide of claim 117, wherein the accessory element is a PTRE selected from the group consisting SEQ ID NOS: 40431-40442 as set forth in Table 12, or a sequence having at least 85%, at least 90%, at least 95%, at least 95%, at least 96%, at least 97%, at least 98% identity thereto.

119. The polynucleotide of any one of claims 1-118, wherein the 5′ and 3′ ITRs are derived from serotype AAV1, AAV2, AAV3, AAV4, AAV5, AAV6, AAV7, AAV8, AAV9, AAV10, AAV11, AAV12, AAV 44.9, AAV-Rh74, or AAVRh10.

120. The polynucleotide of claim 119, wherein the 5′ and 3′ ITRs are derived from serotype AAV2.

121. The polynucleotide of any one of claims 1-120, comprising one or more sequences selected from the group consisting of the sequences of Tables 8-10, 12, 13, 17-22 and 24-27, or a sequence having at least 85%, at least 90%, at least 95%, at least 95%, at least 96%, at least 97%, at least 98%, or at least 99% identity thereto.

122. The polynucleotide of any one of claims 1-121, comprising one or more sequences selected from the group consisting of the sequences of Tables 8-10, 12, 13, 17-22 and 24-27.

123. The polynucleotide of any one of claims 1-122, comprising one or more sequences selected from the group consisting of the sequences of Table 26, or a sequence having at least 85%, at least 90%, at least 95%, at least 95%, at least 96%, at least 97%, at least 98%, or at least 99% identity thereto.

124. The polynucleotide of any one of claims 1-123, comprising one or more sequences selected from the group consisting of the sequences of Table 26.

125. The polynucleotide of claim 124, comprising a sequence of a construct selected from the group of constructs of 1-174, 177-186, and 188-198 as set forth in Table 26.

126. The polynucleotide of any one of claims 123-125, wherein the sequence further comprises a targeting sequence selected from the group of sequences of SEQ ID NOS: 41056-41776 as set forth in Table 27, wherein the targeting sequence is linked to the 3′ end of the polynucleotide sequence encoding the gRNA.

127. The polynucleotide of any one of claims 1-126, wherein one or more AAV component sequences selected from the group consisting of 5′ ITR, 3′ ITR, pol III promoter, pol II promoter, encoding sequence for CRISPR nuclease, encoding sequence for gRNA, accessory element, and poly(A) are modified for depletion of all or a portion of the CpG dinucleotides of the sequences

128. The polynucleotide of claim 127, wherein one or more AAV component sequences selected from the group consisting of 5′ ITR, 3′ ITR, pol III promoter, pol II promoter, encoding sequence for a CRISPR nuclease, encoding sequence for gRNA, and poly(A), and accessory element comprise less than about 10%, less than about 5%, or less than about 1% CpG dinucleotides.

129. The polynucleotide of claim 127, wherein one or more AAV component sequences selected from the group consisting of 5′ ITR, 3′ ITR, pol III promoter, pol II promoter, encoding sequence for a CRISPR nuclease, encoding sequence for gRNA, and poly(A), and accessory element are devoid of CpG dinucleotides.

130. The polynucleotide of any one of claim 127-129, wherein the one or more AAV component sequences codon-optimized for depletion of all or a portion of the CpG dinucleotides are selected from the group consisting of SEQ ID NOS: 41045-41055 as set forth in Table 25.

131. The polynucleotide of any one of claims 1-130, wherein the polynucleotide has the configuration of a construct depicted in any one of FIG. 24, 33-35, or 42.

132. A recombinant adeno-associated virus vector (rAAV) comprising:
a. an AAV capsid protein, and
b. the polynucleotide of any one of claims 1-131.

133. The rAAV of claim 132, wherein the AAV capsid protein is derived from serotype AAV1, AAV2, AAV3, AAV4, AAV5, AAV6, AAV7, AAV8, AAV9, AAV10, AAV11, AAV12, AAV 44.9, AAV-Rh74, or AAVRh10.

134. The rAAV of claim 133, wherein the AAV capsid protein and the 5′ and 3′ ITR are derived from the same serotype of AAV.

135. The rAAV of claim 133, wherein the AAV capsid protein and the 5′ and 3′ ITR are derived from different serotypes of AAV.

136. The rAAV of claim 135, wherein the 5′ and 3′ ITR are derived from AAV serotype 2.

137. The rAAV of any of claims 132-136, wherein upon transduction of a cell with the rAAV, the CRISPR protein and gRNA are capable of being expressed.

138. The rAAV of claim 137, wherein upon expression, the gRNA is capable of forming a ribonucleoprotein (RNP) complex with the CRISPR protein.

139. The rAAV of claim 137 or claim 138, wherein the AAV polynucleotide component sequences modified for depletion of all or a portion of the CpG dinucleotides substantially retain their functional properties upon expression.

140. The rAAV of claim 137 or claim 138, wherein the AAV polynucleotide component sequences modified for depletion of all or a portion of the CpG dinucleotides exhibit a lower potential for inducing an immune response compared to an rAAV wherein the AAV polynucleotide is not modified for depletion of the CpG dinucleotides.

141. The rAAV of claim 140, wherein the lower potential for inducing an immune response is exhibited in an in vitro mammalian cell assay designed to detect production of one or more markers of an inflammatory response selected from the group consisting of TLR9, interleukin-1 (IL-1), IL-6, IL-12, IL-18, tumor necrosis factor alpha (TNF-α), interferon gamma (IFNγ), and granulocyte-macrophage colony stimulating factor (GM-CSF).

142. The rAAV of claim 141, wherein the rAAV comprising the AAV polynucleotide component sequences modified for depletion of all or a portion of the CpG dinucleotides elicits reduced production of the one or more inflammatory markers of at least about 10%, at least about 20%, at least about 30%, at least about 40%, at least about 50%, at least about 60%, at least about 80%, or at least about 90% less compared to the comparable rAAV that is not CpG depleted.

143. The rAAV of claim 140, wherein administration of a dose of the rAAV comprising the AAV polynucleotide component sequences modified for depletion of all or a portion of the CpG dinucleotides to a subject elicits a reduced immune response compared to an administered dose of the comparable rAAV that is not CpG depleted.

144. The rAAV of claim 143, wherein the reduced immune response is a reduction of the production of anti-rAAV antibodies or a delayed-type hypersensitivity reaction to an rAAV component in the subject.

145. The rAAV of claim 143, wherein the reduced immune response is determined by the measurement of one or more inflammatory markers in the blood of the subject selected from the group consisting of TLR9, interleukin-1 (IL-1), IL-6, IL-12, IL-18, tumor necrosis factor alpha (TNF-α), interferon gamma (IFNγ), and granulocyte-macrophage colony stimulating factor (GM-CSF), wherein the one or more markers are reduced by at least about 10%, at least about 20%, at least about 30%, at least about 40%, at least about 50%, at least about 60%, at least about 80%, or at least about 90% compared to the comparable rAAV that is not CpG depleted.

146. The rAAV of any one of claims 143-145, wherein the subject is selected from mouse, rat, pig, dog, and non-human primate.

147. The rAAV of any one of claims 143-145, wherein the subject is human.

148. A pharmaceutical composition, comprising the rAAV of any one of claim 132 and a pharmaceutically acceptable carrier, diluent or excipient.

149. A method for modifying a target nucleic acid in a population of mammalian cells, comprising contacting a plurality of the cells with an effective amount of the rAAV of any one of claims 132-147, wherein the target nucleic acid of a gene of the cells targeted by the expressed gRNA is modified by the expressed CRISPR protein.

150. The method of claim 149, wherein the gene of the cells comprises one or more mutations.

151. The method of claim 149 or claim 150, wherein the modifying comprises introducing an insertion, deletion, substitution, duplication, or inversion of one or more nucleotides in the target nucleic acid of the cells of the population.

152. The method of any one of claims 149-151, wherein the gene is knocked down or knocked out.

153. The method of any one of claims 149-151, wherein the gene is modified such that a functional gene product can be expressed.

154. A method of treating a disease in a subject caused by one or more mutations in a gene of the subject, comprising administering a therapeutically effective dose of the rAAV of any one of claims 132-145 to the subject.

155. The method of claim 149, wherein the rAAV is administered to a subject at a dose of at least about 1×10⁸ vector genomes (vg), at least about 1×10⁵ vector genomes/kg (vg/kg), at least about 1×10⁶ vg/kg, at least about 1×10⁷ vg/kg, at least about 1×10⁸ vg/kg, at least about 1×10⁹ vg/kg, at least about 1×10¹⁰ vg/kg, at least about 1×10¹¹ vg/kg, at least about 1×10¹² vg/kg, at least about 1×10¹³ vg/kg, at least about 1×10¹⁴ vg/kg, at least about 1×10¹⁵ vg/kg, or at least about 1×10¹⁶ vg/kg.

156. The method of claim 154, wherein the rAAV is administered to a subject at a dose of at least about 1×10⁵ vg/kg to about 1×10¹⁶ vg/kg, at least about 1×10⁶ vg/kg to about 1×10¹⁵ vg/kg, or at least about 1×10⁷ vg/kg to about 1×10¹⁴ vg/kg.

157. The method of any one of claims 154-156, wherein the rAAV is administered to the subject by a route of administration selected from subcutaneous, intradermal, intraneural, intranodal, intramedullary, intramuscular, intralumbar, intrathecal, subarachnoid, intraventricular, intracapsular, intravenous, intralymphatical, intraocular or intraperitoneal routes, and wherein the administering method is injection, transfusion, or implantation.

158. The method of any one of claims 149-157, wherein the subject is selected from the group consisting of mouse, rat, pig, and non-human primate.

159. The method of any one of claims 149-157, wherein the subject is a human.

160. A method of making an rAAV vector, comprising:
a. providing a population of packaging cells; and
b. transfecting the population of cells with:
i) a vector comprising the polynucleotide of any one of claims 1-131;
ii) a vector comprising an aap (assembly) gene; and
iii) a vector comprising rep and cap genomes.

161. The method of claim 160, wherein the packaging cell is selected from the group consisting of BHK cells, HEK293 cells, HEK293T cells, NS0 cells, SP2/0 cells, YO myeloma cells, P3X63 mouse myeloma cells, PER cells, PER.C6 cells, hybridoma cells, NIH3T3 cells, COS cells, HeLa cells, and CHO cells.

162. The method of claim 160 or claim 161, the method further comprising recovering the rAAV vector.

163. The method of any one of claims 160-162, wherein the component sequences of the AAV polynucleotide are encompassed in a single rAAV particle.

164. A method of reducing the immunogenicity of an rAAV, comprising deleting all or a portion of the CpG dinucleotides of the sequences of the AAV component sequences selected from the group consisting of 5′ ITR, 3′ ITR, pol III promoter, pol II promoter, encoding sequence for CRISPR nuclease, encoding sequence for gRNA, accessory element, and poly(A).

165. The method of claim 164, wherein the one or more AAV polynucleotide component sequences comprise less than about 10%, less than about 5%, or less than about 1% CpG dinucleotides.

166. The method of claim 165, wherein one or more AAV polynucleotide component sequences are devoid of CpG dinucleotides.

167. The method of any one of claim 164-166, wherein the one or more AAV polynucleotide component sequences are selected from the group consisting of SEQ ID NOS: 41045-41055 as set forth in Table 25.

168. The method of any one of claims 164-167, wherein the rAAV exhibits a lower potential for inducing production of one or more markers of an inflammatory response in an in vitro mammalian cell assay compared to a comparable rAAV wherein the CpG dinucleotides have not been deleted, wherein the one or more inflammatory markers are selected from the group consisting of TLR9, interleukin-1 (IL-1), IL-6, IL-12, IL-18, tumor necrosis factor alpha (TNF-α), interferon gamma (IFNγ), and granulocyte-macrophage colony stimulating factor (GM-CSF).

169. The method of claim 168, wherein the rAAV elicits reduced production of the one or more inflammatory markers of at least about 10%, at least about 20%, at least about 30%, at least about 40%, at least about 50%, at least about 60%, at least about 80%, or at least about 90% less compared to the comparable rAAV that is not CpG depleted.

170. The method of any one of claims 164-167, wherein administration of a dose of the rAAV comprising the AAV polynucleotide component sequences modified for depletion of all or a portion of the CpG dinucleotides to a subject elicits a reduced immune response compared to an administered dose of the comparable rAAV that is not CpG depleted.

171. The method of claim 170, wherein the reduced immune response is a reduction of the production of anti-rAAV antibodies or a delayed-type hypersensitivity reaction to an rAAV component in the subject.

172. The method of claim 170, wherein the reduced immune response is determined by the measurement of one or more inflammatory markers in the blood of the subject selected from the group consisting of TLR9, interleukin-1 (IL-1), IL-6, IL-12, IL-18, tumor necrosis factor alpha (TNF-α), interferon gamma (IFNγ), and granulocyte-macrophage colony stimulating factor (GM-CSF), wherein the one or more markers are reduced by at least about 10%, at least about 20%, at least about 30%, at least about 40%, at least about 50%, at least about 60%, at least about 80%, or at least about 90% compared to the comparable rAAV that is not CpG depleted.

173. The method of any one of claims 164-172, wherein the subject is selected from mouse, rat, pig, dog, and non-human primate.

174. The method of any one of claims 164-172, wherein the subject is human.

175. A composition of an rAAV of any one of claims 132-147, for use as a medicament for the treatment of a human in need thereof.
